(19) United States
(12) Patent Application Publication
(10) Pub. No.: US 2023/0048732 A1
(43) Pub. Date: Feb. 16, 2023

(54) HIGH THROUGHPUT ENGINEERING OF FUNCTIONAL AAV CAPSIDS

(71) Applicant: Shape Therapeutics Inc., Seattle, WA (US)

(72) Inventors: Francois VIGNEAULT, Clyde Hill, WA (US); Thomas PACKARD, Seattle, WA (US); David Jeffrey HUSS, Seattle, WA (US); Kevin Christopher STEIN, Kenmore, WA (US)

(21) Appl. No.: 17/331,462

(22) Filed: May 26, 2021

Related U.S. Application Data
(60) Provisional application No. 63/030,038, filed on May 26, 2020.
(60) Provisional application No. 63/119,554, filed on Nov. 30, 2020.
(60) Provisional application No. 63/134,885, filed on Jan. 7, 2021.
(60) Provisional application No. 63/181,037, filed on Apr. 28, 2021.

(51) Int. Cl. C12N 15/86; C40B 40/02

(52) U.S. Cl. CPC C12N 15/86; C12N 2750/14111; C40B 40/02

(57) ABSTRACT

Disclosed herein are engineered AAV VP capsid polypeptides with the ability to assemble into virus particles and having improved tissue tropism to, for example, CNS tissues. The capsids are engineered using the high throughput discovery system described herein. In certain embodiments, provided herein are recombinant adeno-associated virus (AAV) VP capsid polypeptides having at least one mutation in a residue corresponding to residue 581 to residue 589 in SEQ ID NO: 1.

### 1. CROSS-REFERENCE TO RELATED APPLICATIONS

[0001] This application claims the benefit of and priority to U.S. Provisional Patent Application No. 63/030,038 filed on May 26, 2020. U.S. Provisional Patent Application No. 63/119,554 filed on Nov. 30, 2020; U.S. Provisional Patent Application No. 63/134,885 filed on Jan. 7, 2021; and U.S. Provisional Patent Application No. 63/181,037 filed Apr. 28, 2021, which are incorporated by reference in their entirety.

### 2. SEQUENCE LISTING

[0002] The instant application contains a Sequence Listing with XX sequences, which has been submitted via EFS-Web and is hereby incorporated herein by reference in its entirety. Said ASCII copy, created on XXXX, is named 45736WO_sequencelisting.txt, and is XXX bytes in size.

### 3. BACKGROUND

[0003] Recombinant adeno-associated viruses (rAAV) provide the leading platform for in vivo delivery of gene therapies. Current clinical trials employ a limited number of AAV capsids, primarily from naturally occurring human or primate serotypes such as AAV1, AAV2, AAV5, AAV6, AAV8, AAV9, AAVrh.10, AAV4rh.74, and AAVhu.67. These capsids often provide suboptimal targeting to tissues of interest, both due to poor infectivity of the tissue of interest and competing liver tropism. Increasing the dose to ensure infection of desired tissues can lead to dose-dependent liver toxicity. In addition, use of naturally-occurring capsids presents an immunological memory challenge—pre-immune patient populations are excluded from treatment and repeat dosing in a previously immune naïve patient is often not possible. Thus, there is a need for additional AAV capsids for use in gene therapy, in particular capsids that confer upon the rAAV high infectivity for specific tissues and low liver tropism

### 4. SUMMARY OF THE INVENTION

[0004] We have designed a system for high throughput engineering of functional AAV capsids with altered tropism for various tissues, and using this system have identified capsid variants that have either increased or reduced liver tropism, and increased tropism for target tissues, such as liver or central nervous system (CNS) tissues.

[0005] Provided herein is an engineered adeno-associated virus (AAV) viral protein (VP) capsid polypeptide having an amino acid sequence at least 70% identical to SEQ ID NO: 1, wherein the engineered AAV VP capsid polypeptide has at least one mutation as compared to SEQ ID NO: 1 in the region from a residue corresponding to residue 581 of SEQ ID NO: 1 to a residue corresponding to residue 589 of SEQ ID NO: 1, inclusive, wherein the engineered AAV VP capsid polypeptide is capable of assembling into a recombinant AAV virion (rAAV), wherein the at least one mutation confers higher tropism for a central nervous system (CNS) tissue on the rAAV as compared to an rAAV virion having a wildtype AAV5 VP capsid polypeptide of SEQ ID NO: 1, and wherein the engineered AAV VP capsid polypeptide does not have the sequence of any of SEQ ID NO: 3, SEQ ID NO: 4, SEQ ID NO: 5, SEQ ID NO: 6, SEQ ID NO: 7, and SEQ ID NO: 8. In certain embodiments, the engineered AAV VP capsid polypeptide has a sequence of SEQ ID NO: 2 and wherein Xaa1, Xaa2, Xaa3, Xaa4, Xaa5, Xaa6, Xaa7, Xaa8, and Xaa9 are each independently selected from any amino acid.

[0006] Additionally, provided herein is an engineered adeno-associated virus (AAV) viral protein (VP) capsid polypeptide having an amino acid sequence of SEQ ID NO: 2, wherein amino acid residues Xaa1, Xaa2, Xaa3, Xaa4, Xaa5, Xaa6, Xaa7, Xaa8, and Xaa9 are each independently selected from A, R, N, D, C, E, Q, G, H, I, L, K, M, F, P, S, T, W, Y, and V, wherein the engineered AAV VP capsid polypeptide is capable of assembling into a recombinant AAV virion (rAAV), and wherein the engineered AAV VP capsid polypeptide does not have the sequence of any of SEQ ID NO: 1, SEQ ID NO: 3, SEQ ID NO: 4, SEQ ID NO: 5, SEQ ID NO: 6, SEQ ID NO: 7, and SEQ ID NO: 8. In certain embodiments, the rAAV has higher tropism for a central nervous system (CNS) tissue as compared to an rAAV virion having a wildtype AAV5 VP capsid polypeptide of SEQ ID NO: 1.

### 5. BRIEF DESCRIPTION OF THE DRAWINGS

[0007] These and other features, aspects, and advantages of the present invention will become better understood with regard to the following description, and accompanying drawings where:

[0008] FIG. 1 is a schematic of the high throughput AAV capsid engineering system.

[0009] FIG. 2A provides a side view (top panel) and top view (bottom panel) of key residues of known AAV capsids that have been shown to interact with target cells. FIG. 2B illustrates salient features of the AAV capsid library described in Example 1, showing the region of introduced diversity, with residue numbering corresponding to the numbering of amino acids in AAV5 VP1.

[0010] FIG. 3 is a gel photograph showing effective removal of the linear insert and linear plasmid backbone (“BB”) following digestion with PS-DNAse, enriching “relaxed form” (“RF”) circular species for highly efficient subsequent bacterial transformation.

[0011] FIG. 4 is a schematic of the high throughput AAV capsid engineering system. The column graph on the left shows the size of the AAV capsid library at various stages of preparation, tracking the size of the library from theoretical diversity, synthesized capsid genes, total cloned variants, to sequenced assembled viruses (error bars denote minimum/maximum predicted diversity from NGS sequencing analysis). The pooled viral library is injected into non-human primates and following a period of time sufficient to ensure stable transduction, the animals are euthanized, and tissues are harvested. DNA is purified from the tissues (1), and (2) a unique molecular identifier (UMI) is appended. Exonuclease I is added to digest excess UMI-containing primers (3). Subsequent PCR amplification adds sequencing indexes/tissue barcoding and adapters for next generation sequencing (NGS) sequencing. The addition of UMIs allows for high resolution frequency analysis of capsid variants in the tissues.

[0012] FIGS. 5A-5C illustrates the packaging approach used to maximize rAAV production from the library, with FIG. 5A comparing standard triple transfection (top panel) to the two-plasmid cis packaging approach used herein (bottom panel), and FIG. 5B showing relative production of wild type AAV5 using the two transfection approaches. FIG. 5C is an example of UMI distribution in a liver specimen and shows a majority of capsid variants are found a single time (single UMI). However, a subset of capsid variants is enriched in a given tissue and has increased numbers of UMIs, corresponding to their increased frequency in the target tissue.

[0013] FIGS. 6A-6B are heat maps and a statistical analysis showing clear functional selection through the stages of viral assembly and tissue transduction. FIG. 6A is a heat map prepared at various stages of the high throughput system from pre-assembly, assembled virus, to liver transduction. For the pre-assembly heat map, the library of capsid variants was cloned into plasmids and transformed into electrocompetent bacteria. The resultant library was sequenced and amino acid diversity was measured at each position, with the low levels of positional variation likely arising from synthesis error. Subsequent assembly into virus shows clear amino acid residue/positional biases that highlight selection for viral assembly. Liver transducing viruses show even greater patterns of AA residue/positional selection, with distinctly favored/disfavored variants. Note that each of these heatmaps is normalized by their respective input frequencies. FIG. 6B is a table of statistical analysis (ANOVA) showing that in three liver samples, amino acid residue distribution and residue-position vary significantly, but inter-sample variation is not significant.

[0014] FIGS. 7A-7B show analysis of repeat observed (high UMI) capsid variants between multiple samples. FIG. 7A is a Venn diagram illustrating counts of overlapping variant identification in two liver samples: ˜38% of variants with >10 UMIs were observed in both samples. FIG. 7B is a heat map showing positional amino acid distribution illustrating the strongly selected residues/positions of repeat observed capsid variants.

[0015] FIG. 8 is a schematic of machine learning-based clustering of capsid variants. The example utilizes capsid variant sequences upon which machine learning algorithms were used to map the similarity of capsids among those that infected the liver. This output can then be used to inform selection of candidate variants to selectively target the tissue of interest.

[0016] FIG. 9 illustrates an example of the performance of the library as a whole infecting cortex at a higher relative level than liver after the intravenous administration to a non-human primate (NHP). DNA was isolated from the liver and cortex and either qPCR (at left) or droplet digital PCR (ddPCR) (at right) were used to quantify viral genomes recovered from the respective tissues. By these methods of quantification, the library as a whole has ˜2-fold increased CNS targeting over the liver.

[0017] FIG. 10 illustrates wild-type crystal structure of AAV5 capsid emphasizing electrostatic potential, and two exemplary recombinant VP1 capsid variants obtained by the methods described herein.

[0018] FIGS. 11A-D show Venn diagrams and analytic tables depicting the number of unique sequence variants found in liver tissue only, liver and brain cortex tissues, and cortex tissue only for three different sequencing analysis filters. Next-generation sequencing was performed on viral genomic capsid variants recovered from liver or cortical tissue samples. Unique Molecular Identifiers (UMIs) were appended as part of the molecular recovery process as described herein. This allows for increased confidence that a given capsid variant is present in the tissue, and may be correlated to abundance. FIG. 11A shows a Venn diagram in which the sequencing analysis filter applied was 4 or greater distinct UMIs (also referred to herein as “count”), per each distinct capsid sequence variant. FIG. 11B shows a Venn diagram in which the sequencing analysis filter applied was 50 or greater UMIs. FIG. 11C shows a Venn diagram in which the sequencing analysis filter applied was 100 or greater distinct UMIs. FIG. 11D shows a histogram analysis of the distribution of UMIs in the population of capsid sequence variants found in cortex only in which the sequencing analysis filter applied was 50 or greater UMIs as shown in FIG. 11B.

[0019] FIG. 12 shows heatmaps of normalized amino acid residue frequency in the rAAV5 capsid polypeptide sequences of the present disclosure and how they are enriched moving from pre-assembly to post-assembly to CNS-transducing subsets of variants. The x-axes of the heatmaps indicate the position in the 581-589 region and the y-axis includes all amino acid residues.

[0020] FIG. 13 shows an example of machine learning (ML) model performance validation. Distinct variants are found in CNS and non-CNS tissues, as well as some shared variants found in both (left). Random Forest (RF) ML models show good performance at predicting CNS targeting. At high predicted class probability values, the ML model can resolve CNS-targeting from non-CNS targeting variant sequences (middle, right).

[0021] FIG. 14 illustrates top 20 positional features contributing to model output probability (at left). Shapley Additive Explanations (SHAP) values can be used to interrogate the relative contribution of features to model predictions. These features can be further compared between tissue targeting and non-targeting variants. At right is a model of a CNS variant having a sequence of KRLQQMETM (SEQ ID NO: 1117), representing some features predicted to increase CNS-targeting.

[0022] FIG. 15 shows recovery of rAAV5 variants of the present disclosure from two NHPs across all tissue types including skin, liver, lung, heart, spleen, lymph node, thyroid gland, skeletal muscle, bone marrow, mammary gland, adrenal gland, colon, sciatic nerve (a peripheral nerve), and a number of CNS tissues (forebrain cortex, occipital cortex, temporal cortex, thalamus, hypothalamus, substantia nigra, hippocampus DG, hippocampus CA1, hippocampus CA3, cerebellum, and spinal cord). Analysis of tissue samples enabled the ability to enrich favored properties of a particular variant (e.g., enriched in a first tissue and not enriched in one or more other tissues). Machine learning algorithms were applied to discover determinants of tissue tropism.

[0023] FIG. 16 shows that rAAV5 variants include variants present in the CNS at large, as well as found in the substantia nigra, a subregion of the brain particularly affected in Parkinson's disease. Additionally, FIG. 16 shows that machine learning models exhibited good performance at predicting determinants of high CNS specificity (at right).

[0024] FIG. 17 shows that rAAV5 variants include variants present in muscle tissue, including variants that target heart (cardiac tissue) and skeletal tissue while de-targeted to liver tissue (at left). Additionally, FIG. 17 shows that machine learning models exhibited good performance at predicting determinants of liver detargeting (at right).

[0025] FIG. 18A shows a heatmap of amino acid positional frequencies in a CNS tissue compared to all other analyzed tissues. FIG. 18B shows a heatmap of amino acid positional frequencies in a liver tissue compared to all other analyzed tissues. FIG. 18C shows a heatmap of amino acid positional frequencies in a skeletal muscle tissue compared to all other analyzed tissues. FIG. 18D shows a heatmap of amino acid positional frequencies in a heart tissue compared to all other analyzed tissues. FIG. 18E shows a heatmap of amino acid positional frequencies in a lung tissue compared to all other analyzed tissues. FIG. 18F shows a heatmap of amino acid positional frequencies in a spleen tissue compared to all other analyzed tissues. FIG. 18G shows a heatmap of amino acid positional frequencies in a lymph node tissue compared to all other analyzed tissues. FIG. 18H shows a heatmap of amino acid positional frequencies in a bone marrow tissue compared to all other analyzed tissues. FIG. 18I shows a heatmap of amino acid positional frequencies in a mammary gland tissue compared to all other analyzed tissues. FIG. 18J shows a heatmap of amino acid positional frequencies in a skin tissue compared to all other analyzed tissues. FIG. 18K shows a heatmap of amino acid positional frequencies in an adrenal gland tissue compared to all other analyzed tissues. FIG. 18L shows a heatmap of amino acid positional frequencies in a thyroid tissue compared to all other analyzed tissues. FIG. 18M shows a heatmap of amino acid positional frequencies in a colon tissue compared to all other analyzed tissues. FIG. 18N shows a heatmap of amino acid positional frequencies in a sciatic nerve tissue compared to all other analyzed tissues. FIG. 18O shows a heatmap of amino acid positional frequencies in a spinal cord tissue compared to all other analyzed tissues.

[0026] FIG. 19A shows the results at various steps of bioinformatics pre-processing of the NGS data. Stepwise read count for 48 individual samples through filters is shown. FIG. 19B shows a positional comparison of CNS/non-CNS variant sequences.

[0027] FIG. 20A shows an example of peripheral and CNS tissue samples analyzed by the methods described herein. FIG. 20B shows amino acid positional abundance in the top 1000 machine learning predicted/filtered variants recovered from the CNS compared to non-CNS variants.

[0028] FIG. 21A shows an example of an ensemble of both ML models: Random Forest (RF) and Histogram-based Gradient Boosting Tree (HGB) for averaged predicted CNS probability. Outputs of CNS-targeting probability from both ML models showed good concordance. FIG. 21B shows the distribution of average CNS-targeting probability for all CNS variants.

[0029] FIG. 22 shows an example of machine learning model performance validation. Both Histogram-based Gradient Boosting Tree (HGB) (top) and Random Forest (RF) (bottom) machine learning models showed good performance at predicting CNS targeting. At high predicted class probability values, both machine learning models resolved CNS-targeting from non-CNS targeting.

[0030] FIG. 23 shows how a set of top 20 positional features contributed to model output probability. Shapley Additive Explanations (SHAP) values were used to interrogate the relative contribution of features to model predictions. These features can be further compared between tissue targeting and non-targeting variants (as in FIGS. 24A-C).

[0031] FIGS. 24A, 24B, and 24C shows a comparison of a set of top predictive features positionally. Features were selected if they were found to be important to both the HGB & RF models. Summaries are shown of the features in the top 1000 machine learning-predicted CNS variants compared to a random 2% of CNS variants.

[0032] FIG. 25 shows a set of top 20 positional features contributing to model output probability in a machine learning analysis of sequences that target liver tissue.

[0033] FIGS. 26A, 26B, and 26C show a comparison of top predictive features positionally in a machine learning analysis of sequences that target liver tissue. Features were compared between tissue targeting and non-targeting variants.

[0034] FIG. 27 shows a set of top 20 positional features contributing to model output probability in a machine learning analysis of sequences that are liver-detargeted.

[0035] FIGS. 28A and 28B show a comparison of top predictive features positionally for liver-detargeted variants.

[0036] FIG. 29 shows a set of top 20 positional features contributing to model output probability in a machine learning analysis of sequences that target muscle tissue.

[0037] FIGS. 30A-30B show a comparison of top predictive features positionally in a machine learning analysis of sequences that target muscle tissue. Features were compared between tissue targeting and non-targeting variants.

### 6. DETAILED DESCRIPTION OF THE INVENTION

[0038] Unless described otherwise, all technical and scientific terms used herein have the meaning commonly understood by one of ordinary skill in the art to which the invention pertains.

[0039] Unless otherwise stated, whenever a range is recited, the range is inclusive of the recited endpoints. For example, the region from amino acid residue 581 to amino acid residue 589 of SEQ ID NO: 1 includes amino acid residues 581 and 589.

[0040] “Homology” or “identity” or “similarity” can refer to sequence similarity between two peptides or between two nucleic acid molecules. Homology can be determined by comparing a position in each sequence which can be aligned for purposes of comparison. When a position in the compared sequence can be occupied by the same base or amino acid, then the molecules can be homologous at that position. A degree of homology between sequences can be a function of the number of matching or homologous positions shared by the sequences. An “unrelated” or “non-homologous” sequence shares less than 40% identity, or alternatively less than 25% identity, with one of the sequences of the disclosure. Sequence homology can refer to a % identity of a sequence to a reference sequence. As a practical matter, whether any particular sequence can be at least 50%, 60%, 70%, 80%, 85%, 90%, 92%, 95%, 96%, 97%, 98% or 99% identical to any sequence described herein (which can correspond with a particular nucleic acid sequence described herein), such particular polypeptide sequence can be determined conventionally using known computer programs such the Bestfit program (Wisconsin Sequence Analysis Package, Version 8 for Unix, Genetics Computer Group, University Research Park, 575 Science Drive, Madison, Wis. 53711). When using Bestfit or any other sequence alignment program to determine whether a particular sequence is, for instance, 95% identical to a reference sequence, the parameters can be set such that the percentage of identity can be calculated over the full length of the reference sequence and that gaps in sequence homology of up to 5% of the total reference sequence can be allowed. The term percent “identity” or percent “homology,” in the context of two or more nucleic acid or polypeptide sequences, refer to two or more sequences or subsequences that have a specified percentage of nucleotides or amino acid residues that are the same, when compared and aligned for maximum correspondence, as measured using one of the sequence comparison algorithms described below (e.g., BLASTP and BLASTN or other algorithms available to persons of skill) or by visual inspection. Depending on the application, the percent “identity” can exist over a region of the sequence being compared, e.g., over a functional domain, or, alternatively, exist over the full length of the two sequences to be compared. For sequence comparison, typically one sequence acts as a reference sequence to which test sequences are compared. When using a sequence comparison algorithm, test and reference sequences are input into a computer, subsequence coordinates are designated, if necessary, and sequence algorithm program parameters are designated. The sequence comparison algorithm then calculates the percent sequence identity for the test sequence(s) relative to the reference sequence, based on the designated program parameters. For purposes herein, percent identity and sequence similarity is performed using the BLAST algorithm, which is described in Altschul et al., J. Mol. Biol. 215:403-410 (1990). Software for performing BLAST analyses is publicly available through the National Center for Biotechnology Information (www.ncbi.nlm.nih.gov/).

[0041] In some cases, the identity between a reference sequence (query sequence, e.g., a sequence of the disclosure) and a subject sequence, also referred to as a global sequence alignment, can be determined using the FASTDB computer program. In some embodiments, parameters for a particular embodiment in which identity can be narrowly construed, used in a FASTDB amino acid alignment, can include: Scoring Scheme=PAM (Percent Accepted Mutations) 0, k-tuple=2, Mismatch Penalty=1, Joining Penalty=20, Randomization Group Length=0, Cutoff Score=1, Window Size=sequence length, Gap Penalty=5, Gap Size Penalty=0.05, Window Size=500 or the length of the subject sequence, whichever can be shorter. According to this embodiment, if the subject sequence can be shorter than the query sequence due to N- or C-terminal deletions, not because of internal deletions, a manual correction can be made to the results to take into consideration the fact that the FASTDB program does not account for N- and C-terminal truncations of the subject sequence when calculating global percent identity. For subject sequences truncated at the N- and C-termini, relative to the query sequence, the percent identity can be corrected by calculating the number of residues of the query sequence that can be lateral to the N- and C-terminal of the subject sequence, which can be not matched/aligned with a corresponding subject residue, as a percent of the total bases of the query sequence. A determination of whether a residue can be matched/aligned can be determined by results of the FASTDB sequence alignment. This percentage can be then subtracted from the percent identity, calculated by the FASTDB program using the specified parameters, to arrive at a final percent identity score. This final percent identity score can be used for the purposes of this embodiment. In some cases, only residues to the N- and C-termini of the subject sequence, which can be not matched/aligned with the query sequence, can be considered for the purposes of manually adjusting the percent identity score. That is, only query residue positions outside the farthest N- and C-terminal residues of the subject sequence can be considered for this manual correction. For example, a 90-residue subject sequence can be aligned with a 100-residue query sequence to determine percent identity. The deletion occurs at the N-terminus of the subject sequence, and therefore, the FASTDB alignment does not show a matching/alignment of the first 10 residues at the N-terminus. The 10 unpaired residues represent 10% of the sequence (number of residues at the N- and C-termini not matched/total number of residues in the query sequence) so 10% can be subtracted from the percent identity score calculated by the FASTDB program. If the remaining 90 residues were perfectly matched, the final percent identity can be 90%. In another example, a 90-residue subject sequence can be compared with a 100-residue query sequence. This time the deletions can be internal deletions, so there can be no residues at the N- or C-termini of the subject sequence which can be not matched/aligned with the query. In this case, the percent identity calculated by FASTDB can be not manually corrected. Once again, only residue positions outside the N- and C-terminal ends of the subject sequence, as displayed in the FASTDB alignment, which can be not matched/aligned with the query sequence can be manually corrected for.

[0042] As used herein, “tropism” of a rAAV for a tissue is defined as the ability of a given rAAV to preferentially infect a given cell or tissue. Altered or engineered tropism includes increased or decreased targeting ability for desired tissues, with a corresponding increased or decreased infection of the target tissue.

[0043] For simplicity throughout this disclosure, viral capsid protein is generally referred to as “VP.” Viral capsid protein is referred to as VP1 when referencing AAV5 VP1 positional notation. In all cases, viral capsid sequences and mutations disclosed herein should be understood as pertaining to all isoforms of the capsid protein (VP1, VP2, and VP3), as a mixture of these isoforms assemble to form virions. The positional amino acid residue designations “581-589” are relative to the translational start of the VP1 polypeptide and should be adjusted accordingly to the relative start sites of VP2 and VP3. It should be understood that the present disclosure, when describing any particular VP1 sequence with mutations at particular amino acid residue positions, necessarily also encompasses corresponding mutations in VP2 and VP3. For example, any consensus sequence or specific sequence of a VP1 capsid protein having one or more mutations in the amino acid residue s of the 581-589 region also encompasses VP2 and VP3 capsid proteins having said one or more mutations in an amino acid residue region in VP2 and VP3 corresponding to the amino acid residues of the VP1 581-589 region. For example, the amino acid residues of the 581 to 589 region of VP1 (SEQ ID NO: 1) correspond to the amino acid residues of the 445 to 453 region of VP2 (SEQ ID NO: 1115) and to the amino acid residues of 389 to 397 region of VP3 (SEQ ID NO: 1116).

[0044] It should be understood that the present disclosure includes polynucleotide sequences encoding for any sequence disclosed herein. For example, if an amino acid sequence is provided, the present disclosure also encompasses a polynucleotide sequence encoding for said amino acid sequence.

[0045] It should be understood that further embodiments include mutations in VP1. VP2, VP3, or any combination thereof that do not alter the desired properties (e.g., a particular tissue tropism) or affect viral assembly, as described herein.

[0046] As used herein, “tissue tropism” refers to a preference of a virus having an engineered VP capsid polypeptide of the present disclosure to infect a given tissue or be enriched in or accumulate in a given tissue. Tissue tropism, when used as a relative term and depending on the context in which it is described herein, refers to an increase or decrease in tissue tropism of a given rAAV virion having a first capsid polypeptide in a first tissue as compared to a second tissue and/or refers to an increase or decrease in tissue tropism of a given rAAV virion having a first capsid polypeptide to an rAAV virion having a second capsid polypeptide. In some embodiments, the first tissue can be a group of tissues. In some embodiments, the second tissue can be a group of tissues. For example, the first tissue may be CNS tissues, which comprise cortex forebrain, cortex occipital, cortex temporal, thalamus, hypothalamus, substantia nigra, hippocampus DG, hippocampus CA1, hippocampus CA3, and cerebellum and the second tissue may be a non-CNS tissue consisting collectively of liver, skeletal muscle, heart, lung, spleen, lymph node, bone marrow, mammary gland, skin, adrenal gland, thyroid, colon, sciatic nerve, and spinal cord tissues. As another example, the first tissue may be liver tissue and the second tissue may be non-liver tissue consisting collectively of CNS tissues, skeletal muscle, heart, lung, spleen, lymph node, bone marrow, mammary gland, skin, adrenal gland, thyroid, colon, sciatic nerve, and spinal cord tissues.

[0047] As used herein, the word “recombinant” in the context of an AAV capsid polypeptide, interchangeably refers to an “engineered” or “variant” AAV capsid polypeptide. As used herein, the word “recombinant” in the context of an AAV virion, abbreviated to rAAV, refers to a recombinant virus particle. Said rAAV virion is made of a capsid that may include the engineered AAV5 VP capsid polypeptides disclosed herein.

[0048] 6.1. Capsid Engineering Methods

[0049] Disclosed herein is a system for high throughput engineering of engineered AAV capsids with modified function, including increased or decreased infectivity of desired tissues, such as increased or decreased liver tropism, or increased targeting of the central nervous system (CNS). A general schematic of the process is shown in FIG. 1, however, it should be understood that the present disclosure also encompasses reasonable variations or extensions to the method that are understood to those of ordinary skill in the art. As shown in FIG. 1, the method may begin with production of a capsid library with theoretical diversity of 5×10¹¹ unique sequence variants. Higher or lower theoretical diversities are also encompassed herein. For example, a capsid library may have a theoretical diversity of from about 1×10\hat{ }3 to about 1×10\hat{ }20. The library may then be cloned into plasmids, transformed into bacteria, and subsequently library plasmids are screened for productive virion assembly in a production cell line. The assembled virions may then be administered intravenously into non-human primates (NHP). After a period sufficient for distribution, infection, and stable transduction, the NHP may be sacrificed, organs harvested, and sequences of AAV capsids in each tissue may be determined by deep sequencing.

[0050] FIG. 2A provides a side view (top panel) and top view (bottom panel) of the surface of a prototype AAV virion, identifying residues of known AAV capsids—including AAV2, AAV5, AAV6, and AAV9—that have been shown in the research literature to interact with target cells. These target-interacting residues correspond to amino acids 581-589 in the AAV5 VP1 capsid protein.

[0051] FIG. 2B shows the salient elements of the library plasmid, illustrating rep and cap coding sequences positioned between AAV ITRs. In the illustrated embodiment, further described in Example 1, variation is introduced into each of residues 581-589 of the AAV5 cap protein (“Library variant region”). Each of the 20 natural amino acids is introduced at each of the 9 positions, providing a theoretical library diversity of 20⁹ (20\hat{ }9; approximately 5×10¹¹) unique sequence variants.

[0052] The area targeted for engineering is the most likely to interact with target cell receptors, and relatively tolerant to changes without disrupting virion assembly. Unlike earlier approaches that add unstructured peptides that protrude above the virion 3-fold axis of symmetry, the current approach introduces sequence diversity that alters the characteristics of the binding pocket. In addition, this approach may change the overall structure of the receptor-binding trimer, allowing for altered allosteric interactions outside the binding pocket (e.g., AAVR PKD1). Introduced diversity is non-random, thereby reducing missense and frameshifts of randomized libraries.

[0053] By cloning the polynucleotide encoding the capsid variants into the packaged viral genome (between the ITRs), the recombinant virions with variant capsids carry polynucleotides having their cognate mutation, so the unique variant providing the desired function can be identified by sequencing packaged virus or infected cells.

[0054] In some embodiments, the capsid is a capsid selected from AAV1, AAV2, AAV3, AAV4, AAV5, AAV6, AAV7, AAV8, AAV9, AAV 10, AAV11, AAV 12, AAV13, AAV 14, AAV 15 and AAV 16, AAV.rh8, AAV.rh10, AAV.rh20, AAV.rh39, AAV.Rh74, AAV.RHM4-1, AAV.hu37, AAV.Anc80, AAV.Anc80L65, AAV.7m8, AAV.PHP.B, AAV2.5, AAV2tYF, AAV3B, AAV.LK03, AAV.HSC1, AAV.HSC2, AAV.HSC3, AAV.HSC4, AAV.HSC5, AAV.HSC6, AAV.HSC7, AAV.HSC8, AAV.HSC9, AAV.HSC10, AAV.HSC11, AAV.HSC12, AAV.HSC13, AAV.HSC14, AAV.HSC15, AAV.HSC16 or AAVhu68 (described in WO2020/033842, incorporated herein by reference in its entirety). The hu68 capsid is described in WO 2018/160582, incorporated herein by reference in its entirety.

[0055] Such capsids may comprise a region corresponding to the 581-589 region of the AAV5 VP1, and as such analogous engineered VP capsids with desired tissue tropism, ability to assemble, and exhibit various other desired traits are encompassed herein. Thus, any one of the engineered AAV5 VP capsid polypeptides disclosed herein having a mutation in a region corresponding to the 581 to 589 region of AAV5 VP1 may be inserted into the corresponding region in any one of the other AAV capsids described herein and the present disclosure encompasses such variants.

[0056] In some embodiments, the capsid is a derivative, modification, or pseudotype of AAV1, AAV2, AAV3, AAV4, AAV5, AAV6, AAV7, AAV8, AAV9, AAV 10, AAV11, AAV 12, AAV 13, AAV 14, AAV 15 and AAV 16, AAV.rh8, AAV.rh0. AAV.rh20, AAV.rh39, AAV.Rh74, AAV.RHM4-1, AAV.hu37, AAV.Anc80, AAV.Anc80L65, AAV.7m8, AAV.PHP.B, AAV2.5, AAV2tYF, AAV3B, AAV.LK03, AAV.HSC1, AAV.HSC2, AAV.HSC3, AAV.HSC4, AAV.HSC5, AAV.HSC6, AAV.HSC7, AAV.HSC8, AAV.HSC9, AAV.HSC10, AAV.HSC11, AAV.HSC12, AAV.HSC13, AAV.HSC14, AAV.HSC15, AAV.HSC16 or AAVhu68.

[0057] In some embodiments, capsid protein is a chimera of capsid proteins from two or more serotype selected from AAV1, AAV2, rAAV3, AAV4, AAV5, AAV6, AAV7, AAV8, AAV9, AAV 10, AAV 11, AAV 12, AAV13, AAV 14, AAV 15 and AAV 16, AAV.rh8, AAV.rh10, AAV.rh20, AAV.rh39, AAV.Rh74, AAV.RHM4-1, AAV.hu37, AAV.Anc80, AAV.Anc80L65, AAV.7m8, AAV.PHP.B, AAV2.5, AAV2tYF, AAV3B, AAV.LK03, AAV.HSC1, AAV.HSC2, AAV.HSC3, AAV.HSC4, AAV.HSC5, AAV.HSC6, AAV.HSC7, AAV.HSC8, AAV.HSC9, AAV.HSC10, AAV.HSC11, AAV.HSC12, AAV.HSC13, AAV.HSC14, AAV.HSC15, and AAV.HSC16 (described in WO2020/033842, incorporated herein by reference in its entirety). In certain embodiments, the capsid is an rh32.33 capsid, described in U.S. Pat. No. 8,999,678, incorporated herein by reference in its entirety.

[0058] Such capsids may comprise a region corresponding to 581-589 of the AAV5 VP1, and as such analogous engineered VP capsids with desired tissue tropism, ability to assemble, and exhibit various other desired traits are encompassed herein.

[0059] 6.2. VP-Encoding Polynucleotides, Vectors, and Vector Libraries

[0060] Accordingly, in a first aspect, polynucleotides are provided. The polynucleotides encode an adeno-associated virus (AAV) VP1 capsid polypeptide having the amino acid sequence of SEQ ID NO:2, wherein Xaa1, Xaa2, Xaa3, Xaa4, Xaa5, Xaa6, Xaa7, Xaa8, and Xaa9 are each independently selected from the 20 naturally occurring amino acids—using standard one letter codes, from A, R, N, D, C, E, Q, G, H, I, L, K, M, F, P, S, T, W, Y, and V. The polypeptide includes at least one mutation of the native AAV5 capsid and thus does not have the sequence of SEQ ID NO: 1. In addition, the polypeptide does not have the sequence of SEQ ID NO: 3, SEQ ID NO:4, SEQ ID NO: 5, SEQ ID NO: 6, SEQ ID NO: 7, or SEQ ID NO: 8.

[0061] In some embodiments, the polynucleotide encodes an AAV VP1 capsid polypeptide that further comprises one or more mutations at an amino acid residue outside of the 581-589 region, with reference to SEQ ID NO: 1, wherein the resulting recombinant capsid is capable of forming an assembled virion that exhibits desired tissue targeting.

[0062] In another aspect, a vector capable of replication in prokaryotic cells is provided, wherein the vector comprises the polynucleotide described immediately above. In typical embodiments, the vector is a plasmid encoding a replication-competent AAV genome.

[0063] In a further aspect, a library is provided. The library comprises a plurality of vectors comprising the AAV capsid-encoding polynucleotides. In some embodiments, the vectors are plasmids, and the plurality of plasmids comprise a plurality of different AAV VP-encoding polynucleotides.

[0064] In various library embodiments, at least one of Xaa1, Xaa2, Xaa3, Xaa4, Xaa5, Xaa6, Xaa7, Xaa8, and Xaa9 of SEQ ID NO: 2 is invariant. Such invariant residues are also referred to herein as “framework” residues. Framework residues may contribute to competence of the capsid to assemble into functional virions or infect a particular target cell or tissue

[0065] In some library embodiments, one residue of Xaa1, Xaa2, Xaa3, Xaa4, Xaa5, Xaa6, Xaa7, Xaa8, and Xaa9 of SEQ ID NO: 2 is invariant. In particular embodiments, the invariant residue is the native amino acid of AAV5 VP1 at that position within the VP1 primary amino acid sequence. In particular embodiments, the invariant residue is an amino acid other than the native amino acid of AAV5 VP1 at that position. In some embodiments, two of Xaa1, Xaa2, Xaa3, Xaa4, Xaa5, Xaa6, Xaa7, Xaa8, and Xaa9 of SEQ ID NO: 2 are invariant. In particular embodiments, each invariant residue is the native amino acid of AAV5 VP1 at the respective positions. In particular embodiments, each invariant residue is an amino acid other than the native amino acid of AAV5 VP1 at the respective positions. In some embodiments, three of Xaa1, Xaa2, Xaa3, Xaa4, Xaa5, Xaa6, Xaa7, Xaa8, and Xaa9 of SEQ ID NO: 2 are invariant. In particular embodiments, each invariant residue is the native amino acid of AAV5 VP1 at the respective positions. In particular embodiments, each invariant residue is an amino acid other than the native amino acid of AAV5 VP1 at the respective positions. In some embodiments, four of Xaa1, Xaa2, Xaa3, Xaa4, Xaa5, Xaa6, Xaa7, Xaa8, and Xaa9 or SEQ ID NO: 2 are invariant. In particular embodiments, each invariant residue is the native amino acid of AAV5 VP1 at the respective positions. In particular embodiments, each invariant residue is an amino acid other than the native amino acid of AAV5 VP1 at the respective positions. In some embodiments, five of Xaa1, Xaa2, Xaa3, Xaa4, Xaa5, Xaa6, Xaa7, Xaa8, and Xaa9 of SEQ ID NO: 2 are invariant. In particular embodiments, each invariant residue is the native amino acid of AAV5 VP1 at the respective positions. In particular embodiments, each invariant residue is an amino acid other than the native amino acid of AAV5 VP1 at the respective positions. In some embodiments, six of Xaa1, Xaa2, Xaa3, Xaa4, Xaa5, Xaa6, Xaa7, Xaa8, and Xaa9 of SEQ ID NO: 2 are invariant. In particular embodiments, each invariant residue is the native amino acid of AAV5 VP1 at the respective positions. In particular embodiments, each invariant residue is an amino acid other than the native amino acid of AAV5 VP1 at the respective positions.

[0066] In particular embodiments the rAAV VP1 capsid at position 587 (Xaa7) is not A, C, D, E, F, G, H, I, K, M, P, Q, R, V, W, or Y. In some embodiments, position 587 can be N, S, or T. In particular embodiments, the rAAV VP1 capsid at position 582 (Xaa2) is not G, V, L. or I.

[0067] In various embodiments, the library encodes at least 1× 10⁹ different AAV VP capsid polypeptides, at least 2.5×10⁹ different AAV VP capsid polypeptides, at least 5×10⁹ different AAV VP capsid polypeptides, at least 7.5×10⁹ different AAV VP capsid polypeptides, at least 1×10¹⁰ different AAV VP capsid polypeptides, at least 2.5×10¹⁰ different AAV VP capsid polypeptides, at least 5×10¹⁰ different AAV VP capsid polypeptides, at least 7.5×10¹⁰ different AAV VP capsid polypeptides, at least 1×10¹¹ different AAV VP capsid polypeptides, at least 2.5×10¹¹ different AAV VP capsid polypeptides, or at least 5×10¹¹ different AAV VP capsid polypeptides.

[0068] In another aspect, prokaryotic cells comprising the vectors are provided. In some embodiments, the prokaryotic cell is an E. coli cell and the vector is a plasmid.

[0069] In a related aspect, libraries are provided, the library comprising a plurality of E. coli cells, wherein the plurality of cells comprise a plurality of plasmids, wherein the plurality of plasmids comprise a plurality of different AAV VP-encoding polynucleotides.

[0070] In various library embodiments, at least one of Xaa1, Xaa2, Xaa3, Xaa4, Xaa5, Xaa6, Xaa7, Xaa8, and Xaa9 of SEQ ID NO: 2 is invariant.

[0071] In some library embodiments, one of Xaa1, Xaa2, Xaa3, Xaa4, Xaa5, Xaa6, Xaa7, Xaa8, and Xaa9 is invariant of SEQ ID NO: 2. In particular embodiments, the invariant residue is the native amino acid of AAV5 VP1 at that position within the VP1 primary amino acid sequence. In particular embodiments, the invariant residue is an amino acid other than the native amino acid of AAV5 VP1 at that position. In some embodiments, two of Xaa1, Xaa2, Xaa3, Xaa4, Xaa5, Xaa6, Xaa7, Xaa8, and Xaa9 of SEQ ID NO: 2 are invariant. In particular embodiments, each invariant residue is the native amino acid of AAV5 VP1 at the respective positions. In particular embodiments, each invariant residue is an amino acid other than the native amino acid of AAV5 VP1 at the respective positions. In some embodiments, three of Xaa1, Xaa2, Xaa3, Xaa4, Xaa5, Xaa6, Xaa7, Xaa8, and Xaa9 of SEQ ID NO: 2 are invariant. In particular embodiments, each invariant residue is the native amino acid of AAV5 VP1 at the respective positions. In particular embodiments, each invariant residue is an amino acid other than the native amino acid of AAV5 VP1 at the respective positions. In some embodiments, four of Xaa1, Xaa2, Xaa3, Xaa4, Xaa5, Xaa6, Xaa7, Xaa8, and Xaa9 of SEQ ID NO: 2 are invariant. In particular embodiments, each invariant residue is the native amino acid of AAV5 VP1 at the respective positions. In particular embodiments, each invariant residue is an amino acid other than the native amino acid of AAV5 VP1 at the respective positions. In some embodiments, five of Xaa1, Xaa2, Xaa3, Xaa4, Xaa5, Xaa6, Xaa7, Xaa8, and Xaa9 of SEQ ID NO: 2 are invariant. In particular embodiments, each invariant residue is the native amino acid of AAV5 VP1 at the respective positions. In particular embodiments, each invariant residue is an amino acid other than the native amino acid of AAV5 VP1 at the respective positions. In some embodiments, six of Xaa1, Xaa2, Xaa3, Xaa4, Xaa5, Xaa6, Xaa7, Xaa8, and Xaa9 of SEQ ID NO: 2 are invariant. In particular embodiments, each invariant residue is the native amino acid of AAV5 VP1 at the respective positions. In particular embodiments, each invariant residue is an amino acid other than the native amino acid of AAV5 VP1 at the respective positions.

[0072] In some embodiments, the library encodes at least 1×10⁹ different AAV VP capsid polypeptides, at least 2.5×10⁹ different AAV VP capsid polypeptides, at least 5×10⁹ different AAV VP capsid polypeptides, at least 7.5×10⁹ different AAV VP capsid polypeptides, at least 1×10¹⁰ different AAV VP capsid polypeptides, at least 5×10¹⁰ different AAV VP capsid polypeptides, at least 7.5×10¹⁰ different AAV VP capsid polypeptides, at least 1×10¹¹ different AAV VP capsid polypeptides, at least 2.5×10¹¹ different AAV VP capsid polypeptides, or at least 5×10¹¹ different AAV VP capsid polypeptides.

[0073] 6.3. VP Polypeptides, Peptide Libraries

[0074] In another aspect, AAV VP1 capsid polypeptides are provided. The polypeptide has the amino acid sequence of SEQ ID NO: 2, wherein Xaa1, Xaa2, Xaa3, Xaa4, Xaa5, Xaa6, Xaa7, Xaa8, and Xaa9 are each independently selected from A, R, N, D, C, E, Q, G, H, I, L, K, M, F, P, S, T, W, Y, and V. The polypeptide includes at least one mutation as compared to native AAV VP1, and thus does not have the sequence of SEQ ID NO: 1. In addition, the polypeptide does not have the sequence of SEQ ID NO: 3, SEQ ID NO: 4, SEQ ID NO: 5, SEQ ID NO: 6, SEQ ID NO: 7, or SEQ ID NO: 8.

[0075] In some embodiments, the polypeptide further comprises one or more mutations at an amino acid residue outside of the 581-589 region, with reference to SEQ ID NO: 1, wherein the resulting recombinant capsid is capable of forming an assembled virion that exhibits desired tissue targeting.

[0076] In a further aspect, libraries are provided, the libraries comprising a plurality of polypeptides as described immediately above, the plurality having different primary amino acid sequences.

[0077] In various library embodiments, at least one of Xaa1, Xaa2, Xaa3, Xaa4, Xaa5, Xaa6, Xaa7, Xaa8, and Xaa9 of SEQ ID NO: 2 is invariant.

[0078] In some library embodiments, one of Xaa1, Xaa2, Xaa3, Xaa4, Xaa5, Xaa6, Xaa7, Xaa8, and Xaa9 of SEQ ID NO: 2 is invariant. Such invariant residues are also referred to herein as “framework” residues. In particular embodiments, the invariant residue is the native amino acid of AAV5 VP1 at that position within the VP1 primary amino acid sequence. In particular embodiments, the invariant residue is an amino acid other than the native amino acid of AAV5 VP1 at that position. In some embodiments, two of Xaa1, Xaa2, Xaa3, Xaa4, Xaa5, Xaa6, Xaa7, Xaa8, and Xaa9 of SEQ ID NO: 2 are invariant. In particular embodiments, each invariant residue is the native amino acid of AAV5 VP1 at the respective positions. In particular embodiments, each invariant residue is an amino acid other than the native amino acid of AAV5 VP1 at the respective positions. In some embodiments, three of Xaa1, Xaa2, Xaa3, Xaa4, Xaa5, Xaa6, Xaa7, Xaa8, and Xaa9 of SEQ ID NO: 2 are invariant. In particular embodiments, each invariant residue is the native amino acid of AAV5 VP1 at the respective positions. In particular embodiments, each invariant residue is an amino acid other than the native amino acid of AAV5 VP1 at the respective positions. In some embodiments, four of Xaa1, Xaa2, Xaa3, Xaa4, Xaa5, Xaa6, Xaa7, Xaa8, and Xaa9 of SEQ ID NO: 2 are invariant. In particular embodiments, each invariant residue is the native amino acid of AAV5 VP1 at the respective positions. In particular embodiments, each invariant residue is an amino acid other than the native amino acid of AAV5 VP1 at the respective positions. In some embodiments, five of Xaa1, Xaa2, Xaa3, Xaa4, Xaa5, Xaa6, Xaa7, Xaa8, and Xaa9 of SEQ ID NO: 2 are invariant. In particular embodiments, each invariant residue is the native amino acid of AAV5 VP1 at the respective positions. In particular embodiments, each invariant residue is an amino acid other than the native amino acid of AAV5 VP1 at the respective positions. In some embodiments, six of Xaa1, Xaa2, Xaa3, Xaa4, Xaa5, Xaa6, Xaa7, Xaa8, and Xaa9 of SEQ ID NO: 2 are invariant. In particular embodiments, each invariant residue is the native amino acid of AAV5 VP1 at the respective positions. In particular embodiments, each invariant residue is an amino acid other than the native amino acid of AAV5 VP1 at the respective positions.

[0079] In some embodiments, library comprises at least 1×10⁹ different AAV VP capsid polypeptides, at least 2.5×10⁹ different AAV VP capsid polypeptides, at least 5×10⁹ different AAV VP capsid polypeptides, at least 7.5×10⁹ different AAV VP capsid polypeptides, at least 1×10¹⁰ different AAV VP capsid polypeptides, at least 2.5×10¹⁰ different AAV VP capsid polypeptides, at least 5×10¹⁰ different AAV VP capsid polypeptides, at least 7.5×10¹⁰ different AAV VP capsid polypeptides, at least 1×10¹¹ different AAV VP capsid polypeptides, at least 2.5×10¹¹ different AAV VP capsid polypeptides, or at least 5×10¹¹ different AAV VP capsid polypeptides.

[0080] In certain embodiments, the library comprises at least from about 1×10⁵ to at least about 5×10¹¹ different AAV VP capsid polypeptides. In certain embodiments, the library comprises at least about 1×10⁵, at least about 2×10⁵, at least about 3×10⁵, at least about 4×10⁵, at least about 5×10⁵, at least about 6×10⁵, at least about 7×10⁵, at least about 8×10⁵, at least about 9×10⁵, at least about 1× 10⁶, at least about 2×10 at least about 3×10⁶, at least about 4×10⁶, at least about 5×10⁶, at least about 6×10⁶, at least about 7×10⁶, at least about 8×10⁶, at least about 9×10⁶, at least about 1× 10⁷, at least about 2×10⁷, at least about 3×10⁷, at least about 4×10⁷, at least about 5×10⁷, at least about 6×10⁷, at least about 7×10⁷, at least about 8×10⁷, at least about 9×10⁷, at least about 1×10⁸, at least about 2×10⁸, at least about 3×10⁸, at least about 4×10⁸, at least about 5×10⁸, at least about 6×10, at least about 7×10⁸, at least about 8×10⁸, at least about 9×10′, at least about 1×10⁹, at least about 2×10⁹, at least about 3×10⁹, at least about 4×10⁹, at least about 5×10⁹, at least about 6×10⁹, at least about 7×10⁹, at least about 8×10⁹, at least about 9×10⁹, at least about 1×10¹⁰, at least about 2×10¹⁰, at least about 3×10¹⁰, at least about 4×10¹⁰, at least about 5×10¹⁰, at least about 6×10¹⁰, at least about 7×10¹⁰, at least about 8×10¹⁰, at least about 9×10¹⁰, at least about 1×10¹¹, at least about 2×10¹¹, at least about 3×10¹¹, at least about 4×10¹¹, or at least about 5×10¹¹ AAV VP capsid polypeptides.

[0081] In certain embodiments, provided herein is a recombinant adeno-associated virus AAV VP1 capsid polypeptide having at least one mutation in a residue of region 581 to residue 589 in SEQ ID NO: 1, inclusive, wherein the mutation confers at least about a two-fold increased accumulation of an AAV virion having said AAV VP1 capsid polypeptide in a non-liver tissue as compared to a liver tissue, as compared to wildtype AAV virion having a wildtype AAV5 VP1 capsid polypeptide, and wherein the AAVVP1 capsid polypeptide does not have the sequence of any of SEQ ID NO: 1, SEQ ID NO:3, SEQ ID NO:4, SEQ ID NO:5, SEQ ID NO:6, SEQ ID NO:7, and SEQ ID NO:8.

[0082] 6.4. rAAV Virions, Virion Libraries

[0083] In another aspect, recombinant AAV virions (rAAV) are provided. The virion comprises an AAV VP capsid polypeptide as described above.

[0084] In some embodiments, the rAAV has increased tropism for primate and human liver as compared to a rAAV having the native AAV5 VP1 capsid polypeptide (SEQ ID NO:1). In some embodiments, the rAAV has increased ability to assemble, or exhibits greater virion stability, as compared to a rAAV having the native AAV5 VP1 capsid polypeptide (SEQ ID NO:1).

[0085] In some embodiments, the rAAV has reduced tropism for human liver as compared to a rAAV having the native AAV5 VP1 capsid polypeptide (SEQ ID NO:1).

[0086] In some embodiments, the rAAV has increased ability to cross the blood-brain barrier following intravenous administration as compared to a rAAV having the native AAV5 VP1 capsid polypeptide (SEQ ID NO:1).

[0087] In certain of these embodiments, the rAAV has increased ability to infect one or more brain regions selected from hippocampus, dentate gyrus, cerebral cortex, temporal cortex, occipital cortex, thalamus, forebrain, substantia nigra, hypothalamus, and cerebellum following intravenous, intrathecal, intracerebral ventricular, or intracisternal magna administration, as compared to a rAAV having the native AAV5 VP1 capsid polypeptide (SEQ ID NO 1).

[0088] In some embodiments, the rAAV has increased ability to infect one or more brain regions selected from hippocampus, dentate gyrus, cerebral cortex, temporal cortex, occipital cortex, thalamus, forebrain, substantia nigra, hypothalamus, and cerebellum following intravenous, intrathecal, intracerebral ventricular, or intracisternal magna administration and also has reduced tropism for all non CNS tissues, including being detargeted for cardiac tissue, as compared to a rAAV having the native AAV5 VP1 capsid polypeptide (SEQ ID NO:1).

[0089] In some embodiments, the rAAV has increased ability to infect human retinal cells following intravitreal injection as compared to a rAAV having the native AAV5 VP1 capsid polypeptide (SEQ ID NO:1).

[0090] In some embodiments, the rAAV has increased ability to infect human skeletal muscle following intravenous administration as compared to a rAAV having a VP1 capsid polypeptide having the native AAV5 VP1 capsid polypeptide (SEQ ID NO:1).

[0091] In some embodiments, the rAAV has increased ability to infect a tissue selected from adipose, adrenal gland, aorta, brain (including hippocampus: dentate gyrus, CA1 and CA3; cerebellum, caudate, putamen, midbrain, pons, hypothalamus, cortex-including occipital, temporal and forebrain; substantia nigra, and thalamus), bone marrow, cecum, colon, dorsal root ganglion, duodenum, epididymis, esophagus, eye, gallbladder, heart, ileum, jejunum, kidney, lung, lymph nodes, mammary gland, ovary, pancreas, parathyroid gland, peripheral nerve, pituitary, prostate, salivary gland, seminal vesicle, skeletal muscle, skin, spinal cord, spleen, stomach, testis, thymus, thyroid, trachea, urinary bladder, uterus, and vagina following intravenous administration, as compared to a rAAV having the native AAV5 capsid polypeptide (SEQ ID NO:1).

[0092] Additionally, provided are polynucleotide sequences encoding the rAAV capsid VP proteins described herein.

[0093] In a further aspect, libraries are provided that comprise a plurality of rAAV as described above. The plurality of rAAV comprise a plurality of VP capsid polypeptides having different primary amino acid sequences.

[0094] In various library embodiments, at least one of Xaa1, Xaa2, Xaa3, Xaa4, Xaa5, Xaa6, Xaa7, Xaa8, and Xaa9 of SEQ ID NO: 2 is invariant.

[0095] In some library embodiments, one of Xaa1, Xaa2, Xaa3, Xaa4, Xaa5, Xaa6, Xaa7, Xaa8, and Xaa9 of SEQ ID NO: 2 is invariant. Such invariant residues are also referred to herein as “framework” residues. In particular embodiments, the invariant residue is the native amino acid of AAV5 VP1 at that position within the VP1 primary amino acid sequence. In particular embodiments, the invariant residue is an amino acid other than the native amino acid of AAV5 VP1 at that position. In some embodiments, two of Xaa1, Xaa2, Xaa3, Xaa4, Xaa5, Xaa6, Xaa7, Xaa8, and Xaa9 of SEQ ID NO: 2 are invariant. In particular embodiments, each invariant residue is the native amino acid of AAV5 VP1 at the respective positions. In particular embodiments, each invariant residue is an amino acid other than the native amino acid of AAV5 VP1 at the respective positions. In some embodiments, three of Xaa1, Xaa2, Xaa3, Xaa4, Xaa5, Xaa6, Xaa7, Xaa8, and Xaa9 of SEQ ID NO: 2 are invariant. In particular embodiments, each invariant residue is the native amino acid of AAV5 VP1 at the respective positions. In particular embodiments, each invariant residue is an amino acid other than the native amino acid of AAV5 VP1 at the respective positions. In some embodiments, four of Xaa1, Xaa2, Xaa3, Xaa4, Xaa5, Xaa6, Xaa7, Xaa8, and Xaa9 of SEQ ID NO: 2 are invariant. In particular embodiments, each invariant residue is the native amino acid of AAV5 VP1 at the respective positions. In particular embodiments, each invariant residue is an amino acid other than the native amino acid of AAV5 VP1 at the respective positions. In some embodiments, five of Xaa1, Xaa2, Xaa3, Xaa4, Xaa5, Xaa6, Xaa7, Xaa8, and Xaa9 of SEQ ID NO: 2 are invariant. In particular embodiments, each invariant residue is the native amino acid of AAV5 VP1 at the respective positions. In particular embodiments, each invariant residue is an amino acid other than the native amino acid of AAV5 VP1 at the respective positions. In some embodiments, six of Xaa1, Xaa2, Xaa3, Xaa4, Xaa5, Xaa6, Xaa7, Xaa8, and Xaa9 of SEQ ID NO: 2 are invariant. In particular embodiments, each invariant residue is the native amino acid of AAV5 VP1 at the respective positions. In particular embodiments, each invariant residue is an amino acid other than the native amino acid of AAV5 VP1 at the respective positions.

[0096] In some embodiments, the library comprises at least 1×10⁹ different AAV VP capsid polypeptides, at least 2.5×10⁹ different AAV VP capsid polypeptides, at least 5×10⁹ different AAV VP capsid polypeptides, at least 7.5×10 different AAV VP capsid polypeptides, at least 1×10¹⁰ different AAV VP capsid polypeptides, at least 2.5×10¹⁰ different AAV VP capsid polypeptides, at least 5×10¹⁰ different AAV VP capsid polypeptides, at least 7.5×10¹⁰ different AAV VP capsid polypeptides, at least 1×10¹¹ different AAV VP capsid polypeptides, at least 2.5×10¹¹ different AAV VP capsid polypeptides, or at least 5×10¹¹ different AAV VP capsid polypeptides.

[0097] 6.5. Pharmaceutical Compositions

[0098] In another aspect, pharmaceutical compositions are provided. The pharmaceutical composition comprises a rAAV as described above and a pharmaceutically acceptable carrier.

[0099] A pharmaceutical composition can comprise a first active ingredient. The first active ingredient can comprise a viral vector as described herein and/or any payload as described herein. The pharmaceutical composition can be formulated in unit dose form. The pharmaceutical composition can comprise a pharmaceutically acceptable excipient, diluent, or carrier. The pharmaceutical composition can comprise a second, third, or fourth active ingredient—such as to facilitate enhanced gene replacement, RNA editing. DNA editing, or imaging.

[0100] A pharmaceutical composition described herein can compromise an excipient. An excipient can comprise a cryo-preservative, such as DMSO, glycerol, polyvinylpyrrolidone (PVP), or any combination thereof. An excipient can comprise a cryo-preservative, such as a sucrose, a trehalose, a starch, a salt of any of these, a derivative of any of these, or any combination thereof. An excipient can comprise a pH agent (to minimize oxidation or degradation of a component of the composition), a stabilizing agent (to prevent modification or degradation of a component of the composition), a buffering agent (to enhance temperature stability), a solubilizing agent (to increase protein solubility), or any combination thereof. An excipient can comprise a surfactant, a sugar, an amino acid, an antioxidant, a salt, a non-ionic surfactant, a solubilizer, a triglyceride, an alcohol, or any combination thereof. An excipient can comprise sodium carbonate, acetate, citrate, phosphate, poly-ethylene glycol (PEG), human serum albumin (HSA), sorbitol, sucrose, trehalose, polysorbate 80, sodium phosphate, sucrose, disodium phosphate, mannitol, polysorbate 20, histidine, citrate, albumin, sodium hydroxide, glycine, sodium citrate, trehalose, arginine, sodium acetate, acetate, HCl, disodium edetate, lecithin, glycerol, xanthan rubber, soy isoflavones, polysorbate 80, ethyl alcohol, water, teprenone, or any combination thereof.

[0101] Compositions and methods provided herein can utilize pharmaceutical compositions. The compositions described throughout can be formulated into a pharmaceutical and be used to treat a human or mammal, in need thereof, diagnosed with a disease. In some cases, pharmaceutical compositions can be used prophylactically.

[0102] The compositions provided herein can be utilized in methods provided herein. Any of the provided compositions provided herein can be utilized in methods provided herein. In some cases, a method comprises at least partially preventing, reducing, ameliorating, and/or treating a disease or condition, or a symptom of a disease or condition. A subject can be a human or non-human. A subject can be a mammal (e.g., rat, mouse, cow, dog, pig, sheep, horse). A subject can be a vertebrate or an invertebrate. A subject can be a laboratory animal A subject can be a patient. A subject can be suffering from a disease. A subject can display symptoms of a disease. A subject may not display symptoms of a disease, but still have a disease. A subject can be under medical care of a caregiver (e.g., the subject is hospitalized and is treated by a physician).

[0103] 6.6. Methods of Treatment or Detection

[0104] In some aspects, the present disclosure provides for methods of treatment using an rAAV virion having any one of the engineered AAV VP capsid polypeptide sequences disclosed herein. In some aspects, the present disclosure provides for methods of detection using an rAAV virion having any one of the engineered AAV VP capsid polypeptide sequences disclosed herein. The method comprises administering an effective amount of the pharmaceutical composition comprising rAAV virions having any one of the AAV VP capsid polypeptide sequences disclosed herein to a subject in need thereof. The rAAV virions encapsidate any payload, including those payloads disclosed herein.

[0105] In some embodiments, the effective amount is at least 1×10⁸ viral genomes per dose. In some embodiments, the effective amount is at least 5×10⁸ viral genomes/dose, 7.5×10⁸ viral genomes/dose, at least 1×10¹¹ viral genomes/dose, at least 2.5×10⁹ viral genomes/dose, at least 5×10⁹ viral genomes/dose.

[0106] In some embodiments, the effective amount is at least 1×10¹¹ viral genomes/kg patient weight, at least 5×10¹¹ viral genomes/kg, at least 1×10¹¹ viral genomes/kg, at least 5×10¹² viral genomes/kg, at least 1×10¹³ viral genomes/kg, at least 1×10¹⁴ viral genomes/kg, or at least 5×10¹⁴.

[0107] In some embodiments, the rAAV virion is administered via a systemic administration route including enteral routes of administration and parenteral routes of administration. The rAAV virion may be administered intravenously. In some embodiments, the rAAV may be administered intramuscularly. In some embodiments, the rAAV may be administered intraperitoneally. In some embodiments, the rAAV may be administered topically. In some embodiments, the rAAV may be administered orally. In particular embodiments, the rAAV virion is administered intravenously. In some embodiments, the rAAV is administered intrathecally. In some embodiments, the rAAV is administered by intracerebral ventricular injection. In some embodiments, the rAAV is administered by intracisternal magna administration. In some embodiments, the rAAV is administered by intravitreal injection.

[0108] In various embodiments, the patient suffers from one of the conditions listed in TABLE 1, below. In particular embodiments, the patient suffers from one of the conditions listed in TABLE 1 and the rAAV includes the transgene product associated therewith in TABLE 1.

[0109] In some embodiments, an rAAV virion of the present disclosure, having any of the engineered AAV VP capsid polypeptide sequences disclosed herein, comprises a vector genome, the vector genome comprising a therapeutic polynucleotide or payload. In further embodiments, said payload may be under control of regulatory sequences that direct expression in infected human cells. In some embodiments, the payload comprises a therapeutic polynucleotide encoding any genetically encodable payload, such as an RNA (e.g., a guide RNA), a suppressor tRNA, a transgene, or a genome modifying entity.

[0110] In some embodiments, the therapeutic polynucleotide encodes a guide RNA, a tRNA, a suppressor tRNA, a siRNA, a miRNA, an mRNA, a shRNA, a circular RNA, or an antisense oligonucleotide (ASO), a ribozyme, a DNAzyme, an aptamer, or any combination thereof. In some embodiments, the therapeutic polynucleotide encodes a linear therapeutic polynucleotide or a circular therapeutic polynucleotide.

[0111] In some embodiments, the therapeutic polynucleotide encodes a therapeutic protein (a transgene). In particular embodiments, the transgene encodes a protein selected from the targets suitable for modification or transgene products of TABLE 1.

TABLE 1
Suitable Therapeutic Targets

| | | Target of a Therapeutic |
|---|---|---|
| Primary gene delivery target | Condition | Polynucleotide |
| Brain/CNS | AADC deficiency | AADC |
| | Alzheimer's Disease | Multiple, including APP, SNCA, |
| | | MAPT, ApoE, NGF, TERT |
| | Tauopathies | MAPT |
| | Synucleinopathies | SNCA |
| | Batten disease (CLN2) | CLN2 |
| | Batten disease (CLN3) | CLN3 |
| | Batten disease (CLN6) | CLN6 |
| | MPS-IIIB | NAGLU |
| | Frontotemporal dementia | GRN |
| | with GRN mutations (FTD- | |
| | GRN) | |
| | Parkinson's Disease with | GBA1 |
| | GBA1 mutations (PD- | |
| | GBA) and neuronpathic | |
| | Gaucher's disease | |
| | Synucleinopathies | GBA1 + alpha-synuclein |
| | Gaucher disease type 2 | GBA |
| | Canavan Disease | ASPA |
| | Parkinson disease | AADC |
| | Parkinson disease | GDNF |
| | Parkinson disease | Neurturin |
| | Parkinson disease | GAD |
| | Parkinson disease | ntn |
| | Parkinson disease | hFOXG1 |
| | Parkinson disease | hKCNQ2 |
| | Parkinson disease | hFMR1 |
| | Parkinson disease | anti-Tau/miRNA |
| | Parkinson disease | EPM2A or EPM2B |
| | Parkinson disease | LRRK2 |
| | Parkinson's Disease | LRRK2 |
| | Parkinson's Disease | SNCA |
| | Tay-Sachs Disease | HEXA |
| | Huntington's disease | IT15 |
| | Huntington's disease | CYP46A1 |
| | Huntington's disease | HTT |
| | Protocki-Lupski Syndrome | IT15 |
| | Amyotrophic lateral | C9orf72 |
| | sclerosis | |
| | Amyotrophic lateral | SOD1 |
| | sclerosis | |
| | Down syndrome | DYRK1A |
| | Sanfilippo disease type A | SGSH |
| | Sanfilippo disease type B | hNAGLU |
| | (Nervous system) | HEXB and HEXA |
| | (Nervous system) | human codon-optimized CLN1 |
| | | complementary DNA |
| | (Nervous system) | SURF1 |
| | (Nervous system) | anti-UBE3A-ATS shRNA |
| | (Nervous system) | hSLC6A1 |
| | Rett syndrome | MECP2 |
| Spinal cord | spinal muscular atrophy | SMN |
| | (SMA) | |
| | Giant axonal neuropathy | GAN |
| | Chronic Pain | Nav1.7 |
| | spinocerebellar ataxias | ATXN3 |
| | (SCAs), | |
| Eye | Achromatopsia | CNGB3 |
| | Choroideraemia | REP1 |
| | ad Retinitis Pigmentosa | NRL, RDH12, PRPH2 (RDS), |
| | | RHO, RPGR, SNRNP200, |
| | | NR2E3, IMPDH1, CRX, HK1, |
| | | IMPDH2, SNRNP200 |
| | Stargardt disease | ABCA4 |
| | Usher Syndrome 2A | USH2A |
| | Wet AMD, Dry AMD | NRP1 |
| | Leber congenital amaurosis | RPE65 |
| | (LCA) | |
| | Leber hereditary optic | ND4 |
| | neuropathy (LHON) | |
| | retinitis pigmentosa (RP, | RLBP1 |
| | including RLBP1) | |
| | Wet AMD | Anti-VEGF antibody |
| | X-linked retinitis | RPGR |
| | pigmentosa (X-linked RP) | |
| | X-linked retinoschisis | RS1 |
| Liver | Crigler-Najjar syndrome | UGT1A1 |
| | Familial | LDLR |
| | Hypercholesterolemia (FH | |
| | homozygous) | |
| | Glycogen storage disease | G6PC |
| | type 1A (GSD1a) | |
| | Haemophilia A | FVIII |
| | Haemophilia B | FIX |
| | Mucopolysaccharidosis I | ZFN1, ZFN2 and IDUA donor |
| | (MPS-I) | |
| | Mucopolysaccharidosis II | ZFN1, ZFN2 and IDS donor |
| | (MPS-II) | |
| | Mucopolysaccharidosis | SGSH |
| | IIIA (MPS-IIIA) | |
| | Mucopolysaccharidosis | NAGLU |
| | IIIB (MPS-IIIB) | |
| | Mucopolysaccharidosis VI | ARSB |
| | (MPS-VI) | |
| | hydroxylase deficiency | CYP21A2 |
| | Cardiovascular disease | PCSK9 |
| | Porphyria and Acute | ALAS1 |
| | hepatic porphyria | |
| | Hemochromatosis | HFE |
| | Cholesteryl ester storage | LIPA |
| | disease | |
| | Wilson disease | ATP7B |
| | Adult polyglucosan body- | GBE1 (also muscle cells) |
| | disease | |
| | hepatic steatosis | hSLC13A5 |
| | Alpha-1 antitrypsin | SERPINA1 |
| | deficiency | |
| | Ornithine | OTC |
| | Transcarbamylase | |
| | Deficiency (OTC | |
| | deficiency) | |
| | Alpha-1 antitrypsin | A1AT |
| | deficiency (A1AT | |
| | deficiency) | |
| Muscle | Charcot-Marie-Tooth | NTF3 |
| | disease type 1A (CMT1A) | |
| | Duchenne muscular | Micro-dystrophin |
| | dystrophy (DMD) | |
| | Duchenne muscular | Mini-dystrophin |
| | dystrophy (DMD) | |
| | Dysferlinopathy | DYSF |
| | Pompe disease | GAA |
| | Limb-girdle muscular | FKRP |
| | dystrophies (LGMD) | |
| | (2i/R9) | |
| | Duchenne muscular | DMD |
| | dystrophy (DMD) | |
| | Facioscapulohumeral | DUX4 |
| | Dystrophy | |
| | Myotonic Dystrophy | DMPK |
| | Glycogen storage disorders | anti-GYS1 miRNA |
| | X-linked myotubular | MTM1 |
| | myopathy (X-linked MTM) | |
| | euchromatic histone-lysine | anti-EHMT2 shRNA |
| | N-methyltransferase 2 | |
| Other | (Associated with hearing | TMC1 |
| | loss) | |
| | Obesity (adipose tissue) | CIDEC, SCD1, GNB3 |
| | Bone (osteoclasts) | CLCN7 |
| | Chondrocytes | FGFR3 |
| | Primary Hyperoxaluria | HAO1 |
| | Type 1 (kidney) | |
| | Primary Hyperoxaluria | LDHA |
| | (kidney) | |
| | Acromegaly (multi-organ) | GHR |
| | Asthma (WBCs; | Mex3B |
| | neutrophils, eosinophils) | |
| | Alport syndrome (kidney) | COL4A5 |
| | Transthyretin amyloidosis | TTR |
| | (familial) (multi-organ) | |
| | Charcot-Marie Tooth | PMP22 |
| | Syndrome (PNS/Sciatic | |
| | Nerve; Schwann Cells) | |
| | Angelman syndrome | UBE3A |
| | (nervous system) | |
| | Congestive heart failure | I-1c |
| | (heart) | |
| | Methylmalonic acidemia | MMUT, MMAA, MMAB, |
| | (MMA) (Kidneys) | MMADHC, MCEE |
| | Cystic fibrosis (lung) | CFTR |
| | HIV infections | PG9 antibody |
| | HIV infections | VRC07 antibody |
| Anemia-related disorders | Hemophilia | F8 (Factor VIII), F9 (Factor IX) |
| Sickle-cell related disorders | sickle cell anemia | HBB |
| | sickle cell hemoglobin C | Hemoglobin |
| | disease | |
| | sickle cell thalassemia | beta thalassemia |
| | disease | |

[0112] In some embodiments, the therapeutic polynucleotide encodes a therapeutic RNA. In some embodiments the therapeutic polynucleotide encodes an RNA, such as a guide RNA (including an engineered or synthetic guide RNA) for genome editing or for RNA editing.

[0113] In some embodiments, the therapeutic polynucleotide encodes a tRNA or a modified tRNA (engineered or synthetic tRNA). For example, the tRNA or modified tRNA can be a suppressor tRNA. The suppressor tRNA can be engineered to have an anticodon region that recognizes a stop codon, such as any premature stop codon (opal, ochre, or amber stop codons).

[0114] In some embodiments, the therapeutic polynucleotide (e.g., a therapeutic RNA, a tRNA, or a genome modifying entity) can target a gene listed in TABLE 1 or any gene associated with a neurologic disease, Parkinson's disease, Alzheimer's disease, a Tauopathy. Stargardt disease, alpha-1 antitrypsin deficiency, Duchenne's muscular dystrophy, Rett syndrome, cystic fibrosis, or any genetic disease. In some embodiments, the targeted gene may be ABCA4, AAT, SERPINA1, SERPINA1 E342K, HEXA, LRRK2, SNCA, DMD, APP, Tau, GBA, PINK1, RAB7A, CFTR, ALAS1, ATP7B, ATP7B G1226R, HFE C282Y, LIPA c.894 G>A, PCSK9 start site, or SCNN1A start site, a fragment any of these, or any combination thereof. In some embodiments, the therapeutic polynucleotide is a gene therapy payload (e.g., a transgene) and, thus, may itself be one of the genes listed in TABLE 1 or any gene associated with a neurologic disease, Parkinson's disease, Alzheimer's disease, a Tauopathy, Stargardt disease, alpha-1 antitrypsin deficiency, Duchenne's muscular dystrophy, Rett syndrome, cystic fibrosis, or any genetic disease. In some embodiments, the transgene may be ABCA4, AAT, SERPINA1, SERPINA1 E342K, HEXA, LRRK2, SNCA, DMD. APP, Tau, GBA, PINK1, RAB7A, CFTR, ALAS1, ATP7B, ATP7B G1226R, HFE C282Y, LIPA c.894 G>A, PCSK9 start site, or SCNN1A start site, a fragment any of these, or any combination thereof.

[0115] In some embodiments, the therapeutic polynucleotide encodes genome modifying entities. For example, a genome modifying entity may be a DNA editing enzyme, an RNA editing enzyme, a transcriptional activator, or a transcriptional repressor. The DNA editing enzyme may be any DNA editing enzyme, including any CRISPR/Cas systems, meganucleases, zinc-finger nucleases, (ZFNs). TALE Nucleases (TALENs and megaTALENS). The CRISPR/Cas system can be a Cas3, Cas8, Cas10, Cas9, Cas4, Cas12, or Cas13. The RNA editing enzyme may be ADAR. In some embodiments, the ADAR is a human ADAR1 or human ADAR2. The transcriptional activator may be VP64. A transcriptional repressor may be KRAB. Such genome modifying entities may target any gene listed in TABLE 1 for editing.

[0116] In some embodiments, the present disclosure provides for rAAV virions having an engineered AAV VP capsid polypeptide, where the virion encapsidates any one of or any combination of the therapeutic payloads disclosed herein. In some embodiments, multiple copies of the therapeutic payload are encapsidated.

[0117] In some embodiments, the therapeutic polynucleotide is a polynucleotide capable of serving as a homology template for homology-directed repair.

[0118] In some embodiments, an rAAV virion of the present disclosure, having any of the engineered AAV VP capsid polypeptide sequences disclosed herein, comprises a vector genome, the vector genome comprising a detectable polynucleotide or payload. In further embodiments, said payload may be under control of regulatory sequences that direct expression in infected human cells. Examples of detectable polynucleotides include, but are not limited to, any genetically encodable detectable moiety. For example, a genetically encodable detectable moiety may be a fluorescent protein such as EGFP, GFP, YFP, RFP, CFP, or any variants thereof. In some embodiments, the present disclosure provides for rAAV virions having an engineered AAV VP capsid polypeptide, where the virion encapsidates any one of or any combination of the detectable payloads disclosed herein. In some embodiments, multiple copies of the detectable payload are encapsidated.

[0119] In some embodiments, the present disclosure provides for rAAV virions having an engineered AAV VP capsid polypeptide, where the virion encapsidates any one of or any combination of the therapeutic payloads and detectable payloads disclosed herein. For example, an rAAV of the present disclosure having an engineered AAV VP capsid polypeptide may encapsidate a transgene and a fluorescent protein. As another example, an rAAV of the present disclosure having an engineered AAV VP capsid polypeptide may encapsidate a therapeutic RNA (e.g., a guide RNA) and a fluorescent protein.

[0120] 6.7. In Vivo Selected VP Polypeptides

[0121] In a further aspect, engineered (synonymously, recombinant) adeno-associated virus (AAV) VP capsid polypeptides identified using the methods described herein are provided.

[0122] In some embodiments, the engineered adeno-associated virus (AAV) viral protein (VP) capsid polypeptide has an amino acid sequence at least 70% identical to SEQ ID NO: 1, wherein the engineered AAV VP capsid polypeptide has at least one substitution as compared to SEQ ID NO: 1 in the region from residue 581 to residue 589 of SEQ ID NO: 1, inclusive, wherein the capsid polypeptide is capable of assembling into a recombinant AAV virion (rAAV), and wherein the VP capsid polypeptide does not have the sequence of any of SEQ ID NO: 3, SEQ ID NO: 4, SEQ ID NO: 5, SEQ ID NO: 6, SEQ ID NO: 7, and SEQ ID NO: 8.

[0123] In some embodiments, the engineered adeno-associated virus (AAV) viral protein (VP) capsid polypeptide has an amino acid sequence at least 70% identical to SEQ ID NO: 1, wherein the engineered AAV VP capsid polypeptide has at least one substitution as compared to SEQ ID NO: 1 in the region from residue 581 to residue 589 of SEQ ID NO: 1, inclusive, wherein the capsid polypeptide is capable of assembling into a recombinant AAV virion (rAAV), wherein the at least one substitution confers higher tropism for a central nervous system (CNS) tissue on the rAAV as compared to an rAAV virion having an AAV5 VP capsid polypeptide of SEQ ID NO: 1, and wherein the VP capsid polypeptide does not have the sequence of any of SEQ ID NO: 3, SEQ ID NO: 4, SEQ ID NO: 5, SEQ ID NO: 6, SEQ ID NO: 7, and SEQ ID NO: 8.

[0124] In particular embodiments, the engineered adeno-associated virus (AAV) viral protein (VP) capsid polypeptide has an amino acid sequence at least 75%, 80%, 85%, 90%, 91%, 92%, 93%, 94%, 95%, 96%, 97%, 98% identical to the sequence of SEQ ID NO: 1.

[0125] In some embodiments, the AAV VP capsid polypeptide has an amino acid sequence of SEQ ID NO: 2, wherein Xaa1, Xaa2, Xaa3, Xaa4, Xaa5, Xaa6, Xaa7, Xaa8, and Xaa9 are each independently selected from any amino acid, wherein the capsid polypeptide is capable of assembling into a recombinant AAV virion (rAAV), and wherein the VP capsid polypeptide does not have the sequence of any of SEQ ID NO: 3, SEQ ID NO: 4, SEQ ID NO: 5, SEQ ID NO: 6, SEQ ID NO: 7, and SEQ ID NO: 8, optionally with further mutations elsewhere in the VP capsid polypeptide

[0126] In some embodiments, the AAV VP capsid polypeptide has an amino acid sequence of SEQ ID NO: 2, wherein Xaa1, Xaa2, Xaa3, Xaa4, Xaa5, Xaa6, Xaa7, Xaa8, and Xaa9 are each independently selected from any amino acid, wherein the capsid polypeptide is capable of assembling into a recombinant AAV virion (rAAV), wherein the at least one substitution confers higher tropism for a central nervous system (CNS) tissue on the rAAV as compared to an rAAV virion having an AAV5 VP capsid polypeptide of SEQ ID NO: 1, and wherein the VP capsid polypeptide does not have the sequence of any of SEQ ID NO: 3. SEQ ID NO: 4, SEQ ID NO: 5, SEQ ID NO: 6, SEQ ID NO: 7, and SEQ ID NO: 8, optionally with further mutations elsewhere in the VP capsid polypeptide

[0127] In some embodiments, the engineered adeno-associated virus (AAV) viral protein (VP) capsid polypeptide has an amino acid sequence of SEQ ID NO: 2, wherein amino acid residues Xaa1, Xaa2, Xaa3, Xaa4, Xaa5, Xaa6, Xaa7, Xaa8, and Xaa9 are each independently selected from A, R, N, D, C, E, Q, G, H, I, L, K, M, F, P, S, T, W, Y, and V; wherein the engineered AAV VP capsid polypeptide is capable of assembling into a recombinant AAV virion (rAAV); and wherein the rAAV VP capsid polypeptide does not have the sequence of any of SEQ ID NO: 1, SEQ ID NO: 3, SEQ ID NO: 4, SEQ ID NO: 5, SEQ ID NO: 6, SEQ ID NO: 7, and SEQ ID NO: 8.

[0128] In some embodiments, the region of the engineered VP capsid polypeptide from residue 581 to residue 589, inclusive, has a sequence that is at least 70%, at least 75%, at least 80%, at least 85%, at least 90%, at least 91%, at least 92%, at least 93%, at least 94%, at least 95%, at least 96%, at least 97%, at least 98%, or at least 99% identical to any one of SEQ ID NO:7118-SEQ ID NO:10,117. In particular embodiments, the region of the engineered VP capsid polypeptide from residue 581 to residue 589, inclusive, has a sequence that is identical to any one of SEQ ID NO:7118-SEQ ID NO:10,117.

[0129] In some embodiments, the engineered adeno-associated virus (AAV) viral protein (VP) capsid polypeptide is an engineered AAV5 viral capsid protein, wherein the engineered AAV VP5 capsid polypeptide has at least one substitution as compared to SEQ ID NO: 1 in the region from residue 581 to residue 589 of SEQ ID NO: 1, inclusive; wherein the capsid polypeptide is capable of assembling into a recombinant AAV virion (rAAV); wherein the at least one substitution confers higher tropism for a central nervous system (CNS) tissue on the rAAV as compared to an rAAV virion having an AAV5 VP capsid polypeptide of SEQ ID NO: 1, and wherein the VP capsid polypeptide does not have the sequence of any of SEQ ID NO: 3, SEQ ID NO: 4, SEQ ID NO: 5, SEQ ID NO: 6, SEQ ID NO: 7, and SEQ ID NO: 8, optionally with further mutations elsewhere in the VP protein.

[0130] In some embodiments, the AAV VP capsid polypeptides have an amino acid sequence of SEQ ID NO: 2, wherein Xaa1, Xaa2, Xaa3, Xaa4, Xaa5, Xaa6, Xaa7, Xaa8, and Xaa9 are each independently selected from A, R, N, D, C, E, Q, G, H, I, L, K, M, F, P, S, T, W, Y, and V; and wherein the polypeptide does not have the sequence of any of SEQ ID NO: 1, SEQ ID NO: 3, SEQ ID NO: 4, SEQ ID NO: 5, SEQ ID NO: 6, SEQ ID NO: 7, and SEQ ID NO: 8.

[0131] In some embodiments, the engineered AAV VP capsid polypeptide comprises a polypeptide sequence represented by the formula: (A)-(X)-(B)

[0132] wherein:

[0133] (A) is the polypeptide sequence of SEQ ID NO: 47438

(VAYNVGGQMATNNQSSTTAP residues 561-580 of SEQ ID
NO: 2);

[0134] (X) is the polypeptide sequence comprising amino acid residues Xaa1, Xaa2, Xaa3, Xaa4, Xaa5, Xaa6, Xaa7, Xaa8, and Xaa9 of SEQ ID NO: 2; and

[0135] (B) is the polypeptide sequence of SEQ ID NO:47439 (IVPGSVWMERDVYLQGPIWA residues 590-609 of SEQ ID NO: 2;

[0136] wherein Xaa1, Xaa2, Xaa3, Xaa4, Xaa5, Xaa6, Xaa7, Xaa8, and Xaa9 are each independently selected from A, R, N, D, C, E, Q, G, H, I, L, K, M, F, P, S, T, W, Y, and V; and wherein the capsid polypeptide is capable of assembling into a recombinant AAV virion (rAAV); and;

[0137] wherein the polypeptide does not have the sequence of any of SEQ ID NO:1, SEQ ID NO:3, SEQ ID NO:4. SEQ ID NO:5, SEQ ID NO:6, SEQ ID NO:7, and SEQ ID NO:8.

[0138] In some embodiments, the engineered AAV VP capsid polypeptide comprises a polypeptide sequence represented by the formula: (A)-(X)-(B) wherein:

[0139] (A) is the polypeptide sequence of SEQ ID NO: 47438

(residues 561-580 of SEQ ID NO: 2 VAYNVGGQMATNNQSST
TAP);

[0140] (X) is a polypeptide sequence selected from the list of polypeptides in Table 8 (SEQ ID NOs:115-1114) or Table 10 (SEQ ID NOs: 7118-8117) that confers CNS tissue tropism on a recombinant AAV virion (rAAV); and

[0141] (B) is the polypeptide sequence of SEQ ID NO: 47439 (residues 590-609 of SEQ ID NO: 2: (IVPGSVWMERDVYLQGPIWA)); and

[0142] wherein the capsid polypeptide is capable of assembling into the rAAV and,

[0143] the capsid does not have the sequence of any of SEQ ID NO:1, SEQ ID NO:3, SEQ ID NO:4, SEQ ID NO:5, SEQ ID NO:6, SEQ ID NO:7, and SEQ ID NO:8.

[0144] In some embodiments, the engineered AAV VP capsid polypeptide confers CNS tissue tropism, wherein the CNS tissue is selected from the group consisting of hippocampus: (dentate gyrus. CA1 and CA3); cerebellum, hypothalamus, cortex: (occipital, temporal and forebrain); substantia nigra, thalamus, and any combination thereof.

[0145] In some embodiments, the engineered AAV VP capsid polypeptide comprises a polypeptide sequence represented by the formula: (A)-(X)-(B) wherein:

[0146] (A) is the polypeptide sequence of SEQ ID NO: 47438 (residues 561-580 of SEQ ID NO: 2: (VAYNVGGQMATNNQSSTTAP));

[0147] (X) is a polypeptide sequence selected from the polypeptides of SEQ ID NO: 115-1114 or SEQ ID NO: 1118-47437 that confer corresponding tissue tropism on a recombinant AAV virion (rAAV); and

[0148] (B) is the polypeptide sequence of SEQ ID NO: 47439 (residues 590-609 of SEQ ID NO: 2: (IVPGSVWMERDVYLQGPIWA)); and

[0149] wherein the capsid polypeptide is capable of assembling into the rAAV and,

[0150] the capsid does not have the sequence of any of SEQ ID NO:1, SEQ ID NO:3, SEQ ID NO:4, SEQ ID NO:5, SEQ ID NO:6, SEQ ID NO:7, and SEQ ID NO:8.

[0151] Described below are engineered mutated AAV5 VP1 polypeptide sequences that confer stable or improved virion assembly, tissue tropism, or both. In some embodiments, the present disclosure provides an AAV5 VP1 capsid polypeptide having a sequence homology of no more than 98.7% to SEQ ID NO: 1, wherein the AAV5 capsid polypeptide sequence has at least one mutation in a region from a position corresponding to 581 to a position corresponding to 589 of SEQ ID NO: 1.

[0152] Also encompassed herein are rAAVs composed of engineered AAV5 VP2 capsid polypeptides and engineered AAV5 VP3 capsid polypeptides having the sequences disclosed in the Tables of the Examples (e.g., Table 7, 10, 12, 14, 16, 18, 20, 22, 24, 26, 28, 30, 32, 34, 36, 39, 41, 43, 45, 47, 49, 51, 53, 55, 57, 59, 61, 63, 65, 67, 69, 71, 72, 73, 74, 75, 76, 77, 78, 79, 80, 81, 82, 83, 84, 85, and 86) at the regions in AAV5 VP2 (amin acid residues 445 to 453) and AAV5 VP3 (amino acid residues 389-397) corresponding to the amino acids in the AAV5 VP1 581 to 589 region.

[0153] 6.7.1. In Vivo Selected VP Polypeptides that Confer Increased Liver Tropism

[0154] In various embodiments, the present disclosure provides a mutated VP polypeptide capable of forming an assembled virion that exhibits increased tropism for liver tissue when compared to a virion that comprises the AAV5 VP1 capsid polypeptide of SEQ ID NO: 1. In this section of the disclosure, liver tissue tropism is determined by the frequency of a given amino acid residue occurring at a specified position corresponding to position 581 to position 589 of SEQ ID NO: 1 (generalized in SEQ ID NO: 2) over the frequency of that given amino acid residue in the total library of virus administered to NHP.

[0155] In some embodiments, Xaa1 is selected from A, G, K, M, N, Q, R, S, or T.

[0156] In some embodiments, Xaa1 is selected from A, K, M, or T.

[0157] In some embodiments, Xaa1 is K.

[0158] In additional embodiments, Xaa2 is selected from A, C, H, I, K, S, T, or V.

[0159] In some embodiments, Xaa2 is selected from A, S, T, or V.

[0160] In some embodiments, Xaa2 is T.

[0161] In additional embodiments, Xaa3 is selected from A, G, H, K, M, N, Q, R, S, T, or V.

[0162] In some embodiments, Xaa3 is selected from A, M, or T.

[0163] In some embodiments. Xaa3 is A or T.

[0164] In additional embodiments, Xaa4 is selected from L, M, P, Q, R, T, or W.

[0165] In some embodiments, Xaa4 is selected from L, P, Q, or T.

[0166] In some embodiments, Xaa4 is P.

[0167] In additional embodiments, Xaa5 is selected from F, H, I, K, M, T, or Y.

[0168] In some embodiments, Xaa5 is selected from H, I, or Y.

[0169] In some embodiments, Xaa5 is Y.

[0170] In additional embodiments, Xaa6 is selected from E, G, H, L, M, N, Q, T, or W.

[0171] In some embodiments, Xaa6 is selected from N, or Q.

[0172] In some embodiments, Xaa6 is N.

[0173] In additional embodiments, Xaa7 is selected from A, C, G, H, L, M, R or S.

[0174] In some embodiments, Xaa7 is selected from A, C, H or M.

[0175] In some embodiments, Xaa7 is A.

[0176] In additional embodiments, Xaa8 is selected from A, C, D, F, G, H, M, Q, S, V, W, or Y.

[0177] In some embodiments, Xaa8 is selected from G, M, Q, or S.

[0178] In some embodiments, Xaa8 is G.

[0179] In additional embodiments, Xaa9 is selected from A, C, E, G, H, M, N, P, Q, S, V, or W.

[0180] In some embodiments, Xaa9 is selected from E, G, or P.

[0181] In some embodiments, Xaa9 is G.

[0182] In particular embodiments, the sequence of Xaa1-Xaa9 of the engineered (recombinant) capsid polypeptide is selected from the amino acid sequence provided in TABLE 2.

[0183] In some embodiments, the engineered AAV capsid and corresponding virion exhibits increased liver tropism, when compared with AAV5 wildtype capsid and corresponding virion. This increased tropism can range from about 1.5, 2.0, 2.5, 3.0, 3.5, 4.0, 4.5, 5.0, 5.5, 6.0, 6.5, 7.0, 7.5, 8.0, 8.5, 9.0, 9.5, to about 10.0-fold when compared to a virion that comprises the AAV5 VP1 capsid polypeptide of SEQ ID NO: 1.

TABLE 2
Sequences of the 581 to 589 Region in
AAV5 VP1 Capsid Polypeptide that Drive
Liver Tropism

| Var # | Translation |
|---|---|
| SEQ ID NO: 10 | IAVASHAHG |
| SEQ ID NO: 11 | SAYPKSEDV |
| SEQ ID NO: 12 | SSMQCAMRP |
| SEQ ID NO: 13 | ITVVVGEVN |
| SEQ ID NO: 14 | SEAGDRCSD |
| SEQ ID NO: 15 | ECACGHVHL |
| SEQ ID NO: 16 | TFTNAGKMC |
| SEQ ID NO: 17 | LASPYLIDA |
| SEQ ID NO: 18 | TTQLYEVGS |
| SEQ ID NO: 19 | TVHPIDHAT |
| SEQ ID NO: 20 | TWMMVHRYV |
| SEQ ID NO: 21 | WVYRCDVRH |
| SEQ ID NO: 22 | HWADKALDW |
| SEQ ID NO: 23 | MHTMKNCGW |
| SEQ ID NO: 24 | LCNRMQADQ |
| SEQ ID NO: 25 | WKATPGGQC |
| SEQ ID NO: 26 | ARETTPYQT |
| SEQ ID NO: 27 | MHMSYHWRE |
| SEQ ID NO: 28 | MPKAEIFVP |
| SEQ ID NO: 29 | DKTICQHQL |
| SEQ ID NO: 30 | TTRGSERCS |
| SEQ ID NO: 31 | HTPLAWHGD |
| SEQ ID NO: 32 | SCIPFQQHG |
| SEQ ID NO: 33 | AHQLAMVMN |
| SEQ ID NO: 34 | AAAQRSRYV |
| SEQ ID NO: 35 | DCMTSMLGP |
| SEQ ID NO: 36 | RYLFAVWRY |
| SEQ ID NO: 37 | MMNMQMDRM |
| SEQ ID NO: 38 | AVQWIQWVG |
| SEQ ID NO: 39 | QSQPHVQYN |
| SEQ ID NO: 40 | THIFAYENN |
| SEQ ID NO: 41 | GWQDEQMHL |
| SEQ ID NO: 42 | TSKQETPQQ |
| SEQ ID NO: 43 | CSNSPACLC |
| SEQ ID NO: 44 | VDAHLETNG |
| SEQ ID NO: 45 | CNEKEYEWH |
| SEQ ID NO: 46 | IADIGRMQW |
| SEQ ID NO: 47 | TEWPYGVAF |
| SEQ ID NO: 48 | QCQYQTAWW |
| SEQ ID NO: 49 | GPSGIFHCG |
| SEQ ID NO: 50 | MAHAIDALQ |
| SEQ ID NO: 51 | MHHCYQTFA |
| SEQ ID NO: 52 | GQTVFHYDG |
| SEQ ID NO: 53 | CNAIIAMPC |
| SEQ ID NO: 54 | GTITLMPTQ |
| SEQ ID NO: 55 | TVQCEMDVC |
| SEQ ID NO: 56 | CQHNTPFVQ |
| SEQ ID NO: 57 | RWTDTNFRG |
| SEQ ID NO: 58 | KYEQKWMMD |
| SEQ ID NO: 59 | MLYSTTCWK |
| SEQ ID NO: 60 | ASWVGSFAQ |
| SEQ ID NO: 61 | TTKQYHTME |
| SEQ ID NO: 62 | PGGCYRMME |
| SEQ ID NO: 63 | RNAVCLYRH |
| SEQ ID NO: 64 | VIHEMLSAC |
| SEQ ID NO: 65 | YGEQKYNHS |
| SEQ ID NO: 66 | ANQWENAVK |
| SEQ ID NO: 67 | TSAWWWCSP |
| SEQ ID NO: 68 | EQTMMDLVY |
| SEQ ID NO: 69 | YAMPRNPNV |
| SEQ ID NO: 70 | MHKVWWMKN |
| SEQ ID NO: 71 | AILQMYTAQ |
| SEQ ID NO: 72 | CSTPANSCP |
| SEQ ID NO: 73 | KVVEAELWQ |
| SEQ ID NO: 74 | IANIDPSRV |
| SEQ ID NO: 75 | QLTTTKPLR |
| SEQ ID NO: 76 | ACWRFECDD |
| SEQ ID NO: 77 | QINPEHGGC |
| SEQ ID NO: 78 | MAPPFHVYE |
| SEQ ID NO: 79 | DNWGTWTWT |
| SEQ ID NO: 80 | DESSCVAHG |
| SEQ ID NO: 81 | VAATFNNKV |
| SEQ ID NO: 82 | EVVPFPWAF |
| SEQ ID NO: 83 | TQMPALAEW |
| SEQ ID NO: 84 | NVTNQQYDH |
| SEQ ID NO: 85 | NMTEYVAYR |
| SEQ ID NO: 86 | NVSTVHQPL |
| SEQ ID NO: 87 | QTGPMTHSW |
| SEQ ID NO: 88 | ECMEKHASY |
| SEQ ID NO: 89 | LQAHVVRCT |
| SEQ ID NO: 90 | VGDRYSSMG |
| SEQ ID NO: 91 | PQGLIPMWA |
| SEQ ID NO: 92 | MYVHKGYRS |
| SEQ ID NO: 93 | AVPQYQKAE |
| SEQ ID NO: 94 | ERMMILCSP |
| SEQ ID NO: 95 | NFGFTCPVY |
| SEQ ID NO: 96 | SQIWNVAAY |
| SEQ ID NO: 97 | MWGQQGTWA |
| SEQ ID NO: 98 | QAMMMTMMN |
| SEQ ID NO: 99 | AHTANEFSP |
| SEQ ID NO: 100 | DAHYVYEKG |
| SEQ ID NO: 101 | CNNWIWAHE |
| SEQ ID NO: 102 | NHNLMWVVS |
| SEQ ID NO: 103 | ATMWGDCDY |
| SEQ ID NO: 104 | EWMQEFAGP |
| SEQ ID NO: 105 | QDGSVEWAF |
| SEQ ID NO: 106 | WCPQPPGGN |
| SEQ ID NO: 107 | AECQIWYDW |
| SEQ ID NO: 108 | NAVKFVCED |
| SEQ ID NO: 109 | TQCFASCVA |
| SEQ ID NO: 110 | TVNNHDIGY |

[0184] 6.7.2. In Vivo Selected Engineered VP Polypeptides that are Competent for Assembly into rAAV

[0185] In various preferred embodiments, the mutated (engineered, recombinant) VP capsid polypeptides of the present disclosure are capable of forming an assembled virion, and in some instances that exhibit similar or improved stability when compared to a virion that comprises the AAV5 VP1 capsid polypeptide of SEQ ID NO: 1.

[0186] The frequency of a given amino acid residue occurring in assembled, purified viruses at a specified position corresponding to position 581 to position 589 of SEQ ID NO: 1 (generalized in SEQ ID NO: 2) over the frequency of that given amino acid residue occurring at the specified position in the entire plasmid library was analyzed to identify sequence rules for capsids that preferentially virally assembly.

[0187] Disclosed herein are engineered AAV5 VP capsid polypeptides capable of forming an assembled virion that may exhibit similar or improved stability as compared to wildtype AAV5 VP capsid polypeptide, wherein the engineered variant AAV5 VP capsid polypeptide sequence has one or more mutations, wherein the VP1 polypeptide sequence has said one or more mutations in a region from a position corresponding to 581 in SEQ ID NO: 2 to a position corresponding to 589 in SEQ ID NO: 2 and wherein Xaa1 is selected from A, D, E, G, L, M, N, Q, S, T, or V, or Xaa1 is selected from A, D, E, M, or T. In some embodiments, Xaa1 is E; or Xaa2 is selected from A, C, D, E, G, H, I, N, P, Q, S, T, or V. or Xaa2 is selected from A, S, T, or V, or Xaa2 is A; or wherein Xaa3 is selected from A, D, E, G, H, M, N, Q, S, T, or V, or Xaa3 is selected from D, E, N, Q or T, or Xaa3 is D or T; or wherein Xaa4 is selected from A, D, E, G, H, N, P, Q, S, or T, or Xaa4 is selected from D, E, P, or Q, or Xaa4 is E; or wherein Xaa5 is selected from A, C, D, E, G, H, N, Q, S, T, or Y, or Xaa5 is selected from D, E, N, Q or T, or Xaa5 is N; or wherein Xaa6 is selected from A, D, E, G, H, N, P, Q, S, or T, or Xaa6 is selected from D, N, or Q, or Xaa6 is D; or wherein Xaa7 is selected from A, C, D, E, G, H, N, Q, S, or T, or Xaa7 is selected from A, D, E or G, or Xaa7 is A; or wherein Xaa8 is selected from A, C, D, E, G, H, N, Q, S, or T, or Xaa8 comprises A, D, G, or S, or Xaa8 is G; or wherein Xaa9 is selected from A, D, E, G, H, N, P, Q, S, or T, or Xaa9 is selected from A, D, G, or P, or Xaa9 is G.

[0188] In various embodiments, the VP polypeptide is capable of forming an assembled virion, and in some instances exhibits similar or improved stability when compared to a virion that comprises the AAV5 VP1 capsid polypeptide of SEQ ID NO:1.

[0189] In some embodiments, Xaa1 is selected from A, D, E, G, L, M, N, Q, S, T, or V.

[0190] In some embodiments, Xaa1 is selected from A, D, E, M, or T. In some embodiments, Xaa1 is E.

[0191] In some embodiments, Xaa2 is selected from A, C, D, E, G, H, I, N, P, Q, S, T, or V. In some embodiments, Xaa2 is selected from A, S, T, or V. In some embodiments, Xaa2 is A.

[0192] In some embodiments, Xaa3 is selected from A, D, E, G, H, M, N, Q, S, T, or V. In some embodiments, Xaa3 is selected from D, E, N, Q or T. In some embodiments, Xaa3 is D or T.

[0193] In some embodiments, Xaa4 is selected from A, D, E, G, H, N, P, Q, S, or T. In some embodiments, Xaa4 is selected from D, E, P, or Q. In some embodiments, Xaa4 is E.

[0194] In some embodiments, Xaa5 is selected from A, C, D, E, G, H, N, Q, S, T, or Y. In some embodiments, Xaa5 is selected from D, E, N, Q or T. In some embodiments, Xaa5 is N.

[0195] In some embodiments, Xaa6 is selected from A, D, E, G, H, N, P, Q, S, or T. In some embodiments, Xaa6 is selected from D, N, or Q. In some embodiments, Xaa6 is D.

[0196] In some embodiments. Xaa7 is selected from A, C, D, E, G, H, N, Q, S, or T. In some embodiments, Xaa7 is selected from A, D, E or G. In some embodiments, Xaa7 is A.

[0197] In some embodiments, Xaa8 is selected from A, C, D, E, G, H, N, Q, S, or T. In some embodiments, Xaa8 comprises A, D, G, or S. In some embodiments, Xaa8 is G.

[0198] In some embodiments, Xaa9 is selected from A, D, E, G, H, N, P, Q, S, or T. In some embodiments, Xaa9 is selected from A, D, G, or P. In some embodiments, Xaa9 is G.

[0199] 6.7.3. In Vivo Selected Mutated VP Polypeptides that are Competent for Assembly into rAAV Virions and Exhibit Decreased Liver Tropism

[0200] The present disclosure provides AAV5 virions with a VP capsid polypeptide having at least one mutation in a region with residues that interact with target cells, where the at least one mutation confers decreased liver tissue tropism as compared to a wildtype VP capsid polypeptide. In some embodiments, provided herein are AAV5 VP1 capsid polypeptide having a sequence homology of at least 80% to SEQ ID NO: 1, wherein the AAV5 VP1 capsid polypeptide has at least one mutation in a region from a position corresponding to 581 to a position corresponding to 589 of SEQ ID NO: 1 and wherein said at least one mutation drives decreased liver tropism.

[0201] The frequency of a given amino acid residue occurring at a specified position corresponding to position 581 to position 589 of SEQ ID NO: 1 (generalized in SEQ ID NO: 2) in variants not identified in liver over the frequency of that given amino acid residue occurring at the specified position in variants forming assembled virus was analyzed to identify a set of sequence rules for capsids that preferentially detarget liver tissue.

[0202] Disclosed herein are engineered AAV5 VP capsid polypeptides capable of forming an assembled virion that exhibits decreased liver tissue tropism as compared to wildtype AAV5 VP capsid polypeptide, wherein the engineered variant AAV5 VP capsid polypeptide sequence has one or more mutations, wherein the VP1 polypeptide sequence has said one or more mutations in a region from a position corresponding to 581 in SEQ ID NO: 2 to a position corresponding to 589 in SEQ ID NO: 2 and wherein Xaa1 is not K, or Xaa1 is not A, K, M, or T, or Xaa1 is not A, G, K, M, N, Q, R, S, or T; or wherein Xaa2 is not T, or Xaa2 is not A, S, T, or V, or Xaa2 is not A, C, H, I, K, S, T, or V; or wherein Xaa3 is not A or T, or Xaa3 is not A, M, or T, or Xaa3 is not A, G, H, K, M, N, Q, R, S, T, or V; or wherein Xaa4 is not P, or wherein Xaa4 is not L, P, Q, or T, or Xaa4 is not L, M, P, Q, R, T, or W; or wherein Xaa5 is not Y, or Xaa5 is not H, I, or Y, or Xaa5 is not F, H, I, K, M, T, or Y; or wherein Xaa6 is not N, or Xaa6 is not N, or Q, or Xaa6 is not E, G, H, L, M, N, Q, T, or W; or wherein Xaa7 is not A, or Xaa7 is not A, C, H or M, or Xaa7 is not A, C, G, H, L, M, R or S; or wherein Xaa8 is not G, or Xaa8 is not G, M, Q, or S, or Xaa8 is not A, C, D, F, G, H, M, Q, S, V, W, or Y; or wherein Xaa9 is not G, or Xaa9 is not E, G, or P, or Xaa9 is not A, C, E, G, H, M, N, P, Q, S, V, or W.

[0203] In certain embodiments, Xaa1 is not K, and wherein the VP capsid is capable of forming an assembled virion that exhibits decreased tropism for liver tissue when compared to a virion that comprises the AAV5 VP1 capsid of SEQ ID NO: 1.

[0204] In certain embodiments, Xaa1 is not A, K, M, or T, and wherein the VP capsid is capable of forming an assembled virion that exhibits decreased tropism for liver tissue when compared to a virion that comprises the AAV5 VP1 capsid of SEQ ID NO:1.

[0205] In certain embodiments, Xaa1 is not A, G, K, M, N, Q, R, S, or T, and wherein the VP capsid is capable of forming an assembled virion that exhibits decreased tropism for liver tissue when compared to a virion that comprises the AAV5 VP1 capsid of SEQ ID NO:1.

[0206] In certain embodiments, Xaa2 is not T, and wherein the VP capsid is capable of forming an assembled virion that exhibits decreased tropism for liver tissue when compared to a virion that comprises the AAV5 VP1 capsid of SEQ ID NO:1.

[0207] In certain embodiments, Xaa2 is not A, S, T, or V, and wherein the VP capsid is capable of forming an assembled virion that exhibits decreased tropism for liver tissue when compared to a virion that comprises the AAV5 VP1 capsid of SEQ ID NO:1.

[0208] In certain embodiments, Xaa2 is not A, C, H, I, K, S, T, or V, and wherein the VP capsid is capable of forming an assembled virion that exhibits decreased tropism for liver tissue when compared to a virion that comprises the AAV5 VP1 capsid of SEQ ID NO:1.

[0209] In certain embodiments, Xaa3 is not A or T, and wherein the VP capsid is capable of forming an assembled virion that exhibits decreased tropism for liver tissue when compared to a virion that comprises the AAV5 VP1 capsid of SEQ ID NO:1.

[0210] In certain embodiments, Xaa3 is not A, M, or T, and wherein the VP capsid is capable of forming an assembled virion that exhibits decreased tropism for liver tissue when compared to a virion that comprises the AAV5 VP1 capsid of SEQ ID NO:1.

[0211] In certain embodiments, Xaa3 is not A, G, H, K, M, N, Q, R, S, T, or V, and wherein the VP capsid is capable of forming an assembled virion that exhibits decreased tropism for liver tissue when compared to a virion that comprises the AAV5 VP1 capsid of SEQ ID NO:1.

[0212] In certain embodiments, Xaa4 is not P, and wherein the VP capsid is capable of forming an assembled virion that exhibits decreased tropism for liver tissue when compared to a virion that comprises the AAV5 VP1 capsid of SEQ ID NO:1.

[0213] In certain embodiments, wherein Xaa4 is not L, P, Q, or T. and wherein the VP capsid is capable of forming an assembled virion that exhibits decreased tropism for liver tissue when compared to a virion that comprises the AAV5 VP1 capsid of SEQ ID NO:1.

[0214] In certain embodiments, Xaa4 is not L, M, P, Q, R, T, or W, and wherein the VP capsid is capable of forming an assembled virion that exhibits decreased tropism for liver tissue when compared to a virion that comprises the AAV5 VP1 capsid of SEQ ID NO:1.

[0215] In certain embodiments, Xaa5 is not Y. and wherein the VP capsid is capable of forming an assembled virion that exhibits decreased tropism for liver tissue when compared to a virion that comprises the AAV5 VP1 capsid of SEQ ID NO:1.

[0216] In certain embodiments, Xaa5 is not H, I, or Y, and wherein the VP capsid is capable of forming an assembled virion that exhibits decreased tropism for liver tissue when compared to a virion that comprises the AAV5 VP1 capsid of SEQ ID NO:1.

[0217] In certain embodiments, Xaa5 is not F, H, I, K, M, T, or Y. and wherein the VP capsid is capable of forming an assembled virion that exhibits decreased tropism for liver tissue when compared to a virion that comprises the AAV5 VP1 capsid of SEQ ID NO:1.

[0218] In certain embodiments, Xaa6 is not N, and wherein the VP capsid is capable of forming an assembled virion that exhibits decreased tropism for liver tissue when compared to a virion that comprises the AAV5 VP1 capsid of SEQ ID NO:1.

[0219] In certain embodiments, Xaa6 is not N, or Q. and wherein the VP capsid is capable of forming an assembled virion that exhibits decreased tropism for liver tissue when compared to a virion that comprises the AAV5 VP1 capsid of SEQ ID NO:1.

[0220] In certain embodiments, Xaa6 is not E, G, H, L, M, N, Q, T, or W, and wherein the VP capsid is capable of forming an assembled virion that exhibits decreased tropism for liver tissue when compared to a virion that comprises the AAV5 VP1 capsid of SEQ ID NO:1.

[0221] In certain embodiments, Xaa7 is not A, and wherein the VP capsid is capable of forming an assembled virion that exhibits decreased tropism for liver tissue when compared to a virion that comprises the AAV5 VP1 capsid of SEQ ID NO:1.

[0222] In certain embodiments, Xaa7 is not A, C, H or M, and wherein the VP capsid is capable of forming an assembled virion that exhibits decreased tropism for liver tissue when compared to a virion that comprises the AAV5 VP1 capsid of SEQ ID NO:1.

[0223] In certain embodiments, Xaa7 is not A, C, G, H, L, M, R or S, and wherein the VP capsid is capable of forming an assembled virion that exhibits decreased tropism for liver tissue when compared to a virion that comprises the AAV5 VP1 capsid of SEQ ID NO:1.

[0224] In certain embodiments, Xaa8 is not G, and wherein the VP capsid is capable of forming an assembled virion that exhibits decreased tropism for liver tissue when compared to a virion that comprises the AAV5 VP1 capsid of SEQ ID NO:1.

[0225] In certain embodiments, Xaa8 is not G, M, Q, or S, and wherein the VP capsid is capable of forming an assembled virion that exhibits decreased tropism for liver tissue when compared to a virion that comprises the AAV5 VP1 capsid of SEQ ID NO:1.

[0226] In certain embodiments, Xaa8 is not A, C, D, F, G, H, M, Q, S, V, W, or Y, and wherein the VP capsid is capable of forming an assembled virion that exhibits decreased tropism for liver tissue when compared to a virion that comprises the AAV5 VP1 capsid of SEQ ID NO:1.

[0227] In certain embodiments, Xaa9 is not G, and wherein the VP capsid is capable of forming an assembled virion that exhibits decreased tropism for liver tissue when compared to a virion that comprises the AAV5 VP1 capsid of SEQ ID NO:1.

[0228] In certain embodiments, Xaa9 is not E, G, or P. and wherein the VP capsid is capable of forming an assembled virion that exhibits decreased tropism for liver tissue when compared to a virion that comprises the AAV5 VP1 capsid of SEQ ID NO:1.

[0229] In certain embodiments, Xaa9 is not A, C, E, G, H, M, N, P, Q, S, V, or W, and wherein the VP capsid is capable of forming an assembled virion that exhibits decreased tropism for liver tissue when compared to a virion that comprises the AAV5 VP1 capsid of SEQ ID NO:1.

[0230] The present disclosure encompasses variant VP capsids that have increased tissue tropism, compared to the AAV5 VP1 capsid of SEQ ID NO:1, for any of the following tissues: adipose, adrenal gland, aorta, brain (including hippocampus: dentate gyrus, CA1 and CA3; cerebellum, caudate, putamen, midbrain, pons, hypothalamus, cortex-including occipital, temporal and forebrain; substantia nigra, and thalamus), bone marrow, cecum, colon, dorsal root ganglion, duodenum, epididymis, esophagus, eye, gallbladder, heart, ileum, jejunum, kidney, lung, lymph nodes, mammary gland, ovary, pancreas, parathyroid gland, peripheral nerve, pituitary, prostate, salivary gland, seminal vesicle, skeletal muscle, skin, spinal cord, spleen, stomach, testis, thymus, thyroid, trachea, urinary bladder, uterus, and vagina.

[0231] 6.7.4. In Vivo Selected Mutated VP Polypeptides that Detarget Liver Tissue

[0232] A. Positional Frequency Rules

[0233] In this section, unless otherwise specified, the frequency of a given amino acid residue occurring at a specified position corresponding to position 581 to position 589 of SEQ ID NO: 1 (generalized in SEQ ID NO: 2) in variants identified in non-liver over the frequency of that given amino acid residue occurring at the specified position in variants identified in all other harvested tissues (CNS (cortex forebrain, cortex occipital, cortex temporal, thalamus, hypothalamus, substantia nigra, hippocampus DG, hippocampus CA1, hippocampus CA3, cerebellum), skeletal muscle, heart, lung, spleen, lymph node, bone marrow, mammary gland, skin, adrenal gland, thyroid, colon, sciatic nerve, and spinal cord tissues, liver) was analyzed to identify a set of sequence rules for capsids that preferentially detarget liver tissue. Identification of positional frequency rules from in vivo data is described in detail in EXAMPLE 4. With reference to TABLE 6B in EXAMPLE 4, and SEQ ID NO: 2 (AAV5 VP1), the following amino acids can, thus, be independently mutated, in any combination, at any one or more positions Xaa1-Xaa9, to provide a VP1 capsid with reduced liver tropism as compared wildtype AAV5 VP1 capsid (SEQ ID NO: 1), where liver tropism here refers to properties that are deterministic for liver transduction over properties that are deterministic for transduction of all other harvested tissues.

[0234] Disclosed herein are engineered AAV5 VP capsid polypeptides capable of forming an assembled virion that exhibits decreased liver tissue tropism as compared to wildtype AAV5 VP capsid polypeptide, wherein the engineered variant AAV5 VP capsid polypeptide sequence has one or more mutations, wherein the VP1 polypeptide sequence has said one or more mutations in a region from a position corresponding to 581 in SEQ ID NO: 2 to a position corresponding to 589 in SEQ ID NO: 2 and wherein Xaa1 excludes K; or Xaa1 excludes A, K, M, or T; or Xaa1 excludes A, G, K, M, N, Q, R, S, or T; or Xaa2 excludes T; or Xaa2 excludes A, S, T, or V; or Xaa2 excludes A, C, H, I, K, S, T, or V; or Xaa3 excludes A or T; or Xaa3 excludes A, M, or T; or Xaa3 excludes A, G, H, K, M, N, Q, R, S, T, or V; or Xaa4 excludes P; or Xaa4 excludes L, P, Q, or T; or Xaa4 excludes L, M, P, Q, R, T, or W; or Xaa5 excludes Y; or Xaa5 excludes H, I, or Y; or Xaa5 excludes F, H, I, K, M, T, or Y; or Xaa6 excludes N; or Xaa6 excludes N, or Q; or Xaa6 excludes E, G, H, L, M, N, Q, T, or W; or Xaa7 excludes A; or Xaa7 excludes A, C, H or M; or Xaa7 excludes A, C, G, H, L, M, R or S; or Xaa8 excludes G; or Xaa8 excludes G, M, Q, or S; or Xaa8 excludes A, C, D, F, G, H, M, Q, S, V, W, or Y; or Xaa9 excludes G; or Xaa9 excludes E, G, or P; or Xaa9 excludes A, C, E, G, H, M, N, P, Q, S, V, or W.

[0235] Disclosed herein are engineered AAV5 VP capsid polypeptides capable of forming an assembled virion that exhibits decreased liver tissue tropism as compared to wildtype AAV5 VP capsid polypeptide, wherein the engineered variant AAV5 VP capsid polypeptide sequence has one or more mutations, wherein the VP1 polypeptide sequence has said one or more mutations in a region from a position corresponding to 581 in SEQ ID NO: 2 to a position corresponding to 589 in SEQ ID NO: 2 and wherein said one or more mutations are selected from the following rules. In some embodiments, Xaa1 excludes K. In some embodiments, Xaa1 excludes A, K, M, or T. In some embodiments, Xaa1 excludes A, G, K, M, N, Q, R, S, or T. In some embodiments, Xaa2 excludes T. In some embodiments, Xaa2 excludes A, S, T, or V. In some embodiments, Xaa2 excludes A, C, H, I, K, S, T, or V. In some embodiments, Xaa3 excludes A or T. In some embodiments, Xaa3 excludes A, M, or T. In some embodiments, Xaa3 excludes A, G, H, K, M, N, Q, R, S, T, or V. In some embodiments. Xaa4 excludes P. In some embodiments. Xaa4 excludes L, P, Q, or T. In some embodiments, Xaa4 excludes L, M, P, Q, R, T, or W. In some embodiments, Xaa5 excludes Y. In some embodiments, Xaa5 excludes H, I, or Y. In some embodiments, Xaa5 excludes F, H, I, K, M, T, or Y. In some embodiments, Xaa6 excludes N. In some embodiments, Xaa6 excludes N, or Q. In some embodiments, Xaa6 excludes E, G, H, L, M, N, Q, T, or W. In some embodiments, Xaa7 excludes A. In some embodiments, Xaa7 excludes A, C, H or M. In some embodiments, Xaa7 excludes A, C, G, H, L, M, R or S. In some embodiments, Xaa8 excludes G. In some embodiments, Xaa8 excludes G, M, Q, or S. In some embodiments, Xaa8 excludes A, C, D, F, G, H, M, Q, S, V, W, or Y. In some embodiments, Xaa9 excludes G. In some embodiments, Xaa9 excludes E, G, or P. In some embodiments, Xaa9 excludes A, C, E, G, H, M, N, P, Q, S, V, or W.

[0236] Disclosed herein are engineered AAV5 VP capsid polypeptides capable of forming an assembled virion that exhibits decreased liver tissue tropism as compared to wildtype AAV5 VP capsid polypeptide, wherein the engineered variant AAV5 VP capsid polypeptide sequence has one or more mutations, wherein the VP1 polypeptide sequence has said one or more mutations in a region from a position corresponding to 581 in SEQ ID NO: 2 to a position corresponding to 589 in SEQ ID NO: 2 and wherein said one or more mutations are selected from the following rules: Xaa1 excludes A, K, M, or T, Xaa2 excludes, Xaa3 excludes A or T, Xaa4 excludes P, Xaa5 excludes Y, Xaa6 excludes N. Xaa7 excludes A. Xaa8 excludes G. and Xaa9 excludes G.

[0237] Disclosed herein are engineered AAV5 VP capsid polypeptides capable of forming an assembled virion that exhibits decreased liver tissue tropism as compared to wildtype AAV5 VP capsid polypeptide, wherein the engineered variant AAV5 VP capsid polypeptide sequence has one or more mutations, wherein the VP1 polypeptide sequence has said one or more mutations in a region from a position corresponding to 581 in SEQ ID NO: 2 to a position corresponding to 589 in SEQ ID NO: 2 and wherein said one or more mutations are as follows: Xaa1 excludes A, K, M, or T, or Xaa2 excludes, or Xaa3 excludes A or T, or Xaa4 excludes P, or Xaa5 excludes Y. or Xaa6 excludes N, or Xaa7 excludes A. or Xaa8 excludes G, or Xaa9 excludes G, or any combination thereof.

[0238] B. ML Rules

[0239] For the following set of rules described in this paragraph, favored biophysical properties and favored amino acid residues at each position in the 581 to 589 region of an engineered AAV5 VP1 capsid polypeptide, were determined using in vivo data and two ML models, which are described in EXAMPLE 21. Disclosed herein are engineered AAV5 VP capsid polypeptides capable of forming an assembled virion that exhibits decreased liver tissue tropism as compared to an rAAV virion having a wildtype AAV5 VP capsid polypeptide, wherein the engineered AAV5 VP capsid polypeptide sequence has one or more mutations, wherein the VP1 polypeptide sequence has said one or more mutations in a region from a position corresponding to 581 in SEQ ID NO: 2 to a position corresponding to 589 in SEQ ID NO: 2 and wherein Xaa1 is selected from an amino acid of low solubility at position Xaa1 (e.g., Xaa1 is selected from D, or P); or wherein Xaa1 is selected from an amino acid of low mutability at position Xaa1 (e.g., Xaa1 is selected from C, K, or L); or wherein Xaa2 is selected from an amino acid of low solubility at position Xaa2 (e.g., Xaa2 is selected from N, K, P, E, or D); or wherein Xaa2 is selected from an amino acid of low hydropathy at position Xaa2 (e.g., Xaa2 is selected from D, E, R, K, H, N, or Q); or wherein Xaa2 is selected from an amino acid of low charge at position Xaa2 (e.g., Xaa2 is selected from D or E); or wherein Xaa2 is selected from an amino acid of high number of total potential hydrogen bonds at position Xaa2 (e.g., Xaa2 is selected from H, N, Q, D, E, or R); or wherein Xaa2 is selected from an amino acid of medium volume at position Xaa2 (e.g., Xaa2 is selected from D, E, V, P, N, or T); or wherein Xaa3 is selected from an amino acid of low solubility at position Xaa3 (e.g., Xaa3 is selected from P or D); or wherein Xaa4 is selected from an amino acid of medium volume at position Xaa4 (e.g., Xaa4 is selected from D, E, V, P, N, or T) or wherein Xaa5 is selected from an amino acid of low solubility at position Xaa5 (e.g., Xaa5 is selected from N, P, E, or D); or wherein Xaa8 is selected from an amino acid of low solubility at position Xaa8 (e.g., Xaa8 is selected from K or Q); or wherein Xaa8 is selected from an amino acid of low hydropathy at position Xaa8 (e.g., Xaa8 is selected from K or R); or wherein Xaa8 is selected from an amino acid of high surface accessibility at position Xaa8 (e.g., Xaa8 is selected from E, R, or K); or any combination thereof.

[0240] In some embodiments, Xaa1 is selected from an amino acid of low solubility at position Xaa1. In some embodiments, Xaa1 is selected from D or P. In some embodiments, Xaa1 is selected from an amino acid of low mutability at position Xaa1. In some embodiments. Xaa1 is selected from C, K, or L. In some embodiments, Xaa2 is selected from an amino acid of low solubility at position Xaa2. In some embodiments, Xaa2 is selected from N, K, P, E, or D. In some embodiments, Xaa2 is selected from an amino acid of low hydropathy at position Xaa2. In some embodiments, Xaa2 is selected from D, E, R, K, H, N, or Q. In some embodiments, Xaa2 is selected from an amino acid of low charge at position Xaa2. In some embodiments, Xaa2 is selected from D, E. In some embodiments, Xaa2 is selected from an amino acid of high number of total potential hydrogen bonds at position Xaa2. In some embodiments, Xaa2 is selected from H, N, Q, D, E, or R. In some embodiments, Xaa2 is selected from an amino acid of medium volume at position Xaa2. In some embodiments, Xaa2 is selected from D, E, V, P, N, or T. In some embodiments, Xaa3 is selected from an amino acid of low solubility at position Xaa3. In some embodiments, Xaa3 is selected from P or D. In some embodiments, Xaa4 is selected from an amino acid of medium volume at position Xaa4. In some embodiments, Xaa4 is selected from D, E, V, P, N, or T. In some embodiments, Xaa5 is selected from an amino acid of low solubility at position Xaa5. In some embodiments. Xaa5 is selected from N, P, E, or D. In some embodiments, Xaa8 is selected from an amino acid of low solubility at position Xaa8. In some embodiments, Xaa8 is selected from K or Q. In some embodiments, Xaa8 is selected from an amino acid of low hydropathy at position Xaa8. In some embodiments, Xaa8 is selected from K or R. In some embodiments. Xaa8 is selected from an amino acid of high surface accessibility at position Xaa8. In some embodiments, Xaa8 is selected from E, R, or K.

[0241] In some embodiments, provided herein are AAV5 VP capsid polypeptide having at least one mutation in a region from a position corresponding to 581 to a position corresponding to 589 of AAV5 VP1 and having at least 70%, at least 75%, at least 80%, at least 85%, at least 90%, at least 92%, at least 95%, at least 97%, at least 99%, or 100% sequence identity to any sequence selected from SEQ ID NO: 46438-SEQ ID NO: 47437, wherein said at least one mutation drives liver detargeting tissue tropism.

[0242] 6.7.5. In Vivo Selected Mutated VP Polypeptides that Confer Increased Liver Tropism

[0243] The present disclosure provides AAV5 virions with a VP capsid polypeptide having at least one mutation in a region with residues that interact with target cells (e.g., a target liver cell in a target liver tissue of interest), where the at least one mutation confers increased liver tissue tropism as compared to a wildtype VP capsid polypeptide. In some embodiments, provided herein are AAV5 VP1 capsid polypeptide having a sequence homology of at least 80% to SEQ ID NO: 1, wherein the AAV5 VP1 capsid polypeptide has at least one mutation in a region from a position corresponding to 581 to a position corresponding to 589 of SEQ ID NO: 1 and wherein said at least one mutation drives increased liver tropism. The following sequences rules and sequences also apply to the region in AAV5 VP2 (amino acid residues 445 to 453; VP2 sequence shown in SEQ ID NO: 1115) and AAV5 VP3 (amino acid residues 389 to 397; VP3 sequences shown in SEQ ID NO: 1116) corresponding to AAV5 VP1 amino acid residues 581 to 589. Thus, the present disclosure encompasses AAV5 VP2 capsid polypeptides and AAV5 VP3 capsid polypeptides having one or more mutations in the VP2 and VP3 regions corresponding to the AAV5 VP1 amino acid residues of the 581 to 589 region, where the one or more mutations comport to the rules or sequences in the following section.

[0244] A. Positional Frequency Rules

[0245] In this section, unless otherwise specified, the frequency of a given amino acid residue occurring at a specified position corresponding to position 581 to position 589 of SEQ ID NO: 1 (generalized in SEQ ID NO: 2) in variants identified in liver over the frequency of that given amino acid residue occurring at the specified position in variants identified in all other harvested tissues (CNS (cortex forebrain, cortex occipital, cortex temporal, thalamus, hypothalamus, substantia nigra, hippocampus DG, hippocampus CA1, hippocampus CA3, cerebellum), skeletal muscle, heart, lung, spleen, lymph node, bone marrow, mammary gland, skin, adrenal gland, thyroid, colon, sciatic nerve, and spinal cord tissues) was analyzed to identify, a set of sequence rules for capsids that preferentially target liver tissue. Identification of positional frequency rules from in vivo data is described in detail in EXAMPLE 4.

[0246] Disclosed herein are engineered AAV5 VP capsid polypeptides capable of forming an assembled virion that exhibits increased liver tissue tropism as compared to wildtype AAV5 VP capsid polypeptide, wherein the engineered variant AAV5 VP capsid polypeptide sequence has one or more mutations, wherein the VP1 polypeptide sequence has said one or more mutations in a region from a position corresponding to 581 in SEQ ID NO: 2 to a position corresponding to 589 in SEQ ID NO: 2 and wherein Xaa1 is selected from A, G, K, M, N, Q, R, S, or T, or

Xaa1 is selected from A, K, Q, or R, or Xaa1 is K; or wherein Xaa2 is selected from A, C, I, K, S, T, or V, or Xaa2 is selected from A, K, S, or T, or Xaa2 is A; or wherein Xaa3 is selected from A, G, I, K, M, Q, R, S, T, or V, or Xaa3 is selected from A, K, Q, S, or T, or Xaa3 is selected from K, Q, or T, or Xaa3 is K; or wherein Xaa4 is selected from A, I, K, L, P, Q, R, S, T, or V, or Xaa4 is selected from K, I, S, or V, or Xaa4 is K; or Xaa5 is selected from F, I, L, M, T, V, or Y, or wherein Xaa5 is selected from F, L, or Y, or Xaa5 is F; or Xaa6 is selected from F, H, M, N, Q, S, or Y, or wherein Xaa6 is selected from M or N, or Xaa6 is N; or Xaa7 is selected from A, C, K, M, Q or S, or wherein Xaa7 is selected from A, C, or S, or Xaa7 is S; or wherein Xaa8 is selected from A, C, F, G, M, Q, or S, or Xaa8 is selected from A, C, M, or S, or Xaa8 is C; or wherein Xaa9 is selected from E, F, L, Q, R, or Y, or Xaa9 is selected from L, Q, or R, or Xaa9 is R.

[0247] Disclosed herein are engineered AAV5 VP capsid polypeptides capable of forming an assembled virion that exhibits increased liver tissue tropism as compared to wildtype AAV5 VP capsid polypeptide, wherein the engineered variant AAV5 VP capsid polypeptide sequence has one or more mutations, wherein the VP1 polypeptide sequence has said one or more mutations in a region from a position corresponding to 581 in SEQ ID NO: 2 to a position corresponding to 589 in SEQ ID NO: 2 and wherein said one or more mutations are selected from the following rules. In some embodiments, Xaa1 is selected from A, G, K, M, N, Q, R, S, or T. In some embodiments, Xaa1 is selected from A, K, Q, or R. In some embodiments, Xaa1 is K. In some embodiments, Xaa2 is selected from A, C, I, K, S, T, or V. In some embodiments, is selected from A, K, S, or T, or Xaa2 is A. In some embodiments, wherein Xaa3 is selected from A, G, I, K, M, Q, R, S, T, or V, or Xaa3 is selected from A, K, Q, S, or T. In some embodiments, Xaa3 is selected from K, Q, or T. In some embodiments, Xaa3 is K. In some embodiments, Xaa4 is selected from A, I, K, L, P, Q, R, S, T, or V. In some embodiments, Xaa4 is selected from K, I, S, or V. In some embodiments, Xaa4 is K. In some embodiments, Xaa5 is selected from F, I, L, M, T, V, or Y. In some embodiments, Xaa5 is selected from F, L, or Y, or Xaa5 is F. In some embodiments, Xaa6 is selected from F, H, M, N, Q, S, or Y. In some embodiments, wherein Xaa6 is selected from M or N, or Xaa6 is N. In some embodiments, Xaa7 is selected from A, C, K, M, Q or S. In some embodiments, Xaa7 is selected from A, C, or S, or Xaa7 is S. In some embodiments. Xaa8 is selected from A, C, F, G, M, Q, or S. In some embodiments. Xaa8 is selected from A, C, M, or S, or Xaa8 is C. In some embodiments, Xaa9 is selected from E, F, L, Q, R, or Y. In some embodiments, Xaa9 is selected from L, Q, or R, or Xaa9 is R.

[0248] Disclosed herein are engineered AAV5 VP capsid polypeptides capable of forming an assembled virion that exhibits increased liver tissue tropism as compared to wildtype AAV5 VP capsid polypeptide, wherein the engineered variant AAV5 VP capsid polypeptide sequence has one or more mutations, wherein the VP1 polypeptide sequence has said one or more mutations in a region from a position corresponding to 581 in SEQ ID NO: 2 to a position corresponding to 589 in SEQ ID NO: 2 and wherein said one or more mutations are selected from the following rules: Xaa1 is selected from A, G, K, M, N, Q, R, S, or T, Xaa2 is selected from A, C, I, K, S, T, or V, Xaa3 is selected from A, G, I, K, M, Q, R, S, T, or V, Xaa4 is selected from A, I, K, L, P, Q, R, S, T, or V, Xaa5 is selected from F, I, L, M, T, V, or Y, Xaa6 is selected from F, H, M, N, Q, S, or Y, Xaa7 is selected from A, C, or S, Xaa8 is selected from A, C, F, G, M, Q, or S. and Xaa9 is selected from E, F, L, Q, R, or Y.

[0249] Disclosed herein are engineered AAV5 VP capsid polypeptides capable of forming an assembled virion that exhibits increased liver tissue tropism as compared to wildtype AAV5 VP capsid polypeptide, wherein the engineered variant AAV5 VP capsid polypeptide sequence has one or more mutations, wherein the VP1 polypeptide sequence has said one or more mutations in a region from a position corresponding to 581 in SEQ ID NO: 2 to a position corresponding to 589 in SEQ ID NO: 2 and wherein said one or more mutations are as follows: Xaa1 is selected from A, G, K, M, N, Q, R, S, or T, or Xaa2 is selected from A, C, I, K, S, T, or V, or Xaa3 is selected from A, G, I, K, M, Q, R, S, T, or V, or Xaa4 is selected from A, I, K, L, P, Q, R, S, T, or V, or Xaa5 is selected from F, I, L, M, T, V, or Y, or Xaa6 is selected from F, H, M, N, Q, S, or Y, or Xaa7 is selected from A, C, or S, or Xaa8 is selected from A, C, F, G, M, Q, or S, or Xaa9 is selected from E, F, L, Q, R, or Y, or any combination thereof.

[0250] In some embodiments, provided herein are AAV5 VP capsid polypeptide having at least one mutation in a region from a position corresponding to 581 to a position corresponding to 589 of AAV5 VP1 and having at least 70%, at least 75%, at least 80%, at least 85%, at least 90%, at least 92%, at least 95%, at least 97%, at least 99%, or 100% sequence identity to any sequence selected from SEQ ID NO: 43438-SEQ ID NO: 44437, wherein said at least one mutation drives increased liver tissue tropism.

[0251] B. ML Rules

[0252] For the following set of rules described in this paragraph, favored biophysical properties and favored amino acid residues at each position in the 581 to 589 region of an engineered AAV5 VP1 capsid polypeptide, were determined using in vivo data and two ML models, which are described in EXAMPLE 20. Disclosed herein are engineered AAV5 VP capsid polypeptides capable of forming an assembled virion that exhibits increased liver tissue tropism as compared to an rAAV virion having a wildtype AAV5 VP capsid polypeptide, wherein the engineered AAV5 VP capsid polypeptide sequence has one or more mutations, wherein the VP1 polypeptide sequence has said one or more mutations in a region from a position corresponding to 581 in SEQ ID NO: 2 to a position corresponding to 589 in SEQ ID NO: 2 and wherein Xaa1 is selected from an amino acid of high surface accessibility (e.g., Xaa1 is selected from K, R, or E); or wherein Xaa1 is selected from an amino acid of low hydropathy (e.g., Xaa1 is selected from K, R); or wherein Xaa1 is selected from an amino acid of low amino acid mutability (e.g., Xaa1 is selected from H, P, K, or R); or wherein Xaa1 is selected from an amino acid of low amino acid solubility (e.g., Xaa1 is selected from Q, K, R); or wherein Xaa2 is selected from an amino acid of high surface accessibility (e.g., Xaa2 is selected from E, R, or K); or wherein Xaa2 is selected from an amino acid of low hydropathy (e.g., Xaa2 is selected from K. R); or wherein Xaa2 is selected from an amino acid of high amino acid volume (e.g., Xaa2 is selected from S, L, I, A, R, or K); or wherein Xaa3 is selected from an amino acid of high mutability (e.g., Xaa3 is selected from N, I, A, M, E, or D); or wherein Xaa3 is selected from an amino acid of low solubility (e.g., Xaa3 is selected from N, K, R, or E); or wherein Xaa4 is selected from an amino acid of low hydropathy (e.g., Xaa4 is selected from K or R); or wherein Xaa4 is selected from an amino acid of high amino acid volume (e.g., Xaa4 is selected from K, R, I, or L); or wherein Xaa5 is selected from an amino acid of medium amino acid solubility (e.g., Xaa5 is selected from H or T); or wherein Xaa8 is selected from an amino acid of low surface accessibility (e.g., Xaa8 is selected from V or C); or wherein Xaa8 is selected from an amino acid of low average flexibility index (e.g., Xaa8 is selected from W, V, M, A, F, L, H, or C); or any combination thereof.

[0253] In some embodiments, Xaa1 is selected from an amino acid of high surface accessibility. In some embodiments, Xaa1 is selected from K, R, or E. In some embodiments, Xaa1 is selected from an amino acid of low hydropathy. In some embodiments, Xaa1 is selected from K or R. In some embodiments, Xaa1 is selected from an amino acid of low amino acid mutability. In some embodiments, Xaa1 is selected from H, P, K, or R. In some embodiments, Xaa1 is selected from an amino acid of low amino acid solubility. In some embodiments, Xaa1 is selected from Q, K, or R. In some embodiments, Xaa2 is selected from an amino acid of high surface accessibility. In some embodiments, Xaa2 is selected from E, R, or K. In some embodiments, Xaa2 is selected from an amino acid of low hydropathy. In some embodiments, Xaa2 is selected from K or R. In some embodiments, Xaa2 is selected from an amino acid of high amino acid volume. In some embodiments. Xaa2 is selected from S, L, I, A, R, or K. In some embodiments, Xaa3 is selected from an amino acid of high mutability. In some embodiments, Xaa3 is selected from N, I, A, M, E, or D. In some embodiments, Xaa3 is selected from an amino acid of low solubility. In some embodiments, Xaa3 is selected from N, K, R, or E. In some embodiments, Xaa4 is selected from an amino acid of low hydropathy. In some embodiments, Xaa4 is selected from K, R In some embodiments, Xaa4 is selected from an amino acid of high amino acid volume. In some embodiments, Xaa4 is selected from K, R, I, or L. In some embodiments, Xaa5 is selected from an amino acid of medium amino acid solubility. In some embodiments, Xaa5 is selected from H, T. In some embodiments, Xaa8 is selected from an amino acid of low surface accessibility. In some embodiments, Xaa8 is selected from V or C. In some embodiments, Xaa8 is selected from an amino acid of low average flexibility index. In some embodiments, Xaa8 is selected from W, V, M, A, F, L, H, or C.

[0254] In some embodiments, provided herein are AAV5 VP capsid polypeptide having at least one mutation in a region from a position corresponding to 581 to a position corresponding to 589 of AAV5 VP1 and having at least 70%, at least 75%, at least 80%, at least 85%, at least 90%, at least 92%, at least 95%, at least 97%, at least 99%, or 100% sequence identity to any sequence selected from SEQ ID NO: 44438-SEQ ID NO: 45437, wherein said at least one mutation drives increased liver tissue tropism.

[0255] C. Enriched Liver Sequences

[0256] In some embodiments, provided herein are AAV5 VP capsid polypeptide having at least one mutation in a region from a position corresponding to 581 to a position corresponding to 589 of AAV5 VP1 and having at least 70%, at least 75%, at least 80%, at least 85%, at least 90%, at least 92%, at least 95%, at least 97%, at least 99%, or 100% sequence identity to any sequence selected from SEQ ID NO: 45438-SEQ ID NO: 46437, wherein said at least one mutation drives increased liver tissue tropism.

[0257] 6.7.6. In Vivo Selected Mutated VP Polypeptides that Confer Increased Central Nervous System Tropism, Positional Frequency Based Rules and ML Rules

[0258] The present disclosure provides AAV5 virions with a VP capsid polypeptide having at least one mutation in a region with residues that interact with target cells (e.g., a target CNS cell in a target CNS tissue of interest), where the at least one mutation confers increased CNS tissue tropism as compared to a wildtype VP capsid polypeptide. In some embodiments, provided herein are AAV5 VP1 capsid polypeptide having a sequence homology of at least 80% to SEQ ID NO: 1, wherein the AAV5 VP1 capsid polypeptide has at least one mutation in a region from a position corresponding to 581 to a position corresponding to 589 of SEQ ID NO: 1 and wherein said at least one mutation drives increased central nervous system tropism. The following sequences rules and sequences also apply to the region in AAV5 VP2 (amino acid residues 445 to 453; VP2 sequence shown in SEQ ID NO: 1115) and AAV5 VP3 (amino acid residues 389 to 397; VP3 sequences shown in SEQ ID NO: 1116) corresponding to AAV5 VP1 amino acid residues 581 to 589. Thus, the present disclosure encompasses AAV5 VP2 capsid polypeptides and AAV5 VP3 capsid polypeptides having one or more mutations in the VP2 and VP3 regions corresponding to the AAV5 VP1 amino acid residues of the 581 to 589 region, where the one or more mutations comport to the rules or sequences in the following section.

[0259] A. Positional Frequency Rules

[0260] In this section, unless otherwise specified, the frequency of a given amino acid residue occurring at a specified position corresponding to position 581 to position 589 of SEQ ID NO: 1 (generalized in SEQ ID NO: 2) in variants identified in central nervous system (cortex forebrain, cortex occipital, cortex temporal, thalamus, hypothalamus, substantia nigra, hippocampus DG, hippocampus CA1, hippocampus CA3, cerebellum) over the frequency of that given amino acid residue occurring at the specified position in variants identified in all other harvested tissues (liver, skeletal muscle, heart, lung, spleen, lymph node, bone marrow, mammary gland, skin, adrenal gland, thyroid, colon, sciatic nerve, and spinal cord tissues) was analyzed to identify a set of sequence rules for capsids that preferentially target central nervous system tissues. Identification of positional frequency rules from in vivo data is described in detail in EXAMPLE 5.

[0261] Disclosed herein are engineered AAV5 VP capsid polypeptides capable of forming an assembled virion that exhibits increased central nervous system tissue tropism as compared to wildtype AAV5 VP capsid polypeptide, wherein the engineered variant AAV5 VP capsid polypeptide sequence has one or more mutations, wherein the VP1 polypeptide sequence has said one or more mutations in a region from a position corresponding to 581 in SEQ ID NO: 2 to a position corresponding to 589 in SEQ ID NO: 2 and wherein Xaa1 is selected from A, C, K, M, Q, R, T, or W, or Xaa1 is selected from K, Q, R, or W, or Xaa1 is K; or Xaa2 is selected from F, I, K, R, T, or W, or Xaa2 is selected from F, I, R or T, or Xaa2 is R; or Xaa3 is selected from A, H, N, R, or W, or Xaa3 is selected from A, R, or W, or Xaa3 is R; or Xaa4 is selected from E, G, I, M, Q, or R, or Xaa4 is selected from E, M, or R, or Xaa4 is R; or Xaa5 is selected from C, G, K, I, M, or R, or Xaa5 is selected from K, I, or R, or Xaa5 is I; or Xaa6 is selected from I, K, L, P, Q, R, Y, or Xaa6 is selected from K, R, or Y, or Xaa6 is R; or Xaa7 is selected from D, I, K, R, V, or W, or Xaa7 is selected from I, R, or V, or Xaa7 is V; or Xaa8 is selected from C, G, H, K, L, or V, or Xaa8 is selected from H. K, or V, or Xaa8 is H; or Xaa9 is selected from I, K, L, R, or V, or Xaa9 is selected from I, K, or R, or Xaa9 is R.

[0262] Disclosed herein are engineered AAV5 VP capsid polypeptides capable of forming an assembled virion that exhibits increased central nervous system tissue tropism as compared to wildtype AAV5 VP capsid polypeptide, wherein the engineered variant AAV5 VP capsid polypeptide sequence has one or more mutations, wherein the VP1 polypeptide sequence has said one or more mutations in a region from a position corresponding to 581 in SEQ ID NO: 2 to a position corresponding to 589 in SEQ ID NO: 2 and wherein said one or more mutations are selected from the following rules. In some embodiments, Xaa1 is selected from A, C, K, M, Q, R, T, or W. In some embodiments. Xaa1 is selected from K, Q, R, or W. In some embodiments, Xaa1 is K. In some embodiments, Xaa2 is selected from F, I, K, R, T, or W. In some embodiments, Xaa2 is selected from F, I, R or T. In some embodiments, Xaa2 is R. In some embodiments, Xaa3 is selected from A, H, N, R, or W. In some embodiments, Xaa3 is selected from A, R, or W. In some embodiments, Xaa3 is R. In some embodiments, Xaa4 is selected from E, G, I, M, Q, or R. In some embodiments, Xaa4 is selected from E, M, or R. In some embodiments, Xaa4 is R. In some embodiments, Xaa5 is selected from C, G, K, I, M, or R. In some embodiments, Xaa5 is selected from K, I, or R. In some embodiments, Xaa5 is I. In some embodiments, Xaa6 is selected from I, K, L, P, Q, R, Y. In some embodiments, Xaa6 is selected from K, R, or Y. In some embodiments, Xaa6 is R. In some embodiments, Xaa7 is selected from D, I, K, R, V, or W. In some embodiments, Xaa7 is selected from I, R, or V. In some embodiments. Xaa7 is V. In some embodiments, Xaa8 is selected from C, G, H, K, L, or V. In some embodiments, Xaa8 is selected from H, K, or V. In some embodiments, Xaa8 is H. In some embodiments, Xaa9 is selected from I, K, L, R, or V. In some embodiments, Xaa9 is selected from I, K, or R. In some embodiments, Xaa9 is R.

[0263] Disclosed herein are engineered AAV5 VP capsid polypeptides capable of forming an assembled virion that exhibits increased central nervous system tissue tropism as compared to wildtype AAV5 VP capsid polypeptide, wherein the engineered variant AAV5 VP capsid polypeptide sequence has one or more mutations, wherein the VP1 poly peptide sequence has said one or more mutations in a region from a position corresponding to 581 in SEQ ID NO: 2 to a position corresponding to 589 in SEQ ID NO: 2 and wherein said one or more mutations are selected from the following rules: Xaa1 is selected from A, C, K, M, Q, R, T, or W, Xaa2 is selected from F, I, K, R, T, or W, Xaa3 is selected from A, H, N, R, or W, Xaa4 is selected from E, G, I, M, Q, or R, Xaa5 is selected from C, G, K, I, M, or R, Xaa6 is selected from I, K, L, P, Q, R, Y, Xaa7 is selected from D, I, K, R, V, or W, Xaa8 is selected from C, G, H, K, L, or V, and Xaa9 is selected from I, K, L, R, or V.

[0264] Disclosed herein are engineered AAV5 VP capsid polypeptides capable of forming an assembled virion that exhibits increased central nervous system tissue tropism as compared to wildtype AAV5 VP capsid polypeptide, wherein the engineered variant AAV5 VP capsid polypeptide sequence has one or more mutations, wherein the VP1 polypeptide sequence has said one or more mutations in a region from a position corresponding to 581 in SEQ ID NO: 2 to a position corresponding to 589 in SEQ ID NO: 2 and wherein said one or more mutations are as follows: Xaa1 is selected from A, C, K, M, Q, R, T, or W, Xaa2 is selected from F, I, K, R, T, or W, Xaa3 is selected from A, H, N, R, or W, Xaa4 is selected from E, G, I, M, Q, or R, Xaa5 is selected from C, G, K, I, M, or R, Xaa6 is selected from I, K, L, P, Q, R, Y, Xaa7 is selected from D, I, K, R, V, or W, Xaa8 is selected from C, G, H, K, L, or V, Xaa9 is selected from I, K, L, R, or V, or any combination thereof.

[0265] In some embodiments, provided herein are AAV5 VP capsid polypeptide having at least one mutation in a region from a position corresponding to 581 to a position corresponding to 589 of AAV5 VP1 and having at least 70%, at least 75%, at least 80%, at least 85%, at least 90%, at least 92%, at least 95%, at least 97%, at least 99%, or 100% sequence identity to any sequence selected from SEQ ID NO: 7118-SEQ ID NO: 8117, wherein said at least one mutation drives increased central nervous system tissue tropism.

[0266] B. ML Rules

[0267] For the following set of rules described in the subsequent paragraphs in this section, favored biophysical properties and favored amino acid residues at each position in the 581 to 589 region of an engineered AAV5 VP1 capsid polypeptide, were determined using in vivo data and two ML models, which are described in EXAMPLE 19. Disclosed herein are engineered AAV5 VP capsid polypeptides capable of forming an assembled virion that exhibits increased central nervous system tissue tropism as compared to an rAAV virion having a wildtype AAV5 VP capsid polypeptide, wherein the engineered variant AAV5 VP capsid polypeptide sequence has one or more mutations, wherein the VP1 polypeptide sequence has said one or more mutations in a region from a position corresponding to 581 in SEQ ID NO: 2 to a position corresponding to 589 in SEQ ID NO: 2 and wherein Xaa1 is selected from an amino acid of low amino acid solubility (e.g., Xaa1 is selected from K, R, or Q); or wherein Xaa1 is selected from an amino acid of low amino acid hydropathy (e.g., Xaa1 is selected from K or R); or wherein Xaa1 is selected from an amino acid of high average amino acid flexibility index (e.g., Xaa1 is selected from D, E, R, K, G, I, N, Q, or S); or wherein Xaa1 is selected from an amino acid of high hydrogen bond donors (e.g., Xaa1 is selected from K or R); or wherein Xaa1 is selected from an amino acid of amino acid mutability (e.g., Xaa1 is selected from K, R, P, or H); or wherein Xaa2 is selected from an amino acid of low amino acid solubility (e.g., Xaa2 is selected from R, K, Q, or S); or wherein Xaa2 is selected from an amino acid of low amino acid hydropathy (e.g., Xaa2 is selected from R, K, D, E, N, Q, H, P, Y, W, S, or T); or wherein Xaa2 is selected from an amino acid of high amino acid charge (e.g., Xaa2 is selected from R, K, or H); or wherein Xaa3 is selected from an amino acid of high amino acid solubility (e.g., Xaa3 is selected from A, M, V, W, L, or I); or wherein Xaa5 is selected from an amino acid of high amino acid solubility (e.g., Xaa5 is selected from C, M, V, W, L, or I); or wherein Xaa5 is selected from an amino acid of high hydropathy (e.g., Xaa5 is selected from M, V, or I); or wherein Xaa5 is selected from an amino acid of low average amino acid flexibility index (e.g., Xaa5 is selected from M, W, F, or C); or wherein Xaa8 is selected from an amino acid of high amino acid solubility (e.g., Xaa8 is selected from H, V, or I); or any combination thereof.

[0268] In some embodiments, Xaa1 is selected from an amino acid of low amino acid solubility. In some embodiments, Xaa1 is selected from K, R, Q. In some embodiments, Xaa1 is selected from an amino acid of low amino acid hydropathy. In some embodiments, Xaa1 is selected from K or R. In some embodiments, Xaa1 is selected from an amino acid of high average amino acid flexibility index. In some embodiments, Xaa1 is selected from D, E, R, K, G, I, N, Q, or S. In some embodiments, Xaa1 is selected from an amino acid of high hydrogen bond donors. In some embodiments, Xaa1 is selected from K or R. In some embodiments, Xaa1 is selected from an amino acid of amino acid mutability. In some embodiments, Xaa1 is selected from K, R, P, or H. In some embodiments, Xaa2 is selected from an amino acid of low amino acid solubility. In some embodiments, Xaa2 is selected from R, K, Q, or S. In some embodiments, Xaa2 is selected from an amino acid of low amino acid hydropathy. In some embodiments, Xaa2 is selected from R, K, D, E, N, Q, H, P, Y, W, S, or T. In some embodiments, Xaa2 is selected from an amino acid of high amino acid charge. In some embodiments, Xaa2 is selected from R, K, H. In some embodiments. Xaa3 is selected from an amino acid of high amino acid solubility. In some embodiments, Xaa3 is selected from A, M, V, W, L, or I. In some embodiments, Xaa5 is selected from an amino acid of high amino acid solubility. In some embodiments, Xaa5 is selected from C, M, V, W, L, or I. In some embodiments, Xaa5 is selected from an amino acid of high hydropathy. In some embodiments, Xaa5 is selected from M, V, or I. In some embodiments, Xaa5 is selected from an amino acid of low average amino acid flexibility index. In some embodiments, Xaa5 is selected from M, W, F, or C. In some embodiments, Xaa8 is selected from an amino acid of high amino acid solubility. In some embodiments, Xaa8 is selected from H, V, or I.

[0269] In some embodiments, provided herein are AAV5 VP capsid polypeptide having at least one mutation in a region from a position corresponding to 581 to a position corresponding to 589 of AAV5 VP1 and having at least 70%, at least 75%, at least 80%, at least 85%, at least 90%, at least 92%, at least 95%, at least 97%, at least 99%, or 100% sequence identity to any sequence selected from SEQ ID NO: 8118-SEQ ID NO: 9117, wherein said at least one mutation drives increased CNS tissue tropism.

[0270] C. Enriched CNS Sequences

[0271] In some embodiments, provided herein are AAV5 VP capsid polypeptide having at least one mutation in a region from a position corresponding to 581 to a position corresponding to 589 of AAV5 VP1 and having at least 70%, at least 75%, at least 80%, at least 85%, at least 90%, at least 92%, at least 95%, at least 97%, at least 99%, or 100% sequence identity to any sequence selected from SEQ ID NO: 9118-SEQ ID NO: 10117, wherein said at least one mutation drives increased CNS tissue tropism.

[0272] 6.7.7. In Vivo Selected Mutated VP Polypeptides that Confer Increased Spleen Tropism

[0273] The present disclosure provides AAV5 virions with a VP capsid polypeptide having at least one mutation in a region with residues that interact with target cells (e.g., a target spleen cell in a target spleen tissue of interest), where the at least one mutation confers increased spleen tissue tropism as compared to a wildtype VP capsid polypeptide. In some embodiments, provided herein are AAV5 VP1 capsid polypeptide having a sequence homology of at least 80% to SEQ ID NO: 1, wherein the AAV5 VP1 capsid polypeptide has at least one mutation in a region from a position corresponding to 581 to a position corresponding to 589 of SEQ ID NO: 1 and wherein said at least one mutation drives increased spleen tropism. The following sequences rules and sequences also apply to the region in AAV5 VP2 (amino acid residues 445 to 453; VP2 sequence shown in SEQ ID NO: 1115) and AAV5 VP3 (amino acid residues 389 to 397; VP3 sequences shown in SEQ ID NO: 1116) corresponding to AAV5 VP1 amino acid residues 581 to 589. Thus, the present disclosure encompasses AAV5 VP2 capsid polypeptides and AAV5 VP3 capsid polypeptides having one or more mutations in the VP2 and VP3 regions corresponding to the AAV5 VP1 amino acid residues of the 581 to 589 region, where the one or more mutations comport to the rules or sequences in the following section.

[0274] A. Positional Frequency Rules

[0275] In this section, unless otherwise specified, the frequency of a given amino acid residue occurring at a specified position corresponding to position 581 to position 589 of SEQ ID NO: 1 (generalized in SEQ ID NO: 2) in variants identified in spleen over the frequency of that given amino acid residue occurring at the specified position in variants identified in all other harvested tissues (CNS (cortex forebrain, cortex occipital, cortex temporal, thalamus, hypothalamus, substantia nigra, hippocampus DG, hippocampus CA1, hippocampus CA3, cerebellum), liver, skeletal muscle, heart, lung, lymph node, bone marrow, mammary gland, skin, adrenal gland, thyroid, colon, sciatic nerve, and spinal cord tissues) was analyzed to identify a set of sequence rules for capsids that preferentially target spleen tissue. Identification of positional frequency rules from in vivo data is described in detail in EXAMPLE 6.

[0276] Disclosed herein are engineered AAV5 VP capsid polypeptides capable of forming an assembled virion that exhibits increased spleen tissue tropism as compared to wildtype AAV5 VP capsid polypeptide, wherein the engineered variant AAV5 VP1 capsid polypeptide sequence has one or more mutations, wherein Xaa1 is selected from C, F, H, I, L, P, W, or Y, or Xaa1 is selected from C, F, P, W, or Y, or Xaa1 is selected from P, W, or Y, or Xaa1 is P; or Xaa2 is selected from D, E, L, N, P, R, or W, or Xaa2 is selected from D, E, or W, or Xaa2 is D; or Xaa3 is selected from C, D, E, P, or W, or Xaa3 is selected from D, P, or W, or Xaa3 is P; or Xaa4 is selected from C, F, G, H, R, W or Y, or Xaa4 is selected from C, H, or W, or Xaa4 is C; or Xaa5 is selected from A, D, E, G, P, R, or W, or Xaa5 is selected from D, E, G, or P, or Xaa5 is D; or Xaa6 is selected from A, C, D, E, K, R, W, or Xaa6 is selected from C, K, or R, or Xaa6 is K; or Xaa7 is selected from F, L, P, R, W, Y, or Xaa7 is selected from L, P, or W, or Xaa7 is P; or Xaa8 is selected from E, I, K, L, P, R, or T, or Xaa8 is selected from P, R, or K, or Xaa8 is K; or Xaa9 is selected from C, H, M, T, V, or W, or Xaa9 is selected from C, T, or V, or Xaa9 is V.

[0277] Disclosed herein are engineered AAV5 VP capsid polypeptides capable of forming an assembled virion that exhibits increased spleen tissue tropism as compared to wildtype AAV5 VP capsid polypeptide, wherein the engineered variant AAV5 VP capsid polypeptide sequence has one or more mutations, wherein the VP1 polypeptide sequence has said one or more mutations in a region from a position corresponding to 581 in SEQ ID NO: 2 to a position corresponding to 589 in SEQ ID NO: 2 and wherein said one or more mutations are selected from the following rules. In some embodiments, Xaa1 is selected from C, F, H, I, L, P, W, or Y. In some embodiments, Xaa1 is selected from C, F, P, W, or Y. In some embodiments, Xaa1 is selected from P, W, or Y. In some embodiments, Xaa1 is P. In some embodiments, Xaa2 is selected from D, E, L, N, P, R, or W. In some embodiments, Xaa2 is selected from D, E, or W. In some embodiments, Xaa2 is D. In some embodiments, Xaa3 is selected from C, D, E, P, or W. In some embodiments, Xaa3 is selected from D, P, or W. In some embodiments, Xaa3 is P. In some embodiments, Xaa4 is selected from C, F, G, H, R, W or Y. In some embodiments, Xaa4 is selected from C, H, or W. In some embodiments. Xaa4 is C. In some embodiments. Xaa5 is selected from A, D, E, G, P, R, or W. In some embodiments, Xaa5 is selected from D, E, G, or P. In some embodiments, Xaa5 is D. In some embodiments, Xaa6 is selected from A, C, D, E, K, R, W. In some embodiments, Xaa6 is selected from C, K, or R. In some embodiments, Xaa6 is K. In some embodiments, Xaa7 is selected from F, L, P, R, W, Y. In some embodiments, Xaa7 is selected from L, P, or W. In some embodiments, Xaa7 is P. In some embodiments, Xaa8 is selected from E, I, K, L, P, R, or T. In some embodiments, Xaa8 is selected from P, R, or K. In some embodiments, Xaa8 is K. In some embodiments, Xaa9 is selected from C, H, M, T, V, or W. In some embodiments, Xaa9 is selected from C, T, or V. In some embodiments, Xaa9 is V.

[0278] Disclosed herein are engineered AAV5 VP capsid polypeptides capable of forming an assembled virion that exhibits increased spleen tissue tropism as compared to wildtype AAV5 VP capsid polypeptide, wherein the engineered variant AAV5 VP capsid polypeptide sequence has one or more mutations, wherein the VP1 polypeptide sequence has said one or more mutations in a region from a position corresponding to 581 in SEQ ID NO: 2 to a position corresponding to 589 in SEQ ID NO: 2 and wherein said one or more mutations are selected from the following rules: Xaa1 is selected from C, F, H, I, L, P, W, or Y, Xaa2 is selected from D, E, L, N, P, R, or W, Xaa3 is selected from C, D, E, P, or W, Xaa4 is selected from C, F, G, H, R, W or Y, Xaa5 is selected from A, D, E, G, P, R, or W, Xaa6 is selected from A, C, D, E, K, R, W, Xaa7 is selected from F, L, P, R, W, Y, Xaa8 is selected from E, I, K, L, P, R, or T. and Xaa9 is selected from C, H, M, T, V, or W.

[0279] Disclosed herein are engineered AAV5 VP capsid polypeptides capable of forming an assembled virion that exhibits increased spleen tissue tropism as compared to wildtype AAV5 VP capsid polypeptide, wherein the engineered variant AAV5 VP capsid polypeptide sequence has one or more mutations, wherein the VP1 polypeptide sequence has said one or more mutations in a region from a position corresponding to 581 in SEQ ID NO: 2 to a position corresponding to 589 in SEQ ID NO: 2 and wherein said one or more mutations are as follows: Xaa1 is selected from C, F, H, I, L, P, W, or Y, Xaa2 is selected from D, E, L, N, P, R, or W, Xaa3 is selected from C, D, E, P, or W, Xaa4 is selected from C, F, G, H, R, W or Y, Xaa5 is selected from A, D, E, G, P, R, or W, Xaa6 is selected from A, C, D, E, K, R, W, Xaa7 is selected from F, L, P, R, W, Y, Xaa8 is selected from E, I, K, L, P, R, or T, Xaa9 is selected from C, H, M, T, V, or W, or any combination thereof.

[0280] In some embodiments, provided herein are AAV5 VP capsid polypeptide having at least one mutation in a region from a position corresponding to 581 to a position corresponding to 589 of AAV5 VP1 and having at least 70%, at least 75%, at least 80%, at least 85%, at least 90%, at least 92%, at least 95%, at least 97%, at least 99%, or 100% sequence identity to any sequence selected from SEQ ID NO: 37438-SEQ ID NO: 38437, wherein said at least one mutation drives increased spleen tissue tropism.

[0281] B. ML Rules

[0282] For the following set of rules described in this paragraph, favored biophysical properties and favored amino acid residues at each position in the 581 to 589 region of an engineered AAV5 VP1 capsid polypeptide, were determined using in vivo data and two ML models, which are described in EXAMPLE 42. Disclosed herein are engineered AAV5 VP capsid polypeptides capable of forming an assembled virion that exhibits increased spleen tissue tropism as compared to an rAAV virion having a wildtype AAV5 VP capsid polypeptide, wherein the engineered AAV5 VP capsid polypeptide sequence has one or more mutations, wherein the engineered AAV5 VP1 capsid polypeptide sequence has said one or more mutations in a region from a position corresponding to 581 in SEQ ID NO: 2 to a position corresponding to 589 in SEQ ID NO: 2 and wherein Xaa1 is selected from an amino acid of low solubility (e.g., Xaa1 is selected from D or P); or wherein Xaa1 is selected from an amino acid of high solubility (e.g., Xaa1 is selected from F, I, L); or wherein Xaa1 is selected from an amino acid of low hydropathy (e.g., Xaa1 is selected from Y or P); or wherein Xaa1 is selected from an amino acid of low mutability (e.g., Xaa1 is selected from C, K, or P); or wherein Xaa2 is selected from an amino acid of low solubility (e.g., Xaa2 is selected from D, Q, or R); or wherein Xaa2 is selected from an amino acid of low hydropathy (e.g., Xaa2 is selected from D, E, R, K, H, N, or Q); or wherein Xaa2 is selected from an amino acid of low charge (e.g., Xaa2 is selected from D or E); or wherein Xaa2 is selected from an amino acid of low volume (e.g., Xaa2 is selected from T, N, P, or D); or wherein Xaa2 is selected from an amino acid of high average flexibility (e.g., Xaa2 is selected from D, E, R, P, G, Q, or S); or wherein Xaa3 is selected from an amino acid of low solubility (e.g., Xaa3 is selected from D, E, P, or N); or wherein Xaa3 is selected from an amino acid of low hydropathy (e.g., Xaa3 is selected from D, E, H, N, Q, or P); or wherein Xaa4 is selected from an amino acid of low hydropathy (e.g., Xaa4 is selected from K or R); or wherein Xaa5 is selected from an amino acid of low solubility (e.g., Xaa5 is selected from D, E, P, or N); or wherein Xaa5 is selected from an amino acid of high average flexibility (e.g., Xaa5 is selected from D, E, R, P, G, Q, or S); or wherein Xaa6 is selected from an amino acid of low mutability (e.g., Xaa6 is selected from C); or wherein Xaa8 is selected from an amino acid of high surface accessibility (e.g., Xaa8 is selected from E, R, or K); or wherein Xaa8 is selected from an amino acid of low solubility (e.g., Xaa8 is selected from E, P, R, K, N, or Q); or wherein Xaa8 is selected from an amino acid of medium volume (e.g., Xaa8 is selected from E, D, R, K, V, P, M, I, L, H, N, Q, or T); or wherein Xaa9 is selected from an amino acid of medium mol mass (e.g., Xaa9 is selected from E, D, K, M, I, L, H, or N); or any combination thereof.

[0283] In some embodiments, Xaa1 is selected from an amino acid of low solubility. In some embodiments, Xaa1 is selected from D or P. In some embodiments. Xaa1 is selected from an amino acid of high solubility. In some embodiments, Xaa1 is selected from F, I, or L. In some embodiments, Xaa1 is selected from an amino acid of low hydropathy. In some embodiments, Xaa1 is selected from Y or P. In some embodiments, Xaa1 is selected from an amino acid of low mutability. In some embodiments. Xaa1 is selected from C, K, or P. In some embodiments, Xaa2 is selected from an amino acid of low solubility. In some embodiments, Xaa2 is selected from D, Q, or R. In some embodiments, Xaa2 is selected from an amino acid of low hydropathy. In some embodiments, Xaa2 is selected from D, E, R, K, H, N, or Q. In some embodiments, Xaa2 is selected from an amino acid of low charge. In some embodiments, Xaa2 is selected from D or E. In some embodiments, Xaa2 is selected from an amino acid of low volume. In some embodiments, Xaa2 is selected from T, N, P, or D. In some embodiments, Xaa2 is selected from an amino acid of high average flexibility. In some embodiments, Xaa2 is selected from D, E, R, P, G, Q, or S. In some embodiments. Xaa3 is selected from an amino acid of low solubility. In some embodiments, Xaa3 is selected from D, E, P, or N. In some embodiments, Xaa3 is selected from an amino acid of low hydropathy. In some embodiments, Xaa3 is selected from D, E, H, N, Q, or P. In some embodiments, Xaa4 is selected from an amino acid of low hydropathy. In some embodiments, Xaa4 is selected from K or R. In some embodiments, Xaa5 is selected from an amino acid of low solubility. In some embodiments, Xaa5 is selected from D, E, P, or N. In some embodiments. Xaa5 is selected from an amino acid of high average flexibility. In some embodiments. Xaa5 is selected from D, E, R, P, G, Q, or S. In some embodiments, Xaa6 is selected from an amino acid of low mutability. In some embodiments, Xaa6 is selected from C. In some embodiments, Xaa8 is selected from an amino acid of high surface accessibility. In some embodiments, Xaa8 is selected from E, R, or K. In some embodiments, Xaa8 is selected from an amino acid of low solubility. In some embodiments, Xaa8 is selected from E, P, R, K, N, or Q. In some embodiments, Xaa8 is selected from an amino acid of medium volume. In some embodiments, Xaa8 is selected from E, D, R, K, V, P, M, I, L, H, N, Q, or T. In some embodiments, Xaa9 is selected from an amino acid of medium mol mass. In some embodiments, Xaa9 is selected from E, D, K, M, I, L, H, or N.

[0284] In some embodiments, provided herein are AAV5 VP capsid polypeptide having at least one mutation in a region from a position corresponding to 581 to a position corresponding to 589 of AAV5 VP1 and having at least 70%, at least 75%, at least 80%, at least 85%, at least 90%, at least 92%, at least 95%, at least 97%, at least 99%, or 100% sequence identity to any sequence selected from SEQ ID NO: 38438-SEQ ID NO: 39437, wherein said at least one mutation drives increased spleen tissue tropism.

[0285] C. Enriched Spleen Sequences

[0286] In some embodiments, provided herein are AAV5 VP capsid polypeptide having at least one mutation in a region from a position corresponding to 581 to a position corresponding to 589 of AAV5 VP1 and having at least 70%, at least 75%, at least 80%, at least 85%, at least 90%, at least 92%, at least 95%, at least 97%, at least 99%, or 100% sequence identity to any sequence selected from SEQ ID NO: 39438-SEQ ID NO: 40437, wherein said at least one mutation drives increased spleen tissue tropism.

[0287] 6.7.8. In Vivo Selected Mutated VP Polypeptides that Confer Increased Adrenal Gland Tropism

[0288] The present disclosure provides AAV5 virions with a VP capsid polypeptide having at least one mutation in a region with residues that interact with target cells (e.g., a target adrenal gland cell in a target adrenal gland tissue of interest), where the at least one mutation confers increased adrenal gland tissue tropism as compared to a wildtype VP capsid polypeptide. In some embodiments, provided herein are AAV5 VP1 capsid polypeptide having a sequence homology of at least 80% to SEQ ID NO: 1, wherein the AAV5 VP1 capsid polypeptide has at least one mutation in a region from a position corresponding to 581 to a position corresponding to 589 of SEQ ID NO: 1 and wherein said at least one mutation drives increased adrenal gland tropism. The following sequences rules and sequences also apply to the region in AAV5 VP2 (amino acid residues 445 to 453; VP2 sequence shown in SEQ ID NO: 1115) and AAV5 VP3 (amino acid residues 389 to 397; VP3 sequences shown in SEQ ID NO: 1116) corresponding to AAV5 VP1 amino acid residues 581 to 589. Thus, the present disclosure encompasses AAV5 VP2 capsid polypeptides and AAV5 VP3 capsid polypeptides having one or more mutations in the VP2 and VP3 regions corresponding to the AAV5 VP1 amino acid residues of the 581 to 589 region, where the one or more mutations comport to the rules or sequences in the following section.

[0289] A. Positional Frequency Rules

[0290] In this section, unless otherwise specified, the frequency of a given amino acid residue occurring at a specified position corresponding to position 581 to position 589 of SEQ ID NO: 1 (generalized in SEQ ID NO: 2) in variants identified in adrenal gland over the frequency of that given amino acid residue occurring at the specified position in variants identified in all other harvested tissues (CNS (cortex forebrain, cortex occipital, cortex temporal, thalamus, hypothalamus, substantia nigra, hippocampus DG, hippocampus CA1, hippocampus CA3, cerebellum), liver, skeletal muscle, heart, lung, spleen, lymph node, bone marrow, mammary gland, skin, thyroid, colon, sciatic nerve, and spinal cord tissues) was analyzed to identify a set of sequence rules for capsids that preferentially target adrenal gland tissue. Identification of positional frequency rules from in vivo data is described in detail in EXAMPLE 7.

[0291] Disclosed herein are engineered AAV5 VP capsid polypeptides capable of forming an assembled virion that exhibits increased adrenal gland tissue tropism as compared to wildtype AAV5 VP capsid polypeptide, wherein the engineered variant AAV5 VP1 capsid polypeptide sequence has one or more mutations, wherein Xaa1 is selected from A, C, K, Q, R, S, or T, or Xaa1 is selected from C, K, or R, or Xaa1 is C; or Xaa2 is selected from A, C, I, S, T, or V, or Xaa2 is selected from A, V, or T, or Xaa2 is V; or Xaa3 is selected from A, F, G, K, M, Q, R, T, or V, or Xaa3 is selected from A, G, or M, or Xaa3 is M; or Xaa4 is selected from A, K, M, Q, R, or V, or Xaa4 is selected from A, R, or K, or Xaa4 is K; or Xaa5 is selected from F, I, L, M, R, T, V, or Y, or Xaa5 is selected from R, V, or Y, or Xaa5 is V; or Xaa6 is selected from G, H, M, N, R, or S, or Xaa6 is selected from H or N, or Xaa6 is N; or Xaa7 is selected from A, H, K, Q, R, S or V, or Xaa7 is selected from H, Q, or V, or Xaa7 is H; or Xaa8 is selected from A, G, H, M, Q, or S, or Xaa8 is selected from A, G, M, or S, or Xaa8 is S; or Xaa9 is selected from A, E, N, P, R, S, or Y, or Xaa9 is selected from P or E, or Xaa9 is P.

[0292] Disclosed herein are engineered AAV5 VP capsid polypeptides capable of forming an assembled virion that exhibits increased adrenal gland tissue tropism as compared to wildtype AAV5 VP capsid polypeptide, wherein the engineered variant AAV5 VP capsid polypeptide sequence has one or more mutations, wherein the VP1 polypeptide sequence has said one or more mutations in a region from a position corresponding to 581 in SEQ ID NO: 2 to a position corresponding to 589 in SEQ ID NO: 2 and wherein said one or more mutations are selected from the following rules. In some embodiments, Xaa1 is selected from A, C, K, Q, R, S, or T. In some embodiments, Xaa1 is selected from C, K, or R. In some embodiments, Xaa1 is C. In some embodiments, Xaa2 is selected from A, C, I, S, T, or V. In some embodiments, Xaa2 is selected from A, V, or T. In some embodiments, Xaa2 is V. In some embodiments, Xaa3 is selected from A, F, G, K, M, Q, R, T, or V. In some embodiments, Xaa3 is selected from A, G, or M. In some embodiments, Xaa3 is M. In some embodiments, Xaa4 is selected from A, K, M, Q, R, or V. In some embodiments, Xaa4 is selected from A, R, or K. In some embodiments, Xaa4 is K. In some embodiments, Xaa5 is selected from F, I, L, M, R, T, V, or Y. In some embodiments. Xaa5 is selected from R, V, or Y. In some embodiments, Xaa5 is V. In some embodiments, Xaa6 is selected from G, H, M, N, R, or S. In some embodiments, Xaa6 is selected from H or N. In some embodiments, Xaa6 is N. In some embodiments, Xaa7 is selected from A, H, K, Q, R, S or V. In some embodiments, Xaa7 is selected from H, Q, or V. In some embodiments, Xaa7 is H. In some embodiments, Xaa8 is selected from A, G, H, M, Q, or S. In some embodiments, Xaa8 is selected from A, G, M, or S. In some embodiments, Xaa8 is S. In some embodiments, Xaa9 is selected from A, E, N, P, R, S, or Y. In some embodiments, Xaa9 is selected from P or E. In some embodiments, Xaa9 is P.

[0293] Disclosed herein are engineered AAV5 VP capsid polypeptides capable of forming an assembled virion that exhibits increased adrenal gland tissue tropism as compared to wildtype AAV5 VP capsid polypeptide, wherein the engineered variant AAV5 VP capsid polypeptide sequence has one or more mutations, wherein the VP1 polypeptide sequence has said one or more mutations in a region from a position corresponding to 581 in SEQ ID NO: 2 to a position corresponding to 589 in SEQ ID NO: 2 and wherein said one or more mutations are selected from the following rules: Xaa1 is selected from A, C, K, Q, R, S, or T, Xaa2 is selected from A, C, I, S, T, or V, Xaa3 is selected from A, F, G, K, M, Q, R, T, or V, Xaa4 is selected from A, K, M, Q, R, or V, Xaa5 is selected from F, I, L, M, R, T, V, or Y, Xaa6 is selected from G, H, M, N, R, or S, Xaa7 is selected from A, H, K, Q, R, S or V, Xaa8 is selected from A, G, H, M, Q, or S, and, Xaa9 is selected from A, E, N, P, R, S, or Y.

[0294] Disclosed herein are engineered AAV5 VP capsid polypeptides capable of forming an assembled virion that exhibits increased adrenal gland tissue tropism as compared to wildtype AAV5 VP capsid polypeptide, wherein the engineered variant AAV5 VP capsid polypeptide sequence has one or more mutations, wherein the VP1 polypeptide sequence has said one or more mutations in a region from a position corresponding to 581 in SEQ ID NO: 2 to a position corresponding to 589 in SEQ ID NO: 2 and wherein said one or more mutations are as follows: Xaa1 is selected from A, C, K, Q, R, S, or T, Xaa2 is selected from A, C, I, S, T, or V, Xaa3 is selected from A, F, G, K, M, Q, R, T, or V, Xaa4 is selected from A, K, M, Q, R, or V, Xaa5 is selected from F, I, L, M, R, T, V, or Y, Xaa6 is selected from G, H, M, N, R, or S, Xaa7 is selected from A, H, K, Q, R, S or V, Xaa8 is selected from A, G, H, M, Q, or S, Xaa9 is selected from A, E, N, P, R, S, or Y, or any combination thereof.

[0295] In some embodiments, provided herein are AAV5 VP capsid polypeptide having at least one mutation in a region from a position corresponding to 581 to a position corresponding to 589 and having at least 70%, at least 75%, at least 80%, at least 85%, at least 90%, at least 92%, at least 95%, at least 97%, at least 99%, or 100% sequence identity to any sequence selected SEQ ID NO: 1118-SEQ ID NO: 2117, wherein said at least one mutation drives increased adrenal gland tissue tropism.

[0296] B. ML Rules

[0297] For the following set of rules described in this paragraph, favored biophysical properties and favored amino acid residues at each position in the 581 to 589 region of an engineered AAV5 VP1 capsid polypeptide, were determined using in vivo data and two ML models, which are described in EXAMPLE 31. Disclosed herein are engineered AAV5 VP capsid polypeptides capable of forming an assembled virion that exhibits increased adrenal gland tissue tropism as compared to an rAAV virion having a wildtype AAV5 VP capsid polypeptide, wherein the engineered AAV5 VP capsid polypeptide sequence has one or more mutations, wherein the engineered AAV5 VP1 capsid polypeptide sequence has said one or more mutations in a region from a position corresponding to 581 in SEQ ID NO: 2 to a position corresponding to 589 in SEQ ID NO: 2 and wherein Xaa1 is selected from an amino acid of low mol mass at Xaa1 (e.g., Xaa1 is selected from V, P, S, or C); or wherein Xaa1 is selected from an amino acid of low hydropathy (e.g., Xaa1 is selected from T, S, W, or Y); or wherein Xaa2 is selected from an amino acid of low hydropathy (e.g., Xaa2 is selected from R); or wherein Xaa2 is selected from an amino acid of low mutability (e.g., Xaa2 is selected from C); or wherein Xaa2 is selected from an amino acid of low solubility (e.g., Xaa2 is selected from K); or wherein Xaa3 is selected from an amino acid of low average flexibility (e.g., Xaa3 is selected from W, M, or F); or wherein Xaa3 is selected from an amino acid of high solubility (e.g., Xaa3 is selected from M); or wherein Xaa4 is selected from an amino acid of high surface accessibility (e.g., Xaa4 is selected from K or R); or wherein Xaa4 is selected from an amino acid of high average flexibility (e.g., Xaa4 is selected from K, I, or N); or wherein Xaa5 is selected from an amino acid of medium mutability (e.g., Xaa5 is selected from R or H); or wherein Xaa5 is selected from an amino acid of high goldman engelman steitz (e.g., Xaa5 is selected from V or L); or wherein Xaa5 is selected from an amino acid of low hydropathy (e.g., Xaa5 is selected from R); or wherein Xaa5 is selected from an amino acid of high volume (e.g., Xaa5 is selected from Y, R, or F); or wherein Xaa6 is selected from an amino acid of high solubility (e.g., Xaa6 is selected from Y, V, M, A, or C); or wherein Xaa7 is selected from an amino acid of medium mutability (e.g., Xaa7 is selected from V, H, or R); or wherein Xaa7 is selected from an amino acid of low solubility (e.g., Xaa7 is selected from R); or wherein Xaa8 is selected from an amino acid of high average flexibility (e.g., Xaa8 is selected from K, I, or N); or wherein Xaa8 is selected from an amino acid of high mol mass (e.g., Xaa8 is selected from R or Y); or wherein Xaa9 is selected from an amino acid of high mutability (e.g., Xaa9 is selected from N); or any combination thereof.

[0298] In some embodiments, Xaa1 is selected from an amino acid of low mol mass. In some embodiments, Xaa1 is selected from V, P, S, or C. In some embodiments, Xaa1 is selected from an amino acid of low hydropathy. In some embodiments, Xaa1 is selected from T, S, W, or Y. In some embodiments, Xaa2 is selected from an amino acid of low hydropathy. In some embodiments, Xaa2 is selected from R. In some embodiments. Xaa2 is selected from an amino acid of low mutability. In some embodiments, Xaa2 is selected from C. In some embodiments. Xaa2 is selected from an amino acid of low solubility. In some embodiments, Xaa2 is selected from K. In some embodiments, Xaa3 is selected from an amino acid of low average flexibility. In some embodiments, Xaa3 is selected from W, M, or F. In some embodiments, Xaa3 is selected from an amino acid of high solubility. In some embodiments, Xaa3 is selected from M. In some embodiments, Xaa4 is selected from an amino acid of high surface accessibility. In some embodiments, Xaa4 is selected from K or R. In some embodiments, Xaa4 is selected from an amino acid of high average flexibility. In some embodiments. Xaa4 is selected from K, I, or N. In some embodiments, Xaa5 is selected from an amino acid of medium mutability. In some embodiments, Xaa5 is selected from R, H. In some embodiments, Xaa5 is selected from an amino acid of high goldman engelman steitz. In some embodiments, Xaa5 is selected from V, L. In some embodiments, Xaa5 is selected from an amino acid of low hydropathy. In some embodiments, Xaa5 is selected from R. In some embodiments, Xaa5 is selected from an amino acid of high volume. In some embodiments, Xaa5 is selected from Y, R, or F. In some embodiments, Xaa6 is selected from an amino acid of high solubility. In some embodiments, Xaa6 is selected from Y, V, M, A, or C. In some embodiments, Xaa7 is selected from an amino acid of medium mutability. In some embodiments, Xaa7 is selected from V, H, or R. In some embodiments, Xaa7 is selected from an amino acid of low solubility. In some embodiments, Xaa7 is selected from R. In some embodiments, Xaa8 is selected from an amino acid of high average flexibility. In some embodiments, Xaa8 is selected from K, I, or N. In some embodiments, Xaa8 is selected from an amino acid of high mol mass. In some embodiments, Xaa8 is selected from R or Y. In some embodiments, Xaa9 is selected from an amino acid of high mutability. In some embodiments, Xaa9 is selected from N.

[0299] In some embodiments, provided herein are AAV5 VP capsid polypeptide having at least one mutation in a region from a position corresponding to 581 to a position corresponding to 589 of AAV5 VP1 and having at least 70%, at least 75%, at least 80%, at least 85%, at least 90%, at least 92%, at least 95%, at least 97%, at least 99%, or 100% sequence identity to any sequence selected from SEQ ID NO: 2118-SEQ ID NO: 3117, wherein said at least one mutation drives increased adrenal gland tissue tropism.

[0300] C. Enriched Adrenal Gland Sequences

[0301] In some embodiments, provided herein are AAV5 VP capsid polypeptide having at least one mutation in a region from a position corresponding to 581 to a position corresponding to 589 of AAV5 VP1 and having at least 70%, at least 75%, at least 80%, at least 85%, at least 90%, at least 92%, at least 95%, at least 97%, at least 99%, or 100% sequence identity to any sequence selected from SEQ ID NO: 3118-SEQ ID NO: 4117, wherein said at least one mutation drives increased adrenal gland tissue tropism.

[0302] 6.7.9. In Vivo Selected Mutated VP Polypeptides that Confer Increased Sciatic Nerve Tropism

[0303] The present disclosure provides AAV5 virions with a VP capsid polypeptide having at least one mutation in a region with residues that interact with target cells (e.g., a target sciatic nerve cell in a target sciatic nerve tissue of interest), where the at least one mutation confers increased sciatic nerve tissue tropism as compared to a wildtype VP capsid polypeptide. In some embodiments, provided herein are AAV5 VP1 capsid polypeptide having a sequence homology of at least 80% to SEQ ID NO: 1, wherein the AAV5 VP1 capsid polypeptide has at least one mutation in a region from a position corresponding to 581 to a position corresponding to 589 of SEQ ID NO: 1 and wherein said at least one mutation drives increased sciatic nerve tropism. The following sequences rules and sequences also apply to the region in AAV5 VP2 (amino acid residues 445 to 453; VP2 sequence shown in SEQ ID NO: 1115) and AAV5 VP3 (amino acid residues 389 to 397; VP3 sequences shown in SEQ ID NO: 1116) corresponding to AAV5 VP1 amino acid residues 581 to 589. Thus, the present disclosure encompasses AAV5 VP2 capsid polypeptides and AAV5 VP3 capsid polypeptides having one or more mutations in the VP2 and VP3 regions corresponding to the AAV5 VP1 amino acid residues of the 581 to 589 region, where the one or more mutations comport to the rules or sequences in the following section.

[0304] A. Positional Frequency Rules

[0305] In this section, unless otherwise specified, the frequency of a given amino acid residue occurring at a specified position corresponding to position 581 to position 589 of SEQ ID NO: 1 (generalized in SEQ ID NO: 2) in variants identified in sciatic nerve over the frequency of that given amino acid residue occurring at the specified position in variants identified in all other harvested tissues (CNS (cortex forebrain, cortex occipital, cortex temporal, thalamus, hypothalamus, substantia nigra, hippocampus DG, hippocampus CA1, hippocampus CA3, cerebellum), liver, skeletal muscle, heart, lung, spleen, lymph node, bone marrow, mammary gland, skin, adrenal gland, thyroid, colon, and spinal cord tissues) was analyzed to identify a set of sequence rules for capsids that preferentially target sciatic nerve tissue. Identification of positional frequency rules from in vivo data is described in detail in EXAMPLE 8.

[0306] Disclosed herein are engineered AAV5 VP capsid polypeptides capable of forming an assembled virion that exhibits increased sciatic nerve tissue tropism as compared to wildtype AAV5 VP capsid polypeptide, wherein the engineered variant AAV5 VP1 capsid polypeptide sequence has one or more mutations, wherein Xaa1 is selected from C, G, K, M, Q, R, or Y, or Xaa1 is selected from C, R, or Q, or Xaa1 is C; or Xaa2 is selected from A, C, F, I, Q, T, or V, or Xaa2 is selected from A, C, or I, or Xaa2 is A; or Xaa3 is selected from A, F, I, M, R, S, or T, or Xaa3 is selected from F, M, R, or S, or Xaa3 is R; or Xaa4 is selected from E, N, T, Q, or V, or Xaa4 is selected from E, T, or V, or Xaa4 is T; or Xaa5 is selected from F, H, Q, S, V, or Y, or Xaa5 is selected from F, V, or Y, or Xaa5 is V; or Xaa6 is selected from K, M, N, Q, S, or V, or Xaa6 is selected from M, N, or S, or Xaa6 is N; or Xaa7 is selected from K, M, Q, R, or T, or Xaa7 is selected from M, Q, or T, or Xaa7 is M; or Xaa8 is selected from A, G, H, Q, S, or V, or Xaa8 is selected from H or S, or Xaa8 is H; or Xaa9 is selected from C, E, I, K, or R, or Xaa9 is selected from C, I, or K, or Xaa9 is I.

[0307] herein are engineered AAV5 VP capsid polypeptides capable of forming an assembled virion that exhibits increased sciatic nerve tissue tropism as compared to wildtype AAV5 VP capsid polypeptide, wherein the engineered variant AAV5 VP capsid polypeptide sequence has one or more mutations, wherein the VP1 polypeptide sequence has said one or more mutations in a region from a position corresponding to 581 in SEQ ID NO: 2 to a position corresponding to 589 in SEQ ID NO: 2 and wherein said one or more mutations are selected from the following rules. In some embodiments, Xaa1 is selected from C, G, K, M, Q, R, or Y. In some embodiments, Xaa1 is selected from C, R, or Q. In some embodiments, Xaa1 is C. In some embodiments, Xaa2 is selected from A, C, F, I, Q, T, or V. In some embodiments, Xaa2 is selected from A, C, or I. In some embodiments, Xaa2 is A. In some embodiments, Xaa3 is selected from A, F, I, M, R, S, or T. In some embodiments, Xaa3 is selected from F, M, R, or S. In some embodiments, Xaa3 is R. In some embodiments, Xaa4 is selected from E, N, T, Q, or V. In some embodiments, Xaa4 is selected from E, T, or V. In some embodiments, Xaa4 is T. In some embodiments, Xaa5 is selected from F, H, Q, S. V, or Y. In some embodiments, Xaa5 is selected from F, V, or Y. In some embodiments, Xaa5 is V. In some embodiments, Xaa6 is selected from K, M, N, Q, S, or V. In some embodiments, Xaa6 is selected from M, N, or S. In some embodiments, Xaa6 is N. In some embodiments, Xaa7 is selected from K, M, Q, R, or T. In some embodiments, Xaa7 is selected from M, Q, or T. In some embodiments, Xaa7 is M. In some embodiments, Xaa8 is selected from A, G, H, Q, S, or V. In some embodiments, Xaa8 is selected from H or S. In some embodiments, Xaa8 is H. In some embodiments, Xaa9 is selected from C, E, I, K, or R. In some embodiments, Xaa9 is selected from C, I, or K. In some embodiments, Xaa9 is I.

[0308] Disclosed herein are engineered AAV5 VP capsid polypeptides capable of forming an assembled virion that exhibits increased sciatic nerve tissue tropism as compared to wildtype AAV5 VP capsid polypeptide, wherein the engineered variant AAV5 VP capsid polypeptide sequence has one or more mutations, wherein the VP1 polypeptide sequence has said one or more mutations in a region from a position corresponding to 581 in SEQ ID NO: 2 to a position corresponding to 589 in SEQ ID NO: 2 and wherein said one or more mutations are selected from the following rules: Xaa1 is selected from C, G, K, M, Q, R, or Y, Xaa2 is selected from A, C, F, I, Q, T, or V, Xaa3 is selected from A, F, I, M, R, S, or T, Xaa4 is selected from E, N, T, Q, or V, Xaa5 is selected from F, H, Q, S, V, or Y, Xaa6 is selected from K, M, N, Q, S, or V, Xaa7 is selected from K, M, Q, R, or T, Xaa8 is selected from A, G, H, Q, S, or V, and Xaa9 is selected from C, E, I, K, or R.

[0309] Disclosed herein are engineered AAV5 VP capsid polypeptides capable of forming an assembled virion that exhibits increased sciatic nerve tissue tropism as compared to wildtype AAV5 VP capsid polypeptide, wherein the engineered variant AAV5 VP capsid polypeptide sequence has one or more mutations, wherein the VP1 polypeptide sequence has said one or more mutations in a region from a position corresponding to 581 in SEQ ID NO: 2 to a position corresponding to 589 in SEQ ID NO: 2 and wherein said one or more mutations are as follows: Xaa1 is selected from C, G, K, M, Q, R, or Y, Xaa2 is selected from A, C, F, I, Q, T, or V, Xaa3 is selected from A, F, I, M, R, S, or T, Xaa4 is selected from E, N, T, Q, or V, Xaa5 is selected from F, H, Q, S, V, or Y, Xaa6 is selected from K, M, N, Q, S, or V, Xaa7 is selected from K, M, Q, R, or T, Xaa8 is selected from A, G, H, Q, S, or V, Xaa9 is selected from C, E, I, K, or R, or any combination thereof.

[0310] In some embodiments, provided herein are AAV5 VP capsid polypeptide having at least one mutation in a region from a position corresponding to 581 to a position corresponding to 589 of AAV5 VP1 and having at least 70%, at least 75%, at least 80%, at least 85%, at least 90%, at least 92%, at least 95%, at least 97%, at least 99%, or 100% sequence identity to any sequence selected from SEQ ID NO: 26118-SEQ ID NO: 26990, wherein said at least one mutation drives increased sciatic nerve tissue tropism.

[0311] B. ML Rules

[0312] For the following set of rules described in this paragraph, favored biophysical properties and favored amino acid residues at each position in the 581 to 589 region of an engineered AAV5 VP1 capsid polypeptide, were determined using in vivo data and two ML models, which are described in EXAMPLE 38. Disclosed herein are engineered AAV5 VP capsid polypeptides capable of forming an assembled virion that exhibits increased sciatic nerve tissue tropism as compared to an rAAV virion having a wildtype AAV5 VP capsid polypeptide, wherein the engineered AAV5 VP capsid polypeptide sequence has one or more mutations, wherein the engineered AAV5 VP1 capsid polypeptide sequence has said one or more mutations in a region from a position corresponding to 581 in SEQ ID NO: 2 to a position corresponding to 589 in SEQ ID NO: 2 and wherein Xaa1 is selected from an amino acid of high average flexibility (e.g., Xaa1 is selected from G or R); or wherein Xaa1 is selected from an amino acid of low solubility (e.g., Xaa1 is selected from R, or Q); or wherein Xaa1 is selected from an amino acid of low mutability (e.g., Xaa1 is selected from C, L, F, Y, R, K, P, or H); or wherein Xaa1 is selected from an amino acid of high volume (e.g., Xaa1 is selected from Y, F); or wherein Xaa2 is selected from an amino acid of high surface accessibility (e.g., Xaa2 is selected from E, R, or K); or wherein Xaa3 is selected from an amino acid of medium mutability (e.g., Xaa3 is selected from H or R); or wherein Xaa3 is selected from an amino acid of medium average flexibility (e.g., Xaa3 is selected from V or Y); or wherein Xaa4 is selected from an amino acid of high mutability (e.g., Xaa4 is selected from N); or wherein Xaa4 is selected from an amino acid of high average flexibility (e.g., Xaa4 is selected from I, N, G, or R); or wherein Xaa4 is selected from an amino acid of low solubility (e.g., Xaa4 is selected from N); or wherein Xaa6 is selected from an amino acid of low mutability (e.g., Xaa6 is selected from C, L, F, or Y); or wherein Xaa6 is selected from an amino acid of high volume (e.g., Xaa6 is selected from K, M, I, or L); or wherein Xaa7 is selected from an amino acid of low mutability (e.g., Xaa7 is selected from L, F, or Y); or wherein Xaa7 is selected from an amino acid of medium mol mass (e.g., Xaa7 is selected from D, I, L, or N); or wherein Xaa8 is selected from an amino acid of high surface accessibility (e.g., Xaa8 is selected from S, Y, T, D, P, H, or N); or wherein Xaa9 is selected from an amino acid of low mutability (e.g., Xaa9 is selected from C, H, R); or wherein Xaa9 is selected from an amino acid of medium solubility (e.g., Xaa9 is selected from Q, T, or C); or wherein Xaa9 is selected from an amino acid of low surface accessibility (e.g., Xaa9 is selected from C); or any combination thereof.

[0313] In some embodiments, Xaa1 is selected from an amino acid of high average flexibility. In some embodiments, Xaa1 is selected from G or R. In some embodiments, Xaa1 is selected from an amino acid of low solubility. In some embodiments, Xaa1 is selected from R or Q. In some embodiments, Xaa1 is selected from an amino acid of low mutability. In some embodiments, Xaa1 is selected from C, L, F, Y, R, K, P, or H. In some embodiments, Xaa1 is selected from an amino acid of high volume. In some embodiments, Xaa1 is selected from Y or F. In some embodiments, Xaa2 is selected from an amino acid of high surface accessibility. In some embodiments, Xaa2 is selected from E, R, or K. In some embodiments, Xaa3 is selected from an amino acid of medium mutability. In some embodiments, Xaa3 is selected from H or R. In some embodiments, Xaa3 is selected from an amino acid of medium average flexibility. In some embodiments, Xaa3 is selected from V or Y. In some embodiments, Xaa4 is selected from an amino acid of high mutability. In some embodiments, Xaa4 is selected from N. In some embodiments, Xaa4 is selected from an amino acid of high average flexibility. In some embodiments, Xaa4 is selected from I, N, G, or R. In some embodiments. Xaa4 is selected from an amino acid of low solubility. In some embodiments, Xaa4 is selected from N. In some embodiments, Xaa6 is selected from an amino acid of low mutability. In some embodiments, Xaa6 is selected from C, L, F, or Y. In some embodiments, Xaa6 is selected from an amino acid of high volume. In some embodiments, Xaa6 is selected from K, M, I, or L. In some embodiments, Xaa7 is selected from an amino acid of low mutability. In some embodiments, Xaa7 is selected from L, F, or Y. In some embodiments, Xaa7 is selected from an amino acid of medium mol mass. In some embodiments, Xaa7 is selected from D, I, L, or N. In some embodiments, Xaa8 is selected from an amino acid of high surface accessibility. In some embodiments, Xaa8 is selected from S, Y, T, D, P, H, or N. In some embodiments, Xaa9 is selected from an amino acid of low mutability. In some embodiments, Xaa9 is selected from C, H, or R In some embodiments, Xaa9 is selected from an amino acid of medium solubility. In some embodiments, Xaa9 is selected from Q, T, or C. In some embodiments, Xaa9 is selected from an amino acid of low surface accessibility. In some embodiments, Xaa9 is selected from C.

[0314] In some embodiments, provided herein are AAV5 VP capsid polypeptide having at least one mutation in a region from a position corresponding to 581 to a position corresponding to 589 of AAV5 VP1 and having at least 70%, at least 75%, at least 80%, at least 85%, at least 90%, at least 92%, at least 95%, at least 97%, at least 99%, or 100% sequence identity to any sequence selected from SEQ ID NO: 26991-SEQ ID NO: 27990, wherein said at least one mutation drives increased sciatic nerve tissue tropism.

[0315] C. Enriched Sciatic Nerve Sequences

[0316] In some embodiments, provided herein are AAV5 VP capsid polypeptide having at least one mutation in a region from a position corresponding to 581 to a position corresponding to 589 of AAV5 VP1 and having at least 70%, at least 75%, at least 80%, at least 85%, at least 90%, at least 92%, at least 95%, at least 97%, at least 99%, or 100% sequence identity to any sequence selected from SEQ ID NO: 27991-SEQ ID NO: 28990, wherein said at least one mutation drives increased sciatic nerve tissue tropism.

[0317] 6.7.10. In Vivo Selected Mutated VP Polypeptides that Confer Increased Skeletal Muscle Tropism

[0318] The present disclosure provides AAV5 virions with a VP capsid polypeptide having at least one mutation in a region with residues that interact with target cells (e.g., a target skeletal muscle cell in a target skeletal muscle tissue of interest), where the at least one mutation confers increased skeletal muscle tissue tropism as compared to a wildtype VP capsid polypeptide. In some embodiments, provided herein are AAV5 VP1 capsid polypeptide having a sequence homology of at least 80% to SEQ ID NO: 1, wherein the AAV5 VP1 capsid polypeptide has at least one mutation in a region from a position corresponding to 581 to a position corresponding to 589 of SEQ ID NO: 1 and wherein said at least one mutation drives increased skeletal muscle tropism. The following sequences rules and sequences also apply to the region in AAV5 VP2 (amino acid residues 445 to 453; VP2 sequence shown in SEQ ID NO: 1115) and AAV5 VP3 (amino acid residues 389 to 397; VP3 sequences shown in SEQ ID NO: 1116) corresponding to AAV5 VP1 amino acid residues 581 to 589. Thus, the present disclosure encompasses AAV5 VP2 capsid polypeptides and AAV5 VP3 capsid polypeptides having one or more mutations in the VP2 and VP3 regions corresponding to the AAV5 VP1 amino acid residues of the 581 to 589 region, where the one or more mutations comport to the rules or sequences in the following section.

[0319] A. Positional Frequency Rules

[0320] In this section, unless otherwise specified, the frequency of a given amino acid residue occurring at a specified position corresponding to position 581 to position 589 of SEQ ID NO: 1 (generalized in SEQ ID NO: 2) in variants identified in skeletal muscle over the frequency of that given amino acid residue occurring at the specified position in variants identified in all other harvested tissues (CNS (cortex forebrain, cortex occipital, cortex temporal, thalamus, hypothalamus, substantia nigra, hippocampus DG, hippocampus CA1, hippocampus CA3, cerebellum), liver, heart, lung, spleen, lymph node, bone marrow, mammary gland, skin, adrenal gland, thyroid, colon, sciatic nerve, and spinal cord tissues) was analyzed to identify a set of sequence rules for capsids that preferentially target skeletal muscle tissue. Identification of positional frequency rules from in vivo data is described in detail in EXAMPLE 9.

[0321] Disclosed herein are engineered AAV5 VP capsid polypeptides capable of forming an assembled virion that exhibits increased skeletal muscle tissue tropism as compared to wildtype AAV5 VP capsid polypeptide, wherein the engineered variant AAV5 VP1 capsid polypeptide sequence has one or more mutations, wherein Xaa1 is selected from A, E, H, M, P, Q, or S, or Xaa1 is selected from P or Q, or Xaa1 is Q; or Xaa2 is selected from F, H, I, T, or V, or Xaa2 is selected from T or V, or Xaa2 is V; or Xaa3 is selected from A, G, I, K, M, Q, R, S, T, or V, or Xaa3 is selected from A, L, P, R, or T, or Xaa3 is selected from L, P, or T, or Xaa3 is P; or Xaa4 is selected from D, E, G, P, or S, or Xaa4 is selected from D, E, or S, or Xaa4 is E; or Xaa5 is selected from H, L, M, P, or V, or Xaa5 is selected from L, M, or V, or Xaa5 is L; or Xaa6 is selected from E, H, N, or P, or Xaa6 is P; or Xaa7 is selected from A, H, N, Q or T, or Xaa7 is H; or Xaa8 is selected from I, K, M, P, or W, or Xaa8 is selected from I, P, or W, or Xaa8 is P; or Xaa9 is selected from A, I, M, P, or V, or Xaa9 is selected from A, M, or P, or Xaa9 is M.

[0322] Disclosed herein are engineered AAV5 VP capsid polypeptides capable of forming an assembled virion that exhibits increased skeletal muscle tissue tropism as compared to wildtype AAV5 VP capsid polypeptide, wherein the engineered variant AAV5 VP capsid polypeptide sequence has one or more mutations, wherein the VP1 polypeptide sequence has said one or more mutations in a region from a position corresponding to 581 in SEQ ID NO: 2 to a position corresponding to 589 in SEQ ID NO: 2 and wherein said one or more mutations are selected from the following rules. In some embodiments, Xaa1 is selected from A, E, H, M, P, Q, or S. In some embodiments, Xaa1 is selected from P or Q. In some embodiments, Xaa1 is Q. In some embodiments, Xaa2 is selected from F, H, I, T, or V. In some embodiments, Xaa2 is selected from T or V. In some embodiments, Xaa2 is V. In some embodiments. Xaa3 is selected from A, G, I, K, M, Q, R, S, T, or V. In some embodiments, Xaa3 is selected from A, L, P, R, or T. In some embodiments, Xaa3 is selected from L, P, or T. In some embodiments, Xaa3 is P. In some embodiments, Xaa4 is selected from D, E, G, P, or S. In some embodiments, Xaa4 is selected from D, E, or S. In some embodiments, Xaa4 is E. In some embodiments, Xaa5 is selected from H, L, M, P, or V. In some embodiments, Xaa5 is selected from L, M, or V. In some embodiments, Xaa5 is L. In some embodiments, Xaa6 is selected from E, H, N, or P. In some embodiments, Xaa6 is P. In some embodiments, Xaa7 is selected from A, H, N, Q or T. In some embodiments, Xaa7 is H. In some embodiments, Xaa8 is selected from I, K, M, P, or W. In some embodiments, Xaa8 is selected from I, P, or W. In some embodiments. Xaa8 is P. In some embodiments, Xaa9 is selected from A, I, M, P, or V. In some embodiments, Xaa9 is selected from A. M, or P. In some embodiments, Xaa9 is M.

[0323] Disclosed herein are engineered AAV5 VP capsid polypeptides capable of forming an assembled virion that exhibits increased skeletal muscle tissue tropism as compared to wildtype AAV5 VP capsid polypeptide, wherein the engineered variant AAV5 VP capsid polypeptide sequence has one or more mutations, wherein the VP1 polypeptide sequence has said one or more mutations in a region from a position corresponding to 581 in SEQ ID NO: 2 to a position corresponding to 589 in SEQ ID NO: 2 and wherein said one or more mutations are selected from the following rules: Xaa1 is selected from A, E, H, M, P, Q, or S, Xaa2 is selected from F, H, I, T, or V, Xaa3 is selected from A, G, I, K, M, Q, R, S, T, or V, Xaa4 is selected from D, E, G, P, or S, Xaa5 is selected from H, L, M, P, or V, Xaa6 is selected from E, H, N, or P, Xaa7 is selected from A, H, N, Q or T, Xaa8 is selected from I, K, M, P, or W, and Xaa9 is selected from A, I, M, P, or V.

[0324] Disclosed herein are engineered AAV5 VP capsid polypeptides capable of forming an assembled virion that exhibits increased skeletal muscle tissue tropism as compared to wildtype AAV5 VP capsid polypeptide, wherein the engineered variant AAV5 VP capsid polypeptide sequence has one or more mutations, wherein the VP1 polypeptide sequence has said one or more mutations in a region from a position corresponding to 581 in SEQ ID NO: 2 to a position corresponding to 589 in SEQ ID NO: 2 and wherein said one or more mutations are as follows: Xaa1 is selected from A, E, H, M, P, Q, or S, Xaa2 is selected from F, H, I, T, or V, Xaa3 is selected from A, G, I, K, M, Q, R, S, T, or V, Xaa4 is selected from D, E, G, P, or S, Xaa5 is selected from H, L, M, P, or V, Xaa6 is selected from E, H, N, or P, Xaa7 is selected from A, H, N, Q or T, Xaa8 is selected from I, K, M, P, or W, Xaa9 is selected from A, I, M, P, or V, or any combination thereof.

[0325] In some embodiments, provided herein are AAV5 VP capsid polypeptide having at least one mutation in a region from a position corresponding to 581 to a position corresponding to 589 of AAV5 VP1 and having at least 70%, at least 75%, at least 80%, at least 85%, at least 90%, at least 92%, at least 95%, at least 97%, at least 99%, or 100% sequence identity to any sequence selected from SEQ ID NO: 28991-SEQ ID NO: 29990, wherein said at least one mutation drives increased skeletal muscle tissue tropism.

[0326] B. ML Rules

[0327] For the following set of rules described in this paragraph, favored biophysical properties and favored amino acid residues at each position in the 581 to 589 region of an engineered AAV5 VP1 capsid polypeptide, were determined using in vivo data and two ML models, which are described in EXAMPLE 39. Disclosed herein are engineered AAV5 VP capsid polypeptides capable of forming an assembled virion that exhibits increased skeletal muscle tissue tropism as compared to an rAAV virion having a wildtype AAV5 VP capsid polypeptide, wherein the engineered AAV5 VP capsid polypeptide sequence has one or more mutations, wherein the engineered AAV5 VP1 capsid polypeptide sequence has said one or more mutations in a region from a position corresponding to 581 in SEQ ID NO: 2 to a position corresponding to 589 in SEQ ID NO: 2 and wherein Xaa1 is selected from an amino acid of high average flexibility (e.g., Xaa1 is selected from G or R); or wherein Xaa1 is selected from an amino acid of low average flexibility (e.g., Xaa1 is selected from W, M, F, or H); or wherein Xaa1 is selected from an amino acid of high mol mass (e.g., Xaa1 is selected from R, F, or W); or wherein Xaa2 is selected from an amino acid of low hydropathy (e.g., Xaa2 is selected from K, or R); or wherein Xaa2 is selected from an amino acid of low mutability (e.g., Xaa2 is selected from C, R, or H); or wherein Xaa2 is selected from an amino acid of high average flexibility (e.g., Xaa2 is selected from G or R); or wherein Xaa3 is selected from an amino acid of high average flexibility (e.g., Xaa3 is selected from G or R); or wherein Xaa4 is selected from an amino acid of high hydrophilicity (e.g., Xaa4 is selected from D, E, R, K, or N); or wherein Xaa4 is selected from an amino acid of low mutability (e.g., Xaa4 is selected from C, R, H); or wherein Xaa5 is selected from an amino acid of low mol mass (e.g., Xaa5 is selected from A); or wherein Xaa5 is selected from an amino acid of low average flexibility (e.g., Xaa5 is selected from A or L); or wherein Xaa5 is selected from an amino acid of high mutability (e.g., Xaa5 is selected from D, A, or E); or wherein Xaa6 is selected from an amino acid of low average flexibility (e.g., Xaa6 is selected from W, M, or F); or wherein Xaa6 is selected from an amino acid of low mutability (e.g., Xaa6 is selected from C); or wherein Xaa6 is selected from an amino acid of high mol mass (e.g., Xaa6 is selected from W); or wherein Xaa7 is selected from an amino acid of low goldman engelman steitz (e.g., Xaa7 is selected from R); or wherein Xaa7 is selected from an amino acid of high average flexibility (e.g., Xaa7 is selected from D, R, P, G, or S); or wherein Xaa7 is selected from an amino acid of high mutability (e.g., Xaa7 is selected from R, H, or N); or wherein Xaa7 is selected from an amino acid of low solubility (e.g., Xaa7 is selected from R or Q); or wherein Xaa8 is selected from an amino acid of high hydrophilicity (e.g., Xaa8 is selected from D, E, R, K, or N); or wherein Xaa9 is selected from an amino acid of low mutability (e.g., Xaa9 is selected from Y, F, or L); or any combination thereof.

[0328] In some embodiments, Xaa1 is selected from an amino acid of high average flexibility. In some embodiments, Xaa1 is selected from G or R. In some embodiments, Xaa1 is selected from an amino acid of low average flexibility. In some embodiments, Xaa1 is selected from W, M, F, or H. In some embodiments, Xaa1 is selected from an amino acid of high mol mass. In some embodiments, Xaa1 is selected from R, F, or W. In some embodiments, Xaa2 is selected from an amino acid of low hydropathy. In some embodiments, Xaa2 is selected from K or R. In some embodiments, Xaa2 is selected from an amino acid of low mutability. In some embodiments, Xaa2 is selected from C, R, or H. In some embodiments, Xaa2 is selected from an amino acid of high average flexibility. In some embodiments, Xaa2 is selected from G or R. In some embodiments, Xaa3 is selected from an amino acid of high average flexibility. In some embodiments, Xaa3 is selected from G or R. In some embodiments, Xaa4 is selected from an amino acid of high hydrophilicity. In some embodiments, Xaa4 is selected from D, E, R, K, or N. In some embodiments, Xaa4 is selected from an amino acid of low mutability. In some embodiments, Xaa4 is selected from C, R, or H. In some embodiments, Xaa5 is selected from an amino acid of low mol mass. In some embodiments, Xaa5 is selected from A. In some embodiments, Xaa5 is selected from an amino acid of low average flexibility. In some embodiments, Xaa5 is selected from A or L. In some embodiments, Xaa5 is selected from an amino acid of high mutability. In some embodiments, Xaa5 is selected from D, A, or E. In some embodiments, Xaa6 is selected from an amino acid of low average flexibility. In some embodiments, Xaa6 is selected from W, M, or F. In some embodiments, Xaa6 is selected from an amino acid of low mutability. In some embodiments, Xaa6 is selected from C. In some embodiments, Xaa6 is selected from an amino acid of high mol mass. In some embodiments, Xaa6 is selected from W. In some embodiments, Xaa7 is selected from an amino acid of low goldman engelman steitz. In some embodiments, Xaa7 is selected from R. In some embodiments, Xaa7 is selected from an amino acid of high average flexibility. In some embodiments, Xaa7 is selected from D, R, P, G, or S. In some embodiments, Xaa7 is selected from an amino acid of high mutability. In some embodiments, Xaa7 is selected from R, H, or N. In some embodiments, Xaa7 is selected from an amino acid of low solubility. In some embodiments, Xaa7 is selected from R or Q. In some embodiments, Xaa8 is selected from an amino acid of high hydrophilicity. In some embodiments, Xaa8 is selected from D, E, R, K, or N. In some embodiments, Xaa9 is selected from an amino acid of low mutability. In some embodiments, Xaa9 is selected from Y, F, or L.

[0329] In some embodiments, provided herein are AAV5 VP capsid polypeptide having at least one mutation in a region from a position corresponding to 581 to a position corresponding to 589 of AAV5 VP1 and having at least 70%, at least 75%, at least 80%, at least 85%, at least 90%, at least 92%, at least 95%, at least 97%, at least 99%, or 100% sequence identity to any sequence selected from SEQ ID NO: 29991-SEQ ID NO: 30990, wherein said at least one mutation drives increased skeletal muscle tissue tropism.

[0330] C. Enriched Skeletal Muscle Sequences

[0331] In some embodiments, provided herein are AAV5 VP capsid polypeptide having at least one mutation in a region from a position corresponding to 581 to a position corresponding to 589 of AAV5 VP1 and having at least 70%, at least 75%, at least 80%, at least 85%, at least 90%, at least 92%, at least 95%, at least 97%, at least 99%, or 100% sequence identity to any sequence selected from SEQ ID NO: 30991-SEQ ID NO: 31990, wherein said at least one mutation drives increased skeletal muscle tissue tropism.

[0332] 6.7.11. In Vivo Selected Mutated VP Polypeptides that Confer Increased Spinal Cord Tropism

[0333] The present disclosure provides AAV5 virions with a VP capsid polypeptide having at least one mutation in a region with residues that interact with target cells (e.g., a target spinal cord cell in a target spinal cord tissue of interest), where the at least one mutation confers increased CNS tissue tropism as compared to a wildtype VP capsid polypeptide. In some embodiments, provided herein are AAV5 VP1 capsid polypeptide having a sequence homology of at least 80% to SEQ ID NO: 1, wherein the AAV5 VP1 capsid polypeptide has at least one mutation in a region from a position corresponding to 581 to a position corresponding to 589 of SEQ ID NO: 1 and wherein said at least one mutation drives increased spinal cord tropism. The following sequences rules and sequences also apply to the region in AAV5 VP2 (amino acid residues 445 to 453; VP2 sequence shown in SEQ ID NO: 1115) and AAV5 VP3 (amino acid residues 389 to 397; VP3 sequences shown in SEQ ID NO: 1116) corresponding to AAV5 VP1 amino acid residues 581 to 589. Thus, the present disclosure encompasses AAV5 VP2 capsid polypeptides and AAV5 VP3 capsid polypeptides having one or more mutations in the VP2 and VP3 regions corresponding to the AAV5 VP1 amino acid residues of the 581 to 589 region, where the one or more mutations comport to the rules or sequences in the following section.

[0334] A. Positional Frequency Rules

[0335] In this section, unless otherwise specified, the frequency of a given amino acid residue occurring at a specified position corresponding to position 581 to position 589 of SEQ ID NO: 1 (generalized in SEQ ID NO: 2) in variants identified in spinal cord over the frequency of that given amino acid residue occurring at the specified position in variants identified in all other harvested tissues (CNS (cortex forebrain, cortex occipital, cortex temporal, thalamus, hypothalamus, substantia nigra, hippocampus DG, hippocampus CA1, hippocampus CA3, cerebellum), liver, skeletal muscle, heart, lung, spleen, lymph node, bone marrow, mammary gland, skin, adrenal gland, thyroid, colon, and sciatic nerve tissues) was analyzed to identify a set of sequence rules for capsids that preferentially target spinal cord tissue. Identification of positional frequency rules from in vivo data is described in detail in EXAMPLE 10.

[0336] Disclosed herein are engineered AAV5 VP capsid polypeptides capable of forming an assembled virion that exhibits increased spinal cord tissue tropism as compared to wildtype AAV5 VP capsid polypeptide, wherein the engineered variant AAV5 VP1 capsid polypeptide sequence has one or more mutations, wherein Xaa1 is selected from A, C, K, Q, R, S, or W, or Xaa1 is selected from K, R, or W, or Xaa1 is K; or Xaa2 is selected from H, I, K, L, T, V, or W, or Xaa2 is selected from H, I, or T, or Xaa2 is I; or Xaa3 is selected from C, F, G, H, I, K, N, or R, or Xaa3 is selected from F, I, or R, or Xaa3 is I; or Xaa4 is selected from I, M, Q, S, or V, or Xaa4 is selected from I, M, or V, or Xaa4 is V; or Xaa5 is selected from H, K, Q, T, W, or Y, or Xaa5 is selected from T, W, or Y, or Xaa5 is Y; or Xaa6 is selected from H, L, N, Q, R, W, or Y, or Xaa6 is selected from L, N, R, or Y, or Xaa6 is Y; or Xaa7 is selected from D, H, P, Q, or R, or Xaa7 is R; or Xaa8 is selected from D, F, L, S, T, or Y, or Xaa8 is selected from S, T, or Y, or Xaa8 is T; or Xaa9 is selected from C, I, N, P, R, S, or Y, or Xaa9 is selected from I, P, or R, or Xaa9 is I.

[0337] Disclosed herein are engineered AAV5 VP capsid polypeptides capable of forming an assembled virion that exhibits increased spinal cord tissue tropism as compared to wildtype AAV5 VP capsid polypeptide, wherein the engineered variant AAV5 VP capsid polypeptide sequence has one or more mutations, wherein the VP1 polypeptide sequence has said one or more mutations in a region from a position corresponding to 581 in SEQ ID NO: 2 to a position corresponding to 589 in SEQ ID NO: 2 and wherein said one or more mutations are selected from the following rules. In some embodiments, Xaa1 is selected from A, C, K, Q, R, S, or W. In some embodiments, Xaa1 is selected from K, R, or W. In some embodiments, Xaa1 is K. In some embodiments, Xaa2 is selected from H, I, K, L, T, V, or W. In some embodiments, Xaa2 is selected from H, I, or T. In some embodiments, Xaa2 is I. In some embodiments, Xaa3 is selected from C, F, G, H, I, K, N, or R. In some embodiments, Xaa3 is selected from F, I, or R. In some embodiments, Xaa3 is I. In some embodiments, Xaa4 is selected from 1, M, Q, S, or V. In some embodiments, Xaa4 is selected from I, M, or V. In some embodiments, Xaa4 is V. In some embodiments, Xaa5 is selected from H, K, Q, T, W, or Y. In some embodiments, Xaa5 is selected from T, W, or Y. In some embodiments, Xaa5 is Y. In some embodiments, Xaa6 is selected from H, L, N, Q, R, W, or Y. In some embodiments, Xaa6 is selected from L, N, R, or Y. In some embodiments, Xaa6 is Y. In some embodiments, Xaa7 is selected from D, H, P, Q, or R. In some embodiments, Xaa7 is R. In some embodiments, Xaa8 is selected from D, F, L, S, T, or Y. In some embodiments, Xaa8 is selected from S, T, or Y. In some embodiments, Xaa8 is T. In some embodiments, Xaa9 is selected from C, I, N, P, R, S, or Y. In some embodiments, Xaa9 is selected from I, P, or R. In some embodiments, Xaa9 is I.

[0338] Disclosed herein are engineered AAV5 VP capsid polypeptides capable of forming an assembled virion that exhibits increased spinal cord tissue tropism as compared to wildtype AAV5 VP capsid polypeptide, wherein the engineered variant AAV5 VP capsid polypeptide sequence has one or more mutations, wherein the VP1 polypeptide sequence has said one or more mutations in a region from a position corresponding to 581 in SEQ ID NO: 2 to a position corresponding to 589 in SEQ ID NO: 2 and wherein said one or more mutations are selected from the following rules: Xaa1 is selected from A, C, K, Q, R, S, or W, Xaa2 is selected from H, I, K, L, T, V, or W, Xaa3 is selected from C, F, G, H, I, K, N, or R, Xaa4 is selected from I, M, Q, S, or V, Xaa5 is selected from H, K, Q, T, W, or Y, Xaa6 is selected from H, L, N, Q, R, W, or Y, Xaa7 is selected from D, H, P, Q, or R, Xaa8 is selected from D, F, L, S, T, or Y, and Xaa9 is selected from C, I, N, P, R, S, or Y.

[0339] Disclosed herein are engineered AAV5 VP capsid polypeptides capable of forming an assembled virion that exhibits increased spinal cord tissue tropism as compared to wildtype AAV5 VP capsid polypeptide, wherein the engineered variant AAV5 VP capsid polypeptide sequence has one or more mutations, wherein the VP1 polypeptide sequence has said one or more mutations in a region from a position corresponding to 581 in SEQ ID NO: 2 to a position corresponding to 589 in SEQ ID NO: 2 and wherein said one or more mutations are as follows: Xaa1 is selected from A, C, K, Q, R, S, or W, Xaa2 is selected from H, I, K, L, T, V, or W, Xaa3 is selected from C, F, G, H, I, K, N, or R, Xaa4 is selected from I, M, Q, S, or V, Xaa5 is selected from H, K, Q, T, W, or Y, Xaa6 is selected from H, L, N, Q, R, W, or Y, Xaa7 is selected from D, H, P, Q, or R, Xaa8 is selected from D, F, L, S, T, or Y, Xaa9 is selected from C, I, N, P, R, S, or Y, or any combination thereof.

[0340] In some embodiments, provided herein are AAV5 VP capsid polypeptide having at least one mutation in a region from a position corresponding to 581 to a position corresponding to 589 of AAV5 VP1 and having at least 70%, at least 75%, at least 80%, at least 85%, at least 90%, at least 92%, at least 95%, at least 97%, at least 99%, or 100% sequence identity to any sequence selected from SEQ ID NO: 34991-SEQ ID NO: 35437, wherein said at least one mutation drives increased spinal cord tissue tropism.

[0341] B. ML Rules

[0342] For the following set of rules described in this paragraph, favored biophysical properties and favored amino acid residues at each position in the 581 to 589 region of an engineered AAV5 VP1 capsid polypeptide, were determined using in vivo data and two ML models, which are described in EXAMPLE 41. Disclosed herein are engineered AAV5 VP capsid polypeptides capable of forming an assembled virion that exhibits increased spinal cord tissue tropism as compared to an rAAV virion having a wildtype AAV5 VP capsid polypeptide, wherein the engineered AAV5 VP capsid polypeptide sequence has one or more mutations, wherein the engineered AAV5 VP1 capsid polypeptide sequence has said one or more mutations in a region from a position corresponding to 581 in SEQ ID NO: 2 to a position corresponding to 589 in SEQ ID NO: 2 and wherein Xaa1 is selected from an amino acid of high volume (e.g., Xaa1 is selected from F, W, or Y); or wherein Xaa1 is selected from an amino acid of low mutability (e.g., Xaa1 is selected from Y, F, L, or C); or wherein Xaa1 is selected from an amino acid of high solubility (e.g., Xaa1 is selected from W, F, I, or L); or wherein Xaa1 is selected from an amino acid of low average flexibility (e.g., Xaa1 is selected from F, M, or W); or wherein Xaa2 is selected from an amino acid of low hydropathy (e.g., Xaa2 is selected from P or Y); or wherein Xaa3 is selected from an amino acid of low hydrophilicity (e.g., Xaa3 is selected from Y, W, V, M, F, I, or L); or wherein Xaa3 is selected from an amino acid of high solubility (e.g., Xaa3 is selected from W, F, I, or L); or wherein Xaa6 is selected from an amino acid of high volume (e.g., Xaa6 is selected from W, R, K, M, I, or L); or wherein Xaa6 is selected from an amino acid of high mol mass (e.g., Xaa6 is selected from W); or wherein Xaa8 is selected from an amino acid of high mol mass (e.g., Xaa8 is selected from W, E, K, M, H, or Q); or wherein Xaa8 is selected from an amino acid of high volume (e.g., Xaa8 is selected from W, K, M, I, or L); or wherein Xaa8 is selected from an amino acid of high goldman engelman steitz. (e.g., Xaa8 is selected from V or L); or wherein Xaa9 is selected from an amino acid of high hydropathy (e.g., Xaa9 is selected from V, or I); or wherein Xaa9 is selected from an amino acid of high solubility (e.g., Xaa9 is selected from W, F, I, or L); or any combination thereof.

[0343] In some embodiments, Xaa1 is selected from an amino acid of high volume. In some embodiments, Xaa1 is selected from F, W, or Y. In some embodiments, Xaa1 is selected from an amino acid of low mutability. In some embodiments, Xaa1 is selected from Y, F, L, or C. In some embodiments, Xaa1 is selected from an amino acid of high solubility. In some embodiments, Xaa1 is selected from W, F, I, or L. In some embodiments, Xaa1 is selected from an amino acid of low average flexibility. In some embodiments, Xaa1 is selected from F, M, or W. In some embodiments, Xaa2 is selected from an amino acid of low hydropathy. In some embodiments, Xaa2 is selected from P or Y. In some embodiments, Xaa3 is selected from an amino acid of low hydrophilicity. In some embodiments, Xaa3 is selected from Y, W, V, M, F, I, or L. In some embodiments, Xaa3 is selected from an amino acid of high solubility. In some embodiments, Xaa3 is selected from W, F, I, L. In some embodiments, Xaa6 is selected from an amino acid of high volume. In some embodiments, Xaa6 is selected from W, R, K, M, I, or L. In some embodiments, Xaa6 is selected from an amino acid of high mol mass. In some embodiments, Xaa6 is selected from W. In some embodiments, Xaa8 is selected from an amino acid of high mol mass. In some embodiments, Xaa8 is selected from W, E, K, M, H, or Q. In some embodiments, Xaa8 is selected from an amino acid of high volume. In some embodiments, Xaa8 is selected from W, K, M, I, L. In some embodiments, Xaa8 is selected from an amino acid of high goldman engelman steitz. In some embodiments, Xaa8 is selected from V or L. In some embodiments, Xaa9 is selected from an amino acid of high hydropathy. In some embodiments, Xaa9 is selected from V or I. In some embodiments, Xaa9 is selected from an amino acid of high solubility. In some embodiments, Xaa9 is selected from W, F, I, or L.

[0344] In some embodiments, provided herein are AAV5 VP capsid polypeptide having at least one mutation in a region from a position corresponding to 581 to a position corresponding to 589 of AAV5 VP1 and having at least 70%, at least 75%, at least 80%, at least 85%, at least 90%, at least 92%, at least 95%, at least 97%, at least 99%, or 100% sequence identity to any sequence selected from SEQ ID NO: 35438-SEQ ID NO: 36437, wherein said at least one mutation drives increased spinal cord tissue tropism.

[0345] C. Enriched Spinal Cord Sequences

[0346] In some embodiments, provided herein are AAV5 VP capsid polypeptide having at least one mutation in a region from a position corresponding to 581 to a position corresponding to 589 of AAV5 VP1 and having at least 70%, at least 75%, at least 80%, at least 85%, at least 90%, at least 92%, at least 95%, at least 97%, at least 99%, or 100% sequence identity to any sequence selected from SEQ ID NO: 36438-SEQ ID NO: 37437, wherein said at least one mutation drives increased spinal cord tissue tropism.

[0347] 6.7.12. In Vivo Selected Mutated VP Polypeptides that Confer Increased Mammary Gland Tropism

[0348] The present disclosure provides AAV5 virions with a VP capsid polypeptide having at least one mutation in a region with residues that interact with target cells (e.g., a target mammary gland cell in a target mammary gland tissue of interest), where the at least one mutation confers increased mammary gland tissue tropism as compared to a wildtype VP capsid polypeptide. In some embodiments, provided herein are AAV5 VP1 capsid polypeptide having a sequence homology of at least 80% to SEQ ID NO: 1, wherein the AAV5 VP1 capsid polypeptide has at least one mutation in a region from a position corresponding to 581 to a position corresponding to 589 of SEQ ID NO: 1 and wherein said at least one mutation drives increased mammary gland tropism. The following sequences rules and sequences also apply to the region in AAV5 VP2 (amino acid residues 445 to 453; VP2 sequence shown in SEQ ID NO: 1115) and AAV5 VP3 (amino acid residues 389 to 397; VP3 sequences shown in SEQ ID NO: 1116) corresponding to AAV5 VP1 amino acid residues 581 to 589. Thus, the present disclosure encompasses AAV5 VP2 capsid polypeptides and AAV5 VP3 capsid polypeptides having one or more mutations in the VP2 and VP3 regions corresponding to the AAV5 VP1 amino acid residues of the 581 to 589 region, where the one or more mutations comport to the rules or sequences in the following section.

[0349] A. Positional Frequency Rules

[0350] In this section, unless otherwise specified, the frequency of a given amino acid residue occurring at a specified position corresponding to position 581 to position 589 of SEQ ID NO: 1 (generalized in SEQ ID NO: 2) in variants identified in mammary gland over the frequency of that given amino acid residue occurring at the specified position in variants identified in all other harvested tissues (CNS (cortex forebrain, cortex occipital, cortex temporal, thalamus, hypothalamus, substantia nigra, hippocampus DG, hippocampus CA1, hippocampus CA3, cerebellum), liver, skeletal muscle, heart, lung, spleen, lymph node, bone marrow, skin, adrenal gland, thyroid, colon, sciatic nerve, and spinal cord tissues) was analyzed to identify a set of sequence rules for capsids that preferentially target mammary gland tissue. Identification of positional frequency rules from in vivo data is described in detail in EXAMPLE 11.

[0351] Disclosed herein are engineered AAV5 VP capsid polypeptides capable of forming an assembled virion that exhibits increased mammary gland tissue tropism as compared to wildtype AAV5 VP capsid polypeptide, wherein the engineered variant AAV5 VP1 capsid polypeptide sequence has one or more mutations, wherein Xaa1 is selected from C, K, M, Q, R, or Y, or Xaa1 is selected from C, Q, or R, or Xaa1 is C; or Xaa2 is selected from A, F, I, K, S, T, or V, or Xaa2 is selected from A, S, or V, or Xaa2 is V; or Xaa3 is selected from A, F, G, I, K, L, R, T, or Y, or Xaa3 is selected from F, G, K, R, or Y, or Xaa3 is selected from F, K, or Y, or Xaa3 is F; or Xaa4 is selected from A, I, K, Q, R, or T, or Xaa4 is selected from A, I, or R, or Xaa4 is I; or Xaa5 is selected from I, L, M, Q, R, T, V, or Y, or Xaa5 is selected from I, M, or Y, or Xaa5 is Y; or Xaa6 is selected from H, N, S, or V, or Xaa6 is H; or Xaa7 is selected from A, H, I, N, S or Y, or Xaa7 is N or S, or Xaa7 is N; or Xaa8 is selected from A, C, D, G, H, M, Q, or S, or Xaa8 is selected from G, M, or Q, or Xaa8 is G; or Xaa9 is selected from A, E, L, W, or Y, or Xaa9 is selected from A, L, or W, or Xaa9 is A.

[0352] Disclosed herein are engineered AAV5 VP capsid polypeptides capable of forming an assembled virion that exhibits increased mammary gland tissue tropism as compared to wildtype AAV5 VP capsid polypeptide, wherein the engineered variant AAV5 VP capsid polypeptide sequence has one or more mutations, wherein the VP1 polypeptide sequence has said one or more mutations in a region from a position corresponding to 581 in SEQ ID NO: 2 to a position corresponding to 589 in SEQ ID NO: 2 and wherein said one or more mutations are selected from the following rules. In some embodiments, Xaa1 is selected from C, K, M, Q, R, or Y. In some embodiments, Xaa1 is selected from C, Q, or R. In some embodiments, Xaa1 is C. In some embodiments, Xaa2 is selected from A, F, I, K, S, T, or V. In some embodiments, Xaa2 is selected from A, S, or V. In some embodiments, Xaa2 is V. In some embodiments, Xaa3 is selected from A, F, G, I, K, L, R, T, or Y. In some embodiments, Xaa3 is selected from F, G, K, R, or Y. In some embodiments, Xaa3 is selected from F, K, or Y. In some embodiments, Xaa3 is F. In some embodiments, Xaa4 is selected from A, I, K, Q, R, or T. In some embodiments, Xaa4 is selected from A, I, or R. In some embodiments, Xaa4 is I. In some embodiments, Xaa5 is selected from I, L, M, Q, R, T, V, or Y. In some embodiments, Xaa5 is selected from I, M, or Y. In some embodiments, Xaa5 is Y. In some embodiments, Xaa6 is selected from H, N, S, or V. In some embodiments, Xaa6 is H. In some embodiments, Xaa7 is selected from A, H, I, N, S or Y. In some embodiments, Xaa7 is N or S. In some embodiments, Xaa7 is N. In some embodiments, Xaa8 is selected from A, C, D, G, H, M, Q, or S. In some embodiments, Xaa8 is selected from G, M, or Q. In some embodiments, Xaa8 is G. In some embodiments, Xaa9 is selected from A, E, L, W, or Y. In some embodiments, Xaa9 is selected from A, L, or W. In some embodiments, Xaa9 is A.

[0353] Disclosed herein are engineered AAV5 VP capsid polypeptides capable of forming an assembled virion that exhibits increased mammary gland tissue tropism as compared to wildtype AAV5 VP capsid polypeptide, wherein the engineered variant AAV5 VP capsid polypeptide sequence has one or more mutations, wherein the VP1 polypeptide sequence has said one or more mutations in a region from a position corresponding to 581 in SEQ ID NO: 2 to a position corresponding to 589 in SEQ ID NO: 2 and wherein said one or more mutations are selected from the following rules: Xaa1 is selected from C, K, M, Q, R, or Y, Xaa2 is selected from A, F, I, K, S, T, or V, Xaa3 is selected from A, F, G, I, K, L, R, T, or Y, Xaa4 is selected from A, I, K, Q, R, or T, Xaa5 is selected from I, L, M, Q, R, T, V, or Y, Xaa6 is selected from H, N, S, or V, Xaa7 is selected from A, H, I, N, S or Y, Xaa8 is selected from A, C, D, G, H, M, Q, or S, and, Xaa9 is selected from A, E, L, W, or Y.

[0354] Disclosed herein are engineered AAV5 VP capsid polypeptides capable of forming an assembled virion that exhibits increased mammary gland tissue tropism as compared to wildtype AAV5 VP capsid polypeptide, wherein the engineered variant AAV5 VP capsid polypeptide sequence has one or more mutations, wherein the VP1 polypeptide sequence has said one or more mutations in a region from a position corresponding to 581 in SEQ ID NO: 2 to a position corresponding to 589 in SEQ ID NO: 2 and wherein said one or more mutations are as follows: Xaa1 is selected from C, K, M, Q, R, or Y, Xaa2 is selected from A, F, I, K, S, T, or V, Xaa3 is selected from A, F, G, I, K, L, R, T, or Y, Xaa4 is selected from A, I, K, Q, R, or T, Xaa5 is selected from I, L, M, Q, R, T, V, or Y, Xaa6 is selected from H, N, S, or V, Xaa7 is selected from A, H, I, N, S or Y, Xaa8 is selected from A, C, D, G, H, M, Q, or S, Xaa9 is selected from A, E, L, W, or Y, or any combination thereof.

[0355] In some embodiments, provided herein are AAV5 VP capsid polypeptide having at least one mutation in a region from a position corresponding to 581 to a position corresponding to 589 of AAV5 VP1 and having at least 70%, at least 75%, at least 80%, at least 85%, at least 90%, at least 92%, at least 95%, at least 97%, at least 99%, or 100% sequence identity to any sequence selected from SEQ ID NO: 22118-SEQ ID NO: 23117, wherein said at least one mutation drives increased mammary gland tissue tropism.

[0356] B. ML Rules

[0357] For the following set of rules described in this paragraph, favored biophysical properties and favored amino acid residues at each position in the 581 to 589 region of an engineered AAV5 VP1 capsid polypeptide, were determined using in vivo data and two ML models, which are described in EXAMPLE 36. Disclosed herein are engineered AAV5 VP capsid polypeptides capable of forming an assembled virion that exhibits increased mammary gland tissue tropism as compared to an rAAV virion having a wildtype AAV5 VP capsid polypeptide, wherein the engineered AAV5 VP capsid polypeptide sequence has one or more mutations, wherein the engineered AAV5 VP1 capsid polypeptide sequence has said one or more mutations in a region from a position corresponding to 581 in SEQ ID NO: 2 to a position corresponding to 589 in SEQ ID NO: 2 and wherein Xaa1 is selected from an amino acid of low surface accessibility (e.g., Xaa1 is selected from C); or wherein Xaa1 is selected from an amino acid of medium mol mass (e.g., Xaa1 is selected from C); or wherein Xaa2 is selected from an amino acid of high surface accessibility (e.g., Xaa2 is selected from D, N, or Q); or wherein Xaa2 is selected from an amino acid of low hydropathy (e.g., Xaa2 is selected from D, E, R, K, H, N, or Q); or wherein Xaa3 is selected from an amino acid of high average flexibility (e.g., Xaa3 is selected from D, E, R, P, G, or S); or wherein Xaa3 is selected from an amino acid of medium mutability (e.g., Xaa3 is selected from R or H); or wherein Xaa4 is selected from an amino acid of high mutability (e.g., Xaa4 is selected from M, I, Q, or T); or wherein Xaa4 is selected from an amino acid of high solubility (e.g., Xaa4 is selected from W, F, I, or L); or wherein Xaa4 is selected from an amino acid of high surface accessibility (e.g., Xaa4 is selected from E, R, or K); or wherein Xaa5 is selected from an amino acid of high solubility (e.g., Xaa5 is selected from W, F, I, or L); or wherein Xaa5 is selected from an amino acid of low mutability (e.g., Xaa5 is selected from Y, F, or L); or wherein Xaa6 is selected from an amino acid of high hydropathy (e.g., Xaa6 is selected from V, I, or L); or wherein Xaa6 is selected from an amino acid of medium mol mass (e.g., Xaa6 is selected from D, I, L, or N); or wherein Xaa8 is selected from an amino acid of low surface accessibility (e.g., Xaa8 is selected from C); or wherein Xaa8 is selected from an amino acid of low mutability (e.g., Xaa8 is selected from C, R, or H); or wherein Xaa9 is selected from an amino acid of medium mutability (e.g., Xaa9 is selected from R or H); or any combination thereof.

[0358] [In some embodiments, Xaa1 is selected from an amino acid of low surface accessibility. In some embodiments, Xaa1 is selected from C. In some embodiments, Xaa1 is selected from an amino acid of medium mol mass. In some embodiments, Xaa1 is selected from C. In some embodiments, Xaa2 is selected from an amino acid of high surface accessibility. In some embodiments, Xaa2 is selected from D, N, or Q. In some embodiments, Xaa2 is selected from an amino acid of low hydropathy. In some embodiments, Xaa2 is selected from D, E, R, K, H, N, or Q. In some embodiments, Xaa3 is selected from an amino acid of high average flexibility. In some embodiments, Xaa3 is selected from D, E, R, P, G, or S. In some embodiments, Xaa3 is selected from an amino acid of medium mutability. In some embodiments, Xaa3 is selected from R or H. In some embodiments, Xaa4 is selected from an amino acid of high mutability. In some embodiments, Xaa4 is selected from M, I, Q, or T. In some embodiments, Xaa4 is selected from an amino acid of high solubility. In some embodiments, Xaa4 is selected from W, F, I, or L. In some embodiments, Xaa4 is selected from an amino acid of high surface accessibility. In some embodiments, Xaa4 is selected from E, R, or K. In some embodiments, Xaa5 is selected from an amino acid of high solubility. In some embodiments, Xaa5 is selected from W, F, I, or L. In some embodiments, Xaa5 is selected from an amino acid of low mutability. In some embodiments, Xaa5 is selected from Y, F, or L. In some embodiments, Xaa6 is selected from an amino acid of high hydropathy. In some embodiments, Xaa6 is selected from V, I, or L. In some embodiments, Xaa6 is selected from an amino acid of medium mol mass. In some embodiments, Xaa6 is selected from D, I, L, or N. In some embodiments, Xaa8 is selected from an amino acid of low surface accessibility. In some embodiments, Xaa8 is selected from C. In some embodiments, Xaa8 is selected from an amino acid of low mutability. In some embodiments, Xaa8 is selected from C, R, or H. In some embodiments, Xaa9 is selected from an amino acid of medium mutability. In some embodiments, Xaa9 is selected from R or H.

[0359] In some embodiments, provided herein are AAV5 VP capsid polypeptide having at least one mutation in a region from a position corresponding to 581 to a position corresponding to 589 of AAV5 VP1 and having at least 70%, at least 75%, at least 80%, at least 85%, at least 90%, at least 92%, at least 95%, at least 97%, at least 99%, or 100% sequence identity to any sequence selected from SEQ ID NO: 23118-SEQ ID NO: 24117, wherein said at least one mutation drives increased mammary gland tissue tropism.

[0360] C. Enriched Mammary Gland Sequences

[0361] In some embodiments, provided herein are AAV5 VP capsid polypeptide having at least one mutation in a region from a position corresponding to 581 to a position corresponding to 589 of AAV5 VP1 and having at least 70%, at least 75%, at least 80%, at least 85%, at least 90%, at least 92%, at least 95%, at least 97%, at least 99%, or 100% sequence identity to any sequence selected from SEQ ID NO: 24118-SEQ ID NO: 25117, wherein said at least one mutation drives increased mammary gland tissue tropism.

[0362] 6.7.13. In Vivo Selected Mutated VP Polypeptides that Confer Increased Lung Tropism

[0363] The present disclosure provides AAV5 virions with a VP capsid polypeptide having at least one mutation in a region with residues that interact with target cells (e.g., a target lung cell in a target lung tissue of interest), where the at least one mutation confers increased lung tissue tropism as compared to a wildtype VP capsid polypeptide. In some embodiments, provided herein are AAV5 VP1 capsid polypeptide having a sequence homology of at least 80% to SEQ ID NO: 1, wherein the AAV5 VP1 capsid polypeptide has at least one mutation in a region from a position corresponding to 581 to a position corresponding to 589 of SEQ ID NO: 1 and wherein said at least one mutation drives increased lung tropism. The following sequences rules and sequences also apply to the region in AAV5 VP2 (amino acid residues 445 to 453; VP2 sequence shown in SEQ ID NO: 1115) and AAV5 VP3 (amino acid residues 389 to 397; VP3 sequences shown in SEQ ID NO: 1116) corresponding to AAV5 VP1 amino acid residues 581 to 589. Thus, the present disclosure encompasses AAV5 VP2 capsid polypeptides and AAV5 VP3 capsid polypeptides having one or more mutations in the VP2 and VP3 regions corresponding to the AAV5 VP1 amino acid residues of the 581 to 589 region, where the one or more mutations comport to the rules or sequences in the following section.

[0364] A. Positional Frequency Rules

[0365] In this section, unless otherwise specified, the frequency of a given amino acid residue occurring at a specified position corresponding to position 581 to position 589 of SEQ ID NO: 1 (generalized in SEQ ID NO: 2) in variants identified in lung over the frequency of that given amino acid residue occurring at the specified position in variants identified in all other harvested tissues (CNS (cortex forebrain, cortex occipital, cortex temporal, thalamus, hypothalamus, substantia nigra, hippocampus DG, hippocampus CA1, hippocampus CA3, cerebellum), liver, skeletal muscle, heart, spleen, lymph node, bone marrow, mammary gland, skin, adrenal gland, thyroid, colon, sciatic nerve, and spinal cord tissues) was analyzed to identify a set of sequence rules for capsids that preferentially target lung tissue. Identification of positional frequency rules from in vivo data is described in detail in EXAMPLE 12.

[0366] Disclosed herein are engineered AAV5 VP capsid polypeptides capable of forming an assembled virion that exhibits increased lung tissue tropism as compared to wildtype AAV5 VP capsid polypeptide, wherein the engineered variant AAV5 VP1 capsid polypeptide sequence has one or more mutations, wherein Xaa1 is selected from A, E, K, M, Q, R, S, or T, or Xaa1 is selected from A, E, or Q, or Xaa1 is E; or Xaa2 is selected from A, I, K, S, T, or V, or Xaa2 is selected from S, T, or V, or Xaa2 is T; or Xaa3 is selected from A, E, K, M, Q, R, S, T, or V, or Xaa3 is selected from A, K, R, or S, or Xaa3 is R; or Xaa4 is selected from M, P, R, S, or T, or Xaa4 is selected from P, Q, or T, or Xaa4 is Q; or Xaa5 is selected from I, K, L, M, T, V, or Y, or Xaa5 is selected from L, M, or Y, or Xaa5 is L; or Xaa6 is selected from D, G, H, M, N, R, or S, or Xaa6 is selected from H or N, or Xaa6 is N; or Xaa7 is selected from A, K, M, Q, or R, or Xaa7 is selected from A, K or R, or Xaa7 is R; or Xaa8 is selected from A, F, G, S, W, or Y, or Xaa8 is selected from A, F, or G, or Xaa8 is F; or Xaa9 is selected from A, E, G, P, R, or Y, or Xaa9 is selected from G, P, or R, or Xaa9 is G.

[0367] Disclosed herein are engineered AAV5 VP capsid polypeptides capable of forming an assembled virion that exhibits increased lung tissue tropism as compared to wildtype AAV5 VP capsid polypeptide, wherein the engineered variant AAV5 VP capsid polypeptide sequence has one or more mutations, wherein the VP1 polypeptide sequence has said one or more mutations in a region from a position corresponding to 581 in SEQ ID NO: 2 to a position corresponding to 589 in SEQ ID NO: 2 and wherein said one or more mutations are selected from the following rules. In some embodiments, Xaa1 is selected from A, E, K, M, Q, R, S, or T. In some embodiments, Xaa1 is selected from A, E, or Q. In some embodiments, Xaa1 is E. In some embodiments, Xaa2 is selected from A, I, K, S, T, or V. In some embodiments, Xaa2 is selected from S, T, or V. In some embodiments, Xaa2 is T. In some embodiments, Xaa3 is selected from A, E, K, M, Q, R, S, T, or V. In some embodiments, Xaa3 is selected from A, K, R, or S. In some embodiments, Xaa3 is R. In some embodiments, Xaa4 is selected from M, P, R, S, or T. In some embodiments, Xaa4 is selected from P, Q, or T. In some embodiments, Xaa4 is Q. In some embodiments, Xaa5 is selected from I, K, L, M, T, V, or Y. In some embodiments, Xaa5 is selected from L, M, or Y. In some embodiments, Xaa5 is L. In some embodiments, Xaa6 is selected from D, G, H, M, N, R, or S. In some embodiments, Xaa6 is selected from H or N. In some embodiments, Xaa6 is N. In some embodiments, Xaa7 is selected from A, K, M, Q, or R. In some embodiments, Xaa7 is selected from A, K or R. In some embodiments, Xaa7 is R. In some embodiments, Xaa8 is selected from A, F, G, S, W, or Y. In some embodiments, Xaa8 is selected from A, F, or G. In some embodiments, Xaa8 is F. In some embodiments, Xaa9 is selected from A, E, G, P, R, or Y. In some embodiments, Xaa9 is selected from G, P, or R. In some embodiments, Xaa9 is G.

[0368] Disclosed herein are engineered AAV5 VP capsid polypeptides capable of forming an assembled virion that exhibits increased lung tissue tropism as compared to wildtype AAV5 VP capsid polypeptide, wherein the engineered variant AAV5 VP capsid polypeptide sequence has one or more mutations, wherein the VP1 polypeptide sequence has said one or more mutations in a region from a position corresponding to 581 in SEQ ID NO: 2 to a position corresponding to 589 in SEQ ID NO: 2 and wherein said one or more mutations are selected from the following rules: Xaa1 is selected from A, E, K, M, Q, R, S, or T, Xaa2 is selected from A, I, K, S, T, or V, Xaa3 is selected from A, E, K, M, Q, R, S, T, or V, Xaa4 is selected from M, P, R, S, or T, Xaa5 is selected from I, K, L, M, T, V, or Y, Xaa6 is selected from D, G, H, M, N, R, or S, Xaa7 is selected from A, K, M, Q, or R, Xaa8 is selected from A, F, G, S, W, or Y. and, Xaa9 is selected from A, E, G, P, R, or Y.

[0369] Disclosed herein are engineered AAV5 VP capsid polypeptides capable of forming an assembled virion that exhibits increased lung tissue tropism as compared to wildtype AAV5 VP capsid polypeptide, wherein the engineered variant AAV5 VP capsid polypeptide sequence has one or more mutations, wherein the VP1 polypeptide sequence has said one or more mutations in a region from a position corresponding to 581 in SEQ ID NO: 2 to a position corresponding to 589 in SEQ ID NO: 2 and wherein said one or more mutations are as follows: Xaa1 is selected from A, E, K, M, Q, R, S, or T. Xaa2 is selected from A, I, K, S, T, or V, Xaa3 is selected from A, E, K, M, Q, R, S, T, or V, Xaa4 is selected from M, P, R, S, or T, Xaa5 is selected from I, K, L, M, T, V, or Y, Xaa6 is selected from D, G, H, M, N, R, or S, Xaa7 is selected from A, K, M, Q, or R. Xaa8 is selected from A, F, G, S, W, or Y, Xaa9 is selected from A, E, G, P, R, or Y, or any combination thereof.

[0370] In some embodiments, provided herein are AAV5 VP capsid polypeptide having at least one mutation in a region from a position corresponding to 581 to a position corresponding to 589 of AAV5 VP1 and having at least 70%, at least 75%, at least 80%, at least 85%, at least 90%, at least 92%, at least 95%, at least 97%, at least 99%, or 100% sequence identity to any sequence selected from SEQ ID NO: 16118-SEQ ID NO: 17117, wherein said at least one mutation drives increased lung tissue tropism.

[0371] B. ML Rules

[0372] For the following set of rules described in this paragraph, favored biophysical properties and favored amino acid residues at each position in the 581 to 589 region of an engineered AAV5 VP1 capsid polypeptide, were determined using in vivo data and two ML models, which are described in EXAMPLE 37. Disclosed herein are engineered AAV5 VP capsid polypeptides capable of forming an assembled virion that exhibits increased lung tissue tropism as compared to an rAAV virion having a wildtype AAV5 VP capsid polypeptide, wherein the engineered AAV5 VP capsid polypeptide sequence has one or more mutations, wherein the engineered AAV5 VP1 capsid polypeptide sequence has said one or more mutations in a region from a position corresponding to 581 in SEQ ID NO: 2 to a position corresponding to 589 in SEQ ID NO: 2 and wherein Xaa1 is selected from an amino acid of high mutability (e.g., Xaa1 is selected from D, E, M, A, I, Q, or T); or wherein Xaa2 is selected from an amino acid of high mol mass (e.g., Xaa2 is selected from F); or wherein Xaa2 is selected from an amino acid of low mutability (e.g., Xaa2 is selected from Y, F, or L); or wherein Xaa3 is selected from an amino acid of low mutability (e.g., Xaa3 is selected from K, V, P, or H); or wherein Xaa3 is selected from an amino acid of low hydropathy (e.g., Xaa3 is selected from K or R); or wherein Xaa4 is selected from an amino acid of low mutability (e.g., Xaa4 is selected from K or P); or wherein Xaa4 is selected from an amino acid of high average flexibility (e.g., Xaa4 is selected from D, E, P, or S); or wherein Xaa5 is selected from an amino acid of low average flexibility (e.g., Xaa5 is selected from W, M, or F); or wherein Xaa5 is selected from an amino acid of high solubility (e.g., Xaa5 is selected from W, F, I, or L); or wherein Xaa6 is selected from an amino acid of medium mutability (e.g., Xaa6 is selected from R or H); or wherein Xaa6 is selected from an amino acid of high surface accessibility (e.g., Xaa6 is selected from T); or wherein Xaa7 is selected from an amino acid of low mutability (e.g., Xaa7 is selected from C); or wherein Xaa7 is selected from an amino acid of high solubility (e.g., Xaa7 is selected from W, V, M, F, I, or L); or wherein Xaa8 is selected from an amino acid of high mutability (e.g., Xaa8 is selected from D, E, M, A, I, Q, or T); or wherein Xaa8 is selected from an amino acid of low hydropathy (e.g., Xaa8 is selected from R or K); or wherein Xaa9 is selected from an amino acid of high average flexibility (e.g., Xaa9 is selected from R or G); or any combination thereof.

[0373] In some embodiments, Xaa1 is selected from an amino acid of high mutability. In some embodiments, Xaa1 is selected from D, E, M, A, T, Q, or T. In some embodiments, Xaa2 is selected from an amino acid of high mol mass. In some embodiments, Xaa2 is selected from F. In some embodiments, Xaa2 is selected from an amino acid of low mutability. In some embodiments, Xaa2 is selected from Y, F, or L. In some embodiments, Xaa3 is selected from an amino acid of low mutability. In some embodiments, Xaa3 is selected from K, V, P, or H. In some embodiments, Xaa3 is selected from an amino acid of low hydropathy. In some embodiments, Xaa3 is selected from K or R. In some embodiments, Xaa4 is selected from an amino acid of low mutability. In some embodiments, Xaa4 is selected from K or P. In some embodiments, Xaa4 is selected from an amino acid of high average flexibility. In some embodiments, Xaa4 is selected from D, E, P, or S. In some embodiments, Xaa5 is selected from an amino acid of low average flexibility. In some embodiments, Xaa5 is selected from W, M, or F. In some embodiments, Xaa5 is selected from an amino acid of high solubility. In some embodiments, Xaa5 is selected from W, F, I, or L. In some embodiments, Xaa6 is selected from an amino acid of medium mutability. In some embodiments, Xaa6 is selected from R or H. In some embodiments, Xaa6 is selected from an amino acid of high surface accessibility. In some embodiments, Xaa6 is selected from T. In some embodiments, Xaa7 is selected from an amino acid of low mutability. In some embodiments, Xaa7 is selected from C. In some embodiments, Xaa7 is selected from an amino acid of high solubility. In some embodiments, Xaa7 is selected from W, V, M, F, I, or L. In some embodiments, Xaa8 is selected from an amino acid of high mutability. In some embodiments, Xaa8 is selected from D, E, M, A, I, Q, or T. In some embodiments, Xaa8 is selected from an amino acid of low hydropathy. In some embodiments, Xaa8 is selected from R or K. In some embodiments, Xaa9 is selected from an amino acid of high average flexibility. In some embodiments, Xaa9 is selected from R or G.

[0374] In some embodiments, provided herein are AAV5 VP capsid polypeptide having at least one mutation in a region from a position corresponding to 581 to a position corresponding to 589 of AAV5 VP1 and having at least 70%, at least 75%, at least 80%, at least 85%, at least 90%, at least 92%, at least 95%, at least 97%, at least 99%, or 100% sequence identity to any sequence selected from SEQ ID NO: 17118-SEQ ID NO: 18117, wherein said at least one mutation drives increased lung tissue tropism.

[0375] C. Enriched Lung Sequences

[0376] In some embodiments, provided herein are AAV5 VP capsid polypeptide having at least one mutation in a region from a position corresponding to 581 to a position corresponding to 589 of AAV5 VP1 and having at least 70%, at least 75%, at least 80%, at least 85%, at least 90%, at least 92%, at least 95%, at least 97%, at least 99%, or 100% sequence identity to any sequence selected from SEQ ID NO: 18118-SEQ ID NO: 19117, wherein said at least one mutation drives increased lung tissue tropism.

[0377] 6.7.14. In Vivo Selected Mutated VP Polypeptides that Confer Increased Heart Tropism

[0378] The present disclosure provides AAV5 virions with a VP capsid polypeptide having at least one mutation in a region with residues that interact with target cells (e.g., a target heart cell in a target heart tissue of interest), where the at least one mutation confers increased heart tissue tropism as compared to a wildtype VP capsid polypeptide. In some embodiments, provided herein are AAV5 VP1 capsid polypeptide having a sequence homology of at least 80% to SEQ ID NO: 1, wherein the AAV5 VP1 capsid polypeptide has at least one mutation in a region from a position corresponding to 581 to a position corresponding to 589 of SEQ ID NO: 1 and wherein said at least one mutation drives increased heart tropism. The following sequences rules and sequences also apply to the region in AAV5 VP2 (amino acid residues 445 to 453; VP2 sequence shown in SEQ ID NO: 1115) and AAV5 VP3 (amino acid residues 389 to 397; VP3 sequences shown in SEQ ID NO: 1116) corresponding to AAV5 VP1 amino acid residues 581 to 589. Thus, the present disclosure encompasses AAV5 VP2 capsid polypeptides and AAV5 VP3 capsid polypeptides having one or more mutations in the VP2 and VP3 regions corresponding to the AAV5 VP1 amino acid residues of the 581 to 589 region, where the one or more mutations comport to the rules or sequences in the following section. In some embodiments, “heart” and “cardiac” may be used interchangeably herein.

[0379] A. Positional Frequency Rules

[0380] In this section, unless otherwise specified, the frequency of a given amino acid residue occurring at a specified position corresponding to position 581 to position 589 of SEQ ID NO: 1 (generalized in SEQ ID NO: 2) in variants identified in heart over the frequency of that given amino acid residue occurring at the specified position in variants identified in all other harvested tissues (CNS (cortex forebrain, cortex occipital, cortex temporal, thalamus, hypothalamus, substantia nigra, hippocampus DG, hippocampus CA1, hippocampus CA3, cerebellum), liver, skeletal muscle, lung, spleen, lymph node, bone marrow, mammary gland, skin, adrenal gland, thyroid, colon, sciatic nerve, and spinal cord tissues) was analyzed to identify a set of sequence rules for capsids that preferentially target heart tissue. Identification of positional frequency rules from in vivo data is described in detail in EXAMPLE 13.

[0381] Disclosed herein are engineered AAV5 VP capsid polypeptides capable of forming an assembled virion that exhibits increased heart tissue tropism as compared to wildtype AAV5 VP capsid polypeptide, wherein the engineered variant AAV5 VP capsid polypeptide sequence has one or more mutations, wherein Xaa1 is selected from I, K, L, M, T, or V, or Xaa1 is selected from K or L, or Xaa1 is K; or Xaa2 is selected from A, C, G, I, K, or S, or Xaa2 is selected from A, C, or S, or Xaa2 is A; or Xaa3 is selected from A, D, E, G, K, M, or V, or Xaa3 is selected from E or V, or Xaa3 is E; or Xaa4 is selected from F, H, R, T, W, or Y, or Xaa4 is selected from F, R, or T, or Xaa4 is R; or Xaa5 is selected from F, L, M, or R, or Xaa5 is L; or Xaa6 is selected from A, H, N, W, or Y, or Xaa6 is selected from H, N, or Y, or Xaa6 is H; or Xaa7 is selected from A, C, E, F, K, or T, or Xaa7 is selected from C, F, or T, or Xaa7 is F; or Xaa8 is selected from A, C, M, S, or T, or Xaa8 is selected from C, M, or S, or Xaa8 is C; or Xaa9 is selected from A, D, G, or P, or Xaa9 is selected from A or G. or Xaa9 is A.

[0382] Disclosed herein are engineered AAV5 VP capsid polypeptides capable of forming an assembled virion that exhibits increased heart tissue tropism as compared to wildtype AAV5 VP capsid polypeptide, wherein the engineered variant AAV5 VP capsid polypeptide sequence has one or more mutations, wherein the VP1 polypeptide sequence has said one or more mutations in a region from a position corresponding to 581 in SEQ ID NO: 2 to a position corresponding to 589 in SEQ ID NO: 2 and wherein said one or more mutations are selected from the following rules. In some embodiments, Xaa1 is selected from I, K, L, M, T, or V. In some embodiments, Xaa1 is selected from K or L. In some embodiments, Xaa1 is K. In some embodiments, Xaa2 is selected from A, C, G, I, K, or S. In some embodiments, Xaa2 is selected from A, C, or S. In some embodiments, Xaa2 is A. In some embodiments, Xaa3 is selected from A, D, E, G, K, M, or V. In some embodiments, Xaa3 is selected from E or V. In some embodiments, Xaa3 is E. In some embodiments, Xaa4 is selected from F, H, R, T, W, or Y. In some embodiments, Xaa4 is selected from F, R, or T. In some embodiments, Xaa4 is R. In some embodiments, Xaa5 is selected from F, L, M, or R. In some embodiments, Xaa5 is L. In some embodiments, Xaa6 is selected from A, H, N, W, or Y. In some embodiments, Xaa6 is selected from H, N, or Y. In some embodiments, Xaa6 is H. In some embodiments, Xaa7 is selected from A, C, E, F, K, or T. In some embodiments, Xaa7 is selected from C, F, or T. In some embodiments, Xaa7 is F. In some embodiments, Xaa8 is selected from A, C, M, S, or T. In some embodiments, Xaa8 is selected from C, M, or S. In some embodiments, Xaa8 is C. In some embodiments, Xaa9 is selected from A, D, G, or P. In some embodiments, Xaa9 is selected from A or G. In some embodiments, Xaa9 is A.

[0383] Disclosed herein are engineered AAV5 VP capsid polypeptides capable of forming an assembled virion that exhibits increased heart tissue tropism as compared to wildtype AAV5 VP capsid polypeptide, wherein the engineered variant AAV5 VP capsid polypeptide sequence has one or more mutations, wherein the VP1 polypeptide sequence has said one or more mutations in a region from a position corresponding to 581 in SEQ ID NO: 2 to a position corresponding to 589 in SEQ ID NO: 2 and wherein said one or more mutations are selected from the following rules: Xaa1 is selected from I, K, L, M, T, or V, Xaa2 is selected from A, C, G, I, K, or S, Xaa3 is selected from A, D, E, G, K, M, or V, Xaa4 is selected from F, H, R, T, W, or Y, Xaa5 is selected from F, L, M, or R, Xaa6 is selected from A, H, N, W, or Y, Xaa7 is selected from A, C, E, F, K, or T, Xaa8 is selected from A, C, M, S, or T, and Xaa9 is selected from A, D, G, or P.

[0384] Disclosed herein are engineered AAV5 VP capsid polypeptides capable of forming an assembled virion that exhibits increased heart tissue tropism as compared to wildtype AAV5 VP capsid polypeptide, wherein the engineered variant AAV5 VP capsid polypeptide sequence has one or more mutations, wherein the VP1 polypeptide sequence has said one or more mutations in a region from a position corresponding to 581 in SEQ ID NO: 2 to a position corresponding to 589 in SEQ ID NO: 2 and wherein said one or more mutations are as follows: Xaa1 is selected from I, K, L, M, T, or V, Xaa2 is selected from A, C, G, I, K, or S, Xaa3 is selected from A, D, E, G, K, M, or V, Xaa4 is selected from F, H, R, T, W, or Y, Xaa5 is selected from F, L, M, or R, Xaa6 is selected from A, H, N, W, or Y, Xaa7 is selected from A, C, E, F, K, or T, Xaa8 is selected from A, C, M, S, or T, Xaa9 is selected from A, D, G, or P, or any combination thereof.

[0385] In some embodiments, provided herein are AAV5 VP capsid polypeptide having at least one mutation in a region from a position corresponding to 581 to a position corresponding to 589 of AAV5 VP1 and having at least 70%, at least 75%, at least 80%, at least 85%, at least 90%, at least 92%, at least 95%, at least 97%, at least 99%, or 100% sequence identity to any sequence selected from SEQ ID NO: 13118-SEQ ID NO: 14117, wherein said at least one mutation drives increased heart tissue tropism.

[0386] B. ML Rules

[0387] For the following set of rules described in this paragraph, favored biophysical properties and favored amino acid residues at each position in the 581 to 589 region of an engineered AAV5 VP1 capsid polypeptide, were determined using in vivo data and two ML models, which are described in EXAMPLE 34. Disclosed herein are engineered AAV5 VP capsid polypeptides capable of forming an assembled virion that exhibits increased heart tissue tropism as compared to an rAAV virion having a wildtype AAV5 VP capsid polypeptide, wherein the engineered AAV5 VP capsid polypeptide sequence has one or more mutations, wherein the engineered AAV5 VP1 capsid polypeptide sequence has said one or more mutations in a region from a position corresponding to 581 in SEQ ID NO: 2 to a position corresponding to 589 in SEQ ID NO: 2 and wherein Xaa1 is selected from an amino acid of low solubility (e.g., Xaa1 is selected from N or E); or wherein Xaa1 is selected from an amino acid of low hydropathy (e.g., Xaa1 is selected from H, N, Q, P, Y, D, or E); or wherein Xaa1 is selected from an amino acid of high mutability (e.g., Xaa1 is selected from A or E); or wherein Xaa2 is selected from an amino acid of high hydropathy (e.g., Xaa2 is selected from V or I); or wherein Xaa2 is selected from an amino acid of medium mutability (e.g., Xaa2 is selected from V); or wherein Xaa2 is selected from an amino acid of medium volume (e.g., Xaa2 is selected from V, E, or Q); or wherein Xaa2 is selected from an amino acid of high solubility (e.g., Xaa2 is selected from V or M); or wherein Xaa3 is selected from an amino acid of low solubility (e.g., Xaa3 is selected from R or Q); or wherein Xaa4 is selected from an amino acid of low surface accessibility (e.g., Xaa4 is selected from C); or wherein Xaa4 is selected from an amino acid of high solubility (e.g., Xaa4 is selected from C); or wherein Xaa4 is selected from an amino acid of low charge (e.g., Xaa4 is selected from D, E, Y, W, V, P, M, A, G, F, I, L, N, Q, S, T, or C); or wherein Xaa4 is selected from an amino acid of high hydropathy (e.g., Xaa4 is selected from C); or wherein Xaa5 is selected from an amino acid of high surface accessibility (e.g., Xaa5 is selected from D, E, R, K, N, or Q); or wherein Xaa5 is selected from an amino acid of low solubility (e.g., Xaa5 is selected from D); or wherein Xaa6 is selected from an amino acid of low mutability (e.g., Xaa6 is selected from C); or wherein Xaa6 is selected from an amino acid of low solubility (e.g., Xaa6 is selected from D); or wherein Xaa8 is selected from an amino acid of high surface accessibility (e.g., Xaa8 is selected from D or N); or wherein Xaa8 is selected from an amino acid of high average flexibility (e.g., Xaa8 is selected from D, R, P, G, or S); or wherein Xaa9 is selected from an amino acid of medium mol mass (e.g., Xaa9 is selected from N, D, L, or I); or any combination thereof.

[0388] In some embodiments, Xaa1 is selected from an amino acid of low solubility. In some embodiments, Xaa1 is selected from N or E. In some embodiments, Xaa1 is selected from an amino acid of low hydropathy. In some embodiments, Xaa1 is selected from H, N, Q, P, Y, D, or E. In some embodiments, Xaa1 is selected from an amino acid of high mutability. In some embodiments, Xaa1 is selected from A or E. In some embodiments, Xaa2 is selected from an amino acid of high hydropathy. In some embodiments, Xaa2 is selected from V or I. In some embodiments, Xaa2 is selected from an amino acid of medium mutability. In some embodiments, Xaa2 is selected from V. In some embodiments, Xaa2 is selected from an amino acid of medium volume. In some embodiments, Xaa2 is selected from V, E, or Q. In some embodiments, Xaa2 is selected from an amino acid of high solubility. In some embodiments, Xaa2 is selected from V or M. In some embodiments, Xaa3 is selected from an amino acid of low solubility. In some embodiments, Xaa3 is selected from R or Q. In some embodiments, Xaa4 is selected from an amino acid of low surface accessibility. In some embodiments, Xaa4 is selected from C. In some embodiments, Xaa4 is selected from an amino acid of high solubility. In some embodiments, Xaa4 is selected from C. In some embodiments, Xaa4 is selected from an amino acid of low charge. In some embodiments, Xaa4 is selected from D, E, Y, W, V, P, M, A, G, F, I, L, N, Q, S, T, or C. In some embodiments, Xaa4 is selected from an amino acid of high hydropathy. In some embodiments, Xaa4 is selected from C. In some embodiments, Xaa5 is selected from an amino acid of high surface accessibility. In some embodiments, Xaa5 is selected from D, E, R, K, N, or Q. In some embodiments, Xaa5 is selected from an amino acid of low solubility. In some embodiments, Xaa5 is selected from D. In some embodiments, Xaa6 is selected from an amino acid of low mutability. In some embodiments, Xaa6 is selected from C. In some embodiments, Xaa6 is selected from an amino acid of low solubility. In some embodiments, Xaa6 is selected from D. In some embodiments, Xaa8 is selected from an amino acid of high surface accessibility. In some embodiments, Xaa8 is selected from D or N. In some embodiments, Xaa8 is selected from an amino acid of high average flexibility. In some embodiments, Xaa8 is selected from D, R, P, G, or S. In some embodiments, Xaa9 is selected from an amino acid of medium mol mass. In some embodiments, Xaa9 is selected from N, D, L, or I.

[0389] In some embodiments, provided herein are AAV5 VP capsid polypeptide having at least one mutation in a region from a position corresponding to 581 to a position corresponding to 589 of AAV5 VP1 and having at least 70%, at least 75%, at least 80%, at least 85%, at least 90%, at least 92%, at least 95%, at least 97%, at least 99%, or 100% sequence identity to any sequence selected from SEQ ID NO: 14118-SEQ ID NO: 15117, wherein said at least one mutation drives increased heart tissue tropism.

[0390] C. Enriched Heart Sequences

[0391] In some embodiments, provided herein are AAV5 VP capsid polypeptide having at least one mutation in a region from a position corresponding to 581 to a position corresponding to 589 of AAV5 VP1 and having at least 70%, at least 75%, at least 80%, at least 85%, at least 90%, at least 92%, at least 95%, at least 97%, at least 99%, or 100% sequence identity to any sequence selected from SEQ ID NO: 15118-SEQ ID NO: 16117, wherein said at least one mutation drives increased heart tissue tropism.

[0392] 6.7.15. In Vivo Selected Mutated VP Polypeptides that Confer Increased Colon Tropism

[0393] The present disclosure provides AAV5 virions with a VP capsid polypeptide having at least one mutation in a region with residues that interact with target cells (e.g., a target colon cell in a target colon tissue of interest), where the at least one mutation confers increased colon tissue tropism as compared to a wildtype VP capsid polypeptide. In some embodiments, provided herein are AAV5 VP1 capsid polypeptide having a sequence homology of at least 80% to SEQ ID NO: 1, wherein the AAV5 VP1 capsid polypeptide has at least one mutation in a region from a position corresponding to 581 to a position corresponding to 589 of SEQ ID NO: 1 and wherein said at least one mutation drives increased colon tropism. The following sequences rules and sequences also apply to the region in AAV5 VP2 (amino acid residues 445 to 453; VP2 sequence shown in SEQ ID NO: 1115) and AAV5 VP3 (amino acid residues 389 to 397; VP3 sequences shown in SEQ ID NO: 1116) corresponding to AAV5 VP1 amino acid residues 581 to 589. Thus, the present disclosure encompasses AAV5 VP2 capsid polypeptides and AAV5 VP3 capsid polypeptides having one or more mutations in the VP2 and VP3 regions corresponding to the AAV5 VP1 amino acid residues of the 581 to 589 region, where the one or more mutations comport to the rules or sequences in the following section.

[0394] A. Positional Frequency Rules

[0395] In this section, unless otherwise specified, the frequency of a given amino acid residue occurring at a specified position corresponding to position 581 to position 589 of SEQ ID NO: 1 (generalized in SEQ ID NO: 2) in variants identified in colon over the frequency of that given amino acid residue occurring at the specified position in variants identified in all other harvested tissues (CNS (cortex forebrain, cortex occipital, cortex temporal, thalamus, hypothalamus, substantia nigra, hippocampus DG, hippocampus CA1, hippocampus CA3, cerebellum), liver, skeletal muscle, heart, lung, spleen, lymph node, bone marrow, mammary gland, skin, adrenal gland, thyroid, sciatic nerve, and spinal cord tissues) was analyzed to identify a set of sequence rules for capsids that preferentially target colon tissue. Identification of positional frequency rules from in vivo data is described in detail in EXAMPLE 14.

[0396] Disclosed herein are engineered AAV5 VP capsid polypeptides capable of forming an assembled virion that exhibits increased colon tissue tropism as compared to wildtype AAV5 VP capsid polypeptide, wherein the engineered variant AAV5 VP1 capsid polypeptide sequence has one or more mutations, wherein Xaa1 is selected from C, F, H, N, P, W, or Y, or Xaa1 is selected from F, P, or W, or Xaa1 is P; or Xaa2 is selected from D, E, F, L, or P, or Xaa2 is selected from D, E, L, or P, or Xaa2 is P; or Xaa3 is selected from C, F, H, I, L, P, or Y, or Xaa3 is selected from C, H, or P, or Xaa3 is P; or Xaa4 is selected from C, D, E, N, or P, or Xaa4 is selected from C, D, or E, or Xaa4 is C; or Xaa5 is selected from D, E, G, P, or W, or Xaa5 is selected from G, P, or W, or Xaa5 is P; or Xaa6 is selected from C, K, R, or V, or Xaa6 is selected from K or R, or Xaa6 is R; or Xaa7 is selected from D, M, P, or V, or Xaa7 is P; or Xaa8 is selected from D, I, K, L, P, R, or V, or Xaa8 is selected from K, P, or R, or Xaa8 is P; or Xaa9 is selected from C, H, I, K, L, M, or W, or Xaa9 is selected from I, L, or M, or Xaa9 is I.

[0397] Disclosed herein are engineered AAV5 VP capsid polypeptides capable of forming an assembled virion that exhibits increased colon tissue tropism as compared to wildtype AAV5 VP capsid polypeptide, wherein the engineered variant AAV5 VP capsid polypeptide sequence has one or more mutations, wherein the VP1 polypeptide sequence has said one or more mutations in a region from a position corresponding to 581 in SEQ ID NO: 2 to a position corresponding to 589 in SEQ ID NO: 2 and wherein said one or more mutations are selected from the following rules. In some embodiments, Xaa1 is selected from C, F, H, N, P, W, or Y. In some embodiments, Xaa1 is selected from F, P, or W. In some embodiments, Xaa1 is P. In some embodiments, Xaa2 is selected from D, E, F, L, or P. In some embodiments, Xaa2 is selected from D, E, L, or P. In some embodiments, Xaa2 is P. In some embodiments, Xaa3 is selected from C, F, H, I, L, P, or Y. In some embodiments, Xaa3 is selected from C, H, or P. In some embodiments, Xaa3 is P. In some embodiments, Xaa4 is selected from C, D, E, N, or P. In some embodiments, Xaa4 is selected from C, D, or E. In some embodiments, Xaa4 is C. In some embodiments, Xaa5 is selected from D, E, G, P, or W. In some embodiments, Xaa5 is selected from G, P, or W. In some embodiments, Xaa5 is P. In some embodiments, Xaa6 is selected from C, K, R, or V. In some embodiments, Xaa6 is selected from K or R. In some embodiments, Xaa6 is R. In some embodiments, Xaa7 is selected from D, M, P, or V. In some embodiments, Xaa7 is P. In some embodiments, Xaa8 is selected from D, I, K, L, P, R, or V. In some embodiments, Xaa8 is selected from K, P, or R. In some embodiments, Xaa8 is P. In some embodiments, Xaa9 is selected from C, H, I, K, L, M, or W. In some embodiments, Xaa9 is selected from I, L, or M. In some embodiments, Xaa9 is I.

[0398] Disclosed herein are engineered AAV5 VP capsid polypeptides capable of forming an assembled virion that exhibits increased colon tissue tropism as compared to wildtype AAV5 VP capsid polypeptide, wherein the engineered variant AAV5 VP capsid polypeptide sequence has one or more mutations, wherein the VP1 polypeptide sequence has said one or more mutations in a region from a position corresponding to 581 in SEQ ID NO: 2 to a position corresponding to 589 in SEQ ID NO: 2 and wherein said one or more mutations are selected from the following rules: Xaa1 is selected from C, F, H, N, P, W, or Y, Xaa2 is selected from D, E, F, L, or P. Xaa3 is selected from C, F, H, I, L, P, or Y, Xaa4 is selected from C, D, E, N, or P, Xaa5 is selected from D, E, G, P, or W, Xaa6 is selected from C, K, R, or V, Xaa7 is selected from D, M, P, or V, Xaa8 is selected from D, I, K, L, P, R, or V, and Xaa9 is selected from C, H, I, K, L, M, or W.

[0399] Disclosed herein are engineered AAV5 VP capsid polypeptides capable of forming an assembled virion that exhibits increased colon tissue tropism as compared to wildtype AAV5 VP capsid polypeptide, wherein the engineered variant AAV5 VP capsid polypeptide sequence has one or more mutations, wherein the VP1 polypeptide sequence has said one or more mutations in a region from a position corresponding to 581 in SEQ ID NO: 2 to a position corresponding to 589 in SEQ ID NO: 2 and wherein said one or more mutations are as follows: Xaa1 is selected from C, F, H, N, P, W, or Y, Xaa2 is selected from D, E, F, L, or P. Xaa3 is selected from C, F, H, I, L, P, or Y, Xaa4 is selected from C, D, E, N, or P, Xaa5 is selected from D, E, G, P, or W, Xaa6 is selected from C, K, R, or V, Xaa7 is selected from D, M, P, or V, Xaa8 is selected from D, I, K, L, P, R, or V, Xaa9 is selected from C, H, I, K, L, M, or W, or any combination thereof.

[0400] In some embodiments, provided herein are AAV5 VP capsid polypeptide having at least one mutation in a region from a position corresponding to 581 to a position corresponding to 589 of AAV5 VP1 and having at least 70%, at least 75%, at least 80%, at least 85%, at least 90%, at least 92%, at least 95%, at least 97%, at least 99%, or 100% sequence identity to any sequence selected from SEQ ID NO: 10118-SEQ ID NO: 11117, % wherein said at least one mutation drives increased colon tissue tropism.

[0401] B. ML Rules

[0402] For the following set of rules described in this paragraph, favored biophysical properties and favored amino acid residues at each position in the 581 to 589 region of an engineered AAV5 VP1 capsid polypeptide, were determined using in vivo data and two ML models, which are described in EXAMPLE 33. Disclosed herein are engineered AAV5 VP capsid polypeptides capable of forming an assembled virion that exhibits increased colon tissue tropism as compared to an rAAV virion having a wildtype AAV5 VP capsid polypeptide, wherein the engineered AAV5 VP capsid polypeptide sequence has one or more mutations, wherein the engineered AAV5 VP1 capsid polypeptide sequence has said one or more mutations in a region from a position corresponding to 581 in SEQ ID NO: 2 to a position corresponding to 589 in SEQ ID NO: 2 and wherein Xaa1 is selected from an amino acid of high mol mass (e.g., Xaa1 is selected from Y or W); or wherein Xaa1 is selected from an amino acid of high solubility (e.g., Xaa1 is selected from W, F, I, or L); or wherein Xaa2 is selected from an amino acid of low solubility (e.g., Xaa2 is selected from D); or wherein Xaa2 is selected from an amino acid of low mutability (e.g., Xaa2 is selected from P or K); or wherein Xaa2 is selected from an amino acid of medium mol mass (e.g., Xaa2 is selected from D, E, N, K, M, Q, I, or L); or wherein Xaa2 is selected from an amino acid of low hydropathy (e.g., Xaa2 is selected from D, E, R, K, H, N, or Q); or wherein Xaa3 is selected from an amino acid of low mutability (e.g., Xaa3 is selected from K, V, P, or C); or wherein Xaa3 is selected from an amino acid of high solubility (e.g., Xaa3 is selected from W, F, I, or L); or wherein Xaa5 is selected from an amino acid of high average flexibility (e.g., Xaa5 is selected from S, P, G, R, E, or D); or wherein Xaa5 is selected from an amino acid of high surface accessibility (e.g., Xaa5 is selected from D or N); or wherein Xaa6 is selected from an amino acid of low hydropathy (e.g., Xaa6 is selected from R); or wherein Xaa6 is selected from an amino acid of low mutability (e.g., Xaa6 is selected from Y, R, F, or L); or wherein Xaa6 is selected from an amino acid of low solubility (e.g., Xaa6 is selected from R or Q); or wherein Xaa6 is selected from an amino acid of high surface accessibility (e.g., Xaa6 is selected from E, R, or K); or wherein Xaa6 is selected from an amino acid of high average flexibility (e.g., Xaa6 is selected from G or R); or wherein Xaa8 is selected from an amino acid of low solubility (e.g., Xaa8 is selected from D); or any combination thereof.

[0403] In some embodiments, Xaa1 is selected from an amino acid of high mol mass. In some embodiments, Xaa1 is selected from Y or W. In some embodiments, Xaa1 is selected from an amino acid of high solubility. In some embodiments, Xaa1 is selected from W, F, I, or L. In some embodiments, Xaa2 is selected from an amino acid of low solubility. In some embodiments, Xaa2 is selected from D. In some embodiments, Xaa2 is selected from an amino acid of low mutability. In some embodiments, Xaa2 is selected from P, K. In some embodiments, Xaa2 is selected from an amino acid of medium mol mass. In some embodiments, Xaa2 is selected from D, E, N, K, M, Q, I, or L. In some embodiments, Xaa2 is selected from an amino acid of low hydropathy. In some embodiments, Xaa2 is selected from D, E, R, K, H, N, or Q. In some embodiments, Xaa3 is selected from an amino acid of low mutability. In some embodiments, Xaa3 is selected from K, V, P, or C. In some embodiments, Xaa3 is selected from an amino acid of high solubility. In some embodiments, Xaa3 is selected from W, F, I, or L. In some embodiments, Xaa5 is selected from an amino acid of high average flexibility. In some embodiments, Xaa5 is selected from S, P, G, R, E, or D. In some embodiments, Xaa5 is selected from an amino acid of high surface accessibility. In some embodiments, Xaa5 is selected from D or N. In some embodiments, Xaa6 is selected from an amino acid of low hydropathy. In some embodiments, Xaa6 is selected from R. In some embodiments, Xaa6 is selected from an amino acid of low mutability. In some embodiments, Xaa6 is selected from Y, R, F, or L. In some embodiments, Xaa6 is selected from an amino acid of low solubility. In some embodiments, Xaa6 is selected from R or Q. In some embodiments, Xaa6 is selected from an amino acid of high surface accessibility. In some embodiments, Xaa6 is selected from E, R, or K. In some embodiments, Xaa6 is selected from an amino acid of high average flexibility. In some embodiments, Xaa6 is selected from G or R. In some embodiments, Xaa8 is selected from an amino acid of low solubility. In some embodiments, Xaa8 is selected from D.

[0404] In some embodiments, provided herein are AAV5 VP capsid polypeptide having at least one mutation in a region from a position corresponding to 581 to a position corresponding to 589 of AAV5 VP1 and having at least 70%, at least 75%, at least 80%, at least 85%, at least 90%, at least 92%, at least 95%, at least 97%, at least 99%, or 100% sequence identity to any sequence selected from SEQ ID NO: 11118-SEQ ID NO: 12117, wherein said at least one mutation drives increased colon tissue tropism.

[0405] C. Enriched Colon Sequences

[0406] In some embodiments, provided herein are AAV5 VP capsid polypeptide having at least one mutation in a region from a position corresponding to 581 to a position corresponding to 589 of AAV5 VP1 and having at least 70%, at least 75%, at least 80%, at least 85%, at least 90%, at least 92%, at least 95%, at least 97%, at least 99%, or 100% sequence identity to any sequence selected from SEQ ID NO: 12118-SEQ ID NO: 13117, wherein said at least one mutation drives increased colon tissue tropism.

[0407] 6.7.16. In Vivo Selected Mutated VP Polypeptides that Confer Increased Thyroid Gland Tropism

[0408] The present disclosure provides AAV5 virions with a VP capsid polypeptide having at least one mutation in a region with residues that interact with target cells (e.g., a target thyroid cell in a target thyroid gland tissue of interest), where the at least one mutation confers increased thyroid gland tissue tropism as compared to a wildtype VP capsid polypeptide. In some embodiments, provided herein are AAV5 VP1 capsid polypeptide having a sequence homology of at least 80% to SEQ ID NO: 1, wherein the AAV5 VP1 capsid polypeptide has at least one mutation in a region from a position corresponding to 581 to a position corresponding to 589 of SEQ ID NO: 1 and wherein said at least one mutation drives increased thyroid gland tropism. The following sequences rules and sequences also apply to the region in AAV5 VP2 (amino acid residues 445 to 453; VP2 sequence shown in SEQ ID NO: 1115) and AAV5 VP3 (amino acid residues 389 to 397; VP3 sequences shown in SEQ ID NO: 1116) corresponding to AAV5 VP1 amino acid residues 581 to 589. Thus, the present disclosure encompasses AAV5 VP2 capsid polypeptides and AAV5 VP3 capsid polypeptides having one or more mutations in the VP2 and VP3 regions corresponding to the AAV5 VP1 amino acid residues of the 581 to 589 region, where the one or more mutations comport to the rules or sequences in the following section.

[0409] A. Positional Frequency Rules

[0410] In this section, unless otherwise specified, the frequency of a given amino acid residue occurring at a specified position corresponding to position 581 to position 589 of SEQ ID NO: 1 (generalized in SEQ ID NO: 2) in variants identified in thyroid gland over the frequency of that given amino acid residue occurring at the specified position in variants identified in all other harvested tissues (CNS (cortex forebrain, cortex occipital, cortex temporal, thalamus, hypothalamus, substantia nigra, hippocampus DG, hippocampus CA1, hippocampus CA3, cerebellum), liver, skeletal muscle, heart, lung, spleen, lymph node, bone marrow, mammary gland, skin, adrenal gland, colon, sciatic nerve, and spinal cord tissues) was analyzed to identify a set of sequence rules for capsids that preferentially target thyroid gland tissue. Identification of positional frequency rules from in vivo data is described in detail in EXAMPLE 15.

[0411] Disclosed herein are engineered AAV5 VP capsid polypeptides capable of forming an assembled virion that exhibits increased thyroid gland tissue tropism as compared to wildtype AAV5 VP capsid polypeptide, wherein the engineered variant AAV5 VP1 capsid polypeptide sequence has one or more mutations, wherein Xaa1 is selected from A, K, M, N, Q, or R, or Xaa1 is selected from K. N or Q, or Xaa1 is K; or Xaa2 is selected from A, F, K, L, M, T, V, or W, or Xaa2 is selected from F, V, or W, or Xaa2 is W; or Xaa3 is selected from A, I, K, R, S, T, V, or W, or Xaa3 is selected from A, R or T, or Xaa3 is R; or Xaa4 is selected from A, D, E, I, P, or V, or Xaa4 is selected from A, E, or I, or Xaa4 is A; or Xaa5 is selected from F, I, M, Q, V, or Y, or Xaa5 is M, V, Y, or Xaa5 is M; or Xaa6 is selected from H, M, N, or Y, or Xaa6 is N; or Xaa7 is selected from H, I, N, Q, S, or W, or Xaa7 is selected from H, I, or N, or Xaa7 is H; or Xaa8 is selected from A, D, F, Q, S, or Y, or Xaa8 is selected from A, F, or S, or Xaa8 is F; or Xaa9 is selected from A, Q, S, or Y, or Xaa9 is selected from A or S, or Xaa9 is A.

[0412] Disclosed herein are engineered AAV5 VP capsid polypeptides capable of forming an assembled virion that exhibits increased thyroid gland tissue tropism as compared to wildtype AAV5 VP capsid polypeptide, wherein the engineered variant AAV5 VP capsid polypeptide sequence has one or more mutations, wherein the VP1 polypeptide sequence has said one or more mutations in a region from a position corresponding to 581 in SEQ ID NO: 2 to a position corresponding to 589 in SEQ ID NO: 2 and wherein said one or more mutations are selected from the following rules. In some embodiments, Xaa1 is selected from A, K, M, N, Q, or R. In some embodiments, Xaa1 is selected from K, N or Q. In some embodiments, Xaa1 is K. In some embodiments, Xaa2 is selected from A, F, K, L, M, T, V, or W. In some embodiments, Xaa2 is selected from F, V, or W. In some embodiments, Xaa2 is W. In some embodiments, Xaa3 is selected from A, I, K, R, S, T, V, or W. In some embodiments, Xaa3 is selected from A, R or T. In some embodiments, Xaa3 is R In some embodiments, Xaa4 is selected from A, D, E, I, P, or V. In some embodiments, Xaa4 is selected from A, E, or I. In some embodiments, Xaa4 is A. In some embodiments, Xaa5 is selected from F, I, M, Q, V, or Y. In some embodiments, Xaa5 is M, V, Y. In some embodiments, Xaa5 is M. In some embodiments, Xaa6 is selected from H, M, N, or Y. In some embodiments, Xaa6 is N. In some embodiments, Xaa7 is selected from H, I, N, Q, S, or W. In some embodiments, Xaa7 is selected from H, I, or N. In some embodiments, Xaa7 is H. In some embodiments, Xaa8 is selected from A, D, F, Q, S, or Y. In some embodiments, Xaa8 is selected from A, F, or S. In some embodiments, Xaa8 is F. In some embodiments, Xaa9 is selected from A, Q, S, or Y. In some embodiments, Xaa9 is selected from A or S. In some embodiments, Xaa9 is A.

[0413] Disclosed herein are engineered AAV5 VP capsid polypeptides capable of forming an assembled virion that exhibits increased thyroid gland tissue tropism as compared to wildtype AAV5 VP capsid polypeptide, wherein the engineered variant AAV5 VP capsid polypeptide sequence has one or more mutations, wherein the VP1 polypeptide sequence has said one or more mutations in a region from a position corresponding to 581 in SEQ ID NO: 2 to a position corresponding to 589 in SEQ ID NO: 2 and wherein said one or more mutations are selected from the following rules: Xaa1 is selected from A, K, M, N, Q, or R. Xaa2 is selected from A, F, K, L, M, T, V, or W, Xaa3 is selected from A, I, K, R, S, T, V, or W, Xaa4 is selected from A, D, E, I, P, or V, Xaa5 is selected from F, I, M, Q, V, or Y, Xaa6 is selected from H, M, N, or Y, Xaa7 is selected from H, I, N, Q, S, or W, Xaa8 is selected from A, D, F, Q, S, or Y. and Xaa9 is selected from A, Q, S, or Y.

[0414] Disclosed herein are engineered AAV5 VP capsid polypeptides capable of forming an assembled virion that exhibits increased thyroid gland tissue tropism as compared to wildtype AAV5 VP capsid polypeptide, wherein the engineered variant AAV5 VP capsid polypeptide sequence has one or more mutations, wherein the VP1 polypeptide sequence has said one or more mutations in a region from a position corresponding to 581 in SEQ ID NO: 2 to a position corresponding to 589 in SEQ ID NO: 2 and wherein said one or more mutations are as follows: Xaa1 is selected from A, K, M, N, Q, or R, Xaa2 is selected from A, F, K, L, M, T, V, or W, Xaa3 is selected from A, I, K, R, S, T, V, or W, Xaa4 is selected from A, D, E, I, P, or V, Xaa5 is selected from F, I, M, Q, V, or Y, Xaa6 is selected from H, M, N, or Y, Xaa7 is selected from H, I, N, Q, S, or W, Xaa8 is selected from A, D, F, Q, S, or Y, Xaa9 is selected from A, Q, S, or Y, or any combination thereof.

[0415] In some embodiments, provided herein are AAV5 VP capsid polypeptide having at least one mutation in a region from a position corresponding to 581 to a position corresponding to 589 of AAV5 VP1 and having at least 70%, at least 75%, at least 80%, at least 85%, at least 90%, at least 92%, at least 95%, at least 97%, at least 99%, or 100% sequence identity to any sequence selected from SEQ ID NO: 40438-SEQ ID NO: 41437, wherein said at least one mutation drives increased thyroid gland tissue tropism.

[0416] B. ML Rules

[0417] For the following set of rules described in this paragraph, favored biophysical properties and favored amino acid residues at each position in the 581 to 589 region of an engineered AAV5 VP1 capsid polypeptide, were determined using in vivo data and two ML models, which are described in EXAMPLE 43. Disclosed herein are engineered AAV5 VP capsid polypeptides capable of forming an assembled virion that exhibits increased thyroid gland tissue tropism as compared to an rAAV virion having a wildtype AAV5 VP capsid polypeptide, wherein the engineered AAV5 VP capsid polypeptide sequence has one or more mutations, wherein the engineered AAV5 VP1 capsid polypeptide sequence has said one or more mutations in a region from a position corresponding to 581 in SEQ ID NO: 2 to a position corresponding to 589 in SEQ ID NO: 2 and wherein Xaa1 is selected from an amino acid of high mutability (e.g., Xaa1 is selected from N); or wherein Xaa2 is selected from an amino acid of low surface accessibility (e.g., Xaa2 is selected from F, G, or M); or wherein Xaa3 is selected from an amino acid of high solubility (e.g., Xaa3 is selected from F); or wherein Xaa3 is selected from an amino acid of low mutability (e.g., Xaa3 is selected from Y, F, L, or C); or wherein Xaa3 is selected from an amino acid of medium mol mass (e.g., Xaa3 is selected from D, E, R, K, V, P, M, I, L, N, Q, T, or C); or wherein Xaa3 is selected from an amino acid of low surface accessibility (e.g., Xaa3 is selected from V, I, L, or C); or wherein Xaa4 is selected from an amino acid of high goldman engelman steitz (e.g., Xaa4 is selected from L or V); or wherein Xaa4 is selected from an amino acid of low surface accessibility (e.g., Xaa4 is selected from V, M, A, G, F, I, or L); or wherein Xaa4 is selected from an amino acid of low mol mass (e.g., Xaa4 is selected from D, A, G, I, L, or N); or wherein Xaa5 is selected from an amino acid of high solubility (e.g., Xaa5 is selected from C, L, F, M, V, or Y); or wherein Xaa5 is selected from an amino acid of low solubility (e.g., Xaa5 is selected from D); or wherein Xaa5 is selected from an amino acid of low average flexibility (e.g., Xaa5 is selected from F, M, or W); or wherein Xaa6 is selected from an amino acid of low average flexibility (e.g., Xaa6 is selected from F, M, or W); or wherein Xaa7 is selected from an amino acid of high mutability (e.g., Xaa7 is selected from N); or wherein Xaa7 is selected from an amino acid of low volume (e.g., Xaa7 is selected from P, N, or T); or wherein Xaa8 is selected from an amino acid of low average flexibility (e.g., Xaa8 is selected from F, M, or W); or wherein Xaa8 is selected from an amino acid of low surface accessibility (e.g., Xaa8 is selected from M, G, or F); or wherein Xaa9 is selected from an amino acid of low mutability (e.g., Xaa9 is selected from R, K, P, H, or C); or wherein Xaa9 is selected from an amino acid of low hydropathy (e.g., Xaa9 is selected from R); or any combination thereof.

[0418] In some embodiments, Xaa1 is selected from an amino acid of high mutability. In some embodiments, Xaa1 is selected from N. In some embodiments, Xaa2 is selected from an amino acid of low surface accessibility. In some embodiments, Xaa2 is selected from F, G, or M. In some embodiments, Xaa3 is selected from an amino acid of high solubility. In some embodiments, Xaa3 is selected from F. In some embodiments, Xaa3 is selected from an amino acid of low mutability. In some embodiments, Xaa3 is selected from Y, F, L, or C. In some embodiments, Xaa3 is selected from an amino acid of medium mol mass. In some embodiments, Xaa3 is selected from D, E, R, K, V, P, M, I, L, N, Q, T, or C. In some embodiments, Xaa3 is selected from an amino acid of low surface accessibility. In some embodiments, Xaa3 is selected from V, I, L, or C. In some embodiments, Xaa4 is selected from an amino acid of high goldman engelman steitz. In some embodiments, Xaa4 is selected from L or V. In some embodiments, Xaa4 is selected from an amino acid of low surface accessibility. In some embodiments, Xaa4 is selected from V, M, A, G, F, I, or L. In some embodiments, Xaa4 is selected from an amino acid of low mol mass. In some embodiments, Xaa4 is selected from D, A, G, I, L, or N. In some embodiments, Xaa5 is selected from an amino acid of high solubility. In some embodiments, Xaa5 is selected from C, L, F, M, V, or Y. In some embodiments, Xaa5 is selected from an amino acid of low solubility. In some embodiments, Xaa5 is selected from D. In some embodiments, Xaa5 is selected from an amino acid of low average flexibility. In some embodiments, Xaa5 is selected from F, M, or W. In some embodiments, Xaa6 is selected from an amino acid of low average flexibility. In some embodiments, Xaa6 is selected from F, M, or W. In some embodiments, Xaa7 is selected from an amino acid of high mutability. In some embodiments, Xaa7 is selected from N. In some embodiments, Xaa7 is selected from an amino acid of low volume. In some embodiments, Xaa7 is selected from P, N, or T. In some embodiments, Xaa8 is selected from an amino acid of low average flexibility. In some embodiments, Xaa8 is selected from F, M, or W. In some embodiments, Xaa8 is selected from an amino acid of low surface accessibility. In some embodiments, Xaa8 is selected from M, G, or F. In some embodiments, Xaa9 is selected from an amino acid of low mutability. In some embodiments, Xaa9 is selected from R, K, P, H, or C. In some embodiments, Xaa9 is selected from an amino acid of low hydropathy. In some embodiments, Xaa9 is selected from R.

[0419] In some embodiments, provided herein are AAV5 VP capsid polypeptide having at least one mutation in a region from a position corresponding to 581 to a position corresponding to 589 of AAV5 VP1 and having at least 70%, at least 75%, at least 80%, at least 85%, at least 90%, at least 92%, at least 95%, at least 97%, at least 99%, or 100% sequence identity to any sequence selected from SEQ ID NO: 41438-SEQ ID NO: 42437, wherein said at least one mutation drives increased thyroid gland tissue tropism.

[0420] C. Enriched Thyroid Gland Sequences

[0421] In some embodiments, provided herein are AAV5 VP capsid polypeptide having at least one mutation in a region from a position corresponding to 581 to a position corresponding to 589 of AAV5 VP1 and having at least 70%, at least 75%, at least 80%, at least 85%, at least 90%, at least 92%, at least 95%, at least 97%, at least 99%, or 100% sequence identity to any sequence selected from SEQ ID NO: 42438-SEQ ID NO: 43437, wherein said at least one mutation drives increased thyroid gland tissue tropism.

[0422] 6.7.17. In Vivo Selected Mutated VP Polypeptides that Confer Increased Lymph Node Tropism

[0423] The present disclosure provides AAV5 virions with a VP capsid polypeptide having at least one mutation in a region with residues that interact with target cells (e.g., a target lymph node cell in a target lymph node tissue of interest), where the at least one mutation confers increased lymph node tissue tropism as compared to a wildtype VP capsid polypeptide. In some embodiments, provided herein are AAV5 VP1 capsid polypeptide having a sequence homology of at least 80% to SEQ ID NO: 1, wherein the AAV5 VP1 capsid polypeptide has at least one mutation in a region from a position corresponding to 581 to a position corresponding to 589 of SEQ ID NO: 1 and wherein said at least one mutation drives increased lymph node tropism. The following sequences rules and sequences also apply to the region in AAV5 VP2 (amino acid residues 445 to 453; VP2 sequence shown in SEQ ID NO: 1115) and AAV5 VP3 (amino acid residues 389 to 397; VP3 sequences shown in SEQ ID NO: 1116) corresponding to AAV5 VP1 amino acid residues 581 to 589. Thus, the present disclosure encompasses AAV5 VP2 capsid polypeptides and AAV5 VP3 capsid polypeptides having one or more mutations in the VP2 and VP3 regions corresponding to the AAV5 VP1 amino acid residues of the 581 to 589 region, where the one or more mutations comport to the rules or sequences in the following section.

[0424] A. Positional Frequency Rules

[0425] In this section, unless otherwise specified, the frequency of a given amino acid residue occurring at a specified position corresponding to position 581 to position 589 of SEQ ID NO: 1 (generalized in SEQ ID NO: 2) in variants identified in lymph node over the frequency of that given amino acid residue occurring at the specified position in variants identified in all other harvested tissues (CNS (cortex forebrain, cortex occipital, cortex temporal, thalamus, hypothalamus, substantia nigra, hippocampus DG, hippocampus CA1, hippocampus CA3, cerebellum), liver, skeletal muscle, heart, lung, spleen, bone marrow, mammary gland, skin, adrenal gland, thyroid, colon, sciatic nerve, and spinal cord tissues) was analyzed to identify a set of sequence rules for capsids that preferentially target lymph node tissue. Identification of positional frequency rules from in vivo data is described in detail in EXAMPLE 16.

[0426] Disclosed herein are engineered AAV5 VP capsid polypeptides capable of forming an assembled virion that exhibits increased lymph node tissue tropism as compared to wildtype AAV5 VP capsid polypeptide, wherein the engineered variant AAV5 VP1 capsid polypeptide sequence has one or more mutations, wherein Xaa1 is selected from A, D, E, Q, S, or T, or Xaa1 is selected from D, E, or T, or Xaa1 is E; or Xaa2 is selected from A, H, I, S, T, or V, or Xaa2 is selected from I, T, or V, or Xaa2 is V; or Xaa3 is selected from A, E, H, I, T, or V, or Xaa3 is selected from A, I, T, or V, or Xaa3 is T; or Xaa4 is selected from A, D, E, or P, or Xaa4 is selected from D, or E, or Xaa4 is E; or Xaa5 is selected from I, L, M, V, or Y, or Xaa5 is selected from I, L, V, or Y, or Xaa5 is L; or Xaa6 is selected from D, E, I, N, or Q, or Xaa6 is selected from D, E, or I, or Xaa6 is D; or Xaa7 is selected from A, E, G, Q, or V, or Xaa7 is A, Q, or V, or Xaa7 is V; or Xaa8 is selected from F, G, M, or W, or Xaa8 is selected from F or W, or Xaa8 is W; or Xaa9 is selected from 1, P, T, or Y, or Xaa9 is I or P.

[0427] Disclosed herein are engineered AAV5 VP capsid polypeptides capable of forming an assembled virion that exhibits increased lymph node tissue tropism as compared to wildtype AAV5 VP capsid polypeptide, wherein the engineered variant AAV5 VP capsid polypeptide sequence has one or more mutations, wherein the VP1 polypeptide sequence has said one or more mutations in a region from a position corresponding to 581 in SEQ ID NO: 2 to a position corresponding to 589 in SEQ ID NO: 2 and wherein said one or more mutations are selected from the following rules. In some embodiments, Xaa1 is selected from A, D, E, Q, S, or T. In some embodiments, Xaa1 is selected from D, E, or T. In some embodiments, Xaa1 is E. In some embodiments, Xaa2 is selected from A, H, I, S, T, or V. In some embodiments, Xaa2 is selected from I, T, or V. In some embodiments, Xaa2 is V. In some embodiments, Xaa3 is selected from A, E, H, I, T, or V. In some embodiments, Xaa3 is selected from A, I, T, or V. In some embodiments, Xaa3 is T. In some embodiments, Xaa4 is selected from A, D, E, or P. In some embodiments, Xaa4 is selected from D, or E. In some embodiments, Xaa4 is E. In some embodiments, Xaa5 is selected from I, L, M, V, or Y. In some embodiments, Xaa5 is selected from I, L, V, or Y. In some embodiments, Xaa5 is L. In some embodiments, Xaa6 is selected from D, E, I, N, or Q. In some embodiments, Xaa6 is selected from D, E, or I. In some embodiments, Xaa6 is D. In some embodiments, Xaa7 is selected from A, E, G, Q, or V. In some embodiments, Xaa7 is A, Q, or V. In some embodiments, Xaa7 is V. In some embodiments, Xaa8 is selected from F, G, M, or W. In some embodiments, Xaa8 is selected from F or W. In some embodiments, Xaa8 is W. In some embodiments, Xaa9 is selected from I, P, T, or Y. In some embodiments, Xaa9 is I or P.

[0428] Disclosed herein are engineered AAV5 VP capsid polypeptides capable of forming an assembled virion that exhibits increased lymph node tissue tropism as compared to wildtype AAV5 VP capsid polypeptide, wherein the engineered variant AAV5 VP capsid polypeptide sequence has one or more mutations, wherein the VP1 polypeptide sequence has said one or more mutations in a region from a position corresponding to 581 in SEQ ID NO: 2 to a position corresponding to 589 in SEQ ID NO: 2 and wherein said one or more mutations are selected from the following rules: Xaa1 is selected from A, D, E, Q, S, or T, Xaa2 is selected from A, H, I, S, T, or V, Xaa3 is selected from A, E, H, I, T, or V, Xaa4 is selected from A, D, E, or P, Xaa5 is selected from I, L, M, V, or Y, Xaa6 is selected from D, E, I, N, or Q, Xaa7 is selected from A, E, G, Q, or V, Xaa8 is selected from F, G, M, or W, and Xaa9 is selected from I, P, T, or Y.

[0429] Disclosed herein are engineered AAV5 VP capsid polypeptides capable of forming an assembled virion that exhibits increased lymph node tissue tropism as compared to wildtype AAV5 VP capsid polypeptide, wherein the engineered variant AAV5 VP capsid polypeptide sequence has one or more mutations, wherein the VP1 polypeptide sequence has said one or more mutations in a region from a position corresponding to 581 in SEQ ID NO: 2 to a position corresponding to 589 in SEQ ID NO: 2 and wherein said one or more mutations are as follows: Xaa1 is selected from A, D, E, Q, S, or T, Xaa2 is selected from A, H, I, S, T, or V, Xaa3 is selected from A, E, H, I, T, or V, Xaa4 is selected from A, D, E, or P, Xaa5 is selected from I, L, M, V, or Y, Xaa6 is selected from D, E, I, N, or Q, Xaa7 is selected from A, E, G, Q, or V, Xaa8 is selected from F, G, M, or W, Xaa9 is selected from I, P, T, or Y, or any combination thereof.

[0430] In some embodiments, provided herein are AAV5 VP capsid polypeptide having at least one mutation in a region from a position corresponding to 581 to a position corresponding to 589 of AAV5 VP1 and having at least 70%, at least 75%, at least 80%, at least 85%, at least 90%, at least 92%, at least 95%, at least 97%, at least 99%, or 100% sequence identity to any sequence selected from SEQ ID NO: 19118-SEQ ID NO: 20117, wherein said at least one mutation drives increased lymph node tissue tropism.

[0431] B. ML Rules

[0432] For the following set of rules described in this paragraph, favored biophysical properties and favored amino acid residues at each position in the 581 to 589 region of an engineered AAV5 VP1 capsid polypeptide, were determined using in vivo data and two ML models, which are described in EXAMPLE 35. Disclosed herein are engineered AAV5 VP capsid polypeptides capable of forming an assembled virion that exhibits increased lymph node tissue tropism as compared to an rAAV virion having a wildtype AAV5 VP capsid polypeptide, wherein the engineered AAV5 VP capsid polypeptide sequence has one or more mutations, wherein the engineered AAV5 VP1 capsid polypeptide sequence has said one or more mutations in a region from a position corresponding to 581 in SEQ ID NO: 2 to a position corresponding to 589 in SEQ ID NO: 2 and wherein Xaa1 is selected from an amino acid of high average flexibility (e.g., Xaa1 is selected from D, E, P, G, Q, S, or R); or wherein Xaa1 is selected from an amino acid of high hbond donors (e.g., Xaa1 is selected from R); or wherein Xaa1 is selected from an amino acid of high mol mass (e.g., Xaa1 is selected from Y, W, R, or F); or wherein Xaa2 is selected from an amino acid of low solubility (e.g., Xaa2 is selected from N or E); or wherein Xaa3 is selected from an amino acid of low average flexibility (e.g., Xaa3 is selected from W, M, or F); or wherein Xaa3 is selected from an amino acid of low mutability (e.g., Xaa3 is selected from R, H, K, P, Y, F, L, or C); or wherein Xaa4 is selected from an amino acid of low mutability (e.g., Xaa4 is selected from C); or wherein Xaa5 is selected from an amino acid of high mutability (e.g., Xaa5 is selected from N); or wherein Xaa5 is selected from an amino acid of medium mol mass (e.g., Xaa5 is selected from D, I, L, or N); or wherein Xaa6 is selected from an amino acid of high mol mass (e.g., Xaa6 is selected from Y, W, R, or F); or wherein Xaa6 is selected from an amino acid of high average flexibility (e.g., Xaa6 is selected from G or R); or wherein Xaa7 is selected from an amino acid of high average flexibility (e.g., Xaa7 is selected from D, E, K, P, I, N, Q, or S); or wherein Xaa7 is selected from an amino acid of low solubility (e.g., Xaa7 is selected from N, E); or wherein Xaa8 is selected from an amino acid of low solubility (e.g., Xaa8 is selected from N, E, or D); or wherein Xaa8 is selected from an amino acid of medium mutability (e.g., Xaa8 is selected from R or H); or wherein Xaa9 is selected from an amino acid of low mutability (e.g., Xaa9 is selected from P or K); or wherein Xaa9 is selected from an amino acid of high average flexibility (e.g., Xaa9 is selected from D, E, P, or S); or wherein Xaa9 is selected from an amino acid of high solubility (e.g., Xaa9 is selected from M or V); or any combination thereof.

[0433] In some embodiments, Xaa1 is selected from an amino acid of high average flexibility. In some embodiments, Xaa1 is selected from D, E, P, G, Q, S, or R. In some embodiments, Xaa1 is selected from an amino acid of high hbond donors. In some embodiments, Xaa1 is selected from R. In some embodiments, Xaa1 is selected from an amino acid of high mol mass. In some embodiments, Xaa1 is selected from Y, W, R, or F. In some embodiments, Xaa2 is selected from an amino acid of low solubility. In some embodiments, Xaa2 is selected from N or E. In some embodiments, Xaa3 is selected from an amino acid of low average flexibility. In some embodiments, Xaa3 is selected from W, M, or F. In some embodiments, Xaa3 is selected from an amino acid of low mutability. In some embodiments, Xaa3 is selected from R, H, K, P, Y, F, L, or C. In some embodiments, Xaa4 is selected from an amino acid of low mutability. In some embodiments, Xaa4 is selected from C. In some embodiments, Xaa5 is selected from an amino acid of high mutability. In some embodiments, Xaa5 is selected from N. In some embodiments, Xaa5 is selected from an amino acid of medium mol mass. In some embodiments, Xaa5 is selected from D, I, L, or N. In some embodiments, Xaa6 is selected from an amino acid of high mol mass. In some embodiments, Xaa6 is selected from Y, W, R, or F. In some embodiments, Xaa6 is selected from an amino acid of high average flexibility. In some embodiments, Xaa6 is selected from G, R. In some embodiments, Xaa7 is selected from an amino acid of high average flexibility. In some embodiments, Xaa7 is selected from D, E, K, P, I, N, Q, or S. In some embodiments, Xaa7 is selected from an amino acid of low solubility. In some embodiments, Xaa7 is selected from N or E. In some embodiments, Xaa8 is selected from an amino acid of low solubility. In some embodiments, Xaa8 is selected from N, E, or D. In some embodiments, Xaa8 is selected from an amino acid of medium mutability. In some embodiments, Xaa8 is selected from R or H. In some embodiments, Xaa9 is selected from an amino acid of low mutability. In some embodiments, Xaa9 is selected from P or K. In some embodiments, Xaa9 is selected from an amino acid of high average flexibility. In some embodiments, Xaa9 is selected from D, E, P, or S. In some embodiments, Xaa9 is selected from an amino acid of high solubility. In some embodiments, Xaa9 is selected from M or V.

[0434] In some embodiments, provided herein are AAV5 VP capsid polypeptide having at least one mutation in a region from a position corresponding to 581 to a position corresponding to 589 of AAV5 VP1 and having at least 70%, at least 75%, at least 80%, at least 85%, at least 90%, at least 92%, at least 95%, at least 97%, at least 99%, or 100% sequence identity to any sequence selected from SEQ ID NO: 20118-SEQ ID NO: 21117, wherein said at least one mutation drives increased lymph node tissue tropism.

[0435] C. Enriched Lymph Node Sequences

[0436] In some embodiments, provided herein are AAV5 VP capsid polypeptide having at least one mutation in a region from a position corresponding to 581 to a position corresponding to 589 of AAV5 VP1 and having at least 70%, at least 75%, at least 80%, at least 85%, at least 90%, at least 92%, at least 95%, at least 97%, at least 99%, or 100% sequence identity to any sequence selected from SEQ ID NO: 21118-SEQ ID NO: 22117, wherein said at least one mutation drives increased lymph node tissue tropism.

[0437] 6.7.18. In Vivo Selected Mutated VP Polypeptides that Confer Increased Skin Tropism

[0438] The present disclosure provides AAV5 virions with a VP capsid polypeptide having at least one mutation in a region with residues that interact with target cells (e.g., a target skin cell in a target skin tissue of interest), where the at least one mutation confers increased skin tissue tropism as compared to a wildtype VP capsid polypeptide. In some embodiments, provided herein are AAV5 VP1 capsid polypeptide having a sequence homology of at least 80% to SEQ ID NO: 1, wherein the AAV5 VP1 capsid polypeptide has at least one mutation in a region from a position corresponding to 581 to a position corresponding to 589 of SEQ ID NO: 1 and wherein said at least one mutation drives increased skin tropism. The following sequences rules and sequences also apply to the region in AAV5 VP2 (amino acid residues 445 to 453; VP2 sequence shown in SEQ ID NO: 1115) and AAV5 VP3 (amino acid residues 389 to 397; VP3 sequences shown in SEQ ID NO: 1116) corresponding to AAV5 VP1 amino acid residues 581 to 589. Thus, the present disclosure encompasses AAV5 VP2 capsid polypeptides and AAV5 VP3 capsid polypeptides having one or more mutations in the VP2 and VP3 regions corresponding to the AAV5 VP1 amino acid residues of the 581 to 589 region, where the one or more mutations comport to the rules or sequences in the following section.

[0439] A. Positional Frequency Rules

[0440] In this section, unless otherwise specified, the frequency of a given amino acid residue occurring at a specified position corresponding to position 581 to position 589 of SEQ ID NO: 1 (generalized in SEQ ID NO: 2) in variants identified in skin over the frequency of that given amino acid residue occurring at the specified position in variants identified in all other harvested tissues (CNS (cortex forebrain, cortex occipital, cortex temporal, thalamus, hypothalamus, substantia nigra, hippocampus DG, hippocampus CA1, hippocampus CA3, cerebellum), liver, skeletal muscle, heart, lung, spleen, lymph node, bone marrow, mammary gland, adrenal gland, thyroid, colon, sciatic nerve, and spinal cord tissues) was analyzed to identify a set of sequence rules for capsids that preferentially target skin tissue. Identification of positional frequency rules from in vivo data is described in detail in EXAMPLE 17.

[0441] Disclosed herein are engineered AAV5 VP capsid polypeptides capable of forming an assembled virion that exhibits increased skin tissue tropism as compared to wildtype AAV5 VP capsid polypeptide, wherein the engineered variant AAV5 VP1 capsid polypeptide sequence has one or more mutations, wherein Xaa1 is selected from A, C, K, Q, R, or T, or Xaa1 is selected from C, K, or R, or Xaa1 is C; or Xaa2 is selected from A, C, I, S, T, or V, or Xaa2 is selected from A, S, T, or V, or Xaa2 is V; or Xaa3 is selected from A, C, F, G, M, Q, S, or V, or Xaa3 is selected from A, C, F, M, or Q, or Xaa3 is C; or Xaa4 is selected from C, K, L, P, R, or W, or Xaa4 is selected from L, P, or R, or Xaa4 is R; or Xaa5 is selected from F, H, I, M, V, or Y, or Xaa5 is selected from M, V, or Y, or Xaa5 is Y; or Xaa6 is selected from F, H, I, M, N, Q, or S, or Xaa6 is selected from M, N, or Q, or Xaa6 is N; or Xaa7 is selected from A, H, K, M, N, R, or V, or Xaa7 is A, H, K, or R, or Xaa7 is K; or Xaa8 is selected from A, F, G, H, S, or Y, or Xaa8 is selected from A, F, or S, or Xaa8 is S; or Xaa9 is selected from A, E, G, P, Q, R, or S, or Xaa9 is selected from A, Q, or S, or Xaa9 is A.

[0442] Disclosed herein are engineered AAV5 VP capsid polypeptides capable of forming an assembled virion that exhibits increased skin tissue tropism as compared to wildtype AAV5 VP capsid polypeptide, wherein the engineered variant AAV5 VP capsid polypeptide sequence has one or more mutations, wherein the VP1 polypeptide sequence has said one or more mutations in a region from a position corresponding to 581 in SEQ ID NO: 2 to a position corresponding to 589 in SEQ ID NO: 2 and wherein said one or more mutations are selected from the following rules. In some embodiments, Xaa1 is selected from A, C, K, Q, R, or T. In some embodiments, Xaa1 is selected from C, K, or R. In some embodiments, Xaa1 is C. In some embodiments, Xaa2 is selected from A, C, I, S, T, or V. In some embodiments, Xaa2 is selected from A, S, T, or V. In some embodiments, Xaa2 is V. In some embodiments, Xaa3 is selected from A, C, F, G, M, Q, S, or V. In some embodiments, Xaa3 is selected from A, C, F, M, or Q. In some embodiments, Xaa3 is C. In some embodiments, Xaa4 is selected from C, K, L, P, R, or W. In some embodiments, Xaa4 is selected from L, P, or R. In some embodiments, Xaa4 is R. In some embodiments, Xaa5 is selected from F, H, I, M, V, or Y. In some embodiments, Xaa5 is selected from M, V, or Y. In some embodiments, Xaa5 is Y. In some embodiments, Xaa6 is selected from F, H, I, M, N, Q, or S. In some embodiments, Xaa6 is selected from M, N, or Q. In some embodiments, Xaa6 is N. In some embodiments, Xaa7 is selected from A, H, K, M, N, R, or V. In some embodiments, Xaa7 is A, H, K, or R. In some embodiments, Xaa7 is K. In some embodiments, Xaa8 is selected from A, F, G, H, S, or Y. In some embodiments, Xaa8 is selected from A, F, or S. In some embodiments, Xaa8 is S. In some embodiments, Xaa9 is selected from A, E, G, P, Q, R, or S. In some embodiments, Xaa9 is selected from A, Q, or S. In some embodiments, Xaa9 is A.

[0443] Disclosed herein are engineered AAV5 VP capsid polypeptides capable of forming an assembled virion that exhibits increased skin tissue tropism as compared to wildtype AAV5 VP capsid polypeptide, wherein the engineered variant AAV5 VP capsid polypeptide sequence has one or more mutations, wherein the VP1 polypeptide sequence has said one or more mutations in a region from a position corresponding to 581 in SEQ ID NO: 2 to a position corresponding to 589 in SEQ ID NO: 2 and wherein said one or more mutations are selected from the following rules: Xaa1 is selected from A, C, K, Q, R, or T, Xaa2 is selected from A, C, I, S, T, or V, Xaa3 is selected from A, C, F, G, M, Q, S, or V, Xaa4 is selected from C, K, L, P, R, or W, Xaa5 is selected from F, H, I, M, V, or Y, Xaa6 is selected from F, H, I, M, N, Q, or S, Xaa7 is selected from A, H, K, M, N, R, or V, Xaa8 is selected from A, F, G, H, S, or Y, and Xaa9 is selected from A, E, G, P, Q, R, or S.

[0444] Disclosed herein are engineered AAV5 VP capsid polypeptides capable of forming an assembled virion that exhibits increased skin tissue tropism as compared to wildtype AAV5 VP capsid polypeptide, wherein the engineered variant AAV5 VP capsid polypeptide sequence has one or more mutations, wherein the VP1 polypeptide sequence has said one or more mutations in a region from a position corresponding to 581 in SEQ ID NO: 2 to a position corresponding to 589 in SEQ ID NO: 2 and wherein said one or more mutations are as follows: Xaa1 is selected from A, C, K, Q, R, or T, Xaa2 is selected from A, C, I, S, T, or V, Xaa3 is selected from A, C, F, G, M, Q, S, or V, Xaa4 is selected from C, K, L, P, R, or W, Xaa5 is selected from F, H, I, M, V, or Y, Xaa6 is selected from F, H, I, M, N, Q, or S, Xaa7 is selected from A, H, K, M, N, R, or V, Xaa8 is selected from A, F, G, H, S, or Y, Xaa9 is selected from A, E, G, P, Q, R, or S, or any combination thereof.

[0445] In some embodiments, provided herein are AAV5 VP capsid polypeptide having at least one mutation in a region from a position corresponding to 581 to a position corresponding to 589 of AAV5 VP1 and having at least 70%, at least 75%, at least 80%, at least 85%, at least 90%, at least 92%, at least 95%, at least 97%, at least 99%, or 100% sequence identity to any sequence selected from SEQ ID NO: 31991-SEQ ID NO: 32990, wherein said at least one mutation drives increased skin tissue tropism.

[0446] B. ML Rules

[0447] For the following set of rules described in this paragraph, favored biophysical properties and favored amino acid residues at each position in the 581 to 589 region of an engineered AAV5 VP1 capsid polypeptide, were determined using in vivo data and two ML models, which are described in EXAMPLE 40. Disclosed herein are engineered AAV5 VP capsid polypeptides capable of forming an assembled virion that exhibits increased skin tissue tropism as compared to an rAAV virion having a wildtype AAV5 VP capsid polypeptide, wherein the engineered AAV5 VP capsid polypeptide sequence has one or more mutations, wherein the engineered AAV5 VP1 capsid polypeptide sequence has said one or more mutations in a region from a position corresponding to 581 in SEQ ID NO: 2 to a position corresponding to 589 in SEQ ID NO: 2 and wherein Xaa1 is selected from an amino acid of low surface accessibility (e.g., Xaa1 is selected from C); or wherein Xaa1 is selected from an amino acid of low volume (e.g., Xaa1 is selected from C); or wherein Xaa1 is selected from an amino acid of low mutability (e.g., Xaa1 is selected from C); or wherein Xaa2 is selected from an amino acid of high surface accessibility (e.g., Xaa2 is selected from R or K); or wherein Xaa2 is selected from an amino acid of high average flexibility (e.g., Xaa2 is selected from K, I, or N); or wherein Xaa2 is selected from an amino acid of low mutability (e.g., Xaa2 is selected from P or K); or wherein Xaa3 is selected from an amino acid of high hydropathy (e.g., Xaa3 is selected from I or V); or wherein Xaa4 is selected from an amino acid of low mutability (e.g., Xaa4 is selected from L, F, or Y); or wherein Xaa4 is selected from an amino acid of low average flexibility (e.g., Xaa4 is selected from W, H, F, or M); or wherein Xaa5 is selected from an amino acid of high average flexibility (e.g., Xaa5 is selected from G, R, K, I, or N); or wherein Xaa6 is selected from an amino acid of high average flexibility (e.g., Xaa6 is selected from G, R, K, I, or N); or wherein Xaa8 is selected from an amino acid of high surface accessibility (e.g., Xaa8 is selected from M, G, or F); or wherein Xaa8 is selected from an amino acid of low average flexibility (e.g., Xaa8 is selected from H, F, M, or W); or wherein Xaa8 is selected from an amino acid of low mutability (e.g., Xaa8 is selected from L, F, Y); or wherein Xaa9 is selected from an amino acid of high average flexibility (e.g., Xaa9 is selected from D, E, R, K, P, or G); or wherein Xaa9 is selected from an amino acid of high mutability (e.g., Xaa9 is selected from D, E, R, V, A, or H); or any combination thereof.

[0448] In some embodiments, Xaa1 is selected from an amino acid of low surface accessibility. In some embodiments, Xaa1 is selected from C. In some embodiments, Xaa1 is selected from an amino acid of low volume. In some embodiments, Xaa1 is selected from C. In some embodiments, Xaa1 is selected from an amino acid of low mutability. In some embodiments, Xaa1 is selected from C. In some embodiments, Xaa2 is selected from an amino acid of high surface accessibility. In some embodiments, Xaa2 is selected from R or K. In some embodiments, Xaa2 is selected from an amino acid of high average flexibility. In some embodiments, Xaa2 is selected from K, I, or N. In some embodiments, Xaa2 is selected from an amino acid of low mutability. In some embodiments, Xaa2 is selected from P or K. In some embodiments, Xaa3 is selected from an amino acid of high hydropathy. In some embodiments, Xaa3 is selected from 1 or V. In some embodiments, Xaa4 is selected from an amino acid of low mutability. In some embodiments, Xaa4 is selected from L, F, or Y. In some embodiments, Xaa4 is selected from an amino acid of low average flexibility. In some embodiments, Xaa4 is selected from W, H, F, or M. In some embodiments, Xaa5 is selected from an amino acid of high average flexibility. In some embodiments, Xaa5 is selected from G, R, K, I, or N. In some embodiments, Xaa6 is selected from an amino acid of high average flexibility. In some embodiments, Xaa6 is selected from G, R, K, I, or N. In some embodiments, Xaa8 is selected from an amino acid of high surface accessibility. In some embodiments, Xaa8 is selected from M, G. or F. In some embodiments, Xaa8 is selected from an amino acid of low average flexibility. In some embodiments, Xaa8 is selected from H, F, M, or W. In some embodiments, Xaa8 is selected from an amino acid of low mutability. In some embodiments, Xaa8 is selected from L, F, or Y. In some embodiments, Xaa9 is selected from an amino acid of high average flexibility. In some embodiments, Xaa9 is selected from D, E, R, K, P, or G. In some embodiments, Xaa9 is selected from an amino acid of high mutability. In some embodiments, Xaa9 is selected from D, E, R, V, A, or H.

[0449] In some embodiments, provided herein are AAV5 VP capsid polypeptide having at least one mutation in a region from a position corresponding to 581 to a position corresponding to 589 of AAV5 VP1 and having at least 70%, at least 75%, at least 80%, at least 85%, at least 90%, at least 92%, at least 95%, at least 97%, at least 99%, or 100% sequence identity to any sequence selected from SEQ ID NO: 32991-SEQ ID NO: 33990, wherein said at least one mutation drives increased skin tissue tropism.

[0450] C. Enriched Skin Sequences

[0451] In some embodiments, provided herein are AAV5 VP capsid polypeptide having at least one mutation in a region from a position corresponding to 581 to a position corresponding to 589 of AAV5 VP1 and having at least 70%, at least 75%, at least 80%, at least 85%, at least 90%, at least 92%, at least 95%, at least 97%, at least 99%, or 100% sequence identity to any sequence selected from SEQ ID NO: 33991-SEQ ID NO: 34990, wherein said at least one mutation drives increased skin tissue tropism.

[0452] 6.7.19. In Vivo Selected Mutated VP Polypeptides that Confer Increased Bone Marrow Tropism

[0453] The present disclosure provides AAV5 virions with a VP capsid polypeptide having at least one mutation in a region with residues that interact with target cells (e.g., a target bone marrow cell in a target bone marrow tissue of interest), where the at least one mutation confers increased bone marrow tissue tropism as compared to a wildtype VP capsid polypeptide. In some embodiments, provided herein are AAV5 VP1 capsid polypeptide having a sequence homology of at least 80% to SEQ ID NO: 1, wherein the AAV5 VP1 capsid polypeptide has at least one mutation in a region from a position corresponding to 581 to a position corresponding to 589 of SEQ ID NO: 1 and wherein said at least one mutation drives increased bone marrow tropism. The following sequences rules and sequences also apply to the region in AAV5 VP2 (amino acid residues 445 to 453; VP2 sequence shown in SEQ ID NO: 1115) and AAV5 VP3 (amino acid residues 389 to 397; VP3 sequences shown in SEQ ID NO: 1116) corresponding to AAV5 VP1 amino acid residues 581 to 589. Thus, the present disclosure encompasses AAV5 VP2 capsid polypeptides and AAV5 VP3 capsid polypeptides having one or more mutations in the VP2 and VP3 regions corresponding to the AAV5 VP1 amino acid residues of the 581 to 589 region, where the one or more mutations comport to the rules or sequences in the following section.

[0454] A. Positional Frequency Rules

[0455] In this section, unless otherwise specified, the frequency of a given amino acid residue occurring at a specified position corresponding to position 581 to position 589 of SEQ ID NO: 1 (generalized in SEQ ID NO: 2) in variants identified in bone marrow over the frequency of that given amino acid residue occurring at the specified position in variants identified in all other harvested tissues (CNS (cortex forebrain, cortex occipital, cortex temporal, thalamus, hypothalamus, substantia nigra, hippocampus DG, hippocampus CA1, hippocampus CA3, cerebellum), liver, skeletal muscle, heart, lung, spleen, lymph node, mammary gland, skin, adrenal gland, thyroid, colon, sciatic nerve, and spinal cord tissues) was analyzed to identify a set of sequence rules for capsids that preferentially target bone marrow tissue. Identification of positional frequency rules from in vivo data is described in detail in EXAMPLE 18.

[0456] Disclosed herein are engineered AAV5 VP capsid polypeptides capable of forming an assembled virion that exhibits increased bone marrow tissue tropism as compared to wildtype AAV5 VP capsid polypeptide, wherein the engineered variant AAV5 VP1 capsid polypeptide sequence has one or more mutations, wherein Xaa1 is selected from A, E, G, Q, S, or T, or Xaa1 is selected from A, E, or T, or Xaa1 is E; or Xaa2 is selected from A, I, Q, S, T, V, or Y, or Xaa2 is selected from A, S, T, or Xaa2 is A; or Xaa3 is selected from A, G, I, M, Q, S, or T, or Xaa3 is selected from A, Q, or T, or Xaa3 is Q; or Xaa4 is selected from A, E, P, Q, T, or V, or Xaa4 is selected from A, P, or Q, or Xaa4 is Q; or Xaa5 is selected from F, I, L, M, Q, V, or Y, or Xaa5 is selected from F, V, or Y, or Xaa5 is V; or Xaa6 is selected from F, I, N, Q, S, or V, or Xaa6 is selected from I, N, Q, or S, or Xaa6 is S; or Xaa7 is selected from A, C, M, S, or V, or Xaa7 is A, C, or V, or Xaa7 is C; or Xaa8 is selected from A, C, D, G, M, S, or Y, or Xaa8 is selected from A, M, S, or Y, or Xaa8 is M; or Xaa9 is selected from D, E, G, L, P, S, or Y, or Xaa9 is selected from D, E, or P, or Xaa9 is P.

[0457] Disclosed herein are engineered AAV5 VP capsid polypeptides capable of forming an assembled virion that exhibits increased bone marrow tissue tropism as compared to wildtype AAV5 VP capsid polypeptide, wherein the engineered variant AAV5 VP capsid polypeptide sequence has one or more mutations, wherein the VP1 polypeptide sequence has said one or more mutations in a region from a position corresponding to 581 in SEQ ID NO. 2 to a position corresponding to 589 in SEQ ID NO: 2 and wherein said one or more mutations are selected from the following rules. In some embodiments, Xaa1 is selected from A, E, G, Q, S, or T. In some embodiments, Xaa1 is selected from A, E, or T. In some embodiments, Xaa1 is E. In some embodiments, Xaa2 is selected from A, I, Q, S, T, V, or Y. In some embodiments, Xaa2 is selected from A, S, T. In some embodiments, Xaa2 is A. In some embodiments, Xaa3 is selected from A, G, I, M, Q, S, or T. In some embodiments, Xaa3 is selected from A, Q, or T. In some embodiments, Xaa3 is Q. In some embodiments, Xaa4 is selected from A, E, P, Q, T, or V. In some embodiments, Xaa4 is selected from A, P, or Q. In some embodiments, Xaa4 is Q. In some embodiments, Xaa5 is selected from F, I, L, M, Q, V, or Y. In some embodiments, Xaa5 is selected from F, V, or Y. In some embodiments, Xaa5 is V. In some embodiments, Xaa6 is selected from F, I, N, Q, S, or V. In some embodiments, Xaa6 is selected from I, N, Q, or S. In some embodiments, Xaa6 is S. In some embodiments, Xaa7 is selected from A, C, M, S, or V. In some embodiments, Xaa7 is A, C, or V. In some embodiments, Xaa7 is C. In some embodiments, Xaa8 is selected from A, C, D, G, M, S, or Y. In some embodiments, Xaa8 is selected from A, M, S, or Y. In some embodiments, Xaa8 is M. In some embodiments, Xaa9 is selected from D, E, G, L, P, S, or Y. In some embodiments, Xaa9 is selected from D, E, or P. In some embodiments, Xaa9 is P.

[0458] Disclosed herein are engineered AAV5 VP capsid polypeptides capable of forming an assembled virion that exhibits increased bone marrow tissue tropism as compared to wildtype AAV5 VP capsid polypeptide, wherein the engineered variant AAV5 VP capsid polypeptide sequence has one or more mutations, wherein the VP1 polypeptide sequence has said one or more mutations in a region from a position corresponding to 581 in SEQ ID NO: 2 to a position corresponding to 589 in SEQ ID NO: 2 and wherein said one or more mutations are selected from the following rules: Xaa1 is selected from A, E, G, Q, S, or T, Xaa2 is selected from A, I, Q, S, T, V, or Y, Xaa3 is selected from A, G, I, M, Q, S, or T, Xaa4 is selected from A, E, P, Q, T, or V, Xaa5 is selected from F, I, L, M, Q, V, or Y, Xaa6 is selected from F, I, N, Q, S, or V, Xaa7 is selected from A, C, M, S, or V, Xaa8 is selected from A, C, D, G, M, S, or Y, and Xaa9 is selected from D, E, G, L, P, S, or Y.

[0459] Disclosed herein are engineered AAV5 VP capsid polypeptides capable of forming an assembled virion that exhibits increased bone marrow tissue tropism as compared to wildtype AAV5 VP capsid polypeptide, wherein the engineered variant AAV5 VP capsid polypeptide sequence has one or more mutations, wherein the VP1 polypeptide sequence has said one or more mutations in a region from a position corresponding to 581 in SEQ ID NO: 2 to a position corresponding to 589 in SEQ ID NO: 2 and wherein said one or more mutations are as follows: Xaa1 is selected from A, E, G, Q, S, or T, Xaa2 is selected from A, I, Q, S, T, V, or Y, Xaa3 is selected from A, G, I, M, Q, S, or T, Xaa4 is selected from A, E, P, Q, T, or V, Xaa5 is selected from F, I, L, M, Q, V, or Y, Xaa6 is selected from F, I, N, Q, S, or V, Xaa7 is selected from A, C, M, S, or V, Xaa8 is selected from A, C, D, G, M, S, or Y, Xaa9 is selected from D, E, G, L, P, S, or Y, or any combination thereof.

[0460] In some embodiments, provided herein are AAV5 VP capsid polypeptide having at least one mutation in a region from a position corresponding to 581 to a position corresponding to 589 of AAV5 VP1 and having at least 70%, at least 75%, at least 80%, at least 85%, at least 90%, at least 92%, at least 95%, at least 97%, at least 99%, or 100% sequence identity to any sequence selected from SEQ ID NO: 4118-SEQ ID NO: 5117, wherein said at least one mutation drives increased bone marrow tissue tropism.

[0461] B. ML Rules

[0462] For the following set of rules described in this paragraph, favored biophysical properties and favored amino acid residues at each position in the 581 to 589 region of an engineered AAV5 VP1 capsid polypeptide, were determined using in vivo data and two ML models, which are described in EXAMPLE 32. Disclosed herein are engineered AAV5 VP capsid polypeptides capable of forming an assembled virion that exhibits increased bone marrow tissue tropism as compared to an rAAV virion having a wildtype AAV5 VP capsid polypeptide, wherein the engineered AAV5 VP capsid polypeptide sequence has one or more mutations, wherein the engineered AAV5 VP1 capsid polypeptide sequence has said one or more mutations in a region from a position corresponding to 581 in SEQ ID NO: 2 to a position corresponding to 589 in SEQ ID NO: 2 and wherein Xaa1 is selected from an amino acid of high hydropathy (e.g., Xaa1 is selected from V, I, or L); or wherein Xaa1 is selected from an amino acid of low mutability (e.g., Xaa1 is selected from Y, L, F, or C); or wherein Xaa2 is selected from an amino acid of low hydropathy (e.g., Xaa2 is selected from Y or W); or wherein Xaa2 is selected from an amino acid of high mol mass (e.g., Xaa2 is selected from W); or wherein Xaa2 is selected from an amino acid of low surface accessibility (e.g., Xaa2 is selected from W or A); or wherein Xaa2 is selected from an amino acid of low hydrophilicity (e.g., Xaa2 is selected from W); or wherein Xaa2 is selected from an amino acid of low mutability (e.g., Xaa2 is selected from C); or wherein Xaa2 is selected from an amino acid of low average flexibility (e.g., Xaa2 is selected from W, M, or F); or wherein Xaa5 is selected from an amino acid of low average flexibility (e.g., Xaa5 is selected from W, M, or F); or wherein Xaa6 is selected from an amino acid of low average flexibility (e.g., Xaa6 is selected from W, M, or F); or wherein Xaa6 is selected from an amino acid of low mutability (e.g., Xaa6 is selected from Y, F, L, or C); or wherein Xaa6 is selected from an amino acid of high solubility (e.g., Xaa6 is selected from W, F, I, or L); or wherein Xaa7 is selected from an amino acid of low surface accessibility (e.g., Xaa7 is selected from C); or wherein Xaa7 is selected from an amino acid of high surface accessibility (e.g., Xaa7 is selected from D or N); or wherein Xaa7 is selected from an amino acid of low mutability (e.g., Xaa7 is selected from C); or wherein Xaa7 is selected from an amino acid of high solubility (e.g., Xaa7 is selected from C); or wherein Xaa7 is selected from an amino acid of low solubility (e.g., Xaa7 is selected from D); or wherein Xaa8 is selected from an amino acid of low charge (e.g., Xaa8 is selected from D or E); or wherein Xaa8 is selected from an amino acid of high mutability (e.g., Xaa8 is selected from D, E, A, or T); or wherein Xaa9 is selected from an amino acid of high mol mass (e.g., Xaa9 is selected from H or F); or wherein Xaa9 is selected from an amino acid of low mutability (e.g., Xaa9 is selected from Y, F, or L); or any combination thereof.

[0463] In some embodiments, Xaa1 is selected from an amino acid of high hydropathy. In some embodiments, Xaa1 is selected from V, I, or L. In some embodiments, Xaa1 is selected from an amino acid of low mutability. In some embodiments, Xaa1 is selected from Y, L, F, or C. In some embodiments, Xaa2 is selected from an amino acid of low hydropathy. In some embodiments, Xaa2 is selected from Y or W. In some embodiments, Xaa2 is selected from an amino acid of high mol mass. In some embodiments, Xaa2 is selected from W. In some embodiments, Xaa2 is selected from an amino acid of low surface accessibility. In some embodiments, Xaa2 is selected from W or A. In some embodiments, Xaa2 is selected from an amino acid of low hydrophilicity. In some embodiments, Xaa2 is selected from W. In some embodiments, Xaa2 is selected from an amino acid of low mutability. In some embodiments, Xaa2 is selected from C. In some embodiments, Xaa2 is selected from an amino acid of low average flexibility. In some embodiments, Xaa2 is selected from W, M, or F. In some embodiments, Xaa5 is selected from an amino acid of low average flexibility. In some embodiments, Xaa5 is selected from W, M, or F. In some embodiments, Xaa6 is selected from an amino acid of low average flexibility. In some embodiments, Xaa6 is selected from W, M, or F. In some embodiments, Xaa6 is selected from an amino acid of low mutability. In some embodiments, Xaa6 is selected from Y, F, L, or C. In some embodiments, Xaa6 is selected from an amino acid of high solubility. In some embodiments, Xaa6 is selected from W, F, I, or L. In some embodiments, Xaa7 is selected from an amino acid of low surface accessibility. In some embodiments, Xaa7 is selected from C. In some embodiments, Xaa7 is selected from an amino acid of high surface accessibility. In some embodiments, Xaa7 is selected from D or N. In some embodiments, Xaa7 is selected from an amino acid of low mutability. In some embodiments, Xaa7 is selected from C. In some embodiments, Xaa7 is selected from an amino acid of high solubility. In some embodiments, Xaa7 is selected from C. In some embodiments, Xaa7 is selected from an amino acid of low solubility. In some embodiments, Xaa7 is selected from D. In some embodiments, Xaa8 is selected from an amino acid of low charge. In some embodiments, Xaa8 is selected from D or E. In some embodiments, Xaa8 is selected from an amino acid of high mutability. In some embodiments, Xaa8 is selected from D, E, A, or T. In some embodiments, Xaa9 is selected from an amino acid of high mol mass. In some embodiments, Xaa9 is selected from H or F. In some embodiments, Xaa9 is selected from an amino acid of low mutability. In some embodiments, Xaa9 is selected from Y, F, or L.

[0464] In some embodiments, provided herein are AAV5 VP capsid polypeptide having at least one mutation in a region from a position corresponding to 581 to a position corresponding to 589 of AAV5 VP1 and having at least 70%, at least 75%, at least 80%, at least 85%, at least 90%, at least 92%, at least 95%, at least 97%, at least 99%, or 100% sequence identity to any sequence selected from SEQ ID NO: 5118-SEQ ID NO: 6117, wherein said at least one mutation drives increased bone marrow tissue tropism.

[0465] C. Enriched Bone Marrow Sequences

[0466] In some embodiments, provided herein are AAV5 VP capsid polypeptide having at least one mutation in a region from a position corresponding to 581 to a position corresponding to 589 of AAV5 VP1 and having at least 70%, at least 75%, at least 80%, at least 85%, at least 90%, at least 92%, at least 95%, at least 97%, at least 99%, or 100% sequence identity to any sequence selected from SEQ ID NO: 6118-SEQ ID NO: 7117, wherein said at least one mutation drives increased bone marrow tissue tropism.

[0467] 6.7.20. In Vivo Selected Mutated VP Polypeptides that Confer Increased Skeletal Muscle Tropism or Cardiac Muscle Tropism

[0468] A. ML Rules

[0469] For the following set of rules described in this paragraph, favored biophysical properties and favored amino acid residues at each position in the 581 to 589 region of an engineered AAV5 VP1 capsid polypeptide, were determined using in vivo data and two ML models, which are described in EXAMPLE 22. Disclosed herein are engineered AAV5 VP capsid polypeptides capable of forming an assembled virion that exhibits increased skeletal muscle tissue tropism or cardiac muscle tissue tropism as compared to an rAAV virion having a wildtype AAV5 VP capsid polypeptide, wherein the engineered AAV5 VP capsid polypeptide sequence has one or more mutations, wherein the engineered AAV5 VP1 capsid polypeptide sequence has said one or more mutations in a region from a position corresponding to 581 in SEQ ID NO: 2 to a position corresponding to 589 in SEQ ID NO: 2 and wherein Xaa1 is selected from an amino acid of low solubility (e.g., Xaa1 is selected from D, E, R, K, P, N, or Q); or wherein Xaa1 is selected from an amino acid of low hydropathy (e.g., Xaa1 is selected from D, E, R, K, Q, N, Y, or P); or wherein Xaa1 is selected from an amino acid of high surface accessibility (e.g., Xaa1 is selected from E, R, or K); or wherein Xaa2 is selected from an amino acid of high hydropathy (e.g., Xaa2 is selected from V, I, F, L, or C); or wherein Xaa2 is selected from an amino acid of low mutability (e.g., Xaa2 is selected from R, V, I, H, or C); or wherein Xaa2 is selected from an amino acid of medium volume (e.g., Xaa2 is selected from E, V, or Q); or wherein Xaa3 is selected from an amino acid of low solubility (e.g., Xaa3 is selected from D, R, or Q); or wherein Xaa4 is selected from an amino acid of low solubility (e.g., Xaa4 is selected from D, E, P, or N); or wherein Xaa4 is selected from an amino acid of low charge (e.g., Xaa4 is selected from D or E); or wherein Xaa5 is selected from an amino acid of low amino acid solubility (e.g., Xaa5 is selected from D, E, R, K, N, or Q); or wherein Xaa8 is selected from an amino acid of low solubility (e.g., Xaa8 is selected from D, E, K, P, or N); or wherein Xaa8 is selected from an amino acid of high flexibility index (e.g., Xaa8 is selected from Q, S, P, E, or D); or wherein Xaa8 is selected from an amino acid of high surface accessibility (e.g., Xaa8 is selected from S, D, P, N, E, R, or K); or any combination thereof.

[0470] In some embodiments, Xaa1 is selected from an amino acid of low solubility. In some embodiments, Xaa1 is selected from D, E, R, K, P, N, or Q. In some embodiments, Xaa1 is selected from an amino acid of low hydropathy. In some embodiments, Xaa1 is selected from D, E, R, K, Q, N, Y, or P. In some embodiments, Xaa1 is selected from an amino acid of high surface accessibility. In some embodiments, Xaa1 is selected from E, R, or K. In some embodiments, Xaa2 is selected from an amino acid of high hydropathy. In some embodiments, Xaa2 is selected from V, I, F, L, or C. In some embodiments, Xaa2 is selected from an amino acid of low mutability. In some embodiments, Xaa2 is selected from R, V, I, H, or C. In some embodiments, Xaa2 is selected from an amino acid of medium volume. In some embodiments, Xaa2 is selected from E, V, or Q. In some embodiments, Xaa3 is selected from an amino acid of low solubility. In some embodiments, Xaa3 is selected from D, R, or Q. In some embodiments, Xaa4 is selected from an amino acid of low solubility. In some embodiments, Xaa4 is selected from D, E, P, or N. In some embodiments, Xaa4 is selected from an amino acid of low charge. In some embodiments, Xaa4 is selected from D or E. In some embodiments, Xaa5 is selected from an amino acid of low amino acid solubility. In some embodiments, Xaa5 is selected from D, E, R, K, N, or Q. In some embodiments, Xaa8 is selected from an amino acid of low solubility. In some embodiments, Xaa8 is selected from D, E, K, P, or N. In some embodiments, Xaa8 is selected from an amino acid of high flexibility index. In some embodiments, Xaa8 is selected from Q, S, P, E, or D. In some embodiments, Xaa8 is selected from an amino acid of high surface accessibility. In some embodiments, Xaa8 is selected from S, D, P, N, E, R, or K.

[0471] In some embodiments, provided herein are AAV5 VP capsid polypeptide having at least one mutation in a region from a position corresponding to 581 to a position corresponding to 589 of AAV5 VP1 and having at least 70%, at least 75%, at least 80%, at least 85%, at least 90%, at least 92%, at least 95%, at least 97%, at least 99%, or 100% sequence identity to any sequence selected from SEQ ID NO: 25118-SEQ ID NO: 26117, wherein said at least one mutation drives increased skeletal muscle tissue tropism or cardiac muscle tissue tropism.

### 1.1. Numbered Embodiments

[0472] A number of compositions, and methods are disclosed herein. Specific exemplary embodiments of these compositions and methods are disclosed below. The following embodiments recite non-limiting permutations of combinations of features disclosed herein. Other permutations of combinations of features are also contemplated. In particular, each of these numbered embodiments is contemplated as depending from or relating to every previous or subsequent numbered embodiment, independent of their order as listed.

[0473] In a further aspect, the following embodiments are provided. All numerical references to a preceding embodiment refer to the embodiment so numbered within the same subsection. In yet a further aspect, rAAV comprising the recombinant or engineered VP capsid polypeptides of the following numbered embodiments are provided, as are methods of using pharmaceutical compositions comprising the rAAV for treatment of a subject in need thereof.

[0474] Series A Embodiments

[0475] In the Series A embodiments, “recombinant” adeno-associated (AAV) VP1 capsid polypeptide is synonymous with “engineered” adeno-associated (AAV) VP1 capsid polypeptide.

[0476] 1. A recombinant adeno-associated virus (AAV) VP1 capsid polypeptide having the amino acid sequence of SEQ ID NO:2, wherein Xaa1, Xaa2, Xaa3, Xaa4, Xaa5, Xaa6, Xaa7, Xaa8, and Xaa9 are each independently selected from A, R, N, D, C, E, Q, G, H, I, L, K, M, F, P, S, T, W, Y, and V; and wherein the polypeptide does not have the sequence of any of SEQ ID NO:1, SEQ ID NO:3, SEQ ID NO:4, SEQ ID NO:5, SEQ ID NO:6, SEQ ID NO:7, and SEQ ID NO:8. 2. A recombinant adeno-associated virus (AAV) VP1 capsid polypeptide having at least one mutation in a residue corresponding to residue 581 to residue 589 in SEQ ID NO: 1, wherein the mutation confers tissue tropism for a first tissue as compared to a second tissue and wherein the AAV VP1 capsid polypeptide does not have the sequence of any of SEQ ID NO:1. SEQ ID NO:3, SEQ ID NO:4, SEQ ID NO:5, SEQ ID NO:6, SEQ ID NO:7, and SEQ ID NO:8. 3. The recombinant AAV VP1 capsid polypeptide of embodiment 2, wherein the AAV VP1 capsid polypeptide is an AAV5 VP1 capsid polypeptide. 4. The recombinant AAV VP1 capsid polypeptide of any one of embodiments 1-3, wherein a specific order of the residues at residue 581-589 corresponding to SEQ ID NO: 1 results in a specific tissue tropism. 5. The recombinant AAV VP1 capsid polypeptide of any one of embodiments 1-4, wherein the first tissue is selected from adipose, adrenal gland, aorta, brain (including hippocampus: dentate gyrus, CA1 and CA3; cerebellum, caudate, putamen, midbrain, pons, hypothalamus, cortex-including occipital, temporal and forebrain; substantia nigra, and thalamus), bone marrow, cecum, colon, dorsal root ganglion, duodenum, epididymis, esophagus, eye, gallbladder, heart, ileum, jejunum, kidney, lung, lymph nodes, mammary gland, ovary, pancreas, parathyroid gland, peripheral nerve, pituitary, prostate, salivary gland, seminal vesicle, skeletal muscle, skin, spinal cord, spleen, stomach, testis, thymus, thyroid, trachea, urinary bladder, uterus, and vagina; wherein the second tissue is selected from: adipose, adrenal gland, aorta, brain (including hippocampus: dentate gyrus, CA1 and CA3; cerebellum, caudate, putamen, midbrain, pons, hypothalamus, cortex-including occipital, temporal and forebrain; substantia nigra, and thalamus), bone marrow, cecum, colon, dorsal root ganglion, duodenum, epididymis, esophagus, eye, gallbladder, heart, ileum, jejunum, kidney, lung, lymph nodes, mammary gland, ovary, pancreas, parathyroid gland, peripheral nerve, pituitary, prostate, salivary gland, seminal vesicle, skeletal muscle, skin, spinal cord, spleen, stomach, testis, thymus, thyroid, trachea, urinary bladder, uterus, and vagina.; and wherein the first tissue and the second tissue are different. 6. The recombinant AAV VP1 capsid polypeptide of any one of embodiments 2-4, wherein the rAAV has increased ability to infect a tissue selected from adipose, adrenal gland, aorta, brain (including hippocampus: dentate gyrus, CA1 and CA3; cerebellum, caudate, putamen, midbrain, pons, hypothalamus, cortex-including occipital, temporal and forebrain; substantia nigra, and thalamus), bone marrow, cecum, colon, dorsal root ganglion, duodenum, epididymis, esophagus, eye, gallbladder, heart, ileum, jejunum, kidney, lung, lymph nodes, mammary gland, ovary, pancreas, parathyroid gland, peripheral nerve, pituitary, prostate, salivary gland, seminal vesicle, skeletal muscle, skin, spinal cord, spleen, stomach, testis, thymus, thyroid, trachea, urinary bladder, uterus, and vagina. following intravenous administration as compared to a rAAV having a VP1 capsid polypeptide of SEQ ID NO:1. 7. The recombinant AAV VP1 capsid poly peptide of any one of embodiments 2-6, wherein the rAAV exhibits from about a 1.0005-fold to about a 1000-fold increased accumulation in the first tissue as compared to the second tissue. 8. The recombinant AAV VP1 capsid polypeptide of any one of embodiments 2-6, wherein the rAAV exhibits at least about a 1.0005-fold, at least about a two-fold, at least about a three-fold, at least about a four-fold, at least about a five-fold, at least about a ten-fold, at least about a twenty-fold, at least about a 50-fold, at least about a 75-fold, at least about a 100-fold, or at least about a 1000-fold increased accumulation in the first tissue as compared to the second tissue. 9. The recombinant capsid polypeptide of any preceding embodiment, further comprising one or more mutations at an amino acid residue outside of the 581-589 region, wherein the one or more mutations at an amino acid residue outside of the 581-589 region confers improved manufacturability, improved viral assembly, improved tissue targeting/tropism, or any combination thereof. 10. The recombinant AAV VP1 capsid polypeptide of any of embodiments 1-9, wherein Xaa1 is selected from A, G, K, M, N, Q, R, S, or T. 11. The recombinant capsid polypeptide of any preceding embodiment, wherein Xaa1 is selected from A, K, M, or T. 12. The recombinant capsid polypeptide of any preceding embodiment, wherein Xaa1 is K. 13. The recombinant capsid polypeptide of any preceding embodiment, wherein Xaa2 is selected from A, C, H, I, K, S, T, or V. 14. The recombinant capsid polypeptide of any preceding embodiment, wherein Xaa2 is selected from A, S, T, or V. 15. The recombinant capsid polypeptide of any preceding embodiment, wherein Xaa2 is T. 16. The recombinant capsid poly peptide of any preceding embodiment, wherein Xaa3 is selected from A, G, H, K, M, N, Q, R, S, T, or V. 17. The recombinant capsid polypeptide of any preceding embodiment, wherein Xaa3 is selected from A, M, or T. 18. The recombinant capsid polypeptide of any preceding embodiment, wherein Xaa3 comprises A or T. 19. The recombinant capsid polypeptide of any preceding embodiment, wherein Xaa4 is selected from L, M, P, Q, R, T, or W. 20. The recombinant capsid polypeptide of any preceding embodiment, wherein Xaa4 is selected from L, P, Q, or T. 21. The recombinant capsid polypeptide of any preceding embodiment, wherein Xaa4 is P; 22. The recombinant capsid polypeptide of any preceding embodiment, wherein Xaa5 is selected from F, H, I, K, M, T, or Y. 23. The recombinant capsid polypeptide of any preceding embodiment, wherein Xaa5 is selected from H, I, or Y. 24. The recombinant capsid polypeptide of any preceding embodiment, wherein Xaa5 is Y. 25. The recombinant capsid polypeptide of any preceding embodiment, wherein Xaa6 is selected from E, G, H, L, M, N, Q, T, or W. 26. The recombinant capsid polypeptide of any preceding embodiment, wherein Xaa6 is selected from N, or Q. 27. The recombinant capsid polypeptide of any preceding embodiment, wherein Xaa6 is N. 28. The recombinant capsid polypeptide of any preceding embodiment, wherein Xaa7 is selected from A, C, G, H, L, M, R or S. 29. The recombinant capsid polypeptide of any preceding embodiment, wherein Xaa7 is selected from A, C, H or M. 30. The recombinant capsid polypeptide of any preceding embodiment, wherein Xaa7 is A. 31. The recombinant capsid poly peptide of any preceding embodiment, wherein Xaa8 is selected from A, C, D, F, G, H, M, Q, S, V, W, or Y. 32. The recombinant capsid polypeptide of any preceding embodiment, wherein Xaa8 is selected from G, M, Q, or S. 33. The recombinant capsid polypeptide of any preceding embodiment, wherein Xaa8 is G. 34. The recombinant capsid polypeptide of any preceding embodiment, wherein Xaa9 is selected from A, C, E, G, H, M, N, P, Q, S, V, or W. 35. The recombinant capsid polypeptide of any preceding embodiment, wherein Xaa9 is selected from E, G, or P. 36. The recombinant capsid polypeptide of any preceding embodiment, wherein Xaa9 is G. 37. The recombinant capsid polypeptide of any of embodiments 1-9, wherein Xaa1 is selected from A, D, E, G, L, M, N, Q, S, T, or V. 38. The recombinant capsid polypeptide of embodiment 37, wherein Xaa1 is selected from A, D, E, M, or T. 39. The recombinant capsid polypeptide of embodiment 37, wherein Xaa1 is E. 40. The recombinant capsid polypeptide of any of embodiments 37-39, wherein Xaa2 is selected from A, C, D, E, G, H, I, N, P, Q, S, T, or V. 41. The recombinant capsid polypeptide of any of embodiments 37-40, wherein Xaa2 is selected from A, S, T, or V. 42. The recombinant capsid polypeptide of any of embodiments 37-41, wherein Xaa2 is A. 43. The recombinant capsid polypeptide of any of embodiments 37-42, wherein Xaa3 is selected from A, D, E, G, H, M, N, Q, S, T, or V. 44. The recombinant capsid polypeptide of any of embodiments 37-43, wherein Xaa3 is selected from D, E, N, Q or T. 45 The recombinant capsid polypeptide of any of embodiments 37-44, wherein Xaa3 is D or T. 46. The recombinant capsid polypeptide of any of embodiments 37-45, wherein Xaa4 is selected from A, D, E, G, H, N, P, Q, S, or T. 47. The recombinant capsid polypeptide of any of embodiments 37-46, wherein Xaa4 is selected from D, E, P, or Q. 48. The recombinant capsid polypeptide of any of embodiments 37-47, wherein Xaa4 is E. 49. The recombinant capsid polypeptide of any of embodiments 37-48, wherein Xaa5 is selected from A, C, D, E, G, H, N, Q, S, T, or Y. 50. The recombinant capsid polypeptide of any of embodiments 37-49, wherein Xaa5 is selected from D, E, N, Q or T. 51. The recombinant capsid polypeptide of any of embodiments 37-50, wherein Xaa5 is N. 52. The recombinant capsid polypeptide of any of embodiments 37-51, wherein Xaa6 is selected from A, D, E, G, H, N, P, Q, S, or T. 53. The recombinant capsid polypeptide of any of embodiments 37-52, wherein Xaa6 is selected from D, N, or Q. 54. The recombinant capsid polypeptide of any of embodiments 37-53, wherein Xaa6 is D. 55. The recombinant capsid polypeptide of any of embodiments 37-54, wherein Xaa7 is selected from A, C, D, E, G, H, N, Q, S, or T. 56. The recombinant capsid polypeptide of any of embodiments 37-55, wherein Xaa7 is selected from A. D. E or G. 57. The recombinant capsid polypeptide of any of embodiments 37-56, wherein Xaa7 is A. 58. The recombinant capsid polypeptide of any of embodiments 37-57, wherein Xaa8 is selected from A, C, D, E, G, H, N, Q, S, or T. 59. The recombinant capsid polypeptide of any of embodiments 37-58, wherein Xaa8 comprises A, D, G, or S. 60. The recombinant capsid polypeptide of any of embodiments 37-59, wherein Xaa8 is G. 61. The recombinant capsid polypeptide of any of embodiments 37-60, wherein Xaa9 is selected from A, D, E, G, H, N, P, Q, S, or T. 62. The recombinant capsid polypeptide of any of embodiments 37-61, wherein Xaa9 is selected from A, D, G, or P. 63. The recombinant capsid polypeptide of any of embodiments 37-62, wherein Xaa9 is G. 64. A recombinant capsid polypeptide of any of embodiments 1-36 combined with the recombinant capsid polypeptide of any of embodiments 37-63, wherein the VP1 capsid is capable of forming an assembled virion that exhibits increased tropism for liver tissue when compared to a virion that comprises the AAV5 VP1 capsid polypeptide of SEQ ID NO:1. 65. The recombinant capsid polypeptide of embodiment 1, wherein Xaa1 is not K. and wherein the VP1 capsid is capable of forming an assembled virion that exhibits decreased tropism for liver tissue when compared to a virion that comprises the AAV5 VP1 capsid of SEQ ID NO:1. 66. The recombinant capsid polypeptide of embodiment 1, wherein Xaa1 is not A, K, M, or T, and wherein the VP1 capsid is capable of forming an assembled virion that exhibits decreased tropism for liver tissue when compared to a virion that comprises the AAV5 VP1 capsid of SEQ ID NO:1. 67. The recombinant capsid polypeptide of embodiment 1, wherein Xaa1 is not A, G, K, M, N, Q, R, S, or T, and wherein the VP1 capsid is capable of forming an assembled virion that exhibits decreased tropism for liver tissue when compared to a virion that comprises the AAV5 VP1 capsid of SEQ ID NO:1. 68. The recombinant capsid polypeptide of embodiment 1, or any of embodiments 65-67, wherein Xaa2 is not T, and wherein the VP1 capsid is capable of forming an assembled virion that exhibits decreased tropism for liver tissue when compared to a virion that comprises the AAV5 VP1 capsid of SEQ ID NO:1. 69. The recombinant capsid polypeptide of embodiment 1, or any of embodiments 65-68, wherein Xaa2 is not A, S, T, or V, and wherein the VP1 capsid is capable of forming an assembled virion that exhibits decreased tropism for liver tissue when compared to a virion that comprises the AAV5 VP1 capsid of SEQ ID NO:1. 70. The recombinant capsid polypeptide of embodiment 1, or any of embodiments 65-69, wherein Xaa2 is not A, C, H, I, K, S, T, or V, and wherein the VP1 capsid is capable of forming an assembled virion that exhibits decreased tropism for liver tissue when compared to a virion that comprises the AAV5 VP1 capsid of SEQ ID NO:1. 71. The recombinant capsid polypeptide of embodiment 1, or any of embodiments 65-70, wherein Xaa3 is not A or T, and wherein the VP1 capsid is capable of forming an assembled virion that exhibits decreased tropism for liver tissue when compared to a virion that comprises the AAV5 VP1 capsid of SEQ ID NO:1. 72. The recombinant capsid polypeptide of embodiment 1, or any of embodiments 65-71, Xaa3 is not A, M, or T, and wherein the VP1 capsid is capable of forming an assembled virion that exhibits decreased tropism for liver tissue when compared to a virion that comprises the AAV5 VP1 capsid of SEQ ID NO:1. 73. The recombinant capsid polypeptide of embodiment 1, or any of embodiments 65-72, wherein Xaa3 is not A, G, H, K, M, N, Q, R, S, T, or V, and wherein the VP1 capsid is capable of forming an assembled virion that exhibits decreased tropism for liver tissue when compared to a virion that comprises the AAV5 VP1 capsid of SEQ ID NO:1. 74. The recombinant capsid polypeptide of embodiment 1, or any of embodiments 65-73, wherein Xaa4 is not P, and wherein the VP1 capsid is capable of forming an assembled virion that exhibits decreased tropism for liver tissue when compared to a virion that comprises the AAV5 VP1 capsid of SEQ ID NO:1. 75. The recombinant capsid polypeptide of embodiment 1, or any of embodiments 65-74, wherein Xaa4 is not L, P, Q, or T, and wherein the VP1 capsid is capable of forming an assembled virion that exhibits decreased tropism for liver tissue when compared to a virion that comprises the AAV5 VP1 capsid of SEQ ID NO:1. 76. The recombinant capsid polypeptide of embodiment 1, or any of embodiments 65-75, wherein Xaa4 is not L, M, P, Q, R, T, or W, and wherein the VP1 capsid is capable of forming an assembled virion that exhibits decreased tropism for liver tissue when compared to a virion that comprises the AAV5 VP1 capsid of SEQ ID NO:1. 77. The recombinant capsid polypeptide of embodiment 1, or any of embodiments 65-76, wherein Xaa5 is not Y, and wherein the VP1 capsid is capable of forming an assembled virion that exhibits decreased tropism for liver tissue when compared to a virion that comprises the AAV5 VP1 capsid of SEQ ID NO:1. 78. The recombinant capsid polypeptide of embodiment 1, or any of embodiments 65-77, wherein Xaa5 is not H, I, or Y, and wherein the VP1 capsid is capable of forming an assembled virion that exhibits decreased tropism for liver tissue when compared to a virion that comprises the AAV5 VP1 capsid of SEQ ID NO:1. 79. The recombinant capsid polypeptide of embodiment 1, or any of embodiments 65-78, wherein Xaa5 is not F, H, I, K, M, T, or Y, and wherein the VP1 capsid is capable of forming an assembled virion that exhibits decreased tropism for liver tissue when compared to a virion that comprises the AAV5 VP1 capsid of SEQ ID NO:1. 80. The recombinant capsid polypeptide of embodiment 1, or any of embodiments 65-79, wherein Xaa6 is not N. and wherein the VP1 capsid is capable of forming an assembled virion that exhibits decreased tropism for liver tissue when compared to a virion that comprises the AAV5 VP1 capsid of SEQ ID NO:1. 81. The recombinant capsid polypeptide of embodiment 1, or any of embodiments 65-80, wherein Xaa6 is not N, or Q. and wherein the VP1 capsid is capable of forming an assembled virion that exhibits decreased tropism for liver tissue when compared to a virion that comprises the AAV5 VP1 capsid of SEQ ID NO:1. 82. The recombinant capsid polypeptide of embodiment 1, or any of embodiments 65-81, wherein Xaa6 is not E, G, H, L, M, N, Q, T, or W, and wherein the VP1 capsid is capable of forming an assembled virion that exhibits decreased tropism for liver tissue when compared to a virion that comprises the AAV5 VP1 capsid of SEQ ID NO:1. 83. The recombinant capsid polypeptide of embodiment 1, or any of embodiments 65-82, wherein Xaa7 is not A, and wherein the VP1 capsid is capable of forming an assembled virion that exhibits decreased tropism for liver tissue when compared to a virion that comprises the AAV5 VP1 capsid of SEQ ID NO:1. 84. The recombinant capsid polypeptide of embodiment 1, or any of embodiments 65-83, wherein Xaa7 is not A, C, H or M, and wherein the VP1 capsid is capable of forming an assembled virion that exhibits decreased tropism for liver tissue when compared to a virion that comprises the AAV5 VP1 capsid of SEQ ID NO:1. 85. The recombinant capsid polypeptide of embodiment 1, or any of embodiments 65-84, wherein Xaa7 is not A, C, G, H, L, M, R or S, and wherein the VP1 capsid is capable of forming an assembled virion that exhibits decreased tropism for liver tissue when compared to a virion that comprises the AAV5 VP1 capsid of SEQ ID NO:1. 86. The recombinant capsid polypeptide of embodiment 1, or any of embodiments 65-85, wherein Xaa8 is not G, and wherein the VP1 capsid is capable of forming an assembled virion that exhibits decreased tropism for liver tissue when compared to a virion that comprises the AAV5 VP1 capsid of SEQ ID NO:1. 87. The recombinant capsid polypeptide of embodiment 1, or any of embodiments 65-86, wherein Xaa8 is not G, M, Q, or S, and wherein the VP1 capsid is capable of forming an assembled virion that exhibits decreased tropism for liver tissue when compared to a virion that comprises the AAV5 VP1 capsid of SEQ ID NO:1. 88. The recombinant capsid polypeptide of embodiment 1, or any of embodiments 65-87, wherein Xaa8 is not A, C, D, F, G, H, M, Q, S, V, W, or Y. and wherein the VP1 capsid is capable of forming an assembled virion that exhibits decreased tropism for liver tissue when compared to a virion that comprises the AAV5 VP1 capsid of SEQ ID NO:1. 89. The recombinant capsid polypeptide of embodiment 1, or any of embodiments 65-88, Xaa9 is not G. and wherein the VP1 capsid is capable of forming an assembled virion that exhibits decreased tropism for liver tissue when compared to a virion that comprises the AAV5 VP1 capsid of SEQ ID NO:1. 90. The recombinant capsid polypeptide of embodiment 1, or any of embodiments 65-89, wherein Xaa9 is not E, G, or P, and wherein the VP1 capsid is capable of forming an assembled virion that exhibits decreased tropism for liver tissue w % ben compared to a virion that comprises the AAV5 VP1 capsid of SEQ ID NO:1. 91. The recombinant capsid polypeptide of embodiment 1, or any of embodiments 65-90, wherein Xaa9 is not A, C, E, G, H, M, N, P, Q, S, V, or W, and wherein the VP1 capsid is capable of forming an assembled virion that exhibits decreased tropism for liver tissue when compared to a virion that comprises the AAV5 VP1 capsid of SEQ ID NO:1. 92. A recombinant capsid polypeptide of any of embodiments 65-91 combined with the recombinant capsid polypeptide of any of embodiments 37-63, wherein the VP1 capsid is capable of forming an assembled virion that exhibits decreased tropism for liver tissue w % ben compared to a virion that comprises the AAV5 VP1 capsid polypeptide of SEQ ID NO:1. 93. A recombinant adeno-associated virus (AAV) VP1 capsid polypeptide having at least one residue corresponding to residue 581 to residue 589 in SEQ ID NO: 2, wherein the at least one residue is: Xaa1 and Xaa1 is selected from A, G, K, M, N, Q, R, S, or T; Xaa2 and Xaa2 is selected from A, C, H, I, K, S, T, or V; Xaa3 and Xaa3 is selected from A, G, H, K, M, N, Q, R, S, T, or V; Xaa4 and Xaa4 is selected from L, M, P, Q, R, T, or W; Xaa5 and Xaa5 is selected from F, H, I, K, M, T, or Y; Xaa6 and Xaa6 is selected from E, G, H, L, M, N, Q, T, or W; Xaa7 and Xaa7 is selected from A, C, G, H, L, M, R or S; Xaa8 and Xaa8 is selected from A, C, D, F, G, H, M, Q, S, V, W, or Y; Xaa9 and Xaa9 is selected from A, C, E, G, H, M, N, P, Q, S, V, or W; or any combination thereof, wherein the AAV VP1 capsid polypeptide is capable of exhibiting tissue tropism for liver tissue. 94. A recombinant adeno-associated virus AAV VP1 capsid polypeptide having at least one mutation in a residue of region 581 to residue 589 in SEQ ID NO: 1, wherein the mutation confers at least about a two-fold increased accumulation in a non-liver tissue as compared to a liver tissue, as compared to AAV5 VP1, and wherein the AAV VP1 capsid polypeptide does not have the sequence of any of SEQ ID NO:1, SEQ ID NO:3, SEQ ID NO:4, SEQ ID NO:5, SEQ ID NO:6, SEQ ID NO:7, and SEQ ID NO:8. 95. The recombinant AAVVP1 capsid polypeptide of embodiment 94, wherein the mutation confers at least about a three-fold, at least about a four-fold, at least about a five-fold, at least about a ten-fold, at least about a twenty-fold, at least about a fifty-fold, at least about a 75-fold, at least about a 100-fold increased accumulation in a non-liver tissue as compared to a liver tissue. 96. The recombinant AAVVP1 capsid poly peptide of embodiment 94, wherein the mutation confers from about a 1.0005-fold to about a 1000-fold increased accumulation in a non-liver tissue as compared to a liver tissue. 97. The recombinant capsid polypeptide of any preceding embodiment, further comprising one or more mutations at an amino acid residue outside of the 581-589 region, with reference to SEQ ID NO:1, wherein the resulting recombinant capsid is capable of forming an assembled virion that exhibits desired tissue targeting/tropism. 98. The recombinant capsid polypeptide of embodiment 97, wherein the one or more mutations at an amino acid residue outside of the 581-589 region confers improved manufacturability, improved viral assembly, improved tissue targeting/tropism, or any combination thereof. 99. A vector capable of replication in prokaryotic cells, wherein the vector comprises a polynucleotide encoding the recombinant capsid polypeptide of any preceding embodiment. 100. The vector of embodiment 99, wherein the vector is a plasmid. 101. A library comprising a plurality of plasmids of embodiment 100, the plurality of plasmids comprising a plurality of different AAV VP1-encoding polynucleotides. 102. The plasmid library of embodiment 101, wherein the library encodes at least 1×109 different AAV VP1 capsid polypeptides. 103. The plasmid library of embodiment 102, wherein the library encodes at least 5×109 different AAV VP1 capsid polypeptides. 104. The plasmid library of embodiment 103, wherein the library encodes at least 1×1010 different AAV VP1 capsid polypeptides. 105. The plasmid library of embodiment 104, wherein the library encodes at least 5×1010 different AAV VP1 capsid polypeptides. 106. The plasmid library of embodiment 105, wherein the library encodes at least 7.5×1010 different AAV VP1 capsid polypeptides. 107. The plasmid library of embodiment 106, wherein the library encodes at least 1×1011 different AAV VP1 capsid polypeptides. 108. The plasmid library of embodiment 107, wherein the library encodes at least 2.5×1011 different AAV VP1 capsid polypeptides. 109. The plasmid library of embodiment 108, wherein the library encodes at least 5×1011 different AAV VP1 capsid polypeptides. 110. A prokaryotic cell comprising the vector of embodiment 100. 111. The prokaryotic cell of embodiment 110, wherein prokaryotic cell is an E. coli cell and the vector is a plasmid. 112. A library comprising a plurality of E. coli cells of embodiment 111, wherein the plurality of cells comprises a plurality of plasmids, wherein the plurality of plasmids comprises a plurality of different AAV VP1-encoding polynucleotides. 113. A library comprising a plurality of polypeptides of any of embodiments 1-98, the plurality having different primary amino acid sequences. 114. The library of embodiment 113, wherein the library comprises at least from about 1×105 to at least about 5×1011 different AAV VP1 capsid polypeptides. 115. A recombinant AAV virion (rAAV), the virion comprising an AAV VP1 capsid polypeptide of any of embodiments 1-98. 116. The rAAV virion of embodiment 115, wherein the rAAV has reduced tropism for human liver as compared to a rAAV having a VP1 capsid polypeptide having the sequence of SEQ ID NO:1. 117. The rAAV virion of embodiment 115 or embodiment 116, wherein the rAAV has increased ability to cross the blood-brain barrier following intravenous administration as compared to a rAAV having a VP1 capsid polypeptide having the sequence of SEQ ID NO: 1. 118. The rAAV virion of any one of embodiments 115-117, wherein the rAAV has increased ability to infect one or more brain regions selected from hippocampus, dentate gyrus, cerebral cortex, temporal cortex, occipital cortex, thalamus, forebrain, substantia nigra, hypothalamus, and cerebellum, following intravenous, intrathecal, intracerebral ventricular, or intracisternal magna administration as compared to a rAAV having a VP1 capsid polypeptide having the sequence of SEQ ID NO:1. 119. The rAAV virion of any one of embodiments 115-118, wherein the rAAV has increased ability to infect human retinal cells following intravitreal injection as compared to a rAAV having a VP1 capsid polypeptide having the sequence of SEQ ID NO:1. 120. The rAAV virion of any one of embodiments 115-119, wherein the rAAV has increased ability to infect human skeletal muscle following intravenous administration as compared to a rAAV having a VP1 capsid polypeptide having the sequence of SEQ ID NO:1. 121. The rAAV virion of any one of embodiments 115, and 117-120, wherein the rAAV has increased tropism for human liver as compared to a rAAV having a VP1 capsid polypeptide having the sequence of SEQ ID NO:1. 122. The rAAV virion of embodiment 115, 116, or 121, wherein the rAAV has increased ability to infect a tissue selected from adipose, adrenal gland, aorta, brain (including hippocampus: dentate gyrus, CA1 and CA3; cerebellum, caudate, putamen, midbrain, pons, hypothalamus, cortex-including occipital, temporal and forebrain; substantia nigra, and thalamus), bone marrow, cecum, colon, dorsal root ganglion, duodenum, epididymis, esophagus, eye, gallbladder, heart, ileum, jejunum, kidney, lung, lymph nodes, mammary gland, ovary, pancreas, parathyroid gland, peripheral nerve, pituitary, prostate, salivary gland, seminal vesicle, skeletal muscle, skin, spinal cord, spleen, stomach, testis, thymus, thyroid, trachea, urinary bladder, uterus, and vagina, following intravenous administration as compared to a rAAV having a VP1 capsid polypeptide of SEQ ID NO:1. 123. The rAAV virion of any one of embodiments 115-122, wherein the virion further comprises a vector genome, the vector genome comprising a therapeutic polynucleotide encoding any of the following: a therapeutic RNA selected from a guide RNA or a tRNA, or transgene encoding a protein under control of regulatory sequences that direct transgene expression in infected human cells. 124. The rAAV virion of embodiment 123, wherein the transgene encodes a protein selected from the transgene products of Table 1. 125. A library comprising a plurality of rAAV virions of any one of embodiments 115-124, wherein the plurality of rAAV virions comprise a plurality of VP1 capsid polypeptides with different primary amino acid sequences. 126. The library of embodiment 125, wherein the library comprises at least about 1×10⁵ to at least about 5×10¹¹ different AAV VP1 capsid polypeptides different AAV VP1 capsid polypeptides. 127. A pharmaceutical composition comprising the rAAV of embodiment 123 or embodiment 124 and a pharmaceutically acceptable carrier. 128. A method of treatment, comprising: administering an effective amount of the pharmaceutical composition of embodiment 127 to a patient in need thereof. 129. The method of embodiment 128, wherein the effective amount of the rAAV is less than the effective amount of a wild type rAAV. 130. The method of embodiment 128, wherein the effective amount of the rAAV is less than the effective amount of an otherwise comparable rAAV lacking one or more than one mutation at a position corresponding to residue 581 to residue 589 of SEQ ID NO: 1. 131. The method of any one of embodiments 128-130, wherein the effective amount of the results in lower toxicity in the patient as compared to the effective amount of the wild type rAAV, the otherwise comparable rAAV, or both. 132. The method of embodiment 128, wherein the effective amount is at least from 1×10⁵ viral genomes/kg patient weight to 5×10¹⁴ viral genomes/kg. 133. The method of any one of embodiments 128-132, wherein the rAAV is administered intravenously. 134. The method of any one of embodiments 128-132, wherein the rAAV is administered intrathecally. 135. The method of any one of embodiments 128-132, wherein the rAAV is administered by intracisternal magna administration. 136. The method of any one of embodiments 128-132, wherein the rAAV is administered by intravitreal injection. 137. A method of identifying an AAV VP1 capsid polypeptide that confers tropism for a desired tissue, comprising: administering an aliquot of the library of any one of embodiments 101-109, or 112-144, or 125-126 to a non-human primate; and identifying the sequences of AAV capsid sequence of rAAV that had infected the desired tissue. 138. The method of embodiment 137, wherein the library aliquot is administered intravenously. 139. The method of embodiment 137 wherein the library aliquot is administered intrathecally. 140. The method of embodiment 137, wherein the library aliquot is administered by intra-cisterna magna administration. 141. The method of embodiment 137, wherein the library aliquot is administered by intracerebral ventricular injection. 142. A method of formulating the therapeutic polynucleotide of any one of embodiments 123-124 in a virion, the method comprising: transfecting a cell with plasmid encoding for the recombinant capsid polypeptide of any one of embodiments 1-98 and transfecting the cell with a plasmid encoding for the therapeutic polynucleotide, wherein upon transfection, the cell produces the virion within which is packaged the therapeutic polynucleotide. 143. A composition comprising an AAV virion comprising the recombinant capsid polypeptide of any one of embodiments 1-98 within which is packaged the therapeutic polynucleotide of any one of embodiments 123-124. 144. A recombinant AAV VP1 capsid polypeptide having any one of the VP1 capsid mutations recited in Table 8 (SEQ ID NO:115-1114), and wherein the VP1 capsid polypeptide does not have the sequence of any of SEQ ID NO:1, SEQ ID NO:3, SEQ ID NO:4, SEQ ID NO:5, SEQ ID NO:6, SEQ ID NO:7, and SEQ ID NO:8. 145. A recombinant AAV VP1 capsid polypeptide having any of the VP1 capsid mutations recited in Table 8 (SEQ ID NO:115-1114), wherein the mutation confers tissue tropism for a first tissue as compared to a second tissue and wherein the AAV VP1 capsid polypeptide does not have the sequence of any of SEQ ID NO:1, SEQ ID NO:3, SEQ ID NO:4. SEQ ID NO:5, SEQ ID NO:6, SEQ ID NO:7, and SEQ ID NO:8. 146. The recombinant AAV VP1 capsid polypeptide of embodiment 145, wherein the mutation confers at least about a two-fold increased accumulation of rAAV comprising the mutated VP1 protein in a non-liver tissue as compared to a liver tissue as compared to accumulation of rAAV comprising AAV5 VP1 (SEQ ID NO:1), wherein the mutated rAAV and AAV5 rAAV are each administered intravenously at the same titer, and wherein the VP1 capsid polypeptide does not have the sequence of any of SEQ ID NO:1, SEQ ID NO:3, SEQ ID NO:4, SEQ ID NO:5, SEQ ID NO:6, SEQ ID NO:7, and SEQ ID NO:8. 147. A composition comprising an AAV virion comprising the recombinant capsid polypeptide of any one of embodiments 144-146, within which is packaged a therapeutic polynucleotide encoding any of the following: a therapeutic RNA selected from a guide RNA or a tRNA, or transgene encoding a protein under control of regulatory sequences that direct transgene expression in infected human cells.

[0477] Series B Embodiments—CNS Tropic Capsids

1. An engineered adeno-associated virus (AAV) viral protein (VP) capsid polypeptide having an amino acid sequence at least 70% identical to SEQ ID NO: 1,

[0478] wherein the engineered AAV VP capsid polypeptide has at least one mutation as compared to SEQ ID NO: 1 in the region from a residue corresponding to residue 581 of SEQ ID NO: 1 to a residue corresponding to residue 589 of SEQ ID NO: 1, inclusive,

[0479] wherein the engineered AAV VP capsid polypeptide is capable of assembling into a recombinant AAV virion (rAAV),

[0480] wherein the at least one mutation confers higher tropism for a central nervous system (CNS) tissue on the rAAV as compared to an rAAV virion having a wildtype AAV5 VP capsid polypeptide of SEQ ID NO: 1, and

[0481] wherein the engineered AAV VP capsid polypeptide does not have the sequence of any of SEQ ID NO: 3, SEQ ID NO: 4, SEQ ID NO: 5, SEQ ID NO: 6, SEQ ID NO: 7, and SEQ ID NO: 8. 2. The engineered AAV VP capsid polypeptide of embodiment 1, wherein the engineered AAV VP capsid polypeptide has a sequence of SEQ ID NO: 2 and wherein Xaa1, Xaa2, Xaa3, Xaa4, Xaa5, Xaa6, Xaa7, Xaa8, and Xaa9 are each independently selected from any amino acid. 3. An engineered adeno-associated virus (AAV) viral protein (VP) capsid polypeptide having an amino acid sequence of SEQ ID NO: 2,

[0482] wherein amino acid residues Xaa1, Xaa2, Xaa3, Xaa4, Xaa5, Xaa6, Xaa7, Xaa8, and Xaa9 are each independently selected from A, R, N, D, C, E, Q, G, H, I, L, K, M, F, P, S, T, W, Y, and V,

[0483] wherein the engineered AAV VP capsid polypeptide is capable of assembling into a recombinant AAV virion (rAAV), and

[0484] wherein the engineered AAV VP capsid polypeptide does not have the sequence of any of SEQ ID NO: 1, SEQ ID NO: 3, SEQ ID NO: 4, SEQ ID NO: 5, SEQ ID NO: 6, SEQ ID NO: 7, and SEQ ID NO: 8. 4. The engineered AAV VP capsid polypeptide of embodiment 3, wherein the rAAV has higher tropism for a central nervous system (CNS) tissue as compared to an rAAV virion having a wildtype AAV5 VP capsid polypeptide of SEQ ID NO: 1. 5. The engineered AAV VP capsid polypeptide of any one of embodiments 1-2, wherein the region from the residue corresponding to residue 581 to the residue corresponding to residue 589, inclusive, has a sequence that is at least 70%, at least 75%, at least 80%, at least 85%, at least 90%, at least 92%, at least 95%, at least 97%, or at least 99% identical to any one of SEQ ID NO: 7118-SEQ ID NO: 10117. 6. The engineered AAV VP capsid polypeptide of embodiment 4, wherein the region from the residue corresponding to residue 581 to the residue corresponding to residue 589, inclusive, has a sequence of any one of SEQ ID NO: 7118-SEQ ID NO: 10117. 7. The engineered AAV VP capsid polypeptide of embodiment 3, wherein the Xaa1 to Xaa9 region of SEQ ID NO: 2 has a sequence that is at least 70%, at least 75%, at least 80%, at least 85%, at least 90%, at least 92%, at least 95%, at least 97%, or at least 99% identical to any one of SEQ ID NO: 7118-SEQ ID NO: 10117. 8. The engineered AAV VP capsid polypeptide of embodiment 6, wherein the Xaa1 to Xaa9 region of SEQ ID NO: 2 has a sequence of any one of SEQ ID NO: 7118-SEQ ID NO: 10117.9. The engineered AAV VP capsid polypeptide of any one of embodiments 2-3, wherein:

[0485] Xaa1 is selected from the group consisting of A, C, K, M, Q, R, T, and W; or

[0486] Xaa2 is selected from the group consisting of F, I, K, R, T, and W; or

[0487] Xaa3 is selected from the group consisting of A, H, N, R, and W; or

[0488] Xaa4 is selected from the group consisting of E, G, I, M, Q, and R; or

[0489] Xaa5 is selected from the group consisting of C, G, K, I, M, and R; or

[0490] Xaa6 is selected from the group consisting of I, K, L, P, Q, R, and Y; or

[0491] Xaa7 is selected from the group consisting of D, I, K, R, V, and W; or

[0492] Xaa8 is selected from the group consisting of C, G, H, K, L, and V; or

[0493] Xaa9 is selected from the group consisting of I, K, L, R, and V; or

[0494] any combination thereof.

10. The engineered AAV VP capsid polypeptide of embodiment 5, wherein Xaa1 is selected from K, Q, R, or W. 11. The engineered AAV VP capsid polypeptide of embodiment 5, wherein Xaa2 is selected from F, I, R or T. 12. The engineered AAV VP capsid polypeptide of embodiment 5, wherein Xaa3 is selected from A, R, or W. 13. The engineered AAV VP capsid polypeptide of embodiment 5, wherein Xaa4 is selected from E, M, or R. 14. The engineered AAV VP capsid polypeptide of embodiment 5, wherein Xaa5 is selected from K, I, or R. 15. The engineered AAV VP capsid polypeptide of embodiment 5, wherein Xaa6 is selected from K, R, or Y. 16. The engineered AAV VP capsid polypeptide of embodiment 5, wherein Xaa7 is selected from I, R, or V. 17. The engineered AAV VP capsid polypeptide of embodiment 5, wherein Xaa8 is selected from H, K, or V. 18. The engineered AAV VP capsid polypeptide of embodiment 5, wherein Xaa9 is selected from I, K, or R. 19. The engineered AAV VP capsid polypeptide of embodiment 5, wherein Xaa1 is K. 20. The engineered AAV VP capsid polypeptide of embodiment 5, wherein Xaa2 is R. 21. The engineered AAV VP capsid polypeptide of embodiment 5, wherein Xaa3 is R. 22. The engineered AAV VP capsid polypeptide of embodiment 5, wherein Xaa4 is R. 23. The engineered AAV VP capsid polypeptide of embodiment 5, wherein Xaa5 is I. 24. The engineered AAV VP capsid polypeptide of embodiment 5, wherein Xaa6 is R. 25. The engineered AAV VP capsid polypeptide of embodiment 5, wherein Xaa7 is V. 26. The engineered AAV VP capsid polypeptide of embodiment 5, wherein Xaa8 is H. 27. The engineered AAV VP capsid polypeptide of embodiment 5, wherein Xaa9 is R. 28. The engineered AAV VP capsid poly peptide of any one of embodiments 1-8, wherein the region from the residue corresponding to residue 581 to the residue corresponding to residue 589, inclusive, has a sequence that is at least 70%, at least 75%, at least 80%, at least 85%, at least 90%, at least 92%, at least 95%, at least 97%, at least 98%, or at least 99% identical to any one of SEQ ID NO: 7118-SEQ ID NO: 8117. 29. The engineered AAV VP capsid polypeptide of embodiment 27, wherein the region from residue 581 to residue 589 of SEQ ID NO: 1 has a sequence of any one of SEQ ID NO: 7118-SEQ ID NO: 8117. 30. The engineered AAV VP capsid polypeptide of any one of embodiments 2-3, wherein Xaa1 has low amino acid solubility. 31. The engineered AAV VP capsid polypeptide of embodiment 25, wherein Xaa1 is selected from K, R, or Q. 32. The engineered AAV VP capsid polypeptide of any one of embodiments 2-3, wherein Xaa1 has low amino acid hydropathy. 33. The engineered AAV VP capsid polypeptide of embodiment 27, wherein Xaa1 is selected from K or R. 34. The engineered AAV VP capsid polypeptide of any one of embodiments 2-3, wherein Xaa1 has a high average amino acid flexibility index. 35. The engineered AAV VP capsid polypeptide of embodiment 29, wherein Xaa1 is selected from D, E, R, K, G, I, N, Q, or S. 36. The engineered AAV VP capsid polypeptide of any one of embodiments 2-3, wherein Xaa1 has high hydrogen bond donors. 37. The engineered AAV VP capsid polypeptide of embodiment 31, wherein Xaa1 is selected from K. R. 38. The engineered AAV VP capsid polypeptide of any one of embodiments 2-3, wherein Xaa1 has low amino acid mutability. 39. The engineered AAV VP capsid polypeptide of embodiment 33, wherein Xaa1 is selected from K, R, P, or H. 40. The engineered AAV VP capsid polypeptide of any one of embodiments 2-3, wherein Xaa2 has low amino acid solubility. 41. The engineered AAV VP capsid polypeptide of embodiment 35, wherein Xaa2 is selected from R, K, Q, or S. 42. The engineered AAV VP capsid polypeptide of any one of embodiments 2-3, wherein Xaa2 has low amino acid hydropathy. 43. The engineered AAV VP capsid polypeptide of embodiment 37, wherein Xaa2 is selected from R, K, D, E, N, Q, H, P, Y, W, S, or T. 44. The engineered AAV VP capsid polypeptide of any one of embodiments 2-3, wherein Xaa2 has high amino acid charge. 45. The engineered AAV VP capsid polypeptide of embodiment 39, wherein Xaa2 is selected from R, K, or H. 46. The engineered AAV VP capsid polypeptide of any one of embodiments 2-3, wherein Xaa3 has high amino acid solubility. 47. The engineered AAV VP capsid polypeptide of embodiment 41, wherein Xaa3 is selected from A, M, V, W, L, or I. 48. The engineered AAV VP capsid polypeptide of any one of embodiments 2-3, wherein Xaa5 has high amino acid solubility. 49. The engineered AAV VP capsid polypeptide of embodiment 43, wherein Xaa5 is selected from C, M, V, W, L, or I. 50. The engineered AAV VP capsid polypeptide of any one of embodiments 2-3, wherein Xaa5 has high hydropathy. 51. The engineered AAV VP capsid polypeptide of embodiment 45, wherein Xaa5 is selected from M, V, or I. 52. The engineered AAV VP capsid polypeptide of any one of embodiments 2-3, wherein Xaa5 has low average amino acid flexibility index. 53. The engineered AAV VP capsid polypeptide of embodiment 47, wherein Xaa5 is selected from M, W, F, or C. 54. The engineered AAV VP capsid polypeptide of any one of embodiments 2-3, wherein Xaa8 has high amino acid solubility. 55. The engineered AAV VP capsid polypeptide of embodiment 49, wherein Xaa8 is selected from H, V, or I. 56. The engineered AAV VP capsid polypeptide of any one of embodiments 29-54, wherein the region from the residue corresponding to residue 581 to the residue corresponding to residue 589 inclusive has a sequence having at least 70%, at least 75%, at least 80%, at least 85%, at least 90%, at least 92%, at least 95%, at least 97%, or at least 99% identical to any one of SEQ ID NO: 8118-SEQ ID NO: 9117. 57. The engineered AAV VP capsid polypeptide of any one of embodiments 25-50, wherein the region from the residue corresponding to residue 581 to the residue corresponding to residue 589 inclusive has a sequence of any one of SEQ ID NO: 8118-SEQ ID NO: 9117. 58. The engineered AAV VP capsid polypeptide of any one of embodiments 1-56, wherein the CNS tissue is selected from forebrain cortex, occipital cortex, temporal cortex, thalamus, hypothalamus, substantia nigra, hippocampus DG, hippocampus CA1, hippocampus CA3, cerebellum, and any combination thereof. 59. The engineered AAV VP capsid polypeptide of any one of embodiments 1-57, wherein tropism for CNS tissue is measured as a relative accumulation of the rAAV virion in a CNS tissue as compared to a non-CNS tissue, wherein the non-CNS tissue consists collectively of liver, skeletal muscle, heart, lung, spleen, lymph node, bone marrow, mammary gland, skin, adrenal gland, thyroid, colon, sciatic nerve, and spinal cord. 60. The engineered AAV VP capsid polypeptide of any one of embodiments 1-58, wherein the higher tissue tropism is a 1.0005-fold to about a 1000-fold increased accumulation in the CNS tissue as compared to a non-CNS tissue. 61. The engineered AAV VP capsid polypeptide of embodiment 59, wherein the higher tissue tropism is at least about a 1.0005-fold, at least about a two-fold, at least about a three-fold, at least about a four-fold, at least about a five-fold, at least about a ten-fold, at least about a twenty-fold, at least about a 50-fold, at least about a 75-fold, at least about a 100-fold, or at least about a 1000-fold increased accumulation in the CNS tissue as compared to a non-CNS tissue.

[0495] Series C Embodiments—Liver De-Targeted Capsids

1. An engineered adeno-associated virus (AAV) viral protein (VP) capsid polypeptide having an amino acid sequence at least 70% identical to SEQ ID NO: 1,

[0496] wherein the engineered AAV VP capsid polypeptide has at least one mutation as compared to SEQ ID NO: 1 in the region from a residue corresponding to residue 581 of SEQ ID NO: 1 to a residue corresponding to residue 589 of SEQ ID NO: 1, inclusive,

[0497] wherein the engineered AAV VP capsid polypeptide is capable of assembling into a recombinant AAV virion (rAAV),

[0498] wherein the at least one mutation confers higher tropism for a non-liver tissue on the rAAV as compared to an rAAV virion having a wildtype AAV5 VP capsid polypeptide of SEQ ID NO: 1, and

[0499] wherein the engineered AAV VP capsid polypeptide does not have the sequence of any of SEQ ID NO: 3, SEQ ID NO: 4, SEQ ID NO: 5, SEQ ID NO: 6, SEQ ID NO: 7, and SEQ ID NO: 8. 2. The engineered AAV VP capsid polypeptide of embodiment 1, wherein the engineered AAV VP capsid polypeptide has a sequence of SEQ ID NO: 2 and wherein Xaa1, Xaa2, Xaa3, Xaa4, Xaa5, Xaa6, Xaa7, Xaa8, and Xaa9 are each independently selected from any amino acid. 3. An engineered adeno-associated virus (AAV) viral protein (VP) capsid polypeptide having an amino acid sequence of SEQ ID NO: 2,

[0500] wherein amino acid residues Xaa1, Xaa2, Xaa3, Xaa4, Xaa5, Xaa6, Xaa7, Xaa8, and Xaa9 are each independently selected from A, R, N, D, C, E, Q, G, H, I, L, K, M, F, P, S, T, W, Y, and V,

[0501] wherein the engineered AAV VP capsid polypeptide is capable of assembling into a recombinant AAV virion (rAAV), and

[0502] wherein the engineered AAV VP capsid polypeptide does not have the sequence of any of SEQ ID NO: 1, SEQ ID NO: 3, SEQ ID NO: 4, SEQ ID NO: 5, SEQ ID NO: 6, SEQ ID NO: 7, and SEQ ID NO: 8. 4. The engineered AAV VP capsid polypeptide of embodiment 3, wherein the rAAV has higher tropism for a non-liver tissue as compared to an rAAV virion having a wildtype AAV5 VP capsid polypeptide of SEQ ID NO: 1. 5. The engineered AAV VP capsid poly peptide of embodiment 1, wherein the region from the residue corresponding to residue 581 to the residue corresponding to residue 589, inclusive, has a sequence that is at least 70%, at least 75%, at least 80%, at least 85%, at least 90%, at least 92%, at least 95%, at least 97%, at least 98%, or at least 99% identical to any one of SEQ ID NO: 46438-SEQ ID NO: 47437. 6. The engineered AAV VP capsid polypeptide of embodiment 5, wherein the region from the residue corresponding to residue 581 to the residue corresponding to residue 589, inclusive, has a sequence of any one of SEQ ID NO: 46438-SEQ ID NO: 47437. 7. The engineered AAV VP capsid polypeptide of any one of embodiments 2-4, wherein the Xaa1 to Xaa9 region of SEQ ID NO: 2 has a sequence that is at least 70%, at least 75%, at least 80%, at least 85%, at least 90%, at least 92%, at least 95%, at least 97%, or at least 99% identical to any one of SEQ ID NO: 46438-SEQ ID NO: 47437. 8. The engineered AAV VP capsid polypeptide of embodiment 7, wherein the Xaa1 to Xaa9 region of SEQ ID NO: 2 has a sequence of any one of SEQ ID NO: 46438-SEQ ID NO: 47437. 9. The engineered AAV VP capsid polypeptide of any one of embodiments 2-4, wherein:

[0503] Xaa1 excludes A, G, K, M, N, Q, R, S, or T; or

[0504] Xaa2 excludes A, C, I, K, S, T, or V; or

[0505] Xaa3 excludes A, G, I, K, M, Q, R, S, T, or V; or

[0506] Xaa4 excludes A, I, K, L, P, Q, R, S, T, or V; or

[0507] Xaa5 excludes F, I, L, M, T, V, or Y; or

[0508] Xaa6 excludes F, H, M, N, Q, S, or Y; or

[0509] Xaa7 excludes A, C, K, M, Q or S; or

[0510] Xaa8 excludes A, C, F, G, M, Q, or S; or

[0511] Xaa9 excludes E, F, L, Q, R, or Y; or

[0512] any combination thereof.

10. The engineered AAV VP capsid polypeptide of embodiment 9, wherein Xaa1 excludes A, K, Q, or R. 11. The engineered AAV VP capsid polypeptide of embodiment 9, wherein Xaa2 excludes A, K, S, or T. 12. The engineered AAV VP capsid polypeptide of embodiment 9, wherein Xaa3 excludes A, K, Q, S, or T. 13. The engineered AAV VP capsid polypeptide of embodiment 9, wherein Xaa4 excludes K, I, S, or V. 14. The engineered AAV VP capsid polypeptide of embodiment 9, wherein Xaa5 excludes F, L, or Y. 15. The engineered AAV VP capsid polypeptide of embodiment 9, wherein Xaa6 excludes M or N. 16. The engineered AAV VP capsid polypeptide of embodiment 9, wherein Xaa7 excludes A, C, or S. 17. The engineered AAV VP capsid polypeptide of embodiment 9, wherein Xaa8 excludes A, C, M, or S. 18. The engineered AAV VP capsid polypeptide of embodiment 9, wherein Xaa9 excludes L, Q, or R. 19. The engineered AAV VP capsid polypeptide of embodiment 9, wherein Xaa1 excludes K. 20. The engineered AAV VP capsid polypeptide of embodiment 9, wherein Xaa2 excludes A. 21. The engineered AAV VP capsid polypeptide of embodiment 9, wherein Xaa3 excludes K, Q, or T. 22. The engineered AAV VP capsid polypeptide of embodiment 9, wherein Xaa3 excludes K. 23. The engineered AAV VP capsid polypeptide of embodiment 9, wherein Xaa4 excludes K. 24. The engineered AAV VP capsid polypeptide of embodiment 9, wherein Xaa5 excludes F. 25. The engineered AAV VP capsid polypeptide of embodiment 9, wherein Xaa6 excludes N. 26. The engineered AAV VP capsid polypeptide of embodiment 9, wherein Xaa7 excludes S. 27. The engineered AAV VP capsid polypeptide of embodiment 9, wherein Xaa8 excludes C. 28. The engineered AAV VP capsid polypeptide of embodiment 9, wherein Xaa9 excludes R. 29. The engineered AAV VP capsid polypeptide of any one of embodiments 2-4, wherein Xaa1 has low solubility. 30. The engineered AAV VP capsid polypeptide of embodiment 29, wherein Xaa1 is selected from D and P. 31. The engineered AAV VP capsid polypeptide of any one of embodiments 2-4, wherein Xaa1 has low mutability. 32. The engineered AAV VP capsid polypeptide of embodiment 31, wherein Xaa1 is selected from Xaa1 is selected from C, K, and L. 33. The engineered AAV VP capsid polypeptide of any one of embodiments 2-4, wherein Xaa2 has low solubility. 34. The engineered AAV VP capsid polypeptide of embodiment 33, wherein Xaa2 is selected from Xaa2 is selected from N, K, P, E, and D. 35. The engineered AAV VP capsid polypeptide of any one of embodiments 2-4, wherein Xaa2 has low hydropathy. 36.The engineered AAV VP capsid polypeptide of embodiment 35, wherein Xaa2 is selected from Xaa2 is selected from D, E, R, K, H, N, and Q. 37. The engineered AAV VP capsid polypeptide of any one of embodiments 2-4, wherein Xaa2 has low charge. 38. The engineered AAV VP capsid polypeptide of embodiment 37, wherein Xaa2 is selected from D and E. 39. The engineered AAV VP capsid polypeptide of any one of embodiments 2-4, wherein Xaa2 has high number of total potential hydrogen bonds. 40. The engineered AAV VP capsid polypeptide of embodiment 39, wherein Xaa2 is selected from H, N, Q, D, E. and R. 41. The engineered AAV VP capsid polypeptide of any one of embodiments 2-4, wherein Xaa2 has medium volume. 42. The engineered AAV VP capsid polypeptide of embodiment 41, wherein Xaa2 is selected from D, E, V, P, N, and T. 43. The engineered AAV VP capsid polypeptide of any one of embodiments 2-4, wherein Xaa3 has low solubility. 44. The engineered AAV VP capsid polypeptide of embodiment 43, wherein Xaa3 is selected from P and D. 45. The engineered AAV VP capsid polypeptide of any one of embodiments 2-4, wherein Xaa4 has medium volume. 46. The engineered AAV VP capsid polypeptide of embodiment 45, wherein Xaa4 is selected from D, E, V, P, N, and T. 47. The engineered AAV VP capsid polypeptide of any one of embodiments 2-4, wherein Xaa5 has low solubility. 48. The engineered AAV VP capsid polypeptide of embodiment 47, wherein Xaa5 is selected from N, P, E, and D. 49. The engineered AAV VP capsid polypeptide of any one of embodiments 2-4, wherein Xaa8 has low solubility. 50. The engineered AAV VP capsid polypeptide of embodiment 49, wherein Xaa8 is selected from K and Q. 51. The engineered AAV VP capsid polypeptide of any one of embodiments 2-4, wherein Xaa8 has low hydropathy. 52. The engineered AAV VP capsid polypeptide of embodiment 51, wherein Xaa8 is selected from K and R. 53. The engineered AAV VP capsid polypeptide of any one of embodiments 2-4, wherein Xaa8 has high surface accessibility. 54. The engineered AAV VP capsid polypeptide of embodiment 53, wherein Xaa8 is selected from E, R, and K. 55. The engineered AAV VP capsid polypeptide of any one of embodiments 1-54, wherein the region from the residue corresponding to residue 581 to the residue corresponding to residue 589 inclusive has a sequence having at least 70%, at least 75%, at least 80%, at least 85%, at least 90%, at least 92%, at least 95%, at least 97%, or at least 99% identical to any one of SEQ ID NO: 46438-SEQ ID NO: 47437. 56. The engineered AAV VP capsid polypeptide of embodiment 55, wherein the region from the residue corresponding to residue 581 to the residue corresponding to residue 589 inclusive has a sequence of any one of SEQ ID NO: 46438-SEQ ID NO: 47437. 57. The engineered AAV VP capsid polypeptide of any one of embodiments 1-56, wherein tropism for a non-liver tissue is measured as a relative accumulation of the rAAV virion in a non-liver tissue as compared to a liver tissue, wherein the non-liver tissue consists collectively of CNS tissue, skeletal muscle, heart, lung, spleen, lymph node, bone marrow, mammary gland, skin, adrenal gland, thyroid, colon, sciatic nerve, and spinal cord. 58. The engineered AAV VP capsid polypeptide of embodiment 57, wherein the CNS tissue is selected from forebrain cortex, occipital cortex, temporal cortex, thalamus, hypothalamus, substantia nigra, hippocampus DG, hippocampus CA1, hippocampus CA3, cerebellum, and any combination thereof. 59. The engineered AAV VP capsid polypeptide of any one of embodiments 57-58, wherein the higher tissue tropism is a 1.0005-fold to about a 1000-fold increased accumulation in the non-liver tissue as compared to a liver tissue. 60. The engineered AAV VP capsid polypeptide of embodiment 59, wherein the higher tissue tropism is at least about a 1.0005-fold, at least about a two-fold, at least about a three-fold, at least about a four-fold, at least about a five-fold, at least about a ten-fold, at least about a twenty-fold, at least about a 50-fold, at least about a 75-fold, at least about a 100-fold, or at least about a 1000-fold increased accumulation in the non-liver tissue as compared to a liver tissue.

[0513] Series D Embodiments—Liver Tropic Capsids

1. An engineered adeno-associated virus (AAV) viral protein (VP) capsid polypeptide having an amino acid sequence at least 70% identical to SEQ ID NO: 1,

[0514] wherein the engineered AAV VP capsid polypeptide has at least one mutation as compared to SEQ ID NO: 1 in the region from a residue corresponding to residue 581 of SEQ ID NO: 1 to a residue corresponding to residue 589 of SEQ ID NO: 1, inclusive,

[0515] wherein the engineered AAV VP capsid polypeptide is capable of assembling into a recombinant AAV virion (rAAV),

[0516] wherein the at least one mutation confers higher tropism for a liver tissue on the rAAV as compared to an rAAV virion having a wildtype AAV5 VP capsid polypeptide of SEQ ID NO: 1, and

[0517] wherein the engineered AAV VP capsid polypeptide does not have the sequence of any of SEQ ID NO: 3, SEQ ID NO: 4, SEQ ID NO: 5, SEQ ID NO: 6, SEQ ID NO: 7, and SEQ ID NO: 8. 2. The engineered AAV VP capsid polypeptide of embodiment 1, wherein the engineered AAV VP capsid polypeptide has a sequence of SEQ ID NO: 2 and wherein Xaa1, Xaa2, Xaa3, Xaa4, Xaa5, Xaa6, Xaa7, Xaa8, and Xaa9 are each independently selected from any amino acid. 3. An engineered adeno-associated virus (AAV) viral protein (VP) capsid polypeptide having an amino acid sequence of SEQ ID NO: 2,

[0518] wherein amino acid residues Xaa1, Xaa2, Xaa3, Xaa4, Xaa5, Xaa6, Xaa7, Xaa8, and Xaa9 are each independently selected from A, R, N, D, C, E, Q, G, H, I, L, K, M, F, P, S, T, W, Y, and V,

[0519] wherein the engineered AAV VP capsid polypeptide is capable of assembling into a recombinant AAV virion (rAAV), and

[0520] wherein the engineered AAV VP capsid polypeptide does not have the sequence of any of SEQ ID NO: 1, SEQ ID NO: 3, SEQ ID NO: 4, SEQ ID NO: 5, SEQ ID NO: 6, SEQ ID NO: 7, and SEQ ID NO: 8. 4. The engineered AAV VP capsid polypeptide of embodiment 3, wherein the rAAV has higher tropism for a liver tissue as compared to an rAAV virion having a wildtype AAV5 VP capsid polypeptide of SEQ ID NO: 1. 5. The engineered AAV VP capsid polypeptide of embodiment 1, wherein the region from the residue corresponding to residue 581 to the residue corresponding to residue 589, inclusive, has a sequence that is at least 70%, at least 75%, at least 80%, at least 85%, at least 90%, at least 92%, at least 95%, at least 97%, or at least 99% identical to any one of SEQ ID NO: 43438-SEQ ID NO: 46437. 6. The engineered AAV VP capsid polypeptide of embodiment 5, wherein the region from the residue corresponding to residue 581 to the residue corresponding to residue 589, inclusive, has a sequence of any one of SEQ ID NO: 43438-SEQ ID NO: 46437. 7. The engineered AAV VP capsid polypeptide of any one of embodiments 2-4, wherein the Xaa1 to Xaa9 region of SEQ ID NO: 2 has a sequence that is at least 70%, at least 75%, at least 80%, at least 85%, at least 90%, at least 92%, at least 95%, at least 97%, or at least 99% identical to any one of SEQ ID NO: 43438-SEQ ID NO: 46437. 8. The engineered AAV VP capsid polypeptide of embodiment 7, wherein the Xaa1 to Xaa9 region of SEQ ID NO: 2 has a sequence of any one of SEQ ID NO: 43438-SEQ ID NO: 46437. 9. The engineered AAV VP capsid polypeptide of any one of embodiments 2-4, wherein:

[0521] Xaa1 is selected from the group consisting of A, G, K, M, N, Q, R, S, and T; or

[0522] Xaa2 is selected from the group consisting of A, C, I, K, S, T, and V; or

[0523] Xaa3 is selected from the group consisting of A, G, I, K, M, Q, R, S, T, and V; or

[0524] Xaa4 is selected from the group consisting of A, I, K, L, P, Q, R, S, T, and V; or

[0525] Xaa5 is selected from the group consisting of F, I, L, M, T, V, and Y; or

[0526] Xaa6 is selected from the group consisting of F, H, M, N, Q, S, and Y; or

[0527] Xaa7 is selected from the group consisting of A, C, K, M, Q and S; or

[0528] Xaa8 is selected from the group consisting of A, C, F, G, M, Q, and S; or

[0529] Xaa9 is selected from the group consisting of E, F, L, Q, R, and Y; or

[0530] any combination thereof.

10. The engineered AAV VP capsid polypeptide of embodiment 9, wherein Xaa1 is selected from A, K, Q, and R. 11. The engineered AAV VP capsid polypeptide of embodiment 9, wherein Xaa1 is K. 12. The engineered AAV VP capsid polypeptide of embodiment 9, wherein Xaa2 is selected from A, K, S, and T. 13. The engineered AAV VP capsid polypeptide of embodiment 9, wherein Xaa2 is A. 14. The engineered AAV VP capsid polypeptide of embodiment 9, wherein Xaa3 is selected from A, K, Q, S, and T. 15. The engineered AAV VP capsid polypeptide of embodiment 9, wherein Xaa3 is selected from K, Q, and T. 16. The engineered AAV VP capsid polypeptide of embodiment 9, wherein Xaa3 is K. 17. The engineered AAV VP capsid polypeptide of embodiment 9, wherein Xaa4 is selected from K, I, S, and V. 18. The engineered AAV VP capsid polypeptide of embodiment 9, wherein Xaa4 is K. 19. The engineered AAV VP capsid polypeptide of embodiment 9, wherein Xaa5 is selected from F, L, and Y. 20. The engineered AAV VP capsid polypeptide of embodiment 9, wherein Xaa5 is F. 21. The engineered AAV VP capsid polypeptide of embodiment 9, wherein Xaa6 is selected from M and N. 22. The engineered AAV VP capsid polypeptide of embodiment 9, wherein Xaa6 is N. 23. The engineered AAV VP capsid polypeptide of embodiment 9, wherein Xaa7 is selected from A, C, and S. 24. The engineered AAV VP capsid poly peptide of embodiment 9, wherein Xaa7 is S. 25. The engineered AAV VP capsid polypeptide of embodiment 9, wherein Xaa8 is selected from A, C, M, and S. 26. The engineered AAV VP capsid polypeptide of embodiment 9, wherein Xaa8 is C. 27. The engineered AAV VP capsid poly peptide of embodiment 9, wherein Xaa9 is selected from L, Q, and R. 28. The engineered AAV VP capsid polypeptide of embodiment 9, wherein Xaa9 is R. 29. The engineered AAV VP capsid polypeptide of any one of embodiments 1-28, wherein the region from the residue corresponding to residue 581 to the residue corresponding to residue 589, inclusive, has a sequence that is at least 70%, at least 75%, at least 80%, at least 85%, at least 90%, at least 92%, at least 95%, at least 97%, or at least 99% identical to any one of SEQ ID NO: 43438-SEQ ID NO: 44437. 30. The engineered AAV VP capsid polypeptide of embodiment 29, wherein the region from residue 581 to residue 589 of SEQ ID NO: 1 has a sequence of any one of SEQ ID NO: 43438-SEQ ID NO: 44437. 31. The engineered AAV VP capsid polypeptide of any one of embodiments 2-4, wherein Xaa1 has high surface accessibility. 32. The engineered AAV VP capsid polypeptide of embodiment 31, wherein Xaa1 is selected from K, R, and E. 33. The engineered AAV VP capsid polypeptide of any one of embodiments 2-4, wherein Xaa1 has Low hydropathy (<−3.5). 34. The engineered AAV VP capsid polypeptide of embodiment 33, wherein Xaa1 is selected from K and R. 35. The engineered AAV VP capsid polypeptide of any one of embodiments 2-4, wherein Xaa1 has Low amino acid mutability. 36. The engineered AAV VP capsid polypeptide of embodiment 35, wherein Xaa1 is selected from H, P, K, and R 37. The engineered AAV VP capsid polypeptide of any one of embodiments 2-4, wherein Xaa1 has Low amino acid solubility. 38. The engineered AAV VP capsid polypeptide of embodiment 37, wherein Xaa1 is selected from Q, K, and R. 39. The engineered AAV VP capsid polypeptide of any one of embodiments 2-4, wherein Xaa2 has High surface accessibility.
40. The engineered AAV VP capsid polypeptide of embodiment 39, wherein Xaa2 is selected from E, R, and K. 41. The engineered AAV VP capsid polypeptide of any one of embodiments 2-4, wherein Xaa2 has Low hydropathy. 42. The engineered AAV VP capsid polypeptide of embodiment 41, wherein Xaa2 is selected from K and R. 43. The engineered AAV VP capsid polypeptide of any one of embodiments 2-4, wherein Xaa2 has High amino acid volume. 44. The engineered AAV VP capsid polypeptide of embodiment 43, wherein Xaa2 is selected from S, L, I, A, R, and K. 45. The engineered AAV VP capsid polypeptide of any one of embodiments 2-4, wherein Xaa3 has High mutability. 46. The engineered AAV VP capsid polypeptide of embodiment 45, wherein Xaa3 is selected from N, I, A, M, E, and D. 47. The engineered AAV VP capsid polypeptide of any one of embodiments 2-4, wherein Xaa3 has Low solubility. 48. The engineered AAV VP capsid polypeptide of embodiment 47, wherein Xaa3 is selected from N, K, R, and E. 49. The engineered AAV VP capsid polypeptide of any one of embodiments 2-4, wherein Xaa4 has Low hydropathy. 50. The engineered AAV VP capsid polypeptide of embodiment 49, wherein Xaa4 is selected from K and R. 51. The engineered AAV VP capsid polypeptide of any one of embodiments 2-4, wherein Xaa4 has High amino acid volume. 52. The engineered AAV VP capsid polypeptide of embodiment 51, wherein Xaa4 is selected from K, R, I, and L. 53. The engineered AAV VP capsid polypeptide of any one of embodiments 2-4, wherein Xaa5 has Medium amino acid solubility. 54. The engineered AAV VP capsid polypeptide of embodiment 53, wherein Xaa5 is selected from H and T. 55. The engineered AAV VP capsid polypeptide of any one of embodiments 2-4, wherein Xaa8 has Low surface accessibility. 56. The engineered AAV VP capsid polypeptide of embodiment 55, wherein Xaa8 is selected from V and C. 57. The engineered AAV VP capsid polypeptide of any one of embodiments 2-4, wherein Xaa8 has Low average flexibility index. 58. The engineered AAV VP capsid polypeptide of embodiment 57, wherein Xaa8 is selected from W, V, M, A, F, L, H, and C. 59. The engineered AAV VP capsid polypeptide of any one of embodiments 1-58, wherein the region from the residue corresponding to residue 581 to the residue corresponding to residue 589 inclusive has a sequence having at least 70%, at least 75%, at least 80%, at least 85%, at least 90%, at least 92%, at least 95%, at least 97%, or at least 99% identical to any, one of SEQ ID NO: 44438-SEQ ID NO: 45437. 60. The engineered AAV VP capsid polypeptide of embodiment 59, wherein the region from the residue corresponding to residue 581 to the residue corresponding to residue 589 inclusive has a sequence of any one of SEQ ID NO: 44438-SEQ ID NO: 45437. 61. The engineered AAV VP capsid polypeptide of any one of embodiments 1-60, wherein tropism for liver tissue is measured as a relative accumulation of the rAAV virion in a liver tissue as compared to a non-liver tissue, wherein the non-liver tissue consists collectively of CNS, skeletal muscle, heart, lung, spleen, lymph node, bone marrow, mammary gland, skin, adrenal gland, thyroid, colon, sciatic nerve, and spinal cord. 62. The engineered AAV VP capsid polypeptide of embodiment 61, wherein the CNS tissue is selected from forebrain cortex, occipital cortex, temporal cortex, thalamus, hypothalamus, substantia nigra, hippocampus DG, hippocampus CA1, hippocampus CA3, cerebellum, and any combination thereof. 63. The engineered AAV VP capsid polypeptide of any one of embodiments 61-62, wherein the higher tissue tropism is a 1.0005-fold to about a 1000-fold increased accumulation in the liver tissue as compared to a non-liver tissue. 64. The engineered AAV VP capsid polypeptide of embodiment 63, wherein the higher tissue tropism is at least about a 1.0005-fold, at least about a two-fold, at least about a three-fold, at least about a four-fold, at least about a five-fold, at least about a ten-fold, at least about a twenty-fold, at least about a 50-fold, at least about a 75-fold, at least about a 100-fold, or at least about a 1000-fold increased accumulation in the liver tissue as compared to a non-liver tissue.

[0531] Series E Embodiments—Adrenal Gland Tropic Capsids

1. An engineered adeno-associated virus (AAV) viral protein (VP) capsid polypeptide having an amino acid sequence at least 70% identical to SEQ ID NO: 1,

[0532] wherein the engineered AAV VP capsid polypeptide has at least one mutation as compared to SEQ ID NO: 1 in the region from a residue corresponding to residue 581 of SEQ ID NO: 1 to a residue corresponding to residue 589 of SEQ ID NO: 1, inclusive,

[0533] wherein the engineered AAV VP capsid polypeptide is capable of assembling into a recombinant AAV virion (rAAV),

[0534] wherein the at least one mutation confers higher tropism for an adrenal gland tissue on the rAAV as compared to an rAAV virion having a wildtype AAV5 VP capsid polypeptide of SEQ ID NO: 1, and

[0535] wherein the engineered AAV VP capsid polypeptide does not have the sequence of any of SEQ ID NO: 3, SEQ ID NO: 4, SEQ ID NO: 5, SEQ ID NO: 6, SEQ ID NO: 7, and SEQ ID NO: 8. 2. The engineered AAV VP capsid polypeptide of embodiment 1, wherein the engineered AAV VP capsid polypeptide has a sequence of SEQ ID NO: 2 and wherein Xaa1, Xaa2, Xaa3, Xaa4, Xaa5, Xaa6, Xaa7, Xaa8, and Xaa9 are each independently selected from any amino acid. 3.An engineered adeno-associated virus (AAV) viral protein (VP) capsid polypeptide having an amino acid sequence of SEQ ID NO: 2,

[0536] wherein amino acid residues Xaa1, Xaa2, Xaa3, Xaa4, Xaa5, Xaa6, Xaa7, Xaa8, and Xaa9 are each independently selected from A, R, N, D, C, E, Q, G, H, I, L, K, M, F, P, S, T, W, Y, and V,

[0537] wherein the engineered AAV VP capsid polypeptide is capable of assembling into a recombinant AAV virion (rAAV), and

[0538] wherein the engineered AAV VP capsid polypeptide does not have the sequence of any of SEQ ID NO: 1, SEQ ID NO: 3, SEQ ID NO: 4, SEQ ID NO: 5, SEQ ID NO: 6, SEQ ID NO: 7, and SEQ ID NO: 8. 4. The engineered AAV VP capsid polypeptide of embodiment 3, wherein the rAAV has higher tropism for an adrenal gland tissue as compared to an rAAV virion having a wildtype AAV5 VP capsid polypeptide of SEQ ID NO: 1. 5. The engineered AAV VP capsid poly peptide of embodiment 1, wherein the region from the residue corresponding to residue 581 to the residue corresponding to residue 589, inclusive, has a sequence that is at least 70%, at least 75%, at least 80%, at least 85%, at least 90%, at least 92%, at least 95%, at least 97%, or at least 99% identical to any one of SEQ ID NO: 1118-SEQ ID NO: 4117. 6. The engineered AAV VP capsid polypeptide of embodiment 5, wherein the region from the residue corresponding to residue 581 to the residue corresponding to residue 589, inclusive, has a sequence of any one of SEQ ID NO: 1118-SEQ ID NO: 4117. 7. The engineered AAV VP capsid polypeptide of any one of embodiments 2-4, wherein the Xaa1 to Xaa9 region of SEQ ID NO: 2 has a sequence that is at least 70%, at least 75%, at least 80%, at least 85%, at least 90%, at least 92%, at least 95%, at least 97%, or at least 99% identical to any one of SEQ ID NO: 1118-SEQ ID NO: 4117. 8. The engineered AAV VP capsid polypeptide of embodiment 7, wherein the Xaa1 to Xaa9 region of SEQ ID NO: 2 has a sequence of any one of SEQ ID NO: 1118-SEQ ID NO: 4117. 9. The engineered AAV VP capsid polypeptide of any one of embodiments 2-4, wherein:

[0539] Xaa1 is selected from the group consisting of A, C, K, Q, R S, and T; or

[0540] Xaa2 is selected from the group consisting of A, C, I, S, T, and V; or

[0541] Xaa3 is selected from the group consisting of A, F, G, K, M, Q, R, T, and V; or

[0542] Xaa4 is selected from the group consisting of A, K, M, Q, R, and V; or

[0543] Xaa5 is selected from the group consisting of F, I, L, M, R, T, V, and Y; or

[0544] Xaa6 is selected from the group consisting of G, H, M, N, R, and S; or

[0545] Xaa7 is selected from the group consisting of A, H, K, Q, R, S and V; or

[0546] Xaa8 is selected from the group consisting of A, G, H, M, Q, and S; or

[0547] Xaa9 is selected from the group consisting of A, E, N, P, R, S, and Y; or

any combination thereof. 10. The engineered AAV VP capsid polypeptide of embodiment 9, wherein Xaa1 is selected from C, K, and R. 11. The engineered AAV VP capsid polypeptide of embodiment 9, wherein Xaa1 is C. 12. The engineered AAV VP capsid polypeptide of embodiment 9, wherein Xaa2 is selected from A, V, and T. 13. The engineered AAV VP capsid polypeptide of embodiment 9, wherein Xaa2 is V. 14. The engineered AAV VP capsid polypeptide of embodiment 9, wherein Xaa3 is selected from A, G, and M. 15. The engineered AAV VP capsid poly peptide of embodiment 9, wherein Xaa3 is M. 16. The engineered AAV VP capsid polypeptide of embodiment 9, wherein Xaa4 is selected from A, R, and K. 17. The engineered AAV VP capsid polypeptide of embodiment 9, wherein Xaa4 is K. 18. The engineered AAV VP capsid polypeptide of embodiment 9, wherein Xaa5 is selected from R, V, and Y. 19. The engineered AAV VP capsid polypeptide of embodiment 9, wherein Xaa5 is V. 20. The engineered AAV VP capsid polypeptide of embodiment 9, wherein Xaa6 is selected from H and N. 21. The engineered AAV VP capsid polypeptide of embodiment 9, wherein Xaa6 is N. 22. The engineered AAV VP capsid polypeptide of embodiment 9, wherein Xaa7 is selected from H, Q, and V. 23. The engineered AAV VP capsid polypeptide of embodiment 9, wherein Xaa7 is H. 24. The engineered AAV VP capsid polypeptide of embodiment 9, wherein Xaa8 is selected from A, G, M, and S. 25. The engineered AAV VP capsid polypeptide of embodiment 9, wherein Xaa8 is S. 26. The engineered AAV VP capsid poly peptide of embodiment 9, wherein Xaa9 is selected from P and E. 27. The engineered AAV VP capsid polypeptide of embodiment 9, wherein Xaa9 is P. 28. The engineered AAV VP capsid polypeptide of any one of embodiments 1-27, wherein the region from the residue corresponding to residue 581 to the residue corresponding to residue 589, inclusive, has a sequence that is at least 70%, at least 75%, at least 80%, at least 85%, at least 90%, at least 92%, at least 95%, at least 97%, or at least 99% identical to any one of SEQ ID NO: 1118-SEQ ID NO: 2117. 29. The engineered AAV VP capsid polypeptide of embodiment 28, wherein the region from residue 581 to residue 589 of SEQ ID NO: 1 has a sequence of any one of SEQ ID NO: 1118-SEQ ID NO: 2117. 30. The engineered AAV VP capsid polypeptide of any one of embodiments 2-4, wherein Xaa1 has low mol mass. 31. The engineered AAV VP capsid polypeptide of embodiment 30, wherein Xaa1 is selected from V, P, S, and C. 32. The engineered AAV VP capsid polypeptide of any one of embodiments 2-4, wherein Xaa1 has low hydropathy. 33. The engineered AAV VP capsid polypeptide of embodiment X, wherein Xaa1 is selected from T, S, W, and Y. 34. The engineered AAV VP capsid polypeptide of any one of embodiments 2-4, wherein Xaa2 has low hydropathy. 35. The engineered AAV VP capsid polypeptide of embodiment 34, wherein Xaa2 is R. 36. The engineered AAV VP capsid polypeptide of any one of embodiments 2-4, wherein Xaa2 has low mutability. 37. The engineered AAV VP capsid polypeptide of embodiment 36, wherein Xaa2 is C. 38. The engineered AAV VP capsid polypeptide of any one of embodiments 2-4, wherein Xaa2 has low solubility. 39. The engineered AAV VP capsid polypeptide of embodiment 38, wherein Xaa2 is K. 40. The engineered AAV VP capsid polypeptide of any one of embodiments 2-4, wherein Xaa3 has low average flexibility. 41. The engineered AAV VP capsid polypeptide of embodiment 40, wherein Xaa3 is selected from W, M, and F. 42. The engineered AAV VP capsid polypeptide of any one of embodiments 2-4, wherein Xaa3 has high solubility. 43. The engineered AAV VP capsid polypeptide of embodiment 42, wherein Xaa3 is M. 44. The engineered AAV VP capsid polypeptide of any one of embodiments 2-4, wherein Xaa4 has high surface accessibility. 45. The engineered AAV VP capsid polypeptide of embodiment 44, wherein Xaa4 is selected from K and R. 46. The engineered AAV VP capsid polypeptide of any one of embodiments 2-4, wherein Xaa4 has high average flexibility. 47. The engineered AAV VP capsid polypeptide of embodiment 46, wherein Xaa4 is selected from K, I, and N. 48. The engineered AAV VP capsid polypeptide of any one of embodiments 2-4, wherein Xaa5 has medium mutability. 49. The engineered AAV VP capsid polypeptide of embodiment 48, wherein Xaa5 is selected from R and H. 50. The engineered AAV VP capsid polypeptide of any one of embodiments 2-4, wherein Xaa5 has high goldman engelman steitz. 51. The engineered AAV VP capsid polypeptide of embodiment 50, wherein Xaa5 is selected from V and L. 52. The engineered AAV VP capsid polypeptide of any one of embodiments 2-4, wherein Xaa5 has low hydropathy. 53. The engineered AAV VP capsid polypeptide of embodiment 52, wherein Xaa5 is R. 54. The engineered AAV VP capsid polypeptide of any one of embodiments 2-4, wherein Xaa5 has high volume. 55. The engineered AAV VP capsid polypeptide of embodiment 54, wherein Xaa5 is selected from Y, R, and F. 56. The engineered AAV VP capsid polypeptide of any one of embodiments 2-4, wherein Xaa6 has high solubility. 57. The engineered AAV VP capsid polypeptide of embodiment 56, wherein Xaa6 is selected from Y, V, M, A, and C. 58. The engineered AAV VP capsid polypeptide of any one of embodiments 2-4, wherein Xaa7 has medium mutability. 59. The engineered AAV VP capsid polypeptide of embodiment 58, wherein Xaa7 is selected from V, H, and R. 60. The engineered AAV VP capsid polypeptide of any one of embodiments 2-4, wherein Xaa7 has low solubility. 61. The engineered AAV VP capsid polypeptide of embodiment 59, wherein Xaa7 is R. 62. The engineered AAV VP capsid polypeptide of any one of embodiments 2-4, wherein Xaa8 has high average flexibility. 64. The engineered AAV VP capsid polypeptide of embodiment 62, wherein Xaa8 is selected from K, I, and N. 65. The engineered AAV VP capsid polypeptide of any one of embodiments 2-4, wherein Xaa8 has high mol mass. 66. The engineered AAV VP capsid polypeptide of embodiment 65, wherein Xaa8 is selected from R and Y. 67. The engineered AAV VP capsid polypeptide of any one of embodiments 2-4, wherein Xaa9 has high mutability. 68. The engineered AAV VP capsid polypeptide of embodiment X, wherein Xaa9 is N. 69. The engineered AAV VP capsid poly peptide of any one of embodiments 1-68, wherein the region from the residue corresponding to residue 581 to the residue corresponding to residue 589 inclusive has a sequence having at least 70%, at least 75%, at least 80%, at least 85%, at least 90%, at least 92%, at least 95%, at least 97%, or at least 99% identical to any one of SEQ ID NO: 2118-SEQ ID NO: 3117. 70. The engineered AAV VP capsid polypeptide of embodiment 69, wherein the region from the residue corresponding to residue 581 to the residue corresponding to residue 589 inclusive has a sequence of any one of SEQ ID NO: 2118-SEQ ID NO: 3117. 71. The engineered AAV VP capsid polypeptide of any one of embodiments 1-70, wherein tropism for adrenal gland tissue is measured as a relative accumulation of the rAAV virion in an adrenal gland tissue as compared to a non-adrenal gland tissue, wherein the non-adrenal gland tissue consists collectively of CNS, liver, skeletal muscle, heart, lung, spleen, lymph node, bone marrow, mammary gland, skin, thyroid, colon, sciatic nerve, and spinal cord. 72. The engineered AAV VP capsid polypeptide of embodiment 71, wherein the CNS tissue is selected from forebrain cortex, occipital cortex, temporal cortex, thalamus, hypothalamus, substantia nigra, hippocampus DG, hippocampus CA1, hippocampus CA3, cerebellum, and any combination thereof. 73. The engineered AAV VP capsid polypeptide of any one of embodiments 71-72, wherein the higher tissue tropism is a 1.0005-fold to about a 1000-fold increased accumulation in the adrenal gland tissue as compared to a non-adrenal gland tissue. 74. The engineered AAV VP capsid polypeptide of embodiment 73, wherein the higher tissue tropism is at least about a 1.0005-fold, at least about a two-fold, at least about a three-fold, at least about a four-fold, at least about a five-fold, at least about a ten-fold, at least about a twenty-fold, at least about a 50-fold, at least about a 75-fold, at least about a 100-fold, or at least about a 1000-fold increased accumulation in the adrenal gland tissue as compared to a non-adrenal gland tissue.

[0548] Series F Embodiments—Bone Marrow Tropic Capsids

1. An engineered adeno-associated virus (AAV) viral protein (VP) capsid polypeptide having an amino acid sequence at least 70% identical to SEQ ID NO: 1,

[0549] wherein the engineered AAV VP capsid polypeptide has at least one mutation as compared to SEQ ID NO: 1 in the region from a residue corresponding to residue 581 of SEQ ID NO: 1 to a residue corresponding to residue 589 of SEQ ID NO: 1, inclusive,

[0550] wherein the engineered AAV VP capsid polypeptide is capable of assembling into a recombinant AAV virion (rAAV),

[0551] wherein the at least one mutation confers higher tropism for a bone marrow tissue on the rAAV as compared to an rAAV virion having a wildtype AAV5 VP capsid polypeptide of SEQ ID NO: 1, and

[0552] wherein the engineered AAV VP capsid polypeptide does not have the sequence of any of SEQ ID NO: 3, SEQ ID NO: 4, SEQ ID NO: 5, SEQ ID NO: 6, SEQ ID NO: 7, and SEQ ID NO: 8. 2. The engineered AAV VP capsid polypeptide of embodiment 1, wherein the engineered AAV VP capsid polypeptide has a sequence of SEQ ID NO: 2 and wherein Xaa1, Xaa2, Xaa3, Xaa4, Xaa5, Xaa6, Xaa7, Xaa8, and Xaa9 are each independently selected from any amino acid. 3. An engineered adeno-associated virus (AAV) viral protein (VP) capsid polypeptide having an amino acid sequence of SEQ ID NO: 2,

[0553] wherein amino acid residues Xaa1, Xaa2, Xaa3, Xaa4, Xaa5, Xaa6, Xaa7, Xaa8, and Xaa9 are each independently selected from A, R, N, D, C, E, Q, G, H, I, L, K, M, F, P, S, T, W, Y, and V,

[0554] wherein the engineered AAV VP capsid polypeptide is capable of assembling into a recombinant AAV virion (rAAV), and

[0555] wherein the engineered AAV VP capsid polypeptide does not have the sequence of any of SEQ ID NO: 1, SEQ ID NO: 3, SEQ ID NO: 4, SEQ ID NO: 5, SEQ ID NO: 6, SEQ ID NO: 7, and SEQ ID NO: 8. 4. The engineered AAV VP capsid polypeptide of embodiment 3, wherein the rAAV has higher tropism for a bone marrow tissue as compared to an rAAV virion having a wildtype AAV5 VP capsid polypeptide of SEQ ID NO: 1. 5. The engineered AAV VP capsid polypeptide of embodiment 1, wherein the region from the residue corresponding to residue 581 to the residue corresponding to residue 589, inclusive, has a sequence that is at least 70%, at least 75%, at least 80%, at least 85%, at least 90%, at least 92%, at least 95%, at least 97%, or at least 99% identical to any one of SEQ ID NO: 4118-SEQ ID NO: 7117. 6. The engineered AAV VP capsid polypeptide of embodiment 5, wherein the region from the residue corresponding to residue 581 to the residue corresponding to residue 589, inclusive, has a sequence of any one of SEQ ID NO: 4118-SEQ ID NO: 7117. 7. The engineered AAV VP capsid polypeptide of any one of embodiments 2-4, wherein the Xaa1 to Xaa9 region of SEQ ID NO: 2 has a sequence that is at least 70%, at least 75%, at least 80%, at least 85%, at least 90%, at least 92%, at least 95%, at least 97%, at least 98%, or at least 99% identical to any one of SEQ ID NO: 4118-SEQ ID NO: 7117. 8. The engineered AAV VP capsid polypeptide of embodiment 7, wherein the Xaa1 to Xaa9 region of SEQ ID NO: 2 has a sequence of any one of SEQ ID NO: 4118-SEQ ID NO: 7117. 9. The engineered AAV VP capsid polypeptide of any one of embodiments 2-4, wherein:

[0556] Xaa1 is selected from the group consisting of A, E, G, Q, S, and T; or

[0557] Xaa2 is selected from the group consisting of A, I, Q, S, T, V, and Y; or

[0558] Xaa3 is selected from the group consisting of A, G, I, M, Q, S, and T; or

[0559] Xaa4 is selected from the group consisting of A, E, P, Q, T, and V; or

[0560] Xaa5 is selected from the group consisting of F, I, L, M, Q, V, and Y; or

[0561] Xaa6 is selected from the group consisting of F, I, N, Q, S, and V; or

[0562] Xaa7 is selected from the group consisting of A, C, M, S, and V; or

[0563] Xaa8 is selected from the group consisting of A, C, D, G, M, S, and Y; or

[0564] Xaa9 is selected from the group consisting of D, E, G, L, P, S, and Y; or

any combination thereof. 10. The engineered AAV VP capsid polypeptide of embodiment 9, wherein Xaa1 is selected from A, E. and T. 11. The engineered AAV VP capsid polypeptide of embodiment 9, wherein Xaa1 is E. 12. The engineered AAV VP capsid polypeptide of embodiment 9, wherein Xaa2 is selected from A, S, and T. 13. The engineered AAV VP capsid polypeptide of embodiment 9, wherein Xaa2 is A. 14. The engineered AAV VP capsid polypeptide of embodiment 9, wherein Xaa3 is selected from A, Q, and T. 15. The engineered AAV VP capsid polypeptide of embodiment 9, wherein Xaa3 is Q. 16. The engineered AAV VP capsid polypeptide of embodiment 9, wherein Xaa4 is selected from A, P, and Q. 17. The engineered AAV VP capsid polypeptide of embodiment 9, wherein Xaa4 is Q. 18. The engineered AAV VP capsid polypeptide of embodiment 9, wherein Xaa5 is selected from F, V, and Y. 19. The engineered AAV VP capsid polypeptide of embodiment 9, wherein Xaa5 is V. 20. The engineered AAV VP capsid polypeptide of embodiment 9, wherein Xaa6 is selected from I, N, Q, and S. 21. The engineered AAV VP capsid polypeptide of embodiment 9, wherein Xaa6 is S. 22. The engineered AAV VP capsid polypeptide of embodiment 9, wherein Xaa7 is A, C, and V. 23. The engineered AAV VP capsid polypeptide of embodiment 9, wherein Xaa7 is C. 24. The engineered AAV VP capsid polypeptide of embodiment 9, wherein Xaa8 is selected from A, M, S, and Y. 25. The engineered AAV VP capsid polypeptide of embodiment 9, wherein Xaa8 is M. 26. The engineered AAV VP capsid poly peptide of embodiment 9, wherein Xaa9 is selected from D, E, and P. 27. The engineered AAV VP capsid polypeptide of embodiment 9, wherein Xaa9 is P. 28. The engineered AAV VP capsid polypeptide of any one of embodiments 1-27, wherein the region from the residue corresponding to residue 581 to the residue corresponding to residue 589, inclusive, has a sequence that is at least 70%, at least 75%, at least 80%, at least 85%, at least 90%, at least 92%, at least 95%, at least 97%, or at least 99% identical to any one of SEQ ID NO: 4118-SEQ ID NO: 5117. 29. The engineered AAV VP capsid polypeptide of embodiment 28, wherein the region from residue 581 to residue 589 of SEQ ID NO: 1 has a sequence of any one of SEQ ID NO: 4118-SEQ ID NO: 5117. 30. The engineered AAV VP capsid polypeptide of any one of embodiments 2-4, wherein Xaa1 has high hydropathy. 31. The engineered AAV VP capsid polypeptide of embodiment 30, wherein Xaa1 is selected from V, I, and L. 32. The engineered AAV VP capsid polypeptide of any one of embodiments 2-4, wherein Xaa1 has low mutability. 33. The engineered AAV VP capsid polypeptide of embodiment 32, wherein Xaa1 is selected from Y, L, F, and C. 34. The engineered AAV VP capsid poly peptide of any one of embodiments 2-4, wherein Xaa2 has low hydropathy. 35. The engineered AAV VP capsid polypeptide of embodiment 34, wherein Xaa2 is selected from Y and W. 36. The engineered AAV VP capsid polypeptide of any one of embodiments 2-4, wherein Xaa2 has high mol mass. 37. The engineered AAV VP capsid polypeptide of embodiment 36, wherein Xaa2 is W. 38. The engineered AAV VP capsid polypeptide of any one of embodiments 2-4, wherein Xaa2 has low surface accessibility. 39. The engineered AAV VP capsid polypeptide of embodiment 38, wherein Xaa2 is selected from W and A. 40. The engineered AAV VP capsid polypeptide of any one of embodiments 2-4, wherein Xaa2 has low hydrophilicity. 41. The engineered AAV VP capsid polypeptide of embodiment 40, wherein Xaa2 is W. 42. The engineered AAV VP capsid polypeptide of any one of embodiments 2-4, wherein Xaa2 has low mutability. 43. The engineered AAV VP capsid polypeptide of embodiment 42, wherein Xaa2 is C. 44. The engineered AAV VP capsid polypeptide of any one of embodiments 2-4, wherein Xaa2 has low average flexibility. 45. The engineered AAV VP capsid polypeptide of embodiment 44, wherein Xaa2 is selected from W, M, and F. 46. The engineered AAV VP capsid polypeptide of any one of embodiments 2-4, wherein Xaa5 has low average flexibility. 47. The engineered AAV VP capsid polypeptide of embodiment 46, wherein Xaa5 is selected from W, M, and F. 48. The engineered AAV VP capsid polypeptide of any one of embodiments 2-4, wherein Xaa6 has low average flexibility. 49. The engineered AAV VP capsid polypeptide of embodiment 48, wherein Xaa6 is selected from W, M, and F. 50. The engineered AAV VP capsid polypeptide of any one of embodiments 2-4, wherein Xaa6 has low mutability. 51. The engineered AAV VP capsid polypeptide of embodiment 50, wherein Xaa6 is selected from Y, F, L, and C. 52. The engineered AAV VP capsid polypeptide of any one of embodiments 2-4, wherein Xaa6 has high solubility. 53. The engineered AAV VP capsid polypeptide of embodiment 52, wherein Xaa6 is selected from W, F, I, and L. 54. The engineered AAV VP capsid polypeptide of any one of embodiments 2-4, wherein Xaa7 has low surface accessibility. 55. The engineered AAV VP capsid polypeptide of embodiment 54, wherein Xaa7 is C. 56. The engineered AAV VP capsid polypeptide of any one of embodiments 2-4, wherein Xaa7 has high surface accessibility. 57. The engineered AAV VP capsid polypeptide of embodiment 56, wherein Xaa7 is selected from D and N.
58. The engineered AAV VP capsid polypeptide of any one of embodiments 2-4, wherein Xaa7 has low mutability.
59. The engineered AAV VP capsid polypeptide of embodiment 58, wherein Xaa7 is C.
60. The engineered AAV VP capsid polypeptide of any one of embodiments 2-4, wherein Xaa7 has high solubility.
61. The engineered AAV VP capsid polypeptide of embodiment 60, wherein Xaa7 is C.
62. The engineered AAV VP capsid polypeptide of any one of embodiments 2-4, wherein Xaa7 has low solubility.
63. The engineered AAV VP capsid polypeptide of embodiment X, wherein Xaa7 is D.
64. The engineered AAV VP capsid polypeptide of any one of embodiments 2-4, wherein Xaa8 has low charge.
65. The engineered AAV VP capsid polypeptide of embodiment 64, wherein Xaa8 is selected from D and E.
66. The engineered AAV VP capsid polypeptide of any one of embodiments 2-4, wherein Xaa8 has high mutability.
67. The engineered AAV VP capsid polypeptide of embodiment 66, wherein Xaa8 is selected from D, E. A, and T.
68. The engineered AAV VP capsid polypeptide of any one of embodiments 2-4, wherein Xaa9 has high mol mass.
69. The engineered AAV VP capsid polypeptide of embodiment 68, wherein Xaa9 is selected from H and F.
70. The engineered AAV VP capsid polypeptide of any one of embodiments 2-4, wherein Xaa9 has low mutability.
71. The engineered AAV VP capsid polypeptide of embodiment X, wherein Xaa9 is selected from Y, F, and L.
72. The engineered AAV VP capsid polypeptide of any one of embodiments 1-71, wherein the region from the residue corresponding to residue 581 to the residue corresponding to residue 589 inclusive has a sequence having at least 70%, at least 75%, at least 80%, at least 85%, at least 90%, at least 92%, at least 95%, at least 97%, or at least 99% identical to any one of SEQ ID NO: 5118-SEQ ID NO: 6117.
73. The engineered AAV VP capsid polypeptide of embodiment 72, wherein the region from the residue corresponding to residue 581 to the residue corresponding to residue 589 inclusive has a sequence of any one of SEQ ID NO: 5118-SEQ ID NO: 6117.
74. The engineered AAV VP capsid polypeptide of any one of embodiments 1-73, wherein tropism for bone marrow tissue is measured as a relative accumulation of the rAAV virion in a bone marrow tissue as compared to a non-bone marrow tissue, wherein the non-bone marrow tissue consists collectively of CNS, liver, skeletal muscle, heart, lung, spleen, lymph node, mammary gland, skin, adrenal gland, thyroid, colon, sciatic nerve, and spinal cord.
75. The engineered AAV VP capsid polypeptide of embodiment 74, wherein the CNS tissue is selected from forebrain cortex, occipital cortex, temporal cortex, thalamus, hypothalamus, substantia nigra, hippocampus DG, hippocampus CA1, hippocampus CA3, cerebellum, and any combination thereof.
76. The engineered AAV VP capsid polypeptide of any one of embodiments 74-75, wherein the higher tissue tropism is a 1.0005-fold to about a 1000-fold increased accumulation in the bone marrow tissue as compared to a non-bone marrow tissue.
77. The engineered AAV VP capsid polypeptide of embodiment 76, wherein the higher tissue tropism is at least about a 1.0005-fold, at least about a two-fold, at least about a three-fold, at least about a four-fold, at least about a five-fold, at least about a ten-fold, at least about a twenty-fold, at least about a 50-fold, at least about a 75-fold, at least about a 100-fold, or at least about a 1000-fold increased accumulation in the bone marrow tissue as compared to a non-bone marrow tissue.

[0565] Series G Embodiments—Colon Tropic Capsids

1. An engineered adeno-associated virus (AAV) viral protein (VP) capsid polypeptide having an amino acid sequence at least 70% identical to SEQ ID NO: 1,

[0566] wherein the engineered AAV VP capsid polypeptide has at least one mutation as compared to SEQ ID NO: 1 in the region from a residue corresponding to residue 581 of SEQ ID NO: 1 to a residue corresponding to residue 589 of SEQ ID NO: 1, inclusive,

[0567] wherein the engineered AAV VP capsid polypeptide is capable of assembling into a recombinant AAV virion (rAAV),

[0568] wherein the at least one mutation confers higher tropism for a colon tissue on the rAAV as compared to an rAAV virion having a wildtype AAV5 VP capsid polypeptide of SEQ ID NO: 1, and

[0569] wherein the engineered AAV VP capsid polypeptide does not have the sequence of any of SEQ ID NO: 3, SEQ ID NO: 4, SEQ ID NO: 5, SEQ ID NO: 6, SEQ ID NO: 7, and SEQ ID NO: 8. 2. The engineered AAV VP capsid polypeptide of embodiment 1, wherein the engineered AAV VP capsid polypeptide has a sequence of SEQ ID NO: 2 and wherein Xaa1, Xaa2, Xaa3, Xaa4, Xaa5, Xaa6, Xaa7, Xaa8, and Xaa9 are each independently selected from any amino acid. 3. An engineered adeno-associated virus (AAV) viral protein (VP) capsid polypeptide having an amino acid sequence of SEQ ID NO: 2,

[0570] wherein amino acid residues Xaa1, Xaa2, Xaa3, Xaa4, Xaa5, Xaa6, Xaa7, Xaa8, and Xaa9 are each independently selected from A, R, N, D, C, E, Q, G, H, I, L, K, M, F, P, S, T, W, Y, and V,

[0571] wherein the engineered AAV VP capsid polypeptide is capable of assembling into a recombinant AAV virion (rAAV), and

[0572] wherein the engineered AAV VP capsid polypeptide does not have the sequence of any of SEQ ID NO: 1, SEQ ID NO: 3, SEQ ID NO: 4, SEQ ID NO: 5, SEQ ID NO: 6, SEQ ID NO: 7, and SEQ ID NO: 8. 4. The engineered AAV VP capsid polypeptide of embodiment 3, wherein the rAAV has higher tropism for a colon tissue as compared to an rAAV virion having a wildtype AAV5 VP capsid polypeptide of SEQ ID NO: 1.

5. The engineered AAV VP capsid polypeptide of embodiment 1, wherein the region from the residue corresponding to residue 581 to the residue corresponding to residue 589, inclusive, has a sequence that is at least 70%, at least 75%, at least 80%, at least 85%, at least 90%, at least 92%, at least 95%, at least 97%, or at least 99% identical to any one of SEQ ID NO: 10118-SEQ ID NO: 13117.
6. The engineered AAV VP capsid polypeptide of embodiment 5, wherein the region from the residue corresponding to residue 581 to the residue corresponding to residue 589, inclusive, has a sequence of any one of SEQ ID NO: 10118-SEQ ID NO: 13117.
7. The engineered AAV VP capsid polypeptide of any one of embodiments 2-4, wherein the Xaa1 to Xaa9 region of SEQ ID NO: 2 has a sequence that is at least 70%, at least 75%, at least 80%, at least 85%, at least 90%, at least 92%, at least 95%, at least 97%, or at least 99% identical to any one of SEQ ID NO: 10118-SEQ ID NO: 13117.
8. The engineered AAV VP capsid polypeptide of embodiment 7, wherein the Xaa1 to Xaa9 region of SEQ ID NO: 2 has a sequence of any one of SEQ ID NO: 10118-SEQ ID NO: 13117.
9. The engineered AAV VP capsid polypeptide of any one of embodiments 2-4, wherein:

[0573] Xaa1 is selected from the group consisting of C, F, H, N, P, W, and Y; or

[0574] Xaa2 is selected from the group consisting of D, E, F, L, and P; or

[0575] Xaa3 is selected from the group consisting of C, F, H, I, L, P, and Y; or

[0576] Xaa4 is selected from the group consisting of C, D, E, N, and P; or

[0577] Xaa5 is selected from the group consisting of D, E, G, P, and W; or

[0578] Xaa6 is selected from the group consisting of C, K, R, and V; or

[0579] Xaa7 is selected from the group consisting of D, M, P, and V; or

[0580] Xaa8 is selected from the group consisting of D, I, K, L, P, R, and V; or

[0581] Xaa9 is selected from the group consisting of C, H, I, K, L, M, and W; or

[0582] any combination thereof.

10. The engineered AAV VP capsid polypeptide of embodiment 9, wherein Xaa1 is selected from F, P, and W.
11. The engineered AAV VP capsid polypeptide of embodiment 9, wherein Xaa1 is P.
12. The engineered AAV VP capsid polypeptide of embodiment 9, wherein Xaa2 is selected from D, E, L, and P.
13. The engineered AAV VP capsid polypeptide of embodiment 9, wherein Xaa2 is P.
14. The engineered AAV VP capsid polypeptide of embodiment 9, wherein Xaa3 is selected from C, H, and P.
15. The engineered AAV VP capsid polypeptide of embodiment 9, wherein Xaa3 is P.
16. The engineered AAV VP capsid polypeptide of embodiment 9, wherein Xaa4 is selected from C, D, and E.
17. The engineered AAV VP capsid polypeptide of embodiment 9, wherein Xaa4 is C.
18. The engineered AAV VP capsid polypeptide of embodiment 9, wherein Xaa5 is selected from G, P, and W.
19. The engineered AAV VP capsid polypeptide of embodiment 9, wherein Xaa5 is P.
20. The engineered AAV VP capsid polypeptide of embodiment 9, wherein Xaa6 is selected from K and R.
21. The engineered AAV VP capsid polypeptide of embodiment 9, wherein Xaa6 is R.
22. The engineered AAV VP capsid polypeptide of embodiment 9, wherein Xaa7 is P.
23. The engineered AAV VP capsid polypeptide of embodiment 9, wherein Xaa8 is selected from K, P, and R.
24. The engineered AAV VP capsid polypeptide of embodiment 9, wherein Xaa8 is P.
25. The engineered AAV VP capsid polypeptide of embodiment 9, wherein Xaa9 is selected from I, L, and M.
26. The engineered AAV VP capsid polypeptide of embodiment 9, wherein Xaa9 is I.
27. The engineered AAV VP capsid polypeptide of any one of embodiments 1-26, wherein the region from the residue corresponding to residue 581 to the residue corresponding to residue 589, inclusive, has a sequence that is at least 70%, at least 75%, at least 80%, at least 85%, at least 90%, at least 92%, at least 95%, at least 97%, or at least 99% identical to any one of SEQ ID NO: 10118-SEQ ID NO: 11117.
28. The engineered AAV VP capsid polypeptide of embodiment 27, wherein the region from residue 581 to residue 589 of SEQ ID NO: 1 has a sequence of any one of SEQ ID NO. 10118-SEQ ID NO: 11117.
29. The engineered AAV VP capsid polypeptide of any one of embodiments 2-4, wherein Xaa1 has High mol mass.
30. The engineered AAV VP capsid polypeptide of embodiment 29, wherein Xaa1 is selected from Y, W.
31. The engineered AAV VP capsid polypeptide of any one of embodiments 2-4, wherein Xaa1 has High solubility.
32. The engineered AAV VP capsid polypeptide of embodiment 31, wherein Xaa1 is selected from W, F, I, and L.
33. The engineered AAV VP capsid polypeptide of any one of embodiments 2-4, wherein Xaa2 has Low solubility.
34. The engineered AAV VP capsid polypeptide of embodiment 33, wherein Xaa2 is D.
35. The engineered AAV VP capsid polypeptide of any one of embodiments 2-4, wherein Xaa2 has Low mutability.
36. The engineered AAV VP capsid polypeptide of embodiment 35, wherein Xaa2 is selected from P and K.
37. The engineered AAV VP capsid polypeptide of any one of embodiments 2-4, wherein Xaa2 has Medium mol mass.
38. The engineered AAV VP capsid polypeptide of embodiment 37, wherein Xaa2 is selected from D, E, N, K, M, Q, I, and L.
39. The engineered AAV VP capsid polypeptide of any one of embodiments 2-4, wherein Xaa2 has Low hydropathy.
40. The engineered AAV VP capsid polypeptide of embodiment 39, wherein Xaa2 is selected from D, E, R, K, H, N, and Q.
41. The engineered AAV VP capsid polypeptide of any one of embodiments 2-4, wherein Xaa3 has Low mutability.
42. The engineered AAV VP capsid polypeptide of embodiment 41, wherein Xaa3 is selected from K, V, P, and C.
43. The engineered AAV VP capsid polypeptide of any one of embodiments 2-4, wherein Xaa3 has High solubility.
44. The engineered AAV VP capsid polypeptide of embodiment 43, wherein Xaa3 is selected from W, F, I, and L.
45. The engineered AAV VP capsid polypeptide of any one of embodiments 2-4, wherein Xaa5 has High average flexibility.
46. The engineered AAV VP capsid polypeptide of embodiment 45, wherein Xaa5 is selected from S, P, G, R, E, and D.
47. The engineered AAV VP capsid polypeptide of any one of embodiments 2-4, wherein Xaa5 has High surface accessibility.
48. The engineered AAV VP capsid polypeptide of embodiment 47, wherein Xaa5 is selected from D and N.
49. The engineered AAV VP capsid polypeptide of any one of embodiments 2-4, wherein Xaa6 has Low hydropathy.
50. The engineered AAV VP capsid polypeptide of embodiment 49, wherein Xaa6 is selected from R.
51. The engineered AAV VP capsid polypeptide of any one of embodiments 2-4, wherein Xaa6 has Low mutability.
52. The engineered AAV VP capsid polypeptide of embodiment 51, wherein Xaa6 is selected from Y, R, F, and L.
53. The engineered AAV VP capsid polypeptide of any one of embodiments 2-4, wherein Xaa6 has Low solubility.
54. The engineered AAV VP capsid polypeptide of embodiment 53, wherein Xaa6 is selected from R and Q.
55. The engineered AAV VP capsid polypeptide of any one of embodiments 2-4, wherein Xaa6 has High surface accessibility.
56. The engineered AAV VP capsid polypeptide of embodiment 55, wherein Xaa6 is selected from E, R, K.
57. The engineered AAV VP capsid polypeptide of any one of embodiments 2-4, wherein Xaa6 has High average flexibility.
58. The engineered AAV VP capsid polypeptide of embodiment 57, wherein Xaa6 is selected from G and R.
59. The engineered AAV VP capsid polypeptide of any one of embodiments 2-4, wherein Xaa8 has Low solubility.
60. The engineered AAV VP capsid polypeptide of embodiment 59, wherein Xaa8 is D.
61. The engineered AAV VP capsid polypeptide of any one of embodiments 1-60, wherein the region from the residue corresponding to residue 581 to the residue corresponding to residue 589 inclusive has a sequence having at least 70%, at least 75%, at least 80%, at least 85%, at least 90%, at least 92%, at least 95%, at least 97%, or at least 99% identical to any one of SEQ ID NO: 11118-SEQ ID NO: 12117.
62. The engineered AAV VP capsid polypeptide of embodiment 61, wherein the region from the residue corresponding to residue 581 to the residue corresponding to residue 589 inclusive has a sequence of any one of SEQ ID NO: 11118-SEQ ID NO: 12117.
63. The engineered AAV VP capsid polypeptide of any one of embodiments 1-62, wherein tropism for colon tissue is measured as a relative accumulation of the rAAV virion in a colon tissue as compared to a non-colon tissue, wherein the non-colon tissue consists collectively of CNS, liver, skeletal muscle, heart, lung, spleen, lymph node, bone marrow, mammary gland, skin, adrenal gland, thyroid, sciatic nerve, and spinal cord.
64. The engineered AAV VP capsid polypeptide of embodiment 63, wherein the CNS tissue is selected from forebrain cortex, occipital cortex, temporal cortex, thalamus, hypothalamus, substantia nigra, hippocampus DG, hippocampus CA1, hippocampus CA3, cerebellum, and any combination thereof.
65. The engineered AAV VP capsid polypeptide of any one of embodiments 63-64, wherein the higher tissue tropism is a 1.0005-fold to about a 1000-fold increased accumulation in the colon tissue as compared to a non-colon tissue.
66. The engineered AAV VP capsid polypeptide of embodiment 65, wherein the higher tissue tropism is at least about a 1.0005-fold, at least about a two-fold, at least about a three-fold, at least about a four-fold, at least about a five-fold, at least about a ten-fold, at least about a twenty-fold, at least about a 50-fold, at least about a 75-fold, at least about a 100-fold, or at least about a 1000-fold increased accumulation in the colon tissue as compared to a non-colon tissue.

[0583] Series H Embodiments—Heart Tropic Capsids

1. An engineered adeno-associated virus (AAV) viral protein (VP) capsid polypeptide having an amino acid sequence at least 70% identical to SEQ ID NO: 1,

[0584] wherein the engineered AAV VP capsid polypeptide has at least one mutation as compared to SEQ ID NO: 1 in the region from a residue corresponding to residue 581 of SEQ ID NO: 1 to a residue corresponding to residue 589 of SEQ ID NO: 1, inclusive,

[0585] wherein the engineered AAV VP capsid polypeptide is capable of assembling into a recombinant AAV virion (rAAV),

[0586] wherein the at least one mutation confers higher tropism for a heart tissue on the rAAV as compared to an rAAV virion having a wildtype AAV5 VP capsid polypeptide of SEQ ID NO: 1, and

[0587] wherein the engineered AAV VP capsid polypeptide does not have the sequence of any of SEQ ID NO: 3, SEQ ID NO: 4, SEQ ID NO: 5, SEQ ID NO: 6, SEQ ID NO: 7, and SEQ ID NO: 8. 2. The engineered AAV VP capsid polypeptide of embodiment 1, wherein the engineered AAV VP capsid polypeptide has a sequence of SEQ ID NO: 2 and wherein Xaa1, Xaa2, Xaa3, Xaa4, Xaa5, Xaa6, Xaa7, Xaa8, and Xaa9 are each independently selected from any amino acid. 3. An engineered adeno-associated virus (AAV) viral protein (VP) capsid polypeptide having an amino acid sequence of SEQ ID NO: 2,

[0588] wherein amino acid residues Xaa1, Xaa2, Xaa3, Xaa4, Xaa5, Xaa6, Xaa7, Xaa8, and Xaa9 are each independently selected from A, R, N, D, C, E, Q, G, H, I, L, K, M, F, P, S, T, W, Y, and V,

[0589] wherein the engineered AAV VP capsid polypeptide is capable of assembling into a recombinant AAV virion (rAAV), and

[0590] wherein the engineered AAV VP capsid polypeptide does not have the sequence of any of SEQ ID NO: 1, SEQ ID NO: 3, SEQ ID NO: 4, SEQ ID NO: 5, SEQ ID NO: 6, SEQ ID NO: 7, and SEQ ID NO: 8. 4. The engineered AAV VP capsid polypeptide of embodiment 3, wherein the rAAV has higher tropism for a heart tissue as compared to an rAAV virion having a wildtype AAV5 VP capsid polypeptide of SEQ ID NO: 1.

5. The engineered AAV VP capsid polypeptide of embodiment 1, wherein the region from the residue corresponding to residue 581 to the residue corresponding to residue 589, inclusive, has a sequence that is at least 70%, at least 75%, at least 80%, at least 85%, at least 90%, at least 92%, at least 95%, at least 97%, or at least 99% identical to any one of SEQ ID NO: 13118-SEQ ID NO: 16117.
6. The engineered AAV VP capsid polypeptide of embodiment 5, wherein the region from the residue corresponding to residue 581 to the residue corresponding to residue 589, inclusive, has a sequence of any one of SEQ ID NO: 13118-SEQ ID NO: 16117.
7. The engineered AAV VP capsid polypeptide of any one of embodiments 2-4, wherein the Xaa1 to Xaa9 region of SEQ ID NO: 2 has a sequence that is at least 70%, at least 75%, at least 80%, at least 85%, at least 90%, at least 92%, at least 95%, at least 97%, or at least 99% identical to any one of SEQ ID NO: 13118-SEQ ID NO: 16117.
8. The engineered AAV VP capsid polypeptide of embodiment 7, wherein the Xaa1 to Xaa9 region of SEQ ID NO: 2 has a sequence of any one of SEQ ID NO: 13118-SEQ ID NO: 16117.
9. The engineered AAV VP capsid polypeptide of any one of embodiments 2-4, wherein:
Xaa1 is selected from the group consisting of I, K, L, M, T, and V; or
Xaa2 is selected from the group consisting of A, C, G, I, K, and S; or
Xaa3 is selected from the group consisting of A, D, E, G, K, M, and V; or
Xaa4 is selected from the group consisting of F, H, R, T, W, and Y; or
Xaa5 is selected from the group consisting of F, L, M, and R; or
Xaa6 is selected from the group consisting of A, H, N, W, and Y; or
Xaa7 is selected from the group consisting of A, C, E, F, K, and T; or
Xaa8 is selected from the group consisting of A, C, M, S, and T; or
Xaa9 is selected from the group consisting of A, D, G, and P; or
any combination thereof.
10. The engineered AAV VP capsid polypeptide of embodiment 9, wherein Xaa1 is selected from K and L.
11. The engineered AAV VP capsid polypeptide of embodiment 9, wherein Xaa1 is K.
12. The engineered AAV VP capsid polypeptide of embodiment 9, wherein Xaa2 is selected from A, C, and S.
13. The engineered AAV VP capsid polypeptide of embodiment 9, wherein Xaa2 is A.
14. The engineered AAV VP capsid polypeptide of embodiment 9, wherein Xaa3 is selected from E and V.
15. The engineered AAV VP capsid polypeptide of embodiment 9, wherein Xaa3 is E.
16. The engineered AAV VP capsid polypeptide of embodiment 9, wherein Xaa4 is selected from F, R, and T.
17. The engineered AAV VP capsid polypeptide of embodiment 9, wherein Xaa4 is R.
18. The engineered AAV VP capsid polypeptide of embodiment 9, wherein Xaa5 is L.
19. The engineered AAV VP capsid polypeptide of embodiment 9, wherein Xaa6 is selected from H, N, and Y.
20. The engineered AAV VP capsid polypeptide of embodiment 9, wherein Xaa6 is H.
21. The engineered AAV VP capsid polypeptide of embodiment 9, wherein Xaa7 is selected from C, F, and T.
22. The engineered AAV VP capsid polypeptide of embodiment 9, wherein Xaa7 is F.
23. The engineered AAV VP capsid polypeptide of embodiment 9, wherein Xaa8 is selected from C, M, and S.
24. The engineered AAV VP capsid polypeptide of embodiment 9, wherein Xaa8 is C.
25. The engineered AAV VP capsid polypeptide of embodiment 9, wherein Xaa9 is selected from A and G.
26. The engineered AAV VP capsid polypeptide of embodiment 9, wherein Xaa9 is A.
27. The engineered AAV VP capsid polypeptide of any one of embodiments 1-26, wherein the region from the residue corresponding to residue 581 to the residue corresponding to residue 589, inclusive, has a sequence that is at least 70%, at least 75%, at least 80%, at least 85%, at least 90%, at least 92%, at least 95%, at least 97%, or at least 99% identical to any one of SEQ ID NO: 13118-SEQ ID NO: 14117.
28. The engineered AAV VP capsid polypeptide of embodiment 27, wherein the region from residue 581 to residue 589 of SEQ ID NO: 1 has a sequence of any one of SEQ ID NO: 13118-SEQ ID NO: 14117.
29. The engineered AAV VP capsid polypeptide of any one of embodiments 2-4, wherein Xaa1 has low solubility.
30. The engineered AAV VP capsid polypeptide of embodiment 29, wherein Xaa1 is selected from N and E.
31. The engineered AAV VP capsid polypeptide of any one of embodiments 2-4, wherein Xaa1 has low hydropathy.
32. The engineered AAV VP capsid polypeptide of embodiment 31, wherein Xaa1 is selected from H, N, Q, P, Y, D, and E.
33. The engineered AAV VP capsid polypeptide of any one of embodiments 2-4, wherein Xaa1 has high mutability.
34. The engineered AAV VP capsid polypeptide of embodiment 33, wherein Xaa1 is selected from A and E.
35. The engineered AAV VP capsid polypeptide of any one of embodiments 2-4, wherein Xaa2 has high hydropathy.
36. The engineered AAV VP capsid polypeptide of embodiment 35, wherein Xaa2 is selected from V and I.
37. The engineered AAV VP capsid polypeptide of any one of embodiments 2-4, wherein Xaa2 has medium mutability.
38. The engineered AAV VP capsid polypeptide of embodiment 37, wherein Xaa2 is V.
39. The engineered AAV VP capsid polypeptide of any one of embodiments 2-4, wherein Xaa2 has medium volume.
40. The engineered AAV VP capsid polypeptide of embodiment 39, wherein Xaa2 is selected from V, E, and Q.
41. The engineered AAV VP capsid polypeptide of any one of embodiments 2-4, wherein Xaa2 has high solubility.
42. The engineered AAV VP capsid polypeptide of embodiment 41, wherein Xaa2 is selected from V and M.
43. The engineered AAV VP capsid polypeptide of any one of embodiments 2-4, wherein Xaa3 has low solubility.
44. The engineered AAV VP capsid polypeptide of embodiment 43, wherein Xaa3 is selected from R and Q.
45. The engineered AAV VP capsid polypeptide of any one of embodiments 2-4, wherein Xaa4 has low surface accessibility.
46. The engineered AAV VP capsid polypeptide of embodiment 45, wherein Xaa4 is C.
47. The engineered AAV VP capsid polypeptide of any one of embodiments 2-4, wherein Xaa4 has high solubility.
48. The engineered AAV VP capsid polypeptide of embodiment 47, wherein Xaa4 is C.
49. The engineered AAV VP capsid polypeptide of any one of embodiments 2-4, wherein Xaa4 has low charge.
50. The engineered AAV VP capsid polypeptide of embodiment 49, wherein Xaa4 is selected from D, E, Y, W, V, P, M, A, G, F, I, L, N, Q, S, T, and C.
51. The engineered AAV VP capsid polypeptide of any one of embodiments 2-4, wherein Xaa4 has high hydropathy.
52. The engineered AAV VP capsid polypeptide of embodiment 51, wherein Xaa4 is C.
53. The engineered AAV VP capsid polypeptide of any one of embodiments 2-4, wherein Xaa5 has high surface accessibility.
54. The engineered AAV VP capsid polypeptide of embodiment 53, wherein Xaa5 is selected from D, E, R, K, N, and Q.
55. The engineered AAV VP capsid polypeptide of any one of embodiments 2-4, wherein Xaa5 has low solubility.
56. The engineered AAV VP capsid polypeptide of embodiment 55, wherein Xaa5 is D.
57. The engineered AAV VP capsid polypeptide of any one of embodiments 2-4, wherein Xaa6 has low mutability.
58. The engineered AAV VP capsid polypeptide of embodiment 57, wherein Xaa6 is C.
59. The engineered AAV VP capsid polypeptide of any one of embodiments 2-4, wherein Xaa6 has low solubility.
60. The engineered AAV VP capsid polypeptide of embodiment 59, wherein Xaa6 is D.
61. The engineered AAV VP capsid polypeptide of any one of embodiments 2-4, wherein Xaa8 has high surface accessibility.
62. The engineered AAV VP capsid polypeptide of embodiment 61, wherein Xaa8 is selected from D and N.
63. The engineered AAV VP capsid polypeptide of any one of embodiments 2-4, wherein Xaa8 has high average flexibility.
64. The engineered AAV VP capsid polypeptide of embodiment 63, wherein Xaa8 is selected from D, R, P, G, and S.
65. The engineered AAV VP capsid polypeptide of any one of embodiments 2-4, wherein Xaa9 has medium mol mass.
66. The engineered AAV VP capsid polypeptide of embodiment 65, wherein Xaa9 is selected from N, D, L, and I.
67. The engineered AAV VP capsid polypeptide of any one of embodiments 1-66, wherein the region from the residue corresponding to residue 581 to the residue corresponding to residue 589 inclusive has a sequence having at least 70%, at least 75%, at least 80%, at least 85%, at least 900%, at least 92%, at least 95%, at least 97%, or at least 99% identical to any one of SEQ ID NO: 14118-SEQ ID NO: 15117.
68. The engineered AAV VP capsid polypeptide of embodiment 67, wherein the region from the residue corresponding to residue 581 to the residue corresponding to residue 589 inclusive has a sequence of any one of SEQ ID NO: 14118-SEQ ID NO: 15117.
69. The engineered AAV VP capsid polypeptide of any one of embodiments 1-68, wherein tropism for heart tissue is measured as a relative accumulation of the rAAV virion in a heart tissue as compared to a non-heart tissue, wherein the non-heart tissue consists collectively of CNS, liver, skeletal muscle, lung, spleen, lymph node, bone marrow, mammary gland, skin, adrenal gland, thyroid, colon, sciatic nerve, and spinal cord.
70. The engineered AAV VP capsid polypeptide of embodiment 69, wherein the CNS tissue is selected from forebrain cortex, occipital cortex, temporal cortex, thalamus, hypothalamus, substantia nigra, hippocampus DG, hippocampus CA1, hippocampus CA3, cerebellum, and any combination thereof.
71. The engineered AAV VP capsid polypeptide of any one of embodiments 69-70, wherein the higher tissue tropism is a 1.0005-fold to about a 1000-fold increased accumulation in the heart tissue as compared to a non-heart tissue.
72. The engineered AAV VP capsid polypeptide of embodiment 71, wherein the higher tissue tropism is at least about a 1.0005-fold, at least about a two-fold, at least about a three-fold, at least about a four-fold, at least about a five-fold, at least about a ten-fold, at least about a twenty-fold, at least about a 50-fold, at least about a 75-fold, at least about a 100-fold, or at least about a 1000-fold increased accumulation in the heart tissue as compared to a non-heart tissue.

[0591] Series I Embodiments—Lung Tropic Capsids

1. An engineered adeno-associated virus (AAV) viral protein (VP) capsid polypeptide having an amino acid sequence at least 70% identical to SEQ ID NO: 1,

[0592] wherein the engineered AAV VP capsid polypeptide has at least one mutation as compared to SEQ ID NO: 1 in the region from a residue corresponding to residue 581 of SEQ ID NO: 1 to a residue corresponding to residue 589 of SEQ ID NO: 1, inclusive,

[0593] wherein the engineered AAV VP capsid polypeptide is capable of assembling into a recombinant AAV virion (rAAV),

[0594] wherein the at least one mutation confers higher tropism for a lung tissue on the rAAV as compared to an rAAV virion having a wildtype AAV5 VP capsid polypeptide of SEQ ID NO: 1, and

[0595] wherein the engineered AAV VP capsid polypeptide does not have the sequence of any of SEQ ID NO: 3, SEQ ID NO: 4, SEQ ID NO: 5, SEQ ID NO: 6, SEQ ID NO: 7, and SEQ ID NO: 8. 2. The engineered AAV VP capsid polypeptide of embodiment 1, wherein the engineered AAV VP capsid polypeptide has a sequence of SEQ ID NO: 2 and wherein Xaa1, Xaa2, Xaa3, Xaa4, Xaa5, Xaa6, Xaa7, Xaa8, and Xaa9 are each independently selected from any amino acid. 3. An engineered adeno-associated virus (AAV) viral protein (VP) capsid polypeptide having an amino acid sequence of SEQ ID NO: 2,

[0596] wherein amino acid residues Xaa1, Xaa2, Xaa3, Xaa4, Xaa5, Xaa6, Xaa7, Xaa8, and Xaa9 are each independently selected from A, R, N, D, C, E, Q, G, H, I, L, K, M, F, P, S, T, W, Y, and V,

[0597] wherein the engineered AAV VP capsid polypeptide is capable of assembling into a recombinant AAV virion (rAAV), and

[0598] wherein the engineered AAV VP capsid polypeptide does not have the sequence of any of SEQ ID NO: 1, SEQ ID NO: 3, SEQ ID NO: 4, SEQ ID NO: 5, SEQ ID NO: 6, SEQ ID NO: 7, and SEQ ID NO: 8.

4. The engineered AAV VP capsid polypeptide of embodiment 3, wherein the rAAV has higher tropism for a lung tissue as compared to an rAAV virion having a wildtype AAV5 VP capsid polypeptide of SEQ ID NO: 1.
5. The engineered AAV VP capsid polypeptide of embodiment 1, wherein the region from the residue corresponding to residue 581 to the residue corresponding to residue 589, inclusive, has a sequence that is at least 70%, at least 75%, at least 80%, at least 85%, at least 90%, at least 92%, at least 95%, at least 97%, or at least 99% identical to any one of SEQ ID NO: 16118-SEQ ID NO: 19117.
6. The engineered AAV VP capsid poly peptide of embodiment 5, wherein the region from the residue corresponding to residue 581 to the residue corresponding to residue 589, inclusive, has a sequence of any one of SEQ ID NO: 16118-SEQ ID NO: 19117.
7. The engineered AAV VP capsid polypeptide of any one of embodiments 2-4, wherein the Xaa1 to Xaa9 region of SEQ ID NO: 2 has a sequence that is at least 7M/%, at least 75%, at least 80%, at least 85%, at least 90%, at least 92%, at least 95%, at least 97%, or at least 99% identical to any one of SEQ ID NO: 16118-SEQ ID NO: 19117.
8. The engineered AAV VP capsid polypeptide of embodiment 7, wherein the Xaa1 to Xaa9 region of SEQ ID NO: 2 has a sequence of any one of SEQ ID NO: 16118-SEQ ID NO: 19117.
9. The engineered AAV VP capsid polypeptide of any one of embodiments 2-4, wherein:
Xaa1 is selected from the group consisting of A, E, K, M, Q, R, S, and T; or
Xaa2 is selected from the group consisting of A, I, K, S, T, and V; or
Xaa3 is selected from the group consisting of A, E, K, M, Q, R, S, T, and V; or
Xaa4 is selected from the group consisting of M, P, R, S, and T; or
Xaa5 is selected from the group consisting of I, K, L, M, T, V, and Y; or
Xaa6 is selected from the group consisting of D, G, H, M, N, R, and S; or
Xaa7 is selected from the group consisting of A, K, M, Q, and R; or
Xaa8 is selected from the group consisting of A, F, G, S, W, and Y; or
Xaa9 is selected from the group consisting of A, E, G, P, R, and Y; or
any combination thereof.
10. The engineered AAV VP capsid polypeptide of embodiment 9, wherein Xaa1 is selected from A, E, and Q.
11. The engineered AAV VP capsid polypeptide of embodiment 9, wherein Xaa1 is E.
12. The engineered AAV VP capsid polypeptide of embodiment 9, wherein Xaa2 is selected from S, T, and V.
13. The engineered AAV VP capsid polypeptide of embodiment 9, wherein Xaa2 is T.
14. The engineered AAV VP capsid polypeptide of embodiment 9, wherein Xaa3 is selected from A, K, R, and S.
15. The engineered AAV VP capsid polypeptide of embodiment 9, wherein Xaa3 is R.
16. The engineered AAV VP capsid polypeptide of embodiment 9, wherein Xaa4 is selected from P, Q, and T.
17. The engineered AAV VP capsid polypeptide of embodiment 9, wherein Xaa4 is Q.
18. The engineered AAV VP capsid polypeptide of embodiment 9, wherein Xaa5 is selected from L, M, and Y.
19. The engineered AAV VP capsid polypeptide of embodiment 9, wherein Xaa5 is L.
20. The engineered AAV VP capsid polypeptide of embodiment 9, wherein Xaa6 is selected from H and N.
21. The engineered AAV VP capsid polypeptide of embodiment 9, wherein Xaa6 is N.
22. The engineered AAV VP capsid polypeptide of embodiment 9, wherein Xaa7 is selected from A, K and R.
23. The engineered AAV VP capsid polypeptide of embodiment 9, wherein Xaa7 is R.
24. The engineered AAV VP capsid polypeptide of embodiment 9, wherein Xaa8 is selected from A, F, and G.
25. The engineered AAV VP capsid polypeptide of embodiment 9, wherein Xaa8 is F.
26. The engineered AAV VP capsid polypeptide of embodiment 9, wherein Xaa9 is selected from G, P, and R.
27. The engineered AAV VP capsid polypeptide of embodiment 9, wherein Xaa9 is G.
28. The engineered AAV VP capsid polypeptide of any one of embodiments 1-27, wherein the region from the residue corresponding to residue 581 to the residue corresponding to residue 589, inclusive, has a sequence that is at least 70%, at least 75%, at least 80%, at least 85%, at least 90%, at least 92%, at least 95%, at least 97%, or at least 99% identical to any one of SEQ ID NO: 16118-SEQ ID NO: 17117.
29. The engineered AAV VP capsid polypeptide of embodiment 28, wherein the region from residue 581 to residue 589 of SEQ ID NO: 1 has a sequence of any one of SEQ ID NO: 16118-SEQ ID NO: 17117.
30. The engineered AAV VP capsid polypeptide of any one of embodiments 2-4, wherein Xaa1 has high mutability.
31. The engineered AAV VP capsid polypeptide of embodiment 30, wherein Xaa1 is selected from D, E, M, A, I, Q, and T.
32. The engineered AAV VP capsid polypeptide of any one of embodiments 2-4, wherein Xaa2 has high mol mass.
33. The engineered AAV VP capsid polypeptide of embodiment 32, wherein Xaa2 is F.
34. The engineered AAV VP capsid polypeptide of any one of embodiments 2-4, wherein Xaa2 has low mutability.
35. The engineered AAV VP capsid polypeptide of embodiment 34, wherein Xaa2 is selected from Y, F, and L.
36. The engineered AAV VP capsid polypeptide of any one of embodiments 2-4, wherein Xaa3 has low mutability.
37. The engineered AAV VP capsid polypeptide of embodiment 36, wherein Xaa3 is selected from K, V, P, and H.
38. The engineered AAV VP capsid polypeptide of any one of embodiments 2-4, wherein Xaa3 has low hydropathy.
39. The engineered AAV VP capsid polypeptide of embodiment 38, wherein Xaa3 is selected from K and R.
40. The engineered AAV VP capsid polypeptide of any one of embodiments 2-4, wherein Xaa4 has low mutability.
41. The engineered AAV VP capsid polypeptide of embodiment 40, wherein Xaa4 is selected from K and P.
42. The engineered AAV VP capsid polypeptide of any one of embodiments 2-4, wherein Xaa4 has high average flexibility.
43. The engineered AAV VP capsid polypeptide of embodiment 42, wherein Xaa4 is selected from D, E, P, and S.
44. The engineered AAV VP capsid polypeptide of any one of embodiments 2-4, wherein Xaa5 has low average flexibility.
45. The engineered AAV VP capsid polypeptide of embodiment 44, wherein Xaa5 is selected from W, M, and F.
46. The engineered AAV VP capsid polypeptide of any one of embodiments 2-4, wherein Xaa5 has high solubility.
47. The engineered AAV VP capsid polypeptide of embodiment 46, wherein Xaa5 is selected from W, F, I, and L.
48. The engineered AAV VP capsid polypeptide of any one of embodiments 2-4, wherein Xaa6 has medium mutability.
49. The engineered AAV VP capsid polypeptide of embodiment 48, wherein Xaa6 is selected from R, and H.
50. The engineered AAV VP capsid polypeptide of any one of embodiments 2-4, wherein Xaa6 has high surface accessibility.
51. The engineered AAV VP capsid polypeptide of embodiment 50, wherein Xaa6 is selected from T.
52. The engineered AAV VP capsid polypeptide of any one of embodiments 2-4, wherein Xaa7 has low mutability.
53. The engineered AAV VP capsid polypeptide of embodiment 52, wherein Xaa7 is C.
54. The engineered AAV VP capsid polypeptide of any one of embodiments 2-4, wherein Xaa7 has high solubility.
55. The engineered AAV VP capsid polypeptide of embodiment 54, wherein Xaa7 is selected from W, V, M, F, I, and L.
56. The engineered AAV VP capsid polypeptide of any one of embodiments 2-4, wherein Xaa8 has high mutability.
57. The engineered AAV VP capsid polypeptide of embodiment 56, wherein Xaa8 is selected from D, E, M, A, I, Q, and T.
58. The engineered AAV VP capsid polypeptide of any one of embodiments 2-4, wherein Xaa8 has low hydropathy.
59. The engineered AAV VP capsid polypeptide of embodiment 58, wherein Xaa8 is selected from R and K.
60. The engineered AAV VP capsid polypeptide of any one of embodiments 2-4, wherein Xaa9 has high average flexibility.
61. The engineered AAV VP capsid polypeptide of embodiment 60, wherein Xaa9 is selected from R and G.
62. The engineered AAV VP capsid polypeptide of any one of embodiments 1-61, wherein the region from the residue corresponding to residue 581 to the residue corresponding to residue 589 inclusive has a sequence having at least 70%, at least 75%, at least 80%, at least 85%, at least 90%, at least 92%, at least 95%, at least 97%, or at least 99% identical to any one of SEQ ID NO: 17118-SEQ ID NO: 18117.
63. The engineered AAV VP capsid polypeptide of embodiment 62, wherein the region from the residue corresponding to residue 581 to the residue corresponding to residue 589 inclusive has a sequence of any one of SEQ ID NO: 17118-SEQ ID NO: 18117.
64. The engineered AAV VP capsid polypeptide of any one of embodiments 1-63, wherein tropism for lung tissue is measured as a relative accumulation of the rAAV virion in a lung tissue as compared to a non-lung tissue, wherein the non-lung tissue consists collectively of CNS, liver, skeletal muscle, spleen, lymph node, bone marrow, mammary gland, skin, adrenal gland, thyroid, colon, sciatic nerve, and spinal cord.
65. The engineered AAV VP capsid polypeptide of embodiment 64, wherein the CNS tissue is selected from forebrain cortex, occipital cortex, temporal cortex, thalamus, hypothalamus, substantia nigra, hippocampus DG, hippocampus CA1, hippocampus CA3, cerebellum, and any combination thereof.
66. The engineered AAV VP capsid polypeptide of any one of embodiments 64-65, wherein the higher tissue tropism is a 1.0005-fold to about a 1000-fold increased accumulation in the lung tissue as compared to a non-lung tissue.
67. The engineered AAV VP capsid polypeptide of embodiment 66, wherein the higher tissue tropism is at least about a 1.0005-fold, at least about a two-fold, at least about a three-fold, at least about a four-fold, at least about a five-fold, at least about a ten-fold, at least about a twenty-fold, at least about a 50-fold, at least about a 75-fold, at least about a 100-fold, or at least about a 1000-fold increased accumulation in the lung tissue as compared to a non-lung tissue.

[0599] Series J Embodiments—Lymph Node Tropic Capsids

1. An engineered adeno-associated virus (AAV) viral protein (VP) capsid polypeptide having an amino acid sequence at least 70% identical to SEQ ID NO: 1,

[0600] wherein the engineered AAV VP capsid polypeptide has at least one mutation as compared to SEQ ID NO: 1 in the region from a residue corresponding to residue 581 of SEQ ID NO: 1 to a residue corresponding to residue 589 of SEQ ID NO: 1, inclusive,

[0601] wherein the engineered AAV VP capsid polypeptide is capable of assembling into a recombinant AAV virion (rAAV),

[0602] wherein the at least one mutation confers higher tropism for a lymph node tissue on the rAAV as compared to an rAAV virion having a wildtype AAV5 VP capsid polypeptide of SEQ ID NO: 1, and

[0603] wherein the engineered AAV VP capsid polypeptide does not have the sequence of any of SEQ ID NO: 3, SEQ ID NO: 4, SEQ ID NO: 5, SEQ ID NO: 6, SEQ ID NO: 7, and SEQ ID NO: 8. 2. The engineered AAV VP capsid polypeptide of embodiment 1, wherein the engineered AAV VP capsid polypeptide has a sequence of SEQ ID NO: 2 and wherein Xaa1, Xaa2, Xaa3, Xaa4, Xaa5, Xaa6, Xaa7, Xaa8, and Xaa9 are each independently selected from any amino acid. 3. An engineered adeno-associated virus (AAV) viral protein (VP) capsid polypeptide having an amino acid sequence of SEQ ID NO: 2,

[0604] wherein amino acid residues Xaa1, Xaa2, Xaa3, Xaa4, Xaa5, Xaa6, Xaa7, Xaa8, and Xaa9 are each independently selected from A, R, N, D, C, E, Q, G, H, I, L, K, M, F, P, S, T, W, Y, and V,

[0605] wherein the engineered AAV VP capsid polypeptide is capable of assembling into a recombinant AAV virion (rAAV), and

[0606] wherein the engineered AAV VP capsid polypeptide does not have the sequence of any of SEQ ID NO: 1, SEQ ID NO: 3, SEQ ID NO: 4, SEQ ID NO: 5, SEQ ID NO: 6, SEQ ID NO: 7, and SEQ ID NO: 8. 4. The engineered AAV VP capsid polypeptide of embodiment 3, wherein the rAAV has higher tropism for a lymph node tissue as compared to an rAAV virion having a wildtype AAV5 VP capsid polypeptide of SEQ ID NO: 1. 5. The engineered AAV VP capsid polypeptide of embodiment 1, wherein the region from the residue corresponding to residue 581 to the residue corresponding to residue 589, inclusive, has a sequence that is at least 70%, at least 75%, at least 80%, at least 85%, at least 90%, at least 92%, at least 95%, at least 97%, or at least 99% identical to any one of SEQ ID NO: 19118-SEQ ID NO: 22117. 6. The engineered AAV VP capsid polypeptide of embodiment 5, wherein the region from the residue corresponding to residue 581 to the residue corresponding to residue 589, inclusive, has a sequence of any one of SEQ ID NO: 19118-SEQ ID NO: 22117. 7. The engineered AAV VP capsid polypeptide of any one of embodiments 2-4, wherein the Xaa1 to Xaa9 region of SEQ ID NO: 2 has a sequence that is at least 70%, at least 75%, at least 80%, at least 85%, at least 90%, at least 92%, at least 95%, at least 97%, or at least 99% identical to any one of SEQ ID NO: 19118-SEQ ID NO: 22117. 8. The engineered AAV VP capsid polypeptide of embodiment 7, wherein the Xaa1 to Xaa9 region of SEQ ID NO: 2 has a sequence of any one of SEQ ID NO: 19118-SEQ ID NO: 22117. 9. The engineered AAV VP capsid polypeptide of any one of embodiments 2-4, wherein:

[0607] Xaa1 is selected from the group consisting of A, D, E, Q, S, and T; or

[0608] Xaa2 is selected from the group consisting of A, H, I, S, T, and V; or

[0609] Xaa3 is selected from the group consisting of A, E, H, I, T, and V; or

[0610] Xaa4 is selected from the group consisting of A, D, E, and P; or

[0611] Xaa5 is selected from the group consisting of I, L, M, V, and Y; or

[0612] Xaa6 is selected from the group consisting of D, E, I, N, and Q; or

[0613] Xaa7 is selected from the group consisting of A, E, G, Q, and V; or

[0614] Xaa8 is selected from the group consisting of F, G, M, and W; or

[0615] Xaa9 is selected from the group consisting of I, P, T, and Y; or

[0616] any combination thereof.

10. The engineered AAV VP capsid polypeptide of embodiment 9, wherein Xaa1 is selected from D, E, and T.
11. The engineered AAV VP capsid polypeptide of embodiment 9, wherein Xaa1 is E.
12. The engineered AAV VP capsid polypeptide of embodiment 9, wherein Xaa2 is selected from I, T, and V.
13. The engineered AAV VP capsid polypeptide of embodiment 9, wherein Xaa2 is V.
14. The engineered AAV VP capsid polypeptide of embodiment 9, wherein Xaa3 is selected from A, I, T, and V.
15. The engineered AAV VP capsid polypeptide of embodiment 9, wherein Xaa3 is T.
16. The engineered AAV VP capsid polypeptide of embodiment 9, wherein Xaa4 is selected from D and E.
17. The engineered AAV VP capsid polypeptide of embodiment 9, wherein Xaa4 is E.
18. The engineered AAV VP capsid polypeptide of embodiment 9, wherein Xaa5 is selected from I, L, V, and Y.
19. The engineered AAV VP capsid polypeptide of embodiment 9, wherein Xaa5 is L.
20. The engineered AAV VP capsid polypeptide of embodiment 9, wherein Xaa6 is selected from D, E, and I.
21. The engineered AAV VP capsid polypeptide of embodiment 9, wherein Xaa6 is D.
22. The engineered AAV VP capsid polypeptide of embodiment 9, wherein Xaa7 is A, Q, or V.
23. The engineered AAV VP capsid polypeptide of embodiment 9, wherein Xaa7 is V.
24. The engineered AAV VP capsid polypeptide of embodiment 9, wherein Xaa8 is selected from F and W.
25. The engineered AAV VP capsid polypeptide of embodiment 9, wherein Xaa8 is W.
26. The engineered AAV VP capsid polypeptide of embodiment 9, wherein Xaa9 is I or P.
27. The engineered AAV VP capsid polypeptide of any one of embodiments 1-26, wherein the region from the residue corresponding to residue 581 to the residue corresponding to residue 589, inclusive, has a sequence that is at least 70%, at least 75%, at least 80%, at least 85%, at least 90%, at least 92%, at least 95%, at least 97%, or at least 99% identical to any one of SEQ ID NO: 19118-SEQ ID NO: 20117.
28. The engineered AAV VP capsid polypeptide of embodiment 27, wherein the region from residue 581 to residue 589 of SEQ ID NO: 1 has a sequence of any one of SEQ ID NO: 19118-SEQ ID NO: 20117.
29. The engineered AAV VP capsid polypeptide of any one of embodiments 2-4, wherein Xaa1 has high average flexibility.
30. The engineered AAV VP capsid polypeptide of embodiment 29, wherein Xaa1 is selected from D, E, P, G, Q, S, and R.
31. The engineered AAV VP capsid polypeptide of any one of embodiments 2-4, wherein Xaa1 has high hbond donors.
32. The engineered AAV VP capsid poly peptide of embodiment 31, wherein Xaa1 is R.
33. The engineered AAV VP capsid polypeptide of any one of embodiments 2-4, wherein Xaa1 has high mol mass.
34. The engineered AAV VP capsid polypeptide of embodiment 33, wherein Xaa1 is selected from Y, W, R, and F.
35. The engineered AAV VP capsid polypeptide of any one of embodiments 2-4, wherein Xaa2 has low solubility.
36. The engineered AAV VP capsid polypeptide of embodiment 35, wherein Xaa2 is selected from N and E.
37. The engineered AAV VP capsid polypeptide of any one of embodiments 2-4, wherein Xaa3 has low average flexibility.
38. The engineered AAV VP capsid polypeptide of embodiment 37, wherein Xaa3 is selected from W, M, and F.
39. The engineered AAV VP capsid polypeptide of any one of embodiments 2-4, wherein Xaa3 has low mutability.
40. The engineered AAV VP capsid polypeptide of embodiment 39, wherein Xaa3 is selected from R, H, K, P, Y, F, L, and C.
41. The engineered AAV VP capsid polypeptide of any one of embodiments 2-4, wherein Xaa4 has low mutability.
42. The engineered AAV VP capsid polypeptide of embodiment 41, wherein Xaa4 is C.
43. The engineered AAV VP capsid polypeptide of any one of embodiments 2-4, wherein Xaa5 has high mutability.
44. The engineered AAV VP capsid polypeptide of embodiment 43, wherein Xaa5 is N.
45. The engineered AAV VP capsid polypeptide of any one of embodiments 2-4, wherein Xaa5 has medium mol mass.
46. The engineered AAV VP capsid polypeptide of embodiment 45, wherein Xaa5 is selected from D, I, L, and N.
47. The engineered AAV VP capsid polypeptide of any one of embodiments 2-4, wherein Xaa6 has high mol mass.
48. The engineered AAV VP capsid polypeptide of embodiment 47, wherein Xaa6 is selected from Y, W, R, and F.
49. The engineered AAV VP capsid polypeptide of any one of embodiments 2-4, wherein Xaa6 has high average flexibility.
50. The engineered AAV VP capsid polypeptide of embodiment 49, wherein Xaa6 is selected from G and R.
51. The engineered AAV VP capsid polypeptide of any one of embodiments 2-4, wherein Xaa7 has high average flexibility.
52. The engineered AAV VP capsid polypeptide of embodiment 51, wherein Xaa7 is selected from D, E, K, P, I, N, Q, and S.
53. The engineered AAV VP capsid polypeptide of any one of embodiments 2-4, wherein Xaa7 has low solubility.
54. The engineered AAV VP capsid polypeptide of embodiment 53, wherein Xaa7 is selected from N and E.
55. The engineered AAV VP capsid polypeptide of any one of embodiments 2-4, wherein Xaa8 has low solubility.
56. The engineered AAV VP capsid polypeptide of embodiment 55, wherein Xaa8 is selected from N, E, and D.
57. The engineered AAV VP capsid polypeptide of any one of embodiments 2-4, wherein Xaa8 has medium mutability.
58. The engineered AAV VP capsid polypeptide of embodiment 57, wherein Xaa8 is selected from R and H.
59. The engineered AAV VP capsid polypeptide of any one of embodiments 2-4, wherein Xaa9 has low mutability.
60. The engineered AAV VP capsid polypeptide of embodiment 59, wherein Xaa9 is selected from P and K.
61. The engineered AAV VP capsid polypeptide of any one of embodiments 2-4, wherein Xaa9 has high average flexibility.
62. The engineered AAV VP capsid polypeptide of embodiment 61, wherein Xaa9 is selected from D, E, P, and S.
63. The engineered AAV VP capsid polypeptide of any one of embodiments 2-4, wherein Xaa9 has high solubility.
64. The engineered AAV VP capsid polypeptide of embodiment 63, wherein Xaa9 is selected from M and V.
65. The engineered AAV VP capsid polypeptide of any one of embodiments 1-64, wherein the region from the residue corresponding to residue 581 to the residue corresponding to residue 589 inclusive has a sequence having at least 70%, at least 75%, at least 80%, at least 85%, at least 90%, at least 92%, at least 95%, at least 97%, or at least 99% identical to any one of SEQ ID NO: 20118-SEQ ID NO: 21117.
66. The engineered AAV VP capsid polypeptide of embodiment 65, wherein the region from the residue corresponding to residue 581 to the residue corresponding to residue 589 inclusive has a sequence of any one of SEQ ID NO: 20118-SEQ ID NO: 21117.
67. The engineered AAV VP capsid polypeptide of any one of embodiments 1-66, wherein tropism for lymph node tissue is measured as a relative accumulation of the rAAV virion in a lymph node tissue as compared to a non-lymph node tissue, wherein the non-lymph node tissue consists collectively of CNS, liver, skeletal muscle, heart, lung, spleen, bone marrow, mammary gland, skin, adrenal gland, thyroid, colon, sciatic nerve, and spinal cord.
68. The engineered AAV VP capsid polypeptide of embodiment 67, wherein the CNS tissue is selected from forebrain cortex, occipital cortex, temporal cortex, thalamus, hypothalamus, substantia nigra, hippocampus DG, hippocampus CA1, hippocampus CA3, cerebellum, and any combination thereof.
69. The engineered AAV VP capsid polypeptide of any one of embodiments 67-68, wherein the higher tissue tropism is a 1.0005-fold to about a 1000-fold increased accumulation in the lymph node tissue as compared to a non-lymph node tissue.
70. The engineered AAV VP capsid polypeptide of embodiment 69, wherein the higher tissue tropism is at least about a 1.0005-fold, at least about a two-fold, at least about a three-fold, at least about a four-fold, at least about a five-fold, at least about a ten-fold, at least about a twenty-fold, at least about a 50-fold, at least about a 75-fold, at least about a 100-fold, or at least about a 1000-fold increased accumulation in the lymph node tissue as compared to a non-lymph node tissue.

[0617] Series K Embodiments—Mammary Gland Tropic Capsids

1. An engineered adeno-associated virus (AAV) viral protein (VP) capsid polypeptide having an amino acid sequence at least 70% identical to SEQ ID NO: 1,

[0618] wherein the engineered AAV VP capsid polypeptide has at least one mutation as compared to SEQ ID NO: 1 in the region from a residue corresponding to residue 581 of SEQ ID NO: 1 to a residue corresponding to residue 589 of SEQ ID NO: 1, inclusive,

[0619] wherein the engineered AAV VP capsid polypeptide is capable of assembling into a recombinant AAV virion (rAAV),

[0620] wherein the at least one mutation confers higher tropism for a mammary gland tissue on the rAAV as compared to an rAAV virion having a wildtype AAV5 VP capsid polypeptide of SEQ ID NO: 1, and

[0621] wherein the engineered AAV VP capsid polypeptide does not have the sequence of any of SEQ ID NO: 3, SEQ ID NO: 4, SEQ ID NO: 5, SEQ ID NO: 6, SEQ ID NO: 7, and SEQ ID NO: 8. 2. The engineered AAV VP capsid polypeptide of embodiment 1, wherein the engineered AAV VP capsid polypeptide has a sequence of SEQ ID NO: 2 and wherein Xaa1, Xaa2, Xaa3, Xaa4, Xaa5, Xaa6, Xaa7, Xaa8, and Xaa9 are each independently selected from any amino acid. 3. An engineered adeno-associated virus (AAV) viral protein (VP) capsid polypeptide having an amino acid sequence of SEQ ID NO: 2, wherein amino acid residues Xaa1, Xaa2, Xaa3, Xaa4, Xaa5, Xaa6, Xaa7, Xaa8, and Xaa9 are each independently selected from A, R, N, D, C, E, Q, G, H, I, L, K, M, F, P, S, T, W, Y, and V,

[0622] wherein the engineered AAV VP capsid polypeptide is capable of assembling into a recombinant AAV virion (rAAV), and

[0623] wherein the engineered AAV VP capsid polypeptide does not have the sequence of any of SEQ ID NO: 1, SEQ ID NO: 3, SEQ ID NO: 4, SEQ ID NO: 5, SEQ ID NO: 6. SEQ ID NO: 7, and SEQ ID NO: 8. 4. The engineered AAV VP capsid polypeptide of embodiment 3, wherein the rAAV has higher tropism for a mammary gland tissue as compared to an rAAV virion having a wildtype AAV5 VP capsid polypeptide of SEQ ID NO: 1.

5. The engineered AAV VP capsid polypeptide of embodiment 1, wherein the region from the residue corresponding to residue 581 to the residue corresponding to residue 589, inclusive, has a sequence that is at least 70%, at least 75%, at least 80%, at least 85%, at least 90%, at least 92%, at least 95%, at least 97%, or at least 99% identical to any one of SEQ ID NO: 22118-SEQ ID NO: 25117.
6. The engineered AAV VP capsid polypeptide of embodiment 5, wherein the region from the residue corresponding to residue 581 to the residue corresponding to residue 589, inclusive, has a sequence of any one of SEQ ID NO: 22118-SEQ ID NO: 25117.
7. The engineered AAV VP capsid polypeptide of any one of embodiments 2-4, wherein the Xaa1 to Xaa9 region of SEQ ID NO: 2 has a sequence that is at least 70%, at least 75%, at least 80%, at least 85%, at least 90%, at least 92%, at least 95%, at least 97%, or at least 99% identical to any one of SEQ ID NO: 22118-SEQ ID NO: 25117.
8. The engineered AAV VP capsid polypeptide of embodiment 7, wherein the Xaa1 to Xaa9 region of SEQ ID NO: 2 has a sequence of any one of SEQ ID NO: 22118-SEQ ID NO: 25117.
9. The engineered AAV VP capsid polypeptide of any one of embodiments 2-4, wherein:
Xaa1 is selected from the group consisting of C, K, M, Q, R, and Y; or
Xaa2 is selected from the group consisting of A, F, I, K, S, T, and V; or
Xaa3 is selected from the group consisting of A, F, G, I, K, L, R, T, and Y; or
Xaa4 is selected from the group consisting of A, I, K, Q, R, and T; or
Xaa5 is selected from the group consisting of I, L, M, Q, R, T, V, and Y; or
Xaa6 is selected from the group consisting of H, N, S, and V; or
Xaa7 is selected from the group consisting of A, H, I, N, S and Y; or
Xaa8 is selected from the group consisting of A, C, D, G, H, M, Q, and S; or
Xaa9 is selected from the group consisting of A, E, L, W, and Y; or
any combination thereof.
10. The engineered AAV VP capsid polypeptide of embodiment 9, wherein Xaa1 is selected from C, Q, and R.
11. The engineered AAV VP capsid polypeptide of embodiment 9, wherein Xaa1 is C.
12. The engineered AAV VP capsid polypeptide of embodiment 9, wherein Xaa2 is selected from A, S, and V.
13. The engineered AAV VP capsid polypeptide of embodiment 9, wherein Xaa2 is V.
14. The engineered AAV VP capsid polypeptide of embodiment 9, wherein Xaa3 is selected from F, G, K, R, and Y.
15. The engineered AAV VP capsid polypeptide of embodiment 9, wherein Xaa3 is selected from F, K, and Y.
16. The engineered AAV VP capsid polypeptide of embodiment 9, wherein Xaa3 is F.
17. The engineered AAV VP capsid polypeptide of embodiment 9, wherein Xaa4 is selected from A, I, and R.
18. The engineered AAV VP capsid polypeptide of embodiment 9, wherein Xaa4 is 1.
19. The engineered AAV VP capsid polypeptide of embodiment 9, wherein Xaa5 is selected from I, M, and Y.
20. The engineered AAV VP capsid polypeptide of embodiment 9, wherein Xaa5 is Y.
21. The engineered AAV VP capsid polypeptide of embodiment 9, wherein Xaa6 is H.
22. The engineered AAV VP capsid polypeptide of embodiment 9, wherein Xaa7 is N or S.
23. The engineered AAV VP capsid polypeptide of embodiment 9, wherein Xaa7 is N.
24. The engineered AAV VP capsid polypeptide of embodiment 9, wherein Xaa8 is selected from G, M, and Q.
25. The engineered AAV VP capsid polypeptide of embodiment 9, wherein Xaa8 is G.
26. The engineered AAV VP capsid polypeptide of embodiment 9, wherein Xaa9 is selected from A, L, and W.
27. The engineered AAV VP capsid polypeptide of embodiment 9, wherein Xaa9 is A.
28. The engineered AAV VP capsid polypeptide of any one of embodiments 1-27, wherein the region from the residue corresponding to residue 581 to the residue corresponding to residue 589, inclusive, has a sequence that is at least 700%, at least 75%, at least 80%, at least 85%, at least 90%, at least 92%, at least 95%, at least 97%, or at least 99% identical to any one of SEQ ID NO: 22118-SEQ ID NO: 23117.
29. The engineered AAV VP capsid polypeptide of embodiment 28, wherein the region from residue 581 to residue 589 of SEQ ID NO: 1 has a sequence of any one of SEQ ID NO: 22118-SEQ ID NO: 23117.
30. The engineered AAV VP capsid polypeptide of any one of embodiments 2-4, wherein Xaa1 has low surface accessibility.
31. The engineered AAV VP capsid polypeptide of embodiment 30, wherein Xaa1 is C.
32. The engineered AAV VP capsid polypeptide of any one of embodiments 2-4, wherein Xaa1 has medium mol mass.
33. The engineered AAV VP capsid polypeptide of embodiment 32, wherein Xaa1 is C.
34. The engineered AAV VP capsid polypeptide of any one of embodiments 2-4, wherein Xaa2 has high surface accessibility.
35. The engineered AAV VP capsid polypeptide of embodiment 34, wherein Xaa2 is selected from D, N, and Q.
36. The engineered AAV VP capsid polypeptide of any one of embodiments 2-4, wherein Xaa2 has low hydropathy.
37. The engineered AAV VP capsid polypeptide of embodiment 36, wherein Xaa2 is selected from D, E, R, K, H, N, and Q.
38. The engineered AAV VP capsid polypeptide of any one of embodiments 2-4, wherein Xaa3 has high average flexibility.
39. The engineered AAV VP capsid polypeptide of embodiment 38, wherein Xaa3 is selected from D, E, R, P, G, and S.
40. The engineered AAV VP capsid polypeptide of any one of embodiments 2-4, wherein Xaa3 has medium mutability.
41. The engineered AAV VP capsid polypeptide of embodiment 40, wherein Xaa3 is selected from R and H.
42. The engineered AAV VP capsid polypeptide of any one of embodiments 2-4, wherein Xaa4 has high mutability.
43. The engineered AAV VP capsid polypeptide of embodiment 42, wherein Xaa4 is selected from M, I, Q, and T.
44. The engineered AAV VP capsid polypeptide of any one of embodiments 2-4, wherein Xaa4 has high solubility.
45. The engineered AAV VP capsid polypeptide of embodiment 44, wherein Xaa4 is selected from W, F, I, and L.
46. The engineered AAV VP capsid polypeptide of any one of embodiments 2-4, wherein Xaa4 has high surface accessibility.
47. The engineered AAV VP capsid polypeptide of embodiment 46, wherein Xaa4 is selected from E, R, and K.
48. The engineered AAV VP capsid polypeptide of any one of embodiments 2-4, wherein Xaa5 has high solubility.
49. The engineered AAV VP capsid polypeptide of embodiment 48, wherein Xaa5 is selected from W, F, I, and L.
50. The engineered AAV VP capsid polypeptide of any one of embodiments 2-4, wherein Xaa5 has low mutability.
51. The engineered AAV VP capsid polypeptide of embodiment 50, wherein Xaa5 is selected from Y, F, and L.
52. The engineered AAV VP capsid polypeptide of any one of embodiments 2-4, wherein Xaa6 has high hydropathy.
53. The engineered AAV VP capsid polypeptide of embodiment 52, wherein Xaa6 is selected from V, I, and L.
54. The engineered AAV VP capsid polypeptide of any one of embodiments 2-4, wherein Xaa6 has medium mol mass.
55. The engineered AAV VP capsid polypeptide of embodiment 54, wherein Xaa6 is selected from D, I, L, and N.
56. The engineered AAV VP capsid polypeptide of any one of embodiments 2-4, wherein Xaa8 has low surface accessibility.
57. The engineered AAV VP capsid polypeptide of embodiment 56, wherein Xaa8 is C.
58. The engineered AAV VP capsid polypeptide of any one of embodiments 2-4, wherein Xaa8 has low mutability.
59. The engineered AAV VP capsid polypeptide of embodiment 58, wherein Xaa8 is selected from C, R, and H.
60. The engineered AAV VP capsid polypeptide of any one of embodiments 2-4, wherein Xaa8 has medium mutability.
61. The engineered AAV VP capsid polypeptide of embodiment 60, wherein Xaa9 is selected from R and H.
62. The engineered AAV VP capsid polypeptide of any one of embodiments 1-61, wherein the region from the residue corresponding to residue 581 to the residue corresponding to residue 589 inclusive has a sequence having at least 70%, at least 75%, at least 80%, at least 85%, at least 90%, at least 92%, at least 95%, at least 97%, or at least 99% identical to any one of SEQ ID NO: 23118-SEQ ID NO: 24117.
63. The engineered AAV VP capsid polypeptide of embodiment 62, wherein the region from the residue corresponding to residue 581 to the residue corresponding to residue 589 inclusive has a sequence of any one of SEQ ID NO: 23118-SEQ ID NO: 24117.
64. The engineered AAV VP capsid polypeptide of any one of embodiments 1-63, wherein tropism for mammary gland tissue is measured as a relative accumulation of the rAAV virion in a mammary gland tissue as compared to a non-mammary gland tissue, wherein the non-mammary gland tissue consists collectively of CNS, liver, skeletal muscle, heart, lung, spleen, lymph node, bone marrow, skin, adrenal gland, thyroid, colon, sciatic nerve, and spinal cord.
65. The engineered AAV VP capsid polypeptide of embodiment 65, wherein the CNS tissue is selected from forebrain cortex, occipital cortex, temporal cortex, thalamus, hypothalamus, substantia nigra, hippocampus DG, hippocampus CA1, hippocampus CA3, cerebellum, and any combination thereof.
66. The engineered AAV VP capsid polypeptide of any one of embodiments 64-65, wherein the higher tissue tropism is a 1.0005-fold to about a 1000-fold increased accumulation in the mammary gland tissue as compared to a non-mammary gland tissue.
67. The engineered AAV VP capsid polypeptide of embodiment 66, wherein the higher tissue tropism is at least about a 1.0005-fold, at least about a two-fold, at least about a three-fold, at least about a four-fold, at least about a five-fold, at least about a ten-fold, at least about a twenty-fold, at least about a 50-fold, at least about a 75-fold, at least about a 100-fold, or at least about a 1000-fold increased accumulation in the mammary gland tissue as compared to a non-mammary gland tissue.

[0624] Series L Embodiments—Skeletal or Cardiac Muscle Tropic Capsids

1. An engineered adeno-associated virus (AAV) viral protein (VP) capsid polypeptide having an amino acid sequence at least 70% identical to SEQ ID NO: 1,

[0625] wherein the engineered AAV VP capsid polypeptide has at least one mutation as compared to SEQ ID NO: 1 in the region from a residue corresponding to residue 581 of SEQ ID NO: 1 to a residue corresponding to residue 589 of SEQ ID NO: 1, inclusive,

[0626] wherein the engineered AAV VP capsid polypeptide is capable of assembling into a recombinant AAV virion (rAAV),

[0627] wherein the at least one mutation confers higher tropism for a skeletal muscle tissue or a cardiac muscle tissue on the rAAV as compared to an rAAV virion having a wildtype AAV5 VP capsid polypeptide of SEQ ID NO: 1, and

[0628] wherein the engineered AAV VP capsid polypeptide does not have the sequence of any of SEQ ID NO: 3, SEQ ID NO: 4, SEQ ID NO: 5, SEQ ID NO: 6, SEQ ID NO: 7, and SEQ ID NO: 8. 2. The engineered AAV VP capsid polypeptide of embodiment 1, wherein the engineered AAV VP capsid polypeptide has a sequence of SEQ ID NO: 2 and wherein Xaa1, Xaa2, Xaa3, Xaa4, Xaa5, Xaa6, Xaa7, Xaa8, and Xaa9 are each independently selected from any amino acid. 3. An engineered adeno-associated virus (AAV) viral protein (VP) capsid polypeptide having an amino acid sequence of SEQ ID NO: 2,

[0629] wherein amino acid residues Xaa1, Xaa2, Xaa3, Xaa4, Xaa5, Xaa6, Xaa7, Xaa8, and Xaa9 are each independently selected from A, R, N, D, C, E, Q, G, H, I, L, K, M, F, P, S, T, W, Y, and V,

[0630] wherein the engineered AAV VP capsid polypeptide is capable of assembling into a recombinant AAV virion (rAAV), and

[0631] wherein the engineered AAV VP capsid polypeptide does not have the sequence of any of SEQ ID NO: 1, SEQ ID NO: 3, SEQ ID NO: 4, SEQ ID NO: 5, SEQ ID NO: 6, SEQ ID NO: 7, and SEQ ID NO: 8. 4. The engineered AAV VP capsid polypeptide of embodiment 3, wherein the rAAV has higher tropism for a skeletal muscle tissue or a cardiac muscle tissue as compared to an rAAV virion having a wildtype AAV5 VP capsid polypeptide of SEQ ID NO: 1.

5. The engineered AAV VP capsid polypeptide of embodiment 1, wherein the region from the residue corresponding to residue 581 to the residue corresponding to residue 589, inclusive, has a sequence that is at least 70%, at least 75%, at least 80%, at least 85%, at least 90%, at least 92%, at least 95%, at least 97%, or at least 99% identical to any one of SEQ ID NO: 25118-SEQ ID NO: 26117.
6. The engineered AAV VP capsid polypeptide of embodiment 5, wherein the region from the residue corresponding to residue 581 to the residue corresponding to residue 589, inclusive, has a sequence of any one of SEQ ID NO: 25118-SEQ ID NO: 26117.
7. The engineered AAV VP capsid polypeptide of any one of embodiments 2-4, wherein the Xaa1 to Xaa9 region of SEQ ID NO: 2 has a sequence that is at least 70%, at least 75%, at least 80%, at least 85%, at least 90%, at least 92%, at least 95%, at least 97%, or at least 99% identical to any one of SEQ ID NO: 25118-SEQ ID NO: 26117.
8. The engineered AAV VP capsid polypeptide of embodiment 7, wherein the Xaa1 to Xaa9 region of SEQ ID NO: 2 has a sequence of any one of SEQ ID NO: 25118-SEQ ID NO: 26117.
9. The engineered AAV VP capsid polypeptide of any one of embodiments 2-4, wherein Xaa1 has low solubility.
10. The engineered AAV VP capsid polypeptide of embodiment 9, wherein Xaa1 is selected from D, E, R, K, P, N, and Q.
11. The engineered AAV VP capsid polypeptide of any one of embodiments 2-4, wherein Xaa1 has low hydropathy.
12. The engineered AAV VP capsid polypeptide of embodiment 11, wherein Xaa1 is selected from D, E, R, K, Q, N, Y, P.
13. The engineered AAV VP capsid polypeptide of any one of embodiments 2-4, wherein Xaa1 has high surface accessibility.
14. The engineered AAV VP capsid polypeptide of embodiment 13, wherein Xaa1 is selected from E, R, and K.
15. The engineered AAV VP capsid polypeptide of any one of embodiments 2-4, wherein Xaa2 has high hydropathy.
16. The engineered AAV VP capsid polypeptide of embodiment 15, wherein Xaa2 is selected from V, I, F, L, and C.
17. The engineered AAV VP capsid polypeptide of any one of embodiments 2-4, wherein Xaa2 has low mutability.
18. The engineered AAV VP capsid polypeptide of embodiment 17, wherein Xaa2 is selected from R, V, I, H, and C.
19. The engineered AAV VP capsid polypeptide of any one of embodiments 2-4, wherein Xaa2 has medium volume.
20. The engineered AAV VP capsid polypeptide of embodiment 19, wherein Xaa2 is selected from E, V, and Q.
21. The engineered AAV VP capsid polypeptide of any one of embodiments 2-4, wherein Xaa3 has low solubility.
22. The engineered AAV VP capsid polypeptide of embodiment 21, wherein Xaa3 is selected from D, R, and Q.
23. The engineered AAV VP capsid polypeptide of any one of embodiments 2-4, wherein Xaa4 has low solubility.
24. The engineered AAV VP capsid polypeptide of embodiment 23, wherein Xaa4 is selected from D, E, P, and N.
25. The engineered AAV VP capsid polypeptide of any one of embodiments 2-4, wherein Xaa4 has low charge.
26. The engineered AAV VP capsid polypeptide of embodiment 25, wherein Xaa4 is selected from D and E.
27. The engineered AAV VP capsid polypeptide of any one of embodiments 2-4, wherein Xaa5 has low amino acid solubility.
28. The engineered AAV VP capsid polypeptide of embodiment 27, wherein Xaa5 is selected from D, E, R, K, N, Q.
29. The engineered AAV VP capsid polypeptide of any one of embodiments 2-4, wherein Xaa8 has low solubility.
30. The engineered AAV VP capsid polypeptide of embodiment 29, wherein Xaa8 is selected from D, E, K, P, and N.
31. The engineered AAV VP capsid polypeptide of any one of embodiments 2-4, wherein Xaa8 has high flexibility index.
32. The engineered AAV VP capsid polypeptide of embodiment 31, wherein Xaa8 is selected from Q, S, P, E, and D.
33. The engineered AAV VP capsid polypeptide of any one of embodiments 2-4, wherein Xaa8 has high surface accessibility.
34. The engineered AAV VP capsid polypeptide of embodiment 33, wherein Xaa8 is selected from S, D, P, N, E, R, and K.
35. The engineered AAV VP capsid polypeptide of any one of embodiments 1-34, wherein the region from the residue corresponding to residue 581 to the residue corresponding to residue 589 inclusive has a sequence having at least 70%, at least 75%, at least 80%, at least 85%, at least 90%, at least 92%, at least 95%, at least 97%, or at least 99% identical to any one of SEQ ID NO: 25118-SEQ ID NO: 26117.
36. The engineered AAV VP capsid polypeptide of embodiment 35, wherein the region from the residue corresponding to residue 581 to the residue corresponding to residue 589 inclusive has a sequence of any one of SEQ ID NO: 25118-SEQ ID NO: 26117.
37. The engineered AAV VP capsid polypeptide of any one of embodiments 1-36, wherein tropism for skeletal muscle tissue or cardiac muscle tissue is measured as a relative accumulation of the rAAV virion in a skeletal muscle tissue or a cardiac muscle tissue as compared to a non-skeletal muscle tissue or a non-cardiac muscle tissue, wherein the non-skeletal muscle tissue or a non-cardiac muscle tissue consists collectively of CNS, liver, lung, spleen, lymph node, bone marrow, mammary gland, skin, adrenal gland, thyroid, colon, sciatic nerve, and spinal cord.
38. The engineered AAV VP capsid polypeptide of embodiment 37, wherein the CNS tissue is selected from forebrain cortex, occipital cortex, temporal cortex, thalamus, hypothalamus, substantia nigra, hippocampus DG, hippocampus CA1, hippocampus CA3, cerebellum, and any combination thereof.
39. The engineered AAV VP capsid polypeptide of any one of embodiments 37-38, wherein the higher tissue tropism is a 1.0005-fold to about a 1000-fold increased accumulation in the skeletal muscle tissue or a cardiac muscle tissue as compared to a non-skeletal muscle tissue or a non-cardiac muscle tissue.
40. The engineered AAV VP capsid polypeptide of embodiment 39, wherein the higher tissue tropism is at least about a 1.0005-fold, at least about a two-fold, at least about a three-fold, at least about a four-fold, at least about a five-fold, at least about a ten-fold, at least about a twenty-fold, at least about a 50-fold, at least about a 75-fold, at least about a 100-fold, or at least about a 1000-fold increased accumulation in the skeletal muscle tissue or a cardiac muscle tissue as compared to a non-skeletal muscle tissue or a non-cardiac muscle tissue.

[0632] Series M Embodiments—Sciatic Nerve Tropic Capsids

1. An engineered adeno-associated virus (AAV) viral protein (VP) capsid polypeptide having an amino acid sequence at least 70% identical to SEQ ID NO: 1,

[0633] wherein the engineered AAV VP capsid polypeptide has at least one mutation as compared to SEQ ID NO: 1 in the region from a residue corresponding to residue 581 of SEQ ID NO: 1 to a residue corresponding to residue 589 of SEQ ID NO: 1, inclusive,

[0634] wherein the engineered AAV VP capsid polypeptide is capable of assembling into a recombinant AAV virion (rAAV),

[0635] wherein the at least one mutation confers higher tropism for a sciatic nerve tissue on the rAAV as compared to an rAAV virion having a wildtype AAV5 VP capsid polypeptide of SEQ ID NO: 1, and

[0636] wherein the engineered AAV VP capsid polypeptide does not have the sequence of any of SEQ ID NO: 3, SEQ ID NO: 4, SEQ ID NO: 5, SEQ ID NO: 6, SEQ ID NO: 7, and SEQ ID NO: 8. 2. The engineered AAV VP capsid polypeptide of embodiment 1, wherein the engineered AAV VP capsid polypeptide has a sequence of SEQ ID NO: 2 and wherein Xaa1, Xaa2, Xaa3, Xaa4, Xaa5, Xaa6, Xaa7, Xaa8, and Xaa9 are each independently selected from any amino acid. 3. An engineered adeno-associated virus (AAV) viral protein (VP) capsid polypeptide having an amino acid sequence of SEQ ID NO: 2,

[0637] wherein amino acid residues Xaa1, Xaa2, Xaa3, Xaa4, Xaa5, Xaa6, Xaa7, Xaa8, and Xaa9 are each independently selected from A, R, N, D, C, E, Q, G, H, I, L, K, M, F, P, S, T, W, Y, and V,

[0638] wherein the engineered AAV VP capsid polypeptide is capable of assembling into a recombinant AAV virion (rAAV), and

[0639] wherein the engineered AAV VP capsid polypeptide does not have the sequence of any of SEQ ID NO: 1. SEQ ID NO: 3, SEQ ID NO: 4, SEQ ID NO: 5, SEQ ID NO: 6, SEQ ID NO: 7, and SEQ ID NO: 8. 4. The engineered AAV VP capsid polypeptide of embodiment 3, wherein the rAAV has higher tropism for a sciatic nerve tissue as compared to an rAAV virion having a wildtype AAV5 VP capsid polypeptide of SEQ ID NO: 1. 5. The engineered AAV VP capsid polypeptide of embodiment 1, wherein the region from the residue corresponding to residue 581 to the residue corresponding to residue 589, inclusive, has a sequence that is at least 70%, at least 75%, at least 80%, at least 85%, at least 90%, at least 92%, at least 95%, at least 97%, or at least 99% identical to any one of SEQ ID NO: 26118-SEQ ID NO: 28990.

6. The engineered AAV VP capsid polypeptide of embodiment 5, wherein the region from the residue corresponding to residue 581 to the residue corresponding to residue 589, inclusive, has a sequence of any one of SEQ ID NO: 26118-SEQ ID NO: 28990.
7. The engineered AAV VP capsid polypeptide of any one of embodiments 2-4, wherein the Xaa1 to Xaa9 region of SEQ ID NO: 2 has a sequence that is at least 70%, at least 75%, at least 80%, at least 85%, at least 90%, at least 92%, at least 95%, at least 97%, or at least 99% identical to any one of SEQ ID NO: 26118-SEQ ID NO: 28990.
8. The engineered AAV VP capsid polypeptide of embodiment 7, wherein the Xaa1 to Xaa9 region of SEQ ID NO: 2 has a sequence of any one of SEQ ID NO: 26118-SEQ ID NO: 28990.
9. The engineered AAV VP capsid polypeptide of any one of embodiments 2-4, wherein:

[0640] Xaa1 is selected from the group consisting of C, G, K, M, Q, R, and Y; or

[0641] Xaa2 is selected from the group consisting of A, C, F, I, Q, T, and V; or

[0642] Xaa3 is selected from the group consisting of A, F, I, M, R, S, and T; or

[0643] Xaa4 is selected from the group consisting of E, N, T, Q, and V; or

[0644] Xaa5 is selected from the group consisting of F, H, Q, S, V, and Y; or

[0645] Xaa6 is selected from the group consisting of K, M, N, Q, S, and V; or

[0646] Xaa7 is selected from the group consisting of K, M, Q, R, and T; or

[0647] Xaa8 is selected from the group consisting of A, G, H, Q, S, and V; or

[0648] Xaa9 is selected from the group consisting of C, E, I, K, and R; or

[0649] any combination thereof.

10. The engineered AAV VP capsid polypeptide of embodiment 9, wherein Xaa1 is selected from C, R, and Q.
11. The engineered AAV VP capsid polypeptide of embodiment 9, wherein Xaa1 is C.
12. The engineered AAV VP capsid polypeptide of embodiment 9, wherein Xaa2 is selected from A, C, and I.
13. The engineered AAV VP capsid polypeptide of embodiment 9, wherein Xaa2 is A.
14. The engineered AAV VP capsid polypeptide of embodiment 9, wherein Xaa3 is selected from F, M, R, and S.
15. The engineered AAV VP capsid polypeptide of embodiment 9, wherein Xaa3 is R.
16. The engineered AAV VP capsid polypeptide of embodiment 9, wherein Xaa4 is selected from E, T, and V.
17. The engineered AAV VP capsid polypeptide of embodiment 9, wherein Xaa4 is T.
18. The engineered AAV VP capsid polypeptide of embodiment 9, wherein Xaa5 is selected from F, V, and Y.
19. The engineered AAV VP capsid polypeptide of embodiment 9, wherein Xaa5 is V.
20. The engineered AAV VP capsid polypeptide of embodiment 9, wherein Xaa6 is selected from M, N, and S.
21. The engineered AAV VP capsid polypeptide of embodiment 9, wherein Xaa6 is N.
22. The engineered AAV VP capsid polypeptide of embodiment 9, wherein Xaa7 is selected from M, Q, and T.
23. The engineered AAV VP capsid polypeptide of embodiment 9, wherein Xaa7 is M.
24. The engineered AAV VP capsid polypeptide of embodiment 9, wherein Xaa8 is selected from H and S.
25. The engineered AAV VP capsid polypeptide of embodiment 9, wherein Xaa8 is H.
26. The engineered AAV VP capsid polypeptide of embodiment 9, wherein Xaa9 is selected from C, I, and K.
27. The engineered AAV VP capsid polypeptide of embodiment 9, wherein Xaa9 is I.
28. The engineered AAV VP capsid polypeptide of any one of embodiments 1-27, wherein the region from the residue corresponding to residue 581 to the residue corresponding to residue 589, inclusive, has a sequence that is at least 70%, at least 75%, at least 80%, at least 85%, at least 90%, at least 92%, at least 95%, at least 97%, or at least 99% identical to any one of SEQ ID NO: 26118-SEQ ID NO: 26990.
29. The engineered AAV VP capsid polypeptide of embodiment 28, wherein the region from residue 581 to residue 589 of SEQ ID NO: 1 has a sequence of any one of SEQ ID NO. 26118-SEQ ID NO: 26990.
30. The engineered AAV VP capsid polypeptide of any one of embodiments 2-4, wherein Xaa1 has high average flexibility.
31. The engineered AAV VP capsid polypeptide of embodiment 30, wherein Xaa1 is selected from G and R.
32. The engineered AAV VP capsid polypeptide of any one of embodiments 2-4, wherein Xaa1 has low solubility.
33. The engineered AAV VP capsid polypeptide of embodiment 32, wherein Xaa1 is selected from R and Q.
34. The engineered AAV VP capsid polypeptide of any one of embodiments 2-4, wherein Xaa1 has low mutability.
35. The engineered AAV VP capsid polypeptide of embodiment 34, wherein Xaa1 is selected from C, L, F, Y, R, K, P, and H.
36. The engineered AAV VP capsid polypeptide of any one of embodiments 2-4, wherein Xaa1 has high volume.
37. The engineered AAV VP capsid polypeptide of embodiment 36, wherein Xaa1 is selected from Y and F.
38. The engineered AAV VP capsid polypeptide of any one of embodiments 2-4, wherein Xaa2 has high surface accessibility.
39. The engineered AAV VP capsid polypeptide of embodiment 38, wherein Xaa2 is selected from E, R, and K.
40. The engineered AAV VP capsid polypeptide of any one of embodiments 2-4, wherein Xaa3 has medium mutability.
41. The engineered AAV VP capsid polypeptide of embodiment 40, wherein Xaa3 is selected from H and R.
42. The engineered AAV VP capsid polypeptide of any one of embodiments 2-4, wherein Xaa3 has medium average flexibility.
43. The engineered AAV VP capsid polypeptide of embodiment 42, wherein Xaa3 is selected from V and Y.
44. The engineered AAV VP capsid polypeptide of any one of embodiments 2-4, wherein Xaa4 has high mutability.
45. The engineered AAV VP capsid poly peptide of embodiment 44, wherein Xaa4 is N.
46. The engineered AAV VP capsid polypeptide of any one of embodiments 2-4, wherein Xaa4 has high average flexibility.
47. The engineered AAV VP capsid polypeptide of embodiment 46, wherein Xaa4 is selected from I, N, G, and R.
48. The engineered AAV VP capsid polypeptide of any one of embodiments 2-4, wherein Xaa4 has low solubility.
49. The engineered AAV VP capsid polypeptide of embodiment 48, wherein Xaa4 is N.
50. The engineered AAV VP capsid polypeptide of any one of embodiments 2-4, wherein Xaa6 has low mutability.
51. The engineered AAV VP capsid polypeptide of embodiment 50, wherein Xaa6 is selected from C, L, F, and Y.
52. The engineered AAV VP capsid polypeptide of any one of embodiments 2-4, wherein Xaa6 has high volume.
53. The engineered AAV VP capsid polypeptide of embodiment 52, wherein Xaa6 is selected from K, M, I, and L.
54. The engineered AAV VP capsid polypeptide of any one of embodiments 2-4, wherein Xaa7 has low mutability.
55. The engineered AAV VP capsid polypeptide of embodiment 54, wherein Xaa7 is selected from L, F, and Y.
56. The engineered AAV VP capsid polypeptide of any one of embodiments 2-4, wherein Xaa7 has medium mol mass.
57. The engineered AAV VP capsid polypeptide of embodiment 56, wherein Xaa7 is selected from D, I, L, and N.
58. The engineered AAV VP capsid polypeptide of any one of embodiments 2-4, wherein Xaa8 has high surface accessibility.
59. The engineered AAV VP capsid polypeptide of embodiment 58, wherein Xaa8 is selected from S, Y, T, D, P, H, and N.
60. The engineered AAV VP capsid polypeptide of any one of embodiments 2-4, wherein Xaa9 has low mutability.
61. The engineered AAV VP capsid polypeptide of embodiment 60, wherein Xaa9 is selected from C, H, and R.
62. The engineered AAV VP capsid polypeptide of any one of embodiments 2-4, wherein Xaa9 has medium solubility.
63. The engineered AAV VP capsid polypeptide of embodiment 62, wherein Xaa9 is selected from Q, T, and C.
64. The engineered AAV VP capsid polypeptide of any one of embodiments 2-4, wherein Xaa9 has low surface accessibility.
65. The engineered AAV VP capsid polypeptide of embodiment 64, wherein Xaa9 is C.
66. The engineered AAV VP capsid polypeptide of any one of embodiments 1-65, wherein the region from the residue corresponding to residue 581 to the residue corresponding to residue 589 inclusive has a sequence having at least 70%, at least 75%, at least 80%, at least 85%, at least 90%, at least 92%, at least 95%, at least 97%, or at least 99% identical to any one of SEQ ID NO: 26991-SEQ ID NO: 27990.
67. The engineered AAV VP capsid polypeptide of embodiment 66, wherein the region from the residue corresponding to residue 581 to the residue corresponding to residue 589 inclusive has a sequence of any one of SEQ ID NO: 26991-SEQ ID NO: 27990.
68. The engineered AAV VP capsid polypeptide of any one of embodiments 1-67, wherein tropism for sciatic nerve tissue is measured as a relative accumulation of the rAAV virion in a sciatic nerve tissue as compared to a non-sciatic nerve tissue, wherein the non-sciatic nerve tissue consists collectively of CNS, liver, skeletal muscle, heart, lung, spleen, lymph node, bone marrow, mammary gland, skin, adrenal gland, thyroid, colon, and spinal cord.
69. The engineered AAV VP capsid polypeptide of any one of embodiments 68, wherein the CNS tissue is selected from forebrain cortex, occipital cortex, temporal cortex, thalamus, hypothalamus, substantia nigra, hippocampus DG, hippocampus CA1, hippocampus CA3, cerebellum, and any combination thereof.
70. The engineered AAV VP capsid polypeptide of any one of embodiments 68-69, wherein the higher tissue tropism is a 1.0005-fold to about a 1000-fold increased accumulation in the sciatic nerve tissue as compared to a non-sciatic nerve tissue.
71. The engineered AAV VP capsid polypeptide of embodiment 70, wherein the higher tissue tropism is at least about a 1.0005-fold, at least about a two-fold, at least about a three-fold, at least about a four-fold, at least about a five-fold, at least about a ten-fold, at least about a twenty-fold, at least about a 50-fold, at least about a 75-fold, at least about a 100-fold, or at least about a 1000-fold increased accumulation in the sciatic nerve tissue as compared to a non-sciatic nerve tissue.

[0650] Series N Embodiments—Skeletal Muscle Tropic Capsids

1. An engineered adeno-associated virus (AAV) viral protein (VP) capsid polypeptide having an amino acid sequence at least 70% identical to SEQ ID NO: 1,

[0651] wherein the engineered AAV VP capsid polypeptide has at least one mutation as compared to SEQ ID NO: 1 in the region from a residue corresponding to residue 581 of SEQ ID NO: 1 to a residue corresponding to residue 589 of SEQ ID NO: 1, inclusive,

[0652] wherein the engineered AAV VP capsid polypeptide is capable of assembling into a recombinant AAV virion (rAAV),

[0653] wherein the at least one mutation confers higher tropism for a skeletal muscle tissue on the rAAV as compared to an rAAV virion having a wildtype AAV5 VP capsid polypeptide of SEQ ID NO: 1, and

[0654] wherein the engineered AAV VP capsid polypeptide does not have the sequence of any of SEQ ID NO: 3, SEQ ID NO: 4, SEQ ID NO: 5, SEQ ID NO: 6, SEQ ID NO: 7, and SEQ ID NO: 8. 2. The engineered AAV VP capsid polypeptide of embodiment 1, wherein the engineered AAV VP capsid polypeptide has a sequence of SEQ ID NO: 2 and wherein Xaa1, Xaa2, Xaa3, Xaa4, Xaa5, Xaa6, Xaa7, Xaa8, and Xaa9 are each independently selected from any amino acid. 3. An engineered adeno-associated virus (AAV) viral protein (VP) capsid polypeptide having an amino acid sequence of SEQ ID NO: 2,

[0655] wherein amino acid residues Xaa1, Xaa2, Xaa3, Xaa4, Xaa5, Xaa6, Xaa7, Xaa8, and Xaa9 are each independently selected from A, R, N, D, C, E, Q, G, H, I, L, K, M, F, P, S, T, W, Y, and V,

[0656] wherein the engineered AAV VP capsid polypeptide is capable of assembling into a recombinant AAV virion (rAAV), and

[0657] wherein the engineered AAV VP capsid polypeptide does not have the sequence of any of SEQ ID NO: 1, SEQ ID NO: 3, SEQ ID NO: 4, SEQ ID NO: 5, SEQ ID NO: 6, SEQ ID NO: 7, and SEQ ID NO: 8. 4. The engineered AAV VP capsid polypeptide of embodiment 3, wherein the rAAV has higher tropism for a skeletal muscle tissue as compared to an rAAV virion having a wildtype AAV5 VP capsid polypeptide of SEQ ID NO: 1. 5. The engineered AAV VP capsid polypeptide of any one of embodiment 1, wherein the region from the residue corresponding to residue 581 to the residue corresponding to residue 589, inclusive, has a sequence that is at least 700%, at least 75%, at least 80%, at least 85%, at least 90%, at least 92%, at least 95%, at least 97%, or at least 99% identical to any one of SEQ ID NO: 28991-SEQ ID NO: 31990. 6. The engineered AAV VP capsid polypeptide of embodiment 5, wherein the region from the residue corresponding to residue 581 to the residue corresponding to residue 589, inclusive, has a sequence of any one of SEQ ID NO: 28991-SEQ ID NO: 31990. 7. The engineered AAV VP capsid polypeptide of any one of embodiments 2-4, wherein the Xaa1 to Xaa9 region of SEQ ID NO: 2 has a sequence that is at least 70%, at least 75%, at least 80%, at least 85%, at least 90%, at least 92%, at least 95%, at least 97%, or at least 99% identical to any one of SEQ ID NO: 28991-SEQ ID NO: 31990.

8. The engineered AAV VP capsid polypeptide of embodiment 7, wherein the Xaa1 to Xaa9 region of SEQ ID NO: 2 has a sequence of any one of SEQ ID NO: 28991-SEQ ID NO: 31990.
9. The engineered AAV VP capsid polypeptide of any one of embodiments X-Y, wherein:

[0658] Xaa1 is selected from the group consisting of A, E, H, M, P, Q, and S; or

[0659] Xaa2 is selected from the group consisting of F, H, I, T, and V; or

[0660] Xaa3 is selected from the group consisting of A, G, I, K, M, Q, R, S, T, and V; or

[0661] Xaa4 is selected from the group consisting of D, E, G, P, and S; or

[0662] Xaa5 is selected from the group consisting of H, L, M, P, and V; or

[0663] Xaa6 is selected from the group consisting of E, H, N, and P; or

[0664] Xaa7 is selected from the group consisting of A, H, N, Q and T; or

[0665] Xaa8 is selected from the group consisting of I, K, M, P, and W; or

[0666] Xaa9 is selected from the group consisting of A, I, M, P, and V; or any combination thereof.

10. The engineered AAV VP capsid polypeptide of embodiment 9, wherein Xaa1 is selected from P and Q.
11. The engineered AAV VP capsid polypeptide of embodiment 9, wherein Xaa1 is Q.
12. The engineered AAV VP capsid polypeptide of embodiment 9, wherein Xaa2 is selected from T and V.
13. The engineered AAV VP capsid polypeptide of embodiment 9, wherein Xaa2 is V.
14. The engineered AAV VP capsid polypeptide of embodiment 9, wherein Xaa3 is selected from A, L, P, R, and T.
15. The engineered AAV VP capsid polypeptide of embodiment 9, wherein Xaa3 is selected from L, P, and T.
16. The engineered AAV VP capsid polypeptide of embodiment 9, wherein Xaa3 is P.
17. The engineered AAV VP capsid polypeptide of embodiment 9, wherein Xaa4 is selected from D, E, and S.
18. The engineered AAV VP capsid polypeptide of embodiment 9, wherein Xaa4 is E.
19. The engineered AAV VP capsid polypeptide of embodiment 9, wherein Xaa5 is selected from L. M, and V.
20. The engineered AAV VP capsid polypeptide of embodiment 9, wherein Xaa5 is L.
21. The engineered AAV VP capsid polypeptide of embodiment 9, wherein Xaa6 is P.
22. The engineered AAV VP capsid polypeptide of embodiment 9, wherein Xaa7 is H.
23. The engineered AAV VP capsid polypeptide of embodiment 9, wherein Xaa8 is selected from I, P, and W.
24. The engineered AAV VP capsid polypeptide of embodiment 9, wherein Xaa8 is P.
25. The engineered AAV VP capsid polypeptide of embodiment 9, wherein Xaa9 is selected from A, M, and P.
26. The engineered AAV VP capsid polypeptide of embodiment 9, wherein Xaa9 is M.
27. The engineered AAV VP capsid polypeptide of any one of embodiments 1-26, wherein the region from the residue corresponding to residue 581 to the residue corresponding to residue 589, inclusive, has a sequence that is at least 70%, at least 75%, at least 80%, at least 85%, at least 90%, at least 92%, at least 95%, at least 97%, or at least 99% identical to any one of SEQ ID NO: 28991-SEQ ID NO: 29990.
28. The engineered AAV VP capsid polypeptide of embodiment 27, wherein the region from residue 581 to residue 589 of SEQ ID NO: 1 has a sequence of any one of SEQ ID NO: 28991-SEQ ID NO: 29990.
29. The engineered AAV VP capsid polypeptide of any one of embodiments 2-4, wherein Xaa1 has high average flexibility.
30. The engineered AAV VP capsid polypeptide of embodiment 29, wherein Xaa1 is selected from G and R.
31. The engineered AAV VP capsid polypeptide of any one of embodiments 2-4, wherein Xaa1 has low average flexibility.
32. The engineered AAV VP capsid polypeptide of embodiment 31, wherein Xaa1 is selected from W, M, F, and H.
33. The engineered AAV VP capsid polypeptide of any one of embodiments 2-4, wherein Xaa1 has high mol mass.
34. The engineered AAV VP capsid polypeptide of embodiment 33, wherein Xaa1 is selected from R, F, and W.
35. The engineered AAV VP capsid polypeptide of any one of embodiments 2-4, wherein Xaa2 has low hydropathy.
36. The engineered AAV VP capsid polypeptide of embodiment 35, wherein Xaa2 is selected from K and R.
37. The engineered AAV VP capsid polypeptide of any one of embodiments 2-4, wherein Xaa2 has low mutability.
38. The engineered AAV VP capsid polypeptide of embodiment 37, wherein Xaa2 is selected from C, R, and H.
39. The engineered AAV VP capsid polypeptide of any one of embodiments 2-4, wherein Xaa2 has high average flexibility.
40. The engineered AAV VP capsid polypeptide of embodiment 39, wherein Xaa2 is selected from G and R.
41. The engineered AAV VP capsid polypeptide of any one of embodiments 2-4, wherein Xaa3 has high average flexibility.
42. The engineered AAV VP capsid polypeptide of embodiment 41, wherein Xaa3 is selected from G and R.
43. The engineered AAV VP capsid polypeptide of any one of embodiments 2-4, wherein Xaa4 has high hydrophilicity.
44. The engineered AAV VP capsid polypeptide of embodiment 43, wherein Xaa4 is selected from D, E, R, K, and N.
45. The engineered AAV VP capsid polypeptide of any one of embodiments 2-4, wherein Xaa4 has low mutability.
46. The engineered AAV VP capsid polypeptide of embodiment 45, wherein Xaa4 is selected from C, R, and H.
47. The engineered AAV VP capsid polypeptide of any one of embodiments 2-4, wherein Xaa5 has low mol mass.
48. The engineered AAV VP capsid polypeptide of embodiment 47, wherein Xaa5 is A.
49. The engineered AAV VP capsid polypeptide of any one of embodiments 2-4, wherein Xaa5 has low average flexibility.
50. The engineered AAV VP capsid polypeptide of embodiment 49, wherein Xaa5 is selected from A and L.
51. The engineered AAV VP capsid polypeptide of any one of embodiments 2-4, wherein Xaa5 has high mutability.
52. The engineered AAV VP capsid polypeptide of embodiment 51, wherein Xaa5 is selected from D. A, and E.
53. The engineered AAV VP capsid polypeptide of any one of embodiments 2-4, wherein Xaa6 has low average flexibility.
54. The engineered AAV VP capsid polypeptide of embodiment 53, wherein Xaa6 is selected from W, M, and F.
55. The engineered AAV VP capsid polypeptide of any one of embodiments 2-4, wherein Xaa6 has low mutability.
56. The engineered AAV VP capsid polypeptide of embodiment 55, wherein Xaa6 is C.
57. The engineered AAV VP capsid polypeptide of any one of embodiments 2-4, wherein Xaa6 has high mol mass.
58. The engineered AAV VP capsid polypeptide of embodiment 57, wherein Xaa6 is W.
59. The engineered AAV VP capsid polypeptide of any one of embodiments 2-4, wherein Xaa7 has low goldman engelman steitz.
60. The engineered AAV VP capsid polypeptide of embodiment 59, wherein Xaa7 is R.
61. The engineered AAV VP capsid polypeptide of any one of embodiments 2-4, wherein Xaa7 has high average flexibility.
62. The engineered AAV VP capsid polypeptide of embodiment 61, wherein Xaa7 is selected from D, R, P, G, and S.
63. The engineered AAV VP capsid polypeptide of any one of embodiments 2-4, wherein Xaa7 has high mutability.
64. The engineered AAV VP capsid polypeptide of embodiment 63, wherein Xaa7 is selected from R, H, and N.
65. The engineered AAV VP capsid polypeptide of any one of embodiments 2-4, wherein Xaa7 has low solubility.
66. The engineered AAV VP capsid polypeptide of embodiment 65, wherein Xaa7 is selected from R and Q.
67. The engineered AAV VP capsid polypeptide of any one of embodiments 2-4, wherein Xaa8 has high hydrophilicity.
68. The engineered AAV VP capsid polypeptide of embodiment 67, wherein Xaa8 is selected from D, E, R, K, and N.
69. The engineered AAV VP capsid polypeptide of any one of embodiments 2-4, wherein Xaa9 has low mutability.
70. The engineered AAV VP capsid polypeptide of embodiment 69, wherein Xaa9 is selected from Y. F, and L.
71. The engineered AAV VP capsid polypeptide of any one of embodiments 1-70, wherein the region from the residue corresponding to residue 581 to the residue corresponding to residue 589 inclusive has a sequence having at least 70%, at least 75%, at least 80%, at least 85%, at least 900%, at least 92%, at least 95%, at least 97%, or at least 99% identical to any one of SEQ ID NO: 29991-SEQ ID NO: 30990.
72. The engineered AAV VP capsid polypeptide of embodiment 71, wherein the region from the residue corresponding to residue 581 to the residue corresponding to residue 589 inclusive has a sequence of any one of SEQ ID NO: 29991-SEQ ID NO: 30990.
73. The engineered AAV VP capsid polypeptide of any one of embodiments 1-72, wherein tropism for skeletal muscle tissue is measured as a relative accumulation of the rAAV virion in a skeletal muscle tissue as compared to a non-skeletal muscle tissue, wherein the non-skeletal muscle tissue consists collectively of CNS, liver, heart, lung, spleen, lymph node, bone marrow, mammary gland, skin, adrenal gland, thyroid, colon, sciatic nerve, and spinal cord.
74. The engineered AAV VP capsid polypeptide of embodiment 73, wherein the CNS tissue is selected from forebrain cortex, occipital cortex, temporal cortex, thalamus, hypothalamus, substantia nigra, hippocampus DG, hippocampus CA1, hippocampus CA3, cerebellum, and any combination thereof.
75. The engineered AAV VP capsid polypeptide of any one of embodiments 73 and 74, wherein the higher tissue tropism is a 1.0005-fold to about a 1000-fold increased accumulation in the skeletal muscle tissue as compared to a non-skeletal muscle tissue.
76. The engineered AAV VP capsid polypeptide of embodiment 75, wherein the higher tissue tropism is at least about a 1.0005-fold, at least about a two-fold, at least about a three-fold, at least about a four-fold, at least about a five-fold, at least about a ten-fold, at least about a twenty-fold, at least about a 50-fold, at least about a 75-fold, at least about a 100-fold, or at least about a 1000-fold increased accumulation in the skeletal muscle tissue as compared to a non-skeletal muscle tissue.

[0667] Series O Embodiments—Skin Tropic Capsids

1. An engineered adeno-associated virus (AAV) viral protein (VP) capsid polypeptide having an amino acid sequence at least 70% identical to SEQ ID NO: 1,

[0668] wherein the engineered AAV VP capsid polypeptide has at least one mutation as compared to SEQ ID NO: 1 in the region from a residue corresponding to residue 581 of SEQ ID NO: 1 to a residue corresponding to residue 589 of SEQ ID NO: 1, inclusive,

[0669] wherein the engineered AAV VP capsid polypeptide is capable of assembling into a recombinant AAV virion (rAAV),

[0670] wherein the at least one mutation confers higher tropism for a skin tissue on the rAAV as compared to an rAAV virion having a wildtype AAV5 VP capsid polypeptide of SEQ ID NO: 1, and

[0671] wherein the engineered AAV VP capsid polypeptide does not have the sequence of any of SEQ ID NO: 3, SEQ ID NO: 4, SEQ ID NO: 5, SEQ ID NO: 6, SEQ ID NO: 7, and SEQ ID NO: 8. 2. The engineered AAV VP capsid polypeptide of embodiment 1, wherein the engineered AAV VP capsid polypeptide has a sequence of SEQ ID NO: 2 and wherein Xaa1, Xaa2, Xaa3, Xaa4, Xaa5, Xaa6, Xaa7, Xaa8, and Xaa9 are each independently selected from any amino acid. 3. An engineered adeno-associated virus (AAV) viral protein (VP) capsid polypeptide having an amino acid sequence of SEQ ID NO: 2,

[0672] wherein amino acid residues Xaa1, Xaa2, Xaa3, Xaa4, Xaa5, Xaa6, Xaa7, Xaa8, and Xaa9 are each independently selected from A, R, N, D, C, E, Q, G, H, I, L, K, M, F, P, S, T, W, Y, and V,

[0673] wherein the engineered AAV VP capsid polypeptide is capable of assembling into a recombinant AAV virion (rAAV), and

[0674] wherein the engineered AAV VP capsid polypeptide does not have the sequence of any of SEQ ID NO: 1, SEQ ID NO: 3, SEQ ID NO: 4, SEQ ID NO: 5, SEQ ID NO: 6, SEQ ID NO: 7, and SEQ ID NO: 8. 4. The engineered AAV VP capsid polypeptide of embodiment 3, wherein the rAAV has higher tropism for a skin tissue as compared to an rAAV virion having a wildtype AAV5 VP capsid polypeptide of SEQ ID NO: 1. 5. The engineered AAV VP capsid poly peptide of embodiment 1, wherein the region from the residue corresponding to residue 581 to the residue corresponding to residue 589, inclusive, has a sequence that is at least 70%, at least 75%, at least 80%, at least 85%, at least 90%, at least 92%, at least 95%, at least 97%, or at least 99% identical to any one of SEQ ID NO: 31991-SEQ ID NO: 34990.

6. The engineered AAV VP capsid polypeptide of embodiment 5, wherein the region from the residue corresponding to residue 581 to the residue corresponding to residue 589, inclusive, has a sequence of any one of SEQ ID NO: 31991-SEQ ID NO: 34990.
7. The engineered AAV VP capsid polypeptide of any one of embodiments 2-4, wherein the Xaa1 to Xaa9 region of SEQ ID NO: 2 has a sequence that is at least 70%, at least 75%, at least 80%, at least 85%, at least 90%, at least 92%, at least 95%, at least 97%, or at least 99% identical to any one of SEQ ID NO: 31991-SEQ ID NO: 34990.
8. The engineered AAV VP capsid polypeptide of embodiment 7, wherein the Xaa1 to Xaa9 region of SEQ ID NO: 2 has a sequence of any one of SEQ ID NO: 31991-SEQ ID NO: 34990
9. The engineered AAV VP capsid polypeptide of any one of embodiments 2-4, wherein:

[0675] Xaa1 is selected from the group consisting of A, C, K, Q, R, and T; or

[0676] Xaa2 is selected from the group consisting of A, C, I, S, T, and V; or

[0677] Xaa3 is selected from the group consisting of A, C, F, G, M, Q, S, and V; or

[0678] Xaa4 is selected from the group consisting of C, K, L, P, R, and W; or

[0679] Xaa5 is selected from the group consisting of F, H, I, M, V, and Y; or

[0680] Xaa6 is selected from the group consisting of F, H, I, M, N, Q, and S; or

[0681] Xaa7 is selected from the group consisting of A, H, K, M, N, R, and V; or

[0682] Xaa8 is selected from the group consisting of A, F, G, H, S, and Y; or

[0683] Xaa9 is selected from the group consisting of A, E, G, P, Q, R, and S; or

[0684] any combination thereof.

10. The engineered AAV VP capsid polypeptide of embodiment 9, wherein Xaa1 is selected from C, K, and R.
11. The engineered AAV VP capsid polypeptide of embodiment 9, wherein Xaa1 is C.
12. The engineered AAV VP capsid polypeptide of embodiment 9, wherein Xaa2 is selected from A, S, T, and V.
13. The engineered AAV VP capsid polypeptide of embodiment 9, wherein Xaa2 is V.
14. The engineered AAV VP capsid polypeptide of embodiment 9, wherein Xaa3 is selected from A, C, F, M, and Q.
15. The engineered AAV VP capsid polypeptide of embodiment 9, wherein Xaa3 is C.
16. The engineered AAV VP capsid polypeptide of embodiment 9, wherein Xaa4 is selected from L, P, and R.
17. The engineered AAV VP capsid polypeptide of embodiment 9, wherein Xaa4 is R.
18. The engineered AAV VP capsid polypeptide of embodiment 9, wherein Xaa5 is selected from M, V, and Y.
19. The engineered AAV VP capsid polypeptide of embodiment 9, wherein Xaa5 is Y.
20. The engineered AAV VP capsid polypeptide of embodiment 9, wherein Xaa6 is selected from M, N, and Q.
21. The engineered AAV VP capsid polypeptide of embodiment 9, wherein Xaa6 is N.
22. The engineered AAV VP capsid polypeptide of embodiment 9, wherein Xaa7 is A, H, K, or R.
23. The engineered AAV VP capsid polypeptide of embodiment 9, wherein Xaa7 is K.
24. The engineered AAV VP capsid polypeptide of embodiment 9, wherein Xaa8 is selected from A, F, and S.
25. The engineered AAV VP capsid polypeptide of embodiment 9, wherein Xaa8 is S.
26. The engineered AAV VP capsid polypeptide of embodiment 9, wherein Xaa9 is selected from A, Q, and S.
27. The engineered AAV VP capsid polypeptide of embodiment 9, wherein Xaa9 is A.
28. The engineered AAV VP capsid polypeptide of any one of embodiments 1-27, wherein the region from the residue corresponding to residue 581 to the residue corresponding to residue 589, inclusive, has a sequence that is at least 70%, at least 75%, at least 80%, at least 85%, at least 90%, at least 92%, at least 95%, at least 97%, or at least 99% identical to any one of SEQ ID NO: 31991-SEQ ID NO: 32990.
29. The engineered AAV VP capsid polypeptide of embodiment 28 wherein the region from residue 581 to residue 589 of SEQ ID NO: 1 has a sequence of any one of SEQ ID NO: 31991-SEQ ID NO: 32990.
30. The engineered AAV VP capsid polypeptide of any one of embodiments 2-4, wherein Xaa1 has low surface accessibility.
31. The engineered AAV VP capsid polypeptide of embodiment 30, wherein Xaa1 is C.
32. The engineered AAV VP capsid polypeptide of any one of embodiments 2-4, wherein Xaa1 has low volume.
33. The engineered AAV VP capsid polypeptide of embodiment 32, wherein Xaa1 is C.
34. The engineered AAV VP capsid polypeptide of any one of embodiments 2-4, wherein Xaa1 has low mutability.
35. The engineered AAV VP capsid polypeptide of embodiment 34, wherein Xaa1 is C.
36. The engineered AAV VP capsid polypeptide of any one of embodiments 2-4, wherein Xaa2 has high surface accessibility.
37. The engineered AAV VP capsid polypeptide of embodiment 36, wherein Xaa2 is selected from R and K.
38. The engineered AAV VP capsid polypeptide of any one of embodiments 2-4, wherein Xaa2 has high average flexibility.
39. The engineered AAV VP capsid polypeptide of embodiment 38, wherein Xaa2 is selected from K, I, and N.
40. The engineered AAV VP capsid polypeptide of any one of embodiments 2-4, wherein Xaa2 has low mutability.
41. The engineered AAV VP capsid polypeptide of embodiment 40, wherein Xaa2 is selected from P and K.
42. The engineered AAV VP capsid polypeptide of any one of embodiments 2-4, wherein Xaa3 has high hydropathy.
43. The engineered AAV VP capsid polypeptide of embodiment 42, wherein Xaa3 is selected from I and V.
44. The engineered AAV VP capsid polypeptide of any one of embodiments 2-4, wherein Xaa4 has low mutability.
45. The engineered AAV VP capsid polypeptide of embodiment 44, wherein Xaa4 is selected from L, F, and Y.
46. The engineered AAV VP capsid polypeptide of any one of embodiments 2-4, wherein Xaa4 has low average flexibility.
47. The engineered AAV VP capsid polypeptide of embodiment 46, wherein Xaa4 is selected from W, H, F, and M.
48. The engineered AAV VP capsid polypeptide of any one of embodiments 2-4, wherein Xaa5 has high average flexibility.
49. The engineered AAV VP capsid polypeptide of embodiment 48, wherein Xaa5 is selected from G, R, K, I, and N.
50. The engineered AAV VP capsid polypeptide of any one of embodiments 2-4, wherein Xaa6 has high average flexibility.
51. The engineered AAV VP capsid polypeptide of embodiment 50, wherein Xaa6 is selected from G, R, K, I, and N.
52. The engineered AAV VP capsid polypeptide of any one of embodiments 2-4, wherein Xaa8 has high surface accessibility.
53. The engineered AAV VP capsid polypeptide of embodiment 52, wherein Xaa8 is selected from M, G, and F.
54. The engineered AAV VP capsid polypeptide of any one of embodiments 2-4, wherein Xaa8 has low average flexibility.
55. The engineered AAV VP capsid polypeptide of embodiment 54, wherein Xaa8 is selected from H, F, M, and W.
56. The engineered AAV VP capsid polypeptide of any one of embodiments 2-4, wherein Xaa8 has low mutability.
57. The engineered AAV VP capsid polypeptide of embodiment 56, wherein Xaa8 is selected from L, F, and Y.
58. The engineered AAV VP capsid polypeptide of any one of embodiments 2-4, wherein Xaa9 has high average flexibility.
59. The engineered AAV VP capsid polypeptide of embodiment 58, wherein Xaa9 is selected from D, E, R, K, P, and G.
60. The engineered AAV VP capsid polypeptide of any one of embodiments 2-4, wherein Xaa9 has high mutability.
61. The engineered AAV VP capsid polypeptide of embodiment 60, wherein Xaa9 is selected from D, E, R, V, A, and H.
62. The engineered AAV VP capsid polypeptide of any one of embodiments 1-61, wherein the region from the residue corresponding to residue 581 to the residue corresponding to residue 589 inclusive has a sequence having at least 70%, at least 75%, at least 80%, at least 85%, at least 90%, at least 92%, at least 95%, at least 97%, or at least 99% identical to any one of SEQ ID NO: 32991-SEQ ID NO: 33990.
63. The engineered AAV VP capsid polypeptide of embodiment 62, wherein the region from the residue corresponding to residue 581 to the residue corresponding to residue 589 inclusive has a sequence of any one of SEQ ID NO: 32991-SEQ ID NO: 33990.
64. The engineered AAV VP capsid polypeptide of any one of embodiments 1-61, wherein tropism for skin tissue is measured as a relative accumulation of the rAAV virion in a skin tissue as compared to a non-skin tissue, wherein the non-skin tissue consists collectively of CNS, liver, skeletal muscle, heart, lung, spleen, lymph node, bone marrow, mammary gland, adrenal gland, thyroid, colon, sciatic nerve, and spinal cord.
65. The engineered AAV VP capsid polypeptide of embodiment 64, wherein the CNS tissue is selected from forebrain cortex, occipital cortex, temporal cortex, thalamus, hypothalamus, substantia nigra, hippocampus DG, hippocampus CA1, hippocampus CA3, cerebellum, and any combination thereof.
66. The engineered AAV VP capsid polypeptide of any one of embodiments 64-65, wherein the higher tissue tropism is a 1.0005-fold to about a 1000-fold increased accumulation in the skin tissue as compared to a non-skin tissue.
67. The engineered AAV VP capsid polypeptide of embodiment 66, wherein the higher tissue tropism is at least about a 1.0005-fold, at least about a two-fold, at least about a three-fold, at least about a four-fold, at least about a five-fold, at least about a ten-fold, at least about a twenty-fold, at least about a 50-fold, at least about a 75-fold, at least about a 100-fold, or at least about a 1000-fold increased accumulation in the skin tissue as compared to a non-skin tissue.

[0685] Series P Embodiments—Spinal Cord Tropic Capsids

1. An engineered adeno-associated virus (AAV) viral protein (VP) capsid polypeptide having an amino acid sequence at least 70% identical to SEQ ID NO: 1,

[0686] wherein the engineered AAV VP capsid polypeptide has at least one mutation as compared to SEQ ID NO: 1 in the region from a residue corresponding to residue 581 of SEQ ID NO: 1 to a residue corresponding to residue 589 of SEQ ID NO: 1, inclusive,

[0687] wherein the engineered AAV VP capsid polypeptide is capable of assembling into a recombinant AAV virion (rAAV),

[0688] wherein the at least one mutation confers higher tropism for a spinal cord tissue on the rAAV as compared to an rAAV virion having a wildtype AAV5 VP capsid polypeptide of SEQ ID NO: 1, and

[0689] wherein the engineered AAV VP capsid polypeptide does not have the sequence of any of SEQ ID NO: 3, SEQ ID NO: 4, SEQ ID NO: 5, SEQ ID NO: 6, SEQ ID NO: 7, and SEQ ID NO: 8. 2. The engineered AAV VP capsid polypeptide of embodiment 1, wherein the engineered AAV VP capsid polypeptide has a sequence of SEQ ID NO: 2 and wherein Xaa1, Xaa2, Xaa3, Xaa4, Xaa5, Xaa6, Xaa7, Xaa8, and Xaa9 are each independently selected from any amino acid. 3. An engineered adeno-associated virus (AAV) viral protein (VP) capsid polypeptide having an amino acid sequence of SEQ ID NO: 2,

[0690] wherein amino acid residues Xaa1, Xaa2, Xaa3, Xaa4, Xaa5, Xaa6, Xaa7, Xaa8, and Xaa9 are each independently selected from A, R, N, D, C, E, Q, G, H, I, L, K, M, F, P, S, T, W, Y, and V,

[0691] wherein the engineered AAV VP capsid polypeptide is capable of assembling into a recombinant AAV virion (rAAV), and

[0692] wherein the engineered AAV VP capsid polypeptide does not have the sequence of any of SEQ ID NO: 1, SEQ ID NO: 3, SEQ ID NO: 4, SEQ ID NO: 5, SEQ ID NO: 6, SEQ ID NO: 7, and SEQ ID NO: 8. 4. The engineered AAV VP capsid polypeptide of embodiment 3, wherein the rAAV has higher tropism for a spinal cord tissue as compared to an rAAV virion having a wildtype AAV5 VP capsid polypeptide of SEQ ID NO: 1. 5. The engineered AAV VP capsid polypeptide of embodiment 1, wherein the region from the residue corresponding to residue 581 to the residue corresponding to residue 589, inclusive, has a sequence that is at least 70%, at least 75%, at least 80%, at least 85%, at least 90%, at least 92%, at least 95%, at least 97%, or at least 99% identical to any one of SEQ ID NO: 34991-SEQ ID NO: 37437. 6. The engineered AAV VP capsid polypeptide of embodiment 5, wherein the region from the residue corresponding to residue 581 to the residue corresponding to residue 589, inclusive, has a sequence of any one of SEQ ID NO: 34991-SEQ ID NO: 37437. 7. The engineered AAV VP capsid polypeptide of any one of embodiments 2-4, wherein the Xaa1 to Xaa9 region of SEQ ID NO: 2 has a sequence that is at least 70%, at least 75%, at least 80%, at least 85%, at least 90%, at least 92%, at least 95%, at least 97%, or at least 99% identical to any one of SEQ ID NO: 34991-SEQ ID NO: 37437.

8. The engineered AAV VP capsid polypeptide of embodiment 7, wherein the Xaa1 to Xaa9 region of SEQ ID NO: 2 has a sequence of any one of SEQ ID NO: 34991-SEQ ID NO: 37437.
9. The engineered AAV VP capsid polypeptide of any one of embodiments X-Y, wherein:

[0693] Xaa1 is selected from the group consisting of A, C, K, Q, R, S, and W; or

[0694] Xaa2 is selected from the group consisting of H, I, K, L, T, V, and W; or

[0695] Xaa3 is selected from the group consisting of C, F, G, H, I, K, N, and R; or

[0696] Xaa4 is selected from the group consisting of I, M, Q, S, and V; or

[0697] Xaa5 is selected from the group consisting of H, K, Q, T, W, and Y; or

[0698] Xaa6 is selected from the group consisting of H, L, N, Q, R, W, and Y; or

[0699] Xaa7 is selected from the group consisting of D, H, P, Q, and R; or

[0700] Xaa8 is selected from the group consisting of D, F, L, S, T, and Y; or

[0701] Xaa9 is selected from the group consisting of C, I, N, P, R, S, and Y; or

[0702] any combination thereof.

10. The engineered AAV VP capsid polypeptide of embodiment 9, wherein Xaa1 is selected from K, R, and W.
11. The engineered AAV VP capsid polypeptide of embodiment 9, wherein Xaa1 is K.
12. The engineered AAV VP capsid polypeptide of embodiment 9, wherein Xaa2 is selected from H, I, and T.
13. The engineered AAV VP capsid polypeptide of embodiment 9, wherein Xaa2 is I.
14. The engineered AAV VP capsid polypeptide of embodiment 9, wherein Xaa3 is selected from F. 1, and R.
15. The engineered AAV VP capsid polypeptide of embodiment 9, wherein Xaa3 is I.
16. The engineered AAV VP capsid polypeptide of embodiment 9, wherein Xaa4 is selected from 1, M, and V.
17. The engineered AAV VP capsid polypeptide of embodiment 9, wherein Xaa4 is V.
18. The engineered AAV VP capsid polypeptide of embodiment 9, wherein Xaa5 is selected from T, W, and Y.
19. The engineered AAV VP capsid polypeptide of embodiment 9, wherein Xaa5 is Y.
20. The engineered AAV VP capsid polypeptide of embodiment 9, wherein Xaa6 is selected from L, N, R, and Y.
21. The engineered AAV VP capsid polypeptide of embodiment 9, wherein Xaa6 is Y.
22. The engineered AAV VP capsid polypeptide of embodiment 9, wherein Xaa7 is R.
23. The engineered AAV VP capsid polypeptide of embodiment 9, wherein Xaa8 is selected from S, T, and Y.
24. The engineered AAV VP capsid polypeptide of embodiment 9, wherein Xaa8 is T.
25. The engineered AAV VP capsid polypeptide of embodiment 9, wherein Xaa9 is selected from I, P, and R.
26. The engineered AAV VP capsid polypeptide of embodiment 9, wherein Xaa9 is I.
27. The engineered AAV VP capsid polypeptide of any one of embodiments 1-26, wherein the region from the residue corresponding to residue 581 to the residue corresponding to residue 589, inclusive, has a sequence that is at least 70%, at least 75%, at least 80%, at least 85%, at least 90%, at least 92%, at least 95%, at least 97%, or at least 99% identical to any one of SEQ ID NO: 34991-SEQ ID NO: 35437.
28. The engineered AAV VP capsid polypeptide of embodiment 27, wherein the region from residue 581 to residue 589 of SEQ ID NO: 1 has a sequence of any one of SEQ ID NO: 34991-SEQ ID NO: 35437.
29. The engineered AAV VP capsid polypeptide of any one of embodiments 2-4, wherein Xaa1 has high volume.
30. The engineered AAV VP capsid polypeptide of embodiment 29, wherein Xaa1 is selected from F. W, and Y.
31. The engineered AAV VP capsid polypeptide of any one of embodiments 2-4, wherein Xaa1 has low mutability.
32. The engineered AAV VP capsid polypeptide of embodiment 31, wherein Xaa1 is selected from Y, F, L, and C.
33. The engineered AAV VP capsid polypeptide of any one of embodiments 2-4, wherein Xaa1 has high solubility.
34. The engineered AAV VP capsid polypeptide of embodiment 33, wherein Xaa1 is selected from W, F, I, and L.
35. The engineered AAV VP capsid polypeptide of any one of embodiments 2-4, wherein Xaa1 has low average flexibility.
36. The engineered AAV VP capsid polypeptide of embodiment 35, wherein Xaa1 is selected from F, M, and W.
37. The engineered AAV VP capsid polypeptide of any one of embodiments 2-4, wherein Xaa2 has low hydropathy.
38. The engineered AAV VP capsid polypeptide of embodiment 37, wherein Xaa2 is selected from P and Y.
39. The engineered AAV VP capsid polypeptide of any one of embodiments 2-4, wherein Xaa3 has low hydrophilicity.
40. The engineered AAV VP capsid polypeptide of embodiment 39, wherein Xaa3 is selected from Y, W, V, M, F, I, and L.
41. The engineered AAV VP capsid polypeptide of any one of embodiments 2-4, wherein Xaa3 has high solubility.
42. The engineered AAV VP capsid polypeptide of embodiment 41, wherein Xaa3 is selected from W, F, I, and L.
43. The engineered AAV VP capsid polypeptide of any one of embodiments 2-4, wherein Xaa6 has high volume.
44. The engineered AAV VP capsid polypeptide of embodiment 43, wherein Xaa6 is selected from W, R, K, M, I, and L.
45. The engineered AAV VP capsid polypeptide of any one of embodiments 2-4, wherein Xaa6 has high mol mass.
46. The engineered AAV VP capsid polypeptide of embodiment 45, wherein Xaa6 is selected from W.
47. The engineered AAV VP capsid polypeptide of any one of embodiments 2-4, wherein Xaa8 has high mol mass.
48. The engineered AAV VP capsid polypeptide of embodiment 47, wherein Xaa8 is selected from W, E, K, M, H, and Q.
49. The engineered AAV VP capsid polypeptide of any one of embodiments 2-4, wherein Xaa8 has high volume.
50. The engineered AAV VP capsid polypeptide of embodiment 49, wherein Xaa8 is selected from W, K, M, I, and L.
51. The engineered AAV VP capsid polypeptide of any one of embodiments 2-4, wherein Xaa8 has high goldman engelman steitz.
52. The engineered AAV VP capsid polypeptide of embodiment 51, wherein Xaa8 is selected from V and L.
53. The engineered AAV VP capsid polypeptide of any one of embodiments 2-4, wherein Xaa9 has high hydropathy.
54. The engineered AAV VP capsid polypeptide of embodiment 53, wherein Xaa9 is selected from V and I.
55. The engineered AAV VP capsid polypeptide of any one of embodiments 2-4, wherein Xaa9 has high solubility.
56. The engineered AAV VP capsid polypeptide of embodiment 55, wherein Xaa9 is selected from W, F, I, and L.
57. The engineered AAV VP capsid polypeptide of any one of embodiments 1-56, wherein the region from the residue corresponding to residue 581 to the residue corresponding to residue 589 inclusive has a sequence having at least 70%, at least 75%, at least 80%, at least 85%, at least 90%, at least 92%, at least 95%, at least 97%, or at least 99% identical to any one of SEQ ID NO: 35438-SEQ ID NO: 36437.
58. The engineered AAV VP capsid polypeptide of embodiment 57, wherein the region from the residue corresponding to residue 581 to the residue corresponding to residue 589 inclusive has a sequence of any one of SEQ ID NO: 35438-SEQ ID NO: 36437.
59. The engineered AAV VP capsid polypeptide of any one of embodiments 1-58, wherein tropism for spinal cord tissue is measured as a relative accumulation of the rAAV virion in a spinal cord tissue as compared to a non-spinal cord tissue, wherein the non-spinal cord tissue consists collectively of CNS, liver, skeletal muscle, heart, lung, spleen, lymph node, bone marrow, mammary gland, skin, adrenal gland, thyroid, colon, and sciatic nerve.
60. The engineered AAV VP capsid polypeptide of embodiment 59, wherein the CNS tissue is selected from forebrain cortex, occipital cortex, temporal cortex, thalamus, hypothalamus, substantia nigra, hippocampus DG, hippocampus CA1, hippocampus CA3, cerebellum, and any combination thereof.
61. The engineered AAV VP capsid polypeptide of any one of embodiments 59-60, wherein the higher tissue tropism is a 1.0005-fold to about a 1000-fold increased accumulation in the spinal cord tissue as compared to a non-spinal cord tissue.
62. The engineered AAV VP capsid polypeptide of embodiment 61, wherein the higher tissue tropism is at least about a 1.0005-fold, at least about a two-fold, at least about a three-fold, at least about a four-fold, at least about a five-fold, at least about a ten-fold, at least about a twenty-fold, at least about a 50-fold, at least about a 75-fold, at least about a 100-fold, or at least about a 1000-fold increased accumulation in the spinal cord tissue as compared to a non-spinal cord tissue.

[0703] Series Q Embodiments—Spleen Tropic Capsids

1. An engineered adeno-associated virus (AAV) viral protein (VP) capsid polypeptide having an amino acid sequence at least 70% identical to SEQ ID NO: 1,

[0704] wherein the engineered AAV VP capsid polypeptide has at least one mutation as compared to SEQ ID NO: 1 in the region from a residue corresponding to residue 581 of SEQ ID NO: 1 to a residue corresponding to residue 589 of SEQ ID NO: 1, inclusive,

[0705] wherein the engineered AAV VP capsid polypeptide is capable of assembling into a recombinant AAV virion (rAAV),

[0706] wherein the at least one mutation confers higher tropism for a spleen tissue on the rAAV as compared to an rAAV virion having a wildtype AAV5 VP capsid polypeptide of SEQ ID NO: 1, and

[0707] wherein the engineered AAV VP capsid polypeptide does not have the sequence of any of SEQ ID NO: 3. SEQ ID NO: 4, SEQ ID NO: 5, SEQ ID NO: 6, SEQ ID NO: 7, and SEQ ID NO: 8. 2. The engineered AAV VP capsid polypeptide of embodiment 1, wherein the engineered AAV VP capsid polypeptide has a sequence of SEQ ID NO: 2 and wherein Xaa1, Xaa2, Xaa3, Xaa4, Xaa5, Xaa6, Xaa7, Xaa8, and Xaa9 are each independently selected from any amino acid. 3. An engineered adeno-associated virus (AAV) viral protein (VP) capsid polypeptide having an amino acid sequence of SEQ ID NO: 2,

[0708] wherein amino acid residues Xaa1, Xaa2, Xaa3, Xaa4, Xaa5, Xaa6, Xaa7, Xaa8, and Xaa9 are each independently selected from A, R, N, D, C, E, Q, G, H, I, L, K, M, F, P, S, T, W, Y, and V,

[0709] wherein the engineered AAV VP capsid polypeptide is capable of assembling into a recombinant AAV virion (rAAV), and

[0710] wherein the engineered AAV VP capsid polypeptide does not have the sequence of any of SEQ ID NO: 1, SEQ ID NO: 3, SEQ ID NO: 4, SEQ ID NO: 5, SEQ ID NO: 6, SEQ ID NO: 7, and SEQ ID NO: 8. 4. The engineered AAV VP capsid polypeptide of embodiment 3, wherein the rAAV has higher tropism for a spleen tissue as compared to an rAAV virion having a wildtype AAV5 VP capsid polypeptide of SEQ ID NO: 1. 5. The engineered AAV VP capsid polypeptide of embodiment 1, wherein the region from the residue corresponding to residue 581 to the residue corresponding to residue 589, inclusive, has a sequence that is at least 70%, at least 75%, at least 80%, at least 85%, at least 90%, at least 92%, at least 95%, at least 97%, or at least 99% identical to any one of SEQ ID NO: 37438-SEQ ID NO: 40437. 6. The engineered AAV VP capsid polypeptide of embodiment 5, wherein the region from the residue corresponding to residue 581 to the residue corresponding to residue 589, inclusive, has a sequence of any one of SEQ ID NO: 37438-SEQ ID NO: 40437.

7. The engineered AAV VP capsid polypeptide of any one of embodiments 2-4, wherein the Xaa1 to Xaa9 region of SEQ ID NO: 2 has a sequence that is at least 70%, at least 75%, at least 80%, at least 85%, at least 90%, at least 92%, at least 95%, at least 97%, or at least 99% identical to any one of SEQ ID NO: 37438-SEQ ID NO: 40437.
8. The engineered AAV VP capsid polypeptide of embodiment 7, wherein the Xaa1 to Xaa9 region of SEQ ID NO: 2 has a sequence of any one of SEQ ID NO: 37438-SEQ ID NO: 40437.
9. The engineered AAV VP capsid polypeptide of any one of embodiments 2-4, wherein:

[0711] Xaa1 is selected from the group consisting of C, F, H, I, L, P, W, and Y; or

[0712] Xaa2 is selected from the group consisting of D, E, L, N, P, R, and W; or

[0713] Xaa3 is selected from the group consisting of C, D, E, P, and W; or

[0714] Xaa4 is selected from the group consisting of C, F, G, H, R, W and Y; or

[0715] Xaa5 is selected from the group consisting of A, D, E, G, P, R, and W; or

[0716] Xaa6 is selected from the group consisting of A, C, D, E, K, R, and W; or

[0717] Xaa7 is selected from the group consisting of F, L, P, R, W, and Y; or

[0718] Xaa8 is selected from the group consisting of E, I, K, L, P, R, and T; or

[0719] Xaa9 is selected from the group consisting of C, H, M, T, V, and W; or

[0720] any combination thereof.

10. The engineered AAV VP capsid polypeptide of embodiment 9, wherein Xaa1 is selected from C, F, P, W, and Y.
11. The engineered AAV VP capsid polypeptide of embodiment 9, wherein Xaa1 is selected from P, W, and Y.
12. The engineered AAV VP capsid polypeptide of embodiment 9, wherein Xaa1 is P.
13. The engineered AAV VP capsid polypeptide of embodiment 9, wherein Xaa2 is selected from D, E, and W.
14. The engineered AAV VP capsid polypeptide of embodiment 9, wherein Xaa2 is D.
15. The engineered AAV VP capsid polypeptide of embodiment 9, wherein Xaa3 is selected from D, P, and W.
16. The engineered AAV VP capsid polypeptide of embodiment 9, wherein Xaa3 is P.
17. The engineered AAV VP capsid polypeptide of embodiment 9, wherein Xaa4 is selected from C, H, and W.
18. The engineered AAV VP capsid polypeptide of embodiment 9, wherein Xaa4 is C.
19. The engineered AAV VP capsid polypeptide of embodiment 9, wherein Xaa5 is selected from D, E, G, and P.
20. The engineered AAV VP capsid polypeptide of embodiment 9, wherein Xaa5 is D.
21. The engineered AAV VP capsid polypeptide of embodiment 9, wherein Xaa6 is selected from C, K, and R.
22. The engineered AAV VP capsid polypeptide of embodiment 9, wherein Xaa6 is K.
23. The engineered AAV VP capsid polypeptide of embodiment 9, wherein Xaa7 is selected from L, P, and W.
24. The engineered AAV VP capsid polypeptide of embodiment 9, wherein Xaa7 is P.
25. The engineered AAV VP capsid polypeptide of embodiment 9, wherein Xaa8 is selected from P, R, and K.
26. The engineered AAV VP capsid polypeptide of embodiment 9, wherein Xaa8 is K.
27. The engineered AAV VP capsid polypeptide of embodiment 9, wherein Xaa9 is selected from C, T, and V.
28. The engineered AAV VP capsid polypeptide of embodiment 9, wherein Xaa9 is V.
29. The engineered AAV VP capsid polypeptide of any one of embodiments 1-28, wherein the region from the residue corresponding to residue 581 to the residue corresponding to residue 589, inclusive, has a sequence that is at least 70%, at least 75%, at least 80%, at least 85%, at least 90%, at least 92%, at least 95%, at least 97%, or at least 99% identical to any one of SEQ ID NO: 37438-SEQ ID NO: 38437.
30. The engineered AAV VP capsid polypeptide of embodiment 29, wherein the region from residue 581 to residue 589 of SEQ ID NO: 1 has a sequence of any one of SEQ ID NO: 37438-SEQ ID NO: 38437.
31. The engineered AAV VP capsid polypeptide of any one of embodiments 2-4, wherein Xaa1 has low solubility.
32. The engineered AAV VP capsid polypeptide of embodiment 31, wherein Xaa1 is selected from D and P.
33. The engineered AAV VP capsid polypeptide of any one of embodiments 2-4, wherein Xaa1 has high solubility.
34. The engineered AAV VP capsid polypeptide of embodiment 33, wherein Xaa1 is selected from F, I, and L.
35. The engineered AAV VP capsid polypeptide of any one of embodiments 2-4, wherein Xaa1 has low hydropathy.
36. The engineered AAV VP capsid polypeptide of embodiment 35, wherein Xaa1 is selected from Y and P.
37. The engineered AAV VP capsid polypeptide of any one of embodiments 2-4, wherein Xaa1 has low mutability.
38. The engineered AAV VP capsid polypeptide of embodiment 37, wherein Xaa1 is selected from C, K, and P.
39. The engineered AAV VP capsid polypeptide of any one of embodiments 2-4, wherein Xaa2 has low solubility.
40. The engineered AAV VP capsid polypeptide of embodiment 39, wherein Xaa2 is selected from D, Q, and R.
41. The engineered AAV VP capsid polypeptide of any one of embodiments 2-4, wherein Xaa2 has low hydropathy.
42. The engineered AAV VP capsid polypeptide of embodiment 41, wherein Xaa2 is selected from D, E, R, K, H, N, and Q.
43. The engineered AAV VP capsid polypeptide of any one of embodiments 2-4, wherein Xaa2 has low charge.
44. The engineered AAV VP capsid polypeptide of embodiment 43, wherein Xaa2 is selected from D and E.
45. The engineered AAV VP capsid polypeptide of any one of embodiments 2-4, wherein Xaa2 has low volume.
46. The engineered AAV VP capsid polypeptide of embodiment 45, wherein Xaa2 is selected from T, N, P, and D.
47. The engineered AAV VP capsid polypeptide of any one of embodiments 2-4, wherein Xaa2 has high average flexibility.
48. The engineered AAV VP capsid polypeptide of embodiment 47, wherein Xaa2 is selected from D, E, R, P, G, Q, and S.
49. The engineered AAV VP capsid polypeptide of any one of embodiments 2-4, wherein Xaa3 has low solubility.
50. The engineered AAV VP capsid polypeptide of embodiment 49, wherein Xaa3 is selected from D, E, P, and N.
51. The engineered AAV VP capsid polypeptide of any one of embodiments 2-4, wherein Xaa3 has low hydropathy.
52. The engineered AAV VP capsid polypeptide of embodiment 51, wherein Xaa3 is selected from D, E, H, N, Q, and P.
53. The engineered AAV VP capsid polypeptide of any one of embodiments 2-4, wherein Xaa4 has low hydropathy.
54. The engineered AAV VP capsid polypeptide of embodiment 53, wherein Xaa4 is selected from K and R.
55. The engineered AAV VP capsid polypeptide of any one of embodiments 2-4, wherein Xaa5 has low solubility.
56. The engineered AAV VP capsid polypeptide of embodiment 55, wherein Xaa5 is selected from D, E, P, and N.
57. The engineered AAV VP capsid polypeptide of any one of embodiments 2-4, wherein Xaa5 has high average flexibility.
58. The engineered AAV VP capsid polypeptide of embodiment 57, wherein Xaa5 is selected from D, E, R, P, G, Q, and S.
59. The engineered AAV VP capsid polypeptide of any one of embodiments 2-4, wherein Xaa6 has low mutability.
60. The engineered AAV VP capsid polypeptide of embodiment 59, wherein Xaa6 is selected from C.
61. The engineered AAV VP capsid polypeptide of any one of embodiments 2-4, wherein Xaa8 has high surface accessibility.
62. The engineered AAV VP capsid polypeptide of embodiment 61, wherein Xaa8 is selected from E, R, and K.
63. The engineered AAV VP capsid polypeptide of any one of embodiments 2-4, wherein Xaa8 has low solubility.
64. The engineered AAV VP capsid polypeptide of embodiment 63, wherein Xaa8 is selected from E, P, R, K, N, Q.
65. The engineered AAV VP capsid polypeptide of any one of embodiments 2-4, wherein Xaa8 has medium volume.
66. The engineered AAV VP capsid polypeptide of embodiment 65, wherein Xaa8 is selected from E, D, R, K, V, P, M, I, L, H, N, Q, and T.
67. The engineered AAV VP capsid polypeptide of any one of embodiments 2-4, wherein Xaa9 has medium mol mass.
68. The engineered AAV VP capsid polypeptide of embodiment 67, wherein Xaa9 is selected from E, D, K, M, I, L, H, N.
69. The engineered AAV VP capsid polypeptide of any one of embodiments 1-68, wherein the region from the residue corresponding to residue 581 to the residue corresponding to residue 589 inclusive has a sequence having at least 70%, at least 75%, at least 80%, at least 85%, at least 90%, at least 92%, at least 95%, at least 97%, or at least 99% identical to any one of SEQ ID NO: 38438-SEQ ID NO: 39437.
70. The engineered AAV VP capsid polypeptide of embodiment 69, wherein the region from the residue corresponding to residue 581 to the residue corresponding to residue 589 inclusive has a sequence of any one of SEQ ID NO: 38438-SEQ ID NO: 39437.
71. The engineered AAV VP capsid polypeptide of any one of embodiments 1-70, wherein tropism for spleen tissue is measured as a relative accumulation of the rAAV virion in a spleen tissue as compared to a non-spleen tissue, wherein the non-spleen tissue consists collectively of CNS, liver, skeletal muscle, heart, lung, lymph node, bone marrow, mammary gland, skin, adrenal gland, thyroid, colon, sciatic nerve, and spinal cord.
72. The engineered AAV VP capsid polypeptide of embodiment 71, wherein the CNS tissue is selected from forebrain cortex, occipital cortex, temporal cortex, thalamus, hypothalamus, substantia nigra, hippocampus DG, hippocampus CA1, hippocampus CA3, cerebellum, and any combination thereof.
73. The engineered AAV VP capsid polypeptide of any one of embodiments 71-72, wherein the higher tissue tropism is a 1.0005-fold to about a 1000-fold increased accumulation in the spleen tissue as compared to a non-spleen tissue.
74. The engineered AAV VP capsid polypeptide of embodiment 73, wherein the higher tissue tropism is at least about a 1.0005-fold, at least about a two-fold, at least about a three-fold, at least about a four-fold, at least about a five-fold, at least about a ten-fold, at least about a twenty-fold, at least about a 50-fold, at least about a 75-fold, at least about a 100-fold, or at least about a 1000-fold increased accumulation in the spleen tissue as compared to a non-spleen tissue.

[0721] Series R Embodiments—Thyroid Gland Tropic Capsids

1. An engineered adeno-associated virus (AAV) viral protein (VP) capsid polypeptide having an amino acid sequence at least 70% identical to SEQ ID NO: 1,

[0722] wherein the engineered AAV VP capsid polypeptide has at least one mutation as compared to SEQ ID NO: 1 in the region from a residue corresponding to residue 581 of SEQ ID NO: 1 to a residue corresponding to residue 589 of SEQ ID NO: 1, inclusive,

[0723] wherein the engineered AAV VP capsid polypeptide is capable of assembling into a recombinant AAV virion (rAAV),

[0724] wherein the at least one mutation confers higher tropism for a thyroid gland tissue on the rAAV as compared to an rAAV virion having a wildtype AAV5 VP capsid polypeptide of SEQ ID NO: 1, and

[0725] wherein the engineered AAV VP capsid polypeptide does not have the sequence of any of SEQ ID NO: 3, SEQ ID NO: 4, SEQ ID NO: 5, SEQ ID NO: 6, SEQ ID NO: 7, and SEQ ID NO: 8. 2. The engineered AAV VP capsid polypeptide of embodiment 1, wherein the engineered AAV VP capsid polypeptide has a sequence of SEQ ID NO: 2 and wherein Xaa1, Xaa2, Xaa3, Xaa4, Xaa5, Xaa6, Xaa7, Xaa8, and Xaa9 are each independently selected from any amino acid. 3. An engineered adeno-associated virus (AAV) viral protein (VP) capsid polypeptide having an amino acid sequence of SEQ ID NO: 2,

[0726] wherein amino acid residues Xaa1, Xaa2, Xaa3, Xaa4, Xaa5, Xaa6, Xaa7, Xaa8, and Xaa9 are each independently selected from A, R, N, D, C, E, Q, G, H, I, L, K, M, F, P, S, T, W, Y, and V,

[0727] wherein the engineered AAV VP capsid polypeptide is capable of assembling into a recombinant AAV virion (rAAV), and

[0728] wherein the engineered AAV VP capsid polypeptide does not have the sequence of any of SEQ ID NO: 1, SEQ ID NO: 3, SEQ ID NO: 4, SEQ ID NO: 5, SEQ ID NO: 6, SEQ ID NO: 7, and SEQ ID NO: 8. 4. The engineered AAV VP capsid polypeptide of embodiment 3, wherein the rAAV has higher tropism for a thyroid gland tissue as compared to an rAAV virion having a wildtype AAV5 VP capsid polypeptide of SEQ ID NO: 1. 5. The engineered AAV VP capsid polypeptide of embodiment 1, wherein the region from the residue corresponding to residue 581 to the residue corresponding to residue 589, inclusive, has a sequence that is at least 70%, at least 75%, at least 80%, at least 85%, at least 90%, at least 92%, at least 95%, at least 97%, or at least 99% identical to any one of SEQ ID NO: 40438-SEQ ID NO: 43437. 6. The engineered AAV VP capsid polypeptide of embodiment 5, wherein the region from the residue corresponding to residue 581 to the residue corresponding to residue 589, inclusive, has a sequence of any one of SEQ ID NO: 40438-SEQ ID NO: 43437. 7. The engineered AAV VP capsid polypeptide of embodiment 2-4, wherein the Xaa1 to Xaa9 region of SEQ ID NO: 2 has a sequence that is at least 70%, at least 75%, at least 80%, at least 85%, at least 90%, at least 92%, at least 95%, at least 97%, or at least 99% identical to any one of SEQ ID NO: 40438-SEQ ID NO: 43437. 8. The engineered AAV VP capsid polypeptide of embodiment 7, wherein the Xaa1 to Xaa9 region of SEQ ID NO: 2 has a sequence of any one of SEQ ID NO: 40438-SEQ ID NO: 43437.

9. The engineered AAV VP capsid polypeptide of any one of embodiments 2-4, wherein:

[0729] Xaa1 is selected from the group consisting of A, K, M, N, Q, or R; or

[0730] Xaa2 is selected from the group consisting of A, F, K, L, M, T, V, or W; or

[0731] Xaa3 is selected from the group consisting of A, I, K, R, S, T, V, or W; or

[0732] Xaa4 is selected from the group consisting of A, D, E, I, P, or V; or

[0733] Xaa5 is selected from the group consisting of F, I, M, Q, V, or Y; or

[0734] Xaa6 is selected from the group consisting of H, M, N, or Y; or

[0735] Xaa7 is selected from the group consisting of H, I, N, Q, S, or W; or

[0736] Xaa8 is selected from the group consisting of A, D, F, Q, S, or Y; or

[0737] Xaa9 is selected from the group consisting of A, Q, S, or Y; or

[0738] any combination thereof.

10. The engineered AAV VP capsid polypeptide of embodiment 9, wherein Xaa1 is selected from K, N and Q.
11. The engineered AAV VP capsid polypeptide of embodiment 9, wherein Xaa1 is K.
12. The engineered AAV VP capsid polypeptide of embodiment 9, wherein Xaa2 is selected from F, V, and W.
13. The engineered AAV VP capsid polypeptide of embodiment 9, wherein Xaa2 is W.
14. The engineered AAV VP capsid polypeptide of embodiment 9, wherein Xaa3 is selected from A, R and T.
15. The engineered AAV VP capsid polypeptide of embodiment 9, wherein Xaa3 is R.
16. The engineered AAV VP capsid polypeptide of embodiment 9, wherein Xaa4 is selected from A, E, and I.
17. The engineered AAV VP capsid polypeptide of embodiment 9, wherein Xaa4 is A.
18. The engineered AAV VP capsid polypeptide of embodiment 9, wherein Xaa5 is M, V, or Y.
19. The engineered AAV VP capsid polypeptide of embodiment 9, wherein Xaa5 is M.
20. The engineered AAV VP capsid polypeptide of embodiment 9, wherein Xaa6 is N.
21. The engineered AAV VP capsid polypeptide of embodiment 9, wherein Xaa7 is selected from H. I, and N.
22. The engineered AAV VP capsid polypeptide of embodiment 9, wherein Xaa7 is H.
23. The engineered AAV VP capsid polypeptide of embodiment 9, wherein Xaa8 is selected from A, F, and S.
24. The engineered AAV VP capsid polypeptide of embodiment 9, wherein Xaa8 is F.
25. The engineered AAV VP capsid polypeptide of embodiment 9, wherein Xaa9 is selected from A and S.
26. The engineered AAV VP capsid polypeptide of embodiment 9, wherein Xaa9 is A.
27. The engineered AAV VP capsid polypeptide of any one of embodiments 1-26, wherein the region from the residue corresponding to residue 581 to the residue corresponding to residue 589, inclusive, has a sequence that is at least 70%, at least 75%, at least 80%, at least 85%, at least 90%, at least 92%, at least 95%, at least 97%, or at least 99% identical to any one of SEQ ID NO: 40438-SEQ ID NO: 41437.
28. The engineered AAV VP capsid polypeptide of embodiment 27, wherein the region from residue 581 to residue 589 of SEQ ID NO: 1 has a sequence of any one of SEQ ID NO: 40438-SEQ ID NO: 41437.
29. The engineered AAV VP capsid polypeptide of any one of embodiments 2-4, wherein Xaa1 has high mutability.
30. The engineered AAV VP capsid poly peptide of embodiment 29, wherein Xaa1 is N.
31. The engineered AAV VP capsid polypeptide of any one of embodiments 2-4, wherein Xaa2 has low surface accessibility.
32. The engineered AAV VP capsid polypeptide of embodiment 31, wherein Xaa2 is selected from F, G, and M.
33. The engineered AAV VP capsid polypeptide of any one of embodiments 2-4, wherein Xaa3 has high solubility.
34. The engineered AAV VP capsid polypeptide of embodiment 33, wherein Xaa3 is selected from F.
35. The engineered AAV VP capsid polypeptide of any one of embodiments 2-4, wherein Xaa3 has low mutability.
36. The engineered AAV VP capsid polypeptide of embodiment 35, wherein Xaa3 is selected from Y, F, L, and C.
37. The engineered AAV VP capsid polypeptide of any one of embodiments 2-4, wherein Xaa3 has medium mol mass.
38. The engineered AAV VP capsid polypeptide of embodiment 37, wherein Xaa3 is selected from D, E, R, K, V, P, M, I, L, N, Q, T, and C.
39. The engineered AAV VP capsid polypeptide of any one of embodiments 2-4, wherein Xaa3 has low surface accessibility.
40. The engineered AAV VP capsid polypeptide of embodiment 39, wherein Xaa3 is selected from V, I, L, and C.
41. The engineered AAV VP capsid polypeptide of any one of embodiments 2-4, wherein Xaa4 has high goldman engelman steitz.
42. The engineered AAV VP capsid polypeptide of embodiment 41, wherein Xaa4 is selected from L and V.
43. The engineered AAV VP capsid polypeptide of any one of embodiments 2-4, wherein Xaa4 has low surface accessibility.
44. The engineered AAV VP capsid polypeptide of embodiment 43, wherein Xaa4 is selected from V, M, A, G, F, I, and L.
45. The engineered AAV VP capsid polypeptide of any one of embodiments 2-4, wherein Xaa4 has low mol mass.
46. The engineered AAV VP capsid polypeptide of embodiment 45, wherein Xaa4 is selected from D, A, G, I, L, and N.
47. The engineered AAV VP capsid polypeptide of any one of embodiments 2-4, wherein Xaa5 has high solubility.
48. The engineered AAV VP capsid polypeptide of embodiment 47, wherein Xaa5 is selected from C, L, F, M, V, and Y.
49. The engineered AAV VP capsid polypeptide of any one of embodiments 2-4, wherein Xaa5 has low solubility.
50. The engineered AAV VP capsid polypeptide of embodiment 49, wherein Xaa5 is selected from D.
51. The engineered AAV VP capsid polypeptide of any one of embodiments 2-4, wherein Xaa5 has low average flexibility.
52. The engineered AAV VP capsid polypeptide of embodiment 51, wherein Xaa5 is selected from F, M, and W.
53. The engineered AAV VP capsid polypeptide of any one of embodiments 2-4, wherein Xaa6 has low average flexibility.
54. The engineered AAV VP capsid polypeptide of embodiment 53, wherein Xaa6 is selected from F, M, and W.
55. The engineered AAV VP capsid polypeptide of any one of embodiments 2-4, wherein Xaa7 has high mutability.
56. The engineered AAV VP capsid polypeptide of embodiment 55, wherein Xaa7 is selected from N.
57. The engineered AAV VP capsid polypeptide of any one of embodiments 2-4, wherein Xaa7 has low volume.
58. The engineered AAV VP capsid polypeptide of embodiment 57, wherein Xaa7 is selected from P, N, and T.
59. The engineered AAV VP capsid polypeptide of any one of embodiments 2-4, wherein Xaa8 has low average flexibility.
60. The engineered AAV VP capsid polypeptide of embodiment 59, wherein Xaa8 is selected from F, M, and W.
61. The engineered AAV VP capsid polypeptide of any one of embodiments 2-4, wherein Xaa8 has low surface accessibility.
62. The engineered AAV VP capsid polypeptide of embodiment 61, wherein Xaa8 is selected from M, G, and F.
63. The engineered AAV VP capsid polypeptide of any one of embodiments 2-4, wherein Xaa9 has low mutability.
64. The engineered AAV VP capsid polypeptide of embodiment 63, wherein Xaa9 is selected from R, K, P, H, and C.
65. The engineered AAV VP capsid polypeptide of any one of embodiments 2-4, wherein Xaa9 has low hydropathy.
66. The engineered AAV VP capsid polypeptide of embodiment 65, wherein Xaa9 is selected from R.
67. The engineered AAV VP capsid polypeptide of any one of embodiments 1-66, wherein the region from the residue corresponding to residue 581 to the residue corresponding to residue 589 inclusive has a sequence having at least 70%, at least 75%, at least 80%, at least 85%, at least 90%, at least 92%, at least 95%, at least 97%, or at least 99% identical to any one of SEQ ID NO: 41438-SEQ ID NO: 42437.
68. The engineered AAV VP capsid polypeptide of embodiment 67, wherein the region from the residue corresponding to residue 581 to the residue corresponding to residue 589 inclusive has a sequence of any one of SEQ ID NO: 41438-SEQ ID NO: 42437.
69. The engineered AAV VP capsid polypeptide of any one of embodiments 1-68, wherein tropism for thyroid gland tissue is measured as a relative accumulation of the rAAV virion in a thyroid gland tissue as compared to a non-thyroid gland tissue, wherein the non-thyroid gland tissue consists collectively of CNS, liver, skeletal muscle, heart, lung, spleen, lymph node, bone marrow, mammary gland, skin, adrenal gland, colon, sciatic nerve, and spinal cord.
70. The engineered AAV VP capsid polypeptide of embodiment 69, wherein the CNS tissue is selected from forebrain cortex, occipital cortex, temporal cortex, thalamus, hypothalamus, substantia nigra, hippocampus DG, hippocampus CA1, hippocampus CA3, cerebellum, and any combination thereof.
71. The engineered AAV VP capsid polypeptide of any one of embodiments 69-70, wherein the higher tissue tropism is a 1.0005-fold to about a 1000-fold increased accumulation in the thyroid gland tissue as compared to a non-thyroid gland tissue.
72. The engineered AAV VP capsid polypeptide of embodiment 71, wherein the higher tissue tropism is at least about a 1.0005-fold, at least about a two-fold, at least about a three-fold, at least about a four-fold, at least about a five-fold, at least about a ten-fold, at least about a twenty-fold, at least about a 50-fold, at least about a 75-fold, at least about a 100-fold, or at least about a 1000-fold increased accumulation in the thyroid gland tissue as compared to a non-thyroid gland tissue.

### Series S Embodiments

[0739] 1. An engineered adeno-associated virus (AAV) VP capsid polypeptide having the amino acid sequence of SEQ ID NO:2,

[0740] wherein amino acid residues Xaa1, Xaa2, Xaa3, Xaa4, Xaa5, Xaa6, Xaa7, Xaa8, and Xaa9 are each independently selected from A, R, N, D, C, E, Q, G, H, I, L, K, M, F, P, S, T, W, Y, and V:

[0741] wherein the capsid polypeptide is capable of assembling into a recombinant AAV

[0742] virion (rAAV); and

[0743] wherein the polypeptide does not have the sequence of any of SEQ ID NO:1, SEQ ID NO:3, SEQ ID NO:4, SEQ ID NO:5, SEQ ID NO:6, SEQ ID NO:7, and SEQ ID NO:8.

2. An engineered adeno-associated virus (AAV) VP capsid polypeptide having at least one mutation in a residue corresponding to residue 581 to residue 589 in SEQ ID NO: 1, wherein the capsid polypeptide is capable of assembling into a recombinant AAV virion (rAAV) and wherein the polypeptide mutation confers tissue tropism on the recombinant rAAV for a first tissue as compared to a second tissue and wherein the AAV VP capsid polypeptide does not have the sequence of any of SEQ ID NO:3. SEQ ID NO:4, SEQ ID NO:5, SEQ ID NO:6, SEQ ID NO:7, and SEQ ID NO:8.
3. An engineered AAV VP capsid polypeptide comprising a polypeptide sequence represented by the formula. (A)-(X)-(B)
[0744] wherein:
[0745] (A) is the polypeptide sequence of SEQ ID NO:47438 (VAYNVGGQMATNNQSSTTAP residues 561-580 of SEQ ID NO:2);
[0746] (X) is the polypeptide sequence comprising amino acid residues Xaa1, Xaa2, Xaa3, Xaa4, Xaa5, Xaa6, Xaa7, Xaa8, and Xaa9 of SEQ ID NO:2; and
[0747] (B) is the polypeptide sequence of SEQ ID NO:47439 (IVPGSVWMERDVYLQGPIWA residues 590-609 of SEQ ID NO:2;

[0748] wherein Xaa1, Xaa2, Xaa3, Xaa4, Xaa5, Xaa6, Xaa7, Xaa8, and Xaa9 are each independently selected from A, R, N, D, C, E, Q, G, H, I, L, K, M, F, P, S, T, W, Y, and V; and

[0749] wherein the capsid polypeptide is capable of assembling into a recombinant AAV virion (rAAV); and;

[0750] wherein the polypeptide does not have the sequence of any of SEQ ID NO:1, SEQ ID NO:3, SEQ ID NO:4, SEQ ID NO:5, SEQ ID NO:6, SEQ ID NO:7, and SEQ ID NO:8.

4. The engineered AAV VP capsid polypeptide of embodiment 3, comprising a polypeptide sequence represented by the formula: (A)-(X)-(B) wherein:
[0751] (A) is the polypeptide sequence of SEQ ID NO: 47438 (residues 561-580 of SEQ ID NO: 2 VAYNVGGQMATNNQSSTTAP);
[0752] (X) is a polypeptide sequence selected from the list of polypeptides in Table 8 (SEQ ID NOs:115-1114)¹ or Table 10 (SEQ ID NOs: 7118-8117) that confers CNS tissue tropism on a recombinant AAV virion (rAAV); and
[0753] (B) is the polypeptide sequence of SEQ ID NO: 47439 (residues 590-609 of SEQ ID NO: 2: (IVPGSVWMERDVYLQGPIWA)); and

[0754] wherein the capsid polypeptide is capable of assembling into the rAAV and, the capsid does not have the sequence of any of SEQ ID NO:1, SEQ ID NO:3, SEQ ID NO:4. SEQ ID NO:5, SEQ ID NO:6, SEQ ID NO:7, and SEQ ID NO:8. 5. The engineered AAV VP capsid polypeptide of embodiment 4, wherein the CNS tissue is selected from the group consisting of hippocampus: (dentate gyrus, CA1 and CA3); cerebellum, hypothalamus, cortex: (occipital, temporal and forebrain); substantia nigra, thalamus, and any combination thereof.

6. The recombinant AAV VP capsid polypeptide of embodiment 3, comprising a polypeptide sequence represented by the formula: (A)-(X)-(B) wherein:
[0755] (A) is the polypeptide sequence of SEQ ID NO: 47438 (residues 561-580 of SEQ ID NO: 2: (VAYNVGGQMATNNQSSTTAP));
[0756] (X) is a polypeptide sequence selected from any of the polypeptides of SEQ ID NO:115-1114 or 1118-47437 that confer corresponding tissue tropism on a recombinant AAV virion (rAAV); and
[0757] (B) is the polypeptide sequence of SEQ ID NO: 47439 (residues 590-609 of SEQ ID NO: 2: (IVPGSVWMERDVYLQGPIWA)); and

[0758] wherein the capsid polypeptide is capable of assembling into the rAAV and, the capsid does not have the sequence of any of SEQ ID NO:1, SEQ ID NO:3, SEQ ID NO:4. SEQ ID NO:5, SEQ ID NO:6, SEQ ID NO:7, and SEQ ID NO:8. 7. The engineered AAV VP capsid polypeptide of any of the previous embodiments, wherein the AAV VP capsid polypeptide is an AAV5 VP1 capsid polypeptide. 8. The engineered AAV VP capsid polypeptide of any of the previous embodiments, wherein the capsid confers upon a recombinant AAV virion (rAAV), increased tissue targeting for any tissue selected from the following tissues:
[0759] adipose, adrenal gland, aorta, brain (including hippocampus: dentate gyrus, CA1 and CA3; cerebellum, caudate, putamen, midbrain, pons, hypothalamus, cortex-including occipital, temporal and forebrain; substantia nigra, thalamus, and any combinations thereof), bone marrow, cecum, colon, dorsal root ganglion, duodenum, epididymis, esophagus, eye, gallbladder, heart, ileum, jejunum, kidney, lung, lymph nodes, mammary gland, ovary, pancreas, parathyroid gland, peripheral nerve, pituitary, prostate, salivary gland, seminal vesicle, skeletal muscle, skin, spinal cord, spleen, stomach, testis, thymus, thyroid, trachea, urinary bladder, uterus, and vagina.
   compared to a control virion comprising a capsid with any of the following sequences: SEQ ID NO:1, SEQ ID NO:3, SEQ ID NO:4, SEQ ID NO:5, SEQ ID NO:6, SEQ ID NO:7, and SEQ ID NO:8. 9. The engineered AAV VP capsid polypeptide of embodiment 2, wherein the rAAV exhibits from about a 1.0005-fold to about a 1000-fold increased accumulation in the first tissue as compared to the second tissue. 10. The engineered AAV VP capsid polypeptide of embodiment 9, wherein the rAAV exhibits at least about a 1.0005-fold, at least about a two-fold, at least about a three-fold, at least about a four-fold, at least about a five-fold, at least about a ten-fold, at least about a twenty-fold, at least about a 50-fold, at least about a 75-fold, at least about a 100-fold, or at least about a 1000-fold increased accumulation in the first tissue as compared to the second tissue. 11. The engineered AAV VP capsid polypeptide of any of embodiments 1 or 3-8, wherein the rAAV exhibits from about a 1.0005-fold to about a 1000-fold increased accumulation in the tissue. 12. The engineered AAV VP capsid polypeptide of embodiment 11, wherein the rAAV exhibits at least about a 1.0005-fold, at least about a two-fold, at least about a three-fold, at least about a four-fold, at least about a five-fold, at least about a ten-fold, at least about a twenty-fold, at least about a 50-fold, at least about a 75-fold, at least about a 100-fold, or at least about a 1000-fold increased accumulation in the tissue. 13. The engineered AAV VP capsid polypeptide of any of embodiments 1-3 or 6-12, wherein at least one mutant residue is:

[0760] Xaa1 and Xaa1 is selected from A, G, K, M, N, Q, R, S, or T;

[0761] Xaa2 and Xaa2 is selected from A, C, H, I, K, S, T, or V;

[0762] Xaa3 and Xaa3 is selected from A, G, H, K, M, N, Q, R, S, T, or V;

[0763] Xaa4 and Xaa4 is selected from L, M, P, Q, R, T, or W;

[0764] Xaa5 and Xaa5 is selected from F, H, I, K, M, T, or Y;

[0765] Xaa6 and Xaa6 is selected from E, G, H, L, M, N, Q, T, or W;

[0766] Xaa7 and Xaa7 is selected from A, C, G, H, L, M, R or S;

[0767] Xaa8 and Xaa8 is selected from A, C, D, F, G, H, M, Q, S, V, W, or Y;

[0768] Xaa9 and Xaa9 is selected from A, C, E, G, H, M, N, P, Q, S, V, or W;

[0769] or any combination thereof,

[0770] wherein the capsid polypeptide is capable of assembling into a recombinant AAV virion (rAAV) and wherein the rAAV is capable of exhibiting tissue tropism for liver tissue.

14. The engineered AAV VP capsid polypeptide of any of embodiments 1-12, wherein:

[0771] Xaa1 excludes A, G, K, M, N, Q, R, S, or T;

[0772] Xaa2 excludes A, C, H, I, K, S, T, or V;

[0773] Xaa3 excludes A, G, H, K, M, N, Q, R, S, T, or V:

[0774] Xaa4 excludes L, M, P, Q, R, T, or W;

[0775] Xaa5 excludes F, H, I, K, M, T, or Y;

[0776] Xaa6 excludes E, G, H, L, M, N, Q, T, or W;

[0777] Xaa7 excludes A, C, G, H, L, M, R or S.

[0778] Xaa8 excludes A, C, D, F, G, H, M, Q, S, V, W, or Y;

[0779] Xaa9 excludes A, C, E, G, H, M, N, P, Q, S, V, or W.

[0780] or any combination thereof,

wherein the capsid polypeptide is capable of assembling into a recombinant AAV virion (rAAV) and exhibits less targeting or tropism to liver tissue compared to a rAAV having a VP1 capsid polypeptide having the sequence of SEQ ID NO:1. 15. The engineered AAV VP capsid polypeptide of any of the previous embodiments, having at least one residue corresponding to residue 581 to residue 589 in SEQ ID NO: 2, wherein:

[0781] Xaa1 is A, D, E, G, L, M, N, Q, S, T, or V;

[0782] Xaa2 is A, C, D, E, G, H, I, N, P, Q, S, T, or V;

[0783] Xaa3 is A, D, E, G, H, M, N, Q, S, T, or V;

[0784] Xaa4 is A, D, E, G, H, N, P, Q, S, or T;

[0785] Xaa5 is A, C, D, E, G, H, N, Q, S, T, or Y;

[0786] Xaa6 is A, D, E, G, H, N, P, Q, S, or T;

[0787] Xaa7 is s A, C, D, E, G, H, N, Q, S, or T;

[0788] Xaa8 is A, C, D, E, G, H, N, Q, S, or T;

[0789] Xaa9 is A, D, E, G, H, N, P, Q, S, or T;

[0790] or any combination thereof,

wherein the capsid polypeptide is capable of assembling into a recombinant AAV virion (rAAV).
16. The recombinant capsid polypeptide of any preceding embodiment, further comprising one or more mutations or substitutions at an amino acid residue outside of the 581-589 region, wherein the one or more mutations or substitutions at an amino acid residue outside of the 581-589 region confers improved manufacturability, improved viral assembly, improved tissue targeting/tropism, or any combination thereof. 17. A polynucleotide encoding any of the recombinant adeno-associated virus (AAV) VP capsid polypeptides of embodiments 1-16. 18. A recombinant AAV virion (rAAV), the virion comprising an AAV VP capsid polypeptide of any of embodiments 1-15. 19. The rAAV virion of embodiment 18, wherein the rAAV has reduced tropism for human liver as compared to a rAAV having a VP1 capsid polypeptide having the sequence of SEQ ID NO:1. 20. The rAAV virion of embodiment 18 or embodiment 19, wherein the rAAV has increased ability to cross the blood-brain barrier following intravenous administration as compared to a rAAV having a VP1 capsid polypeptide having the sequence of SEQ ID NO:1. 21. The rAAV virion of any one of embodiments 18-20 wherein the rAAV has increased ability to infect one or more brain regions selected from hippocampus, dentate gyrus, cerebral cortex, temporal cortex, occipital cortex, thalamus, forebrain, substantia nigra, hypothalamus, and cerebellum, following intravenous, intrathecal, intracerebral ventricular, or intracisternal magna administration as compared to a rAAV having a VP1 capsid polypeptide having the sequence of SEQ ID NO:1.
22. The rAAV virion of any one of embodiments 18-21, wherein the rAAV has increased ability to infect human retinal cells following intravitreal injection as compared to a rAAV having a VP1 capsid polypeptide having the sequence of SEQ ID NO:1.
23. The rAAV virion of any one of embodiments 18, wherein the rAAV has increased ability to infect human skeletal muscle following intravenous administration as compared to a rAAV having a VP1 capsid polypeptide having the sequence of SEQ ID NO:1.
24. The rAAV virion of any one of embodiments 18, wherein the rAAV has increased tropism for human liver as compared to a rAAV having a VP1 capsid poly peptide having the sequence of SEQ ID NO: 1. 25. The rAAV virion of any one of embodiments 18-24, wherein the virion further comprises a vector genome, the vector genome comprising a therapeutic polynucleotide encoding any of the following: a therapeutic RNA selected from a guide RNA or a tRNA, or transgene encoding a protein under control of regulatory sequences that direct transgene expression in infected human cells. 26. The rAAV virion of embodiment 25, wherein the transgene encodes a protein selected from the transgene products of Table 1. 27. A composition comprising an AAV virion comprising the engineered capsid polypeptide of any one of embodiments 1-16, within which is packaged the therapeutic polynucleotide of embodiment 25. 28. A composition comprising an AAV virion comprising the engineered capsid polypeptide of any one of embodiments 1-16, within which is packaged a therapeutic polynucleotide encoding any of the following: a therapeutic RNA selected from a guide RNA or a tRNA, or transgene encoding a protein under control of regulatory sequences that direct transgene expression in infected human cells. 29. The rAAV virion of any one of embodiments 18-26, wherein the virion further comprises a vector genome, the vector genome comprising a therapeutic polynucleotide encoding any of the following: a therapeutic RNA selected from a guide RNA or a tRNA, or transgene encoding a protein under control of regulatory sequences that direct transgene expression in infected human cells. 30. The rAAV virion of embodiment 29, wherein the transgene encodes a protein selected from the transgene products of Table 1.
31. A pharmaceutical composition comprising the rAAV of embodiment 29 or embodiment 30 and a pharmaceutically acceptable carrier. 32. A method of treatment, comprising:

[0791] administering an effective amount of the pharmaceutical composition of embodiment 31 to a patient in need thereof. 33. The method of embodiment 32, wherein the effective amount of the rAAV is less than the effective amount of a wild type rAAV. 34. The method of embodiment 32, wherein the effective amount of the rAAV is less than the effective amount of an otherwise comparable rAAV lacking one or more than one mutation or substitution at a position corresponding to residue 581 to residue 589 of SEQ ID NO: 1.

35. The method of embodiment 34, wherein the effective amount of the rAAV results in lower toxicity in the patient as compared to the effective amount of the wild type rAAV, the otherwise comparable rAAV, or both.
36. The method of embodiment 32, wherein the effective amount is at least from 1×10⁵ viral genomes/kg patient weight to 5×10¹⁴ viral genomes/kg.
37. The method of any one of embodiments 32-36, wherein the rAAV is administered intravenously.
38. The method of any one of embodiments 32-36, wherein the rAAV is administered intrathecally.
39. The method of any one of embodiments 32-36, wherein the rAAV is administered by intracisternal magna administration.
40. The method of any one of embodiments 32-36, wherein the rAAV is administered by intravitreal injection.
41. The rAAV virion according to any one of embodiments 18-26 or 29-30, for use in treating a disease in a patient.
42. The rAAV virion for use according to embodiment 41, for use in treating any of the diseases in Table 1.
43. The rAAV virion for use according to embodiment 41, for use in treating a CNS disease.
44. The rAAV virion for use according to embodiment 43, wherein the CNS disease is selected from the conditions listed in Table 1.
45. The rAAV virion for use according to embodiment 43 or 44, wherein the engineered AAV VP capsid polypeptide comprises any one of the mutations recited in Table 8 (SEQ ID NO:115-1114). Table 10 (SEQ ID NO: 7118-8117), Table 39 (SEQ ID NO: 8118-9117) or Table 74 (SEQ ID NO: 9118-10117).
46. The rAAV virion for use according to embodiment 45, wherein the engineered VP1 capsid polypeptide does not have the sequence of any of SEQ ID NO:1, SEQ ID NO:3, SEQ ID NO:4, SEQ ID NO:5, SEQ ID NO:6, SEQ ID NO:7, and SEQ ID NO:8.
47. The rAAV virion for use according to embodiment 42, wherein the virion comprises a therapeutic polynucleotide encoding a target from any of the targets listed in Table 1.

### Series T Embodiments—AAV5

[0792] 1. The engineered AAV VP capsid polypeptide of any of the embodiments described herein, wherein the engineered AAV VP capsid polypeptide is an engineered AAV5 VP capsid polypeptide.
[0793] 2. The engineered AAV VP capsid polypeptide of embodiment 1, wherein the mutation is a substitution.

### Series U Embodiments—Assembly

[0794] 1. The engineered AAV VP capsid polypeptide of any of the embodiments described herein, wherein:
   [0795] Xaa1 is selected from the group consisting of A, D, E, G, L, M, N, Q, S, T, or V; or
      [0796] Xaa2 is selected from the group consisting of A, C, D, E, G, H, I, N, P, Q, S, T, or V; or
      [0797] Xaa3 is selected from the group consisting of A, D, E, G, H, M, N, Q, S, T, or V; or
      [0798] Xaa4 is selected from the group consisting of A, D, E, G, H, N, P, Q, S, or T; or
      [0799] Xaa5 is selected from the group consisting of A, C, D, E, G, H, N, Q, S, T, or Y; or
      [0800] Xaa6 is selected from the group consisting of A, D, E, G, H, N, P, Q, S, or T; or
      [0801] Xaa7 is selected from the group consisting of A, C, D, E, G, H, N, Q, S, or T; or
      [0802] Xaa8 is selected from the group consisting of A, C, D, E, G, H, N, Q, S, or T; or
      [0803] Xaa9 is selected from the group consisting of A, D, E, G, H, N, P, Q, S, or T; or any combination thereof.
[0804] 2. The engineered AAV VP capsid polypeptide of embodiment 1, wherein Xaa1 is A, D, E, M, or T.
[0805] 3. The engineered AAV VP capsid polypeptide of embodiment 1, wherein Xaa1 is E.
[0806] 4. The engineered AAV VP capsid polypeptide of embodiment 1, wherein Xaa2 is A, S, T, or V.
[0807] 5. The engineered AAV VP capsid polypeptide of embodiment 1, wherein Xaa2 is A.
[0808] 6. The engineered AAV VP capsid polypeptide of embodiment 1, wherein Xaa3 is D, E, N, Q or T.
[0809] 7. The engineered AAV VP capsid polypeptide of embodiment 1, wherein Xaa3 is D or T.
[0810] 8. The engineered AAV VP capsid polypeptide of embodiment 1, wherein Xaa4 is D, E. P, or Q.
[0811] 9. The engineered AAV VP capsid polypeptide of embodiment 1, wherein Xaa4 is E.
[0812] 10. The engineered AAV VP capsid polypeptide of any one of claims X-Y, wherein Xaa5 is D, E, N, Q or T.
[0813] 11. The engineered AAV VP capsid polypeptide of embodiment 1, wherein Xaa5 is N.
[0814] 12. The engineered AAV VP capsid polypeptide of embodiment 1, wherein Xaa6 is D, N, or Q.
[0815] 13. The engineered AAV VP capsid polypeptide of embodiment 1, wherein Xaa6 is D.
[0816] 14. The engineered AAV VP capsid polypeptide of any one of claims X-Y, wherein Xaa7 is A, D, E or G.
[0817] 15. The engineered AAV VP capsid polypeptide of embodiment 1, wherein Xaa7 is A.
[0818] 16. The engineered AAV VP capsid polypeptide of any one of claims X-Y, wherein Xaa8 is A, D, G, or S.
[0819] 17. The engineered AAV VP capsid polypeptide of embodiment 1, wherein Xaa8 is G.
[0820] 18. The engineered AAV VP capsid polypeptide of embodiment 1, wherein Xaa9 is A, D, G, or P.
[0821] 19. The engineered AAV VP capsid polypeptide of embodiment 1, wherein Xaa9 is G.

### Series V Embodiments-Recombinant AAV Virions

[0822] 1. A recombinant AAV virion (rAAV), comprising:
   [0823] the engineered AAV VP capsid polypeptide of embodiments described herein assembled into a capsid; and
   [0824] a payload,
   [0825] wherein the engineered AAV VP capsid polypeptide encapsidates the payload.
[0826] 2. The recombinant rAAV of embodiment 1, wherein the payload comprises a therapeutic polynucleotide, optionally wherein the therapeutic polynucleotide encodes a transgene or a genome modifying entity.
[0827] 3. The rAAV of embodiment 2, wherein the therapeutic polynucleotide encodes a guide RNA, a tRNA, a suppressor tRNA, a siRNA, a miRNA, an mRNA, a shRNA, a circular RNA, or an antisense oligonucleotide (ASO), a ribozyme, a DNAzyme, an aptamer, or any combination thereof.
[0828] 4. The rAAV of embodiment 3, wherein the therapeutic polynucleotide encodes a linear therapeutic polynucleotide or a circular therapeutic polynucleotide.
[0829] 5. The rAAV of embodiment 2, wherein the transgene is selected from TABLE 1.
[0830] 6. The rAAV of embodiment 2, wherein the genome modifying entity comprises a CRISPR/Cas system, an adenosine deaminase acting on RNA (ADAR) enzyme, a transcriptional activator, or a transcriptional repressor.
[0831] 7. The rAAV of embodiment 6, wherein the CRISPR/Cas system comprises a Cas3. Cas8, Cas10, Cas9, Cas4, Cas12, or Cas13.
[0832] 8. The rAAV of embodiment 6, wherein the ADAR is human ADAR1 or human ADAR2.
[0833] 9. The rAAV of embodiment 6, wherein the transcriptional activator is VP64.
[0834] 10. The rAAV of embodiment 6, wherein the transcriptional repressor is KRAB.
[0835] 11. A pharmaceutical composition comprising the rAAV virion of any one of embodiments 1-10, and a pharmaceutically acceptable carrier.
[0836] 12. A method of treatment, comprising administering a therapeutically effective amount of the pharmaceutical composition of embodiment 11, to a subject in need thereof.
[0837] 13. The pharmaceutical composition of embodiment 12, for use in treating a subject in need thereof, wherein the use comprises administering a therapeutically effective amount of the pharmaceutical composition of embodiment 11, to the subject.
[0838] 14. The rAAV virion of any one of the embodiments 1-10, for use in the manufacture of a medicament for treating a subject in need thereof by administration of a therapeutically effective amount thereof
[0839] 15. The method or use of any one of the embodiments 12-14, wherein the therapeutically effective amount of the rAAV virion is less than the therapeutically effective amount of a rAAV virion having a wildtype AAV5 VP capsid polypeptide of SEQ ID NO: 1 encapsidating the same payload, wherein the rAAV virion having the wildtype AAV5 VP capsid polypeptide of SEQ ID NO: 1 is administered by the same route of administration.
[0840] 16. The method or use of any one of the embodiments 12-15, wherein the therapeutically effective amount of the rAAV virion results in lower toxicity in the subject as compared to a therapeutically effective amount of a rAAV virion having a wildtype AAV5 VP capsid polypeptide of SEQ ID NO: 1 encapsidating the same payload, wherein the rAAV virion having the wildtype AAV5 VP capsid polypeptide of SEQ ID NO: 1 is administered by the same route of administration.
[0841] 17. The method or use of any one of the embodiments 12-16, wherein the therapeutically effective amount is at least from 1×10⁵ viral genomes/kg subject weight to 5×10¹⁴ viral genomes/kg subject weight.
[0842] 18. The method or use of any one of the embodiments 12-17, wherein the rAAV virion is administered via systemic administration.
[0843] 19. The method or use of embodiment 18, wherein the systemic administration is intravenous administration, intramuscular administration, intraperitoneal administration, or oral administration.
[0844] 20. The method or use of any one of the embodiments 12-19, wherein the subject is a human or a non-human animal.
[0845] 21. The method or use of any one of the embodiments 12-20, wherein the subject has a disease.
[0846] 22. The method or use of embodiment 21, wherein the disease is a neurological condition.
[0847] 23. The method of embodiment 22, wherein the neurological condition is AADC deficiency, Alzheimer's Disease, tauopathies, synucleinopathies, Batten Disease. MPS-IIIB, frontotemporal dementia with GBA1 mutations (PD-GBA), neuronpathic Gaucher's Disease, Gaucher Disease Type 2, Canavan Disease, Parkinson's Disease, Tay-Sachs Disease, Huntington's Disease, Protocki-Lupski Syndrome, amyotrophic lateral sclerosis, down syndrome, Sanfilippo Disease Type A. Sanfilippo Disease Type B, or Rett syndrome.
[0848] 24. The method of embodiment 23, wherein the dementia is frontotemporal dementia (FTD).

### Series W Embodiments

[0849] 1. The method or use of any embodiment disclosed herein, wherein the disease is selected from Table 1.
[0850] 2. The method or use of any embodiment disclosed herein, wherein the rAAV VP1 capsid at position 587 (Xaa7) is not A, C, D, E, F, G, H, I, K, M, P, Q, R, V, W, or Y.
[0851] 3. The method or use of any embodiment disclosed herein, wherein the rAAV VP1 capsid at position 587 can be N, S, or T.
[0852] 4. The method or use of any embodiment disclosed herein, wherein the rAAV VP1 capsid at position 582 (Xaa2) is not G, V, L, or I.
[0853] 5. The method of use of any embodiment disclosed herein, wherein the rAAV VP1 capsid comprises one or more mutations outside of the 581-589 (Xaa1-Xaa9) region wherein the rAAV VP1 capsid is capable of assembling and exhibiting a desired tissue tropism.

### 1.2. Examples

[0854] Below are examples of specific embodiments for carrying out the present invention. The examples are offered for illustrative purposes only and are not intended to limit the scope of the present invention in any way. Efforts have been made to ensure accuracy with respect to numbers used (e.g., amounts, temperatures, etc.), but some experimental error and deviation should, of course, be allowed for.

[0855] The practice of the present invention will employ, unless otherwise indicated, conventional methods of protein chemistry, biochemistry, recombinant DNA techniques and pharmacology, within the skill of the art. Such techniques are explained fully in the literature.

### Example 1

### High Throughput Capsid Engineering Systems

[0856] This example describes the high throughput capsid engineering systems and methods disclosed herein to discover engineered tissue tropic AAV variants. The high throughput capsid engineering system is schematized in FIG. 1. As shown in FIG. 1, in the pre-assembly phase, processes described herein allow for generation of plasmid libraries containing variants of the AAV capsid gene with massive diversity at specific locations in the capsid gene encoding sequence. This library of variants is assembled into virus using the 2-plasmid system described herein, then assembled viruses are directly injected into non-human primates (NHP) for in vivo selection. Tissues are harvested and tissue-transducing capsid genes are labeled with unique molecular identifiers and barcodes. These variant sequences/UMIs/barcodes are parameterized and machine learning algorithms are used to identify deterministic features of specific tissue targeting/de-targeting capsids. “De-targeting” may be referred to herein as “sparing” with respect to a particular tissue. For example, liver detargeting or liver sparing may both be used herein to refer to variants or properties of variants that preferentially exhibit reduced homing to liver tissue.

[0857] Processes described herein allow for cloning of synthetic oligonucleotide variants of the AAV capsid gene with massive diversity. This library of variants is assembled into virus using the 2-plasmid system described herein, then assembled viruses are directly injected into non-human primates for n vivo selection. The process was carried out as follows, but it is understood that reasonable and scientifically standard modifications to these methods are encompassed herein. The library template was primary PCR amplified (8-10 cycles) and DNA is purified using a column (pool library). Optionally, a second 8 cycle amplification is performed from the library pool. DNA is purified using a suitable column. Next, a digestion was performed with NEB BsaI HF-V2 (library—3 hours; backbone—2 hours+1 hour with calf intestinal alkaline phosphatase) and DNA is purified using a column. The resulting digest was combined at a 3:1 ratio and ligated with NEB T4 ligase ON a 16° C. and more ATP (1 μM) and T4 ligase was added the following morning. A “ligase cycle” was carried out 20 times. Ligase cycling refers to 10 seconds at 16 degrees C., followed by 30 seconds at 25 degrees C. for each “cycle”. The ligase was heat inactivated and more ATP (1 μM) was added. PS-DNAse was added for 2 hours at 37° C. to digest linear (un-ligated) species, enriching for relaxed form (rf) circular DNA (FIG. 3). DNA was purified using a column and DNA was eluted in water. Electrocompetent recombinase-defective bacteria was transformed at massive scale by performing many (>100) electroporation reactions to incorporate library plasmids. Transformed bacteria was selected using antibiotic selection in liquid shaking culture overnight at 37° C. Transformation efficiency was confirmed and library coverage was measured by plating limiting dilutions of transformed bacteria on antibiotic selective agar plates. Library plasmid DNA was prepared for sequencing and transfection for viral production using a Megaprep kit. Virions were produced via “double transfection”: viral producer eukaryotic cell lines (e.g., HEK293) were co-transfected with a mixture of Adenovirus-derived “helper” gene plasmid and library plasmids. Virus from cells/supernatant was purified the following 3-7 days using density centrifugation or FPLC methods. DNA from virions was amplified for NGS sequencing analysis of assembly. Optionally, cloning may be repeated with assembly-competent variants. Purified library virus was intravenously administered to NHPs at a dose range between 1-5×10¹³ viral genomes/kg. Tissues were harvested after 4-6 weeks and library variants were sequenced.

[0858] Tissues were harvested and transducing capsid genes are labeled with unique molecular identifiers and barcodes. These variant sequences/UMIs/barcodes were parameterized, and machine learning algorithms were used to identify deterministic features of specific tissue targeting/de-targeting capsids.

[0859] FIG. 2A provides a side view (top panel) and top view (bottom panel) of key residues of known AAV capsids that have been shown to interact with target cells. FIG. 2B illustrates salient features of the AAV capsid library described in Example 1, showing the region of introduced diversity, with residue numbering corresponding to the numbering of amino acids in AAV5 VP1. The library plasmid includes the invariant rep and diversified cap coding sequences between AAV ITRs (a cis-packaging approach).

[0860] As noted above, Plasmid-Safe DNAse (PS-DNAse) was used to remove linear DNA after ligation. Use of this linear-selective DNAse enzyme to degrade un-ligated DNA maximizes transformation efficiency to maximize library diversity. FIG. 3 is a photograph of a gel showing effective removal of the linear insert and linear plasmid backbone (“BB”) following digestion with PS-DNAse. Total efficiency of plasmid library generation was 4.23×10⁹ colony-forming units per μg plasmid DNA in one example of this method.

[0861] FIG. 4 is a schematic of the high throughput AAV capsid engineering system described in EXAMPLE 1. The histogram shows the size of the AAV capsid library at various stages of preparation, tracking the size of the library from theoretical diversity, synthesized capsid genes, total cloned variants, to sequenced assembled viruses (error bars denote minimum/maximum predicted diversity from NGS sequencing analysis). The pooled viral library was injected into non-human primates and following a period of time sufficient to ensure stable transduction, the animals were euthanized, and tissues were harvested. DNA was purified from the tissues (1), and (2) a unique molecular identifier (UMI) was appended. Exonuclease I was added to digest excess UMI-containing primers (3). Subsequent PCR amplification added sequencing indexes/tissue barcoding and adapters for sequencing. The addition of UMIs allows for high resolution frequency analysis of capsid variants in the tissues.

[0862] FIG. 5A illustrates the packaging approach used to maximize rAAV production from the library, with FIG. 5A comparing standard triple transfection (top panel) to the two-plasmid cis packaging approach used in EXAMPLE 1 (bottom panel), and FIG. 5B showing relative production of wild type AAV5 using the two transfection approaches. FIG. 5C is an example of UMI distribution in a liver specimen and shows a majority of capsid variants are found a single time (single UMI). However, a subset of capsid variants is enriched in a given tissue and may have increased numbers of UMIs, corresponding to their increased frequency in the target tissue.

### Example 2

### Identification and Analysis of AAV5 Variants in NHPs

[0863] This example describes identification and analysis of tissue targeting AAV5 capsid variants discovered using the general methods described in EXAMPLE 1. To identify variants with preferential infection of specific tissues (tropism), the biodistribution of the AAV5-based variant capsid library was evaluated in non-human primates (NHPs). The biodistribution investigation was performed according to Primate Products, LLC Standard Operating Procedures and authorized veterinary standards. Prior to library dose injection, a pre-study schedule of activities was performed to benchmark NHP clinical pathology, general health, and AAV5 seronegativity. Study animals were selected based on seronegativity for antibodies against AAV5.

[0864] NHPs received an IV Bolus injection of the AAV5-based capsid library at a dose range between 1-5×10¹³ viral genomes/kg. The final diluted AAV5-based capsid library sample was mixed and transferred to sterile syringes for intravenous administration with a dose volume of 5 mL/kg. Dose preparations were made using common pipetting and transferring techniques of the AAV5-based capsid library. From a common stock of diluted stock of AAV5-based capsid library, dose volumes were prepared separately for each animal based on their respective body weight in order to deliver equivalent amount of vector to each animal on a per kg basis.

[0865] Following Day 1 library injection, clinical observations were made twice a day (Days 1-29) and body weight was checked weekly. At Day 29, all study animals were euthanized and underwent tissue collection in accordance with Primate Products, LLC Standard euthanasia procedures.

[0866] A diverse array of tissues were collected, including: adrenal gland, aorta, bone with bone marrow, brain (cerebellum), brain (hippocampus, dentate gyrus), brain (hippocampus, CA1), brain (hippocampus, CA3), brain (hypothalamus), brain (cortex, temporal), brain (cortex, forebrain), brain (cortex, occipital), brain (substantia nigra), brain (thalamus), cecum, colon, duodenum, epididymis, esophagus, eye, gallbladder, heart, ileum, jejunum, kidney, liver, lung, lymph node(s), mammary gland, ovary, pancreas, parathyroid gland, peripheral nerve (sciatic), pituitary, prostate, salivary gland, seminal vesicle, skeletal muscle, skin, spinal cord, spleen, stomach, testis, thymus, thyroid gland, trachea, urinary bladder, uterus, and vagina. Tissues were collected as two 1 cm³ blocks (or whole organ) and preserved in liquid nitrogen. Liver was specifically collected in five 1 cm³ blocks. For Brain, two 1 cm³ blocks were collected from each region as noted in the above list, with the exception of smaller regions, which were collected in their entirety.

[0867] FIG. 8 is a schematic of machine learning-based clustering of capsid variants. The example utilizes capsid variant sequences upon which machine learning algorithms were used to map the similarity of capsids among those that infected the liver. This output can then be used to inform selection of candidate variants to selectively target the tissue of interest.

[0868] FIG. 9 illustrates an example of the performance of the library as a whole infecting cortex at a higher relative level than liver after the intravenous administration to an NHP. DNA was isolated from the liver and cortex and either qPCR (at left) or droplet digital PCR (ddPCR) (at right) were used to quantify viral genomes recovered from the respective tissues. By these methods of quantification, the library as a whole has ˜2-fold increased CNS targeting over the liver.

[0869] FIGS. 11A-D show Venn diagrams and analytic tables depicting the number of unique sequence variants found in liver tissue only, liver and cortex tissues, and cortex tissue only for three different sequencing analysis filters. Next-generation sequencing was performed on viral genomic capsid variants recovered from liver or cortical tissue samples. Unique Molecular Identifiers (UMIs) were appended as part of the molecular recovery process as described herein. This allows for increased confidence that a given capsid variant is present in the tissue, and may be correlated to abundance. FIG. 11A shows a Venn diagram in which the sequencing analysis filter applied was 4 or greater distinct UMIs—also referred to herein as “count”—per each distinct capsid sequence variant. FIG. 11B shows a Venn diagram in which the sequencing analysis filter applied was 50 or greater UMIs. FIG. 11C shows a Venn diagram in which the sequencing analysis filter applied was 100 or greater distinct UMIs. FIG. 11D shows a histogram analysis of the distribution of UMIs in the population of capsid sequence variants found in cortex only in which the sequencing analysis filter applied was 50 or greater UMIs as shown in FIG. 11B.

### Example 3

### AAV5 Variants that Functionally Assemble in Virus

[0870] This example describes engineered AAV5 variants that assemble into virions discovered using the methods and systems described in EXAMPLE 1-EXAMPLE 2. Following production and purification of the library virus as described in EXAMPLE 1, assembly of the AAV5 library virus was assessed. The composition of capsid variants was measured by NGS of an amplicon spanning the variant region. The frequency of a given amino acid residue occurring at a specified position corresponding to position 581 to position 589 of SEQ ID NO: 1 (generalized in SEQ ID NO: 2) over the frequency of that given amino acid residue occurring at the specified position in the library plasmid was analyzed to identify sequence rules that are preferred for viral assembly. With reference to TABLE 3 below, and SEQ ID NO: 2, the following amino acids can be independently mutated, in any combination, at any one or more positions Xaa1-Xaa9, to provide an AAV VP1 capsid that is capable of assembling. Additionally, one or more mutations outside of the Xaa1-Xaa9 region can be allowed, as long as the capsid is still capable of assembling.

TABLE 3
Viral Assembly Options

Xaa1 is A, D, E, G, L, M, N, Q, S, T, or V
Xaa1 is A, D, E, M, or T
Xaa1 is E
Xaa2 is A, C, D, E, G, H, I, N, P, Q, S, T, or V
Xaa2 is A, S, T, or V
Xaa2 is A
Xaa3 is A, D, E, G, H, M, N, Q, S, T, or V
Xaa3 is D, E, N, Q or T
Xaa3 is D or T
Xaa4 is A, D, E, G, H, N, P, Q, S, or T
Xaa4 is D, E, P, or Q
Xaa4 is E
Xaa5 is A, C, D, E, G, H, N, Q, S, T, or Y
Xaa5 is D, E, N, Q or T
Xaa5 is N.
Xaa6 is A, D, E, G, H, N, P, Q, S, or T;
Xaa6 is D, N, or Q; or
Xaa6 is D.
Xaa7 is s A, C, D, E, G, H, N, Q, S, or T;
Xaa7 is A, D, E or G; or
Xaa7 is A.
Xaa8 is A, C, D, E, G, H, N, Q, S, or T;
Xaa8 is A, D, G, or S; or
Xaa8 is G.
Xaa9 is A, D, E, G, H, N, P, Q, S, or T;
Xaa9 is A, D, G, or P; or
Xaa9 is G.

### Example 4

### AAV5 Variants with Liver Tissue Targeting and AAV5 Variants with Liver-Detargeting Properties

[0871] This example describes engineered AAV5 variants with tissue tropism in liver and AAV5 variants that preferentially detarget liver tissue that were discovered using the methods and systems described in EXAMPLE 1-EXAMPLE 2.

[0872] FIGS. 6A-B are heat maps and a statistical analysis showing clear functional selection through viral assembly and tissue transduction in liver. FIG. 6A is a heat map prepared at various stages of the high throughput system described in EXAMPLES 1-2 from pre-assembly, assembled virus, to liver transduction. Thus, FIG. 6A, at right, shows a heatmap of favored positional residues for all liver transducing variants divided by all assembled virus. For the pre-assembly heat map, the library of capsid variants was cloned into plasmids and transformed into electrocompetent bacteria. The resultant library was sequenced and amino acid diversity was measured at each position, with the low levels of positional variation likely arising from synthesis error. Subsequent assembly into virus showed clear amino acid residue/positional biases that highlight selection for viral assembly. Liver transducing viruses showed even greater patterns of AA residue/positional selection, with distinctly favored/disfavored variants. Each of these heatmaps was normalized by their respective input frequencies. FIG. 6B is a table of statistical analysis (ANOVA) showing that in three liver samples, amino acid residue distribution and residue-position varied significantly, but inter-sample variation was not significant.

[0873] FIGS. 7A-B illustrate analysis of repeat observed (high UMI) capsid variants between multiple samples. FIG. 7A is a Venn diagram illustrating counts of overlapping variant identification in two liver samples: ˜38% of variants with >10 UMIs were observed in both samples. FIG. 7B is a heat map showing positional amino acid distribution illustrating the strongly selected residues/positions of repeat observed capsid variants.

[0874] FIG. 10 provides structure illustrations with the illustration on the left representing the crystal structure of wildtype AAV5 [SEQ NO:1] (PDB: 6JCT from Zhang et al. Nat Commun. 2019 Aug. 21; 10(1):3760), oriented to the 3-fold axis of symmetry. The middle and right illustrations represent variants recovered from NHP liver replacing the 581-589 residues with NPAMFNCDY (middle panel, amino acid SEQ ID NO:112), and KLTAHIYAL (right panel, amino acid SEQ ID NO:114). These illustrations were generated using PyMOL to replace the variant sequences and are colored by predicted electrostatic charge to highlight the differences in charge among liver variants recovered from the same tissue.

[0875] The frequency of a given amino acid residue occurring at a specified position corresponding to position 581 to position 589 of SEQ ID NO: 1 (generalized in SEQ ID NO: 2) in variants identified in liver over the frequency of that given amino acid residue occurring at the specified position in variants forming assembled virus was analyzed to identify a set of sequence rules for capsids that preferentially target liver tissue. With reference to TABLE 4 below, and SEQ ID NO: 2 (AAV5 VP1), the following amino acids can be independently mutated, in any combination, at any one or more positions Xaa1-Xaa9, to provide a VP1 capsid with enhanced liver tropism as compared wildtype AAV5 VP1 capsid (SEQ ID NO: 1), where liver tropism here refers to properties that are preferred for liver transduction over properties that are preferred for virion assembly. Additionally, one or more mutations outside of the Xaa1-Xaa9 region can be allowed, as long as the capsid is still capable of assembling and exhibiting the desired liver targeting property.

TABLE 4
Liver Tropism Options and Rules

Xaa1 is A, G, K, M, N, Q, R, S, or T;
Xaa1 is A, K, M, or T; or
Xaa1 is K.
Xaa2 is A, C, H, I, K, S, T, or V;
Xaa2 is A, S, T, or V; or
Xaa2 is T.
Xaa3 is A, G, H, K, M, N, Q, R, S, T, or V;
Xaa3 is A, M, or T; or
Xaa3 is s A or T.
Xaa4 is L, M, P, Q, R, T, or W;
Xaa4 is L, P, Q, or T; or
Xaa4 is P.
Xaa5 is F, H, I, K, M, T, or Y;
Xaa5 is H, I, or Y; or
Xaa5 is Y.
Xaa6 is E, G, H, L, M, N, Q, T, or W;
Xaa6 is N, or Q; or
Xaa6 is N,
Xaa7 is A, C, G, H, L, M, R or S;
Xaa7 is A, C, H or M; or
Xaa7 is A.
Xaa8 is A, C, D, F, G, H, M, Q, S, V, W, or Y;
Xaa8 is G, M, Q, or S; or
Xaa8 is G.
Xaa9 is A, C, E, G, H, M, N, P, Q, S, V, or W;
Xaa9 is E, G, or P; or
Xaa9 is G.

[0876] The frequency of a given amino acid residue occurring at a specified position corresponding to position 581 to position 589 of SEQ ID NO: 1 (generalized in SEQ ID NO: 2) in variants not identified in liver over the frequency of that given amino acid residue occurring at the specified position in variants forming assembled virus was analyzed to identify a set of sequence rules that are preferred for liver detargeting. With reference to Table 5 below and AAV5 VP1 (SEQ ID NO: 2), the following amino acids can be independently excluded, in any combination, to provide an AAV VP1 capsid that is capable of assembling and is less targeted to liver tissue (“liver-sparing”, or “liver-detargeted”) than the wildtype AAV5 VP1 capsid (SEQ ID NO: 1), where liver-detargeting here refers to properties that are preferred among viruses that have decreased liver transduction over properties that are preferred for virion assembly. Additionally, one or more mutations outside of the Xaa1-Xaa9 region can be allowed, as long as the capsid is still capable of assembling and exhibits the desired features.

TABLE 5
Liver Detargeting Rules

Xaa1 excludes K;
Xaa1 excludes A, K, M, or T; or
Xaa1 excludes A, G, K, M, N, Q, R, S, or T.
Xaa2 excludes T;
Xaa2 excludes A, S, T, or V; or
Xaa2 excludes A, C, H, I, K, S, T, or V.
Xaa3 excludes A or T;
Xaa3 excludes A, M, or T; or
Xaa3 excludes A, G, H, K, M, N, Q, R, S, T, or V.
Xaa4 excludes P;
Xaa4 excludes L, P, Q, or T; or
Xaa4 excludes L, M, P, Q, R, T, or W.
Xaa5 excludes Y;
Xaa5 excludes H, I, or Y; or
Xaa5 excludes F, H, I, K, M, T, or Y.
Xaa6 excludes N;
Xaa6 excludes N, or Q; or
Xaa6 excludes E, G, H, L, M, N, Q, T, or W.
Xaa7 excludes A;
Xaa7 excludes A, C, H or M; or
Xaa7 excludes A, C, G, H, L, M, R or S.
Xaa8 excludes G;
Xaa8 excludes G, M, Q, or S; or
Xaa8 excludes A, C, D, F, G, H, M, Q, S, V, W, or Y.
Xaa9 excludes G;
Xaa9 excludes E, G, or P; or
Xaa9 excludes A, C, E, G, H, M, N, P, Q, S, V, or W.

[0877] Liver, CNS, skeletal muscle, heart, lung, spleen, lymph node, bone marrow, mammary gland, skin, adrenal gland, thyroid, colon, sciatic nerve, and spinal cord tissues were analyzed to identify, amino acid residues in the AAV5 VP1 581-589 region that drive liver tropism. The results are shown in FIG. 18B which shows the positional frequency of each amino acid in the 581 to 589 region of AAV5 VP1 in liver tissue as compared to all other analyzed tissues, wherein the capsid polypeptide has the sequence of SEQ ID NO: 2. The position (“Xaan”, n=1-9) is denoted on the x-axis and amino acid residues are denoted on the y-axis. The frequency of a particular amino acid residue in a particular position is indicated in the heatmap as intensity. Darker squares indicate a higher frequency of a particular amino acid in a particular position and lighter squares indicate a lower frequency of a particular amino acid in a particular position.

[0878] The frequency of a given amino acid residue occurring at a specified position corresponding to position 581 to position 589 of SEQ ID NO: 1 (generalized in SEQ ID NO: 2) in variants identified in liver over the frequency of that given amino acid residue occurring at the specified position in variants identified in all other analyzed tissues was compared to identify a set of sequence rules that are preferred for liver targeting. With reference to TABLE 6A below, and SEQ ID NO: 2 (AAV5 VP1), the following amino acids can, thus, be independently mutated, in any combination, at any one or more positions Xaa1-Xaa9, to provide a VP1 capsid with enhanced liver tropism as compared wildtype AAV5 VP1 capsid (SEQ ID NO: 1), where liver tropism here refers to properties that are preferred for liver transduction over properties that are preferred for transduction of all other harvested tissues.

TABLE 6A
Liver Tropism Rules

Xaa1 is selected from A, G, K, M, Q, R, S, or T
Xaa1 is selected from A, K, Q, or R
Xaa1 is K
Xaa2 is selected from A, C, I, K, S, T, or V
Xaa2 is selected from A, K, S, or T
Xaa2 is A
Xaa3 is selected from A, G, I, K, M, Q, R, S, T, or V
Xaa3 is selected from A, K, Q, S, or T
Xaa3 is selected from K, Q, or T
Xaa3 is K
Xaa4 is selected from A, I, K, L, P, Q, R, S, T, or V
Xaa4 is selected from K, I, S, or V
Xaa4 is K
Xaa5 is selected from F, I, L, M, T, V, or V.
Xaa5 is selected from F, L, or Y
Xaa5 is F
Xaa6 is selected from F, H, M, N, Q, S, or Y
Xaa6 is selected from M or N
Xaa6 is N
Xaa7 is selected from A, C, K, M, Q or S
Xaa7 is selected from A, C, or S
Xaa7 is S
Xaa8 is selected from A, C, F, G, M, Q, or S
Xaa8 is selected from A, C, M, or S
Xaa8 is C
Xaa9 is selected from E, F, L, Q, R, or Y
Xaa9 is selected from L, Q, or R
Xaa9 is R

[0879] With reference to TABLE 6B below, and SEQ ID NO: 2 (AAV5 VP1), the following amino acids can, thus, be independently mutated, in any combination, at any one or more positions Xaa1-Xaa9, to provide a VP1 capsid with reduced liver tropism as compared wildtype AAV5 VP1 capsid (SEQ ID NO: 1), where liver tropism here refers to properties that are deterministic for liver transduction over properties that are deterministic for transduction of all other harvested tissues.

TABLE 6B
Liver Detargeting Rules

Xaa1 is not selected from A, G, K, M, N, Q, R, S, or T
Xaa1 is not selected from A, K, Q, or R
Xaa1 is not K
Xaa2 is not selected from A, C, I, K, S, T, or V
Xaa2 is not selected from A, K, S, or T
Xaa2 is not A
Xaa3 is not selected from A, G, I, K, M, Q, R, S, T, or V
Xaa3 is not selected from A, K, Q, S, or T
Xaa3 is not selected from K, Q, or T
Xaa3 is not K
Xaa4 is not selected from A, I, K, L, P, Q, R, S, T, or V
Xaa4 is not selected from K, I, S, or V
Xaa4 is not K
Xaa5 is not selected from F, I, L, M, T, V, or Y.
Xaa5 is not selected from F, L, or Y
Xaa5 is not F
Xaa6 is not selected from F, H, M, N, Q, S, or Y
Xaa6 is not selected from M or N
Xaa6 is not N
Xaa7 is not selected from A, C, K, M, Q or S
Xaa7 is not selected from A, C, or S
Xaa7 is not S
Xaa8 is not selected from A, C, F, G, M, Q, or S
Xaa8 is not selected from A, C, M, or S
Xaa8 is not C
Xaa9 is not selected from E, F, L, Q, R, or Y
Xaa9 is not selected from L, Q, or R
Xaa9 is not R

[0880] TABLE 7 below provides sequences of the 581 to 589 region for variant AAV VP1 capsid polypeptides that were found in liver tissue and comport to one or more of the rules provided in TABLE 6. The present disclosure, thus, provides for rAAVs composed of engineered AAV5 VP1 capsid polypeptides having a SEQ ID NO: 2, wherein the Xaa1 to Xaa9 region is any one of SEQ ID NO: 43438-SEQ ID NO: 44437, as disclosed in TABLE 7. Also encompassed herein are rAAVs composed of engineered AAV5 VP2 capsid polypeptides and engineered AAV5 VP3 capsid polypeptides having the sequences disclosed in the below table at the regions in AAV5 VP2 (amino acid residues 445 to 453) and AAV5 VP3 (amino acid residues 389-397) corresponding to the amino acids in the AAV5 VP1 581 to 589 region.

TABLE 7
Sequences of the 581 to 589 Region in AAV5 VP1
Capsid Polypeptide that Drive Liver Tissue Tropism

| SEQ | |
|---|---|
| ID | 581-589 |
| NO | Sequence |
| 43438 | KADPATSIG |
| 43439 | KAEAMRNDR |
| 43440 | KAECYYGYE |
| 43441 | KAEGENVAK |
| 43442 | KAFPAPQGP |
| 43443 | KAGCMFWCE |
| 43444 | KAQHDTAVG |
| 43445 | KARVNCHGS |
| 43446 | KASDLNTQP |
| 43447 | KCCEYCDIA |
| 43448 | KCCTCVSFP |
| 43449 | KCDFWMGWM |
| 43450 | KCICSDDLK |
| 43451 | KCLSESFWG |
| 43452 | KCLWPFDWG |
| 43453 | KCLWPFNWG |
| 43454 | KCMDAKEHA |
| 43455 | KCQPCIVKC |
| 43456 | KCQSKDTHF |
| 43457 | KCSTDKAVE |
| 43458 | KCVVLENTQ |
| 43459 | KDHWECAGY |
| 43460 | KDNCVMWHW |
| 43461 | KDPKEQFFQ |
| 43462 | KDQQDQCND |
| 43463 | KEDERKSGT |
| 43464 | KETCTNMDL |
| 43465 | KFDLCQDSM |
| 43466 | KFWMPEMEF |
| 43467 | KGDLLDCLE |
| 43468 | KGEITPSGD |
| 43469 | KGGDGNYPF |
| 43470 | KGLDVHALN |
| 43471 | KGWKPDMTN |
| 43472 | KHAAYNACE |
| 43473 | KHQDIMHRG |
| 43474 | KIAQVDTWV |
| 43475 | KIDSQQSNY |
| 43476 | KIDSYGTSM |
| 43477 | KIEMQYRQS |
| 43478 | KIGYWWPQA |
| 43479 | KITPPLGNY |
| 43480 | KIYPECHYS |
| 43481 | KLEPNMADR |
| 43482 | KLLIHGPYE |
| 43483 | KMCGNCEAG |
| 43484 | KMEHMQHQS |
| 43485 | KMESRQLYN |
| 43486 | KMQHYDAEA |
| 43487 | KNDEYRMQN |
| 43488 | KNMLGDWPN |
| 43489 | KNMYYMYEA |
| 43490 | KPATQLDCA |
| 43491 | KPCKHMGGR |
| 43492 | KPDHMRWAL |
| 43493 | KPDQGGICK |
| 43494 | KPEGCLNSR |
| 43495 | KPFQALMMS |
| 43496 | KPGVHSHHG |
| 43497 | KPIAETVNW |
| 43498 | KPMGCHASS |
| 43499 | KPTPHAYDA |
| 43500 | KPWIQIASH |
| 43501 | KPWYERYQT |
| 43502 | KQATYPHAW |
| 43503 | KQDTKNLDE |
| 43504 | KQEMFGRFL |
| 43505 | KOAPFVSGD |
| 43506 | KQQMDHCAM |
| 43507 | KQTPYEMFH |
| 43508 | KRWVAEWIV |
| 43509 | KSDCQFRDH |
| 43510 | KSDRWAWGC |
| 43511 | KSELSTWGI |
| 43512 | KSEPPQVVT |
| 43513 | KSGYIDLYH |
| 43514 | KSIFLDSWE |
| 43515 | KSILKEDDG |
| 43516 | KSNGDMSGL |
| 43517 | KSNRDMNFA |
| 43518 | KSQMEMCIG |
| 43519 | KSRDNDGVL |
| 43520 | KSTTDSGCQ |
| 43521 | KSVQVPDAM |
| 43522 | KSWINEWLS |
| 43523 | KTDGPGTSW |
| 43524 | KTKPLDTVD |
| 43525 | KTLSDLAVQ |
| 43526 | KTLWALSCN |
| 43527 | KTNAEENFI |
| 43528 | KTNAWDTPC |
| 43529 | KTNPVKYVK |
| 43530 | KTQCTAQQN |
| 43531 | KTONEKVWL |
| 43532 | KTQTPCFQH |
| 43533 | KTSWMMEAV |
| 43534 | KTTDGKMID |
| 43535 | KITQWHEWA |
| 43536 | KVAQGLGPE |
| 43537 | KVCEIGTQG |
| 43538 | KVDAFEGRM |
| 43539 | KVECAQFDV |
| 43540 | KVEPSMLLD |
| 43541 | KVGINELFT |
| 43542 | KVHLSLWPQ |
| 43543 | KVIMYQHNG |
| 43544 | KVMWAGSKR |
| 43545 | KVNADGSRC |
| 43546 | KVPFACCSS |
| 43547 | KVRNKDPTM |
| 43548 | KVSVOGQVF |
| 43549 | KVTHCEAMN |
| 43550 | KWELYNNDP |
| 43551 | KWHTEDRNC |
| 43552 | KYNYKTYKT |
| 43553 | KACSAMDFC |
| 43554 | KALHQINED |
| 43555 | KAPMGWMNE |
| 43556 | KAQCALDTM |
| 43557 | KCENKDVGY |
| 43558 | KCNMNQEAE |
| 43559 | KCPQLNDNQ |
| 43560 | KCQQEQQYN |
| 43561 | KEGVENTGW |
| 43562 | KEMWNCDPA |
| 43563 | KETPFLMQS |
| 43564 | KFHVKPVDM |
| 43565 | KHMQSDHFT |
| 43566 | KHVYSEMGL |
| 43567 | KIHKNEDLF |
| 43568 | KKLDGHDKY |
| 43569 | KKVMGMGIY |
| 43570 | KLVQRCEVD |
| 43571 | KMLDWKNCS |
| 43572 | KNGVDDAHN |
| 43573 | KNVVHEKQA |
| 43574 | KQALMENFF |
| 43575 | KQTTAEIGY |
| 43576 | KRDDCHNDN |
| 43577 | KRTVIHEMM |
| 43578 | KSHYGAGVT |
| 43579 | KSIDNYLCE |
| 43580 | KSKRWNWDV |
| 43581 | KSVCCQINN |
| 43582 | KTFCTQYMD |
| 43583 | KTFLVKTFI |
| 43584 | KTRNCPKEA |
| 43585 | KTSLVVRRG |
| 43586 | KTTLCVQWG |
| 43587 | KTVQQVQMG |
| 43588 | KTWWTEQSA |
| 43589 | KVAADLGHL |
| 43590 | KVEHYYDIG |
| 43591 | KVISHCDHY |
| 43592 | KWRVSVYVM |
| 43593 | KYEEFECMY |
| 43594 | KYICTRWHC |
| 43595 | KYSPTPFMY |
| 43596 | KYTPWDATF |
| 43597 | IACRCNCFD |
| 43598 | IADSKRLQK |
| 43599 | IADVQRCHY |
| 43600 | IAGHYDSWK |
| 43601 | IAGMKVITP |
| 43602 | IAHSVFTDH |
| 43603 | IAQRTRQQQ |
| 43604 | IAQTTLLPG |
| 43605 | IATIKVHAS |
| 43606 | LAAPKTMCH |
| 43607 | LACFSYTNV |
| 43608 | LAEPKKWHT |
| 43609 | LAFQYCYPP |
| 43610 | LAGLKHAYK |
| 43611 | LAHWQGLTY |
| 43612 | LALCIRHSW |
| 43613 | LAPPHKLDL |
| 43614 | LASFTSPDP |
| 43615 | LASTYWYSQ |
| 43616 | LATLNAFQN |
| 43617 | LAVVRATLD |
| 43618 | MAASDWHVM |
| 43619 | MAAWLEWGL |
| 43620 | MAEIRTRHV |
| 43621 | MAHENTKAG |
| 43622 | MAMTLEISD |
| 43623 | MASTYIERE |
| 43624 | MAVPMKMHC |
| 43625 | MAYLVVRQH |
| 43626 | NAARMEQAT |
| 43627 | NACTTKVGS |
| 43628 | NADYCSFPI |
| 43629 | NAENHTKTC |
| 43630 | NAFSMDIHV |
| 43631 | NAQSDPHQG |
| 43632 | NASKYGDFL |
| 43633 | NASSTVINT |
| 43634 | NATANYCLG |
| 43635 | NATTHSHTS |
| 43636 | NAVDRGIAT |
| 43637 | NAVPIKYPY |
| 43638 | NAWSSNEEA |
| 43639 | PAQRVIANL |
| 43640 | QAALMTEQF |
| 43641 | QADRMLKTG |
| 43642 | QADRWTGII |
| 43643 | QAEWPGTMT |
| 43644 | QAGLGSDAP |
| 43645 | QAHCVNLSS |
| 43646 | QAMNSARTH |
| 43647 | QAMTMLMQH |
| 43648 | QANNYNRMD |
| 43649 | QANTGRVYS |
| 43650 | QAQCAMGAR |
| 43651 | QAQWMGCKW |
| 43652 | QARIENNQF |
| 43653 | QATLQPVCI |
| 43654 | QATQTYDWH |
| 43655 | QATYP1TSE |
| 43656 | RADLWHIQN |
| 43657 | RAEDKWRSC |
| 43658 | RAERNSAEQ |
| 43659 | RAMAMDSSH |
| 43660 | RAMDDQHYG |
| 43661 | RAMLVEQWG |
| 43662 | RAQLFHQKT |
| 43663 | RAQPTSCCG |
| 43664 | RASVMPEAV |
| 43665 | SAAFQARLG |
| 43666 | SAAFSAFNV |
| 43667 | SAAWQLQMT |
| 43668 | SACQKEWCP |
| 43669 | SAEHKTHTM |
| 43670 | SAGRRNIGM |
| 43671 | SAHAGMHSN |
| 43672 | SAHKEDISG |
| 43673 | SAKSHLSNV |
| 43674 | SAKYFSFGV |
| 43675 | SAWAFVFGK |
| 43676 | SANYYMTNM |
| 43677 | SARVCDCPW |
| 43678 | SASDPKNCY |
| 43679 | SASKFGWFS |
| 43680 | SASWLDDQS |
| 43681 | SATGMRDYA |
| 43682 | SAWFTIVSG |
| 43683 | TAAGYHFCK |
| 43684 | TAAPWRHQS |
| 43685 | TAAQFMDEL |
| 43686 | TACLCLERP |
| 43687 | TADPLCRGA |
| 43688 | TAGILDHYL |
| 43689 | TAHCVMNKQ |
| 43690 | TAHGIYTQF |
| 43691 | TAHPGWEGY |
| 43692 | TAKFFADWP |
| 43693 | TALIISQNL |
| 43694 | TALLLDANP |
| 43695 | TAMPITAIP |
| 43696 | TAMQSGKVS |
| 43697 | TANPEALVD |
| 43698 | TANYGAAFA |
| 43699 | TAQKSFMNC |
| 43700 | TATQCKAKE |
| 43701 | TAVTTWNMP |
| 43702 | VADSWAYNP |
| 43703 | VAEWIMEKC |
| 43704 | VAKQSADPI |
| 43705 | VALNVAQKG |
| 43706 | VAMKKMTDD |
| 43707 | VAMPTMKYK |
| 43708 | VAQLALDEK |
| 43709 | VARFTELCP |
| 43710 | VARTFGEEK |
| 43711 | VASKFAGSV |
| 43712 | VATAQWLSC |
| 43713 | VAVQFREWL |
| 43714 | WAEHRDMRN |
| 43715 | WALTGYNIT |
| 43716 | WAQVCHCGE |
| 43717 | YAAGAMEAS |
| 43718 | YADMPSERG |
| 43719 | YAELLQKMF |
| 43720 | YAGCMLAIQ |
| 43721 | YAGSHEENC |
| 43722 | YAHAIMGCQ |
| 43723 | YAHENQQTS |
| 43724 | YANMKMICE |
| 43725 | YAQTYYNKD |
| 43726 | YARRFWTCV |
| 43727 | YARTTLANK |
| 43728 | YASILTNQS |
| 43729 | YASQSWQQE |
| 43730 | YATELGEYG |
| 43731 | YAVFGHQSR |
| 43732 | YAVLQNHYG |
| 43733 | AALIGLIGD |
| 43734 | AANPTQWMT |
| 43735 | AATMQTVPT |
| 43736 | AAYMAKLRA |
| 43737 | CAEQIMRNQ |
| 43738 | CAQRSMRSM |
| 43739 | CAQSFTVKG |
| 43740 | CASHRKGAV |
| 43741 | DAENFVFKG |
| 43742 | DANMTRTRP |
| 43743 | DANVIAHNP |
| 43744 | EASFVVEPV |
| 43745 | FAIWEAHGR |
| 43746 | FASHNYAPV |
| 43747 | FASRVCVDG |
| 43748 | GAEQNNECT |
| 43749 | GAFTVEFSP |
| 43750 | HAMQEELPP |
| 43751 | HAQFRGSAT |
| 43752 | IACTOQISV |
| 43753 | IADWFDYEC |
| 43754 | IAMQYPEQY |
| 43755 | IAPSVNQAT |
| 43756 | IAPWWSTTT |
| 43757 | LAEAGQNQV |
| 43758 | LAEGLKRTG |
| 43759 | LAGKSGQQV |
| 43760 | LAIEMVDRS |
| 43761 | LAISFKGKW |
| 43762 | LARGKDVAE |
| 43763 | MAKIGYYMI |
| 43764 | MAKPNPPLG |
| 43765 | NAAKYRNKQ |
| 43766 | NADLQIFFR |
| 43767 | NALPESMTC |
| 43768 | NAYPFVDHR |
| 43769 | PAAMDYLMD |
| 43770 | PACQETGMF |
| 43771 | PAEAEKIGR |
| 43772 | QAEFRCGNH |
| 43773 | QAFCEPNTP |
| 43774 | QAGKWAVCE |
| 43775 | QALWYEDMT |
| 43776 | QASCTHVWD |
| 43777 | RAEWKQWSC |
| 43778 | SAEWMQSWH |
| 43779 | SAEWTHNNQ |
| 43780 | SAGMYARVA |
| 43781 | SATMCDSQS |
| 43782 | SAYWFQMAG |
| 43783 | TAEHIKVDL |
| 43784 | TAISEIPAP |
| 43785 | TAKMVAAME |
| 43786 | TALMLNMAS |
| 43787 | TAVTTNKWA |
| 43788 | VAAKNYKER |
| 43789 | VAMMVAGFQ |
| 43790 | VAMTDAKMC |
| 43791 | VANVAIADM |
| 43792 | VASGSTEVC |
| 43793 | VATMIATQL |
| 43794 | WAHKDWSNW |
| 43795 | WAMEDGKSA |
| 43796 | YAALTYYYS |
| 43797 | ICKQNYSRT |
| 43798 | IFKEGIHYQ |
| 43799 | EPKNMGGCE |
| 43800 | IRKEVAVVP |
| 43801 | IRKNYRMKQ |
| 43802 | ITKNRDRWP |
| 43803 | IVKLVLPVG |
| 43804 | IVKQEHESY |
| 43805 | IYKPNTQLQ |
| 43806 | IYKTRHGWW |
| 43807 | IYKVLKPVH |
| 43808 | LCKQLGKQE |
| 43809 | LGKQEAVTN |
| 43810 | LGKWKIQGT |
| 43811 | LIKPLEISD |
| 43812 | LMKCLNWCC |
| 43813 | LMKCNEAFT |
| 43814 | LQKSWNMLQ |
| 43815 | LVKRKELET |
| 43816 | LVKWTNVLP |
| 43817 | LYKMMYAFR |
| 43818 | MCKLKLEIP |
| 43819 | MCKNQNKPA |
| 43820 | MHKPEGMNG |
| 43821 | MIKPSVEGM |
| 43822 | MLKCTHDLP |
| 43823 | MNKTMINYA |
| 43824 | MQKLMALQA |
| 43825 | MQKTIQQWM |
| 43826 | MWKVYEKSE |
| 43827 | NHKWICLTR |
| 43828 | NIKSRMIEF |
| 43829 | NMKSQWQPS |
| 43830 | NNKFWDYDP |
| 43831 | NQKATTASY |
| 43832 | NQKWSTWNN |
| 43833 | NVKCMQHMV |
| 43834 | PRKNQVDLG |
| 43835 | QCKQPLVIN |
| 43836 | QDKTKSCMY |
| 43837 | QGKYSANWY |
| 43838 | QKKFIQCYG |
| 43839 | QLKAPPAAH |
| 43840 | QMKMLWFNV |
| 43841 | QNKPASMHP |
| 43842 | QQKPQECYS |
| 43843 | QVKDVVGNV |
| 43844 | RGKTYEHGN |
| 43845 | RPKTFAALR |
| 43846 | RSKQARISH |
| 43847 | SCKLNLHEG |
| 43848 | SFKFYAEEA |
| 43849 | SGKQGNWRL |
| 43850 | SIKELVGCG |
| 43851 | SIKMIDCFG |
| 43852 | SMKWFITDD |
| 43853 | SVKYCQSKD |
| 43854 | TFKSYEMET |
| 43855 | TFKYHYNAC |
| 43856 | THKWGWWIA |
| 43857 | TIKPKNEWC |
| 43858 | TIKPYYPYQ |
| 43859 | TKKKRNGHL |
| 43860 | TRKDTLVAS |
| 43861 | TSKTCFAEK |
| 43862 | TTKEDEVCS |
| 43863 | TTKYTQSIF |
| 43864 | TVKPAVPGE |
| 43865 | VEKSSIMNR |
| 43866 | VFKLPEPVV |
| 43867 | VSKCGVSHI |
| 43868 | VTKYKYEGM |
| 43869 | WKKMKYTWK |
| 43870 | WMKPEFHYD |
| 43871 | YSKYKRLWI |
| 43872 | AEKPWNAMN |
| 43873 | AIKFKYAPD |
| 43874 | ANKVGTAGN |
| 43875 | AQKEYSKYL |
| 43876 | CKKMGLHVM |
| 43877 | CSKFRECCG |
| 43878 | DFKTMNYMV |
| 43879 | DFKWIQDQG |
| 43880 | DHKILGAIP |
| 43881 | ELKVAISSG |
| 43882 | ENKTQFAYL |
| 43883 | FRKMGCGKT |
| 43884 | GLKLNLFQA |
| 43885 | GSKTCQQVM |
| 43886 | LNKGQPLEM |
| 43887 | LTKETGQVV |
| 43888 | MLKTARWRD |
| 43889 | MSKPRVCCA |
| 43890 | MVKTGVEEM |
| 43891 | MWKFAQLRL |
| 43892 | MYKPEQWCM |
| 43893 | QIKSCKNTD |
| 43894 | STKQHPHLN |
| 43895 | STKVPWWFP |
| 43896 | TMKFSHESA |
| 43897 | TYKYKESSE |
| 43898 | VQKSWEYDN |
| 43899 | WSKKDIWAD |
| 43900 | IIPKDNKWR |
| 43901 | IPAKFRSWW |
| 43902 | ISVKGLTTH |
| 43903 | IYCKIKEWG |
| 43904 | LDHKCAAGM |
| 43905 | LHLKLINHC |
| 43906 | LLEKKQASG |
| 43907 | LSQKPSNLI |
| 43908 | LYAKKMAGY |
| 43909 | LYAKKMVGY |
| 43910 | MGSKIHFMA |
| 43911 | MQGKNMAVT |
| 43912 | NCVKAMDWY |
| 43913 | NHEKTIASF |
| 43914 | NIDKRGPMM |
| 43915 | NMLKHMFGQ |
| 43916 | NMVKYIHMG |
| 43917 | NRAKEHWHQ |
| 43918 | NSYKLDWGW |
| 43919 | NTGKMEEKR |
| 43920 | PFEKWNSQS |
| 43921 | PFRKSAGYM |
| 43922 | QHTKPNCRD |
| 43923 | QLCKVGRDN |
| 43924 | QTEKLMRLD |
| 43925 | QTNKWDVVT |
| 43926 | QTWKLITHG |
| 43927 | QVHKGQKFS |
| 43928 | QVNKITWVN |
| 43929 | QVTKFVTEG |
| 43930 | QWCKLINMC |
| 43931 | QWVKYHDIW |
| 43932 | QYIKKYWNH |
| 43933 | RVHKGQKFS |
| 43934 | SCAKFDVVE |
| 43935 | SDSKLHQVA |
| 43936 | SGTKYCCWN |
| 43937 | SIGKWPAYE |
| 43938 | SMMKCPTQY |
| 43939 | SVWKCERIS |
| 43940 | TCTKAVDHC |
| 43941 | TYEKFNKHQ |
| 43942 | TYIKSYQMA |
| 43943 | VRDKGVQCA |
| 43944 | VSQKSPTAW |
| 43945 | WCTKCNYNQ |
| 43946 | WCVKRMENH |
| 43947 | WVEKHLMLG |
| 43948 | YSQKPEEAN |
| 43949 | CTYKTGSPA |
| 43950 | CVLKWATMW |
| 43951 | DQMKWSQMG |
| 43952 | DWVKATQMC |
| 43953 | ESDKEERMT |
| 43954 | EVVKMPNHR |
| 43955 | EYIKWDGTP |
| 43956 | FCQKIEYYH |
| 43957 | FGPKLTWHT |
| 43958 | GCGKCECWN |
| 43959 | GTFKNPVHQ |
| 43960 | GVTKLEVWP |
| 43961 | GWDKKRDFR |
| 43962 | IPIKLPPQG |
| 43963 | LEAKVAQYY |
| 43964 | MDCKYPRDQ |
| 43965 | NDGKIQFSG |
| 43966 | NLSKLAQMP |
| 43967 | NLSKLTQMP |
| 43968 | NYAKLFQDI |
| 43969 | QKRKLQVYS |
| 43970 | OPAKKFWDF |
| 43971 | QSSKWMWPL |
| 43972 | QWYKMGYNR |
| 43973 | RGPKDTNVK |
| 43974 | RSLKYEGQQ |
| 43975 | SPNKSPFPG |
| 43976 | SSIKPMLSP |
| 43977 | SYHKQERCQ |
| 43978 | TCVKAGLCL |
| 43979 | TGLKVIGQH |
| 43980 | TIMKPLCFA |
| 43981 | TNHKFRCDR |
| 43982 | TSSKCTMDA |
| 43983 | VHPKVQRVT |
| 43984 | YSDKMESSN |
| 43985 | IHCMFGAGA |
| 43986 | IQQYFNWCE |
| 43987 | IRDMFEVGR |
| 43988 | LEFEFYWDE |
| 43989 | LIHPFARGN |
| 43990 | LIQAFPRDT |
| 43991 | LPTPFMAHL |
| 43992 | LSRDFCNWF |
| 43993 | LVTSFASML |
| 43994 | MCDHFQMAY |
| 43995 | MPRCFDAAA |
| 43996 | MPVMFGLHC |
| 43997 | NMYPFMKYQ |
| 43998 | NWITFSGAV |
| 43999 | QCDLFSEGY |
| 44000 | QHSVFMQIP |
| 44001 | QNIRFTTDM |
| 44002 | QSNHFEQEK |
| 44003 | QYGSFNQNV |
| 44004 | REEIFSYMV |
| 44005 | RGIVFSQDN |
| 44006 | RKADFMHIT |
| 44007 | RPIWFIFVL |
| 44008 | RQQEFDRCR |
| 44009 | RTDHFGHWE |
| 44010 | RVEMFKWRT |
| 44011 | SCHGFQNWP |
| 44012 | SIGLFMKDS |
| 44013 | SKEWFSGTS |
| 44014 | SNAPFEQCN |
| 41015 | SNLSFGLTA |
| 44016 | SQGYFDANL |
| 44017 | STQMFANVQ |
| 44018 | TCMYFSCAL |
| 44019 | TEAWFQSAF |
| 44020 | TIRNFWLQN |
| 44021 | TNMLFLVWP |
| 44022 | TPCRFNSQR |
| 44023 | TQSCFHLEN |
| 44024 | TRQFFHHGD |
| 44025 | TVEQFTNSV |
| 44026 | TVRMFCRAI |
| 44027 | TWHSFPNQE |
| 41028 | TYISFQDEK |
| 44029 | VSQSFDHVN |
| 44030 | VWQPFSGDH |
| 44031 | YCCWFEHRL |
| 44032 | YGCHFQRQE |
| 44033 | YHMGFTGMG |
| 44034 | YMSSFTCHW |
| 44035 | YPMTFRAAC |
| 44036 | YYNNFICDK |
| 44037 | ACVAFSQQM |
| 44038 | AHEIFNLQV |
| 44039 | AHTQFLSAD |
| 44040 | AMQSFDMPG |
| 44041 | ARFLFYFDV |
| 44042 | CCVYFNRQM |
| 44043 | CNIDFTADY |
| 44044 | CSQIFWERG |
| 44045 | CTPQFNRGF |
| 44046 | DEIAFWDGE |
| 44047 | DGLMFHQQR |
| 44048 | DIDQFASVN |
| 44049 | DREAFDMAS |
| 44050 | DSQWFEHNA |
| 44051 | DTGPFMLFQ |
| 44052 | ETRPFEQVW |
| 44053 | FTNRFQLMA |
| 44054 | GCCHFCDHL |
| 44055 | HRMYFLRWP |
| 44056 | IICGFFAWS |
| 44057 | LGHQFNNWT |
| 44058 | MDGYFGFAV |
| 44059 | MGSNFVKQF |
| 44060 | NICGFFAWS |
| 44061 | QHCQFEQAI |
| 44062 | QKDIFPMQM |
| 44063 | QMELFCQQD |
| 44064 | QNTEFMDHY |
| 44065 | QTSDFAMSS |
| 44066 | QVMPFVIEG |
| 44067 | SKMNFGTAN |
| 44068 | SKTEFSLKM |
| 44069 | TGDLFCCHL |
| 44070 | TQGLFAQVG |
| 44071 | VCFHFRDAA |
| 44072 | VCMLFQHEA |
| 44073 | VHSRFGQYT |
| 44074 | WQPRFYHIW |
| 44075 | YEDPFRHYS |
| 44076 | ICHSGNRLL |
| 44077 | ICQGSNSMA |
| 44078 | IGTVRNWCW |
| 44079 | IICPTNEYM |
| 44080 | EKILLNEMT |
| 44081 | EQCFFINMEE |
| 44082 | EVMCHNVYP |
| 44083 | EVNLNNHHW |
| 44084 | LCAQHNEVC |
| 44085 | LETEGNPFY |
| 44086 | LGIGNNWEQ |
| 44087 | LITPPNWWH |
| 44088 | LLEEMNEQC |
| 44089 | LLFWYNHMS |
| 44090 | LMILRNTHQ |
| 44091 | LQMPYNWQT |
| 44092 | LRHICNCGQ |
| 44093 | LSLSKNCAG |
| 44094 | LTPLANQYC |
| 44095 | LTRFNNDLP |
| 44096 | LVPRENMLW |
| 44097 | LYELHNTWD |
| 44098 | MFEQDNAPT |
| 44099 | MLLYPNNTN |
| 44100 | MMCSNNSHR |
| 44101 | MQSPENTVY |
| 44102 | MTCLQNQSE |
| 44103 | MTIANNIRN |
| 44104 | MTYNYNSKD |
| 44105 | MVWICNAPR |
| 44106 | NCGYKNNKA |
| 44107 | NICFVNDAL |
| 44108 | NILSPNCYE |
| 44109 | NKVGMNYMQ |
| 44110 | NMCHHNWRD |
| 44111 | NPAYKNWGW |
| 44112 | NQIYTNPWG |
| 44113 | NSLESNAWT |
| 44114 | NTMTPNFRK |
| 44115 | NYVAKNYMV |
| 44116 | PKFIANRQE |
| 44117 | PNYWINYQN |
| 44118 | PRCYENWRY |
| 44119 | PWQFTNLEK |
| 44120 | QCCHPNGYQ |
| 44121 | QNCWYNFFR |
| 44122 | QQCNTNTDS |
| 44123 | QVVTVNASD |
| 44124 | REGIANDWV |
| 44125 | SDGTENRMN |
| 44126 | SHLQCNYMR |
| 44127 | SLTVWNQNG |
| 44128 | STMWRNRES |
| 44129 | STVYWNMET |
| 44130 | SYTSGNESW |
| 44131 | TGAPGNWFH |
| 44132 | TRNAYNCHQ |
| 44133 | TSSWVNWDP |
| 44134 | TTMPENIPL |
| 44135 | TTRFHNNVM |
| 44136 | TVWNTNTGW |
| 44137 | VCRNGNRQA |
| 44138 | VEFPENSHY |
| 44139 | VLTWDNPDE |
| 44140 | VTHATNVLE |
| 44141 | WNGFMNQGY |
| 44142 | WPVRLNEYK |
| 44143 | YEAVPNKMS |
| 44144 | YYECRNYSD |
| 44145 | AKVYSNLYG |
| 44146 | ATILVNRDG |
| 44147 | AWFTHNALP |
| 44148 | CIHHRNDKV |
| 44149 | CNYDTNLRP |
| 44150 | CTOSINGLI |
| 44151 | CTVLINCRD |
| 44152 | CVTWENVMT |
| 44153 | DLVHCNNHM |
| 44154 | DRGYYNSMM |
| 44155 | DTEHENEGV |
| 44156 | EPHIMNSHE |
| 44157 | EQRVYNHQY |
| 44158 | FTVTMNCTA |
| 44159 | GGALDNGQC |
| 44160 | GPDRYNEES |
| 44161 | GSLALNVRQ |
| 44162 | GTQRDNTGF |
| 44163 | HCICNNSGA |
| 44164 | HMTLGNLCP |
| 44165 | ICGWENCSE |
| 44166 | LCENVNPSE |
| 44167 | LFTEINGCY |
| 44168 | LMCQMNNRS |
| 44169 | MPGFENKMP |
| 44170 | MPRDENHIG |
| 44171 | NFDCSNDQT |
| 41172 | NLLVSNVIT |
| 44173 | PDGPMNLLG |
| 44174 | PMMMANRIA |
| 44175 | QHRQANGIH |
| 44176 | QMSYVNQYR |
| 44177 | QSVSNNRRA |
| 44178 | QTFMTNFDT |
| 44179 | QYSPANQWD |
| 44180 | RTFLTNPKD |
| 44181 | SMHDYNENV |
| 44182 | STELKNMER |
| 41183 | SVLYSNYFA |
| 41184 | TGAMTNYCY |
| 44185 | TMMQNNTEV |
| 44186 | TRDTHNSVD |
| 44187 | TRIHVNRYG |
| 44188 | TTWLDNEDA |
| 44189 | VERPENQEW |
| 44190 | WQAPHNOSY |
| 44191 | YVITANNHQ |
| 44192 | ICQHIGSWG |
| 44193 | IDHDYASDS |
| 44194 | ILIMILSHS |
| 44195 | EPRFVYSPV |
| 44196 | ITVADRSSH |
| 44197 | LEGATESLW |
| 44198 | LLPLHGSWH |
| 44199 | MCLAPTSMH |
| 44200 | MCSPEPSLQ |
| 44201 | MEHQQDSRF |
| 44202 | MGDDSMSEH |
| 44203 | MPRTCMSTN |
| 44204 | NCEQWKSMF |
| 44205 | NDQTSSSAW |
| 44206 | NIQFHTSGQ |
| 44207 | NKDVDRSHV |
| 44208 | NLVRWESGW |
| 44209 | NMSPWMSDR |
| 44210 | NPCIVISSV |
| 44211 | NSYHLESMD |
| 44212 | NVAMYASSE |
| 44213 | NVLCVKSVQ |
| 44214 | NVMECHSPA |
| 44215 | NYCTLMSAC |
| 44216 | PILETHSVE |
| 44217 | QIGWEASSL |
| 44218 | QIVELHSLG |
| 44219 | QIVQAMSSE |
| 44220 | QLADNHSRP |
| 44221 | QSLYDRSGT |
| 44222 | QSTCYFSNC |
| 44223 | QTREGVSYY |
| 44224 | QVDMARSSF |
| 44225 | QVMENSSWA |
| 44226 | RECVHLSCP |
| 44227 | REGLLWSNS |
| 44228 | RISQQWSRS |
| 44229 | RTIQKESHV |
| 44230 | RWCMKISAN |
| 44231 | SCTHVMSNA |
| 44232 | SHELQLSGL |
| 44233 | SHMNQASMP |
| 44234 | SITRWVSAE |
| 44235 | SLYMEMSWQ |
| 44236 | SWCSEHSPN |
| 44237 | SYIEWGSWM |
| 44238 | TCERKRSDK |
| 44239 | TCTYDKSQI |
| 44240 | THIQCRSMM |
| 44241 | THWWQPSSG |
| 44242 | TKHMIQSYG |
| 44243 | TSARCISAE |
| 44244 | TSTHVKSYQ |
| 44245 | TTHFAVSGI |
| 44246 | TTSHCVSPS |
| 44247 | TVHMCQSFV |
| 44248 | VGTAAHSQR |
| 44249 | VIAQELSAK |
| 44250 | VSDWGHSDS |
| 44251 | VWWREDSTN |
| 44252 | WLEPCVSSL |
| 44253 | WPETVGSSE |
| 44254 | WYAPAESSN |
| 44255 | YCCRPVSDF |
| 44256 | YHMDGDSRH |
| 44257 | ADETQYSCH |
| 44258 | AFNQHTSMD |
| 44259 | AISPWMSCA |
| 44260 | AMYNVSSAA |
| 44261 | AMYQNPSPC |
| 44262 | ARAEWKSKD |
| 44263 | CVCADTSVF |
| 44264 | DEEENTSEQ |
| 44265 | ELAAPHSQV |
| 44266 | ERATLKSMC |
| 44267 | ERMWKTSDN |
| 44268 | ESIRLRSSQ |
| 44269 | FNAVHMSLE |
| 44270 | GGRFNQSWA |
| 44271 | GHFMTLSKG |
| 44272 | GNERMFSSA |
| 44273 | HLTMWESFD |
| 44274 | LCTFNGSNG |
| 44275 | LKGTMMSPI |
| 44276 | LTYLKRSIG |
| 44277 | MLNLHGSDM |
| 44278 | MSIPASSEV |
| 44279 | NIGYRKSSG |
| 44280 | NRESDVSTG |
| 44281 | PCQWPVSRA |
| 44282 | PCVYKSLEI |
| 44283 | PTIWLHSYL |
| 44284 | PVCPWGSFD |
| 44285 | PWVAVESAE |
| 44286 | QQTRHRSCV |
| 44287 | RTEWHQSQA |
| 44288 | SMQPTGSGW |
| 44289 | STQWEQSMQ |
| 44290 | SWVSKESEE |
| 44291 | TNMPMPSYE |
| 44292 | TQGRMYSCW |
| 44293 | TWGFNRSYC |
| 44294 | VQHCSHSLD |
| 44295 | VTYEAKSQW |
| 44296 | WDSQPQSGV |
| 44297 | WELNNPSVM |
| 44298 | WLTWHFSSF |
| 44299 | IIATGWECD |
| 44300 | ISLPMLECI |
| 44301 | LKIYTKCCD |
| 44302 | LSSHSEECQ |
| 44303 | MCFDIATCA |
| 44304 | MEHFLQVCN |
| 44305 | MKWPAFACA |
| 44306 | MMNVHQNCE |
| 44307 | MPVRLTKCS |
| 44308 | MWVDCCECH |
| 44309 | NGGQKATCP |
| 44310 | NGWFVRICG |
| 44311 | NNASPSYCG |
| 44312 | NRPHQWLCC |
| 44313 | NSHACSECS |
| 44314 | PNNQCSYCC |
| 44315 | PRTEDLQCI |
| 44316 | QCMAHIQCD |
| 44317 | QEMDGWYCC |
| 44318 | QGAIYEVCL |
| 44319 | QEFLWFYCG |
| 44320 | QKQSTVICE |
| 44321 | QLNVTPICC |
| 44322 | QMAPYSICQ |
| 44323 | QNGNIEKCQ |
| 44324 | QQNPNGCCH |
| 44325 | QVSSHVECV |
| 44326 | RLSAGDACY |
| 44327 | RPVLECNCE |
| 44328 | RQYEQDVCD |
| 44329 | RREPTKCCW |
| 44330 | RVTEWFQCG |
| 44331 | RWCGKGYCV |
| 44332 | SFSYAECCA |
| 44333 | SHENQWACI |
| 44334 | SHMFQHTCG |
| 44335 | SNTLYDTCY |
| 44336 | SQFMDDDCA |
| 44337 | SRNAMQYCP |
| 44338 | SSHIDGICN |
| 44339 | TELVYMTCQ |
| 44340 | TGDSRMDCQ |
| 44341 | TKGFMSVCR |
| 44342 | TNYPNWICH |
| 44343 | TQEAISDCF |
| 44344 | TQQFCHDCQ |
| 44345 | TTGMLENCN |
| 44346 | TWTQMIDCY |
| 44347 | TYVRRWMCL |
| 44348 | VIHGSLQCQ |
| 44349 | VIMMDGYCT |
| 44350 | VIMTQMNCW |
| 44351 | VPNTKDACF |
| 44352 | VWCGNQWCN |
| 44353 | WFTNVLWCG |
| 44354 | YPIMERWCH |
| 44355 | YSEICDRCI |
| 44356 | AFAQLGQCH |
| 44357 | ALVLRCICL |
| 44358 | CHPDKMECP |
| 44359 | CVMVEWLCS |
| 44360 | DGSCKWNCH |
| 44361 | DSMRKYQCR |
| 44362 | DTVMQAACW |
| 44363 | GGPHREFCI |
| 44364 | HTIDKMNCP |
| 44365 | IPYQQDCCA |
| 44366 | LILHMLECQ |
| 44367 | MHTSMLICC |
| 44368 | MKAATMVCL |
| 44369 | MKFTLPQCN |
| 44370 | NCHRNDACD |
| 44371 | NENQMMHCA |
| 44372 | NTAQQLCCE |
| 44373 | NTTQRALCG |
| 44374 | PTRTRRTCR |
| 44375 | QINLDSQCM |
| 44376 | QSAIEEVCR |
| 44377 | QSHPRITCA |
| 44378 | QVQMGRDCG |
| 44379 | RCETPTGCE |
| 44380 | SCCYCPTCC |
| 44381 | SMCFKGTCE |
| 44382 | SRNANDGCF |
| 44383 | SVFMRDECC |
| 44384 | TCWQWLKCE |
| 44385 | TMDRQPMCI |
| 44386 | TSSTEQMCV |
| 44387 | IGRITMGDR |
| 44388 | IHTLKHDYR |
| 44389 | IMFMVAFDR |
| 44390 | LHVPPSWAR |
| 44391 | LMCTMLTDR |
| 44392 | LMNELMHLR |
| 44393 | MDFLSCGLR |
| 44394 | MELDVSNDR |
| 44395 | MFMMMHDIR |
| 44396 | MNHWNMHMR |
| 44397 | NDPHQHDAR |
| 44398 | NFLDCSERR |
| 44399 | NPNLIEKHR |
| 44400 | QCLLTLQNR |
| 44401 | QEHHVEGVR |
| 44402 | QITHLQVGR |
| 44403 | QSSFNPDMR |
| 44404 | QYEVKMWSR |
| 44405 | RNDDNLERR |
| 44406 | RTFYKQVAR |
| 44407 | SCSQIQEIR |
| 44408 | SEGCRMPPR |
| 44409 | SFAVMMEDR |
| 44410 | SPNLEEKHR |
| 44411 | SSSSRRDYR |
| 44412 | SVYLKLRIR |
| 44413 | SYLQWHVTR |
| 44414 | TGYFYMAHR |
| 44415 | TPAFTHWER |
| 44416 | TPMSTQNVR |
| 44417 | TTPQYMRER |
| 44418 | VNMPLYKFR |
| 44419 | WEHHCAEWR |
| 44420 | WLPFAMTNR |
| 44421 | YCYRAKEQR |
| 44422 | YIEPPALGR |
| 44423 | YINMNAQER |
| 44424 | YKLCRVKGR |
| 44425 | YMLVDMIFR |
| 44426 | DHAHYWYGR |
| 44427 | DSVSQQVER |
| 44428 | ECCNYVWER |
| 44429 | ESQYSQGTR |
| 44430 | FMSMQGDQR |
| 44431 | GKNCWPIKR |
| 44432 | HTGPMLGDR |
| 44433 | HWCTIGKLR |
| 44434 | MGADYGVWR |
| 44435 | NFNQCTIYR |
| 44436 | QKQGTICER |
| 44437 | QSAIEEVYR |

### Example 5

### AAV5 Variants with Tissue Tropism in CNS

[0881] This example describes engineered AAV5 variants with tissue tropism in CNS that were discovered using the methods and systems described in EXAMPLE 1-EXAMPLE 2.

[0882] TABLE 8 is a list of 1000 variants (CNS variants) that had the highest normalized UMI counts across two cortical sequencing samples and absent in two liver sequencing samples. Minimal inclusion criteria for this list included presence in both quality filtered cortex NGS data sets; and exclusion criteria were detection of a given variant in either of two independent liver sequencing samples. The total number of variants that meet these criteria following analysis of the four data sets is 2108. UMI counts were then normalized independently for the two separate cortex NGS data sets, and the variant sequences were then rank ordered by the sum of the two independently normalized UMI counts (maximum possible=200%), and the top 1000 are listed here (SEQ ID NO: 115-SEQ ID NO: 1114). Variant residues are at positions 581-589.

TABLE 8

| | | norm 2 |
|---|---|---|
| | | samples |
| | | (max |
| | | possible |
| SEQ ID NO | var_aa | score 200%) |
| SEQ ID NO: 115 | RVTIMFTGT | 112.28% |
| SEQ ID NO: 116 | YTGCIDGFL | 100.01% |
| SEQ ID NO: 117 | TNMSTQPCW | 97.08% |
| SEQ ID NO: 118 | VWTTVCNDY | 96.78% |
| SEQ ID NO: 119 | DYANILKQS | 91.84% |
| SEQ ID NO: 120 | EFVLGCQGI | 76.88% |
| SEQ ID NO: 121 | TIMWTMMRE | 76.32% |
| SEQ ID NO: 122 | SPMVVTHSD | 76.07% |
| SEQ ID NO: 123 | DWYDIWTLV | 69.59% |
| SEQ ID NO: 124 | REFAISGGN | 69.44% |
| SEQ ID NO: 125 | SITNCNHOR | 69.01% |
| SEQ ID NO: 126 | HIQEELEEQ | 64.92% |
| SEQ ID NO: 127 | DINGKKNIC | 64.05% |
| SEQ ID NO: 128 | FLAEHFTSH | 63.45% |
| SEQ ID NO: 129 | QCQSQEWFH | 60.94% |
| SEQ ID NO: 130 | ARSGINGHE | 60.24% |
| SEQ ID NO: 131 | CIRQYDAID | 59.65% |
| SEQ ID NO: 132 | ILIFESRIG | 58.77% |
| SEQ ID NO: 133 | HFADNQVVQ | 56.73% |
| SEQ ID NO: 134 | NESHVERHC | 56.14% |
| SEQ ID NO: 135 | TMVTSVTLP | 55.86% |
| SEQ ID NO: 136 | PTLSCPYHK | 54.39% |
| SEQ ID NO: 137 | TVAKVLSGH | 53.82% |
| SEQ ID NO: 138 | KIFITTDEG | 52.65% |
| SEQ ID NO: 139 | KSAQVYWHP | 52.63% |
| SEQ ID NO: 140 | CSALFAQHD | 52.05% |
| SEQ ID NO: 141 | AGSACMPAH | 50.59% |
| SEQ ID NO: 142 | IVIWQGEWI | 50.29% |
| SEQ ID NO: 143 | SYCEVEDAP | 50.00% |
| SEQ ID NO: 144 | DCSWWLQLG | 49.42% |
| SEQ ID NO: 145 | NFCKQGNIC | 47.08% |
| SEQ ID NO: 146 | HIHDTMSDY | 46.81% |
| SEQ ID NO: 147 | QYVHMLGEC | 46.50% |
| SEQ ID NO: 148 | RQHHCLPVN | 46.22% |
| SEQ ID NO: 149 | AHVDHQCSG | 45.43% |
| SEQ ID NO: 150 | SFSQTHLGW | 45.40% |
| SEQ ID NO: 151 | AASQMWQRG | 45.04% |
| SEQ ID NO: 152 | NDCTCRAIM | 44.16% |
| SEQ ID NO: 153 | NSHEYLDRH | 43.86% |
| SEQ ID NO: 154 | DWIWGTDMW | 43.60% |
| SEQ ID NO: 155 | MIFYRTYGF | 42.40% |
| SEQ ID NO: 156 | HPAPLNMPH | 42.11% |
| SEQ ID NO: 157 | SQQHCQHDQ | 41.58% |
| SEQ ID NO: 158 | HEVMMCPAP | 41.01% |
| SEQ ID NO: 159 | KRTDLHAAD | 40.95% |
| SEQ ID NO: 160 | EYFKPKSQD | 40.94% |
| SEQ ID NO: 161 | KLAHSWCIW | 40.94% |
| SEQ ID NO: 162 | NAMANFSVR | 40.64% |
| SEQ ID NO: 163 | EVTTPRPPT | 39.50% |
| SEQ ID NO: 164 | YTHDEQIDY | 38.90% |
| SEQ ID NO: 165 | LTHQGGRQR | 38.31% |
| SEQ ID NO: 166 | AQWYMWCWD | 37.73% |
| SEQ ID NO: 167 | RMMWQSHCD | 37.44% |
| SEQ ID NO: 168 | EIHKRIAMT | 36.55% |
| SEQ ID NO: 169 | CMSCCKWPH | 36.42% |
| SEQ ID NO: 170 | DFQRPTETQ | 35.67% |
| SEQ ID NO: 171 | SFMPCHCRG | 35.67% |
| SEQ ID NO: 172 | LTHNTPFPK | 35.40% |
| SEQ ID NO: 173 | HYVVRHEDP | 35.14% |
| SEQ ID NO: 174 | FQEAPPHVH | 34.80% |
| SEQ ID N0: 175 | YAELEWKVC | 33.92% |
| SEQ ID NO: 176 | RCVAEPNEP | 33.37% |
| SEQ ID NO: 177 | GLIFHQSLS | 33.34% |
| SEQ ID NO: 178 | ASHGMDEYN | 33.33% |
| SEQ ID NO: 179 | PIACRAINW | 33.33% |
| SEQ ID NO: 180 | NCKPDQIAM | 32.69% |
| SEQ ID NO: 181 | FRMWFTECI | 31.87% |
| SEQ ID NO: 182 | MGYAKHDSH | 31.59% |
| SEQ ID NO: 183 | DTSCLFLMQ | 31.29% |
| SEQ ID NO: 184 | KVAGGHETT | 31.16% |
| SEQ ID NO: 185 | YSRYHHSLL | 30.99% |
| SEQ ID NO: 186 | VADTWQVHC | 30.43% |
| SEQ ID NO: 187 | LWGYGAVNM | 29.25% |
| SEQ ID NO: 188 | FGRQAYVAW | 29.24% |
| SEQ ID NO: 189 | EEVQFTQQD | 29.24% |
| SEQ ID NO: 190 | GTGHIGNAT | 29.24% |
| SEQ ID NO: 191 | AYTYNSKLY | 28.95% |
| SEQ ID NO: 192 | FIFRKCDHW | 28.37% |
| SEQ ID NO: 193 | QCVDCPPYC | 27.79% |
| SEQ ID NO: 194 | ETPPLCHGP | 27.78% |
| SEQ ID NO: 195 | RMTPNNCQR | 27.28% |
| SEQ ID NO: 196 | NSTPMACME | 26.91% |
| SEQ ID NO: 197 | STHPLNLYH | 26.90% |
| SEQ ID NO: 198 | TTVPDPGPR | 26.32% |
| SEQ ID NO: 199 | LIWSVYQDE | 26.09% |
| SEQ ID NO: 200 | YDNHQKARN | 26.02% |
| SEQ ID NO: 201 | SIYQKWVTN | 25.92% |
| SEQ ID NO: 202 | MQSMQHWHP | 25.74% |
| SEQ ID NO: 203 | TLVSCDQGN | 25.73% |
| SEQ ID NO: 204 | WSITGQPWF | 25.73% |
| SEQ ID NO: 205 | YQKVEYWNY | 25.73% |
| SEQ ID NO: 206 | AHYQQSTQR | 25.44% |
| SEQ ID NO: 207 | QVRVITHKS | 25.17% |
| SEQ ID NO: 208 | WAAKPGDPK | 25.15% |
| SEQ ID NO: 209 | RSDNDWCFL | 25.15% |
| SEQ ID NO: 210 | ETHRGTVGL | 24.89% |
| SEQ ID NO: 211 | KCSVQEKKA | 24.89% |
| SEQ ID NO: 212 | WVEPEQCFG | 24.56% |
| SEQ ID NO: 213 | NHQQCPKCP | 24.28% |
| SEQ ID NO: 214 | AAHSAPFFD | 24.27% |
| SEQ ID NO: 215 | KGQRRDSVS | 24.07% |
| SEQ ID NO: 216 | DVMQNQCKS | 23.98% |
| SEQ ID NO: 217 | ALVYSGWIC | 23.72% |
| SEQ ID NO: 218 | FAKARHNWR | 23.69% |
| SEQ ID NO: 219 | TYIQYPTNA | 23.69% |
| SEQ ID NO: 220 | VSKFIAASW | 23.69% |
| SEQ ID NO: 221 | RQREGKHGN | 23.68% |
| SEQ ID NO: 222 | MAAHTKYRF | 23.40% |
| SEQ ID NO: 223 | FVGLMNQCG | 23.39% |
| SEQ ID NO: 224 | TWQSMVNSE | 23.15% |
| SEQ ID NO: 225 | TWQSMVNSE | 23.10% |
| SEQ ID NO: 226 | SRHYEQFEC | 23.10% |
| SEQ ID NO: 227 | VTAGQLGLN | 23.10% |
| SEQ ID NO: 228 | DSQYHVKCG | 22.82% |
| SEQ ID NO: 229 | LSECSDRAN | 22.51% |
| SEQ ID NO: 230 | YAYPTEGQI | 22.22% |
| SEQ ID NO: 231 | KRFVDMPEM | 21.95% |
| SEQ ID NO: 232 | VHKFQGNFG | 21.94% |
| SEQ ID NO: 233 | RGHEPPMWL | 21.93% |
| SEQ ID NO: 234 | QKCYCDEQC | 21.64% |
| SEQ ID NO: 235 | RHAPTDISP | 21.60% |
| SEQ ID NO: 236 | MTGIGKCWN | 21.05% |
| SEQ ID NO: 237 | QAYCCMHQY | 20.48% |
| SEQ ID NO: 238 | KHDDCCTGT | 20.47% |
| SEQ ID NO: 239 | KWYQFGMVA | 20.42% |
| SEQ ID NO: 240 | LTWECKFGG | 20.18% |
| SEQ ID NO: 241 | AIVQQHYYP | 19.88% |
| SEQ ID NO: 242 | EENVWMQYQ | 19.88% |
| SEQ ID NO: 243 | NSQPMDFLP | 19.88% |
| SEQ ID NO: 244 | FDTAFQGDI | 19.59% |
| SEQ ID NO: 245 | QMEARMDCE | 19.49% |
| SEQ ID NO: 246 | NWVPQIEHW | 19.33% |
| SEQ ID NO: 247 | VAILGLNPT | 19.31% |
| SEQ ID NO: 248 | ANVPMCSLQ | 19.31% |
| SEQ ID NO: 249 | LIPMDWIGM | 19.30% |
| SEQ ID NO: 250 | IYCGNSDMQ | 18.73% |
| SEQ ID NO: 251 | PAETLMDGF | 18.71% |
| SEQ ID NO: 252 | FSYQIQCQN | 18.43% |
| SEQ ID NO: 253 | TMRLFWDMG | 18.42% |
| SEQ ID NO: 254 | QRVPMQLVE | 18.42% |
| SEQ ID NO: 255 | AMTRQNGWM | 18.16% |
| SEQ ID NO: 256 | GMRTHSVMN | 18.13% |
| SEQ ID NO: 257 | LITVQHIRN | 18.13% |
| SEQ ID NO: 258 | TTYPHNTHG | 17.88% |
| SEQ ID NO: 259 | RIEMDEWEA | 17.85% |
| SEQ ID NO: 260 | DNTPEHCYM | 17.57% |
| SEQ ID NO: 261 | SSVVMAKQP | 17.55% |
| SEQ ID NO: 262 | CLVRIQKDH | 17.54% |
| SEQ ID NO: 263 | TLPKMHMWP | 17.54% |
| SEQ ID NO: 264 | MPHHSPDCW | 17.32% |
| SEQ ID NO: 265 | QELECHACS | 17.31% |
| SEQ ID NO: 266 | HMHNLPVKP | 17.31% |
| SEQ ID NO: 267 | GIAVWFDFQ | 17.25% |
| SEQ ID NO: 268 | ANRSRPTWQ | 17.25% |
| SEQ ID NO: 269 | KTFPILEAW | 17.25% |
| SEQ ID NO: 270 | ALQYCQGKD | 16.97% |
| SEQ ID NO: 271 | YHFEYMTSF | 16.97% |
| SEQ ID NO: 272 | VCGHRNDGN | 16.96% |
| SEQ ID NO: 273 | EICAAMDSF | 16.68% |
| SEQ ID NO: 274 | YWFVLNPCV | 16.41% |
| SEQ ID NO: 275 | QQNPCLGGM | 16.32% |
| SEQ ID NO: 276 | FNWFVRAYI | 16.14% |
| SEQ ID NO: 277 | DCDPYNMVD | 16.12% |
| SEQ ID NO: 278 | RTGDAGMSP | 16.10% |
| SEQ ID NO: 279 | LEFNGHLFN | 16.08% |
| SEQ ID NO: 280 | VYVAAGGGC | 15.92% |
| SEQ ID NO: 281 | MTTGLMAYE | 15.87% |
| SEQ ID NO: 282 | MAIDNLECK | 15.83% |
| SEQ ID NO: 283 | QKAIVAQND | 15.81% |
| SEQ ID NO: 284 | GGDGRVHNK | 15.52% |
| SEQ ID NO: 285 | THDAARKTA | 15.50% |
| SEQ ID NO: 286 | TWNEPHQNQ | 15.20% |
| SEQ ID NO: 287 | ANRADWQHL | 14.96% |
| SEQ ID NO: 288 | CTKAYRKPG | 14.93% |
| SEQ ID NO: 289 | RTAVIQCIE | 14.92% |
| SEQ ID NO: 290 | WKVSPIQGF | 14.92% |
| SEQ ID NO: 291 | MCGEYQPGS | 14.91% |
| SEQ ID NO: 292 | NHHPYTFHQ | 14.91% |
| SEQ ID NO: 293 | NPRYCLSLS | 14.64% |
| SEQ ID NO: 294 | SRASQQSMW | 14.64% |
| SEQ ID NO: 295 | VLKSCDRHG | 14.64% |
| SEQ ID NO: 296 | KEARSQTGD | 14.63% |
| SEQ ID NO: 297 | FANGCTGSI | 14.63% |
| SEQ ID NO: 298 | GAMAAPYHD | 14.62% |
| SEQ ID NO: 299 | YEHPIMWPV | 14.62% |
| SEQ ID NO: 300 | CYGWEGCKC | 14.33% |
| SEQ ID NO: 301 | AAAMRDKTD | 14.33% |
| SEQ ID NO: 302 | KLRIGVVCN | 14.33% |
| SEQ ID NO: 303 | TPHSIHTDK | 14.33% |
| SEQ ID NO: 304 | QTETWEFGA | 14.26% |
| SEQ ID NO: 305 | KAEMKMGCN | 14.16% |
| SEQ ID NO: 306 | VPICCNLPM | 14.11% |
| SEQ ID NO: 307 | LPSHCNLGS | 14.05% |
| SEQ ID NO: 308 | SMNRTHLER | 14.04% |
| SEQ ID NO: 309 | FGEFTMDEN | 13.84% |
| SEQ ID NO: 310 | YTAHNANVV | 13.78% |
| SEQ ID NO: 311 | GTMKHNGRA | 13.76% |
| SEQ ID NO: 312 | EHYCKDNVL | 13.75% |
| SEQ ID NO: 313 | TKRMMEDSG | 13.75% |
| SEQ ID NO: 314 | CERDCNCTA | 13.74% |
| SEQ ID NO: 315 | TGRVTADMA | 13.74% |
| SEQ ID NO: 316 | YNGDRLFCF | 13.53% |
| SEQ ID NO: 317 | NHEVVAFMQ | 13.47% |
| SEQ ID NO: 318 | QNEICVHHE | 13.47% |
| SEQ ID NO: 319 | LRSGMIVSG | 13.46% |
| SEQ ID NO: 320 | QPKMWMMAS | 13.45% |
| SEQ ID NO: 321 | DVRHSWSEK | 13.45% |
| SEQ ID NO: 322 | EILQDVYYL | 13.45% |
| SEQ ID NO: 323 | SVVNNLKAS | 13.45% |
| SEQ ID NO: 324 | RCTDCSYFY | 13.29% |
| SEQ ID NO: 325 | GSTSRNQRD | 13.17% |
| SEQ ID NO: 326 | LDCNAMPST | 13.16% |
| SEQ ID NO: 327 | QGRWACWYS | 13.16% |
| SEQ ID NO: 328 | TIEWYPDSQ | 13.16% |
| SEQ ID NO: 329 | KAVSYHHDG | 13.16% |
| SEQ ID NO: 330 | TMEHCQRPQ | 13.16% |
| SEQ ID NO: 331 | RMFWDTSDR | 12.89% |
| SEQ ID NO: 332 | MCNPKMMSS | 12.88% |
| SEQ ID NO: 333 | DSHDMINYK | 12.87% |
| SEQ ID NO: 334 | LTCYHNELS | 12.87% |
| SEQ ID NO: 335 | AVVEHAVNR | 12.87% |
| SEQ ID NO: 336 | CGQMVICSE | 12.87% |
| SEQ ID NO: 337 | NLRDAHWCM | 12.87% |
| SEQ ID NO: 338 | ESSQEIKTC | 12.77% |
| SEQ ID NO: 339 | AKMWQLENP | 12.73% |
| SEQ ID NO: 340 | GTIPKQHEF | 12.59% |
| SEQ ID NO: 341 | ARDCYWKAR | 12.58% |
| SEQ ID NO: 342 | AADREQGWW | 12.57% |
| SEQ ID NO: 343 | DSVQQRWYV | 12.57% |
| SEQ ID NO: 344 | KCGQDWIHG | 12.33% |
| SEQ ID NO: 345 | QVYAPEIEG | 12.32% |
| SEQ ID NO: 346 | CCCVPRSIY | 12.29% |
| SEQ ID NO: 347 | AAHGEMKTA | 12.28% |
| SEQ ID NO: 348 | QFWLMHEWP | 12.28% |
| SEQ ID NO: 349 | KFAMDWVSD | 12.00% |
| SEQ ID NO: 350 | TSDSVINWL | 12.00% |
| SEQ ID NO: 351 | QIIYRCRST | 12.00% |
| SEQ ID NO: 352 | GYDLRGADE | 11.99% |
| SEQ ID NO: 353 | CIRFMMREG | 11.99% |
| SEQ ID NO: 354 | HSNTHGYPL | 11.73% |
| SEQ ID NO: 355 | HGNMPHCYP | 11.72% |
| SEQ ID NO: 356 | VGLSIKMYG | 11.71% |
| SEQ ID NO: 357 | ESWRYKHQA | 11.70% |
| SEQ ID NO: 358 | PKRYQAWTW | 11.70% |
| SEQ ID NO: 359 | SCSQKLMMQ | 11.70% |
| SEQ ID NO: 360 | ALVTYRSMQ | 11.70% |
| SEQ ID NO: 361 | ALNSDMAAW | 11.60% |
| SEQ ID NO: 362 | NHSLCWDSK | 11.60% |
| SEQ ID NO: 363 | KKEDYAKFF | 11.41% |
| SEQ ID NO: 364 | RQYLYKRQQ | 11.41% |
| SEQ ID NO: 365 | TAMPEHRWD | 11.41% |
| SEQ ID NO: 366 | GFCTIPVAD | 11.40% |
| SEQ ID NO: 367 | IAVQKRLFC | 11.40% |
| SEQ ID NO: 368 | LAEIKDWVP | 11.40% |
| SEQ ID NO: 369 | MLPMFMGON | 11.40% |
| SEQ ID NO: 370 | NVRTYIDDS | 11.40% |
| SEQ ID NO: 371 | YFWISKALY | 11.13% |
| SEQ ID NO: 372 | ISYQPNPME | 11.12% |
| SEQ ID NO: 373 | ACDDWCWMC | 11.11% |
| SEQ ID NO: 374 | QTEMKKCAR | 11.11% |
| SEQ ID NO: 375 | ATTHKVKDN | 11.11% |
| SEQ ID NO: 376 | DIEKCMNVS | 11.11% |
| SEQ ID NO: 377 | QSFSYDAKE | 11.11% |
| SEQ ID NO: 378 | YGPEILKLT | 11.11% |
| SEQ ID NO: 379 | YGPEILKLT | 11.11% |
| SEQ ID NO: 380 | WAAWMYQQE | 11.09% |
| SEQ ID NO: 381 | DIACLDQWQ | 10.93% |
| SEQ ID NO: 382 | TSLVMPSLP | 10.89% |
| SEQ ID NO: 383 | MHSQQRAIK | 10.84% |
| SEQ ID NO: 384 | VRQSVPHWA | 10.83% |
| SEQ ID NO: 385 | DTRPSRDSS | 10.82% |
| SEQ ID NO: 386 | RSGAKCYCD | 10.82% |
| SEQ ID NO: 387 | ECKTHRDVY | 10.63% |
| SEQ ID NO: 388 | DELHVISIM | 10.55% |
| SEQ ID NO: 389 | QTKFMDDMH | 10.54% |
| SEQ ID NO: 390 | TSMTERRTV | 10.54% |
| SEQ ID NO: 391 | VQTWAIPCC | 10.53% |
| SEQ ID NO: 392 | LPTLRVADK | 10.53% |
| SEQ ID NO: 393 | KTGTTMEPM | 10.52% |
| SEQ ID NO: 394 | TKQFVHNED | 10.50% |
| SEQ ID NO: 395 | TCQEPHNIT | 10.28% |
| SEQ ID NO: 396 | QKVASMGCW | 10.27% |
| SEQ ID NO: 397 | CKGHDAGEY | 10.27% |
| SEQ ID NO: 398 | FPWSRPKCW | 10.26% |
| SEQ ID NO: 399 | HAMSLSTFQ | 10.25% |
| SEQ ID NO: 400 | MTCVWHSDF | 10.25% |
| SEQ ID NO: 401 | VKAWWHDHQ | 10.24% |
| SEQ ID NO: 402 | DVLKCEINE | 10.24% |
| SEQ ID NO: 403 | PIKGVAVQE | 10.24% |
| SEQ ID NO: 404 | LSRLYPNTY | 10.23% |
| SEQ ID NO: 405 | KQTVMTDTS | 9.96% |
| SEQ ID NO: 406 | SATPHWYCH | 9.95% |
| SEQ ID NO: 407 | KITQLFOYE | 9.94% |
| SEQ ID NO: 408 | VTWINLRSG | 9.92% |
| SEQ ID NO: 409 | IHOLVGAFW | 9.66% |
| SEQ ID NO: 410 | CVNLMAVNN | 9.66% |
| SEQ ID NO: 411 | EKQKLTVSS | 9.66% |
| SEQ ID NO: 412 | RLDHWATCD | 9.65% |
| SEQ ID NO: 413 | AVERNLERM | 9.65% |
| SEQ ID NO: 414 | KTNNTVCHS | 9.65% |
| SEQ ID NO: 415 | HHLRNVHHC | 9.44% |
| SEQ ID NO: 416 | ARGTCNYCY | 9.37% |
| SEQ ID NO: 417 | STEENEALY | 9.37% |
| SEQ ID NO: 418 | KKQQISIRL | 9.36% |
| SEQ ID NO: 419 | SAAEKAMDQ | 9.36% |
| SEQ ID NO: 420 | TAPGGSTPQ | 9.36% |
| SEQ ID NO: 421 | QTNQVVVVE | 9.36% |
| SEQ ID NO: 422 | DSTPNLFDP | 9.08% |
| SEQ ID NO: 423 | DVASYCQLQ | 9.08% |
| SEQ ID NO: 424 | TQCKQLTVM | 9.08% |
| SEQ ID NO: 425 | TMEHHECMW | 9.07% |
| SEQ ID NO: 426 | DVLVCEILW | 9.07% |
| SEQ ID NO: 427 | NIYSGINNP | 9.07% |
| SEQ ID NO: 428 | MFPKKMCLH | 8.83% |
| SEQ ID NO: 429 | THONTWLFY | 8.83% |
| SEQ ID NO: 430 | NHGYRNNSM | 8.78% |
| SEQ ID NO: 431 | QMHICMYEG | 8.74% |
| SEQ ID NO: 432 | KWEVMSAAY | 8.73% |
| SEQ ID NO: 433 | QRMIVDALQ | 8.50% |
| SEQ ID NO: 434 | IMMISSYSM | 8.50% |
| SEQ ID NO: 435 | TGAGIKEAH | 8.49% |
| SEQ ID NO: 436 | VPWVEFRLQ | 8.49% |
| SEQ ID NO: 437 | OPWPHLINK | 8.48% |
| SEQ ID NO: 438 | SSLCRAYDN | 8.22% |
| SEQ ID NO: 439 | CVKSRODSD | 8.21% |
| SEQ ID NO: 440 | NYILTQLGM | 8.20% |
| SEQ ID NO: 441 | FGGVEDSWM | 8.19% |
| SEQ ID NO: 442 | SVKDPMDWG | 8.19% |
| SEQ ID NO: 443 | YSDRFQFQF | 8.19% |
| SEQ ID NO: 444 | NCPMYDMIS | 8.12% |
| SEQ ID NO: 445 | IWGIYVHYF | 8.08% |
| SEQ ID NO: 446 | FTPELWENY | 7.91% |
| SEQ ID NO: 447 | AHSRMDWTP | 7.91% |
| SEQ ID NO: 448 | OPFORKVEE | 7.91% |
| SEQ ID NO: 449 | DYENCFESY | 7.91% |
| SEQ ID NO: 450 | IEVYHFTNS | 7.89% |
| SEQ ID NO: 451 | KALTHDARN | 7.89% |
| SEQ ID NO: 452 | KTQMKRLRM | 7.70% |
| SEQ ID NO: 453 | KAPWAPMDS | 7.67% |
| SEQ ID NO: 454 | ETVMMPMSI | 7.64% |
| SEQ ID NO: 455 | DYVDQCCWS | 7.63% |
| SEQ ID NO: 456 | RACVGSPLW | 7.62% |
| SEQ ID NO: 457 | KIMHSWYND | 7.62% |
| SEQ ID NO: 458 | RHEPTQSVS | 7.62% |
| SEQ ID NO: 459 | DPKGOSIQA | 7.61% |
| SEQ ID NO: 460 | RTTSRDVED | 7.61% |
| SEQ ID NO: 461 | QCMVMTEAD | 7.61% |
| SEQ ID NO: 462 | VQHNSESNI | 7.61% |
| SEQ ID NO: 463 | WHESTTIGS | 7.61% |
| SEQ ID NO: 464 | RHEQYVVAT | 7.60% |
| SEQ ID NO: 465 | VVCTDTRAL | 7.49% |
| SEQ ID NO: 466 | EHHAMMLHE | 7.47% |
| SEQ ID NO: 467 | KACMSHQGR | 7.42% |
| SEQ ID NO: 468 | DSPAYTTQY | 7.35% |
| SEQ ID NO: 469 | ICELTHCNY | 7.33% |
| SEQ ID NO: 470 | KATDLMVNG | 7.32% |
| SEQ ID NO: 471 | PQSHELQLL | 7.32% |
| SEQ ID NO: 472 | CHCHYNPFC | 7.32% |
| SEQ ID NO: 473 | FAFCVAGER | 7.32% |
| SEQ ID NO: 474 | EFWTTHSKG | 7.31% |
| SEQ ID NO: 475 | GHVLLGWYP | 7.31% |
| SEQ ID NO: 476 | YCQQLFLCD | 7.05% |
| SEQ ID NO: 477 | AKEPVRLYP | 7.04% |
| SEQ ID NO: 478 | EERLFTGCH | 7.04% |
| SEQ ID NO: 479 | QTSPKFCMC | 7.04% |
| SEQ ID NO: 480 | WMNQCGCKD | 7.04% |
| SEQ ID NO: 481 | NYSRGKENE | 7.03% |
| SEQ ID NO: 482 | DIQRWEHEG | 7.02% |
| SEQ ID NO: 483 | MMAMKQGFY | 7.02% |
| SEQ ID NO: 484 | KVNACGNLT | 6.89% |
| SEQ ID NO: 485 | ETTHRREWS | 6.75% |
| SEQ ID NO: 486 | PTVEEVVVQ | 6.75% |
| SEQ ID NO: 487 | SIEPRKTVG | 6.75% |
| SEQ ID NO: 488 | QTIMRHAQT | 6.74% |
| SEQ ID NO: 489 | RIETVSVPL | 6.74% |
| SEQ ID NO: 490 | SRTICVHGN | 6.74% |
| SEQ ID NO: 491 | GACKYSMCL | 6.73% |
| SEQ ID NO: 492 | GWDQNCKDS | 6.73% |
| SEQ ID NO: 493 | ASINCHLTE | 6.44% |
| SEQ ID NO: 494 | HYMELLCGC | 6.44% |
| SEQ ID NO: 495 | ITRTYQEMQ | 6.44% |
| SEQ ID NO: 496 | RANENHPFT | 6.44% |
| SEQ ID NO: 497 | LNKMQSYSA | 6.42% |
| SEQ ID NO: 498 | NGYLVHACQ | 6.21% |
| SEQ ID NO: 499 | LMAYCYANN | 6.18% |
| SEQ ID NO: 500 | KESKEHRWA | 6.16% |
| SEQ ID NO: 501 | FTTMCEHTA | 6.15% |
| SEQ ID NO: 502 | ATMWVQAYG | 6.15% |
| SEQ ID NO: 503 | RGQFHLIMD | 6.15% |
| SEQ ID NO: 504 | DLVDLRSWM | 6.14% |
| SEQ ID NO: 505 | LGAVLNNMV | 6.14% |
| SEQ ID NO: 506 | MYRQKEMQT | 6.14% |
| SEQ ID NO: 507 | RLEDTVGGS | 6.14% |
| SEQ ID NO: 508 | ACHYRLDNC | 6.06% |
| SEQ ID NO: 509 | LNNAGYRPC | 6.02% |
| SEQ ID NO: 510 | SFSHTDLEA | 5.89% |
| SEQ ID NO: 511 | ATEPLKFQY | 5.87% |
| SEQ ID NO: 512 | NQNPYDMMG | 5.87% |
| SEQ ID NO: 513 | FKIEWSQDI | 5.86% |
| SEQ ID NO: 514 | QIGHQYKWD | 5.86% |
| SEQ ID NO: 515 | SWSQLQHTD | 5.86% |
| SEQ ID NO: 516 | QMMDFQHPA | 5.86% |
| SEQ ID NO: 517 | LFTQRGWGN | 5.85% |
| SEQ ID NO: 518 | TATQREAFV | 5.59% |
| SEQ ID NO: 519 | KENPSEYEM | 5.58% |
| SEQ ID NO: 520 | KEFQLQMEP | 5.57% |
| SEQ ID NO: 521 | KSAGIRTLL | 5.57% |
| SEQ ID NO: 522 | MSEKGYAWV | 5.57% |
| SEQ ID NO: 523 | VYCGKDFQA | 5.57% |
| SEQ ID NO: 524 | CVKLVMANC | 5.56% |
| SEQ ID NO: 525 | ALRPYMDDR | 5.56% |
| SEQ ID NO: 526 | CSIQINNCR | 5.56% |
| SEQ ID NO: 527 | GTRINTCNG | 5.56% |
| SEQ ID NO: 528 | FGAVELDAP | 5.56% |
| SEQ ID NO: 529 | YCQRGHLSC | 5.56% |
| SEQ ID NO: 530 | HRMNNHAWF | 5.54% |
| SEQ ID NO: 531 | NADFKYNNT | 5.52% |
| SEQ ID NO: 532 | MGATKSDDF | 5.32% |
| SEQ ID NO: 533 | SMHDYNFNV | 5.31% |
| SEQ ID NO: 534 | GNECFHNVE | 5.29% |
| SEQ ID NO: 535 | GVWMPHGWR | 5.29% |
| SEQ ID NO: 536 | EIWPAAWMD | 5.28% |
| SEQ ID NO: 537 | APKWQIVDP | 5.27% |
| SEQ ID NO: 538 | HAMHWWSPM | 5.27% |
| SEQ ID NO: 539 | QCKYSERGT | 5.21% |
| SEQ ID NO: 540 | TCCMWTFIW | 5.01% |
| SEQ ID NO: 541 | ETGYRENPC | 5.00% |
| SEQ ID NO: 542 | MEMFTMKSC | 4.99% |
| SEQ ID NO: 543 | PQGFCKPQC | 4.98% |
| SEQ ID NO: 544 | KTTFDVACY | 4.98% |
| SEQ ID NO: 545 | WCRTPQREN | 4.98% |
| SEQ ID NO: 546 | GSQQMQASQ | 4.97% |
| SEQ ID NO: 547 | ITGSPQNGC | 4.97% |
| SEQ ID NO: 548 | GTVEAPQSF | 4.93% |
| SEQ ID NO: 549 | LNCPSKDET | 4.85% |
| SEQ ID NO: 550 | CSNTETHGV | 4.84% |
| SEQ ID NO: 551 | QMEQWHRGG | 4.78% |
| SEQ ID NO: 552 | IPFNSMIYC | 4.72% |
| SEQ ID NO: 553 | RVEQWRGQQ | 4.70% |
| SEQ ID NO: 554 | WNMPWGFYH | 4.70% |
| SEQ ID NO: 555 | MISCMDSWN | 4.69% |
| SEQ ID NO: 556 | TSRALDVAA | 4.69% |
| SEQ ID NO: 557 | FFRWRWGLG | 4.69% |
| SEQ ID NO: 558 | FPKCAIWHY | 4.69% |
| SEQ ID NO: 559 | NMIKRCSQG | 4.69% |
| SEQ ID NO: 560 | GTSVNILMM | 4.68% |
| SEQ ID NO: 561 | MRQRTYICQ | 4.68% |
| SEQ ID NO: 562 | RGCMAECMP | 4.68% |
| SEQ ID NO: 563 | MPMPVYQRD | 4.59% |
| SEQ ID NO: 564 | ALNKTLAES | 4.55% |
| SEQ ID NO: 565 | EAGMWPSKA | 4.41% |
| SEQ ID NO: 566 | AAVKEQQVM | 4.40% |
| SEQ ID NO: 567 | SAQYSGFDT | 4.40% |
| SEQ ID NO: 568 | LILDFNKID | 4.40% |
| SEQ ID NO: 569 | MSAVSLGRS | 4.39% |
| SEQ ID NO: 570 | RWGSPMAVP | 4.39% |
| SEQ ID NO: 571 | KTVTNGDAG | 4.39% |
| SEQ ID NO: 572 | YTMSMQMQR | 4.39% |
| SEQ ID NO: 573 | AHEHYRIFP | 4.11% |
| SEQ ID NO: 574 | GKFPMPTHS | 4.11% |
| SEQ ID NO: 575 | KIENRGQCR | 4.10% |
| SEQ ID NO: 576 | MWEMRRAMG | 4.10% |
| SEQ ID NO: 577 | HGSSYNIVQ | 4.09% |
| SEQ ID NO: 578 | VIKAFQHFN | 4.09% |
| SEQ ID NO: 579 | EVRCNKCRS | 3.88% |
| SEQ ID NO: 580 | LALQFQYNS | 3.85% |
| SEQ ID NO: 581 | GVITVDAKG | 3.84% |
| SEQ ID NO: 582 | CLHHHYPVT | 3.83% |
| SEQ ID NO: 583 | AECRGHYQA | 3.82% |
| SEQ ID NO: 584 | KTGWDSHWS | 3.82% |
| SEQ ID NO: 585 | RYEMMDTSD | 3.82% |
| SEQ ID NO: 586 | DIFWSSMDF | 3.81% |
| SEQ ID NO: 587 | MSTHVLKWV | 3.81% |
| SEQ ID NO: 588 | CDVWWFPNL | 3.81% |
| SEQ ID NO: 589 | IVFHNKFQH | 3.81% |
| SEQ ID NO: 590 | SHIQSASNL | 3.81% |
| SEQ ID NO: 591 | VKQLRQDGF | 3.81% |
| SEQ ID NO: 592 | DKCLNNKFY | 3.80% |
| SEQ ID NO: 593 | RNDWQQVFS | 3.80% |
| SEQ ID NO: 594 | QRREQCTST | 3.77% |
| SEQ ID NO: 595 | YHWSYEGAT | 3.75% |
| SEQ ID NO: 596 | TDFDKRQVP | 3.67% |
| SEQ ID NO: 597 | QISMKGEHG | 3.55% |
| SEQ ID NO: 598 | LVGERKNAY | 3.53% |
| SEQ ID NO: 599 | DPMKIFVSH | 3.53% |
| SEQ ID NO: 600 | KQTRTDYAY | 3.52% |
| SEQ ID NO: 601 | AVAMIRPNQ | 3.51% |
| SEQ ID NO: 602 | ESTHMLYEM | 3.51% |
| SEQ ID NO: 603 | VDADYCSCS | 3.51% |
| SEQ ID NO: 604 | EMVRMQRGT | 3.51% |
| SEQ ID NO: 605 | NCDHRFGTL | 3.50% |
| SEQ ID NO: 606 | SVVESAAEV | 3.48% |
| SEQ ID NO: 607 | NARPMCGQV | 3.40% |
| SEQ ID NO: 608 | TEATEMTYY | 3.33% |
| SEQ ID NO: 609 | AYGSFEKDW | 3.24% |
| SEQ ID NO: 610 | MNSFYRAEW | 3.24% |
| SEQ ID NO: 611 | MIDNCKICL | 3.23% |
| SEQ ID NO: 612 | VCRGSPLAE | 3.23% |
| SEQ ID NO: 613 | DTRMDQCCY | 3.22% |
| SEQ ID NO: 614 | LVDCSNTCQ | 3.22% |
| SEQ ID NO: 615 | INKNMDAAY | 3.22% |
| SEQ ID NO: 616 | TGMTFNSFR | 3.22% |
| SEQ ID NO: 617 | AWKIAHNSF | 3.22% |
| SEQ ID NO: 618 | NFMQMSIMG | 3.22% |
| SEQ ID NO: 619 | WIKHCWPPH | 3.22% |
| SEQ ID NO: 620 | NLWNIAMQQ | 3.18% |
| SEQ ID NO: 621 | EHMDRADDA | 3.11% |
| SEQ ID NO: 622 | AQDVYYPGS | 3.08% |
| SEQ ID NO: 623 | FPQTMHAQA | 2.96% |
| SEQ ID NO: 624 | TFGCIESMQ | 2.95% |
| SEQ ID NO: 625 | KFFYTELMH | 2.94% |
| SEQ ID NO: 626 | GRLGPGTWK | 2.93% |
| SEQ ID NO: 627 | ASTDGTWKD | 2.92% |
| SEQ ID NO: 628 | DARPFLAWM | 2.92% |
| SEQ ID NO: 629 | KFHSKERMN | 2.91% |
| SEQ ID NO: 630 | SLQHFPECA | 2.87% |
| SEQ ID NO: 631 | VCVSAHHHF | 2.87% |
| SEQ ID NO: 632 | AVIFELDAT | 2.84% |
| SEQ ID NO: 633 | EQADQMQVD | 2.83% |
| SEQ ID NO: 634 | MSQFKAYLF | 2.82% |
| SEQ ID NO: 635 | EMSIQSSLG | 2.76% |
| SEQ ID NO: 636 | GIGYRTFIG | 2.67% |
| SEQ ID NO: 637 | KASHTVTGT | 2.65% |
| SEQ ID NO: 638 | NSVALENRG | 2.64% |
| SEQ ID NO: 639 | NEGPLMCWF | 2.64% |
| SEQ ID NO: 640 | NNELQSRPK | 2.61% |
| SEQ ID NO: 641 | NGTQCLNMD | 2.52% |
| SEQ ID NO: 642 | SSTWQNVDK | 2.51% |
| SEQ ID NO: 643 | YMVPYSNYP | 2.50% |
| SEQ ID NO: 644 | WFDRPMCMF | 2.48% |
| SEQ ID NO: 645 | LECTALVAM | 2.38% |
| SEQ ID NO: 646 | QVQSGQFIF | 2.37% |
| SEQ ID NO: 647 | KMFTMICFD | 2.37% |
| SEQ ID NO: 648 | QSDAVHEPA | 2.36% |
| SEQ ID NO: 649 | GYMCEDAGI | 2.35% |
| SEQ ID NO: 650 | EIHPGDLND | 2.35% |
| SEQ ID NO: 651 | EFSKACTNE | 2.35% |
| SEQ ID NO: 652 | KSTYYNLKW | 2.34% |
| SEQ ID NO: 653 | TSSRTNPWG | 2.34% |
| SEQ ID NO: 654 | SFKGFHLQN | 2.28% |
| SEQ ID NO: 655 | CDEWDNLTH | 2.20% |
| SEQ ID NO: 656 | DAGIGMKFY | 2.16% |
| SEQ ID NO: 657 | LGDQAGYHV | 2.14% |
| SEQ ID NO: 658 | IIVWMMMYR | 2.13% |
| SEQ ID NO: 659 | GADEWLLTM | 2.10% |
| SEQ ID NO: 660 | QSYPTMYQC | 2.09% |
| SEQ ID NO: 661 | DRTWTMTQM | 2.08% |
| SEQ ID NO: 662 | TSWTTEHRM | 2.06% |
| SEQ ID NO: 663 | TLRICELHG | 2.06% |
| SEQ ID NO: 664 | CQASHEHAH | 2.06% |
| SEQ ID NO: 665 | ESAEPRMIP | 2.06% |
| SEQ ID NO: 666 | FWMQLWCLP | 2.03% |
| SEQ ID NO: 667 | QGYCRNCTG | 2.02% |
| SEQ ID NO: 668 | ESCLVRRGW | 2.00% |
| SEQ ID NO: 669 | QIRCTCGWP | 1.98% |
| SEQ ID NO: 670 | HAYQHDHSS | 1.97% |
| SEQ ID NO: 671 | DMAVSEAHC | 1.97% |
| SEQ ID NO: 672 | WAGMAYHAQ | 1.94% |
| SEQ ID NO: 673 | FQQDIQIGQ | 1.92% |
| SEQ ID NO: 674 | VVHKGRWKE | 1.91% |
| SEQ ID NO: 675 | MQLRQSDKW | 1.89% |
| SEQ ID NO: 676 | YVRQFPIFL | 1.87% |
| SEQ ID NO: 677 | IIHRTEGAA | 1.87% |
| SEQ ID NO: 678 | GQYWGQGWL | 1.85% |
| SEQ ID NO: 679 | GSTHMNQEG | 1.85% |
| SEQ ID NO: 680 | INAGDKPNT | 1.83% |
| SEQ ID NO: 681 | LGTAMREMQ | 1.81% |
| SEQ ID NO: 682 | PGGGDRPAC | 1.81% |
| SEQ ID NO: 683 | QDVQMWYQI | 1.80% |
| SEQ ID NO: 684 | QARAVMTAD | 1.79% |
| SEQ ID NO: 685 | GAHDPKVWY | 1.78% |
| SEQ ID NO: 686 | GTLGYHITG | 1.77% |
| SEQ ID NO: 687 | SMLMMITGM | 1.77% |
| SEQ ID NO: 688 | RDDYGIYDN | 1.77% |
| SEQ ID NO: 689 | HLVTTRHSH | 1.76% |
| SEQ ID NO: 690 | ITDLRCWLK | 1.76% |
| SEQ ID NO: 691 | IMVRELMSS | 1.75% |
| SEQ ID NO: 692 | NAEHCFMGQ | 1.73% |
| SEQ ID NO: 693 | NNLQWMYAK | 1.73% |
| SEQ ID NO: 694 | SPMPFLNVL | 1.72% |
| SEQ ID NO: 695 | CEQQLIAEG | 1.72% |
| SEQ ID NO: 696 | NDKYAFADR | 1.71% |
| SEQ ID NO: 697 | WIKRHIPSG | 1.71% |
| SEQ ID NO: 698 | REGAKHCVN | 1.69% |
| SEQ ID NO: 699 | CDDWTFERQ | 1.69% |
| SEQ ID NO: 700 | GVGPSHGER | 1.69% |
| SEQ ID NO: 701 | ESTEWQHTF | 1.69% |
| SEQ ID NO: 702 | MFVCCTIIV | 1.67% |
| SEQ ID NO: 703 | QKYEPRFFG | 1.67% |
| SEQ ID NO: 704 | AHVKIQLSW | 1.66% |
| SEQ ID NO: 705 | TESHMLSVE | 1.66% |
| SEQ ID NO: 706 | LRPLQHIQL | 1.65% |
| SEQ ID NO: 707 | MANGNWGVW | 1.65% |
| SEQ ID NO: 708 | VTDAAMFMG | 1.64% |
| SEQ ID NO: 709 | WHEEKPANS | 1.62% |
| SEQ ID NO: 710 | KCORMSVQQ | 1.62% |
| SEQ ID NO: 711 | DDRIGHCRN | 1.62% |
| SEQ ID NO: 712 | IAPEARCGT | 1.62% |
| SEQ ID NO: 713 | GCSSSVNMR | 1.61% |
| SEQ ID NO: 714 | RKRVRAYSE | 1.61% |
| SEQ ID NO: 715 | QEPKEDHIV | 1.60% |
| SEQ ID NO: 716 | SILPYPIDV | 1.59% |
| SEQ ID NO: 717 | ILDIINTET | 1.59% |
| SEQ ID NO: 718 | RFMLESWLH | 1.59% |
| SEQ ID NO: 719 | NSAHVHYTH | 1.58% |
| SEQ ID NO: 720 | LVKGHMTTS | 1.58% |
| SEQ ID NO: 721 | DKYANVHNE | 1.57% |
| SEQ ID NO: 722 | RYCTPDHEV | 1.57% |
| SEQ ID NO: 723 | RYHRRHDKP | 1.57% |
| SEQ ID NO: 724 | SMRMFEHSC | 1.56% |
| SEQ ID NO: 725 | SRCNKPTVR | 1.56% |
| SEQ ID NO: 726 | TFHQSDYWE | 1.55% |
| SEQ ID NO: 727 | VLQMPWLYT | 1.55% |
| SEQ ID NO: 728 | VCTPPLNMQ | 1.55% |
| SEQ ID NO: 729 | LNSDRLIEY | 1.52% |
| SEQ ID NO: 730 | CETYVPVIY | 1.52% |
| SEQ ID NO: 731 | WVPTFHARY | 1.52% |
| SEQ ID NO: 732 | CEIRTYEWS | 1.52% |
| SEQ ID NO: 733 | KHDGFSVVG | 1.51% |
| SEQ ID NO: 734 | AWYHTQDDM | 1.50% |
| SEQ ID NO: 735 | WMCEFSCIQ | 1.50% |
| SEQ ID NO: 736 | AMVMSKTES | 1.49% |
| SEQ ID NO: 737 | NFCCLECCI | 1.49% |
| SEQ ID NO: 738 | RTSPALLCA | 1.49% |
| SEQ ID NO: 739 | DITLWMATE | 1.48% |
| SEQ ID NO: 740 | AVAEIRPEP | 1.47% |
| SEQ ID NO: 741 | SARVTTMLY | 1.47% |
| SEQ ID NO: 742 | TLRAEMSFH | 1.47% |
| SEQ ID NO: 743 | ASKQNGINC | 1.47% |
| SEQ ID NO: 744 | RRCPALTIR | 1.47% |
| SEQ ID NO: 745 | ARPLVCQAL | 1.46% |
| SEQ ID NO: 746 | MMLGYMGQD | 1.46% |
| SEQ ID NO: 747 | QEHIYKHSN | 1.46% |
| SEQ ID NO: 748 | DONTFPETG | 1.46% |
| SEQ ID NO: 749 | KSEGWLLGD | 1.45% |
| SEQ ID NO: 750 | SPCFDVFEE | 1.44% |
| SEQ ID NO: 751 | TINKFPWVC | 1.44% |
| SEQ ID NO: 752 | IRFTTQIVD | 1.44% |
| SEQ ID NO: 753 | SVWEKTQMR | 1.43% |
| SEQ ID NO: 754 | CPCHKWASC | 1.43% |
| SEQ ID NO: 755 | HDHAAKQLD | 1.43% |
| SEQ ID NO: 756 | RPVGKLYMI | 1.43% |
| SEQ ID NO: 757 | MWGCKLFVC | 1.42% |
| SEQ ID NO: 758 | KHNPSRHDI | 1.42% |
| SEQ ID NO: 759 | NPYQCIVAG | 1.39% |
| SEQ ID NO: 760 | CMRGGQKLT | 1.36% |
| SEQ ID NO: 761 | DVDTSQFDR | 1.34% |
| SEQ ID NO: 762 | VCVKWRNVN | 1.34% |
| SEQ ID NO: 763 | WASPSVWRR | 1.34% |
| SEQ ID NO: 764 | YFHYRYDYG | 1.33% |
| SEQ ID NO: 765 | KVYYIISHQ | 1.32% |
| SEQ ID NO: 766 | QTYRGDWQK | 1.31% |
| SEQ ID NO: 767 | RVDKAGAIF | 1.28% |
| SEQ ID NO: 768 | VFNLMLQDK | 1.27% |
| SEQ ID NO: 769 | VKKPQYDMH | 1.26% |
| SEQ ID NO: 770 | QYVQCAAKD | 1.23% |
| SEQ ID NO: 771 | EGCYFWKQV | 1.22% |
| SEQ ID NO: 772 | TMKTWIYRN | 1.22% |
| SEQ ID NO: 773 | GWESFPHCG | 1.21% |
| SEQ ID NO: 774 | QKAEHLFVG | 1.21% |
| SEQ ID NO: 775 | PDSIPNSWC | 1.21% |
| SEQ ID NO: 776 | CHGRMLCYI | 1.20% |
| SEQ ID NO: 777 | NQQRTYNSG | 1.19% |
| SEQ ID NO: 778 | LDTKTLANS | 1.19% |
| SEQ ID NO: 779 | FAPEFDNHC | 1.19% |
| SEQ ID NO: 780 | REFAISGGS | 1.19% |
| SEQ ID NO: 781 | AFKTFGHVN | 1.18% |
| SEQ ID NO: 782 | ASSRLAEVI | 1.18% |
| SEQ ID NO: 783 | RMSAEKERS | 1.17% |
| SEQ ID NO: 784 | TMGLGVNAI | 1.17% |
| SEQ ID NO: 785 | PADWDREHG | 1.17% |
| SEQ ID NO: 786 | PELRPCAPR | 1.17% |
| SEQ ID NO: 787 | PDTQSAFWI | 1.17% |
| SEQ ID NO: 788 | KFKWLVRMT | 1.16% |
| SEQ ID NO: 789 | MTNRCAKYK | 1.15% |
| SEQ ID NO: 790 | AQPRTCQII | 1.13% |
| SEQ ID NO: 791 | IVVFGQMGY | 1.13% |
| SEQ ID NO: 792 | KVVFMFRWY | 1.12% |
| SEQ ID NO: 793 | CQTHWEKGD | 1.12% |
| SEQ ID NO: 794 | SGTEHVALH | 1.12% |
| SEQ ID NO: 795 | LCDLIMTDE | 1.11% |
| SEQ ID NO: 796 | PTLDRWEYH | 1.10% |
| SEQ ID NO: 797 | QLPIYIQKS | 1.08% |
| SEQ ID NO: 798 | HLAWIVNED | 1.00% |
| SEQ ID NO: 799 | HYFKWLFVE | 0.98% |
| SEQ ID NO: 800 | KFTWKKYFA | 0.97% |
| SEQ ID NO: 801 | HIWPPLFYW | 0.94% |
| SEQ ID NO: 802 | TWMPKVEYK | 0.91% |
| SEQ ID NO: 803 | ALTAVHAGT | 0.90% |
| SEQ ID NO: 804 | TLNSWHPEC | 0.90% |
| SEQ ID NO: 805 | AHMSYCLSR | 0.89% |
| SEQ ID NO: 806 | TDYPWVLHG | 0.89% |
| SEQ ID NO: 807 | WFSIIMSKL | 0.89% |
| SEQ ID NO: 808 | SVKVKNGFT | 0.89% |
| SEQ ID NO: 809 | NHIFKKVTW | 0.88% |
| SEQ I0 NO: 810 | KPPACIGGK | 0.88% |
| SEQ ID NO: 811 | PPDARQSLR | 0.88% |
| SEQ ID NO: 812 | RQTGTGNME | 0.88% |
| SEQ ID NO: 813 | EQFADQAPR | 0.88% |
| SEQ ID NO: 814 | ISISAQDID | 0.88% |
| SEQ ID NO: 815 | KFTLQQMAS | 0.88% |
| SEQ ID NO: 816 | SFSGTHLGW | 0.88% |
| SEQ ID NO: 817 | NHSDTDTAQ | 0.86% |
| SEQ ID NO: 818 | AFCYSYYQN | 0.80% |
| SEQ ID NO: 819 | EGKFTKAAV | 0.80% |
| SEQ ID NO: 820 | VQCLWWHKE | 0.77% |
| SEQ ID NO: 821 | QNLMYCSSV | 0.72% |
| SEQ ID NO: 822 | RRWLNPAYN | 0.69% |
| SEQ ID NO: 823 | PWFYKDWPH | 0.66% |
| SEQ ID NO: 824 | QALWLESDN | 0.62% |
| SEQ ID NO: 825 | TLNLRHPEC | 0.62% |
| SEQ ID NO: 826 | APEFRNRLT | 0.60% |
| SEQ ID NO: 827 | DVMRMGHYL | 0.60% |
| SEQ ID NO: 828 | ERRAHNHYA | 0.60% |
| SEQ ID NO: 829 | TSHKMMVLS | 0.59% |
| SEQ ID NO: 830 | EVDRNTNWC | 0.59% |
| SEQ ID NO: 831 | MALPLRVLS | 0.59% |
| SEQ ID NO: 832 | PCKSTRSIL | 0.59% |
| SEQ ID NO: 833 | TTDGMMGDH | 0.59% |
| SEQ ID NO: 834 | YPVHLMPPL | 0.59% |
| SEQ ID NO: 835 | ECWMAVQSC | 0.59% |
| SEQ ID NO: 836 | ERTACKTKS | 0.59% |
| SEQ ID NO: 837 | GTARHNMQL | 0.59% |
| SEQ ID NO: 838 | GTVDAQDRE | 0.59% |
| SEQ ID NO: 839 | RQIGTGNTE | 0.59% |
| SEQ ID NO: 840 | SPDGRGLCG | 0.59% |
| SEQ ID NO: 841 | TLNSRHLEC | 0.59% |
| SEQ ID NO: 842 | VLTDGACAA | 0.59% |
| SEQ ID NO: 843 | AHMYYCLSR | 0.58% |
| SEQ ID NO: 844 | AMLMSDGGG | 0.58% |
| SEQ ID NO: 845 | AQGFKPSGG | 0.58% |
| SEQ ID NO: 846 | ATGTYNLEE | 0.58% |
| SED ID NO: 847 | AYAASKNAM | 0.58% |
| SEQ ID NO: 848 | CAWYMKQGN | 0.58% |
| SEQ ID NO: 849 | CCRQIWIQY | 0.58% |
| SEQ ID NO: 850 | CMKTFPMNA | 0.58% |
| SEQ ID NO: 851 | DRINLMWKD | 0.58% |
| SEQ ID NO: 852 | DRVDLMWKD | 0.58% |
| SEQ ID NO: 853 | DSATFESAD | 0.58% |
| SEQ ID NO: 854 | EFEMRDSGY | 0.58% |
| SEQ ID NO: 855 | EKYQIHRDR | 0.58% |
| SEQ ID NO: 856 | HNQRTYPAL | 0.58% |
| SEQ ID NO: 857 | KMTNSSENS | 0.58% |
| SEQ ID NO: 858 | KQPTFPMLA | 0.58% |
| SEQ ID NO: 859 | LMRWYNRCW | 0.58% |
| SEQ ID NO: 860 | LRCTVMDPG | 0.58% |
| SEQ ID NO: 861 | LYQKDQRFG | 0.58% |
| SEQ ID NO: 862 | MHVNRRIDQ | 0.58% |
| SEQ ID NO: 863 | NCKSDQIAM | 0.58% |
| SEQ ID NO: 864 | NNHRLNDAN | 0.58% |
| SEQ ID NO: 865 | QPKVHGNYL | 0.58% |
| SEQ ID NO: 866 | QVEDRYWSY | 0.58% |
| SEQ ID NO: 867 | RRGYVNIEW | 0.58% |
| SEQ ID NO: 868 | SPCPTWDGL | 0.58% |
| SEQ ID NO: 869 | SRLLVHECP | 0.58% |
| SEQ ID NO: 870 | SSMQCVMRP | 0.58% |
| SEQ ID NO: 871 | SVTYHEWHL | 0.58% |
| SEQ ID NO: 872 | TCICSHTYP | 0.58% |
| SEQ ID NO: 873 | TGMAVSEQS | 0.58% |
| SEQ ID NO: 874 | TIEHGAWKC | 0.58% |
| SEQ ID NO: 875 | TPLTKWLPI | 0.58% |
| SEQ ID NO: 876 | VSIPNLGWP | 0.58% |
| SEQ ID NO: 877 | YCHLEDRIT | 0.58% |
| SEQ ID NO: 878 | EWMVIMAKN | 0.40% |
| SEQ ID NO: 879 | RVAIMFTGT | 0.35% |
| SEQ ID NO: 880 | IPDIMRRCP | 0.33% |
| SEQ ID NO: 881 | ERTACKMRS | 0.33% |
| SEQ ID NO: 882 | YTTVEGRIT | 0.33% |
| SEQ ID NO: 883 | DLEFCVMER | 0.32% |
| SEQ ID NO: 884 | YAQRTCWSE | 0.31% |
| SEQ ID NO: 885 | DRVNLTWKD | 0.31% |
| SEQ ID NO: 886 | DSTPNLLDP | 0.31% |
| SEQ ID NO: 887 | EPLYSWVGV | 0.31% |
| SEQ ID NO: 888 | DQLFMKFWS | 0.31% |
| SEQ ID NO: 889 | FVGLMSQCG | 0.31% |
| SEQ ID NO: 890 | KPCSSMSIQ | 0.31% |
| SEQ ID NO: 891 | SIYQKWVTS | 0.31% |
| SEQ ID NO: 892 | TLSSRHPEC | 0.31% |
| SEQ ID NO: 893 | AQTNNTCSI | 0.31% |
| SEQ ID NO: 894 | IPSHVHLGE | 0.31% |
| SEQ ID NO: 895 | MALPPHVLS | 0.31% |
| SEQ ID NO: 896 | MGCIGNCIL | 0.31% |
| SEQ ID NO: 897 | QTQHYGSTT | 0.31% |
| SEQ ID NO: 898 | RVDRNTNWC | 0.31% |
| SEQ ID NO: 899 | TYDTRSHCL | 0.31% |
| SEQ ID NO: 900 | ARVDHQCSG | 0.30% |
| SEQ ID NO: 901 | NGSHYNAMR | 0.30% |
| SEQ ID NO: 902 | QTQLYQNDE | 0.30% |
| SEQ ID NO: 903 | SPYGRGLCG | 0.30% |
| SEQ ID NO: 904 | TYSLAMSLG | 0.30% |
| SEQ ID NO: 905 | WVGNANRPA | 0.30% |
| SEQ ID NO: 906 | AHVDHQCGG | 0.30% |
| SEQ ID NO: 907 | APEFNVARR | 0.30% |
| SEQ ID NO: 908 | CCQQIWVQY | 0.30% |
| SEQ ID NO: 909 | CITARSTAA | 0.30% |
| SEQ ID NO: 910 | CTIARSTAA | 0.30% |
| SEQ ID NO: 911 | DVIRTTHSG | 0.30% |
| SEQ ID NO: 912 | GSQQTTPSC | 0.30% |
| SEQ ID NO: 913 | GYATFPDSD | 0.30% |
| SEQ ID NO: 914 | ISSTMVEHG | 0.30% |
| SEQ ID NO: 915 | KLLFMKFWN | 0.30% |
| SEQ ID NO: 916 | KVDRNTYWC | 0.30% |
| SEQ ID NO: 917 | LFRAYAWSQ | 0.30% |
| SEQ ID NO: 918 | LITRDTGLA | 0.30% |
| SEQ ID NO: 919 | LSECSDRTN | 0.30% |
| SEQ ID NO: 920 | NCKPNQIAM | 0.30% |
| SEQ ID NO: 921 | PAVPADEFF | 0.30% |
| SEQ ID NO: 922 | QATDMHRWQ | 0.30% |
| SEQ ID NO: 923 | STARHNTQL | 0.30% |
| SEQ ID NO: 924 | THMNYCLSR | 0.30% |
| SEQ ID NO: 925 | TSHRMMVFS | 0.30% |
| SEQ ID NO: 926 | AMTRCMAGH | 0.30% |
| SEQ ID NO: 927 | CPEHNLVGV | 0.30% |
| SEQ ID NO: 928 | CPEHSQVGV | 0.30% |
| SEQ ID NO: 929 | DRANLMWKD | 0.30% |
| SEQ ID NO: 930 | DRVNLMWKG | 0.30% |
| SEQ ID NO: 931 | DWGYCHSKA | 0.30% |
| SEQ ID NO: 932 | EFVLGYQGI | 0.30% |
| SEQ ID NO: 933 | EKYQIHWDH | 0.30% |
| SEQ ID NO: 934 | EQFVDRAPR | 0.30% |
| SEQ ID NO: 935 | EROAHSHYA | 0.30% |
| SEQ ID NO: 936 | KIYQKWVTN | 0.30% |
| SEQ ID NO: 937 | GQFRSGAHR | 0.30% |
| SEQ ID NO: 938 | HTNEQYLQH | 0.30% |
| SEQ ID NO: 939 | HVNTSCKQS | 0.30% |
| SEQ ID NO: 940 | KYSPIQEHN | 0.30% |
| SEQ ID NO: 941 | LCLQGAKMD | 0.30% |
| SEQ ID NO: 942 | LMSITSAVE | 0.30% |
| SEQ ID NO: 943 | LTHNIPFPK | 0.30% |
| SEQ ID NO: 944 | MALPLHALS | 0.30% |
| SEQ ID NO: 945 | MCQSVEKEY | 0.30% |
| SEQ ID NO: 946 | NGNRYNAMR | 0.30% |
| SEQ ID NO: 947 | NHRSREIDI | 0.30% |
| SEQ ID NO: 948 | NIVRSRSIT | 0.30% |
| SEQ ID NO: 949 | NKTCYLTCP | 0.30% |
| SEQ ID NO: 950 | PQARVDMEF | 0.30% |
| SEQ ID NO: 951 | QAAGMHRWQ | 0.30% |
| SEQ ID NO: 952 | REFVISGGN | 0.30% |
| SEQ ID NO: 953 | SMREYQKHI | 0.30% |
| SEQ ID NO: 954 | SPHSCQHMG | 0.30% |
| SEQ ID NO: 955 | SRLSVHECP | 0.30% |
| SEQ ID NO: 956 | STTRHNMQL | 0.30% |
| SEQ ID NO: 957 | TFHFSILLT | 0.30% |
| SEQ ID NO: 958 | TPQPMNVAA | 0.30% |
| SEQ ID NO: 959 | TYIQHPTNA | 0.30% |
| SEQ ID NO: 960 | VAGRFGSNT | 0.30% |
| SEQ ID NO: 961 | VSMPSLGWP | 0.30% |
| SEQ ID NO: 962 | YDNHQKARI | 0.30% |
| SEQ ID NO: 963 | AHMIYCLSR | 0.29% |
| SEQ ID NO: 964 | AHMNYCLSH | 0.29% |
| SEQ ID NO: 965 | AQWIQQKHG | 0.29% |
| SEQ ID NO: 966 | ARTLREGWG | 0.29% |
| SEQ ID NO: 967 | ASKLEVQEQ | 0.29% |
| SEQ ID NO: 968 | AVEHGAWKC | 0.29% |
| SEQ ID NO: 969 | AVETGESAV | 0.29% |
| SEQ ID NO: 970 | CCRQIWVQH | 0.29% |
| SEQ ID NO: 971 | CGGQETGLA | 0.29% |
| SEQ ID NO: 972 | CNSWCTGSL | 0.29% |
| SEQ ID NO: 973 | DCRHTTLYV | 0.29% |
| SEQ ID NO: 974 | DESTCVAHG | 0.29% |
| SEQ ID NO: 975 | DGMHRELHS | 0.29% |
| SEQ ID NO: 976 | DKYGLGIFH | 0.29% |
| SEQ ID NO: 977 | DRVYLMWKD | 0.29% |
| SEQ ID NO: 978 | DTDYKPHFA | 0.29% |
| SEQ ID NO: 979 | DVHDGQLCY | 0.29% |
| SEQ ID NO: 980 | DVYDSQLCY | 0.29% |
| SEQ ID NO: 981 | DYAPTNTMM | 0.29% |
| SEQ ID NO: 982 | DYSQVNCER | 0.29% |
| SEQ ID NO: 983 | DYSQVNREK | 0.29% |
| SEQ ID NO: 984 | EEYYTWECH | 0.29% |
| SEQ ID NO: 985 | ETHHEYRDD | 0.29% |
| SEQ ID NO: 986 | EYACMLMTR | 0.29% |
| SEQ ID NO: 987 | FLRPKRHFS | 0.29% |
| SEQ ID NO: 988 | GCQLGFQIT | 0.29% |
| SEQ ID NO: 989 | GQFRRGAYR | 0.29% |
| SEQ ID NO: 990 | GSLSKDTPL | 0.29% |
| SEQ ID NO: 991 | GSQQTTLSR | 0.29% |
| SEQ ID NO: 992 | HCHQEDRIT | 0.29% |
| SEQ ID NO: 993 | HHECLYQIY | 0.29% |
| SEQ ID NO: 994 | HVDQHRIQA | 0.29% |
| SEQ ID NO: 995 | IADIGRKQW | 0.29% |
| SEQ ID NO: 996 | IAWPTDCSF | 0.29% |
| SEQ ID NO: 997 | IYCPCQDSD | 0.29% |
| SEQ ID NO: 998 | KAALFLKDC | 0.29% |
| SEQ ID NO: 999 | KAGMDQTAV | 0.29% |
| SEQ ID NO: 1000 | KCRMAVQSC | 0.29% |
| SEQ ID NO: 1001 | KPLASIGQH | 0.29% |
| SEQ ID NO: 1002 | KQLFMEFWN | 0.29% |
| SEQ ID NO: 1003 | KSLQEQGGA | 0.29% |
| SEQ ID NO: 1004 | KTQLSDHKH | 0.29% |
| SEQ ID NO: 1005 | LDHTNLMKL | 0.29% |
| SEQ ID NO: 1006 | LIQWYNRCW | 0.29% |
| SEQ ID NO: 1007 | LMKTSPCYW | 0.29% |
| SEQ ID NO: 1008 | LMLGYMEQD | 0.29% |
| SEQ ID NO: 1009 | LSECSDQAN | 0.29% |
| SEQ ID NO: 1010 | LVVIDPAHY | 0.29% |
| SEQ ID NO: 1011 | MALPLYVLS | 0.29% |
| SEQ ID NO: 1012 | MCOMSRRSI | 0.29% |
| SEQ ID NO: 1013 | MMLGYMERD | 0.29% |
| SEQ I0 NO: 1014 | MTQVHQALV | 0.29% |
| SEQ ID NO: 1015 | NACPQHDFG | 0.29% |
| SEQ ID NO: 1016 | NALWMTKAP | 0.29% |
| SEQ ID NO: 1017 | NCRHTILYV | 0.29% |
| SEQ ID NO: 1018 | NDCICRAIL | 0.29% |
| SEQ ID NO: 1019 | NFANHQPLP | 0.29% |
| SEQ ID NO: 1020 | NQRGLCKDE | 0.29% |
| SEQ ID NO: 1021 | PACLLRRML | 0.29% |
| SEQ ID NO: 1022 | PANPSFSYL | 0.29% |
| SEQ ID NO: 1023 | PCQQLMCFT | 0.29% |
| SEQ ID NO: 1024 | PDARQSLRH | 0.29% |
| SEQ ID NO: 1025 | PIYQKWVIN | 0.29% |
| SEQ ID NO: 1026 | PNGCRPFCC | 0.29% |
| SEQ ID NO: 1027 | PQHAGRAEH | 0.29% |
| SEQ ID NO: 1028 | QCFLWNDYQ | 0.29% |
| SEQ ID NO: 1029 | QHLMTLSHE | 0.29% |
| SEQ ID NO: 1030 | QPLSRNGAR | 0.29% |
| SEQ ID NO: 1031 | QPQLRNGAR | 0.29% |
| SEQ ID NO: 1032 | QRQSQEWFH | 0.29% |
| SEQ ID NO: 1033 | QTGVMAAIG | 0.29% |
| SEQ ID NO: 1034 | QVVIIECKN | 0.29% |
| SEQ ID NO: 1035 | RDRRVRDEC | 0.29% |
| SEQ ID NO: 1036 | RLETTRYIW | 0.29% |
| SEQ ID NO: 1037 | RMARVSVHG | 0.29% |
| SEQ ID NO: 1038 | RQHHCLPVI | 0.29% |
| SEQ ID NO: 1039 | RQVGTGNME | 0.29% |
| SEQ ID NO: 1040 | RSTRFIGIA | 0.29% |
| SEQ ID NO: 1041 | RTNEQYPQH | 0.29% |
| SEQ ID NO: 1042 | RTRISQMSG | 0.29% |
| SEQ ID NO: 1043 | RTRTSQMFG | 0.29% |
| SEQ ID NO: 1044 | RVNGSTCGH | 0.29% |
| SEQ ID NO: 1045 | SATTSGTAF | 0.29% |
| SEQ ID NO: 1046 | SATYHEWHP | 0.29% |
| SEQ ID NO: 1047 | SEAKYDTAT | 0.29% |
| SEQ ID NO: 1048 | SKRWYGHSA | 0.29% |
| SEQ ID NO: 1049 | SMQEYQKHV | 0.29% |
| SEQ ID NO: 1050 | SRCTVVDPG | 0.29% |
| SEQ ID NO: 1051 | SSWMQMQGP | 0.29% |
| SEQ ID NO: 1052 | TAMVSECID | 0.29% |
| SEQ ID NO: 1053 | TEEHMMIQT | 0.29% |
| SEQ ID NO: 1054 | TGRWLVYQA | 0.29% |
| SEQ ID NO: 1055 | TLNSRHPEY | 0.29% |
| SEQ ID NO: 1056 | TSEPHCSFA | 0.29% |
| SEQ ID NO: 1057 | TVDGMMGDH | 0.29% |
| SEQ ID NO: 1058 | TVPKWDNIS | 0.29% |
| SEQ ID NO: 1059 | TYHCYMSWM | 0.29% |
| SEQ ID NO: 1060 | TYIQCPTNA | 0.29% |
| SEQ ID NO: 1061 | TYIQYPANA | 0.29% |
| SEQ ID NO: 1062 | VHGQTDLSL | 0.29% |
| SEQ ID NO: 1063 | VPVPFLSLR | 0.29% |
| SEQ ID NO: 1064 | VSFQRMNNM | 0.29% |
| SEQ ID NO: 1065 | VSTPNLGWP | 0.29% |
| SEQ ID NO: 1066 | VSVQGRAQL | 0.29% |
| SEQ ID NO: 1067 | VTEVLNQDV | 0.29% |
| SEQ ID NO: 1068 | YATHMQHLE | 0.29% |
| SEQ ID NO: 1069 | YCHQEDRII | 0.29% |
| SEQ ID NO: 1070 | YETDSEGYD | 0.29% |
| SEQ ID NO: 1071 | YPAHMMPPL | 0.29% |
| SEQ ID NO: 1072 | YWCPSQRWR | 0.29% |
| SEQ ID NO: 1073 | QLKYAVGAN | 0.23% |
| SEQ ID NO: 1074 | MNHQCMLWD | 0.07% |
| SEQ ID NO: 1075 | RHQRVMPTY | 0.05% |
| SEQ ID NO: 1076 | NSGIATADH | 0.05% |
| SEQ ID NO: 1077 | ACHTGQSGM | 0.04% |
| SEQ ID NO: 1078 | SHWFFHFDL | 0.03% |
| SEQ ID NO: 1079 | DVTQTRYCY | 0.03% |
| SEQ ID NO: 1080 | FSEQNVSAA | 0.03% |
| SEQ ID NO: 1081 | GPLYSWVGI | 0.03% |
| SEQ ID NO: 1082 | NAGMKGVDV | 0.03% |
| SEQ ID NO: 1083 | CTEAGMTFG | 0.02% |
| SEQ ID NO: 1084 | PMNDMQFVP | 0.02% |
| SEQ ID NO: 1085 | SGRRSGGRP | 0.02% |
| SEQ ID NO: 1086 | DVAQYGLGS | 0.02% |
| SEQ ID NO: 1087 | NPTDLLQHE | 0.02% |
| SEQ ID NO: 1088 | QAQCIAMQR | 0.02% |
| SEQ ID NO: 1089 | DGMHRELCS | 0.02% |
| SEQ ID NO: 1090 | DGTHRELYS | 0.02% |
| SEQ ID NO: 1091 | KWCQFGMVA | 0.02% |
| SEQ ID NO: 1092 | LTHNTPFPE | 0.02% |
| SEQ ID NO: 1093 | PMPTADVLH | 0.02% |
| SEQ ID NO: 1094 | QGEEVWWEA | 0.02% |
| SEQ ID NO: 1095 | RMVTMERDR | 0.02% |
| SEQ ID NO: 1096 | RVNGSTCWH | 0.02% |
| SEQ ID NO: 1097 | RWYQFGMVA | 0.02% |
| SEQ ID NO: 1098 | TFLEYQALG | 0.02% |
| SEQ ID NO: 1099 | TTGVCSFAQ | 0.02% |
| SEQ ID NO: 1100 | YHKQMAVWW | 0.02% |
| SEQ ID NO: 1101 | AVSVACLNT | 0.01% |
| SEQ ID NO: 1102 | CDSPSLLQS | 0.01% |
| SEQ ID NO: 1103 | CMYLPALQY | 0.01% |
| SEQ ID NO: 1104 | CSSWANGCD | 0.01% |
| SEQ ID NO: 1105 | EDCPKVFTI | 0.01% |
| SEQ ID NO: 1106 | EFALGCQGI | 0.01% |
| SEQ ID NO: 1107 | ERGEMRATG | 0.01% |
| SEQ ID NO: 1108 | ERGGMKATG | 0.01% |
| SEQ ID NO: 1109 | GRVHGNVCI | 0.01% |
| SEQ ID NO: 1110 | HVWSLEWHL | 0.01% |
| SEQ ID NO: 1111 | IPGHVHFGF | 0.01% |
| SEQ ID NO: 1112 | IWGVYVHYF | 0.01% |
| SEQ ID NO: 1113 | NHDEKLWAP | 0.01% |
| SEQ ID NO: 1114 | NVWSLAVRD | 0.01% |

[0883] CNS (cortex forebrain, cortex occipital, cortex temporal, thalamus, hypothalamus, substantia nigra, hippocampus DG, hippocampus CA1, hippocampus CA3, cerebellum), liver, skeletal muscle, heart, lung, spleen, lymph node, bone marrow, mammary gland, skin, adrenal gland, thyroid, colon, sciatic nerve, and spinal cord tissues were analyzed to identify amino acid residues in the AAV5 VP1 581-589 region that drive CNS tropism. The results are shown in FIG. 18B which shows the positional frequency of each amino acid in the 581 to 589 region of AAV5 VP1 in CNS tissue as compared to all other analyzed tissues, wherein the capsid polypeptide has the sequence of SEQ ID NO: 2. The position (“Xaan”, n=1-9) is denoted on the x-axis and amino acid residues are denoted on the y-axis. The frequency of a particular amino acid residue in a particular position is indicated in the heatmap as intensity. Darker squares indicate a higher frequency of a particular amino acid in a particular position and lighter squares indicate a lower frequency of a particular amino acid in a particular position.

[0884] The frequency of a given amino acid residue occurring at a specified position corresponding to position 581 to position 589 of SEQ ID NO: 1 (generalized in SEQ ID NO: 2) in variants identified in CNS over the frequency of that given amino acid residue occurring at the specified position in variants identified in all other harvested tissues was analyzed to identify a set of sequence rules for capsids that preferentially target CNS tissue. With reference to TABLE 9 below, and SEQ ID NO: 2 (AAV5 VP1), the following amino acids can, thus, be independently mutated, in any combination, at any one or more positions Xaa1-Xaa9, to provide a VP1 capsid with enhanced CNS tropism as compared wildtype AAV5 VP1 capsid (SEQ ID NO: 1), where CNS tropism here refers to properties that are preferred for CNS transduction over properties that are preferred for transduction of all other harvested tissues.

TABLE 9
CNS Tropism Rules

Xaa1 is selected from A, C, K, M, Q, R, T, or W
Xaa1 is selected from K, Q, R, or W
Xaa1 is K
Xaa2 is selected from F, I, K, R, T, or W
Xaa2 is selected from F, I, R or T
Xaa2 is R
Xaa3 is selected from A, H, N, R, or W
Xaa3 is selected from A, R, or W
Xaa3 is R
Xaa4 is selected from E, G, I, M, Q, or R
Xaa4 is selected from E, M, or R
Xaa4 is R
Xaa5 is selected from C, G, K, I, M, or R
Xaa5 is selected from K, I, or R
Xaa5 is I
Xaa6 is selected from I, K, L, P, Q, R, Y
Xaa6 is selected from K, R, or Y
Xaa6 is R
Xaa7 is selected from D, I, K, R, V, or W
Xaa7 is selected from I, R, or V
Xaa7 is V
Xaa8 is selected from C, G, H, K, L, or V
Xaa8 is selected from H, K, or V
Xaa8 is H
Xaa9 is selected from I, K, L, R, or V
Xaa9 is selected from I, K, or R
Xaa9 is R

[0885] TABLE 10 below provides sequences of the 581 to 589 region for variant AAV VP1 capsid polypeptides that were found in CNS tissue and comport to one or more of the rules provided in TABLE 9. The present disclosure, thus, provides for rAAVs composed of engineered AAV5 VP1 capsid polypeptides having a SEQ ID NO: 2, wherein the Xaa1 to Xaa9 region is any one of SEQ ID NO: 7118-SEQ ID NO: 8117 as disclosed in TABLE 10. Also encompassed herein are rAAVs composed of engineered AAV5 VP2 capsid polypeptides and engineered AAV5 VP3 capsid polypeptides having the sequences disclosed in the below table at the regions in AAV5 VP2 (amin acid residues 445 to 453) and AAV5 VP3 (amino acid residues 389-397) corresponding to the amino acids in the AAV5 VP1 581 to 589 region.

TABLE 10
Sequences of the 581 to 589 Region in AAV5 VP1
Capsid Polypeptide that Drive CNS Tissue Tropism

| SEQ | |
|---|---|
| ID | 581-589 |
| NO | Sequence |
| 7118 | KTTFDVACY |
| 7119 | KDGYREAWM |
| 7120 | KTSNVMDQM |
| 7121 | KTLHMLESK |
| 7122 | KSHDYHGRA |
| 7123 | KSEWTCCPQ |
| 7124 | KMHGNERCF |
| 7125 | KQTVEVDQE |
| 7126 | KVAHEMMSA |
| 7127 | KMNTWDQAR |
| 7128 | KFNTKDQLM |
| 7129 | KCQSKECGG |
| 7130 | KGLITENNY |
| 7131 | KVEWRWGSA |
| 7132 | KTFQYMGPT |
| 7133 | KCGLTPGVE |
| 7134 | KQRIAYEWQ |
| 7135 | KGQRRDSVS |
| 7136 | KQCSLAPTI |
| 7137 | KEWCVQQQC |
| 7138 | KKDPLHLGD |
| 7139 | KQTKSMVYM |
| 7140 | KISGLNDAS |
| 7141 | KPDILKTKT |
| 7142 | KWSAYFLIE |
| 7143 | KGESQCTSQ |
| 7144 | KQEYIMRQR |
| 7145 | KLDPRQADQ |
| 7146 | KIYMQCDQE |
| 7147 | KWAASHKHD |
| 7148 | KENKIMQAS |
| 7149 | KVAGGHETT |
| 7150 | KTDPIAEYC |
| 7151 | KPDHAMAQQ |
| 7152 | KSDKVWYVL |
| 7153 | KIEAEEMHA |
| 7154 | KKTECEMIV |
| 7155 | KGTPNWWGP |
| 7156 | KPAGKNTCW |
| 7157 | KSVHYETCE |
| 7158 | KCNVITYHG |
| 7159 | KQEQFHTGS |
| 7160 | KTMADMYNR |
| 7161 | KTVETYAAH |
| 7162 | KSWVWVDTE |
| 7163 | KAIWQGTEN |
| 7164 | KPLTYTVGS |
| 7165 | KYASMDIYS |
| 7166 | KCTMITPCF |
| 7167 | KEAYTDMSC |
| 7168 | KHMPTLQWQ |
| 7169 | KIEYGHWIH |
| 7170 | KYSPFQEHN |
| 7171 | KHTLAEMYG |
| 7172 | KIWAGVNLG |
| 7173 | KCDDRNTQH |
| 7174 | KSIMMSQLD |
| 7175 | KKIFCSWDY |
| 7176 | KQAGYDFFH |
| 7177 | KSDAQRNVA |
| 7178 | KPPSWPMSL |
| 7179 | KAHDITWNL |
| 7180 | KQATNNNGW |
| 7181 | KDPDCYDWP |
| 7182 | KHTEYCSHE |
| 7183 | KWYHYNEMT |
| 7184 | KGQMISETR |
| 7185 | KHEPMCVQL |
| 7186 | KVDTVRNPK |
| 7187 | KRVQQMETM |
| 7188 | KIIFELGMD |
| 7189 | KSGWGAPYE |
| 7190 | KIQMAVSLD |
| 7191 | KVPSQLVFE |
| 7192 | KSPDMTLLL |
| 7193 | KSMTCVYYP |
| 7194 | KPDKPNDYA |
| 7195 | KFICTTIAC |
| 7196 | KPAYEHRGF |
| 7197 | KNNTEDGGR |
| 7198 | KATREYDIP |
| 7199 | KCETKKRFN |
| 7200 | KTEKWASHE |
| 7201 | KATVEGSWR |
| 7202 | KRRDGTRSY |
| 7203 | KALHYAMIK |
| 7204 | KWEVMSAAY |
| 7205 | KALYLHTIG |
| 7206 | KLNPFSTGT |
| 7207 | KVEIINWHP |
| 7208 | KNDPIDNEG |
| 7209 | KTFTKEVTP |
| 7210 | KCGNEGRMS |
| 7211 | KNETFIAST |
| 7212 | KDNQSCEWN |
| 7213 | KAQVVPVEC |
| 7214 | KMMAFEKQC |
| 7215 | KWQEMPTFQ |
| 7216 | KYCPPQTPN |
| 7217 | KCAMFNAGE |
| 7218 | KSTEPQTYP |
| 7219 | KFTEALSCG |
| 7220 | KGEIEGGAK |
| 7221 | KQLTFPMLA |
| 7222 | KEFVGFQAM |
| 7223 | KHDGFSVVG |
| 7224 | KATRDPKFP |
| 7225 | KRWLHMYQG |
| 7226 | KHLDMTSCH |
| 7227 | KDEQFARCK |
| 7228 | KTLPCSNSE |
| 7229 | KYMQENVLS |
| 7230 | KSAPRENFN |
| 7231 | KQRMTRQGE |
| 7232 | KARQDDVNT |
| 7233 | KCGVEHEHR |
| 7234 | KSELFMKLH |
| 7235 | KNELENVEN |
| 7236 | KYWCKNEWD |
| 7237 | KASLGACVE |
| 7238 | KSCNDGQQN |
| 7239 | KVTPELEEV |
| 7240 | KQEWHVHTE |
| 7241 | KPKCDEQKS |
| 7242 | KWHGGPGVV |
| 7243 | KGNSVTHVQ |
| 7244 | KWDDMHTQM |
| 7245 | KQAHLEVAW |
| 7246 | KVNACGNLT |
| 7247 | KAIPQGSSC |
| 7248 | KENCRMDGC |
| 7249 | KQRDWENFA |
| 7250 | KMCWWPESM |
| 7251 | KQNLMCCHN |
| 7252 | KESPWDGFY |
| 7253 | KGMQMWNCE |
| 7254 | KAILNAMME |
| 7255 | KEDAHSNME |
| 7256 | KAPWAPMDS |
| 7257 | KRAIVGYAL |
| 7258 | KSGMIQEET |
| 7259 | KSYQMIMTW |
| 7260 | KFELHGTVG |
| 7261 | KSGTCGYGQ |
| 7262 | KSLQCASRH |
| 7263 | KTGTTMEPM |
| 7264 | KTDYSRLSD |
| 7265 | KHYKWGHCQ |
| 7266 | KLYGLNHSC |
| 7267 | KLKESMESA |
| 7268 | KAGYQEGSC |
| 7269 | KCWDCHEAG |
| 7270 | KPVQCACQN |
| 7271 | KDYWAGYQM |
| 7272 | KSEHHWINA |
| 7273 | KGGPWAYNC |
| 7274 | KYAYSLDCA |
| 7275 | KLWIDQRGH |
| 7276 | KLWIDQRGY |
| 7277 | QRVTKMHFE |
| 7278 | ERTACKMKS |
| 7279 | ERGEMKATG |
| 7280 | ARGTCNYCY |
| 7281 | QRNEMSASR |
| 7282 | FRDVCMHDV |
| 7283 | ERMMWEEYP |
| 7284 | HRMSYKWGW |
| 7285 | ERVADDMTC |
| 7286 | MRSECEHAM |
| 7287 | NRGEWLENF |
| 7288 | NRQFWYLNT |
| 7289 | PRLLRPNRV |
| 7290 | TRRVATHMP |
| 7291 | VRHSRNNTV |
| 7292 | SRWFQIGTE |
| 7293 | TRQWMCVHC |
| 7294 | HRVHSEKTD |
| 7295 | GRHTAFATG |
| 7296 | LRSRVEKDH |
| 7297 | ERMEGKACN |
| 7298 | NRLDQETRR |
| 7299 | SRSWFDSCG |
| 7300 | VRCQQHQGN |
| 7301 | YRSWMCWDI |
| 7302 | CRNTQYEQH |
| 7303 | ARKNCDHLN |
| 7304 | ARCQNHWSH |
| 7305 | MRQRTYICQ |
| 7306 | SRCTVMDPG |
| 7307 | PRNLVAMYW |
| 7308 | TRMQAVDHE |
| 7309 | FRAVYYYHS |
| 7310 | RREAMDDSP |
| 7311 | GRQSENEEA |
| 7312 | TRHPTIAMH |
| 7313 | YRLHVWMKV |
| 7314 | DRREKQLMK |
| 7315 | ERKAMRWSL |
| 7316 | LRMQKEGQE |
| 7317 | IRPQYAKMD |
| 7318 | SRTECVHGN |
| 7319 | NRCGVSKCC |
| 7320 | CRCNDAWNM |
| 7321 | FRKQGHGEK |
| 7322 | YRMEYGTCE |
| 7323 | SRPFNYFQR |
| 7324 | QRGPLQHQQ |
| 7325 | MRQCNYDFL |
| 7326 | MRQCNYDFW |
| 7327 | MRQCNYGFW |
| 7328 | SRTRMYMDH |
| 7329 | ERTLTKAGS |
| 7330 | WRLAALYQS |
| 7331 | CRCCPVMKD |
| 7332 | YRDRCWNRE |
| 7333 | LRNMRGDWD |
| 7334 | CRKCEISAR |
| 7335 | ARTQFHSDE |
| 7336 | ERSMKDADE |
| 7337 | YRRWQSNYT |
| 7338 | HRMNNHAWF |
| 7339 | QRTQCNFSI |
| 7340 | TRILNEFFC |
| 7341 | ARLEIEYMG |
| 7342 | WRFCDMRMS |
| 7343 | DRLYCKLAH |
| 7344 | ERKTTADWK |
| 7345 | GRSMVLHFV |
| 7346 | TRHDNGPSD |
| 7347 | PRAPERPPQ |
| 7348 | MRRKTPEDD |
| 7349 | ERFRVQEFQ |
| 7350 | ERYYPESSE |
| 7351 | GRAHGNVCI |
| 7352 | ARSGINGHE |
| 7353 | ARVALVKPG |
| 7354 | SRYVNNGTV |
| 7355 | ARAYNSYQA |
| 7356 | PRFKACHDP |
| 7357 | QRQGQLHYW |
| 7358 | SRCTIDVPS |
| 7359 | DRTMCKVQG |
| 7360 | LRVSQSFSN |
| 7361 | NRTNSPYVH |
| 7362 | CRGSLSNAN |
| 7363 | VRQSVPHWA |
| 7364 | HRQESPNNK |
| 7365 | TRNIGGVFQ |
| 7366 | RRWMNAKAT |
| 7367 | YRAHSAGYC |
| 7368 | YRAHSAGYY |
| 7369 | PPRTVARFK |
| 7370 | MTRSCQTEG |
| 7371 | SMRNSKGSG |
| 7372 | GGRSLHAYL |
| 7373 | GTREYGKVS |
| 7374 | EVRSTRKNH |
| 7375 | GLRHGFYAV |
| 7376 | LARTTTNSE |
| 7377 | VVREQFGIH |
| 7378 | ANRADWQHL |
| 7379 | WCRTPQREN |
| 7380 | WKRTAGVHF |
| 7381 | GYRNYFEWP |
| 7382 | TARNFGDPP |
| 7383 | EARESGMHD |
| 7384 | MARLYHPQM |
| 7385 | SNRYVSLFI |
| 7386 | PWRWHKSAC |
| 7387 | TLRAEMSFH |
| 7388 | EQRHISRAP |
| 7389 | TKRIKCCWE |
| 7390 | MKRAPTLDY |
| 7391 | ENREAVWFN |
| 7392 | AERDHKTIY |
| 7393 | ELRMSFTKV |
| 7394 | CVRIGMREP |
| 7395 | TARSTSDKC |
| 7396 | GKRVEDTSC |
| 7397 | NQRGFCKDE |
| 7398 | TPRCERADG |
| 7399 | DQRMLLKEL |
| 7400 | SNRYYSREF |
| 7401 | EDRMGLPHN |
| 7402 | EGRTESYGN |
| 7403 | ASRSCMTQE |
| 7404 | QSRQMMLLH |
| 7405 | MTRVSMTWR |
| 7406 | TFRHWEGHH |
| 7407 | VARQMQENQ |
| 7408 | INRPMGHGM |
| 7409 | CIRFMMREG |
| 7410 | FFRWRWGLG |
| 7411 | QGRWACWYS |
| 7412 | HHRVNYEMY |
| 7413 | SVRTCHQDE |
| 7414 | DDRVKMFHY |
| 7415 | GMRYSEWHW |
| 7416 | ETREHHLLV |
| 7417 | MFRQFYIQG |
| 7418 | TTRQISNID |
| 7419 | DCRHTILYV |
| 7420 | AIRQFMMHL |
| 7421 | LMRWSKDSN |
| 7422 | LMRGSKDSN |
| 7423 | LMRWSKDSS |
| 7424 | LMRWSRDSN |
| 7425 | ASRQFETCW |
| 7426 | SDRMVSESA |
| 7427 | NTREVCDLS |
| 7428 | EFRCRLEGS |
| 7429 | DCRCYDCHD |
| 7430 | TMRDSDYNW |
| 7431 | DVRACMEDL |
| 7432 | WCRCKRFEE |
| 7433 | WIRSAWRPG |
| 7434 | MGRPHAWWG |
| 7435 | NFRMQTGCH |
| 7436 | SMRDLIAEA |
| 7437 | TARDREHAM |
| 7438 | CSRNRCWSG |
| 7439 | DYREKYKCQ |
| 7440 | VCRQKTDSW |
| 7441 | YSRMEENDR |
| 7442 | PERYVKPAR |
| 7443 | QPRVYEGFY |
| 7444 | MDRMMYMLG |
| 7445 | VNRGDLSLF |
| 7446 | HTRKEGFNS |
| 7447 | LFRTIPIWQ |
| 7448 | APRREEQNC |
| 7449 | NTRQINGVD |
| 7450 | DARHKWCLE |
| 7451 | AERQACTMG |
| 7452 | ESRMLRQSS |
| 7453 | ETRVREDAV |
| 7454 | AMRAGLENS |
| 7455 | TCRWFAHYS |
| 7456 | QVRFEQNPA |
| 7457 | NERVYGWGM |
| 7458 | EKRLFDRTY |
| 7459 | VSRCGIDRS |
| 7460 | DARKTVNEW |
| 7461 | TIRYIGMSG |
| 7462 | FFRECGSYE |
| 7463 | NTRSDLRAG |
| 7464 | ANRMIWYPY |
| 7465 | AQRCFHRWG |
| 7466 | TCRYEELAD |
| 7467 | STRTTDWNM |
| 7468 | DARKTYECY |
| 7469 | SSRGQDGVM |
| 7470 | RTREPFWWW |
| 7471 | IERWWVIDV |
| 7472 | ENRSPNNPA |
| 7473 | DWRYFCVSL |
| 7474 | NPRQGFVPV |
| 7475 | NSRLLIKHL |
| 7476 | HTRVVKSTG |
| 7477 | EIRQFVKGA |
| 7478 | QERSMNAWW |
| 7479 | CARLEGRGN |
| 7480 | FMRDVFAWD |
| 7481 | MLRTQIHCA |
| 7482 | QLRCEYQHT |
| 7483 | CCRMDNKKS |
| 7484 | YERVGGNNE |
| 7485 | NVRNFFDHC |
| 7486 | ATRWVQMGQ |
| 7487 | MDRDIPHCR |
| 7488 | CYRRSDSFC |
| 7489 | EYSRCCHQE |
| 7490 | VHLRSHTWF |
| 7491 | QQLRCHCFS |
| 7492 | AAIRYDPGF |
| 7493 | MSNRIIDIQ |
| 7494 | VTQRPLHHS |
| 7495 | NQQRTYNNG |
| 7496 | SLGRIECDF |
| 7497 | SADRTAMFH |
| 7498 | NILRYLICD |
| 7499 | TFMRKICGM |
| 7500 | CWARSVAQN |
| 7501 | ELPRYYGQM |
| 7502 | EYSRMNKAS |
| 7503 | DKVRQGQKD |
| 7504 | EFNRYPHGN |
| 7505 | HEMRRDYKS |
| 7506 | QVYRMMMQP |
| 7507 | TVNRAMREE |
| 7508 | YKLRSSFRW |
| 7509 | FANRCPPDD |
| 7510 | NKIRDVAVE |
| 7511 | PVARKMSTC |
| 7512 | VIQRKFDSG |
| 7513 | ALDRERLIF |
| 7514 | AGSRMQWAM |
| 7515 | WSSREYWHK |
| 7516 | THARFKMKS |
| 7517 | NCARGPMEK |
| 7518 | LWSRFISMD |
| 7519 | IAMRCWGNE |
| 7520 | LVDRSGRTA |
| 7521 | SQSRTIIQE |
| 7522 | HEVRRYGQN |
| 7523 | NSTRNTSYY |
| 7524 | GPARSFEAC |
| 7525 | YCPRLVEAW |
| 7526 | VIGRTVDDP |
| 7527 | WFDRSWHIL |
| 7528 | CYIRNMVNL |
| 7529 | LIGRDSKVW |
| 7530 | QNERLGVPT |
| 7531 | VICRMKKHS |
| 7532 | VEDRVFACC |
| 7533 | GHLRDHPLY |
| 7534 | FEFRKCDHW |
| 7535 | RKTRCFCNY |
| 7536 | TSERHSCMV |
| 7537 | SMSRHMMHQ |
| 7538 | DEGRFTAYY |
| 7539 | GVSRLPYHA |
| 7540 | QVDRTMWMH |
| 7541 | CELRKPSYH |
| 7542 | NNDRHQHLK |
| 7543 | TVDRKVEIE |
| 7544 | NSARYAWVY |
| 7545 | AITRHVADT |
| 7546 | TDKRAHVGA |
| 7547 | LLWRRVKRT |
| 7548 | YVIRKTWFN |
| 7549 | FAERANYCC |
| 7550 | SYMRHPNFD |
| 7551 | GGDRMATDR |
| 7552 | FQTRPSCSF |
| 7553 | MMVRREFAD |
| 7554 | AVMRNDQWL |
| 7555 | LQERDHHMQ |
| 7556 | LTPRSEGLS |
| 7557 | LVGRTYQHQ |
| 7558 | DATRAQTGE |
| 7559 | MMVRELMSS |
| 7560 | CGHRHSSMG |
| 7561 | HHLRNVHHC |
| 7562 | NSTRWYHTG |
| 7563 | NHMRKQSSH |
| 7564 | DDCRLNVRT |
| 7565 | MCARGAMCA |
| 7566 | SWGRIPHES |
| 7567 | QLKRNEQTS |
| 7568 | RNQRTYPAL |
| 7569 | SFFREDYSE |
| 7570 | DSHRCLKAD |
| 7571 | SAPRNEITR |
| 7572 | DIQRWEHEG |
| 7573 | EQLRDLNIE |
| 7574 | NYARHDILA |
| 7575 | MGQRSAANY |
| 7576 | STARHNMQL |
| 7577 | PAYRMECCE |
| 7578 | ETHRGTVGL |
| 7579 | DVCRKPVSH |
| 7580 | DVMRMEHYL |
| 7581 | PAWRRYCWT |
| 7582 | DMHRGGMWT |
| 7583 | CTLRQIKMH |
| 7584 | YAQRTCWPE |
| 7585 | WCMRDWYQE |
| 7586 | ESQRGTLWC |
| 7587 | RMVRVSVHG |
| 7588 | EAWRNSSSG |
| 7589 | LWDRFCCPV |
| 7590 | NHTRGKQCV |
| 7591 | NCERWFQIE |
| 7592 | QAVRTRTFR |
| 7593 | AYLRRNVGN |
| 7594 | LTNRTQESW |
| 7595 | NVDRQHAQS |
| 7596 | DYERSIENH |
| 7597 | MPTRMQKGA |
| 7598 | MSARENTPD |
| 7599 | CSERGESAF |
| 7600 | MTERYYWCQ |
| 7601 | CHIRDCSPI |
| 7602 | NNVRKVGNT |
| 7603 | VEMRANKGL |
| 7604 | WDGRPDLST |
| 7605 | ESYQIQCQN |
| 7606 | TSSEITSPP |
| 7607 | CTKPIPCWM |
| 7608 | IMHEIPEID |
| 7609 | HQSPIHTNT |
| 7610 | REMMIVNCD |
| 7611 | IWPQIQYRM |
| 7612 | PEKWIHMHE |
| 7613 | ILIFIQNCP |
| 7614 | SACNIEYHT |
| 7615 | SGNQIVQAP |
| 7616 | HWELIRCHD |
| 7617 | NSHTIMNGM |
| 7618 | DVDIIGLPA |
| 7619 | QKHMILCHF |
| 7620 | ACEWINMYN |
| 7621 | ATYQIQWPG |
| 7622 | FIIWIEHRH |
| 7623 | GIEQIMGCP |
| 7624 | VIMGIQTDD |
| 7625 | VQPTESYSD |
| 7626 | YSPLIGRWK |
| 7627 | IHSNIPVAE |
| 7628 | NHDLIQFVK |
| 7629 | WSPSIPGGE |
| 7630 | CNYPIIWDK |
| 7631 | VSAYIERQW |
| 7632 | QVSHISEHW |
| 7633 | MMTTIQYHD |
| 7634 | WAEAIKHFT |
| 7635 | VSKFIAASW |
| 7636 | CSNDINGRA |
| 7637 | LNSMIMWGN |
| 7638 | HACVITLDG |
| 7639 | GTEPIMWRD |
| 7640 | LSTLITMMD |
| 7641 | GWALIVNGL |
| 7642 | MVNHILPNN |
| 7643 | RSLDIQYDI |
| 7644 | RVVPIEDSM |
| 7645 | LVNTIWKAA |
| 7646 | GYKFIGRSR |
| 7647 | QYLLIPHLP |
| 7648 | NNGPIWISS |
| 7649 | YGENISPSP |
| 7650 | QSDWISIPC |
| 7651 | CMAHIWEGH |
| 7652 | NWFGINSWH |
| 7653 | FQTSINYYG |
| 7654 | TMEYIGLDQ |
| 7655 | GKIPIDTFR |
| 7656 | WAYYIRLQP |
| 7657 | VAYPIQTDV |
| 7658 | LSIQINNQI |
| 7659 | EQTYISEWG |
| 7660 | TCGDIQLRA |
| 7661 | MAGHIGHHS |
| 7662 | GFKDILMVQ |
| 7663 | VWWMIIHTS |
| 7664 | NAAMIATVC |
| 7565 | SMHLICGEA |
| 7666 | ACSQIGQDD |
| 7667 | DSQEIGSES |
| 7668 | NWEVIGRWH |
| 7669 | HSGFIDRQA |
| 7670 | PVKPIIHAS |
| 7671 | IQAVIASGW |
| 7672 | DHLSICCQN |
| 7673 | CTKPIVMDW |
| 7674 | LNHPIADYD |
| 7675 | TQAKIECCS |
| 7676 | GTEHIPMQA |
| 7677 | SFPMILVNC |
| 7678 | GCQQIQLQT |
| 7679 | ATDMIFVSN |
| 7680 | RQCVIGDYD |
| 7681 | RLAWIEQSP |
| 7682 | YEHPIMWPV |
| 7683 | HEGLIMRLE |
| 7684 | TSYCIQTVD |
| 7685 | AMEMIVMHE |
| 7686 | MGCLIQFCE |
| 7687 | FSWPIHEPD |
| 7688 | ESTHIMKTP |
| 7689 | HPDKIEYWR |
| 7690 | TFGCIESMQ |
| 7691 | EDGLIVYGP |
| 7692 | DHIHIERAN |
| 7693 | GCMCIRHAY |
| 7694 | APIPINMEG |
| 7695 | QMNAIQLCV |
| 7696 | SQSQIRQAD |
| 7697 | PIVLIHYDA |
| 7698 | VADWIGHTP |
| 7699 | GSNSITRDT |
| 7700 | QWEDITKCS |
| 7701 | EDQWISNPF |
| 7702 | QCGFIRLNE |
| 7703 | DSDPITVDL |
| 7704 | EIGIIRHGH |
| 7705 | FQTLILSGL |
| 7706 | DNNMIVRCA |
| 7707 | MAPDIPHCR |
| 7708 | MDADIPHCR |
| 7709 | MDPAIPHCR |
| 7710 | MDPDIAHCR |
| 7711 | MDPDILHCR |
| 7712 | MDPDIPHCC |
| 7713 | MDPDIPHCG |
| 7714 | MDPDIPHCH |
| 7715 | MDPDIPHCL |
| 7716 | MDPDIPHCR |
| 7717 | MDPDIPHCS |
| 7718 | MDPDIPHFR |
| 7719 | MDPDIPHGR |
| 7720 | MDPDIPHWR |
| 7721 | MDPDIPNCR |
| 7722 | MDPDIPPCR |
| 7723 | MDPDIPRCR |
| 7724 | MDPDIPYCR |
| 7725 | MDPDIRHCR |
| 7726 | MDPGIPHCR |
| 7727 | MDPNIPHCR |
| 7728 | MDPVIPHCR |
| 7729 | MDPY1PHCR |
| 7730 | MDTDIPHCR |
| 7731 | MNPDIPHCR |
| 7732 | MYPD1PHCR |
| 7733 | VDPDIPHCR |
| 7734 | HVDQHRVQA |
| 7735 | MYLNYRHFA |
| 7736 | AVASERQLR |
| 7737 | LEQLDRCMY |
| 7738 | LFHQGREPM |
| 7739 | CVCEMRTVD |
| 7740 | NDCTCRAIM |
| 7741 | TIDVKRWGQ |
| 7742 | EATYTRYMT |
| 7743 | HSGYKRQMK |
| 7744 | TYMEYRQHK |
| 7745 | VDCWLRDPI |
| 7746 | YKTEFRTKL |
| 7747 | DPYNTRFRT |
| 7748 | LNYMRRAMW |
| 7749 | FAIWKRNES |
| 7750 | WKDDLRSTY |
| 7751 | ENQQRRNFG |
| 7752 | IMPPKRYFV |
| 7753 | VAADSRMMI |
| 7754 | IMCHARMMA |
| 7755 | RDIWERPCV |
| 7756 | EHSSPREDN |
| 7757 | EVHLFRGEG |
| 7758 | MYTDMRCWR |
| 7759 | LIHYCRCIN |
| 7760 | HQCQSRSYI |
| 7761 | GTAVSRQSK |
| 7762 | VMFYWRYNS |
| 7763 | FGDHLRVMY |
| 7764 | NSEWLRYTF |
| 7765 | AVHWHRKCE |
| 7766 | PMELWRTWY |
| 7767 | SQDCGRPES |
| 7768 | AAKKGRDLH |
| 7769 | QNLWYRPLT |
| 7770 | TCYCHRAHE |
| 7771 | LACTPRCIF |
| 7772 | VAFGMRWLL |
| 7773 | WAQCDRAVC |
| 7774 | FCDIGRSGG |
| 7775 | GHQWDRLLA |
| 7776 | WLTEKRHFE |
| 7777 | MTGQCRNSQ |
| 7778 | IHPMMRENG |
| 7779 | IFQLSRPAW |
| 7780 | IKETWRVYF |
| 7781 | NTNPGRYGC |
| 7782 | DLVDLRSWM |
| 7783 | CNEVCRNYL |
| 7784 | GFTPDRCRN |
| 7785 | DVPIHRVQL |
| 7786 | TMEAHRFGS |
| 7787 | GSATNRCGN |
| 7788 | NSAECREFQ |
| 7789 | VADTYRMWH |
| 7790 | DYYLNRASH |
| 7791 | NSKACRGCT |
| 7792 | LHNSCRTLE |
| 7793 | TVGSKRDLY |
| 7794 | FNWEVRAYI |
| 7795 | TNIKERTGS |
| 7796 | TTYHHRNTL |
| 7797 | MWTVARMFP |
| 7798 | EQFADRAPR |
| 7799 | LNELPRAEY |
| 7800 | RAEWFRCQH |
| 7801 | PANHARNPK |
| 7802 | SWQQHRKMS |
| 7803 | LPDHWRKFD |
| 7804 | EDWLRRNIW |
| 7805 | DAAMTRTVP |
| 7806 | LLWMGRRRR |
| 7807 | ATCWVRMGQ |
| 7808 | WVKQKDVLC |
| 7809 | MSLDTSVPF |
| 7810 | TSHKMMVFS |
| 7811 | NMKPKDVFR |
| 7812 | LLAKYMVHT |
| 7813 | QDCERQVFA |
| 7814 | PTMLPHVKH |
| 7815 | QGFSTDVKP |
| 7816 | EPLLPAVGN |
| 7817 | IAKDDAVRL |
| 7818 | MENLKGVYD |
| 7819 | QTNQVVVVE |
| 7820 | GTTGHAVNE |
| 7821 | AFLQTPVFS |
| 7822 | ETAFQQVQV |
| 7823 | TWHKQLVGV |
| 7824 | TKYHYHVKV |
| 7825 | RNDWQQVFS |
| 7826 | QVGVTVVQR |
| 7827 | DSHDMFVYK |
| 7828 | MYLSFPVHE |
| 7829 | PWEIEWVYW |
| 7830 | HFADNQVVQ |
| 7831 | MHQFLQVAQ |
| 7832 | NAGMKGVDV |
| 7833 | STQKVPVLA |
| 7834 | GWDMLSVAK |
| 7835 | RNLPTSVEA |
| 7836 | GMSDCEVSF |
| 7837 | GKLTVQVNH |
| 7838 | LILQRNVKD |
| 7839 | NAKEQVVNN |
| 7840 | GDHKCHVEW |
| 7841 | GFKYCEVDH |
| 7842 | MFDMMSVLK |
| 7843 | IVGINHVAW |
| 7844 | MMNQCQVWN |
| 7845 | QGQHVMVHS |
| 7846 | NNCNMNVMK |
| 7847 | EKHFMQVDR |
| 7848 | PIAQDQVWS |
| 7849 | ECHKCEVCV |
| 7850 | PHAYMQVWR |
| 7851 | MQVNLQVIE |
| 7852 | TPQPMNVAT |
| 7853 | AWMCRNVYC |
| 7854 | CGYWLVVPW |
| 7855 | QHTQQLVQN |
| 7856 | CPEHNQVGI |
| 7857 | HDEKQKVYG |
| 7858 | EPFLKEVNV |
| 7859 | AVTQLSVER |
| 7860 | QHKTKCVDN |
| 7861 | IHCNVLVNY |
| 7862 | MDGHFSVGC |
| 7863 | YHQLVQVNE |
| 7864 | GQPVWCVCM |
| 7865 | MIKPLLVVG |
| 7866 | GLGWWNVHT |
| 7867 | TMAQWTVHN |
| 7868 | EPMPMPVWN |
| 7869 | IPTFDGVEP |
| 7870 | ELPDTEVPW |
| 7871 | QAMLHHVWV |
| 7872 | FTEWKPVFF |
| 7873 | QAVTLEVVC |
| 7874 | HECDTVVVN |
| 7875 | CVNLMAVNN |
| 7876 | QHQAFFVFT |
| 7877 | ATEKQMVDH |
| 7878 | TGMHPFVRG |
| 7879 | QVMQEKVRC |
| 7880 | DFPHMHVGT |
| 7881 | NAGVVKVWP |
| 7882 | EITQHFVKH |
| 7883 | VADTWQVHC |
| 7884 | SIYQKWVTN |
| 7885 | PIKGVAVQE |
| 7886 | IFSHPSVSG |
| 7887 | ECSVHPVNC |
| 7888 | DKMSLQVQI |
| 7889 | EGEWLIVPV |
| 7890 | TQNACKVRT |
| 7891 | TGSLTDVIW |
| 7892 | GSAMLMVIR |
| 7893 | TAGEWIVQH |
| 7894 | TGMSRYVQD |
| 7895 | FAGFTPVWM |
| 7896 | NMWYSFVMI |
| 7897 | ETEHGSVYT |
| 7898 | PSILPVVMF |
| 7899 | PEYVKWVAD |
| 7900 | TIHPAWVIL |
| 7901 | QWFTKGVDE |
| 7902 | CYAEEPVWP |
| 7903 | QIMSAKVFE |
| 7904 | MTTFCDVEA |
| 7905 | FTGTPPVDM |
| 7906 | ESWMCPVDY |
| 7907 | DCTYCCVKA |
| 7908 | AVVEHAVNR |
| 7909 | MDYHCQVED |
| 7910 | QPGVVPVPC |
| 7911 | MPYPLNVKE |
| 7912 | NVYATPVVC |
| 7913 | NCHIDHVQD |
| 7914 | VDMGVHVGS |
| 7915 | VIKVNTVNP |
| 7916 | DFKALDVQC |
| 7917 | MSAQRYVQT |
| 7918 | FCKCFMKHC |
| 7919 | VIPEFMNHA |
| 7920 | AVIHEKPHG |
| 7921 | MLFDFEEHN |
| 7922 | RCVQAHFHK |
| 7923 | NPTDLFQHE |
| 7924 | GEMTRCFHN |
| 7925 | IAVASHAHG |
| 7926 | WKWYGLPHH |
| 7927 | SVTYHEWHP |
| 7928 | TDHPWVLHG |
| 7929 | AKEHMPHHM |
| 7930 | GIHQLIHHC |
| 7931 | EACMPWAHH |
| 7932 | DVMQYQNHM |
| 7933 | DVDFLKMHC |
| 7934 | MYAGWLNHG |
| 7935 | TNGVQIMHV |
| 7936 | DGLSYEAHD |
| 7937 | EHCYYKEHE |
| 7938 | HPSWPTMHK |
| 7939 | ISCIMKKHL |
| 7940 | IWGTRSAHR |
| 7941 | NQCWCPKHY |
| 7942 | SFKWCPGHE |
| 7943 | ADCFRPFHI |
| 7944 | IQDCSTLHW |
| 7945 | LQHFDLIHL |
| 7946 | PQQCGGFHR |
| 7947 | TWGLHHYHT |
| 7948 | VNPPDMIHT |
| 7949 | DKANKMMHG |
| 7950 | ETMSEGIHC |
| 7951 | FYPYTNCHH |
| 7952 | PAAPLILHY |
| 7953 | QCLNMMMHG |
| 7954 | QVGTGMYHS |
| 7955 | WDHYLPEHV |
| 7956 | TVQDNDEHA |
| 7957 | TKQFFTAHC |
| 7958 | NFSVCPRHL |
| 7959 | ITTDATGHF |
| 7960 | STFHFQSHD |
| 7961 | HMDHCQCHE |
| 7962 | QYWWPATHD |
| 7963 | LGEPYKAHD |
| 7964 | ISNTMVEHG |
| 7965 | VTAFTACHY |
| 7966 | EWLSLYCHW |
| 7967 | PIHTYKRHP |
| 7968 | GYNYYWQHA |
| 7969 | ATVHMPKHE |
| 7970 | MFSAFSMHD |
| 7971 | TCTNSEPHP |
| 7972 | TIDWCEPHC |
| 7973 | LMHGVMDHV |
| 7974 | YITCQYSHH |
| 7975 | LATTTSYHC |
| 7976 | GTCLFKTHK |
| 7977 | DSAKQWHHQ |
| 7978 | SYAAFLHHG |
| 7979 | PNCDPAHHD |
| 7980 | FAPEFDNHC |
| 7981 | QISMKGEHG |
| 7982 | QLTTNDAHG |
| 7983 | CMAQMVYHH |
| 7984 | CIDVLFKHL |
| 7985 | EAGKEGAHF |
| 7986 | QYCNTDNHI |
| 7987 | YLESKTIHA |
| 7988 | PHQYGDEHQ |
| 7989 | WPTMLSAHM |
| 7990 | DQFCPFDHY |
| 7991 | LPTQVYGHN |
| 7992 | DTHPMSNHR |
| 7993 | MGVITSIHQ |
| 7994 | NAMTCSMHN |
| 7995 | TIQHAFKHN |
| 7996 | NVFPAETHV |
| 7997 | TLEPAYRHA |
| 7998 | YEICKHGHF |
| 7999 | HSLVQQLHP |
| 8000 | VPVATMIHH |
| 8001 | RVDGADRHY |
| 8002 | CHILDGLHD |
| 8003 | MLGVAPGHL |
| 8004 | ANLISQGHC |
| 8005 | GSYIVQNHC |
| 8006 | WPEAFHLHQ |
| 8007 | CDFMFTRHI |
| 8008 | HVWNDVFHM |
| 8009 | ADYSMMWHM |
| 8010 | WNWLKVMHE |
| 8011 | PVTTKNCHE |
| 8012 | FCHEVFSHT |
| 8013 | IHKMNFDHL |
| 8014 | WAIFGDIHH |
| 8015 | QSGTCHYHD |
| 8016 | WVYSHEKHY |
| 8017 | DVKYATLHD |
| 8018 | GTEMMGDHA |
| 8019 | QTKVHQQHT |
| 8020 | ASSSQYPHN |
| 8021 | TSLCAKPHF |
| 8022 | GYTQQDEHF |
| 8023 | DHCHCIAHP |
| 8024 | IPACGIMHE |
| 8025 | TCNVSWKHE |
| 8026 | TKGMWQQHS |
| 8027 | SAGPFFDHY |
| 8028 | HTVNAESHM |
| 8029 | DDGSNTMHG |
| 8030 | GVAQYLHHC |
| 8031 | EFADYNFHF |
| 8032 | NTCEGWSHF |
| 8033 | FPKCAIWHY |
| 8034 | AFGLTTGHT |
| 8035 | STGSFSIHC |
| 8036 | HHEFINSHA |
| 8037 | QVVIDPAHY |
| 8038 | CAGMAWSHS |
| 8039 | TVQWNFAHM |
| 8040 | RCVQDHFHK |
| 8041 | LLWMGQRHR |
| 8042 | QQTWEQMQR |
| 8043 | CAMPHYQVR |
| 8044 | LGKVQTHIR |
| 8045 | CSVWMQRDR |
| 8046 | VFPKDEQFR |
| 8047 | EHITEQDLR |
| 8048 | DKTVQTSAR |
| 8049 | GGMWQCEVR |
| 8050 | LEKNSSQMR |
| 8051 | CDAEAEFRR |
| 8052 | MGGSCKQER |
| 8053 | TCVIGKGRR |
| 8054 | VAFFWQRCR |
| 8055 | FAESMWCDR |
| 8056 | FAQQDKQDR |
| 8057 | DANWTVRRR |
| 8058 | MCNGGIPAR |
| 8059 | EGATAWQDR |
| 8060 | SHIQLNAWR |
| 8061 | IPAEWDSWR |
| 8062 | DAHNDALAR |
| 8063 | QPQSRNGAR |
| 8064 | NWNHCHQWR |
| 8065 | CWHFFGADR |
| 8066 | CAMDNTMCR |
| 8067 | TFVYGARDR |
| 8068 | QLDTYMEGR |
| 8069 | AATTHHSAR |
| 8070 | YTNHYYNAR |
| 8071 | VGIWFIPCR |
| 8072 | WSEDMSQYR |
| 8073 | MCSQTISMR |
| 8074 | RGLAQDCCR |
| 8075 | FCNKLTSVR |
| 8076 | PTNYGWMWR |
| 8077 | HTLQWEAVR |
| 8078 | QCAHFYQTR |
| 8079 | EWEGVSQFR |
| 8080 | QAVIAVDGR |
| 8081 | GITEQPLAR |
| 8082 | GIVMLKCGR |
| 8083 | TLLLVGKDR |
| 8084 | GLWLNVAPR |
| 8085 | QTEMKKCAR |
| 8086 | GHIDLEIMR |
| 8087 | RMTPNNCQR |
| 8088 | TCGPKLTQR |
| 8089 | HIGWMGWLR |
| 8090 | QETHWAMMR |
| 8091 | PYHNPWECR |
| 8092 | YDLWGWSTR |
| 8093 | QHYNSMIDR |
| 8094 | TYMTNLGDR |
| 8095 | GKLTFGTER |
| 8096 | GVHDPLHDR |
| 8097 | TTYLSMRDR |
| 8098 | AHMNYCLSR |
| 8099 | NYCKYNKMR |
| 8100 | GVGPSHGER |
| 8101 | AKISATWDR |
| 8102 | INMEYLTDR |
| 8103 | YTGHTNSGR |
| 8104 | MHCLHQTMR |
| 8105 | YWCPSQWWR |
| 8106 | MLAFDPMGR |
| 8107 | IIAVSMRGR |
| 8108 | VWEDNPPFR |
| 8109 | CTLMHSHTR |
| 8110 | LLWMEQRRR |
| 8111 | LLWMGQQRR |
| 8112 | LLWMGQRCR |
| 8113 | LLWMGQRRR |
| 8114 | LLWMGQWRR |
| 8115 | MDPDMPHCR |
| 8116 | MDPDSPHCR |
| 8117 | MDPDVPHCR |

### Example 6

### AAV5 Variants with Tissue Tropism in Spleen

[0886] This example describes engineered AAV5 variants with tissue tropism in spleen that were discovered using the methods and systems described in EXAMPLE 1-EXAMPLE 2.

[0887] CNS, liver, skeletal muscle, heart, lung, spleen, lymph node, bone marrow, mammary gland, skin, adrenal gland, thyroid, colon, sciatic nerve, and spinal cord tissues were analyzed to identify amino acid residues in the AAV5 VP1 581-589 region that drive spleen tropism. The results are shown in FIG. 18F which shows the positional frequency of each amino acid in the 581 to 589 region of AAV5 VP1 in spleen tissue as compared to all other analyzed tissues, wherein the capsid polypeptide has the sequence of SEQ ID NO: 2. The position (“Xaan”, n=1-9) is denoted on the x-axis and amino acid residues are denoted on the y-axis. The frequency of a particular amino acid residue in a particular position is indicated in the heatmap as intensity. Darker squares indicate a higher frequency of a particular amino acid in a particular position and lighter squares indicate a lower frequency of a particular amino acid in a particular position.

[0888] The frequency of a given amino acid residue occurring at a specified position corresponding to position 581 to position 589 of SEQ ID NO: 1 (generalized in SEQ ID NO: 2) in variants identified in spleen over the frequency of that given amino acid residue occurring at the specified position in variants identified in all other harvested tissues was analyzed to identify a set of sequence rules for capsids that preferentially target spleen tissue. With reference to TABLE 11 below, and SEQ ID NO: 2 (AAV5 VP1), the following amino acids can, thus, be independently mutated, in any combination, at any one or more positions Xaa1-Xaa9, to provide a VP1 capsid with enhanced spleen tropism as compared wildtype AAV5 VP1 capsid (SEQ ID NO: 1), where spleen tropism here refers to properties that are preferred for spleen transduction over properties that are preferred for transduction of all other harvested tissues.

TABLE 11
Spleen Tropism Rules

Xaa1 is selected from C, F, H, I, L, P, W, or Y
Xaa1 is selected from C, F, P, W, or Y
Xaa1 is selected from P, W, or Y
Xaa1 is P
Xaa1 is selected from D, E, L, N, P, R, or W
Xaa2 is selected from D, E, or W
Xaa2 is D
Xaa3 is selected from C, D, E, P, or W
Xaa3 is selected from D, P, or W
Xaa3 is P
Xaa4 is selected from C, F, G, H, R, W or Y
Xaa4 is selected from C, H, or W
Xaa4 is C
Xaa5 is selected from A, D, E, G, P, R, or W
Xaa5 is selected from D, E, G, or P
Xaa5 is D
Xaa6 is selected from A, C, D, E, K, R, W
Xaa6 is selected from C, K, or R
Xaa6 is K
Xaa7 is selected from F, L, P, R, W, Y
Xaa7 is selected from L, P, or W
Xaa7 is P
Xaa8 is selected from E, I, K, L, P, R, or T
Xaa8 is selected from P, R, or K
Xaa8 is K
Xaa9 is selected from C, H, M, T, V, or W
Xaa9 is selected from C, T, or V
Xaa9 is V

[0889] TABLE 12 below provides sequences of the 581 to 589 region for variant AAV VP1 capsid polypeptides that were found in spleen tissue and comport to one or more of the rules provided in TABLE 11. The present disclosure, thus, provides for rAAVs composed of engineered AAV5 VP1 capsid polypeptides having a SEQ ID NO: 2, wherein the Xaa1 to Xaa9 region is any one of SEQ ID NO: 37438-SEQ ID NO: 38437, as disclosed in TABLE 12. Also encompassed herein are rAAVs composed of engineered AAV5 VP2 capsid polypeptides and engineered AAV5 VP3 capsid polypeptides having the sequences disclosed in the below table at the regions in AAV5 VP2 (amin acid residues 445 to 453) and AAV5 VP3 (amino acid residues 389-397) corresponding to the amino acids in the AAV5 VP1 581 to 589 region.

TABLE 12
Sequences of the 581 to 589 Region
in AAV5 VP1 Capsid Polypeptide
that Drive Spleen Tissue Tropism

| SEQ | |
|---|---|
| ID | 581-589 |
| NO | Sequence |
| 37438 | PANFGQAYP |
| 37439 | PCVQDLRA |
| 37440 | PCYGQTDWN |
| 37441 | PDAWNEMWH |
| 37442 | PDPRPATND |
| 37443 | PDTGHEWWW |
| 37444 | PDWREATVV |
| 37445 | PEDPTVTNH |
| 37446 | PEKHSCSTT |
| 37447 | PFILKQRNQ |
| 37448 | PGMTTTPSF |
| 37449 | PGSLECAAL |
| 37450 | PHVANMGPG |
| 37451 | PHVNYDTLC |
| 37452 | PIWGNCAKT |
| 37453 | PKGSQYGEQ |
| 37454 | PKGVLLGGA |
| 37455 | PKLQYHSES |
| 37456 | PLARIEPLW |
| 37457 | PLECKMWYN |
| 37458 | PMPFCKHQF |
| 37459 | PMQQKLWME |
| 37460 | PMRWNKFVP |
| 37461 | PMVKLEETS |
| 37462 | PNCKHSIAV |
| 37463 | PNTCTKDGL |
| 37464 | PPHRFRHIP |
| 37465 | PPWPPETAE |
| 37466 | PQASKAFSK |
| 37467 | PQQQYLSVC |
| 37468 | PQTAYMQAY |
| 37469 | PRYFVEACE |
| 37470 | PSHWFCGGA |
| 37471 | PTDFIRVNE |
| 37472 | PTRATMFID |
| 37473 | PVAWRENSL |
| 37474 | PVTRFECCK |
| 37475 | PYCICTQPY |
| 37476 | PYHDNSAPQ |
| 37477 | PYHLNQDNN |
| 37478 | PWAIEYSLV |
| 37479 | PYIMEFHPF |
| 37480 | PKEHFPTCM |
| 37481 | PAAAMFLPS |
| 37482 | PAAHKEWEW |
| 37483 | PAAHNACHC |
| 37484 | PAALDLYNG |
| 37485 | PACLGRTDA |
| 37486 | PACNCQIAS |
| 37487 | PACRKGYWN |
| 37488 | PADEAFVEC |
| 37489 | PADKSQLGA |
| 37490 | PADLNLSIP |
| 37491 | PADNLHCHG |
| 37492 | PADSAKQRK |
| 37493 | PADYGWCVG |
| 37494 | PADYRAYGD |
| 37495 | PAECKYIYA |
| 37496 | PAEFPFMIH |
| 37497 | PAEFRCTPF |
| 37498 | PAEPGQSMG |
| 37499 | PAEVTNFGV |
| 37500 | PAEWCLQHV |
| 37501 | PAFGCMLNH |
| 37502 | PAGCHGKTH |
| 37503 | PAGCVCASS |
| 37504 | PAGMAMPGT |
| 37505 | PAGNAAWTT |
| 37506 | PAGWNECAC |
| 37507 | PAHKVDLCF |
| 37508 | PAHQCTVHD |
| 37509 | PAHYVPGIE |
| 37510 | PAISNKFAG |
| 37511 | PAKLYITVR |
| 37512 | PAKQAADYG |
| 37513 | PAKYLPWQY |
| 37514 | PALRETPWT |
| 37515 | PALWRYYKQ |
| 37516 | PAMMMPTKQ |
| 37517 | PAMRYDSLY |
| 37518 | PANNCRIHT |
| 37519 | PAPCWWNVT |
| 37520 | PAPDNSDTC |
| 37521 | PAPHAWDVH |
| 37522 | PAPIWQVLD |
| 37523 | PAPKHSYQN |
| 37524 | PAPPLAQSN |
| 37525 | PAQNAPMCG |
| 37526 | PAQQLTCIK |
| 37527 | PARCAQFVA |
| 37528 | PAREDGNGW |
| 37529 | PARKAYCLP |
| 37530 | PARLISDYE |
| 37531 | PARSLWQTY |
| 37532 | PARSTYGAA |
| 37533 | PASCMWFSH |
| 37534 | PASLGIPKM |
| 37535 | PATEVQQFM |
| 37536 | PATNQCKRI |
| 37537 | PATQERGEK |
| 37538 | PAVADDMYK |
| 37539 | PAVHMQLDP |
| 37540 | PAVNANATN |
| 37541 | PAVNVPMST |
| 37542 | PAVQCSWHG |
| 37543 | PAVQGLPKM |
| 37544 | PAVSACPYW |
| 37545 | PAYGSPPWA |
| 37546 | PCADTMSVW |
| 37547 | PCAFETTQH |
| 37548 | PCAGKDICN |
| 37549 | PCAPYARSK |
| 37550 | PCAQWYCDC |
| 37551 | PCCEDVSNI |
| 37552 | PCCEGTMDN |
| 37553 | PCCQICNTW |
| 37554 | PCCYTQRPT |
| 37555 | PCDRTCPDM |
| 37556 | PCEFKSTET |
| 37557 | PCEGHEKPQ |
| 37558 | PCERALLQH |
| 37559 | PCEVQNAQT |
| 37560 | PCFAVMAGC |
| 37561 | PCFCHYTNC |
| 37562 | PCFGPSYAD |
| 37563 | PCFVKDSTA |
| 37564 | PCGGLTHPH |
| 37565 | PCGLMDDYP |
| 37566 | PCGQWKIQN |
| 37567 | PCHAFEPDH |
| 37568 | PCHMMVIAN |
| 37569 | PCHQQELDK |
| 37570 | PCHQYWIED |
| 37571 | PCHRYSKFM |
| 37572 | PCKCYPRKC |
| 37573 | PCLHMQYNP |
| 37574 | PCLHTCHRG |
| 37575 | PCLWPMGCY |
| 37576 | PCMHVQQWE |
| 37577 | PCMKKHSST |
| 37578 | PCMQNFDDG |
| 37579 | PCNKWNPKQ |
| 37580 | PCNLMRDQN |
| 37581 | PCNLVWNCE |
| 37582 | PCNTDPSIH |
| 37583 | PCPDWYVMS |
| 37584 | PCPHDRLNA |
| 37585 | PCPIIWESG |
| 37586 | PCPLSQYQT |
| 37587 | PCPSEDWFW |
| 37588 | PCQSIKCCW |
| 37589 | PCQSSWLMI |
| 37590 | PCRVGFSYE |
| 37591 | PCSESWSNT |
| 37592 | PCSHYCART |
| 37593 | PCSWFYHGG |
| 37594 | PCSYTIFDT |
| 37595 | PCTCCFNRQ |
| 37596 | PCTCVWYRC |
| 37597 | PCTGQLFMA |
| 37598 | PCTQKQKPF |
| 37599 | PCTWAHSHD |
| 37600 | PCVHGTQTW |
| 37601 | PCVKKDCEE |
| 37602 | PCVNKVGTM |
| 37603 | PCVWQWHCT |
| 37604 | PCWLKPTSW |
| 37605 | PCWRRDIHP |
| 37606 | PCWVNDHPM |
| 37607 | PCWWKWMCG |
| 37608 | PCYLCMLIL |
| 37609 | PCYWAIAGV |
| 37610 | PCYYFGMPH |
| 37611 | PDACSPFGA |
| 37612 | PDADQFVPQ |
| 37613 | PDAGWQNSP |
| 37614 | PDAMKDCVT |
| 37615 | PDANIEFLC |
| 37616 | PDAPWEGWH |
| 37617 | PDCCDMQCF |
| 37618 | PDCTERFME |
| 37619 | PDDEQVRVN |
| 37620 | PDDEVCSKV |
| 37621 | PDDGHKHPF |
| 37622 | PDDMWQYEA |
| 37623 | PDEEYAQYW |
| 37624 | PDEGFLYDN |
| 37625 | PDELHLEDG |
| 37626 | PDEPRSKCQ |
| 37627 | PDEQHMGYW |
| 37628 | PDFQRENFE |
| 37629 | PDGFGVSMP |
| 37630 | PDGRRYVCS |
| 37631 | PDHAMEYQC |
| 37632 | PDHEPNGDA |
| 37633 | PDHGIQFGW |
| 37634 | PDHIRMVTP |
| 37635 | PDHKLIVYD |
| 37636 | PDHMGLPYH |
| 37637 | PDHVHCIHA |
| 37638 | PDHVREHCM |
| 37639 | PDIHGPQSE |
| 37640 | PDKACSHHP |
| 37641 | PDKDNHVAY |
| 37642 | PDKSEAQRQ |
| 37643 | PDKVSDYQE |
| 37644 | PDLQPRDTT |
| 37645 | PDLVCDYCQ |
| 37646 | PDLVPIVGN |
| 37647 | PDLWSPFWY |
| 37648 | PDMFKERSQ |
| 37649 | PDMIVDPDN |
| 37650 | PDMLTDSTC |
| 37651 | PDMPHDRHC |
| 37652 | PDMQWNGEW |
| 37653 | PDMTCTINI |
| 37654 | PDNIFWGEA |
| 37655 | PDNLAPYVP |
| 37656 | PDNMITMQH |
| 37657 | PDNNFLSNQ |
| 37658 | PDPGHRMYA |
| 37659 | PDPHCEDRK |
| 37660 | PDPHIVWCG |
| 37661 | PDPLARRFE |
| 37562 | PDQHTHLAM |
| 37663 | PDQRGQTGQ |
| 37664 | PDRPCEDVN |
| 37665 | PDSCLHRTA |
| 37666 | PDSVPVQHN |
| 37667 | PDTAKQDMS |
| 37658 | PDTCWNWPR |
| 37669 | PDTSMECDH |
| 37670 | PDTTMKNTL |
| 37671 | PDWATLMGN |
| 37672 | PDWAVMKAP |
| 37673 | PDWFEENTV |
| 37574 | PDWGSHYCN |
| 37675 | PDWHASYGN |
| 37676 | PDWNMRMYP |
| 37677 | PDWRYGWYS |
| 37678 | PDWSGKYDI |
| 37679 | PDWSPPIQN |
| 37680 | PDWWAIEMG |
| 37681 | PDYHIGCNH |
| 37682 | PDYMDCAPM |
| 37683 | PDYWKSAFA |
| 37684 | PEAKWKEHD |
| 37685 | PEAMIGQEN |
| 37585 | PEANEVQTR |
| 37687 | PEARSWWAQ |
| 37688 | PEAVWCAFA |
| 37689 | PECAESPIT |
| 37690 | PECFLDSNV |
| 37691 | PECFSPENM |
| 37692 | PECLINYTC |
| 37693 | PECQSIDSV |
| 37694 | PECSNWRNH |
| 37695 | PECVIEYED |
| 37696 | PECVRYSKC |
| 37697 | PEDCCRQDS |
| 37698 | PEDMTLDGS |
| 37699 | PEDNNIRRN |
| 37700 | PEDSGYHWH |
| 37701 | PEEANQQVT |
| 37702 | PEEAPKQMF |
| 37703 | PEEETMYAC |
| 37704 | PEEHEVEQT |
| 37705 | PEEINDHCY |
| 37706 | PEEYEHMNC |
| 37707 | PEFFHWPHS |
| 37708 | PEFMSKGDS |
| 37709 | PEFVQYGSC |
| 37710 | PEGCTYPQL |
| 37711 | PEGHEEHPS |
| 37712 | PEGLVIHMT |
| 37713 | PEHGIHDGE |
| 37714 | PEHRAANVG |
| 37715 | PEHSNLFSY |
| 37716 | PEHTVIWES |
| 37717 | PEHVETHGQ |
| 37718 | PEIFGQMSW |
| 37719 | PEIIWQIAT |
| 37720 | PEITCKIAD |
| 37721 | PEIVNPARF |
| 37722 | PEKVLLGMV |
| 37723 | PELYTMFFT |
| 37724 | PEMALTKGL |
| 37725 | PEMCDPADQ |
| 37726 | PEMDKFKNM |
| 37727 | PEMGEATKV |
| 37728 | PEMPRHICR |
| 37729 | PEMTYEPMS |
| 37730 | PEMVEEMNV |
| 37731 | PEMWMILEG |
| 37732 | PENHKMGPW |
| 37733 | PENTFCSTY |
| 37734 | PENVGASGA |
| 37735 | PENWRPWVT |
| 37736 | PEPKLIGLF |
| 37737 | PEPLGQGTW |
| 37738 | PEPQTQDDG |
| 37739 | PEPRNVMKS |
| 37740 | PEQCSERIV |
| 37741 | PEQNDVNGM |
| 37742 | PEQRRRYDG |
| 37743 | PEQWSWGVC |
| 37744 | PEQWWRYQA |
| 37745 | PEQYKYYQC |
| 37746 | PEQYNAQAE |
| 37747 | PERINHLGC |
| 37748 | PERLFTCFV |
| 37749 | PERNKVWVA |
| 37750 | PERYNQNQL |
| 37751 | PESCGAAAP |
| 37752 | PESDRIYRP |
| 37753 | PESIKTIQR |
| 37754 | PESNKWEDH |
| 37755 | PESNWRCPE |
| 37756 | PETAAAKAM |
| 37757 | PETFDTYPH |
| 37758 | PETHSESCN |
| 37759 | PETWNDRCH |
| 37760 | PETYLGIPD |
| 37761 | PEVIQNESM |
| 37762 | PEVPSTNHA |
| 37763 | PEVTSRDIM |
| 37764 | PEVWGGRTQ |
| 37765 | PEWGHIGNH |
| 37766 | PEWIDGYVM |
| 37767 | PEWWGQNIH |
| 37768 | PEYHWDHYY |
| 37769 | PEYSTSFEQ |
| 37770 | PEYTEFEHQ |
| 37771 | PFAKPNIEE |
| 37772 | PFCCEMHIP |
| 37773 | PFCLQDVCH |
| 37774 | PFDTCFICT |
| 37775 | PFDVDGPIY |
| 37776 | PFEAQINFD |
| 37777 | PFECHKSSS |
| 37778 | PFESHDQYT |
| 37779 | PFFCSGVKC |
| 37780 | PFFEPDDEM |
| 37781 | PFGLVEINT |
| 37782 | PFGRMIVDD |
| 37783 | PFGWESQQP |
| 37784 | PFHEDCPTE |
| 37785 | PFHEPWAYA |
| 37786 | PFHGVILEN |
| 37787 | PFHLPRFPS |
| 37788 | PFHVHGEHY |
| 37789 | PFHYNKTLC |
| 37790 | PFKAHKPSL |
| 37791 | PFKHENLRH |
| 37792 | PFKPCPIEI |
| 37793 | PFKSDFWAI |
| 37794 | PFLAGDRPV |
| 37795 | PFLMEENYR |
| 37796 | PFLYVIDRR |
| 37797 | PFMAHGMYQ |
| 37798 | PFMISNALQ |
| 37799 | PFMQCCYSW |
| 37800 | PFNFMGMVQ |
| 37801 | PFNPDWGRF |
| 37802 | PFNRMTDYY |
| 37803 | PFNSDSYIR |
| 37804 | PFNYMFLIM |
| 37805 | PFPAMKIKL |
| 37806 | PFPWEWLRL |
| 37807 | PFQQFLERC |
| 37808 | PFQWVWREQ |
| 37809 | PFRECKNCT |
| 37810 | PFSFSQPGS |
| 37811 | PFSKGAYLA |
| 37812 | PFSQWIHSA |
| 37813 | PFTHPICWH |
| 37814 | PFTHQPAGM |
| 37815 | PFVGLLEHS |
| 37816 | PFVKPLDIA |
| 37817 | PFVQYKWDR |
| 37818 | PFWCEAISY |
| 37819 | PFWIHRMIE |
| 37820 | PFWLFHAKC |
| 37821 | PFWVRITPF |
| 37822 | PFYDQKLSF |
| 37823 | PFYKKYTAF |
| 37824 | PFYPLWENF |
| 37825 | PFYQHLSGY |
| 37826 | PFYTSDGCP |
| 37827 | PFYYFTCCQ |
| 37828 | PGADTHGPQ |
| 37829 | PGAGLGPPS |
| 37830 | PGANYWGCM |
| 37831 | PGAYKNQQH |
| 37832 | PGCLEIFHM |
| 37833 | PGCPNSNPH |
| 37834 | PGDCEEAII |
| 37835 | PGDCHEAWC |
| 37836 | PGDQYREWC |
| 37837 | PGDRGPIGR |
| 37838 | PGDWQTTPT |
| 37839 | PGDYRQTLP |
| 37840 | PGEAAFEKQ |
| 37841 | PGEAVCHRW |
| 37842 | PGEFKGLVS |
| 37843 | PGFGMNSIR |
| 37844 | PGGAYVWTR |
| 37845 | PGGCMWARD |
| 37846 | PGGGFCLNG |
| 37847 | PGGINNMTV |
| 37848 | PGGWLEHPA |
| 37849 | PGGWQVNPS |
| 37850 | PGHCYRMGW |
| 37851 | PGHFWWQHA |
| 37852 | PGHKFRSMD |
| 37853 | PGHWNLYHQ |
| 37854 | PGHYAIMKR |
| 37855 | PGIHSVMNQ |
| 37856 | PGIRAQCGE |
| 37857 | PGKLQTMGP |
| 37858 | PGKMINPQM |
| 37859 | PGKNLKWTD |
| 37860 | PGKVAWSQG |
| 37861 | PGLICSIDW |
| 37862 | PGLPYRNHH |
| 37863 | PGMEKNGDL |
| 37864 | PGNCIPAMG |
| 37865 | PGNEHMQMT |
| 37866 | PGNGRLYWT |
| 37867 | PGNRFMTYY |
| 37868 | PGNWAKPGG |
| 37869 | PGPHDMGSL |
| 37870 | PGPSDNTPN |
| 37871 | PGQGSDTEE |
| 37872 | PGQLTSRHF |
| 37873 | PGQSDSDMV |
| 37874 | PGQTEERVW |
| 37875 | PGRIDFWKP |
| 37876 | PGRPMWMTN |
| 37877 | PGRYCKTHS |
| 37878 | PGSQALQWA |
| 37879 | PGSSNKPYA |
| 37880 | PGSSSACLC |
| 37881 | PGSTYQAML |
| 37882 | PGSWYMHLP |
| 37883 | PGTFWHEQY |
| 37884 | PGTGVADRN |
| 37885 | PGTKACMKH |
| 37886 | PGTSWIPWM |
| 37887 | PGVTNCDVG |
| 37888 | PGVTVWGYH |
| 37889 | PGVWLSYNC |
| 37890 | PGWGKSFLT |
| 37891 | PGWHNFTAI |
| 37892 | PGWLEAWSP |
| 37893 | PGWPAPTGH |
| 37894 | PGYKTPWAK |
| 37895 | PHAEGLFCT |
| 37896 | PHAHPMFMT |
| 37897 | PHASSPMQP |
| 37898 | PHCFPAYCC |
| 37899 | PHCKICRWN |
| 37900 | PHCLADYFM |
| 37901 | PHCPMIRQD |
| 37902 | PHCREGEVQ |
| 37903 | PHCWWKWSG |
| 37904 | PHDMSMRFY |
| 37905 | PHDINNAKY |
| 37906 | PHEEGNKWG |
| 37907 | PHEGHDRKQ |
| 37908 | PHEHKEGVC |
| 37909 | PHENEAIHW |
| 37910 | PHEYIVVKS |
| 37911 | PHFKHHKTQ |
| 37912 | PHFKMEPHD |
| 37913 | PHFSRQNGT |
| 37914 | PHGGQRISN |
| 37915 | PHGLNEAAI |
| 37916 | PHHAGTQRS |
| 37917 | PHHDVSIPC |
| 37918 | PHHFTVYPF |
| 37919 | PHHIMWHHP |
| 37920 | PHHLMSCIG |
| 37921 | PHIEVAIGH |
| 37922 | PHIIPLEGL |
| 37923 | PHIKDWPRA |
| 37924 | PHISCAHAW |
| 37925 | PHKFIFMTS |
| 37926 | PHKPGTTKD |
| 37927 | PHKWIKFAG |
| 37928 | PHKWWNVHW |
| 37929 | PHMCYLLWR |
| 37930 | PHMWRDNHN |
| 37931 | PHMYKWTRM |
| 37932 | PHNCELNSA |
| 37933 | PHNQREHCA |
| 37934 | PHNYDWGCS |
| 37935 | PHPENMSKQ |
| 37936 | PHPFGHREA |
| 37937 | PHPHKQHNW |
| 37938 | PHPQCTHMM |
| 37939 | PHPRMGIQQ |
| 37940 | PHQCKQLTS |
| 37941 | PHRANSTQY |
| 37942 | PHRFPDRKM |
| 37943 | PHSCCCMKC |
| 37944 | PHSCLFMWA |
| 37945 | PHSEQIKCG |
| 37946 | PHSFNTIMS |
| 37947 | PHSIVATRD |
| 37948 | PHSNQAEFN |
| 37949 | PHSWAYHTS |
| 37950 | PHTMRVCLP |
| 37951 | PHTPQGTKA |
| 37952 | PHTREGLAQ |
| 37953 | PHTWIKQEG |
| 37954 | PHVMGGEWC |
| 37955 | PHVPHEIGI |
| 37956 | PHVRCPMDL |
| 37957 | PHWDKGYDL |
| 37958 | PHWFFCNMN |
| 37959 | PHWMPWNQV |
| 37960 | PHWQYETGS |
| 37961 | PHWRPPLGF |
| 37962 | PHYDSLAHS |
| 37963 | PHYLQVCCA |
| 37964 | PIAEDEVAV |
| 37965 | PIANDMHTY |
| 37966 | PIANKHPSI |
| 37967 | PIAPSGFVG |
| 37968 | PIAWVEQFP |
| 37969 | PICFEDCCH |
| 37970 | PICMIGRWT |
| 37971 | PIDEAINDS |
| 37972 | PIDPRQSGE |
| 37973 | PIDPVYHLI |
| 37974 | PIEMHVACS |
| 37975 | PIESPIHHS |
| 37976 | PIESTPVLV |
| 37977 | PIFMTEQNL |
| 37978 | PIGPSSTSC |
| 37979 | PIHHKQTYM |
| 37980 | PIHRESPRI |
| 37981 | PIIPQAQLF |
| 37982 | PIITNCAHS |
| 37983 | PIIWELGWA |
| 37984 | FDAGEEAYF |
| 37985 | FDLDQQVHT |
| 37986 | FDPQDDWCY |
| 37987 | FDRISVLGV |
| 37988 | FDTDHRWCW |
| 37989 | GDDLYVHGM |
| 37990 | GDECFCKLI |
| 37991 | GDFCFYKMT |
| 37992 | GDFHPDPLC |
| 37993 | GDGKSTKVT |
| 37994 | GDVHHLHSK |
| 37995 | GDVPTWPKC |
| 37996 | HDTSQAHNI |
| 37997 | IDEDIFFAA |
| 37998 | IDIHMSANI |
| 37999 | IDKNWKGLW |
| 38000 | IDQCAKFHR |
| 38001 | IDTFNCDTY |
| 38002 | IDWFAGACG |
| 38003 | KDAAYVTPD |
| 38004 | KDHCYTCID |
| 38005 | KDPRITWYV |
| 38006 | KDQFWGCLP |
| 38007 | LDHPMHMMC |
| 38008 | MDAHGRNHG |
| 38009 | MDHPRVEMQ |
| 38010 | MDLYYTLAN |
| 38011 | MDNFDRPAA |
| 38012 | MDNRELVVK |
| 38013 | NDQCQQHTC |
| 38014 | NDEKAAIDI |
| 38015 | NDGSSVHMN |
| 38016 | NDKHTTMEN |
| 38017 | NDPYNKQSQ |
| 38018 | QDHTNAWHQ |
| 38019 | QDQDLNAWA |
| 38020 | QDRDQSYHR |
| 38021 | RDAANLEFP |
| 38022 | RDDLMVKIV |
| 38023 | RDIDHKNDE |
| 38024 | SDANDRADW |
| 38025 | SDCAMTIHV |
| 38026 | SDCSDFTQF |
| 38027 | SDDHAMQMN |
| 38028 | SDDVKLPGL |
| 38029 | SDHTCCWTF |
| 38030 | SDMDPCSDK |
| 38031 | SDMWMERSC |
| 38032 | SDNCMEADN |
| 38033 | SDRNALMPN |
| 38034 | SDTKWNVCY |
| 38035 | TDDFGTPWD |
| 38036 | TDEHQGVFQ |
| 38037 | TDHDHHQEF |
| 38038 | TDKPMMGGH |
| 38039 | TDPTRSTVP |
| 38040 | TDRVGMPPY |
| 38041 | VDGNEEEKP |
| 38042 | VDHDVDTMQ |
| 38043 | VDNHGFNDW |
| 38044 | VDWGVDPWH |
| 38045 | VDYCKEFVW |
| 38046 | WDKAQDVRM |
| 38047 | WDSHCQKIQ |
| 38048 | WDSPFNYSF |
| 38049 | WDSRYKCPI |
| 38050 | YDAEHQQLA |
| 38051 | YDDCTTNQG |
| 38052 | YDFPIMTCE |
| 38053 | YDPDKMKPG |
| 38054 | CDWMANVSV |
| 38055 | LDTIQINEV |
| 38056 | EQPHADQKI |
| 38057 | FAPSGKFRD |
| 38058 | FVPFHWWSH |
| 38059 | GCPPDPWHN |
| 38060 | GMPVMAFQT |
| 38061 | GPPECHMML |
| 38062 | GSPQWLEYT |
| 38063 | HSPLEFSSP |
| 38064 | IAPLQCPVS |
| 38065 | IFPMADCRV |
| 38066 | IQPYYWNDT |
| 38067 | KTPIKCEQH |
| 38068 | KVPPYRTCP |
| 38069 | KWPGMMGEV |
| 38070 | LEPNLMNTE |
| 38071 | LMPHRTWKC |
| 38072 | LNPHFVFGR |
| 38073 | LPPTCANGT |
| 38074 | LVPMAHRAC |
| 38075 | MAPQPMSWG |
| 38076 | MCPMFFWCE |
| 38077 | MLPYVCDPG |
| 38078 | MPPPNHLDV |
| 38079 | MTPSWIVED |
| 38080 | NCPAMPLKI |
| 38081 | NRPIRAWKR |
| 38082 | NTPERPHRK |
| 38083 | NTPITIQPL |
| 38084 | NYPSAHQCG |
| 38085 | QFPEIHRGE |
| 38086 | QMPTTTDRC |
| 38087 | QQPMIAEHV |
| 38088 | RNPSIQYWS |
| 38089 | RVPYVETYD |
| 38090 | SCPEMDLHR |
| 38091 | SNPIMDSDC |
| 38092 | SPPISYPRM |
| 38093 | SQPVMELSE |
| 38094 | SVPFTNMQS |
| 38095 | SVPMWWCAP |
| 38096 | TRPCICCDV |
| 38097 | TSPQNDHYS |
| 38098 | TTPFEKCCA |
| 38099 | TVPLQFQDS |
| 38100 | TVPRYSRNQ |
| 38101 | TYPRMITPA |
| 38102 | VGPCVRSDW |
| 38103 | VGPPYDTQD |
| 38104 | VLPFGAVGT |
| 38105 | VMPANWFFS |
| 38106 | VQPCMQCWC |
| 38107 | VRPMHMNCT |
| 38108 | VTPRFQWLT |
| 38109 | VYPTHNEVV |
| 38110 | WNPVQWTHS |
| 38111 | WTPVPSSSN |
| 38112 | WWPMRKWVS |
| 38113 | YLPYQSICG |
| 38114 | YNPQQRSLS |
| 38115 | IVPQQKIDE |
| 38116 | HGPFCDHAY |
| 38117 | KGPIFHSAY |
| 38118 | ENKCFASTT |
| 38119 | EQLCGKKKQ |
| 38120 | ERTCMPSAY |
| 38121 | ESDCFMWLG |
| 38122 | EYECLDCNI |
| 38123 | FCYCSHFPW |
| 38124 | FHMCSCTRY |
| 38125 | FSSCFNAVE |
| 38126 | FWRCDPNKV |
| 38127 | FYNCCDNPL |
| 38128 | GCMCEGAEF |
| 38129 | GGFCPCDQK |
| 38130 | GGSCSWDKP |
| 38131 | GIICYDATN |
| 38132 | HRGCCESGR |
| 38133 | HSFCVEGIP |
| 38134 | IHFCMCCDF |
| 38135 | IHRCIAEAA |
| 38136 | IHTCPKNTQ |
| 38137 | ILDCHKHYS |
| 38138 | ITECHPRKT |
| 38139 | ITYCNVVYW |
| 38140 | IVVCMHCEQ |
| 38141 | KGMCLSQGD |
| 38142 | KGVCKGVLP |
| 38143 | KYECPFYYV |
| 38144 | LHDCQMWGD |
| 38145 | LHSCDTPWT |
| 38146 | LKECCFEDA |
| 38147 | LNECYYNRP |
| 38148 | LPDCTDYRK |
| 38149 | LPRCCTINY |
| 38150 | LVGCSYCQS |
| 38151 | MAGCPPHDS |
| 38152 | MASCIPQTS |
| 38153 | MFACTQFFG |
| 38154 | MGDCHRSPD |
| 38155 | MMRCNVDFE |
| 38156 | MMSCIAAVQ |
| 38157 | MVSCRSAAC |
| 38158 | NASCHWHFD |
| 38159 | NGLCVESTA |
| 38160 | NPACNKMPT |
| 38161 | NQACNGWHK |
| 38162 | NSHCTWRKF |
| 38163 | NVECLPMLP |
| 38164 | QAMCCSYPR |
| 38165 | QAMCVHWHM |
| 38166 | QCYCAKYWS |
| 38167 | QGDCYEMWE |
| 38168 | QMTCPSDLW |
| 38169 | QQICPVGEF |
| 38170 | QYACHQIGA |
| 38171 | RGACDEFET |
| 38172 | RLMCYFRTW |
| 38173 | RPACTVPGK |
| 38174 | SGDCRDWHD |
| 38175 | SGTCYHYAL |
| 38176 | STGCGLMWG |
| 38177 | SVYCEEFYT |
| 38178 | TIMCVASLA |
| 38179 | TLYCYDDYH |
| 38180 | TRICCKNRQ |
| 38181 | VKQCTKFDE |
| 38182 | VWCCSVNPG |
| 38183 | WRNCMQDSK |
| 38184 | WSICHKDSY |
| 38185 | QNWCGKNLE |
| 38186 | SQDCGRPES |
| 38187 | KVGCFVDVW |
| 38188 | FCKCFMKHC |
| 38189 | ESQRDDGWL |
| 38190 | ESRADIEVA |
| 38191 | ETCIDMQGK |
| 38192 | ETHTDYQGP |
| 38193 | ETNPDWEGR |
| 38194 | FCTSDQKAL |
| 38195 | FGDHDNMPE |
| 38196 | FRHHDVNNH |
| 38197 | GEYYDEVNH |
| 38198 | GMEPDTQLY |
| 38199 | GMVPDLLPH |
| 38200 | GVNMDMEVS |
| 38201 | HGELDCASC |
| 38202 | HHFTDVDAH |
| 38203 | HHHADFHLA |
| 38204 | HMHRDMHEE |
| 38205 | HPNRDSAHM |
| 38206 | HRDGDILIE |
| 38207 | HYTSDWFQA |
| 38208 | IAKEDICQP |
| 38209 | ICVNDNFHN |
| 38210 | ISAPDNQLS |
| 38211 | IVTADNTME |
| 38212 | KANWDVNHS |
| 38213 | KENGDSITL |
| 38214 | KVDPDCHMF |
| 38215 | KVLQDQFTI |
| 38216 | KVVIDRKWD |
| 38217 | KYEPDGFIP |
| 38218 | LVGLDLSCH |
| 38219 | MHYSDGFVS |
| 38220 | MIEYDVGYK |
| 38221 | MLKTDCPLH |
| 38222 | MPCMDRRRP |
| 38223 | MRCADMLRY |
| 38224 | MTESDDRCV |
| 38225 | NCGLDITMR |
| 38226 | NIQADMSQQ |
| 38227 | NTVMDRMNF |
| 38228 | QCDSDTQSR |
| 38229 | QTRKDGESH |
| 38230 | QTRWDLIGL |
| 38231 | QVCIDWSGG |
| 38232 | QVNEDDAAK |
| 38233 | REYMDDEKQ |
| 38234 | RHHIDIPTY |
| 38235 | RVLTDERMD |
| 38236 | SAREDDNPC |
| 38237 | SCRIDWTDW |
| 38238 | SFNYDMVSR |
| 38239 | SGRGDVNGA |
| 38240 | SMQVDVLQR |
| 38241 | SNQWDWHIF |
| 38242 | SVMLDEWIN |
| 38243 | SWCIDCEAD |
| 38244 | TIAVDGHHS |
| 38245 | TILPDSAEF |
| 38246 | TIVYDNWSR |
| 38247 | TTTADKPAS |
| 38248 | TTVLDHGLQ |
| 38249 | TWKEDWALL |
| 38250 | TYKRDIMKT |
| 38251 | VILKDRVNW |
| 38252 | VKKSDAKQC |
| 38253 | VQDGDYSPS |
| 38254 | VSMEDHCKH |
| 38255 | WEKFDRPWR |
| 38256 | WPSADCDIP |
| 38257 | YMSRDQIKS |
| 38258 | YPTRDNLFM |
| 38259 | YWNFDDYQQ |
| 38260 | YYTGDLTYK |
| 38261 | SVKQDCVED |
| 38262 | TVREDCCIN |
| 32263 | YFAADEQWG |
| 38264 | NQIKDVAAS |
| 38265 | DARFDQWHH |
| 38266 | ALTHDDGRT |
| 38267 | FAYFQKDLF |
| 38268 | FNADHKCPS |
| 38269 | GRDALKNGD |
| 38270 | GVATLKWEQ |
| 38271 | GVCSKKSGA |
| 38272 | HFAEIKYET |
| 38273 | HMRMCKATW |
| 38274 | HPRSTKWCQ |
| 38275 | IEEHLKVCY |
| 38276 | IVATPKQYG |
| 38277 | KLNHVKRTS |
| 38278 | MCNYHKLNK |
| 38279 | MGGPYKLMC |
| 38280 | MGNIVKPAD |
| 38281 | MIDRMKESY |
| 38282 | MRTNYKLEM |
| 38283 | NFWLAKPFK |
| 38284 | NLHGTKFGY |
| 38285 | QMMQTKLHD |
| 38286 | QMTIPKWGY |
| 38287 | QSCWTKCEA |
| 38288 | SGILSKDWK |
| 38289 | SIDEPKFTV |
| 38290 | TEHENKCVG |
| 38291 | TGLLRKEQS |
| 38292 | TKNEFKTND |
| 38293 | TMAQCKYPH |
| 38294 | TMFSHKPSD |
| 38295 | VMCVPKYKD |
| 38296 | VNEEMKFQP |
| 38297 | WNGHHKDML |
| 38298 | YWFLHKGCN |
| 38299 | EVARTKFGG |
| 38300 | QMSWGKYHQ |
| 38301 | SYYQSKNTD |
| 38302 | LWFFMKFAK |
| 38303 | GACLWKRHL |
| 38304 | THARFKMKS |
| 38305 | LMMMCKQQY |
| 38306 | ESSWLYPHN |
| 38307 | FSITEEPFW |
| 38308 | GVVDYWPTF |
| 38309 | HHTLNYPNE |
| 38310 | HWESFIPRV |
| 38311 | IGGWIWPGP |
| 38312 | IVSELCPSF |
| 38313 | KKQMPFPRD |
| 38314 | LGRAPCPCW |
| 38315 | LSNVPMPAQ |
| 38316 | MAAEAYPCI |
| 38317 | MHAEFGPLP |
| 38318 | MKFQSGPKS |
| 38319 | NQFRAEPIS |
| 38320 | NVTNFDPHP |
| 38321 | QAAPGPPYE |
| 38322 | QPNGWAPPC |
| 38323 | QQFQTDPQT |
| 38324 | QVEIQEPAI |
| 38325 | RMLVRVPDG |
| 38326 | RPDMLTPYR |
| 38327 | SQCTPFPFN |
| 38328 | SRDRRQPKK |
| 38329 | SSFHEDPCN |
| 38330 | THHGLQPND |
| 38331 | TKVVIEPNC |
| 38332 | TLYGHDPAH |
| 38333 | TMFSFQPVE |
| 38334 | VINNRVPPT |
| 38335 | VQNYADPTG |
| 38336 | YGTIPVPIT |
| 38337 | YIKAVTPPF |
| 38338 | IREPTEPYC |
| 38339 | IFQLSRPAW |
| 38340 | ISGWRMPCD |
| 38341 | QAEVFAPYH |
| 38342 | DAMWKFPST |
| 38343 | TVNPCIPDN |
| 38344 | KCLQMCPNG |
| 38345 | FCNTHCGKP |
| 38346 | GLDWVSVKA |
| 38347 | HGNAETHKD |
| 38348 | HITNPTSKP |
| 38349 | HPEWKMSKC |
| 38350 | IAKQEHVKS |
| 38351 | IVDALHHKW |
| 38352 | IWTHLCVKH |
| 38353 | LFIQYYHKS |
| 38354 | LQNDWDAKL |
| 38355 | LVIPRDTKK |
| 38356 | LYHETHKKC |
| 38357 | MAIPTGVKE |
| 38358 | MAVEYDRKG |
| 38359 | MMNWWMYKA |
| 38360 | MVTQTYFKN |
| 38361 | NCMAVWAKN |
| 38362 | NLDQWNVKV |
| 38363 | NTEGCRVKK |
| 38364 | QIGTPSQKA |
| 38365 | QIQMTDDKQ |
| 38366 | QSAQWNVKA |
| 38367 | RTFNRATKT |
| 38368 | SLVHFHAKT |
| 38369 | TFGFFCTKG |
| 38370 | TFSTGLSKK |
| 38371 | TKGFMQKKE |
| 38372 | TMDEHHMKI |
| 38373 | TSVDLQMKA |
| 38374 | VEMWVWEKK |
| 38375 | VKQFNAHKG |
| 38376 | VNLTTSVKF |
| 38377 | WCYQCILKF |
| 38378 | WSMQLSHKM |
| 38379 | YAWTTVCKT |
| 38380 | NMVWKCRKS |
| 38381 | VMWTWESKY |
| 38382 | EVLDSMSEV |
| 38383 | EVTHPIGAV |
| 38384 | FASRCPRTV |
| 38385 | FFFIRMARV |
| 38386 | FGVEAWLPV |
| 38387 | FHGERHQDV |
| 38388 | FVRVQQRAV |
| 38389 | HACIHTDEV |
| 38390 | HLSEFNMQV |
| 38391 | HTFYCTCRV |
| 38392 | HVSIATGSV |
| 38393 | HYDFQLTQV |
| 38394 | ICVNKQQSV |
| 38395 | IFHSHATCV |
| 38396 | IFSYSQRMV |
| 38397 | IRYPYGKMV |
| 38398 | KSSEIVKWV |
| 38399 | KSYQRTFLV |
| 38400 | KYTGGIVVV |
| 38401 | LTNWNGMHV |
| 38402 | MIETTGQQV |
| 38403 | MMGPPQHVV |
| 38404 | MPKWGREPV |
| 38405 | MVEATDWWV |
| 38406 | MWTTETMGV |
| 38407 | MWVMGPLCV |
| 38408 | NHCMWEGYV |
| 38409 | NHHPFMYYV |
| 38410 | NIMLGQNSV |
| 38411 | NWVHPITRV |
| 38412 | QGCHFNMSV |
| 38413 | QVVKFEIPV |
| 38414 | RRQWQDFMV |
| 38415 | SAGYMCYDV |
| 38416 | SGDGFHYGV |
| 38417 | SIMHLCEHV |
| 38418 | SNCSVVKCV |
| 38419 | SPVILNADV |
| 38420 | STRMCQMLV |
| 38421 | SWQQSPYFV |
| 38422 | TARYYDGPV |
| 38423 | TCGYFTRDV |
| 38424 | TWASRRKCV |
| 38425 | VKCLGAMNV |
| 38426 | VNCKHMNNV |
| 38427 | VNYSWNIQV |
| 38428 | VVMPFWSAV |
| 38429 | WTVELANGV |
| 38430 | WVQPRMSIV |
| 38431 | YHEHAVESV |
| 38432 | YLEANMCHV |
| 38433 | YQHWTTMGV |
| 38434 | YTTFYRFQV |
| 38435 | QAMLHHVWV |
| 38436 | QNLMYCSSV |
| 38437 | TCGQYVNGV |

### Example 7

### AAV5 Variants with Tissue Tropism in Adrenal Gland

[0890] This example describes engineered AAV5 variants with tissue tropism in adrenal gland that were discovered using the methods and systems described in EXAMPLE 1-EXAMPLE 2.

[0891] CNS, liver, skeletal muscle, heart, lung, spleen, lymph node, bone marrow, mammary gland, skin, adrenal gland, thyroid, colon, sciatic nerve, and spinal cord tissues were analyzed to identify amino acid residues in the AAV5 VP1 581-589 region that drive adrenal gland tropism. The results are shown in FIG. 18K which shows the positional frequency of each amino acid in the 581 to 589 region of AAV5 VP1 in adrenal gland tissue as compared to all other analyzed tissues, wherein the capsid polypeptide has the sequence of SEQ ID NO: 2. The position (“Xaan”, n=1-9) is denoted on the x-axis and amino acid residues are denoted on the y-axis. The frequency of a particular amino acid residue in a particular position is indicated in the heatmap as intensity. Darker squares indicate a higher frequency of a particular amino acid in a particular position and lighter squares indicate a lower frequency of a particular amino acid in a particular position.

[0892] The frequency of a given amino acid residue occurring at a specified position corresponding to position 581 to position 589 of SEQ ID NO: 1 (generalized in SEQ ID NO: 2) in variants identified in adrenal gland over the frequency of that given amino acid residue occurring at the specified position in variants identified in all other harvested tissues was analyzed to identify a set of sequence rules for capsids that preferentially target adrenal gland tissue. With reference to TABLE 13 below, and SEQ ID NO: 2 (AAV5 VP1), the following amino acids can, thus, be independently mutated, in any combination, at any one or more positions Xaa1-Xaa9, to provide a VP1 capsid with enhanced adrenal gland tropism as compared wildtype AAV5 VP1 capsid (SEQ ID NO: 1), where adrenal gland tropism here refers to properties that are preferred for adrenal gland transduction over properties that are preferred for transduction of all other harvested tissues.

TABLE 13
Adrenal Gland Tropism Rules

Xaa1 is selected from A, C, K, Q, R, S, or T
Xaa1 is selected from C, K, or R
Xaa1 is C
Xaa2 is selected from A, C, I, S, T, or V
Xaa2 is selected from A, V, or T
Xaa2 is
Xaa3 is selected from A, F, G, K, M, Q, R, T, or V
Xaa3 is selected from A, G, or M
Xaa3 is M
Xaa4 is selected from A, K, M, Q, R, or V
Xaa4 is selected from A, R, or K
Xaa4 is K
Xaa5 is selected from F, I, L, M, R, T, V, or Y
Xaa5 is selected from R, V, or Y
Xaa5 is V
Xaa6 is selected from G, H, M, N, R, or S
Xaa6 is selected from H or N
Xaa6 is N
Xaa7 is selected from A, H, K, Q, R, S or V
Xaa7 is selected from H, Q, or V
Xaa7 is H
Xaa8 is selected from A, G, H, M, Q, or S
Xaa8 is selected from A, G, M, or S
Xaa8 is S
Xaa9 is selected from A, E, N, P, R, S, or Y
Xaa9 is selected from P or E
Xaa9 is P

[0893] TABLE 14 below provides sequences of the 581 to 589 region for variant AAV VP1 capsid polypeptides that were found in adrenal gland tissue and comport to one or more of the rules provided in TABLE 13. The present disclosure, thus, provides for rAAVs composed of engineered AAV5 VP1 capsid polypeptides having a SEQ ID NO: 2, wherein the Xaa1 to Xaa9 region is any one of SEQ ID NO: 1118-SEQ ID NO: 2117, as disclosed in TABLE 14. Also encompassed herein are rAAVs composed of engineered AAV5 VP2 capsid polypeptides and engineered AAV5 VP3 capsid polypeptides having the sequences disclosed in the below table at the regions in AAV5 VP2 (amin acid residues 445 to 453) and AAV5 VP3 (amino acid residues 389-397) corresponding to the amino acids in the AAV5 VP1 581 to 589 region.

TABLE 14
Sequences of the 581 to 589 Region
in AAV5 VP1 Capsid Polypeptide that
Drive Adrenal Gland Tissue Tropism

| SEQ | |
|---|---|
| ID | 581-589 |
| NO | Sequence |
| 1118 | CAAQYWLTP |
| 1119 | CARFVERWP |
| 1120 | CCAKFQMCT |
| 1121 | CEADGNWMR |
| 1122 | CIDMVQSWS |
| 1123 | CMLLAEKMF |
| 1124 | CMYPKSTDR |
| 1125 | CSLPYVREG |
| 1126 | CSVKMPGFR |
| 1127 | CTANVWTAQ |
| 1128 | CTVVMMRQP |
| 1129 | CVIPLRMYM |
| 1130 | CVIQTSRGI |
| 1131 | CAAYRGLLE |
| 1132 | CAFQPVRWF |
| 1133 | CAFQRMMYQ |
| 1134 | CAHQPQRDR |
| 1135 | CANYAFMTE |
| 1136 | CAPLVNSFC |
| 1137 | CARMFAAQW |
| 1138 | CCHFQHKAG |
| 1139 | CCLQPELTM |
| 1140 | CCRPFVLHQ |
| 1141 | CDVKCKKED |
| 1142 | CEMIANTNN |
| 1143 | CFNIIQRYD |
| 1144 | CFRQVQAMS |
| 1145 | CGDWLWRNL |
| 1146 | CHGHRPFDA |
| 1147 | CHIDYDLGF |
| 1148 | CHMKFNKFG |
| 1149 | CIGKCWPPM |
| 1150 | CIGRVNGTR |
| 1151 | CIKLIMDDR |
| 1152 | CIKSKFSWQ |
| 1153 | CINEKQIRW |
| 1154 | CIVKFSNTQ |
| 1155 | CKMATNGMT |
| 1156 | CKMYMHESR |
| 1157 | CLMALKRSG |
| 1158 | CLSSYSRYQ |
| 1159 | CLVKYPQFG |
| 1160 | CMYFIAEWH |
| 1161 | CPDEPRWFP |
| 1162 | CPFKVFAHG |
| 1163 | CPMIDEFPT |
| 1164 | CPTWSCQQW |
| 1165 | CPWQIKVAA |
| 1166 | CQMEQHYSP |
| 1167 | CSAPLRHWY |
| 1168 | CSIFGPTYP |
| 1169 | CSKFIVDWE |
| 1170 | CSLRYFMAR |
| 1171 | CSRTMEVGL |
| 1172 | CSSVRWMSP |
| 1173 | CSSYSFQHS |
| 1174 | CTFMANWGF |
| 1175 | CTGQRGFAN |
| 1176 | CTMDQWQTA |
| 1177 | CTTHFYRAR |
| 1178 | CVAPVRLQD |
| 1179 | CVAYRLVNP |
| 1180 | CVFMRLTSG |
| 1181 | CVFVRNNMM |
| 1182 | CVGSLMRIQ |
| 1183 | CVHLTSSSA |
| 1184 | CVKQYMQPP |
| 1185 | CVRHTENWC |
| 1186 | CVTTRHKQC |
| 1187 | CVWSAPVEC |
| 1188 | CVYQSRFSC |
| 1189 | CWNENTYEA |
| 1190 | CWNGIQRQA |
| 1191 | CYTRFHYSE |
| 1192 | CYVFRHHYC |
| 1193 | HVASTSYVT |
| 1194 | HVFDTDRWM |
| 1195 | HVFHLDEAN |
| 1196 | HVKDTDVQI |
| 1197 | HVQARQNPG |
| 1198 | HVSDKNHAK |
| 1199 | HVVPQNWNW |
| 1200 | HVVQRLTIP |
| 1201 | IVEARLEFN |
| 1202 | IVEDFEIVI |
| 1203 | IVFYRFEFV |
| 1204 | IVLPTMLLA |
| 1205 | IVVEAKMTT |
| 1206 | IVVSTWHEQ |
| 1207 | IVWLQRVGD |
| 1208 | KVDHTINQM |
| 1209 | KVDTEKNMM |
| 1210 | KVTGHEQDV |
| 1211 | KVVLWEHFQ |
| 1212 | LVCTHTKAA |
| 1213 | LVDDDYQMD |
| 1214 | LVEIPCSNW |
| 1215 | LVHSCQHTE |
| 1216 | LVLQSFHHS |
| 1217 | LVNCYTYRA |
| 1218 | LVQVMDMKP |
| 1219 | LVVIFEGRH |
| 1220 | LVWMDPHWG |
| 1221 | MVAAKEKHD |
| 1222 | MVAHNGLGF |
| 1223 | MVCMLVHHC |
| 1224 | MVDHSYQQE |
| 1225 | MVEVIEGGQ |
| 1226 | MVHGNHECW |
| 1227 | MVNPMHCCN |
| 1228 | MVRKYEKMH |
| 1229 | MVSCNQHDS |
| 1230 | MVSHVVASE |
| 1231 | MVSVDQMSV |
| 1232 | MVWSRADWS |
| 1233 | NVAIILSTD |
| 1234 | NVAVEHNMG |
| 1235 | NVEDTRKGS |
| 1236 | NVFLAHQRA |
| 1237 | NVHNSGRFD |
| 1238 | NVIGTENMS |
| 1239 | NVKSEHRES |
| 1240 | NVLLEKAFW |
| 1241 | NVNRGHLLE |
| 1242 | NVNWQARND |
| 1243 | NVTHKQGCS |
| 1244 | NVYPDSMHG |
| 1245 | PVNFFEHPM |
| 1246 | QVDIDTQNA |
| 1247 | QVDPHGNMH |
| 1248 | QVDRWCTAA |
| 1249 | QVEYAHSRA |
| 1250 | QVFMQHDIE |
| 1251 | QVGNPLKEF |
| 1252 | QVIEWGRSG |
| 1253 | QVIIRKWFA |
| 1254 | QVLMAQFSR |
| 1255 | QVQKCMQYV |
| 1256 | QVQKGACPS |
| 1257 | QVQSGPYWG |
| 1258 | QVQTENMCD |
| 1259 | QVRCGIKTG |
| 1260 | QVTFHAYVC |
| 1261 | QVTIQNDYD |
| 1262 | QVWNPHLCM |
| 1263 | RVATEHFRE |
| 1264 | RVDNPFVSY |
| 1265 | RVSECTENY |
| 1266 | RVTEEVGSR |
| 1267 | SVDQHDHLL |
| 1268 | SVERYPLTA |
| 1269 | SVFDVVHEE |
| 1270 | SVHVRIVEP |
| 1271 | SVKQHHVDW |
| 1272 | SVLGMPAYR |
| 1273 | SVMDANTWR |
| 1274 | SVNKDVRHC |
| 1275 | SVNSYMDSV |
| 1276 | SVPRKSKCS |
| 1277 | SVRSYHSQP |
| 1278 | SVTQPLYCQ |
| 1279 | SVVKRNDDV |
| 1280 | TVAHFLNGG |
| 1281 | TVALSEQYR |
| 1282 | TVAVRYETL |
| 1283 | TVCSTIVDW |
| 1284 | TVDWRWGDF |
| 1285 | TVEHKMDAP |
| 1286 | TVISDYEDC |
| 1287 | TVKMLQHWT |
| 1288 | TVMKEQANM |
| 1289 | TVNDHGPCI |
| 1290 | TVNKWHQTA |
| 1291 | TVNQCMTHC |
| 1292 | TVYFVWDSQ |
| 1293 | VVGATATGM |
| 1294 | VVGPPGHHY |
| 1295 | VVMFWQEGD |
| 1296 | VVMQQYRSH |
| 1297 | VVNKDKWRI |
| 1298 | VVQWPTSLL |
| 1299 | VVSAAKSSG |
| 1300 | VVSHKQRCS |
| 1301 | VVSKYQIVP |
| 1302 | VVTCRHQGS |
| 1303 | VVVPMSNCE |
| 1304 | WVMCISGHY |
| 1305 | YVMFNTWRE |
| 1306 | YVTMSDERP |
| 1307 | AVGFMECAN |
| 1308 | DVKDRNELH |
| 1309 | EVSAEEGQN |
| 1310 | GVMPRWGLF |
| 1311 | GVVNLVKMQ |
| 1312 | IVMYDHFNQ |
| 1313 | KVILDSFRQ |
| 1314 | KVMPEPVTE |
| 1315 | LVHLFQYHL |
| 1316 | QVVACMHHT |
| 1317 | RVDYSAIHM |
| 1318 | SVIMHHDQH |
| 1319 | VVEMNGDDD |
| 1320 | VVEYAPWAW |
| 1321 | AVAKGVGVT |
| 1322 | AVMATGVTQ |
| 1323 | AVSGNWMMT |
| 1324 | AVSKSGCGM |
| 1325 | DVAAVQVLE |
| 1326 | DVASYEQAY |
| 1327 | DVEWQQSWT |
| 1328 | DVGGLNREY |
| 1329 | DVHEVMSCG |
| 1330 | DVHICTVHI |
| 1331 | DVKGMLDGF |
| 1332 | DVKMQQKYF |
| 1333 | DVMGHAKLA |
| 1334 | DVRAYLNKE |
| 1335 | DVRYNQNAW |
| 1336 | DVSFMGWDC |
| 1337 | DVTHHFAKQ |
| 1338 | EVAHFLANE |
| 1339 | EVDNMQMGE |
| 1340 | EVGVSAPMM |
| 1341 | EVSGMFHPA |
| 1342 | EVTTMLKAC |
| 1343 | EVWINMAPE |
| 1344 | EVYMEPANW |
| 1345 | GVFFRYEHG |
| 1346 | GVFSTGVVT |
| 1347 | GVGVGLGTQ |
| 1348 | GVHQESGQN |
| 1349 | GVNKLSYEN |
| 1350 | GVRIPMAAD |
| 1351 | GVSQFMAET |
| 1352 | HVGAHTRSD |
| 1353 | HVGKMPGGS |
| 1354 | HVNSFQPDR |
| 1355 | IVCTTFEDS |
| 1356 | IVDQTCMHA |
| 1357 | IVGIWQWMG |
| 1358 | IVKNLEQYM |
| 1359 | IVKTLICYN |
| 1360 | KVDVITVKD |
| 1361 | KVGAHNDEV |
| 1362 | KVTWLDLED |
| 1363 | LVEAVMNAT |
| 1364 | LVKACTDQH |
| 1365 | LVKQYGLIH |
| 1366 | LVLMDRQAY |
| 1367 | LVSQTPRKV |
| 1368 | LVVDHAEWS |
| 1369 | MVALTDQLG |
| 1370 | MVDSNACLC |
| 1371 | MVHPSQNVD |
| 1372 | MVKEAPYYR |
| 1373 | MVSEYATNA |
| 1374 | MVTGISKSS |
| 1375 | NVESNYNLI |
| 1376 | NVEWGTVQS |
| 1377 | NVFMTSFQC |
| 1378 | NVFQPEDHC |
| 1379 | NVTWEDVQE |
| 1380 | PVAAAEPRN |
| 1381 | QVAEPGGRF |
| 1382 | QVDSWPVLS |
| 1383 | QVGCTVGPG |
| 1384 | RVQHSGAHW |
| 1385 | RVINTWECM |
| 1386 | RVYTTGKCS |
| 1387 | SVHHSRWGY |
| 1388 | SVNQAMARK |
| 1389 | SVSVMTYSE |
| 1390 | TVAMDPDYA |
| 1391 | TVATEPAQQ |
| 1392 | TVDFFVMDC |
| 1393 | TVDHCVGTV |
| 1394 | TVGLNERNG |
| 1395 | TVHWWECVQ |
| 1396 | TVQTNFTSK |
| 1397 | TVTWEWMMK |
| 1398 | TVVGLITNA |
| 1399 | VVEKRMDRS |
| 1400 | VVHGYVCKQ |
| 1401 | VVHPLAYCT |
| 1402 | VVNKQQISE |
| 1403 | VVTSPDAFQ |
| 1404 | VVVHTQCNP |
| 1405 | WVTPTNHKP |
| 1406 | YVAEYGLGA |
| 1407 | YVEERGSQR |
| 1408 | YVIVHMKGM |
| 1409 | YVTPNIAVH |
| 1410 | HCMRQSESG |
| 1411 | HSMPEAVAY |
| 1412 | HTMEILPGL |
| 1413 | HTMHDSCFN |
| 1414 | HTMLWAKDE |
| 1415 | ICMSYLSWD |
| 1416 | IPMFSIHGN |
| 1417 | KAMLEGPYL |
| 1418 | KNMINEAAP |
| 1419 | KSMWEHAIF |
| 1420 | KTMEDVIHA |
| 1421 | KYMSYERES |
| 1422 | LAMTLAVGQ |
| 1423 | LCMDYALVD |
| 1424 | LCMLLASQQ |
| 1425 | LSMCFRDDY |
| 1426 | MCMVERRGS |
| 1427 | MFMSQHVED |
| 1428 | MNMHTDCTT |
| 1429 | NAMWTTEYE |
| 1430 | NEMKFSYSH |
| 1431 | NIMNWQNGD |
| 1432 | NLMPTNHAM |
| 1433 | NSMQHCVCP |
| 1434 | NTMHPVGMM |
| 1435 | NTMMVGRCE |
| 1436 | PIMFEGECK |
| 1437 | QCMMKSSYE |
| 1438 | QFMPYLGFA |
| 1439 | QGMENQWHQ |
| 1440 | QHMYANCLP |
| 1441 | QKMTRQHWG |
| 1442 | QSMEQEFVT |
| 1443 | WSMMALKDY |
| 1444 | QSMMTDRTY |
| 1445 | REMTKVGGR |
| 1446 | RGMYRCGWD |
| 1447 | RNMYISQWE |
| 1448 | RSMGNEQDP |
| 1449 | SEMKLVNLP |
| 1450 | SEMVKHNFE |
| 1451 | SGMKQVGAA |
| 1452 | SGMLVGIYN |
| 1453 | SHMVSNSAV |
| 1454 | SSMSKHEVA |
| 1455 | STMPGTDQK |
| 1456 | TAMHQTMLN |
| 1457 | TAMMSGHLV |
| 1458 | TAMVVEYDQ |
| 1459 | TCMKNINYQ |
| 1460 | TCMLGAEAA |
| 1461 | TCMQLATMQ |
| 1462 | TCMTLRHIG |
| 1463 | TCMYYWKQP |
| 1464 | THMLCPRMD |
| 1465 | TNMSYQRSD |
| 1466 | TRMPVNQSC |
| 1467 | TWMEWHANA |
| 1468 | TYMGTHNHS |
| 1469 | VFMPDYYDK |
| 1470 | VKMPYHYEG |
| 1471 | VQMQEVPHY |
| 1472 | WFMHYSWKH |
| 1473 | WKMEGDCFK |
| 1474 | EIMCAYVKA |
| 1475 | GAMPNPYHE |
| 1476 | GTMWSTKSC |
| 1477 | HPMFMIPGY |
| 1478 | HYMLKEYFA |
| 1479 | HPMFMIPGY |
| 1480 | IMMAQWFAH |
| 1481 | PSMPNIKPS |
| 1482 | PYMQYWYWE |
| 1483 | REMLRDKMP |
| 1484 | SAMQVMTMC |
| 1485 | TAMSICMYG |
| 1486 | TEMDKGLIR |
| 1487 | ANMFRNGMQ |
| 1488 | ASMFWNYQV |
| 1489 | DRMVIKSAE |
| 1490 | EAMRAMTPI |
| 1491 | EAMYWQCAI |
| 1492 | EIMWEGVGS |
| 1493 | ENMHKEYVQ |
| 1494 | EPMEHYLRS |
| 1495 | GAMTMCCEW |
| 1496 | GKMMGLHSH |
| 1497 | ILMEYDHDK |
| 1498 | IMMHRVMSD |
| 1499 | KAMEVHFQK |
| 1500 | KAMGLPSWY |
| 1501 | KSMWEDR1C |
| 1502 | LAMPWDTLQ |
| 1503 | LCMLRMMGH |
| 1504 | LIMAHWLDM |
| 1505 | LIMDSKMGQ |
| 1506 | LLMPVLHQM |
| 1507 | MGMKREGSG |
| 1508 | MQMSKNKHP |
| 1509 | MRMIHWMHC |
| 1510 | NKMEWHKYC |
| 1511 | NWMQNTEGH |
| 1512 | PEMSFEFTT |
| 1513 | PGMNMVRKE |
| 1514 | PTMWWYLLV |
| 1515 | QCMPVSGMT |
| 1516 | QGMHAMFYA |
| 1517 | QMMQLYCGA |
| 1518 | SAMVHSNKS |
| 1519 | SHMSYLMSH |
| 1520 | TCMPNIQCP |
| 1521 | TFMHQFGTY |
| 1522 | TQMMTPVGA |
| 1523 | TWMADWHQE |
| 1524 | VAMQSMQEH |
| 1525 | VAMQTHQCY |
| 1526 | WWMHGRVGR |
| 1527 | YCMLKHKAG |
| 1528 | YCMWQQTSN |
| 1529 | YKMDHNNTY |
| 1530 | YSMTWNQQT |
| 1531 | HTGKADVSV |
| 1532 | IMEKLRRSS |
| 1533 | IPFKAVMVG |
| 1534 | IRVKPGCRV |
| 1535 | ITGKYPMTA |
| 1536 | KLEKTVVYS |
| 1537 | LDIKMDFLC |
| 1538 | LMHKDQVSP |
| 1539 | LNVKTGNAW |
| 1540 | LTTKQPDMP |
| 1541 | MASKLHMAV |
| 1542 | NSLKYEFSE |
| 1543 | NTGKTGQFN |
| 1544 | PCAKSYDQS |
| 1545 | PKDKGVICE |
| 1546 | QEVKGQWWP |
| 1547 | QIFKQTEVQ |
| 1548 | QITKPILDR |
| 1549 | QLAKAMTQS |
| 1550 | QPVKYPQTN |
| 1551 | RISKDGSDR |
| 1552 | RIVKRYHNG |
| 1553 | SLCKMLTAK |
| 1554 | SYKKPVKYM |
| 1555 | SYNKVMTQH |
| 1556 | TACKTEGGP |
| 1557 | TCVKTTHGA |
| 1558 | TDGKTRMQQ |
| 1559 | TETKWQHLE |
| 1560 | TIHKYCHHQ |
| 1561 | TSTKHHWWC |
| 1562 | TSVKKPHLA |
| 1563 | TTLKCTNTW |
| 1564 | TWIKPHQQL |
| 1565 | VCEKSNDYA |
| 1566 | VCFKMLLGN |
| 1567 | VECKTMAHQ |
| 1568 | VNAKWQTAS |
| 1569 | VSCKIYHYA |
| 1570 | VSGKECSED |
| 1571 | VTYKYYCDF |
| 1572 | WYQKQAEHG |
| 1573 | YCSKSVRCC |
| 1574 | NFSKCAKYD |
| 1575 | VCTKGFLNS |
| 1576 | AAHKEMKDT |
| 1577 | ACGKMHGPN |
| 1578 | AFLKQSIIH |
| 1579 | AGSKRFDWF |
| 1580 | AILKMTKVL |
| 1581 | DTGKFMCKW |
| 1582 | EHQKNINMH |
| 1583 | ESEKVWMMT |
| 1584 | EWRKKKKRT |
| 1585 | FCRKIEQAN |
| 1586 | FICKTLHQH |
| 1587 | GCDKTRFEN |
| 1588 | GILKFRDFM |
| 1589 | ICWKFLVSN |
| 1590 | IEVKYWNHH |
| 1591 | IWYKWWVMF |
| 1592 | KCDKPMLKP |
| 1593 | KMEKVERMP |
| 1594 | LDLKHNMCD |
| 1595 | MCIKCDAND |
| 1596 | NCNKCKNRT |
| 1597 | NQCKINVGT |
| 1598 | QQLKTN1NF |
| 1599 | RIEKLQCDY |
| 1600 | STLKTYAYN |
| 1601 | TGTKITMQT |
| 1602 | TIHKDGEFS |
| 1603 | VLQKFGHSF |
| 1604 | VTGKHIAQN |
| 1605 | YCYKTAVAA |
| 1606 | HCALVNRLR |
| 1607 | HFAMVWAGE |
| 1608 | HIGYVEAMR |
| 1609 | HTKPVNAQP |
| 1610 | IHQYVNFVH |
| 1611 | INNTVAHQE |
| 1612 | KALMVQQFD |
| 1613 | KCLMVDWGV |
| 1614 | KHGQVSIHD |
| 1615 | KMDRVGYSA |
| 1616 | KWNNVENNE |
| 1617 | KYSPVEWMY |
| 1618 | LGQHVQCWQ |
| 1619 | LKSWVCATS |
| 1620 | LMKCVMCRD |
| 1621 | MASPVNSEF |
| 1622 | MCLFVRVSQ |
| 1623 | MHGMVHAFE |
| 1624 | MLIHVNHKS |
| 1625 | MQDQVCKIG |
| 1626 | MQQRINKHM |
| 1627 | MRQTVDRPE |
| 1628 | MYHAVQCMP |
| 1629 | MYYQVSKQD |
| 1630 | NAENVDNGV |
| 1631 | NFEFVERYR |
| 1632 | NGHEVPVEE |
| 1633 | NKQVVQMTA |
| 1634 | NLPLVHSLE |
| 1635 | NLQRVEMGV |
| 1636 | NMQNVARCY |
| 1637 | NSWDVGSFN |
| 1638 | NTYPVLSDW |
| 1639 | PEYFVVYMY |
| 1640 | QGGAVMHEE |
| 1641 | QGGAVMHEE |
| 1642 | QIQPVNALF |
| 1643 | QQLSVHMWH |
| 1644 | QSGWVQIAA |
| 1645 | QWQYVMTDK |
| 1646 | RCWSVEASQ |
| 1647 | RDQRVLKVM |
| 1648 | RTTGVGDIS |
| 1649 | SAWCVPGQL |
| 1650 | SCHLVIKHH |
| 1651 | SFAPVAHIE |
| 1652 | SGRHVLIEI |
| 1653 | SITAVWSDE |
| 1654 | SQNMVDSQC |
| 1655 | SSCIVNIAS |
| 1656 | SSNLVGAGE |
| 1657 | STELVKYID |
| 1658 | TMHPVCCPM |
| 1659 | TMREVQCEW |
| 1660 | TPAHVCRGY |
| 1661 | VNDMVLAVV |
| 1662 | VSFCVRKQS |
| 1663 | YALTVPHSE |
| 1664 | YTPNVHYMV |
| 1665 | ECANVIKFN |
| 1666 | GACTVQNMT |
| 1667 | HIEWVSMHR |
| 1668 | MGQNVNHAG |
| 1669 | QAAFVNYGP |
| 1670 | RGFHVIVDQ |
| 1671 | RYDLVSYHQ |
| 1672 | VFDTVFAYC |
| 1673 | VKKYVDVHF |
| 1674 | VQSAVSMCS |
| 1675 | APVFVEQMG |
| 1676 | ASTAVLVQR |
| 1677 | DAGFVREPV |
| 1678 | EAVPVESGD |
| 1679 | EEKEVICMC |
| 1680 | EFEQVGFMM |
| 1681 | EGTMVKQGE |
| 1682 | EHNCVYLTE |
| 1683 | EMHYVCCQT |
| 1684 | EPFRVTQCG |
| 1685 | FASIVFGGE |
| 1686 | FEYMVLNWH |
| 1687 | FQAPVTKAS |
| 1688 | GLGYVHRSN |
| 1689 | GWQSVWNAP |
| 1690 | GYNWVQEQR |
| 1691 | HAVMVYSDY |
| 1692 | HTKGVVHQP |
| 1693 | IARHVDHDL |
| 1694 | IQTEVHTVY |
| 1695 | KQQDVTMNA |
| 1696 | KYIDVWDAR |
| 1697 | LGVDVLADY |
| 1698 | MQVLVSMTP |
| 1699 | NTIDVQLGG |
| 1700 | QKAYVSVSG |
| 1701 | QSPAVNCAW |
| 1702 | RIEQVDVFN |
| 1703 | RIGGVADAD |
| 1704 | RWECVTGGY |
| 1705 | TCIRVWQWA |
| 1706 | TMRYVNTCV |
| 1707 | TSHNVANFG |
| 1708 | VEQMVMPPH |
| 1709 | VYTVVDEHS |
| 1710 | WFPVVWSHN |
| 1711 | YHVLVEGDR |
| 1712 | HGIALNLGT |
| 1713 | HRDYANSWN |
| 1714 | IGTRFNAQT |
| 1715 | ILDDCNCKC |
| 1716 | IPRMLNHVE |
| 1717 | ISYQPNPME |
| 1718 | KASELNQVL |
| 1719 | KHLDCNERE |
| 1720 | KLSNMNHPI |
| 1721 | KMEQGNMDS |
| 1722 | KMFHSNQEA |
| 1723 | KNWVCNLLT |
| 1724 | KTEVTNGPT |
| 1725 | LCIRKNYTH |
| 1726 | LCQFNNATD |
| 1727 | LEAECNSMQ |
| 1728 | LGDERNCGQ |
| 1729 | LHDNWNRYT |
| 1730 | LPFRSNNAQ |
| 1731 | LTVQNNGIR |
| 1732 | MCAYMNKKE |
| 1733 | MPNLSNSFQ |
| 1734 | NGAEMNWHE |
| 1735 | NGNQFNNCT |
| 1736 | NSTQPNLWF |
| 1737 | NYTIYNPAE |
| 1738 | PIETTNHMD |
| 1739 | PMYANNYFC |
| 1740 | PTQPLNQHG |
| 1741 | QAWCANTFH |
| 1742 | QCFYANRGD |
| 1743 | QHQQFNLTT |
| 1744 | QIDMMNCNR |
| 1745 | QQLPENLYQ |
| 1746 | QTDVINKFP |
| 1747 | QTGMENHQN |
| 1748 | QYSWSNINT |
| 1749 | RIEANNWGV |
| 1750 | RIICQNAVA |
| 1751 | SEKVINASC |
| 1752 | SIAVKNMCH |
| 1753 | SKRDNNCEV |
| 1754 | SMQRYNSKP |
| 1755 | SSLCRNMWP |
| 1756 | STYGRNLYP |
| 1757 | SWSNINHQT |
| 1758 | TCGEYNHRC |
| 1759 | TFQEKNVMH |
| 1760 | THQMTNTYS |
| 1761 | TIAQDNKEA |
| 1762 | TLITTNRQY |
| 1763 | TMVQNNMCF |
| 1764 | TRQPFNMSL |
| 1765 | TSSEFNRQR |
| 1766 | TSVACNSTD |
| 1767 | TTVFWNNFK |
| 1768 | TWVPDNADS |
| 1769 | TYQVNNWSD |
| 1770 | VANHHNEIQ |
| 1771 | VIGTANAAP |
| 1772 | VMGMINGAW |
| 1773 | VPLVINKEQ |
| 1774 | VSSQFNGPS |
| 1775 | VTHCKNVAC |
| 1776 | VWYPQNAVE |
| 1777 | WCNYLNQGM |
| 1778 | WQCTENWQN |
| 1779 | FYWAHNICE |
| 1780 | KYEILNCNH |
| 1781 | LYAMLNKFF |
| 1782 | MGNYQNTHY |
| 1783 | RKDEANGQT |
| 1784 | YFIIQNHLD |
| 1785 | YTRSNNWDY |
| 1786 | AAFMPNNYY |
| 1787 | AALFPNWSN |
| 1788 | AEECSNHNV |
| 1789 | AHSMTNLVG |
| 1790 | AWFDHNEHQ |
| 1791 | AYARSNRQD |
| 1792 | DATIANAQV |
| 1793 | DIAEKNRMM |
| 1794 | DWKTSNAEY |
| 1795 | EGDWYNYGT |
| 1796 | GIIFSNTCM |
| 1797 | GPPPYNAWF |
| 1798 | GSQRTNTSC |
| 1799 | GTSRYNAFI |
| 1800 | IALLTNDLA |
| 1801 | ICGRLNNNP |
| 1802 | INAPQNMSW |
| 1803 | ISGYHNVDE |
| 1804 | IYHTLNHCM |
| 1805 | KAEMSNAIT |
| 1806 | KAIPENSHR |
| 1807 | KIHSPNQDE |
| 1808 | LKSPHNENG |
| 1809 | LLEVKNHDH |
| 1810 | LSDLQNKGA |
| 1311 | LSHTSNMGH |
| 1812 | LTYLANQSD |
| 1813 | MGKSRNGSE |
| 1814 | MISMWNRSN |
| 1815 | MMDPTNFGS |
| 1816 | MNNITNWNP |
| 1817 | NTGRANKFD |
| 1818 | NNQWMNSLE |
| 1819 | NQIRNNMER |
| 1820 | NTYMHNREG |
| 1821 | NWNDSNDCC |
| 1822 | QCYTFNDTK |
| 1823 | QRDLANGQF |
| 1824 | QTASWNMEM |
| 1825 | RCEPFNWRE |
| 1826 | RMAQINQQG |
| 1827 | STALMNEYQ |
| 1828 | SWWLTNTAV |
| 1829 | TADFYNDQM |
| 1830 | TASSANLSW |
| 1831 | TFEICNSPQ |
| 1832 | TFLRLNDFV |
| 1833 | TFSQHNHKA |
| 1834 | TKCTTNQQC |
| 1835 | TSALNNNSK |
| 1836 | TSHDNNAQI |
| 1837 | TTFHINEYP |
| 1838 | VCVPKNGIH |
| 1839 | VGAQTNCLQ |
| 1840 | VYNLLNHYQ |
| 1841 | VYRIANTQY |
| 1842 | YAKSRNIVG |
| 1843 | HKESLGHHC |
| 1844 | HRHPCGHIP |
| 1845 | HSAPSFHTQ |
| 1846 | IDKLYWHWG |
| 1847 | IDQPIQHAS |
| 1848 | IGKMNDHGM |
| 1849 | IIQYNGHQA |
| 1850 | IKTELAHQY |
| 1851 | KAAGDSHTP |
| 1852 | KADAPIHWS |
| 1853 | KAECKPHHE |
| 1854 | KATELGHCG |
| 1855 | KCTAMRHKE |
| 1856 | KTEQATHTC |
| 1857 | KTSEWHHVG |
| 1858 | LATSRVHFG |
| 1859 | LGGWMEHSF |
| 1860 | LSDHLHHYT |
| 1861 | MCHHRHHAE |
| 1862 | MFRERIHHD |
| 1863 | NCIFIEHPT |
| 1864 | NKVGCQHSY |
| 1865 | NMKVDAHSN |
| 1866 | NSSYEEHDQ |
| 1867 | NTCFIGHNE |
| 1868 | PGSQYVHWI |
| 1869 | QASYRTHHD |
| 1870 | QCAIMRHYC |
| 1871 | QIAEIIHFG |
| 1872 | QIYPEHHKE |
| 1873 | QRKHYVHVF |
| 1874 | QWDTLRHTP |
| 1875 | RICFHQHWG |
| 1876 | RKECEDHGG |
| 1877 | RTLEWFHRG |
| 1878 | SFSWIYHQD |
| 1879 | TAVMYAHDC |
| 1880 | TREINDHGI |
| 1881 | TRGSMYHHC |
| 1882 | TTVRNFHAE |
| 1883 | TYCCYHHQG |
| 1884 | TYECAAHYP |
| 1885 | VAQPYIHSH |
| 1886 | VNKPAGHIQ |
| 1887 | VRDLLHHDM |
| 1888 | VYETLKHRG |
| 1889 | VYETMGHEE |
| 1890 | WYYYPAHHK |
| 1891 | YEVTIPHAI |
| 1892 | ETRWWPHIE |
| 1893 | MSCMKEHSP |
| 1894 | NCAPMEHHV |
| 1895 | QGLNYEHQE |
| 1896 | SCRHIYHEA |
| 1897 | SMNQAIHLE |
| 1898 | AAYMTDHMN |
| 1899 | ASTSIVHAH |
| 1900 | DSFLNRHTE |
| 1901 | DTCSRKHWM |
| 1902 | ESFYQRHVT |
| 1903 | ESVVGPHWD |
| 1904 | ETDVCRHGV |
| 1905 | HQNASMHMP |
| 1906 | HYIQIQHDY |
| 1907 | IMVALMHED |
| 1908 | IYNQFPHYG |
| 1909 | KHSPDHHFE |
| 1910 | KMAMLRHAT |
| 1911 | KSVGWCHAF |
| 1912 | LQQPIVHIE |
| 1913 | LTETEHHDQ |
| 1914 | MATHCLHWR |
| 1915 | MMPEIMHVL |
| 1916 | NMGLLYHTN |
| 1917 | NTEPMTHWN |
| 1918 | PMKPMHHGY |
| 1919 | QCTFYFHWR |
| 1920 | QHVQEIHGA |
| 1921 | QIYHNHHTA |
| 1922 | QSCVGLHQI |
| 1923 | SATSKSHTF |
| 1924 | SCDEYMHHP |
| 1925 | SCVLKVHFP |
| 1926 | SLCMHRHDF |
| 1927 | SMGPTVHQM |
| 1928 | TAGHEGHIC |
| 1929 | TCEWWIHMD |
| 1930 | TFGWFMHIP |
| 1931 | TFSQHSHKA |
| 1932 | TRQQLFHTQ |
| 1933 | TIGSTKHIG |
| 1934 | VMPCYWHTT |
| 1935 | WDGTKVHWL |
| 1936 | YHVILVHQA |
| 1937 | YPTVFEHSE |
| 1938 | HIGYMPRSY |
| 1939 | HLCPNQFSP |
| 1940 | HSNGLGPSC |
| 1941 | HSQIFMLSW |
| 1942 | IGSQIFTST |
| 1943 | IGSSIMSST |
| 1944 | IIHQQHNST |
| 1945 | ITSRRGMSE |
| 1946 | KAEPLRLSP |
| 1947 | KAFIRDESY |
| 1948 | KGDWTVKSY |
| 1949 | KGGHKDESP |
| 1950 | KIWAHMCSP |
| 1951 | KMFLLEQSD |
| 1952 | LASCNWRSQ |
| 1953 | LAYPCYASA |
| 1954 | LFSFLWRSA |
| 1955 | LIDQYTNST |
| 1956 | LIEQTCVSN |
| 1957 | LKVDELLSN |
| 1958 | LMEQFDYSQ |
| 1959 | LQGEQSASD |
| 1960 | LYEQYKASY |
| 1961 | MQQYAYISH |
| 1962 | MSIRHMISY |
| 1963 | NCGVSMKSN |
| 1964 | NCHSKCYSS |
| 1965 | NTAHCWESD |
| 1966 | QGSFAHVSQ |
| 1967 | QHKVMGRSW |
| 1968 | QTRCDFLSH |
| 1969 | RADHYRASK |
| 1970 | RCEAEGGSK |
| 1971 | REHVMETSM |
| 1972 | RSNIEHLSE |
| 1973 | RTDSFYESD |
| 1974 | RTIDPVQSS |
| 1975 | RTVEHQASA |
| 1976 | SLGCREISL |
| 1977 | SLHAWAISA |
| 1978 | SNFEFQKSH |
| 1979 | TCGLFSGSY |
| 1980 | TFTRPEQSQ |
| 1981 | TGKWISPSN |
| 1982 | TKENLAASY |
| 1983 | TMLVHHGSM |
| 1984 | TSFLLGVSS |
| 1985 | TTHDEGVSI |
| 1986 | VAAHPLTSD |
| 1987 | VERMATESE |
| 1988 | VGQVIDRSW |
| 1989 | VTTRNPFST |
| 1990 | VYQVCTISD |
| 1991 | WCQRFQTSS |
| 1992 | WITEIELSG |
| 1993 | YFALSGESS |
| 1994 | EIHHLPSSH |
| 1995 | GIAETYISA |
| 1996 | HSEQMHQSD |
| 1997 | LAKSCSSSQ |
| 1998 | NASLDMISV |
| 1999 | SSEPETKSN |
| 2000 | VADMGPWSG |
| 2001 | APHSYAMSY |
| 2002 | ASHIKWNSH |
| 2003 | DAQQAPNSS |
| 2004 | EDWIMHASF |
| 2005 | EPSFESDSN |
| 2006 | ESKWWIQSD |
| 2007 | FGKDTFVSS |
| 2008 | GANNIYVSM |
| 2009 | GKSLMMTSF |
| 2010 | GNTQQPMSF |
| 2011 | GTAAMEQSC |
| 2012 | IDASLDMSW |
| 2013 | ISEPCYVSI |
| 2014 | LMNSYCVSH |
| 2015 | LNVEAELSF |
| 2016 | LSLPGVPSM |
| 2017 | NMTGIHVSP |
| 2018 | NTFATGNSP |
| 2019 | QCYESMTSW |
| 2020 | QICQTDASA |
| 2021 | SCVFRLASG |
| 2022 | SDPHAGPSD |
| 2023 | SLWILRMSN |
| 2024 | SSCGNMVSN |
| 2025 | THWQYEASH |
| 2026 | TNAQFSNSW |
| 2027 | TTGVSEGSA |
| 2028 | VANYHPYSM |
| 2029 | VIRYGDLSQ |
| 2030 | VMGPQPVSV |
| 2031 | VSVMLAASD |
| 2032 | HFYSQSTLP |
| 2033 | HGAIHAVLP |
| 2034 | HHECMWMFP |
| 2035 | HTEARMVEP |
| 2036 | IGNYYHKWP |
| 2037 | IIRHHEFAP |
| 2038 | IIWQQDIGP |
| 2039 | IQSECVVVP |
| 2040 | KNESAKQCP |
| 2041 | KSVNLCVDP |
| 2042 | KTSFSEMPP |
| 2043 | KTSMTFYNP |
| 2044 | LARSDCRQP |
| 2045 | LFYPEWDGP |
| 2046 | LGCDTEQMP |
| 2047 | LHEFHKSYP |
| 2048 | LQLRSDWCP |
| 2049 | LTIHSQREP |
| 2050 | MACLFRACP |
| 2051 | MEGAIGQNP |
| 2052 | MGANIAQMP |
| 2053 | MGSSRMIYP |
| 2054 | MHIFHSLCP |
| 2055 | MKSECMSGP |
| 2056 | MWGHISEMP |
| 2057 | NFHMKSMCP |
| 2058 | NLHDFIFAP |
| 2059 | NWNLWDTYP |
| 2060 | PEFEFFTTP |
| 2061 | QCDEQEYNP |
| 2062 | QGQRFYNYP |
| 2063 | QYARLDCLP |
| 2064 | RADIGSLCP |
| 2065 | RCILKREQP |
| 2066 | RETVAMDMP |
| 2067 | RFEFLMAPP |
| 2068 | SAYIGEQGP |
| 2069 | SLRVCIGQP |
| 2070 | STHLKLSDP |
| 2071 | STNLIGQNP |
| 2072 | TCGWSHAMP |
| 2073 | TGNLWQSMP |
| 2074 | TSQAPMCNP |
| 2075 | YCDRSGIWP |
| 2076 | YFYEAKLMP |
| 2077 | YNGYTSVCP |
| 2078 | YRDRFFAVP |
| 2079 | YSHPRDGAP |
| 2080 | ACQLLHWQP |
| 2081 | DWDSMCWWP |
| 2082 | EDTMAQMWP |
| 2083 | LCHFRLVGP |
| 2084 | NQTGHMPAP |
| 2085 | QAPAYMWGP |
| 2086 | WHSRKQWPP |
| 2087 | YTKYLMTEP |
| 2088 | AFATCSMMP |
| 2089 | APVCGQDPP |
| 2090 | DADERQILP |
| 2091 | DERNSFWFP |
| 2092 | DIHTNTIEP |
| 2093 | DSGWWATMP |
| 2094 | GLTMNRCYP |
| 2095 | GMFWLTQAP |
| 2096 | GWWVATMLP |
| 2097 | HAELTMNVP |
| 2098 | IACCSEAIP |
| 2099 | KGDYQADAP |
| 2100 | LEKSMMTAP |
| 2101 | LRYLSDADP |
| 2102 | MCRANGDMP |
| 2103 | MCTLRHWQP |
| 2104 | MFELFVMGP |
| 2105 | MSTPNMTQP |
| 2106 | NAEQWCCGP |
| 2107 | NMTPLMTLP |
| 2108 | QAQPNVNYP |
| 2109 | QAYTDDTGP |
| 2110 | QWGGNQQTP |
| 2111 | QYEEMAWGP |
| 2112 | SAYMLRYQP |
| 2113 | SGQQFIFCP |
| 2114 | SPGHNMVGP |
| 2115 | SSVHTLYFP |
| 2116 | SYNYEHAWP |
| 2117 | TCNMQRAVP |

### Example 8

### AAV5 Variants with Tissue Tropism in Sciatic Nerve

[0894] This example describes engineered AAV5 variants with tissue tropism in sciatic nerve that were discovered using the methods and systems described in EXAMPLE 1-EXAMPLE 2.

[0895] CNS, liver, skeletal muscle, heart, lung, spleen, lymph node, bone marrow, mammary gland, skin, adrenal gland, thyroid, colon, sciatic nerve, and spinal cord tissues were analyzed to identify amino acid residues in the AAV5 VP1 581-589 region that drive sciatic nerve tropism. The results are shown in FIG. 18N which shows the positional frequency of each amino acid in the 581 to 589 region of AAV5 VP1 in sciatic nerve tissue as compared to all other analyzed tissues, wherein the capsid polypeptide has the sequence of SEQ ID NO: 2. The position (“Xaan”, n=1-9) is denoted on the x-axis and amino acid residues are denoted on the y-axis. The frequency of a particular amino acid residue in a particular position is indicated in the heatmap as intensity. Darker squares indicate a higher frequency of a particular amino acid in a particular position and lighter squares indicate a lower frequency of a particular amino acid in a particular position.

[0896] The frequency of a given amino acid residue occurring at a specified position corresponding to position 581 to position 589 of SEQ ID NO: 1 (generalized in SEQ ID NO: 2) in variants identified in sciatic nerve over the frequency of that given amino acid residue occurring at the specified position in variants identified in all other harvested tissues was analyzed to identify a set of sequence rules for capsids that preferentially target sciatic nerve tissue. With reference to TABLE 15 below, and SEQ ID NO: 2 (AAV5 VP1), the following amino acids can, thus, be independently mutated, in any combination, at any one or more positions Xaa1-Xaa9, to provide a VP1 capsid with enhanced sciatic nerve tropism as compared wildtype AAV5 VP1 capsid (SEQ ID NO: 1), where sciatic nerve tropism here refers to properties that are preferred for sciatic nerve transduction over properties that are preferred for transduction of all other harvested tissues.

TABLE 15
Sciatic Nerve Tropism Rules

Xaa1 is selected from C, G, K, M, Q, R, or Y.
Xaa1 is selected from C, R, or Q.
Xaa1 is C.
Xaa2 is selected from A, C, F, I, Q, T, or V.
Xaa2 is selected from A, C, or I.
Xaa2 is A.
Xaa3 is selected from A, F, I, M, R, S, or T.
Xaa3 is selected from F, M, R, or S.
Xaa3 is R.
Xaa4 is selected from E, N, T, Q, or V.
Xaa4 is selected from E, T, or V.
Xaa4 is T.
Xaa5 is selected from F, H, Q, S, V, or Y.
Xaa5 is selected from F, V, or Y.
Xaa5 is V.
Xaa6 is selected from K, M, N, Q, S, or V.
Xaa6 is selected from M, N, or S.
Xaa6 is N.
Xaa7 is selected from K, M, Q, R, or T.
Xaa7 is selected from M, Q, or T.
Xaa7 is M.
Xaa8 is selected from A, G, H, Q, S, or V.
Xaa8 is selected from H or S.
Xaa8 is H.
Xaa9 is selected from C, E, I, K, or R.
Xaa9 is selected from C, I, or K.
Xaa9 is I.

[0897] TABLE 16 below provides sequences of the 581 to 589 region for variant AAV VP1 capsid polypeptides that were found in sciatic nerve tissue and comport to one or more of the rules provided in TABLE 15. The present disclosure, thus, provides for rAAVs composed of engineered AAV5 VP1 capsid polypeptides having a SEQ ID NO: 2, wherein the Xaa1 to Xaa9 region is any one of SEQ ID NO: 26118-SEQ ID NO: 26990, as disclosed in TABLE 16. Also encompassed herein are rAAVs composed of engineered AAV5 VP2 capsid polypeptides and engineered AAV5 VP3 capsid polypeptides having the sequences disclosed in the below table at the regions in AAV5 VP2 (amin acid residues 445 to 453) and AAV5 VP3 (amino acid residues 389-397) corresponding to the amino acids in the AAV5 VP1 581 to 589 region.

TABLE 16
Sequences of the 581 to 589 Region
in AAV5 VP1 Capsid Polypeptide that
Drive Sciatic Nerve Tissue Tropism

| SEQ | |
|---|---|
| ID | 581-589 |
| NO | Sequence |
| 26118 | CQGYEHSQE |
| 26119 | CAHAMKWGS |
| 26120 | CGGQVEFGW |
| 26121 | CSSCYHRVF |
| 26122 | CCCEALMPQ |
| 26123 | CENPLCQSS |
| 26124 | CFGPEGYAG |
| 26125 | CHPQHHHSH |
| 26126 | CSSFYHRVF |
| 26127 | CKEPRKMRE |
| 26128 | CPVHQMDFT |
| 26129 | CIVKSNGSK |
| 26130 | CPGLQFDTP |
| 26131 | CHHFNMPSQ |
| 26132 | CCRQIWVQY |
| 26133 | CIIARSTAA |
| 26134 | CAEKQEYVQ |
| 26135 | CAHMQYAGP |
| 26136 | CANPLWAQT |
| 26137 | CAVKTHTCT |
| 26138 | CCNRNWNQQ |
| 26139 | CDYMHKLNE |
| 26140 | CEGRHTWGK |
| 26141 | CFHRHSTVP |
| 26142 | CFIAADNRN |
| 26143 | CFKHQMMMH |
| 26144 | CFSDTDNAM |
| 26145 | CFTNHWEMG |
| 26146 | CFVPMFNHN |
| 26147 | CFWLDWWCW |
| 26148 | CGYMHKLNE |
| 26149 | CHSIFNVKC |
| 26150 | CISAGMKND |
| 26151 | CKDLRCGCA |
| 26152 | CLGQMWAQW |
| 26153 | CLHQWLMPT |
| 26154 | CLIAPPHMD |
| 26155 | CLTSTSHCI |
| 26156 | CMCPGKEYP |
| 26157 | CMLAWQNDF |
| 26158 | CNPKCDAMM |
| 26159 | CNYDSHKMK |
| 26160 | CPLFLPALP |
| 26161 | CQNMKRIDW |
| 26162 | CQQPPRPEK |
| 26163 | CRIQSIHVH |
| 26164 | CSAGDEWGG |
| 26165 | CSKHATMAH |
| 26166 | CSKHVTMAH |
| 26167 | CSMFLHHTQ |
| 26168 | CTILNHQDA |
| 26169 | CTRPDEIKE |
| 26170 | CVAICQDGL |
| 26171 | CVHTISNCH |
| 26172 | CVTWTNRKL |
| 26173 | CVWSEDAGY |
| 26174 | CWCEKSHLG |
| 26175 | CWLCQCPRQ |
| 26176 | CYDHFQMKD |
| 26177 | CYQFHTGFW |
| 26178 | CHAAVANLY |
| 26179 | CTMCHDCSP |
| 26180 | CADPQERCD |
| 26181 | CMEVTCFVV |
| 26182 | CIGPFHCAN |
| 26183 | CWGPIMHPF |
| 26184 | CSESYRGPD |
| 26185 | CQQHFMFAP |
| 26186 | CGHLLRRAE |
| 26187 | CRRDGYAAM |
| 26188 | CPEHNQVGV |
| 26189 | CIHRFVSSP |
| 26190 | CDWMANVSV |
| 26191 | CCRMDNKKS |
| 26192 | CLNNSTCRG |
| 26193 | CDHVTKHPT |
| 26194 | CKYAFKMEK |
| 26195 | CDAEAEFRR |
| 26196 | CPFKLYSKG |
| 26197 | CSIQINNCR |
| 26198 | CMVSTQKLA |
| 26199 | CFCTYKIEH |
| 26200 | CVCWFWFFW |
| 26201 | CHMLNDCMS |
| 26202 | CMAHIWEGH |
| 26203 | CGCQVKCHT |
| 26204 | CSMPQQCME |
| 26205 | CWECCTDSG |
| 26206 | CIMLNGCFQ |
| 26207 | CIDVLFKHL |
| 26208 | CQMLCRPPV |
| 26209 | CAGIHLNEA |
| 26210 | CYMNFIVDG |
| 26211 | CYIRNMVNL |
| 26212 | CPKQANRSG |
| 26213 | CVLSRSTMR |
| 26214 | CEAGWCRSD |
| 26215 | CIQPTWDSY |
| 26216 | CYWPMTNCT |
| 26217 | CNGYWMCMS |
| 26218 | CSVWMQRDR |
| 26219 | CWILHHRCS |
| 26220 | CYNQFHTDN |
| 26221 | YAVMSPPAG |
| 26222 | YAVMSQPAG |
| 26223 | YAVMSRPAG |
| 26224 | YAVVSHPAG |
| 26225 | RAVEMQPCT |
| 26226 | IAEEGWACP |
| 26227 | QAPLATAIE |
| 26228 | FAPEFDNHC |
| 26229 | SAHMPKSVT |
| 26230 | EAYLYNIPM |
| 26231 | NAEQCMIGA |
| 26232 | RASMCDCFE |
| 26233 | SACPLWCGS |
| 26234 | DAMHKWIFA |
| 26235 | HAPCEQWAW |
| 26236 | MASIDKQHV |
| 26237 | AAQWPMEYT |
| 26238 | TAEWKLCGE |
| 26239 | QAEGGPNMP |
| 26240 | IATEHPDEW |
| 26241 | NALDEDCQH |
| 26242 | AAMLYNACM |
| 26243 | VADWIGHTP |
| 26244 | VAIQCNRSY |
| 26245 | GATILTKCL |
| 26246 | YASTMHSIP |
| 26247 | QALVGNAAE |
| 26248 | SAICQNYDA |
| 26249 | DAHNDALAR |
| 26250 | AADECMLHT |
| 26251 | AAEKLFAWE |
| 26252 | AAFLGQLSV |
| 26253 | AANSRENDW |
| 26254 | AATNMSNVH |
| 26255 | DAEANGCDA |
| 26256 | DAGKLGQHD |
| 26257 | DAGWMNSWV |
| 26258 | DALPMHGQR |
| 26259 | DAMCSIRKD |
| 26260 | DARANCDAA |
| 26261 | EAEIAYGFM |
| 26262 | EAGCINVPS |
| 26263 | EAQLYSTKA |
| 26264 | EASTYFIWD |
| 26265 | FADTCPRHA |
| 26266 | FAELHGMQG |
| 26267 | FAHDSCESG |
| 26268 | FANWLKSFP |
| 26269 | FAQIIVHEH |
| 26270 | FATGCKQGT |
| 26271 | GANKTCCEG |
| 26272 | GASPKLGPV |
| 26273 | HADEPYEWR |
| 26274 | HAEYQQQMG |
| 26275 | HAGYIASPN |
| 26276 | HAIPFNDSQ |
| 26277 | IAFHRGADH |
| 26278 | IAGPQQQMT |
| 26279 | IAHHRGCHT |
| 26280 | IAHVMDCLE |
| 26281 | IALVMTSWE |
| 26282 | IAMMENRQQ |
| 26283 | KADMCPYII |
| 26284 | KADMKNPCD |
| 26285 | KAELGKLIE |
| 26286 | LAMPKPDKQ |
| 26287 | LANEQIDFT |
| 26288 | LATMHSGQC |
| 26289 | MAAWCHKSQ |
| 26290 | NADPCMWMQ |
| 26291 | NAFQKEACI |
| 26292 | NAHMYTKHS |
| 26293 | NAMWHTKVG |
| 26294 | NANQKWYWS |
| 26295 | NASFSNHQA |
| 26296 | PAYYGPGSE |
| 26297 | QAAPPCAMS |
| 26298 | QAIRGTHDQ |
| 26299 | QAMRFSENG |
| 26300 | QATAEYACD |
| 26301 | QAWMPVCHT |
| 26302 | RAIMSDWEC |
| 26303 | RALECNWFL |
| 26304 | RALTFDCHK |
| 26305 | SAEYSNDES |
| 26306 | SAHTFCAPR |
| 26307 | SAHVVLGEM |
| 26308 | SALENVPKY |
| 26309 | SAMTSSHQK |
| 26310 | SAMYTENIS |
| 26311 | SASTKVASE |
| 26312 | TADLNHGEQ |
| 26313 | TADVNLALD |
| 26314 | TADVTAQWL |
| 26315 | TAGHFKWEQ |
| 26316 | TAIRADWQS |
| 26317 | TANRMTNQP |
| 26318 | TASEAHMEK |
| 26319 | TATLWARGY |
| 26320 | TATQRGMFQ |
| 26321 | TAVHNTHVQ |
| 26322 | VAFPAQLGA |
| 26323 | VAISTSPTT |
| 26324 | VASFNQICA |
| 26325 | VATDRMWMC |
| 26326 | VAWMMLAKD |
| 26327 | YAEVFRFKG |
| 26328 | YAIDSSRME |
| 26329 | YANWLYDCT |
| 26330 | NAELQQADI |
| 26331 | TAAGYIVDA |
| 26332 | SAFQSSDVP |
| 26333 | EAYITYNKA |
| 26334 | TAEVRWPCP |
| 26335 | YAQRTCWPE |
| 26336 | YAMPLYFCE |
| 26337 | KAGYQEGSC |
| 26338 | AAMWWQWDR |
| 26339 | GAYSLHDWR |
| 26340 | HAETDHVGL |
| 26341 | FAQQDKQDR |
| 26342 | YAYHPQCKP |
| 26343 | QATGMHRWQ |
| 26344 | IADGFAAVA |
| 26345 | QAGNSMWAK |
| 26346 | MAMWIADTH |
| 26347 | MATCYMYAD |
| 26348 | IAKIGNCVW |
| 26349 | NANYWFYYD |
| 26350 | EASWYYPAI |
| 26351 | KACMSHQGR |
| 26352 | QAEENSHWC |
| 26353 | SAAWQFGGS |
| 26354 | RACGMRGDY |
| 26355 | DADAWWMMH |
| 26356 | NACDWKNDY |
| 26357 | SAIGKTKKM |
| 26358 | QAVRRWWFF |
| 26359 | AAIRYDPGF |
| 26360 | NAGWQGQVD |
| 26361 | NALPAQQHY |
| 26362 | IAYHYDQQN |
| 26363 | DATTSTECH |
| 26364 | HAVNFDCKK |
| 26365 | EASIQASWN |
| 26366 | QAIPRENPM |
| 26367 | DAHAFHCQP |
| 26368 | LATTTSYHC |
| 26369 | DASQIPITF |
| 26370 | VAADSRMMI |
| 26371 | PACKEWCFC |
| 26372 | IAHWKCHYP |
| 26373 | AAMHNLFET |
| 26374 | FAQQIINAS |
| 26375 | GAKYIQNTD |
| 26376 | EAGPRKRDV |
| 26377 | PAHINDQYM |
| 26378 | MAHAPPNSD |
| 26379 | MAMWAVWNK |
| 26380 | MAEQMERDF |
| 26381 | SATNCDLYP |
| 26382 | HAKQANGMV |
| 26383 | AADIFAIND |
| 26384 | TATCGIEVE |
| 26385 | AAIGNQTLA |
| 26386 | AAQYMGIMK |
| 26387 | KAPWAPMDS |
| 26388 | NAENESSIG |
| 26389 | QAKMILDGT |
| 26390 | DMRKTWEAC |
| 26391 | TGRIKDAGP |
| 36392 | PWRCMQGYY |
| 26393 | MVRQCDYKM |
| 26394 | AIRTTMCDW |
| 26395 | KSRRGKLTW |
| 26396 | TDRQIDQYH |
| 26397 | TSRSEAADL |
| 26398 | IMRHCYSNG |
| 26399 | KRRDGTRSY |
| 26400 | YIRVGGNNE |
| 26401 | QERSMNAWW |
| 26402 | EKRESFDCG |
| 26403 | DYREKYKCQ |
| 26404 | DHRFKYYDH |
| 26405 | DIRTTGCQT |
| 26406 | DSRTETFFG |
| 26407 | EDRITECGA |
| 26408 | ESRNWDDTD |
| 26409 | ESRTMNMYE |
| 26410 | EVRSTRKNH |
| 26411 | FPRQASSQQ |
| 26412 | FWRQSGKLQ |
| 26413 | HCRWVKYHK |
| 26414 | HTRWPHIWH |
| 26415 | IERVEYAVN |
| 26416 | INRLLMTCD |
| 26417 | INRVEFTTS |
| 26418 | ITRMNSETV |
| 26419 | KIRVYCTPE |
| 26420 | LPRWADVQQ |
| 26421 | MERWWLVEG |
| 26422 | NCRPMEDMR |
| 26423 | QERITGMVM |
| 26424 | QSRTQGNDH |
| 26425 | SDRTAMCAY |
| 26426 | TCRWFAHYS |
| 26427 | TGREVDHTS |
| 26428 | VTRCIPTQW |
| 26429 | WCRPQQPDF |
| 26430 | YVRVIDDKW |
| 26431 | GKRVEDTSC |
| 26432 | WCRCKRFIE |
| 26433 | EIRQFVKGA |
| 26434 | DVRSHDEMT |
| 26435 | WKRTAGVHF |
| 26436 | GHRPKLCDQ |
| 26437 | GPRHIEEDG |
| 26438 | ENRSPNNPA |
| 26439 | ASRSCMTQE |
| 26440 | ECRMAVQSC |
| 26441 | NNRRQFGYV |
| 26442 | TCRYEELAD |
| 26443 | APRDMDACV |
| 26444 | PPRTVARFK |
| 26445 | KERMQVSKA |
| 26446 | TNRCHDDRG |
| 26447 | EFRCRLIGS |
| 26448 | GTRIYGKVS |
| 26449 | KIRDCDGNV |
| 26450 | TLRAEMSFH |
| 26451 | VDRLFRMEY |
| 26452 | KQRDWENFA |
| 26453 | SCRMVYGRA |
| 26454 | FFRICGSYI |
| 26455 | EKRLFDRTY |
| 26456 | ESRQVQDCY |
| 26457 | PWRWHKSAC |
| 26458 | MKRAPTLDY |
| 26459 | AKRECTHIP |
| 26460 | SYRALFNGW |
| 26461 | DLRWLPYDL |
| 26462 | IIRQSEQYH |
| 26463 | IHRVVCRDH |
| 26464 | EVRIQCKID |
| 26465 | WERCLELNQ |
| 26466 | EQRHISRAP |
| 26467 | DSRTQGGLC |
| 26468 | TQREVETSY |
| 26469 | KQRIAYEWQ |
| 26470 | NTRIVCDLS |
| 26471 | KTYTHECVA |
| 26472 | AVATTVMMC |
| 26473 | EKMTHTCLQ |
| 26474 | MQMTQEWMA |
| 26475 | YTKTYVDCF |
| 26476 | KSGTCGYGQ |
| 26477 | SKNTVGIGH |
| 26478 | TLTTDKTYS |
| 26479 | ACGTGVMAL |
| 26480 | YYDTISPDG |
| 26481 | QMLTTAHNL |
| 26482 | IKETWRVYF |
| 26483 | QLDTYMEGR |
| 26484 | ACDTPFQYH |
| 26485 | AEGTGMGNF |
| 26486 | ALNTQEMCN |
| 26487 | ANFTFVRSE |
| 26488 | ATGTGWLDN |
| 26489 | DFSTHPGTE |
| 26490 | DHMTPWERQ |
| 26491 | DMITGMQGS |
| 26492 | DPSTCCCFM |
| 26493 | DSDTMMNHN |
| 26494 | DWSTQEVNY |
| 26495 | EFHTKNRDM |
| 26496 | EMVTEDFWQ |
| 26497 | EWMTQCGWH |
| 26498 | GSHTCHLEV |
| 26499 | GSLTQNDNL |
| 26500 | GSNTIMTCL |
| 26501 | GTGTHEDYD |
| 26502 | IEGTCDRAG |
| 26503 | IQTTEMTSQ |
| 26504 | IWCTSCEIA |
| 26505 | KICTFGRES |
| 26506 | KIITFISPH |
| 26507 | LCCTEECVN |
| 26508 | LESTSMWMY |
| 26509 | LGITMCTTM |
| 26510 | LQSTGIFYA |
| 26511 | LSQTHQKLH |
| 26512 | LTPTINAWH |
| 26513 | MFCTSALRG |
| 26514 | MQETNQFMR |
| 26515 | MVATCFNND |
| 26516 | NMNTGQQPG |
| 26517 | NQGTCTQYS |
| 26518 | NQQTQVCMT |
| 26519 | PEATKPIKM |
| 26520 | RPCIYEYQD |
| 26521 | RWDTLYFDI |
| 26522 | SDETGVPAK |
| 26523 | SILTYQNVG |
| 26524 | SMATNHWAE |
| 26525 | SQFTQLTQA |
| 26526 | THYTDVLVV |
| 26527 | VCFTANLMG |
| 26528 | VGTTTMQSQ |
| 26529 | VHHTNTMAN |
| 26530 | VMSTDISQI |
| 26531 | VQTTYDRKG |
| 26532 | VRWTYMTNA |
| 26533 | VTPTLNRCQ |
| 26534 | YTHTPHLRE |
| 26535 | DMVTVNCID |
| 26536 | DSATFKSAD |
| 26537 | AVETGESAM |
| 26538 | QTNTMQMLS |
| 26539 | EIHTGRPGS |
| 26540 | EPETLWYVG |
| 26541 | ATDTYNLQE |
| 26542 | MEHTMDFGV |
| 26543 | EHITEQDLR |
| 26544 | ETSTHCCKV |
| 26545 | TYDTRNHCL |
| 26546 | PSNTGKFCQ |
| 26547 | KSQTVMYDF |
| 26548 | AECTEDNDD |
| 26549 | QNLTKEDQY |
| 26550 | WVPTPWRTH |
| 26551 | NWCTMYRYW |
| 26552 | AKPTHDVGS |
| 26553 | LFMTYSARN |
| 26554 | DRTTMVGWY |
| 26555 | GEMTRCFHN |
| 26556 | NDCTCRAIM |
| 26557 | IHFTSQSCL |
| 26558 | NSHTIMNGM |
| 26559 | YPDTADIFW |
| 26560 | SSMTAERFT |
| 26561 | SVNTMWYPD |
| 26562 | GRHTAFATG |
| 26563 | PWTTPENYT |
| 26564 | IWITCPYAA |
| 26565 | ACHTGQSGM |
| 26566 | QMVTQLNWE |
| 26567 | QWFTKGVGE |
| 26568 | QIKTHSNVF |
| 26569 | QTGTGHWEF |
| 26570 | NHWTTCDYS |
| 26571 | LMKTSPSYW |
| 26572 | NVWTNIAEM |
| 26573 | RQTTYDCLD |
| 26574 | GQNTTDRSN |
| 26575 | HVNTSCKQF |
| 26576 | NTHTGNDRL |
| 26577 | TYMTNLGDR |
| 26578 | KQKTQNRNA |
| 26579 | WKATPGGQC |
| 26580 | VTMTTKSVW |
| 26581 | TCLSVMNQY |
| 26582 | QSDAVHEPA |
| 26583 | YQERVRKDV |
| 26584 | DDLDVWQTS |
| 26585 | GCNHVHIGQ |
| 26586 | GIANVDDWE |
| 26587 | NQIDVQWLQ |
| 26588 | REVMVCILR |
| 26589 | LCHNVLDYY |
| 26590 | NQPCVNTYW |
| 26591 | TMAEVVINL |
| 26592 | QRMIVDALQ |
| 26593 | RMVRVSVHG |
| 26594 | FTVYVGARE |
| 26595 | ACAGVTWGI |
| 26596 | AFTNVTRWC |
| 26597 | ARNCVGSFC |
| 26598 | AVQSVLGCR |
| 26599 | DHCAVWNHE |
| 26600 | DISPVNRWH |
| 26601 | DSYRVLCLS |
| 26602 | DVIPVPKSC |
| 26603 | EQIHVTMAN |
| 26604 | EVYNVKGSA |
| 26605 | FLEFVHHGT |
| 26606 | FYSSVQRDQ |
| 26607 | GSHQVDILH |
| 26608 | MGDSVLTAH |
| 26609 | MMSNVPGEY |
| 26610 | NHVPVVGAM |
| 26611 | NTLLVDFDF |
| 26612 | PFTNVTRWC |
| 26613 | QNTCVIGAQ |
| 26614 | QQDAVCVSH |
| 26615 | QSFVVQGTY |
| 26616 | QWHAVTTNE |
| 26617 | RLDCVKESP |
| 26618 | RVVEVHAQV |
| 26619 | SDNFVITHS |
| 26620 | SQQFVHHIY |
| 26621 | SYYWVWMAG |
| 26622 | TNNVVIEWG |
| 26623 | TSMCVETQY |
| 26624 | TVIDVVRWH |
| 26625 | VFPDVSFWQ |
| 26626 | VIAQVFKYH |
| 26627 | VIGKVHHDN |
| 26628 | VTNRVAMPI |
| 26629 | VTSLVTNMG |
| 26630 | WYVPVNHLY |
| 26631 | WYVPVNQLY |
| 26632 | RWDFVWYIQ |
| 26633 | GVFYVGHWQ |
| 26634 | HGNMVLVIG |
| 26635 | NSVHVHASN |
| 26636 | NKEAVTGSS |
| 26637 | HPVKVDDFT |
| 26638 | SRLPVHECP |
| 26639 | WTLQVMKIN |
| 26640 | MRVQVFSDA |
| 26641 | SDSKVQWGM |
| 26642 | KSAQVYWHP |
| 26643 | QFMGVSSHS |
| 26644 | LFIKVKDTS |
| 26645 | HFHEVAWGS |
| 26646 | ALDRVSMAC |
| 26647 | WCEHVIMNP |
| 26648 | TKQPVHFLG |
| 26649 | YGNSVTCTS |
| 26650 | ESCLVRRGW |
| 26651 | EWEGVSQFR |
| 26652 | AEHMVVDHE |
| 26653 | TCNKVANMY |
| 26654 | GSYIVQNHC |
| 26655 | HHFHVNLDI |
| 26656 | KTSNVMDQM |
| 26657 | NVEDVGMIE |
| 26658 | VDMGVHVGS |
| 26659 | GGSYVSAPD |
| 26660 | VEDRVFACC |
| 26661 | WKAIVLEYW |
| 26662 | ASVMVAITG |
| 26663 | DSQSVGDSF |
| 26664 | INMPVSKDQ |
| 26665 | YRLHVWMKV |
| 26666 | YWEKVPCMK |
| 26667 | SGQPVDCMF |
| 26668 | FNWEVRAYI |
| 26669 | ACDQVNTVQ |
| 26670 | QTNQVVVVE |
| 26671 | FMMPVVDNY |
| 26672 | WCEAVGDYA |
| 26673 | SGFFVHTSN |
| 26674 | HFSHVDQCM |
| 26675 | NRCGVSKCC |
| 26676 | TSTFANEFT |
| 26677 | QRPIANDAM |
| 26678 | VQDKINYSY |
| 26679 | QTGHFNQRG |
| 26680 | EGTLWNVCV |
| 26681 | GVIPLNMPS |
| 26682 | MWTEFNEDG |
| 26683 | KMTNSNENS |
| 26684 | GRAHGNVCI |
| 26685 | QCEYSNCCY |
| 26686 | DVISRNGRC |
| 26687 | NMCEANHES |
| 26688 | EVAGENGNY |
| 26689 | YTGHTNSGR |
| 26690 | ACDFGNLGR |
| 26691 | ADVVTNINL |
| 26692 | AIEASNGGG |
| 26693 | ASESPNESG |
| 26694 | ATCQSNKCP |
| 26695 | ATTRHNTEA |
| 26696 | DGWSGNKMA |
| 26697 | DMKLQNDHP |
| 26698 | DMLKHNNAR |
| 26699 | DNNAMNDQQ |
| 26700 | DQQYSNVCC |
| 26701 | DRIWINWVG |
| 26702 | DVQKKNDKS |
| 26703 | EKDEINRAW |
| 26704 | ERFMANTGL |
| 26705 | ESSDTNYRQ |
| 26706 | EYHGLNLMA |
| 26707 | EYVWLNCGE |
| 26708 | FMHAGNLDA |
| 26709 | FVGCLNHYL |
| 26710 | GHIKLNVLP |
| 26711 | GIMQLNTEP |
| 26712 | GNCFQNKSN |
| 26713 | HPHVHNQKP |
| 26714 | HTVDGNVFP |
| 26715 | IDAVKNRND |
| 26716 | KEMAKNYEP |
| 26717 | KQDEWNCDR |
| 26718 | KQNCANLCE |
| 26719 | LLSDENTEC |
| 26720 | MKMEENSAS |
| 26721 | MLVQENNSY |
| 26722 | NLERCNTMM |
| 26723 | NQFFYNLQN |
| 26724 | NSCYMNSIE |
| 26725 | NYTQCNFSN |
| 26726 | QMAWENWFG |
| 26727 | QSCSDNYSG |
| 26728 | RCDQMNLHF |
| 26729 | RGDALNMVP |
| 26730 | SSFLLNHQY |
| 26731 | SWVFCNVGQ |
| 26732 | TTLNTNCSH |
| 26733 | YVYRMNGNC |
| 26734 | LMQWYNRCW |
| 26735 | VTEVFNQDV |
| 26736 | GNKLKNDQM |
| 26737 | YMGSTNIWM |
| 26738 | QLEECNPLS |
| 26739 | LVDCSNTCQ |
| 26740 | KLYGLNHSC |
| 26741 | SGALKNREE |
| 26742 | MIKLINCVN |
| 26743 | QPSRFNTAD |
| 26744 | MQEHKNFYG |
| 26745 | TTYPHNTHG |
| 26746 | IYKWDNKFH |
| 26747 | QRTQCNFSI |
| 26748 | KYWCKNEWD |
| 26749 | IEHCSNRYA |
| 26750 | MINWGNKCT |
| 26751 | VPLGFNFAG |
| 26752 | RENGYNATM |
| 26753 | QKSMLNSIQ |
| 26754 | EGQYWNYMT |
| 26755 | TFIYLNHFG |
| 26756 | DYFQYNEAP |
| 26757 | SCQLLNDGG |
| 26758 | AHEDPNTWC |
| 26759 | KNELENVIN |
| 26760 | VGGYSNQWV |
| 26761 | WDNWSNTQI |
| 26762 | HQYVHNWRQ |
| 26763 | VHHKTNRSY |
| 26764 | TMWEDNQNM |
| 26765 | DCDPYNMVD |
| 26766 | QISAWNEFF |
| 26767 | GNEDCNLAC |
| 26768 | MIMGYNFEF |
| 26769 | LPSHCNLGS |
| 26770 | TIDLSNKVT |
| 26771 | TTTITNRLC |
| 26772 | QCTAHNTCM |
| 26773 | DSMVYNRPQ |
| 26774 | KIQPTNHHE |
| 26775 | KGLIYNHHT |
| 26776 | NYGCHNCKY |
| 26777 | QEGRFAMSH |
| 26778 | RTGDAGMSP |
| 26779 | ILLPDDMLK |
| 26780 | HLDCLKMEM |
| 26781 | YSNSIQMSF |
| 26782 | YREHRTMSD |
| 26783 | GWYQKCMGD |
| 26784 | PTNYGWMWR |
| 26785 | GCYWNMMQP |
| 26786 | PNGHYWMIP |
| 26787 | ADYNNEMIQ |
| 26788 | AGSQMHMLS |
| 26789 | ASWSPQMNT |
| 26790 | ATGNKTMSY |
| 26791 | DLNQCQMYC |
| 26792 | EEVHSAMEG |
| 26793 | EGPALWMNT |
| 26794 | EGVHLPMGN |
| 26795 | EMEMEEMVG |
| 26796 | EQGYRVMSF |
| 26797 | EVFHDRMMG |
| 26798 | FCSEMVMNQ |
| 26799 | GNSKNDMHC |
| 26800 | GQCNTMMWQ |
| 26801 | HINAAVMHE |
| 26802 | IEPDCPMIP |
| 26803 | KIEAEEMHA |
| 26804 | KLVSKTMHH |
| 26805 | MMESALMDR |
| 26806 | NQDIMVMGQ |
| 26807 | NWACMGMGI |
| 26808 | PDWYNWMED |
| 26809 | PMKSPVMKD |
| 26810 | PQEEFMMTQ |
| 26811 | QELYLPMGC |
| 26812 | RFKHQMMMH |
| 26813 | RMDMKEMWG |
| 26814 | SQQLECMGP |
| 26815 | SRAEEYMPW |
| 26816 | TRVPSMMYK |
| 26817 | TYAANIMHV |
| 26818 | VCTHYVMQR |
| 26819 | VMKPCFMTP |
| 26820 | SKNLYTMAG |
| 26821 | LDGPIGMGT |
| 26822 | FCNYAVMSP |
| 26823 | TLPKMHMWP |
| 26824 | TKPLEDMPT |
| 26825 | ESAEPRMIP |
| 26826 | AEVPYVMQQ |
| 26827 | QHSRAYMWY |
| 26828 | TNFPTSMHG |
| 26829 | YISEYVMMV |
| 26830 | TTTNQFMFQ |
| 26831 | TVGIRHMKD |
| 26832 | QCFSTEMCQ |
| 26833 | ELEPDGMHV |
| 26834 | THARFKMKS |
| 26835 | YSVQAYMAN |
| 26836 | FQWRTEMNN |
| 26837 | PSIKHGMPK |
| 26838 | DVDFLKMHC |
| 26839 | IHSFMAMAQ |
| 26840 | ENCMSRMKP |
| 26841 | MLMHADMTQ |
| 26842 | FTEPMCMQG |
| 26843 | YHCCFAMQS |
| 26844 | PGGCYRMME |
| 26845 | SQKQFSMQN |
| 26846 | HMLHAIMES |
| 26847 | TNGVQIMHV |
| 26848 | ETEIRQMDG |
| 26849 | YSNSTIMNL |
| 26850 | YVKMCSMRN |
| 26851 | GTVECEMNA |
| 26852 | FWGMESMSC |
| 26853 | ASGHMTMCM |
| 26854 | NTSELLMAQ |
| 26855 | SEDCMDMYF |
| 26856 | STEFWVQHT |
| 26857 | WSSREYWHK |
| 26858 | TVMSAWSHM |
| 26859 | ETHYPYNHI |
| 26860 | FQIRFDRHH |
| 26861 | TSSHDEAHK |
| 26862 | TSYLRKIHS |
| 26863 | TRYRMRYHG |
| 26864 | GIWRTREHY |
| 26865 | RGSLMSFHE |
| 26866 | SYAAFLHHG |
| 26867 | LQFLTVVHL |
| 26868 | GVSRLPYHA |
| 26869 | AHFFEIPHS |
| 26870 | AILVEFPHG |
| 26871 | AWTPSHGHP |
| 26872 | DGCKMFNHC |
| 26873 | DGYIYHTHL |
| 26874 | DIGNQDRHS |
| 26875 | EDMPAVDHN |
| 26876 | EFDQYMTHC |
| 26877 | ERVPRYVHH |
| 26878 | ESVMQANHT |
| 26879 | EVCIYCSHV |
| 26880 | GEDEAWQHT |
| 26881 | GIVVADRHV |
| 26882 | GSLPWKNHV |
| 26883 | HIADKSTHR |
| 26884 | HILYAWWHS |
| 26885 | HSPFFMNHA |
| 26886 | HTYPLDHHF |
| 26887 | IYSDNQYHH |
| 26888 | KIVECVSHI |
| 26889 | KSMWSERHC |
| 26890 | KWWWAYTHK |
| 26891 | LIAMRIVHD |
| 26892 | LYCSPPNHC |
| 26893 | MEKRCGVHQ |
| 26894 | MIACDKVHY |
| 26895 | MMAKHTNHE |
| 26896 | NCVQWKYHQ |
| 26897 | NGCCLMTHL |
| 26898 | NYICTRKHP |
| 26899 | NYQNKLLHG |
| 26900 | QHMIREAHG |
| 26901 | QLSMLGVHF |
| 26902 | SCNMCVSHE |
| 26903 | SHKFMNYHW |
| 26904 | SHLNNITHQ |
| 26905 | SRNGSKRHA |
| 26906 | STKPWPEHN |
| 26907 | SWFECFHHE |
| 26908 | TIMMGVEHM |
| 26909 | VMFYTVHHE |
| 26910 | YSMEEHFHN |
| 26911 | YYVFMQLHA |
| 26912 | HWELIRCHD |
| 26913 | YEICKHGHF |
| 26914 | TCNVSWEHE |
| 26915 | HGNSFLVHW |
| 26916 | YITCQYSHH |
| 26917 | QVVIDPAHY |
| 26918 | RVWSLEWHL |
| 26919 | KYSPFQEHN |
| 26920 | YPQPCSCHS |
| 26921 | QVWSDGQHV |
| 26922 | SVTYHEWHP |
| 26923 | TCNVSWKHE |
| 26924 | MLFDFEEHN |
| 26925 | QTMCITIHP |
| 26926 | KTEKWASHE |
| 26927 | FCKCFMKHC |
| 26928 | QMSWGKYHQ |
| 26929 | KYINFDHHQ |
| 26930 | MKGYFVHHS |
| 26931 | NKPAMMQHE |
| 26932 | ITTDATGHF |
| 26933 | RDQKGLGHM |
| 26934 | MYLSTPVHE |
| 26935 | DVKYATLHD |
| 26936 | MYAGWLNHG |
| 26937 | AVIHEKPHG |
| 26938 | GTIRMPEHR |
| 26939 | QKHMILCHF |
| 26940 | QEAGYTRHN |
| 26941 | AKEHMPHHM |
| 26942 | TKQFFTAHC |
| 26943 | AFGLTTGHT |
| 26944 | YLESKTIHA |
| 26945 | TRDPFWHHD |
| 26946 | GVWMQGFHP |
| 26947 | AVQMQQQHI |
| 26948 | VKAWWHDHQ |
| 26949 | GIHQLIHHC |
| 26950 | TRQWMCVHC |
| 26951 | ILANPIRQI |
| 26952 | KHNPSRHDI |
| 26953 | NFYLSGFLI |
| 26954 | KQCSLAPTI |
| 26955 | GFHNTKLPI |
| 26956 | TILQQMEEI |
| 26957 | ACNPFWHSI |
| 26958 | AFTETKCSI |
| 26959 | AGSHFGRRI |
| 26960 | EVTRTQVQI |
| 26961 | FYLCNYGAI |
| 26962 | LEAKWQCSI |
| 26963 | LWMWQLSCI |
| 26964 | MKDRMHQVI |
| 26965 | NVAQPDFQI |
| 26966 | QITSGCHCI |
| 26967 | VTCPIQRTI |
| 26968 | VTHKLVDAI |
| 26969 | YPHKKCRCI |
| 26970 | YSLEKRFQI |
| 26971 | EPLYSWVGI |
| 26972 | ASIATMDRI |
| 26973 | TCGHTRFFI |
| 26974 | EHKGCMQAI |
| 26975 | VNDDYECGI |
| 26976 | NMPSLRTRI |
| 26977 | FKIEWSQDI |
| 26978 | EFVLGCQGI |
| 26979 | WDAYYTNGI |
| 26980 | QSMVACYTI |
| 26981 | ATNKYANAI |
| 26982 | WHFLMIFYI |
| 26983 | QQEAYILRI |
| 26984 | GGALARSSI |
| 26985 | EFDWLLGTI |
| 26986 | RRTDHGEPI |
| 26987 | WPNIKHQPI |
| 26988 | HQCQSRSYI |
| 26989 | EICMRSGFI |
| 26990 | IECSPRESI |

### Example 9

### AAV5 Variants with Tissue Tropism in Skeletal Muscle

[0898] This example describes engineered AAV5 variants with tissue tropism in skeletal muscle that were discovered using the methods and systems described in EXAMPLE 1-EXAMPLE 2.

[0899] CNS, liver, skeletal muscle, heart, lung, spleen, lymph node, bone marrow, mammary gland, skin, adrenal gland, thyroid, colon, sciatic nerve, and spinal cord tissues were analyzed to identify amino acid residues in the AAV5 VP1 581-589 region that drive skeletal muscle tropism. The results are shown in FIG. 18C which shows the positional frequency of each amino acid in the 581 to 589 region of AAV5 VP1 in skeletal muscle tissue as compared to all other analyzed tissues, wherein the capsid polypeptide has the sequence of SEQ ID NO: 2. The position (‘Xaan’, n=1-9) is denoted on the x-axis and amino acid residues are denoted on the y-axis. The frequency of a particular amino acid residue in a particular position is indicated in the heatmap as intensity. Darker squares indicate a higher frequency of a particular amino acid in a particular position and lighter squares indicate a lower frequency of a particular amino acid in a particular position.

[0900] The frequency of a given amino acid residue occurring at a specified position corresponding to position 581 to position 589 of SEQ ID NO: 1 (generalized in SEQ ID NO: 2) in variants identified in skeletal muscle over the frequency of that given amino acid residue occurring at the specified position in variants identified in all other harvested tissues was analyzed to identify a set of sequence rules for capsids that preferentially target skeletal muscle tissue. With reference to TABLE 17 below, and SEQ ID NO: 2 (AAV5 VP1), the following amino acids can, thus, be independently mutated, in any combination, at any one or more positions Xaa1-Xaa9, to provide a VP1 capsid with enhanced skeletal muscle tropism as compared wildtype AAV5 VP1 capsid (SEQ ID NO: 1), where skeletal muscle tropism here refers to properties that are preferred for skeletal muscle transduction over properties that are preferred for transduction of all other harvested tissues.

TABLE 17
Skeletal Muscle Tropism Rules

Xaa1 is selected from A, E, H, M, P, Q, or S
Xaa1 is selected from P or Q
Xaa1 is Q
Xaa2 is selected from F, H, I, T, or V
Xaa2 is selected from T or V
Xaa2 is V
Xaa3 is selected from A, G, I, K, M, Q, R, S, T, or V
Xaa3 is selected from A, L, P, R, or T
Xaa3 is selected from L, P, or T
Xaa3 is P
Xaa4 is selected from D, E, G, P, or S
Xaa4 is selected from D, E, or S
Xaa4 is E
Xaa5 is selected from H, L, M, P, or V
Xaa5 is selected from L, M, or V
Xaa5 is L
Xaa6 is selected from E, H, N, or P
Xaa6 is P
Xaa7 is selected from A, H, N, Q or T
Xaa7 is H
Xaa8 is selected from I, K, M, P, or W
Xaa8 is selected from I, P, or W
Xaa8 is P
Xaa9 is selected from A, I, M, P, or V
Xaa9 is selected from A, M, or P
Xaa9 is M

[0901] TABLE 18 below provides sequences of the 581 to 589 region for variant AAV VP1 capsid polypeptides that were found in skeletal muscle tissue and comport to one or more of the rules provided in TABLE 17. The present disclosure, thus, provides for rAAVs composed of engineered AAV5 VP1 capsid polypeptides having a SEQ ID NO: 2, wherein the Xaa1 to Xaa9 region is any one of SEQ ID NO: 28991-SEQ ID NO: 29990, as disclosed in TABLE 18. Also encompassed herein are rAAVs composed of engineered AAV5 VP2 capsid polypeptides and engineered AAV5 VP3 capsid polypeptides having the sequences disclosed in the below table at the regions in AAV5 VP2 (amin acid residues 445 to 453) and AAV5 VP3 (amino acid residues 389-397) corresponding to the amino acids in the AAV5 VP1 581 to 589 region.

TABLE 18
Sequences of the 581 to 589 Region
in AAV5 VP1 Capsid Polypeptide that
Drive Skeletal Muscle Tissue Tropism

| SEQ | |
|---|---|
| ID | 581-589 |
| NO | Sequence |
| 28991 | QAEIVCNSK |
| 28992 | QANGSMDHH |
| 28993 | QANWWVDAG |
| 28994 | QARTMDERP |
| 28995 | QAWEGCAGE |
| 28996 | QCAFIPNSA |
| 28997 | QCGNVMLMP |
| 28998 | CICHFLUCK |
| 28999 | QCMCVEIAA |
| 29000 | QCNAQAELF |
| 29001 | QCQLTVSMS |
| 29002 | QCQWQKMEH |
| 29003 | QECYEKMEC |
| 29004 | QEHCMNYGP |
| 29005 | QEMFIQARG |
| 29006 | QENLTNGDN |
| 29007 | QFIMLGETN |
| 29008 | QHVQIMAGQ |
| 29009 | QIEGVNHAN |
| 29010 | QIERYWHAT |
| 29011 | QIHGVTIWQ |
| 29012 | QIHIWDGQS |
| 29013 | QIHLRECSF |
| 29014 | QIRAMLDSS |
| 29015 | QISIADCYN |
| 29016 | QIWNEVHAQ |
| 29017 | QKNEYWTAF |
| 29018 | QKNLVPSYW |
| 29019 | QKSFPGDGI |
| 29020 | QLMVYMYES |
| 29021 | QMEYTWMGG |
| 29022 | QMFQDHNQP |
| 29023 | QMHHWDVWG |
| 29024 | QMQPTCGQF |
| 29025 | QNENVVWMS |
| 29026 | QPMHQQVTF |
| 29027 | QPMSFNWKN |
| 29028 | QPNYVEHCG |
| 29029 | QPTMHMPRG |
| 29030 | QPVVTWQSH |
| 29031 | QQITTEHSG |
| 29032 | QQLCQLDRK |
| 29033 | QQYLCMSSD |
| 29034 | QSCATTSAQ |
| 29035 | QSFQAPRLA |
| 29036 | QSHRVMDIP |
| 29037 | QSHYCHTFS |
| 29038 | QSMSYQKEG |
| 29039 | QSNLKSMYC |
| 29040 | QSSSMACDN |
| 29041 | QSSWAWMAE |
| 29042 | QTGNWWQYG |
| 29043 | QTIFWLNVG |
| 29044 | QTISGFQKD |
| 29045 | QTLHLHTNM |
| 29046 | QTMRLEPYH |
| 29047 | QTNLLVDTS |
| 29048 | QTTAILKLD |
| 29049 | QTTLKMKED |
| 29050 | QVETPWSGA |
| 29051 | QVQNVWCPK |
| 29052 | QVVTMPDPL |
| 29053 | QVWDMNDNA |
| 29054 | QWERGANYK |
| 29055 | QWLLLCHGN |
| 29056 | QYERLHTNM |
| 29057 | QYIPFERYW |
| 29058 | QYMTQAKKD |
| 29059 | QPSRFNTAD |
| 29060 | QKTANGWCH |
| 29061 | QMCVWMTRQ |
| 29062 | QAKMILDGT |
| 29063 | QTAEWYCGA |
| 29064 | QTNGHPYFP |
| 29065 | QFAQLWCAK |
| 29066 | QCTAHNTCM |
| 29067 | QAADSASAS |
| 29068 | QADRDGCYA |
| 29069 | QAGWINTLN |
| 29070 | QATFHATQK |
| 29071 | QCADKNVLE |
| 29072 | QCFNTCPCD |
| 29073 | QCKTVIMGA |
| 29074 | QDFQFDEVW |
| 29075 | QDTMMTYMS |
| 29076 | QDWFNLAHW |
| 29077 | QEEHQKFGM |
| 29078 | QEENENMGC |
| 29079 | QETQAAMRQ |
| 29080 | QEVTTTDPQ |
| 29081 | QFMVKNSNH |
| 29082 | QFNLTDYFH |
| 29083 | QFRGLEHMV |
| 29084 | QFVSTHHEA |
| 29085 | QGNTCHKDA |
| 29086 | QGRIYDQAT |
| 29087 | QGSWNFCPP |
| 29088 | QHAPLHNFI |
| 29089 | QHCPIVEQD |
| 29090 | QHREIVKLQ |
| 29091 | QHSTDSGDK |
| 29092 | QHVELQVMK |
| 29093 | QIACLQKQG |
| 29094 | QIHDQLKGN |
| 29095 | QIQEVQSSV |
| 29096 | QISIGCNSQ |
| 29097 | QISSSRDMY |
| 29098 | QITDWENFH |
| 29099 | QKDPLHVHS |
| 29100 | QKDQVWHAW |
| 29101 | QKEEQPKMG |
| 29102 | QKPELEQGP |
| 29103 | QLCNPLAPM |
| 29104 | QLPGIKMWD |
| 29105 | QMFGFQPGN |
| 29106 | QMHPMIRFF |
| 29107 | QMHSMTNCN |
| 29108 | QMRIWRMMW |
| 29109 | QMVPATPCN |
| 29110 | QNAFMDLLA |
| 29111 | QNCFRYECP |
| 29112 | QNETRQHCW |
| 29113 | QNMPVMQYR |
| 29114 | QNRPTECIG |
| 29115 | QNVKEYSAS |
| 29116 | QPADPNDGG |
| 29117 | QPAPGHRGQ |
| 29118 | QPILPNIWE |
| 29119 | QPQVIYDVR |
| 29120 | QQLFWDIGV |
| 29121 | QQPLMRTEE |
| 29122 | QQSTKMKWH |
| 29123 | QSDKKNRCA |
| 29124 | QSDQLSRIQ |
| 29125 | QSELGHELP |
| 29126 | QSLWQQLSM |
| 29127 | QSQPEWNEK |
| 29128 | QSSTDQEAW |
| 29129 | QSTENNWYS |
| 29130 | QSVQPCDDP |
| 29131 | QSVSQLTCC |
| 29132 | QTAATMTED |
| 29133 | QTAVKNIDN |
| 29134 | QTCNAEVFT |
| 29135 | QTCNCGKAF |
| 29136 | QTGQYATLK |
| 29137 | QTIPREAEC |
| 29138 | QTNLPVVKN |
| 29139 | QTQTWERQD |
| 29140 | QTWCKRIHF |
| 29141 | QTYMPHHAH |
| 29142 | QVCSMFGNA |
| 29143 | QVINVHGRW |
| 29144 | QVIRHECQY |
| 29145 | QVSNTATCL |
| 29146 | QVTQVQALG |
| 29147 | QVVEKHENR |
| 29148 | QVYHYCRRH |
| 29149 | QWHVGGTSA |
| 29150 | QWHVGGTSA |
| 29151 | QWRNPIYGP |
| 29152 | QWTQGYASP |
| 29153 | QYEWLNTCD |
| 29154 | QYFRFGFDP |
| 29155 | QYGNSLNAG |
| 29156 | QYVPAGYFA |
| 29157 | QADRIGQCL |
| 29158 | QANAMAEFP |
| 29159 | QCACTITMK |
| 29160 | QCASTMSMT |
| 29161 | QCELLNVLC |
| 29162 | QCIEYEATE |
| 29163 | QDGMEAKNR |
| 29164 | QDIKKWCSE |
| 29165 | QGFMEQQHT |
| 29166 | QHQAEMEGF |
| 29167 | QHTEMDCSN |
| 29168 | QIGGFQYYY |
| 29169 | QIKLQQWYD |
| 29170 | QKDEYLNWH |
| 29171 | QKDMHAYPL |
| 29172 | QKPRWFCCP |
| 29173 | QMSSGEWVR |
| 29174 | QNELRESYE |
| 29175 | QSKPMEHVQ |
| 29176 | QTDWSMFLP |
| 29177 | QTYFPWHWF |
| 29178 | QVCSRWTKS |
| 29179 | QWVEWPFPC |
| 29180 | AVEKVMEVQ |
| 29181 | AVKLNQTYK |
| 29182 | AVNGNVYGR |
| 29183 | CVEGMVFVP |
| 29184 | CVGQYNNDM |
| 29185 | CVLRQYDGG |
| 29186 | CVNVRGRSS |
| 29187 | CVRQKAETE |
| 29188 | CVTAASPWN |
| 29189 | DVAERHMHE |
| 29190 | DVCMATIGQ |
| 29191 | DVDPLPCEP |
| 29192 | DVGYQMKKQ |
| 29193 | DVICYSDHR |
| 29194 | DVISMSLMG |
| 29195 | DVLIDHDFF |
| 29196 | DVMHFLDLA |
| 29197 | DVQNMDIGV |
| 29198 | DVRDDEFGN |
| 29199 | EVCGMECSG |
| 29200 | EVDDKPSGH |
| 29201 | EVEYEAKTV |
| 29202 | EVFVADNNI |
| 29203 | EVGAWGASY |
| 29204 | EVKAANWQV |
| 29205 | EVQHHYVSG |
| 29206 | EVRMCNATH |
| 29207 | EVVKKPWDG |
| 29208 | FVFTHIDDY |
| 29209 | GVEPISRAA |
| 29210 | GVGQKCGHQ |
| 29211 | GVLAQQAQW |
| 29212 | GVLLPHHWM |
| 29213 | HVNQWGRYG |
| 29214 | HVQSIIHAE |
| 29215 | IVDWSNVLH |
| 29216 | IVGMANQEH |
| 29217 | IVHSLDAPG |
| 29218 | IVSFGYAQG |
| 29219 | IVSYLKTND |
| 29220 | IVYDMMADV |
| 29221 | KVDTQWKSV |
| 29222 | KVRPPCIYI |
| 29223 | LVDPHRPMM |
| 29224 | LVNHGDSYC |
| 29225 | LVTGNSWEQ |
| 29226 | MVIGTSLLA |
| 29227 | NVMGHDWVH |
| 29228 | NVQWFEQNI |
| 29229 | NVVWGMLYG |
| 29230 | NVYINLASS |
| 29231 | PVPHNYQWW |
| 29232 | PVRHCSVWF |
| 29233 | RVCTFCCCF |
| 29234 | RVDFNVYCK |
| 29235 | RVFMLEMYA |
| 29236 | RVNMNDIGE |
| 29237 | SVAMRQLDN |
| 29238 | SVFWPEHNP |
| 29239 | SVHICEDGW |
| 29240 | SVLSFVAQK |
| 29241 | SVNPYPHGI |
| 29242 | SVRTHMHLP |
| 29243 | SVTFDVGGP |
| 29244 | SVYICNMDQ |
| 29245 | TVAVNEHLA |
| 29246 | TVFVYDNPG |
| 29247 | TVLDAWTAE |
| 29248 | TVNSNRTGD |
| 29249 | TVNVFPIHE |
| 29250 | TVYDVNAFS |
| 29251 | VVMDAHCNL |
| 29252 | VVTDYMVGA |
| 29253 | WVKFANDCQ |
| 29254 | WVRMRNLEK |
| 29255 | YVAGLFNNR |
| 29256 | YVKFSVNIN |
| 29257 | YVQLRIADD |
| 29258 | YVQTTAHSS |
| 29259 | MVTERKPWS |
| 29260 | SVLHVGALA |
| 29261 | WVHPYSYCA |
| 29262 | DVKSWAVCD |
| 29263 | LVVTKFTYV |
| 29264 | RVNGSTCRH |
| 29265 | AVESSKGYV |
| 29266 | AVGCFGKEP |
| 29267 | AVMEYILYK |
| 29268 | AVNDQWQWG |
| 29269 | AVQLGNSMF |
| 29270 | AVSAPLSKE |
| 29271 | AVVQGMLYP |
| 29272 | CVAHFDQCF |
| 29273 | CVDYHRREQ |
| 29274 | CVESGTGHQ |
| 29275 | CVIHRMDMP |
| 29276 | CVMNVIWDA |
| 29277 | CVNETDTAA |
| 29278 | CVSYNPSIR |
| 29279 | CVTINTISG |
| 29280 | DVNCCITCG |
| 29281 | DVNTYANRD |
| 29282 | DVRAMTNDW |
| 29283 | DVVEKCSWF |
| 29284 | DVVHMWWWS |
| 29285 | EVACYDMTG |
| 29286 | EVAMMINNN |
| 29287 | EVGTECQWL |
| 29288 | EVGTNHKQH |
| 29289 | EVKMFYKQY |
| 29290 | EVLDHISAG |
| 29291 | EVREEGVLT |
| 29292 | EVTHQLKNA |
| 29293 | EVTVFIAPW |
| 29294 | EVWNEESMF |
| 29295 | EVYIKQQYY |
| 29296 | FVPPSCYNY |
| 29297 | GVAAQPCSP |
| 29298 | GVAPKPDFE |
| 29299 | GVASCNRFD |
| 29300 | GVMPKYFFG |
| 29301 | GVNAKQQTR |
| 29302 | GVYFMCDFM |
| 29303 | HVQTAEWIP |
| 29304 | IVDWPANRY |
| 29305 | IVIGRWYSC |
| 29306 | IVMRALANN |
| 29307 | IVMSFHRNH |
| 29308 | IVTDCRDGL |
| 29309 | IVTTKQLCR |
| 29310 | KVDDHICPG |
| 29311 | KVGWIEWYA |
| 29312 | KVYPLDFKM |
| 29313 | LVDGCVWMH |
| 29314 | LVDYTGNED |
| 29315 | LVFYTSVRG |
| 29316 | LVTKEDCAY |
| 29317 | MVAVDGTEP |
| 29318 | MVDMKQLMF |
| 29319 | MVEANEHAM |
| 29320 | MVEIHPDYD |
| 29321 | MVHLRGDGE |
| 29322 | NVDSSPFLT |
| 29323 | NVHGIMWDN |
| 29324 | NVQTKMHLP |
| 29325 | NVTPHEFQA |
| 29326 | NVTTIEPAH |
| 29327 | NVVQVTQNA |
| 29328 | NVVSKDHGG |
| 29329 | NVWHGYWLN |
| 29330 | PVAHVPFGM |
| 29331 | PVTAPGFAH |
| 29332 | RVYNPMYWH |
| 29333 | SVAQEMEST |
| 29334 | SVCEDAFFD |
| 29335 | SVDAQAFVY |
| 29336 | SVDQESAYR |
| 29337 | SVERHGSDK |
| 29338 | SVHQWCDVT |
| 29339 | SVIAFHIHV |
| 29340 | SVLHTMMVK |
| 29341 | SVNEVIDQV |
| 29342 | SVNQESAYR |
| 29343 | SVNSKNHTQ |
| 29344 | SVSYGNHSV |
| 29345 | SVTDRDHQY |
| 29346 | TVAPQSSLW |
| 29347 | TVCMDANFK |
| 29348 | TVKDLRVVT |
| 29349 | TVLWKHDKA |
| 29350 | TVSQCSFFP |
| 29351 | TVTLSEKWH |
| 29352 | TVYGFPNEV |
| 29353 | VVGVAPVMP |
| 29354 | WVKAVTLEQ |
| 29355 | WVVQTFTFD |
| 29356 | YVDCRNDAG |
| 29357 | YVELYEVDQ |
| 29358 | YVRDTALCF |
| 29359 | YVTSALDTF |
| 29360 | CVSFDACFA |
| 29361 | DVDRLCSIP |
| 29362 | DVSQTNFSE |
| 29363 | DVVWSTKDQ |
| 29364 | DVWSSISDS |
| 29365 | EVDGGGKMQ |
| 29366 | EVFLAGLMS |
| 29367 | EVLLAGIGP |
| 29368 | EVTPMYCSD |
| 29369 | FVRGNLQTP |
| 29370 | GVCHNTGCT |
| 29371 | HVFELDRTC |
| 29372 | HVIPDPRPA |
| 29373 | IVETDGSLM |
| 29374 | EVKFECCNH |
| 29375 | LVYHSFVHE |
| 29376 | MVCREQENG |
| 29377 | MVEVATMPH |
| 29378 | RVDDYERTF |
| 29379 | SVIHYSWAL |
| 29380 | SVSAWNPMS |
| 29381 | DKPFEWDLL |
| 29382 | EQPHDPSST |
| 29383 | FDPNRSQDV |
| 29384 | GEPKCVMME |
| 29385 | GGPDIKHYI |
| 29386 | GGPSEQPRP |
| 29387 | HHPKFAEKG |
| 29388 | HHPQVLRGM |
| 29389 | HNPVWVQQE |
| 29390 | ICPLEQYEM |
| 29391 | IGPMGQYGR |
| 29392 | IMPEAKNTP |
| 29393 | KCPDEMNNI |
| 29394 | KTPFTRWLR |
| 29395 | KTPLMVASI |
| 29396 | MLPSFGDEM |
| 29397 | NGPQGLMAC |
| 29398 | NNPTNTEAR |
| 29399 | PCPDHHRWL |
| 29400 | PLPCPRSGY |
| 29401 | RIPPMMWIL |
| 29402 | SSPPWGHPF |
| 29403 | SSPSHAEYL |
| 29404 | WMPLYCMHV |
| 29405 | WQPSHAYHF |
| 29406 | FCPCGQEMC |
| 29407 | SWPLPERPS |
| 29408 | LSPWPQTDQ |
| 29409 | EQPNMGDYG |
| 29410 | MLPLEMKNL |
| 29411 | FPPREGPEW |
| 29412 | AHPHCCRHP |
| 29413 | CAPQFNWQY |
| 29414 | CQPRYHWCY |
| 29415 | ESPNWGYMD |
| 29416 | GQPQQIWQA |
| 29417 | HHPHQANIY |
| 29418 | KDPLGESKW |
| 29419 | KMPLKQADF |
| 29420 | MFPQAPADG |
| 29421 | MFPVCQDRD |
| 29422 | MGPMKPMMD |
| 29423 | NPPLCQEYG |
| 29424 | PGPEQITAG |
| 29425 | PPPWFQSRS |
| 29426 | PQPCSWPAQ |
| 29427 | SGPWCGSAW |
| 29428 | SSPNVHDLD |
| 29429 | SWPFSWLIV |
| 29430 | TKPDSANWD |
| 29431 | VNPQEEFFD |
| 29432 | VQPPYIAMV |
| 29433 | VSPRDLHHM |
| 29434 | YFPQESENS |
| 29435 | YQPNWRSQT |
| 29436 | AHPWCLTPN |
| 29437 | DNPWLLTFR |
| 29438 | KQPISASPI |
| 29439 | MDPLGPAAD |
| 29440 | NEPQICRKC |
| 29441 | NQPGRFRTV |
| 29442 | VPPRMTIEL |
| 29443 | YSPTTNGGP |
| 29444 | ALSEHFWNV |
| 29445 | ANVELMTIK |
| 29446 | ATHEQGGQL |
| 29447 | CFCECSFCE |
| 29448 | CFDEFMLWG |
| 29449 | CITELINYT |
| 29450 | CLAEQITCQ |
| 29451 | CRSEGHIHT |
| 29452 | DGMEWDLCG |
| 29453 | DHVEIQHMS |
| 29454 | DTTEQMQIY |
| 29455 | EACEGAMLE |
| 29456 | ECEEPSLMK |
| 29457 | EEVESGHFG |
| 29458 | EILEEQESC |
| 29459 | ELIEKVYRW |
| 29460 | FTREDKDRC |
| 29461 | GAVEKMVQE |
| 29462 | GMEEVEREG |
| 29463 | HGEEIHWKD |
| 29464 | IWTEAAENC |
| 29465 | KGEEMYECG |
| 29466 | LREEYKLAG |
| 29467 | LTCENQQIP |
| 29468 | LWTESVMGN |
| 29469 | MALERCDVD |
| 29470 | MEEEYMFTA |
| 29471 | MMSEQCHLT |
| 29472 | MNIERDRNH |
| 29473 | NTCEPVQMI |
| 29474 | PTLEFLNLM |
| 29475 | RPNEPLDYS |
| 29476 | SKREIENCH |
| 29477 | SLCEMMQPH |
| 29478 | SMTEIVVAW |
| 29479 | SSNEGGCWM |
| 29480 | STKEDFDMF |
| 29481 | STVEKMQTL |
| 29482 | TTDECHGHP |
| 29483 | TTVEMECGM |
| 29484 | VEEERPFWS |
| 29485 | VRGERLSDL |
| 29486 | VTIERNIWQ |
| 29487 | VTRELWLPQ |
| 29488 | WCTEFSTRQ |
| 29489 | WNVETFLGY |
| 29490 | YIAEMEFMN |
| 29491 | KQHELMVRV |
| 29492 | PKHEDMRWW |
| 29493 | NQREWHGLA |
| 29494 | SECEVLCSL |
| 29495 | PHAETHWYT |
| 29496 | AAMESCAEI |
| 29497 | AEGEIEMWT |
| 29498 | AFVEFSDVT |
| 29499 | AGCETWNAP |
| 29500 | AMHEATDAQ |
| 29501 | AQSEWGSAT |
| 29502 | ARDESAEEH |
| 29503 | ATHEMHLDA |
| 29504 | CKKESGSYE |
| 29505 | DCDECQDDQ |
| 29506 | DKDERAEGM |
| 29507 | DQWEYEVQF |
| 29508 | EELEQQMCT |
| 29509 | EMHEWSRAN |
| 29510 | ESEEMHAYE |
| 29511 | GKIEARETD |
| 29512 | HMFERPRTQ |
| 29513 | HPSEECSWR |
| 29514 | KLVEMQESK |
| 29515 | KWCEVLWQP |
| 29516 | LEGEAYAQE |
| 29517 | LFSEFFEYE |
| 29518 | LSNEMTIDA |
| 29519 | LTIENPHDQ |
| 29520 | LYKEIGENI |
| 29521 | NAEEWWSCD |
| 29522 | NCVEAGSFA |
| 29523 | NMMEYERFS |
| 29524 | NNMEDRWGT |
| 29525 | NSNEHGAMW |
| 29526 | PTCEVPENC |
| 29527 | SFIEFPAMT |
| 29528 | SIDEQTFPP |
| 29529 | SKEEVQYIF |
| 29530 | SWTEISSVK |
| 29531 | TAAEMIYEY |
| 29532 | TWDEQTAQV |
| 29533 | TWRECQSSH |
| 29534 | VGNEDKCDP |
| 29535 | VMIEKTMMH |
| 29536 | VPVEVHKQA |
| 29537 | WGAENHGPW |
| 29538 | WKDEYTVDD |
| 29539 | YAREFGNMY |
| 29540 | YTDERAMLN |
| 29541 | CDAENSDGG |
| 29542 | CLDEPRTDF |
| 29543 | GHEEYWEHV |
| 29544 | HHREQKDHS |
| 29545 | HSAEQVLME |
| 29546 | MIQEIKEDN |
| 29547 | MWCEVMHCS |
| 29548 | SCRECDECP |
| 29549 | TPDEQSHYD |
| 29550 | TTAEYGMSI |
| 29551 | AFHHLGEFQ |
| 29552 | ALMPLTRWN |
| 29553 | AMHSLHYMF |
| 29554 | ASEYLASPM |
| 29555 | ATTLLHYKN |
| 29556 | AWWWLNAQG |
| 29557 | CNIQLHTHY |
| 29558 | DRVRLMMVA |
| 29559 | DWGYLRIWC |
| 29560 | DYSKLDVHY |
| 29561 | ERSTLPMSR |
| 29562 | FADYLAAAS |
| 29563 | FPYHLWVGG |
| 29564 | GAEKLHLVH |
| 29565 | GGIDLTLMM |
| 29566 | HADCLELSC |
| 29567 | HGEDLNEFL |
| 29568 | HHDDLAPWQ |
| 29569 | IICTLSLDS |
| 29570 | ILNVLESWE |
| 29571 | KERRLWSGV |
| 29572 | LFDRLKLNE |
| 29573 | LRSMLASYD |
| 29574 | MHGHLTQSI |
| 29575 | MSISLWGNA |
| 29576 | PENPLVTMS |
| 29577 | RNTCLNTGD |
| 29578 | SLSRLYWSN |
| 29579 | TIRSLEMVW |
| 29580 | VGIPLQAHC |
| 29581 | VMDGLGLVL |
| 29582 | VIGFLMIPT |
| 29583 | VTRDLQKEQ |
| 29584 | VYDYLINGA |
| 29585 | WHGRLMITC |
| 29586 | WYQFLDNQL |
| 29587 | YACLLDTLG |
| 29588 | YSYSLMSGW |
| 29589 | DKINLAVSY |
| 29590 | HMEWLEEQA |
| 29591 | ITVALNQGW |
| 29592 | KCADLIIRS |
| 29593 | HATGLVNFM |
| 29594 | ATMNLSWGL |
| 29595 | TYESLQNSW |
| 29596 | NLSNLVSCR |
| 29597 | ALDALHYCS |
| 29598 | ANIGLETGV |
| 29599 | ARVDLMSHQ |
| 29600 | AWTGLHVCN |
| 29601 | CRDGLPHTV |
| 29602 | CTFWLYFFR |
| 29603 | DFNYLNWFC |
| 29604 | DILDLVNSF |
| 29605 | DIYQLHPSY |
| 29606 | DLFCLNYDF |
| 29607 | DQHKLTVEN |
| 29608 | DTDTLMNSG |
| 29609 | DTELLLVQE |
| 29610 | DYMLLQGVY |
| 29611 | ECHLLEEQR |
| 29612 | ECRSLCFQH |
| 29613 | EDRDLSWTF |
| 29614 | EGMILDHTP |
| 29615 | EKANLTYGV |
| 29616 | EKRSLPACM |
| 29617 | EPHSLDICL |
| 29618 | EYFVLHVYD |
| 29619 | EYNSLLCHF |
| 29620 | FRKLLTRRF |
| 29621 | FWCYLVLMV |
| 29622 | GEDTLAAWG |
| 29623 | GGEFLAVAY |
| 29624 | HHMQLLRSG |
| 29625 | HPGKLFETH |
| 29626 | IGTALERQG |
| 29627 | KIVVLAKGE |
| 29628 | KQTVLHVHH |
| 29629 | KSLPLHDHF |
| 29630 | LFTCLQEQE |
| 29631 | LSGWLSQFG |
| 29632 | LTTHLPEWN |
| 29633 | MKTVLYVGD |
| 29634 | MNLHLPQWG |
| 29635 | NFHSLESTP |
| 29636 | NTVTLVQHE |
| 29637 | NYGKLGKSY |
| 29638 | PMDSLTRVY |
| 29639 | PWQNLAVNH |
| 29640 | RWQDLLNTG |
| 29641 | SQMHLFTSW |
| 29642 | SSFELLDHQ |
| 29643 | TFNKLSCMW |
| 29644 | THAMLDRNF |
| 29645 | TQEALMDGQ |
| 29646 | TQTNLAECA |
| 29647 | TSQLLMHGN |
| 29648 | TWGLLWKQY |
| 29649 | VKLKLSEGQ |
| 29650 | YTYALAHAT |
| 29651 | YYNNLNIHT |
| 29652 | AHAMLDRNF |
| 29653 | DYKYLSCQY |
| 29654 | EEMHLDNAL |
| 29655 | ENHNLENHG |
| 29656 | EQTVLHVHH |
| 29657 | HNIDLQNWD |
| 29658 | IDTLLYHAI |
| 29659 | KCEWLQWVP |
| 29660 | KPHPLDPFR |
| 29661 | LCSELVHWS |
| 29662 | MHGPLYCAE |
| 29663 | MWGGLDMVY |
| 29664 | NRAQLCRCN |
| 29665 | TAMWLHNMV |
| 29666 | TAVALFEMD |
| 29667 | TNVGLIDGS |
| 29668 | VQEWLGLYC |
| 29669 | CDGHDPFWY |
| 29670 | CEEKTPVWC |
| 29671 | CIYLKPDYQ |
| 29672 | CLQHMPRLQ |
| 29673 | DARSSPDCL |
| 29674 | DPWHEPSMG |
| 29675 | DRHTKPNST |
| 29676 | ETMYWPAMD |
| 29677 | FFRDCPYEY |
| 29678 | GNNRNPTYW |
| 29679 | GTSDFPEAV |
| 29680 | HNLKIPMME |
| 29681 | IASHNPSKQ |
| 29682 | IDFRPPNNT |
| 29683 | IPNGPPNNQ |
| 29684 | LGFRKPFTR |
| 29685 | LQYTFPEGQ |
| 29686 | LTEATPKWA |
| 29687 | MFQYYPYCD |
| 29688 | MGEDRPSMT |
| 29689 | MHFKYPQGG |
| 29690 | MPDMDPAAL |
| 29691 | PQHISPDPT |
| 29692 | PYDMIPCNR |
| 29693 | SAAFQPRAS |
| 29694 | SRQPVPLSK |
| 29695 | STARQPALE |
| 29696 | SWYMPPMYC |
| 29697 | TIFQPPFHY |
| 29698 | VMDTTPLHF |
| 29699 | WAVLGPQKF |
| 29700 | WSGFHPPTM |
| 29701 | WTVLGPQKF |
| 29702 | YANFSPLWS |
| 29703 | SNTPMPYHG |
| 29704 | TFVRKPSLM |
| 29705 | KDGRNPHCL |
| 29706 | TCEDDPSLR |
| 29707 | CWMIVPAWH |
| 29708 | AAEPIPTWP |
| 29709 | CHCMWPSGV |
| 29710 | CSENEPFHR |
| 29711 | DMGHCPHDM |
| 29712 | DSDNIPYCP |
| 29713 | DSWRFPGHP |
| 29714 | DSYVTPYFT |
| 29715 | DTGSTPVGT |
| 29716 | EINPEPNWK |
| 29717 | FKLWNPDSI |
| 29718 | FWRSVPEYW |
| 29719 | GISSWPSAH |
| 29720 | GPNTHPHMA |
| 29721 | GSSYVPICF |
| 29722 | GTDACPLHL |
| 29723 | GTNGVPKVN |
| 29724 | HDYPTPKNW |
| 29725 | HMTFKPTAQ |
| 29726 | HQYNEPHVS |
| 29727 | ICTNYPKMD |
| 29728 | IHLMKPAHI |
| 29729 | IHNKFPLTM |
| 29730 | LKDFDPAIH |
| 29731 | LKVLWPTEM |
| 29732 | MHLRDPHQH |
| 29733 | MMHGYPFYP |
| 29734 | MNWLVPYSD |
| 29735 | NAMAIPKEC |
| 29736 | NDAGEPTRE |
| 29737 | RAMMRPHGE |
| 29738 | RMEYPPEQF |
| 29739 | SCTHDPTQL |
| 29740 | SSQPVPVPV |
| 29741 | STYHTPFNN |
| 29742 | TCVMEPCIC |
| 29743 | TIQRYPDYG |
| 29744 | TNQPFPSSE |
| 29745 | TQNLEPHWN |
| 29746 | TSDQYPSSY |
| 29747 | TTARRPTYD |
| 29748 | VAMAHPMTV |
| 29749 | VAVDSPHEM |
| 29750 | VLGRSPQVM |
| 29751 | WTYAPPLNY |
| 29752 | AHSHMPVCL |
| 29753 | CKDLSPYKF |
| 29754 | EEMQYPMFM |
| 29755 | ETCKMPLSD |
| 29756 | HHELDPDWE |
| 29757 | IPHNEPKAG |
| 29758 | KECFIPCAF |
| 29759 | MTRIRPDAN |
| 29760 | WKAPGPITR |
| 29761 | AEHSPHHDF |
| 29762 | ASALHCHNQ |
| 29763 | ATADNHHPR |
| 29764 | CSSLYSHMP |
| 29765 | DMCKYSHFV |
| 29766 | ETHTRAHDC |
| 29767 | ETIFVDHLN |
| 29768 | FNIHICHFI |
| 29769 | GEASMEHMQ |
| 29770 | GRIFSKHPD |
| 29771 | GSNQEQHGN |
| 29772 | GYQPDQHCP |
| 29773 | HRLIEQHDT |
| 29774 | IMMLMSHLE |
| 29775 | ITCKFTHNG |
| 29776 | ITQHMNHFQ |
| 29777 | ITSWMAHPQ |
| 29778 | KEAVMNHWT |
| 29779 | KLFPWEHFG |
| 29780 | KLMFWIHHT |
| 29781 | KRMQPEHCA |
| 29782 | KTDHERHAY |
| 29783 | KTWLPYHTW |
| 29784 | KWLWNWHDW |
| 29785 | LCLSACHFE |
| 29786 | LHDNYCHET |
| 29787 | LSQDVHHDT |
| 29788 | MAFFSMHQG |
| 29789 | MCTDYGHEG |
| 29790 | MLKCNFHHQ |
| 29791 | MPEPREHTR |
| 29792 | MSCPHFHVG |
| 29793 | NFEVCQHCE |
| 29794 | NHQNWMHMD |
| 29795 | RFILELHDS |
| 29796 | RPVNGVHLH |
| 29797 | SAGWIMHNS |
| 29798 | SWTWDWHVA |
| 29799 | THQADEHDA |
| 29800 | TTIQSNHCK |
| 29801 | TTMQQGHDL |
| 29802 | WSANQMHSH |
| 29803 | YIERTNHTP |
| 29804 | FRDVCMHDV |
| 29805 | FANDFTHNM |
| 29806 | GQLSTQHHM |
| 29807 | ASKQGTHDY |
| 29808 | AAEPYKHSK |
| 29809 | ASNTYDHSL |
| 29810 | CAMPGSHQI |
| 29811 | CDVKDAHHD |
| 29812 | DGCDMTHTR |
| 29813 | DGWLYQHTY |
| 29814 | DTMSKNHCT |
| 29815 | DTYAAGHSA |
| 29816 | EDTLTLHEN |
| 29817 | EFTLFQHEN |
| 29818 | ENVDRQHHM |
| 29819 | EPNMCCHHR |
| 29820 | EYTDVMHDA |
| 29821 | FAAVCHHPI |
| 29822 | FDTFSVHRL |
| 29823 | FTDCMGHTM |
| 29824 | GAYQPCHYP |
| 29825 | GSWHCVHCP |
| 29826 | HAAPQCHYS |
| 29827 | KMEFQLHPG |
| 29828 | LDGAMSHMC |
| 29829 | MHVTPRHPP |
| 29830 | MQLIDHHGP |
| 29831 | MSKVDRHCA |
| 29832 | MTMLGGHCI |
| 29833 | NCMYEMHWQ |
| 29834 | NFYDSLHCF |
| 29835 | NGNLTAHPN |
| 29836 | NIELRDHGQ |
| 29837 | PCHRKKHPK |
| 29838 | RCGRTAHNH |
| 29839 | REWYHCHYM |
| 29840 | SKYPINHVQ |
| 29841 | SSEFAVHCG |
| 29842 | TINVKHHFG |
| 29843 | WDWFSYHAE |
| 29844 | WEAKCAHSV |
| 29845 | WPVLNDHEH |
| 29846 | WPVLNDHGH |
| 29847 | YHEKSCHFG |
| 29848 | CQVSYQHYP |
| 29849 | DGTVCVHMG |
| 29850 | GAESCCHFG |
| 29851 | GELMHRHMD |
| 29852 | HTQHHSHHL |
| 29853 | ISSNFDHFE |
| 29854 | KMQNCAHQH |
| 29855 | LSSLHDHPE |
| 29856 | NTQWEAHSP |
| 29857 | SFSSNAHLQ |
| 29858 | STECYYHGI |
| 29859 | TSTHIEHDT |
| 29860 | YRVNCGHPN |
| 29861 | AKDLISKPH |
| 29862 | AMCNDIAPW |
| 29863 | DILPKVYPE |
| 29864 | DLEWQHCPP |
| 29865 | DMEPQYWPA |
| 29866 | DTLGPEAPH |
| 29867 | EAMMMYQPN |
| 29868 | EIMAAWTPP |
| 29869 | EQGSVWTPP |
| 29870 | EWFHQMSPH |
| 29871 | FMEDNTKPR |
| 29872 | HTIWSHDPW |
| 29873 | LATQICFPT |
| 29874 | LRMDCVPPY |
| 29875 | LTGPNLSPA |
| 29876 | MGNRSGSPS |
| 29877 | MPSHWYRPI |
| 29878 | MTHKDIGPS |
| 29879 | NFCKGMNPY |
| 29880 | PATKTHDPF |
| 29881 | SALNAAPPP |
| 29882 | SWCRYHEPL |
| 29883 | TFMHESEPH |
| 29884 | WQYTQNCPA |
| 29885 | YLGWICAPC |
| 29886 | YCECGHWPN |
| 29887 | MPWLDKPPC |
| 29888 | CQMLCRPPV |
| 29889 | PIWQGYWPW |
| 29890 | YDYWMQAPT |
| 29891 | EWVVQQIPQ |
| 29892 | ADHWEKGPF |
| 29893 | AIDPINRPN |
| 29894 | AMEKPTLPI |
| 29895 | CTNFVNRPG |
| 29896 | DIVNHESPG |
| 29897 | GDESGLVPE |
| 29898 | GNESGLVPE |
| 29899 | GPKWGRSPL |
| 29900 | HDAPMFTPG |
| 29901 | ICMICATPE |
| 29902 | KWEHGFMPF |
| 29903 | LCKVGMEPE |
| 29904 | MEETVTRPG |
| 29905 | MEKRKGQPV |
| 29906 | NDLSPAEPT |
| 29907 | NMAMAKQPG |
| 29908 | RCSKVKWPA |
| 29909 | RFVVASYPY |
| 29910 | RHVSIMPPV |
| 29911 | SAVNKCVPG |
| 29912 | SETRNNFPY |
| 29913 | SIMRCKFPN |
| 29914 | STGPELDPP |
| 29915 | TDCCVGPPQ |
| 29916 | VGNVIARPV |
| 29917 | YCVCIQRPF |
| 29918 | GLIKIVKPW |
| 29919 | HEHTAFRPE |
| 29920 | IQIRANCPN |
| 29921 | MEGHTGNPC |
| 29922 | TPCIWHSPF |
| 29923 | AMEIQYMSM |
| 29924 | ASTNEEKSM |
| 29925 | CIEQKHLCM |
| 29926 | EAGIRAEDM |
| 29927 | EMSSSNMAM |
| 29928 | FFCKYNBIM |
| 29929 | FHHNSRLDM |
| 29930 | GGHSMTKAM |
| 29931 | GIVRQCCIM |
| 29932 | GIYYEQDGM |
| 29933 | GRRAELGLM |
| 29934 | GTMQVTGAM |
| 29935 | GYSSTHVQM |
| 29936 | IAVQTGSDM |
| 29937 | KCMPNVGWM |
| 29938 | KLKPICMKM |
| 29939 | LCWMAGAQM |
| 29940 | NAICTLEEM |
| 29941 | NCEFWKMFM |
| 29942 | NCVQTNSEM |
| 29943 | SADSEEGHM |
| 29944 | SKMSNQDAM |
| 29945 | SKSDVQSMM |
| 29946 | SPLNRNCLM |
| 29947 | VWLQSLDRM |
| 29948 | WMGHKHKQM |
| 29949 | MLTPVQATM |
| 29950 | KTSNVMDQM |
| 29951 | AKCDVTGGM |
| 29952 | AYMAYHTEM |
| 29953 | CTTASMSYM |
| 29954 | EIGSRNRRM |
| 29955 | ERSFHNSIM |
| 29956 | ESRIGQECM |
| 29957 | EYFNILRNM |
| 29958 | FATWHLYDM |
| 29959 | FDCWANNNM |
| 29960 | FIWDCGDIM |
| 29961 | FKTFGSREM |
| 29962 | GDDHRVLTM |
| 29963 | GGYHKFPVM |
| 29964 | GNDIFMVIM |
| 29965 | GNTPCRGLM |
| 29966 | LIACRENEM |
| 29967 | LKATYEYVM |
| 29968 | LNDIKWYVM |
| 29969 | LQIRAWEYM |
| 29970 | MLKVQCTHM |
| 29971 | PQDFKHNYM |
| 29972 | REFCGALMM |
| 29973 | RFGREAGGM |
| 29974 | RFTGHMGAM |
| 29975 | RHESINRYM |
| 29976 | RSDLKVCAM |
| 29977 | RYNLQIMWM |
| 29978 | SFMLKWWAM |
| 29979 | SMFGDRQAM |
| 29980 | SNCDNWSAM |
| 29981 | SPLHYLVQM |
| 29982 | SYRPFRKMM |
| 29983 | TLMQPGYQM |
| 29984 | VPDHIVGMM |
| 29985 | VSSSDGWNM |
| 29986 | WTAHMYTNM |
| 29987 | WTYHSMAQM |
| 29988 | WWWGNFMFM |
| 29989 | YCNQQQWTM |
| 29990 | YEQVITVMM |

### Example 10

### AAV5 Variants with Tissue Tropism in Spinal Cord

[0902] This example describes engineered AAV5 variants with tissue tropism in spinal cord that were discovered using the methods and systems described in EXAMPLE 1-EXAMPLE 2.

[0903] CNS, liver, skeletal muscle, heart, lung, spleen, lymph node, bone marrow, mammary gland, skin, adrenal gland, thyroid, colon, sciatic nerve, and spinal cord tissues were analyzed to identify amino acid residues in the AAV5 VP1 581-589 region that drive spinal cord tropism. The results are shown in FIG. 18O which shows the positional frequency of each amino acid in the 581 to 589 region of AAV5 VP1 in spinal cord tissue as compared to all other analyzed tissues, wherein the capsid polypeptide has the sequence of SEQ ID NO: 2. The position (“Xaan”, n=1-9) is denoted on the x-axis and amino acid residues are denoted on the y-axis. The frequency of a particular amino acid residue in a particular position is indicated in the heatmap as intensity. Darker squares indicate a higher frequency of a particular amino acid in a particular position and lighter squares indicate a lower frequency of a particular amino acid in a particular position.

[0904] The frequency of a given amino acid residue occurring at a specified position corresponding to position 581 to position 589 of SEQ ID NO: 1 (generalized in SEQ ID NO: 2) in variants identified in spinal cord over the frequency of that given amino acid residue occurring at the specified position in variants identified in all other harvested tissues was analyzed to identify a set of sequence rules for capsids that preferentially target spinal cord tissue. With reference to TABLE 19 below, and SEQ ID NO: 2 (AAV5 VP1), the following amino acids can, thus, be independently mutated, in any combination, at any one or more positions Xaa1-Xaa9, to provide a VP1 capsid with enhanced spinal cord tropism as compared wildtype AAV5 VP1 capsid (SEQ ID NO: 1), where spinal cord tropism here refers to properties that are preferred for spinal cord transduction over properties that are preferred for transduction of all other harvested tissues.

TABLE 19
Spinal Cord Tropism Rules

Xaa1 is selected from A, C, K, Q, R, S, or W
Xaa1 is selected from K, R, or W
Xaa1 is K
Xaa2 is selected from H, I, K, L, T, V, or W
Xaa2 is selected from H, I, or T
Xaa2 is I
Xaa3 is selected from C, F, G, H, I, K, N, or R
Xaa8 is selected from F, I, or R
Xaa3 is I
Xaa4 is selected from I, M, Q, S, or V
Xaa4 is selected from I, M, or V
Xaa4 is V
Xaa5 is selected from H, K, Q, T, W, or Y
Xaa5 is selected from T, W, or Y
Xaa5 is Y
Xaa6 is selected from H, L, N, Q, R, W, or Y
Xaa6 is selected from L, N, R, or Y
Xaa6 is Y
Xaa7 is selected from D, H, P, Q, or R
Xaa7 is R
Xaa8 is selected from D, F, L, S, T, or Y
Xaa8 is selected from S, T, or Y
Xaa8 is T
Xaa9 is selected from C, I, N, P, R, S, or Y
Xaa9 is selected from I, P, or R
Xaa9 is I

[0905] TABLE 20 below provides sequences of the 581 to 589 region for variant AAV VP1 capsid polypeptides that were found in spinal cord tissue and comport to one or more of the rules provided in TABLE 19. The present disclosure, thus, provides for rAAVs composed of engineered AAV5 VP1 capsid polypeptides having a SEQ ID NO: 2, wherein the Xaa1 to Xaa9 region is any one of SEQ ID NO: 34991-SEQ ID NO: 35437, as disclosed in TABLE 20. Also encompassed herein are rAAVs composed of engineered AAV5 VP2 capsid polypeptides and engineered AAV5 VP3 capsid polypeptides having the sequences disclosed in the below table at the regions in AAV5 VP2 (amin acid residues 445 to 453) and AAV5 VP3 (amino acid residues 389-397) corresponding to the amino acids in the AAV5 VP1 581 to 589 region.

TABLE 20
Sequences of the 581 to 589 Region
in AAV5 VP1 Capsid Polypeptide that
Drive Spinal Cord Tissue Tropism

| SEQ | |
|---|---|
| ID | 581-589 |
| NO | Sequence |
| 34991 | KYNMLYHMD |
| 34992 | KGESQCTSQ |
| 34993 | KGQHKENRS |
| 34994 | KWHGGPGVV |
| 34995 | KRMLYPMCF |
| 34996 | KATNADGET |
| 34997 | KQSDKWGDD |
| 34998 | KIMHSWYND |
| 34999 | KKEQDHWDK |
| 35000 | KASLGACVE |
| 35001 | KGGFYGESA |
| 35002 | KQNPSMRQD |
| 35003 | KSFSWDSSA |
| 35004 | KFLIAFEVT |
| 35005 | KEFMPCCHR |
| 35006 | KEGITGLEL |
| 35007 | KTCTEWPGE |
| 35008 | KVNRSNRIW |
| 35009 | KVTNYYHSG |
| 35010 | KYSPTPFMY |
| 35011 | KCEGEEVGR |
| 35012 | KQEYIMRQR |
| 35013 | KWDDMHTQM |
| 35014 | KNETFIAST |
| 35015 | KAVTRADAS |
| 35016 | KVAEGQNML |
| 35017 | KHLDMTSCH |
| 35018 | KATRDPKFP |
| 35019 | KTLPCSNSE |
| 35020 | KFNTKDQLM |
| 35021 | KGGLSTTNA |
| 35022 | KIQPTNHHE |
| 35023 | KTGWDSHWS |
| 35024 | KGCVPWSKI |
| 35025 | KMEVNMSEL |
| 35026 | KTLHMLESK |
| 35027 | KTGATNLAW |
| 35028 | KCRYKDCQC |
| 35029 | KSIMMSQLD |
| 35030 | KSGMIQEET |
| 35031 | KAIPQGSSC |
| 35032 | KGQRRDSVS |
| 35033 | KIEYGHWIH |
| 35034 | KAHDITWNL |
| 35035 | KSAQVYWHP |
| 35036 | KIQPMMVKA |
| 35037 | KEFQLQMEP |
| 35038 | KSTMLEHHD |
| 35039 | KRFVDMPEM |
| 35040 | KYSPFQEHN |
| 35041 | KNCIMLASN |
| 35042 | KSFQEQGGA |
| 35043 | KTMGIGGGP |
| 35044 | KVEGYGWTR |
| 35045 | KPLTYTVGS |
| 35046 | KQATNNNGW |
| 35047 | KVEIINWHP |
| 35048 | KSEHHWINA |
| 35049 | KGNPLDGDT |
| 35050 | KCDDRNTQH |
| 35051 | KLMYKVMSC |
| 35052 | KQKTQNRNA |
| 35053 | KCADLIIRS |
| 35054 | KHEPMCVQL |
| 35055 | KIGCMYSSQ |
| 35056 | LIAAQKNFK |
| 35057 | QIMQKYQYS |
| 35058 | WIPAMTYWC |
| 35059 | WIPAMTYWY |
| 35060 | WINMPHDRH |
| 35061 | DIVCLMNST |
| 35062 | MIRPLTHCK |
| 35063 | FIIRCMLIW |
| 35064 | TISSVFLLD |
| 35065 | EICQHMGMA |
| 35066 | SIVNHNEAR |
| 35067 | GIELPVKHH |
| 35068 | EICSRGRTI |
| 35069 | GIKYKDVLS |
| 35070 | GIKFFVDNC |
| 35071 | GIIERYGDC |
| 35072 | NICAKHRMS |
| 35073 | RIQKLKWCQ |
| 35074 | SIDVPPTAN |
| 35075 | TIVWSECAW |
| 35076 | NIDAVERIW |
| 35077 | TIGWKELNE |
| 35078 | TIMFGCLAE |
| 35079 | GIFMEVAWC |
| 35080 | RICPLFCIK |
| 35081 | LIQSYPHQC |
| 35082 | MISAPPDTC |
| 35083 | QIGPKAFGW |
| 35084 | DIACLDQWQ |
| 35085 | GILVQGGSM |
| 35086 | TIRPHHAKS |
| 35087 | AIFHACNSG |
| 35088 | RIVDGNACG |
| 35089 | CIHSQGMVC |
| 35090 | QILQWDCPS |
| 35091 | QIYSLASTW |
| 35092 | SIKFHERQH |
| 35093 | TILQQMEEI |
| 35094 | AIGPDRSNN |
| 35095 | TIHPAWVTL |
| 35096 | QISMKGEHG |
| 35097 | EIIQAHLIN |
| 35098 | CIIGRQEWL |
| 35099 | TIWVHEYGM |
| 35100 | SIAQDQVWS |
| 35101 | PIWQGYWPW |
| 35102 | IIKFLWRPT |
| 35103 | DITSLGCIM |
| 35104 | WINEANCLM |
| 35105 | GIKKPNEDN |
| 35106 | EIRQFVKGA |
| 35107 | TILPKKTLC |
| 35108 | DIGRFTAYY |
| 35109 | TISQIPWVR |
| 35110 | TIVVIPIKS |
| 35111 | LINSIVCGD |
| 35112 | GIPLWVFID |
| 35113 | FIDEKQCHE |
| 35114 | DICQKQSPN |
| 35115 | NIGVIPHIQ |
| 35116 | CIDVLFKHL |
| 35117 | QIIYRCRST |
| 35118 | EIHMFGQSE |
| 35119 | QIHSEHCAT |
| 35120 | HIHMSDRGA |
| 35121 | AIGCFQNGG |
| 35122 | HIKVEHEEV |
| 35123 | LIEKQRWML |
| 35124 | GIWVRDTNY |
| 35125 | EICMRSGFI |
| 35126 | CIQPTWDSY |
| 35127 | QISKPSVQC |
| 35128 | SGITFPGSN |
| 35129 | DFIPDWSST |
| 35130 | EMISNNCHR |
| 35131 | EMINACFQA |
| 35132 | APIFVCDCC |
| 35133 | YSIIWRVYR |
| 35134 | RKIESYCIT |
| 35135 | EKIMVKRAF |
| 35136 | ATISKLECQ |
| 35137 | LKICFSPTV |
| 35138 | ELIYKIKTD |
| 35139 | ARIWNDSMA |
| 35140 | DQILPMNGV |
| 35141 | IHIHFNWFY |
| 35142 | RGIYCYYVC |
| 35143 | WRIYEEDPT |
| 35144 | YKIGAAECD |
| 35145 | DPILQTYLS |
| 35146 | DQILSMNGV |
| 35147 | GFIERYGDC |
| 35148 | DSIIKDQSD |
| 35149 | LFIKVKDTS |
| 35150 | MAIQVFMSD |
| 35151 | ISIENEIMG |
| 35152 | APIQITKAY |
| 35153 | EKIRQNAAP |
| 35154 | ISICAQDID |
| 35155 | VGIMRNDTG |
| 35156 | GTIHMYCGW |
| 35157 | TRILNEFFC |
| 35158 | QNIRLGVPT |
| 35159 | DVIHTTHSG |
| 35160 | SHIQLNAWR |
| 35161 | ILIFIQNCP |
| 35162 | TRIVEPDAN |
| 35163 | ATIAQWCVH |
| 35164 | HVIGMGAGE |
| 35165 | RAIYNDMTE |
| 35166 | SAICQNYDA |
| 35167 | SQIQIRQAD |
| 35168 | NRIQMIDFQ |
| 35169 | FTIFPGNAG |
| 35170 | YVIGQKDEM |
| 35171 | IWITCPYAA |
| 35172 | NAIPYFVQA |
| 35173 | AVIHEKPHG |
| 35174 | ACIPQMHSA |
| 35175 | TSIEGLKTM |
| 35176 | ASIATMDRI |
| 35177 | PVICVWHDN |
| 35178 | CWILHHRCS |
| 35179 | VTWVHYDMY |
| 35180 | YTMVAPDYE |
| 35181 | SMPVGTKID |
| 35182 | MPKVHCASC |
| 35183 | WCLVNELPT |
| 35184 | VTSVAGGGE |
| 35185 | QQTVVQFCL |
| 35186 | ADVVMQTCC |
| 35187 | GVHVTESGA |
| 35188 | NYCVNKRAV |
| 35189 | MTSVCNWDS |
| 35190 | REKVWSDLK |
| 35191 | ICFVNLDHV |
| 35192 | MKHVSTMTK |
| 35193 | SGFVILEGI |
| 35194 | VFTVAHCVH |
| 35195 | WFNVRQNGQ |
| 35196 | QAPVIPIMA |
| 35197 | TNGVQIMHV |
| 35198 | INMVSMYAY |
| 35199 | QGFVVHSPS |
| 35200 | QFYVAEHLE |
| 35201 | RQCVIGDYD |
| 35202 | HTRVVKSTG |
| 35203 | GTAVSRQSK |
| 35204 | QTDVKVNFD |
| 35205 | NWTVHLIYG |
| 35206 | TAMVSECKD |
| 35207 | GHLVPFDCG |
| 35208 | HYVVRHEDP |
| 35209 | PTDVITTDQ |
| 35210 | CMEVTCFVV |
| 35211 | IQAVMASGW |
| 35212 | LESVKMDCN |
| 35213 | EMYVQRHSL |
| 35214 | AAFVMNGDG |
| 35215 | HCWVNEKCE |
| 35216 | SKDVYGMYC |
| 35217 | EDLVVYMGS |
| 35218 | VGNVMIKMC |
| 35219 | IHRVVCRDH |
| 35220 | MFVVNQNWA |
| 35221 | HEWVLDFFP |
| 35222 | RVEAYAPTT |
| 35223 | THCHYQGND |
| 35224 | WAGCYTYAN |
| 35225 | WDHNYFTYL |
| 35226 | IVMEYAFIP |
| 35227 | NSCTYNKDA |
| 35228 | FKNWYINMH |
| 35229 | ETNSYNSHH |
| 35230 | LSSCYYMTY |
| 35231 | GSTQYPCCK |
| 35232 | QAEGYRDCY |
| 35233 | IGQWYECMT |
| 35234 | GNAGYQADL |
| 35235 | GCMPYQINV |
| 35236 | SLCIYDHRH |
| 35237 | ETNHYLISD |
| 35238 | EGSDYVGYN |
| 35239 | NMMQYQWAI |
| 35240 | LPKIYLSFC |
| 35241 | QNLMYCSSV |
| 35242 | RPVTYPHTA |
| 35243 | FDKTYFHDC |
| 35244 | LMEHYLREG |
| 35245 | NVWYYFRTW |
| 35246 | WPSFYANYR |
| 35247 | IACKYERVC |
| 35248 | LMEHYLREW |
| 35249 | SMHDYNFNV |
| 35250 | GYRNYFIWP |
| 35251 | FAMSYQRQN |
| 35252 | EVYCYQLQS |
| 35253 | YKNSYSQWP |
| 35254 | SHMSYGQVQ |
| 35255 | IQCKYIHFT |
| 35256 | ANHLYHAAN |
| 35257 | NYHNYMFGM |
| 35258 | CFNTYDQCF |
| 35259 | SDNMYHTIE |
| 35260 | RPVHYQGTN |
| 35261 | MEHFYDRES |
| 35262 | PNGHYWMIP |
| 35263 | ATNKYANAI |
| 35264 | DKTCYLTCP |
| 35265 | TMSNYGCLQ |
| 35266 | MGMAYSDSE |
| 35267 | ELPRYYGQM |
| 35268 | DKYLYMYSD |
| 35269 | LLAKYMVHT |
| 35270 | MTERYYWCQ |
| 35271 | DFMWYHICS |
| 35272 | HGSSYNTVQ |
| 35273 | SLTQYQWRG |
| 35274 | TVNWYSGFG |
| 35275 | MEPHYWEWP |
| 35276 | STTAYHQDY |
| 35277 | VVTQYVDAP |
| 35278 | AVDHYSNGA |
| 35279 | NGNHYNAMR |
| 35280 | LHKAYVTDS |
| 35281 | SGNMYESGE |
| 35282 | CSESYRGPD |
| 35283 | YLEMYSKDW |
| 35284 | DPGWYGLAP |
| 35285 | MNSFYRAEW |
| 35286 | NEDQYMHVE |
| 35287 | WHGFYKIMF |
| 35288 | YTWPYPETH |
| 35289 | PGGCYRMME |
| 35290 | MYLNYRHFA |
| 35291 | WVHPYSYCA |
| 35292 | DYFQYNEAP |
| 35293 | RQTTYDCLD |
| 35294 | AVEDYWRYF |
| 35295 | TSCCYESSS |
| 35296 | EPRLYCAQE |
| 35297 | HTLLWYGIC |
| 35298 | MDHPTYGIY |
| 35299 | DGCQKYQEQ |
| 35300 | FKFISYVGD |
| 35301 | IYLKFYFSL |
| 35302 | DCDMKYLYE |
| 35303 | LGSPFYECG |
| 35304 | LLLNSYKWY |
| 35305 | RLSLWYFCH |
| 35306 | MDRMMYMLG |
| 35307 | AMGYQYLYE |
| 35308 | SVMLDYHDM |
| 35309 | IVKQCYDCH |
| 35310 | QVEDGYWSY |
| 35311 | EWLSLYCHW |
| 35312 | CTEIRYYGT |
| 35313 | CLHHHYPVT |
| 35314 | QYVGMYTQQ |
| 35315 | QHSRAYMWY |
| 35316 | TSSDHYALP |
| 35317 | YAMPLYFCE |
| 35318 | ECVSDYACC |
| 35319 | GHHQCYKAD |
| 35320 | VSLQKYDMT |
| 35321 | NQQRTYNNG |
| 35322 | QEYHIYFPF |
| 35323 | AEDTPYTIY |
| 35324 | YSVQAYMAN |
| 35325 | QTAEWYCGA |
| 35326 | ECGCMYWGY |
| 35327 | RKWSCHRGH |
| 35328 | RQTDTHRAN |
| 35329 | NVDAHERYR |
| 35330 | SRENLGRYN |
| 35331 | WMPNQSRGW |
| 35332 | SATARFRDN |
| 35333 | EKRLFDRTY |
| 35334 | LGHHKGRWH |
| 35335 | YEWPWQRGL |
| 35336 | YEWPWQRWL |
| 35337 | YEWPWRRWL |
| 35338 | GCLGTKRQI |
| 35339 | HDSLFKRTE |
| 35340 | HEWPWQRWL |
| 35341 | SYLRQQRDT |
| 35342 | ALANKRRNH |
| 35343 | HEGLIMRLE |
| 35344 | AQRCFHRWG |
| 35345 | LFCPTCRYA |
| 35346 | HLYSDGRGS |
| 35347 | QCKTHPRSF |
| 35348 | LFTDTKRPE |
| 35349 | EFTHAIRQC |
| 35350 | GATWEIRFP |
| 35351 | ASWLCGRNV |
| 35352 | AMLQKKRQD |
| 35353 | DWYLSSRDQ |
| 35354 | LHSYQWRLG |
| 35355 | CGHLLRRAE |
| 35356 | IEFTHSRKV |
| 35357 | PWYNWDRRC |
| 35358 | LCTSTERQG |
| 35359 | LVDRSGRTA |
| 35360 | NLDMSRRDF |
| 35361 | NAMCFGRAK |
| 35362 | VHHKTNRSY |
| 35363 | TVNRAMREE |
| 35364 | EAGPRKRDV |
| 35365 | CSVWMQRDR |
| 35366 | TFVYGERDR |
| 35367 | LREEELMTR |
| 35368 | WHRDEMLIT |
| 35369 | AMKPMILTN |
| 35370 | RAAGIQGTA |
| 35371 | EQELKNSTQ |
| 35372 | MATYSDPTS |
| 35373 | NPPHRNCTI |
| 35374 | SVTPDSITT |
| 35375 | EACHPDLTP |
| 35376 | ASEHKANTT |
| 35377 | AYPLENDTD |
| 35378 | TYYNMWHTK |
| 35379 | DDYQQHWTG |
| 35380 | DTLDMPETN |
| 35381 | NEQCHAKTS |
| 35382 | NEQCHVKTS |
| 35383 | PYKIVMITR |
| 35384 | IKHITHNTY |
| 35385 | STNPNTETR |
| 35386 | HMALVMQTA |
| 35387 | YDLWGWSTR |
| 35388 | IYMSTGNTP |
| 35389 | QQTKNNSTD |
| 35390 | DTFSNQNTV |
| 35391 | SAPRNEITR |
| 35392 | GSKIIMHTE |
| 35393 | MTKMMCETI |
| 35394 | WCHITWPTN |
| 35395 | CVGYKSNTP |
| 35396 | NCDHRFGTL |
| 35397 | SSQHASHTD |
| 35398 | IMTMQMDTA |
| 35399 | IKHITRNTY |
| 35400 | QFMMGQQTP |
| 35401 | MAMWIADTH |
| 35402 | RKVAVESTW |
| 35403 | IGQHNVQTT |
| 35404 | MLMHADMTQ |
| 35405 | MQPMESATW |
| 35406 | HRVHSEKTD |
| 35407 | RFDQFWDTY |
| 35408 | QSRCVDNTV |
| 35409 | FNESGWPTW |
| 35410 | ESSQEIKTC |
| 35411 | DQEAQVVTG |
| 35412 | TCKNLTYYI |
| 35413 | ECLLFLVGI |
| 35414 | EMKCIGAGI |
| 35415 | QPHEAEFKI |
| 35416 | YTNFEDVLI |
| 35417 | PPHIGTQFI |
| 35418 | WDNWSNTQI |
| 35419 | WVTLCADLI |
| 35420 | RSLDIQYDI |
| 35421 | RSFYHPKLI |
| 35422 | DHFYMSYGI |
| 35423 | VEQMVWADI |
| 35424 | CPWFIKWGI |
| 35425 | PHVSGEGKI |
| 35426 | QAWPKTEYI |
| 35427 | FNWFVRAYI |
| 35428 | DMGMDNKGI |
| 35429 | GTMCREQMI |
| 35430 | TSVIRLFWI |
| 35431 | YMHFRQYPI |
| 35432 | EFVLGCQGI |
| 35433 | WPNIKHQPI |
| 35434 | AAMESCAEI |
| 35435 | HQCQSRSYI |
| 35436 | YSDPKNMSI |
| 35437 | FFRICGSYI |

### Example 11

### AAV5 Variants with Tissue Tropism in Mammary Gland

[0906] This example describes engineered AAV5 variants with tissue tropism in mammary gland that were discovered using the methods and systems described in EXAMPLE 1-EXAMPLE 2.

[0907] CNS, liver, skeletal muscle, heart, lung, spleen, lymph node, bone marrow, mammary gland, skin, adrenal gland, thyroid, colon, sciatic nerve, and spinal cord tissues were analyzed to identify amino acid residues in the AAV5 VP1 581-589 region that drive mammary gland tropism. The results are shown in FIG. 18I which shows the positional frequency of each amino acid in the 581 to 589 region of AAV5 VP1 in mammary gland tissue as compared to all other analyzed tissues, wherein the capsid polypeptide has the sequence of SEQ ID NO: 2. The position (“Xaan”, n=1-9) is denoted on the x-axis and amino acid residues are denoted on the y-axis. The frequency of a particular amino acid residue in a particular position is indicated in the heatmap as intensity. Darker squares indicate a higher frequency of a particular amino acid in a particular position and lighter squares indicate a lower frequency of a particular amino acid in a particular position.

[0908] The frequency of a given amino acid residue occurring at a specified position corresponding to position 581 to position 589 of SEQ ID NO: 1 (generalized in SEQ ID NO: 2) in variants identified in mammary gland over the frequency of that given amino acid residue occurring at the specified position in variants identified in all other harvested tissues was analyzed to identify a set of sequence rules for capsids that preferentially target mammary gland tissue. With reference to TABLE 21 below, and SEQ ID NO: 2 (AAV5 VP1), the following amino acids can, thus, be independently mutated, in any combination, at any one or more positions Xaa1-Xaa9, to provide a VP1 capsid with enhanced mammary gland tropism as compared wildtype AAV5 VP1 capsid (SEQ ID NO: 1), where mammary gland tropism here refers to properties that are preferred for mammary gland transduction over properties that are preferred for transduction of all other harvested tissues.

TABLE 21
Mammary Gland Tropism Rules

Xaa1 is selected from C, K, M, Q, R, or Y
Xaa1 is selected from C, Q, or R
Xaa1 is C
Xaa2 is selected from A, F, I, K, S, T, or V
Xaa2 is selected from A, S, or V
Xaa2 is V
Xaa3 is selected from A, F, G, I, K, L, R, T, or Y
Xaa3 is selected from F, G, K, R, or Y
Xaa3 is selected from F, K, or Y
Xaa3 is F
Xaa4 is selected from A, I, K, Q, R, or T
Xaa4 is selected from A, I, or R
Xaa4 is I
Xaa5 is selected from I, L, M, Q, R, T, V, or Y
Xaa5 is selected from I, M, or Y
Xaa5 is Y
Xaa6 is selected from H, N, S, or V
Xaa6 is H
Xaa7 is selected from A, H, I, N, S or Y
Xaa7 is N or S
Xaa7 is N
Xaa8 is selected from A, C, D, G, H, M, Q, or S
Xaa8 is selected from G, M, or Q
Xaa8 is G
Xaa9 is selected from A, E, L, W, or Y
Xaa9 is selected from A, L, or W
Xaa9 is A

[0909] TABLE 22 below provides sequences of the 581 to 589 region for variant AAV VP1 capsid polypeptides that were found in mammary gland tissue and comport to one or more of the rules provided in TABLE 21. The present disclosure, thus, provides for rAAVs composed of engineered AAV5 VP1 capsid polypeptides having a SEQ ID NO: 2, wherein the Xaa1 to Xaa9 region is any one of SEQ ID NO: 22118-SEQ ID NO: 23117, as disclosed in TABLE 22. Also encompassed herein are rAAVs composed of engineered AAV5 VP2 capsid polypeptides and engineered AAV5 VP3 capsid polypeptides having the sequences disclosed in the below table at the regions in AAV5 VP2 (amin acid residues 445 to 453) and AAV5 VP3 (amino acid residues 389-397) corresponding to the amino acids in the AAV5 VP1 581 to 589 region.

TABLE 22
Sequences of the 581 to 589 Region
in AAV5 VP1 Capsid Polypeptide that Drive
Mammary Gland Tissue Tropism

| SEQ | |
|---|---|
| ID | 581-589 |
| NO | Sequence |
| 22118 | CIKTDWQRI |
| 22119 | CAVSGPECY |
| 22120 | CCEIWLASS |
| 22121 | CDYWLVVPW |
| 22122 | CFTQKESAY |
| 22123 | CGYWLAVPW |
| 22124 | CIPTYHHFG |
| 22125 | CIRGQTHYN |
| 22126 | CNTPYEVWA |
| 22127 | CQSTGAHME |
| 22128 | CQSTGSHMA |
| 22129 | CSKATGGAE |
| 22130 | CSKTTWGAE |
| 22131 | CYNSGDCGN |
| 22132 | CIMSHCRQH |
| 22133 | CSNKTCCKA |
| 22134 | CGYWLVVPW |
| 22135 | CHMLNDCMS |
| 22136 | CSKATWGAE |
| 22137 | CKNPSWYMD |
| 22138 | CFEMYYAMW |
| 22139 | CDPCMECGS |
| 22140 | CTDGKHASW |
| 22141 | CFCTYKIEH |
| 22142 | CIGPHWHIP |
| 22143 | CAHQQHNED |
| 22144 | CAHSYQMSR |
| 22145 | CAIHIFLQD |
| 22146 | CAIQISDTS |
| 22147 | CALSALTME |
| 22148 | CALVSRSQD |
| 22149 | CAMIHGKYD |
| 22150 | CANFAMQQF |
| 22151 | CASRSMLTE |
| 22152 | CAVRTFMGS |
| 22153 | CCDDCPPNR |
| 22154 | CCGIFNGIY |
| 22155 | CCHMQYRES |
| 22156 | CEMYREYFI |
| 22157 | CFAKMEKLQ |
| 22158 | CFAPYMNVD |
| 22159 | CFMHYGRIA |
| 22160 | CFSQFASGS |
| 22161 | CFYQKGAAY |
| 22162 | CGFWLDQNE |
| 22163 | CHRLVMGYH |
| 22164 | CIAPRPEWP |
| 22165 | CIKLKCSHS |
| 22166 | CILWKHAMP |
| 22167 | CISNTRFGV |
| 22168 | CITMPMNFG |
| 22169 | CIYEWFTRD |
| 22170 | CKSGMVHHA |
| 22171 | CKSMGLFLV |
| 22172 | CKYDYHQNT |
| 22173 | CLGYMWQNT |
| 22174 | CMKADGMQR |
| 22175 | CMSDRGLQS |
| 22176 | CMYMQNAMG |
| 22177 | CNNLSVCDE |
| 22178 | CNSLFTNQQ |
| 22179 | CPTMYKMQA |
| 22180 | CQKCYDHYQ |
| 22181 | CQYRTRMIT |
| 22182 | CSAPTLSGN |
| 22183 | CSFHIIMGE |
| 22184 | CSFHNNEHA |
| 22185 | CSICEHCMD |
| 22186 | CSMAEQKSQ |
| 22187 | CSMRYMAVH |
| 22188 | CSRPLHDSY |
| 22189 | CSTQYMKHM |
| 22190 | CSVNFYTSF |
| 22191 | CSWEWFRAE |
| 22192 | CSWQLWQSC |
| 22193 | CSYSTQIGH |
| 22194 | CTAITLRYP |
| 22195 | CTERTESNR |
| 22196 | CTHDIWAQA |
| 22197 | CTHQIHLPA |
| 22198 | CTKTYMHDF |
| 22199 | CTLNVQSDG |
| 22200 | CTLQWSAGP |
| 22201 | CTMRVQMKP |
| 22202 | CTVLRFDHQ |
| 22203 | CVAYSYNST |
| 22204 | CVCGKKQMG |
| 22205 | CVFAQSGSY |
| 22206 | CVFYQRKVL |
| 22207 | CVIAKYYQE |
| 22208 | CVIHTPYQY |
| 22209 | CVIRDGHYD |
| 22210 | CVKMKQDFN |
| 22211 | CVMEQQKER |
| 22212 | CVNTTHDYQ |
| 22213 | CVNVMAADR |
| 22214 | CVQIILDGF |
| 22215 | CVRMCVDHA |
| 22216 | CVSMEVPMV |
| 22217 | CVICKFDEQ |
| 22218 | CVTLTHRDK |
| 22219 | CVTYSSAPK |
| 22220 | CVYPTMKAD |
| 22221 | CWICMCVSP |
| 22222 | CWLHTRTHW |
| 22223 | CWLHTRTHW |
| 22224 | CWTTANTSN |
| 22225 | CYAKVTANT |
| 22226 | CYEQWNGLA |
| 22227 | CYFLHNNHE |
| 22228 | CYYTIEKAE |
| 22229 | CAVGGPECY |
| 22230 | CKTQERANS |
| 22231 | CYNSGDCDN |
| 22232 | CTSTDPIAP |
| 22233 | CRGKSHDHT |
| 22234 | CPALNYDCV |
| 22235 | CMLTHIMEF |
| 22236 | CTFPSADMC |
| 22237 | CQSTGSHME |
| 22238 | CSFHMNITS |
| 22239 | CIPTYRHFG |
| 22240 | CYGRVAHHE |
| 22241 | CTEIRYYGT |
| 22242 | CVKPFLTGW |
| 22243 | CAWYMKQGN |
| 22244 | CAEPVYMWK |
| 22245 | CAGTSMAKE |
| 22246 | CASHVKWGP |
| 22247 | CAVAYMSCT |
| 22248 | CAYKPHVAP |
| 22249 | CCHNEHRHM |
| 22250 | CCVSFAYSC |
| 22251 | CDAVHNDAS |
| 22252 | CEYLPDMHK |
| 22253 | CFHWVNHMT |
| 22254 | CFQTANIGG |
| 22255 | CHDAQFKTD |
| 22256 | CHKSWWRLD |
| 22257 | CHYWVSTDG |
| 22258 | CIAHRHAQP |
| 22259 | CIFRLSALS |
| 22260 | CIGSRQAIA |
| 22261 | CIHIASRLG |
| 22262 | CISFYTSAG |
| 22263 | CITKLMVNA |
| 22264 | CIVTDSMAP |
| 22265 | CIYYPNFYN |
| 22266 | CKQMYLATE |
| 22267 | CKVPVFSLE |
| 22268 | CLRVCNCSP |
| 22269 | CLRVYNCSP |
| 22270 | CMLRYMLGR |
| 22271 | CMLRYMLGR |
| 22272 | CMPQKYHKD |
| 22273 | CMSAMCMWS |
| 22274 | CMSKIVWSS |
| 22275 | CNDQAQYDW |
| 22276 | CNTSMAIMG |
| 22277 | CPWWSDNCM |
| 22278 | CRVTITYPT |
| 22279 | CSFQMQFMG |
| 22280 | CSFVLDNAF |
| 22281 | CSGPVSASA |
| 22282 | CSKYFNDWG |
| 22283 | CSKYSAEYP |
| 22284 | CSTPHHLQL |
| 22285 | CSVNIGQHA |
| 22286 | CSYKDQSQQ |
| 22287 | CSYTHWRSA |
| 22288 | CTAHPMLQA |
| 22289 | CTATKILHA |
| 22290 | CTFVALSMQ |
| 22291 | CTGSIVKQM |
| 22292 | CTHPRITGA |
| 22293 | CTIKQLCNG |
| 22294 | CVANCQQCI |
| 22295 | CVARNINAN |
| 22296 | CVCMYQNMQ |
| 22297 | CVFLAQKMK |
| 22298 | CVFMRSHDK |
| 22299 | CVFPVHSSN |
| 22300 | CVHKICMHH |
| 22301 | CVHQNSRAK |
| 22302 | CVHRGLTYT |
| 22303 | CVHVAMHYP |
| 22304 | CVHYANMML |
| 22305 | CVLSKMWCH |
| 22306 | CVLRSNVQL |
| 22307 | CVNEFFTCF |
| 22308 | CVNMKTDGN |
| 22309 | CVNQLCDSQ |
| 22310 | CVNVENLTA |
| 22311 | CVPDTIDTE |
| 22312 | CVQMIMKDW |
| 22313 | CVQTDNRRP |
| 22314 | CVRHYGEYW |
| 22315 | CVVADQGRG |
| 22316 | CVWHAPIQT |
| 22317 | CVWHASIQT |
| 22318 | CVYTKIIGH |
| 22319 | CWEFMFWHG |
| 22320 | CWGVISKAP |
| 22321 | CWIRGTQDR |
| 22322 | CYLITFREH |
| 22323 | TVADSSRLM |
| 22324 | TVCMFQVLP |
| 22325 | TVFPMTVVP |
| 22326 | TVGFSEQDA |
| 22327 | TVIQWYWHH |
| 22328 | TVLSWGLCN |
| 22329 | TVNQECNCQ |
| 22330 | TVRPQDNKN |
| 22331 | VVDHSCSRV |
| 22332 | VVDPFGHEQ |
| 22333 | VVHENQLKP |
| 22334 | WVTCRGTVF |
| 22335 | YVEIHHAQK |
| 22336 | YVHEGGENP |
| 22337 | YVLESNYCQ |
| 22338 | YVSASWMTP |
| 22339 | YVTKFAECH |
| 22340 | YVVTHVPWH |
| 22341 | YVYDEFLWS |
| 22342 | FVMCYNDCK |
| 22343 | AVHWHRKWE |
| 22344 | AVINPPCHP |
| 22345 | AVSLQPQFG |
| 22346 | DVKAFMGCV |
| 22347 | GVEAYRNFK |
| 22348 | GVIHRQYCP |
| 22349 | KVEANPRVC |
| 22350 | LVHAVSYIC |
| 22351 | MVAPPNCCV |
| 22352 | NVNVRESEW |
| 22353 | PVHAVSYIC |
| 22354 | RVTIMFTDT |
| 22355 | SVHTADVCC |
| 22356 | SVPQQKIDE |
| 22357 | TVKINSISP |
| 22358 | YVQCTHYAQ |
| 22359 | GVIHRQYCQ |
| 22360 | QVPRPSMWW |
| 22361 | PVSPLRSYV |
| 22362 | QVTSDGKII |
| 22363 | VVGWDNYVA |
| 22364 | NVHHEWCDW |
| 22365 | MVDPMSVPF |
| 22366 | DVDYRSEAW |
| 22367 | IVPQQKIDE |
| 22368 | VVHPMAYCF |
| 22369 | LVVTKFTYV |
| 22370 | AVKSRTTWV |
| 22371 | AVQGDPGVA |
| 22372 | AVSVETWWT |
| 22373 | AVVDCPLNI |
| 22374 | AVWNVVSDG |
| 22375 | AVYQYVETP |
| 22376 | DVDKLEHGQ |
| 22377 | DVDNCYKGD |
| 22378 | DVICFGKWE |
| 22379 | DVQTRNLSK |
| 22380 | DVYRDAMTP |
| 22381 | EVALQWAST |
| 22382 | EVDVRVLFD |
| 22383 | EVESWMWVC |
| 22384 | EVHRVASCP |
| 22385 | EVSKFNHYF |
| 22386 | EVSTITFWS |
| 22387 | EVTPHWTGG |
| 22388 | EVYYAMASW |
| 22389 | FVNVMKVTC |
| 22390 | GVKPGASCG |
| 22391 | GVQQFYRYD |
| 22392 | GVRLSSPWE |
| 22393 | GVYPMHEAC |
| 22394 | HVCMMASCD |
| 22395 | IVCAYSNAS |
| 22396 | IVEPAIVCA |
| 22397 | IVNKWDGFA |
| 22398 | IVYYCGKRK |
| 22399 | KVICHEFTS |
| 22400 | KVMHTGWHP |
| 22401 | KVVQRIDHD |
| 22402 | LVCRYWDDE |
| 22403 | LVFMQEYAA |
| 22404 | LVKCNTCME |
| 22405 | CVNHCGQMG |
| 22406 | LVTEQVNSP |
| 22407 | MVDRMKWHK |
| 22408 | MVYPIEWGA |
| 22409 | NVGIITFQD |
| 22410 | NVLQNSIMC |
| 22411 | NVYTHHVLS |
| 22412 | QVDNYFNRL |
| 22413 | QVNFGLHAQ |
| 22414 | RVNEATHDD |
| 22415 | SVCPFSYNL |
| 22416 | SVFSNQDGV |
| 22417 | SVGFEQSWY |
| 22418 | SVIPLPHGD |
| 22419 | SVITTEFQD |
| 22420 | SVVNHAGAC |
| 22421 | TVAHERSFQ |
| 22422 | TVDNTNWLK |
| 22423 | TVHYSSQDP |
| 22424 | TVSGLWQEL |
| 22425 | VVGTYALTY |
| 22426 | VVHTCAMCT |
| 22427 | VVSAHMPGV |
| 22428 | VVTVAWTPG |
| 22429 | WVEKYLISY |
| 22430 | YVLSAIPFG |
| 22431 | YVWYRRIDL |
| 22432 | KVCNSEYWD |
| 22433 | QVHIKVTDH |
| 22434 | KVDRNTNWC |
| 22435 | GVEAYCNFK |
| 22436 | HVWNDVFHM |
| 22437 | EVQRNIYSP |
| 22438 | GVAQYLHHC |
| 22439 | DVPIHRVQL |
| 22440 | SVNLNCTEH |
| 22441 | FVFAMIPGF |
| 22442 | AVHWHRKCE |
| 22443 | GVMIYEADE |
| 22444 | KVAGGHETT |
| 22445 | FVPWCHSFG |
| 22446 | NVTPGRTHS |
| 22447 | LVSQWDYDM |
| 22448 | RVDIGGFAQ |
| 22449 | HVDQHRVQA |
| 22450 | AVEACYHSP |
| 22451 | AVFTFATCG |
| 22452 | AVQWSAENM |
| 22453 | DVDYRPDAQ |
| 22454 | DVELGGSNF |
| 22455 | DVFQYEMLA |
| 22456 | DVGYASDPK |
| 22457 | DVKVTEDAE |
| 22458 | DVRLDDGAQ |
| 22459 | DVRPDEFHN |
| 22460 | DVRPDKFHN |
| 22461 | DVVSTESTT |
| 22462 | EVFREWMWM |
| 22463 | EVGSDCHQG |
| 22464 | EVKYMRHIC |
| 22465 | EVRPSVGSD |
| 22466 | EVTSAGFDF |
| 22467 | FVIWRQESR |
| 22468 | FVRCLSTHN |
| 22469 | FVSEQMTAQ |
| 22470 | GVDSSRPVQ |
| 22471 | HVCQKTHSI |
| 22472 | HVNTSCKQF |
| 22473 | HVQHHDAAT |
| 22474 | IVAYGTCGA |
| 22475 | IVHQKQLAA |
| 22476 | LVDEMFSQW |
| 22477 | LVKGSFAPD |
| 22478 | LVKPQSGEL |
| 22479 | LVRQDSQIG |
| 22480 | LVVCSCPFP |
| 22481 | MVEFYCSDE |
| 22482 | MVEFYYSDE |
| 22483 | NVAYHMVNN |
| 22484 | NVENAYDAM |
| 22485 | NVFLNLDLA |
| 22486 | NVHTIENSA |
| 22487 | NVVDILAGS |
| 22488 | NVYYKHAHP |
| 22489 | PVIRTWVDI |
| 22490 | QVASHTQPE |
| 22491 | QVATWSMYH |
| 22492 | QVFMASTGE |
| 22493 | RVGVQEAVC |
| 22494 | RVHISILKG |
| 22495 | RVNMKTDGN |
| 22496 | SVCLHNLVG |
| 22497 | SVHGFDQSM |
| 22498 | SVIKVAFFF |
| 22499 | SVRLHNLVG |
| 22500 | TVDPNVRVD |
| 22501 | TVVPQGFDR |
| 22502 | YVCIPAHDR |
| 22503 | YVCMIHMDD |
| 22504 | YVDLIMSVD |
| 22505 | YVISKCAGQ |
| 22506 | TSFCQIASR |
| 22507 | VCFKLFHVE |
| 22508 | AFFKFMTQM |
| 22509 | DKFPMPTHS |
| 22510 | ETFGIRTFA |
| 22511 | GIFWASYGF |
| 22512 | GKFPMPTHS |
| 22513 | GMFCASYGF |
| 22514 | KDFWGHQCF |
| 22515 | LLFTLMSSS |
| 22516 | QTFYEGHAT |
| 22517 | RDFRMNAGA |
| 22518 | RTFYEGNAT |
| 22519 | TTFQSLQQM |
| 22520 | NQFHWVRYD |
| 22521 | LWFFMKFAK |
| 22522 | YTFWDYHRS |
| 22523 | KDFWEHQCF |
| 22524 | VHFTVLNWG |
| 22525 | DYFQYNEAP |
| 22526 | QEFLEERYV |
| 22527 | GTFHCCAWE |
| 22528 | ETFGIRTFD |
| 22529 | EQFADRAPR |
| 22530 | ARFMWNHTR |
| 22531 | DTFLEMSMG |
| 22532 | DTFPIAGSF |
| 22533 | EAFRHDHFH |
| 22534 | EGFFYHHGG |
| 22535 | EGFQFSNQG |
| 22536 | ERFMTASMQ |
| 22537 | FEFTVHCTH |
| 22538 | GKFEPPVNA |
| 22539 | HAFPTVRWG |
| 22540 | IMFDPNIPN |
| 22541 | KAFHIQREK |
| 22542 | LDFQIRFER |
| 22543 | LPFHLQSDT |
| 22544 | LPFTQMHGS |
| 22545 | LSFPVVLTE |
| 22546 | NAFEYEKIM |
| 22547 | NAFTKTQDQ |
| 22548 | NSFSTNWSY |
| 22549 | NTFCETVTF |
| 22550 | QKFEGEWFT |
| 22551 | RAFVGCSPE |
| 22552 | RQFAHRFKM |
| 22553 | SCFAILSAN |
| 22554 | TSFELNDER |
| 22555 | TSFSPELFN |
| 22556 | WNFNCIILH |
| 22557 | STFISSGIQ |
| 22558 | FKFWDMETR |
| 22559 | KRFVDMPEM |
| 22560 | VSFQRMNDM |
| 22561 | ERFKTFCEA |
| 22562 | LLFPLMSSS |
| 22563 | EKRNFKTMN |
| 22564 | NWFQAIEIG |
| 22565 | GIFCASYGF |
| 22566 | IWFWWEKAE |
| 22567 | RTFYEGHAT |
| 22568 | TTFPQVIMN |
| 22569 | DAFINRLSG |
| 22570 | DIFDRPSSD |
| 22571 | ETFLPWVHT |
| 22572 | ETFSKTWFG |
| 22573 | KSFGSPFER |
| 22574 | KSFGSPFEW |
| 22575 | MAFYKSQFN |
| 22576 | NAFGMEYNT |
| 22577 | NSFKPSGVT |
| 22578 | PWFMVPNWP |
| 22579 | QCFFNHRCE |
| 22580 | RAFQDHYAY |
| 22581 | TIFSASDSK |
| 22582 | VAFYQENTT |
| 22583 | WHFSSKWMD |
| 22584 | TPGITQQQW |
| 22585 | TSHICVSSL |
| 22586 | TWLIDADMA |
| 22587 | VAMIMEGQF |
| 22588 | VFKIREDDN |
| 22589 | WADIEYSHD |
| 22590 | WTGIKCQSS |
| 22591 | YFCILEKMT |
| 22592 | YMCIQMAGW |
| 22593 | ESPIMLNQA |
| 22594 | RTPIELMHG |
| 22595 | AGQITTSVI |
| 22596 | ESDIFDGRQ |
| 22597 | HPSICKGGD |
| 22598 | QCHIIVARE |
| 22599 | QCHIIVARG |
| 22600 | TAKIIMLAS |
| 22601 | DMSIATWYP |
| 22602 | ESDIFDGHQ |
| 22603 | TCVIGKGRR |
| 22604 | VACIEHAKC |
| 22605 | QFDIDQCCT |
| 22606 | HPSICQGGD |
| 22607 | AWIISQEGR |
| 22608 | DMWILKDAS |
| 22609 | DYYEIDCFM |
| 22610 | EHMIEFPHR |
| 22611 | FREIKIYDM |
| 22612 | GLYITHSME |
| 22613 | HCNIFSREQ |
| 22614 | IICICNRGH |
| 22615 | KEVIMKRCV |
| 22616 | KLEIMCQAK |
| 22617 | KPGIMKFYN |
| 22618 | LYNIPMGYT |
| 22619 | MKDIRVTQR |
| 22620 | MYTIGTCYG |
| 22621 | NINIYWMID |
| 22622 | NSAIMSNYM |
| 22623 | QEDILQTQY |
| 22624 | QFEICHSQE |
| 22625 | QHLIMPEPH |
| 22626 | QPLIQHAGG |
| 22627 | QQTIDSYGH |
| 22628 | QSGINDLYG |
| 22629 | RCMIYHQNA |
| 22630 | RGGIFPQRP |
| 22631 | RMCIDYLRP |
| 22632 | TACIQQKLL |
| 22633 | TNRIVTRII |
| 22634 | TQQILHDAF |
| 22635 | TRIINVILG |
| 22636 | TSLITGQLY |
| 22637 | VEPIMFQPA |
| 22638 | VNYIICKMD |
| 22639 | VNYIICKMG |
| 22640 | IKHITHNTY |
| 22641 | MYAIADELD |
| 22642 | NPSIQPKTM |
| 22643 | PENIAEDHE |
| 22644 | MRKIKIACM |
| 22645 | LRAILDCGW |
| 22646 | ELAIDQDIH |
| 22647 | SRTICVHGN |
| 22648 | IANITACAN |
| 22649 | EESIRLLDE |
| 22650 | EIYELPKFP |
| 22651 | GSAIFVKEE |
| 22652 | GYTIKNGYN |
| 22653 | HHEIANLHQ |
| 22654 | KHQINAVER |
| 22655 | NGEIFSCMS |
| 22656 | NGEIFSYMS |
| 22657 | QFKIYDCVG |
| 22658 | QIGITYYLP |
| 22659 | QMGINHDDR |
| 22660 | QPAINTQCA |
| 22661 | SFKILNRGG |
| 22662 | SPDIDLINH |
| 22663 | STSITELAM |
| 22664 | TTLIKMHVE |
| 22665 | TWEIKHNQV |
| 22666 | VACIANLWT |
| 22667 | VFAIMTRTQ |
| 22668 | WSNIYWRQD |
| 22669 | THGHYTMSA |
| 22670 | TRAGYNEQD |
| 22671 | TSVKYSAWG |
| 22672 | TYWNYAEAK |
| 22673 | VFTDYWEQG |
| 22674 | VFTDYWERG |
| 22675 | VIDWYPHQQ |
| 22676 | VSDEYVMEQ |
| 22677 | WELTYDCLA |
| 22678 | WIICYEALQ |
| 22679 | WLIVYDHGN |
| 22680 | YAHSYGHFD |
| 22681 | MAEQYKYGH |
| 22682 | TGAKYHDWL |
| 22683 | EAENYFPRH |
| 22684 | GLMDYSLCA |
| 22685 | KEIQYHSYE |
| 22686 | MDTCYMYAD |
| 22687 | QPPKYFVHQ |
| 22688 | RNTPYEFWA |
| 22689 | SGNMYESGA |
| 22690 | TEPHYWEWP |
| 22691 | TTERYYWCQ |
| 22692 | KEIPYHSYE |
| 22693 | LMAWYENWY |
| 22694 | ITRTYQEMQ |
| 22695 | VREYYPKFH |
| 22696 | QQEAYILRI |
| 22697 | DMTFYLSRD |
| 22698 | MMPEYFNKD |
| 22699 | FITAYHPCL |
| 22700 | GQKSYDGCH |
| 22701 | MFEKYFQTM |
| 22702 | NEAPYSTWQ |
| 22703 | SMSEYHYDE |
| 22704 | AAVQYSLMG |
| 22705 | AEEVYGYHQ |
| 22706 | AQMEYDCAM |
| 22707 | DDALYAVFY |
| 22708 | DSWMYHVQL |
| 22709 | DYIHYKNGM |
| 22710 | EFSYYHTHG |
| 22711 | ESEKYTWSG |
| 22712 | FGATYNQTI |
| 22713 | FGLWYRDHK |
| 22714 | FHITYLMDK |
| 22715 | GAQQYADSI |
| 22716 | GFCHYWKQG |
| 22717 | GNCKYHVTQ |
| 22718 | HIVTYEHHE |
| 22719 | HPCYYSWAP |
| 22720 | HWDNYWKMD |
| 22721 | HWREYPSKG |
| 22722 | ICHQYTRHG |
| 22723 | IPLAYPEYQ |
| 22724 | ISKAYVDWW |
| 22725 | IYHPYDMLG |
| 22726 | KQMEYDNFH |
| 22727 | LMIQYVNKH |
| 22728 | LMREYMSVP |
| 22729 | MCQWYATNL |
| 22730 | MSDYYKEDS |
| 22731 | MYGGYAAGF |
| 22732 | NFCGYQAMH |
| 22733 | NGLQYMSSA |
| 22734 | NYHYYDHAG |
| 22735 | PTVAYENLD |
| 22736 | QAIGYNYFW |
| 22737 | QGQYYYECG |
| 22738 | QWPLYVMDR |
| 22739 | REELYQCAP |
| 22740 | REKNYELSE |
| 22741 | RWYWYESCN |
| 22742 | SMTSYYRQQ |
| 22743 | SWVWYPNLC |
| 22744 | WATAYWQGI |
| 22745 | WCGFYFLAA |
| 22746 | WNSPYKKRY |
| 22747 | YQVHYASHG |
| 22748 | KCTEYVHTC |
| 22749 | PIHTYKRHP |
| 22750 | RMKWYLPCV |
| 22751 | FAMSYQRQN |
| 22752 | EASWYYPAI |
| 22753 | MEPHYWEWP |
| 22754 | MSTDYCKVN |
| 22755 | TSKDYNEEI |
| 22756 | MTERYYWCQ |
| 22757 | QTPKYFVHQ |
| 22758 | YSKQYAEYY |
| 22759 | HSDWYMKYP |
| 22760 | AEGYYVFQP |
| 22761 | AWGCYQKGY |
| 22762 | DIKMYWEGA |
| 22763 | FGILYNNNE |
| 22764 | FNQLYMITH |
| 22765 | GAEGYSKDQ |
| 22766 | GAEGYSKGQ |
| 22767 | GINDYKSGN |
| 22768 | GMDFYFNLE |
| 22769 | HKMAYGRDQ |
| 22770 | EAYEYWDYW |
| 22771 | IKEGYQLGG |
| 22772 | ISQFYLLDQ |
| 22773 | KECNYQARG |
| 22774 | KPLQYEAIQ |
| 22775 | LPNPYKTVV |
| 22776 | LPVQYEDRD |
| 22777 | MCDNYKSLA |
| 22778 | NHGNYEEAW |
| 22779 | NTMPYGHSY |
| 22780 | NYIPYGRLA |
| 22781 | QTQTYAYMD |
| 22782 | RFDHYNNEQ |
| 22783 | RKEYYPNVQ |
| 22784 | SAYQYLGCH |
| 22785 | SCGPYLWGT |
| 22786 | SHGNYEIAW |
| 22787 | SMNLYNRGV |
| 22788 | SMPPYRMLS |
| 22789 | SYQPYSKTV |
| 22790 | TANCYPILG |
| 22791 | TSWMYYDYG |
| 22792 | TYCLYGISE |
| 22793 | VALHYDHPN |
| 22794 | YFQLYMKEG |
| 22795 | YWAGYHMWP |
| 22796 | YYTCYPPSM |
| 22797 | TTHSDHHHA |
| 22798 | TYNLEHQCS |
| 22799 | TYRLEHECI |
| 22800 | VCQKVHGLF |
| 22801 | VLDNIHWHW |
| 22802 | VSEETHNFR |
| 22803 | VWNWEHKCT |
| 22804 | WYQCLHYQN |
| 22805 | YAWCQHCKN |
| 22806 | YHMDVHDSM |
| 22807 | YNMLTHVSM |
| 22808 | ETTLAHRWE |
| 22809 | HSAARHMFV |
| 22810 | LAECKHSSA |
| 22811 | MFMMMHDIW |
| 22812 | MFMTMHDIW |
| 22813 | NLNNWHTDM |
| 22814 | QNNWGHYNK |
| 22815 | QTLGGHMCT |
| 22816 | SSNFNHHIY |
| 22817 | MTAKEHAYL |
| 22818 | HQVLDHQLQ |
| 22819 | DMRRAHQEK |
| 22820 | VNQMMHTQA |
| 22821 | MFSFKHVHW |
| 22822 | AQASAHIMS |
| 22823 | DAIPRHICR |
| 22824 | DCSQQHMTL |
| 22825 | DEGVEHRPM |
| 22826 | DEMLQHSIM |
| 22827 | DFHNAHFGS |
| 22828 | DHDTNHWSH |
| 22829 | EASTFHRQG |
| 22830 | ECAETHEMK |
| 22831 | ECHVGHSGC |
| 22832 | EMCSVHQAW |
| 22833 | FCKFMHETH |
| 22834 | GFCQLHTQE |
| 22835 | GPSLIHQAA |
| 22836 | HYETEHDGC |
| 22837 | IAKASHKDR |
| 22838 | IASGTHHCQ |
| 22839 | IIEQSHTLE |
| 22840 | KLDLTHRMQ |
| 22841 | LFTKQHVYS |
| 22842 | LKHFVHAAS |
| 22843 | LTLGNHGEY |
| 22844 | NAGCQHEYE |
| 22845 | NQRVEHAFS |
| 22846 | NTEREHRYN |
| 22847 | QIVHDHRHR |
| 22848 | RYDCMHCYA |
| 22849 | SAGEIHEHF |
| 22850 | SLDGVHDGF |
| 22851 | SLHYWHSAN |
| 22852 | SSNYWHASS |
| 22853 | STKAHHWCQ |
| 22854 | TEAATHWHR |
| 22855 | TEDLSHLWW |
| 22856 | TFQQSHAAV |
| 22857 | TISLVHLSE |
| 22858 | TMDVLHCDY |
| 22859 | TWCYRHNVE |
| 22860 | VSSQGHRFY |
| 22861 | VWMTWHASY |
| 22862 | YHAPQHHMG |
| 22863 | TQKGNHCRW |
| 22864 | APRNVHCGT |
| 22865 | LMEYCHDRF |
| 22866 | NYDFLHHVE |
| 22867 | NCIAKHEVT |
| 22868 | NSAHVHYFH |
| 22869 | NGYLVHACQ |
| 22870 | SDGMVHNCW |
| 22871 | KCGVEHEHR |
| 22872 | QATNEHIFW |
| 22873 | DTHHTHWQY |
| 22874 | FTQAIHHPD |
| 22875 | LEIVMHSLP |
| 22876 | GAKYRHYLQ |
| 22877 | APNFCHCSF |
| 22878 | ATHDMHRLC |
| 22879 | DDKCDHLQH |
| 22880 | DTKWMHQHC |
| 22881 | DTKWMHQHC |
| 22882 | EGVPLHRAF |
| 22883 | VSMFNQNSC |
| 22884 | WAHYTINQQ |
| 22885 | YHRHIANNG |
| 22886 | YLHNQGNGL |
| 22887 | YRGAACNPH |
| 22888 | DLGMINNME |
| 22889 | DEKAEKNES |
| 22890 | FASMQANDR |
| 22891 | GGHLEGNWQ |
| 22892 | HITMWYNGD |
| 22893 | HRQESPNDK |
| 22894 | NEIFNQNSY |
| 22895 | NGVALENRG |
| 22896 | NPWFLDNQF |
| 22897 | QMTSSTNCV |
| 22898 | TKQQLINSN |
| 22899 | NEISNQNSY |
| 22900 | VECTDTNDE |
| 22901 | HITVWYNGD |
| 22902 | RNNWKVNSQ |
| 22903 | YCCSDTNTE |
| 22904 | QMTSSTNCA |
| 22905 | PACQKGNHA |
| 22906 | ACLWQRNDE |
| 22907 | ATVQFANDG |
| 22908 | DALTHGNFE |
| 22909 | DHAKLNNPS |
| 22910 | DITGHCNPA |
| 22911 | EAINRVNCQ |
| 22912 | EHEHRINQC |
| 22913 | EHRQLVNNN |
| 22914 | EKIPHYNME |
| 22915 | EKWDMFNTE |
| 22916 | FTYCVNNYQ |
| 22917 | GKICAENWI |
| 22918 | GYRPELNSA |
| 22919 | HFDVICNCY |
| 22920 | IMALDQNTN |
| 22921 | IMEMINNAF |
| 22922 | IRMYAYNWL |
| 22923 | LESQQSNYT |
| 22924 | LIGPQANLY |
| 22925 | LTSMQENHS |
| 22926 | MIQYNKNMG |
| 22927 | MSEPRYNDL |
| 22928 | NCEWEMNDR |
| 22929 | NRSMFKNVR |
| 22930 | PTDFNENDC |
| 22931 | QFYSMDNHD |
| 22932 | QQEVKKNNA |
| 22933 | RNCMDTNGM |
| 22934 | RWADVTNMS |
| 22935 | STIYAFNWA |
| 22936 | TCMQCSNMP |
| 22937 | TWAPHNNGM |
| 22938 | VAKTSWNHC |
| 22939 | WICPKINAP |
| 22940 | WSILGTNWG |
| 22941 | YDPHNNNGV |
| 22942 | YSVARCNMD |
| 22943 | YSVCHMANY |
| 22944 | YIRVGGNNE |
| 22945 | FQIRQDNLA |
| 22946 | KIDAHSNME |
| 22947 | NSVALENRG |
| 22948 | KNTMCDNDA |
| 22949 | ALKSWMNGS |
| 22950 | ILIFIQNCP |
| 22951 | QMKPLINDE |
| 22952 | TISHHLNRE |
| 22953 | DHLFNNNEW |
| 22954 | ETGYRENPC |
| 22955 | TSDTMWEGD |
| 22956 | TTVRKQFGY |
| 22957 | VGGSVNRGG |
| 22958 | VLYYSNYGH |
| 22959 | WAMFMYEGA |
| 22960 | YAQCFGQGI |
| 22961 | YAQCFSQGI |
| 22962 | YLRSLKCGN |
| 22963 | NGCTTTKGE |
| 22964 | DPKWEQYGM |
| 22965 | EFVMGCQGI |
| 22966 | FCQAINIGH |
| 22967 | GCMTRLDGL |
| 22968 | HFHEVAGGS |
| 22969 | HHMHIWLGL |
| 22970 | HTVGMAEGD |
| 22971 | IQAVMVSGW |
| 22972 | KSMPPGQGY |
| 22973 | SRDTWQIGR |
| 22974 | TEGVKRWGQ |
| 22975 | VLMFNRGGS |
| 22976 | VLMFNRWGS |
| 22977 | DPKWEKYGM |
| 22978 | TNHCRDAGT |
| 22979 | KWTDCIEGY |
| 22980 | DTDKQGQGE |
| 22981 | MTRQPEDGF |
| 22982 | ASDKMDVGS |
| 22983 | QPEQGGWGT |
| 22984 | KSMPPGQGD |
| 22985 | AACHFTYGS |
| 22986 | AATCSLKGH |
| 22987 | AHADMTTGF |
| 22988 | AMQRSVAGE |
| 22989 | AYEHCEHGP |
| 22990 | DIADRNVGH |
| 22991 | DRMCMMCGV |
| 22992 | DRSEFRQGT |
| 22993 | DTPDFNTGI |
| 22994 | ETEGQVAGA |
| 22995 | ETNLHTKGH |
| 22996 | HALSLTWGD |
| 22997 | HSLPHTEGL |
| 22998 | IHSRVNAGH |
| 22999 | IQKVTKRGA |
| 23000 | KEGPTPVGH |
| 23001 | KFDFWVAGH |
| 23002 | KHTQQDSGS |
| 23003 | LATHQKDGR |
| 23004 | LMELTNEGW |
| 23005 | LSPKNDPGV |
| 23006 | LSYSIVTGE |
| 23007 | MAVTLMHGC |
| 23008 | MCVRWSVGD |
| 23009 | MDTHLQHGA |
| 23010 | MGGSNVWGN |
| 23011 | MKWDCLIGP |
| 23012 | NFVCSDIGK |
| 23013 | NLMRRDHGG |
| 23014 | QAMYTTAGE |
| 23015 | QLKNAFEGS |
| 23016 | QQYAPVIGP |
| 23017 | QSREPRGGK |
| 23018 | SAVGWGVGQ |
| 23019 | SYIFSEIGT |
| 23020 | SYMVIGWGG |
| 23021 | TFTYAYDGQ |
| 23022 | TKKRNCFGM |
| 23023 | TSIHDNQGM |
| 23024 | VATSKDVGP |
| 23025 | VNRPTNFGT |
| 23026 | WPQRVPLGM |
| 23027 | YFPFHMAGQ |
| 23028 | EIRMIISGC |
| 23029 | GRHYEAAGY |
| 23030 | MLAFDPMGR |
| 23031 | HHMPIWLGL |
| 23032 | HFHEVAWGS |
| 23033 | AGQFKSEGS |
| 23034 | TGACMVEGL |
| 23035 | TLVSCDQGN |
| 23036 | DGGLRVQGM |
| 23037 | WINSPIQGF |
| 23038 | EGGKNIFGM |
| 23039 | LDGPIGMGT |
| 23040 | EPLYSWVGT |
| 23041 | TNIKERTGS |
| 23042 | TEDVKRWGQ |
| 23043 | TSHLAWCEA |
| 23044 | VAMMGCMQA |
| 23045 | VCENEAGVA |
| 23046 | VMCQTLVKA |
| 23047 | VSLVRYVDA |
| 23048 | YPCFGTSLA |
| 23049 | AHTWLQHWA |
| 23050 | DAGWQQFAA |
| 23051 | DTEQWEATA |
| 23052 | HQYELQMHA |
| 23053 | LGYHCCQAA |
| 23054 | NSTPMACMA |
| 23055 | QIEYCMFYA |
| 23056 | SDDDREREA |
| 23057 | SHDLVAAWA |
| 23058 | THAWLQHWA |
| 23059 | SAQCAGHNA |
| 23060 | VLPEGTMTA |
| 23061 | LGMQADRFA |
| 23062 | LGYYCCQAA |
| 23063 | KYAYSLDCA |
| 23064 | GTEQWEATA |
| 23065 | WSKGTMLEA |
| 23066 | KGIWQGMDA |
| 23067 | NERTGACSA |
| 23068 | KSEHHWENA |
| 23069 | FSEQNVSAA |
| 23070 | ASYYLVRNA |
| 23071 | DGERFMMQA |
| 23072 | DIGLRNMNA |
| 23073 | DTIQFVQNA |
| 23074 | KWKWKTMMA |
| 23075 | DYRGQDHVA |
| 23076 | EFTTCVELA |
| 23077 | EICFKEYWA |
| 23078 | EQIGVWWHA |
| 23079 | ETMWNMWDA |
| 23080 | IMITEVRSA |
| 23081 | KQETRGSVA |
| 23082 | KSCITSHCA |
| 23083 | LSHQECAAA |
| 23084 | LTNDKSVTA |
| 23085 | MCRKNKILA |
| 23086 | MEGSDNLSA |
| 23087 | MHEGVAGIA |
| 23088 | MNEYMIKCA |
| 23089 | MYGFVMWEA |
| 23090 | NIYATGSQA |
| 23091 | NQVHSVDLA |
| 23092 | NYTPFYKRA |
| 23093 | PEYWGQKIA |
| 23094 | QFNFTESDA |
| 23095 | QTDWKVVVA |
| 23096 | SAHDTIRDA |
| 23097 | SFMVMACYA |
| 23098 | SECGTCQRA |
| 23099 | SSSCVVIAA |
| 23100 | SSTTVWEYA |
| 23101 | STGTNAEHA |
| 23102 | SYQWLCADA |
| 23103 | TSEGITREA |
| 23104 | TSSHQTVKA |
| 23105 | VCNMTDLQA |
| 23106 | VKESSDACA |
| 23107 | VMEQLQHTA |
| 23108 | WCTPMNRVA |
| 23109 | YKQSHMVAA |
| 23110 | MSWDMVEAA |
| 23111 | QFRCMMDDA |
| 23112 | EIVQPQCYA |
| 23113 | ALQFVSSTA |
| 23114 | TERRMFRTA |
| 23115 | QTPKSLLDA |
| 23116 | AEVMQWQAA |
| 23117 | EADTFTLIA |

### Example 12

### AAV5 Variants with Tissue Tropism in Lung

[0910] This example describes engineered AAV5 variants with tissue tropism in lung that were discovered using the methods and systems described in EXAMPLE 1-EXAMPLE 2.

[0911] CNS, liver, skeletal muscle, heart, lung, spleen, lymph node, bone marrow, mammary gland, skin, adrenal gland, thyroid, colon, sciatic nerve, and spinal cord tissues were analyzed to identify amino acid residues in the AAV5 VP1 581-589 region that drive lung tropism. The results are shown in FIG. 18E which shows the positional frequency of each amino acid in the 581 to 589 region of AAV5 VP1 in lung tissue as compared to all other analyzed tissues, wherein the capsid polypeptide has the sequence of SEQ ID NO: 2. The position (“Xaan”, n=1-9) is denoted on the x-axis and amino acid residues are denoted on the y-axis. The frequency of a particular amino acid residue in a particular position is indicated in the heatmap as intensity. Darker squares indicate a higher frequency of a particular amino acid in a particular position and lighter squares indicate a lower frequency of a particular amino acid in a particular position.

[0912] The frequency of a given amino acid residue occurring at a specified position corresponding to position 581 to position 589 of SEQ ID NO: 1 (generalized in SEQ ID NO: 2) in variants identified in lung over the frequency of that given amino acid residue occurring at the specified position in variants identified in all other harvested tissues was analyzed to identify a set of sequence rules for capsids that preferentially target lung tissue. With reference to TABLE 23 below, and SEQ ID NO: 2 (AAV5 VP1), the following amino acids can, thus, be independently mutated, in any combination, at any one or more positions Xaa1-Xaa9, to provide a VP1 capsid with enhanced lung tropism as compared wildtype AAV5 VP1 capsid (SEQ ID NO: 1), where lung tropism here refers to properties that are preferred for lung transduction over properties that are preferred for transduction of all other harvested tissues.

TABLE 23
Lung Tropism Rules

Xaa1 is selected from A, E, K, M, Q, R, S, or T
Xaa1 is selected from A, E, or Q
Xaa1 is E
Xaa2 is selected from A, I, K, S, T, or V
Xaa2 is selected from S, T, or V
Xaa2 is T
Xaa3 is selected from A, E, K, M, Q, R, S, T, or V
Xaa3 is selected from A, K, R, or S
Xaa3 is R
Xaa4 is selected from M, P, R, S, or T
Xaa4 is selected from P, Q, or T
Xaa4 is Q
Xaa5 is selected from I, K, L, M, T, V, or Y
Xaa5 is selected from L, M, or Y
Xaa5 is L
Xaa6 is selected from D, G, H, M, N, R, or S
Xaa6 is selected from H or N
Xaa6 is N
Xaa7 is selected from A, K, M, Q, or R
Xaa7 is selected from A, K or R
Xaa7 is R
Xaa8 is selected from A, F, G, S, W, or Y
Xaa8 is selected from A, F, or G
Xaa8 is F
Xaa9 is selected from A, E, G, P, R, or Y
Xaa9 is selected from G, P, or R
Xaa9 is G

[0913] TABLE 24 below provides sequences of the 581 to 589 region for variant AAV VP1 capsid polypeptides that were found in lung tissue and comport to one or more of the rules provided in TABLE 23. The present disclosure, thus, provides for rAAVs composed of engineered AAV5 VP1 capsid polypeptides having a SEQ ID NO: 2, wherein the Xaa1 to Xaa9 region is any one of SEQ ID NO: 16118-SEQ ID NO: 17117, as disclosed in TABLE 24. Also encompassed herein are rAAVs composed of engineered AAV5 VP2 capsid polypeptides and engineered AAV5 VP3 capsid polypeptides having the sequences disclosed in the below table at the regions in AAV5 VP2 (amin acid residues 445 to 453) and AAV5 VP3 (amino acid residues 389-397) corresponding to the amino acids in the AAV5 VP1 581 to 589 region

TABLE 24
Sequences of the 581 to 589 Region in AAV5 VP1
Capsid Polypeptide that Drive Lung Tissue
Tropism

| SEQ | |
|---|---|
| ID | 581-589 |
| NO | Sequence |
| 16118 | ETDYCYQCL |
| 16119 | EHVFGLLRE |
| 16120 | EDHISDSQL |
| 16121 | ENTEGIGPS |
| 16122 | EVTIHFVPQ |
| 16123 | EPRMSDMGD |
| 16124 | EPFCTQQLM |
| 16125 | EHPRQQDSA |
| 16126 | EVTRNHHFN |
| 16127 | ETRSGIAWQ |
| 16128 | EANLSHSWG |
| 16129 | EFLGTRLPD |
| 16130 | EGETVISQW |
| 16131 | EGRLKRHDF |
| 16132 | EGTEEGPTH |
| 16133 | ELRFVKTQR |
| 16134 | ENLARDAHY |
| 16135 | ERTIQHGEA |
| 16136 | ESTKAKKFP |
| 16137 | EVKLFKRNH |
| 16138 | EYKVYRHID |
| 16139 | EQKIKNGGH |
| 16140 | ERTCIATMW |
| 16141 | EVQRNIYSP |
| 16142 | EFSAMYSWY |
| 16143 | EHITEQDLR |
| 16144 | EACYAPSWA |
| 16145 | EAEYWNCGR |
| 16146 | EAGILMPAL |
| 16147 | EANSCEGFQ |
| 16148 | EANTWLNSA |
| 16149 | EARYSCWWG |
| 16150 | ECEQPNRWS |
| 16151 | ECFGKRFYD |
| 16152 | ECLPVLHND |
| 16153 | ECMGPGVCG |
| 16154 | ECQLCNWWP |
| 16155 | EDFWVFHYK |
| 16156 | EEEGQTAAG |
| 16157 | EEEQWGHMY |
| 16158 | EEVPCEKCF |
| 16159 | EEVRPKFGV |
| 16160 | EFCEMQNLC |
| 16161 | EFCHAMVCQ |
| 16162 | EFEDYGSWE |
| 16163 | EFEWECVQA |
| 16164 | EFFIIGAID |
| 16165 | EFKMSVFSN |
| 16166 | EFKQEFEAF |
| 16167 | EFTRKSCKF |
| 16168 | EGEVVDCDK |
| 16169 | EGGSQTYQG |
| 16170 | EGHQCQEGL |
| 16171 | EGRIHAQWM |
| 16172 | EGSPQESMS |
| 16173 | EGTGMQQAF |
| 16174 | EHADSWACP |
| 16175 | EHEGLNNHL |
| 16176 | EHFFKREDR |
| 16177 | EHFTKITVE |
| 16178 | EHFYICVHD |
| 16179 | EHNKEVYYG |
| 16180 | EHRQMHDSY |
| 16181 | EHSCTHMGN |
| 16182 | EHTRKDVCD |
| 16183 | EIHSNIAAG |
| 16184 | EILQGTVVQ |
| 16185 | EISMRPVTQ |
| 16186 | EIVYVDYPH |
| 16187 | EKCFCEVCG |
| 16188 | EKDHFDVMQ |
| 16189 | EKLNHEAGY |
| 16190 | EKMHQLATP |
| 16191 | EKRMMIDTH |
| 16192 | EKWMYDKDL |
| 16193 | ELDDICGIL |
| 16194 | ELEHYMSYQ |
| 16195 | ELKWWWRIF |
| 16196 | ELPTILKHR |
| 16197 | ELQKWFRKS |
| 16198 | EMEGYRAIQ |
| 16199 | EMFWQVAGA |
| 16200 | EMKFFAYAA |
| 16201 | EMKNLKRTG |
| 16202 | EMKVIGVDF |
| 16203 | EMRQQKMSR |
| 16204 | EMRTVMAGV |
| 16205 | EMTTSWYMN |
| 16206 | EMWSVKFGM |
| 16207 | ENAQFLVWA |
| 16208 | ENDSVSAIG |
| 16209 | ENGHCVSCT |
| 16210 | ENHRITGQS |
| 16211 | ENRKWTLAF |
| 16212 | ENSQTSAFG |
| 16213 | EPGELSVHV |
| 16214 | EPLTMDTGD |
| 16215 | EPRSCNFWC |
| 16216 | EQASSGERG |
| 16217 | EQMGYVHKG |
| 16218 | EQNTANLCD |
| 16219 | EQQFWNRLS |
| 16220 | EQQTGGYGP |
| 16221 | EQRFWNRLS |
| 16222 | EQVLMTYWF |
| 16223 | ERAEFEMKE |
| 16224 | ERAFSHNQS |
| 16225 | ERDHIKGCI |
| 16226 | ERSDFHWYM |
| 16227 | ESDWMNVSM |
| 16228 | ESFNYAHFK |
| 16229 | ESHPFTNFS |
| 16230 | ESISRDQSW |
| 16231 | ESKMSHKEA |
| 16232 | ESLHALAHM |
| 16233 | ESMFWDSDK |
| 16234 | ESMRRLGDT |
| 16235 | ESNSNRWAY |
| 16236 | ESRIMAPLW |
| 16237 | ESWNILLTH |
| 16238 | ETADRPSLD |
| 16239 | ETAHCPLNA |
| 16240 | ETCIANAWL |
| 16241 | ETDDQMMPP |
| 16242 | ETHTSEANM |
| 16243 | ETKLLPDLG |
| 16244 | ETMAQSCYG |
| 16245 | ETMGICHNS |
| 16246 | ETMHPVVDG |
| 16247 | ETMSTVYGQ |
| 16248 | ETNSCEGFQ |
| 16249 | ETRQAHLYH |
| 16250 | ETTAQKLKI |
| 16251 | ETVEYLSYE |
| 16252 | EVASKFFEH |
| 16253 | EVCRIGWMS |
| 16254 | EVCTIMEHP |
| 16255 | EVGTSCRFE |
| 16256 | EVNDQYREL |
| 16257 | EVNMPTGQH |
| 16258 | EVPHFDVSQ |
| 16259 | EVQCCMAAM |
| 16260 | EVQPVRRFT |
| 16261 | EVSFKARCA |
| 16262 | EVSMPEKTP |
| 16263 | EVSMTGHIA |
| 16264 | EVSPMRHIM |
| 16265 | EVTNEHCCW |
| 16266 | EVTQFDNPV |
| 16267 | EVTQGECFY |
| 16268 | EVVHDPGYA |
| 16269 | EVVKCPNSI |
| 16270 | EVVKIDMIP |
| 16271 | EVYAPRHMC |
| 16272 | EWDKMQKVP |
| 16273 | EWGRRANKD |
| 16274 | EWHAFMSHC |
| 16275 | EWWRYMADY |
| 16276 | EYCWANKNG |
| 16277 | EYIREWAQD |
| 16278 | EYKQQGVRR |
| 16279 | EYQGNYMAT |
| 16280 | EMMERQIHE |
| 16281 | EFITSGQCS |
| 16282 | EVVFMSGDI |
| 16283 | EPGHPGYEM |
| 16284 | EVMGLGCDG |
| 16285 | EAQWGMDDT |
| 16286 | ECKTHRDVY |
| 16287 | ENIPQSIWT |
| 16288 | ETCWTACDR |
| 16289 | EAYTDMPKT |
| 16290 | NTRPMRLHM |
| 16291 | NTRPMRPHM |
| 16292 | QTMQWMCKG |
| 16293 | QTMWLKEHR |
| 16294 | RTEIRYYGT |
| 16295 | STRPAIQKS |
| 16296 | STTVWAQCS |
| 16297 | STVMESAMY |
| 16298 | TTGTFPALP |
| 16299 | TTMPKGGNL |
| 16300 | VTESWSSWQ |
| 16260 | EVQPVRRFT |
| 16302 | YTEQEDNAA |
| 16303 | KTYCQDGWT |
| 16304 | LTTVYNWPH |
| 16305 | ITPPYCDMV |
| 16306 | LTMMAMCND |
| 16307 | ATQTDPVAR |
| 16308 | HTLHSHQNT |
| 16309 | STERGTPQY |
| 16310 | TTGTFPALQ |
| 16311 | ATVMFIEIS |
| 16312 | FTNQLPEAN |
| 16313 | CTLRVEYVQ |
| 16314 | VTWMVKTSN |
| 16315 | ATQFSGENA |
| 16316 | ATQLYAPIA |
| 16317 | FTVYVGARE |
| 16318 | KTKCCKTHD |
| 16319 | KTQIHMGDE |
| 16320 | RTEAHLPAP |
| 16321 | TTERYEITP |
| 16322 | VTVYVGARE |
| 16323 | ITASIKDQW |
| 16324 | DTAPNESDR |
| 16325 | HTRKEGFNS |
| 16326 | GTWMEENLH |
| 16327 | RTDVMMKVM |
| 16328 | ATEMFDCDV |
| 16329 | ATNVLYLDC |
| 16330 | ATQQVFWNL |
| 16331 | ATSHYAKGL |
| 16332 | ATSIFCVFR |
| 16333 | ATTHWAGHH |
| 16334 | ATTMSAFYG |
| 16335 | ATTSYNLTR |
| 16336 | ATVDISNVK |
| 16337 | CIPPIVMDR |
| 16338 | CTSFACKYF |
| 16339 | DTAMMHKIA |
| 16340 | DTGEIMTRS |
| 16341 | DTIPYCRGC |
| 16342 | DTKFWMQWN |
| 16343 | DTKIQTIHT |
| 16344 | DTLLPANWS |
| 16345 | DTNKLNDLS |
| 16346 | DTRQCLDTQ |
| 16347 | DTTTSTMAL |
| 16348 | DTVNTCGQM |
| 16349 | FTELHCNGN |
| 16350 | GTEYDRLSP |
| 16351 | GTFMDQRPN |
| 16352 | GTMPMDAGG |
| 16353 | GTMTTLYAN |
| 16354 | GTPHVVSQE |
| 16355 | GTQVNRATE |
| 16356 | GTSVNMKDQ |
| 16357 | GTSYWPQWN |
| 16358 | HTAICQDAS |
| 16359 | HTAYPYQCP |
| 16360 | HTDCLFTDD |
| 16361 | HTIPFFEAE |
| 16362 | HTKMTHGTS |
| 16363 | HTMQREYME |
| 16364 | HTNCLFTDD |
| 16365 | HTTTQVKHP |
| 16366 | HTVKIDQTC |
| 16367 | ITDQRRRAC |
| 16368 | ITELRPLIL |
| 16369 | ITNKQQLAR |
| 16370 | ITNQFMSKH |
| 16371 | ITRVDCSHD |
| 16372 | KTEPSVRIA |
| 16373 | KTLMWDCQT |
| 16374 | KTTILEDKA |
| 16375 | KTYICASCF |
| 16376 | LTAVSVFRR |
| 16377 | LTHDGWFYS |
| 16378 | LTKCNEKGN |
| 16379 | LTMLHMHCQ |
| 16380 | LTSGEGFEV |
| 16381 | LTTGIWKTW |
| 16382 | LTWMGLSME |
| 16383 | LTYVQGDWR |
| 16384 | MTEQSGRAY |
| 16385 | MTETTDMAH |
| 16386 | MTFFVNQAH |
| 16387 | MTIGFHVNG |
| 16388 | MTKQNKTHR |
| 16389 | MTTSSHWAK |
| 16390 | MTV0WAQYG |
| 16391 | NTAPKMSCT |
| 16392 | NTDVPQFMP |
| 16393 | NTEPMWSCS |
| 16394 | NTEVMDTGQ |
| 16395 | NTLRPQHTF |
| 16396 | NTMEDWECY |
| 16397 | NTNFWNWSL |
| 16398 | NTRSKDFWN |
| 16399 | NTSAHGYNQ |
| 16400 | NTTTFCHDE |
| 16401 | NTVFMHEQT |
| 16402 | NTVSHFAYD |
| 16403 | QTAANFCFD |
| 16404 | QTDAQGIGH |
| 16405 | QTELDTGLS |
| 16406 | QTFLAMDGK |
| 16407 | QTHDEYECA |
| 16408 | QTIRDMSGF |
| 16409 | QTLLSNCCA |
| 16410 | QTLWVHGTR |
| 16411 | QTMPCMYVE |
| 16412 | QTNVELHQE |
| 16413 | QTPQYHVGG |
| 16414 | QTQLNCAAC |
| 16415 | QTSFAETDY |
| 16416 | QTTVFQLEN |
| 16417 | QTVQLGTPV |
| 16418 | QTWAAHCSR |
| 16419 | QTYHVYTCC |
| 16420 | RTDRNTDFL |
| 16421 | RTGFEVPTS |
| 16422 | RTHLMEVTQ |
| 16423 | STDLKFCAK |
| 16424 | STDNKFWLG |
| 16425 | STEAAYENP |
| 16426 | STERMFKEA |
| 16427 | STFTAGATM |
| 16428 | STHGHISHN |
| 16429 | STMNFLPCE |
| 16430 | STMSCEILR |
| 16431 | STMTCGEFA |
| 16432 | STSDHHCHS |
| 16433 | STSSLDKLI |
| 16434 | STTNPYQLA |
| 16435 | TTAMYPVHT |
| 16436 | TTDCMWENH |
| 16437 | TTDQKRHGS |
| 16438 | TTEQWDFCR |
| 16439 | TTERTRICN |
| 16440 | TTMPHHEWQ |
| 16441 | TTMQCNSYD |
| 16442 | TTNPVEMFN |
| 16443 | TTTHMLTRC |
| 16444 | TTVPFQAWC |
| 16445 | TTYCPPTVE |
| 16446 | VTDLVRHFA |
| 16447 | VTEHQQRSV |
| 16448 | VTENLMMYH |
| 16449 | VTEQDDGQW |
| 16450 | VTKEMVWQC |
| 16451 | VTNQCCKAM |
| 16452 | VTTQSCKWM |
| 16453 | WTDNYFHES |
| 16454 | WTLHNQSLK |
| 16455 | WTVHNKDEA |
| 16456 | YTKAEDSIC |
| 16457 | YTKQIDNIE |
| 16458 | STMMVGRQC |
| 16459 | ITNSERATY |
| 16460 | PTDVITTDQ |
| 16461 | DTITFKQQH |
| 16462 | MTTEHITWW |
| 16463 | ITAIMCRSS |
| 16464 | CTESCQTGP |
| 16465 | MTESVENPG |
| 16466 | STTAYHQDY |
| 16467 | CTEIRYYGT |
| 16468 | QERGSLWYG |
| 16469 | WWRAMEKDM |
| 16470 | LDRNQSYHA |
| 16471 | SLRTPECDC |
| 16472 | CYRCALWTV |
| 16473 | ANRFYDCSH |
| 16474 | DRREKQLMK |
| 16475 | DVRAMHSTC |
| 16476 | FCRMYANAD |
| 16477 | IGRLNASTP |
| 16478 | IRRSMQQQN |
| 16479 | PSRWYKLGI |
| 16480 | TIRYIGMSG |
| 16481 | ASRSCMTQE |
| 16482 | AERQACTMG |
| 16483 | VGRERVWDS |
| 16484 | ALRPYMDDR |
| 16485 | ASRYDYNHG |
| 16486 | ASRYDYSHG |
| 16487 | CERGALKMI |
| 16488 | CLRQDRIIF |
| 16489 | DARPSPISQ |
| 16490 | DARVSNIQQ |
| 16491 | DCRCYGNNS |
| 16492 | DKRDHHYFA |
| 16493 | DSRFYEVQL |
| 16494 | DSRQLHHIG |
| 16495 | DSRYTQCYI |
| 16496 | DVRMNQDLY |
| 16497 | FGRNYTDHL |
| 16498 | FGRYRLWKG |
| 16499 | GERWPHNML |
| 16500 | GFRVGSLRH |
| 16501 | GIRLKGNIM |
| 16502 | GSRPRMKQP |
| 16503 | HCRLKEDEG |
| 16504 | HERTAKFRY |
| 16505 | HRRLFNKMN |
| 16506 | IERNSGQGS |
| 16507 | IGRDIDTSF |
| 16508 | INRENRRGG |
| 16509 | ISRMCESAL |
| 16510 | KLREVGRPC |
| 16511 | KQRDYMRKR |
| 16512 | LMRWPWDDT |
| 16513 | LNRILDRMG |
| 16514 | MGRTCADWT |
| 16515 | MIRNETQWA |
| 16516 | MVRFAPAYP |
| 16517 | NMRYTEMGV |
| 16518 | QCRNQDKSQ |
| 16519 | QERWQIQTW |
| 16520 | QSRLEHYGL |
| 16521 | SHREMNRAR |
| 16522 | SPREKNHYW |
| 16523 | TAREDCQHA |
| 16524 | TARLIEKYN |
| 16525 | TVRWQADTM |
| 16526 | VERHKMKWQ |
| 16527 | VSRSLERQA |
| 16528 | WCRQTMMDW |
| 16529 | WFRRHNYFY |
| 16530 | WNRDHNDWT |
| 16531 | DVRSHDEMT |
| 16532 | TERRMFRTA |
| 16533 | QVRFEQNPA |
| 16534 | MDRMHKSGI |
| 16535 | KNRDFEGFD |
| 16536 | NQDQARTEH |
| 16537 | QAFQFECHD |
| 16538 | QATQAGANQ |
| 16539 | RMAQFFRAH |
| 16540 | RNLQGGNHG |
| 16541 | SCLQYKATE |
| 16542 | SIEQKLTFT |
| 16543 | VGWQYCEEG |
| 16544 | TRKQGEGPY |
| 16545 | TGHQLPYNK |
| 16546 | LIDQNTKGN |
| 16547 | CGYQFSETM |
| 16548 | SGCQYEPRN |
| 16549 | IQAQMDQQQ |
| 16550 | CFNQRIQDS |
| 16551 | MGLQNDPTS |
| 16552 | TATQREAFV |
| 16553 | IAEQRLVEV |
| 16554 | QPSQQGRPG |
| 16555 | AVDQLRMEL |
| 16556 | CDHQRHQQP |
| 16557 | FRKQGHGEK |
| 16558 | IIGQWGQSD |
| 16559 | IIGQWGRSD |
| 16560 | NELQQGTSE |
| 16561 | NVSQWMITY |
| 16562 | QYVQCAAKD |
| 16563 | SLTQYQWRG |
| 16564 | VDMQKQTES |
| 16565 | VNVQMPSAP |
| 16566 | WAMQWWAKP |
| 16567 | YESQKGRRA |
| 16568 | MGMQQDTQV |
| 16569 | AAQQGLNPC |
| 16570 | ADIQISLCD |
| 16571 | AFAQYSRGN |
| 16572 | AFNQQEMWA |
| 16573 | ANHQVTSHP |
| 16574 | ANMQPNAIM |
| 16575 | ASGQFPKEG |
| 16576 | ASLQATCNH |
| 16577 | AYAQKYRTA |
| 16578 | CFSQTDCMS |
| 16579 | CIWQHNITQ |
| 16580 | CSQQVNCLS |
| 16581 | CWMQSQENW |
| 16582 | DCAQITYGG |
| 16583 | DCAQLRQDG |
| 16584 | DFVQSDTEF |
| 16585 | DGLQIQIQE |
| 16586 | DKMQCSSGG |
| 16587 | DMAQQQKSH |
| 16588 | DVMQGNRAF |
| 16589 | DWAQFCNHT |
| 16590 | DYAQFSVVP |
| 16591 | DYAQGAAMP |
| 16592 | FGMQRRHKE |
| 16593 | FHKQFHSKF |
| 16594 | GDEQTHCNG |
| 16595 | GFTQFYHHE |
| 16596 | GIHQETYCP |
| 16597 | GITQMSQHA |
| 16598 | GMVQDYVWL |
| 16599 | GSMQVMKKC |
| 16600 | GVCQMSEMR |
| 16601 | GVFQEASHK |
| 16602 | GVTQGHEIT |
| 16603 | GWMQWHRQR |
| 16604 | GYEQPVKCE |
| 16605 | GYIQCQMHA |
| 16606 | HASQEYTSL |
| 16607 | HASQLGAMV |
| 16608 | HDAQFLPDQ |
| 16609 | HGLQVGQFY |
| 16610 | HPEQFVACE |
| 16611 | HSNQMWYCY |
| 16612 | HWAWLKVTY |
| 16613 | IHKQFEMES |
| 16614 | IHQQTHYQF |
| 16615 | IMMQRALMG |
| 16616 | INQQYNSCW |
| 16617 | ISTQMENTG |
| 16618 | IVEQKPTVQ |
| 16619 | KDAQQWNCA |
| 16620 | KGNQQITSL |
| 16621 | KMIQSTHDF |
| 16622 | KPNQSNRQE |
| 16623 | KSAQVYWNP |
| 16624 | LAVQSIHSH |
| 16625 | LHCQIWFQD |
| 16526 | LIAQQMHIN |
| 16627 | LICQSDCFP |
| 16628 | LMTQEAQRA |
| 16629 | LSVQAQWDV |
| 16630 | LWMQHMCLD |
| 16631 | LYCQSPKDC |
| 16632 | MAHQSDIMH |
| 16633 | MAQQYHDEM |
| 16634 | MGHQWSGNK |
| 16635 | NFEQYVHNY |
| 16636 | MFKQPNHWD |
| 16637 | NHQQQNLIG |
| 16638 | QAEQENEDH |
| 16639 | QMAQREDDY |
| 16640 | QPAQMEDMG |
| 16641 | QSAQQPAGS |
| 16642 | QVFQLTMVK |
| 16643 | QVGQYTLPE |
| 16644 | RCWQADISG |
| 16645 | RPAQIDPWY |
| 16646 | SAVQIQVLH |
| 16647 | SLAQDIACF |
| 16648 | SNDQNIHNG |
| 16649 | SNEQIPRVP |
| 16650 | HGLQVGQFY |
| 16651 | SQTQWDHMD |
| 16652 | SSEQAGPHM |
| 16653 | SVQQIQKQP |
| 16654 | TFHQCERSD |
| 16655 | THQQVALGN |
| 16656 | THTQYWKYA |
| 16657 | TISQMVYSK |
| 16658 | TMGQICVHA |
| 16659 | TQCQWNVAK |
| 16660 | VEAQFMDNA |
| 16661 | VLSQYTQHA |
| 16662 | VVSQTYQNR |
| 16663 | VWQQYILVI |
| 16664 | WYIQVDRKG |
| 16665 | YIKQIDNIE |
| 16666 | YQTQYSFWH |
| 16667 | LVGQCTSHW |
| 16668 | GIKQTLVRQ |
| 16669 | GCQQIQLQT |
| 15670 | KYMQENVLS |
| 15671 | NCHQLGDNM |
| 16672 | MMVQWGAMA |
| 16673 | FSEQNVSAA |
| 16674 | TSGQVDHRT |
| 16675 | YYEQMDGEF |
| 16676 | QPVQAPHCA |
| 16677 | SEAQDQVWS |
| 16678 | PLKALEWEY |
| 16679 | QMEALMDCE |
| 16680 | QSKTLCYQC |
| 16681 | QVSTLENVQ |
| 15682 | RQAKLATLH |
| 15683 | SKESLPQWQ |
| 16684 | TGVSLVNYS |
| 16685 | MLHNLWMQC |
| 16686 | AAQTLECHK |
| 16687 | YWFVLNPCV |
| 16688 | CHVNLKAWW |
| 16689 | DFGMLEWQW |
| 16690 | KYEILNCNH |
| 16691 | MQYTLPTWP |
| 16692 | TMANLCWRT |
| 16693 | TNIPLGTNM |
| 15694 | TWMPLAPCH |
| 15695 | TWMPLAPCY |
| 16696 | HQNLLECNE |
| 16697 | TGKWLVYQA |
| 16698 | EPADLDVDH |
| 16699 | FFLKLNDVP |
| 16700 | AHYFLLEYP |
| 16701 | AIIPLPMPT |
| 16702 | AIVNLHTQQ |
| 16703 | ANLPLQQQD |
| 16704 | AVEFLAHRY |
| 16705 | AVYPLFAPD |
| 15706 | CHNLLHCVY |
| 16707 | CNSTLQYGH |
| 16708 | DFCMLQMGM |
| 16709 | DHCILPQTC |
| 16710 | DMFMLDEAP |
| 16711 | DYFPLVVAP |
| 16712 | GANFLVSQT |
| 16713 | GKNPLMPSP |
| 16714 | GLDKLMMLA |
| 16715 | GVMMLGTAN |
| 16716 | HIDHLNAAT |
| 16717 | HPLPLSVMS |
| 16718 | HSMLLQEYM |
| 16719 | ENTALFVNA |
| 16720 | KEYDLSLTM |
| 16721 | KNFELDQFE |
| 16722 | KPYSLAMTE |
| 16723 | LGTPLEAGL |
| 16724 | LIDRLPACY |
| 16725 | LRDCLHVLG |
| 16726 | LVDELNQIK |
| 16727 | MFDDLMVGR |
| 16728 | MINNLDECC |
| 16729 | MVDGLTKEY |
| 16730 | NCQSLATNV |
| 16731 | NEVHLEHNY |
| 16732 | NLEMLAMFQ |
| 16733 | NVMPLIQYR |
| 16734 | PITILCCSQ |
| 16735 | PROILHFSQ |
| 16736 | QASLLDHYP |
| 16737 | QGQPLMRYS |
| 16738 | QQNRLNMNW |
| 16739 | QQSPLLWER |
| 16740 | QRHDLEVDH |
| 16741 | QVVDLVDVY |
| 16742 | RGEILQLQQ |
| 16743 | SAQCLEMWP |
| 16744 | SGLILQCNP |
| 16745 | SENYLGEGH |
| 16746 | SSKPLTNEC |
| 16747 | SVAFLNQEW |
| 16748 | SWNRLNWCL |
| 16749 | TCESLYSRG |
| 16750 | THDSLIAHW |
| 16751 | TIGNLTKPI |
| 16752 | TLMGLWNQG |
| 16753 | TNDPLMRSD |
| 16754 | TQCGLKMYP |
| 16755 | TRMLLEWTY |
| 16756 | TSEPLEGED |
| 16757 | VDSWLSMRD |
| 16758 | VIHYLTHEC |
| 16759 | YCIHLKDDI |
| 16760 | YCIPLQPMN |
| 16761 | YSVPLHHCF |
| 16762 | YVGNLCRWK |
| 16763 | YVVKLEDYK |
| 16764 | YYADLNAHD |
| 16765 | RNMALHHPT |
| 16766 | DGCSLYAFN |
| 16767 | ACDRLMFQG |
| 16768 | SLVDLYKTA |
| 16769 | FCNKLTSVR |
| 16770 | IDAFLANRG |
| 16771 | NMMTLWSHL |
| 16772 | QIVSKNSRQ |
| 16773 | RGVHSNCAE |
| 16774 | SAFLPNTVC |
| 16775 | SEYDNNPCQ |
| 16776 | SFTIYNHKW |
| 16777 | SSMTRNNCK |
| 16778 | THDYFNGDY |
| 16779 | TWANGNGGP |
| 16780 | VNHHENWKK |
| 16781 | IEWPTNSDH |
| 16782 | NAYVDNLRY |
| 16783 | QQCMGNDMT |
| 16784 | AFLHENMEG |
| 16785 | ANGTYNLQE |
| 16786 | ANMFRNGMQ |
| 16787 | DSYFINELY |
| 16788 | FFEMVNTEQ |
| 16789 | HSW1NNQEH |
| 16790 | KSVTQNRTR |
| 16791 | NSYFINELY |
| 16792 | TFAAVNCCQ |
| 16793 | TMKTFNYVF |
| 16794 | YCQLGNHNA |
| 16795 | YHENWNMPM |
| 16796 | GWMRHNREQ |
| 16797 | QSGYMNKLW |
| 16798 | VSMSSNYDK |
| 15799 | KCAMFNAGE |
| 16800 | AEYMTNASM |
| 16801 | AGYASNWAD |
| 16802 | AESPTNAER |
| 16803 | AKGTYNQGN |
| 16804 | ASETNNGGY |
| 16805 | AYQMFNNVQ |
| 16806 | DAEHKNAIR |
| 16807 | DAHYTNECR |
| 16808 | DCQPVNRIL |
| 16809 | DENFDNHAG |
| 16810 | DMNSRNVQD |
| 15811 | DMVPCNLMH |
| 15812 | DWAANNWWP |
| 15813 | FEAPINLSF |
| 16814 | FVHVENRCD |
| 16815 | GAMPGNGCT |
| 16816 | GHKVCNCWE |
| 16817 | GVWPDNCPQ |
| 16818 | GYCGCNHMG |
| 16819 | HHVWPNRQV |
| 16820 | HIEMRNAHM |
| 16821 | HMYVTNHDG |
| 16822 | ICSYYNQTQ |
| 15823 | IFYATNHSW |
| 16824 | IKHDFNSAF |
| 16825 | 1NAPPNLRT |
| 16826 | KGDEQNCYC |
| 16827 | KEDVENCCC |
| 16828 | KPGTVNPAA |
| 16829 | KQFPCNSGH |
| 16830 | LCAGTNLTP |
| 16831 | LEADNNDAD |
| 16832 | LKIPFNMTC |
| 16833 | LMAYANTDD |
| 16834 | LRTPYNFWW |
| 16835 | LVKVINERQ |
| 16836 | MCTPRNEQE |
| 16837 | MKGFDNYSP |
| 16838 | MLSYHNESW |
| 16839 | MQNEKNDNP |
| 16840 | MRKDYNDTW |
| 16841 | MYQDANQIT |
| 16842 | NVHTTNYAF |
| 16843 | QFSGYNYHY |
| 16844 | QLHWPNNFG |
| 16845 | QMHVANINL |
| 16846 | QSNEFNPVA |
| 16847 | QVAPKNCWQ |
| 16848 | QYICFNCYH |
| 16849 | SACEPNVSP |
| 16850 | SANKMNAER |
| 16851 | SEGTCNTCG |
| 16852 | SIAMYNNMH |
| 16853 | SREAQNRET |
| 16854 | SVKDNNRRL |
| 16855 | SWTASNWRD |
| 16856 | SWTSRNAHH |
| 16857 | TAQYVNREI |
| 16858 | TQDVQNMYV |
| 16859 | TSMLHNEEN |
| 16860 | TVKEENAAC |
| 16861 | VFIAQNEGN |
| 16862 | VGVGVNRFD |
| 16863 | VHANANMSH |
| 16864 | VPELGNGAY |
| 16865 | VQLPTNKQW |
| 16866 | VSINTNEPG |
| 16867 | VVQYKNHAT |
| 16868 | YGTEVNSMI |
| 16869 | YQVANNQQG |
| 16870 | YYADMNAHD |
| 16871 | HMWMYNKCT |
| 16872 | ARTIANDTQ |
| 16873 | FREDMNATM |
| 16874 | SLWVGYRTD |
| 16875 | TPKNDQRAE |
| 16876 | LNARTMRSA |
| 16877 | MEDFSDRWP |
| 16878 | RMVIMERDR |
| 16879 | DGQLVERYD |
| 16880 | APKNDQRAE |
| 16881 | TYYWDCRHV |
| 16882 | LMEAASRSY |
| 16883 | TQQTADRWA |
| 16884 | IVTCNGRWD |
| 16885 | YDYYKMREG |
| 16886 | ASKAKQRVA |
| 16887 | FQATTKRLP |
| 16888 | NAQLGKRGH |
| 16889 | YLWMIARPD |
| 16890 | YLWMITRPD |
| 16891 | KQNPSMRQD |
| 16892 | SATARERDN |
| 16893 | AAEMHQRGE |
| 16894 | AAEMHQRGV |
| 16895 | AFKATRRGV |
| 16896 | ASGSHQREN |
| 16897 | ASGSHQRKN |
| 16898 | ASHIYCRHE |
| 16899 | DIKMQKRGV |
| 16900 | DVGLALRNH |
| 16901 | FQADYKRHE |
| 16902 | FVKMKQRYG |
| 16903 | GAGYRMRVN |
| 16901 | GVSVEGRDE |
| 16905 | GYKNCHRHG |
| 16906 | HIDLQTRKE |
| 16907 | HVEWTMREH |
| 16908 | IGGMFSRHA |
| 16909 | IQKLMRRMH |
| 16910 | KAISHERGQ |
| 16911 | LAYTCHRGD |
| 16912 | LHWYWCRNW |
| 16913 | LKKKRGRAC |
| 16914 | LQEPRMRYE |
| 16915 | MCQSYERGA |
| 16916 | MFNRIPRFS |
| 16917 | MICRMDRMK |
| 16918 | MQKAHDRSA |
| 16919 | MSGFHIRCA |
| 16920 | MSSFHIRCA |
| 16921 | NLIYQPRKS |
| 16922 | QATFTTRLV |
| 16923 | QGDHFDRNS |
| 16924 | QGGMMKRGQ |
| 16925 | QIDEVTRNL |
| 16926 | QVEPVEREY |
| 16927 | RCDGVMRSQ |
| 16928 | SAELVQREA |
| 16929 | SGSHCGRMA |
| 16930 | SLKMRPRQI |
| 16931 | SRGDYLRVG |
| 16932 | SWEWQMRYP |
| 16933 | TAIHEHRGL |
| 16934 | TIEPFWRSW |
| 16935 | TKYVDDRPG |
| 16936 | TSIPITRQE |
| 16937 | VINMNRRWG |
| 16938 | VSINMWRAQ |
| 16939 | WDNLMQRTC |
| 16940 | WIQPISRTG |
| 16941 | YGSYYMRGW |
| 16942 | YMHEWMRLT |
| 16943 | YSAPRIRDA |
| 16944 | SMNLWCRGN |
| 16945 | CDLFPIRWP |
| 16946 | TEGPMHRAW |
| 16947 | QGTGHSLFL |
| 16948 | RHWRHTMFL |
| 16949 | RMETWCGFS |
| 16950 | PMWTQMPFP |
| 16951 | DINASEWFC |
| 16952 | MIVMGPHFT |
| 16953 | SLYNCMFFL |
| 16954 | WMKVRQGFG |
| 16955 | ILEAIVNFW |
| 16956 | KISPWDGFY |
| 16957 | AALENGWFN |
| 16958 | ACMVNPGFW |
| 16959 | ACSTVMDFN |
| 16960 | ASIWRKLFD |
| 16961 | AVHAEDIFM |
| 16962 | DASVPGVFE |
| 16963 | DCNWHWPFT |
| 16964 | DKHFYQKFH |
| 16965 | DSSLHGAFM |
| 16966 | DSVNTSAFH |
| 16967 | DVIRDDSFQ |
| 16968 | FGMVHHGFF |
| 16969 | FKYYIPEFC |
| 16970 | FPGWCASFP |
| 16971 | HICDMDMFL |
| 16972 | HYFYTQQFG |
| 16973 | IAIPCASFY |
| 16974 | KNVMHSEFR |
| 16975 | KYDREWPFL |
| 16976 | LCCDVCMFL |
| 16977 | LGDTGLMFG |
| 16978 | LMSICAAFP |
| 16979 | LQGWRWWFA |
| 16980 | LVSDHIEFG |
| 16981 | MASSEHCFF |
| 16982 | MHIEGVMFQ |
| 16983 | MIWYNRKFM |
| 16984 | MNEIFVEFP |
| 16985 | MWTAQQTFM |
| 16986 | MYIPVYITN |
| 16987 | NVQFESTFF |
| 16988 | PAMPFYWFE |
| 16989 | QHQPFSMFS |
| 16990 | QNSHGPVFG |
| 16991 | QNVMHSEFR |
| 16992 | QQAPATIFP |
| 16993 | QQVEWSVFQ |
| 16994 | QSISDMPFP |
| 16995 | QVTPSMIFK |
| 16996 | RDSCYINFP |
| 16997 | SATCWLWFG |
| 16998 | SCMGFTSFP |
| 16999 | SDEWEDVFG |
| 17000 | SGCHWGIFH |
| 17001 | SMYSTHCFC |
| 17002 | SYPGHHWFY |
| 17003 | TASGNTYFV |
| 17004 | TILEGDNFA |
| 17005 | TITFIDLFN |
| 17006 | TKNAMHNFF |
| 17007 | TVSRASYFD |
| 17008 | VAVTVTDFD |
| 17009 | VMEKYAHFP |
| 17010 | WGDRYGLFV |
| 17011 | YSQWFTFFE |
| 17012 | QVHAKLGFM |
| 17013 | SATIRFYFN |
| 17014 | QHQAFFVFT |
| 17015 | QMKGATEFC |
| 17016 | LVNMFQCFW |
| 17017 | ASTERAKFG |
| 17018 | NVKWHCDGG |
| 17019 | PYFRFFPHG |
| 17020 | QCGAIYQTG |
| 17021 | QQNLADQAG |
| 17022 | RQGKAMSMG |
| 17023 | SCTHIKVPG |
| 17024 | SCTMKDWWG |
| 17025 | SCTPIKVPG |
| 17026 | FLNNEELKG |
| 17027 | WDNMDQTQG |
| 17028 | AMLRQEKTG |
| 17029 | DSQNNWPTG |
| 17030 | KCGWHGENG |
| 17031 | VQQNNLKAG |
| 17032 | VAANTYCYG |
| 17033 | GEPWFQTHG |
| 17034 | GEPWFRTHG |
| 17035 | GMASMEHCG |
| 17036 | GQGTSRLMG |
| 17037 | ICHLRHIAG |
| 17038 | MMLGYMEQG |
| 17039 | NAKPKQVQG |
| 17040 | PCYNAMNRG |
| 17041 | QIHPYLEAG |
| 17042 | SRDCVVHDG |
| 17043 | VCPSCRDYG |
| 17044 | WIKWKCSEG |
| 17045 | CLNNSTCRG |
| 17046 | QHSKCHMHG |
| 17047 | AADFSGYYG |
| 17048 | AAGATMLRG |
| 17049 | AEIPIMFMG |
| 17050 | AFVNWPIHG |
| 17051 | ANQPKHGAG |
| 17052 | APL1KASWG |
| 17053 | AWDWCDMRG |
| 17054 | AYNSRANGG |
| 17055 | CHGHFQHIG |
| 17056 | DAKTCHSRG |
| 17057 | DCKLMRHQG |
| 17058 | DIMLRTCCG |
| 17059 | DRCMQTKHG |
| 17060 | DSATQHMEG |
| 17061 | KCGWHGDAG |
| 17062 | FEGSRQLWG |
| 17063 | FREWRAMDG |
| 17064 | GCTPSVCSG |
| 17065 | GVMLMIAGG |
| 17066 | GYVPWLMEG |
| 17067 | HCHMIFKDG |
| 17068 | HKDDYVQTG |
| 17069 | ISEDIKENG |
| 17070 | ISWLCEMNG |
| 17071 | KNEWTYHQG |
| 17072 | LEDMMSVEG |
| 17073 | LIMEQPLAG |
| 17074 | LNAECTSTG |
| 17075 | LSTCWAIAG |
| 17076 | LVVNQYTLG |
| 17077 | MAAPTALNG |
| 17078 | MIGTIQSDG |
| 17079 | MKASTMELG |
| 17080 | MKVYHEMVG |
| 17081 | MQVSADHHG |
| 17082 | NAAWQSITG |
| 17083 | NCSHYDSRG |
| 17084 | NGMVSGQYG |
| 17085 | NHPYQHIEG |
| 17086 | NKMHCDTMG |
| 17087 | NKVMCLWQG |
| 17088 | NNAPVWLHG |
| 17089 | NSVSCGGQG |
| 17090 | PGDFTSGYG |
| 17091 | QCDEQQEAG |
| 17092 | QFGSFWPTG |
| 17093 | QNARSSMVG |
| 17094 | QYDTIQLNG |
| 17095 | SCHHVGMCG |
| 17096 | SFKWTIVNG |
| 17097 | SIMKYDQMG |
| 17098 | SMHHTQFTG |
| 17099 | SVGFPYESG |
| 17100 | TAQYDVWHG |
| 17101 | TGYPKLKDG |
| 17102 | TQEPWGCAG |
| 17103 | TQGLPRGRG |
| 17104 | TRLYNWPMG |
| 17105 | TSHHWAAQG |
| 17106 | TWWKDPQEG |
| 17107 | VAHYYCWEG |
| 17108 | VLMNWQPRG |
| 17109 | VLNHWEPIG |
| 17110 | VVMHPYAAG |
| 17111 | VVSHYDMIG |
| 17112 | WHTVHYMGG |
| 17113 | WLTFDRFEG |
| 17114 | AKCPWHHTG |
| 17115 | VNPWYVKHG |
| 17116 | DVASRCWVG |
| 17117 | SGTPHQQSG |

### Example 13

### AAV5 Variants with Tissue Tropism in Heart

[0914] This example describes engineered AAV5 variants with tissue tropism in heart that were discovered using the methods and systems described in EXAMPLE 1-EXAMPLE 2.

[0915] CNS, liver, skeletal muscle, heart, lung, spleen, lymph node, bone marrow, mammary gland, skin, adrenal gland, thyroid, colon, sciatic nerve, and spinal cord tissues were analyzed to identify amino acid residues in the AAV5 VP1 581-589 region that drive heart tropism. The results are shown in FIG. 18D which shows the positional frequency of each amino acid in the 581 to 589 region of AAV5 VP1 in heart tissue as compared to all other analyzed tissues, wherein the capsid polypeptide has the sequence of SEQ ID NO: 2. The position (“Xaan”, n=1-9) is denoted on the x-axis and amino acid residues are denoted on the y-axis. The frequency of a particular amino acid residue in a particular position is indicated in the heatmap as intensity. Darker squares indicate a higher frequency of a particular amino acid in a particular position and lighter squares indicate a lower frequency of a particular amino acid in a particular position.

[0916] The frequency of a given amino acid residue occurring at a specified position corresponding to position 581 to position 589 of SEQ ID NO: 1 (generalized in SEQ ID NO: 2) in variants identified in heart over the frequency of that given amino acid residue occurring at the specified position in variants identified in all other harvested tissues was analyzed to identify a set of sequence rules for capsids that preferentially target heart tissue. With reference to TABLE 25 below, and SEQ ID NO: 2 (AAV5 VP1), the following amino acids can, thus, be independently mutated, in any combination, at any one or more positions Xaa1-Xaa9, to provide a VP1 capsid with enhanced heart tropism as compared wildtype AAV5 VP1 capsid (SEQ ID NO: 1), where heart tropism here refers to properties that are preferred for heart transduction over properties that are preferred for transduction of all other harvested tissues.

TABLE 25
Heart Tropism Rules

Xaa1 is selected from I, K, L, M, T, or V
Xaa1 is selected from K or L
Xaa1 is K
Xaa2 is selected from A, C, G, I, K, or S
Xaa2 is selected from A, C, or S
Xaa2 is A
Xaa3 is selected from A, D, E, G, K, M, or V
Xaa3 is selected from E or V
Xaa3 is E
Xaa4 is selected from F, H, R, T, W, or Y
Xaa4 is selected from F, R, or T
Xaa4 is R
Xaa5 is selected from F, L, M, or R
Xaa5 is L
Xaa6 is selected from A, H, N, W, or Y
Xaa6 is selected from H, N, or Y
Xaa6 is H
Xaa7 is selected from A, C, E, F, K, or T
Xaa7 is selected from C, F, or T
Xaa7 is F
Xaa8 is selected from A, C, M, S, or T
Xaa8 is selected from C, M, or S
Xaa8 is C
Xaa9 is selected from A, D, G, or P
Xaa9 is selected from A or G
Xaa9 is A

[0917] TABLE 26 below provides sequences of the 581 to 589 region for variant AAV VP1 capsid polypeptides that were found in heart tissue and comport to one or more of the rules provided in TABLE 25. The present disclosure, thus, provides for rAAVs composed of engineered AAV5 VP1 capsid polypeptides having a SEQ ID NO: 2, wherein the Xaa1 to Xaa9 region is any one of SEQ ID NO: 13118-SEQ ID NO: 14117, as disclosed in TABLE 26. Also encompassed herein are rAAVs composed of engineered AAV5 VP2 capsid polypeptides and engineered AAV5 VP3 capsid polypeptides having the sequences disclosed in the below table at the regions in AAV5 VP2 (amin acid residues 445 to 453) and AAV5 VP3 (amino acid residues 389-397) corresponding to the amino acids in the AAV5 VP1 581 to 589 region.

TABLE 26
Sequences of the 581 to 589 Region in AAV5 VP1
Capsid Polypeptide that Drive Heart Tissue
Tropism

| SEQ | |
|---|---|
| ID | 581-589 |
| NO | Sequence |
| 13118 | KAAPMDISI |
| 13119 | KADCPAYKA |
| 13120 | KADVWMAIA |
| 13121 | KAELSDHVL |
| 13122 | KATDALPSC |
| 13123 | KCSKQASYP |
| 13124 | KDGYALLSC |
| 13125 | KDNEAQYQP |
| 13126 | KDYMFNLPF |
| 13127 | KEAMMYNAN |
| 13128 | KEGLIFSTE |
| 13129 | KEHTNECRH |
| 13130 | KEIVEVDGN |
| 13131 | KEMAYQHMW |
| 13132 | KEMLAMWLQ |
| 13133 | KEWFVTWKA |
| 13134 | KFLPCITSY |
| 13135 | KFPYLPHRN |
| 13136 | KGCMSWEEG |
| 13137 | KGDRFCGEV |
| 13138 | KGEPGYMYY |
| 13139 | KGMFVANSH |
| 13140 | KGTKGPQMQ |
| 13141 | KHAGTRYKG |
| 13142 | KHFTSCDRT |
| 13143 | KHHDAAREM |
| 13144 | KH1FNECDC |
| 13145 | KHMQKYVHY |
| 13146 | KHPRFTGWH |
| 13147 | KIESDWHAQ |
| 13148 | KKHQFCEGT |
| 13149 | KLELHGCQN |
| 13150 | KLMSFRELE |
| 13151 | KLQLEKPLN |
| 13152 | KMDCHKYGV |
| 13153 | KMNETTNPR |
| 13154 | KMVDQSLAT |
| 13155 | KMVMEDTDV |
| 13156 | KNFMNHEPQ |
| 13157 | KNNRTIRWG |
| 13158 | KNNTWKWWY |
| 13159 | KNQYFETSQ |
| 13160 | KNWEKQNEV |
| 13161 | KNYNPVNYE |
| 13162 | KPCKACLNS |
| 13163 | KPCWDQAMQ |
| 13164 | KPDQKLWWD |
| 13165 | KPDWWIKVN |
| 13166 | KPSNSKQTV |
| 13167 | KPTQHGVGP |
| 13168 | KQAEGDDVG |
| 13169 | KQH1FQWHH |
| 13170 | KQ1HEWEGQ |
| 13171 | KQLPEQOPL |
| 13172 | KQMLEFAPY |
| 13173 | KQNEINHSC |
| 13174 | KREDHYGWG |
| 13175 | KRSFEWLER |
| 13176 | KSDYNSYDA |
| 13177 | KSLSSEMGV |
| 13178 | KSMDKDLTS |
| 13179 | KSSCVDDSS |
| 13180 | KSVAEGAND |
| 13181 | KTAQLSVME |
| 13182 | KTAYELVDG |
| 13183 | KTCDSQTMT |
| 13184 | KTEMYSDQC |
| 13185 | KTFEWLCPY |
| 13186 | KTMPVGAWD |
| 13187 | KTTWVDDFD |
| 13188 | KTYYVMAEV |
| 13189 | KVLDTLTEH |
| 13190 | KVMHACNAN |
| 13191 | KWDETMFMS |
| 13192 | KWEDFGWWK |
| 13193 | KWEQPNPQA |
| 13194 | KWEYVRCAS |
| 13195 | KWLEARMYL |
| 13196 | KWLKTLMCL |
| 13197 | KWQDAHYIL |
| 13198 | KWTLDAWLT |
| 13199 | KWWVDRLCQ |
| 13200 | KYAVSPCDP |
| 13201 | KYDWLDAGG |
| 13202 | KTDPEAEYC |
| 13203 | KGNPLDGDT |
| 13204 | VAHICDPET |
| 13205 | VASEHSCLP |
| 13206 | VAVEDRPAL |
| 13207 | WAREELGFA |
| 13208 | YAMCHRWMR |
| 13209 | YAPNNSHWP |
| 13210 | AACPHQFKD |
| 13211 | AADLGQSMC |
| 13212 | AAESAKFHE |
| 13213 | AAGIAVACT |
| 13214 | AAIRCMQTS |
| 13215 | AAKLYMDLS |
| 13216 | AAMKGEV1G |
| 13217 | AAMLRLLGK |
| 13218 | AANMLYCST |
| 13219 | AANWTHCSL |
| 13220 | AAPMHLHEI |
| 13221 | AAQFMEKNQ |
| 13222 | AASGLEVVA |
| 13223 | AATNWGVET |
| 13224 | AAVKWDQPL |
| 13225 | AAVPELHHS |
| 13226 | AAVQQPEHT |
| 13227 | AAYSQSAGS |
| 13228 | CADSCYWYP |
| 13229 | CAEAWFPQR |
| 13230 | CAFLDWDWC |
| 13231 | CAFRWVEWD |
| 13232 | CAHHVMWYP |
| 13233 | CAHQPDGYA |
| 13234 | CANAENATC |
| 13235 | CANCVAISP |
| 13236 | CAQPNTHNS |
| 13237 | CAVAWKGDY |
| 13238 | DAAQCTWAR |
| 13239 | DAHPEGPQR |
| 13240 | DALEYHSPF |
| 13241 | DAMRTHENT |
| 13242 | DAQKQQVMH |
| 13243 | DAQWIGCLE |
| 13244 | DARWRSQCP |
| 13245 | DARYSWPGA |
| 13246 | DATFNTSSL |
| 13247 | DAVLFTAMQ |
| 13248 | EAFGNGIDP |
| 13249 | EAGEHQKVE |
| 13250 | EAGRNYMDL |
| 13251 | EANQCHVHI |
| 13252 | EATWTAQGA |
| 13253 | EAYLWENQL |
| 13254 | FAEWKTEQQ |
| 13255 | FAHCAMNES |
| 13256 | FAHWRDCWY |
| 13257 | FAKIRERHV |
| 13258 | FASCMRGRA |
| 13259 | FASPAGPWS |
| 13260 | FAVNEHDVF |
| 13261 | FAYATIRRD |
| 13262 | GAEIMVNGW |
| 13263 | GAEPYVKGG |
| 13264 | GAERQWFTP |
| 13265 | GAHVNSMNA |
| 13266 | GANSSELQQ |
| 13267 | GAVMWERDG |
| 13268 | HADCYVADF |
| 13269 | HADRMEGPW |
| 13270 | HADRPMSAC |
| 13271 | HAEWTEPVD |
| 13272 | HAIPACKRD |
| 13273 | HAKLETMWG |
| 13274 | HALAWCTKH |
| 13275 | HATYCQMAM |
| 13276 | HAVSQERAG |
| 13277 | IACVHMKQW |
| 13278 | IADERWCMA |
| 13279 | IADYEQCSS |
| 13280 | IAFETYWTN |
| 13281 | IAGQWAAFG |
| 13282 | IAKCIDVMD |
| 13283 | IAKWIEKIG |
| 13284 | IAMLSQHTV |
| 13285 | IAQPYDNWG |
| 13286 | IAINHSAGP |
| 13287 | IAVTGFAMS |
| 13288 | LADGMGKVP |
| 13289 | LAFSDITWS |
| 13290 | LAHSEDRTS |
| 13291 | LALQUAGAH |
| 13292 | LAMWFNESC |
| 13293 | LAMWKMRQH |
| 13294 | LATMEDQSN |
| 13295 | MAAPYORYN |
| 13296 | MAAVMIDQA |
| 13297 | MACRAWIFV |
| 13298 | MADKCANNA |
| 13299 | MAEQAVNSK |
| 13300 | MAGNVCLCV |
| 13301 | MAHMNTGVP |
| 13302 | MAKWDDSFS |
| 13303 | MALMVEECD |
| 13304 | MAMLCSICS |
| 13305 | MANPEMYMQ |
| 13306 | MAQFVWCNG |
| 13307 | MASMMNACN |
| 13308 | MASMSKDDS |
| 13309 | MASQEHQES |
| 13310 | MAVHRPTFC |
| 13311 | MAWDIMFWP |
| 13312 | MAYQQVIAG |
| 13313 | MAYQRHAAF |
| 13314 | NACIRRTTW |
| 13315 | NACIRWAFD |
| 13316 | NADALGALQ |
| 13317 | NADREMFEH |
| 13318 | NAEHRGMTN |
| 13319 | NAGAQWLGI |
| 13320 | NAGLEWKLQ |
| 13321 | NAHCGAACC |
| 13322 | NAMAYENDY |
| 13323 | NAMLTLGAG |
| 13324 | NAMQRANIR |
| 13325 | NAPCFRYYN |
| 13326 | NARDDSIFN |
| 13327 | NASHYEKDG |
| 13328 | NATSYHKFM |
| 13329 | PAEIKMPSQ |
| 13330 | PARLMMWEF |
| 13331 | QADQYYSLE |
| 13332 | QAMLKQGPR |
| 13333 | QASCISWSQ |
| 13334 | QASQENRLT |
| 13335 | QAVECTQAP |
| 13336 | QAYTGDKDI |
| 13337 | RADDYQPVS |
| 13338 | RAELFNNGK |
| 13339 | RAEQADWHE |
| 13340 | RAILNEKRD |
| 13341 | RAINFDKAS |
| 13342 | RAPELVMNE |
| 13343 | RAPYEADSN |
| 13344 | SAAYIVKGP |
| 13345 | SADGQQAAT |
| 13346 | SADLSLTYD |
| 13347 | SADQVPECP |
| 13348 | SA1YRNWFE |
| 13349 | SAKLSEQNV |
| 13350 | SAYALQSPR |
| 13351 | TAA1VGKES |
| 13352 | TACMDHHIR |
| 13353 | TACNMMCAY |
| 13354 | TADWYNGGP |
| 13355 | TAEVWWVFH |
| 13356 | TAGFAKHFP |
| 13357 | TANMCDEGI |
| 13358 | TANSEAHYT |
| 13359 | TARWLDEHL |
| 13360 | TARYITSRA |
| 13361 | TASEFPCGV |
| 13362 | TAWKADSGM |
| 13363 | TAWWNDCWF |
| 13364 | VAAGPLFYG |
| 13365 | VACAPEAMG |
| 13366 | VADGRQPME |
| 13367 | VAFYNKMRG |
| 13368 | VAIQSVGYH |
| 13369 | VAIVWMCSE |
| 13370 | VALPRCQLV |
| 13371 | VAMYTRCHT |
| 13372 | VAPKDNQQM |
| 13373 | VAPQCTNEH |
| 13374 | VAQPVQDMG |
| 13375 | VASKTQFAM |
| 13376 | VAYYFDQAG |
| 13377 | WAPPCYYDV |
| 13378 | YAANKDCFL |
| 13379 | YAKYGQRWM |
| 13380 | YATFEVWFR |
| 13381 | YATMEYNNN |
| 13382 | EAFQKCNWQ |
| 13383 | HATGLVNFM |
| 13384 | AADIFAIND |
| 13385 | EAELENVNM |
| 13386 | IAYHYDQQN |
| 13387 | TSEPLLAML |
| 13388 | TTEDCPNRV |
| 13389 | TTEYTCEDQ |
| 13390 | VFENCSRTF |
| 13391 | VGEWEDEHD |
| 13392 | VIEHAHHVN |
| 13393 | VSEGQVNMD |
| 13394 | VSEHDDCGL |
| 13395 | VSEVYLAER |
| 13396 | WYEKLMDAF |
| 13397 | YCEVPQNPV |
| 13398 | YDEYCESKS |
| 13399 | YIEIVRGPM |
| 13400 | YSEDATPKG |
| 13401 | AFEFTDGCC |
| 13402 | AFESAADHW |
| 13403 | AIEVEGMWD |
| 13404 | ALELEAHRP |
| 13405 | AMERIKMRN |
| 13406 | ATEAYSKLQ |
| 13407 | ATEKDHRVC |
| 13408 | AVEFQHGHC |
| 13409 | AVEIHKCID |
| 13410 | AVEPGISPF |
| 13411 | AYEHDFKCS |
| 13412 | CCEIKRHYY |
| 13413 | CIEKSISST |
| 13414 | CLEQMCRTN |
| 13415 | CPEPFQKVD |
| 13416 | CREQNNCDR |
| 13417 | CSEHGCDIP |
| 13418 | CSEWIRAVR |
| 13419 | CTEQYLVDK |
| 13420 | CTEVRNWYD |
| 13421 | DCEFPMGAN |
| 13422 | DDEGYIFNQ |
| 13423 | DGEFRYVVS |
| 13424 | DGEQESGQT |
| 13425 | DHEVSVAGS |
| 13426 | DIEMCPCYN |
| 13427 | DKEIVNMVW |
| 13428 | DLEYVEFDW |
| 13429 | DQEVFQTHF |
| 13430 | EEEFWMHNA |
| 13431 | EIEPTIGPE |
| 13432 | EKETMWAEP |
| 13433 | ELEKYKLTN |
| 13434 | ELEVRHSND |
| 13435 | EVEEETDEK |
| 13436 | EWEYERGAE |
| 13437 | FCETEPSGA |
| 13438 | FKEHVQNHM |
| 13439 | FQEACMACH |
| 13440 | FSEPSNNFC |
| 13441 | FWESTSPFT |
| 13442 | GEEWVEPTA |
| 13443 | GHEHGWQLS |
| 13444 | GNERLSVCI |
| 13445 | GNETLEMHG |
| 13446 | GRECKQGGH |
| 13447 | GTEHWLSAC |
| 13448 | GYENYNKRD |
| 13449 | HCEYCQMMN |
| 13450 | HFEAGYACS |
| 13451 | HIEGYFRWP |
| 13452 | HIEYTNKCL |
| 13453 | HPEKARPLA |
| 13454 | HPEMKHQNH |
| 13455 | HVENALVFT |
| 13456 | ICEEQFLMG |
| 13457 | IHEEQECGS |
| 13458 | IHEGYKTAP |
| 13459 | IMEQSAQHT |
| 13460 | IRECGQHGS |
| 13461 | ITETWDIFF |
| 13462 | LDEFGFWTH |
| 13463 | LGESEHCMA |
| 13464 | LKEAWICKG |
| 13465 | LKEGINHIC |
| 13466 | LMEGSAKAM |
| 13467 | LYEGRPWYN |
| 13468 | MDEQMGKMS |
| 13469 | MIEKQYPTM |
| 13470 | MKEESKSWP |
| 13471 | MLENYEHMG |
| 13472 | MNEPQKMRQ |
| 13473 | MPEYMKTMQ |
| 13474 | MPEYQARLM |
| 13475 | MREQMPVQY |
| 13476 | MRETVFHEP |
| 13477 | MTESGMKDK |
| 13478 | MVEVSRGEA |
| 13479 | MWECGYGGN |
| 13480 | MWERIGMGG |
| 13481 | MYEDTHCVC |
| 13482 | MYEHINSQR |
| 13483 | MYEKQDGVL |
| 13484 | NGEGSQTCE |
| 13485 | NHEQKSYIF |
| 13486 | NLEIYLQMN |
| 13487 | NVEFMRCNS |
| 13488 | NVEWWAPHV |
| 13489 | NWEQEFVMI |
| 13490 | NWEYMRRKC |
| 13491 | QDERMDLVQ |
| 13492 | QIESGCPHC |
| 13493 | QRELITMGC |
| 13494 | QSEVTHLKW |
| 13495 | QTEQWMCSH |
| 13496 | QWEHIWCWH |
| 13497 | QYENINKVD |
| 13498 | RDEVVFAHC |
| 13499 | RNEPNVWVN |
| 13500 | RTEQSRVWE |
| 13501 | RVEVWYGEL |
| 13502 | SEESVVTHF |
| 13503 | SHEQLAGCP |
| 13504 | SMENRWEYL |
| 13505 | SMEYYYGME |
| 13506 | SNEQMMTMQ |
| 13507 | STECSGLSG |
| 13508 | SYEVIYHMD |
| 13509 | TCEKLISVC |
| 13510 | TKELTRSEA |
| 13511 | TNEAIMQVC |
| 13512 | TNEIGEWWF |
| 13513 | TSELLVNGD |
| 13514 | TSENREYMQ |
| 13515 | TWEKQSRNG |
| 13516 | TWELIQTKF |
| 13517 | VCEEAGELG |
| 13518 | VHEYYRSCA |
| 13519 | VLEFCKDEE |
| 13520 | VMEKQGNGG |
| 13521 | VMEYMLIAW |
| 13522 | VNENNELSA |
| 13523 | VNEQWQIMC |
| 13524 | VNEWSADCS |
| 13525 | VSEFHDLHL |
| 13526 | VSELCTNMA |
| 13527 | VTERWIGPM |
| 13528 | VYEKFSYIT |
| 13529 | VYEREQMDV |
| 13530 | YHECKEGHI |
| 13531 | YSENRIFFR |
| 13532 | YYECLGQDL |
| 13533 | WIEGTLIGA |
| 13534 | NWEFNARHD |
| 13535 | YWEKVPCMK |
| 13536 | GNEDCNLAC |
| 13537 | MNECFSGAQ |
| 13538 | TYESLQNSW |
| 13539 | YCECGHWPN |
| 13540 | CWECCTDSG |
| 13541 | VCPRDMTWE |
| 13542 | VPCRPIYQH |
| 13543 | VRWRGDVAN |
| 13544 | WVLRCTYEY |
| 13545 | ADARVMTMM |
| 13546 | ADLRPSVDY |
| 13547 | AGDRSQILG |
| 13548 | AMMRAWSTF |
| 13549 | AQDRFMLGC |
| 13550 | ATNRIMAAW |
| 13551 | AVVREHVES |
| 13552 | CIWRKYPEF |
| 13553 | CQCRFCHPL |
| 13554 | CTIRVQNGE |
| 13555 | DEFRFLPAD |
| 13556 | DGGRFDDYY |
| 13557 | DHWRKLHKA |
| 13558 | DIARLQVLG |
| 13559 | DKYRQQENS |
| 13560 | DQIRTLQMT |
| 13561 | DRLRDDYPC |
| 13562 | DRPRPMWGH |
| 13563 | DVIRIVHDY |
| 13564 | DYARNHMMW |
| 13565 | DYTRYHSYF |
| 13566 | EGNRPEGLA |
| 13567 | ERVRPLSTD |
| 13568 | ESDREEQSR |
| 13569 | ESWRECMCR |
| 13570 | ETMRCQTMA |
| 13571 | EVARGQDWA |
| 13572 | EVNREETIQ |
| 13573 | EYLRESMMP |
| 13574 | FDDREPFNG |
| 13575 | FDGRPRMFE |
| 13576 | FGPRKNRHE |
| 13577 | FPRRLDHHQ |
| 13578 | FPYRIEGED |
| 13579 | FPYRKVECG |
| 13580 | FTARSYQDA |
| 13581 | FVDRVDKHH |
| 13582 | GNDRAEPDR |
| 13583 | GTCREYGRN |
| 13584 | HGARCCWGV |
| 13585 | HLSRNEYKS |
| 13586 | HSLRDWFKH |
| 13587 | HSPRRATMV |
| 13588 | IHGRMINSI |
| 13589 | IPPRYRHMA |
| 13590 | IRLRDPELH |
| 13591 | IWIRWPSMG |
| 13592 | LFDRVGIEA |
| 13593 | LGCRETRHD |
| 13594 | LIMRNASWC |
| 13595 | LW1RWGSCT |
| 13596 | MFIRIRWLV |
| 13597 | MKCRIEKVN |
| 13598 | MVYRIKMTY |
| 13599 | NFHRWDMNT |
| 13600 | NRDRSWCQH |
| 13601 | NSDRMHMIE |
| 13602 | NYPRDHRQH |
| 13603 | NYYRALKWD |
| 13604 | PVTRWEAGS |
| 13605 | QIDRAEKQE |
| 13606 | QNVRSNAYT |
| 13607 | SDLRNLCAR |
| 13608 | SHRVLRSN |
| 13609 | SIYRMVMQC |
| 13610 | SNDRFPIMC |
| 13611 | SQGRMASGA |
| 13612 | SQTRDTLNF |
| 13613 | SVKRFQHNN |
| 13614 | TQQRVYSIE |
| 13615 | TYDRMQKCN |
| 13616 | VPCRGLVVL |
| 13617 | VPLRHLTDH |
| 13618 | VTDRAFSMN |
| 13619 | VTPRHKTLF |
| 13620 | VITRVEHFP |
| 13621 | VVMRDEGGR |
| 13622 | WCHRVGCTG |
| 13623 | WDGRFQAAY |
| 13624 | WNLRKANAP |
| 13625 | YHDRFERAH |
| 13626 | YHYREPSAD |
| 13627 | YPGRQHVAN |
| 13628 | YRIRKTCAF |
| 13629 | YVNRYGAGW |
| 13630 | NNVRKVGNT |
| 13631 | TSDWLKHFC |
| 13632 | TWSLLQQGD |
| 13633 | VRAYLMGPN |
| 13634 | VSHALIDWH |
| 13635 | YPKQLHVWT |
| 13636 | ACHTLDQQD |
| 13637 | AHQVLHVRS |
| 13638 | AKRELLDHD |
| 13639 | ANCYLNHTT |
| 13640 | APKKLEHVD |
| 13641 | AQNALWERI |
| 13642 | CFAALDYAS |
| 13643 | CGNALPLIH |
| 13644 | CNDCLMFCD |
| 13645 | CNTMLVSAG |
| 13646 | CSMYLMEFG |
| 13647 | CWYMLKAYT |
| 13648 | DFVQLINRA |
| 13649 | DGYHLEGQC |
| 13650 | DIKALMDGW |
| 13651 | DKSKLDVSY |
| 13652 | DTCKLGGWF |
| 13653 | EHMLLVEQL |
| 13654 | EYNGLGQAY |
| 13655 | FCCLLYARR |
| 13656 | FFSGLEGRH |
| 13657 | FTDQIFTNP |
| 13658 | GGNILDIGP |
| 13659 | GIIPLHWQP |
| 13660 | GSDLLVYSA |
| 13661 | GSMLLGGME |
| 13662 | GTMLLWRQN |
| 13663 | GVANLIGLT |
| 13664 | HELYLTTNT |
| 13665 | HSACLMTMS |
| 13666 | IDTALNVHC |
| 13667 | IENWLFVWL |
| 13668 | IMTMLTSET |
| 13669 | INAVLWWRL |
| 13670 | ITHGLQTWD |
| 13671 | ITTDLQMDH |
| 13672 | IWNELILGC |
| 13673 | LDCELYQTR |
| 13674 | LGMYLQLGQ |
| 13675 | LGVQLSSAP |
| 13676 | LHLKLYGQL |
| 13677 | LLTLLMYWV |
| 13678 | LMYMLPPRH |
| 13679 | LRPWLPDST |
| 13680 | LTHALGTWE |
| 13681 | LWTHLMANH |
| 13682 | MDQKLLTNQ |
| 13683 | MEDMLMEGH |
| 13684 | MHMLLHDVK |
| 13685 | MITWLTDQV |
| 13686 | MNVGLWALW |
| 13687 | MYACLAQPP |
| 13688 | NHCMLHHMG |
| 13689 | NHDHLFERY |
| 13690 | NQPHLWSCG |
| 13691 | NTRDLHTKR |
| 13692 | PNGLLQMVI |
| 13693 | Q1AALHQNH |
| 13694 | QLGMLPRAM |
| 13695 | QMVMLKDQY |
| 13696 | OQGQLKTWS |
| 13697 | QVSCLVRDD |
| 13698 | RTWTLECDF |
| 13699 | RVNILEKIA |
| 13700 | SFAHLIDDR |
| 13701 | S1AVLCHGN |
| 13702 | SIDALKSAF |
| 13703 | SIVKLNRSV |
| 13704 | SLNKLFHQE |
| 13705 | SLQFLYHGS |
| 13706 | TERLLQQFY |
| 13707 | TFATLCDQQ |
| 13708 | TIMGLLGNV |
| 13709 | TMYPLMHYS |
| 13710 | TPAQLNGYG |
| 13711 | TQCMLHGPY |
| 13712 | TQGWLTLCY |
| 13713 | TSDWLQNYI |
| 13714 | TTQCLDRWQ |
| 13715 | TTWILPHHD |
| 13716 | TYVPLWAYW |
| 13717 | VEVQLKALQ |
| 13718 | VMHCLRQFM |
| 13719 | VRPWLVMDN |
| 13720 | VTDGLGFRQ |
| 13721 | WVRDLKCPV |
| 13722 | YRIFLMHLC |
| 13723 | CIDVLFKHL |
| 13724 | VFKPLDKRY |
| 13725 | TQGSVHVMN |
| 13726 | VEPTWHCDW |
| 13727 | VISNRHHLP |
| 13728 | WRVSAHYYI |
| 13729 | YDHTIHRNP |
| 13730 | YLLYPHSSG |
| 13731 | ACDLQHNIA |
| 13732 | ADQQQHKVI |
| 13733 | ADWHCHRND |
| 13734 | AEAQFHTGE |
| 13735 | ANHWKHEWE |
| 13736 | ASGWGHCWR |
| 13737 | AVIKAHCAA |
| 13738 | AYCHQHQHA |
| 13739 | AYMPYHKEQ |
| 13740 | AYQAEHVGM |
| 13741 | CINWKHVAS |
| 13742 | DDHWHHRAK |
| 13743 | DFLTAHCIE |
| 13744 | DFLYMHRMG |
| 13745 | DGDAAHTKP |
| 13746 | DHQLCHVAL |
| 13747 | DHVDNHEEA |
| 13748 | DNAYFHIKG |
| 13749 | DPCNHHWCI |
| 13750 | DVVYTHCIN |
| 13751 | EENHSHDER |
| 13752 | EINFQHRHV |
| 13753 | EIQWNHWYV |
| 13754 | EKDMHHVAS |
| 13755 | ELLKVHGPK |
| 13756 | EMNGRHWWP |
| 13757 | EPAVTHDSA |
| 13758 | EQHIMHEQW |
| 13759 | ERMVCHWDA |
| 13760 | EWPINHQKV |
| 13761 | FDKAFHVHM |
| 13762 | FKPIVHHCG |
| 13763 | GEDQIHVWH |
| 13764 | GHQSEHRCS |
| 13765 | GINSHHNDL |
| 13766 | GKQNNHRIE |
| 13767 | GNKYMHHHA |
| 13768 | GPKPVHFDV |
| 13769 | GSVMGHCGS |
| 13770 | GWGCGHGVH |
| 13771 | HGYNWHHLG |
| 13772 | HTLHRHWFW |
| 13773 | HTQFAHGVD |
| 13774 | HVAIGHGGF |
| 13775 | IERHEHNPY |
| 13776 | IIPHFHLCY |
| 13777 | IKCIQHVHY |
| 13778 | IKDITHNHP |
| 13779 | LCRQTHKWV |
| 13780 | LFGVYHFSG |
| 13781 | LICKYHYCQ |
| 13782 | LQPMMHTHS |
| 13783 | LTLCMHEAD |
| 13784 | MCGLYHTEG |
| 13785 | MCHGCHRSY |
| 13786 | MFDNCHVFP |
| 13787 | MNDTYHRRA |
| 13788 | MNLTIHEQF |
| 13789 | MQMFKHNWI |
| 13790 | MTGVEHVFY |
| 13791 | NCFWTHVSG |
| 13792 | NDYPIHCYS |
| 13793 | NFTSFHTYS |
| 13794 | NHMLTHHYH |
| 13795 | NYAFNHQGV |
| 13796 | NYQQHHFFS |
| 13797 | QHSWKHFDS |
| 13798 | QILHYHYHG |
| 13799 | QMNWKHVWN |
| 13800 | QNSERHDEP |
| 13801 | QRMFTHQEY |
| 13802 | QSFSPHFGV |
| 13803 | QSVHTHANL |
| 13804 | QTGNAHWQE |
| 13805 | RCNEDHEQD |
| 13806 | RIIEQHAHG |
| 13807 | RQCEMHTVD |
| 13808 | SCGWKHDNP |
| 13809 | SCTEMHAGR |
| 13810 | SLYVHHKDG |
| 13811 | STGLQHDFN |
| 13812 | TEGQTHHTA |
| 13813 | TERSAHVTY |
| 13814 | TFKWMHEGW |
| 13815 | TFNNCHMQS |
| 13816 | THTQQHVVN |
| 13817 | TMSDRHICH |
| 13818 | TNATSHWCG |
| 13819 | TNGWMHHWD |
| 13820 | TTMIRHHGH |
| 13821 | TVFGTHRAL |
| 13822 | TVGMFHCQG |
| 13823 | TYTPRHRFS |
| 13824 | VRKWQHHGG |
| 13825 | VTTHCHHTY |
| 13826 | WEAKWHAWE |
| 13827 | WGFNDHKRG |
| 13828 | WRGIGHADL |
| 13829 | WTTAFHKRT |
| 13830 | YIVQTHCGG |
| 13831 | YKCHDHCHD |
| 13832 | YNNFHHQMY |
| 13833 | YRNEPHQGF |
| 13834 | YTNYKHCCF |
| 13835 | TGCNHHGRF |
| 13836 | DVCDDHKPN |
| 13837 | DVAPMHQVE |
| 13838 | VFKPNSFQT |
| 13839 | VPIQFSFAS |
| 13840 | VPLWDVFQT |
| 13841 | VTGVTIFEL |
| 13842 | YTPTRYFGK |
| 13843 | YVGWHMFLD |
| 13844 | IWKIQEFGT |
| 13845 | AGQPVTFHF |
| 13846 | AHASHMFGG |
| 13847 | ARQMICFGG |
| 13848 | ATYYNQFHD |
| 13849 | CCTWKCFCQ |
| 13850 | DFPLFTFGN |
| 13851 | DIRHMSFEF |
| 13852 | DPSQPGFNA |
| 13853 | DVAHKCFIS |
| 13854 | EGGKERFQQ |
| 13855 | EKMTWVFAG |
| 13856 | ENTTCNFQG |
| 13857 | ESLGCEFML |
| 13858 | FGCCGRFVI |
| 13859 | FTGKRDFMK |
| 13860 | FIMWHRFAW |
| 13861 | GDNAKDFRG |
| 13862 | GHANALFAD |
| 13863 | GIRSTDFYQ |
| 13864 | GMIVDVFWV |
| 13865 | GMTIMAFQG |
| 13866 | HGAKAPFTA |
| 13867 | HNDYPQFQP |
| 13868 | HVNAGSFGS |
| 13869 | IFILRTFFA |
| 13870 | IFPWFKFHW |
| 13871 | IQVHSLFGC |
| 13872 | IRPFIEFLQ |
| 13873 | LHQKPNFDC |
| 13874 | LIHHCTFEQ |
| 13875 | LQLEDRFNG |
| 13876 | MCSHYQFMS |
| 13877 | MFYLEDFRQ |
| 13878 | MITQFIFNI |
| 13879 | MTVMQGFLS |
| 13880 | NPQWGLFNQ |
| 13881 | NTGARPFAG |
| 13882 | PCLQTRFAQ |
| 13883 | PMYQDMFTL |
| 13884 | QGDLMGFHY |
| 13885 | QIGMNTFMS |
| 13886 | QMHVMIFGS |
| 13887 | REWDHYFQI |
| 13888 | RLRISPFNI |
| 13889 | RMGAWSFPS |
| 13890 | RVTTAEFLC |
| 13891 | RWSQNKFQR |
| 13892 | SDHDNVFED |
| 13893 | SHTTYDFFK |
| 13894 | SNVCNSFVN |
| 13895 | SPHAGPFGC |
| 13896 | SQFMMDFGP |
| 13897 | SQVPGRFIF |
| 13898 | TCCLYEFIH |
| 13899 | TGGTAEFGL |
| 13900 | TSNWHEFTN |
| 13901 | TSPCCTFGI |
| 13902 | VHDAQGFCA |
| 13903 | VKMMWDFAD |
| 13904 | VTHITEFMA |
| 13905 | VVSTDMFIH |
| 13906 | WCAPAVFNE |
| 13907 | YFREKPFDV |
| 13908 | YQCKMAFHV |
| 13909 | GVWMQGFHP |
| 13910 | MWGCKLFVC |
| 13911 | YLDSSECCW |
| 13912 | YVKPCYDCI |
| 13913 | AGLQHDTCV |
| 13914 | AITHVMHCH |
| 13915 | ASVLQQLCV |
| 13916 | ATTGMLACH |
| 13917 | AVGATMMCH |
| 13918 | AVHDNFWCL |
| 13919 | CCKYNQLCH |
| 13920 | CDKIDPYCD |
| 13921 | CDTDESGCY |
| 13922 | CHRCKVNCQ |
| 13923 | CITPYRPCD |
| 13924 | CMYSWVPCG |
| 13925 | CVHYCFGCS |
| 13926 | CVKSYEKCF |
| 13927 | DEHAHWSCS |
| 13928 | DEHQMMECG |
| 13929 | DIGFRIDCD |
| 13930 | DMCEFMYCD |
| 13931 | DMFYWQPCE |
| 13932 | DRRDHEACN |
| 13933 | EFDSPNQCY |
| 13934 | EFHPHDWCL |
| 13935 | ERGFMEHCH |
| 13936 | ESMSTRACG |
| 13937 | ETDPYKSCH |
| 13938 | ETVSPVGCH |
| 13939 | EVAQTMRCA |
| 13940 | EYQLSETCT |
| 13941 | FHKCYSACR |
| 13942 | FKDMIARCP |
| 13943 | GDDCKFDCL |
| 13944 | GTGSTWECT |
| 13945 | GVAVTTCCR |
| 13946 | HSNMRSACE |
| 13947 | IKRTYPACW |
| 13948 | IMCECQHCE |
| 13949 | IPFPMCGCC |
| 13950 | IRAPFNRCE |
| 13951 | ITCTYRNCE |
| 13952 | ITDYQSDCY |
| 13953 | LCALHEQCQ |
| 13954 | LSVSSDACY |
| 13955 | LVVAHCGCV |
| 13956 | MDAYFNSCQ |
| 13957 | MGTFVAHCY |
| 13958 | MIALNQNCT |
| 13959 | MMPSYTLCW |
| 13960 | MPAWMMNCH |
| 13961 | MQQCDGGCG |
| 13962 | MSWSVYWCI |
| 13963 | MTNCIEYCA |
| 13964 | MTTLYQSCL |
| 13965 | MVHGALMCR |
| 13966 | MVRSREQCI |
| 13967 | NGGKGQQCD |
| 13968 | NLGYCEHCY |
| 13969 | NLMTPWPCQ |
| 13970 | NSNMMAHCE |
| 13971 | NWVPVYDCH |
| 13972 | PFILSNCCA |
| 13973 | QNGVWENCE |
| 13974 | QSDGFEDCS |
| 13975 | QTTNNQRCD |
| 13976 | RDTKRSCCH |
| 13977 | RFVDFGSCQ |
| 13978 | RHYYWVLCP |
| 13979 | RNMYFVDCM |
| 13980 | RYDKVCYCV |
| 13981 | SGFSEKCCK |
| 13982 | SGRPKLVCN |
| 13983 | SHDPHNTCG |
| 13984 | SIGYYCHCM |
| 13985 | SILPTWGCD |
| 13986 | SKHDFDHCF |
| 13987 | THILYSWCI |
| 13988 | TIFYCRWCN |
| 13989 | TKNEYGLCF |
| 13990 | TVQYGRGCS |
| 13991 | TWGLKWMCP |
| 13992 | VDMVVDNCC |
| 13993 | VFGDGAHCI |
| 13994 | VHDQRLVCD |
| 13995 | VNPCAQGCH |
| 13996 | VNPQFSQCT |
| 13997 | VPMYTQVCN |
| 13998 | VSALIDHCC |
| 13999 | VTGPMPTCL |
| 14000 | VTMQVRQCA |
| 14001 | VVMQKIGCI |
| 14002 | VVNTVGCCV |
| 14003 | WHLFSACCS |
| 14004 | WHMLCDGCS |
| 14005 | WMRTQCWCP |
| 11006 | YGGLSCGCL |
| 14007 | YGPSTEPCQ |
| 14008 | LSAQRLVCD |
| 14009 | WVHPYSYCA |
| 14010 | TMHDIIVTA |
| 14011 | VPNVQNMKA |
| 14012 | VWAWQNGYA |
| 14013 | AEAIWLPWA |
| 14014 | AECLGYVDA |
| 14015 | AHVVHTSGA |
| 14016 | ALLFAPARA |
| 14017 | AMPNGLDVA |
| 11018 | ARLCTWPYA |
| 14019 | ATNKNCAHA |
| 14020 | CCFQNNTQA |
| 14021 | CLNGWKQAA |
| 14022 | CSQSYAADA |
| 14023 | CTNHNDHDA |
| 14024 | DFIMMQDQA |
| 14025 | DPLVHTMIA |
| 14026 | DRDNVDSQA |
| 14027 | DRSEMGAYA |
| 14028 | DRSVVDVDA |
| 14029 | DTDMIAQFA |
| 14030 | DTWKVMMAA |
| 14031 | EGQSMMYQA |
| 14032 | EIVGQKGWA |
| 14033 | EKQLYMYEA |
| 14034 | ELTIIMVVA |
| 14035 | ERDGWNMAA |
| 14036 | ESSLFEHYA |
| 14037 | ETQWWDVIA |
| 14038 | FVIPSGAGA |
| 14039 | GGHNYGMHA |
| 14040 | GIAASCHLA |
| 14041 | GSCSTLISA |
| 14042 | GSLPYSMYA |
| 14043 | GTMIYSHMA |
| 14044 | HHGQCGGMA |
| 14045 | HTFLCNITA |
| 14046 | IISAKQHDA |
| 14047 | IKCIPGWYA |
| 14048 | ILAQANIHA |
| 14049 | ILHSVTVRA |
| 14050 | INRQCDMIA |
| 14051 | 1QKYGAEVA |
| 14052 | IQMLVQGSA |
| 14053 | IRMHMPRDA |
| 14054 | ISKPYQLTA |
| 14055 | ITKCDGNTA |
| 14056 | IVTASVCQA |
| 14057 | LNSLVCSFA |
| 14058 | LTKIVTTGA |
| 14059 | LWCVSNSFA |
| 14060 | MEIGIMKIA |
| 14061 | MERIMLSLA |
| 14062 | MGWYIVRHA |
| 14063 | MHNWGGKIP |
| 14064 | MHWLKYNYA |
| 14065 | MMAHSGHMA |
| 14066 | MMDPCNPPA |
| 14067 | MNGMPTSFA |
| 14068 | MPDSWVRVA |
| 14069 | MRIAQCNGA |
| 14070 | MSMQHLEHA |
| 14071 | MSTHEDHVA |
| 14072 | MVNTGGNTA |
| 14073 | MVTCVQSGA |
| 14074 | MWMMQGMNA |
| 14075 | NCDQMSISA |
| 14076 | NCKLESDLA |
| 14077 | NDMYVKGTA |
| 14078 | NINGIINQA |
| 14079 | NRTDRMMDA |
| 14080 | NTCQHVNFA |
| 14081 | PCSTWLLAA |
| 14082 | QKMFGDSYA |
| 14083 | QNMSNWLDA |
| 14084 | QQVCDIPSA |
| 14085 | QSTKEYWQA |
| 14086 | QVMCMCAAA |
| 14087 | RTNLQQVDA |
| 14088 | SCAQERHDA |
| 14089 | SILTGGGFA |
| 14090 | SLVCHRNFA |
| 14091 | SMDVHCNDA |
| 14092 | SMKLLSEAA |
| 14093 | SMNATRWKA |
| 14094 | SQACSNHYA |
| 14095 | SYMLKSDYA |
| 14096 | THVNRARWA |
| 14097 | TRCTCERYA |
| 14098 | TTDACWQHA |
| 14099 | TTHHAQAGA |
| 14100 | TTSMGKHYA |
| 14101 | TVGLDAHSA |
| 14102 | TYWPGCANA |
| 14103 | VCTAINDNA |
| 14104 | VIDTIAGHA |
| 14105 | VLSLFKEPA |
| 14106 | VNQQIESDA |
| 14107 | VTQLVTRLA |
| 14108 | VTTQIKRIA |
| 14109 | VWHVPRDQA |
| 14110 | VYCGNKTKA |
| 14111 | YDAKSSVNA |
| 14112 | YGREKQAYA |
| 14113 | YVHADPEFA |
| 14114 | YVKIKEAIA |
| 14115 | YWLEVDSKA |
| 14116 | DVQGSGQWA |
| 14117 | SVLHVQALA |

### Example 14

### AAV5 Variants with Tissue Tropism in Colon

[0918] This example describes engineered AAV5 variants with tissue tropism in colon that were discovered using the methods and systems described in EXAMPLE 1-EXAMPLE 2.

[0919] CNS, liver, skeletal muscle, heart, lung, spleen, lymph node, bone marrow, mammary gland, skin, adrenal gland, thyroid, colon, sciatic nerve, and spinal cord tissues were analyzed to identify amino acid residues in the AAV5 VP1 581-589 region that drive colon tropism. The results are shown in FIG. 18M which shows the positional frequency of each amino acid in the 581 to 589 region of AAV5 VP1 in colon tissue as compared to all other analyzed tissues, wherein the capsid polypeptide has the sequence of SEQ ID NO: 2. The position (“Xaan”, n=1-9) is denoted on the x-axis and amino acid residues are denoted on the y-axis. The frequency of a particular amino acid residue in a particular position is indicated in the heatmap as intensity. Darker squares indicate a higher frequency of a particular amino acid in a particular position and lighter squares indicate a lower frequency of a particular amino acid in a particular position.

[0920] The frequency of a given amino acid residue occurring at a specified position corresponding to position 581 to position 589 of SEQ ID NO: 1 (generalized in SEQ ID NO: 2) in variants identified in colon over the frequency of that given amino acid residue occurring at the specified position in variants identified in all other harvested tissues was analyzed to identify a set of sequence rules for capsids that preferentially target colon tissue. With reference to TABLE 27 below, and SEQ ID NO: 2 (AAV5 VP1), the following amino acids can, thus, be independently mutated, in any combination, at any one or more positions Xaa1-Xaa9, to provide a VP1 capsid with enhanced colon tropism as compared wildtype AAV5 VP1 capsid (SEQ ID NO: 1), where colon tropism here refers to properties that are preferred for colon transduction over properties that are preferred for transduction of all other harvested tissues.

TABLE 27
Colon Tropism Rules

Xaa1 is selected from C, F, H, N, P, W, or Y
Xaa1 is selected from F, P, or W
Xaa1 is P
Xaa2 is selected from D, E, F, L, or P
Xaa2 is selected from D, E, L, or P
Xaa2 is P
Xaa3 is selected from C, F, H, I, L, P, or Y
Xaa3 is selected from C, H, or P
Xaa3 is P
Xaa4 is selected from C, D, E, or P
Xaa4 is selected from C, D, or E
Xaa4 is C
Xaa5 is selected from D, E, G, P, or W
Xaa5 is selected from G, P, or W
Xaa5 is P
Xaa6 is selected from C, K, R, or V
Xaa6 is selected from K or R
Xaa6 is R
Xaa7 is selected from D, M, P, or V
Xaa7 is P
Xaa8 is selected from D, I, K, L, P, R, or V
Xaa8 is selected from K, P, or R
Xaa8 is P
Xaa9 is selected from C, H, I, K, L, M, or W
Xaa9 is selected from I, L, or M
Xaa9 is I

[0921] TABLE 28 below provides sequences of the 581 to 589 region for variant AAV VP1 capsid polypeptides that were found in colon tissue and comport to one or more of the rules provided in TABLE 27. The present disclosure, thus, provides for rAAVs composed of engineered AAV5 VP1 capsid polypeptides having a SEQ ID NO: 2, wherein the Xaa1 to Xaa9 region is any one of SEQ ID NO: 10118-SEQ ID NO: 11117, as disclosed in TABLE 28. Also encompassed herein are rAAVs composed of engineered AAV5 VP2 capsid polypeptides and engineered AAV5 VP3 capsid polypeptides having the sequences disclosed in the below table at the regions in AAV5 VP2 (amin acid residues 445 to 453) and AAV5 VP3 (amino acid residues 389-397) corresponding to the amino acids in the AAV5 VP1 581 to 589 region.

TABLE 28
Sequences of the 581 to 589 Region in AAV5 VP1
Capsid Polypeptide that Drive Colon
Tissue Tropism

| SEQ | |
|---|---|
| ID | 581-589 |
| NO | Sequence |
| 10118 | PENIAEDHE |
| 10119 | PYALAEGNP |
| 10120 | PLAGRFVAQ |
| 10121 | PAEAKQRFD |
| 10122 | PAAYDGRLL |
| 10123 | PACHCYESL |
| 10124 | PACRFEANS |
| 10125 | PACSPYGWW |
| 10126 | PADFVNSNY |
| 10127 | PAECWRMTF |
| 10128 | PAEFDYLFT |
| 10129 | PAHEIKNLE |
| 10130 | PAIDHLLHR |
| 10131 | PAMQGHMVD |
| 10132 | PAMRTVHMW |
| 10133 | PAQWAWADG |
| 10134 | PARCAVSEH |
| 10135 | PASLKEHCV |
| 10136 | PATCSQKKY |
| 10137 | PATPPTIVG |
| 10138 | PAYHTWQYN |
| 10139 | PCAPYHPNQ |
| 10140 | PCDCSYYFR |
| 10141 | PCGSDIGCM |
| 10142 | PCHMWMNFY |
| 10143 | PCIWNWETD |
| 10144 | PCKPYPKDI |
| 10145 | PCNNCGHIR |
| 10146 | PCPMSPGEW |
| 10147 | PCQLKSDGE |
| 10148 | PCRDTLEGI |
| 10149 | PCRPLPHLL |
| 10150 | PCSMPKAGG |
| 10151 | PCTVEGRQY |
| 10152 | PCYMKSWVM |
| 10153 | PDCQEFWKQ |
| 10154 | PDGFSCRFA |
| 10155 | PDHCLQSTK |
| 10156 | PDHRDEMEW |
| 10157 | PDHTNYHIV |
| 10158 | PDIIIEGNT |
| 10159 | PDINYSCAI |
| 10160 | PDLRTQLFS |
| 10161 | PDMCGRMDM |
| 10162 | PDMQTEAGA |
| 10163 | PDPRRTNWQ |
| 10164 | PDPVDHRGD |
| 10165 | PDPWSTSHK |
| 10166 | PDQQYELSC |
| 10167 | PDRNLSQGP |
| 10168 | PDRWCQLYK |
| 10169 | PDSHVPLRD |
| 10170 | PDTKYLHRC |
| 10171 | PDVQNRWEM |
| 10172 | PDVTTNNVI |
| 10173 | PDWLMWSHH |
| 10174 | PDWYHCGFQ |
| 10175 | PEAEFGQKS |
| 10176 | PEAEYEQMK |
| 10177 | PECHNYNQI |
| 10178 | PEDENPLYE |
| 10179 | PEDQHNTWC |
| 10180 | PEDWKRHAN |
| 10181 | PEEQTCEGR |
| 10182 | PEFPTWGHY |
| 10183 | PEGLWSVAC |
| 10184 | PEHKGYAGW |
| 10185 | PEISHKNVY |
| 10186 | PEKESTVIS |
| 10187 | PEKYCHEGY |
| 10188 | PELAMPWEM |
| 10189 | PELTYAKSI |
| 10190 | PEMCKMGSP |
| 10191 | PENWFWPHQ |
| 10192 | PEPSAMTIP |
| 10193 | PEQLLYSMK |
| 10194 | PEREDCHNP |
| 10195 | PESEGRMTK |
| 10196 | PESKLMWGA |
| 10197 | PETKTFCQQ |
| 10198 | PEWTTTTVF |
| 10199 | PFACGMSTW |
| 10200 | PFAEFVGRT |
| 10201 | PFAGGEYDG |
| 10202 | PFCIPWTEG |
| 10203 | PFCQPPEFN |
| 10204 | PFDRMDHLA |
| 10205 | PFGLSQCKG |
| 10206 | PFGQLKFNM |
| 10207 | PFHVPPPTH |
| 10208 | PFKCQDIDC |
| 10209 | PFMSTYQVE |
| 10210 | PFPVQNVDS |
| 10211 | PFSKWVYEW |
| 10212 | PFVSQWEHM |
| 10213 | PFWWVCKVI |
| 10214 | PGGYKEHTW |
| 10215 | PGIPIVWMH |
| 10216 | PGKQTLTIQ |
| 10217 | PGMMPGCTA |
| 10218 | PGPFRGPER |
| 10219 | PGVTCFSQT |
| 10220 | PHCLKAGPL |
| 10221 | PHDARVSRM |
| 10222 | PHEDNNHQT |
| 10223 | PHELCHISH |
| 10224 | PHENKFLDC |
| 10225 | PHHGANGFC |
| 10226 | PHHWCIVES |
| 10227 | PHKCMFSWN |
| 10228 | PHNYRVFWE |
| 10229 | PHPPNPGEN |
| 10230 | PHQHPQIPE |
| 10231 | PHRDVIWLG |
| 10232 | PHRVNVERS |
| 10233 | PHSNSVGKC |
| 10234 | PHSQKLNSG |
| 10235 | PHTDAGYIH |
| 10236 | PHTQALICP |
| 10237 | PIASEMYED |
| 10238 | PICEFCTMN |
| 10239 | PIEFYTIKH |
| 10240 | PIEGYHIAD |
| 10241 | PIESKPRSS |
| 10242 | PIEPPGQKP |
| 10243 | PIHHQLMCF |
| 10244 | PIIPCGGWQ |
| 10245 | PIISTFNNQ |
| 10246 | PILCTMPFV |
| 10247 | PILIPSLQP |
| 10248 | PILPNTHTG |
| 10249 | PIMCKEPGV |
| 10250 | PIMMHQTLG |
| 10251 | PIMPKYNAL |
| 10252 | PINTSHSYF |
| 10253 | PIPHVMNEP |
| 10254 | PIRQNAMMW |
| 10255 | PITLRQPWH |
| 10256 | PIVAWIWYD |
| 10257 | PIVHQNPMN |
| 10258 | PIVVDGRKF |
| 10259 | PlYSIVIKG |
| 10260 | PKCEILTGA |
| 10261 | PKGADRYNY |
| 10262 | PKGVAMGGT |
| 10263 | PKIEPNLCK |
| 10264 | PKIMPKSCS |
| 10265 | PKLEDDEHC |
| 10266 | PKLTCETWF |
| 10267 | PKSDLCEWV |
| 10268 | PKSELQKSF |
| 10269 | PKSIDELFE |
| 10270 | PKTWMHGVP |
| 10271 | PLCLKYEGC |
| 10272 | PLECNRGTD |
| 10273 | PLEMSNTPW |
| 10274 | PLGFAPEIT |
| 10275 | PLHQTSEYK |
| 10276 | PLLMTKTGS |
| 10277 | PLMMGPQRQ |
| 10278 | PLNHACYCC |
| 10279 | PLNWIIACR |
| 10280 | PLQTSKWQA |
| 10281 | PLVKLEEIH |
| 10282 | PMCICWASE |
| 10283 | PMFYDEPKH |
| 10284 | PMGCNGYVT |
| 10285 | PMGYSNLNC |
| 10286 | PMHPTCFVI |
| 10287 | PMIVPDVAY |
| 10288 | PMLKTEAMS |
| 10289 | PMLPEKFPD |
| 10290 | PMMISCNSV |
| 10291 | PMMWSTNVK |
| 10292 | PMNWAHSCA |
| 10293 | PMPNYYHPQ |
| 10294 | PMRPHRDAE |
| 10295 | PMSPFPFEH |
| 10296 | PMTSTEPME |
| 10297 | PMWYYYHRM |
| 10298 | PMYSQVHLG |
| 10299 | PMYVLEAHY |
| 10300 | PNAKPCCFE |
| 10301 | PNCLKSIHG |
| 10302 | PNCPFYPHP |
| 10303 | PNDLNRRTK |
| 10304 | PNEPMTPGQ |
| 10305 | PNESGHQSS |
| 10306 | PNFYSDISR |
| 10307 | PNIKYVYNG |
| 10308 | PNIPLIDMC |
| 10309 | PNMPTCNAP |
| 10310 | PNQYTANEI |
| 10311 | PNRHGPDAE |
| 10312 | PNSSTPYNW |
| 10313 | PNWQNLESD |
| 10314 | PPDAFRWCP |
| 10315 | PPDIQPNCS |
| 10316 | PPELEKCTP |
| 10317 | PPFCKWYIV |
| 10318 | PPILLIQMR |
| 10319 | PPKDKYLRE |
| 10320 | PPKPAEEGH |
| 10321 | PPKYPQQQI |
| 10322 | PPPSVRMMM |
| 10323 | PPQQCEWIA |
| 10324 | PPRHSNSQG |
| 10325 | PPTIGCSCN |
| 10326 | PQAEVMLGE |
| 10327 | PQCRMLIME |
| 10328 | PQDDKGVIP |
| 10329 | PQECSHVHP |
| 10330 | PQKLNFTYC |
| 10331 | PQKTLAVGN |
| 10332 | PQLVSHIGH |
| 10333 | PQNPKMIPA |
| 10334 | PQNTFVRKQ |
| 10335 | PQPCSYDSG |
| 10336 | PQRYIFGAW |
| 10337 | PQSCENNCR |
| 10338 | PQSHCHMET |
| 10339 | PQTFWGETC |
| 10340 | PQVMQLAEA |
| 10341 | PQYIQAIED |
| 10342 | PQYRCIDEH |
| 10343 | PQYTNRVIG |
| 10344 | PQYVPDRGT |
| 10345 | PRCLKCRPH |
| 10346 | PRGANSMMT |
| 10347 | PRISMREID |
| 10348 | PRLNVELDW |
| 10349 | PRLQWMEPG |
| 10350 | PRMCMSENE |
| 10351 | PRMWDKLDQ |
| 10352 | PRRDKDVYM |
| 10353 | PRVCVTWVT |
| 10354 | PRWMQTYQV |
| 10355 | PSACMVGPC |
| 10356 | PSADCNPWA |
| 10357 | PSAGDLSQY |
| 10358 | PSAQGNFSM |
| 10359 | PSCVIFKPW |
| 10360 | PSDHTWKNV |
| 10361 | PSEGDSWLC |
| 10362 | PSESLELCP |
| 10363 | PSFLCGKYI |
| 10364 | PSGCYKCMK |
| 10365 | PSKHKDLNE |
| 10366 | PSLYCCDGV |
| 10367 | PSMYEDMTN |
| 10368 | PSNPEQHLV |
| 10369 | PSPRYPVCM |
| 10370 | PSVLQIITN |
| 10371 | PSVTVDVGS |
| 10372 | PTCLGKIKW |
| 10373 | PTCQTPPLH |
| 10374 | PTEFDQEQT |
| 10375 | PTEPREDAA |
| 10376 | PTETRWHTG |
| 10377 | PTFMFRRDL |
| 10378 | PTGIYAMQC |
| 10379 | PTHLFNFHW |
| 10380 | PTINRYFNE |
| 10381 | PTKEMMSMF |
| 10382 | PTKSSGGAA |
| 10383 | PTMLAVKNA |
| 10384 | PTMPWKKAE |
| 10385 | PTMYRPMHV |
| 10386 | PTNGIASAH |
| 10387 | PTPSIVLCQ |
| 10388 | PTQYIGDHR |
| 10389 | PTRIQMTVD |
| 10390 | PTVWANVAE |
| 10391 | PTVWRTFEF |
| 10392 | PTWYVLAHF |
| 10393 | PTYPFISYS |
| 10394 | PVAGDRYGG |
| 10395 | PVAVPTESP |
| 10396 | PVDRLVHTN |
| 10397 | PVEMPDSCH |
| 10398 | PVGSHMTFW |
| 10399 | MVIHGMHID |
| 10400 | PVIKPNTEV |
| 10401 | PVIQQRRDQ |
| 10402 | PVIRKIYEL |
| 10403 | PVKCEDHPE |
| 10404 | PVKSPWFNP |
| 10405 | PVLCEMKQY |
| 10406 | PVNWPPFFC |
| 10407 | PVPRRKCSS |
| 10408 | PVPTFCSTC |
| 10409 | PVPYETHMY |
| 10410 | PVRKAGWQK |
| 10411 | PVSPPCDAQ |
| 10412 | PVVMIGHMS |
| 10413 | PWDLRNQYH |
| 10414 | PWEAMYMTA |
| 10415 | PWERRHAER |
| 10416 | PWETCRWKQ |
| 10417 | PWIAMVAQE |
| 10418 | PWNQKCNYP |
| 10419 | PWNWDGHMR |
| 10420 | PWQCLRSPD |
| 10421 | PWVRWRTCQ |
| 10422 | PYAANHQQG |
| 10423 | PYACKIIRG |
| 10424 | PYCNIWMES |
| 10425 | PYCPMQIDC |
| 10426 | PYCWMVDDA |
| 10427 | PYEHGKEHH |
| 10428 | PYGYNCVID |
| 10429 | PYHRIMEYA |
| 10430 | PYIRCKKDG |
| 10431 | PYMRCEHQH |
| 10432 | PYMVTCYDF |
| 10433 | PYNPQYCCC |
| 10434 | PYPWDRCWI |
| 10435 | PYRKPWNAE |
| 10436 | PYRVEGEHN |
| 10437 | PYSFKDLLE |
| 10438 | PYTIQKGEY |
| 10439 | PYTNEQQYT |
| 10440 | PYVQAQAGR |
| 10441 | PYVRRVTEI |
| 10442 | MPTRQRHEK |
| 10443 | APILLQASC |
| 10444 | DPRRSMWYL |
| 10445 | IPRIVYMCD |
| 10446 | SPCNMDTHH |
| 10447 | RPVTYPHTA |
| 10448 | NPGWILSMA |
| 10449 | IPSHVHFGE |
| 10450 | APDNEAGMY |
| 10451 | APDPSTANR |
| 10452 | APFNANCCN |
| 10453 | APGCYFYRN |
| 10454 | APICEGEPK |
| 10455 | APITIGAMS |
| 10456 | APKWFNSLD |
| 10457 | APLHNFPVT |
| 10458 | APMDMGRMT |
| 10459 | APMHSFDAE |
| 10460 | APNDCMMQN |
| 10461 | APPHQDHNP |
| 10462 | APQCVIVFT |
| 10463 | APRQJWMHH |
| 10464 | APVYWDHQM |
| 10465 | APWWEFPQY |
| 10466 | APYDPKYVF |
| 10467 | APYQAVMES |
| 10468 | CPALNQLGR |
| 10469 | CPAMPGYCH |
| 10470 | CPDDSRLDQ |
| 10471 | CPDLPDWSG |
| 10472 | CPFFNYMIQ |
| 10473 | CPGYYETEI |
| 10474 | CPHAHYVWR |
| 10475 | CPIYYGPVS |
| 10476 | CPKGHEYEN |
| 10477 | CPKQWLPAC |
| 10478 | CPLIDWCMY |
| 10479 | CPLPARWGD |
| 10480 | CPNCWYDEV |
| 10481 | CPPQSENKV |
| 10482 | CPPRRYVNG |
| 10483 | CPQCMQGAS |
| 10484 | CPQMPWLHE |
| 10485 | CPRQLYHWQ |
| 10486 | CPSCEISVP |
| 10487 | CPSECDNLK |
| 10488 | CPSKQTRNP |
| 10489 | CPTQLYLHN |
| 10490 | CPVCEDMPL |
| 10491 | CPVLFTHME |
| 10492 | CPWLELCYH |
| 10493 | CPYCDQEGH |
| 10494 | DPAGDLMQG |
| 10495 | DPCNVDPGF |
| 10496 | DPCTCHTAK |
| 10497 | DPDPVDMYA |
| 10498 | DPGAPGPKA |
| 10499 | DPHCIPTWK |
| 10500 | DPHCVKNNC |
| 10501 | DPICVVWTG |
| 10502 | DPIHAHVEC |
| 10503 | DPKHYNETM |
| 10504 | DPKICWQER |
| 10505 | DPKSCPRRE |
| 10506 | DPKSGFNGT |
| 10507 | DPMCFHAYQ |
| 10508 | DPMQMHRSG |
| 10509 | DPPKCYRYE |
| 10510 | DPPNTSFFH |
| 10511 | DPPRCDMQK |
| 10512 | DPPSPVMCG |
| 10513 | DPQLFCSDL |
| 10514 | DPRMGGSVN |
| 10515 | DPSYNERHR |
| 10516 | EPCHWMHEF |
| 10517 | EPDQMQERL |
| 10518 | EPDQPRWDS |
| 10519 | EPECTEFKV |
| 10520 | EPFPHVMWG |
| 10521 | EPGIVHWYD |
| 10522 | EPGYYDGGN |
| 10523 | EPHKYNQPS |
| 10524 | EPHLQPHQK |
| 10525 | EPHLTAVPT |
| 10526 | EPKNYSERH |
| 10527 | EPLKYNHES |
| 10528 | EPLQFMELM |
| 10529 | EMIRLGEWS |
| 10530 | EPPVCQGNE |
| 10531 | EPRRVDDQQ |
| 10532 | EPVMVRMQF |
| 10533 | FPALIKPHE |
| 10534 | FPASPDILI |
| 10535 | FPCGIVWTH |
| 10536 | FPCQNGPHN |
| 10537 | FPDRMDYVE |
| 10538 | FPGGQKPCL |
| 10539 | FPHFTCWCD |
| 10540 | EPHGYAMIW |
| 10541 | FPIQGNHFP |
| 10542 | FPKAPKYYL |
| 10543 | FPKNNLTKC |
| 10544 | FPLCVDPGP |
| 10545 | FPNIDNPKA |
| 10546 | FPPPIHLAI |
| 10547 | FPPQQEFIH |
| 10548 | FPQWGKEPI |
| 10549 | FPRTTNTRV |
| 10550 | FPSHDDFLG |
| 10551 | FPVTCGTVF |
| 10552 | FPWYSLILT |
| 10553 | FPYMAEQYR |
| 10554 | FPYWDIDDT |
| 10555 | GPDPWSQWW |
| 10556 | GPDPWSQWW |
| 10557 | GPDTEYRGC |
| 10558 | GPFADPPAT |
| 10559 | GPFLSVPAH |
| 10560 | GPFRFEWEW |
| 10561 | GPGTLRHLL |
| 10562 | GPHWYWHDM |
| 10563 | GPINPYAHG |
| 10564 | GPLSKHFDV |
| 10565 | GPMHNTGPP |
| 10566 | GPPPSDLRS |
| 10567 | GPPWKHCDA |
| 10568 | GPSCYLDYW |
| 10569 | GPTIWIHTY |
| 10570 | GPTIYQYMQ |
| 10571 | GPTKLNYNN |
| 10572 | GPVVPCNSW |
| 10573 | GPVWEFEWM |
| 10574 | GPWHACKIN |
| 10575 | HPCCDRYLA |
| 10576 | HPDAPGPIQ |
| 10577 | HPDVRNYEN |
| 10578 | HPEVDSSGA |
| 10579 | HPGCEYSWE |
| 10580 | HPGIEVDRG |
| 10581 | HPGWTHAVF |
| 10582 | HPHDVFHET |
| 10583 | HPILPAQYF |
| 10584 | HPISPWQWL |
| 10585 | HPLSRGSES |
| 10586 | HPMFEAYQN |
| 10587 | HPNFIWCNH |
| 10588 | HPNGNEREH |
| 10589 | HPNPWGVFW |
| 10590 | HPRFNRLQV |
| 10591 | HPSFIKCQV |
| 10592 | HPYLCTIRI |
| 10593 | IPDAWWANM |
| 10594 | IPHRNIHPS |
| 10595 | IPLWETMNM |
| 10596 | IPNDRDRCA |
| 10597 | IPRVHWKAE |
| 10598 | IPTFRTMKI |
| 10599 | IPWFDFAME |
| 10600 | KPAPWMRME |
| 10601 | KPCPPHAYV |
| 10602 | KPEAWAVCG |
| 10603 | KPESKMLSE |
| 10604 | KPFVSECTE |
| 10605 | KPGFRYFAE |
| 10606 | KPGTVKDCD |
| 10607 | KPILMSEEA |
| 10608 | KPITEGRRD |
| 10609 | KPKCCQYNW |
| 10610 | KPMCDGVAY |
| 10611 | KPMCLYVLT |
| 10612 | KPNDCLREG |
| 10613 | KPPMPTNTG |
| 10614 | KPPYSCREQ |
| 10615 | KPQHENKQL |
| 10616 | KPSMYPRNS |
| 10617 | KPTDMVGAW |
| 10618 | KPTQIGGEH |
| 10619 | KPVEPTTNP |
| 10620 | LPAAYFWGA |
| 10621 | LPAWYRARC |
| 10622 | LPIEQQKSW |
| 10623 | LPIESEGEI |
| 10624 | LPLGQADEA |
| 10625 | LPLVYAKNW |
| 10626 | LPLYFHEHY |
| 10627 | LPMDEKEGA |
| 10628 | LPMQCDETY |
| 10629 | LPMVWGNPK |
| 10630 | LPMYIEHMC |
| 10631 | LPNPVNATQ |
| 10632 | LPNWFCRNY |
| 10633 | LPPAHMFYC |
| 10634 | LPQHYGIWH |
| 10635 | LPQPYPDNY |
| 10636 | LPQRGTPIV |
| 10637 | LPRHIYKST |
| 10638 | LPSHELWFW |
| 10639 | LPTSDCRAE |
| 10640 | LPTYNKYVQ |
| 10641 | MPAHANSTC |
| 10642 | MPCTCSYPH |
| 10643 | MPDNFGNGP |
| 10644 | MPIMMNVSP |
| 10645 | MPMDLNYIQ |
| 10646 | MPMFCQIEQ |
| 10647 | MPPFHENES |
| 10648 | MPPPVQDWN |
| 10649 | MPPVRLYSY |
| 10650 | MPQDCGWNL |
| 10651 | MPRDGTWWC |
| 10652 | MPSHGYWYQ |
| 10653 | MPSPYGEAY |
| 10654 | MPSQGVIWH |
| 10655 | MPSVWGPDM |
| 10656 | MPTEYEAHG |
| 10657 | MPTQAYMPQ |
| 10658 | MPVDIANQM |
| 10659 | MPWWYGCIC |
| 10660 | NPCFMIWYT |
| 10661 | NPCMLQDHH |
| 10662 | NPCTFWNNE |
| 10663 | NPGHAWATM |
| 10664 | NPGWWCRMW |
| 10665 | NPIMYPCLS |
| 10666 | NPLIRDMWT |
| 10667 | NPLKLDYPE |
| 10668 | NPPWLQPFS |
| 10669 | NPQFLHFQI |
| 10670 | NPRAMDAAH |
| 10671 | NPRHDAGHS |
| 10672 | NPSWNACNV |
| 10673 | NPTMPGIRG |
| 10674 | NPTQDFKVM |
| 10675 | NPVTGEYSL |
| 10676 | NPWHYTYAF |
| 10677 | NPYLHMFNQ |
| 10678 | NPYNQHC1C |
| 10679 | NPYRTFTDG |
| 10680 | QPAFEHAQV |
| 10681 | QPAHMEVMY |
| 10682 | QPAHPGTGL |
| 10683 | QPAQYAVMH |
| 10684 | QPCDITYQS |
| 10685 | QPDCEWPNN |
| 10686 | QPDMYDCYA |
| 10687 | QPEFTYLQF |
| 10688 | OPHSSVILD |
| 10689 | QPPAAAKQD |
| 10690 | QPTDDVIQG |
| 10691 | QPTQRMYHC |
| 10692 | QPVTFYEKH |
| 10693 | QPVWFPKCW |
| 10694 | QPWMVWNSH |
| 10695 | QPWMYVMGS |
| 10696 | QPWITWWNR |
| 10697 | QPYCERTGI |
| 10698 | RPAVDDEEC |
| 10699 | RPCPNMTDG |
| 10700 | RPDVRNELC |
| 10701 | RPELGGQQT |
| 10702 | RPETTAERP |
| 10703 | RPHHFWVPF |
| 10704 | RPKECEQMW |
| 10705 | RPLDTSQED |
| 10706 | RPMFGAVAG |
| 10707 | RPMHGDYDD |
| 10708 | RPNCVMYDK |
| 10709 | RPPDEIWGH |
| 10710 | RPRDNGVEG |
| 10711 | RPWSSEFRV |
| 10712 | SPAEIPSIF |
| 10713 | SPCPNGVRQ |
| 10714 | SPDVGWTES |
| 10715 | SPEVTEYGF |
| 10716 | SPFMWWRWW |
| 10717 | SPGFILGGY |
| 10718 | SPGKFWHPC |
| 10719 | SPHFQKHPS |
| 10720 | SPIRIDWQG |
| 10721 | SPISDLRNC |
| 10722 | SPIWEGERT |
| 10723 | SPKKAEQAI |
| 10724 | SPLHVHWQS |
| 10725 | SPLISVLEG |
| 10726 | SPLQNYEER |
| 10727 | SPMDTTEPK |
| 10728 | SPMQKQKVS |
| 10729 | SPQTCSEPT |
| 10730 | SPRCMTNGG |
| 10731 | SPSGIMEGN |
| 10732 | SPYQCPQAS |
| 10733 | TPDHKTRAH |
| 10734 | TPDPDLNNR |
| 10735 | TPGSDMSMV |
| 10736 | TPHSSMKVG |
| 10737 | TPKLEFPVD |
| 10738 | TPLLTSGHE |
| 10739 | TPLMAYWIP |
| 10740 | TPMDYEDQE |
| 10741 | TPMFDRHSL |
| 10742 | TPMLGMLWW |
| 10743 | TPMWQASWQ |
| 10744 | TPNCMGQRM |
| 10745 | TPNVWEQQM |
| 10746 | TPPHKCSVG |
| 10747 | TPQCAMWNE |
| 10748 | TPSQVASDD |
| 10749 | TPSRNMVDL |
| 10750 | TPYIRHHFE |
| 10751 | TPYTWCWPD |
| 10752 | VPCPKWSMI |
| 10753 | VPEQGRWEA |
| 10754 | VPKLIDTDQ |
| 10755 | VPLLILNNN |
| 10756 | VPLVSYSQQ |
| 10757 | VPMMCQWSQ |
| 10758 | VPQHKNEFQ |
| 10759 | VPQWIDERW |
| 10760 | VPRHWAGVR |
| 10761 | VPRYNSDEQ |
| 10762 | VPSCQCSES |
| 10763 | VPTIKVIRA |
| 10764 | VPTQSVKGC |
| 10765 | VPTSYWCTN |
| 10766 | VPWFVMLMM |
| 10767 | VPWMVLDNN |
| 10768 | WPALFVADA |
| 10769 | WPDPFIHAT |
| 10770 | WPEATHRFA |
| 10771 | WPKYDMPLH |
| 10772 | WPMCPVCYF |
| 10773 | WPMTRTNGH |
| 10774 | WPNYHSWYE |
| 10775 | WPPNGKWFM |
| 10776 | WPQRGTMDM |
| 10777 | WPTGHCAYW |
| 10778 | WPYYCCIEH |
| 10779 | YPANKCEWE |
| 10780 | YPASYDCHP |
| 10781 | YPDTVQKSP |
| 10782 | YPDWWEMIT |
| 10783 | YPEGEMNYE |
| 10784 | YPFQPIEEP |
| 10785 | YPFWAGWGD |
| 10786 | YPGMKICGH |
| 10787 | YPIIMLPCR |
| 10788 | YPMQGGIRW |
| 10789 | YPNDAKHGN |
| 10790 | YPNLHHSMM |
| 10791 | YPSDGLFEQ |
| 10792 | YPSGHKPYW |
| 10793 | YPS1NCPTN |
| 10794 | YPSPPERLE |
| 10795 | YPVNCTQKW |
| 10796 | YPWENNAHL |
| 10797 | YPWMTACHD |
| 10798 | YPYICEFVW |
| 10799 | YPYPRLWEC |
| 10800 | NEPYCIWAY |
| 10801 | GRPVMHRHS |
| 10802 | DSPSNHPAV |
| 10803 | YYPFPGPTD |
| 10804 | AAPIPGKAF |
| 10805 | AFPNVMYQN |
| 10806 | AGPKMIEPW |
| 10807 | AHPQQPHVT |
| 10808 | AIPMIGSYC |
| 10809 | AIPQEGVCC |
| 10810 | AKPYKFSGE |
| 10811 | AMPIVMWHT |
| 10812 | ANPADWHWY |
| 10813 | ANPFVLAPW |
| 10814 | ARPWWMLEQ |
| 10815 | ASPPDYKAQ |
| 10816 | AVPQMTGWC |
| 10817 | AYPHCEAVM |
| 10818 | AYPSGIRAH |
| 10819 | CCPVDNEFW |
| 10820 | CDPPIDCYI |
| 10821 | CDPSYELNI |
| 10822 | CDPWHKYNG |
| 10823 | CGPFRHQNG |
| 10824 | CHPQEWHGQ |
| 10825 | CIPDFISEY |
| 10826 | CLPWVMSIA |
| 10827 | CMPPDCKCP |
| 10828 | CNPGWPKPG |
| 10829 | CTPYPPRDQ |
| 10830 | CVPNSHIWQ |
| 10831 | CYPTLEKHA |
| 10832 | DFPLNPVQT |
| 10833 | DFPLQVTGY |
| 10834 | DFPRNNAIM |
| 10835 | DGPGTQCIK |
| 10836 | DLPAGQRMF |
| 10837 | DLPLPKLMQ |
| 10838 | DNPGYLKEE |
| 10839 | DSPNYVWTH |
| 10840 | DTPEYAPSM |
| 10841 | DTPLQYKAQ |
| 10842 | DYPKGEKCD |
| 10843 | EEPELQRLN |
| 10844 | EHPPHAFAH |
| 10845 | EKPLYYHHA |
| 10846 | ELPATLFQF |
| 10847 | ENPQRIRSI |
| 10848 | ESPCHQNQG |
| 10849 | EYPSYWSDG |
| 10850 | EYPYDVPNF |
| 10851 | FAPEICGCC |
| 10852 | FDPVCKCMK |
| 10853 | FEPQNPTFQ |
| 10854 | FFPTMHARF |
| 10855 | FIPCVISNQ |
| 10856 | FLPEWKAFH |
| 10857 | FLPTSKLHS |
| 10858 | FLPTYDGMH |
| 10859 | FNPPIRQLW |
| 10860 | FQPFTSNLL |
| 10861 | FQPYMTSTS |
| 10862 | FRPIISMKR |
| 10863 | FRPMITCWW |
| 10864 | FSPPMVMKY |
| 10865 | FSPYFMVPH |
| 10866 | FTPDSLIVH |
| 10867 | FTPECTRGM |
| 10868 | FVPHDCNRD |
| 10869 | GAPFDELPH |
| 10870 | GCPLIVPDL |
| 10871 | GDPLVIWLC |
| 10872 | GFPREMYTE |
| 10873 | GGPEKEAHR |
| 10874 | GGPPIDEGN |
| 10875 | GHPFKDYHS |
| 10876 | GMPWEDISN |
| 10877 | GNPCSPKIN |
| 10878 | GNPKLLESF |
| 10879 | GNPPTWLCP |
| 10880 | GNPYMYPWH |
| 10881 | GRPWDPYFE |
| 10882 | GTPQWWNKG |
| 10883 | GTPSMHMGI |
| 10884 | GVPQDRIQE |
| 10885 | HCPNQGRRS |
| 10886 | HFPRSEAHR |
| 10887 | HGPMEVMHE |
| 10888 | HHPFAKPII |
| 10889 | HIPQHSRMC |
| 10890 | HKPEQMEAY |
| 10891 | HKPKMWMYG |
| 10892 | HNPLIRTMV |
| 10893 | HNPLQENDC |
| 10894 | HQPELMTDN |
| 10895 | HRPDWNDGK |
| 10896 | HRPPCEMGD |
| 10897 | HYPAYQKAC |
| 10898 | HYPWTPWTP |
| 10899 | ICPTKGMEA |
| 10900 | ICPVCSWDC |
| 10901 | IDPEIYAWC |
| 10902 | IDPLDGNHF |
| 10903 | IHPOQWWDH |
| 10904 | IIPHQNIMW |
| 10905 | IKPEPMWMT |
| 10906 | ILPPEKHQA |
| 10907 | IMPNNLEMM |
| 10908 | INPRKLSSK |
| 10909 | IQPMYVIYQ |
| 10910 | IQPWDYVRP |
| 10911 | ISPLNICWF |
| 10912 | ITPEVLKTT |
| 10913 | KCPLGKPAS |
| 10914 | KCPRGGMNC |
| 10915 | KDPCCGCHN |
| 10916 | KGPPHKDDQ |
| 10917 | KHPNIWCAN |
| 10918 | KLPDTYKNF |
| 10919 | KMPPPAKDI |
| 10920 | KTPHCIKHY |
| 10921 | KVPVLTAGG |
| 10922 | KWPTFKWPK |
| 10923 | KYPEPGRGT |
| 10924 | LAPQLGWRN |
| 10925 | LCPGEWLVI |
| 10926 | LEPKDLAAP |
| 10927 | LEPPSTVNV |
| 10928 | LFPNQCNFV |
| 10929 | LFPQHIAQP |
| 10930 | LGPHRWYGH |
| 10931 | LHPWMPAGR |
| 10932 | LKPSWQDKA |
| 10933 | LLPMDEMKT |
| 10934 | LMPCHGDIA |
| 10935 | LMPELGCTD |
| 10936 | LSPLIAGIY |
| 10937 | LTPDVRINA |
| 10938 | LTPSCRHKW |
| 10939 | LVPTLINCL |
| 10940 | LWPSSCQMK |
| 10941 | MAPQPMGGG |
| 10942 | MCPKTFRFE |
| 10943 | MEPKKMKVW |
| 10944 | MEPMSRDHL |
| 10945 | MEPWEQCHI |
| 10946 | MGPRYDKEW |
| 10947 | MHPDSYNVT |
| 10948 | MKPDQNHHK |
| 10949 | MLPLPNEFQ |
| 10950 | MLPMAWYQI |
| 10951 | MLPMRQLTQ |
| 10952 | MLPWSSRSN |
| 10953 | MMPDILRSY |
| 10954 | MQPCWQPQC |
| 10955 | MRPQQVWNG |
| 10956 | MSPQPELSG |
| 10957 | MVPAAGPGE |
| 10958 | MVPKMMRSQ |
| 10959 | MWPAMKVCW |
| 10960 | NCPQPNCGW |
| 10961 | NMPERKLTF |
| 10962 | NMPIGGYCC |
| 10963 | NNPQKQQSR |
| 10964 | NNPSNSLIW |
| 10965 | NTPEFHWQQ |
| 10966 | NTPLDFTGE |
| 10967 | NTPNNMEAR |
| 10968 | NTPQQGQKG |
| 10969 | NVPTEPMDH |
| 10970 | NWPVSDEDM |
| 10971 | NYPCTDKNH |
| 10972 | NYPVGYHEL |
| 10973 | QAPMVQDTQ |
| 10974 | QAPWKHEGP |
| 10975 | QCPDEKAEF |
| 10976 | QCPIQSVVC |
| 10977 | QDPFWRGLH |
| 10978 | QHPDQGQHC |
| 10979 | QIPYEMWWS |
| 10980 | QLPCIKKCP |
| 10981 | QLPGCRTDQ |
| 10982 | QLPKMWLPN |
| 10983 | QMPNGEIVT |
| 10984 | QNPDDVINL |
| 10985 | QNPSPMMHR |
| 10986 | QNPSTYCHY |
| 10987 | QQPWPHQRG |
| 10988 | QRPTMLQGY |
| 10989 | QSPPIEPTI |
| 10990 | QSPWKLWSH |
| 10991 | QWPDFMVTI |
| 10992 | QYPQLPHWA |
| 10993 | REPFLHVNS |
| 10994 | RFPVKLGAM |
| 10995 | RHPQLGLPH |
| 10996 | R1PWAELMK |
| 10997 | RKPWREHNI |
| 10998 | RLPYYVQFC |
| 10999 | RNPCSKHEV |
| 11000 | RNPRDYPMF |
| 11001 | ROPANREKE |
| 11002 | RTPFPHDSL |
| 11003 | RWPSEKEKF |
| 11004 | SAPPSFAQK |
| 11005 | SAPVEWMRK |
| 11006 | SCPNRESGR |
| 11007 | SGPRTDCPL |
| 11008 | SGPVVMIQS |
| 11009 | SMPHACYNG |
| 11010 | SMPTTSSSC |
| 11011 | SSPDNWKHM |
| 11012 | STPLGNSAP |
| 11013 | STPMVCEMG |
| 11014 | SVPHEVHCE |
| 11015 | SVPLKFWTL |
| 11016 | SWPDEPSVA |
| 11017 | SWPHCEIEI |
| 11018 | SYPLTRWPA |
| 11019 | SYPYMHMQD |
| 11020 | TAPQCVSDA |
| 11021 | TCPNLTAYC |
| 11022 | TCPRNLCNY |
| 11023 | TDPLCKHQT |
| 11024 | TDPLNPLCD |
| 11025 | TEPPCPGQT |
| 11026 | TEPSIMNEV |
| 11027 | TFPCNREGI |
| 11028 | TFPSIQWSR |
| 11029 | TGPNFQPAL |
| 11030 | TIPECKKCE |
| 11031 | TIPYEANCA |
| 11032 | TKPQITEIS |
| 11033 | TQPCMPNRT |
| 11034 | TRPPSSLDE |
| 11035 | TIPTWQNSP |
| 11036 | TVPHFYFYG |
| 11037 | TWPMSCDCD |
| 11038 | TYPFGWDKH |
| 11039 | VAPAILYRC |
| 11040 | VAPIHDHRI |
| 11041 | VDPAMMPDN |
| 11042 | VEPTASQLC |
| 11043 | VHPEQTLIG |
| 11044 | VHPFHKYEQ |
| 11045 | VIPVHNMCG |
| 11046 | VKPYNGLVQ |
| 11047 | VLPHEWNQG |
| 11048 | VLPKSHFFP |
| 11049 | VMPEESVRN |
| 11050 | VMPYAWGIS |
| 11051 | VMPYAWGIS |
| 11052 | VQPCFMMDH |
| 11053 | VQPFPYCCE |
| 11054 | VQPHPFNPH |
| 11055 | VQPPILEQH |
| 11056 | VQPWWDAMG |
| 11057 | VRPLHNFID |
| 11058 | VSPANADND |
| 11059 | VTPNLQVQS |
| 11060 | VTPYDWKFQ |
| 11061 | WAPSPRQDR |
| 11062 | WDPVYGERN |
| 11063 | WEPDGIVPQ |
| 11064 | WHPKCYDVF |
| 11065 | WHPMDKNER |
| 11066 | WIPTEIYal |
| 11067 | WKPEGQNFG |
| 11068 | WLPRMPSCD |
| 11069 | WMPCCPHGC |
| 11070 | WMPGMHWRC |
| 11071 | WMPSTTRWN |
| 11072 | WQPDWMYEH |
| 11073 | WRPPVRVQD |
| 11074 | WSPERERFE |
| 11075 | WWPIWWIPQ |
| 11076 | WYPLDVLAS |
| 11077 | WYPMLWELE |
| 11078 | LS1CQPVMP |
| 11079 | TTRCFRHAK |
| 11080 | WATCDAPPV |
| 11081 | NYVCSTSGY |
| 11082 | LTKCMNKGW |
| 11083 | SCECPCCLA |
| 11084 | VCECCRQNI |
| 11085 | ALCCFCCQG |
| 11086 | TSYCIQTVD |
| 11087 | DQECCQTLF |
| 11088 | QTQVPIWNT |
| 11089 | LATHPPYTY |
| 11090 | LTYNPTMIG |
| 11091 | TGIIPIRVC |
| 11092 | TCQEPHNIT |
| 11093 | QVYAPEIEG |
| 11094 | DYQSERLWS |
| 11095 | KEQEQRPVR |
| 11096 | ISMQNRCAD |
| 11097 | IFQLSRPAW |
| 11098 | ECKTHRDVY |
| 11099 | YHNQDRHYL |
| 11100 | KVDTVRNPK |
| 11101 | TVSRGRPVA |
| 11102 | NQAYGRGHV |
| 11103 | SVRLNEPHV |
| 11104 | CLVNDMPRK |
| 11105 | AHTFEAPKW |
| 11106 | IWNYCVPKH |
| 11107 | HWEQHNPIW |
| 11108 | CIDWAEMPQ |
| 11109 | ACVMYDCPP |
| 11110 | WVGNANRPA |
| 11111 | SVEVGCSPG |
| 11112 | CVFSTNHPA |
| 11113 | AMRQIIAPC |
| 11114 | TVVFSENEI |
| 11115 | WKGRWTTTI |
| 11116 | NSHYTEGVI |
| 11117 | AWTPTEKQI |

### Example 15

### AAV5 Variants with Tissue Tropism in Thyroid Gland

[0922] This example describes engineered AAV5 variants with tissue tropism in thyroid gland that were discovered using the methods and systems described in EXAMPLE 1-EXAMPLE 2.

[0923] CNS, liver, skeletal muscle, heart, lung, spleen, lymph node, bone marrow, mammary gland, skin, adrenal gland, thyroid, colon, sciatic nerve, and spinal cord tissues were analyzed to identify amino acid residues in the AAV5 VP1 581-589 region that drive thyroid gland tropism. The results are shown in FIG. 18L which shows the positional frequency of each amino acid in the 581 to 589 region of AAV5 VP1 in thyroid gland tissue as compared to all other analyzed tissues, wherein the capsid polypeptide has the sequence of SEQ ID NO: 2. The position (“Xaan”, n=1-9) is denoted on the x-axis and amino acid residues are denoted on the y-axis. The frequency of a particular amino acid residue in a particular position is indicated in the heatmap as intensity. Darker squares indicate a higher frequency of a particular amino acid in a particular position and lighter squares indicate a lower frequency of a particular amino acid in a particular position.

[0924] The frequency of a given amino acid residue occurring at a specified position corresponding to position 581 to position 589 of SEQ ID NO: 1 (generalized in SEQ ID NO: 2) in variants identified in thyroid gland over the frequency of that given amino acid residue occurring at the specified position in variants identified in all other harvested tissues was analyzed to identify a set of sequence rules for capsids that preferentially target thyroid gland tissue. With reference to TABLE 29 below, and SEQ ID NO: 2 (AAV5 VP1), the following amino acids can, thus, be independently mutated, in any combination, at any one or more positions Xaa1-Xaa9, to provide a VP1 capsid with enhanced thyroid gland tropism as compared wildtype AAV5 VP1 capsid (SEQ ID NO: 1), where thyroid gland tropism here refers to properties that are preferred for thyroid gland transduction over properties that are preferred for transduction of all other harvested tissues.

TABLE 29
Thyroid Gland Tropism Rules

Xaa1 is selected from A, K, M, N, Q, or R
Xaa1 is selected from K, N or Q
Xaa1 is K
Xaa2 is selected from A, F, K, L, M, T, V, or W
Xaa2 is selected from F, V, or W
Xaa2 is W
Xaa3 is selected from A, I, K, R, S, T, V, or W
Xaa3 is selected from A, R or T
Xaa3 is R
Xaa4 is selected from A, D, E, I, P, or V
Xaa4 is selected from A, E, or I
Xaa4 is A
Xaa5 is selected from F, I, M, Q, V, or Y
Xaa5 is M, V, Y
Xaa5 is M
Xaa6 is selected from H, M, N, or Y
Xaa6 is N
Xaa7 is selected from H, I, N, Q, S, or W
Xaa7 is selected from H, I, or N
Xaa7 is H
Xaa8 is selected from A, D, F, Q, S, or Y
Xaa8 is selected from A, F, or S
Xaa8 is F
Xaa9 is selected from A, Q, S, or Y
Xaa9 is selected from A or S
Xaa9 is A

[0925] TABLE 30 below provides sequences of the 581 to 589 region for variant AAV VP1 capsid polypeptides that were found in thyroid gland tissue and comport to one or more of the rules provided in TABLE 29. The present disclosure, thus, provides for rAAVs composed of engineered AAV5 VP1 capsid polypeptides having a SEQ ID NO: 2, wherein the Xaa1 to Xaa9 region is any one of SEQ ID NO: 40438-SEQ ID NO: 41437, as disclosed in TABLE 30. Also encompassed herein are rAAVs composed of engineered AAV5 VP2 capsid polypeptides and engineered AAV5 VP3 capsid polypeptides having the sequences disclosed in the below table at the regions in AAV5 VP2 (amin acid residues 445 to 453) and AAV5 VP3 (amino acid residues 389-397) corresponding to the amino acids in the AAV5 VP1 581 to 589 region.

TABLE 30
Sequences of the 581 to 589 Region in AAV5 VP1
Capsid Polypeptide that Drive Thyroid
Gland Tissue Tropism
SEQ

| ID | 581-589 |
|---|---|
| NO | Sequence |
| 40438 | KAEDSQPDC |
| 40439 | KAMQVLENC |
| 40440 | KASWIPSNK |
| 40441 | KCEDNTFAS |
| 40442 | KCTDLGEYF |
| 40443 | KDHEEHGPK |
| 40444 | KERTAWSRE |
| 40445 | KFMQDPCNS |
| 40446 | KGELMCLDV |
| 40447 | KGPKECAAT |
| 40448 | KHILWGSLA |
| 40449 | KIGISEQDF |
| 40450 | KKYTDQDYG |
| 40451 | KMTPVEADA |
| 40452 | KNPTVFWKM |
| 40453 | KQAIYLDLD |
| 40454 | KSAMQEGVA |
| 40455 | KSFGSEVFF |
| 40456 | KSKWGHYWD |
| 40457 | KSMDLGQFM |
| 40458 | KSNQTYCAA |
| 40459 | KSYCLHMKQ |
| 40460 | KTGMACDIN |
| 40461 | KTLVKQMDY |
| 40462 | KTVWVYRVH |
| 40463 | KTYPHCFPV |
| 40464 | KVEDGLQWH |
| 40465 | KVEGMVTQS |
| 40466 | KVIEFCGEE |
| 40467 | KWLEANMTG |
| 40468 | KYAFRYEAS |
| 40469 | KCLQMCPNG |
| 40470 | KAIGWFHFD |
| 40471 | KAYTVEMDP |
| 40472 | KCCLPWQNI |
| 40473 | KCEQWQKVC |
| 40474 | KCHVGGNVY |
| 40475 | KCNPWSEPT |
| 40476 | KDDGDDNIP |
| 40477 | KDRDQVHWM |
| 40478 | KEGNMDACS |
| 40479 | KEYDPQHWW |
| 40480 | KFIYGQREV |
| 40481 | KFKQEDAQM |
| 40482 | KGIWQDHSC |
| 40483 | KHCENCEYF |
| 40484 | KIAPVAASP |
| 40485 | KIEMLCCQG |
| 40486 | KILNPNDSY |
| 40487 | KKRRDTQIY |
| 40488 | KLHIWNVPC |
| 40489 | KMQPNGEWP |
| 40490 | KNDQTTYPE |
| 40491 | KNEPDNLCE |
| 40492 | KPCTFAPFM |
| 40493 | KPEWAMMYD |
| 40494 | KPYQDIARM |
| 40495 | KQEIQGVCR |
| 40496 | KQETRTTDH |
| 40497 | KQFWMKVEV |
| 40498 | KQMLQQCFG |
| 40499 | KQWELYQID |
| 40500 | KRVVKFTST |
| 40501 | KRYTHGKNW |
| 40502 | KSADMPTTL |
| 40503 | KSFLHPAAH |
| 40504 | KSFYMCRCG |
| 40505 | KSYVGSYES |
| 40506 | KTCELTAMR |
| 40507 | KTEMSDMHW |
| 40508 | KTLVCVNWF |
| 40509 | KTYLWEHES |
| 40510 | KVSEAHYDL |
| 40511 | KVTTETGVP |
| 40512 | KVVAVNQSL |
| 40513 | KWQQAEYDE |
| 40514 | KYCHWWYKL |
| 40515 | KYQNAKPVA |
| 40516 | KKNSMDCQV |
| 40517 | KPYFKDCPR |
| 40518 | KSIFQATLQ |
| 40519 | KTAHDKDID |
| 40520 | KHSSWCCYT |
| 40521 | KSEHHWINA |
| 40522 | KVGMDQTAV |
| 40523 | KFFYTELMH |
| 40524 | KDFNFEAQG |
| 40525 | KDQQAERHV |
| 40526 | KDYANFGMN |
| 40527 | KHIHCTIQC |
| 40528 | KNPCLVWQK |
| 40529 | KSYEMVNQW |
| 40530 | KTGWDSHWS |
| 40531 | KVAYMWYNW |
| 40532 | KHGVLPMPA |
| 40533 | KTLHMLESK |
| 40534 | KCGLTPGVE |
| 40535 | KVDTVRNPK |
| 40536 | KAHDMAINL |
| 40537 | KAEMKMGCN |
| 40538 | KTTIVPAWN |
| 40539 | KAIPQGSSC |
| 40540 | KMTNSNENS |
| 40541 | KWYQFGMVA |
| 40542 | KFDVIRQAM |
| 40543 | KQLTFPMLA |
| 40544 | KQEWHVHTE |
| 40545 | KIDQTQWQR |
| 40546 | KRFVDMPEM |
| 40547 | KLYGLNHSC |
| 40548 | KIQPMMVKA |
| 40549 | KMLHKVWID |
| 40550 | KGPIFHSAY |
| 40551 | KGMQMWNCC |
| 40552 | IWKFKNAHL |
| 40553 | IWNDQWDCP |
| 40554 | IWNWMTEDC |
| 40555 | IWTLNWAQL |
| 40556 | LWEQWSTLS |
| 40557 | LWQFCSICE |
| 40558 | LWVECHCNQ |
| 40559 | MWVELPSDD |
| 40560 | NWIHWNACF |
| 40561 | NWMERDHNH |
| 40562 | NWSYCNVSA |
| 40563 | NWIHQDMFD |
| 40564 | NWYFMSQTD |
| 40565 | QWAKWDWSS |
| 40566 | QWHQFNRMH |
| 40567 | QWTTITKEE |
| 40568 | RWKSQEEIQ |
| 40569 | SWAFANHTH |
| 40570 | SWEQNVVST |
| 40571 | TWTAMEIYG |
| 40572 | SWSPTGVAN |
| 40573 | AWDHTMPYG |
| 40574 | AWGNRYHYC |
| 40575 | AWHDYFRDN |
| 40576 | AWMDCSIMC |
| 40577 | CWQAALHSA |
| 40578 | CWWCALLST |
| 40579 | DWIMDTPKP |
| 40580 | DWIVDTPKP |
| 40581 | DWNYYACYT |
| 40582 | EWICVQSHN |
| 40583 | GWMIAMDGK |
| 40584 | GWNTFIWGQ |
| 40585 | GWTLNPSEG |
| 40586 | HWIPQWARS |
| 40587 | HWISFERHQ |
| 40588 | IWDEKCTQC |
| 40589 | IWKDYLHVG |
| 40590 | LWCNENAMD |
| 40591 | LWQQIPWGK |
| 40592 | MWAAMPVGH |
| 40593 | MWEQEPNRN |
| 40594 | MWFAENNGL |
| 40595 | MWGINGVAY |
| 40596 | MWRPARYKS |
| 40597 | NWEDSPWCY |
| 40598 | NWEPCWWAH |
| 40599 | NWGPQQSER |
| 40600 | NWNKTRFTC |
| 40601 | NWVSHDKEA |
| 40602 | PWAETEKPN |
| 40603 | PWIPNQIKQ |
| 40604 | PWTCNENQW |
| 40605 | QWPEMTCCD |
| 40606 | QWTRTGSSF |
| 40607 | RWHNGENCS |
| 40608 | RWNARWELG |
| 40609 | RWRCRMQGN |
| 40610 | SWIDMANNQ |
| 40611 | SWTALGSVP |
| 40612 | SWTLRMWAS |
| 40613 | TWLPVGAAH |
| 40614 | TWVNFPTHC |
| 40615 | VWWFAPMEA |
| 40616 | WWAQPWHAL |
| 40617 | WWTDMSSWT |
| 40618 | YWWLDHANF |
| 40619 | GWIINLHYH |
| 40620 | NWVVWPMEN |
| 40621 | RWVCANAQD |
| 40622 | CWECYQFKR |
| 40623 | CWSAIMTGC |
| 40624 | DWMQGGIYN |
| 40625 | EWFEDEVLW |
| 40626 | EWGMHTSNR |
| 40627 | FWSGYNAEK |
| 40628 | GWTHFHWQE |
| 40629 | LWKTILEGV |
| 40630 | RWGMYDSYY |
| 40631 | RWTDTNFRG |
| 40632 | TWAMMGQWW |
| 40633 | LWKLGNKVF |
| 40634 | TWTSRCELL |
| 40635 | VWNPDLKMN |
| 40636 | EWIKKIADH |
| 40637 | IWNYCVPKH |
| 40638 | YWAFPCCGF |
| 40639 | CWGPIMHPF |
| 40640 | TWKSPRGYM |
| 40641 | AWMCCARHD |
| 40642 | CWWNFGKDC |
| 40643 | SWCAMIYEM |
| 40644 | IVRFYFKSW |
| 40645 | LIRQGDCFI |
| 40646 | LTRDRFTEW |
| 40647 | LYRTSIALV |
| 40648 | MERYGHCHP |
| 40649 | MLRAESGLT |
| 40650 | NNRTYDWWN |
| 40651 | PVRMFTESG |
| 40652 | QGRQILKAI |
| 40653 | QHRYYTCQS |
| 40654 | QLRKHYTLL |
| 40655 | QYRPTWVHV |
| 40656 | RFRWVHFHW |
| 40657 | SGRCNALNT |
| 40658 | TIRDSVFGC |
| 40659 | VAREDEWQN |
| 40660 | VCRTQESSA |
| 40661 | VHRHRAHKF |
| 40662 | VPRVWERAH |
| 40663 | VVRSYNFGE |
| 40664 | NDRHVPCWD |
| 40665 | AFRNKEFYV |
| 40666 | AHRDYACTN |
| 40667 | CMRGDKRNR |
| 40668 | CMRGDKRNR |
| 40669 | CNRPKCPPM |
| 40670 | DARFGLNFG |
| 40671 | DARFYITEG |
| 40672 | DHRETDAEE |
| 40673 | DYRNYFIWP |
| 40674 | EARCTDMCY |
| 40675 | EFRPVLECC |
| 40676 | EIRYYYPES |
| 40677 | ELRWDARPH |
| 40678 | EMRITNARC |
| 40679 | ERRMEQAQT |
| 40680 | ESRAGYMHY |
| 40681 | EYRCVYRKC |
| 40682 | EYRLCPQTS |
| 40683 | FHREQAAHQ |
| 40684 | HSRQSEETI |
| 40685 | IAREPLMAN |
| 40686 | IDRKDRRES |
| 40687 | IIRNRCAEP |
| 40688 | IYRLMHWDN |
| 40689 | LMRSTVKNG |
| 40690 | LPRCVIAAC |
| 40691 | LTREDFTQM |
| 40692 | MLRAMDIDA |
| 40693 | MVRDKNNDH |
| 40694 | NRRMVVAQS |
| 40695 | NTREYPEYI |
| 40696 | PMRMAIEFD |
| 40697 | PSRPCTYHS |
| 40698 | QGRWMYHWW |
| 40699 | QLREIQMIQ |
| 40700 | SNRCLTYEF |
| 40701 | SQRDEMFAL |
| 40702 | SQRHIECIG |
| 40703 | STRDWMSCM |
| 40704 | TDRMLAGQR |
| 40705 | TFRMSVTGV |
| 40706 | TIRSFNLEA |
| 40707 | TMRTHSSWW |
| 40708 | TYRVFMVHD |
| 40709 | VFRMVMEQY |
| 40710 | VYRLREKQE |
| 40711 | IGRHQMTDK |
| 40712 | ANRADWQHL |
| 40713 | QCRHTDQVK |
| 40714 | ETRGFVKCH |
| 40715 | ETRVREDAV |
| 40716 | QDRRPENRF |
| 40717 | CERSKCPKS |
| 40718 | DIRSYKGFQ |
| 40719 | QVRDIANMC |
| 40720 | VKRLENEWH |
| 40721 | YGRLREAMH |
| 40722 | DDRVKMFHY |
| 40723 | ANRMIWYPY |
| 40724 | GHRPKLCDQ |
| 40725 | VNRGDLSLF |
| 40726 | QSRCDPVSP |
| 40727 | EHRDNTTRP |
| 40728 | GVRNALNLS |
| 40729 | GIRCISKAG |
| 40730 | LTRSGPIGQ |
| 40731 | MTRVSMTWR |
| 40732 | CCRQIWVQY |
| 40733 | STRPIACHS |
| 40734 | NNRALMSVE |
| 40735 | TVRHQMDAY |
| 40736 | NNRRQFGYV |
| 40737 | SSRMQMQGP |
| 40738 | MFEAIVTGL |
| 40739 | MHGAFVDTQ |
| 40740 | MNVAYHGFS |
| 40741 | MTQADPCIG |
| 40742 | NAYAAGNIG |
| 40743 | NHSANPHGY |
| 40744 | NIMAIHHDS |
| 40745 | NMVAMNEPR |
| 40746 | NVWAWKEVE |
| 40747 | QLIAIHDIN |
| 40748 | QTVAHENCD |
| 40749 | QTVAPGGHC |
| 40750 | RADATGVPN |
| 40751 | REDAYLAGH |
| 40752 | RSEAGIRQI |
| 40753 | SGLAFDEDD |
| 40754 | SHVAYKLLD |
| 40755 | TMVAFSSCL |
| 40756 | TSYAMWSDV |
| 40757 | VASAMRHHT |
| 40758 | VTEAFPTSV |
| 40759 | VVDAIAQAD |
| 40760 | WGLANNCHE |
| 40761 | GIWAYGCTS |
| 40762 | AACAIWKGE |
| 40763 | CGDAYDEHC |
| 40764 | DDSAQYWQV |
| 40765 | DHTACKKLC |
| 40766 | DSKADHCVN |
| 40767 | DSMADDQHL |
| 40768 | EASAFPHDQ |
| 40769 | ECHAIDQSD |
| 40770 | ECKARNSCG |
| 40771 | ECTAHGVHC |
| 40772 | EFDARVAHE |
| 40773 | EFFALDSQS |
| 40774 | EHGAVHNAN |
| 40775 | EVAASSAIH |
| 40776 | EVIAGHVGA |
| 40777 | FPSAPTEPG |
| 40778 | GKEAAYAVW |
| 40779 | GMWAQWCSN |
| 40780 | GVEAYKFPH |
| 40781 | HEQAVQKHI |
| 40782 | HNCAGWDDG |
| 40783 | HQVATQLIK |
| 40784 | HTKAYNHCV |
| 40785 | HVHAVPNFA |
| 40786 | IADAQTMQP |
| 40787 | IFVAPMPGM |
| 40788 | IHVALDQSL |
| 40789 | IRVAKKGAR |
| 40790 | ITGAMMYMG |
| 40791 | ITLACVYHD |
| 40792 | IVMADVYGN |
| 40793 | IVNACMVEK |
| 40794 | LEIALHACW |
| 40795 | LFTAFRQFT |
| 40796 | LTSAVGAGM |
| 40797 | MISAFTGSH |
| 40798 | MISAPPDTW |
| 40799 | MTFAHDTTN |
| 40800 | NEFAIQNAE |
| 40801 | NKEARGALD |
| 40802 | NTTASTDVP |
| 40803 | PCKAKEKAV |
| 40804 | QQDAMEQYF |
| 40805 | RAAAQGPPQ |
| 40806 | RFFAAELQW |
| 40807 | RLEAMYNWG |
| 40808 | SAIATHQYI |
| 40809 | SEYAAMRDS |
| 40810 | SGCAMLNMG |
| 40811 | SKCAHSFEH |
| 40812 | SNWARSSAE |
| 40813 | SRFASWEGM |
| 40814 | SRMAIDVIG |
| 40815 | STSADPHCG |
| 40816 | TQMAHMIAH |
| 40817 | TTCAHSKMG |
| 40818 | ITEADDPTT |
| 40819 | VGEAPGHWQ |
| 40820 | VVGADRCQA |
| 40821 | WEEACKLDT |
| 40822 | WHSAVQHLL |
| 40823 | WVDAFCCQC |
| 40824 | YEQAMEYET |
| 40825 | YNNADCHYH |
| 40826 | YTQAMCITA |
| 40827 | TQHALSWWS |
| 40828 | NVLARCDDI |
| 40829 | VRAAQRSEP |
| 40830 | TQNACKVRT |
| 40831 | AAKALMSCH |
| 40832 | DFHACYKCS |
| 40833 | ICAAPNSAK |
| 40834 | LSMAMQVGC |
| 40835 | MNKAMTTWA |
| 40836 | QCNALNSFV |
| 40837 | RTCAYESGT |
| 40838 | TKNAMEIQE |
| 40839 | TPNAFVFAS |
| 40840 | TQEACHHDP |
| 40841 | CMEAQGECY |
| 40842 | QMQAWYCQE |
| 40843 | GTNAYMAHK |
| 40844 | AVKAPSQMS |
| 40845 | QSDAVHEPA |
| 40846 | QGVACLDQL |
| 40847 | NVYATPVVC |
| 40848 | TNAAYEMWF |
| 40849 | DQLALTFED |
| 40850 | RTEAHLPAP |
| 40851 | LDGYMNHDC |
| 40852 | LILPMGVNN |
| 40853 | LMSVMFAAH |
| 40854 | LQDHMCHNG |
| 40855 | LQEDMSPYA |
| 40856 | LVIKMHQLW |
| 40857 | LYHEMTHAF |
| 40858 | MCAVMDIFG |
| 40859 | MMQRMVYQC |
| 40860 | MNSLMQVAW |
| 40861 | MVQRMVYQC |
| 40862 | MVTTMGSTE |
| 40863 | NCCNMQLTF |
| 40864 | NCHVMSINL |
| 40865 | NGCGMVWQR |
| 40866 | NLAGMLPKN |
| 40867 | NMTGMPNGT |
| 40868 | QALKMENDQ |
| 40869 | QFYMMPFSL |
| 40870 | QGFFMMALM |
| 40871 | QKNHMYHQM |
| 40872 | QSDMMCHCM |
| 40873 | QTCSMLKDR |
| 40874 | RATEMAWSW |
| 40875 | SAGFMQEAA |
| 40876 | SHTRMGAFS |
| 40877 | SIAWMHLTQ |
| 40878 | SNMGMKHYE |
| 40879 | STDFMIHHF |
| 40880 | THDSMFFAC |
| 40881 | VAGNMDDHA |
| 40882 | VPYWMNTQQ |
| 40883 | VSVDMNCAS |
| 40884 | VTSLMQMGC |
| 40885 | YDTRMQTLG |
| 40886 | YRGWMNMED |
| 40887 | MSLWMATMQ |
| 40888 | AFHHMMNTS |
| 40889 | AHTIMMRDF |
| 40890 | AMDLMGDCE |
| 40891 | AMMQMMKAN |
| 40892 | ATAPMCFYQ |
| 40893 | CCCPMILFN |
| 40894 | CGEDMKICQ |
| 40895 | CMFGMVNYT |
| 40896 | CVATMHCHQ |
| 40897 | DELKMGHNI |
| 40898 | DGTPMHEYE |
| 40899 | DKMVMVFKR |
| 40900 | DKWTMQHWE |
| 40901 | DMVKMADCY |
| 40902 | DYEDMDQYY |
| 40903 | EGNIMMTQH |
| 40904 | ETSPMMTKP |
| 40905 | FQSQMPKMA |
| 40906 | FSQTMIFGA |
| 40907 | GMIGMARLA |
| 40908 | GVDPMVTHQ |
| 40909 | HKDTMHSFS |
| 40910 | HKFWMPNQH |
| 40911 | HMCWMATDK |
| 40912 | HMYGMQKHE |
| 40913 | INPKMHYAS |
| 40914 | LATTMQAFN |
| 40915 | LCEVMGCDA |
| 40916 | LENTMWKCA |
| 40917 | LGAVMTCHY |
| 40918 | LHQTMACQL |
| 40919 | LNGTMLAMS |
| 40920 | NANDMSSDR |
| 40921 | NCEPMNEWP |
| 40922 | NEPPMGLKY |
| 40923 | NESPMNDTC |
| 40924 | NITEMGAYP |
| 40925 | NTGEMAEYV |
| 40926 | PNILMMFEP |
| 40927 | PVGWMVQWP |
| 40928 | QCNHMDHVA |
| 40929 | QDNMMVRDY |
| 40930 | QISTMLARC |
| 40931 | QMATMFTCR |
| 40932 | QPISMQGQM |
| 40933 | QQVRMDRLD |
| 40934 | RDEDMHIAE |
| 40935 | RHQHMKYLD |
| 40936 | RTVDMNLKG |
| 40937 | SGLGMPNWT |
| 40938 | SGSCMWGYA |
| 40939 | SMIPMDSMP |
| 40940 | TPNNMWWME |
| 40941 | TQVLMHATW |
| 40942 | VAQTMHYHH |
| 40943 | VKDEMHYMR |
| 40944 | VLDQMHAPP |
| 40945 | VVNSMWLMH |
| 40946 | WFHNMLATN |
| 40947 | WGMCMQRPI |
| 40948 | YRTEMNEAH |
| 40949 | YVSQMWMQC |
| 40950 | YHAPMLMCN |
| 40951 | DPVEMCSYA |
| 40952 | DRTTMVGWY |
| 40953 | LPWHMMCMP |
| 40954 | AFCRMKFGG |
| 40955 | GTEMMGDHA |
| 40956 | PCWPMMIPG |
| 40957 | GTIRMPEHR |
| 40958 | FCSPMFKQE |
| 40959 | AKAGMSYSG |
| 40960 | ACAIMKMWY |
| 40961 | AHFQMNMSP |
| 40962 | CESKMCQEP |
| 40963 | CLYNMWQCE |
| 40964 | DTLPMAMDP |
| 40965 | DYGSMAASW |
| 40966 | EDFSMPFNH |
| 40967 | ESSSMNEEK |
| 40968 | IEVGMTFPE |
| 40969 | IHQYMTAHG |
| 40970 | LDKQMWQFT |
| 40971 | MEAMMKHME |
| 40972 | PQGIMWWTL |
| 40973 | TMWMMHSSP |
| 40974 | VGLSMHSMD |
| 40975 | VKGRMCNNF |
| 40976 | GSTHMNQEG |
| 40977 | YDYWMQAPT |
| 40978 | HNIHMWCNI |
| 40979 | MCLNMAKQG |
| 40980 | QINTMQMLS |
| 40981 | NNCNMNVMK |
| 40982 | VLTTMWKNN |
| 40983 | FHDRMAWAR |
| 40984 | AQWYMWCWD |
| 40985 | YTELMKKAC |
| 40986 | CISPMRVHQ |
| 40987 | YASTMHSIP |
| 40988 | CEFPMGPSD |
| 40989 | LLPIMHTHW |
| 40990 | FQHRMEEDA |
| 40991 | STALMDANM |
| 40992 | EFGEMLGVD |
| 40993 | VTSHMATAC |
| 40994 | PAYRMECCE |
| 40995 | GAQSMQFSC |
| 40996 | YVIPMVPSS |
| 40997 | AAFVMNGDG |
| 40998 | FTEPMCMQG |
| 40999 | LHDSRNKSP |
| 41000 | LRDFENLIL |
| 41001 | LTEDGNWWS |
| 41002 | LVITFNQGC |
| 41003 | MGLSFNHTR |
| 41004 | MSTERNRAC |
| 41005 | PQOHINFSK |
| 41006 | QCTVQNQFG |
| 41007 | QMELSNQWN |
| 41008 | QTVDHNITL |
| 41009 | SAKYDNVQI |
| 41010 | SAYSTNGDA |
| 41011 | SCQDVNNYH |
| 41012 | SHGYGNRFA |
| 41013 | SHYQDNIGF |
| 41014 | SSKPSNEMW |
| 41015 | TKKEINDCC |
| 41016 | TMVMNNWVA |
| 41017 | TQHSNNQAT |
| 41018 | WHKLHNRHV |
| 41019 | AHAFNNVVD |
| 41020 | AKHWFNESG |
| 41021 | AVVGANQVL |
| 41022 | AYPHRNVGL |
| 41023 | CKQQFNGQN |
| 41024 | CMNEWNKLG |
| 41025 | CMVDANHLW |
| 41026 | CNFNNNDHA |
| 41027 | CTLFSNFQY |
| 41028 | DSCKANTQS |
| 41029 | EAWMHNFNW |
| 41030 | EIYITNCTS |
| 41031 | ERHGFNHCN |
| 41032 | ESDPRNLGP |
| 41033 | ETEERNGFG |
| 41034 | GFGHSNGFL |
| 41035 | GISTFNLWK |
| 41036 | HMTEKNMGE |
| 41037 | HYMMNNYLV |
| 41038 | ICAIVNTCN |
| 41039 | ICSGVNADN |
| 41040 | IQVRWNAEL |
| 41041 | IRYILNPEF |
| 41042 | ISDCFNCAD |
| 41043 | LCAHYNPHN |
| 41044 | LHGNYNYSV |
| 41045 | LNSHINGHM |
| 41046 | LSCCTNVFC |
| 41047 | LSCMRNMSL |
| 41048 | LSDYVNDEG |
| 41049 | LVMPYNSAQ |
| 41050 | LYEERNAQM |
| 41051 | MCNGYNVSF |
| 41052 | MHVFSNVCG |
| 41053 | MQYTINYQD |
| 41054 | NETSLNQHM |
| 41055 | NFVYWNYLP |
| 41056 | NGVNINQCF |
| 41057 | NHVNANLRA |
| 41058 | NKQYFNQKD |
| 41059 | NSHDYNCFH |
| 41060 | NSLHNNEDP |
| 41061 | NTGMDNGQG |
| 41062 | NVLPFNCNF |
| 41063 | QHEYLNQKS |
| 41064 | QSQRLNGQI |
| 41065 | RTEYANHMH |
| 41066 | SFYSTNFQL |
| 41067 | SSGWLNSEN |
| 41068 | STCIDNGRT |
| 41069 | SVWWGNSAA |
| 41070 | TPMWVNMVC |
| 41071 | TVGVINLVR |
| 41072 | TVELLNPGT |
| 41073 | TYHCQNHDH |
| 41074 | VHQWTNMQF |
| 41075 | VPQTYNVEA |
| 41076 | VQDLFNQFC |
| 41077 | VVHCNNTSW |
| 41078 | WDCLLNKWR |
| 41079 | YGMYENFHC |
| 41080 | YRCHNNEKT |
| 41081 | IEEGKNALY |
| 41082 | GSATPNETP |
| 41083 | YVSLCNDGN |
| 41084 | ADHLHNVWI |
| 41085 | CHCHYNPFC |
| 41086 | CVMPSNCQD |
| 41087 | CYDMWNMTT |
| 41088 | DIQYKNHMN |
| 41089 | DKLLSNSWR |
| 41090 | DTESHNETP |
| 41091 | FKMDTNFAP |
| 41092 | ITYEGNISP |
| 41093 | LHLWRNSGE |
| 41094 | MTTHSNCGP |
| 41095 | PTKYHNMIG |
| 41096 | QLSKVNVYE |
| 41097 | RHSDHNYIG |
| 41098 | SNQHNNQSM |
| 41099 | SPGTENRGG |
| 41100 | SQMQVNPLH |
| 41101 | TLTEVNRLA |
| 41102 | TQEHINIWN |
| 41103 | TSHFKNCIM |
| 41104 | TTWEQNVMD |
| 41105 | TVCFENLGG |
| 41106 | YALLHNAMW |
| 41107 | MSARINTPD |
| 41108 | ERNMFNICH |
| 41109 | GRQSINEIA |
| 41110 | STGCYNWPQ |
| 41111 | WGQSYNYWP |
| 41112 | AVKSCNTCK |
| 41113 | QESMCNYWQ |
| 41114 | DKCLNNKEY |
| 41115 | HMAYCNKVC |
| 41116 | GAMLNNNAS |
| 41117 | GKTQYNHHN |
| 41118 | TYDTRNHCL |
| 41119 | NGNHYNAMR |
| 41120 | DYSQVNCEK |
| 41121 | GTMKHNGRA |
| 41122 | EKIRQNAAP |
| 41123 | NLERCNTMM |
| 41124 | SRYVNNGTV |
| 41125 | LRHEGYHSE |
| 41126 | MEYWPIHCQ |
| 41127 | MFLPTDHQF |
| 41128 | MQHEETHDY |
| 41129 | MREQKSHGY |
| 41130 | MTHGHSHSF |
| 41131 | NLDMVTHAE |
| 41132 | NTQGTVHIQ |
| 41133 | NVDNHDHFE |
| 41134 | PQPSEYHWN |
| 41135 | QEHQYEHQS |
| 41136 | QGPECTHNP |
| 41137 | QSKWQDHDY |
| 41138 | QSVWLEHTL |
| 41139 | QSVYDMHTP |
| 41140 | QVDGQCHTT |
| 41141 | RDSRPGHQY |
| 41142 | RQFKQTHFQ |
| 41143 | RSPHVHHQL |
| 41144 | SAHTDRHNS |
| 41145 | TSPCDMHFS |
| 41146 | TYNPWQHFE |
| 41147 | VHCQTDHDG |
| 41148 | WAHYKAHYP |
| 41149 | WQDFYIHYA |
| 41150 | WRYMWPHRQ |
| 41151 | YAVMYQHHA |
| 41152 | YCLQYAHKG |
| 41153 | AFWNPTHFD |
| 41154 | AMIPNLHME |
| 41155 | AMLGYQHQP |
| 41156 | AQDIYEHMQ |
| 41157 | ASYHWTHAG |
| 41158 | AVVIEKHDG |
| 41159 | CMKSYDHGS |
| 41160 | CNVWPCHQE |
| 41161 | DADLAAHWP |
| 41162 | DAQLGMHFI |
| 41163 | DKANCYHWL |
| 41164 | DKIPIDHFA |
| 41165 | DKIPIDHFV |
| 41166 | DVHHLTHSP |
| 41167 | EANKAFHLA |
| 41168 | EHGDEMHPP |
| 41169 | EHMNCMHCE |
| 41170 | GAGMRMHDT |
| 41171 | HKASWCHDQ |
| 41172 | HMMLRDHNN |
| 41173 | ICSIYGHHQ |
| 41174 | IDSQIYHML |
| 41175 | LCAEFPHGR |
| 41176 | LITQPVHQQ |
| 41177 | LQAGGEHNW |
| 41178 | LTLESPHPA |
| 41179 | LYKWIVHNS |
| 41180 | LYYITEHST |
| 41181 | MAVSQSHQF |
| 41182 | MAVWVKHQH |
| 41183 | MSSMLEHSW |
| 41184 | MYGFYGHDM |
| 41185 | NAYQNSHYP |
| 41186 | QLYGRRHWH |
| 41187 | QMMDFQHPA |
| 41188 | QNYWGRHPA |
| 41189 | QSHYRMHSA |
| 41190 | QVNHVRHWS |
| 41191 | RHICFQHCK |
| 41192 | RIEIGQHYV |
| 41193 | RSEVSSHLD |
| 41194 | SANWFTHDK |
| 41195 | SVSLKVHHE |
| 41196 | SYVTTQHST |
| 41197 | TASGIDHPK |
| 41198 | TQAEYSHKS |
| 41199 | TTWGTGHMA |
| 41200 | VFNLYSHSH |
| 41201 | VIKPFAHHG |
| 41202 | YASYKCHGD |
| 41203 | YVQSAQHQQ |
| 41204 | YYASLDHYL |
| 41205 | NFWNQVHCV |
| 41206 | MATNKYHIQ |
| 41207 | QYYNYCHMN |
| 41208 | GCMCIRHAY |
| 41209 | YIYFALHTH |
| 41210 | WFDRSWHIL |
| 41211 | NIAMPAHIP |
| 41212 | HDPLAGHWP |
| 41213 | QRQGQLHYW |
| 41214 | IACISMHNH |
| 41215 | AQEHLDHCL |
| 41216 | ECTMRMHSH |
| 41217 | EDSFSFHTI |
| 41218 | EYCETMFIN |
| 41219 | FMPYCVHSG |
| 41220 | HSKNTVHKR |
| 41221 | IMGIHLHPA |
| 41222 | IRNIAKHAL |
| 41223 | LDKRQDHNF |
| 41224 | MQAEACHRW |
| 41225 | NTHLFHHYL |
| 41226 | QHTSAFHTM |
| 41227 | WHKCLSHQD |
| 41228 | WRKCLSHQD |
| 41229 | NAYYDSHCE |
| 41230 | HDPPPMHWL |
| 41231 | RCQLFDHDE |
| 41232 | LGKVQTHIR |
| 41233 | DVIHTTHSG |
| 41234 | TKGRNDHME |
| 41235 | NSTRWYHTG |
| 41236 | DTDNKPHFA |
| 41237 | QGYSHLHAL |
| 41238 | CQAGTDHFP |
| 41239 | CASSKSHYL |
| 41240 | ALGNRHHQC |
| 41241 | VQYYYGHMQ |
| 41242 | GVFYVGHWQ |
| 41243 | LVQQDWREW |
| 41244 | MCAYLHMFH |
| 41245 | MEKVKCSFA |
| 41246 | PKNWAPMFT |
| 41247 | QQDIYIDFF |
| 41248 | QTEHLWMFH |
| 41249 | SGHWNDYFH |
| 41250 | STIPIWNFL |
| 41251 | TEQFSRLFA |
| 41252 | TQDSKMGFG |
| 41253 | TVAWATAFE |
| 41254 | VKKLAKYFH |
| 41255 | VKVDKSQFD |
| 41256 | VVNIRGSFQ |
| 41257 | AFEVSESFE |
| 41258 | AGEMDEAFG |
| 41259 | AMELADDFA |
| 41260 | AVDHCFKFE |
| 41261 | DFKKPSLFR |
| 41262 | DMQTICRFP |
| 41263 | GMGWQVSFN |
| 41264 | GPIPSEVFP |
| 41265 | HCYIKEGFQ |
| 41266 | HNMPSGQFT |
| 41267 | HYESRLDFY |
| 41268 | ICKSDPVFD |
| 41269 | LEPCTDEFG |
| 41270 | LIMRISPFD |
| 41271 | LSGSIMEFN |
| 41272 | MVSENSTFW |
| 41273 | MYSRTIPFH |
| 41274 | NKHEVGCFG |
| 41275 | NKYEVGCFG |
| 41276 | NMHWRYQFE |
| 41277 | PYPTHSMFS |
| 41278 | QDSHVHSFF |
| 41279 | QGQYWHYFK |
| 41280 | SCGHQTRFG |
| 41281 | SCGHQTWFG |
| 41282 | SDHYCGTFY |
| 41283 | SHMMSHAFW |
| 41284 | SNSLYRAFL |
| 41285 | SSVCTQIFT |
| 41286 | TGEMDEAFG |
| 41287 | TNDIWWQFS |
| 41288 | TRTELANFF |
| 41289 | VCWLWFYFG |
| 41290 | VGICHPEFW |
| 41291 | WVTNQSDFA |
| 41292 | YPQCAQWFW |
| 41293 | HQKMTYAFT |
| 41294 | VRWGHTCFY |
| 41295 | NSAECREFQ |
| 41296 | WKNNQKWFK |
| 41297 | DIGSYKGFQ |
| 41298 | DSAHYCTFT |
| 41299 | EKSTILPFA |
| 41300 | EKSTILPFT |
| 41301 | EVEYGCWFE |
| 41302 | GNMRQSRFP |
| 41303 | HGLHEDSFY |
| 41304 | TNNYPMPFD |
| 41305 | DMPPLHSFC |
| 41306 | ASTMKSIFE |
| 41307 | SLASEVQFQ |
| 41308 | DLTTDTIFQ |
| 41309 | SADRTAMFH |
| 41310 | PTYPYEWFQ |
| 41311 | NMKPKDVFR |
| 41312 | SATIRFYFN |
| 41313 | FVPWCHSFG |
| 41314 | ITEQYDAFA |
| 41315 | NTMCQLNFC |
| 41316 | LYQKDQRFS |
| 41317 | LFGTHPGQA |
| 41318 | LQELSSQYA |
| 41319 | LTVNLMKIA |
| 41320 | NAIDCMSGA |
| 41321 | NAWIDWSLA |
| 41322 | NQGTSAWGA |
| 41323 | NSLPFGMVA |
| 41324 | PFNKSKGLA |
| 41325 | PNONGTQGA |
| 41326 | QDQQVHEGA |
| 41327 | QLMIQGSYA |
| 41328 | QSAYLIMVA |
| 41329 | QTTFAERHA |
| 41330 | SDHGRIMTA |
| 41331 | SLAHWDGRA |
| 41332 | SSGWTQQMA |
| 41333 | TFIMLGADA |
| 41334 | VDYYSPYLA |
| 41335 | VGCIAQAAA |
| 41336 | VNDCNWCEA |
| 41337 | VRTPWQTVA |
| 41338 | WFNVKKTAA |
| 41339 | YAPQQHMWA |
| 41340 | YSQKQCPTA |
| 41341 | ACYQQCVSA |
| 41342 | AKSSIEYSA |
| 41343 | ALWDKFEAA |
| 41344 | CDYHTLSPA |
| 41345 | CFENLQVMA |
| 41346 | CRDWDGFNA |
| 41347 | CTTDTPQNA |
| 41348 | CYHECQGCA |
| 41349 | DIFFKCEWA |
| 41350 | DVGGRAVQA |
| 41351 | EATDLCLNA |
| 41352 | EATDLCPNA |
| 41353 | EDNHYQMIA |
| 41354 | EFYNYEIMA |
| 41355 | EGGSNMMNA |
| 41356 | EKAMLLNGA |
| 41357 | EKTCVTREA |
| 41358 | EQAMWMYPA |
| 41359 | EQGHCEVAA |
| 41360 | ESKWYYVMA |
| 41361 | EVERDKVGA |
| 41362 | FDEKRSESA |
| 41363 | FPANYHSNA |
| 41364 | FVSTQMPIA |
| 41365 | GPNDWMFDA |
| 41366 | GYVAWMYVA |
| 41367 | HCDDVLWCA |
| 41368 | HSAYFGVGA |
| 41369 | IEELGKPRA |
| 41370 | INGMKSAMA |
| 41371 | INVPDLLGA |
| 41372 | ITSIRMYQA |
| 41373 | IVQPYHVEA |
| 41374 | LHQPRMDCA |
| 41375 | LIYHTPVMA |
| 41376 | LSSCRGLIA |
| 41377 | LTIRDYGEA |
| 41378 | LVNVRYMHA |
| 41379 | MHEPILKYA |
| 41380 | MICWWKQPA |
| 41381 | MMNHSQLYA |
| 41382 | MQHPYMQMA |
| 41383 | MSTVSGSYA |
| 41384 | NGFMAAVMA |
| 41385 | NHADYMRNA |
| 41386 | NMWPTFRAA |
| 41387 | NTDEESGMA |
| 41388 | NTMMLQSAA |
| 41389 | QAPLKRAAA |
| 41390 | QCNRCDQYA |
| 41391 | QFIQYGTCA |
| 41392 | QIGLKMTPA |
| 41393 | QLNPWFYYA |
| 41394 | REISVEAVA |
| 41395 | SAKITWASA |
| 41396 | SIVEFESAA |
| 41397 | STHMATQLA |
| 41398 | TKSSIEYSA |
| 41399 | TNLRQHINA |
| 41400 | TVSDGDWIA |
| 41401 | TVVLTLKEA |
| 41402 | VTSWFHEIA |
| 41403 | VITVSGGCA |
| 41404 | VVMCKSRDA |
| 41405 | WVMHYYQYA |
| 41406 | YSSPDLRPA |
| 41407 | TVLVPVQAA |
| 41408 | EVGIKYRAA |
| 41409 | EVNWQCQYA |
| 41410 | GSMFNPGAA |
| 41411 | MTNWFPACA |
| 41412 | MVKTSCKPA |
| 41413 | MVKTVYPDA |
| 41414 | PPEEQCGMA |
| 41415 | QFTETWPCA |
| 41416 | RIIWPDVVA |
| 41417 | SSDTPANQA |
| 41418 | TFVECIQYA |
| 41419 | TGHFFTTAA |
| 41420 | VGYGCKGYA |
| 41421 | VSWSRMEQA |
| 41422 | YRLHCCNRA |
| 41423 | MRVQVFSDA |
| 41424 | RTESWSSLA |
| 41425 | QKWMQMDGA |
| 41426 | TAAGYIVDA |
| 41427 | TQQTADRWA |
| 41428 | FQIRQDNLA |
| 41429 | NTGMEGQMA |
| 41430 | IMTMQMDTA |
| 41431 | EYSSQHPYA |
| 41432 | QPFCFSIGA |
| 41433 | MGVPPLMQA |
| 41434 | VFGSTRSAA |
| 41435 | ATNYTMEPA |
| 41436 | HIHMSDRGA |
| 41437 | GSHDYYQSA |

### Example 16

### AAV5 Variants with Tissue Tropism in Lymph Node

[0926] This example describes engineered AAV5 variants with tissue tropism in lymph node that were discovered using the methods and systems described in EXAMPLE 1-EXAMPLE 2.

[0927] CNS, liver, skeletal muscle, heart, lung, spleen, lymph node, bone marrow, mammary gland, skin, adrenal gland, thyroid, colon, sciatic nerve, and spinal cord tissues were analyzed to identify amino acid residues in the AAV5 VP1 581-589 region that drive lymph node tropism. The results are shown in FIG. 18G which shows the positional frequency of each amino acid in the 581 to 589 region of AAV5 VP1 in lymph node tissue as compared to all other analyzed tissues, wherein the capsid polypeptide has the sequence of SEQ ID NO: 2. The position (“Xaan”, n=1-9) is denoted on the x-axis and amino acid residues are denoted on the y-axis. The frequency of a particular amino acid residue in a particular position is indicated in the heatmap as intensity. Darker squares indicate a higher frequency of a particular amino acid in a particular position and lighter squares indicate a lower frequency of a particular amino acid in a particular position.

[0928] The frequency of a given amino acid residue occurring at a specified position corresponding to position 581 to position 589 of SEQ ID NO: 1 (generalized in SEQ ID NO: 2) in variants identified in lymph node over the frequency of that given amino acid residue occurring at the specified position in variants identified in all other harvested tissues was analyzed to identify a set of sequence rules for capsids that preferentially target lymph node tissue. With reference to TABLE 31 below, and SEQ ID NO: 2 (AAV5 VP1), the following amino acids can, thus, be independently mutated, in any combination, at any one or more positions Xaa1-Xaa9, to provide a VP1 capsid with enhanced lymph node tropism as compared wildtype AAV5 VP1 capsid (SEQ ID NO: 1), where lymph node tropism here refers to properties that are preferred for lymph node transduction over properties that are preferred for transduction of all other harvested tissues.

TABLE 31
Lymph Node Tropism Rules

Xaa1 is selected from A, D, E, Q, S, or T
Xaa1 is selected from D, E, or T
Xaa1 is E
Xaa2 is selected from A, H, I, S, T, or V
Xaa2 is selected from I, T, or V
Xaa2 is V
Xaa3 is selected from A, E, H, I, T, or V
Xaa3 is selected from A, I, T, or V
Xaa3 is T
Xaa4 is selected from A, D, E, or P
Xaa4 is selected from D, or E
Xaa4 is E
Xaa5 is selected from I, L, M, V, or Y
Xaa5 is selected from I, L, V, or Y
Xaa5 is L
Xaa6 is selected from D, E, I, N, or Q
Xaa6 is selected from D, E, or I
Xaa6 is D
Xaa7 is selected from A, E, G, Q, or V
Xaa7 is A, Q, or V
Xaa7 is V
Xaa8 is selected from F, G, M, or W
Xaa8 is selected from F or W
Xaa8 is W
Xaa9 is selected from I, P, T, or Y
Xaa9 is I or P

[0929] TABLE 32 below provides sequences of the 581 to 589 region for variant AAV VP1 capsid polypeptides that were found in lymph node tissue and comport to one or more of the rules provided in TABLE 31. The present disclosure, thus, provides for rAAVs composed of engineered AAV5 VP1 capsid polypeptides having a SEQ ID NO: 2, wherein the Xaa1 to Xaa9 region is any one of SEQ ID NO: 19118-SEQ ID NO: 20, as disclosed in TABLE 32. Also encompassed herein are rAAVs composed of engineered AAV5 VP2 capsid polypeptides and engineered AAV5 VP3 capsid polypeptides having the sequences disclosed in the below table at the regions in AAV5 VP2 (amin acid residues 445 to 453) and AAV5 VP3 (amino acid residues 389-397) corresponding to the amino acids in the AAV5 VP1 581 to 589 region.

TABLE 32
Sequences of the 581 to 589 Region in AAV5
VP1 Capsid Polypeptide that Drive Lymph
Node Tissue Tropism

| SEQ | 581-589 |
|---|---|
| ID NO | Sequence |
| 19118 | ETTMWNSWA |
| 19119 | ENTMWQSSQ |
| 19120 | ERQAHNHYA |
| 19121 | EAKSRPQYA |
| 19122 | FCQQDDTDI |
| 19123 | EDICHWHHT |
| 19124 | EECIMQRSK |
| 19125 | EEERTCKHC |
| 19126 | EEFARIPGH |
| 19127 | EEPRCVNPC |
| 19128 | EFFCQADKA |
| 19129 | EGAGLYEFA |
| 19130 | EGPELTCDK |
| 19131 | EGTLRYTMS |
| 19132 | EHDTQDISV |
| 19133 | EHHPLGVMG |
| 19134 | EHHYCVPWS |
| 19135 | EHILTAERI |
| 19136 | EIAAKIFCR |
| 19137 | EIILIWKQC |
| 19138 | EIMSYPHTN |
| 19139 | EIQHVSHEH |
| 19140 | EKHGCDKAE |
| 19141 | ELNHKWHSV |
| 19142 | EMALVVSNQ |
| 19143 | EMHQFMECQ |
| 19144 | EMRFTNFCY |
| 19145 | ENIHNNDCT |
| 19146 | ENKEKEGQW |
| 19147 | ENTMAIIEH |
| 19148 | EPILYHEHK |
| 19149 | EPIQIFNDA |
| 19150 | EQHRDTMRP |
| 19151 | EQNACDHYG |
| 19152 | EQVFGFWNY |
| 19153 | ERMETFIXP |
| 19154 | ESCEDEGIL |
| 19155 | ESKASGANG |
| 19156 | ESMLPIMGR |
| 19157 | ESVPLEYAN |
| 19158 | ETCCFTNMG |
| 19159 | ETCGQGGYT |
| 19160 | ETDHCESWY |
| 19161 | ETPIEWDEQ |
| 19162 | EVEVHSTAL |
| 19163 | EVHIAPSAC |
| 19164 | EVKRITEQS |
| 19165 | EVKRWMMVD |
| 19166 | EVMAMVDVA |
| 19167 | EVPQNELNV |
| 19168 | EVRSIEYWN |
| 19169 | EVWHTKILI |
| 19170 | EWAFNYNQN |
| 19171 | EYKMFEKYE |
| 19172 | EDHWHGPGD |
| 19173 | FVALKAVID |
| 19174 | FVAPVDSFY |
| 19175 | FVFEGPMHQ |
| 19176 | FVKVRIWTQ |
| 19177 | FVQPTFIRH |
| 19178 | FVWYGPRNH |
| 19179 | GVACVQETD |
| 19180 | GVANFMLNN |
| 19181 | GVCEENEWM |
| 19182 | GVCQMCCWP |
| 19183 | GVDARHAQR |
| 19184 | GVEFCLING |
| 19185 | GVEWPPFMQ |
| 19186 | GVFMTWQWL |
| 19187 | GVHGINVMM |
| 19188 | GVHIMQCQF |
| 19189 | GVHIYACHY |
| 19190 | GVHQVPTWN |
| 19191 | GVLQMDWQE |
| 19192 | GVMQHWTCD |
| 19193 | GVMWDGVAP |
| 19194 | GVQMTVRQA |
| 19195 | GVTYAQRIC |
| 19196 | GVVFCDQKD |
| 19197 | GVVLFQGGA |
| 19198 | GVVNSMQTK |
| 19199 | GVVQQGAMI |
| 19200 | HVFVMDGPI |
| 19201 | HVIWDSMKL |
| 19202 | HVMDHVATS |
| 19203 | IVDFENRHP |
| 19204 | IVDPIFRQT |
| 19205 | IVFEGGIAS |
| 19206 | IVGAPCLVT |
| 19207 | IVGDCQFHV |
| 19208 | IVGSNTYGY |
| 19209 | IVHNVEYSN |
| 19210 | IVHSQPNSV |
| 19211 | IVLQLQQAK |
| 19212 | IVNALEFCK |
| 19213 | IVNNAQMHE |
| 19214 | IVQMHYINQ |
| 19215 | IVQVESCQN |
| 19216 | IVSARDTHN |
| 19217 | KVDGMDIEG |
| 19218 | KVDPPGIFW |
| 19219 | KVDQGLCQP |
| 19220 | KVDWDGNID |
| 19221 | KVEPHHPAD |
| 19222 | KVNPKEFQD |
| 19223 | KVPICAHKQ |
| 19224 | KVQICDFWC |
| 19225 | LVCLCHSCA |
| 19226 | LVDQYMWQN |
| 19227 | LVDRVKHVD |
| 19228 | LVDYWAWNG |
| 19229 | LVEQERMGV |
| 19230 | LVFAKLDQN |
| 19231 | LVGICDLCP |
| 19232 | LVGSTSHVT |
| 19233 | LVMHQQRNY |
| 19234 | LVYQHDTAP |
| 19235 | LVYTELSGA |
| 19236 | MVATESHDK |
| 19237 | MVDDPGQQF |
| 19238 | MVDHWGDWN |
| 19239 | MVDHYICMY |
| 19240 | MVDSFGKYL |
| 19241 | MVECEGEQY |
| 19242 | MVEDSTCHW |
| 19243 | MVEEANVPC |
| 19244 | MVEEGSWNI |
| 19245 | MVEGRQDLT |
| 19246 | MVENCDLPP |
| 19247 | MVEWGGSNQ |
| 19248 | MVGCFYTWT |
| 19249 | MVGYQYPAA |
| 19250 | MVHEAELYA |
| 19251 | MVKEDITEH |
| 19252 | MVKEQWQCT |
| 19253 | MVLPANGFQ |
| 19254 | MVNALTDYG |
| 19255 | MVNPWVVFY |
| 19256 | MVNQAWQTD |
| 19257 | MVQPMPQHH |
| 19258 | MVSFNYEIG |
| 19259 | MVTKEYMCC |
| 19260 | MVTMGYWSS |
| 19261 | MVTPYWNQY |
| 19262 | MVYPKRGEN |
| 19263 | MVYSGQQEF |
| 19264 | NVAFAHCGG |
| 19265 | NVDDHPTMC |
| 19266 | NVDMRNVES |
| 19267 | NVDTPSGNQ |
| 19268 | NVDWDSECS |
| 19269 | NVECCLNRP |
| 19270 | NVEEKWEWW |
| 19271 | NVEFRYFYN |
| 19272 | NVESFPHEQ |
| 19273 | NVEWWGHCA |
| 19274 | NVFATNCWV |
| 19275 | NVGAHFAPF |
| 19276 | NVGGPCYNL |
| 19277 | NVGGQNMEH |
| 19278 | NVGIGHGGN |
| 19279 | NVGIHFAQQ |
| 19280 | NVGNEHIAY |
| 19281 | NVHIALEQH |
| 19282 | NVIQHAIGG |
| 19283 | NVKFSIEHT |
| 19284 | NVLGTLVHV |
| 19285 | NVMDCESCC |
| 19286 | NVSYEQNFM |
| 19287 | PVATALRMP |
| 19288 | PVNLNCTVS |
| 19289 | PVSLCRFGG |
| 19290 | PVTGENHMN |
| 19291 | QVALRGATC |
| 19292 | QVDDCGHLF |
| 19293 | QVDMELPCW |
| 19294 | QVETTMIGH |
| 19295 | QVIQNVWER |
| 19296 | QVIQRRNVM |
| 19297 | QVMIECRQS |
| 19298 | QVMNGSPKT |
| 19299 | QVQIGFEDG |
| 19300 | QVVTWGYEY |
| 19301 | QVYFWGTHS |
| 19302 | RVCDKNLDL |
| 19303 | RVDEKLDHD |
| 19304 | RVDTNMRDR |
| 19305 | RVEHWVNMS |
| 19306 | RVNEWGAYG |
| 19307 | RVPLYPYWT |
| 19308 | RVSPWDQWF |
| 19309 | RVVMPLGSL |
| 19310 | SVAYKWDAF |
| 19311 | SVDACDYDD |
| 19312 | SVDDCMHSA |
| 19313 | SVDNDRAWP |
| 19314 | SVEAKSATC |
| 19315 | SVEFHEDFS |
| 19316 | SVEGANAEV |
| 19317 | SVEGVIIDR |
| 19318 | SVEYYSMPQ |
| 19319 | SVFQTHCDW |
| 19320 | SVGPLQYWK |
| 19321 | SVGWGWMMG |
| 19322 | SVHEWDPCT |
| 19323 | SVHGKVSWF |
| 19324 | SVHTIWPMA |
| 19325 | SVICWTHMA |
| 19326 | SVIYNEHVT |
| 19327 | SVMKQELSV |
| 19328 | SVNMYMLPD |
| 19329 | SVSMASAHG |
| 19330 | SVTACPNWN |
| 19331 | SVTASYGFS |
| 19332 | SVVEDAMRG |
| 19333 | SVVPTNNDM |
| 19334 | SVYAPTKWG |
| 19335 | SVYWPTTEF |
| 19336 | TVADMFFDG |
| 19337 | TVAHVADCY |
| 19338 | TVAPCNQGL |
| 19339 | TVATHCFIH |
| 19340 | TVAVWWRNA |
| 19341 | TVDAIQGWQ |
| 19342 | TVDMRHFFT |
| 19343 | TVDSEHRLC |
| 19344 | TVEAMHLGP |
| 19345 | TVEDGQWSW |
| 19346 | TVEFTYGWC |
| 19347 | TVEPTNYDG |
| 19348 | TVFHSTGVG |
| 19349 | TVGICFCPV |
| 19350 | TVGLLEMTR |
| 19351 | TVGTGCDTC |
| 19352 | TVGWYQHDW |
| 19353 | TVHNCLTMG |
| 19354 | TVLSTTQKD |
| 19355 | TVMHHDGRL |
| 19356 | TVMSWQQHE |
| 19357 | TVMWQTQIG |
| 19358 | TVNIILQGS |
| 19359 | TVQMYQDLE |
| 19360 | TVSESRKHN |
| 19361 | TVTDEDDCN |
| 19362 | TVTIAVQNM |
| 19363 | TVVQWHAMI |
| 19364 | TVWTEVSPP |
| 19365 | VVDPRPDWF |
| 19366 | VVDRWDHWM |
| 19367 | VVDSNFCSM |
| 19368 | VVGCDKSDA |
| 19369 | VVHEAWCDT |
| 19370 | VVHNFLDQS |
| 19371 | VVKEFTGHY |
| 19372 | VVKICGCCR |
| 19373 | VVMLQSGMT |
| 19374 | VVMREWRCF |
| 19375 | VVNQGVACT |
| 19376 | VVQHMANGI |
| 19377 | VVRWPGSEW |
| 19378 | VVSRNEVGA |
| 19379 | VVTFTNILQ |
| 19380 | VVVCRPVAP |
| 19381 | VVYEKQDHM |
| 19382 | VVYPLAPYR |
| 19383 | VVYSNICVE |
| 19384 | WVASQGAQC |
| 19385 | YVANVPVLW |
| 19386 | YVLGRHCVF |
| 19387 | YVQIKGLQL |
| 19388 | YVTALATYD |
| 19389 | SVTNGSTKH |
| 19390 | LNCERAGVE |
| 19391 | KVNCRMIIM |
| 19392 | GVWMQGFHP |
| 19393 | AVHTADVCC |
| 19394 | DVKSWAVCD |
| 19395 | SVLHVQALA |
| 19396 | AVSPHWGNY |
| 19397 | CVVKRMAEF |
| 19398 | CVVNMEYCL |
| 19399 | CVWSRHQIC |
| 19400 | DVRLIGHEA |
| 19401 | DVVRQWQAP |
| 19402 | FVEEDLYEE |
| 19403 | FVHMWSRLC |
| 19404 | FVRPLEEFY |
| 19405 | HVFQGDYIA |
| 19406 | HVGNLTAFN |
| 19407 | IVANAQIPG |
| 19408 | EVGYQNCQS |
| 19409 | EVLGQMTCT |
| 19410 | EVSEWEDWQ |
| 19411 | EVSNSVCRV |
| 19412 | KVCVVAGPM |
| 19413 | KVEVKRDYW |
| 19414 | KVVDRETYS |
| 19415 | KVYEIGEAP |
| 19416 | MVEWEEEWD |
| 19417 | MVLIRGMSF |
| 19418 | MVLPTKLWD |
| 19419 | MVSVVQEPN |
| 19420 | NVLSEVYGH |
| 19421 | PVKDCILWS |
| 19422 | QVCSDWCEC |
| 19423 | QVDTRCYGG |
| 19424 | QVMMDDSNV |
| 19425 | QVSCNVEPK |
| 19426 | FPTQMKMCN |
| 19427 | FPTWDKPPT |
| 19428 | FTTCFSIMV |
| 19429 | FTTFWVPQQ |
| 19430 | FTTLHNMEN |
| 19431 | EYTCELACV |
| 19432 | GETTIWPDH |
| 19433 | GLTADLWHY |
| 19434 | GMTYVSGHH |
| 19435 | GNTLIVTGP |
| 19436 | GSTTQHDGT |
| 19437 | GWTPHTLER |
| 19438 | GYTANFYTN |
| 19439 | HGTTEASGP |
| 19440 | HKTIDDIFT |
| 19441 | HNTEPPGMP |
| 19442 | HPTNMSACE |
| 19443 | HSTGSGTFH |
| 19444 | HSTPFVFNS |
| 19445 | IATNQSAIL |
| 19446 | IGTAYPQWR |
| 19447 | IGTIHPQAQ |
| 14948 | IGTVTVGAY |
| 19449 | IITMMCRSD |
| 19450 | IMTSVDSQR |
| 19451 | IRTRELDQY |
| 19452 | ISTEKNESY |
| 19453 | ISTLFSSGD |
| 19454 | ITTKYDCMG |
| 19455 | ITTPFYKVG |
| 19456 | IWTRADLGR |
| 19457 | KMTVRQSDS |
| 19458 | KTTDDTVGE |
| 19459 | KWTQFGWMD |
| 19460 | KWTRIGDSA |
| 19461 | LGTQEQGMP |
| 19462 | LHTRTQCEP |
| 19463 | LNTGYMWNQ |
| 19464 | LPTSVNMMH |
| 19465 | LQTAIPEWP |
| 19466 | LSTTEDEMP |
| 19467 | LTTAVAIRE |
| 19468 | LTTQLFLQE |
| 19469 | LTTQYECGP |
| 19470 | LTTWNTYVN |
| 19471 | LWTQISEFA |
| 19472 | MATEGACNP |
| 19473 | MATMFTNWC |
| 19474 | MITCIDGIF |
| 19475 | MPTLCECGL |
| 19476 | MSTMSMDSY |
| 19477 | MSTTEVLAE |
| 19478 | MWTGQLRQC |
| 19479 | MYTQWSKAP |
| 19480 | NATNSQNMY |
| 19481 | NATPYKAEY |
| 19482 | NFTVTNLQM |
| 19483 | NITLGAACE |
| 19484 | NNTNQCQNC |
| 19485 | NQTEMSSNG |
| 19486 | NRTCNAGEW |
| 19487 | NRTGPAAWA |
| 19488 | NSTAFFRDQ |
| 19489 | NSTIQGGAW |
| 19490 | NTTEISRLP |
| 19491 | NYTERVQDL |
| 19492 | NYTNCEFGN |
| 19493 | PATTADMHY |
| 19494 | PPTHQMWYC |
| 19495 | QATSAMIPS |
| 19496 | QCTCEGEAQ |
| 19497 | QDTELYCCM |
| 19498 | QITQMGRQE |
| 19499 | QLTWQAHSW |
| 19500 | QMTPGWWKT |
| 19501 | QNTCLPVFY |
| 19502 | QTTSAMING |
| 19503 | QYTHGTCFS |
| 19504 | RYIGTWQDC |
| 19505 | SATYTEMQS |
| 19506 | SETHNDHGW |
| 19507 | SKTCEIGKT |
| 19508 | SNTAYFNGS |
| 19509 | SSTAEPNGR |
| 19510 | STTAIDCMR |
| 19511 | SWTACTPCH |
| 19512 | SYTYRLTDQ |
| 19513 | THTEEDVFN |
| 19514 | TKTAFGDMG |
| 19515 | TNTAFGCYG |
| 19516 | TSTEYKMGL |
| 19517 | TTTMLHRIN |
| 19518 | TTTTQDSQR |
| 19519 | TTTYQALNA |
| 19520 | TYTCNKWFR |
| 19521 | VATKFETNT |
| 19522 | VATMAEDNP |
| 19523 | VATTDGPVY |
| 19524 | VCTNLAHGA |
| 19525 | VDTIFTDEH |
| 19526 | VGTPLDTSV |
| 19527 | VETVFMEQN |
| 19528 | VKTPGATDF |
| 19529 | VPTNTFDTH |
| 19530 | VSTAVMPEG |
| 19531 | VSTGLQDAC |
| 19532 | VSTTGPEDG |
| 19533 | VITEMPMME |
| 19534 | VITGYQCAS |
| 19535 | VTTTTKVSN |
| 19536 | VWTQEMWDA |
| 19537 | WDTVPKIRD |
| 19538 | WFTGPWAMH |
| 19539 | WRTQCQSEK |
| 19540 | WYTYNMCER |
| 19541 | YATFQDCNA |
| 19542 | YATNQCYNG |
| 19543 | YCTDQSETS |
| 19544 | YETKGNLAR |
| 19545 | YMTFKGYHG |
| 19546 | YPTKDPFKN |
| 19547 | YSTQCNTMK |
| 19548 | YTTDDGMSP |
| 19549 | YTTHRDTVT |
| 19550 | YTTVDNSLQ |
| 19551 | KQTVEVDQE |
| 19552 | RITQGESGM |
| 19553 | ESTKWDYEA |
| 19554 | QQTKNNSTD |
| 19555 | WCTQFDEYT |
| 19556 | KITVHDRIP |
| 19557 | DMTLQSVSS |
| 19558 | PLTIEVNCT |
| 19559 | QCTAHNTCM |
| 19560 | FNLEFSPTL |
| 19561 | FPQESNHDG |
| 19562 | GAVEIDCLY |
| 19563 | GHAEQWFES |
| 19564 | GHFEFMRDA |
| 19565 | GHVEVCTLS |
| 19566 | GIGEEMFWD |
| 19567 | GSPEVSVAS |
| 19568 | GWSEAHKSD |
| 19569 | GYYEVVKMY |
| 19570 | HGYEIQFFQ |
| 19571 | HHDEKLKML |
| 19572 | HMDELEYCG |
| 19573 | HNKEKWPTE |
| 19574 | IACESDESW |
| 19575 | IHYEHGMQC |
| 19576 | ILLEFQAPM |
| 19577 | IQQERNRYH |
| 19578 | ISAEHIFAG |
| 19579 | ISFEWLELN |
| 19580 | ISSEAIFYP |
| 19581 | TIMEILGQN |
| 19582 | KACESIQDL |
| 19583 | KAEEIENMC |
| 19584 | KAIESMLEM |
| 19585 | KAMESHDCC |
| 19586 | KFEEVHASG |
| 19587 | KHPEQYRKY |
| 19588 | KHVEALKAY |
| 19589 | KKYEECPLA |
| 19590 | KMVEDEPSA |
| 19591 | KNEEDYALY |
| 19592 | KPVEIDMEG |
| 19593 | KQYELNNWC |
| 19594 | KSSECGWAC |
| 19595 | KTIEQTIPH |
| 19596 | KTYERYQCA |
| 19597 | LAKELCCIQ |
| 19598 | LANEKDSMC |
| 19599 | LFREKMFNP |
| 19600 | LIVEHDCWF |
| 19501 | LKCEYPPMS |
| 19602 | LLDEVRQAG |
| 19603 | LLWECEKGV |
| 19604 | LTLEQSVPM |
| 19605 | LWYEVMIWY |
| 19606 | LYKENWQFP |
| 19607 | LYQENQHEW |
| 19608 | MFAEYSHIG |
| 19609 | MFEEKNLHT |
| 19610 | MHKECEACR |
| 19611 | MHMEMNYSE |
| 19612 | MIAEFVSNY |
| 19513 | MNEEQEHGA |
| 19614 | MPDEQQQMW |
| 19615 | MQAELTMSA |
| 19616 | MRHEEQRLK |
| 19617 | MRHEIVAMY |
| 19618 | MSAEVLLMT |
| 19619 | MSCELTGMH |
| 19620 | MYVEYTVGM |
| 19621 | NAVEILLCG |
| 19622 | NCNEPKYAA |
| 19623 | NEYECMCWY |
| 19624 | NGDEFTVHG |
| 19525 | NHAEFLSGC |
| 19626 | NHGEYFDWF |
| 19627 | NHYEMQDWE |
| 19628 | NKLENCEGM |
| 19629 | NNHEQEWRN |
| 19630 | NSREAEMLR |
| 19631 | NTHEFKFQF |
| 19632 | NTHEFMMQD |
| 19633 | NYDEKHVCH |
| 19634 | PFFERNIRE |
| 19635 | PKFEFYEMI |
| 19636 | PMEEMMHFC |
| 19637 | PTNELYDNE |
| 19638 | PYPEASVKM |
| 19639 | PYREGFRSP |
| 19640 | QALECTCQR |
| 19641 | QARECEAMD |
| 19642 | QASEHDTVV |
| 19643 | QHNEKPMDA |
| 19644 | QHYEFQKHC |
| 19645 | QIDEGMYSE |
| 19646 | QINEFAEHE |
| 19647 | QMREIQAEQ |
| 19648 | QNPEVHFSK |
| 19649 | QSEECMECR |
| 19650 | QSNEDLADI |
| 19651 | RAMEMQDQG |
| 19652 | RCNEYTGEK |
| 19653 | RIIEQDEIT |
| 19654 | RINEQDECM |
| 19655 | RWMELENAT |
| 19656 | SAGEWGQMW |
| 19657 | SIDEFQENW |
| 19658 | SPDEFGTFR |
| 19659 | SPHEIFVWN |
| 19660 | SSEEWCQCE |
| 19661 | SSVEGIRER |
| 19662 | SWAENKQSF |
| 19663 | TAEEIWYER |
| 19664 | TCCEPSWND |
| 19665 | TGNELYCWT |
| 19566 | THAEFEHMH |
| 19667 | TKMEYQGAT |
| 19668 | TMQEFVVKG |
| 19669 | TMYETLLMG |
| 19670 | TQNEHGKYD |
| 19671 | TREEDDKVN |
| 19672 | TRMEQPSGR |
| 19673 | TSNEMKKHW |
| 19674 | TTEEGQTFR |
| 19675 | TWGENGAWC |
| 19676 | VCEEYYQMR |
| 19677 | VFEEDAYGL |
| 19678 | VFLEGMHFP |
| 19679 | VKNEQTVFF |
| 19680 | VLGELGDMG |
| 19681 | VSPECPSFT |
| 19682 | WGAEKQWAF |
| 19683 | WGHEIMTEW |
| 19684 | WHDEKSRYL |
| 19685 | WENWENAGQ |
| 19686 | WMIEMWNCM |
| 19687 | YADECAYGR |
| 19688 | YAGEHDMGQ |
| 19689 | YANEPQHHF |
| 19690 | YMVEYAKYG |
| 19691 | YNEEEWFFA |
| 19692 | YQVERGASA |
| 19693 | MGKEYSQCF |
| 19694 | TYEEENGFL |
| 19695 | NTCEGWSHF |
| 19696 | GLFEGSPGA |
| 19697 | MWHELIADQ |
| 19698 | NQREWHGLA |
| 19699 | GDYQLLNSP |
| 19700 | GFIDLNSRR |
| 19701 | GIDWEDQVG |
| 19702 | GIMLLPNGH |
| 19703 | GSLTLLEQT |
| 19704 | GYVSLWSMY |
| 19705 | HCVALMMDR |
| 19706 | HEEVLIAGS |
| 19707 | HGLTLKWDC |
| 19708 | HHESLGMHM |
| 19709 | HMEALNTNV |
| 19710 | HTGFLTKGM |
| 19711 | HTICLAVTP |
| 19712 | HTWQLHNWN |
| 19713 | IDLNLNIQI |
| 19714 | IHDTLGAVA |
| 19715 | KCEVLEVQD |
| 19716 | KEVYLSTAA |
| 19717 | KHVDLSNIP |
| 19718 | LGNQLAYGG |
| 19719 | LHYPLVNDG |
| 19720 | LMDHLCTPN |
| 19721 | LRGCLHLEH |
| 19722 | LTNFLQNDN |
| 19723 | MFLPLHYKD |
| 19724 | MHELLQSVH |
| 19725 | MIAQLHTWA |
| 19726 | MNRWLLTDG |
| 19727 | MPQSLRVCS |
| 19728 | MYEWLAHCW |
| 19729 | NANLLTEQY |
| 19730 | NEMRLECSY |
| 19731 | NHKWLKCSL |
| 19732 | NHVSLNCDP |
| 19733 | NISWLHSFH |
| 19734 | NTCYLYAFF |
| 19735 | PDPVLSIKD |
| 19736 | PHCTLSFIG |
| 19737 | PRKSLWMEP |
| 19738 | PWAVLNQEP |
| 19739 | PYEQLGTII |
| 19740 | QFGSLVNSW |
| 19741 | QGYKLDNQM |
| 19742 | QKEYLMNSG |
| 19743 | QMWTLPSHN |
| 19744 | QPMVLNQDC |
| 19745 | QQHRLTFMP |
| 19746 | QSQSLTEEA |
| 19747 | QTNALLNGE |
| 19748 | QWNGLNSCL |
| 19749 | RCLDLVNEP |
| 19750 | SADQLHQFA |
| 19751 | SAEDLYYHY |
| 19752 | SCVCLEAHQ |
| 19753 | SDWPLMRYQ |
| 19754 | SEVGLPCYQ |
| 19755 | SFNQLICGL |
| 19756 | SHDDLRMQC |
| 19757 | SPGILQMIG |
| 19758 | SREILDVVA |
| 19759 | SSQHLWHRD |
| 19760 | STVTLHTHQ |
| 19761 | SYDGLDQVA |
| 19762 | SYEILGDWC |
| 19763 | TCLNLSWYG |
| 19764 | TFGFLSDPQ |
| 19765 | THEHLANHN |
| 19766 | TMEPLGWSF |
| 19767 | TSEVLDHFC |
| 19768 | TYMQLSKYC |
| 19769 | VFHTLHTKG |
| 19770 | VGMPLRKEE |
| 19771 | VGNCLHNYW |
| 19772 | VIYQLGEMV |
| 19773 | VREFLNGLN |
| 19774 | WCWQLHDQF |
| 19775 | WDDLLSFWC |
| 19776 | WTLMLHNFM |
| 19777 | NMPSLRTRI |
| 19778 | ASFFLNPLE |
| 19779 | ATMNLSWGL |
| 19780 | FQDPKDTVG |
| 19781 | FTNSDDDVS |
| 19782 | GCEACDFMG |
| 19783 | GDNKIDMHN |
| 19784 | GHMWTDSMA |
| 19785 | GIHVTDLQE |
| 19786 | GMQWPDSME |
| 19787 | GNDIWDFMA |
| 19788 | GQNVMDYHA |
| 19789 | GSSVDDGVS |
| 19790 | GTECIDWTA |
| 19791 | GTNAKDGTP |
| 19792 | GWDRHDGFV |
| 19793 | HDKDFDWAN |
| 19794 | HHDTSDMSC |
| 19795 | HHGPMDWGA |
| 19796 | HIMCYDEWY |
| 19797 | HLYIKDMTD |
| 19798 | HSMVHDCFN |
| 19799 | HSWTRDRLE |
| 19800 | HWVMGDVKL |
| 19801 | HYDQRDEHQ |
| 19802 | HYHQSDWMH |
| 19803 | IAIPEDKQY |
| 19804 | IASLEDMNG |
| 19805 | IEMVRDCGY |
| 19806 | IHLKSDYVW |
| 19807 | IKDWVDGIQ |
| 19808 | IQQTIDMVA |
| 19809 | ITHMIDQDN |
| 19810 | ITWPEDGSI |
| 19811 | KDYASDIHK |
| 19812 | KEFRMDSGS |
| 19813 | KHHTSDTAV |
| 19814 | KIYDHDAWT |
| 19815 | KSLCYDDWM |
| 19816 | KWVNVDDMR |
| 19817 | LADSDDPMD |
| 19818 | LIASRDEAH |
| 19819 | LINMWDFWP |
| 19820 | LQHFIDEGA |
| 19821 | LQKVCDVYT |
| 19822 | LTAKPDCCN |
| 19823 | LTVVNDTVF |
| 19824 | LWLARDLMC |
| 19825 | MASFTDHPQ |
| 19826 | MEVAQDVIN |
| 19827 | MHCAVDAQC |
| 19828 | MHRHMDHEG |
| 19829 | MNCQQDCVR |
| 19830 | MQHVRDQFN |
| 19831 | MSHTTDGDE |
| 19832 | MTGYWDVEY |
| 19833 | MTIPIDEMA |
| 19834 | MTVHRDAWY |
| 19835 | MTYKWDCHV |
| 19836 | MWNIIDRHN |
| 19837 | NAPHADTPS |
| 19838 | NCRHCDPNC |
| 19839 | NCSYHDASP |
| 19840 | NDGKDDTYQ |
| 19841 | NEDMWDYNH |
| 19842 | NFRTFDHSE |
| 19843 | NHLTRDQWG |
| 19844 | NMLNADAMY |
| 19845 | NNSVCDKMS |
| 19846 | NQVGRDVMD |
| 19847 | NSDTGDMNP |
| 19848 | NTMHTDTME |
| 19849 | NTMLTDTGS |
| 19850 | QCMHDDWSS |
| 19851 | QCMWPDIAG |
| 19852 | QEKLQDMYG |
| 19853 | QFMDFDFHY |
| 19854 | QLMPRDGLC |
| 19855 | QQEHADWWR |
| 19856 | QSENMDYWD |
| 19857 | QTFDADGMH |
| 19858 | QTQPHDRHH |
| 19859 | QYHHIDYGK |
| 19860 | QYQNDDRAS |
| 19861 | QYYRADGAK |
| 19862 | RQVMTDRIN |
| 19863 | RSEFADHWW |
| 19864 | SAEYWDMQD |
| 19865 | SAIWGDNSM |
| 19866 | SDETRDKHD |
| 19867 | SFSFCDQRT |
| 19868 | SIEDFDEDK |
| 19869 | SMEPYDTFF |
| 19870 | SNRWQDTYY |
| 19871 | SPEIWDMGA |
| 19872 | SSSQCDVYE |
| 19873 | STLQSDPFE |
| 19874 | STMFKDHFA |
| 19875 | TARNHDHTA |
| 19876 | TCHDVDFTM |
| 19877 | TGGLWDWFE |
| 19878 | THVGIDNIP |
| 19879 | TIRYFDGCG |
| 19880 | TLHDNDSAC |
| 19881 | TMEVSDQHN |
| 19882 | TMGIYDMNE |
| 19883 | TMRTSDVYE |
| 19884 | TNYQVDWDS |
| 19885 | TQMMYDCMQ |
| 19886 | TSKSYDGQC |
| 19887 | TSSVVDLNA |
| 19888 | VCALYDEQS |
| 19889 | VCCYIDCVQ |
| 19890 | VCSMNDSCF |
| 19891 | VDCIIDPQA |
| 19892 | VEKGQDMDN |
| 19893 | VGDQPDAGP |
| 19894 | VGVQDDFMY |
| 19895 | VHYNVDQCA |
| 19896 | VMVKRDVAR |
| 19897 | VNGVTDMDD |
| 19898 | VPPSADDPH |
| 19899 | VPWVSDWRC |
| 19900 | VQLIKDWDQ |
| 19901 | VSMRCDADY |
| 19902 | VSQPFDPYP |
| 19903 | VSRIDDAAC |
| 19904 | VTHWCDHSY |
| 19905 | WDSCSDSWM |
| 19906 | WFRMRDCCG |
| 19907 | WLVIKDVNL |
| 19908 | WMMQVDGYP |
| 19909 | WRKMEDNCM |
| 19910 | YEQGVDRTF |
| 19911 | YGCKSDEGF |
| 19912 | YQIQFDQII |
| 19913 | YSEMGDFYG |
| 19914 | YSSFTDQNV |
| 19915 | YTFYKDCCC |
| 19916 | DNILRDVMA |
| 19917 | QISVYDTKY |
| 19918 | STALMDANM |
| 19919 | MSGPNDTEF |
| 19920 | GIWVRDTYN |
| 19921 | DHLSNDAEM |
| 19922 | ATGLTDHQW |
| 19923 | QSRCVDNTV |
| 19924 | GCAVIEVSA |
| 19925 | GKWYNGVEL |
| 19926 | GRNNAWVHV |
| 19927 | GSMMFGVAQ |
| 19928 | GTSWVLVQY |
| 19929 | GTYLHVVAD |
| 19930 | GWSDMTVVF |
| 19931 | HHSIKNVCH |
| 19932 | IDFITTVHY |
| 19933 | IDHHFVVIE |
| 19934 | IHEHHPVIF |
| 19935 | ILGVHNVEA |
| 19936 | IPHHIFVQD |
| 19937 | IYVMPVVER |
| 19938 | KDENNPVAP |
| 19939 | KEDMTSVGQ |
| 19940 | KEVTSQVSY |
| 19941 | KFVHTQVEC |
| 19942 | KNGCITVQP |
| 19943 | KQFNHMVTH |
| 19944 | KSVDKYVVD |
| 19945 | LCHDKIVHV |
| 19946 | LEVVQVVGG |
| 19947 | MLPTCMVVN |
| 19948 | MMASKFVGR |
| 19949 | MRMPDGVNT |
| 19950 | MWEATCVRS |
| 19951 | NAELYPVEW |
| 19952 | NGEQAFVMV |
| 19953 | NHCYVEVGG |
| 19954 | NPQYGCVME |
| 19955 | NYHDYQVCY |
| 19956 | PGIFGCVGW |
| 19957 | PSNNKCVWC |
| 19953 | QKHCQCVSV |
| 19959 | QTGTGWVGN |
| 19960 | QWGTTNVIT |
| 19961 | RADNTNVSW |
| 19962 | RINHYHVWV |
| 19963 | RSCGEVVET |
| 19964 | RWDGQEVWK |
| 19965 | SGYYPWVLT |
| 19966 | SHNFKQVMR |
| 19967 | SLHPVFVNS |
| 19968 | SQFWAHVCP |
| 19969 | SRVNCFVIV |
| 19970 | STILMPVHI |
| 19971 | TAVAWCVSS |
| 19972 | TAVLREVFM |
| 19973 | TCYTCCVWY |
| 19974 | THCTKVVDT |
| 19975 | TIEVMSVWN |
| 19976 | TMRTQCVAL |
| 19977 | TPLTCMVCA |
| 19978 | TQFHCPVVK |
| 19979 | TQSSQTVAY |
| 19980 | TSQQGIVSL |
| 19981 | TYADMWVGC |
| 19982 | TYHTVSVCD |
| 19983 | VGSWVEVQN |
| 19984 | VKQYWHVEE |
| 19985 | VMETHWVWA |
| 19986 | VNPTNKVHG |
| 19987 | VTELRYVSH |
| 19938 | YAEVNPVIG |
| 19989 | YHQWPFVDM |
| 19990 | YKKAWMVMQ |
| 19991 | YNPSEEVDG |
| 19992 | YQGTMIVGS |
| 19993 | YSCKERVGV |
| 19994 | SFSYDVVMN |
| 19995 | MFSHGHVMF |
| 19996 | DCVLTMVDK |
| 19997 | QWFTKGVGE |
| 19998 | FPGVFKNWV |
| 19999 | GASWYCSWM |
| 20000 | GFQWDAHWN |
| 20001 | GFVSYHSWD |
| 20002 | GIAVRSAWF |
| 20003 | GISDDAYWW |
| 20004 | GMMLMPSWC |
| 20005 | GNAACNAWP |
| 20006 | GTPRDEQWY |
| 20007 | GYNTANSWQ |
| 20008 | HLDWFNMWQ |
| 20009 | ICEHMEWED |
| 20010 | IDQNFCMWG |
| 20011 | IHHGCKMWI |
| 20012 | IPMLCRIWM |
| 20013 | IREPMPAWA |
| 20014 | ISAIAGMWG |
| 20015 | ITAATTTWK |
| 20016 | IWYVRCWWA |
| 20017 | KKKNCILWR |
| 20018 | LADSQVFWT |
| 20019 | LPDKAAHWS |
| 20020 | LQPRTGPWK |
| 20021 | LRPHIHAWE |
| 20022 | LSENITGWW |
| 20023 | LSPWNFGWD |
| 20024 | LTVPHCSWQ |
| 20025 | MASCKVAWS |
| 20026 | MCDWREKWT |
| 20027 | MFVCRQFWK |
| 20028 | MGAANYSWY |
| 20029 | MGSIWLEWH |
| 20030 | MIESVSHWD |
| 20031 | MIFPIYSWA |
| 20032 | MPMCHCGWN |
| 20033 | MREVHCTWM |
| 20034 | MTAADVCWG |
| 20035 | MTLDFSTWG |
| 20036 | NGMQICCWY |
| 20037 | NHVIYHDWE |
| 20038 | NIDHQFHWW |
| 20039 | NLKWHKRWT |
| 20040 | NMEQDPYWN |
| 20041 | NMVNAGGWS |
| 20042 | NQMFWNIWG |
| 20043 | NSGPFYCWT |
| 20044 | PLRWDESWG |
| 20045 | QANWTMMWC |
| 20046 | QIKEVEYWG |
| 20047 | QNRYSELWA |
| 20048 | QSYWFQQWA |
| 20049 | QTSSCEEWG |
| 20050 | QYKQVLDWY |
| 20051 | RIDAQQQWF |
| 20052 | RSADSWEWT |
| 20053 | RTIAWEKWQ |
| 20054 | RWDAGRTWF |
| 20055 | SEDQFHHWC |
| 20056 | SIDNKWPWR |
| 20057 | SKFVRYDWG |
| 20058 | SLCADPDWP |
| 20059 | SMWGPRAWT |
| 20060 | SPYNECHWL |
| 20061 | SQGITGRWV |
| 20062 | STEDCVSWY |
| 20063 | TADVEPPWN |
| 20064 | TALRQMAWH |
| 20065 | TFEPYSWWL |
| 20066 | THGCMLTWT |
| 20067 | THHQMFEWT |
| 20068 | TIASFMQWD |
| 20069 | TKAMIWHWG |
| 20070 | TMRHWCRWP |
| 20071 | TRMMMQEWP |
| 20072 | VAVKEAQWH |
| 20073 | VCHWSLCWL |
| 20074 | VFHSTHWWY |
| 20075 | VSEYYWEWN |
| 20076 | VTSTILHWQ |
| 20077 | WELNAPEWQ |
| 20078 | WQCAMVMWI |
| 20079 | YPWCYMDWV |
| 20080 | YTHDTGLWM |
| 20081 | LERTIPIWQ |
| 20082 | YWCPSQWWR |
| 20083 | KMAGIGCWY |
| 20084 | MYDTMGAWC |
| 20085 | FTPMNRDRI |
| 20086 | GHYWAHEAI |
| 20087 | GIFTTNFEI |
| 20088 | GMDVNHCGI |
| 20089 | GSCITMGSI |
| 20090 | HSDLMVCQI |
| 20091 | HYCYGEFGI |
| 20092 | EACTSLPII |
| 20093 | EAENFQGCI |
| 20094 | ECHAKATNI |
| 20095 | ELKLPWLNI |
| 20096 | MNMTYYTEI |
| 20097 | MSEAEGHKI |
| 20098 | MTDLARTYI |
| 20099 | NCPSDQPSI |
| 20100 | NEVHYEMAI |
| 20101 | NRSKASGDI |
| 20102 | NSWFKPEFI |
| 20103 | NWYKDVIRI |
| 20104 | PAESCNQKI |
| 20105 | RYPHEVNGI |
| 20106 | SCQAVWCGI |
| 20107 | SRETFTKHI |
| 20108 | TCADGMDHI |
| 20109 | TKECSHEVI |
| 20110 | TSRFEMHTI |
| 20111 | VTAMFGQEI |
| 20112 | VTNPKQEAI |
| 20113 | WMGAMVHDI |
| 20114 | YGPKFWIAI |
| 20115 | YMDMRNLVI |
| 20116 | WPNIKHQPI |
| 20117 | YSDPKNMSI |

### Example 17

### AAV5 Variants with Tissue Tropism in Skin

[0930] This example describes engineered AAV5 variants with tissue tropism in skin that were discovered using the methods and systems described in EXAMPLE 1-EXAMPLE 2.

[0931] CNS, liver, skeletal muscle, heart, lung, spleen, lymph node, bone marrow, mammary gland, skin, adrenal gland, thyroid, colon, sciatic nerve, and spinal cord tissues were analyzed to identify amino acid residues in the AAV5 VP1 581-589 region that drive skin tropism. The results are shown in FIG. 18J which shows the positional frequency of each amino acid in the 581 to 589 region of AAV5 VP1 in skin tissue as compared to all other analyzed tissues, wherein the capsid polypeptide has the sequence of SEQ ID NO: 2. The position (“Xaan”, n=1-9) is denoted on the x-axis and amino acid residues are denoted on the y-axis. The frequency of a particular amino acid residue in a particular position is indicated in the heatmap as intensity. Darker squares indicate a higher frequency of a particular amino acid in a particular position and lighter squares indicate a lower frequency of a particular amino acid in a particular position.

[0932] The frequency of a given amino acid residue occurring at a specified position corresponding to position 581 to position 589 of SEQ ID NO: 1 (generalized in SEQ ID NO: 2) in variants identified in skin over the frequency of that given amino acid residue occurring at the specified position in variants identified in all other harvested tissues was analyzed to identify a set of sequence rules for capsids that preferentially target skin tissue. With reference to TABLE 33 below, and SEQ ID NO: 2 (AAV5 VP1), the following amino acids can, thus, be independently mutated, in any combination, at any one or more positions Xaa1-Xaa9, to provide a VP1 capsid with enhanced skin tropism as compared wildtype AAV5 VP1 capsid (SEQ ID NO: 1), where skin tropism here refers to properties that are preferred for skin transduction over properties that are preferred for transduction of all other harvested tissues.

TABLE 33
Skin Tropism Rules

Xaa1 is selected from A, C, K, Q, R, or T
Xaa1 is selected from C, K, or R
Xaa1 is C
Xaa2 is selected from A, C, I, S, T, or V
Xaa2 is selected from A, S, T, or V
Xaa2 is V
Xaa3 is selected from A, C, F, G, M, Q, S, or V
Xaa3 is selected from A, C, F, M, or Q
Xaa3 is C
Xaa4 is selected from C, K, L, P, R, or W
Xaa4 is selected from L, P, or R
Xaa4 is R
Xaa5 is selected from F, H, I, M, V, or Y
Xaa5 is selected from M, V, or Y
Xaa5 is Y
Xaa6 is selected from F, H, I, M, N, Q, or S
Xaa6 is selected from M, N, or Q
Xaa6 is N
Xaa7 is selected from A, H, K, M, N, R, or V
Xaa7 is A, H, K, or R
Xaa7 is K
Xaa8 is selected from A, F, G, H, S, or Y
Xaa8 is selected from A, F, or S
Xaa8 is S
Xaa9 is selected from A, E, G, P, Q, R, or S
Xaa9 is selected from A, Q, or S
Xaa9 is A

[0933] TABLE 34 below provides sequences of the 581 to 589 region for variant AAV VP1 capsid polypeptides that were found in skin tissue and comport to one or more of the rules provided in TABLE 33. The present disclosure, thus, provides for rAAVs composed of engineered AAV5 VP1 capsid polypeptides having a SEQ ID NO: 2, wherein the Xaa1 to Xaa9 region is any one of SEQ ID NO: 31991-SEQ ID NO: 32990, as disclosed in TABLE 34. Also encompassed herein are rAAVs composed of engineered AAV5 VP2 capsid polypeptides and engineered AAV5 VP3 capsid polypeptides having the sequences disclosed in the below table at the regions in AAV5 VP2 (amin acid residues 445 to 453) and AAV5 VP3 (amino acid residues 389-397) corresponding to the amino acids in the AAV5 VP1 581 to 589 region.

TABLE 34
Sequences of the 581 to 589 Region in AAV5
VP1 Capsid Polypeptide that Drive Skin
Tissue Tropism

| SEQ | 581-589 |
|---|---|
| ID NO | Sequence |
| 31991 | CAFAYTIQS |
| 31992 | CAFMTHCYA |
| 31993 | CAGPWCHHE |
| 31994 | CAIVCFDSF |
| 31995 | CAMWHQKGM |
| 31996 | CANCTWVAE |
| 31997 | CASWYATDR |
| 31998 | CAVWANWLC |
| 31999 | CAWLATDFK |
| 32000 | CCDHVQSSW |
| 32001 | CCMPMFRNA |
| 32002 | CFAAYRMQG |
| 32003 | CFAKWWGYE |
| 32004 | CFALKINYS |
| 32005 | CFCIMVNGY |
| 32006 | CFCQRPLWP |
| 32007 | CFLRNNAEY |
| 32008 | CFRYAEIGP |
| 32009 | CGAIHSKRD |
| 32010 | CHARGYIMP |
| 32011 | CHCMPLVIF |
| 32012 | CITHTLKDG |
| 32013 | CKVMKMEGE |
| 32014 | CLVWERRFS |
| 32015 | CMSMNHWWR |
| 32016 | CNAKMTDLA |
| 32017 | CPNIAPIPG |
| 32018 | CQLTVHSFG |
| 32019 | CQSSYSMYA |
| 32020 | CQTRFYVMP |
| 32021 | CRGTIAVGI |
| 32022 | CRMFKIDAI |
| 32023 | CRSRYEAQC |
| 32024 | CSIKCAFGC |
| 32025 | CSITHQRGC |
| 32026 | CSQKIAYAK |
| 32027 | CSSPQYFSM |
| 32028 | CSTYYCNGL |
| 32029 | CSVKCAFGC |
| 32030 | CSYPWDNLG |
| 32031 | CTATYTIRD |
| 32032 | CTCQYGWTV |
| 32033 | CTFYYFKHH |
| 32034 | CTKGWMVIG |
| 32035 | CTLRTWSGM |
| 32036 | CTMFYEQSK |
| 32037 | CTMKYQEHK |
| 32038 | CTMQALRQA |
| 32039 | CTTKFEKCW |
| 32040 | CITTFACPT |
| 32041 | CTWMAFTAP |
| 32042 | CTWPRCDSF |
| 32043 | CTWVTHGQQ |
| 32044 | CVCGKMGHG |
| 32045 | CVDPDDYGY |
| 32046 | CVEIMYMNE |
| 32047 | CVEYWGQCN |
| 32048 | CVGSRPEAA |
| 32049 | CVIWDQAQN |
| 32050 | CVLTQQFNA |
| 32051 | CVMHSTDHH |
| 32052 | CVQRKDRGT |
| 32053 | CVQRKMQAV |
| 32054 | CVQTKINCG |
| 32055 | CVQYNKCRS |
| 32056 | CVRYYPRPA |
| 32057 | CVTMALMDQ |
| 32058 | CVTTSNYTM |
| 32059 | CVTVTYDGR |
| 32060 | CVVHKQKEY |
| 32061 | CVVHTMRWC |
| 32062 | CVVKHLFGH |
| 32063 | CWSYGQTAA |
| 32064 | CAAQHCAQV |
| 32065 | CAAQHYAQV |
| 32066 | CAGIQATGD |
| 32067 | CAIHTRSHS |
| 32068 | CAIMFSAGP |
| 32069 | CAIMLQHMT |
| 32070 | CALPVLVAM |
| 32071 | CALPYAWSR |
| 32072 | CALSMYSQE |
| 32073 | CALTYAWSR |
| 32074 | CAVYFGKCA |
| 32075 | CCRYYVNVE |
| 32076 | CEKLTQNVD |
| 32077 | CEYFKRHPD |
| 32078 | CFHQYHQAH |
| 32079 | CFHRYHQAH |
| 32080 | CFKIWDLGN |
| 32081 | CFMGLSFHW |
| 32082 | CFVEPKTSC |
| 32083 | CFVWEFNYP |
| 32084 | CGDCYGWCQ |
| 32085 | CGGFCTALE |
| 32086 | CHAQIQHGG |
| 32087 | CHAQSIMGP |
| 32088 | CHFMINAGR |
| 32089 | CHHFATESE |
| 32090 | CHHYTNTSQ |
| 32091 | CHVPLNNCD |
| 32092 | CIKACYDHE |
| 32093 | CIKSYNVMM |
| 32094 | CILHKHSFP |
| 32095 | CIMLNARVG |
| 32096 | CIQLNKMGP |
| 32097 | CIVTVPQQA |
| 32098 | CIWMQHFSL |
| 32099 | CKFDMPSFF |
| 32100 | CKNFHWMND |
| 32101 | CKQQINDAY |
| 32102 | CKSHFDQVE |
| 32103 | CKYDITKMA |
| 32104 | CLELVKVYE |
| 32105 | CLNTYHYQG |
| 32106 | CLSSSYNSY |
| 32107 | CMHLVNMNY |
| 32108 | CMQFIRIGS |
| 32109 | CMQFIRVGS |
| 32110 | CMVHNHKGF |
| 32111 | CMYWLTNQE |
| 32112 | CNCHIRHTG |
| 32113 | CNFQTNVHL |
| 32114 | CNTQVYGNY |
| 32115 | CNVDRYNRP |
| 32116 | CPKPFLIQE |
| 32117 | CQELRTQYA |
| 32118 | CQEVYAHMS |
| 32119 | CQSVHYRAP |
| 32120 | CRAAHSVCA |
| 32121 | CRATHSVCA |
| 32122 | CSGCYMKMP |
| 32123 | CSGTMLSQP |
| 32124 | CSHHVDRVM |
| 32125 | CSHQKLMES |
| 32126 | CSMIQNSFQ |
| 32127 | CSTDHALVE |
| 32128 | CSTMVRSQT |
| 32129 | CSTWLNQHM |
| 32130 | CTCNLPYAI |
| 32131 | CTEMLQRKG |
| 32132 | CTGQLMHKE |
| 32133 | CTHGFLTGP |
| 32134 | CTHKVNSWI |
| 32135 | CTIFNTVDQ |
| 32136 | CTIRANWHF |
| 32137 | CTMLANHYQ |
| 32138 | CTPGFWSER |
| 32139 | CTQFTKHQE |
| 32140 | CYTAWQGAW |
| 32141 | CTIVKMWHT |
| 32142 | CTTYRNLLS |
| 32143 | CTYFSMMDR |
| 32144 | CTYMQMAYG |
| 32145 | CVFQCYRSP |
| 32146 | CVFVQQNFQ |
| 32147 | CVHAASLMP |
| 32148 | CVHLGHWQW |
| 32149 | CVLPVLVAM |
| 32150 | CVLWQVHSE |
| 32151 | CVNQHSLAM |
| 32152 | CVPISAAPV |
| 32153 | CVRLIDWCC |
| 32154 | CVVMKFSEH |
| 32155 | CVYWQQNHE |
| 32156 | CWGPKFVDF |
| 32157 | CWMPQQVAT |
| 32158 | CYPVYKDWS |
| 32159 | CYTIKQMDI |
| 32160 | CANHLNQTI |
| 32161 | CWAVISMSS |
| 32162 | CTCWYNRGD |
| 32163 | CTHPVHDNE |
| 32164 | CYQVTIQHN |
| 32165 | CTLMHSHTR |
| 32166 | CIIGRQEWL |
| 32167 | CSRNRCWSG |
| 32168 | CSIQINNCR |
| 32169 | CGHRCEMNM |
| 32170 | CNSYNKPWM |
| 32171 | CMHLSCDWT |
| 32172 | CYAEEPVWP |
| 32173 | CNSWSTGSL |
| 32174 | CMNHRWSTT |
| 32175 | CWHFFGADR |
| 32176 | CARLEGRGN |
| 32177 | CMEAQGECY |
| 32178 | CTKPIPCWM |
| 32179 | CDCLHHCCM |
| 32180 | CIWSSPDQP |
| 32181 | CADPFSIRG |
| 32182 | CSMPQQCME |
| 32183 | CTMCHDCSP |
| 32184 | CTEISWGGV |
| 32185 | CVGYKSNTP |
| 32186 | CSESYRGPD |
| 32187 | CWECCTDSG |
| 32188 | EVMPVNRKH |
| 32189 | EVTRFSEPG |
| 32190 | GVAYEEDYY |
| 32191 | HVFSHWNCN |
| 32192 | IVADLNMFY |
| 32193 | IVGMQMTGE |
| 32194 | IVNSFQKMS |
| 32195 | IVTIVSRTA |
| 32196 | KVEQYMQCH |
| 32197 | KVTMESFDL |
| 32198 | LVDHMSTGC |
| 32199 | LVGPTDQLP |
| 32200 | MVGQLMKES |
| 32201 | NVFYVGEWP |
| 32202 | NVMLGAGTI |
| 32203 | NVQKQQTDA |
| 32204 | NVQRLCCLQ |
| 32205 | PVSLFGLIH |
| 32206 | QVCAMVQCR |
| 32207 | SVKHKEMVG |
| 32208 | SVNYCPRGP |
| 32209 | SVTCLYTSF |
| 32210 | TVDRCFQYA |
| 32211 | TVFYCTKMH |
| 32212 | TVGIEWLNW |
| 32213 | TVGSWAPGS |
| 32214 | TVMRALVYN |
| 32215 | VVVDLWWHT |
| 32216 | WVGCTNHGQ |
| 32217 | YVVDLKNFG |
| 32218 | AVETEFRER |
| 32219 | AVNCTIYGP |
| 32220 | AVNTQDDLF |
| 32221 | AVRNVEVSR |
| 32222 | AVSTWAMQS |
| 32223 | DVCKVMTRV |
| 32224 | DVGSWLNKC |
| 32225 | DVNHTKEEN |
| 32226 | DVRVDMNHA |
| 32227 | DVYNNVKLG |
| 32228 | EVCRIERYM |
| 32229 | EVDIVTNNY |
| 32230 | EVIFMNCPL |
| 32231 | EVNEEEVTY |
| 32232 | EVWWEESKS |
| 32233 | EVYPCMSYG |
| 32234 | FVHCTNALF |
| 32235 | FVTCNQYAP |
| 32236 | GVFYTMASY |
| 32237 | GVKCINSPV |
| 32238 | GVMNHIAWT |
| 32239 | HVCMLEFGT |
| 32240 | HVMQGAPTD |
| 32241 | HVVMKHGES |
| 32242 | IVAKISW5E |
| 32243 | IVCPAGQYH |
| 32244 | IVEPSGHFL |
| 32245 | IVVSMDQWL |
| 32246 | LVGPEGAWN |
| 32247 | LVMQLYCAG |
| 32248 | LVMRMCADG |
| 32249 | LVTQDMKRY |
| 32250 | MVTQPCAWQ |
| 32251 | NVEREQSLG |
| 32252 | NVFIATAQT |
| 32253 | NVGIFWYCG |
| 32254 | PVAWCDKLG |
| 32255 | QVAYAFEAN |
| 32256 | QVHYMMCYE |
| 32257 | QVLSQWFDN |
| 32258 | QVVQKAMAE |
| 32259 | SVMTTFCHN |
| 32260 | TVGITMLPM |
| 32261 | TVHEIMENN |
| 32262 | VVMPKESNE |
| 32263 | YVCGSGMEQ |
| 32264 | YVDKRSTME |
| 32265 | AVETGESAM |
| 32266 | AVATRAMYS |
| 32267 | AVSCGQQRE |
| 32268 | DVAIMQGKG |
| 32269 | DVLMDKRHC |
| 32270 | DVNEPIQCQ |
| 32271 | DVNLDPDVC |
| 32272 | DVYKSPCTT |
| 32273 | EVGINSEGL |
| 32274 | EVGLCQSGR |
| 32275 | EVLKSFMCQ |
| 32276 | EVMFMKKHL |
| 32277 | EVQVIKAQE |
| 32278 | EVSHRVSAA |
| 32279 | EVTQLSCQV |
| 32280 | EVVCSMYYG |
| 32281 | FVASVPDMS |
| 32282 | FVDFNHKQW |
| 32283 | FVDTYEAPG |
| 32284 | FVEPYTDHQ |
| 32285 | FVTMLHWQS |
| 32286 | GVAVIRKMQ |
| 32287 | GVEEFNAQD |
| 32288 | GVFPNMFAP |
| 32289 | GVGMKCYSH |
| 32290 | GVLPVQQGF |
| 32291 | GVQPWESCT |
| 32292 | GVSAYCTSA |
| 32293 | GVWIMRSKR |
| 32294 | GVYYYTKQP |
| 32295 | HVAFQWSGQ |
| 32296 | HVALQNDWG |
| 32297 | IVAHQCQYC |
| 32298 | IVAKYGMTS |
| 32299 | IVDQRSVWV |
| 32300 | IVQPCQ5NW |
| 32301 | IVRSALTNT |
| 32302 | KVCFKEDAF |
| 32303 | LVNEMWYHS |
| 32304 | LVQHSVVWM |
| 32305 | LVTGMMSMG |
| 32306 | MVAQHGISL |
| 32307 | MVAQYGISL |
| 32308 | MVEHNRLAN |
| 32309 | MVGMLYKTK |
| 32310 | MVVYRENMG |
| 32311 | MVWEVKFND |
| 32312 | MVWEVKFNG |
| 32313 | NVCAMPMTH |
| 32314 | NVCTMPMTH |
| 32315 | NVMPSPMDR |
| 32316 | NVQAYERAN |
| 32317 | NVQRHHIFQ |
| 32318 | NVVQSFTAK |
| 32319 | PVQHIYWGL |
| 32320 | QVEVDHCWA |
| 32321 | QVGVCDQCQ |
| 32322 | QVMENTELK |
| 32323 | QVMQNQCYT |
| 32324 | QVTMQPYSK |
| 32325 | QVTRDGKGG |
| 32326 | QVVQYLTNH |
| 32327 | RVDVTNHRY |
| 32328 | RVEPTTVPD |
| 32329 | RVQSQWDGC |
| 32330 | SVCPTRYAD |
| 32331 | SVVCTTEFS |
| 32332 | SVWASTVFH |
| 32333 | TVARGPVPG |
| 32334 | TVGNSKMQN |
| 32335 | TVHWDITGC |
| 32336 | TVMSAFDWG |
| 32337 | TVTTKVRDS |
| 32338 | VVCMHHCDM |
| 32339 | VVGQKMTQT |
| 32340 | VVQQIRDFH |
| 32341 | WVEWPQMGS |
| 32342 | WVVCRCAWE |
| 32343 | YVPDRDGCD |
| 32344 | YVQLKQEWY |
| 32345 | YVVGMGKFC |
| 32346 | PVLHIYWGL |
| 32347 | YVHPWFGVS |
| 32348 | KVNACGNLT |
| 32349 | PVNLAQRDK |
| 32350 | EVAGCATAV |
| 32351 | SVKLAIDQK |
| 32352 | LVGKYIDSM |
| 32353 | DVMQNQCKS |
| 32354 | HVVPCCPFH |
| 32355 | DVISRNGRC |
| 32356 | LVDCSNTCQ |
| 32357 | AVEDYWRYF |
| 32358 | GVAQYLHHC |
| 32359 | QVEDGYWSY |
| 32360 | MVFLEQHGR |
| 32361 | LVQKWMRTC |
| 32362 | VVISTKHTH |
| 32363 | DVDVVALPM |
| 32364 | RVTIMFTGT |
| 32365 | AVNACSNSH |
| 32366 | TVWIQSYSN |
| 32367 | PVNESVHIC |
| 32368 | SVRTCHQDE |
| 32369 | DVTQHTSCT |
| 32370 | PVEMKFAVQ |
| 32371 | GVWMQGFHP |
| 32372 | QVHMQRYYG |
| 32373 | KVAHEMMSA |
| 32374 | DVCKATTTE |
| 32375 | AVHNVKDVH |
| 32376 | NVYATPVVC |
| 32377 | NVMGTQAKE |
| 32378 | DVKAFMGGV |
| 32379 | RVNGSTCRH |
| 32380 | SVYMMTEGW |
| 32381 | HVTKLMTSH |
| 32382 | ELCTNWTAN |
| 32383 | EPCQSHEFY |
| 32384 | ETCPYFDFD |
| 32385 | GGCVYWQMD |
| 32386 | GTCTDMGIC |
| 32387 | HTCHFGGFV |
| 32388 | ISCQSMCCE |
| 32389 | ITCQKMAMN |
| 32390 | KDCFNGECE |
| 32391 | KPCMFWMSR |
| 32392 | KTCAVNVYL |
| 32393 | LACQIQWMT |
| 32394 | MTCEYRTSM |
| 32395 | MWCDYGTGW |
| 32396 | QACFIAGQQ |
| 32397 | QDCCKQSVA |
| 32398 | QGCKQMGSM |
| 32399 | SSCYHSTGA |
| 32400 | STCTIRGNP |
| 32401 | TACTMFECQ |
| 32402 | VACWYTKHS |
| 32403 | VICQVQGRA |
| 32404 | VYCLTHAGP |
| 32405 | YICRLWTQC |
| 32406 | YTCVMEHMH |
| 32407 | AMCPTHWHQ |
| 32408 | DRCNFNCSE |
| 32409 | DSCPQIFRD |
| 32410 | EWCLADGMT |
| 32411 | GACKFNGHK |
| 32412 | GRCQYFQMA |
| 32413 | GWCWYMRMG |
| 32414 | IGCKVQSTN |
| 32415 | ISCKAHWQG |
| 32416 | ITCVDNKMC |
| 32417 | KSCEWMLQQ |
| 32418 | KTCEWGQDK |
| 32419 | LCCPFDTDA |
| 32420 | LKCMNHSAW |
| 32421 | LKCVFMRAE |
| 32422 | LSCLATYQS |
| 32423 | MLCEPEGAR |
| 32424 | NYCTYHSTH |
| 32425 | QSCATIIRE |
| 32426 | QSCLQQIQA |
| 32427 | RSCTKEDYW |
| 32428 | RTCWFMGVG |
| 32429 | SGCPQRVAT |
| 32430 | SHCWYWYWN |
| 32431 | SNCPYHTFY |
| 32432 | SNCVTDATA |
| 32433 | TNCAMQMYY |
| 32434 | TTCRTWEAF |
| 32435 | VACRENMLT |
| 32436 | VLCHEADGP |
| 32437 | VYCPCDGPD |
| 32438 | YACHMGHYD |
| 32439 | YPCLMEKEY |
| 32440 | YSCMVNTHQ |
| 32441 | YSCSQAMHG |
| 32442 | AACENKVCF |
| 32443 | AMCLFETMQ |
| 32444 | AQCKLTTVE |
| 32445 | ATCWQPAAK |
| 32446 | DNCKIMFMC |
| 32447 | DPCPNMIWT |
| 32448 | DWCTYRAQD |
| 32449 | EACYMYHNT |
| 32450 | EGCYFWKQV |
| 32451 | EICTASPQA |
| 32452 | ESCLTGGNT |
| 32453 | ETCQKYVAK |
| 32454 | FICQIKSAS |
| 32455 | HACPKHYCR |
| 32456 | HCCFKNGDM |
| 32457 | HMCPFMDQA |
| 32458 | IACVSWFTC |
| 32459 | ILCWHHYSV |
| 32460 | ISCRTQSAC |
| 32461 | ITCITWVNG |
| 32462 | KACDYFMHG |
| 32463 | KHCHSMQFE |
| 32464 | KSCLYFDAY |
| 32465 | MACDYFMHG |
| 32466 | MACPKNISG |
| 32467 | MACSMNVAL |
| 32468 | MMCFNYFDR |
| 32469 | NACSHQHLG |
| 32470 | NPCPNMIWT |
| 32471 | NYCRRTFHH |
| 32472 | QACRLTYWY |
| 32473 | QACWLTYWY |
| 32474 | QMCTLTKAD |
| 32475 | RACHKQLWV |
| 32476 | RPCWPWDHL |
| 32477 | RSCFEMKHI |
| 32478 | RTCNLPYAI |
| 32479 | RYCSTIYYS |
| 32480 | SACPWNFYC |
| 32481 | SGCFWRNTS |
| 32482 | SHCLYWMKH |
| 32483 | SICQTNFAV |
| 32484 | SKCGFDVAA |
| 32485 | SLCTIHGAQ |
| 32486 | TACHISHYD |
| 32487 | TACYKNTCE |
| 32488 | TACYPHSFG |
| 32489 | TICSMGQKD |
| 32490 | TICYMSTSS |
| 32491 | TYCRSGDVQ |
| 32492 | VMCTWQACR |
| 32493 | WHCNFHWHL |
| 32494 | WYCLTQRSD |
| 32495 | WYCMCIIRE |
| 32496 | YACATQQHL |
| 32497 | YACPKHYCR |
| 32498 | YHCKFNWLG |
| 32499 | YHCQNYAAS |
| 32500 | YKCAHDPTG |
| 32501 | IYCWMPMSP |
| 32502 | EHCNHDQGV |
| 32503 | KACMSHQGR |
| 32504 | MSCPAKIVV |
| 32505 | QNCIMLASN |
| 32506 | GICLFKTHK |
| 32507 | KPCNPVGQE |
| 32508 | RLCDTHKCL |
| 32509 | EMCGGGLSC |
| 32510 | EACMPWAHH |
| 32511 | IMCHARMMA |
| 32512 | AQCHDMWGH |
| 32513 | ESCHLQHGE |
| 32514 | WACIIYMWN |
| 32515 | GRPRTPLGN |
| 32516 | GTIRKEKYY |
| 32517 | IPRRLQLPI |
| 32518 | ITQRDNIAM |
| 32519 | IYERHHCQA |
| 32520 | KDNRRIYKQ |
| 32521 | MALRSPFNL |
| 32522 | MCDRAIRSD |
| 32523 | QMYRLAYSR |
| 32524 | RLSRAHLPQ |
| 32525 | SIERHCRME |
| 32526 | YDWRTMAEV |
| 32527 | YSERYINAY |
| 32528 | AASRSHQSE |
| 32529 | DGVRMHKDW |
| 32530 | ETKRSDHEV |
| 32531 | LCARGHKSG |
| 32532 | MCLREIQMQ |
| 32533 | MPQRYNRET |
| 32534 | NCARGWMII |
| 32535 | TGERTHMCL |
| 32536 | VSRRSDWSE |
| 32537 | YFPRPFKMT |
| 32538 | YMDRMSECY |
| 32539 | AFDRHSDLA |
| 32540 | AGGRIGDSQ |
| 32541 | DFVRTNIGV |
| 32542 | EFVRNPCFE |
| 32543 | ESARYIDFT |
| 32544 | FAQRTTDHR |
| 32545 | FHDRPFTFT |
| 32546 | FQDREQFWY |
| 32547 | GWMRGEYNV |
| 32548 | ICVRWHCGP |
| 32549 | IRVRWHCGP |
| 32550 | KCQRMDTWK |
| 32551 | KGDRFMVDQ |
| 32552 | LAARIGEVE |
| 32553 | LIARYGKQW |
| 32554 | LMARIQNIT |
| 32555 | MADREMAAR |
| 32556 | MCIRSGFIV |
| 32557 | MEDRLAHYH |
| 32558 | NCIRNWQHA |
| 32559 | NGIRIFLFG |
| 32560 | PMSRQLYSD |
| 32561 | QGVRILTAA |
| 32562 | QWMRWLIVT |
| 32563 | TADRWCDAS |
| 32564 | TCTRKDDDM |
| 32565 | TMARFPCIS |
| 32566 | VSERAHCGE |
| 32567 | WEHRFSASM |
| 32568 | WGIRNMELR |
| 32569 | YADRFACYQ |
| 32570 | YANRNFSPE |
| 32571 | YENRGREHN |
| 32572 | AFDRHSDWA |
| 32573 | MEVRECGWD |
| 32574 | MGQRYDIQG |
| 32575 | QAVRRWWFF |
| 32576 | HHLRNVHHC |
| 32577 | KATRDPKFP |
| 32578 | NSTRNTSYY |
| 32579 | MTERYYWCQ |
| 32580 | MTQRVVHWG |
| 32581 | NNDRHQHLK |
| 32582 | NILRYLICD |
| 32583 | MPTRMQKGA |
| 32584 | DIGRFTAYY |
| 32585 | EAWRNSSSG |
| 32586 | AQARTIGLG |
| 32587 | TKGRNDHME |
| 32588 | GQFRSGAYR |
| 32589 | LNARTMRSA |
| 32590 | MMKRNRFIC |
| 32591 | EYSRMNKAS |
| 32592 | SYARKVYDC |
| 32593 | ICIRGARAD |
| 32594 | ERMCYEDSY |
| 32595 | ESGFYATWN |
| 32596 | FGGHYWPCP |
| 32597 | GHGSYLAED |
| 32598 | GNQPYGDNQ |
| 32599 | GQVGYQMHG |
| 32600 | GYHMYQKTS |
| 32601 | ITMSYAHMC |
| 32602 | IWRDYDQCY |
| 32603 | QKRDYQFMP |
| 32604 | QMNSYPMYE |
| 32605 | RADAYTQIA |
| 32606 | SCELYMARD |
| 32607 | ACSCYMHTG |
| 32608 | DISMYMFQD |
| 32609 | DMNMYLGSQ |
| 32610 | ECIWYDNYF |
| 32611 | GFYWYEMAL |
| 32612 | HYAAYEQAM |
| 32613 | IKMLYHWKD |
| 32614 | ISYDYAQAP |
| 32615 | ITMPYAHMC |
| 32616 | KTPWYTWHD |
| 32617 | MASLYPFGQ |
| 32618 | MFTPYRMQA |
| 32619 | NGASYNQIE |
| 32620 | QEMDYRMST |
| 32621 | QHQHYELHQ |
| 32622 | QWSMYNMYD |
| 32623 | RLTCYRMHK |
| 32624 | SAAFYMDVD |
| 32625 | SGLEYMGQQ |
| 32626 | SIQMYRYQA |
| 32627 | TPLWYHRTE |
| 32628 | WCGCYHIFN |
| 32629 | WWFMYWADI |
| 32630 | YPHKYWQMK |
| 32631 | YRHEYAHYS |
| 32632 | TAVLYETEF |
| 32633 | ADHVYGTEQ |
| 32634 | AINEYWDVP |
| 32635 | ASDGYFMEL |
| 32636 | ASGCYATMW |
| 32637 | DIKTYMGLQ |
| 32638 | DKGGYGCHE |
| 32639 | DLVNYGNHG |
| 32640 | DYQWYQVAR |
| 32641 | EMRFYESGN |
| 32642 | EQLQYEPSH |
| 32643 | GILPYVKFQ |
| 32644 | GSTHYTDAN |
| 32645 | ICISYEGGT |
| 32646 | ICQVYSKTG |
| 32647 | IPMQYAHFK |
| 32648 | IPVQYAHFK |
| 32649 | IQDDYQLMT |
| 32650 | LADLYDLSH |
| 32651 | LEQFYEGNI |
| 32652 | LGGDYFRSD |
| 32653 | LKKWYETHG |
| 32654 | MAEPYGLAT |
| 32655 | MCDDYETSQ |
| 32656 | MTKPYMTQC |
| 32657 | MYLGYDMDC |
| 32658 | NQSAYRVAE |
| 32659 | QHEGYVRNG |
| 32660 | QQPSYMVSC |
| 32661 | QTPAYCHHQ |
| 32662 | QYQWYAKIE |
| 32663 | SAHWYCHRT |
| 32664 | THYTYAVAQ |
| 32665 | TNGHYHCKY |
| 32566 | TTTIYRRNG |
| 32667 | TTTIYSRNG |
| 32668 | TYAKYALRG |
| 32669 | VLNTYPCNH |
| 32670 | YIRMYDIAS |
| 32671 | YTMCYSHQS |
| 32672 | YTQNYVFPP |
| 32673 | SIDTYDHRN |
| 32674 | EYSPYQVME |
| 32675 | QHFWYEMES |
| 32676 | QIQLYQNDE |
| 32677 | MCFPYSCAA |
| 32678 | QSEHYVLPC |
| 32679 | RNLNYNTAV |
| 32680 | ATNKYANAI |
| 32681 | LLAKYMVHT |
| 32682 | ITEQYDAFA |
| 32683 | FRLDYDYKN |
| 32684 | LPTQYQQQN |
| 32685 | GQNGYGQCM |
| 32686 | HSDWYMKYP |
| 32687 | NMPAYQIQC |
| 32688 | YISEYVMMV |
| 32689 | NGNHYNAMR |
| 32690 | DPGWYGLAP |
| 32691 | VQMQYERLF |
| 32692 | AYHCYMSWM |
| 32693 | GDVSYDAEA |
| 32694 | MMLGYMEQD |
| 32695 | ESNKWNPYG |
| 32696 | GIHAHNSTY |
| 32697 | KFASANGPL |
| 32698 | LCKTENGSD |
| 32699 | LGNMENPPP |
| 32700 | LRAGNNITC |
| 32701 | MFQLPNHFC |
| 32702 | NATQKNGMY |
| 32703 | NPKPNNYQY |
| 32704 | SSDAENRCG |
| 32705 | DAGCSNDNG |
| 32706 | GCLYANIAQ |
| 32707 | GTATTNFDQ |
| 32708 | LLFPRNVGG |
| 32709 | MHRCRNTDQ |
| 32710 | QAMTNNVRC |
| 32711 | TLDVQNVQN |
| 32712 | TSGYCNIGA |
| 32713 | VAAQVNQSQ |
| 32714 | VSNWENVAG |
| 32715 | AASGLNAFK |
| 32716 | AKSCFNGFE |
| 32717 | ASNIMNISF |
| 32718 | ASQWLNDSF |
| 32719 | AWVMNNWWA |
| 32720 | DKSEENRQE |
| 32721 | ETSCVNLFN |
| 32722 | FKESRNQGA |
| 32723 | GAFYINNTF |
| 32724 | GLTLANIGA |
| 32725 | HEPLTNQVS |
| 32726 | HPVDTNAGA |
| 32727 | ITSLCNEFH |
| 32728 | ITSLWNEFH |
| 32729 | MHAERNANM |
| 32730 | MTDQFNKMQ |
| 32731 | MYAERNANM |
| 32732 | MYVWRNDCA |
| 32733 | NFRTINDNM |
| 32734 | NIDIHNHEE |
| 32735 | PLKGTNQIF |
| 32736 | PMVIFNTDY |
| 32737 | QCDYRNMHF |
| 32738 | QGTHHNHVQ |
| 32739 | QKVPVNDHQ |
| 32740 | QMLNHNHHA |
| 32741 | QRMITNWGC |
| 32742 | QTDIRNVSG |
| 32743 | QWQTTNGGA |
| 32744 | RADQSNPCQ |
| 32745 | RHFMINAGR |
| 32746 | RTECCNVAA |
| 32747 | RTSQENKWC |
| 32748 | SAVEGNRHN |
| 32749 | SCFEVNQAS |
| 32750 | SLRNRNADY |
| 32751 | SMVIFNTDY |
| 32752 | SWICCNAST |
| 32753 | SYVHWNVWS |
| 32754 | TAYIHNSEQ |
| 32755 | THNEVNYAQ |
| 32756 | TTDQFNKMQ |
| 32757 | WSHTANKYP |
| 32758 | YILSMNGGE |
| 32759 | YQVKFNVMC |
| 32760 | YRPPCNRKD |
| 32761 | YSTAHNEMP |
| 32762 | DHWQFNTHM |
| 32763 | EAMVINTES |
| 32764 | WHEQSNHIW |
| 32765 | FTSNRNWQA |
| 32766 | RIVDGNACG |
| 32767 | QPQSRNGAR |
| 32768 | KISGLNDAS |
| 32769 | QESMCNYWQ |
| 32770 | TRETMNEWH |
| 32771 | GAMLNNNAS |
| 32772 | RMTPNNCQR |
| 32773 | KIAAWNDFL |
| 32774 | KTGATNLAW |
| 32775 | SQAHQNRTC |
| 32776 | VHHKTNRSY |
| 32777 | STVGQNHCG |
| 32778 | KMTNSNENS |
| 32779 | LPSHCNLGS |
| 32780 | TPQPMNVAT |
| 32781 | KWTPREKDY |
| 32782 | MSQKGFKAG |
| 32783 | RKWMKAKAT |
| 32784 | SGNPTMKNW |
| 32785 | SSVCFPKAG |
| 32786 | TWTMNEKDS |
| 32787 | AHKPAKKWL |
| 32788 | AIWQPSKMD |
| 32789 | ALYYPEKYA |
| 32790 | ETEPLPKQD |
| 32791 | IMTPHWKAC |
| 32792 | ITTEFMKAC |
| 32793 | MIGISMKGC |
| 32794 | MSSALEKCG |
| 32795 | RQIEVTKWG |
| 32796 | TERKMHKAA |
| 32797 | TRASVMKYQ |
| 32798 | AEALHIKAY |
| 32799 | ANLKHAKFG |
| 32800 | DFFYMDKLS |
| 32801 | DIIWAQKAA |
| 32802 | GFNPVIKYS |
| 32803 | GLEWHTKDW |
| 32804 | HQVTIFKDR |
| 32805 | ICWLITKTE |
| 32806 | KMYSSAKSY |
| 32807 | LKHPTWKEE |
| 32808 | LPGYVEKHQ |
| 32809 | MQNACFKDP |
| 32810 | NIYETLKRI |
| 32811 | QKLNIQKQS |
| 32812 | QLMMEEKVS |
| 32813 | RASFNDKAG |
| 32814 | RCVQPQKEG |
| 32815 | SAEHSSKWK |
| 32816 | SLGCFHKWE |
| 32817 | SQWMIWKCR |
| 32818 | TFLCTLKEE |
| 32819 | TFLYTLKEE |
| 32820 | WSAKSTKEQ |
| 32821 | YYSPMVKAH |
| 32822 | ETHQRCKMS |
| 32823 | RTDVMMKVM |
| 32824 | SCSFCPKDC |
| 32825 | ATVHMPKHE |
| 32826 | DWAWTMKIA |
| 32827 | PDLCQDKLN |
| 32828 | LFWQFGKQG |
| 32829 | PRWQSEKCQ |
| 32830 | TFTYEAKFW |
| 32831 | NHDPSIKDQ |
| 32832 | RKWMNAKAT |
| 32833 | IKTTMVKED |
| 32834 | FEEFITISR |
| 32835 | GGIFEQSSS |
| 32836 | GSFWFTDSK |
| 32837 | IAGPAWFSM |
| 32838 | KQHYAYLSP |
| 32839 | KSTIEPFSI |
| 32840 | MSAECLHSD |
| 32841 | NCIDMWWSS |
| 32842 | PKSEDITSD |
| 32843 | QHNHMWSSW |
| 32844 | QTMKFTSSW |
| 32845 | RHAPTDISP |
| 32846 | THAVLIRSK |
| 32847 | TQESSRVSS |
| 32848 | TSLKIYHSP |
| 32849 | VEPISSQSY |
| 32850 | WLMKWLESD |
| 32851 | DCIDMWWSS |
| 32852 | DFYTVSMSC |
| 32853 | MIKFIEGSQ |
| 32854 | KTGLPDISA |
| 32855 | LGTFTCSSP |
| 32856 | LSNTCCMSN |
| 32857 | QWQLSWCSC |
| 32858 | QWTQWAMSC |
| 32859 | RCWHIPNSS |
| 32860 | SHGWFHQSQ |
| 32861 | TGAQAANSC |
| 32862 | TWSYNVTSF |
| 32863 | YIVIRCVSN |
| 32864 | ALRVGWTSE |
| 32865 | DKQAMSHSQ |
| 32866 | DTVYNVLSW |
| 32867 | EATDNLTSN |
| 32868 | EDESLHMSW |
| 32869 | EDESRHMSW |
| 32870 | EHVNVTYSP |
| 32871 | ESKSEQPSA |
| 32872 | FLEAWANSM |
| 32873 | FRDGMIVSC |
| 32874 | GIGQPEDSP |
| 32875 | ICATILRSA |
| 32876 | KSGISEMSE |
| 32877 | LGRDCSRSH |
| 32878 | LNMATSLSR |
| 32879 | LSKVQQGSY |
| 32880 | LYQDLLYSE |
| 32881 | NIVESTESP |
| 32882 | NNPVLVASC |
| 32883 | NNTYVMSSG |
| 32884 | QAEYFDASA |
| 32885 | RSMWPPSSG |
| 32886 | TAHCFTV5P |
| 32887 | TASLLWYSN |
| 32888 | TEEKCYISP |
| 32889 | TQLPTMQSL |
| 32890 | TSSPHGASG |
| 32891 | VDRFICASW |
| 32892 | VDRFICASW |
| 32893 | DHDFAQFSG |
| 32894 | NNGPIWISS |
| 32895 | PDAMWMASS |
| 32896 | SDRMVSISA |
| 32897 | AAMSSSHSY |
| 32898 | VHSFHVESY |
| 32899 | LRVSQSFSN |
| 32900 | ATMEKCRSI |
| 32901 | LLFPLMSSS |
| 32902 | NTECRQNSD |
| 32903 | YGENISPSP |
| 32904 | TWQSMVNSE |
| 32905 | TSQYSSVST |
| 32906 | GAQSMQFSC |
| 32907 | KTYSAMYSP |
| 32908 | ENTMWQSSQ |
| 32909 | KLKESMESA |
| 32910 | QWMHCQLSR |
| 32911 | MQQHMKYSL |
| 32912 | ECRMAVQSC |
| 32913 | GAANRIQSW |
| 32914 | QRNEMSASR |
| 32915 | DMTLQSVSS |
| 32916 | ENGAISEPA |
| 32917 | HGNLMYTGA |
| 32918 | ISVCKQMIA |
| 32919 | IWQYKDSDA |
| 32920 | LSAFMGRNA |
| 32921 | MTNIAWQKA |
| 32922 | QSAFMGRNA |
| 32923 | QSSLEAGAA |
| 32924 | SEKFIIRTA |
| 32925 | SIGFWMRQA |
| 32926 | TGQWTFATA |
| 32927 | WEFSLADVA |
| 32928 | AIVKMGNPA |
| 32929 | ATNDKVHCA |
| 32930 | DASESHFEA |
| 32931 | DQHEVQNVA |
| 32932 | EWLPCGDLA |
| 32933 | FGRLHQWLA |
| 32934 | GCHSFCEKA |
| 32935 | HCSQMDTYA |
| 32936 | KAESFTYNA |
| 32937 | LITTGEFLA |
| 32938 | MSNSIRWMA |
| 32939 | NAELSCYGA |
| 32940 | NFAYTMLNA |
| 32941 | QNSHVIHEA |
| 32942 | SGTYLYDNA |
| 32943 | TQTKMMDMA |
| 32944 | YMTEWCSWA |
| 32945 | EIVQPQCYA |
| 32946 | AGGQKPAFA |
| 32947 | AISCGKWYA |
| 32948 | ALAWMEFCA |
| 32949 | FFGTPYHMA |
| 32950 | GFELVKAYA |
| 32951 | HTMNGVLYA |
| 32952 | IDSWQPCDA |
| 32953 | KCALIQDIA |
| 32954 | KHAQMSSDA |
| 32955 | KKGDSTREA |
| 32956 | LMMVILDTA |
| 32957 | MAANCEVFA |
| 32958 | MAEYTDAAA |
| 32959 | MWNYGHNYA |
| 32960 | MYGQNWNVA |
| 32961 | NCIHNWQHA |
| 32962 | NHFLASVLA |
| 32963 | NSKIVDYCA |
| 32964 | QCWFRGDYA |
| 32965 | QCWLRGDYA |
| 32966 | RATCGISMA |
| 32967 | RKHGLLFMA |
| 32968 | RMAHTFWDA |
| 32969 | SSFPMWWIA |
| 32970 | SSGLNWRDA |
| 32971 | STGSHGVCA |
| 32972 | WTKWECCVA |
| 32973 | KMLPTCSDA |
| 32974 | KPNPFVAWA |
| 32975 | FGQFCCQVA |
| 32976 | MPEKDGCPA |
| 32977 | DCDWQSAMA |
| 32978 | ALQFVSSTA |
| 32979 | AWDANLAFA |
| 32980 | QKGMMLDCA |
| 32981 | VFGSTRSAA |
| 32982 | RGGWCMRKA |
| 32983 | INENMQWLA |
| 32984 | PPMPVSHFA |
| 32985 | KRTIEHPCA |
| 32986 | RQMCMAHHA |
| 32987 | TSEPHCSYA |
| 32988 | ICNMDFRCA |
| 32989 | AHAWLQHWA |
| 32990 | HIHMSDRGA |

### Example 18

### AAV5 Variants with Tissue Tropism in Bone Marrow

[0934] This example describes engineered AAV5 variants with tissue tropism in bone marrow that were discovered using the methods and systems described in EXAMPLE 1-EXAMPLE 2.

[0935] CNS, liver, skeletal muscle, heart, lung, spleen, lymph node, bone marrow, mammary gland, skin, adrenal gland, thyroid, colon, sciatic nerve, and spinal cord tissues were analyzed to identify amino acid residues in the AAV5 VP1 581-589 region that drive bone marrow tropism. The results are shown in FIG. 18H which shows the positional frequency of each amino acid in the 581 to 589 region of AAV5 VP1 in bone marrow tissue as compared to all other analyzed tissues, wherein the capsid polypeptide has the sequence of SEQ ID NO: 2. The position (“Xaan”, n=1-9) is denoted on the x-axis and amino acid residues are denoted on the y-axis. The frequency of a particular amino acid residue in a particular position is indicated in the heatmap as intensity. Darker squares indicate a higher frequency of a particular amino acid in a particular position and lighter squares indicate a lower frequency of a particular amino acid in a particular position.

[0936] The frequency of a given amino acid residue occurring at a specified position corresponding to position 581 to position 589 of SEQ ID NO: 1 (generalized in SEQ ID NO: 2) in variants identified in bone marrow over the frequency of that given amino acid residue occurring at the specified position in variants identified in all other harvested tissues was analyzed to identify a set of sequence rules for capsids that preferentially target bone marrow tissue. With reference to TABLE 35 below, and SEQ ID NO: 2 (AAV5 VP1), the following amino acids can, thus, be independently mutated, in any combination, at any one or more positions Xaa1-Xaa9, to provide a VP1 capsid with enhanced bone marrow tropism as compared wildtype AAV5 VP1 capsid (SEQ ID NO: 1), where bone marrow tropism here refers to properties that are preferred for bone marrow transduction over properties that are preferred for transduction of all other harvested tissues.

TABLE 35
Bone Marrow Tropism Rules

Xaa1 is selected from A, E, G, Q, S, or T
Xaa1 is selected from A, E, or T
Xaa1 is E
Xaa2 is selected from A, I, Q, S, T, V, or Y
Xaa2 is selected from A, S, T
Xaa2 is A
Xaa3 is selected from A, G, I, M, Q, S, or T
Xaa3 is selected from A, Q, or T
Xaa3 is Q
Xaa4 is selected from A, E, P, Q, T, or V
Xaa4 is selected from A, P, or Q
Xaa4 is Q
Xaa5 is selected from F, I, L, M, Q, V, or Y
Xaa5 is selected from F, V, or Y
Xaa5 is V
Xaa6 is selected from F, I, N, Q, S, or V
Xaa6 is selected from I, N, Q, or S
Xaa6 is S
Xaa7 is selected from A, C, M, S, or V
Xaa7 is A, C, or V
Xaa7 is C
Xaa8 is selected front A, C, D, G, M, S, or Y
Xaa8 is selected from A, M, S, or Y
Xaa8 is M
Xaa9 is selected from D, E, G, L, P, S, or Y
Xaa9 is selected from D, E, or P
Xaa9 is P

[0937] TABLE 36 below provides sequences of the 581 to 589 region for variant AAV VP1 capsid polypeptides that were found in bone marrow tissue and comport to one or more of the rules provided in TABLE 35. The present disclosure, thus, provides for rAAVs composed of engineered AAV5 VP1 capsid polypeptides having a SEQ ID NO: 2, wherein the Xaa1 to Xaa9 region is any one of SEQ ID NO: 4118-SEQ ID NO: 5117, as disclosed in TABLE 36. Also encompassed herein are rAAVs composed of engineered AAV5 VP2 capsid polypeptides and engineered AAV5 VP3 capsid polypeptides having the sequences disclosed in the below table at the regions in AAV5 VP2 (amin acid residues 445 to 453) and AAV5 VP3 (amino acid residues 389-397) corresponding to the amino acids in the AAV5 VP1 581 to 589 region.

TABLE 36
Sequences of the 581 to 589 Region in AAV5
VP1 Capsid Polypeptide that Drive Bone
Marrow Tissue Tropism

| SEQ | 581-589 |
|---|---|
| ID NO | sequence |
| 4118 | EAEDEIQKA |
| 4119 | EASWPMDWD |
| 4120 | ECIHDQCSS |
| 4121 | EDIDLKGAQ |
| 4122 | EEGPQRMNH |
| 4123 | EGCCYWSHA |
| 4124 | EHWPMAMFN |
| 4125 | EHWQKDYNH |
| 4126 | EIYWMMSNV |
| 4127 | EKKSCQCWH |
| 4128 | ELDSWWRIA |
| 4129 | ELKESMESA |
| 4130 | EMAQTSETP |
| 4131 | ENGHKFNEE |
| 4132 | ENQTRMTSW |
| 4133 | EPTSEVHHD |
| 4134 | EQFNHTWHG |
| 4135 | EQHDWYQKY |
| 4136 | EQIALHCAW |
| 4137 | ERFAFVADH |
| 4138 | ESSRYRMMM |
| 4139 | ETHEFEKLC |
| 4140 | ETRTTAWSA |
| 4141 | EVITWGHMQ |
| 4142 | EVKDKPSIF |
| 4143 | EVWNAHEEG |
| 4144 | EWESSSILS |
| 4145 | EYTHESHWA |
| 4146 | EIEGMYWPL |
| 4147 | ETAWKWEWS |
| 4148 | EQLLSLCPS |
| 4149 | EKNQSTCET |
| 4150 | EYARGELEN |
| 4151 | EHPEWKCMY |
| 4152 | EMEHYPCYN |
| 4153 | EYSMSEQTN |
| 4154 | EKGGQMCAN |
| 4155 | ECDRLKNER |
| 4156 | EWCPGEPDG |
| 4157 | EEPRILYAG |
| 4158 | EHKLFMKPE |
| 4159 | EKIMVKRAF |
| 4160 | EAKEDWGVR |
| 4161 | EDKYMTKRH |
| 4162 | EGDLSGFQC |
| 4163 | EGKPRCFDW |
| 4164 | EHFQYQNHI |
| 4165 | EHKYFNSGH |
| 4166 | EHWYNRKGL |
| 4167 | EIWMWTQGC |
| 4168 | EKTAGMQTM |
| 4169 | ELPWQRWEN |
| 4170 | ELVPMKLRS |
| 4171 | ENHEEKMAE |
| 4172 | ENLSVNNLF |
| 4173 | ENMDDHYDT |
| 4174 | ENWCERYAK |
| 4175 | EQHLKPFEA |
| 4176 | EQKHCWSRD |
| 4177 | ERMLVHMRS |
| 4178 | EVQWNNPKP |
| 4179 | HAAGNEFCY |
| 4180 | HACDTQEHP |
| 4181 | HAENGAVWR |
| 4182 | HAISRQQVE |
| 4183 | HALTTDYYN |
| 4184 | HANQEGWCL |
| 4185 | HATSSTGDD |
| 4186 | HAVMHSAVS |
| 4187 | HAYNTFQFG |
| 4188 | IADHTEADP |
| 4189 | IADNIMQAC |
| 4190 | IAGMTADDG |
| 4191 | IAHDGQADS |
| 4192 | IAHEKKVSL |
| 4193 | IAELLHNFD |
| 4194 | IANSKMWEA |
| 4195 | IAYCTDAYE |
| 4196 | KACQNSNFW |
| 4197 | KACTDESGF |
| 4198 | KARDLEYEQ |
| 4199 | KAYDTMKCA |
| 4200 | KAYSEELGY |
| 4201 | LAANSVLYF |
| 4202 | LADWYSARE |
| 4203 | LAEIMKCPP |
| 4204 | LAFHLNGTS |
| 4205 | LAGCMGLQE |
| 4206 | LAMAAHEEA |
| 4207 | LAMNQSKAI |
| 4208 | LANLHEWEG |
| 4209 | LASITTPPS |
| 4210 | MAANNECLV |
| 4211 | MAGMMEEGS |
| 4212 | MAGPCSSDT |
| 4213 | MAIERAEVN |
| 4214 | MAERWHEVY |
| 4215 | MAEYKCAVN |
| 4216 | MAKYPVNWG |
| 4217 | MANDKHDPQ |
| 4218 | MARQEGWCK |
| 4219 | MASGSVEKM |
| 4220 | MASHIWNQW |
| 4221 | MAVGNLSEA |
| 4222 | NAALHSADW |
| 4223 | NAANQDHTW |
| 4224 | NAEAAWMTF |
| 4225 | NAELMDAHG |
| 4226 | NAFCGNHYL |
| 4227 | NAFNYRLVE |
| 4228 | NAGHYMEYK |
| 4229 | NAGPCWSEE |
| 4230 | NAMPREQFP |
| 4231 | NAMSNAAML |
| 4232 | NANPHHAVP |
| 4233 | NANQSCANN |
| 4234 | NASHDMHDL |
| 4235 | NAVQTLQLY |
| 4236 | NAWFPMTNT |
| 4237 | PACFRVMFV |
| 4238 | PAMNFFIEF |
| 4239 | PAPKNQSTD |
| 4240 | QAACTHPWS |
| 4241 | QADQMPTQE |
| 4242 | QAEGGPNMP |
| 4243 | QAKTSYGGE |
| 4244 | QALVHGAPL |
| 4245 | QAMMAQRAG |
| 4246 | QASQYTVKY |
| 4247 | QATHWPMWR |
| 4248 | RACHPPHLK |
| 4249 | RAEPMIYNF |
| 4250 | RAEQAPVCN |
| 4251 | RAQDTEMML |
| 4252 | RAQLYGMDS |
| 4253 | SAATFKGSP |
| 4254 | SAAYCSYLR |
| 4255 | SAAYFPARG |
| 4256 | SACGAQYPP |
| 4257 | SAEAVVRLW |
| 4258 | SAEVQATTY |
| 4259 | SAGLRVCDR |
| 4260 | SAEFCLKKH |
| 4261 | SAEEVDCHY |
| 4262 | SALDVQRPS |
| 4263 | SALQISMLY |
| 4264 | SANWVQRDM |
| 4265 | SAPSMWWAS |
| 4266 | SAQNHDCWL |
| 4267 | SARPFEFME |
| 4268 | SASNEFDGL |
| 4269 | SAVAHMSET |
| 4270 | TACIAYVDN |
| 4271 | TADFNVRVE |
| 4272 | TAFWMKGPQ |
| 4273 | TAGLSHFKS |
| 4274 | TAGLVTGLG |
| 4275 | TAHCHITYL |
| 4276 | TAHGCPTQH |
| 4277 | TAKTHLFPW |
| 4278 | TALHEDWEP |
| 4279 | TALMSSLQA |
| 4280 | TANLHTIEG |
| 4281 | TANQAYSTE |
| 4282 | TAPTEDYGG |
| 4283 | TATGMKHVY |
| 4284 | TAVHLLDPD |
| 4285 | TAVRYEVCG |
| 4286 | TAWKQNVSD |
| 4287 | TAYYEEFWR |
| 4288 | VAAHEGRKS |
| 4289 | VADRQNEHK |
| 4290 | VAFSLMEMD |
| 4291 | VAGFVSPTG |
| 4292 | VAGNGIPMP |
| 4293 | VAGWATPQL |
| 4294 | VARDHRAGT |
| 4295 | VASLGLYCM |
| 4296 | WAPVHWMKD |
| 4297 | WAYNSVASE |
| 4298 | YAASHMEMP |
| 4299 | YAHEVYRHG |
| 4300 | YAMDCMGGV |
| 4301 | YAQTDGCLE |
| 4302 | YATQNTFSY |
| 4303 | YAVEYGWNQ |
| 4304 | AAHNYEGVA |
| 4305 | CATHMERTR |
| 4306 | DADDQAVSG |
| 4307 | DADFCPRMP |
| 4308 | DAGLDSAGY |
| 4309 | DAHALQNVI |
| 4310 | DATGKFNFN |
| 4311 | FADKWANQF |
| 4312 | FANLFANTW |
| 4313 | FANLEINTW |
| 4314 | GANNQNSCE |
| 4315 | GANQHDVGH |
| 4316 | GAQCLFFQN |
| 4317 | HAIHDCYPP |
| 4318 | HAILYFYFP |
| 4319 | LAIQPCDER |
| 4320 | MAGDYACAM |
| 4321 | MASSVVHSC |
| 4322 | MATNREWWG |
| 4323 | MAVWAKAAE |
| 4324 | NARDPACDN |
| 4325 | PADRNNLWQ |
| 4326 | PAECISDSQ |
| 4327 | PATVKPMYW |
| 4328 | QALNRVQFN |
| 4329 | QATGMLYEE |
| 4330 | QATVTKEYW |
| 4331 | RAIHDCYPP |
| 4332 | SARDGISMH |
| 4333 | SAVYIQPDY |
| 4334 | TADVVPCHH |
| 4335 | VADYLNEFT |
| 4336 | VANNGMAVK |
| 4337 | VAWSQEFSQ |
| 4338 | YAQQFTMPT |
| 4339 | QAAGETFYG |
| 4340 | AACWTNMQW |
| 4341 | HAPMDNAPF |
| 4342 | NACDWKNDY |
| 4343 | IAMLESWWG |
| 4344 | DAGRFTGTS |
| 4345 | TAPRIDQQE |
| 4346 | VATDSVHES |
| 4347 | MAEQMGCQA |
| 4348 | DARFDQWHH |
| 4349 | PACFDDGEF |
| 4350 | LAEPWATSH |
| 4351 | PAVGFKDFQ |
| 4352 | HANHLMSHE |
| 4353 | LAHCDMMMC |
| 4354 | GADDHHLMT |
| 4355 | YAPKMWAEA |
| 4356 | WANTYSENV |
| 4357 | RAIYNDMTE |
| 4358 | AAMGYAKMS |
| 4359 | AAPERCYFE |
| 4360 | CAHPEEYHQ |
| 4361 | DAHFPGLAQ |
| 4362 | DAQCFSFGH |
| 4363 | HAVGPVMLE |
| 4364 | GIQDEAWVA |
| 4365 | GQQSFQQVD |
| 4366 | GSQMMQDQA |
| 4367 | GVQLTIQQA |
| 4368 | GVQPALYED |
| 4369 | GYQPDMGMS |
| 4370 | HCQIDVLRV |
| 4371 | HTQFEPGYH |
| 4372 | HVQVDQSKS |
| 4373 | HWQHETMAQ |
| 4374 | INQLKHSAY |
| 4375 | ISQCDTAII |
| 4376 | ESQWCANNK |
| 4377 | KDQCIKQAP |
| 4378 | KEQPNDRTQ |
| 4379 | KVQENEVLG |
| 4380 | LKQQFAEGM |
| 4381 | LVQLNMAGA |
| 4382 | LVQSEWGEE |
| 4383 | LWQLFTMQQ |
| 4384 | LYQQLESSG |
| 4385 | MLQSHTCLG |
| 4386 | MNQFGNMKQ |
| 4387 | MQQPFYRSM |
| 4388 | MYQVWCTDT |
| 4389 | NCQHNEESP |
| 4390 | NDQFRVVDA |
| 4391 | NFQRMHWST |
| 4392 | NIQGVIDYR |
| 4393 | NPQKWNPCI |
| 4394 | NQQCFDYYS |
| 4395 | NVQEATTDS |
| 4396 | NYQPFYVWA |
| 4397 | PHQLHENWG |
| 4398 | PLQLDHECT |
| 4399 | PSQIDHAEQ |
| 4400 | PWQYCELGA |
| 4401 | QCQSEHRDE |
| 4402 | QCQSFGVTQ |
| 4403 | QDQLYGRDE |
| 4404 | QDQQKQYDW |
| 4405 | QHQHLCRTS |
| 4406 | QKQFNAQMG |
| 4407 | QLQWFVKDS |
| 4408 | QNQIEHWCA |
| 4409 | QPQFMVGQI |
| 4410 | QVQFDRCYL |
| 4411 | RFQCEGHLD |
| 4412 | RHQLLEWYD |
| 4413 | RTQPDGQTR |
| 4414 | SDQQWKPTH |
| 4415 | SGQPFSYSK |
| 4416 | SHQQCVMDP |
| 4417 | SKIMMQDHV |
| 4418 | SIQTTFNDD |
| 4419 | STQKYWNYE |
| 4420 | TGQLNTGCV |
| 4421 | THQTARQNV |
| 4422 | TLQWEPKGV |
| 4423 | TNQCICAAP |
| 4424 | TNQNLGNDY |
| 4425 | TASNIVCCE |
| 4426 | TTQWSQLQS |
| 4427 | TVQSMTSFA |
| 4428 | TVQTPPQYV |
| 4429 | TWQSLCDFE |
| 4430 | VCQLMKYQP |
| 4431 | VDQVFVEDR |
| 4432 | VPQTDLDLC |
| 4433 | VQQIIGTIG |
| 4434 | VSQPCLIVD |
| 4435 | VVQWFAQQV |
| 4436 | VWQQQFVWL |
| 4437 | WDQFCRLMM |
| 4438 | WNQIMEYDY |
| 4439 | WNQPLMWCF |
| 4440 | YCQQTYTEY |
| 4441 | YEQKENQSY |
| 4442 | YGQWFDMSY |
| 4443 | YEQHMHIQR |
| 4444 | YEQTKQIMQ |
| 4445 | YNQAVCQEP |
| 4446 | YPQPFMLMF |
| 4447 | YTQLCHHGV |
| 4448 | AEQSRRSVG |
| 4449 | AKQCLQDYP |
| 4450 | CFQQKHNLF |
| 4451 | CGQSVSHAG |
| 4452 | CQQYTLVQA |
| 4453 | DDQFQDSTC |
| 4454 | FDQPTPDHP |
| 4455 | GEQHQMPMV |
| 4456 | IGQHDVQTT |
| 4457 | IMQQWPAMF |
| 4458 | ISQHTCSKD |
| 4459 | KEQPSQMHG |
| 4460 | MQQANSDYA |
| 4461 | MTQCRDCWL |
| 4462 | MTQDFNCDY |
| 4463 | QRQQMSHDC |
| 4464 | QRQRMSHDC |
| 4465 | RHQLLEWDS |
| 4466 | RVQHCYGDM |
| 4467 | SKQPNADSD |
| 4468 | VCQKYDEWG |
| 4469 | VTQQYWACD |
| 4470 | VTQQYWACN |
| 4471 | WDQPNMHTF |
| 4472 | WGQHKHTVA |
| 4473 | YCQEFEQYP |
| 4474 | YDQWECDEH |
| 4475 | YDQWERDEH |
| 4476 | HDQMMGLER |
| 4477 | TNQCIFKTM |
| 4478 | CHQCEGQDN |
| 4479 | GDQFQDSTC |
| 4480 | THQYFASLA |
| 4481 | IGQHNVQTT |
| 4482 | LKQCQSTMF |
| 4483 | ALQQNPSMT |
| 4484 | MMQCRDCWL |
| 4485 | SCQEWGIQW |
| 4486 | ANQFWKIHC |
| 4487 | GHIQYMRST |
| 4488 | GIIQTGCYK |
| 4489 | GIVQGYEGS |
| 4490 | GKTQFRKCS |
| 4491 | GMYQKCYFA |
| 4492 | GNCQQVQMG |
| 4493 | GQDQCCREW |
| 4494 | GSSQGRARA |
| 4495 | GSVQEGYDA |
| 4496 | GTRQFEGNC |
| 4497 | GTTQDWRVP |
| 4498 | GVIQDQGMF |
| 4499 | GVVQRATIE |
| 4500 | GVYQKQSMQ |
| 4501 | HDLQYPMSF |
| 4502 | HFHQMIEGG |
| 4503 | ICAQANIAR |
| 4504 | ICDQPGTTG |
| 4505 | IGVQTSFQD |
| 4506 | IHLQWQSMM |
| 4507 | IIDQKYSWC |
| 4508 | INLQGHHWP |
| 4509 | ISCQEEISM |
| 4510 | ISDQNVAHR |
| 4511 | ITLQTANAP |
| 4512 | IVLQYKFME |
| 4513 | IVMQQWFPF |
| 4514 | KCEQIENNP |
| 4515 | KEIQFMTMH |
| 4516 | KLVQNMKRD |
| 4517 | KQDQCMCWY |
| 4518 | KYEQLLGCY |
| 4519 | KYYQAFSKY |
| 4520 | LNWQFVECQ |
| 4521 | LNYQIALCR |
| 4522 | LPHQYNVVY |
| 4523 | LQTQRHWIP |
| 4524 | LSVQGLCSY |
| 4525 | LTSQSNHWG |
| 4526 | LWMQHQHGS |
| 4527 | LWSQYGLWV |
| 4528 | LYLQNMHCE |
| 4529 | MDVQTMNDG |
| 4530 | MSFQETTSI |
| 4531 | MTVQWFDIN |
| 4532 | MWDQTEMFN |
| 4533 | MYSQRNCLY |
| 4534 | NDRQHHHKC |
| 4535 | NNYQKLSFD |
| 4536 | NSIQFSSWR |
| 4537 | NTAQNEGWM |
| 4538 | NTEQMPPLS |
| 4539 | NTVQDMGVC |
| 4540 | NVLQLDAFL |
| 4541 | NWAQAHWYG |
| 4542 | NWDQTMSQD |
| 4543 | PEYQVERSE |
| 4544 | PMIQTDCRW |
| 4545 | PPPQIYLMA |
| 4546 | PWVQTNIGL |
| 4547 | QCFQEGWQD |
| 4548 | QDIQLSHHT |
| 4549 | QEVQFFATD |
| 4550 | QHVQRNYAS |
| 4551 | QQCQTGTPG |
| 4552 | QSCQAIVED |
| 4553 | QTTQQWCMQ |
| 4554 | QYSQIHMQK |
| 4555 | RGYQHEMMG |
| 4556 | RQHQGHYDY |
| 4557 | SNEQLDDDR |
| 4558 | SNIQDDPKG |
| 4559 | SQAQCEMMD |
| 4560 | SSDQQGWVT |
| 4561 | SSLQCFDME |
| 4562 | SSMQMPSGN |
| 4563 | SYVQTEWVY |
| 4564 | TIA0THWFW |
| 4565 | TIKQCSFCL |
| 4566 | TISQTQGYM |
| 4567 | TQTQINQGR |
| 4568 | TSMQSTQGK |
| 4569 | TTMQRLHFE |
| 4570 | TYAQRHVMG |
| 4571 | VDKQMQIYL |
| 4572 | VHCQADTAN |
| 4573 | VINQNIQCQ |
| 4574 | VMKQGNQEE |
| 4575 | VPAQQSTFV |
| 4576 | VPHQLCHIG |
| 4577 | VQVQGLAIM |
| 4578 | VTAQAESWF |
| 4579 | VTAQQMNLG |
| 4580 | VTVQKQEDH |
| 4581 | VVIQDIRKD |
| 4582 | VVLQQVDPA |
| 4583 | WERQYVPFV |
| 4584 | WIHQQFAEI |
| 4585 | WPCQQQSTW |
| 4586 | WSGQNYNGA |
| 4587 | YEKQEMNCY |
| 4588 | YMNQQNKDE |
| 4589 | YSLQTEVND |
| 4590 | YVSQSSYNY |
| 4591 | YYGQNYMGC |
| 4592 | ARAQIQDEW |
| 4593 | CVMQERQAN |
| 4594 | DLEQAMHAG |
| 4595 | DPCQEWDSE |
| 4596 | FEAQIVLPG |
| 4597 | IHLQWIWAN |
| 4598 | KHDQSGIAN |
| 4599 | LSGQIDEMS |
| 4600 | LYMQAPSEG |
| 4601 | NCLQKMQIW |
| 4602 | NDLQDKSHQ |
| 4603 | NVSQITQDC |
| 4604 | PNNQARGQC |
| 4605 | PVIQPCDER |
| 4606 | RWKQWCWEF |
| 4607 | VSYQTQDML |
| 4608 | YDLQTIKQL |
| 4609 | NITQLQCYC |
| 4610 | FHPQTSDND |
| 4611 | MEWQSEYIS |
| 4612 | DHPQMHFYW |
| 4613 | LVAQQDSCE |
| 4614 | LWKQWCWEF |
| 4615 | LVIQPCDER |
| 4616 | KPVQCACQN |
| 4617 | LIIQHPNMA |
| 4618 | SFLQYHERT |
| 4619 | GLPQSADVI |
| 4620 | DQVQGAHLF |
| 4621 | SGDQHLSEG |
| 4622 | LKSQGCEAY |
| 4623 | SCCQHDNNA |
| 4624 | YHEQCQWHS |
| 4625 | NMMQYQWAI |
| 4626 | MIPQHARGP |
| 4627 | TGRQYYSCC |
| 4628 | GNLYVPSWG |
| 4629 | GVDLVMMLK |
| 4630 | GVMLVGHKY |
| 4631 | HDFHVKRRC |
| 4632 | HNDWVIMAP |
| 4633 | HNVHVTTKW |
| 4634 | ICKLVMKED |
| 4635 | IEIYVNFCT |
| 4636 | IIDYVAHLL |
| 4637 | INELVEWCP |
| 4638 | ISCSVESLS |
| 4639 | KDKEVIVNC |
| 4640 | KDMCVHKYT |
| 4641 | KEWLVDESQ |
| 4642 | KMKMVKEVC |
| 4643 | KVEEVNVQQ |
| 4644 | KWTEVDGSW |
| 4645 | LCEHVQNCM |
| 4646 | LDDKVADHW |
| 4647 | LDKIVGMWS |
| 4648 | LGDNVDCWQ |
| 4649 | LMGDVTHMF |
| 4650 | LRVWVMYLS |
| 4651 | LSCHVQMNS |
| 4652 | LTSDVHIHM |
| 4653 | LYEAVAQME |
| 4654 | MFPLVGMIV |
| 4655 | MMTMVCNAL |
| 4656 | MPASVGSYT |
| 4657 | MWSPVFNWL |
| 4658 | NCEWVTKLA |
| 4659 | NETGVFRQA |
| 4660 | NFCAVEQGV |
| 4661 | NFGYVRAVG |
| 4662 | NIWGVDATE |
| 4663 | NPAPVDQHY |
| 4664 | NQNAVECIQ |
| 4665 | NRDVVRAWH |
| 4666 | NTEHVLVTP |
| 4667 | NVFLVPDMD |
| 4668 | NVVSVPVKS |
| 4669 | PESHVVSVW |
| 4670 | PNYVVQWNF |
| 4671 | PTTIVGWRD |
| 4672 | QCDDVMISE |
| 4673 | QCTFVPFET |
| 4674 | QGKYVGMIM |
| 4675 | QGYYVNSVD |
| 4676 | QMKMVNTSK |
| 4677 | QWCPVQMQC |
| 4678 | QYNVVKCVA |
| 4679 | RCDNVEACF |
| 4680 | RDGPVVPPP |
| 4681 | RIASVQWEE |
| 4682 | RPTLVNAHL |
| 4683 | RQIPVEDSN |
| 4684 | RTDLVAVCG |
| 4685 | RWSHVRVLW |
| 4686 | SFAHVGLPI |
| 4687 | SGHMVVCCR |
| 4688 | SNAPVHTCD |
| 4689 | SPATVAAGC |
| 4690 | SSIGVMGLY |
| 4691 | SSLCVNDQW |
| 4692 | STFRVGDCI |
| 4693 | STTIVGWRD |
| 4694 | TCDYVCAQV |
| 4695 | THTSVGGQC |
| 4696 | TRCDVEGYA |
| 4697 | TTYWVREMS |
| 4698 | TVMTVAAMQ |
| 4699 | TYRLVQQCM |
| 4700 | VFESVVITE |
| 4701 | VFTPVEKSG |
| 4702 | VGDRVQKNS |
| 4703 | VGTTVNVRS |
| 4704 | VHNMVLAFD |
| 4705 | VIGGVISYW |
| 4706 | VRELVMWGY |
| 4707 | VSGFVFVWR |
| 4708 | VTDYVPMNQ |
| 4709 | VTEIVCESG |
| 4710 | VVGVVIYTR |
| 4711 | VVVAVNADG |
| 4712 | VWELVSHVQ |
| 4713 | YDSGVETIS |
| 4714 | YYHGVVDSE |
| 4715 | CHAAVTNLY |
| 4716 | DLIIVPWSN |
| 4717 | LEILVAINE |
| 4718 | LMTWVEKGA |
| 4719 | LMTWVEKGD |
| 4720 | NTYGVAFDT |
| 4721 | QYHWVTRII |
| 4722 | RPPHVGPAL |
| 4723 | RQEFVFDCY |
| 4724 | SGKLVMCGY |
| 4725 | SSGPVIILR |
| 4726 | TCFHVAEMF |
| 4727 | PQCHVMADR |
| 4728 | CSDLVGTNC |
| 4729 | IRMNVVLTP |
| 4730 | ISMEVNRGE |
| 4731 | ALDRVSMAC |
| 4732 | FFEGVNINY |
| 4733 | PMYVVPEMC |
| 4734 | GKLDISNLC |
| 4735 | GLCNPSIVT |
| 4736 | GQIYCSRYD |
| 4737 | GSNFGSIDK |
| 4738 | GSNPFSRHG |
| 4739 | GYAKESAKR |
| 4740 | HHMRMSTLP |
| 4741 | HMDDSSICA |
| 4742 | ICREESETP |
| 4743 | IGEKISAMP |
| 4744 | INEGESTYD |
| 4745 | IVNTCSQSW |
| 4746 | KRKEASTRW |
| 4747 | LFEHSSVAN |
| 4748 | LGGLESCPG |
| 4749 | LHISISKSC |
| 4750 | LISEFSHDK |
| 4751 | LLTHISYME |
| 4752 | LPGIQSTMR |
| 4753 | LVSAYSEKF |
| 4754 | MDIDLSSHA |
| 4755 | MGAFTSINI |
| 4756 | MNVAFSMED |
| 4757 | MTPAMSFSP |
| 4758 | MTIRESICE |
| 4759 | NFDHISAST |
| 4760 | NLRYASNWP |
| 4761 | NMMSKSLDS |
| 4762 | NMSPFSSHS |
| 4763 | NMSPMSESY |
| 4764 | NQYTASNIC |
| 4765 | NTYSWSREW |
| 4766 | QTGAASANR |
| 4767 | QVECPSVDA |
| 4768 | RGVGMSTDN |
| 4769 | RVAEMSNTP |
| 4770 | SKNCLSFSW |
| 4771 | SMVTDSRWT |
| 4772 | SSGKDSNAA |
| 4773 | STDDESMPG |
| 4774 | TECPKSLTS |
| 4775 | TGKDESHFY |
| 4776 | THFHTSREP |
| 4777 | TMEFTSPCS |
| 4778 | TNHGFSNWV |
| 4779 | TQDWNSTAA |
| 4780 | TTHWQSWIQ |
| 4781 | TYGMCSTFQ |
| 4782 | VCLTHSFSN |
| 4783 | VIEMESGDF |
| 4784 | VNLVDSIRD |
| 4785 | VVNLFSFRS |
| 4786 | WFMEPSPQR |
| 4787 | WMHEDSSQY |
| 4788 | WTFMDSTTD |
| 4789 | YCSPFSGDA |
| 4790 | YLNKRSVNA |
| 4791 | CISMYSEGD |
| 4792 | ISGLMSDYQ |
| 4793 | IWMLPSVTT |
| 4794 | KQHNYSGRA |
| 4795 | KSGLQSITR |
| 4796 | LSEVFSAQP |
| 4797 | LSMVFSKGE |
| 4798 | MHFPWSGEA |
| 4799 | QVPWESKLC |
| 4800 | SKEEDSTML |
| 4801 | VEMCYSWNY |
| 4802 | YYTIASANV |
| 4803 | IPSADSWPM |
| 4804 | LPRTSSQIG |
| 4805 | QWGFGSDET |
| 4806 | AVLLASDQR |
| 4807 | DWNWKSCEW |
| 4808 | TSSNDSTAN |
| 4809 | IHGYHSCYF |
| 4810 | HVMLLSPNQ |
| 4811 | LSELFSAQR |
| 4812 | DIKMFSFHT |
| 4813 | GHTGSWCDR |
| 4814 | GKYRIACDT |
| 4815 | GMADLKCPS |
| 4816 | GMVEAECMD |
| 4817 | GQICILCSE |
| 4818 | GQYFKECYD |
| 4819 | GVNILTCEC |
| 4820 | GWKYEQCTD |
| 4821 | GWTPQLCSS |
| 4822 | HCSSMLCQS |
| 4823 | HNIPFYCMH |
| 4824 | HRLMYDCHK |
| 4825 | HSCPLACMN |
| 4826 | HTIGYQCHD |
| 4827 | HVAEYCCKH |
| 4828 | HYDTHQCWF |
| 4829 | IEWDHLCSH |
| 4830 | IHHGSICCT |
| 4831 | ITETRACAA |
| 4832 | KEEMMQCEE |
| 4833 | KGEPENCST |
| 4834 | KQDMARCWW |
| 4835 | KTDSINCQQ |
| 4836 | LFEPINCYH |
| 4837 | LSEVCLCSE |
| 4838 | MCDANHCNS |
| 4839 | MKGHNDCIS |
| 4840 | MMGVRNCHM |
| 4841 | MSTRCHCRY |
| 4842 | MTYKADCPK |
| 4843 | NDDTMHCAY |
| 4844 | NHTHITCTE |
| 4845 | NMMIMHCHT |
| 4846 | NNTTTRCLM |
| 4847 | NPLMQCCYL |
| 4848 | NRADMICAK |
| 4849 | NSAPSMCST |
| 4850 | NTEPNNCWC |
| 4851 | NTVYDNCGE |
| 4852 | NVKHCHCEI |
| 4853 | NWTYTFCQQ |
| 4854 | PFPMEQCWQ |
| 4855 | QCKWGDCAC |
| 4856 | QVHRPECRH |
| 4857 | RFWLQCCTE |
| 4858 | SFENSECTK |
| 4859 | SFYERACES |
| 4860 | SGFLTVCDR |
| 4861 | SHCMLNCWA |
| 4862 | SKILFDCTS |
| 4863 | SPLITNCEA |
| 4864 | SQVRTVCGF |
| 4865 | SRNPMMCHP |
| 4866 | STKNDICEG |
| 4867 | STLPSKCGM |
| 4868 | STMGTKCSM |
| 4869 | TDREIHCMN |
| 4870 | TFFPGHCYQ |
| 4871 | TLIEKLCED |
| 4872 | TPMRCYCFG |
| 4873 | TTDTATCKS |
| 4874 | TTHKMTCCP |
| 4875 | ITYKQECTI |
| 4876 | VDEWYVCMW |
| 4877 | VDRHGGCQF |
| 4878 | VFSKFVCQL |
| 4879 | VGSLYNCSG |
| 4880 | VNTLRHCQS |
| 4881 | VPTNLNCCQ |
| 4882 | VREHYKCGW |
| 4883 | YENAMICEM |
| 4884 | YTENKECCP |
| 4885 | AKNYFWCKP |
| 4886 | CISILGCAH |
| 4887 | FTEEGACGM |
| 4888 | GGMDLICHG |
| 4889 | HWVMQMCIG |
| 4890 | IMEPLVCDD |
| 4891 | KGCMDWCDS |
| 4892 | MKYDRPCCT |
| 4893 | NNDHFVCYL |
| 4894 | NTNMRHCGI |
| 4895 | RSIPGGCVA |
| 4896 | SFYSHICRE |
| 4897 | TCHWIQCFN |
| 4898 | TGEAQDCNP |
| 4899 | TVPMDHCWA |
| 4900 | VMKIKRCEG |
| 4901 | VNALFDCCY |
| 4902 | VTMNFHCGC |
| 4903 | VNDYDQCCM |
| 4904 | DYAENWCIE |
| 4905 | AWRPPNCEL |
| 4906 | NPIKFQCAH |
| 4907 | VYANENCAP |
| 4908 | PHEDCECLR |
| 4909 | TSVMWACPG |
| 4910 | GICGTRSMK |
| 4911 | GIMLSQDML |
| 4912 | GIVADRSME |
| 4913 | GLGYGHHMM |
| 4914 | GMVFTNYMR |
| 4915 | GSELGGVMG |
| 4916 | GVLPSYMMM |
| 4917 | HSPPCQIMP |
| 4918 | HWTTEEQMM |
| 4919 | IMCTKARMD |
| 4920 | IMIFEQMMH |
| 4921 | IQGCQMGME |
| 4922 | ISHNNAHMQ |
| 4923 | ITTPYGHMY |
| 4924 | KDLRSMEMC |
| 4925 | KFMGYMVMP |
| 4926 | KFMGYTVMP |
| 4927 | KHWFDPGMW |
| 4928 | KIMEPTFMC |
| 4929 | LCGLNTKMY |
| 4930 | LFHPDMMMP |
| 4931 | LGDDKYIMS |
| 4932 | LNANMKEMF |
| 4933 | LQTSTINMQ |
| 4934 | LSFDFPTMC |
| 4935 | MCALNPGMP |
| 4936 | MCFMQNDMR |
| 4937 | MDWSEGKMG |
| 4938 | MHDGGMEMP |
| 4939 | MILGEMSMY |
| 4940 | MNLNKIMMY |
| 4941 | MPYCEHWMI |
| 4942 | MSIPFCWMQ |
| 4943 | MVKPCGSMF |
| 4944 | NFHRWDRMT |
| 4945 | NIEWFKTMG |
| 4946 | NKEDNHMMM |
| 4947 | NKNEMAMMG |
| 4948 | NNCHYNIMA |
| 4949 | NQFPATEMQ |
| 4950 | NTFLCQKMA |
| 4951 | NTRFNVDME |
| 4952 | PLTLADKMQ |
| 4953 | PWYWPFEMY |
| 4954 | QGNWTMLMQ |
| 4955 | QKECYPNMV |
| 4956 | QSGVDFAMA |
| 4957 | QSLREENMQ |
| 4958 | QVLKGEEMP |
| 4959 | RHDHMMNMA |
| 4960 | RSVVNEKMF |
| 4961 | RVCNNESMF |
| 4962 | SCVVTDNMR |
| 4963 | SDHVLHEMC |
| 4964 | SEREMRHMP |
| 4965 | SFASKLAME |
| 4966 | SLDHMPMMG |
| 4967 | SLTFFQYMD |
| 4968 | SPSSHCVMI |
| 4969 | STSPYEHME |
| 4970 | SVGTRINMA |
| 4971 | THSSLASMV |
| 4972 | TLCSQNWMM |
| 4973 | TNHIQNEMD |
| 4974 | TNNEDTQMH |
| 4975 | TRHYNCTML |
| 4976 | TVVTKGTMP |
| 4977 | TWIEMDYME |
| 4978 | TYPKRMNMM |
| 4979 | VCDPWFAMP |
| 4980 | VDAPQPNMP |
| 4981 | VMYMRDQMW |
| 4982 | VPKWGTGMF |
| 4983 | VSAYEQNMK |
| 4984 | VTWHPLSMH |
| 4985 | VVEPQMRMC |
| 4986 | WITLNQKMV |
| 4987 | WWCHPMHMM |
| 4988 | YDKTYMAMG |
| 4989 | YQFNWGNMT |
| 4990 | YTKETGGMV |
| 4991 | DKIPINGMS |
| 4992 | DVEKTMQMN |
| 4993 | FHFIRHEMV |
| 4994 | FQMAMCSMG |
| 4995 | GRFEEGAMY |
| 4996 | EGVMLNAMQ |
| 4997 | KDRCQYEMA |
| 4998 | MCGFETTMP |
| 4999 | MHDDYRGMQ |
| 5000 | MSRRKEAMP |
| 5001 | QRIWTTYMH |
| 5002 | RRFEEGAMY |
| 5003 | SELFRANMD |
| 5004 | VMCNMMQMT |
| 5005 | WNAPKVMMA |
| 5006 | DKIPINGMP |
| 5007 | SFHPSWWMY |
| 5008 | NCFDSEDMG |
| 5009 | VTTNELGMH |
| 5010 | TTFPQVIMN |
| 5011 | DENWNHNMF |
| 5012 | TSGEMLRML |
| 5013 | LIEVLNHMN |
| 5014 | LFDRCNNMW |
| 5015 | KFHSKERMN |
| 5016 | YMNSLWHMR |
| 5017 | GIVTCAGMC |
| 5018 | GIHICKACP |
| 5019 | GNWSKVSKP |
| 5020 | GWENLFMTP |
| 5021 | HHPTLFHFP |
| 5022 | HPDNSQMSP |
| 5023 | HQTRSELAP |
| 5024 | HSAAPTEGP |
| 5025 | HVFSIFHVP |
| 5026 | IMRLDARCP |
| 5027 | INTGFMNKP |
| 5028 | ISHPSVGEP |
| 5029 | ITMPRMDNP |
| 5030 | KDVEFFHGP |
| 5031 | KSEENYNHP |
| 5032 | KVDDHAFEP |
| 5033 | KVDNEFYVP |
| 5034 | KVWPCNPDP |
| 5035 | LCAIWTLCP |
| 5036 | LFRFDMSPP |
| 5037 | LHCSPEIGP |
| 5038 | LHESLDDFP |
| 5039 | LPCHAIVSP |
| 5040 | LVTLNHNKP |
| 5041 | LYGDAQGGP |
| 5042 | MGGHMHEYP |
| 5043 | MMVCGDRSP |
| 5044 | MPNMWQEWP |
| 5045 | MQEELVHCP |
| 5046 | MRGIEVEQP |
| 5047 | MYIRREGNP |
| 5048 | NCDERPHWP |
| 5049 | NEGPIMYSP |
| 5050 | NEWNPLPKP |
| 5051 | NILCKHKVP |
| 5052 | NISGQLHTP |
| 5053 | NMSGEYVFP |
| 5054 | NQCEIIDFP |
| 5055 | NSTNNGWQP |
| 5056 | NSVKQNAAP |
| 5057 | NTGLSDEPP |
| 5058 | NVTTAWNCP |
| 5059 | NWHWPPVFP |
| 5060 | NYDFYGMIP |
| 5061 | NYGEAYNFP |
| 5062 | PLIIQQFWP |
| 5063 | PSACMAGKP |
| 5064 | QFEDMYKSP |
| 5065 | QHANFAVQP |
| 5066 | QNSPCTAFP |
| 5067 | QSCLFMQIP |
| 5068 | QSTWAERWP |
| 5069 | QTMLYWYLP |
| 5070 | QTWKHMLGP |
| 5071 | RCIWKCEGP |
| 5072 | REDPSALEP |
| 5073 | RHDLYVWSP |
| 5074 | RYDYAKYHP |
| 5075 | SECTHDHFP |
| 5076 | SGVPYWAHP |
| 5077 | SSIYEPEYP |
| 5078 | STSCSPKWP |
| 5079 | STTSQHHPP |
| 5080 | SVTSQWMPP |
| 5081 | SVVCQQDEP |
| 5082 | TESDFAIGP |
| 5083 | TMTRIVHEP |
| 5084 | TNSSGEFPP |
| 5085 | TSALELQKP |
| 5086 | TWPRGAMHP |
| 5087 | TWSSIDMWP |
| 5088 | VFLVSGMLP |
| 5089 | VGLTMTGVP |
| 5090 | VRNEGGEWP |
| 5091 | WDCTMYHFP |
| 5092 | YPHTPHNCP |
| 5093 | YPHTPYNCP |
| 5094 | AQPNGNEHP |
| 5095 | CISEIAITP |
| 5096 | CISITAITP |
| 5097 | CVLSWCVRP |
| 5098 | DFNDSNWLP |
| 5099 | DMMVSGHVP |
| 5100 | DQLTWHTGP |
| 5101 | DQMDEFLYP |
| 5102 | GIDRPHFVP |
| 5103 | HNNNHAIPP |
| 5104 | LGNWHHNSP |
| 5105 | LHYNNERDP |
| 5106 | MSEVMDFLP |
| 5107 | STAHRPWTP |
| 5108 | TELVRQVAP |
| 5109 | TITALMVDP |
| 5110 | VKLTHRVRP |
| 5111 | VQPVQLFCP |
| 5112 | YTCCENHWP |
| 5113 | YPNDMTFEP |
| 5114 | AQPSMDYVP |
| 5115 | FKVRKFWDP |
| 5116 | QTEEPDDYP |
| 5117 | INEGLLYPP |

### Example 19

### AAV5 Variants with Tissue Tropism in CNS as Identified by Machine Learning

[0938] This example describes preferred properties of engineered AAV5 variants that display CNS tissue tropism as identified, by machine learning methods.

[0939] First, sequencing data from CNS tissues was subject to bioinformatics pre-processing. An overview of the bioinformatics pre-processing steps are as follows. First, raw NGS paired end reads were merged, quality-filtered (>Q30 avg), and base-corrected (fastp). Next, reads <150 nt were removed (readlength). Accurate alignment of reads was ensured using fuzzy matching of constant sequences on both 5′ and 3′ of variant region (align, fuzzy Align). Reads with stop codons were removed (stop). Additional relevant filters were used to select variants for subsequent analysis (e.g., “deduped”-shows number of unique UMI-var pairs detected in a given sample). Finally, filtered variants were moved into the machine learning pipeline of the present disclosure. FIG. 19A shows the results at various steps of bioinformatics pre-processing of the NGS data. Stepwise read count for 48 individual samples through filters is shown. FIG. 19B shows a positional comparison of CNS/non-CNS variant sequences. Position 1-9 refers to the 581-589 positions of AAV5 VP1 (SEQ ID NO: 2).

[0940] Additional filters were developed taking into consideration the experimental design. First, as the libraries were designed such that a single amino acid residue is encoded by a single codon, each variant amino acid sequence should be represented by roughly one nucleotide sequence. Consequently, the number of sequencing reads for a given nucleotide sequence should approximately match the number of reads of the encoded amino acid sequence (the ratio of sequencing reads for a given nucleotide sequence and its encoded amino acid sequence should be approximately equal to 1). As such, in some cases. DNA variants were eliminated for which this ratio was <0.9. Furthermore, as many errors can arise during library preparation and sequencing. DNA variants were eliminated that were only present once after deduplication of the sequencing reads.

[0941] Finally, as variant sequences isolated from tissues must be amplified during library preparation, the abundance of a variant nucleotide sequence in the starting material should be proportional to its abundance after amplification. Thus, variant sequences in the starting material should show greater amplification as compared to variant sequences that arise due to PCR or sequencing errors. Thus, comparing the ratio of sequencing reads of a nucleotide sequence before and after deduplication produced a bimodal distribution, with a higher-ratio group likely representing variants in the starting population, and a lower-ratio group of variants presumably resulting from PCR/sequencing errors. Therefore, as an optional stringent filter, in some embodiments the low-ratio group variants were removed.

[0942] FIG. 20A shows an example of peripheral and CNS tissue samples analyzed by the methods described herein. FIG. 20B shows amino acid positional abundance in the top 1000 predicted/filtered variants recovered from the CNS compared to non-CNS variants. An overview of the machine learning process is as follows. Filtered variants were binary classified as groups of Present(1)/Absent(0) for the targeted tissue(s): those found in both target/non-target tissue(s) (“shared” variants) were assigned as Absent(0). Each 9 aa variant sequence is represented as a 144-feature vector, composed of 16 biophysical properties per position (TABLE 37 below). Featurized variants were input into 2 separate ML models: Random Forest (RF) and Histogram-based Gradient Boosting Tree (HGB). Training and testing was done with cross-validation and all predictions of tissue Presence/Absence were made on hold-out data not used in model training (FIG. 22). Weights were assigned to each training sample to correct for class-imbalance. Machine learning performance was assessed through concordance between two models (FIG. 21A-FIG. 21B) and the average predicted probability of the two models was taken as the prediction. The top predicted variants were outputted. Important features contributing to tissue targeting/de-targeting were extracted (FIG. 23 and FIGS. 24A-C) as Shapley Additive Explanations (SHAP) values, representing the contribution of individual features to model output.

[0943] To accommodate potential sparse sampling of recovered variants from tissues, we focus the model on biophysical properties through featurization of the variant sequence. In this embodiment, the biophysical properties listed in TABLE 37 were used to construct a 144-feature vector for each variant as input for the ML. In TABLE 37, amino acid biophysical features are derived from the following amino acid properties. “Charge” refers to the electrostatic property of the amino acid side chain as an acid or base, having a positive or negative charge in an aqueous solvent at neutral pH. “Phosphorylation” refers to whether the functional group of an amino acid residue can have a phosphate group added as a post-translational modification. “Ionic_bond” refers to the capacity of an amino acid residue side chain to participate in electrostatic interactions. “Hydrogen_bond” refers to the capacity of an amino acid residue side chain to participate in hydrogen bond(s), “hbond_donors” refers to the number of amino acid residue side chain atoms that can donate a hydrogen atom to a hydrogen bond under neutral pH conditions, whereas “h-bond_acceptors” refers to the number of amino acid residue side chain atoms that can accept a donor hydrogen atom in a hydrogen bond under neutral pH conditions and “total_potential_h_bonds” refers to the number of amino acid residue side chain atoms that can participate in a hydrogen bond. “Mol_mass”, is the predicted molecular weight of an amino acid residue in unit Daltons. “Volume” refers to the predicted volume of a given amino acid residue in aqueous solution, and is adapted from Zamyatnin, A. A., Protein volume in solution, Prog. Biophys. Mol. Biol., 24:107-123 (1972). “Hydropathy” represents the hydrophobic (repels water) or hydrophilic (attracts water) properties of the side chain of a given amino acid residue, and the values are adapted from Kyte, J. and Doolittle, R. F., J. Mol. Biol., 157:105-132 (1982). “Goldman_engelman_steitz” is a particular measurement of hydrophobicity, as it refers to the free energy transfer from amino acid residues in an alpha-helix from non-aqueous condition to water, and the values for individual amino acids (kcal/residue) are adapted from Engelman, D. M., Steitz, T. A. and Goldman A., Annu. Rev. Biophys. Chem., 15:321-353 (1986). “Flexibility” refers to the symmetric/asymmetric distribution of amino acid residues in polypeptides and is adapted from Bhaskaran, R. & Ponnuswamy, P. R., Int. J. Peptide and Protein Res., 32:4:241-255 (1988). “Mutability” refers to the probability that a given amino acid residue would change in across an evolutionary interval, and is calculated by the relative frequency at which a residue is replaced with another, and in this case Alanine is arbitrarily set at “100” as adapted from Dayhoff. M. O., Schwartz, R. M., & Orcutt, B. C. Atlas of Protein Sequence and Structure, Vol. 5, Suppl. 3 (1978). See also references on the world wide web at:imgt.org/IMGTeducation/Aide-memoire/_UK/aminoacids/charge/and imgt.org/lMGTeducation/Aide-memoire/_UK/aminoacids/abbreviation.html#refs, each of which are incorporated herein by reference in their entirety.

TABLE 37
Biophysical properties used to featurize variant amino acids

| Amino | | | | | phosphor- | | | | |
|---|---|---|---|---|---|---|---|---|---|
| Acid | category | charge | hydropathy | solubility | ylation | average_flexibility_idx | ionic_bond | hydrogen_bond | hydrophilicity |
| Y | amphipathic | 0 | −1.3 | 63 | 1 | 0.42 | 0 | 1 | −2.3 |
| W | amphipathic | 0 | −0.9 | 97 | 0 | 0.31 | 0 | 1 | −3.4 |
| D | charged | −1 | −3.5 | −55 | 0 | 0.51 | 1 | 1 | 3 |
| E | charged | −1 | −3.5 | −31 | 0 | 0.5 | 1 | 1 | 3 |
| R | charged | 1 | −4.5 | −14 | 0 | 0.53 | 1 | 1 | 3 |
| K | charged | 1 | −3.9 | −23 | 0 | 0.47 | 1 | 1 | 3 |
| V | hydrophobic | 0 | 4.2 | 76 | 0 | 0.39 | 0 | 0 | −1.5 |
| P | hydrophobic | 0 | −1.6 | −46 | 0 | 0.51 | 0 | 0 | 0 |
| M | hydrophobic | 0 | 1.9 | 74 | 0 | 0.3 | 0 | 0 | −1.3 |
| A | hydrophobic | 0 | 1.8 | 41 | 0 | 0.36 | 0 | 0 | −0.5 |
| G | hydrophobic | 0 | −0.4 | 0 | 0 | 0.54 | 0 | 0 | 0 |
| F | hydrophobic | 0 | 2.8 | 100 | 0 | 0.31 | 0 | 0 | −2.5 |
| I | hydrophobic | 0 | 4.5 | 99 | 0 | 0.46 | 0 | 0 | −1.8 |
| L | hydrophobic | 0 | 3.8 | 97 | 0 | 0.37 | 0 | 0 | −1.8 |
| H | polar | 1 | −3.2 | 8 | 0 | 0.32 | 1 | 1 | −0.5 |
| N | polar | 0 | −3.5 | −28 | 0 | 0.46 | 0 | 1 | 3 |
| Q | polar | 0 | −3.5 | −10 | 0 | 0.49 | 0 | 1 | 0.2 |
| S | polar | 0 | −0.8 | −5 | 1 | 0.51 | 0 | 1 | 0.3 |
| T | polar | 0 | −0.7 | 13 | 1 | 0.44 | 0 | 1 | −0.4 |
| C | polar | 0 | 2.5 | 49 | 0 | 0.35 | 0 | 0 | −1 |

| Amino | | muta- | | | | | vol- | |
|---|---|---|---|---|---|---|---|---|
| Acid | Surface_accessibility | bility | hbond_donors | hbond_aceptors | total_potential_hbonds | mol_mass | ume | goldman_engelman_steitz |
| Y | 1.089 | 41 | 1 | 1 | 2 | 181 | 193.6 | −0.7 |
| W | 0.808 | 18 | 1 | 0 | 1 | 204 | 227.8 | 1.2 |
| D | 1.283 | 106 | 0 | 4 | 4 | 133 | 111.1 | −9.2 |
| E | 1.445 | 102 | 0 | 4 | 4 | 147 | 138.4 | −8.2 |
| R | 1.475 | 65 | 5 | 0 | 5 | 174 | 173.4 | −12.3 |
| K | 1.545 | 56 | 3 | 0 | 3 | 146 | 168.6 | −8.8 |
| V | 0.606 | 74 | 0 | 0 | 0 | 117 | 140 | 2.6 |
| P | 1.236 | 56 | 0 | 0 | 0 | 115 | 112.7 | −0.2 |
| M | 0.714 | 94 | 0 | 0 | 0 | 149 | 162.9 | 3.4 |
| A | 0.815 | 100 | 0 | 0 | 0 | 89 | 88.6 | 1.6 |
| G | 0.714 | 49 | 0 | 0 | 0 | 75 | 60.1 | 1 |
| F | 0.695 | 41 | 0 | 0 | 0 | 165 | 189.9 | 3.7 |
| I | 0.603 | 96 | 0 | 0 | 0 | 131 | 166.7 | 3.1 |
| L | 0.603 | 40 | 0 | 0 | 0 | 131 | 166.7 | 2.8 |
| H | 1.18 | 66 | 2 | 2 | 4 | 155 | 153.2 | −3 |
| N | 1.296 | 134 | 2 | 2 | 4 | 132 | 114.1 | −4.8 |
| Q | 1.348 | 93 | 2 | 2 | 4 | 146 | 143.8 | −4.1 |
| S | 1.115 | 120 | 1 | 2 | 3 | 105 | 89 | 0.6 |
| T | 1.184 | 97 | 1 | 2 | 3 | 119 | 116.1 | 1.2 |
| C | 0.394 | 20 | 0 | 0 | 0 | 121 | 108.5 | 2 |

[0944] Favored biophysical properties and favored amino acid residues at each position in the 581 to 589 region of an AAV5 VP1 capsid polypeptide, which are associated with a higher probability of CNS tissue tropism as predicted by machine learning are described below. Any of the below machine learning-derived positional amino acid preferences described in TABLE 38 can be present alone or in combination with each other or in combination with any of the amino acid preferences observed and described in EXAMPLE 5, TABLE 9.

TABLE 38
Machine Learning-Derived CNS Tissue Tropism Rules

Low amino acid solubility at position Xaa1
Xaa1 is selected from K, R, or Q
Low amino acid hydropathy at position Xaa1
Xaa1 is selected from K or R
High average amino acid flexibility index at position Xaa1
Xaa1 is selected from D, E, R, K, G, I, N, Q, or S
High hydrogen bond donors at position Xaa1
Xaa1 is selected from K or R
Amino acid mutability at position Xaa1
Xaa1 is selected from K, R, P, or H
Low amino acid solubility at position Xaa2
Xaa2 is selected from R, K, Q, or S
Low amino acid hydropathy at position Xaa2
Xaa2 is selected from R, K, D, E, N, Q, H, P, Y, W, S, or T
High amino acid charge at position Xaa2
Xaa2 is selected from R, K, or H
High amino acid solubility at position Xaa3
Xaa3 is selected from A, M, V, W, L, or I
High amino acid solubility at position Xaa5
Xaa5 is selected from C, M, V, W, L, or I
High hydropathy at position Xaa5
Xaa5 is selected from M, V, or I
Low average amino acid flexibility index at position Xaa5
Xaa5 is selected from M, W, F, or C
High amino acid solubility at position Xaa8
Xaa8 is selected from H, V, or I

[0945] TABLE 39 below provides sequences of the 581 to 589 region for variant AAV VP1 capsid polypeptides that exhibited CNS tissue tropism and comport to one or more of the rules provided in TABLE 38. The present disclosure, thus, provides for rAAVs composed of engineered AAV5 VP1 capsid polypeptides having a SEQ ID NO: 2, wherein the Xaa1 to Xaa9 region is any one of SEQ ID NO: 8118-SEQ ID NO: 9117, as disclosed in TABLE 39. Also encompassed herein are rAAVs composed of engineered AAV5 VP2 capsid polypeptides and engineered AAV5 VP3 capsid polypeptides having the sequences disclosed in the below table at the regions in AAV5 VP2 (amin acid residues 445 to 453) and AAV5 VP3 (amino acid residues 389-397) corresponding to the amino acids in the AAV5 VP1 581 to 589 region.

TABLE 39
Sequences of the 581 to 589 Region in AAV5
VP1 Capsid Polypeptide that Drive CNS
Tissue Tropism

| SEQ | 581-589 |
|---|---|
| ID NO | Sequence |
| 8118 | HWELVRCHD |
| 8119 | SQSRTIEQA |
| 8120 | KMAGIGCWD |
| 8121 | KSEMMSKLD |
| 8122 | ICIRGARTD |
| 8123 | CCKSKEACA |
| 8124 | RVAGEGIQS |
| 8125 | DNYWIIPFA |
| 8126 | TERDHKTIY |
| 8127 | VKHTAVDVL |
| 8128 | RGLSQDCCR |
| 8129 | KMEGNMSEL |
| 8130 | KNPPWICVW |
| 8131 | GVFRPDSFR |
| 8132 | AKCTIQNFQ |
| 8133 | KTVTKEVTP |
| 8134 | RIFYVMGIG |
| 8135 | HWEMIRCHD |
| 8136 | GKVQWSAQA |
| 8137 | VAANSRMMI |
| 8138 | KSPCYMSVQ |
| 8139 | KSGKVWYVL |
| 8140 | PWRARVGAR |
| 8141 | RGLTQDCCR |
| 8142 | RQYFEDSAG |
| 8143 | KSVQVYWHP |
| 8144 | IPINDREWG |
| 8145 | QIRSLITHA |
| 8146 | RMTPHNCQR |
| 8147 | EACYWGHCS |
| 8148 | MMAVIRQKS |
| 8149 | LSAKQRFFC |
| 8150 | KFNTKYQLM |
| 8151 | QNKHNWWIT |
| 8152 | SRLPVHKCP |
| 8153 | IRNRYAQAP |
| 8154 | KVNCRMTIM |
| 8155 | KSYLIANRH |
| 8156 | KTTFDVTCY |
| 8157 | MEDRVFACC |
| 8158 | NLNNLVSCR |
| 8159 | DAIWEHIRL |
| 8160 | KWAIVGYAL |
| 8161 | KFGFMYSEF |
| 8162 | KSTMLEHHA |
| 8163 | GRWMCNEAA |
| 8164 | KDHQLWGVW |
| 8165 | ASSFCKFTS |
| 8166 | PKRIRYRTT |
| 8167 | TKITMPGYQ |
| 8168 | TFHQSDYWA |
| 8169 | GKRVGDTSC |
| 8170 | FAQRDKQDR |
| 8171 | KTYSAMHSP |
| 8172 | TRAYYDSYS |
| 8173 | RMTPNNFQR |
| 8174 | KWGNEGRMS |
| 8175 | TVRHRMDAY |
| 8176 | RQQRNHASS |
| 8177 | TISQIPLVR |
| 8178 | FNWLVRAYI |
| 8179 | MYTGRRCWR |
| 8180 | QCHRGYIYE |
| 8181 | NYFAFWVFI |
| 8182 | AIDCCYSCG |
| 8183 | KIYMQCDRE |
| 8184 | DRKQAGQIY |
| 8185 | RDVGEENSA |
| 8186 | IAKKNFMKT |
| 8187 | RKAYLNYVA |
| 8188 | EMHAFWQRG |
| 8189 | FCKCFVKHC |
| 8190 | RKKVEVVVA |
| 8191 | NTRTGNDRL |
| 8192 | LADCMINHH |
| 8193 | LDTKTLASS |
| 8194 | EVDSKVICV |
| 8195 | RTFMKDMCE |
| 8196 | DAHSPWQVI |
| 8197 | TRHPTITMH |
| 8198 | SSRHRGGCQ |
| 8199 | RCTDHGESI |
| 8200 | SSMCSGSLL |
| 8201 | GKLTFDTER |
| 8202 | RKDQSDLWS |
| 8203 | RSMWSAFKH |
| 8204 | FRLDYNYKN |
| 8205 | RKKVEVVGE |
| 8206 | GYNYYWQHV |
| 8207 | TKLMYNTVD |
| 8208 | KTLHMPESK |
| 8209 | GRPVWCVCM |
| 8210 | MVHRVQGDD |
| 8211 | ATRYQICGE |
| 8212 | DIRWLPYDL |
| 8213 | HMHNLSVKP |
| 8214 | THRTMDDYF |
| 8215 | NYFTFWVFI |
| 8216 | HGCKCQYSF |
| 8217 | VSANEDRAG |
| 8218 | YPVNMMPPL |
| 8219 | GFRRTHVDQ |
| 8220 | CWMLHHRCS |
| 8221 | CVNLMPVNN |
| 8222 | TMRAGLENS |
| 8223 | QGFSTDAKP |
| 8224 | QIVSCDTET |
| 8225 | QKGMMLDYA |
| 8226 | DSHRCLKAA |
| 8227 | NTSEMLMAQ |
| 8228 | GKIARDQLN |
| 8229 | QYWWPTTHD |
| 8230 | KTNFGDAIE |
| 8231 | YIYMMLNLH |
| 8232 | QWFAKGVGE |
| 8233 | QLMSCANVE |
| 8234 | DIEFCMKQY |
| 8235 | DYEKFVKWM |
| 8236 | FCNYAAMSP |
| 8237 | CYWSMTNCT |
| 8238 | KWPVTANLH |
| 8239 | DTRHKWCLE |
| 8240 | FCVKSPRVD |
| 8241 | DAIQWGSWQ |
| 8242 | SALYRRGHV |
| 8243 | FMTVRNWAG |
| 8244 | KISTTWADT |
| 8245 | MHNAHVIIE |
| 8246 | MTGCRETVD |
| 8247 | QYKWHDVGV |
| 8248 | VACDMCLVQ |
| 8249 | KSEWTCCPH |
| 8250 | ARKPCNGWD |
| 8251 | TRYPTIAMH |
| 8252 | TFMFNSKWS |
| 8253 | RAMAYHFYW |
| 8254 | LYNMRMKDR |
| 8255 | DIWWTLTRD |
| 8256 | YHVHMMPPL |
| 8257 | KSGSCAMRV |
| 8258 | TRWTEKRQA |
| 8259 | QLMPCTNVE |
| 8260 | MGAMKSDDF |
| 8261 | AMKSHGCLT |
| 8262 | QNGPILTSR |
| 8263 | YCCNQEPFT |
| 8264 | NWCTMYRYC |
| 8265 | KDPDFYDWP |
| 8266 | LWIKQHVKC |
| 8267 | TRLEIEYMG |
| 8268 | DMTHTGIMS |
| 8269 | SMHMRVCYT |
| 8270 | IANKSNCHK |
| 8271 | VGRFNAYGE |
| 8272 | GLVANVTPR |
| 8273 | NTHTGNARL |
| 8274 | MVKPCLDEW |
| 8275 | QIKAHSNVF |
| 8276 | LVDRSGRAA |
| 8277 | TSKGKPTCC |
| 8278 | NCYCAYGWP |
| 8279 | IWQSLKKAT |
| 8280 | ARSGINGHA |
| 8281 | NWTRNMQWA |
| 8282 | NCLSRKKFA |
| 8283 | CIMLNGCFP |
| 8284 | KNGATNLAW |
| 8285 | NNCKLAMVH |
| 8286 | KATHCDKYA |
| 8287 | VFNPMLQDT |
| 8288 | ARPEIEMIG |
| 8289 | NSVHVHSSN |
| 8290 | SCPWKCMIV |
| 8291 | CSNDINGRT |
| 8292 | KMGMHDMAT |
| 8293 | KKLVNEGTW |
| 8294 | QLNQWTFAG |
| 8295 | FERRIGWDH |
| 8296 | VWNVMIKMC |
| 8297 | TGGCYRMME |
| 8298 | KPDPRQADQ |
| 8299 | LSCKFGWDG |
| 8300 | KYPFKYYVT |
| 8301 | TMLQKKRQD |
| 8302 | GYAQRSFFM |
| 8303 | ATDGYVAQD |
| 8304 | KMSTYHTYD |
| 8305 | HVADNQVVQ |
| 8306 | AKTFVMSFD |
| 8307 | TCNVSWEHE |
| 8308 | RRTDHCEPI |
| 8309 | RTDYSRLSD |
| 8310 | TDLRKRSNL |
| 8311 | IKAWWHDHQ |
| 8312 | KFKWEACCP |
| 8313 | VNVDCDVQQ |
| 8314 | QYQSTGVVR |
| 8315 | LIHEERKEQ |
| 8316 | ETNVVEDWY |
| 8317 | LACTPRYIF |
| 8318 | HGGCYRMME |
| 8319 | QSVNERHFH |
| 8320 | DWIKQHIKG |
| 8321 | QLMPCANVA |
| 8322 | TQREGETSY |
| 8323 | HNDWQQVFS |
| 8324 | YEDNDVMQI |
| 8325 | ARRAGLENS |
| 8326 | GATWLFRSP |
| 8327 | RTLWALYAI |
| 8328 | DCIICSSKG |
| 8329 | HMALVMQTV |
| 8330 | HSNMSLVHQ |
| 8331 | TNGAQIMHV |
| 8332 | STRPIACQS |
| 8333 | CMYVPADQE |
| 8334 | SPHYFADQW |
| 8335 | GFDLMRQIN |
| 8336 | GHHQCYKAN |
| 8337 | EMNSDYSGI |
| 8338 | SYWHVLLLV |
| 8339 | SADRTVMFH |
| 8340 | RFTVKDGDA |
| 8341 | QCKPGAEGF |
| 8342 | KAIQAFEHD |
| 8343 | ATRYQICDE |
| 8344 | MWWREGAMR |
| 8345 | LFMTYSTRN |
| 8346 | QPPNREAWC |
| 8347 | TPKSAGICC |
| 8348 | KPTYEHRGF |
| 8349 | CNYPIIWDR |
| 8350 | FTGTPPVGM |
| 8351 | QGQTGKYVM |
| 8352 | AHLHNQVIF |
| 8353 | KATVEMQSL |
| 8354 | CVRIGMRGP |
| 8355 | HLSFMMSSF |
| 8356 | TTMWIWFPF |
| 8357 | TTMMKWCAG |
| 8358 | FIQPTWDSY |
| 8359 | RC1WCHMQG |
| 8360 | LVHRVQGGD |
| 8361 | NVRSPAVRD |
| 8362 | LKENWMEWG |
| 8363 | YSASFGCQS |
| 8364 | GLKYWMHGI |
| 8365 | QTGTGHGFE |
| 8366 | QMNYQHEHR |
| 8367 | AHLHNKFIF |
| 8368 | STKQMTKSF |
| 8369 | QEENGKSVT |
| 8370 | RVADEGIQP |
| 8371 | CGLSTHEYL |
| 8372 | RANTESDQP |
| 8373 | QSAEWYLNG |
| 8374 | CWQLFNEQN |
| 8375 | AADGYVIQD |
| 8376 | SANQRHHDW |
| 8377 | KCVEWNAPA |
| 8378 | MHDTMGAWC |
| 8379 | GDNMVQWGS |
| 8380 | DVWCRKLMP |
| 8381 | SYRTLFNGW |
| 8382 | MRQHMKYSL |
| 8383 | PDQYLVVGD |
| 8384 | RELDKENCV |
| 8385 | MTGQCRNGQ |
| 8386 | TSLWQQMAS |
| 8387 | HSMFRHPCP |
| 8388 | GNTKCPSWH |
| 8389 | HECDTVAVN |
| 8390 | ERTGEKGIR |
| 8391 | GSGPVQSEE |
| 8392 | DGWCQKLMP |
| 8393 | QSVNEHHFP |
| 8394 | RAAKYQNSH |
| 8395 | DYERADCWM |
| 8396 | IRNYCRMTA |
| 8397 | LAVWQQKME |
| 8398 | INMSVSKDQ |
| 8399 | ACDKWDCCC |
| 8400 | SQPVCCVCM |
| 8401 | GRALANCAE |
| 8402 | ITTHMNCAD |
| 8403 | MKTTMQDYF |
| 8404 | HCIKVESVG |
| 8405 | HKGTHAFAM |
| 8406 | HYTEMSCDD |
| 8407 | DFWWTLTRD |
| 8408 | SMQYFFKTA |
| 8409 | LNCPSKDGT |
| 8410 | CTHMKNVRT |
| 8411 | ANADNSFCQ |
| 8412 | EERPWEWET |
| 8413 | CSHGTGAMC |
| 8414 | FAIWDYESK |
| 8415 | HLRFIMHEP |
| 8416 | HLMPRSQCF |
| 8417 | QLMVAFLCP |
| 8418 | AHSPFLDHM |
| 8419 | KQAGYDLFH |
| 8420 | DTMQWGSWQ |
| 8421 | SGFFVHTSS |
| 8422 | AKIIAQLCV |
| 8423 | NWTGNMQWE |
| 8424 | QREGNNYLT |
| 8425 | NAFWTQNME |
| 8426 | IKQVFNQIV |
| 8427 | HAVSGPTTG |
| 8428 | NTSGLLMAQ |
| 8429 | MYLSFPVHA |
| 8430 | STLSRHGWG |
| 8431 | QWMWQRLID |
| 8432 | TQGTMDSWY |
| 8433 | RPIHTRQNY |
| 8434 | EWLRQPRMT |
| 8435 | NQQRTNNNG |
| 8436 | QPRTVGVAG |
| 8437 | ASWPCGRNV |
| 8438 | LNSMIMWDN |
| 8439 | ESRSPNNPA |
| 8440 | PTSWLNDLT |
| 8441 | MIRKRFEGQ |
| 8442 | AMWAGLENS |
| 8443 | KLTDIWAHM |
| 8444 | TSYNCGRDP |
| 8445 | HCVKVESVG |
| 8446 | TACGSFHGC |
| 8447 | MSVPKRQGP |
| 8448 | LKQAKQMEP |
| 8449 | DCDVWHANV |
| 8450 | MGDWLGVPT |
| 8451 | FCKHNAQTQ |
| 8452 | QTKPMIGNE |
| 8453 | LSAQFNNQS |
| 8454 | PALMRRNIF |
| 8455 | ISTICPKIC |
| 8456 | TGSFMGCVD |
| 8457 | MTGCREAVA |
| 8458 | ERGLDNKPR |
| 8459 | NYCINKRAV |
| 8460 | SGQPVDRMF |
| 8461 | QIMSAKVFG |
| 8462 | MFVVNRNWA |
| 8463 | WPDPESEEV |
| 8464 | MNTMLMSNS |
| 8465 | HFVDNQVVQ |
| 8466 | NTRQRYHTW |
| 8467 | TSLVMPSLP |
| 8468 | DYRQCIDWE |
| 8469 | VLRYKCYPS |
| 8470 | HWEIEWVYW |
| 8471 | QVMMGQQTP |
| 8472 | RGCQVKCHT |
| 8473 | EQWKTHQQN |
| 8474 | YSKWARALS |
| 8475 | QCMITISCP |
| 8476 | DVWWQKLMP |
| 8477 | VANTWQVHC |
| 8478 | RMMWQSHCG |
| 8479 | VANITACAN |
| 8480 | PWAVEYSLV |
| 8481 | SYMWPHFPH |
| 8482 | FFEQEAHNR |
| 8483 | LCTGTERQG |
| 8484 | MAVGTVSAK |
| 8485 | QSSSPVMWV |
| 8486 | SSVVMVKQP |
| 8487 | EPRLYCAQA |
| 8488 | YANIHNRHG |
| 8489 | EAYIYLGEA |
| 8490 | PVETARCSG |
| 8491 | NAIPYFIQA |
| 8492 | FCKCFMKHF |
| 8493 | EKLVMYHKC |
| 8494 | YEDCMDMYF |
| 8495 | GIWVWDTYN |
| 8496 | AEWDHKTIY |
| 8497 | TQIQIRQAD |
| 8498 | RCNWQFAQH |
| 8499 | ESRHCKYPY |
| 8500 | SSNCMRRAS |
| 8501 | GVGQFRLLS |
| 8502 | KIDQTQWRR |
| 8503 | HLSFLVSSF |
| 8504 | NAGMSFRNR |
| 8505 | VMNRMEWSV |
| 8506 | LFMGMSDST |
| 8507 | ANVVMRKCQ |
| 8508 | GIYYQWRGQ |
| 8509 | DVHAEHSPQ |
| 8510 | QHPMTFSHE |
| 8511 | EPRLYCTQE |
| 8512 | NAKEQVVNT |
| 8513 | EFCHDDILM |
| 8514 | PLFRSEWLA |
| 8515 | GNMLRNFGS |
| 8516 | HAETDHAGL |
| 8517 | MKMHQLNGC |
| 8518 | SSERFRAEG |
| 8519 | QGGCAPMDS |
| 8520 | REVIMTGCG |
| 8521 | SDNGWCAHS |
| 8522 | YCCNQELFA |
| 8523 | TFVYGEWDR |
| 8524 | IFPSKIPCQ |
| 8525 | YVTQMQHLE |
| 8526 | NSRLLIKHP |
| 8527 | KTFPAADMK |
| 8528 | VGHVMIKMC |
| 8529 | GTDHVIVGY |
| 8530 | GAWSMQSSC |
| 8531 | YAVQTNNIM |
| 8532 | WGGMSNNQG |
| 8533 | QMVTQLNWG |
| 8534 | VPKQGAKQE |
| 8535 | DEYQQESFR |
| 8536 | GGTRSGKVV |
| 8537 | CQNTAIRAI |
| 8538 | TIHPPWVTL |
| 8539 | CMVSTPKLA |
| 8540 | RIWWALYAI |
| 8541 | SNYTDVETW |
| 8542 | WTSSKAVYD |
| 8543 | ESSFQDNVI |
| 8544 | YAHAFHCQP |
| 8545 | RRPPKPGTT |
| 8546 | QMYATMDTY |
| 8547 | EGGQCEKCK |
| 8548 | MGDWLGTPT |
| 8549 | GVKYATLHD |
| 8550 | PWEIEWGYW |
| 8551 | MYLLFPVHE |
| 8552 | HVLNGTGGP |
| 8553 | NIGQSPTQL |
| 8554 | VSCMWCQEN |
| 8555 | TMSVHYGQV |
| 8556 | NAAMITTVC |
| 8557 | HAVNSDCKK |
| 8558 | NIRPCVNQE |
| 8559 | QMECRGGAM |
| 8560 | VGVQCPNGG |
| 8561 | MQGMQTFWT |
| 8562 | QTMGIGGGP |
| 8563 | RSQQDRVMA |
| 8564 | QQGMCVTAI |
| 8565 | AIGPRLIDD |
| 8566 | HGINVELGS |
| 8567 | NVDGRHPMI |
| 8568 | DAARERHWE |
| 8569 | QTEIGHWVE |
| 8570 | TCGQCVNGV |
| 8571 | EGSMFAERQ |
| 8572 | HSCKYLMRV |
| 8573 | MCDWLGAPT |
| 8574 | EVSMFAERP |
| 8575 | ESAITSCAW |
| 8576 | RVCEMRTVD |
| 8577 | AHQGCRPGQ |
| 8578 | ANMISPYGL |
| 8579 | EKHRCAKDR |
| 8580 | TQQRSQATA |
| 8581 | IPMSREFPE |
| 8582 | GNQLITMSG |
| 8583 | YEMTSKCAY |
| 8584 | TIGQIPWVW |
| 8585 | HHGASLGKY |
| 8586 | QMMPQMDCS |
| 8587 | DSWQYYNGL |
| 8588 | VTYYGHYSV |
| 8589 | TIVHMPKHE |
| 8590 | QSHHFLNSA |
| 8591 | TNTMIWNDC |
| 8592 | KAIQASERD |
| 8593 | CRSTGMMRQ |
| 8594 | TSSLTDVIW |
| 8595 | TQAKIECWS |
| 8596 | KYAHSSCED |
| 8597 | NYENNFRAQ |
| 8598 | SPSQKGYGP |
| 8599 | QSHGGVVVQ |
| 8600 | WIQLAILVC |
| 8601 | NTHTGNYRL |
| 8602 | EACYLGHCH |
| 8603 | DEYQQESFP |
| 8604 | YRQQMFERQ |
| 8605 | AQQSTMISL |
| 8606 | AHQTPWAWI |
| 8607 | SISRADLQG |
| 8608 | LNVMSIHRC |
| 8609 | AGRFHKHYA |
| 8610 | GEMTRCFRN |
| 8611 | QVKWTANPD |
| 8612 | KTISPHVFA |
| 8613 | MGRPGACQA |
| 8614 | FMQPYGHGE |
| 8615 | DCWCYTTKC |
| 8616 | LIRRHCHYP |
| 8617 | QMGVTVVQR |
| 8618 | VCYNQEKAA |
| 8619 | EMNSDRSGI |
| 8620 | HLWMCPPRY |
| 8621 | TASLTDVIW |
| 8622 | LETTMRHGE |
| 8623 | FIGENNAEA |
| 8624 | QQQRTVFGM |
| 8625 | CYNQFHTYN |
| 8626 | LTISHPKSQ |
| 8627 | AVNRIQQVH |
| 8628 | GWFMIQSMK |
| 8629 | WCNWKFAQH |
| 8630 | MSYLVKGVG |
| 8631 | NTSRELIMP |
| 8632 | TVNPCVNGE |
| 8633 | QMGHQLCVQ |
| 8634 | DERHKWCLE |
| 8635 | MWHELITDQ |
| 8636 | LTRSGPVGQ |
| 8637 | AQFHIHRWQ |
| 8638 | VCTPPLNMQ |
| 8639 | SWSQLQHTA |
| 8640 | VATYIHAMH |
| 8641 | STPQGKQRQ |
| 8642 | TTTITNRLR |
| 8643 | SSLCRTYDN |
| 8644 | MLEKRNHWG |
| 8645 | NSELLRYTF |
| 8646 | CGVGLTQCK |
| 8647 | TGQQIHYKG |
| 8648 | DLEPIMTQA |
| 8649 | PIAQDKVWS |
| 8650 | YSTIQGSGP |
| 8651 | ATTTIQGKA |
| 8652 | ISICAQDIG |
| 8653 | STNPNLTGD |
| 8654 | THELHGHCV |
| 8655 | QEMMIVNCD |
| 8656 | EADTFTLIV |
| 8657 | GMNAYPAHS |
| 8658 | NCRQLGDNM |
| 8659 | ARCSMLDHG |
| 8660 | ASTWMQSYS |
| 8661 | HYCSCHNKY |
| 8662 | VSNVTIGCC |
| 8663 | DNAFMHHHV |
| 8664 | SKVHWDLPC |
| 8665 | NPQHQIDIG |
| 8666 | MWWCESAMR |
| 8667 | FIQCCQDTP |
| 8668 | RMVCDGRID |
| 8669 | ELPRYYGQV |
| 8670 | VTAFTTCHY |
| 8671 | TCSSTEGSG |
| 8672 | EWRTISYGN |
| 8673 | QSTPTLGPK |
| 8674 | GWALIVNDL |
| 8675 | VTILGLNPT |
| 8676 | VTCHWHQGG |
| 8677 | QGSVVHSPS |
| 8678 | NQARENWFH |
| 8679 | HIKVCTLGD |
| 8680 | QYYWFAQFL |
| 8681 | LKVDHKIGD |
| 8682 | DSPAFHQSG |
| 8683 | WSCRSICPP |
| 8684 | QHATTCTHP |
| 8685 | QYQHAVWAP |
| 8686 | LVCSNVDDR |
| 8687 | GKEHMPHHM |
| 8688 | SMSDCEVSF |
| 8689 | DHIWLHWME |
| 8690 | WSTLYLMTS |
| 8691 | MANDQRVDY |
| 8692 | SYWDVLLLV |
| 8693 | KMGTLHNME |
| 8694 | DHHRTSAVR |
| 8695 | MNTPCQQAP |
| 8696 | NSTHNTSYY |
| 8697 | AVSMFAERQ |
| 8698 | STDLSNHFQ |
| 8699 | DSIIKDQSA |
| 8700 | FCGKGANQI |
| 8701 | TQRSTQWSK |
| 8702 | CHYQINKFA |
| 8703 | QATPACPAV |
| 8704 | DVFWPDSFR |
| 8705 | FVIKPNQAT |
| 8706 | CRKSKEVCA |
| 8707 | ASGFGHWWG |
| 8708 | RKRTAGVHF |
| 8709 | TYMYRSDCS |
| 8710 | MSVKKECGG |
| 8711 | WHFLMTFYI |
| 8712 | IADDYFMYH |
| 8713 | RIHDTMSDY |
| 8714 | CNMPQQCME |
| 8715 | TVGMRQAMM |
| 8716 | KKIFCSRDY |
| 8717 | NHDEKMWAP |
| 8718 | LCAVCGGCD |
| 8719 | VHPQTHVTD |
| 8720 | QHEQSNRIW |
| 8721 | EAYATVHMC |
| 8722 | LMHTYVVQQ |
| 8723 | DACAAHDHW |
| 8724 | DIMMKHCRR |
| 8725 | LTQYKALVQ |
| 8726 | MDKHKIGYA |
| 8727 | ESDVALGTI |
| 8728 | NVGYYKWQS |
| 8729 | IECFPRESI |
| 8730 | LSMPYAPTT |
| 8731 | AVKILMHDH |
| 8732 | THELHGHCS |
| 8733 | NSQTIMLHQ |
| 8734 | HIHMSDRGT |
| 8735 | TGRAWMWHS |
| 8736 | NSHAHGHMK |
| 8737 | DYTIMPYIA |
| 8738 | SVTYHERHP |
| 8739 | CTAMGWVHN |
| 8740 | SVTYHKWHP |
| 8741 | VSCEFGQEY |
| 8742 | KDLEYQRSN |
| 8743 | AKGPHWGQG |
| 8744 | RYHHSCDSH |
| 8745 | ACTWLHGTN |
| 8746 | SIHNVLVQN |
| 8747 | KVDQNTNWC |
| 8748 | FGEFTTDEN |
| 8749 | VWMRFDYVD |
| 8750 | MAKKREVGV |
| 8751 | MDEHFSVGC |
| 8752 | EFRCRLIDS |
| 8753 | NHCHCIAHP |
| 8754 | IIMLGCTGR |
| 8755 | VTLTSKMCQ |
| 8756 | RAECRYQII |
| 8757 | FDVHKMCIY |
| 8758 | VSADTPYMN |
| 8759 | THRTRHTDC |
| 8760 | DYYLNRASP |
| 8761 | SVSTKPHAE |
| 8762 | VADWIGRTP |
| 8763 | KLYIVMNQA |
| 8764 | NPIPGYFEQ |
| 8765 | SCKWIQSNR |
| 8766 | QWGVISGHA |
| 8767 | ESEFGHWWG |
| 8768 | KKAGAKDAL |
| 8769 | CTCEPRSAW |
| 8770 | YLYHSMMKQ |
| 8771 | ILRTIPNRT |
| 8772 | IEESIQNAD |
| 8773 | AMMPKTETH |
| 8774 | VVTLHSKAR |
| 8775 | VCCSHADSA |
| 8776 | DGSSHFTMQ |
| 8777 | VAYPIQTDA |
| 8778 | YAQQSPHCE |
| 8779 | YMLHAIMES |
| 8780 | AAVITINGL |
| 8781 | LNMVWGQKF |
| 8782 | NALPAQQHH |
| 8783 | QKPTIWDHF |
| 8784 | YQDIRQCIF |
| 8785 | TCTHFEFVD |
| 8786 | TLEPAYWHE |
| 8787 | PVHFWTQSK |
| 8788 | RCKRAVQVV |
| 8789 | WCESWGPQG |
| 8790 | AVVYKMNYH |
| 8791 | KNHMMLYVN |
| 8792 | ANMCGCDSF |
| 8793 | LFSDHGVSY |
| 8794 | TWSCCLHQY |
| 8795 | WTDSDSDCT |
| 8796 | VIDCCYSCD |
| 8797 | PIAQDQVLS |
| 8798 | LCRWYRYAN |
| 8799 | QNIRPGVPT |
| 8800 | RTTDHRADE |
| 8801 | QIHSEHCTT |
| 8802 | QSHDGVMVQ |
| 8803 | DLLANTICT |
| 8804 | SANIVFSVC |
| 8805 | LSMTRELWH |
| 8806 | MLHKYLHMW |
| 8807 | QYAITYQKG |
| 8808 | VQMYWSSKD |
| 8809 | GFNLMHMAG |
| 8810 | LFYSPMHTH |
| 8811 | VKAKKMANP |
| 8812 | NCMPTIAGS |
| 8813 | SHWQMQVMA |
| 8814 | HIMQEGRSS |
| 8815 | HFAMKCHNN |
| 8816 | EIIQAHLVN |
| 8817 | VKNALCQHM |
| 8818 | KTWDAHRSS |
| 8819 | IRGFMQNIY |
| 8820 | VSYAPMDAQ |
| 8821 | SGSMTQHHT |
| 8822 | AICTTASFD |
| 8823 | YPTECNHLT |
| 8824 | QSQHLAYKG |
| 8825 | LKAQAVTVT |
| 8826 | CTVQFELGC |
| 8827 | GTSQLQHMA |
| 8828 | PIYCNALCS |
| 8829 | VSKPDMHVS |
| 8830 | GPLVCISAG |
| 8831 | HKVKFGALH |
| 8832 | TQGWLAAGH |
| 8833 | GPRLIVHKL |
| 8834 | MFGFSYSDG |
| 8835 | TMGMANCGM |
| 8836 | QSAIMSART |
| 8837 | VWGMAYTAC |
| 8838 | DATFMKNAF |
| 8839 | TEGPMHRVW |
| 8840 | FFRICDSYI |
| 8841 | CTALVNEDL |
| 8842 | SQAHQNRAC |
| 8843 | AMIGHGAYA |
| 8844 | HAETHHVGL |
| 8845 | ATVDVKGSH |
| 8846 | SSDGESHYI |
| 8847 | RTLLPNANS |
| 8848 | ITCNWCVMP |
| 8849 | GSLLQGVSD |
| 8850 | FCIMASDMA |
| 8851 | QGAFQMMLP |
| 8852 | FMWTTHRWH |
| 8853 | MFAQQMGVD |
| 8854 | ALVMIILQG |
| 8855 | ATISTESEV |
| 8856 | LTCNWTHHG |
| 8857 | TFKEYQGYH |
| 8858 | IRQPIHMTP |
| 8859 | QTAMWCWQE |
| 8860 | HIEVCTLGA |
| 8861 | QTHLKLECE |
| 8862 | GRNEQGYCH |
| 8863 | TFMQNTYQG |
| 8864 | LTNYHIAQE |
| 8865 | ATTEKCRSI |
| 8866 | ENAQMKCLM |
| 8867 | HKLWYWAFF |
| 8868 | AHAFRHKHF |
| 8869 | KFICTTITC |
| 8870 | QPGIVICKK |
| 8871 | IMGYKCKWL |
| 8872 | QPGYMNKLW |
| 8873 | QCDAALNWS |
| 8874 | ISTVCPKIF |
| 8875 | NDQHAPCTE |
| 8876 | ASSHRHWVY |
| 8877 | AMMLFQTSY |
| 8878 | SKEDLCHQQ |
| 8879 | AKIHGAWNA |
| 8880 | ASAPRVNEQ |
| 8881 | SCPWKCPIV |
| 8882 | PNRYRPFCC |
| 8883 | DHLRDHPLY |
| 8884 | GNGTVGKAN |
| 8885 | EQAGAASMW |
| 8886 | VQKLTLNAK |
| 8887 | GHNHMYTQP |
| 8888 | VSKTPWERD |
| 8889 | QSCHVMNMP |
| 8890 | IVLWFVNTT |
| 8891 | WCQHIPHNG |
| 8892 | CIAREYTGY |
| 8893 | YFVVNHFWS |
| 8894 | STLEDEKPY |
| 8895 | ARCHDMWGH |
| 8896 | MAAIKWYMS |
| 8897 | WMLHGWATL |
| 8898 | MVDCMKWHE |
| 8899 | AGMYSFSGE |
| 8900 | VALQTKIEQ |
| 8901 | GTQNLLHGY |
| 8902 | MTQYKALAQ |
| 8903 | GCATYSCYV |
| 8904 | QGDMGTWVG |
| 8905 | SAVVSMRND |
| 8906 | YPYGKCSNY |
| 8907 | RVINTEWGR |
| 8908 | TIYHHGNTL |
| 8909 | QQTTYDCLD |
| 8910 | LTHLQHSAT |
| 8911 | YMPLAMQYC |
| 8912 | TREPCQQCD |
| 8913 | IQDLQIAIK |
| 8914 | ATTNHDMQQ |
| 8915 | FCNKLTSVW |
| 8916 | EAVCMDTFP |
| 8917 | SAALVADGP |
| 8918 | QPEIFPVMA |
| 8919 | HTESGQDET |
| 8920 | TRNTWQQDF |
| 8921 | GVNTNMNGS |
| 8922 | CQAELIDVR |
| 8923 | TSTMCSWSM |
| 8924 | NAEPQQADI |
| 8925 | IRQMAGGHC |
| 8926 | LNQCAQAGC |
| 8927 | TATCGIEAE |
| 8928 | TNLHNNHYW |
| 8929 | AYSYYSVLP |
| 8930 | STMLLLARD |
| 8931 | VAYYSGHMM |
| 8932 | IQQLSMVGS |
| 8933 | ARVKETCEW |
| 8934 | TFMFNSEGS |
| 8935 | CVPKTIACC |
| 8936 | ACYEFVNAC |
| 8937 | TRMQFNKCH |
| 8938 | SRDIAKSST |
| 8939 | YESCNLTRD |
| 8940 | MVGRNMWAV |
| 8941 | MVGRNMWAV |
| 8942 | CQMQVLNNI |
| 8943 | YLVHEGHSR |
| 8944 | TGTQFMRWA |
| 8945 | MCMQEDRLA |
| 8946 | LATNHREIM |
| 8947 | GRWPYFLAC |
| 8948 | IPSFYWGDY |
| 8949 | GDDWIIWQA |
| 8950 | MECIHMRND |
| 8951 | SIWDCNHRS |
| 8952 | NTVFQLYHT |
| 8953 | GYGHTFWDA |
| 8954 | VHEEYSNSH |
| 8955 | GTLACDQKE |
| 8956 | FCCMYCQHP |
| 8957 | ESSMWCTDC |
| 8958 | QTADWCHPV |
| 8959 | MPHGRCNTI |
| 8960 | GITQHFVKH |
| 8961 | AMDCGQSFG |
| 8962 | LAYSQYVGC |
| 8963 | NRNCTDAWH |
| 8964 | RSHFQEGVQ |
| 8965 | MFMAKQNAM |
| 8966 | PIWSVYQDE |
| 8967 | DKRIICQDN |
| 8968 | MFYAMVGPE |
| 8969 | ETCCSEWHV |
| 8970 | AIHAHTAAN |
| 8971 | AIHAHTAAN |
| 8972 | NVSSHQHCW |
| 8973 | CRCCWYQDQ |
| 8974 | DMSDCEVSF |
| 8975 | SMCWFNQVA |
| 8976 | AAPMVGEFY |
| 8977 | SPMSFLNVL |
| 8978 | TKGPKELMA |
| 8979 | EGWTQFRPE |
| 8980 | QAGDSMWAK |
| 8981 | SADTNVVVE |
| 8982 | LKSGQYRFT |
| 8983 | YIHDYSSPN |
| 8984 | QTEEAMGFT |
| 8985 | QLCIPLTWE |
| 8986 | EANCNHVGV |
| 8987 | SGMKGRTQI |
| 8988 | AEAIINDIW |
| 8989 | LTEFTPYIG |
| 8990 | FCAHNFTSD |
| 8991 | SFLMMMNCT |
| 8992 | LCMPADRQS |
| 8993 | MTNSQHQHW |
| 8994 | PKHHVTWED |
| 8995 | VSQPAWQQK |
| 8996 | QAQSHIHYT |
| 8997 | EVLMAMSLF |
| 8998 | GQALDKQYQ |
| 8999 | SNEPLDTCY |
| 9000 | SQAVRKCCD |
| 9001 | QGSPLDSFQ |
| 9002 | LLFPLMGSS |
| 9003 | PNSPGVCSC |
| 9004 | MSTHVLKWV |
| 9005 | FCHAFPDAY |
| 9006 | VEGWHGTNA |
| 9007 | TQGVSTIGV |
| 9008 | NDEQRNTLY |
| 9009 | TSQHKYAEE |
| 9010 | HDCIWMECR |
| 9011 | DFAYRSTGV |
| 9012 | DSATSKSAD |
| 9013 | EPASCGSTR |
| 9014 | SMGWDHMMS |
| 9015 | MASTESDMC |
| 9016 | QMEVHWHMR |
| 9017 | AQWISPWPT |
| 9018 | QENDANRPQ |
| 9019 | LVNQLFHSW |
| 9020 | ACDQVNTFQ |
| 9021 | MKSVFMHEW |
| 9022 | WGEKCLGTS |
| 9023 | VSRSDWTMP |
| 9024 | TSTEPGVGT |
| 9025 | YHTFVECAQ |
| 9026 | ASCYVWGPA |
| 9027 | QHQSVMGFA |
| 9028 | HMQAQIHYW |
| 9029 | KQHELIVRV |
| 9030 | AYCCFNRFQ |
| 9031 | TYMQCMVSG |
| 9032 | CAVNTYQKH |
| 9033 | RNINEYEHY |
| 9034 | SARVNHGRV |
| 9035 | HSHMYDCQQ |
| 9036 | NTECWQNSD |
| 9037 | LNCQKANQN |
| 9038 | TVMMLMDNG |
| 9039 | MTTGLMAYE |
| 9040 | LLYRNMILS |
| 9041 | QSHLSDKMY |
| 9042 | TMAMLGWMN |
| 9043 | GLWHGFYAV |
| 9044 | GGCCGGELN |
| 9045 | LQYSPGQQT |
| 9046 | TNNCYWCAP |
| 9047 | AVLGSNYLK |
| 9048 | MDTKVVYGT |
| 9049 | WADRQGALA |
| 9050 | VITLKNNCH |
| 9051 | AIAEIKEQS |
| 9052 | VTMPMATWH |
| 9053 | VHFEAWRGM |
| 9054 | VEGVEMKCM |
| 9055 | TDAGMFAHA |
| 9056 | ITKFKMQDH |
| 9057 | AMCEVCIAP |
| 9058 | KSGYQCDSM |
| 9059 | LALMIQQAH |
| 9060 | LSAQDTMFH |
| 9061 | YQAQLNNCW |
| 9062 | SCEATMHAI |
| 9063 | TELGEPSSK |
| 9064 | DMTHTDEMP |
| 9065 | LEGPNTKWG |
| 9066 | EARMPWAHH |
| 9067 | HVHMCTPSV |
| 9068 | LNTYYRLED |
| 9069 | INCQTKKEM |
| 9070 | VPEPKGTLN |
| 9071 | STHMAGHYA |
| 9072 | APGMAFGGQ |
| 9073 | SVSAQQTMQ |
| 9074 | RTVYDVQDD |
| 9075 | GCYGNQPPT |
| 9076 | TATWGIEVE |
| 9077 | ECATNVGDR |
| 9078 | WDQKNLMDT |
| 9079 | ERTLTKTGS |
| 9080 | IVNMNHSAM |
| 9081 | FWMKWESYG |
| 9082 | AMRDNSVAH |
| 9083 | CWSYTNKNC |
| 9084 | QANPYNHGI |
| 9085 | IHVKFPPFD |
| 9086 | EYIQHSSAR |
| 9087 | TTTTPCNMP |
| 9088 | CCTGLGSMG |
| 9089 | TVTHMSTWG |
| 9090 | NNMLHGAYR |
| 9091 | WGQHLPMID |
| 9092 | MMKMCEYDG |
| 9093 | GANNMTAMN |
| 9094 | THAAYGTNL |
| 9095 | LSSLPMHYC |
| 9096 | ETEQYDAFV |
| 9097 | YTGIKVMGR |
| 9098 | DVEHVSCPK |
| 9099 | WHCEFTQHH |
| 9100 | LSTQSAKEY |
| 9101 | ISDPNVGFP |
| 9102 | SVCSKWDGT |
| 9103 | NNMWDTIFM |
| 9104 | NHKMVRDAL |
| 9105 | HVGIYEHCH |
| 9106 | SPKMMVSMT |
| 9107 | WMVRQKYMA |
| 9108 | LQWWERMGK |
| 9109 | CCGEREEYG |
| 9110 | FAGFTPGWM |
| 9111 | PHKDSMQMT |
| 9112 | DKTVQSLSL |
| 9113 | PWACEHVWH |
| 9114 | EYCEFMSEA |
| 9115 | YGVMCPSHY |
| 9116 | PIIRGRSDS |
| 9117 | EPMEANQCR |

### Example 20

### Engineered AAV5 Variants with Tissue Tropism in Liver as Identified by Machine Learning

[0946] This example describes preferred properties of engineered AAV5 variants that display liver tissue tropism as identified by machine learning methods. The same bioinformatics pre-process, machine learning methods, and analyses as described in EXAMPLE 19 and FIGS. 19-FIG. 22 were carried out to identify preferred properties of engineered AAV5 variants that display liver tissue tropism. FIG. 25 shows a set of top 20 positional features contributing to model output probability. Shapley Additive Explanations (SHAP) values can be used to interrogate the relative contribution of features to model predictions. As shown in FIGS. 26A-C, these features were further compared between tissue targeting and non-targeting variants. FIGS. 26A-C show a comparison of top predictive features positionally. Features were selected if they were found to be important to both the HGB & RF models. Summaries are shown of the features in the top 1000 ML-predicted liver variants compared to random 2% liver variants.

[0947] Favored biophysical properties and favored amino acid residues at each position in the 581 to 589 region of an AAV5 VP capsid polypeptide, which are associated with a higher probability of liver tissue tropism are described below. Any of the below machine learning-derived positional amino acid preferences described in TABLE 40 can be present alone or in combination with each other or in combination with any of the amino acid preferences observed and described in EXAMPLE 4, TABLE 6. Listed below in TABLE 40 are a summary of positional features shared between the top 30 important features for liver tropism extracted from two ML models (HGB & RF).

TABLE 40
Machine Learning-Derived Liver Tissue Tropism Rules

High surface accessibility at position Xaa1
Xaa1 is selected from K, R, or E
Low hydropathy (<−3.5) at position Xaa1
Xaa1 is selected from K or R
Low amino acid mutability at position Xaa1
Xaa1 is selected from H, P, K, or R
Low amino acid solubility at position Xaa1
Xaa1 is selected from Q, K, or R
High surface accessibility at position Xaa2
Xaa2 is selected from E, R, or K
Low hydropathy at position Xaa2
Xaa2 is selected from K orR
High amino acid volume at position Xaa2
Xaa2 is selected from S, L, I, A, R, or K
High mutability at position Xaa3
Xaa3 is selected from N, I, A, M, E, or D
Low solubility at position Xaa3
Xaa3 is selected from N, K, R, or E
Low hydropathy at position Xaa4
Xaa4 is selected from K or R
High amino acid volume at position Xaa4
Xaa4 is selected from K, R, I, or L
Medium amino acid solubility at position
Xaa5 Xaa5 is selected from H or T
Low surface accessibility at position Xaa8
Xaa8 is selected from V or C
Low average flexibility index at position Xaa8
Xaa8 is selected from W, V, M, A, F, L, H, or C

[0948] TABLE 41 below provides sequences of the 581 to 589 region for variant AAV VP1 capsid poly peptides that exhibited liver tissue tropism and comport to one or more of the rules provided in TABLE 40. The present disclosure, thus, provides for rAAVs composed of engineered AAV5 VP1 capsid polypeptides having a SEQ ID NO: 2, wherein the Xaa1 to Xaa9 region is any one of SEQ ID NO: 44438-SEQ ID NO: 45437, as disclosed in TABLE 41. Also encompassed herein are rAAVs composed of engineered AAV5 VP2 capsid polypeptides and engineered AAV5 VP3 capsid polypeptides having the sequences disclosed in the below table at the regions in AAV5 VP2 (amin acid residues 445 to 453) and AAV5 VP3 (amino acid residues 389-397) corresponding to the amino acids in the AAV5 VP1 581 to 589 region

TABLE 41
Sequences of the 581 to 589 Region in AAV5 VP1
Capsid Polypeptide that Drive Liver Tissue Tropism

| SEQ | |
|---|---|
| ID | 581-589 |
| NO | Sequence |
| 44438 | KAVAGCDFW |
| 44439 | KVQSAVEVT |
| 44440 | TTKPKQSCM |
| 44441 | QATKLQDVA |
| 44442 | RARHTEECA |
| 44443 | TSHKQSDCT |
| 44444 | KSGHTWDMS |
| 44445 | RVVITSNCT |
| 44446 | VAFRMKWVC |
| 44447 | KDTFTKQWQ |
| 44448 | KAQSDCDFY |
| 44449 | KAVSSLDGV |
| 44450 | LVGRCYDLH |
| 44451 | KDGKCVSCG |
| 44452 | KCEVKQCDH |
| 44453 | SQVIRLACY |
| 44454 | ACNVCAH1R |
| 44455 | TTYKEMVSG |
| 44456 | AAMKLGNLA |
| 44457 | GSNRHMIYA |
| 44458 | A1SKFIEGM |
| 44459 | ECGRLYEHE |
| 44460 | KADQFSRDR |
| 44461 | AAYKAQVLR |
| 44462 | ASWLDMCMR |
| 44463 | KYEHTTSPG |
| 44464 | QGLKCEQFE |
| 44465 | TKNTIVKAE |
| 44466 | RSNLLLQHM |
| 44467 | EKRMRAECE |
| 44468 | AIKMTNRCR |
| 44469 | TMAKYNEME |
| 44470 | RAERWGGCV |
| 44471 | NAKLEHAVN |
| 44472 | IMTKVHHVT |
| 44473 | QKRHCQTCT |
| 44474 | TKRDCNTQI |
| 44475 | RGEQKVYCS |
| 44476 | SRRLTTAHY |
| 44477 | SKKLTQQHM |
| 44478 | MGFRTSQPV |
| 44479 | AASRGNDCN |
| 44480 | KYETENGIN |
| 44481 | KAKLETWWD |
| 44482 | GMTKNTMGH |
| 44483 | ARSFVEKCR |
| 44484 | FGKYFWNSF |
| 44485 | VMVKWMRCN |
| 44486 | IVHKCIDIG |
| 44487 | IVHKCIDIG |
| 44488 | KAQYGFAVP |
| 44489 | KSEFVQSNF |
| 44490 | FTKIHWWFT |
| 44491 | TKMQVTSST |
| 44492 | MRATSHIVS |
| 44493 | KSTFAVLWA |
| 44494 | GATFCWNCG |
| 44495 | VKTQYCDMD |
| 44496 | KVGPAADFA |
| 44497 | AASFHAMDR |
| 44498 | EKVMRKPAD |
| 44499 | KVTIGTLAN |
| 44500 | AKMNYANVD |
| 44501 | SKQVCLAHE |
| 44502 | VAKMSFDCC |
| 44503 | RPSYKVKCQ |
| 44504 | ATHKIIGVE |
| 44505 | KSMHTVNEP |
| 44506 | VCARTNNLC |
| 44507 | TKVIYEKAV |
| 44508 | RSGVTYAWA |
| 44509 | RTQTFTMIP |
| 44510 | KCEMNISCH |
| 44511 | KPLQAFAFN |
| 44512 | AELRYQFYM |
| 44513 | DKRVIVKCE |
| 44514 | SNCLLGQCT |
| 44515 | QKQGFAINQ |
| 44516 | SKLLYSTSG |
| 44517 | KITFCWPCH |
| 44518 | RMQYTQSCS |
| 44519 | GTRTSFAMD |
| 44520 | VVKQTTGMD |
| 44521 | SATRAFEVQ |
| 44522 | SNGLQNIAF |
| 44523 | KMQSRLYCY |
| 44524 | TIKPSWLCA |
| 44525 | VSVRMHEMH |
| 44526 | KAMMDHAYD |
| 44527 | LASRAENHS |
| 44528 | KMQVDNANE |
| 44529 | MCMKAQRSG |
| 44530 | TAMTDVRDR |
| 44531 | RINRNNCRI |
| 44532 | MAQLLYSCQ |
| 44533 | QCRRMEGVE |
| 44534 | AMQRALINA |
| 44535 | DRKTQMIST |
| 44536 | NGFIQYDSK |
| 44537 | SKNAANSWD |
| 44538 | QKKFMECAQ |
| 44539 | SLFLEKSCG |
| 44540 | KVLECHGAA |
| 44541 | KIESTSSHC |
| 44542 | KHQFTGLHS |
| 44543 | QRKMNPDCM |
| 44544 | KMSTCMEHN |
| 44545 | AIGRNDQTT |
| 44546 | NAVVMMSNK |
| 44547 | RNIQGISWA |
| 44548 | AKSPITNGM |
| 44549 | SSNRYGDVT |
| 44550 | MRSGFQMST |
| 44551 | IAAEFKACR |
| 44552 | KLNSTMYVG |
| 44553 | LAVRTKQFH |
| 44554 | KQTSPLHIG |
| 44555 | KVANFFDEP |
| 44556 | TKQHFPLGE |
| 44557 | MIVKIERGV |
| 44558 | ACSKLTCCY |
| 44559 | LMYKMHQIL |
| 44560 | TAGKTWEGK |
| 44561 | KFHNSIVVT |
| 44562 | AACRISEVP |
| 44563 | ISTKAHQME |
| 44564 | SQKSHTVWA |
| 44565 | VKFLVQCHD |
| 44566 | SVTIWENFV |
| 44567 | KANPSNGFQ |
| 44568 | TTGWQVQCM |
| 44569 | SYVFAQJGC |
| 44570 | ATRQLFDCR |
| 44571 | GTHRTEMGR |
| 44572 | AQNRIGNQN |
| 44573 | MSNTAVQFV |
| 44574 | QKASYVEFD |
| 44575 | FGMKSKQMS |
| 44576 | IQREVTWCT |
| 44577 | NVNREHRFA |
| 44578 | MDPLLIKMA |
| 44579 | TRFMTDCMF |
| 44580 | VKGQMYSCE |
| 44581 | KCEEQKPCP |
| 44582 | VCLQFYQGR |
| 44583 | MTRASHVMC |
| 44584 | RADQQVRWA |
| 44585 | RADRCSDLY |
| 44586 | TSVTIVECV |
| 44587 | SNRTCAVSV |
| 44588 | VRTYVQACE |
| 44589 | ALMKLWCAM |
| 44590 | QKNPTLDSA |
| 44591 | SMRRNKYWC |
| 44592 | TKAEHVVMH |
| 44593 | VAVKHHTTC |
| 44594 | FCKTSTSFN |
| 44595 | SANLLSDFH |
| 44596 | KSVMDDVVD |
| 44597 | KGETTQNYG |
| 44598 | KAMDGAALT |
| 44599 | KMEVRMDHG |
| 44600 | TKTTTNISI |
| 44601 | TIAREKGYP |
| 44602 | AIKPSTWQQ |
| 44603 | MKFLLELWS |
| 44604 | KGMMKDTEQ |
| 44605 | IMKPFMEMW |
| 44606 | ACVTCTTFK |
| 44607 | AMKSRCRCE |
| 44608 | MCKFSVWAL |
| 44609 | YNKAYGYMA |
| 44610 | QRAHYIDCD |
| 44611 | LAAVWVVDG |
| 44612 | MAHGFQRWC |
| 44613 | STKIQYFCE |
| 44614 | EYVAWMKQW |
| 44615 | KSVQKECYF |
| 44616 | MCAQWCQCN |
| 44617 | RAEAHWHNF |
| 44618 | NKLIQEGCP |
| 44619 | EKAGSGAWN |
| 44620 | SAGMKPMCC |
| 44621 | RKSQKRMIN |
| 44622 | SAAIDRLQR |
| 44623 | AQAYYGVCD |
| 44624 | MAMRVGSHQ |
| 44625 | QKTPTMNEW |
| 44626 | NCTMIQRNY |
| 44627 | KCNSQPSSD |
| 44628 | IKQPYALTA |
| 44629 | GQQLIARCG |
| 44630 | EERPWYCKE |
| 44631 | NRELRMHHE |
| 44632 | TEQIFMKGC |
| 44633 | QKRLGEEVE |
| 42634 | TTYKAMSGD |
| 44635 | SHMFQYSHT |
| 44636 | TLKVHGIGG |
| 44637 | KIQQNMETI |
| 44638 | KAMQPECGA |
| 44639 | ASYRMGDHP |
| 44640 | AFAKLIHTE |
| 44641 | KAEPNMALE |
| 44642 | FRKSYWYTG |
| 44643 | MGGGQASWY |
| 44644 | VLHKAEICL |
| 44645 | YCTQCRGGV |
| 44646 | MCSQCAVLD |
| 44647 | RVNTSSRAT |
| 44648 | IRYAYDGNE |
| 44649 | VATQLIHSY |
| 44650 | IWKQLVEMQ |
| 44651 | KGGTENGWN |
| 44652 | MSQRIWTVG |
| 44653 | NKQMFCKGP |
| 44654 | MTYRSEFMR |
| 44655 | APGKGNRAC |
| 44656 | MFTRFMRCG |
| 44657 | RCMQSFTFH |
| 44658 | TIFRLRKSC |
| 44659 | MMSSQMKCG |
| 44660 | HTARNVRMR |
| 44661 | TGKSWTMLG |
| 44662 | EAAKESRLA |
| 44663 | GVKLQSYMT |
| 44664 | DRRYFTYAG |
| 44665 | LCYMLFEMT |
| 44666 | TIKCWNWSN |
| 44667 | STGMWQCAQ |
| 44668 | KLTECPLCG |
| 44669 | KTFFYHAPC |
| 44670 | RISDAYQCP |
| 44671 | SSKYAHYCA |
| 44672 | IATVWARCP |
| 44673 | TIGRTQFCH |
| 44674 | SSHMEFSAK |
| 44675 | MIQRVPTVA |
| 44676 | SKTDKMEFY |
| 44677 | TTAIRMYCV |
| 44678 | KCQYCSDMY |
| 44679 | TCKPIYHIE |
| 44680 | RVNRKQINI |
| 44681 | SGGKSQIVP |
| 44682 | MFRINTECC |
| 44683 | NAATIYREA |
| 44684 | ASTKQEYWR |
| 44685 | TSALKPACN |
| 44686 | TVNLNGESR |
| 44687 | SGTFAPFGW |
| 44688 | ACAKDRYAS |
| 44689 | KCMSALEQQ |
| 44690 | ALTMLIKGC |
| 44691 | SKTLFHMIQ |
| 44692 | VSVIKFKGE |
| 44693 | KPAEAHSVW |
| 44694 | TRQLYGLHD |
| 44695 | KKVMGMLYH |
| 44696 | MKTPLAEAH |
| 44697 | KVEGCKSHY |
| 44698 | HVAMSCNLM |
| 44699 | KKDTVNENA |
| 44700 | LSGRMAQQA |
| 44701 | ATLVKAFCA |
| 44702 | ACTHLMCRP |
| 44703 | QVTKLPPFS |
| 44704 | SCHMIAEFA |
| 44705 | SGYFRIQLS |
| 44706 | STKIGAKFL |
| 44707 | TSNFNCKMW |
| 44708 | GSQRIGIIP |
| 44709 | QRAGSFGWD |
| 44710 | NMRMWEWTT |
| 44711 | IAVKAWFDH |
| 44712 | KSNKRCGHL |
| 44713 | MGLQRMEFC |
| 44714 | KPSHYSCAF |
| 44715 | KGATDVPSG |
| 44716 | LAIKCMDEW |
| 44717 | ADNFLVKHG |
| 44718 | SRVIRSDSC |
| 44719 | MKQFCTCMS |
| 44720 | NCLLQWGQC |
| 44721 | GAAVLSALH |
| 44722 | KKNTAFAST |
| 44723 | QRTATLEAW |
| 44724 | SKLTVAAVE |
| 44725 | SMYRVMPCV |
| 44726 | HGILQNCFI |
| 44727 | LTVQLLECA |
| 44728 | MMMRQHLYG |
| 44729 | TAHFSFDTA |
| 44730 | QKKLWYGPV |
| 44731 | TKLQFTSPH |
| 44732 | TKLQFTSPH |
| 44733 | VGNFLYRAY |
| 44734 | TSGTSYQCQ |
| 44735 | RWQNAYEVS |
| 44736 | ARVMFDMSR |
| 44737 | SGQFFNVSL |
| 44738 | VSMMLCASL |
| 44739 | KGGLQENFG |
| 44740 | TALAKLHVG |
| 44741 | ACQPSFAGR |
| 44742 | ADKPLYQNE |
| 44743 | DWVLWTRIC |
| 44744 | VANAHWCVG |
| 44745 | SCAKTFAYS |
| 44746 | KIQQDIDMG |
| 44747 | KLKTQELWS |
| 44748 | IVMREAQAS |
| 44749 | TKNFTKGAW |
| 44750 | LCAKEGSHE |
| 44751 | TCLHVWQCG |
| 44752 | TSHVMYQYC |
| 44753 | AAVMQFMGV |
| 44754 | KMDWPNVLN |
| 44755 | TNQRIPNCE |
| 44756 | RSKDGGNCW |
| 44757 | SHTIFLHSF |
| 44758 | TGRLQEAYA |
| 44759 | SFCFCSANF |
| 44760 | TASFFMSVM |
| 44761 | ACQRVEKYT |
| 44762 | RAIAGGECV |
| 44763 | VAVKGWWGT |
| 44764 | KRCVTHECR |
| 44765 | TAYMTFDQA |
| 44766 | SSYRGVACE |
| 44767 | FCGSCVAFE |
| 44768 | AMGINMSGF |
| 44769 | KVVPNFPAQ |
| 44770 | TCSKDGSWW |
| 44771 | ERSPTFESQ |
| 44772 | LKASYHYQR |
| 44773 | FANTLANNA |
| 44774 | ATRQDGMAY |
| 44775 | SPASCQAAA |
| 44776 | AMGFSPHER |
| 44777 | SRYVVNSAH |
| 44778 | MANIWHKGA |
| 44779 | TKTPCWVWS |
| 44780 | AWGSFIHMR |
| 44781 | VYNFSARER |
| 44782 | VEAKMCEQN |
| 44783 | NCNLYYDHL |
| 44784 | TIFTTYSMK |
| 44785 | LAGKAQMWQ |
| 44786 | KMNGCQSTE |
| 44787 | MKQRTWSGK |
| 44788 | MMVVWQNMC |
| 44789 | FCVYFVDGK |
| 44790 | SAMIAGLGK |
| 44791 | DRKLFQFSG |
| 44792 | TSWTCPRFG |
| 44793 | MMKILQHSA |
| 44794 | QEVVWFKEP |
| 44795 | VSRITTIMA |
| 44796 | SAGSCAHMQ |
| 44797 | LSLRLERMC |
| 44798 | KGTPNLVSE |
| 44799 | TMFSCKYEG |
| 44800 | VTNMRLEGV |
| 44801 | AVKLPMCVD |
| 44802 | KENLTQSAT |
| 44803 | SAQTHEKFM |
| 44804 | TAVIRSNTA |
| 44805 | VFNRLIQSI |
| 44806 | QKAHIFDVT |
| 44807 | NSSKLEKYT |
| 44808 | GAGKSNCNP |
| 44809 | RGDTQHCMY |
| 44810 | KKEYNNGWW |
| 44811 | AAYQMTGIY |
| 44812 | TAMHTHKLG |
| 44813 | NHNMCAVVV |
| 44814 | DNRFMFVDT |
| 44815 | KWAENTVSG |
| 44816 | HALLKMCEG |
| 44817 | ESSTCKFGQ |
| 44818 | TRLKLDVWS |
| 44819 | SAYQLTGTA |
| 44820 | ACVASIGMK |
| 44821 | FCRIHMMCW |
| 44822 | QCRKDWGHY |
| 44823 | FCNTLVISA |
| 44824 | AWYRTEQMW |
| 44825 | TMKSWVHGC |
| 44826 | SAAGMNDCL |
| 44827 | KITTCWADP |
| 44828 | ARRIEEGYG |
| 44829 | LCMPLLTFD |
| 44830 | NGNVVMKEY |
| 44831 | SSLTCSHSV |
| 44832 | QGLKEYCHP |
| 44833 | AGVGSWQNE |
| 44834 | KGAIQQEWW |
| 44835 | AKNPYLWYQ |
| 44836 | ACSELYRHL |
| 44837 | NTWMNLESC |
| 44838 | TGGQLFQCW |
| 44839 | MNVKKSGSL |
| 44840 | MGLPVADWG |
| 44841 | FSTSHFHLW |
| 44842 | GSVKGMSVS |
| 44843 | YSGMFHEGR |
| 44844 | GWKPYAYAE |
| 44845 | ACCLTMCSY |
| 44846 | STRTTSSSM |
| 44847 | AAVPCSMQQ |
| 44848 | STQMQTVGL |
| 44849 | NFFLTAVEH |
| 44850 | YAQSKVRMG |
| 44851 | AGGKAQAVE |
| 44852 | TATLCANFC |
| 44853 | TGTVKMGME |
| 44854 | TTYIRLGGP |
| 44855 | SVFLSQSCR |
| 44856 | AKYEKVGMA |
| 44857 | ITQIWARVI |
| 44858 | QMNRLGNWN |
| 44859 | QSSWHSKVW |
| 44860 | KSDQSVCDQ |
| 44861 | LAASCGHVG |
| 44862 | GATTCKQID |
| 44863 | YKNHFMHMW |
| 44864 | VALVVVMSH |
| 44865 | ACVTNLWGD |
| 44866 | MMMRQEFCE |
| 44867 | IRKYYHNGV |
| 44868 | KFAIAQPVS |
| 44869 | TAMKQPTLP |
| 44870 | SVIIHPSYE |
| 44871 | VGAQFAVQF |
| 44872 | SKNELFVMH |
| 44873 | TACFNALSC |
| 44874 | DCYKSEVGV |
| 44875 | VKFLVQQGQ |
| 44876 | GTQTRFDNS |
| 44877 | KSGPVVCKE |
| 44878 | VAHISSGAL |
| 44879 | ARNLAQGGY |
| 44880 | VFGINGKCY |
| 44881 | FFTQCARVP |
| 44882 | TSWFKDCVG |
| 44883 | STQIWSKMH |
| 44884 | ISGTNRMVP |
| 44885 | GAHTCAKAG |
| 44886 | TIVFSLHRD |
| 44887 | MCAQMMGVE |
| 44888 | TSASCCQLT |
| 44889 | KGRWVDPMA |
| 44890 | MWKEITGQS |
| 44891 | SALETNADQ |
| 44892 | TCTTLTNQA |
| 44893 | SSVHQMLTC |
| 44894 | AGKITWQND |
| 44895 | SGKTHSGEQ |
| 44896 | MGHMCPGCF |
| 44897 | TSTLHFSAD |
| 44898 | KYETENGIK |
| 44899 | RASVTMGSA |
| 44900 | RASVTMGSA |
| 44901 | FTTVCAGCV |
| 44902 | MRVTYPWAD |
| 44903 | AGAFMMPNW |
| 44904 | SKSDKLECR |
| 44905 | GGTYKLNGC |
| 44906 | KTIPVCAHS |
| 44907 | KADQGVKDW |
| 44908 | KSTPLAEGV |
| 44909 | VGKGMNRFN |
| 44910 | KINTECMHD |
| 44911 | MAIIMSELG |
| 44912 | TPKHQQGYY |
| 44913 | FREEYRRGG |
| 44914 | ACNYFSREC |
| 44915 | ATLKVMGHH |
| 44916 | KCYTEGTNA |
| 44917 | AMLMNTACG |
| 44918 | TINRWMVAF |
| 44919 | NGNMIWRGK |
| 44920 | IVNTFWNYC |
| 44921 | SVYLKPTVS |
| 44922 | KHALAVSQP |
| 44923 | VGNQIPRGE |
| 44924 | STHILEGWD |
| 44925 | KSVGGTEHP |
| 44926 | QKNATAVNN |
| 44927 | FCSQHLTGP |
| 44928 | QCRVCQFHA |
| 44929 | VAAQFSRFE |
| 44930 | RSSSETLWS |
| 44931 | HKKEFVMNS |
| 44932 | TKNPTQLER |
| 44933 | TGMVLNGAM |
| 44934 | MKSHQMWVM |
| 44935 | VPKYWQQAC |
| 44936 | LVWRLHQAP |
| 44937 | KSTAPEMMN |
| 44938 | SFVIHSRTA |
| 44939 | SMFIFLHIC |
| 44940 | AMASFWECG |
| 44941 | QSFIMYGDC |
| 44942 | ASLKSMEYR |
| 44943 | VGMANMTCQ |
| 44944 | MCGHHAQLG |
| 44945 | ISQLVWKCV |
| 44946 | TAYRAIGPY |
| 44947 | QRGTYNQMM |
| 44948 | ATVGKVDIQ |
| 44949 | KTATNMNSF |
| 44950 | GCGLWVYSS |
| 44951 | VTTSLMDSA |
| 44952 | KSMMNESAV |
| 44953 | TIIACPRGS |
| 44954 | AAFGMNTFP |
| 44955 | VLYKIWQEK |
| 44956 | TCRRYECSV |
| 44957 | EKAMKSCTF |
| 44958 | AQNLHFYAP |
| 44959 | AKSQCSKGL |
| 44960 | VGTPTCQGV |
| 44961 | GSHSHMLDR |
| 44962 | SAAYRYCEP |
| 44963 | KVNPLNGHW |
| 44964 | GRIQFIMCG |
| 44965 | KATQEVWHK |
| 44966 | KKEAVGIMN |
| 44967 | GASSSYQNS |
| 44968 | EREAHCNQA |
| 44969 | VPHISFKCC |
| 44970 | LAHMAYPSV |
| 44971 | TALVQYNYP |
| 44972 | ESMRGQQWW |
| 44973 | TVAFSMCRP |
| 44974 | RCAMDIPHG |
| 44975 | LAMPCSGLC |
| 44976 | GKQFNMGDP |
| 44977 | NKTLVGIQS |
| 44978 | TANIASVPG |
| 44979 | MIVKTVMDV |
| 44980 | VTWSCSELA |
| 44981 | IGHGVQTAF |
| 44982 | KCNNHVNSS |
| 44983 | TRVPTQSIF |
| 44984 | TCHVSQDCT |
| 44985 | NTFMSTFLE |
| 44986 | TYQFRNRSE |
| 44987 | SAAWQKRCP |
| 44988 | RKEEFHACN |
| 44989 | GSMFTCYLA |
| 44990 | GESRLNEHW |
| 44991 | IKTPYCSSG |
| 44992 | FANSTQGCA |
| 44993 | AACLNTQYR |
| 44994 | FISFHEGYR |
| 44995 | HQMKAMNLG |
| 44996 | ACMGIKHVH |
| 44997 | IAQQTWQFE |
| 44998 | ERYMFLNME |
| 44999 | HKTPYPHLR |
| 45000 | RAEMLHEAV |
| 45001 | SGQHMPGCM |
| 45002 | GYMLKSDVQ |
| 45003 | YCVQTAFMH |
| 45004 | FRAYFQSAQ |
| 45005 | VSFTWNRCI |
| 45006 | ACASLINQM |
| 45007 | TNRHAEAYI |
| 45008 | SCQPAYGGG |
| 45009 | YTNLVIGVW |
| 45010 | MIFVISVGN |
| 45011 | TFYVQVNDK |
| 45012 | SANKVVHTD |
| 45013 | KCAMALIHK |
| 45014 | MLFWFRCLL |
| 45015 | DIEKLHHVF |
| 45016 | RYVCPLDHY |
| 45017 | SCCQEANGA |
| 45018 | THYFRNMHG |
| 45019 | AFVPFGNDL |
| 45020 | LGKVVYQAY |
| 45021 | ASKLDTALT |
| 45022 | MCKLLATSQ |
| 45023 | SLKAEYSGN |
| 45024 | NTQTVNRMF |
| 45025 | QVHKGWACV |
| 45026 | SQRVWEQVC |
| 45027 | THTKAQIGH |
| 45028 | MGSRHFHFP |
| 45029 | GHYVCSMAY |
| 45030 | DKHGNANWN |
| 45031 | GMSRQSIAD |
| 45032 | KAEHFNVDA |
| 45033 | IKMNHHIQG |
| 45034 | IFGKQHRLH |
| 45035 | ATGTKISVE |
| 45036 | MAKINPLHG |
| 45037 | TTRHCAYAQ |
| 45038 | MIQFDMMHG |
| 45039 | KTKSGAVFT |
| 45040 | AQKLMMGQG |
| 45041 | VSNLTWPGP |
| 45042 | ESKIVRYNN |
| 45043 | SAGRWCQTY |
| 45044 | NGALQMVQW |
| 45045 | GMFIQAVEA |
| 45046 | AGNTTIKFE |
| 45047 | AYFSCMHVN |
| 45048 | LGMTCVAHG |
| 45049 | VAILALRCH |
| 45050 | TKQQVGDCW |
| 45051 | TGLMLQQIC |
| 45052 | NVHFLFNCA |
| 45053 | NYRVAEWVA |
| 45054 | AARIACFDS |
| 45055 | VCVTKQMAC |
| 45056 | DRRPVCCYT |
| 45057 | KNDKGQCYF |
| 45058 | LG1KSQDAA |
| 45059 | QSALMSKYW |
| 45060 | TVGIKFQEM |
| 45061 | YTKFMSGGM |
| 45062 | AFRSPNVMY |
| 45063 | YSSLLALRA |
| 45064 | TQAKLQCAE |
| 45065 | TANHATMCD |
| 45066 | SPQPILDLQ |
| 45067 | TTVLIQICE |
| 45068 | SAASLIPTL |
| 45069 | MKVDSTFIH |
| 45070 | LGAANQMCH |
| 45071 | MSTADMIRI |
| 45072 | KAALMGWEK |
| 45073 | NCVVLQKLH |
| 45074 | DRAPKLSWE |
| 45075 | VCNQFQHWH |
| 45076 | KISFEVTEY |
| 45077 | TFYIWNHCD |
| 45078 | MCKQIIQGG |
| 45079 | SCSVWRCMS |
| 45080 | VSILMYQNQ |
| 45081 | TSMFYEMCN |
| 45082 | SYKHCSQVG |
| 45083 | FAAQWFWTG |
| 45084 | TWATWLEGQ |
| 45085 | SAWVCQFIQ |
| 45086 | NAMSQVSLA |
| 45087 | SNQFFPQSG |
| 45088 | TGTLMGSQG |
| 45089 | MCNYSNSGE |
| 45090 | TCSQPPCCG |
| 45091 | GHYIFNCSQ |
| 45092 | IGHRYYWSM |
| 45093 | GCHTIQFYR |
| 45094 | NCNMYHYFA |
| 45095 | GAQPRVVLS |
| 45096 | KATCYMDAN |
| 45097 | SAKQWTTVE |
| 45098 | NANTNGHMF |
| 45099 | TAGQPGILG |
| 45100 | WGTYWFNMP |
| 45101 | VSSKSVHDV |
| 45102 | SPQSFPQFE |
| 45103 | SKAANNQCC |
| 45104 | MGYQPAVGN |
| 45105 | AEMRTMIQA |
| 45106 | GGTFIQGQG |
| 45107 | KGTDDGQWQ |
| 45108 | GCNIQNMAA |
| 45109 | AGMGIHAMP |
| 45110 | AGQLVQACH |
| 45111 | TRDTFFKMG |
| 45112 | STYVQMDGG |
| 45113 | TSTTKMLSC |
| 45114 | TANATVFHS |
| 45115 | TCEQEWKAR |
| 45116 | SAMPGASMN |
| 45117 | GASYANNVV |
| 45118 | AAFTHMGTF |
| 45119 | AVKNWEVHE |
| 45120 | VASFWHCGA |
| 45121 | AIYPTNFVK |
| 45122 | NPALHNQCQ |
| 45123 | QKMAVCDMP |
| 45124 | KLHQRTWAA |
| 45125 | SAKYHMDVE |
| 45126 | QCVANYIAR |
| 45127 | GWHVQSCAM |
| 45128 | VPITCYNHG |
| 45129 | DKQPHNTGF |
| 45130 | AQNGMAICE |
| 45131 | VLFQTMVED |
| 45132 | TRKAVCQPV |
| 45133 | VALKMFCTY |
| 45134 | GANTEVLAG |
| 45135 | MGAVTMVGS |
| 45136 | MSYLKTTCH |
| 45137 | TMGLHQDHP |
| 45138 | LMHPLGTCA |
| 45139 | TMGLAGKSA |
| 45140 | YGQHWNPLT |
| 45141 | ACYQLPSAN |
| 45142 | ATKEKHPFY |
| 45143 | MMKNTQFCE |
| 45144 | KTNFRCEYY |
| 45145 | MVAKEIDGP |
| 45146 | MGSLQNMEF |
| 45147 | RAQPQERVV |
| 45148 | TKAECMPYQ |
| 45149 | VAMFNRLDR |
| 45150 | KAHDVLSNP |
| 45151 | VTNLLMRAS |
| 45152 | VGWACQAFY |
| 45153 | MTNSSHKWS |
| 45154 | KAAWSEDGR |
| 45155 | ASGLYYSHG |
| 45156 | MTGLQRVAV |
| 45157 | KPSTKMTLR |
| 45158 | IATFIRGFY |
| 45159 | ARGVLNLED |
| 45160 | FMNMMGSCS |
| 45161 | FAHQHPGCP |
| 45162 | NCVSLAAHW |
| 45163 | DSMRCTPVP |
| 45164 | FDRLITQGE |
| 45165 | TGLADQDWW |
| 45166 | NSIASKKSM |
| 45167 | MFYYAFTCG |
| 45168 | NSMVGGMSE |
| 45169 | LV1PWARVE |
| 45170 | FAAMACDMT |
| 45171 | NSTSIFDAC |
| 45172 | IAAHVVMCD |
| 45173 | SAVPVCSCI |
| 45174 | NKNSTNQWE |
| 45175 | TRFEYWSNS |
| 45176 | QMTMWANFY |
| 45177 | SPNPLPWCD |
| 45178 | KAINPLKAT |
| 45179 | SVSIFKGSN |
| 45180 | GNYISSMAC |
| 45181 | YATTTMSML |
| 45182 | KVHTCGMNY |
| 45183 | NWNMWLKSL |
| 45184 | FAAITRFQS |
| 45185 | SVTAKNLCL |
| 45186 | VCTICPVQM |
| 45187 | NIKLTHFEM |
| 45188 | VTQLSCVDT |
| 45189 | GAGMEASMD |
| 45190 | AAVSVHKCL |
| 45191 | TAALWK1EC |
| 45192 | TGQPYYNTA |
| 45193 | AILPCSTPK |
| 45194 | EKQVYIVRN |
| 45195 | MAKPAHAED |
| 45196 | KVHEASYFP |
| 45197 | VMIKTWASL |
| 45198 | HSATAVREG |
| 45199 | GQIFMCQHI |
| 45200 | AVSLHEHLQ |
| 45201 | AAMPVMKCW |
| 45202 | LGAMMALHC |
| 45203 | RCGLSSDAT |
| 45204 | LALQIQENR |
| 45205 | TARTPNDFE |
| 45206 | MGTFKLDFN |
| 45207 | TSTRANMLC |
| 45208 | AFKLVSCLE |
| 45209 | ISLPCHEVK |
| 45210 | EKGYIFVID |
| 45211 | TTSVLTGTG |
| 45212 | FARQFMEYW |
| 45213 | FGHFVGLTG |
| 45214 | STMSIVRTP |
| 45215 | ASVTNVKGM |
| 45216 | MSKLHAGIH |
| 45217 | GIAFAVHGI |
| 45218 | MFQTTILES |
| 45219 | MAHSYQSFC |
| 45220 | VTQMIANVQ |
| 45221 | DRFTQQSAK |
| 45222 | VQKYVTQAF |
| 45223 | SASTTRFIG |
| 45224 | VAATAYMDE |
| 45225 | RGEHFKCSY |
| 45226 | HSNMWLDQY |
| 45227 | NKTSNIMYH |
| 45228 | AAYSPMFWR |
| 45229 | SVMPCVDAY |
| 45230 | TAVPILDWT |
| 45231 | SGMLFIYSG |
| 45232 | NRLTIHTWY |
| 45233 | VAVITQDYP |
| 45234 | NSRLIRPHG |
| 45235 | RTIHPMRFI |
| 45236 | SKFEFQNAA |
| 45237 | MGRPVPSHS |
| 45238 | MAHNLVSLS |
| 45239 | KMMCNPTLL |
| 45240 | NIKLTHCNF |
| 45241 | AASSWVLME |
| 45242 | MCLQPYNCY |
| 45243 | VTHSTPQCV |
| 45244 | TSKVVSDAP |
| 45245 | ASSIVETAA |
| 45246 | KLHSGGYLC |
| 45247 | TAGIIYFYH |
| 45248 | SGKQLQNTY |
| 45249 | RFTMYSEWL |
| 45250 | TSRPISHEI |
| 45251 | SGMLKPMYS |
| 45252 | RTTMGVKME |
| 45253 | TCLTRHSQG |
| 45254 | MADKKWRYC |
| 45255 | SFYIHQEAN |
| 45256 | ASYMKSELA |
| 45257 | SYTRAVECN |
| 45258 | SVQMEGLGW |
| 45259 | GTKHTMQQC |
| 45260 | TSQHLQVLC |
| 45261 | MHNRIQKGG |
| 45262 | VIKSYVSTA |
| 45263 | RLQYAGQFL |
| 45264 | DKQFIAEWP |
| 45265 | SHEHCMKMC |
| 45266 | KTEDYQHHQ |
| 45267 | AVYMAGRYM |
| 45268 | GATPLCDAN |
| 45269 | GAYHVTNQT |
| 45270 | SHQHHPWGA |
| 45271 | GATIVMTGH |
| 45272 | TAVAQVDPV |
| 45273 | TARNLMGSS |
| 45274 | KGNHKMKHE |
| 45275 | RIEDTRHNN |
| 45276 | MCHQWMSCT |
| 45277 | STHYKIWAG |
| 45278 | TMKAMMEVP |
| 45279 | ALAHEAGKR |
| 45280 | SSNIIQYHE |
| 45281 | TQKSGSFNN |
| 45282 | ALKLAQSHY |
| 45283 | VCSHFCNEQ |
| 45284 | MSAWKMRDR |
| 45285 | TVTVWPVCC |
| 45286 | NSKHLNTYV |
| 45287 | VSHWITKVR |
| 45288 | TSMPYKAYG |
| 45289 | VYLQHNCCW |
| 45290 | AANVGMLGS |
| 45291 | KLQMNYEEK |
| 45292 | LGGFHVSAS |
| 45293 | GATFLQFDG |
| 45294 | SQMLSEHLE |
| 45295 | TPGWVNQIA |
| 45296 | TGTFVQMDK |
| 45297 | ATKQTPWAI |
| 45298 | TMCHEMCSL |
| 45299 | VGAACKMVA |
| 45300 | GQVTMQRCC |
| 45301 | TWTIKQIGE |
| 45302 | SARQVLDPD |
| 45303 | VSKSWLNSF |
| 45304 | GGMFLAEGS |
| 45305 | NYVTLGNHM |
| 45306 | ISKHCHDQG |
| 45307 | SAQSALDAL |
| 45308 | FAHGHSKAR |
| 45309 | AYFYLGAEF |
| 45310 | QKTQHPVWN |
| 45311 | NLCVSLESY |
| 45312 | MSQRVSVPS |
| 45313 | KEKLQMNHM |
| 45314 | HKGFTALFQ |
| 45315 | GTRTRIQQE |
| 45316 | ACTNMFAYD |
| 45317 | QSMHCANLK |
| 45318 | LGSHYCNYA |
| 45319 | VAMLEFQSA |
| 45320 | SSHMLELHI |
| 45321 | HGVIPMNW1 |
| 45322 | SGAKMAWVA |
| 45323 | SQWMLPCGE |
| 45324 | MPTHMWDAP |
| 45325 | NVMMQTYSR |
| 45326 | TCOGIGSVT |
| 45327 | TCRVAEFVP |
| 45328 | MGVMLTSEW |
| 45329 | AQNLYSAFW |
| 45330 | NHQLTYCSG |
| 45331 | MIKLRHWDV |
| 45332 | HCGPCLKGD |
| 45333 | AAQYQAIGV |
| 45334 | TNKMVGHGH |
| 45335 | RCGVQQGSN |
| 45336 | TFMRNEWTY |
| 45337 | AKYICONYC |
| 45338 | GCARNNGAI |
| 45339 | GCGKLEIHF |
| 45340 | TAVQTHTGA |
| 45341 | ARMPRESAD |
| 45342 | VMIPRMGCG |
| 45343 | YGYMANKMK |
| 45344 | NSYTNFKGG |
| 45345 | VLYSWWHFD |
| 45346 | KCFEDLCST |
| 45347 | VSNPMSCKK |
| 45348 | SCQHFMDDP |
| 45349 | VAAHWKMSN |
| 45350 | AAVAMQMCE |
| 45351 | ISQHCHCKL |
| 45352 | QWKQAQCCT |
| 45353 | GHRSRLSGA |
| 45354 | TCASLQSNQ |
| 45355 | KSAWMYGES |
| 45356 | RSATDYGNH |
| 45357 | ASGTKWAHK |
| 45358 | SPVTLHNGE |
| 45359 | RKERVIKEK |
| 45360 | VAARYTAPN |
| 45361 | AVKQTIYMP |
| 45362 | FKILKPGLG |
| 45363 | AAIPFACMG |
| 45364 | MCRLWHDAW |
| 45365 | AQKYILVGQ |
| 45366 | IQIFCFWCG |
| 45367 | NRKGQHVQL |
| 45368 | TKKTCVTWG |
| 45369 | TVNMWGADD |
| 45370 | GFKPEMRMA |
| 45371 | HRKHKFVPI |
| 45372 | KLSWEEYVR |
| 45373 | VIAQQGNAR |
| 45374 | TTAHVYDGM |
| 45375 | VKQMKLEQH |
| 45376 | MCVMSQEHL |
| 45377 | GRMQTSRCG |
| 45378 | TMRGTGAQH |
| 45379 | HYRPFWSAC |
| 45380 | ELFMDHRSW |
| 45381 | FSQPCVNGQ |
| 45382 | RPFTNEGLC |
| 45383 | VGMSPFKFC |
| 45384 | TVKIYGEAS |
| 45385 | AYRYEYCAI |
| 45386 | IGITWYGDT |
| 45387 | ERARSHECT |
| 45388 | KIESIVCNT |
| 45389 | MGASNMRFV |
| 45390 | VANYCNRPE |
| 45391 | AGQTFIYVH |
| 45392 | LAMMCHADQ |
| 45393 | MHVMSGHLF |
| 45394 | AMRQANAGV |
| 45395 | QYSIWNFDH |
| 45396 | TTHLGMNHF |
| 45397 | MSLHKCDVR |
| 45398 | NFAMSMRDH |
| 45399 | MKYEKNSCW |
| 45400 | GSSYLNQPT |
| 45401 | MSRHCSMHD |
| 45402 | MANATSREN |
| 45403 | EAYRNKNVC |
| 45404 | KNNTKKQWP |
| 45405 | RVAFTLESF |
| 45406 | AYKQIHDST |
| 45407 | NATGAPRAW |
| 45408 | MKHDVKEWN |
| 45409 | FSTQQCCVE |
| 45410 | EKKFHLKYQ |
| 45411 | ALGQFATCD |
| 45412 | GGFRFTAQA |
| 45413 | IALSCQSHL |
| 45414 | MSQFGMLAG |
| 45415 | AMKFVNYFY |
| 45416 | SMHLHMKDL |
| 45417 | ISTLLSYCG |
| 45418 | TEMSLPGME |
| 45419 | NAKLGDACG |
| 45420 | AMKKEGEWG |
| 45421 | SAHSTAVYR |
| 45422 | VTYSCVCTH |
| 45423 | GSNWIYEEA |
| 45424 | VSVIFPQQG |
| 45425 | MVIREWCQC |
| 45426 | MVMRQLFYN |
| 45427 | VSYYMYEAP |
| 45428 | CVIRAHQLC |
| 45429 | YGAAKQAMA |
| 45430 | AVTSSLRDL |
| 45431 | TGQVQGFHY |
| 45432 | DKLMFGEWC |
| 45433 | AASLKPWMY |
| 45434 | TRGLYMWSY |
| 45435 | LSSRSEHPN |
| 45436 | NASMYGAQC |
| 45437 | SIFFFAASP |

### Example 21

### AAV5 Variants with Liver-Detargeting Tissue Tropism as Identified by Machine Learning

[0949] This example describes preferred properties of engineered AAV5 variants that display liver-detargeting tissue tropism as identified by machine learning methods. The same bioinformatics pre-process, machine learning methods, and analyses as described in EXAMPLE 19 and FIGS. 19-FIG. 22 were carried out to identify preferred properties of engineered AAV5 variants that display liver-detargeting tissue tropism. FIG. 27 shows a set of top 20 positional features contributing to model output probability. Shapley Additive Explanations (SHAP) values can be used to interrogate the relative contribution of features to model predictions. As shown in FIGS. 28A-B, these features were further compared between tissue targeting and non-targeting variants. FIGS. 28A-B show a comparison of top predictive features positionally. Features were selected if they were found to be important to both the HGB & RF models. Summaries are shown of the features in the top 1000 ML-predicted liver-detargeting variants compared to random 2% liver-detargeting variants.

[0950] Favored biophysical properties and favored amino acid residues at each position in the 581 to 589 region of an AAV5 VP1 capsid polypeptide, which are associated with a higher probability of liver-detargeting tissue tropism are described below. Any of the below machine learning-derived positional amino acid preferences described in TABLE 42. Listed below in TABLE 42 are a summary of positional features shared between the top 30 important features for liver tropism extracted from two ML models (HGB & RF).

TABLE 42
Machine Learning-Derived Liver-
Detargeting Tissue Tropism Rules

Low solubility at position Xaa1
Xaa1 is selected from D, or P
Low mutability at position Xaa1
Xaa1 is selected from C, K, or L
Low solubility at position Xaa2
Xaa2 is selected from N, K, P, E, or D
Low hydropathy at position Xaa2
Xaa2 is selected from D, E, R, K, H, N, or Q
Low charge at position Xaa2
Xaa2 is selected from D or E
High number of total potential hydrogen bonds at position Xaa2
Xaa2 is selected from H, N, Q, D, E, or R
Medium volume at position Xaa2
Xaa2 is selected from D, E, V, P, N, or T
Low solubility at position Xaa3
Xaa3 is selected from P or D
Medium volume at position Xaa4
Xaa4 is selected from D, E, V, P, N, or T
Low solubility at position Xaa5
Xaa5 is selected from N, P, E, or D
Low solubility at position Xaa8
Xaa8 is selected from K or Q
Low hydropathy at position Xaa8
Xaa8 is selected from K or R
High surface accessibility at position Xaa8
Xaa8 is selected from E, R, or K

[0951] TABLE 43 below provides sequences of the 581 to 589 region for variant AAV VP1 capsid polypeptides that exhibited liver-detargeting tissue tropism and comport to one or more of the rules provided in TABLE 42. The present disclosure, thus, provides for rAAVs composed of engineered AAV5 VP1 capsid polypeptides having a SEQ ID NO: 2, wherein the Xaa1 to Xaa9 region is any one of SEQ ID NO: 46438-SEQ ID NO: 47437, as disclosed in TABLE 43. Also encompassed herein are rAAVs composed of engineered AAV5 VP2 capsid polypeptides and engineered AAV5 VP3 capsid polypeptides having the sequences disclosed in the below table at the regions in AAV5 VP2 (amin acid residues 445 to 453) and AAV5 VP3 (amino acid residues 389-397) corresponding to the amino acids in the AAV5 VP1 581 to 589 region.

TABLE 43
Sequences of the 581 to 589 Region in AAV5 VP1
Capsid Polypeptide that Drive Liver-Detargeting
Tissue Tropism

| SEQ | |
|---|---|
| ID | 581-589 |
| NO | Sequence |
| 46438 | IDGDDEPRA |
| 46439 | PRSDDDQRF |
| 46440 | WDCEDERRH |
| 46441 | DDPDDLECC |
| 46442 | PESDPERTN |
| 46443 | REWWWCLRI |
| 46444 | DDHEEVFKA |
| 46445 | DEDECEGRM |
| 46446 | AEIEKDPRW |
| 46447 | PEPLPEPSK |
| 46448 | YECVERDRF |
| 46449 | PHPQATGPS |
| 46450 | QEHHPRDRW |
| 46451 | CDTEAEFRR |
| 46452 | MEPGEKSRP |
| 46453 | LEMGGKTRT |
| 46454 | CHPHDEHKT |
| 46455 | MDLFPPHRH |
| 46456 | YEDNDVMQI |
| 46457 | PDMKSVVKA |
| 46458 | KWPIEWGHY |
| 46459 | VDRLPPNKS |
| 46460 | MDWDDAIRG |
| 46461 | WDRPPVMRP |
| 46462 | YDWGRVTPN |
| 46463 | REPWQTTEH |
| 46464 | PWKHEPSEF |
| 46465 | FDSHPKIER |
| 46466 | LRDRDGNRM |
| 46467 | RRGMEPTKH |
| 40468 | GDERPGQRN |
| 40469 | PLDRDQATQ |
| 46470 | PKNCRWYRT |
| 46471 | PECGDRGDR |
| 46472 | WDHEPETKH |
| 46473 | EGPDPCNSA |
| 46474 | PECFPKGRN |
| 46475 | CDHDTKHPT |
| 46476 | PADFRDTRV |
| 46477 | CEYDDESQF |
| 46478 | DDEDVSEEI |
| 46479 | HDKPGKPPY |
| 40480 | KNPPWICVW |
| 40481 | PIEKDDNVD |
| 46482 | PKMDKVEPC |
| 46483 | PDPCTEGTC |
| 46484 | ADNCPKNDN |
| 46485 | PDHITKCDE |
| 46486 | DDHDDKLVA |
| 46487 | WEDEPPWKI |
| 46488 | PQPDENYPW |
| 46489 | FDREKRDGN |
| 46490 | GNPHEGQKF |
| 46491 | PEGSMDRRF |
| 40492 | GDWSERSIT |
| 40493 | PERWERPVW |
| 46494 | NDLCQDQRV |
| 46495 | TRPDESPRQ |
| 46496 | WECADRRPT |
| 46497 | YESCNLTRD |
| 46498 | PPPVHNDRS |
| 46499 | VHPEACMRN |
| 46500 | PDQVDRNTP |
| 46501 | REPNSGLVY |
| 46502 | EEPEFTGRG |
| 46503 | TDHNGEIRP |
| 46504 | CDRDPSWRD |
| 46505 | QDRNRVHRQ |
| 46506 | IDPYDCDPT |
| 46507 | PDQDDMMHG |
| 46508 | YEYRPELRA |
| 46509 | CVPEPWDYR |
| 46510 | MDPKHHCES |
| 46511 | QDQCDDKIE |
| 46512 | MHYCDRERK |
| 46513 | PPDRCTAEK |
| 46514 | RNPSQDQKG |
| 46515 | CDTHDVSKD |
| 46516 | DVADVPDTT |
| 46517 | DEKPMDGRG |
| 46518 | PDTSPYCKS |
| 46519 | QLPDKWPKS |
| 46520 | YRCCDDSKT |
| 46521 | PAECISDSQ |
| 46522 | PDPLYWIMN |
| 46523 | LEEGDHMHM |
| 46524 | GDHEPKHEH |
| 46525 | WEVEQRPRH |
| 46526 | CECWPEYKR |
| 46527 | PFPLNPERH |
| 46528 | DVISRNGRC |
| 46529 | PNEDKIKPD |
| 46530 | YPCDDTKPE |
| 46531 | DTDEENSPH |
| 46532 | IDPGMMFRG |
| 46533 | PEQRDRLGF |
| 46534 | DEPSDDDEE |
| 46535 | HHPPKQPPN |
| 46536 | CRWEDYDSR |
| 46537 | CPPQADRIQ |
| 46538 | PQPQFDMMQ |
| 46539 | EFPDGGHKM |
| 46540 | CNCPDQHPD |
| 46541 | WPKCDECRM |
| 46542 | ADNEDARPK |
| 46543 | PICRPDTDV |
| 46544 | APCHDKDRE |
| 46545 | LDPPDSACG |
| 46546 | VETEEKMIL |
| 46547 | MEDTDERSN |
| 46548 | CDRDKRHDH |
| 46549 | GEEADEYHM |
| 46550 | RDIWECIRR |
| 46551 | AECQEDRRG |
| 46552 | TEPDTVDES |
| 46553 | PDPGIRWPM |
| 46554 | PRDVDDSAY |
| 46555 | VEEDQSCKT |
| 46556 | RQYFEDNAG |
| 46557 | YDQWERDIH |
| 46558 | RKPEWSCMV |
| 46559 | LNPQSPEPK |
| 46560 | PPCKMKIDT |
| 46561 | PNDWITDPH |
| 46562 | VERMENPKH |
| 46563 | DAPEPHAQK |
| 46564 | PQEPEEGKT |
| 46565 | HDMDDVLNH |
| 46566 | VDCTPDRRN |
| 46567 | PHQARKNKP |
| 46568 | CEDEGKTWL |
| 46569 | PFPQMNSNA |
| 46570 | ADLRPSVDY |
| 46571 | GEPWDTRIV |
| 46572 | YKPKFDAMG |
| 46573 | PDPQQGGTA |
| 45574 | MDGRDKVDP |
| 45575 | CEDQRQPME |
| 46576 | PDFHHKRDF |
| 46577 | NEGCRDEKS |
| 46578 | LQPNAVGKT |
| 46579 | PKLCSHOTE |
| 46580 | QVPDEGYSW |
| 46581 | NEPDKGYTM |
| 46582 | DLDDVCNKC |
| 46583 | QDTDEGDQC |
| 46584 | FDNPDEYVT |
| 46585 | YPDCEGGKM |
| 45586 | DVNKPDEKW |
| 45587 | EVNDDHAKP |
| 46588 | PHQRNRMDP |
| 46589 | QEPDSNRGV |
| 46590 | SLPQPDTRY |
| 46591 | FEPCPRSCW |
| 46592 | KEPKMEKRG |
| 46593 | PGDHRFYWP |
| 46594 | ADTANILRH |
| 46595 | KPCRDNQDV |
| 46596 | LPPCYCQQY |
| 46597 | PECIEGPNH |
| 46598 | HDNKDVNRN |
| 46599 | GEMTRCFRN |
| 46600 | PDKEKVMPA |
| 46601 | WNSPDDERV |
| 46602 | VDRDDGKDY |
| 46603 | DFEDELSKV |
| 46604 | YEDGDH1VE |
| 46605 | VEGEEILRI |
| 46606 | CEWLDLMRT |
| 46607 | HEAEDWRPF |
| 46608 | KMPCEGEFT |
| 46609 | GDPWEEWRK |
| 46610 | HERWDANPY |
| 46611 | PGCCDLTNI |
| 46612 | PIIKGEPAD |
| 46613 | PDTDDIIHW |
| 46614 | EDLNEKSKS |
| 46615 | EVDDGNVGE |
| 46616 | DDWNEAKRN |
| 46617 | PPDMPMSAD |
| 46618 | QNPWDTDNH |
| 46619 | PDTWAYAPH |
| 46620 | TEPEIRNWF |
| 46621 | FPSDPDGEH |
| 46622 | PPPVVSPKP |
| 46623 | FDPHNPCFR |
| 46624 | ANAEPVHRC |
| 46625 | LVPESQMHG |
| 46626 | WERCPELNQ |
| 46627 | MDEHREQRS |
| 46628 | SDPEKYPWD |
| 46629 | ERDDPRFSN |
| 46630 | FDSSQEWKL |
| 46631 | CRKNPT1HM |
| 46632 | EAEEMGLKH |
| 46633 | CKYLSHERL |
| 46634 | IDPCDELFW |
| 46635 | CKPTSDMKE |
| 46636 | RPWEWWIRK |
| 46637 | FEPQVEANT |
| 46638 | LETAEKSKS |
| 46639 | FDSCSRHRW |
| 46640 | DNTDPDGSW |
| 46641 | ADPOSVCCT |
| 46642 | PHCQTVSDI |
| 46643 | IEEPDTCLV |
| 46644 | PEMQNDMDS |
| 46645 | DHLPEDKRY |
| 46646 | QENDANRPQ |
| 46647 | KQGCEKNPM |
| 46648 | HRCDPDMGR |
| 46649 | DVPRDRKEN |
| 46650 | EDNNNDVKH |
| 46651 | IDFRPPNNT |
| 46652 | DFPDKGELG |
| 46653 | CIPDVAIMM |
| 46654 | MEDHTAPRW |
| 46655 | PENQQNHRD |
| 46656 | CRKSETPWD |
| 46657 | RIPPMMIML |
| 46658 | PQPWNQQAF |
| 46659 | CEIQGGQRY |
| 46660 | VDFHDGFND |
| 46661 | WDDHKLWRW |
| 46662 | RDPFSPDPM |
| 46663 | HLPRDDPVM |
| 46664 | SD1PPNCRK |
| 46665 | DPPRSKDDS |
| 46666 | NDPDTSRTA |
| 46667 | IDWPDNQKV |
| 46668 | YDCENILRT |
| 46669 | VEKPSEEPQ |
| 46670 | LKPLPHFRE |
| 46671 | HDEEEKNKA |
| 46672 | PHGWEENDP |
| 46673 | PLVGMDHRE |
| 46674 | HRPEQLHEG |
| 46675 | PGPHDQGPY |
| 46676 | EVEDRSGWC |
| 46677 | PEPDWVQEC |
| 45678 | CRSEGWIHT |
| 46679 | PETTSRWKW |
| 46680 | RDYQDFICY |
| 46681 | CDFQSSWDQ |
| 46682 | IECFPRESI |
| 46683 | PERASEMFW |
| 46684 | NYPRDHRQH |
| 46685 | FEAHDRPSN |
| 46686 | WEMNDMODY |
| 46687 | LDTCEMLKQ |
| 46688 | QFPEFDRET |
| 46689 | PVPHPEKEF |
| 46690 | EFDEFNTRG |
| 45691 | GDQAGATRF |
| 45692 | EPPTNDART |
| 46693 | AEVGTEHKV |
| 46694 | DDPSGQLRL |
| 46695 | EDPHSKKEH |
| 46696 | CRKEQGQRT |
| 46597 | PEAGGKSWD |
| 46598 | PWDPEEDGD |
| 46699 | ENPEMMGFE |
| 46700 | MNPNEKGGL |
| 46701 | PDAAERKGV |
| 46702 | EPPDGQVDA |
| 45703 | FDANDCRPS |
| 45704 | FRSHDREEN |
| 46705 | IKCEEPMRL |
| 46706 | FIPDTDNWG |
| 46707 | IDCRSRLEE |
| 46708 | CKEQPTERF |
| 46709 | DDMEDQQQY |
| 46710 | DKPEQLKEH |
| 46711 | PDSHKQPDC |
| 46712 | CDPSVEDRV |
| 46713 | PEGCHHQEE |
| 46714 | FDPCQGGEQ |
| 45715 | NDEDNMSRH |
| 45716 | PECLPKNSC |
| 46717 | AEDASRDLF |
| 46718 | CNPRPQMVG |
| 46719 | CDDHAKRNA |
| 46720 | MRNYPDARF |
| 46721 | DNPPGRRKP |
| 46722 | PDNSDATHQ |
| 46723 | MDCKEWNKQ |
| 46724 | GNQCELNPH |
| 46725 | PNYKKRSTV |
| 45726 | LRCCGMETE |
| 45727 | PPDMQSAKW |
| 45728 | DHPSNDAEM |
| 46729 | RIPGSRPPQ |
| 46730 | WDPNQGGAT |
| 46731 | PSCAPCLEK |
| 46732 | IDSHCKMRE |
| 46733 | CEYDGTMDT |
| 46734 | EVADENGNY |
| 46735 | PQPNIPVRW |
| 46736 | WDYNSIFPG |
| 46737 | IHSNDOPKG |
| 45738 | PHDLKHQRS |
| 45739 | PIPLMMHDE |
| 45740 | FDCLPDREH |
| 46741 | PNDWHIAYG |
| 46742 | LDTKRTFKK |
| 46743 | CDRASDEGK |
| 46744 | DDSSQEKRW |
| 46745 | PEHQDEQSC |
| 46746 | TEPETYPAT |
| 46747 | FKDWDHHTV |
| 46748 | WKTCPQEAY |
| 46749 | EEKDEQERA |
| 45750 | WPNTPWEPH |
| 45751 | CPTGDQQKW |
| 45752 | RPCMQQDPH |
| 46753 | CDAGLISKM |
| 46754 | EASDMSIEK |
| 46755 | AEPRAIWRH |
| 46756 | FHISPKEKW |
| 46757 | PIPPIKTHS |
| 46758 | PDPQNHQFV |
| 46759 | TEVEQLPRA |
| 46760 | IDPNNLTSM |
| 46761 | LGDEPWAKF |
| 46762 | LNHCDKEDH |
| 46763 | WEDHDLHRN |
| 46764 | PALYRRKTD |
| 46765 | NEDIPDPPH |
| 46766 | WEIQDVIRV |
| 46767 | PENWNTGKH |
| 46768 | PDRYPAFEM |
| 46769 | HNPWFSCRW |
| 46770 | INQKETWKF |
| 46771 | PVPYSGPKQ |
| 46772 | YEREPRMFH |
| 46773 | LDEEPVFVG |
| 46774 | PVDADHQLW |
| 46775 | RPPHVGPAL |
| 46776 | ADPTTETPH |
| 46777 | PDWWPRCKP |
| 46778 | YQPRSTPPG |
| 46779 | NNGDDRRQH |
| 46780 | REWKDNCKQ |
| 46781 | PDDWSGTLY |
| 46782 | PEVYPGGTT |
| 46783 | PKCCCKCDW |
| 46784 | PDCRWGEDN |
| 46785 | CDLPMSWRV |
| 46786 | PEDCDDRIS |
| 46787 | QDCEPEYDF |
| 46788 | DVSEDHFND |
| 46789 | PKQLDQPTN |
| 46790 | EFHDMDMVI |
| 46791 | CEHPESKDV |
| 46792 | TEHKDHFET |
| 46793 | PSNEPSVKT |
| 46794 | GEVTGHERN |
| 46795 | PNPQSHLHI |
| 46796 | CPRCDSRPA |
| 46797 | MEDNTVCSV |
| 46798 | QPPRRAMKM |
| 46799 | SLPEEHPFE |
| 46800 | ANPLFKCIS |
| 46801 | DQSEDLDQG |
| 46802 | DDPEYTLCL |
| 46803 | KFPYLPHRN |
| 46804 | PVGNKDSRY |
| 46805 | WDVDHKLRM |
| 46806 | PQHGAETPH |
| 46807 | PHREEDDHC |
| 46808 | CVPNPLGHI |
| 46809 | NDTGPHGRH |
| 46810 | DDTENLRE1 |
| 46811 | VDPWDPAQP |
| 46812 | CDPWDWEIE |
| 46813 | EQPHDPSST |
| 46814 | PVPCNTVKF |
| 46815 | KMPNELGYY |
| 46816 | KEREERRFW |
| 46817 | DFPEPYYGF |
| 46818 | QDQRRQKRM |
| 46819 | PRHTMLGPS |
| 46820 | DDREKCNWM |
| 46821 | FEQWKDQKV |
| 46822 | LRPCEGEQD |
| 46823 | CPTKPRYPS |
| 46824 | PSESKLMNY |
| 46825 | CDKNWILQQ |
| 46826 | PSPPPGHNA |
| 46827 | IKPEPNWSS |
| 46828 | PEETRHNDC |
| 46829 | DDVQVEPKW |
| 46830 | PQNGMLHYS |
| 46831 | FDSRHIEKP |
| 46832 | HEKHSLDRY |
| 46833 | ETPDDWNCY |
| 46834 | CDAEAGFRR |
| 46835 | EEFGPTKPM |
| 46836 | DVPQKAHND |
| 46837 | IHPCEGSQT |
| 46838 | VDLQQEDIY |
| 46839 | AFPDNSKTE |
| 46840 | EELASSDKY |
| 46841 | EEYTGECRG |
| 45842 | NIDDKPSMQ |
| 45843 | WPPEPWCCC |
| 45844 | IDPFCAVRI |
| 46845 | DEYCQWIRS |
| 46846 | PODEWQNRV |
| 46847 | LNPHVSQIW |
| 46848 | MDPYEVTSC |
| 46849 | WDAFEPMRY |
| 46850 | YDFSERKCF |
| 46851 | MDPNHVHAG |
| 46852 | FDCFDRNLC |
| 46853 | YDTDDAQPN |
| 46854 | WDPHKENTM |
| 45855 | RDPNAQGWT |
| 45856 | EWPHIDAGK |
| 45857 | EMDEKLDGK |
| 46858 | CQPPEEGMV |
| 46859 | PPANDVPHQ |
| 46860 | IECSPRETI |
| 46861 | VDIHKEMRV |
| 46862 | PAEHDPNQV |
| 46863 | PKPPPHYEQ |
| 46864 | PGNPENDPN |
| 46865 | DWNLEDDRA |
| 46866 | CEYWHQVRP |
| 45857 | HDPCTQIKP |
| 45858 | CQPPEEGMV |
| 45859 | PRVDNGNQL |
| 46870 | PHESCECSG |
| 46871 | ADTKRKRRT |
| 46872 | DEPRDWGAQ |
| 46873 | INEDAQEKM |
| 46874 | LNSEPKCRA |
| 46875 | PMPNTGDEE |
| 46876 | TVDEQGIQH |
| 46877 | FDGCSKMPM |
| 46878 | AEPDTIDWD |
| 45879 | DIWDTEVQE |
| 45880 | PQDLKPGNS |
| 45881 | IDRCDVLQH |
| 46882 | HDPWNVLDW |
| 46883 | EDPSCPAAQ |
| 46884 | MNTNENCRK |
| 46885 | CKHVDWDSK |
| 46886 | SEGMDRDRC |
| 46887 | YKELDRDPQ |
| 46888 | PRLQSRKYL |
| 46889 | PGLWIAPDH |
| 46890 | PYLHSKQDK |
| 46891 | PQCHDHRQD |
| 46892 | EQPTQTPFS |
| 46893 | HPPKRHIPC |
| 46894 | VDTQKTERA |
| 46895 | DVDDLVEIM |
| 46896 | CELNGKIDL |
| 46897 | EEENCEQGN |
| 46898 | DEDERTLDI |
| 46899 | YPPSQEIKT |
| 46900 | PHSEEGREI |
| 46901 | EQPECETNV |
| 46902 | PHCNDGSEP |
| 46903 | CECWGCTRG |
| 46904 | PNDFTTHGA |
| 46905 | CDTNPQDQV |
| 46906 | PRWQSEECQ |
| 46907 | VEATPKSPN |
| 46908 | PEEGSPAEY |
| 46909 | DTFQADKRY |
| 46910 | PYEKEKKKD |
| 46911 | DFYHHDDRG |
| 46912 | DTEEPVVNP |
| 46913 | PNEPNEEHK |
| 46914 | VRIYDRCEM |
| 46915 | LRCDPWLPQ |
| 46916 | LEWSEKINP |
| 46917 | VTPEETVVI |
| 46918 | PDPPKQYED |
| 46919 | HPGHDRPDF |
| 46920 | EHGHDDQHR |
| 46921 | DVENQDWAM |
| 46922 | PHSEKYAKH |
| 46923 | PDCLDEGAA |
| 46924 | QDCSDWTKF |
| 46925 | QDHENNLKT |
| 46926 | ADSQDPLQQ |
| 46927 | PLESHESEF |
| 46928 | HDDTHRIVN |
| 46929 | CNEFKHERR |
| 46930 | NEARDGEPF |
| 46931 | PQNPSEWPP |
| 46932 | CRCDTKIRE |
| 46933 | QEPLSKHGV |
| 46934 | INPEIRQIE |
| 46935 | YDLSPKMYY |
| 46936 | EVSDYQQWV |
| 46937 | RPPHKMSKE |
| 46938 | EDRCPGNPG |
| 46939 | LMPDPVQGI |
| 46940 | SIDRDHPKE |
| 46941 | ADPQVEWAM |
| 46942 | CQRQEPDRE |
| 46943 | DAMEDSKTC |
| 46944 | PDPKAWSNY |
| 46945 | PQPKQCMCW |
| 46946 | DMSDEGQKT |
| 46947 | QEPFTESKS |
| 46948 | YECDSEHEV |
| 46949 | PHGTEDWDY |
| 46950 | VRPHDVFYM |
| 46951 | FHPDKLMPM |
| 46952 | QDRRDDHGG |
| 46953 | LKLRDEFNE |
| 46954 | CEVQDEWTG |
| 46955 | EVPNNHHYT |
| 46956 | PEPSWKYRP |
| 46957 | CPWCDTQTY |
| 46958 | KDKCDYMTV |
| 46959 | CATDPIHRV |
| 46960 | CESFPGPVM |
| 46961 | PHVCGEGKI |
| 46962 | LREEELMTR |
| 46963 | WNPANMFNI |
| 46964 | CDPCMECGS |
| 46965 | LHPPPHQCP |
| 46966 | NDFSDEPCM |
| 46967 | IDPPGTESM |
| 46968 | PYPQQSHLE |
| 46969 | VRPFDDGPM |
| 46970 | TEPSKMPIW |
| 46971 | PTMKFKDRD |
| 46972 | CHSGDILDT |
| 46973 | PPKMMDNEF |
| 46974 | PSWGGREEE |
| 46975 | LDQNNGPET |
| 46976 | NETPDAWNV |
| 46977 | WEVPRWPPI |
| 46978 | FDTDQRQSE |
| 46979 | WIPCQFSKI |
| 46980 | PLDHRPHTF |
| 46981 | IWEDMKGKF |
| 46982 | WRIRPQQEI |
| 46983 | PGHFEPTNY |
| 46984 | MEPPDMQCP |
| 46985 | DVPFVNASD |
| 46986 | LRTCPVWRQ |
| 46987 | PIECMGQHW |
| 46988 | VDPSNAAFK |
| 46989 | DPPIDMSKD |
| 46990 | WKPGYGAKP |
| 46991 | CPPSETRVP |
| 46992 | MQDRDTPTI |
| 46993 | RHPEGRRVD |
| 46994 | PFKQGRENP |
| 46995 | LDVTPQPEG |
| 46996 | EVGDMAHQS |
| 46997 | PGHHPLEDH |
| 46998 | HLPVYAPKD |
| 46999 | DVEAMDFGT |
| 47000 | CTPGFWSER |
| 47001 | IDHIGDDRF |
| 47002 | PQSHKLIES |
| 47003 | CNPPCTPFN |
| 47004 | DVCDDHKPT |
| 47005 | PPPLAGWMW |
| 47006 | YDPNMFPYT |
| 47007 | IKPKDQAPL |
| 47008 | ERCHDTEKY |
| 47009 | CKKESTCAL |
| 47010 | PKPVQPHND |
| 47011 | DPELDIPEE |
| 47012 | HEDTHVLRQ |
| 47013 | ESEEHRVMS |
| 47014 | PMEEMHSHE |
| 47015 | DEEVEGMSV |
| 47016 | DEPFFAIRP |
| 47017 | YEMMPNIKY |
| 47018 | EYPENSSHF |
| 47019 | WNPGPVLTH |
| 47020 | GERNGGWRL |
| 47021 | PADIDDDGN |
| 47022 | QRWSDGDKC |
| 47023 | AKICDADQL |
| 47024 | VEPRYDDPC |
| 47025 | PSEHWGCDG |
| 47026 | RNCCGPNPY |
| 47027 | PEQMDRAHG |
| 47028 | MVPDQYQMS |
| 47029 | WVPDLEDVQ |
| 47030 | IDKITWQKH |
| 47031 | DDWTPYLNE |
| 47032 | PDQSEMTKA |
| 47033 | FHPDRRNPT |
| 47034 | QDTNETNDV |
| 47035 | WNEIDEGRW |
| 47036 | DDNQSRGCP |
| 47037 | EIQQHDNVI |
| 47038 | SPPDWWPFD |
| 47039 | MEPDMRQYS |
| 47040 | DIEFLDCET |
| 47041 | LEMQQLTKV |
| 47042 | IEELEEESH |
| 47043 | EDWRKDNNF |
| 47044 | PDMKDFKQE |
| 47045 | WPWKPPYSD |
| 47046 | LQPDRECIG |
| 47047 | WDMMFPCKW |
| 47048 | PHDPGECYP |
| 47049 | PQDHMVNMQ |
| 47050 | DNDEQLGGC |
| 47051 | CKPHQQRIH |
| 47052 | GDMNVWVRY |
| 47053 | CEGAAWPQI |
| 47054 | SVDDFSSHV |
| 47055 | VIPESMNHA |
| 47056 | DDPCMRCNV |
| 47057 | KKPWDDHTR |
| 47058 | SWPQGDYRF |
| 47059 | PVCPMKQRS |
| 47060 | DGEEDWMDP |
| 47061 | MESEESVKP |
| 47062 | QDTESKFRD |
| 47063 | DDMDLEIKH |
| 47064 | ENPSNWHDW |
| 47065 | HHVSMDNKH |
| 47066 | NRDWFEWKM |
| 47067 | CQPESVWHP |
| 47068 | PPCGKGTLC |
| 47069 | PYMLCNSRS |
| 47070 | GEPEAKGNG |
| 47071 | VNLDEMPKA |
| 47072 | ADRCEQEVL |
| 47073 | VNPGQESGE |
| 47074 | CMPDEMTWS |
| 47075 | ENHENCDQD |
| 47076 | MDDMDRRNS |
| 47077 | MDWCEYHRS |
| 47078 | PDHERVEYC |
| 47079 | IRPIICRKG |
| 47080 | PPEHCEHTQ |
| 47081 | LEPPGLDSM |
| 47082 | LKTCPEGNT |
| 47083 | WDKCAWAWD |
| 47084 | MRVCDELEP |
| 47085 | MRHDPFHRR |
| 47086 | LVPDDRLWD |
| 47087 | VWDDKSEAE |
| 47088 | VNPCSIMKA |
| 47089 | GPDEEWNIQ |
| 47090 | PMDEFGHYV |
| 47091 | PGEENEPPA |
| 47092 | ENDEASICM |
| 47093 | PSRTEGDKM |
| 47094 | PDRQQPMQH |
| 47095 | PNQLDKPAM |
| 47096 | EHPNDKIAI |
| 47097 | CNMATSNRS |
| 47098 | PWPDHQRAC |
| 47099 | WPDSRNSPN |
| 47100 | FDDRKRDAR |
| 47101 | LYCEADRKI |
| 47102 | PNENKGQGF |
| 47103 | TYPDVCIGW |
| 47104 | PQQQEGGTE |
| 47105 | PPNFKIYKE |
| 47106 | LPAGDEKGE |
| 47107 | REPLVTEGG |
| 47108 | LCDEGDMPS |
| 47109 | TEDFENHDG |
| 47110 | NEPQSPVGY |
| 47111 | WDGIDRQNT |
| 47112 | MKVTDKLDD |
| 47113 | QDETDEWQR |
| 47114 | QEFIGEERT |
| 47115 | QDDIDLASW |
| 47116 | PTDAALHGN |
| 47117 | PTINDWKTK |
| 47118 | PMDHEKRYH |
| 47119 | YKCDDNFIP |
| 47120 | RDSNCHFDK |
| 47121 | YNDFNRGEW |
| 47122 | PCDQTLIWQ |
| 47123 | DFGCKDEST |
| 47124 | CNLCTHAKC |
| 47125 | ANPDSSVMH |
| 47126 | FRDGDAAEE |
| 47127 | PFPCQQDIF |
| 47128 | VKNAERPRE |
| 47129 | CDFCRQFIK |
| 47130 | PDTSNKTFH |
| 47131 | HERCSELEY |
| 47132 | TDANRLCRK |
| 47133 | PNGCDRSGG |
| 47134 | LESDSFDRD |
| 47135 | PDLQKRQGA |
| 47136 | YEYWPDVSW |
| 47137 | CPWWDFAEC |
| 47138 | DQKDVKGKM |
| 47139 | YELCPLPQH |
| 47140 | DVEDCLICC |
| 47141 | IMPEKMHTD |
| 47142 | PHAEDRDNN |
| 47143 | TVPDVRDCQ |
| 47144 | EQHRDTMRP |
| 47145 | CVMPHNHRL |
| 47146 | PQEDEGVRQ |
| 47147 | SQPNPEENW |
| 47148 | PIDGNSHKD |
| 47149 | PGEPADEKT |
| 47150 | PDHWECIHD |
| 47151 | QQPPLAPDV |
| 47152 | YNPQNHVEG |
| 47153 | GDNAKDFRG |
| 47154 | FNVSWENKP |
| 47155 | PERLNGPTP |
| 47156 | FDPHRCSCH |
| 47157 | DRLRDDYPC |
| 47158 | VSEDDESHQ |
| 47159 | FESTQEPIA |
| 47160 | CKNFPMKNN |
| 47161 | PVPMSHEMQ |
| 47162 | HNGIEKTRE |
| 47163 | KDPCADRWA |
| 47164 | EVVDNMRSQ |
| 47165 | ADYKDWAEH |
| 47166 | PRNLPAYHS |
| 47167 | PMSQICCDM |
| 47168 | YDCWAKEAT |
| 47169 | ENPEVWIEQ |
| 47170 | IERWGVIDV |
| 47171 | DADDRVEAT |
| 47172 | CKDRPEIDC |
| 47173 | NGDDHVFRE |
| 47174 | DYIRIFDRH |
| 47175 | QDHEREEYK |
| 47176 | AEAKERFEM |
| 47177 | PDDEKIEHP |
| 47178 | MNPAVEKGM |
| 47179 | CDPQYDQED |
| 47180 | YEAHSDDRK |
| 47181 | MDPCEEPGR |
| 47182 | CODEDEAMQ |
| 47183 | PEAQDKVWS |
| 47184 | PRLTDIREV |
| 47185 | VPPFLDIRD |
| 47186 | PEHPDPFSQ |
| 47187 | YWCLDDPRD |
| 47188 | ERVEDGMDH |
| 47189 | RDYAPLLID |
| 47190 | QVPEIQSMP |
| 47191 | PRNGPYCDE |
| 47192 | CDNGEDDHH |
| 47193 | PFDTMDYRS |
| 47194 | PNTHPEYSK |
| 47195 | WNREDKRAQ |
| 47196 | PDWCQDPGM |
| 47197 | PQQPHWCDG |
| 47198 | PPDPPGDNV |
| 47199 | SPPNLRAFP |
| 47200 | GEEDEQSNH |
| 47201 | CHPTHQIRC |
| 47202 | PFPYHLEVC |
| 47203 | PNNQARGQC |
| 47204 | KNPTWVMSD |
| 47205 | YRHEEYWHN |
| 47206 | LEHENGTPQ |
| 47207 | QDPHAHRDD |
| 47208 | VDLCRKQVK |
| 47209 | PYWCDWPNG |
| 47210 | YPCQNHWRT |
| 47211 | MIPCHDRTY |
| 47212 | QPADPPNDS |
| 47213 | PKHADALRM |
| 47214 | LEPCTDEFG |
| 47215 | PDCDPAHHD |
| 47216 | CRPQAIWLH |
| 47217 | HEEIPQQPK |
| 47218 | CEDLNKPMM |
| 47219 | HNPSGPEFS |
| 47220 | GDFIPKQEV |
| 47221 | CKTQERANS |
| 47222 | SDDDREREA |
| 47223 | FEPVSGETP |
| 47224 | PHSDSWCDR |
| 47225 | WHKRDDKTQ |
| 47226 | PYPPMWRGM |
| 47227 | IEDVWECPY |
| 47228 | DYDWSDMKC |
| 47229 | IEMHEKKEE |
| 47230 | CEPRDCNFY |
| 47231 | PTMRESMES |
| 47232 | EVPFKTSTT |
| 47233 | VSPHKTSRN |
| 47234 | ADHCNWSRT |
| 47235 | SDHDNVFED |
| 47236 | SRPGDRGVQ |
| 47237 | QEPDSYACM |
| 47238 | DEECQRVPM |
| 47239 | VDNMSEGRQ |
| 47240 | EQEHDEEKP |
| 47241 | PEFGWWIAM |
| 47242 | PDELMGWQQ |
| 47243 | CECAGWSYE |
| 47244 | MEPFHVNKV |
| 47245 | HKDWHDADL |
| 47246 | PCNCDSWQN |
| 47247 | NEDWEAPEG |
| 47248 | PIEAMHDGW |
| 47249 | MIPQSEERW |
| 47250 | YKTGDEYGL |
| 47251 | PLDKEPMER |
| 47252 | HEDHDPAQE |
| 47253 | GNQDRTNRK |
| 47254 | CQTRDTLEL |
| 47255 | EADEQKTRW |
| 47256 | TEADEEWDT |
| 47257 | GDKWIGCEL |
| 47258 | ECDCRDTPC |
| 47259 | VQPQQMHKT |
| 47260 | PKCCSGMTT |
| 47261 | YNPFYGADM |
| 47262 | CPWCDMKPW |
| 47263 | KDRDTCRAD |
| 47264 | SELTNWVRW |
| 47265 | YNPAACVEL |
| 47266 | CVMPTIYRG |
| 47267 | EIKPYDARN |
| 47268 | EFSGHDEPD |
| 47269 | VDIKPKGAI |
| 47270 | MEQWDPDEW |
| 47271 | VEVTPGFKF |
| 47272 | PPNLCWNQH |
| 47273 | SRVKDCHKA |
| 47274 | ENEKPRTRC |
| 47275 | PHDWSPEFA |
| 47276 | PHQGDREGF |
| 47277 | IESDDIRTQ |
| 47278 | HDDPPGGGF |
| 47279 | EIQDLLCKA |
| 47280 | CVEDHWLHI |
| 47281 | HIAEPKNKP |
| 47282 | HEWKCEKRV |
| 47283 | YEATPHGRQ |
| 47284 | YPPNEHWQC |
| 47285 | LNPAGKIWD |
| 47286 | PEVGSPYPS |
| 47287 | IERHEHNPY |
| 47288 | HDPPKLGCM |
| 47289 | NDDCEESQK |
| 47290 | PVVERFNDP |
| 47291 | PFEEYEQTD |
| 47292 | VRPEKQRVG |
| 47293 | YSDEQGICQ |
| 47294 | HNVPDVRRN |
| 47295 | EADERSKEQ |
| 47296 | PYIWQAMHR |
| 47297 | KDHIAEHRL |
| 47298 | AKPKCPPEG |
| 47299 | DDDIGADSV |
| 47300 | DDPFENIGV |
| 47301 | WDGRTNDKA |
| 47302 | EGDDCMWCR |
| 47303 | VNRRRRDEM |
| 47304 | TEVDDKICY |
| 47305 | EHGDEMHPP |
| 47306 | LEKFPYQPL |
| 47307 | FDEMHTCYD |
| 47308 | KCPDEMNNI |
| 47309 | IDTGDWLVG |
| 47310 | PVPCCHYDP |
| 47311 | PGTEDYSRW |
| 47312 | LNYQPCCRI |
| 47313 | PAEEYHSRE |
| 47314 | PEELYLYRK |
| 47315 | MDVSDQWPE |
| 47316 | WFPDHMSGI |
| 47317 | CPPPSHHID |
| 47318 | LPPMKQDEE |
| 47319 | WRPCAYCQT |
| 47320 | CDDNGCTRD |
| 47321 | RYPEPDAQV |
| 47322 | QVPIMDDFF |
| 47323 | PKLPEYTDS |
| 47324 | MNSEPVTET |
| 47325 | HVPENFVQC |
| 47326 | PDRCHSGDW |
| 47327 | YPPPPNQHH |
| 47328 | IFPYTDKFI |
| 47329 | PGDCYWLER |
| 47330 | HEHRPYFRV |
| 47331 | DLFNHDSPH |
| 47332 | YDDNNWGSA |
| 47333 | HDSGPTFDM |
| 47334 | EIDLEDAQK |
| 47335 | PQEDKQCKP |
| 47336 | DVVHLDWKE |
| 47337 | IVPCLWPIP |
| 47338 | WEPVNAAMA |
| 47339 | QEPLRC1PG |
| 47340 | GNCEPSEPE |
| 47341 | DNVNNKQKG |
| 47342 | PDWFKADDT |
| 47343 | KHPAELDAA |
| 47344 | PTGHQRGTF |
| 47345 | WENEEDKVT |
| 47346 | QNWYDKLPT |
| 47347 | SDARECDIM |
| 47348 | QDSQDQQQW |
| 47349 | DNCDAGKWD |
| 47350 | VKDLADPPG |
| 47351 | PSAPNMWKQ |
| 47352 | ENEETWIFY |
| 47353 | WDNMDQTQG |
| 47354 | EYPCSKMRY |
| 47355 | QCDNESDSM |
| 47356 | SDPDIACVH |
| 47357 | HDDQMHCSS |
| 47358 | CEEETIEQS |
| 47359 | HRAQDPQQF |
| 47350 | HRTDEPTQN |
| 47351 | DVGTGDDRQ |
| 47362 | VDACSHNRS |
| 47363 | FDHQNWFEQ |
| 47364 | VNCPDQHDV |
| 47365 | CDMAHMLPV |
| 47365 | CDMAHMLPV |
| 47367 | YENKTDMKF |
| 47368 | EYPDNQWSQ |
| 47369 | CDWPIENRA |
| 47370 | VDHVKRCPV |
| 47371 | WRTSDKYER |
| 47372 | PK1QRVTET |
| 47373 | LDDWMMPVS |
| 47374 | HYPRNLVEE |
| 47375 | NEFQEDKSV |
| 47376 | DRGQDNHRI |
| 47377 | PFNDGGIIE |
| 47378 | CYPCLQDKG |
| 47379 | CTPNHCGGK |
| 47380 | SDTEKMHQQ |
| 47381 | GPCCPKYNC |
| 47382 | TLPADKPKG |
| 47383 | FTEEDEIRE |
| 47384 | PDFQKVVSH |
| 47385 | CNPDHMYCQ |
| 47386 | HETCGENVC |
| 47387 | WELAQKHKP |
| 47388 | YYNEPKAKG |
| 47389 | CKTDEFDNH |
| 47390 | KRPEICEWG |
| 47391 | LDPPNSHVN |
| 47392 | PHDNHRHGL |
| 47393 | PIVDWKRQD |
| 47394 | YRDMPGQHN |
| 47395 | YYPMADPSC |
| 47396 | PVNHKDQMT |
| 47397 | EYEWVDEPQ |
| 47398 | PYPGGAVRA |
| 47399 | RKPWVASRV |
| 47400 | NDPWTPISY |
| 47401 | YRFGPFEQE |
| 47402 | RRLPDFDDV |
| 47403 | QPPESMVQL |
| 47404 | DEWTNKRNS |
| 47405 | CRFTDDSSV |
| 47406 | PWNLPWRPG |
| 47407 | YESNTKSDV |
| 47408 | IEQEDQGYH |
| 47409 | EVLDDMKWN |
| 47410 | FNPMVYAHK |
| 47411 | QVDEWGGHE |
| 47412 | PMLQSRGWN |
| 47413 | PYACHHPDF |
| 47414 | PHTNRECDC |
| 47415 | WYDDDLLAN |
| 47416 | PPGCGWYDN |
| 47417 | WQPTHPARF |
| 47418 | EWDDPYGWE |
| 47419 | DCWWFGWQT |
| 47420 | KHPDQWTMT |
| 47421 | YIDRDDSEE |
| 47422 | VDYRTTVKS |
| 47423 | CDDERMDQP |
| 47424 | GVPIIEPRV |
| 47425 | WPKGTKDEA |
| 47426 | DRVHPDHLY |
| 47427 | NEQHNRDQQ |
| 47428 | QEPKETLMI |
| 47429 | KRWMEVDTY |
| 47430 | LNNKDPPPV |
| 47431 | FPHPDSSKH |
| 47432 | PDHSRLEYP |
| 47433 | LEPEQLDMF |
| 47434 | WPPCHETQL |
| 47435 | CPLRDDDPA |
| 47436 | EDENMKSTN |
| 47437 | PTEPDEQYA |

### Example 22

### AAV5 Variants with Skeletal or Cardiac Muscle Tissue Tropism as Identified by Machine Learning

[0952] This example describes preferred properties of engineered AAV5 variants that display skeletal muscle tissue tropism or cardiac muscle tissue tropism as identified by machine learning methods. The same bioinformatics pre-process, machine learning methods, and analyses as described in EXAMPLE 19 and FIGS. 19-FIG. 22 were carried out to identify preferred properties of engineered AAV5 variants that display skeletal muscle tissue tropism or cardiac muscle tissue tropism. FIG. 29 shows a set of top 20 positional features contributing to model output probability. Shapley Additive Explanations (SHAP) values can be used to interrogate the relative contribution of features to model predictions. As shown in FIGS. 30A-B, these features were further compared between tissue targeting and non-targeting variants. FIGS. 30A-B show a comparison of top predictive features positionally. Features were selected if they were found to be important to both the HGB & RF models. Summaries are shown of the features in the top 1000 ML-predicted skeletal muscle or cardiac muscle variants compared to random 2% muscle variants.

[0953] Favored biophysical properties and favored amino acid residues at each position in the 581 to 589 region of an AAV5 VP1 capsid polypeptide, which are associated with a higher probability of skeletal muscle tissue tropism or cardiac muscle tissue tropism are described below. Any of the below machine learning-derived positional amino acid preferences described in TABLE 44. Listed below in TABLE 44 are a summary of positional features shared between the top 30 important features for skeletal muscle tissue tropism or cardiac muscle tissue tropism extracted from two ML models (HGB & RF).

TABLE 44
Machine Learning-Derived Skeletal Muscle Tissue
Tropism or Cardiac Muscle Tissue Tropism Rules

Low solubility at position Xaa1
Xaa1 is selected from D, E, R, K, P, N, or Q
Low hydropathy at position Xaa1
Xaa1 is selected from D, E, R, K, Q, N, Y, or P
High surface accessibility at position Xaa1
Xaa1 is selected from E, R, or K
High hydropathy at position Xaa2
Xaa2 is selected from V, I, F, L, or C
Low mutability at position Xaa2
Xaa2 is selected from R, V, I, H, or C
Medium volume at position Xaa2
Xaa2 is selected from E, V, or Q
Low solubility at position Xaa3
Xaa3 is selected from D, R, or Q
Low solubility at position Xaa4
Xaa4 is selected from D, E, P, or N
Low charge at position Xaa4
Xaa4 is selected from D, or E
Low amino acid solubility at position Xaa5
Xaa5 is selected from D, E, R, K, N, or Q
Low solubility at position Xaa8
Xaa8 is selected from D, E, K, P, or N
High flexibility index at position Xaa8
Xaa8 is selected from Q, S, P, E, or D
High surface accessibility at position Xaa8
Xaa8 is selected from S, D, P, N, E, R, or K

[0954] TABLE 45 below provides sequences of the 581 to 589 region for variant AAV VP1 capsid polypeptides that exhibited skeletal tissue tropism or muscle tissue tropism and comport to one or more of the rules provided in TABLE 44. The present disclosure, thus, provides for rAAVs composed of engineered AAV5 VP1 capsid polypeptides having a SEQ ID NO: 2, wherein the Xaa1 to Xaa9 region is any one of SEQ ID NO: 25118-SEQ ID NO: 26117, as disclosed in TABLE 45. Also encompassed herein are rAAVs composed of engineered AAV5 VP2 capsid polypeptides and engineered AAV5 VP3 capsid polypeptides having the sequences disclosed in the below table at the regions in AAV5 VP2 (amin acid residues 445 to 453) and AAV5 VP3 (amino acid residues 389-397) corresponding to the amino acids in the AAV5 VP1 581 to 589 region.

TABLE 45
Sequences of the 581 to 589 Region in AAV5 VP1
Capsid Polypeptide that Drive Skeletal Tissue
Tropism or Muscle Tissue Tropism

| SEQ | |
|---|---|
| ID | 581-589 |
| NO | Sequence |
| 25118 | RDQCRMEAG |
| 25119 | EEREFRASN |
| 25120 | DVCDDHKPT |
| 25121 | EVREQCEID |
| 25122 | WERCLELNP |
| 25123 | PVMCVWHDN |
| 25124 | CWECCPDSG |
| 25125 | TGCNHNGRF |
| 25126 | PVICVWHDS |
| 25127 | RDQCRMEYG |
| 25128 | KGNPLDGDK |
| 25129 | EINEFRASN |
| 25130 | YSDAKNMSI |
| 25131 | DLLVATEWF |
| 25132 | PYGTIEYDE |
| 25133 | FPKVSECNW |
| 25134 | TQHEDHWLA |
| 25135 | NGVGRPGDN |
| 25136 | AADIFALND |
| 25137 | EDNIQIMME |
| 25138 | AVCDDHKPN |
| 25139 | TQPEDHWLS |
| 25140 | FPKGSEGNW |
| 25141 | WEQCLELNQ |
| 25142 | TYEALQNSW |
| 25143 | WERCMELNQ |
| 25144 | RYQCRMESG |
| 25145 | SGDWDFGAW |
| 25146 | DLEVATAWF |
| 25147 | VFKPLDNRY |
| 25148 | DSYTDSWSI |
| 25149 | PFACDRYEV |
| 25150 | SGDLDFGEW |
| 25151 | KDGRNPDCL |
| 25152 | DLSVATEWF |
| 25153 | SADIFAIND |
| 25154 | CWACCTDSG |
| 25155 | CWECYTDSG |
| 25156 | YKGMEKDPV |
| 25157 | TYESLOTSW |
| 25158 | QTNEEEYGN |
| 25159 | YYNHKIVEQ |
| 25160 | CWEGCTDSG |
| 25161 | AADEFAINA |
| 25162 | PYGPEEYDA |
| 25163 | EAGCKVWPT |
| 25164 | EFGCMYWGY |
| 25165 | DVAPMHQVA |
| 25166 | EVLIQCKED |
| 25167 | NKMEIFDSW |
| 25168 | DVADVPDTT |
| 25169 | HTIMEWSPT |
| 25170 | CGECCTDSG |
| 25171 | DVTTTSWIE |
| 25172 | ECGCMYWCY |
| 25173 | GNEDCNLAF |
| 25174 | HHFNVNLDE |
| 25175 | TQTEDHWLA |
| 25176 | ECGCMYWGC |
| 25177 | YSDPKNMYI |
| 25178 | EIHMFGPSE |
| 25179 | EAMPFRENQ |
| 25180 | YSDPMNMSE |
| 25181 | DLEVATELF |
| 25182 | KEFVQWAAA |
| 25183 | ASDMQFWSM |
| 25184 | DTSDLQVMK |
| 25185 | EVYKNDDGN |
| 25186 | NIDEMNCNA |
| 25187 | YKGMEKTPV |
| 25188 | NTVEKMQTL |
| 25189 | ESYPKLTQF |
| 25190 | RDAWKWKRY |
| 25191 | TIDDKQSWA |
| 25192 | ATMDGHMSM |
| 25193 | WGRCLELNQ |
| 25194 | CQMLCRTPV |
| 25195 | VFKTLDKRY |
| 25196 | EMAELWDTG |
| 25197 | EISSSNLDP |
| 25198 | DLIVATEGF |
| 25199 | FCDPAHHYE |
| 25200 | VMDEYEANP |
| 25201 | ETSEHNRMP |
| 25202 | ECGCMYWGS |
| 25203 | PYGLIEYDE |
| 25204 | EIAGNDTYM |
| 25205 | VDRLFRVEY |
| 25206 | PTEPDEQYA |
| 25207 | SVDQDQPGN |
| 25208 | GWECCTDSG |
| 25209 | SGDWDFGEG |
| 25210 | DMENPNAGP |
| 25211 | VFKPLDKRS |
| 25212 | DVIPRDGAE |
| 25213 | PVICVWHGN |
| 25214 | ITAEVTWQE |
| 25215 | IRTWGCKKQ |
| 25216 | GSHWYDCNP |
| 25217 | RLTEDMSDM |
| 25218 | FDWMANVSV |
| 25219 | THESLQNSW |
| 25220 | FQMLCRPPV |
| 25221 | EIHMVGQSE |
| 25222 | ETADRIHWI |
| 25223 | PYGPIEYYE |
| 25224 | CDHVTKNPT |
| 25225 | EVHTKDEHM |
| 25226 | TVCNHHGRF |
| 25227 | QGDYSWWRY |
| 25228 | GTLDVPTMF |
| 25229 | SVICVWHDN |
| 25230 | HVDITDNDM |
| 25231 | CDHATKHPT |
| 25232 | TYEYLQNSW |
| 25233 | ATSEIQPFV |
| 25234 | EVIEGCPMG |
| 25235 | DNVDLDIQH |
| 25236 | NVLGFDDGG |
| 25237 | SNVMATQNW |
| 25238 | QVTDNAAGM |
| 25239 | AKYLPGLYY |
| 25240 | HNCPWDQQY |
| 25241 | CWECCTYSG |
| 25242 | WNTIMTVES |
| 25243 | PQYVHNWRQ |
| 25244 | HTGMEWSPT |
| 25245 | WDYSMAKKD |
| 25246 | WKHCEREIN |
| 25247 | SIFDYDTFQ |
| 25248 | QTNGEEDGN |
| 25249 | EAALENVNM |
| 25250 | WQKPINCEC |
| 25251 | EIRMFGQSE |
| 25252 | DALEWPMPP |
| 25253 | DIAPDWKGE |
| 25254 | TKMNIFDSW |
| 25255 | MVRPTDQPA |
| 25256 | ITEDQARSC |
| 25257 | IEYWEHETK |
| 25258 | TIVEDAPLA |
| 25259 | YKEMPTILC |
| 25260 | TVLEDSMWA |
| 25261 | AVCDWLIAE |
| 25262 | PSSCDWIPV |
| 25263 | LSTELHHFG |
| 25264 | CTEGENDEH |
| 25265 | PMPDGMFGI |
| 25266 | CTVDGLHFH |
| 25267 | DNYMQLNGV |
| 25268 | DVDGEHEVY |
| 25269 | EVQHELASG |
| 25270 | FTGDFATFA |
| 25271 | TTDQQCTGP |
| 25272 | ESVEKSISN |
| 25273 | AMGEEINYQ |
| 25274 | VAGDIEWYG |
| 25275 | DTQPDTLNP |
| 25276 | AITDDNRMQ |
| 25277 | TNDQQCTGH |
| 25278 | VCEELDREW |
| 25279 | GNGYWMCMS |
| 25280 | HQYVHTWRQ |
| 25281 | SYHMFDYGE |
| 25282 | CMHDEMQTS |
| 25283 | DFNSIDHSG |
| 25284 | DASERNRWQ |
| 25285 | RHNPHDACE |
| 25286 | QYVDQENCN |
| 25287 | DASPQCDRD |
| 25288 | EIKPAAEIT |
| 25289 | DALTRVDGD |
| 25290 | DYQWPDVEE |
| 25291 | DIVENDSLQ |
| 25292 | VIVESEEYM |
| 25293 | GFVDKMVMD |
| 25294 | IVHEWEVNH |
| 25295 | EVMQPEASV |
| 25296 | QTLDKWDGP |
| 25297 | DTFMMQSAH |
| 25298 | DAIPWWWSY |
| 25299 | WERCLVLNQ |
| 25300 | NVEEGMAAD |
| 25301 | EAGPWKRDV |
| 25302 | TIHDVAMMD |
| 25303 | MNLQIGGKG |
| 25304 | NNVRQVGNT |
| 25305 | QFPGGDDEG |
| 25306 | VYVEMIGWY |
| 25307 | TVEHTNHDA |
| 25308 | HQYVHDWRQ |
| 25309 | NLIVATEWF |
| 25310 | MLMHADMTP |
| 25311 | DSSESLNQN |
| 25312 | KCEFYQFCQ |
| 25313 | EVCSQWTQF |
| 25314 | MIDEVWHHW |
| 25315 | PNMPHAEDQ |
| 25316 | TFDDFDMCA |
| 25317 | PWQQHRKMS |
| 25318 | GDPWEEWRK |
| 25319 | EQLEDNDMQ |
| 25320 | MIHSQDMFE |
| 25321 | QVFHQDDVN |
| 25322 | HYKYDANRK |
| 25323 | DMMNIEKMG |
| 25324 | WEHCYRVSW |
| 25325 | DILFWEDDD |
| 25326 | MTDEHLQYT |
| 25327 | LSVDRDYFL |
| 25328 | DVQQIHNKE |
| 25329 | MITNNCNIP |
| 25330 | NISWNESHD |
| 25331 | ETVHPSASN |
| 25332 | TKMIIFDAW |
| 25333 | IIAQWDQVN |
| 25334 | TADDFQGDE |
| 25335 | SQERMAYDG |
| 25336 | EAMQDHTDC |
| 25337 | CDWMANVAV |
| 25338 | DVKPVQKDW |
| 25339 | ANEYQYDTM |
| 25340 | MVVDRMLGW |
| 25341 | MVVEYLTAG |
| 25342 | MPAYSKLKW |
| 25343 | AHEEDEAMQ |
| 25344 | ETRPTVAIQ |
| 25345 | VDNMSEGRQ |
| 25346 | SQESMDYDG |
| 25347 | CVDDLASSF |
| 25348 | EVKPSMRDD |
| 25349 | LCSQPIPEP |
| 25350 | ETRPGMSDS |
| 25351 | ETSFKIHEH |
| 25352 | DTVEGGYIQ |
| 25353 | YYEHPINKK |
| 25354 | SIDWINQQG |
| 25355 | EITPYAKWP |
| 25356 | EMCERNAGI |
| 25357 | DVCINPWYT |
| 25358 | NDYFRVYRK |
| 25359 | SQEHMDYDG |
| 25360 | LGPWPQTDQ |
| 25361 | AGEFVQANW |
| 25362 | TVKPHDNTE |
| 25363 | QDEMMMACI |
| 25364 | VTWEDVYIN |
| 25365 | NVHESDTMF |
| 25366 | NIAGYEWWM |
| 25367 | WLLGMWNTG |
| 25368 | VINPHDRSV |
| 25369 | TVIPYEMFD |
| 25370 | PSTNLTDSA |
| 25371 | SVYDDFTST |
| 25372 | NIHGVNLQG |
| 25373 | DWEKVPCMK |
| 25374 | TQQVADYTK |
| 25375 | FIGSSDKQS |
| 25376 | CLDELVEED |
| 25377 | ATLDLDSHA |
| 25378 | DTQQEQSQC |
| 25379 | TAEIFAVND |
| 25380 | DVVFNLWAP |
| 25381 | GSMSSTVPH |
| 25382 | NVVMLDQSY |
| 25383 | QQDMIVTKQ |
| 25384 | DFMFLISTH |
| 25385 | FQVDTFMFE |
| 25386 | IFEWGDATY |
| 25387 | LPPGIEWEH |
| 25388 | MDRLAEFKD |
| 25389 | DTVVKNMYH |
| 25390 | EQIPVTWTT |
| 25391 | WHMMSRDGN |
| 25392 | STEEGKGWF |
| 25393 | DVMMALATQ |
| 25394 | SAEPQDANV |
| 25395 | SVTMDEEAH |
| 25396 | AVPTSQAEY |
| 25397 | PCAMHNWCC |
| 25398 | EVYVESQNE |
| 25399 | CIDTYDIDS |
| 25400 | SNMELYCRV |
| 25401 | GTHEHEYGA |
| 25402 | DTLPVQVYQ |
| 25403 | NIFDTNVLT |
| 25404 | VSEDKEAIS |
| 25405 | VMHDIPNFF |
| 25406 | ETMSRHEGM |
| 25407 | ATEIDHWQW |
| 25408 | LSMDVTMAG |
| 25409 | AIHWMDWCQ |
| 25410 | TVHFESEET |
| 25411 | EMAGPFVTT |
| 25412 | DIHVNNFWN |
| 25413 | EKQMDGINH |
| 25414 | QEDGDFSTF |
| 25415 | EITQTYDHL |
| 25416 | AHSEIMCDQ |
| 25417 | VTKLAEDVY |
| 25418 | PEFMWCVPW |
| 25419 | DTTTDMWVA |
| 25420 | DVFIENQHW |
| 25421 | NVSLQSIHK |
| 25422 | ESGMEQISQ |
| 25423 | PNGCYTDCE |
| 25424 | AVKEFHDCF |
| 25425 | WVADHGDGS |
| 25426 | EIGMTQPCT |
| 25427 | WLYTSNFKD |
| 25428 | DDMEDQQQY |
| 25429 | EATTTSEKD |
| 25430 | QTQDTMNLH |
| 25431 | QVHHNNVDM |
| 25432 | SVVLCNLCQ |
| 25433 | DAPDFMTFC |
| 25434 | FPRIEGQGE |
| 25435 | POLFKGPVE |
| 25436 | TTEWLDFDA |
| 25437 | FEWVDWGYV |
| 25438 | MRNYPDARF |
| 25439 | EIGSCPEWC |
| 25440 | DNPPGRRKP |
| 25441 | TTTDSPMHF |
| 25442 | SCDESEAYY |
| 25443 | WEHVLDYAK |
| 25444 | DASFVDODE |
| 25445 | GVNEAEFTI |
| 25446 | MIEVTSHST |
| 25447 | AVQHTEFNL |
| 25448 | DIQGMLEAA |
| 25449 | DVVMTAMDY |
| 25450 | FKDWDHHTV |
| 25451 | NVEHNNMGA |
| 25452 | HVHEIMEEE |
| 25453 | SVMTNDDID |
| 25454 | GPIEFGWQI |
| 25455 | EFANTEHTS |
| 25456 | VTEDMIMNT |
| 25457 | SQISVEFNC |
| 25458 | EFWSRAWSD |
| 25459 | DADELRSAK |
| 25460 | EMRTYNKDY |
| 25461 | SSTELFQAG |
| 25462 | TEPETYPAT |
| 25463 | VMDDESHRG |
| 25464 | DACEEGSSM |
| 25465 | WYTQDIEKE |
| 25466 | IGDHDCQEQ |
| 25467 | DVGNTYNHW |
| 25468 | QSYTTMYQC |
| 25469 | ISGEIDYME |
| 25470 | ACCEFELTQ |
| 25471 | TANEWETME |
| 25472 | AEKMDEIWK |
| 25473 | VTKPKWSNF |
| 25474 | VVVLSDFGE |
| 25475 | GSHWYDYNQ |
| 25476 | GMYESNQGS |
| 25477 | DVDCVWHEE |
| 25478 | LVYDPHFTS |
| 25479 | NDVDLWHVD |
| 25480 | AVEYAGWEK |
| 25481 | FYQADIGWA |
| 25482 | NTEAEDHQD |
| 25483 | RCDCKVHEF |
| 25484 | HLPCGWPAV |
| 25485 | IPVHFDWFF |
| 25486 | NVEGIVTAC |
| 25487 | DVGNMAAIE |
| 25488 | ETLQAQHCD |
| 25489 | NTADIHMKE |
| 25490 | SPLEVWTPA |
| 25491 | KFVWDTWAW |
| 25492 | KCFLCGSTI |
| 25493 | WECADRRPT |
| 25494 | VIDDYFQMC |
| 25495 | GATCTIVRY |
| 25496 | TIDCYAAMD |
| 25497 | PYCQQAANW |
| 25498 | MVYEATELD |
| 25499 | MTVDLYEVL |
| 25500 | EVDKGLAQA |
| 25501 | DSELLPEAH |
| 25502 | AVYDHAPQN |
| 25503 | WHHTHSHNC |
| 25504 | DIMPQWAFM |
| 25505 | DIRHYNISR |
| 25506 | VTLDGNRMG |
| 25507 | IIETQCQAI |
| 25508 | EASHIFTGE |
| 25509 | QIAEACAQH |
| 25510 | ETTCNMGAK |
| 25511 | VFDMTNLRV |
| 25512 | LSPWHQTDQ |
| 25513 | ECSHQDRSN |
| 25514 | TMMDAEVGL |
| 25515 | YLTELIQKT |
| 25516 | EIVELRQTR |
| 25517 | FPMVWFVLF |
| 25518 | SNEWPTMIH |
| 25519 | QISEHAGRS |
| 25520 | VVQEKSINW |
| 25521 | DAQPQRNGS |
| 25522 | EVWTSCMTP |
| 25523 | EATNFTIGR |
| 25524 | VTEPHSFTV |
| 25525 | LHEVQTILH |
| 25526 | EVVTQMEHL |
| 25527 | WRVWQNLPQ |
| 25528 | TSEYMATGE |
| 25529 | KDWRFEDEK |
| 25530 | IQAEQMSGC |
| 25531 | DAKNWLDKN |
| 25532 | MPNFAWEAQ |
| 25533 | DLLNYGMFH |
| 25534 | EQPFDEFKA |
| 25535 | HATGLVNVM |
| 25536 | KEEFNQEPA |
| 25537 | EAYTRVGYE |
| 25538 | MQEEMGPRK |
| 25539 | DFTNQDHDN |
| 25540 | EVRANCESY |
| 25541 | DNTDPDGSW |
| 25542 | TEGPSNFST |
| 25543 | DNANFSGAD |
| 25544 | EYMERDMSI |
| 25545 | FDKLGTMWG |
| 25546 | CVDQLDDVT |
| 25547 | ESGGYMRMC |
| 25548 | VQTMPKPIY |
| 25549 | TYVDNNHMV |
| 25550 | EIVVEFEDQ |
| 25551 | IPDCMNLSQ |
| 25552 | HTVMEGSPT |
| 25553 | PIIPIAEHV |
| 25554 | DVQGSGQWV |
| 25555 | HTNQQANSP |
| 25556 | STDDEYSLA |
| 25557 | TAVEWHYFD |
| 25558 | MAPQSLWNM |
| 25559 | SSGEMDHVY |
| 25560 | TEDDYGPIS |
| 25561 | TTEAGTALE |
| 25562 | TTEAGTALE |
| 25563 | ETDLKCHSY |
| 25564 | ACVEQEKAD |
| 25565 | SMNEMYQYP |
| 25566 | GEDTTTQAF |
| 25567 | FPQMNEWEC |
| 25568 | DVHTTCYHY |
| 25569 | SQPNPEENW |
| 25570 | EVMLSKMEY |
| 25571 | EVDHCNMYP |
| 25572 | EFHQFGNHM |
| 25573 | TVQMGEWGY |
| 25574 | NMSDGHEVC |
| 25575 | DDNEYHVWS |
| 25576 | DNWMGQDDK |
| 25577 | DEMDAQMGA |
| 25578 | TNDWMRLRV |
| 25579 | IHYDYNTIC |
| 25580 | DTGSFTSTP |
| 25581 | LTEATPKWT |
| 25582 | GDWSERSIT |
| 25583 | TTCPMEKLN |
| 25584 | DVAQYGLGN |
| 25585 | DVAQYGLGN |
| 25586 | TADMMPMNP |
| 25587 | TDESEFESS |
| 25588 | HDMSYHDPI |
| 25589 | TVVERHEHG |
| 25590 | CVETQWRAD |
| 25591 | SEDIESARQ |
| 25592 | EVEVVKEFQ |
| 25593 | NTOTTDEHG |
| 25594 | PQKGDDWLY |
| 25595 | PCEQMPYIM |
| 25596 | DEYDNVWQA |
| 25597 | DMRDSHAWP |
| 25598 | YTCHEEWPL |
| 25599 | ESGLAPMNL |
| 25600 | PMDHEKRYH |
| 25601 | VPEPDDKPY |
| 25602 | AIIWTTDQP |
| 25603 | QSMPECEGH |
| 25604 | DAGPLSMRS |
| 25605 | VTEVQHMAK |
| 25606 | WEGFYMLTL |
| 25607 | MIMCMDCFP |
| 25608 | DIAGMPHIS |
| 25609 | GVDAGLVSE |
| 25610 | TIDVPMQYA |
| 25611 | MELEGHNLP |
| 25612 | DEWYRSKED |
| 25613 | VWDCPKWRH |
| 25614 | SYDDTVICW |
| 25615 | EVDNKCYYN |
| 25616 | DSTPIMQRC |
| 25617 | YWDCQHSYM |
| 25618 | TKMIIFGSW |
| 25619 | SVVERQLVD |
| 25620 | EVCEHEQCM |
| 25621 | DCSHEAHRY |
| 25622 | INPELSEGC |
| 25623 | DTSSWGVEP |
| 25624 | HYRDNKSLP |
| 25625 | MNSEPVTET |
| 25626 | QMEWLAAGP |
| 25627 | EFTTADGEF |
| 25628 | MFPSEAKEI |
| 25629 | DVKPGLFYT |
| 25630 | ETDQPQLAA |
| 25631 | DVLLYMSAT |
| 25632 | DIIFKLEAG |
| 25633 | CDAGLISKM |
| 25634 | MFTGPDVRH |
| 25635 | GVMESQYIS |
| 25636 | DCTLQPAMY |
| 25637 | PEAQRVAGE |
| 25638 | DVEMCQKMS |
| 25639 | WHGCYKIMF |
| 25640 | VHMPYTEET |
| 25641 | ENGTHQYND |
| 25642 | QCAYSWWRY |
| 25643 | CEWLGTCNH |
| 25644 | DTCYNNWKD |
| 25645 | LSAQRLVGD |
| 25646 | NLDMYSESQ |
| 25647 | SELFYSETH |
| 25648 | MDYDGMAVY |
| 25649 | LCSDEVCWT |
| 25650 | TIEGKSLYC |
| 25651 | ETSMPMEHT |
| 25652 | VE1NAKWGN |
| 25653 | EEPWDCQIP |
| 25654 | EEPEFTGRG |
| 25655 | ENDCRERMA |
| 25656 | CVMHVQCDH |
| 25657 | AIATGWQDM |
| 25658 | EYHGYLEHT |
| 25659 | IQWVHGCLF |
| 25660 | NDCSDCOIL |
| 25661 | AGMEIIVQC |
| 25662 | DHEMPESTF |
| 25663 | VKCFPCQLE |
| 25664 | NEPELKLQP |
| 25665 | DTCQAMHGD |
| 25666 | EWHFVNEGT |
| 25667 | MVQQYNGSE |
| 25668 | D1ERFSTVC |
| 25669 | NEAAHSPGP |
| 25670 | HNPCWPFMI |
| 25671 | IVDMPVRHP |
| 25672 | SADEDKCGW |
| 25673 | SFPEAWPIA |
| 25674 | MIVSQQWVW |
| 25675 | HIEYWDQRD |
| 25676 | SLMYEDDYP |
| 25677 | DAAIYVMLD |
| 25678 | MQKNPPKRV |
| 25679 | TMVDWELGK |
| 25680 | QTGLNEYAP |
| 25681 | DDMWCGGLY |
| 25682 | VIYFVGLIA |
| 25683 | HHACGTREH |
| 25684 | DISSNEYDI |
| 25685 | AIECYKMGS |
| 25686 | EESNRGYQH |
| 25687 | MTEVVVSSM |
| 25688 | HEGHPHLSC |
| 25689 | ESCTGEWWA |
| 25690 | MTDTVQEYA |
| 25691 | PRNGPYCDE |
| 25692 | NKMTEARKH |
| 25693 | DNGQVEETA |
| 25694 | DAYVQQPSF |
| 25695 | FVYEWSNLV |
| 25696 | EVRGQGSHY |
| 25697 | WFDCPPCCA |
| 25698 | WREFSEWTF |
| 25699 | QLFAPDMDW |
| 25700 | TYNDFYTAF |
| 25701 | EVGSMPQDW |
| 25702 | SKELGSVET |
| 25703 | DVTISMQAG |
| 25704 | KYNFNLNKY |
| 25705 | VSDWPQIKA |
| 25706 | DTKSRQWDC |
| 25707 | AYEGECIHY |
| 25708 | MAEFEQWLE |
| 25709 | CELHELFDG |
| 25710 | TAEYIDISY |
| 25711 | EIAQFSGVC |
| 25712 | DWNEEMAHL |
| 25713 | WQEYRMTDQ |
| 25714 | SNENICPTC |
| 25715 | LPVDVLVKT |
| 25716 | SADWRHKSP |
| 25717 | EDGQSMCVS |
| 25718 | MHHEYAMAG |
| 25719 | DDHDINGGP |
| 25720 | MTEDQTWWQ |
| 25721 | WNEPWYVRP |
| 25722 | ECQQDSWHY |
| 25723 | EVOROMSNK |
| 25724 | DMHSFKWWS |
| 25725 | DHGEIPAFT |
| 25726 | EYDKMMYAE |
| 25727 | DADREDFWS |
| 25728 | QQEAEHKGV |
| 25729 | AHEVITVRP |
| 25730 | QPIDVSAAI |
| 25731 | DIYLKCFIK |
| 25732 | EIFLENRFP |
| 25733 | FTKTNDHNT |
| 25734 | WQALWCLVH |
| 25735 | AFKALDVQC |
| 25736 | DIHSTNWLA |
| 25737 | NLTDKCTAD |
| 25738 | NSEWWSSVL |
| 25739 | TNEIMWCSP |
| 25740 | MVAPSQALQ |
| 25741 | APGEYMDVE |
| 25742 | ECAKTEWNF |
| 25743 | KDLHDAIHN |
| 25744 | LAPSCKIYC |
| 25745 | FMWPPQIVV |
| 25746 | HMQEPSIAS |
| 25747 | MEPVMHYLN |
| 25748 | YCKCPTCNT |
| 25749 | ADGPVLQMF |
| 25750 | EVSSCDDFT |
| 25751 | CNEEMEFSC |
| 25752 | MLTESQQSM |
| 25753 | WPGFEKLPS |
| 25754 | SPYCDDRGN |
| 25755 | QYCLTEASH |
| 25756 | TSEWLWVDS |
| 25757 | DNMVWRGAH |
| 25758 | CDNDYLTAT |
| 25759 | VIEYNSNIY |
| 25760 | HVSAIEKAQ |
| 25761 | QVATFECKQ |
| 25762 | LHIHRDVTI |
| 25763 | NHEETEFGY |
| 25764 | MDSCYDYQS |
| 25765 | EVLGCNYWP |
| 25766 | STEDWATLH |
| 25767 | CQTDKNATE |
| 25768 | ALEQEMVKF |
| 25769 | MITFASASK |
| 25770 | DDEVYVWGQ |
| 25771 | QVMPRSIER |
| 25772 | AVHTFQMWD |
| 25773 | LVGNADHGQ |
| 25774 | NVGLPSYFA |
| 25775 | EDYSGTKWG |
| 25776 | TVPLKTYGG |
| 25777 | TYMPMDCKW |
| 25778 | FIVQQSIWK |
| 25779 | NEQHYEYWK |
| 25780 | LDVTPQPEG |
| 25781 | ETSLPHWQG |
| 25782 | DSKPVMMAN |
| 25783 | VYRHFDMTP |
| 25784 | DSLAAWSDK |
| 25785 | STIPTPIWL |
| 25786 | VQVQDWLPE |
| 25787 | DWNCAALKP |
| 25788 | EVGPSWEQR |
| 25789 | MHDFLTSAQ |
| 25790 | NLPCSQQAM |
| 25791 | DQRCNKAPG |
| 25792 | PLAFSPVQR |
| 25793 | ETDLAMKAE |
| 25794 | NVEWRQACN |
| 25795 | ETTTCWQYF |
| 25796 | AMPYEEVPA |
| 25797 | ESAQFVAYS |
| 25798 | VLDCAMCNP |
| 25799 | AEPHFQNKS |
| 25800 | MNESFPTWN |
| 25801 | EVQCDQIHP |
| 25802 | MDQCFSYNQ |
| 25803 | EVGSQRTAY |
| 25804 | DHSPVKSAY |
| 25805 | YICQQDLIM |
| 25806 | KIDHEQDCY |
| 25807 | LPVEPIDCE |
| 25808 | GLMVGQWPH |
| 25809 | AHIWDTLIP |
| 25810 | ATIVGDSGN |
| 25811 | TANDYGPTE |
| 25812 | NVELPKIHE |
| 25813 | MLPDHWVIT |
| 25814 | HPFNEAVKH |
| 25815 | IISSTTSTG |
| 25816 | IKEHECRRI |
| 25817 | AVHQINVAA |
| 25818 | LVMEALPMA |
| 25819 | GQIWAAMRR |
| 25820 | MWVCKLFVC |
| 25821 | PIHHGEHVY |
| 25822 | NHQCNGLAQ |
| 25823 | TCEEPYNFA |
| 25824 | LVHEKWEQF |
| 25825 | ALAKFRCWS |
| 25826 | ITSVFDNKA |
| 25827 | DVITHWIGQ |
| 25828 | QQASSSGGF |
| 25829 | EGDDLDRHY |
| 25830 | MPELKFSYC |
| 25831 | HQTHQHNIW |
| 25832 | AFGTLEHEP |
| 25833 | TKPTHDVGS |
| 25834 | QVMQNESER |
| 25835 | SDESNWFGQ |
| 25836 | FSADVNNYD |
| 25837 | LWCCIDTEC |
| 25838 | SMEEWGCES |
| 25839 | MHFCIWMRM |
| 25840 | AHNESDDCG |
| 25841 | SHQFVQPNN |
| 25842 | AIHMFGQSE |
| 25843 | PRKCSNEEV |
| 25844 | HFPLGWLWL |
| 25845 | QQLELDGSL |
| 25846 | INHGWEKVA |
| 25847 | HQHCAEFCH |
| 25848 | DCSHNGMRE |
| 25849 | WINQQTLQC |
| 25850 | QERMFEMTA |
| 25851 | QINMSMHES |
| 25852 | MVTARCWLS |
| 25853 | PLWFEPALN |
| 25854 | EIGYRKVYN |
| 25855 | ESVMEKSMF |
| 25856 | NVNHFGMGD |
| 25857 | SVNVDNEAM |
| 25858 | NEWFQCDVH |
| 25859 | NPNCTKQQY |
| 25860 | QMGPHERHA |
| 25861 | ETRMHMDAL |
| 25862 | LNMYEASLS |
| 25863 | MKVTDKLDD |
| 25864 | ADETCAKKF |
| 25865 | INQWLTCRW |
| 25866 | HNVGDMFCN |
| 25867 | SNQPQGQYC |
| 25868 | LEKVINVLH |
| 25869 | SFVHMFQGP |
| 25870 | DASYYSPVP |
| 25871 | VNDDIYQQG |
| 25872 | LEMMGWPIG |
| 25873 | MEHALCTRT |
| 25874 | ECSCVKRGY |
| 25875 | ESGFPNPYH |
| 25876 | STDWSPSLG |
| 25877 | ETDYIQMGA |
| 25878 | DIVTVIKRT |
| 25879 | LAWDNQQFN |
| 25880 | DTDHRNKFP |
| 25881 | MSNDRCSMG |
| 25882 | FRQSVPHWA |
| 25883 | QVGQEAKNC |
| 25884 | YLEWDSWRC |
| 25885 | MSDFPISTP |
| 25886 | MQNLSSVTE |
| 25887 | STEYRNALN |
| 25888 | VIVGNNVGI |
| 25889 | DGPCDQMTN |
| 25890 | MDEYFCGFT |
| 25891 | EPAQSQHGF |
| 25892 | SFDYVMWGC |
| 25893 | DVFKEHYHQ |
| 25894 | HFVQPACEH |
| 25895 | DVANLKHHV |
| 25896 | VSEQIWNAD |
| 25897 | IVPCLWPIP |
| 25898 | GHQEFKGSE |
| 25899 | ANCSSEIYV |
| 25900 | DSTHDIAHS |
| 25901 | TTDRQCTGH |
| 25902 | V1SAMNVYP |
| 25903 | AHQFIQWLH |
| 25904 | ETYRYGSQR |
| 25905 | KGNPLAGDT |
| 25906 | NTMQMPMIG |
| 25907 | MYEVLNNDQ |
| 25908 | ICLHDHFRN |
| 25909 | EMKGTLYAY |
| 25910 | APDFRMITR |
| 25911 | PQWMPVNQI |
| 25912 | EFKTQQFDP |
| 25913 | VNEWLDSIY |
| 25914 | GSIQSVMWE |
| 25915 | DFMCDQFVC |
| 25916 | PCSDSTELD |
| 25917 | DQECWQSSQ |
| 25918 | EEPLPSDQK |
| 25919 | QTMKLEHLK |
| 25920 | PGTHWWWDC |
| 25921 | MTVSWDSWK |
| 25922 | DAWKPHQFY |
| 25923 | THEEYQLGS |
| 25924 | TVIQTECNT |
| 25925 | SNTFIDWQA |
| 25926 | LYDWSCAQS |
| 25927 | WREPNCHGL |
| 25928 | TMAEMCGSP |
| 25929 | SETDWQRKC |
| 25930 | QVIIGYCES |
| 25931 | GFDECMFWY |
| 25932 | PCTQIGEIY |
| 25933 | FMDFFGMAS |
| 25934 | DQMLDNTAY |
| 25935 | SQDCQEVGG |
| 25936 | SDHMSERVD |
| 25937 | DVLQREEIC |
| 25938 | VIALYSLAY |
| 25939 | EWNYGGLKC |
| 25940 | EVQYGKYWA |
| 25941 | DMTMYSNAV |
| 25944 | MTQGYPSLM |
| 25943 | SIPCNHCFE |
| 25944 | MTQGYPSLM |
| 25945 | DIASVRQTE |
| 25946 | IVDSASVCQ |
| 25947 | AIEAKMTQV |
| 25948 | ALAKFQGWS |
| 25949 | PAFLGACGF |
| 25950 | ESEEHRVMS |
| 25951 | CQGCVPFKG |
| 25952 | FIEFDAVTW |
| 25953 | TTCSSNREW |
| 25954 | VCNELQKYF |
| 25955 | VPCYHKGRW |
| 25956 | DVKCEPDRG |
| 25957 | LICWYQQGN |
| 25958 | EMQTHYAAR |
| 25959 | AETDHYIPT |
| 25960 | PQSDDWAMP |
| 25961 | NHQWTQRRY |
| 25962 | FEGNYTATK |
| 25963 | CNCPDQHPD |
| 25964 | IFQCLYTGT |
| 25965 | VETYQINDT |
| 25966 | FFEWLLDTG |
| 25967 | SDALGPEWW |
| 25968 | MTNCKLHEQ |
| 25969 | IYEACFWWL |
| 25970 | WCMQEGTMS |
| 25971 | EIRLEHDGG |
| 25972 | HVELSLWNQ |
| 25973 | CWMEFMAGN |
| 25974 | AWDYWNSQW |
| 25975 | NNITTPDAY |
| 25976 | SVTMHSMEL |
| 25977 | TYDHIKFAP |
| 25978 | LQQMENASP |
| 25979 | CTDDKMCPV |
| 25980 | IDSCNTSLN |
| 25981 | CKEMRMDQW |
| 25982 | EPEHGAMDK |
| 25983 | VINCHTENN |
| 25984 | ETHLINPGI |
| 25985 | CDHDTKHPT |
| 25986 | CSAEIIDTC |
| 25987 | EVGFYMVPR |
| 25988 | AIWSIEHES |
| 25989 | MVNLGYAEC |
| 25990 | ELEGMSRRE |
| 25991 | VDATTGDYQ |
| 25992 | TVGFGLKAS |
| 25993 | WMEASITGP |
| 25994 | WTDGWHTMC |
| 25995 | SVTLGMKPN |
| 25996 | GHVQESWNC |
| 25997 | STVAADWDH |
| 25998 | ESEIAISWN |
| 25999 | NETLDSKHF |
| 26000 | TFMWLDRVG |
| 26001 | TTDSWMDVE |
| 26002 | DEAEEHGCT |
| 26003 | FTPPKLHYK |
| 26004 | QYLTAEFTS |
| 26005 | MSTNNCNIS |
| 26006 | EAWSCGIYD |
| 26007 | NYDTLLETH |
| 26008 | NVEYVNWHW |
| 26009 | FVMPISAQG |
| 26010 | SQESHMTWH |
| 26011 | GIVALDNAD |
| 26012 | TVMWKDYID |
| 26013 | PWCEDPGCS |
| 26014 | TVEYVTDDA |
| 26015 | TQDCSTMPS |
| 26016 | SMCWLENGN |
| 26017 | MVDLETTYV |
| 26018 | DNTQKQNDP |
| 26019 | NVDRCDSWQ |
| 26020 | TYEPCSTSH |
| 26021 | DFHCQTERQ |
| 26022 | TTAPMEMSL |
| 26023 | NAVEGQSHK |
| 26024 | DNYSIKVGQ |
| 26025 | FMMFHMGLD |
| 26026 | ETRFDDRRA |
| 26027 | NTGWQEAER |
| 26028 | WVFMSWCDV |
| 26029 | PCLITVAPH |
| 26030 | DIAVIGAGA |
| 26031 | EATLITYCS |
| 26032 | TTEDMQCDM |
| 26033 | ITMPRVRPT |
| 26034 | LFVMPAAIE |
| 26035 | ALEHTLFGT |
| 26036 | MGCDVMKAS |
| 26037 | DSWPTLMHD |
| 26038 | CYHEECDGN |
| 26039 | ITTPQTQSH |
| 26040 | IHDWYEVGS |
| 26041 | SMQMTSHYH |
| 26042 | TVAVFSIAM |
| 26043 | QGDEINEQA |
| 26044 | PCSQYYPSC |
| 26045 | PFAAVSMVF |
| 26046 | MQLTNMEIE |
| 26047 | VTESIDYVH |
| 26048 | TIAPYTYMD |
| 26049 | DIQLTHIHG |
| 26050 | MYMTVQQNV |
| 26051 | PFHERGLMQ |
| 26052 | TYVNQGMGP |
| 26053 | FVCELQSAN |
| 26054 | ETKSHPVMV |
| 26055 | ENDEASICM |
| 26056 | VVHMENDQM |
| 26057 | NTFILETFD |
| 26058 | HDENWVIKE |
| 26059 | WFVTQGAYM |
| 26060 | FWATSHWGY |
| 26061 | IPYTEKADI |
| 26062 | HDEEEKNKA |
| 26063 | WLHYVEDTL |
| 26064 | NWAFNARHD |
| 26065 | CSGYWMCMS |
| 26066 | DEVLTGTIN |
| 26067 | DVNQNAKYD |
| 26068 | ITDIFHWSC |
| 26069 | HMRTMDAFE |
| 26070 | ESIQKHSVC |
| 26071 | MSEMEKQQF |
| 26072 | LMDEQPMWC |
| 26073 | HWDVQVNNA |
| 26074 | EQNHAQLMP |
| 26075 | DTAKVVELC |
| 26076 | ETSCGTLMC |
| 26077 | EQQW1APKH |
| 26078 | EVKOATIWC |
| 26079 | TYDPFWMQH |
| 26080 | THDTTIFAF |
| 26081 | THDTTTFAF |
| 26082 | WVTPQCIHL |
| 26083 | LGHDVNGHH |
| 26084 | CHELIKKQW |
| 26085 | SNWSKCAPT |
| 26086 | LNDYTHHQA |
| 26087 | ACEQENIQH |
| 26088 | LYDYMHMGS |
| 26089 | EVPLHTVCQ |
| 26090 | VHGCGKQYH |
| 26091 | MHMDQPTMC |
| 26092 | VKFSNEMKW |
| 26093 | MELHKCNSP |
| 26094 | ELHGTYNSC |
| 26095 | SEAEMDWIG |
| 26096 | AFRTMDEVH |
| 26097 | IIDNVLCNG |
| 26098 | MKMCNCPYQ |
| 26099 | MILVQQLQN |
| 26100 | PSTGNIQFM |
| 26101 | QHPGFGLVI |
| 26102 | IWWEHMGPA |
| 26103 | QWRWHKSAC |
| 26104 | DSESRLCED |
| 26105 | ETSAEFEQV |
| 26106 | FLGSMWPRD |
| 26107 | CVTLEQSSF |
| 26108 | HMTAMCLAG |
| 26109 | NVELRHHGY |
| 26110 | MALDQRSKP |
| 26111 | DFIYDGEDM |
| 26112 | FDRHDKSCC |
| 26113 | TIGQHCADF |
| 26114 | HVANGTDAC |
| 26115 | DSHTRRYDT |
| 26116 | MIPQPVEPF |
| 26117 | TVAHHFVET |

### Example 23

### Treatment of a Neurological Disease or Condition with an AAV5-Derived Virion Encapsidating a Therapeutic Payload

[0955] This example describes treatment of a neurological disease or condition with a variant AAV5-derived virion having any one of the engineered CNS tropic variant AAV5 VP capsid polypeptides disclosed herein, wherein the variant AAV5 virion encapsidates a therapeutic payload. Polynucleotide sequence encoding for AAV Rep, an AAV5-derived variant Cap and helper proteins and a therapeutic payload are transfected in cells to produce variant AAV5 virions, where the polynucleotide sequence encoding for the variant AAV5 Cap comprises at least one mutation in a region from a position corresponding to 581 to a position corresponding to 589 in the VP1 capsid polypeptide and where the polynucleotide sequence encoding for the variant AAV5 Cap encodes for an amino acid sequence of any one of SEQ ID NO: 7118-SEQ ID NO: 10117. The therapeutic payload is a guide RNA targeting an mRNA encoded for by a gene implicated in the neurological disease or condition or a transgene. The variant AAV5 virion encapsidating the payload is administered to a subject. The subject is a human or non-human animal. The route of administration is a systemic route of administration. The systemic route of administration is intravenous administration. Upon administration to the subject, the variant AAV5 virions encapsidating the therapeutic payload exhibit enhanced CNS tissue tropism as compared wildtype AAV5 virions encapsidating the therapeutic payload. Upon administration to the subject, a lower dose of the variant AAV5 virions encapsidating the therapeutic payload is administered as compared to wildtype AAV5 virions encapsidating the therapeutic payload. Upon administration to the subject, at least one symptom of neurological disease or condition is alleviated or the subject is cured.

### Example 24

### Treatment of Alzheimer's Disease with an AAV5-Derived Virion Encapsidating a Therapeutic Payload

[0956] This example describes treatment of Alzheimer's disease with a variant AAV5-derived virion having any one of the engineered CNS tropic variant AAV5 VP capsid polypeptides disclosed herein, wherein the variant AAV5 virion encapsidates a therapeutic payload. Polynucleotide sequence encoding for AAV Rep, an AAV5-derived variant Cap and helper proteins and a therapeutic payload are transfected in cells to produce variant AAV5 virions, where the polynucleotide sequence encoding for the variant AAV5 Cap comprises at least one mutation in a region from a position corresponding to 581 to a position corresponding to 589 in the VP1 capsid polypeptide and where the polynucleotide sequence encoding for the variant AAV5 Cap encodes for an amino acid sequence of any one of SEQ ID NO: 7118-SEQ ID NO: 10117. Each such variant is detargeted for all non-CNS tissues, including being detargeted for cardiac tissue. The therapeutic payload is a guide RNA targeting an mRNA encoded for by a gene implicated in Alzheimer's disease or a transgene. The mRNA targeted by the guide RNA is an mRNA encoded for by a gene encoding for amyloid precursor protein (APP), alpha-synuclein (SNCA), Tau protein (MAPT), or Apolipoprotein E (ApoE). The transgene is a gene encoding for amyloid precursor protein (APP), alpha-synuclein (SNCA), Tau protein (MAPT), or Apolipoprotein E (ApoE). The variant AAV5 virion encapsidating the payload is administered to a subject. The subject is a human or non-human animal. The route of administration is a systemic route of administration. The systemic route of administration is intravenous administration. Upon administration to the subject, the variant AAV5 virions encapsidating the therapeutic payload exhibit enhanced CNS tissue tropism as compared wildtype AAV5 virions encapsidating the therapeutic payload. Upon administration to the subject, a lower dose of the variant AAV5 virions encapsidating the therapeutic payload is administered as compared to wildtype AAV5 virions encapsidating the therapeutic payload. Upon administration to the subject, at least one symptom of Alzheimer's disease is alleviated or the subject is cured.

### Example 25

### Treatment of Parkinson's Disease with an AAV5-Derived Virion Encapsidating a Therapeutic Payload

[0957] This example describes treatment of Parkinson's disease with a variant AAV5-derived virion having any one of the engineered CNS tropic variant AAV5 VP capsid polypeptides disclosed herein, wherein the variant AAV5 virion encapsidates a therapeutic payload. Polynucleotide sequence encoding for AAV Rep, an AAV5-derived variant Cap and helper proteins and a therapeutic payload are transfected in cells to produce variant AAV5 virions, where the polynucleotide sequence encoding for the variant AAV5 Cap comprises at least one mutation in a region from a position corresponding to 581 to a position corresponding to 589 in the VP1 capsid polypeptide and where the polynucleotide sequence encoding for the variant AAV5 Cap encodes for an amino acid sequence of any one of SEQ ID NO: 7118-SEQ ID NO: 10117. The therapeutic payload is a guide RNA targeting an mRNA encoded for by a gene implicated in Parkinson's disease or a transgene. The mRNA targeted by the guide RNA is an mRNA encoded for by a gene encoding for leucine-rich repeat kinase 2 (LRRK2). The transgene is LRRK2; GBA1; GBA1+alpha-synuclein; AADC; GDNF; Neurturin; GAD; NTN; hFOXG1; hKCNQ2; hFMR1; anti-Tau/miRNA; EPM2A or EPM2B. The variant AAV5 virion encapsidating the payload is administered to a subject. The subject is a human or non-human animal. The route of administration is a systemic route of administration. The systemic route of administration is intravenous administration. Upon administration to the subject, the variant AAV5 virions encapsidating the therapeutic payload exhibit enhanced CNS tissue tropism as compared wildtype AAV5 virions encapsidating the therapeutic payload. Upon administration to the subject, a lower dose of the variant AAV5 virions encapsidating the therapeutic payload is administered as compared to wildtype AAV5 virions encapsidating the therapeutic payload. Upon administration to the subject, at least one symptom of Parkinson's disease is alleviated or the subject is cured.

### Example 26

### Treatment of a Tauopathy with an AAV5-Derived Virion Encapsidating a Therapeutic Payload

[0958] This example describes treatment of a Tauopathy with a variant AAV5-derived virion having any one of the engineered CNS tropic variant AAV5 VP capsid polypeptides disclosed herein, wherein the variant AAV5 virion encapsidates a therapeutic payload. Polynucleotide sequence encoding for AAV Rep, an AAV5-derived variant Cap and helper proteins and a therapeutic payload are transfected in cells to produce variant AAV5 virions, where the polynucleotide sequence encoding for the variant AAV5 Cap comprises at least one mutation in a region from a position corresponding to 581 to a position corresponding to 589 in the VP1 capsid polypeptide and where the polynucleotide sequence encoding for the variant AAV5 Cap encodes for an amino acid sequence of any one of SEQ ID NO: 7118-SEQ ID NO: 10117. The therapeutic payload is a guide RNA targeting an mRNA encoded for by a gene implicated in the Tauopathy or a transgene. The mRNA targeted by the guide RNA is an mRNA encoded for by a gene (MAPT) encoding for Tau protein. The transgene is MAPT. The variant AAV5 virion encapsidating the payload is administered to a subject. The subject is a human or non-human animal. The route of administration is a systemic route of administration. The systemic route of administration is intravenous administration. Upon administration to the subject, the variant AAV5 virions encapsidating the therapeutic payload exhibit enhanced CNS tissue tropism as compared wildtype AAV5 virions encapsidating the therapeutic payload. Upon administration to the subject, a lower dose of the variant AAV5 virions encapsidating the therapeutic payload is administered as compared to wildtype AAV5 virions encapsidating the therapeutic payload. Upon administration to the subject, at least one symptom of Tauopathy disease is alleviated or the subject is cured.

### Example 27

### Treatment of Alpha-1 Antitrypsin Deficiency (AATD) with an AAV5-Derived Virion Encapsidating a Therapeutic Payload

[0959] This example describes treatment of AATD with a variant AAV5-derived virion having any one of the engineered CNS tropic variant AAV5 VP capsid polypeptides disclosed herein, wherein the variant AAV5 virion encapsidates a therapeutic payload. Polynucleotide sequence encoding for AAV Rep, an AAV5-derived variant Cap and helper proteins and a therapeutic payload are transfected in cells to produce variant AAV5 virions, where the polynucleotide sequence encoding for the variant AAV5 Cap comprises at least one mutation in a region from a position corresponding to 581 to a position corresponding to 589 in the VP1 capsid polypeptide and where the polynucleotide sequence encoding for the variant AAV5 Cap encodes for an amino acid sequence of any one of SEQ ID NO: 43438-SEQ ID NO: 46437. The therapeutic payload is a guide RNA targeting an mRNA encoded for by a gene implicated in AATD or a transgene. The mRNA targeted by the guide RNA is an mRNA encoded for by a gene encoding for SERPINA1. The transgene is SERPINA1. The variant AAV5 virion encapsidating the payload is administered to a subject. The subject is a human or non-human animal. The route of administration is a systemic route of administration. The systemic route of administration is intravenous administration. Upon administration to the subject, the variant AAV5 virions encapsidating the therapeutic payload exhibit enhanced CNS tissue tropism as compared wildtype AAV5 virions encapsidating the therapeutic payload. Upon administration to the subject, a lower dose of the variant AAV5 virions encapsidating the therapeutic payload is administered as compared to wildtype AAV5 virions encapsidating the therapeutic payload. Upon administration to the subject, at least one symptom of AATD is alleviated or the subject is cured.

### Example 28

### Treatment of Cystic Fibrosis with an AAV5-Derived Virion Encapsidating a Therapeutic Payload

[0960] This example describes treatment of cystic fibrosis with a variant AAV5-derived virion having any one of the engineered CNS tropic variant AAV5 VP capsid polypeptides disclosed herein, wherein the variant AAV5 virion encapsidates a therapeutic payload. Polynucleotide sequence encoding for AAV Rep, an AAV5-derived variant Cap and helper proteins and a therapeutic payload are transfected in cells to produce variant AAV5 virions, where the polynucleotide sequence encoding for the variant AAV5 Cap comprises at least one mutation in a region from a position corresponding to 581 to a position corresponding to 589 in the VP1 capsid polypeptide and where the polynucleotide sequence encoding for the variant AAV5 Cap encodes for an amino acid sequence of any one of SEQ ID NO: 16118-SEQ ID NO: 19117. The therapeutic payload is a guide RNA targeting an mRNA encoded for by a gene implicated in cystic fibrosis or a transgene. The mRNA targeted by the guide RNA is an mRNA encoded for by a gene encoding for CFTR. The transgene is CFTR. The variant AAV5 virion encapsidating the payload is administered to a subject. The subject is a human or non-human animal. The route of administration is a systemic route of administration. The systemic route of administration is intravenous administration. Upon administration to the subject, the variant AAV5 virions encapsidating the therapeutic payload exhibit enhanced CNS tissue tropism as compared wildtype AAV5 virions encapsidating the therapeutic payload. Upon administration to the subject, a lower dose of the variant AAV5 virions encapsidating the therapeutic payload is administered as compared to wildtype AAV5 virions encapsidating the therapeutic payload. Upon administration to the subject, at least one symptom of cystic fibrosis disease is alleviated or the subject is cured.

### Example 29

### Treatment of Duchenne Muscular Dystrophy with an AAV5-Derived Virion Encapsidating a Therapeutic Payload

[0961] This example describes treatment of Duchenne muscular dystrophy with a variant AAV5-derived virion having any one of the engineered CNS tropic variant AAV5 VP capsid polypeptides disclosed herein, wherein the variant AAV5 virion encapsidates a therapeutic payload. Polynucleotide sequence encoding for AAV Rep, an AAV5-derived variant Cap and helper proteins and a therapeutic payload are transfected in cells to produce variant AAV5 virions, where the polynucleotide sequence encoding for the variant AAV5 Cap comprises at least one mutation in a region from a position corresponding to 581 to a position corresponding to 589 in the VP1 capsid poly peptide and where the polynucleotide sequence encoding for the variant AAV5 Cap encodes for an amino acid sequence of any one of SEQ ID NO: 25118-SEQ ID NO: 26117, SEQ ID NO: 28991-SEQ ID NO: 31990, or SEQ ID NO: 13118-SEQ ID NO: 16117. The therapeutic payload is a guide RNA targeting an mRNA encoded for by a gene implicated in Duchenne muscular dystrophy or a transgene. The mRNA targeted by the guide RNA is an mRNA encoded for by a gene encoding for DMD. The transgene is DMD. The variant AAV5 virion encapsidating the payload is administered to a subject. The subject is a human or non-human animal. The route of administration is a systemic route of administration. The systemic route of administration is intravenous administration. Upon administration to the subject, the variant AAV5 virions encapsidating the therapeutic payload exhibit enhanced CNS tissue tropism as compared wildtype AAV5 virions encapsidating the therapeutic payload. Upon administration to the subject, a lower dose of the variant AAV5 virions encapsidating the therapeutic payload is administered as compared to wildtype AAV5 virions encapsidating the therapeutic payload. Upon administration to the subject, at least one symptom of Duchenne muscular dystrophy disease is alleviated or the subject is cured.

### Example 30

### Treatment of Frontotemporal Dementia with an AAV5-Derived Virion Encapsidating a Therapeutic Payload

[0962] This example describes treatment of frontotemporal dementia (FTD) with a variant AAV5-derived virion having any one of the engineered CNS tropic variant AAV5 VP capsid polypeptides disclosed herein, wherein the variant AAV5 virion encapsidates a therapeutic payload. Polynucleotide sequence encoding for AAV Rep, an AAV5-derived variant Cap and helper proteins and a therapeutic payload are transfected in cells to produce variant AAV5 virions, where the polynucleotide sequence encoding for the variant AAV5 Cap comprises at least one mutation in a region from a position corresponding to 581 to a position corresponding to 589 in the VP1 capsid polypeptide and where the polynucleotide sequence encoding for the variant AAV5 Cap encodes for an amino acid sequence of any one of SEQ ID NO: 7118-SEQ ID NO: 10117. The therapeutic payload is a guide RNA targeting an mRNA encoded for by a gene implicated in FTD or a transgene. The mRNA targeted by the guide RNA is an mRNA encoded for by a gene encoding for progranulin. The transgene is progranulin. The variant AAV5 virion encapsidating the payload is administered to a subject. The subject is a human or non-human animal. The route of administration is a systemic route of administration. The systemic route of administration is intravenous administration. Upon administration to the subject, the variant AAV5 virions encapsidating the therapeutic payload exhibit enhanced CNS tissue tropism as compared to wildtype AAV5 virions encapsidating the therapeutic payload. Upon administration to the subject, a lower dose of the variant AAV5 virions encapsidating the therapeutic payload is administered as compared to wildtype AAV5 virions encapsidating the therapeutic payload. Upon administration to the subject, at least one symptom of FTD is alleviated or the subject is cured.

### Example 31

### AAV5 Variants with Adrenal Gland Tissue Tropism as Identified by Machine Learning

[0963] This example describes preferred properties of engineered AAV5 variants that display adrenal gland tissue tropism as identified by machine learning methods. The same bioinformatics pre-process, machine learning methods, and analyses as described in EXAMPLE 19 and FIGS. 19-FIG. 22 were carried out to identify preferred properties of engineered AAV5 variants that display adrenal gland tissue tropism.

[0964] Favored biophysical properties and favored amino acid residues at each position in the 581 to 589 region of an AAV5 VP capsid polypeptide, which are associated with a higher probability of adrenal gland tissue tropism are described below. Any of the below machine learning-derived positional amino acid preferences described in TABLE 46 can be present alone or in combination with each other or in combination with any of the amino acid preferences observed and described in EXAMPLE 7, TABLE 13. Listed below in TABLE 46 are a summary of positional features shared between the top important features for adrenal gland tropism extracted from the ML models.

TABLE 46
Machine Learning-Derived Adrenal Gland Tissue Tropism Rules

Low mol mass at Xaa1
Xaa1 is selected from V, P, S, or C
Low hydropathy at Xaa1
Xaa1 is selected from T, S, W, or Y
Low hydropathy at Xaa2
Xaa2 is selected from R
Low mutability at Xaa2
Xaa2 is selected from C
Low solubility at Xaa2
Xaa2 is selected from K
Low average flexibility at Xaa3
Xaa3 is selected from W, M, or F
High solubility at Xaa3
Xaa3 is selected from M
High surface accessibility at Xaa4
Xaa4 is selected from K or R
High average flexibility at Xaa4
Xaa4 is selected from K, I, or N
Medium mutability at Xaa5
Xaa5 is selected from R or H
High goldman engelman steitz at Xaa5
Xaa5 is selected from V or L
Low hydropathy at Xaa5
Xaa5 is selected from R
High volume at Xaa5
Xaa5 is selected from Y, R or F
High solubility at Xaa6
Xaa6 is selected from Y, V, M, A, or C
Medium mutability at Xaa7
Xaa7 is selected from V, H, or R
Low solubility at Xaa7
Xaa7 is selected from R
High average flexibility at Xaa8
Xaa8 is selected from K, I, or N
High mol mass at Xaa8
Xaa8 is selected from R, or Y
High mutability at Xaa9
Xaa9 is selected from N

[0965] TABLE 47 below provides sequences of the 581 to 589 region for variant AAV VP1 capsid polypeptides that exhibited adrenal gland tissue tropism and comport to one or more of the rules provided in TABLE 46. The present disclosure, thus, provides for rAAVs composed of engineered AAV5 VP1 capsid polypeptides having a SEQ ID NO: 2, wherein the Xaa1 to Xaa9 region is any one of SEQ ID NO: 2118-SEQ ID NO: 3117 as disclosed in TABLE 47. Also encompassed herein are rAAVs composed of engineered AAV5 VP2 capsid polypeptides and engineered AAV5 VP3 capsid polypeptides having the sequences disclosed in the below table at the regions in AAV5 VP2 (amin acid residues 445 to 453) and AAV5 VP3 (amino acid residues 389-397) corresponding to the amino acids in the AAV5 VP1 581 to 589 region.

TABLE 47
Sequences of the 581 to 589 Region in AAV5 VP1
Capsid Polypeptide that Drive Adrenal Gland
Tissue Tropism

| SEQ | |
|---|---|
| ID | 581-589 |
| NO | Sequence |
| 2118 | AAGGFLSGC |
| 2119 | AAVQKERYN |
| 2120 | ACYFMMRQN |
| 2121 | AFGHAMKQF |
| 2122 | AIGCIQNGG |
| 2123 | AIGCVQNGG |
| 2124 | AIGGFPNGG |
| 2125 | AKSYFQNGG |
| 2126 | AILKLTKVL |
| 2127 | AILKMTKVM |
| 2128 | AILKTTKVL |
| 2129 | AIMKMTKVL |
| 2130 | ALGHRHHQC |
| 2131 | ALNKTLAEG |
| 2132 | ANMFRNGML |
| 2133 | ANMFRNGMR |
| 2134 | ANYIQYVWE |
| 2135 | AQMQYERLF |
| 2136 | ARAPNEGVI |
| 2137 | ARQWMCVHC |
| 2138 | ARTLYMINR |
| 2139 | ARVIEHKAG |
| 2140 | ASMFWHYQV |
| 2141 | ATCKHTDHL |
| 2142 | ATCYFVSSQ |
| 2143 | ATFKHTDHF |
| 2144 | ATFKHTDHW |
| 2145 | ATLKHTDHL |
| 2146 | ATNKYANAT |
| 2147 | ATVKHTDHL |
| 2148 | AVGLNERNG |
| 2149 | AVGNRHHQC |
| 2150 | AWGMQDQRY |
| 2151 | AWMCRGVYC |
| 2152 | AWMCRHVYC |
| 2153 | AWMCRNFYC |
| 2154 | AWMCRNVDC |
| 2155 | AWMCRNVHC |
| 2156 | AWMCRNVNC |
| 2157 | AWMCRNVYY |
| 2158 | AWMCRSVYC |
| 2159 | AWMCRTVYC |
| 2160 | AWMFRNVYC |
| 2161 | AWRCRNVYC |
| 2162 | AWRCRNVYC |
| 2163 | AWVCRNVYC |
| 2164 | AWVMKDQQY |
| 2165 | AWVMKNQRY |
| 2166 | AYCHRAHNG |
| 2167 | CAGIHLNEG |
| 2168 | CAGIHMNEA |
| 2169 | CAGIHMNEA |
| 2170 | CARFVARWP |
| 2171 | CARFVEGWP |
| 2172 | CARFVERWH |
| 2173 | CARFVERWR |
| 2174 | CAVIHLNEA |
| 2175 | CAVPPSRYP |
| 2176 | CAVPTARYP |
| 2177 | CAVPTSRYL |
| 2178 | CAVPTSRYT |
| 2179 | CAVQKERYN |
| 2180 | CAVVMMRQP |
| 2181 | CCAKFKMCT |
| 2182 | CCEDMKIWQ |
| 2183 | CCVFRHHYC |
| 2184 | CDIDYDLGF |
| 2185 | CECIVQMAT |
| 2186 | CECLVQMGT |
| 2187 | CFDIIQRYD |
| 2188 | CFKFKFRLV |
| 2189 | CFKFKVRLA |
| 2190 | CFKSKFSWQ |
| 2191 | CFNIIERYD |
| 2192 | CGEDMKMWQ |
| 2193 | CGKDIKIWQ |
| 2194 | CGKDMQIWQ |
| 2195 | CHGRVAHHE |
| 2196 | CHLRDCSPI |
| 2197 | CHMDYDLGF |
| 2198 | CHRFIQPSY |
| 2199 | CHRFIQRSY |
| 2200 | CHRYIQQSY |
| 2201 | CHSRDCSPL |
| 2202 | CIKSMFSWQ |
| 2203 | CILQTRKGN |
| 2204 | CKIGTQKGQ |
| 2205 | CKIVAWKGQ |
| 2206 | CKIVIQKGQ |
| 2207 | CKIVIQKSQ |
| 2208 | CKLVTQKGQ |
| 2209 | CKMVTQKGQ |
| 2210 | CKMYMHEAR |
| 2211 | CKMYMQESR |
| 2212 | CKMYMRESR |
| 2213 | CLMALNRSG |
| 2214 | CLMAMKRSG |
| 2215 | CLMGLKRSG |
| 2216 | CLSPFARAM |
| 2217 | CLVALKRSG |
| 2218 | CMKRYMMLP |
| 2219 | CPDEPKWFP |
| 2220 | CRKQGHGEK |
| 2221 | CSIVRWMSP |
| 2222 | CSKFIVAWE |
| 2223 | CSKFIVGWE |
| 2224 | CSKFIVVWE |
| 2225 | CSSFRWMSP |
| 2226 | CSSVRWMGP |
| 2227 | CSSVRWMST |
| 2228 | CTFVMMRQP |
| 2229 | CTGQRGFTN |
| 2230 | CTGVMMRQP |
| 2231 | CTIRGNSSC |
| 2232 | CTLRGNASC |
| 2233 | CTVGMMRQP |
| 2234 | CTVLMMRQP |
| 2235 | CTVLMTRQP |
| 2236 | CTVVLMRQP |
| 2237 | CTVVMMREP |
| 2238 | CTVVMVRQP |
| 2239 | CVDTYRMWQ |
| 2240 | CVHQRMHVT |
| 2241 | CVIQTSRGT |
| 2242 | CVKFKVRLV |
| 2243 | CVLEFSRQW |
| 2244 | CVLKFSREW |
| 2245 | CVLKFSRHW |
| 2246 | CVLKFSRQG |
| 2247 | CVLKFSRQS |
| 2248 | CVLKFSRRW |
| 2249 | CVLKVSRQW |
| 2250 | CVLKYSRQW |
| 2251 | CVLQTSRGI |
| 2252 | CVMQTSRGI |
| 2253 | CVNKLSYEN |
| 2254 | CVRHTENWR |
| 2255 | CVSLFARAM |
| 2256 | CVSPFARAK |
| 2257 | CVSPFARAT |
| 2258 | CVSPFARGM |
| 2259 | CVSPFARSM |
| 2260 | CVSPFARVM |
| 2261 | CVSPFGRAM |
| 2262 | CVSPFVRAM |
| 2263 | CVSQFARAM |
| 2264 | CVSSFARAM |
| 2265 | CVTTRHKQG |
| 2266 | CVWPFKFDF |
| 2267 | CVWPMKFDF |
| 2268 | CWDVTCQEN |
| 2269 | CYGRVAHLE |
| 2270 | CYRFIQQSY |
| 2271 | CYVFRHHDC |
| 2272 | DASSNDRNT |
| 2273 | DCESPEKQN |
| 2274 | DCESSEKPN |
| 2275 | DCQSPEKPN |
| 2276 | DEDVCKFVF |
| 2277 | DEVACKFVF |
| 2278 | DEVDCKFVF |
| 2279 | DEVVCKFMF |
| 2280 | DEVVCKIVF |
| 2281 | DFKLFHNRE |
| 2282 | DFKLFHNRP |
| 2283 | DFKLFNNRA |
| 2284 | DFKVFHNRA |
| 2285 | DFQLFHNRA |
| 2286 | DFRLFHNRA |
| 2287 | DFRWFIRMN |
| 2288 | DMKRPTRYN |
| 2289 | DMQRPPRYN |
| 2290 | DMQRPSRYN |
| 2291 | KNNMIVRCV |
| 2292 | DNQWMNSLE |
| 2293 | DNSMIVRCA |
| 2294 | DQPHLHRIG |
| 2295 | DRCLVEWVS |
| 2296 | DRCLVKWVA |
| 2297 | DRMDFHFFF |
| 2298 | DSKQIAKAM |
| 2299 | DVCNVLGWK |
| 2300 | DVDVVARPM |
| 2301 | DVKLFHNRA |
| 2302 | DVRGLNREY |
| 2303 | DVRNFFDHC |
| 2304 | DWHQYDGCE |
| 2305 | DWNQHDGCE |
| 2306 | DWNQYAGCE |
| 2307 | DWNQYDGGE |
| 2308 | DWNQYNGCE |
| 2309 | DWSQYDGCE |
| 2310 | DYKQTAKAM |
| 2311 | ECAHVIKFN |
| 2312 | ECHKMRCLE |
| 2313 | ECHKMRCVE |
| 2314 | ECNKMRCIE |
| 2315 | EETKKVKHW |
| 2316 | EHKKNINMH |
| 2317 | EKRHISRAP |
| 2318 | EQRHISRAR |
| 2319 | EQRHISRTP |
| 2320 | ERVIEHRAG |
| 2321 | ERVLEHKAG |
| 2322 | EYDVNMRQM |
| 2323 | FGKDAFVSS |
| 2324 | FGKDTFASS |
| 2325 | FGKDTFLSS |
| 2326 | FGKDTFVSA |
| 2327 | FGKDTVVSS |
| 2328 | FGMDTFVSS |
| 2329 | FMMHRVMSD |
| 2330 | FMMHRVMSG |
| 2331 | FMMMAKTQA |
| 2332 | FQKLRDVCF |
| 2333 | FREQGHGEK |
| 2334 | FRKEGHGEK |
| 2335 | FRKPGHGEK |
| 2336 | FRKQAHGEK |
| 2337 | FRKQGHGAK |
| 2338 | FRKQGHGEE |
| 2339 | FRKQGHGQK |
| 2340 | FRKQGNGEK |
| 2341 | FRKQGPGEK |
| 2342 | FRKQVHGEK |
| 2343 | FRNQVHGEK |
| 2344 | FSSCCRQKG |
| 2345 | FTSNRNWEA |
| 2346 | FTSNRNWQD |
| 2347 | FTSNRNWQP |
| 2348 | GAHHRCRMT |
| 2349 | GAWMQGFHP |
| 2350 | GCAKFQMCT |
| 2351 | GCAKTRFEN |
| 2352 | GCDKNRFEN |
| 2353 | GCDKTRFAN |
| 2354 | GCDKTRFES |
| 2355 | GCDKTRFEY |
| 2356 | GCHKMRCIE |
| 2357 | GEGIRKMNN |
| 2358 | GEGIRQMNT |
| 2359 | GEGVRQMNN |
| 2360 | GEVVCKFVF |
| 2361 | GFDRQDAHR |
| 2362 | GFKLFHNRA |
| 2363 | GMKTRCDDD |
| 2364 | GMKTRCDYA |
| 2365 | GMKTRCDYV |
| 2366 | GMKTRCHYD |
| 2367 | GMKTRCNYD |
| 2368 | GMKTRCVYD |
| 2369 | GMQTRCDYD |
| 2370 | GMQTRCDYD |
| 2371 | GRAFVKIDT |
| 2372 | GRICMQGMK |
| 2373 | GRIFMLGMK |
| 2374 | GRIFVKIDT |
| 2375 | GRLFVKIDT |
| 2376 | GRWFQIGTE |
| 2377 | GTFKHTDHL |
| 2378 | GVAYRESQA |
| 2379 | GVDKLSYEN |
| 2380 | GVHHRWRMT |
| 2381 | GVKPRWGLF |
| 2382 | GVKTRCDYD |
| 2383 | GVWMQGIHP |
| 2384 | GWEKKINFQ |
| 2385 | GWEKKINGQ |
| 2386 | GWEKKLNVQ |
| 2387 | GWEKKVNVQ |
| 2388 | GWEKTINVQ |
| 2389 | GWFFKNYYC |
| 2390 | GWKKKINVQ |
| 2391 | GWMCRNVYC |
| 2392 | GWQKKINVQ |
| 2393 | HACCLLQQY |
| 2394 | HACSLLKQY |
| 2395 | HACSLLQQF |
| 2396 | HIEWVSMQR |
| 2397 | HIQWVSMHR |
| 2398 | HMEWVSMHR |
| 2399 | HRADIMCWN |
| 2400 | HREAIMCWN |
| 2401 | HREDIMCGN |
| 2402 | HREDIMCWD |
| 2403 | HREDIMCWI |
| 2404 | HREDIRCWN |
| 2405 | HRGDIMCWN |
| 2406 | HRKDIMCWN |
| 2407 | HRQDIMCWN |
| 2408 | HRTETECWC |
| 2409 | HSCSLLQQY |
| 2410 | HVGALTRSD |
| 2411 | IARHIDHDL |
| 2412 | IAWHVDHDL |
| 2413 | ICHLRHIAA |
| 2414 | ICHLRHIPV |
| 2415 | ICHLRHISG |
| 2416 | ICHLRHNAG |
| 2417 | ICHLRHVAG |
| 2418 | ICTTLIQGM |
| 2419 | ICTTQIKGM |
| 2420 | ICYKWWVMF |
| 2421 | IDAALDMSW |
| 2422 | IEVKYWNRH |
| 2423 | IEYVRSCPW |
| 2424 | IFMAFDHLE |
| 2425 | IGMDKPVDA |
| 2426 | IHMKPQESP |
| 2427 | IHMKQQDSP |
| 2428 | IHMKQQESA |
| 2429 | IHMKQQEST |
| 2430 | IHMKQQQSP |
| 2431 | IHMKQRESP |
| 2432 | IHMKTIVGE |
| 2433 | IHMRQQESP |
| 2434 | IILHNMKSW |
| 2435 | IMLALMHED |
| 2436 | IMLHRVMSD |
| 2437 | IMMAHWFAH |
| 2438 | IMMAQWFAQ |
| 2439 | IMMAQWFGH |
| 2440 | IMMAQWFSH |
| 2441 | IMMAWEIAH |
| 2442 | IMMHRMMSD |
| 2443 | IMMHRVMSE |
| 2444 | IMMHRVMSV |
| 2445 | IMMHRVMSY |
| 2446 | IMMHRVMYD |
| 2447 | IMMLRVMSD |
| 2448 | IMMNRVMSD |
| 2449 | IMMQRVMSD |
| 2450 | IMMVQWFAH |
| 2451 | IMMYRVMSD |
| 2452 | IMVALMHEG |
| 2453 | IVCRMWHQP |
| 2454 | IWHKWWVMF |
| 2455 | IWYKWWAMF |
| 2456 | IWYKWWLMF |
| 2457 | IWYKWWVMC |
| 2458 | IWYKWWVMV |
| 2459 | IWYKWWVMY |
| 2460 | KAIPENSNR |
| 2461 | KALEVHFQK |
| 2462 | KAMEFHFQK |
| 2463 | KAMPEPVTE |
| 2464 | KAQDFATEN |
| 2465 | KAQEFATED |
| 2466 | KAQEFATEH |
| 2467 | KAQKFATEN |
| 2468 | KAOQFATEN |
| 2469 | KAREFATEN |
| 2470 | KASTEAGDK |
| 2471 | KATTEASDK |
| 2472 | KCDKPMLEP |
| 2473 | KCDKPMLQP |
| 2474 | KCDTFRGME |
| 2475 | KCEPFRGME |
| 2476 | KCETFLGME |
| 2477 | KCGILYYQG |
| 2478 | KCGNLYYQG |
| 2479 | KCGSLNYQG |
| 2480 | KCGSLYCQG |
| 2481 | KCGSLYHQG |
| 2482 | KCGSLYSQG |
| 2483 | KCGSLYYQV |
| 2484 | KCGSMYYQG |
| 2485 | KCGTLYYQG |
| 2486 | KCYFMMRQN |
| 2487 | KDCQYEGAC |
| 2488 | KDCQYEGSW |
| 2489 | KDCQYLGAW |
| 2490 | KFELNQTAV |
| 2491 | KFELNRKAV |
| 2492 | KFETFRGME |
| 2493 | KFGLNQKAV |
| 2494 | KFIDVWDAR |
| 2495 | KGEYQADAP |
| 2496 | KHDPMCGQL |
| 2497 | KHEQMCVQL |
| 2498 | KHERMCVQL |
| 2499 | KHETMCVQL |
| 2500 | KHKENAVER |
| 2501 | KHKPMCVQL |
| 2502 | KHKYEDPMV |
| 2503 | KHKYEDTMG |
| 2504 | KHQINTVER |
| 2505 | KHQPMCVQL |
| 2506 | KHSSHMEAC |
| 2507 | KIHYHFEDK |
| 2508 | KINYHFEDE |
| 2509 | KINYHFEDQ |
| 2510 | KISGLNDAT |
| 2511 | KKDEANGQT |
| 2512 | KKDPMQTYP |
| 2513 | KMGTEVSQQ |
| 2514 | KMRMIFRKD |
| 2515 | KNEPMCVQL |
| 2516 | KPVEYASAP |
| 2517 | KQDFHHGLA |
| 2518 | KQLYHIPTC |
| 2519 | KQQYVTMNA |
| 2520 | KQRDESRAP |
| 2521 | KQRHISRAP |
| 2522 | KQSAHMEAC |
| 2523 | KQSPHMEAC |
| 2524 | KQSSHMEAF |
| 2525 | KRDLANGQF |
| 2526 | KREEEHPCA |
| 2527 | KRMDFHFFF |
| 2528 | KRSSHMEAC |
| 2529 | KRVIEHKAG |
| 2530 | KRYFWMSYY |
| 2531 | KSMLEDRIC |
| 2532 | KSMWEARIC |
| 2533 | KSMWEDREG |
| 2534 | KSMWEDRTC |
| 2535 | KSMWEERIC |
| 2536 | KSMWENRIC |
| 2537 | KSMWEYRIC |
| 2538 | KSVWEDRIC |
| 2539 | KTFFWMSYY |
| 2540 | KTFSESTCR |
| 2541 | KTMEVHFQK |
| 2542 | KTQWDEAIV |
| 2543 | KTYEADTIC |
| 2544 | KTYFADTES |
| 2545 | KTYFADTMG |
| 2546 | KTYFADTVG |
| 2547 | KTYFAETEG |
| 2548 | KTYFANTIG |
| 2549 | KTYFSDTEG |
| 2550 | KTYFWMSYC |
| 2551 | KTYFWMSYS |
| 2552 | KTYFWTSYY |
| 2553 | KTYFWVSYY |
| 2554 | KVDVFTVKD |
| 2555 | KVDVETFKD |
| 2556 | KVDVETVOD |
| 2557 | KVDVVTVKD |
| 2558 | KVILDSFRR |
| 2559 | KVMPEPVPE |
| 2560 | KVMPEPVTA |
| 2561 | KVMPEPVTV |
| 2562 | KVMPVPVTE |
| 2563 | KVMSEPVTE |
| 2564 | KVTWMDLED |
| 2565 | KVVLDSFRQ |
| 2566 | KVYMEPANW |
| 2567 | KYEELIKYI |
| 2568 | KYEFLLKHI |
| 2569 | KYEFLLKYL |
| 2570 | KYEFLLRYI |
| 2571 | KYEELNCNP |
| 2572 | KYEVLLKYI |
| 2573 | KYEYLLKYI |
| 2574 | KYEAVWDAR |
| 2575 | KYIDFWDAR |
| 2576 | KYIDIWDAR |
| 2577 | KYEDVWEAR |
| 2578 | KYKAPTENP |
| 2579 | KYKHPTINP |
| 2580 | KYKPLTENP |
| 2581 | KYKPPTMNP |
| 2582 | KYKRPTINP |
| 2583 | KYQPPTINP |
| 2584 | LAVDKSRLL |
| 2585 | LCGLMPRPA |
| 2586 | LCGVMPRPG |
| 2587 | LFKPEDEDR |
| 2588 | LFKPEDPDR |
| 2589 | LFKPEEQDR |
| 2590 | LHRDPMPIM |
| 2591 | LHRDQMPFM |
| 2592 | LHRDQMPLM |
| 2593 | LIMAHWLHM |
| 2594 | LIMAYWLDM |
| 2595 | LIMSHWLDM |
| 2596 | LKRPQGEAE |
| 2597 | LLMAHWLDM |
| 2598 | LQKYYMNQP |
| 2599 | LQNYRDEDG |
| 2600 | LQPWWLGMI |
| 2601 | LQTYHHVDG |
| 2602 | LQTYQPVDG |
| 2603 | LRFLSDADP |
| 2604 | LRKEGHGEK |
| 2605 | LRYLSDTDP |
| 2606 | LSTNRLVNA |
| 2607 | LSTNRMVSA |
| 2608 | LSTNRMVTA |
| 2609 | LYRDQMPIM |
| 2610 | MCGHASKAV |
| 2611 | MCGHASRAE |
| 2612 | MCGPASKAE |
| 2613 | MCHLRHAIG |
| 2614 | MCRANGNMP |
| 2615 | MCSLRHWQP |
| 2616 | MEGMWNRSN |
| 2617 | MISMLNRSN |
| 2618 | MRSEYMNES |
| 2619 | MRWILTEME |
| 2620 | MSAQRHVQT |
| 2621 | MSAQRYAQT |
| 2622 | MSAQRYVQA |
| 2623 | MSMLRMHEA |
| 2624 | NAMCFGRAR |
| 2625 | NAMCFGREK |
| 2626 | NAMCFGRTK |
| 2627 | NAMCIGRAK |
| 2628 | NAMGFGRAK |
| 2629 | NATCFGRAK |
| 2630 | NCNKCINRT |
| 2631 | NCNKCKHRT |
| 2632 | NCNKCKYRT |
| 2633 | NCRHTILYV |
| 2634 | NCSKCAKYD |
| 2635 | NCVKLECQS |
| 2636 | NELQDQCGM |
| 2637 | NEVVCKFVF |
| 2638 | NFSKCAKYV |
| 2639 | NFSKCTKYD |
| 2640 | NFSKGAKYD |
| 2641 | NGMDKAVDA |
| 2642 | NGMDKPFDA |
| 2643 | NGMDKPIDA |
| 2644 | NGMDKPVDG |
| 2645 | NGMDKPVDS |
| 2646 | NGMDKPVNA |
| 2647 | NGMDQPVDA |
| 2648 | NGMDRPVDA |
| 2649 | NGMDTPVDA |
| 2650 | NGVDKPVDA |
| 2651 | NGWESEQHM |
| 2652 | NHMKQQESP |
| 2653 | NLDMSRRAF |
| 2654 | NLDMSRRDC |
| 2655 | NMIKRCCQG |
| 2656 | NMIKRCSKG |
| 2657 | NMIKRCSQA |
| 2658 | NMIKRCSQC |
| 2659 | NMIKRCSQS |
| 2660 | NMIKRCSQV |
| 2661 | NMIKWCSQG |
| 2662 | NMVKRCSQG |
| 2663 | NNQWKNSLE |
| 2664 | NNQWTNSLE |
| 2665 | NPCKINVGT |
| 2666 | NQCKINFGT |
| 2667 | NQCKINVGN |
| 2668 | NQCKINVGP |
| 2669 | NQCKLNVGT |
| 2670 | NQLKDVAAS |
| 2671 | NQWKINVGT |
| 2672 | NRAETECWC |
| 2673 | NRCLVEWVA |
| 2674 | NRMDFHFFV |
| 2675 | NRMDFNFFF |
| 2676 | NRNKCKNRT |
| 2677 | NRPFNYFQR |
| 2678 | NRTLYMINR |
| 2679 | NSSYFEFSN |
| 2680 | NSVKLGCQN |
| 2681 | NTIKRCSQG |
| 2682 | NVDMSRRDF |
| 2683 | NVMCFGRAK |
| 2684 | NVRNFFAHC |
| 2685 | NVRNFFEHC |
| 2686 | NVSKCAKYD |
| 2687 | NVWPNIAEM |
| 2688 | NVWTNISEM |
| 2689 | NWNGRWNQC |
| 2690 | NWNKCKNRT |
| 2691 | NWPCHDNRH |
| 2692 | NWSYHDNRH |
| 2693 | NWTGRWHQC |
| 2694 | NYCDRAHNG |
| 2695 | PAVQKERYN |
| 2696 | PCFSIARYY |
| 2697 | PCYFMMRQN |
| 2698 | PKVTCRYRM |
| 2699 | PPLHSRCGM |
| 2700 | PQLHSRCRM |
| 2701 | PQLLSRCGM |
| 2702 | PQLNSRCGM |
| 2703 | PQLRSRCGM |
| 2704 | PWVMKDQRY |
| 2705 | QAYCCMHQD |
| 2706 | QCDEFKMRM |
| 2707 | OCHKMRCIE |
| 2708 | QESNRCWCD |
| 2709 | QHKERMLFD |
| 2710 | QHKERMVFD |
| 2711 | QHQKNINMH |
| 2712 | QLDEFKMRM |
| 2713 | QMSWVQNWE |
| 2714 | QMYHNHHTA |
| 2715 | QMYWAQNWE |
| 2716 | QMYWGQNWE |
| 2717 | QMYWIQNWE |
| 2718 | QMYWVQNLE |
| 2719 | OMYWVQSWE |
| 2720 | QPVTRMTNE |
| 2721 | QQLHSRCGM |
| 2722 | QQRHISRAP |
| 2723 | QRDLAHGQF |
| 2724 | QRDLANGKS |
| 2725 | QRDLANGLF |
| 2726 | QRDLANGQI |
| 2727 | QRDLANGQS |
| 2728 | QRDLANGQV |
| 2729 | QRDLANGQY |
| 2730 | QRDMANGQF |
| 2731 | ORDPANGQF |
| 2732 | QSAFRQSDS |
| 2733 | QSTFRQCDS |
| 2734 | QSTMRQYYA |
| 2735 | QSYCCMHQY |
| 2736 | QTYWVQNWE |
| 2737 | QVSGMFHPA |
| 2738 | QVYCCMHQY |
| 2739 | QVYWVQNWE |
| 2740 | QWDEFKKRM |
| 2741 | QWDEFKMRR |
| 2742 | QWDEFKVRM |
| 2743 | QWDVFKMRM |
| 2744 | RACSLLQQY |
| 2745 | RCDKTRFEN |
| 2746 | RCEAFNWRE |
| 2747 | RCELFNWRE |
| 2748 | RCEPFHWRE |
| 2749 | RCEPFNLRE |
| 2750 | RCEPFNWHE |
| 2751 | RCGHASKAE |
| 2752 | RCGPFNWRE |
| 2753 | RCGQVRNEM |
| 2754 | RCKLFDHDE |
| 2755 | RCVEDHFHK |
| 2756 | RCVLDHFHK |
| 2757 | RCVQDHFHE |
| 2758 | RCVQDHFHR |
| 2759 | RCVQDHFHT |
| 2760 | RCVQDHFNK |
| 2761 | RCVQDHIHK |
| 2762 | RCVQDHSHK |
| 2763 | RCVQDNFHK |
| 2764 | RCVQHHFHK |
| 2765 | RCVRDHFHK |
| 2766 | RCYFMMRQN |
| 2767 | RDLSLHLMR |
| 2768 | RECLIERCG |
| 2769 | RECLIERCI |
| 2770 | RECLIKRCS |
| 2771 | RECLVERCS |
| 2772 | RIERVDVFN |
| 2773 | RKDEANGQA |
| 2774 | RMDEANGQT |
| 2775 | RQCLIERCS |
| 2776 | RQMWMAHHA |
| 2777 | RRDAKVANG |
| 2778 | RRDEANGQT |
| 2779 | RREDIMCWN |
| 2780 | RRKDIMKER |
| 2781 | RRYRELTEE |
| 2782 | RSEPFNWRE |
| 2783 | RTDAIHHQV |
| 2784 | RTDAIHPQI |
| 2785 | RWVQDHFHK |
| 2786 | RYCQVWGCA |
| 2787 | RYDLFSYHQ |
| 2788 | RYDLVSHHQ |
| 2789 | RYDLVSYHR |
| 2790 | RYDLVSYYQ |
| 2791 | RYNLVSYHQ |
| 2792 | RYRQEWGCA |
| 2793 | SAGQKERYN |
| 2794 | SA1QKERYN |
| 2795 | SALYGSKAI |
| 2796 | SAVQQERYN |
| 2797 | SAVQRERYN |
| 2798 | SAVRNERYN |
| 2799 | SAWYGSKSI |
| 2800 | SCKGFHLQN |
| 2801 | SCKSHQMHE |
| 2802 | SCRHIYREA |
| 2803 | SCRHLYHEA |
| 2804 | SCRHNYHEA |
| 2805 | SCRRIYHEA |
| 2806 | SFDRQDVHR |
| 2807 | SFDRQGAHR |
| 2808 | SFGHAMKQC |
| 2809 | SFKGFHLEN |
| 2810 | SFKGFHVQN |
| 2811 | SFMGFHLQN |
| 2812 | SFVRQDAHR |
| 2813 | SGQKFIFCP |
| 2814 | SIGCFQNGG |
| 2815 | SIIFSNTCM |
| 2816 | SILLPGIQG |
| 2817 | SIMHEGVQS |
| 2818 | SIMLPGIQA |
| 2819 | SLNQAIHLE |
| 2820 | SMGPTVHEM |
| 2821 | SMNQAVHLE |
| 2822 | SMNQPIHLE |
| 2823 | SMRSQHADY |
| 2824 | SNCALHNAW |
| 2825 | SNCAQHNSW |
| 2826 | SNCAQYNAW |
| 2827 | SNCSQHNAW |
| 2828 | SNCVQHNAW |
| 2829 | SNGAQHNAW |
| 2830 | SNGFEWACE |
| 2831 | SNGFEWVCA |
| 2832 | SNGFEWVGE |
| 2833 | SNGFEWVSE |
| 2834 | SNGFEWVYE |
| 2835 | SNMFRNGMQ |
| 2836 | SNVFEWVCE |
| 2837 | SRDEAKSWV |
| 2838 | SRICMLGMK |
| 2839 | SRIILDYYS |
| 2840 | SRPFNYIQR |
| 2841 | SRSFNYFQR |
| 2842 | SRWCQIGTE |
| 2843 | SRWFKIGTE |
| 2844 | SRWFQIGTK |
| 2845 | SSGDRRSDS |
| 2846 | SSKGFHLQN |
| 2847 | SSKQDFYGL |
| 2848 | SSKSHRMHE |
| 2849 | SSMLEGVQS |
| 2850 | SSVDRRSDG |
| 2851 | SSVHALYFP |
| 2852 | SSVHTLYYP |
| 2853 | SSVQKERYN |
| 2854 | STCYFVASL |
| 2855 | STDPYTSHH |
| 2856 | STFKHTDHL |
| 2857 | STGFEWVCE |
| 2858 | STSYFVASQ |
| 2859 | SVGPTVHQM |
| 2860 | SVSKFQADK |
| 2861 | SVVQKERYN |
| 2862 | SWEKKINVQ |
| 2863 | SWGLIHGWN |
| 2864 | SWGLIHWWN |
| 2865 | SWGLIHYWN |
| 2866 | SWGLVHCWN |
| 2867 | SWKWDKYCN |
| 2868 | SWMCRNVYC |
| 2869 | SWRHIYHEA |
| 2870 | SWRTRGNFE |
| 2871 | SWSKCNMEN |
| 2872 | SWVLIHCWN |
| 2873 | SYDRQDAHR |
| 2874 | SYVFRHHYC |
| 2875 | TACATYRSF |
| 2876 | TACMTYRSF |
| 2877 | TACVAYRSF |
| 2878 | TACVNYRSF |
| 2879 | TACVTYRGL |
| 2880 | TACVTYR1F |
| 2881 | TAFVTYRSF |
| 2882 | TAFVTYRSL |
| 2883 | TAGHEGHSC |
| 2884 | TAGHQGHIC |
| 2885 | TAGVTYRSF |
| 2886 | TAITMWQYM |
| 2887 | TAMCFGRAK |
| 2888 | TAMSMCMYG |
| 2889 | TAMTICMYG |
| 2890 | TANDHRVDA |
| 2891 | TATDRRVDA |
| 2892 | TAVQKERYN |
| 2893 | TAVSICMYG |
| 2894 | TAVTMWQSM |
| 2895 | TAWVTYRSF |
| 2896 | TAYVTYRSF |
| 2897 | TCCFMMRQN |
| 2898 | TCCSIARYY |
| 2899 | TCDFMMRQN |
| 2900 | TCFFMMRQN |
| 2901 | TCFGIARYY |
| 2902 | TCFNIARYY |
| 2903 | TCFSIARCY |
| 2904 | TCFSIARYD |
| 2905 | TCFSIARYF |
| 2906 | TCFSIARYS |
| 2907 | TCFSIDRYY |
| 2908 | TCFSIGRYY |
| 2909 | TCFSITRYY |
| 2910 | TCFSIVRYY |
| 2911 | TCFSNARYY |
| 2912 | TCFSTARYY |
| 2913 | TCFSVARYY |
| 2914 | FCFTIARYY |
| 2915 | TCFTVARYY |
| 2916 | TCGSLYYQG |
| 2917 | TCHFALHGC |
| 2918 | TCHFMMRQN |
| 2919 | TCHYALHAC |
| 2920 | TCNKCKNRT |
| 2921 | TCRYALHGC |
| 2922 | TCSFMMRQN |
| 2923 | TCSRFDNQA |
| 2924 | TCVSLARYY |
| 2925 | TCWALFRGE |
| 2926 | TCWDLFRGG |
| 2927 | TCYFMMGQN |
| 2928 | TCYFMMREN |
| 2929 | TCYFMMRKN |
| 2930 | TCYFMMRPN |
| 2931 | TCYFMMRQD |
| 2932 | TCYFMMRQK |
| 2933 | TCYFMMRQT |
| 2934 | TCYFMMRRN |
| 2935 | TCYFMVRQN |
| 2936 | TCYSIARYY |
| 2937 | TCYSMMRQN |
| 2938 | TCYVMMRQN |
| 2939 | TCYYMMRQN |
| 2940 | TDCVTYRSF |
| 2941 | TFDLSNKVT |
| 2942 | TFGWFMRIP |
| 2943 | TFKGFHLQN |
| 2944 | TFSKCAKYD |
| 2945 | TFYFMMRQN |
| 2946 | TGCVTYRSF |
| 2947 | TGGLNERNG |
| 2948 | TGGTFVRTM |
| 2949 | TGMDKPVDA |
| 2950 | TGQATERAL |
| 2951 | TGTDHRVDA |
| 2952 | TGWSTCMIP |
| 2953 | TITKPINLF |
| 2954 | TITKPSHLF |
| 2955 | TLNKTLAES |
| 2956 | TNTCECVDR |
| 2957 | TNYIQYVWD |
| 2958 | TPLMMCRAS |
| 2959 | TPMMMCQAS |
| 2960 | TRCYFVASQ |
| 2961 | TRDAKVSNG |
| 2962 | TREWMCVHC |
| 2963 | TRHMGVSAG |
| 2964 | TRKWMCVHC |
| 2965 | TRLWMCVHC |
| 2966 | TRMDFHFFF |
| 2967 | TRPWMCVHC |
| 2968 | TRQRMCVHC |
| 2969 | TRQWMCAHC |
| 2970 | TRQWMCIHC |
| 2971 | TROWMCLHC |
| 2972 | TRQWMCVHG |
| 2973 | TRQWMCVHW |
| 2974 | TRQWMCVYC |
| 2975 | TRQWMGVHC |
| 2976 | TRQWMWVHC |
| 2977 | TRTLYMIDR |
| 2978 | TRTLYRINR |
| 2979 | TRTPYMINR |
| 2980 | TRWFQIGTE |
| 2981 | TRYFMMRQN |
| 2982 | TSCDRAHNA |
| 2983 | TSCVTYRSF |
| 2984 | TTCFEVASQ |
| 2985 | TTCFIVASQ |
| 2986 | TTCYFVASE |
| 2987 | TTCYFVASP |
| 2988 | TTCYFVASW |
| 2989 | TTCYFVGSQ |
| 2990 | TTCYFVSSQ |
| 2991 | TTCYFVVSQ |
| 2992 | TICYIVASE |
| 2993 | TFCYLVASP |
| 2994 | TTFKHTDHL |
| 2995 | TTGYFVASQ |
| 2996 | TTRYFVASQ |
| 2997 | TTWYFVASQ |
| 2998 | TTYYFVASQ |
| 2999 | TVGLNERNA |
| 3000 | TVGLNERNS |
| 3001 | TVGLNKRNG |
| 3002 | TVGVNERNG |
| 3003 | TVKMHFAAP |
| 3004 | TVKTNFTSK |
| 3005 | TVOSNEFSK |
| 3006 | TWALAAKYE |
| 3007 | TWFSIARYY |
| 3008 | TWKWDEYCN |
| 3009 | TWKWDKYCH |
| 3010 | TWKWDKYYN |
| 3011 | TWKWDRYCN |
| 3012 | TWNKCNMHV |
| 3013 | TWPYHDNRH |
| 3014 | TWQTKDFYN |
| 3015 | TWSKCNLHV |
| 3016 | TWSKCNMRV |
| 3017 | TWSKCNVHV |
| 3018 | TWSKCSMHV |
| 3019 | TWSKCTMHV |
| 3020 | TWSKFNMHV |
| 3021 | TWSRCNMHV |
| 3022 | TWTYCEQRH |
| 3023 | TYCDRADNG |
| 3024 | TYCDRAHDV |
| 3025 | TYCDRAHNA |
| 3026 | TYCDRTHNG |
| 3027 | TYFDRAHTG |
| 3028 | TYWDRAHNG |
| 3029 | TYYDRAHNG |
| 3030 | VACRMWHQP |
| 3031 | VAEKRMDRS |
| 3032 | VARHVDHDL |
| 3033 | VAWSNEDQK |
| 3034 | VCHTFLRLG |
| 3035 | VFCRMWHQP |
| 3036 | VGEKRMDRS |
| 3037 | VHEQLEGCK |
| 3038 | VILKMTKVL |
| 3039 | VLGNRHHQC |
| 3040 | VLKKFGHSF |
| 3041 | VLMQYERLF |
| 3042 | VLNKTLAES |
| 3043 | VLPKFGHSF |
| 3044 | VLQKFGHSV |
| 3045 | VLRKFGHSF |
| 3046 | VMKTRCDYD |
| 3047 | VMMHRVMSD |
| 3048 | VPIEYMTEK |
| 3049 | VPIPYMTEK |
| 3050 | VPIQYMAEK |
| 3051 | VPMQYMTEK |
| 3052 | VQEQLESCK |
| 3053 | VQKLRDLCC |
| 3054 | VQMQYARLF |
| 3055 | VQMQYERLY |
| 3056 | VQMQYQRLF |
| 3057 | VQMQYVRLF |
| 3058 | VQTYQHVDG |
| 3059 | VQVQYERLF |
| 3060 | VRIQYMTEK |
| 3061 | VRMQYERLF |
| 3062 | VSAECYFDM |
| 3063 | VSDEFYFDM |
| 3064 | VSDVCYFDM |
| 3065 | VSGECYFDM |
| 3066 | VTWMVRTSN |
| 3067 | VVCRMWYQP |
| 3068 | VVEKRMERS |
| 3069 | VVFRMWHQP |
| 3070 | VVWMQGFHP |
| 3071 | VVYRMWHQP |
| 3072 | VWRYFCVSL |
| 3073 | VWYKWWVMF |
| 3074 | WATKWDVHR |
| 3075 | WCNTRLAMA |
| 3076 | WCTSRLAMA |
| 3077 | WCTTRLTMA |
| 3078 | WCTTRLVMA |
| 3079 | WWMHGRGGR |
| 3080 | YACSLLQQY |
| 3081 | YAVQKERYN |
| 3082 | YCHKTAVAA |
| 3083 | YCHQQDRIT |
| 3084 | YCNKTAVAA |
| 3085 | YCYKNAVAA |
| 3086 | YCYKTAVAV |
| 3087 | YCYRTAVAA |
| 3088 | YGEAOITSP |
| 3089 | YIKQICADA |
| 3090 | YIKQICSDS |
| 3091 | YINKNPHQM |
| 3092 | YLHKNPHQM |
| 3093 | YLNKNHHQM |
| 3094 | YLNKNLHQM |
| 3095 | YLNKNPHQR |
| 3096 | YLNKNPHQV |
| 3097 | YLNQNPHQM |
| 3098 | YLTKNPHQM |
| 3099 | YMIKRCSQG |
| 3100 | YPTQRLHHL |
| 3101 | YRDEAKCWV |
| 3102 | YRDEAKSWA |
| 3103 | YRDEAQSWV |
| 3104 | YRDEDKSWV |
| 3105 | YRGEAKSWV |
| 3106 | YRHEAKSWV |
| 3107 | YRKQGHGEK |
| 3108 | YRMEYGTCK |
| 3109 | YRMEYGTWE |
| 3110 | YSAQLRQQM |
| 3111 | YSVDRRSDS |
| 3112 | YWCPNQWWR |
| 3113 | YWCPSKWWR |
| 3114 | YWCPSQLWR |
| 3115 | YWCPSQWLR |
| 3116 | YWGLIHCWN |
| 3117 | YWGPSQWWR |

### Example 32

### AAV5 Variants with Bone Marrow Tissue Tropism as Identified by Machine Learning

[0966] This example describes preferred properties of engineered AAV5 variants that display bone marrow tissue tropism as identified by machine learning methods. The same bioinformatics pre-process, machine learning methods, and analyses as described in EXAMPLE 19 and FIGS. 19-FIG. 22 were carried out to identify preferred properties of engineered AAV5 variants that display bone marrow tissue tropism.

[0967] Favored biophysical properties and favored amino acid residues at each position in the 581 to 589 region of an AAV5 VP capsid polypeptide, which are associated with a higher probability of bone marrow tissue tropism are described below. Any of the below machine learning-derived positional amino acid preferences described in TABLE 48 can be present alone or in combination with each other or in combination with any of the amino acid preferences observed and described in EXAMPLE 18, TABLE 35. Listed below in TABLE 48 are a summary of positional features shared between the top important features for bone marrow tropism extracted from the ML models.

TABLE 48
Machine Learning-Derived Bone Marrow Tissue Tropism Rules

High hydropathy at Xaa1
Xaa1 is selected from V, I, or L
Low mutability at Xaa1
Xaa1 is selected from Y, L, F, or C
Low hydropathy at Xaa2
Xaa2 is selected from Y or W
High mol mass at Xaa2
Xaa2 is selected from W
Low surface accessibility at Xaa2
Xaa2 is selected from W or A
Low hydrophilicity at Xaa2
Xaa2 is selected from W
Low mutability at Xaa2
Xaa2 is selected from C
Low average flexibility at Xaa2
Xaa2 is selected from W, M, or F
Low average flexibility at Xaa5
Xaa5 is selected from W, M, or F
Low average flexibility at Xaa6
Xaa6 is selected from W, M, or F
Low mutability at Xaa6
Xaa6 is selected from Y, F, L, or C
High solubility at Xaa6
Xaa6 is selected from W, F, I, or L
Low surface accessibility at Xaa7
Xaa7 is selected from C
Or
High surface accessibility at Xaa7
Xaa7 is selected from D or N
Low mutability at Xaa7
Xaa7 is selected from C
High solubility at Xaa7
Xaa7 is selected from C
Or
Low solubility at Xaa7
Xaa7 is selected from D
Low charge at Xaa8
Xaa8 is selected from D or E
High mutability at Xaa8
Xaa8 is selected from D, E, A, or T
High mol mass at Xaa9
Xaa9 is selected from H or F
Low mutability at Xaa9
Xaa9 is selected from Y, F, or L

[0968] TABLE 49 below provides sequences of the 581 to 589 region for variant AAV VP1 capsid polypeptides that exhibited bone marrow tissue tropism and comport to one or more of the rules provided in TABLE 48. The present disclosure, thus, provides for rAAVs composed of engineered AAV5 VP1 capsid polypeptides having a SEQ ID NO: 2, wherein the Xaa1 to Xaa9 region is any one of SEQ ID NO: 5118-SEQ ID NO: 6117, as disclosed in TABLE 49. Also encompassed herein are rAAVs composed of engineered AAV5 VP2 capsid polypeptides and engineered AAV5 VP3 capsid polypeptides having the sequences disclosed in the below table at the regions in AAV5 VP2 (amin acid residues 445 to 453) and AAV5 VP3 (amino acid residues 389-397) corresponding to the amino acids in the AAV5 VP1 581 to 589 region.

TABLE 49
Sequences of the 581 to 589 Region in AAV5
VP1 Capsid Polypeptide that Drive Bone Marrow
Tissue Tropism

| SEQ | |
|---|---|
| ID | 581-589 |
| NO | Sequence |
| 5118 | AADVVPCHH |
| 5119 | ACFHVAEMF |
| 5120 | AEMHMVADF |
| 5121 | AESLCNELC |
| 5122 | AKKSCQCWH |
| 5123 | ANDYDQCCM |
| 5124 | ANGHKFNEE |
| 5125 | ANNEFIQPF |
| 5126 | ANQCIFKTM |
| 5127 | AQCLCNELC |
| 5128 | AQGLCNELC |
| 5129 | AQHDWYQKY |
| 5130 | AQPNMDYVP |
| 5131 | AQPSMDCVP |
| 5132 | AQPSMDYAP |
| 5133 | AQPSMDYVA |
| 5134 | AQPSMEYVP |
| 5135 | AQSLCNELF |
| 5136 | AQSLCNELG |
| 5137 | AQSLCNQLC |
| 5138 | AQSLFNELC |
| 5139 | AQSVCNELC |
| 5140 | AQTLCNELC |
| 5141 | ARAKIQDEW |
| 5142 | ARALIQDEW |
| 5143 | ARARIQDEW |
| 5144 | ARGQIQDEW |
| 5145 | ARPSMDYVP |
| 5146 | ARVQIQDEW |
| 5147 | AWESSSIIS |
| 5148 | AYAENWCIE |
| 5149 | CANHMIRTR |
| 5150 | CATHMIRTK |
| 5151 | CCEHKEYLN |
| 5152 | CCEPKGYLN |
| 5153 | CCRKDNKKS |
| 5154 | CCRMANKKS |
| 5155 | CCRMDDKKS |
| 5156 | CCRMDHKKS |
| 5157 | CCRMDIKKS |
| 5158 | CCRMDNKES |
| 5159 | CCRMDNKIS |
| 5160 | CCRMDNKKA |
| 5161 | CCRMDNKRS |
| 5162 | CCRMDNQKS |
| 5163 | CCRRDNKKS |
| 5164 | CDAEAEFQR |
| 5165 | CDAEDEFRR |
| 5166 | CDAKAEFRR |
| 5167 | CDAVAEFRR |
| 5168 | CDDEAEFRR |
| 5169 | CDGEAEFLR |
| 5170 | CDGEAEFRR |
| 5171 | CDGVAEFRR |
| 5172 | CFKQKHNLF |
| 5173 | CFLQKHNLF |
| 5174 | CFQEKHNLF |
| 5175 | CFQPKHNLF |
| 5176 | CFQQKHNIF |
| 5177 | CFQQKHNLI |
| 5178 | CFQQNHNLF |
| 5179 | CFQRKHNLF |
| 5180 | CGYJEFMVG |
| 5181 | CHCDAVECF |
| 5182 | CHFDAMECF |
| 5183 | CHKCIGQDN |
| 5184 | CHQCIGPDN |
| 5185 | CHQCIGQDS |
| 5186 | CHQCIGQDT |
| 5187 | CHQCVGQDN |
| 5188 | CHWDAMECF |
| 5189 | CIKIQLIDQ |
| 5190 | CIKIQMIDK |
| 5191 | CIKIRMIDQ |
| 5192 | CIKVQMIDQ |
| 5193 | CINITAITP |
| 5194 | CISITVITP |
| 5195 | CMAHIWEAH |
| 5196 | CMAHIWEGD |
| 5197 | CMDHIWEGH |
| 5198 | CMSHIWEGH |
| 5199 | CPQCIGQDN |
| 5200 | CRCDAMECF |
| 5201 | CWYDEFMVG |
| 5202 | CWYHEFMVA |
| 5203 | CWYHEFMVD |
| 5204 | CWYHEFMVR |
| 5205 | CWYHEFMVS |
| 5206 | CWYHEFMVV |
| 5207 | CWYHEFVVG |
| 5208 | CWYHEHMVG |
| 5209 | CWYHEVMVG |
| 5210 | CWYHKFMVG |
| 5211 | CWYLEFMVG |
| 5212 | CWYNEFMVG |
| 5213 | CWYPEFMVG |
| 5214 | CWYREFMVG |
| 5215 | CWYYEFMVG |
| 5216 | DACDWKNDY |
| 5217 | DACQEWDSE |
| 5218 | DADFCARMP |
| 5219 | DADFCPRMA |
| 5220 | DADFCPRMS |
| 5221 | DADFCPRMT |
| 5222 | DARFDQWHY |
| 5223 | DCAENWCIE |
| 5224 | DCIHDQCSS |
| 5225 | DDDCWVFYH |
| 5226 | DDDFWVFYH |
| 5227 | DDDHWVFYH |
| 5228 | DDDYWAFYH |
| 5229 | DDDYWGFYH |
| 5230 | DDGSWVFYH |
| 5231 | DFAENWCIE |
| 5232 | DGDYWVFYH |
| 5233 | DGGCWPREC |
| 5234 | DHAENWCIE |
| 5235 | DHELTGSEA |
| 5236 | DITQLQCYC |
| 5237 | DKNEMFMKW |
| 5238 | DLDCDWLHS |
| 5239 | DMDCEWLHS |
| 5240 | DPCQDWDSE |
| 5241 | DPCQEWNSE |
| 5242 | DPCQKWDSE |
| 5243 | DPCQVWDSE |
| 5244 | DPCREWDSE |
| 5245 | DPGQEWDSE |
| 5246 | DQCQEWDSE |
| 5247 | DRCQEWDSE |
| 5248 | DSCQEWDSE |
| 5249 | DSRFDQWHH |
| 5250 | DTCQEWDSE |
| 5251 | DYAEHWCIE |
| 5252 | DYAEIWCIE |
| 5253 | DYAEKWCIA |
| 5254 | DYAENGCIE |
| 5255 | DYAENWCIA |
| 5256 | DYAENWCIG |
| 5257 | DYAENWCME |
| 5258 | DYAENWCNE |
| 5259 | DYAENWCVE |
| 5260 | DYAENWWIE |
| 5261 | DYAETWCIE |
| 5262 | DYAQNWCIE |
| 5263 | DYAVNWCIE |
| 5264 | DYDENWCIE |
| 5265 | DYGENWCIE |
| 5266 | DYPENWCIE |
| 5267 | DYTENWCIE |
| 5268 | DYVENWCIE |
| 5269 | EAEDE1OKS |
| 5270 | EAEDE1QRA |
| 5271 | EAGDE/QKA |
| 5272 | EATGMLYEE |
| 5273 | EAWNAHEEG |
| 5274 | ECESSS1IS |
| 5275 | EC1HAQCSS |
| 5276 | ECIHDKCSS |
| 5277 | ECIHDQCCS |
| 5278 | EC1HDQCSA |
| 5279 | EC1HDQCSP |
| 5280 | EC1HDQCST |
| 5281 | EC1HDQCTS |
| 5282 | ECIHHQCSS |
| 5283 | ECIHVQCSS |
| 5284 | EDFHEFAQT |
| 5285 | EDGHKFNEE |
| 5286 | EEKSCQCWH |
| 5287 | EGIHDOCSS |
| 5288 | EHAEWKCMY |
| 5289 | EHHEWKCMY |
| 5290 | EHPEGKCMY |
| 5291 | EHPELKCMY |
| 5292 | EHPEWKCLC |
| 5293 | EHPEWKGMY |
| 5294 | EHPEWTCMY |
| 5295 | EHREWKCMY |
| 5296 | EHSEWKCMY |
| 5297 | EHTEWKCMY |
| 5298 | EINQSTCET |
| 5299 | EKDQSTCET |
| 5300 | EKESCQCWH |
| 5301 | EKHQSTCET |
| 5302 | EKINWKRPF |
| 5303 | EKIMVKRTF |
| 5304 | EKIMVKWAF |
| 5305 | EKKACQCWH |
| 5306 | EKKPCQCWH |
| 5307 | EKKSCKCWH |
| 5308 | EKKSCLCWH |
| 5309 | EKKSCPCWH |
| 5310 | EKKSCQCWD |
| 5311 | EKKSCQCWN |
| 5312 | EKKSCRCWH |
| 5313 | EKKSFQCWH |
| 5314 | EKKSWQCWH |
| 5315 | EKKSYQCWH |
| 5316 | EKKTCQCWH |
| 5317 | EKLLSLCPS |
| 5318 | EKNESTCET |
| 5319 | EKNQCTCET |
| 5320 | EKNQGTCET |
| 5321 | EKNQSTCEA |
| 5322 | EKNQSTCEP |
| 5323 | EKNQSTCES |
| 5324 | EKNQSTCGT |
| 5325 | EKNVWNNKW |
| 5326 | EKQSCQCWH |
| 5327 | EKRSCQCWH |
| 5328 | EKTQSTCET |
| 5329 | EKTSCQCWH |
| 5330 | ELPEWKCMY |
| 5331 | ENAHKFNEE |
| 5332 | ENGDKFNEE |
| 5333 | ENGHEFNEE |
| 5334 | ENGHKFDEE |
| 5335 | ENGHKFNAE |
| 5336 | ENGHKFNEA |
| 5337 | ENGHKFNEK |
| 5338 | ENGHKFNKE |
| 5339 | ENGHKFNQE |
| 5340 | ENGHKESEE |
| 5341 | ENGHKFTEE |
| 5342 | ENGHQFNEE |
| 5343 | ENGHRFNEE |
| 5344 | ENPEWKCMY |
| 5345 | ENVHKFNEE |
| 5346 | EQHDWCQKY |
| 5347 | EQHDWYKKY |
| 5348 | EQHDWYLKY |
| 5349 | EQHHWYQKY |
| 5350 | EQHNWYQKY |
| 5351 | EQKSCQCWH |
| 5352 | EQLLSLCHS |
| 5353 | EQLLSLCLS |
| 5354 | EQLLSLCPN |
| 5355 | EQLLSLCSS |
| 5356 | EQLLTLCPS |
| 5357 | EQLSSLCPS |
| 5358 | EQNDWYQKY |
| 5359 | EQPLSLCPS |
| 5360 | EQVLSLCPS |
| 5361 | ERIHDQCSS |
| 5362 | ERKSCQCWH |
| 5363 | ERNQSTCET |
| 5364 | ESEDEIQKA |
| 5365 | ESGHKFNEE |
| 5366 | ESIGMVCSD |
| 5367 | ETALKWEWS |
| 5368 | ETAWKWDWS |
| 5369 | ETGHKFNEE |
| 5370 | ETSWKWEWS |
| 5371 | EVPWESKLC |
| 5372 | EVWDAHEEG |
| 5373 | EVWNSHEEG |
| 5374 | EWEGSSEIS |
| 5375 | EWESNSIIS |
| 5376 | EWESSSIIA |
| 5377 | EWESSSTIS |
| 5378 | EWETSSIIS |
| 5379 | EWGFGSDET |
| 5380 | EWIHDQCSS |
| 5381 | EWLPWINER |
| 5382 | FEMAMCSMG |
| 5383 | FKIRKFWDP |
| 5384 | FKMAMCSMG |
| 5385 | FKVGKFWDP |
| 5386 | FKVIKFWDP |
| 5387 | FKVRKFLDP |
| 5388 | FKVRKFWDS |
| 5389 | FQMAMGSMG |
| 5390 | FQMSMCSMG |
| 5391 | FQVRKFWDP |
| 5392 | FRIIWGADM |
| 5393 | FRILWQCEG |
| 5394 | FRMAMCSMG |
| 5395 | FRPIWGADM |
| 5396 | FRPIWGGDM |
| 5397 | FRTIWGADL |
| 5398 | FRTIWGADV |
| 5399 | FRTIWGPDM |
| 5400 | FRTIWGTDM |
| 5401 | FRVRKFWDP |
| 5402 | FVDSMLHKW |
| 5403 | FWDRQWDDF |
| 5404 | FWLGLFPTK |
| 5405 | FWLGVFPAK |
| 5406 | FWMGLFPAK |
| 5407 | GATHMIRTR |
| 5408 | GCEAKEYLN |
| 5409 | GCLTWAFRG |
| 5410 | GCVTWAFRC |
| 5411 | GCVTWDFRG |
| 5412 | GDHDMLNSL |
| 5413 | GEQEARNCS |
| 5414 | GEREGRNCS |
| 5415 | GEYLRHTVT |
| 5416 | GEYLRNTIT |
| 5417 | GEYLRSTVT |
| 5418 | GEYQRNTVT |
| 5419 | GGAAMWGRY |
| 5420 | GGAAMWRKY |
| 5421 | GGAGMWRRY |
| 5422 | GGASMWRRY |
| 5423 | GGATMWRRY |
| 5424 | GGDAMWRRY |
| 5425 | GGEERVGEA |
| 5426 | GGGAMWRRY |
| 5427 | GIEGMYWPL |
| 5428 | GILIMAYSW |
| 5429 | GLDCEWLHS |
| 5430 | GLLYDFNPE |
| 5431 | GLLYDFNQG |
| 5432 | GLPHSADVI |
| 5433 | GLPQSADGE |
| 5434 | GLPRSADVE |
| 5435 | GLSVMTYTS |
| 5436 | GMHHAVWAS |
| 5437 | GMNHAVGAS |
| 5438 | GMNHAVWAN |
| 5439 | GMNHAVWTS |
| 5440 | GMNHSVWAS |
| 5441 | GMNNAVWAS |
| 5442 | GMNQAVWAS |
| 5443 | GMNYAVWAS |
| 5444 | GMPQSADVI |
| 5445 | GMSHAVWAS |
| 5446 | GMTHAVWAS |
| 5447 | GNGHKFNEE |
| 5448 | GQSLCNELC |
| 5449 | GVPQSADVE |
| 5450 | GWMCEVPWT |
| 5451 | GWMWFVHWT |
| 5452 | GWMWEVPWR |
| 5453 | GWMWEVTWT |
| 5454 | HDEMMGLER |
| 5455 | HDIMFAHQM |
| 5456 | HDIMFSHQM |
| 5457 | HDEMFTHKM |
| 5458 | HDIMFTHKR |
| 5459 | HDIMFTHQR |
| 5460 | HDIMFTYQM |
| 5461 | HDKMMGLER |
| 5462 | HQLMFTHQM |
| 5463 | HDQMMDLER |
| 5464 | HDQMMGMER |
| 5465 | HNIMFTHQM |
| 5466 | IADVVPCHH |
| 5467 | IAMLESWWS |
| 5468 | ECFHVAEMF |
| 5469 | EDMLESWWG |
| 5470 | EGEAQDCNP |
| 5471 | EGMIRATRE |
| 5472 | IGMIRDARE |
| 5473 | IGMIRDTHE |
| 5474 | IGMIWDTRE |
| 5475 | IGMLRDTRE |
| 5476 | IGVMLNAMK |
| 5477 | IGVMLNDMQ |
| 5478 | ILHMMHRGA |
| 5479 | IMAPLVCDD |
| 5480 | IMAPENCDG |
| 5481 | IMEALVCDD |
| 5482 | IMEHLVCDD |
| 5483 | IMEHMVCDD |
| 5484 | IMEPLACDD |
| 5485 | IMEPLVCAD |
| 5486 | IMEPLVCDA |
| 5487 | IMEPLVCDN |
| 5488 | IMEPLVCDV |
| 5489 | IMEPLVCGD |
| 5490 | IMEPLVCND |
| 5491 | IMEPPVCDD |
| 5492 | IMEPRVCDD |
| 5493 | IMEPVVCDD |
| 5494 | IMERLVCDD |
| 5495 | IMERMVCDD |
| 5496 | IMKPLVCDD |
| 5497 | IMKQWPAMF |
| 5498 | IMPQWPAMF |
| 5499 | IMQEWPAMF |
| 5500 | IMQPLVCDD |
| 5501 | IMQPWPAMF |
| 5502 | IMQQWLAMF |
| 5503 | IMQQWPAKF |
| 5504 | IMQQWPAMY |
| 5505 | IMQQWPDMF |
| 5506 | IMQQWPSMF |
| 5507 | IMQQWPTMF |
| 5508 | IMRQWPAMF |
| 5509 | IMVPLVCDD |
| 5510 | INNEFIQPF |
| 5511 | IPDLMHNVH |
| 5512 | IPGLMSDYQ |
| 5513 | IRQQWPAMF |
| 5514 | IRTIWGADM |
| 5515 | ISALMSDYQ |
| 5516 | ISDLMHDVH |
| 5517 | ISDLMHNAH |
| 5518 | ISDLMHNGH |
| 5519 | ISDLMHNVN |
| 5520 | ISDLMHSVH |
| 5521 | ISDLMHYVH |
| 5522 | ISDLMNNVH |
| 5523 | ISDLVHNVH |
| 5524 | ISDMMHNVH |
| 5525 | ISELMSDYQ |
| 5526 | ISGLMSDDQ |
| 5527 | ISGLMSDHQ |
| 5528 | ISGLMSDYE |
| 5529 | ISGLMSDYK |
| 5530 | ISGLTSDYQ |
| 5531 | ISGLVSDYQ |
| 5532 | ISNLMHNVH |
| 5533 | ISQHTCNKD |
| 5534 | ISQHTCSED |
| 5535 | ISQQTCSKD |
| 5536 | ISRHTCSKD |
| 5537 | ISSADSWPM |
| 5538 | ISVLMSDYQ |
| 5539 | ITCIEAQEN |
| 5540 | ITCIEGLEN |
| 5541 | ITCIEGQED |
| 5542 | ITCIEGREN |
| 5543 | ITCLEGQEN |
| 5544 | ITEPLVCDD |
| 5545 | ITQHTCSKD |
| 5546 | IWARQWDDF |
| 5547 | IWDHOWDDF |
| 5548 | IWDMMHRGA |
| 5549 | IWDRKWDDF |
| 5550 | IWDRLWDDF |
| 5551 | IWDRPWDDF |
| 5552 | IWDRQLDDF |
| 5553 | IWDRQWADF |
| 5554 | IWDRQWDAF |
| 5555 | IWDRQWDDY |
| 5556 | IWDRQWGDF |
| 5557 | IWDRQWNDF |
| 5558 | IWDRQWYDF |
| 5559 | IWDSQWDDF |
| 5560 | IWHRQWDDF |
| 5561 | IWKLPSVIT |
| 5562 | IWKMPPIDM |
| 5563 | IWMLPSETT |
| 5564 | IWMLPSVAT |
| 5565 | IWMLPSV1T |
| 5566 | IWVRQWDDF |
| 5567 | IWYRQWDDF |
| 5568 | KCCLGKNSR |
| 5569 | KFHSKERMS |
| 5570 | KENEFAYTY |
| 5571 | KINIFEYTC |
| 5572 | KENVFEYTY |
| 5573 | KETIFEYTY |
| 5574 | KKDVWNNKW |
| 5575 | KKHVWNNKW |
| 5576 | KKNAWNNKW |
| 5577 | KKNEMFMKW |
| 5578 | KKNEWNNKW |
| 5579 | KKNGWNNKW |
| 5580 | KKNVWDNKW |
| 5581 | KKWAIHNKW |
| 5582 | KKWAINNEW |
| 5583 | KKNVWNSKW |
| 5584 | KKNVWNTKW |
| 5585 | KKNVWNYKW |
| 5586 | KKNVWSNKW |
| 5587 | KKNVWYNKW |
| 5588 | KKSVWNNKW |
| 5589 | KKYVWNNMI |
| 5590 | KLLPWINER |
| 5591 | KLNIFEYTY |
| 5592 | KNDHFVCYL |
| 5593 | KNGHKENEE |
| 5594 | KNNEFIQPF |
| 5595 | KPVQCACEN |
| 5596 | KQHDWYQKY |
| 5597 | KRLPWINER |
| 5598 | KTNVWNNKW |
| 5599 | KWGFGSDET |
| 5600 | KWLPCINER |
| 5601 | KWLPGINER |
| 5602 | KWLPWIHER |
| 5603 | KWLPWIKER |
| 5604 | KWLPWISER |
| 5605 | KWLPWVNER |
| 5606 | KWLQWINER |
| 5607 | KWLRWINER |
| 5608 | KWMPWINER |
| 5609 | KWPPWINER |
| 5610 | KWQPWINER |
| 5611 | KWRPWINER |
| 5612 | LADSMLHKW |
| 5613 | LAGQMDEMS |
| 5614 | LAIQPCDER |
| 5615 | LATGMLYEE |
| 5616 | LDDSMLHKW |
| 5617 | LDQMMGLER |
| 5618 | LGIQPCDER |
| 5619 | LIDSMLHKW |
| 5620 | LILIMAYSW |
| 5621 | LPAWQQHGR |
| 5622 | LQGGFDHLK |
| 5623 | LQGGFDHLP |
| 5624 | LQGGFDHLS |
| 5625 | LSASMEYEE |
| 5626 | LSGLIDEMS |
| 5627 | LSGQIAEMS |
| 5628 | LSGQIDEMA |
| 5629 | LSGQIDEMP |
| 5630 | LSGQIDEVI |
| 5631 | LSGQIDEMY |
| 5632 | LSMVFSRGE |
| 5633 | LSVQIDEMS |
| 5634 | LSVVFSKGE |
| 5635 | LVDIMLHKW |
| 5636 | LVDSMLHEW |
| 5637 | LVDSMLHRW |
| 5638 | LVDSMLRKW |
| 5639 | LVDSMPHKW |
| 5640 | LVDTMLHKW |
| 5641 | LVHSMLHKW |
| 5642 | LVIEPCDER |
| 5643 | LVIKPCDER |
| 5644 | LVIQACDER |
| 5645 | LVIQHCDER |
| 5646 | LVIQPCAER |
| 5647 | LVIQPCDEG |
| 5648 | LVIQPCDEH |
| 5649 | LVIQPCDEP |
| 5650 | LVIQPCDKR |
| 5651 | LVIQPCNER |
| 5652 | LVIORYDER |
| 5653 | LVIQSCDER |
| 5654 | LVIRPCDER |
| 5655 | LVLQPCDER |
| 5656 | LVMQPCDER |
| 5657 | LVNSMLHKW |
| 5658 | LVTQPCDER |
| 5659 | LVVQPCDER |
| 5660 | LWAAMEYEE |
| 5661 | LWAFLEYEE |
| 5662 | LWAFMEYEE |
| 5663 | LWASMAYEE |
| 5664 | LWASMEFEE |
| 5665 | LWASMEHEE |
| 5666 | LWASMESEE |
| 5667 | LWASMEYDK |
| 5668 | LWASMEYEA |
| 5669 | LWASMEYEQ |
| 5670 | LWASMEYEV |
| 5671 | LWASMGYEE |
| 5672 | LWASMKYEE |
| 5673 | LWASVEYEE |
| 5674 | LWENYHSEF |
| 5675 | LWEQWCWEF |
| 5676 | LWESKENKS |
| 5677 | LWGSMEYEE |
| 5678 | LWKEWCWEF |
| 5679 | LWKIMCWEF |
| 5680 | LWKMPPIDM |
| 5681 | LWKPRHYDF |
| 5682 | LWKPWCWEF |
| 5683 | LWKQGCWEF |
| 5684 | LWKQLCWEF |
| 5685 | LWKQSCWEF |
| 5686 | LWKQWCGEF |
| 5687 | LWKQWCLEF |
| 5688 | LWKQWCSEF |
| 5689 | LWKQWCWEC |
| 5690 | LWKQWCWEI |
| 5691 | LWKQWCWES |
| 5692 | LWKQWCWEV |
| 5693 | LWKQWCWEY |
| 5694 | LWKOWCWGF |
| 5695 | LWKQWCWKF |
| 5696 | LWKQWFWEF |
| 5697 | LWKQWGWEC |
| 5698 | LWKRWCWEF |
| 5699 | LWMQWCWEF |
| 5700 | LWPSMEYEE |
| 5701 | LWQQWCWEF |
| 5702 | LWRQWCWEF |
| 5703 | LWTQWCWEF |
| 5704 | LWTSMEYEV |
| 5705 | LWVRQWDDF |
| 5706 | LWVSMEYEE |
| 5707 | LYEIRFSDM |
| 5708 | LYEIRFVDM |
| 5709 | LYKIRFADM |
| 5710 | LYKQAPSEG |
| 5711 | LYMPAPSEG |
| 5712 | LYMQATSEG |
| 5713 | LYVIRFADM |
| 5714 | LYVQAPSEG |
| 5715 | MAEPMGCQA |
| 5716 | MAEQMGCRA |
| 5717 | MAEQMVCQA |
| 5718 | MAGDCACAM |
| 5719 | MDHPNDHFF |
| 5720 | MDHTNDLFF |
| 5721 | MEWQSEYVS |
| 5722 | MGEQMGCQA |
| 5723 | MGEVMDFLP |
| 5724 | MKNVWNNKW |
| 5725 | MLGHANDGL |
| 5726 | MLGHASDAL |
| 5727 | MMEPLVCDD |
| 5728 | MSAVMDFLP |
| 5729 | MSEIMDFLP |
| 5730 | MSEVMDFMP |
| 5731 | MSEVMDFPP |
| 5732 | MSEVMDFQP |
| 5733 | MSEVMDFRP |
| 5734 | MSGVMDFLP |
| 5735 | MSQVMDFLP |
| 5736 | MSWNWWALY |
| 5737 | MSWNWWNLY |
| 5738 | MSWNWWTVY |
| 5739 | MSWTWWTLY |
| 5740 | MTEQMGCQA |
| 5741 | MWASMEYEE |
| 5742 | MWDRQWDDF |
| 5743 | MWKQWQNEF |
| 5744 | NACDLKNDY |
| 5745 | NACDWKSDY |
| 5746 | NACDWKTDY |
| 5747 | NACDWKYDY |
| 5748 | NACDWRNDY |
| 5749 | NADVVPCHH |
| 5750 | NAYDWKNDY |
| 5751 | NCFHVAEMF |
| 5752 | NFFDSEDMG |
| 5753 | NGGCWAREC |
| 5754 | NGGCWLREC |
| 5755 | NGGCWPWEC |
| 5756 | NGGCWSREC |
| 5757 | NGGCWTREC |
| 5758 | NGGFWPREC |
| 5759 | NGGGWPREC |
| 5760 | NINQLQCYC |
| 5761 | NITQLQCCC |
| 5762 | NKHEMFMKW |
| 5763 | NKNAMFMKW |
| 5764 | NKNGMFMKW |
| 5765 | NKNVWNNKW |
| 5766 | NLDCEWLHS |
| 5767 | NMEPLVCDD |
| 5768 | NMTQLQCYC |
| 5769 | NNDDFVCYL |
| 5770 | NNDHCVCYL |
| 5771 | NNDHFICYL |
| 5772 | NNDHFLCYL |
| 5773 | NNDHFVCFL |
| 5774 | NNDHFVCHL |
| 5775 | NNDHFVCNL |
| 5776 | NNDHFVCYM |
| 5777 | NNDHIVCYL |
| 5778 | NNDHSVCYL |
| 5779 | NNDHVVCYL |
| 5780 | NNDHYVCYL |
| 5781 | NNDRFVCYL |
| 5782 | NNHHFVCYL |
| 5783 | NPCQENDSE |
| 5784 | NRGMNAWTA |
| 5785 | NSCDWKNDY |
| 5786 | NTCIEGQEN |
| 5787 | NVGQITQDC |
| 5788 | NWFDSEDMG |
| 5789 | NYAENWCIE |
| 5790 | NYRVHGGAG |
| 5791 | NYRVHGSAA |
| 5792 | NYRVRGSAG |
| 5793 | PATGMLYEE |
| 5794 | PKELFPTCM |
| 5795 | PLCHVMADR |
| 5796 | PMDWVAECR |
| 5797 | PNNEFIQPF |
| 5798 | PQCHVMDDR |
| 5799 | PQCHVMSDR |
| 5800 | PQCHVTADR |
| 5801 | PQCLVMADR |
| 5802 | PQCRVMADR |
| 5803 | PQSLCNELC |
| 5804 | PQYHVMADR |
| 5805 | PVIQPCDER |
| 5806 | PWGFGSDET |
| 5807 | PWKIDFWYH |
| 5808 | PWKVDFWDH |
| 5809 | PWLSEFMHW |
| 5810 | QAAGMLYEE |
| 5811 | QANGMLYEE |
| 5812 | QATRMLYEE |
| 5813 | QATVMLYEE |
| 5814 | QDFHEFAET |
| 5815 | QDFHEFAPT |
| 5816 | QDFHEFAQA |
| 5817 | QDFHEFDQT |
| 5818 | QDFHEFPQT |
| 5819 | QDFPEFAQT |
| 5820 | QDIHFFAQT |
| 5821 | QFMCEIECR |
| 5822 | QFMFEIECK |
| 5823 | QHPEWKCMY |
| 5824 | QKGISEFQR |
| 5825 | QKNVWNNKW |
| 5826 | QMDWVAGCR |
| 5827 | QMDWVGECR |
| 5828 | QNCFFMHWW |
| 5829 | QNGHKFNEE |
| 5830 | QNWFFLHWW |
| 5831 | QPTGMLYEE |
| 5832 | QQCHVMADR |
| 5833 | QQHDWYQKY |
| 5834 | QVPWESRLC |
| 5835 | QVTGMLYEE |
| 5836 | QVWNAHEEG |
| 5837 | QWAFGSDET |
| 5838 | QWESKEMGS |
| 5839 | QWESKEMYS |
| 5840 | QWGCGSDET |
| 5841 | QWGFASDET |
| 5842 | QWGFESDET |
| 5843 | QWGFGADET |
| 5844 | QWGFGSDEA |
| 5845 | QWGFGSDEN |
| 5846 | QWGFGSDEP |
| 5847 | QWGFGSGET |
| 5848 | QWGFGSHET |
| 5849 | QWGFGSNET |
| 5850 | QWGFGSVET |
| 5851 | QWGFVSDET |
| 5852 | QWGIGSDET |
| 5853 | QWGSGSDET |
| 5854 | QWGVGSDET |
| 5855 | QWGYGSDET |
| 5856 | QWKQWCWEF |
| 5857 | QWVFGSDET |
| 5858 | RDFHEFAQT |
| 5859 | RDIMFTHQM |
| 5860 | RHELLEWDS |
| 5861 | RHQLLEWAS |
| 5862 | RHQLMEWDS |
| 5863 | RHQLVEWDS |
| 5864 | RHRLLEWDS |
| 5865 | RKNVWNNKW |
| 5866 | RMDWVAECR |
| 5867 | RNNEFIQPF |
| 5868 | RRQLLEWDS |
| 5869 | RSSTFEHHK |
| 5870 | RSTIFERHK |
| 5871 | RVIQPCDER |
| 5872 | RVTRDERWG |
| 5873 | RWGFGSDEA |
| 5874 | RWKQWCWEF |
| 5875 | SCFHVAEMF |
| 5876 | SCILRLISS |
| 5877 | SCYSHICRI |
| 5878 | SFDPSWWMY |
| 5879 | SFFLRLISS |
| 5880 | SFHPIWWMY |
| 5881 | SFHPSWWMS |
| 5882 | SFHPSWWVY |
| 5883 | SFHPTWWMY |
| 5884 | SFHRSWWMY |
| 5885 | SFHSSWWMY |
| 5886 | SFHTSWWMY |
| 5887 | SFILRLICS |
| 5888 | SFILRLISF |
| 5889 | SFILRPISS |
| 5890 | SFNPSWWMY |
| 5891 | SFNSHICRI |
| 5892 | SFSSHICRI |
| 5893 | SFYNHICRI |
| 5894 | SFYPSWWMY |
| 5895 | SFYSHICHI |
| 5896 | SFYSHICPI |
| 5897 | SFYSHICRM |
| 5898 | SFYSLICRI |
| 5899 | SFYSNICRI |
| 5900 | SFYSPICRI |
| 5901 | SFYSYICRI |
| 5902 | SGFPMWDYW |
| 5903 | SGIPMWDHW |
| 5904 | SGIPMWDYR |
| 5905 | SGIPMWEYW |
| 5906 | SGIPMWNYW |
| 5907 | SGIPVWDYW |
| 5908 | SGIQMWDYW |
| 5909 | SGIRMWDYW |
| 5910 | SGNPMWDYW |
| 5911 | SILIMAYSW |
| 5912 | SIYSHICRI |
| 5913 | SMNSLWHMR |
| 5914 | SQSLCNELC |
| 5915 | SRAQIQDEW |
| 5916 | SRTIWGADM |
| 5917 | SSILRLISS |
| 5918 | SSIPMWDYW |
| 5919 | SVPMDHCWA |
| 5920 | SWDRQWDDF |
| 5921 | SWKIDFWDH |
| 5922 | SYAVLQRTM |
| 5923 | SYILRLISS |
| 5924 | SYYSHICRI |
| 5925 | TADAVPCHH |
| 5926 | TADVVLCHH |
| 5927 | TADVVPCDH |
| 5928 | TAEAQDCNP |
| 5929 | TAEVVPCHH |
| 5930 | TANVVPCHH |
| 5931 | TCEAQDCNP |
| 5932 | TCEGREVDS |
| 5933 | TCEGRKLDS |
| 5934 | TCFDSEDMG |
| 5935 | TCFHAAEMF |
| 5936 | TCFHFAEMF |
| 5937 | TCFHGAEMF |
| 5938 | TCFHIAEMF |
| 5939 | TCFHVAAMF |
| 5940 | TCFHVDEMF |
| 5941 | TCFHVTEMF |
| 5942 | TCFNVAEMF |
| 5943 | TCFPVAEMF |
| 5944 | TCFRVAEMF |
| 5945 | TCGRDEFAF |
| 5946 | TCGRDLFAF |
| 5947 | TCGRDQCAF |
| 5948 | TCGRDQFAY |
| 5949 | TCGRDQFSF |
| 5950 | TCIHVAEMF |
| 5951 | TFFHVAEMF |
| 5952 | TFHPSWWMY |
| 5953 | TGDVVPCHH |
| 5954 | TGEAEDCNP |
| 5955 | TGEAQDCNA |
| 5956 | TGEAQDCSP |
| 5957 | TGFHVAEMF |
| 5958 | TGGCWPREC |
| 5959 | TGIPMWDYW |
| 5960 | TGKAQDCNP |
| 5961 | TGMSELADE |
| 5962 | TGPMDHCWA |
| 5963 | THFPWSGEA |
| 5964 | THQLLEWDS |
| 5965 | TMEPLVCDD |
| 5966 | TMSVVQCER |
| 5967 | TNDEFIQPF |
| 5968 | TNDHFVCYL |
| 5969 | TNHCIFKTM |
| 5970 | TNHEFIQPF |
| 5971 | TNIEFIQPF |
| 5972 | TNMSELADE |
| 5973 | TNNAVIQPF |
| 5974 | TNNECIQPF |
| 5975 | TNNEFFQPF |
| 5976 | TNNEFIEPF |
| 5977 | TNNEFIQLF |
| 5978 | TNNEFIQQF |
| 5979 | TNNEFIQRF |
| 5980 | TNNEFIQSF |
| 5981 | TNNEFIRPF |
| 5982 | TNNEFLQPF |
| 5983 | TNNEFVQPF |
| 5984 | TNNEIIQPF |
| 5985 | TNNEVIQPF |
| 5986 | TNNQFIQPF |
| 5987 | TNQCLFKIM |
| 5988 | TNSEFIQPF |
| 5989 | TNTEFIQPF |
| 5990 | TNYEFIQPF |
| 5991 | TRAQIQDEW |
| 5992 | TSDVVPCHH |
| 5993 | TSMNELADE |
| 5994 | TSNEFIQPF |
| 5995 | TVPMDHCWP |
| 5996 | TVPMDHCWS |
| 5997 | TWFHVAEMF |
| 5998 | TWLPWINER |
| 5999 | TYAVLKRTM |
| 6000 | VATDSVNES |
| 6001 | VGEERVGEP |
| 6002 | VGGERVGEA |
| 6003 | VGVMLNAMQ |
| 6004 | VKKIKRCEG |
| 6005 | VMEPLVCDD |
| 6006 | VMYPWISCL |
| 6007 | VNDDDQCCM |
| 6008 | VNDHDQCCM |
| 6009 | VNDNDQCCM |
| 6010 | VNDYAQCCM |
| 6011 | VNDYDKCCM |
| 6012 | VNDYDQCCR |
| 6013 | VNDYDQCCV |
| 6014 | VNDYDQCFM |
| 6015 | VNDYDQCWM |
| 6016 | VNDYDQCYM |
| 6017 | VNDYEQCCM |
| 6018 | VNDYVQCCM |
| 6019 | VNGHKFNEE |
| 6020 | VNGYDQCCM |
| 6021 | VNHYDQCCM |
| 6022 | VNNYDQCCM |
| 6023 | VQKIINSTV |
| 6024 | VQLLSLCPS |
| 6025 | VSDLMHNVH |
| 6026 | VSGQIDEMS |
| 6027 | VVIQPCDER |
| 6028 | VWAAMEYEE |
| 6029 | VWDCQWDDF |
| 6030 | VWEMPPIDM |
| 6031 | VWESSSIIS |
| 6032 | VWKKPPIDM |
| 6033 | VWKMLPIDM |
| 6034 | VWKMPPIDT |
| 6035 | VWKMPPIDV |
| 6036 | VWKMPPLDM |
| 6037 | VWKMPPMDM |
| 6038 | VWKMPPVDM |
| 6039 | VWKMPQIDM |
| 6040 | VWKMPSIDM |
| 6041 | VWKMSPIDM |
| 6042 | VWKQWCWEF |
| 6043 | VWKRPPIDM |
| 6044 | VWKTPPIDM |
| 6045 | WVKVPPIDM |
| 6046 | VWQMPPIDM |
| 6047 | VWTMPPIDM |
| 6048 | WAKCQFGAT |
| 6049 | WCRMDNKKS |
| 6050 | WCRWPFYSE |
| 6051 | WHCDAMECF |
| 6052 | WILIMASSW |
| 6053 | WILIMAYAW |
| 6054 | WILIMAYSL |
| 6055 | WILIMAYTW |
| 6056 | WILIMEYSW |
| 6057 | WILIMSYSW |
| 6058 | WILIMTYSW |
| 6059 | WILIMVYSW |
| 6060 | WILSMAYSW |
| 6061 | WIMIMAYSW |
| 6062 | WIPIMAYSW |
| 6063 | WIQIMAYSW |
| 6064 | WIRIMAYSW |
| 6065 | WIVIMAYSW |
| 6066 | WLIHLWTQF |
| 6067 | WLIPLWAQF |
| 6068 | WLIPLWPQF |
| 6069 | WLIPLWTEF |
| 6070 | WLIPMWTQF |
| 6071 | WLIPPWTQF |
| 6072 | WLIPVWTQF |
| 6073 | WLIRLWTQF |
| 6074 | WLLIMAYSW |
| 6075 | WLLPLWTQF |
| 6076 | WPSIWKNEQ |
| 6077 | WPSIWNNER |
| 6078 | WQMRMQNKF |
| 6079 | WSKCQFGAA |
| 6080 | WSKCQFGAM |
| 6081 | WSKCRFGAT |
| 6082 | WSKFQFGAT |
| 6083 | WSKWQFGAT |
| 6084 | WSLIMAYSW |
| 6085 | WSQCQFGAT |
| 6086 | WSRCQFGAT |
| 6087 | WTIACIQRG |
| 6088 | WTNDCIQRG |
| 6089 | WVDSMLHKW |
| 6090 | WVLIMAYSW |
| 6091 | YASYKAMED |
| 6092 | YCFDSEDMG |
| 6093 | YDIMFTHQM |
| 6094 | YDQMMGLER |
| 6095 | YFAADERWG |
| 6096 | YFQQKHNLF |
| 6097 | YFTADEQWG |
| 6098 | YGGCWPREC |
| 6099 | YISDSVSHG |
| 6100 | YKVRKFWDP |
| 6101 | YPNGMTFEP |
| 6102 | YQEHFHNLI |
| 6103 | YQENFHNWI |
| 6104 | YQNDMTFEP |
| 6105 | YRSHEKFQF |
| 6106 | YRSPEKFEF |
| 6107 | YRSPEQFQF |
| 6108 | YRTPEKFQF |
| 6109 | YSDEMDWSK |
| 6110 | YSNEMDWNK |
| 6111 | YSSSKAMED |
| 6112 | YVGDSVSHG |
| 6113 | YVSDCVSHG |
| 6114 | YVSDGVSHG |
| 6115 | YVSDSVNHG |
| 6116 | YVSDSVSHS |
| 6117 | YVSDSVSRG |

### Example 33

### AAV5 Variants with Colon Tissue Tropism as Identified by Machine Learning

[0969] This example describes preferred properties of engineered AAV5 variants that display colon tissue tropism as identified by machine learning methods. The same bioinformatics pre-process, machine learning methods, and analyses as described in EXAMPLE 19 and FIGS. 19-FIG. 22 were carried out to identify preferred properties of engineered AAV5 variants that display colon tissue tropism.

[0970] Favored biophysical properties and favored amino acid residues at each position in the 581 to 589 region of an AAV5 VP capsid polypeptide, which are associated with a higher probability of colon tissue tropism are described below. Any of the below machine learning-derived positional amino acid preferences described in TABLE 50 can be present alone or in combination with each other or in combination with any of the amino acid preferences observed and described in EXAMPLE 14, TABLE 27. Listed below in TABLE 50 are a summary of positional features shared between the top important features for colon tropism extracted from the ML models.

TABLE 50
Machine Learning-Derived Colon Tissue Tropism Rules

High mol mass at Xaa1
Xaa1 is selected from Y or W
High solubility at Xaa1
Xaa1 is selected from W, F, I, or L
Low solubility at Xaa2
Xaa2 is selected from D
Low mutability at Xaa2
Xaa2 is selected from P or K
Medium mol mass at Xaa2
Xaa2 is selected from D, E, N, K, M, Q, I, or L
Low hydropathy at Xaa2
Xaa2 is selected from D, E, R, K, H, N, or Q
Low mutability at Xaa3
Xaa3 is selected from K, V, P, or C
High solubility at Xaa3
Xaa3 is selected from W, F, I, or L
High average flexibility at Xaa5
Xaa5 is selected from S, P, G, R, E, or D
High surface accessibility at Xaa5
Xaa5 is selected from D or N
Low hydropathy at Xaa6
Xaa6 is selected from R
Low mutability at Xaa6
Xaa6 is selected from Y, R, F, or L
Low solubility at Xaa6
Xaa6 is selected from R or Q
High surface accessibility at Xaa6
Xaa6 is selected from E, R, or K
High average flexibility at Xaa6
Xaa6 is selected from G or R
Low solubility at Xaa8
Xaa8 is selected from D

[0971] TABLE 51 below provides sequences of the 581 to 589 region for variant AAV VP1 capsid polypeptides that exhibited colon tissue tropism and comport to one or more of the rules provided in TABLE 50. The present disclosure, thus, provides for rAAVs composed of engineered AAV5 VP1 capsid polypeptides having a SEQ ID NO: 2, wherein the Xaa1 to Xaa9 region is any one of SEQ ID NO: 11118-SEQ ID NO: 12117, as disclosed in TABLE 51. Also encompassed herein are rAAVs composed of engineered AAV5 VP2 capsid polypeptides and engineered AAV5 VP3 capsid polypeptides having the sequences disclosed in the below table at the regions in AAV5 VP2 (amin acid residues 445 to 453) and AAV5 VP3 (amino acid residues 389-397) corresponding to the amino acids in the AAV5 VP1 581 to 589 region.

TABLE 51
Sequences of the 581 to 589 Region in AAV5
VP1 Capsid Polypeptide that Drive Colon
Tissue Tropism

| SEQ | |
|---|---|
| ID | 581-589 |
| NO | Sequence |
| 11118 | ACCKVRRDC |
| 11119 | ACPVEFVPW |
| 11120 | ACYIDAAPN |
| 11121 | ACYLRNEDR |
| 11122 | ADASRTELD |
| 11123 | ADASRTEPD |
| 11124 | ADASRTKRD |
| 11125 | ADERPNATD |
| 11126 | ADIMFEIIF |
| 11127 | ADIMKESIV |
| 11128 | ADIMKVSIF |
| 11129 | ADIMMESIF |
| 11130 | ADIMQESIF |
| 11131 | ADIMRESIF |
| 11132 | AD1NRWSYV |
| 11133 | ADITKESIF |
| 11134 | ADLHNNHEV |
| 11135 | ADLNNNHED |
| 11136 | ADRDGPHWY |
| 11137 | ADRGGPHWD |
| 11138 | AECCLEPKH |
| 11139 | AEDGADMII |
| 11140 | AEGCKFYNG |
| 11141 | AELMMGSII |
| 11142 | AEQQHRLIE |
| 11143 | AFCRGHYKA |
| 11144 | AFCRGHYPA |
| 11145 | AFCRGHYRA |
| 11146 | AFCRGLYQA |
| 11147 | AFCRGRYQA |
| 11148 | AFDTFYAFS |
| 11149 | AFHHDRKYY |
| 11150 | AFKEFSLCC |
| 11151 | AFLYAAGWC |
| 11152 | AFNLDRKYY |
| 11153 | AFNQDRKYY |
| 11154 | AFPQNEHQR |
| 11155 | AFVTFYAFR |
| 11156 | AGPVEFFPW |
| 11157 | AGRQEKPDG |
| 11158 | AGRQEKPYV |
| 11159 | AGWQKCYDS |
| 11160 | AGWQMCDDS |
| 11161 | AGWQTCYDS |
| 11162 | AHDLATEWE |
| 11163 | AIDYLIDIL |
| 11164 | AINHEKTDW |
| 11165 | AKDPKPIRK |
| 11166 | ALNHDRKYY |
| 11167 | ALPDTNHAD |
| 11168 | ALSNDNAIL |
| 11169 | ALSNHNAVL |
| 11170 | AMHMTRGKC |
| 11171 | AMIWPQVLD |
| 11172 | AMQKTRGKC |
| 11173 | ANCDMKDPW |
| 11174 | ANCDMTDRW |
| 11175 | ANCNKRHNW |
| 11176 | ANNHEKTDL |
| 11177 | ANNHEKTEW |
| 11178 | ANNHVKTDW |
| 11179 | APPPHEVKI |
| 11180 | APPPHEVKS |
| 11181 | APPPREVKF |
| 11182 | APPQMCDFI |
| 11183 | AQFKDRSSF |
| 11184 | ARPKNLPLS |
| 11185 | AVTNHCIDR |
| 11186 | AVWQMCYDS |
| 11187 | AWDGSIEFL |
| 11188 | AYDAPRWFM |
| 11189 | AYFQARLLL |
| 11190 | AYIMKESIF |
| 11191 | AYNHDRKYY |
| 11192 | CDKMCAPQA |
| 11193 | CDPHGMVGC |
| 11194 | CDRKGAGNC |
| 11195 | CDRMYAPQA |
| 11196 | CERKGAGHC |
| 11197 | CERKGAGNG |
| 11198 | CERKGSGNC |
| 11199 | CERRGAGNC |
| 11200 | CFCKCGMPS |
| 11201 | CFDCSRAHP |
| 11202 | CFDRGKAFW |
| 11203 | CGFPGFSPV |
| 11204 | CGRWNFQYL |
| 11205 | CGSSGHLIY |
| 11206 | CHPLTAPSV |
| 11207 | CIHTCESII |
| 11208 | CINPCESII |
| 11209 | CLLDGKSDL |
| 11210 | CMCPPRLEV |
| 11211 | CMKFAFWEC |
| 11212 | CMKIAFWGC |
| 11213 | CMKMAFWEC |
| 11214 | CMPTARICM |
| 11215 | CQIWAKNEY |
| 11216 | CQIWGKNEF |
| 11217 | CQLWAKNEF |
| 11218 | CQPHWEKGD |
| 11219 | CRKMMORIS |
| 11220 | CSGSGHLIY |
| 11221 | CWDERNVFC |
| 11222 | CWFMGEGCH |
| 11223 | CWLIWKLDR |
| 11224 | CWVLWKLDR |
| 11225 | DCKCDMFNC |
| 11226 | DCPLSNSYE |
| 11227 | DDKIAVGWP |
| 11228 | DDKIAVRWH |
| 11229 | DDVDCCDRK |
| 11230 | DFIMKYHAM |
| 11231 | DFNHDRKYY |
| 11232 | DFPQNEHQR |
| 11233 | DEQEFSLCC |
| 11234 | DGFMDFKHH |
| 11235 | DGMRDFKPG |
| 11236 | DGVVPVTNL |
| 11237 | DGYMDFKHL |
| 11238 | DGYMDFKRH |
| 11239 | DHALATEWE |
| 11240 | DHDLATGWE |
| 11241 | DHDLTIEWE |
| 11242 | DHDLVTEWE |
| 11243 | DHVLATEWE |
| 11244 | DKDCDLTSR |
| 11245 | DKDGDRFYI |
| 11246 | DKDHSRIDG |
| 11247 | DKHDSRIDG |
| 11248 | DKHHGRIDG |
| 11249 | DKHHSRFDG |
| 11250 | DKHHSRIDC |
| 11251 | DKHHSRIDD |
| 11252 | DKHHSRIDR |
| 11253 | DKHHSRIDV |
| 11254 | DKHHSRIHG |
| 11255 | DKHHSRITG |
| 11256 | DKHHSRIYG |
| 11257 | DKHHSRMDG |
| 11258 | DKHHSRNDG |
| 11259 | DKHHSRVDG |
| 11260 | DKHLSRIDG |
| 11261 | DKHNSRIDG |
| 11262 | DKHPSRIDG |
| 11263 | DKHRSRIDG |
| 11264 | DKLHSRIDG |
| 11265 | DKNHSRIDG |
| 11266 | DKPHSRIDG |
| 11267 | DKYHSRIDG |
| 11268 | DMHHSRIDG |
| 11269 | DNGFKLQKS |
| 11270 | DNQCSDKGL |
| 11271 | DPPNDMGAV |
| 11272 | DQHHSRIDG |
| 11273 | DRDCNLTSR |
| 11274 | DRHHSRIDG |
| 11275 | DSRCPAAYF |
| 11276 | DTFDRIFCS |
| 11277 | DWDHMFEME |
| 11278 | DWSHIFGRG |
| 11279 | DYNWHACSI |
| 11280 | EAIHRQACT |
| 11281 | EDIMKESIF |
| 11282 | EDNKWHGWH |
| 11283 | EEAPGFFCF |
| 11284 | EEAPGFICY |
| 11285 | EEATGFICF |
| 11286 | EEDPGFICF |
| 11287 | EEGPGFICF |
| 11288 | EEGPGFIFF |
| 11289 | EETPGFICF |
| 11290 | EFKEFSLCC |
| 11291 | EFPIDRRFP |
| 11292 | EGDEHEFAG |
| 11293 | EGDEPEFAG |
| 11294 | EGDEQEFVG |
| 11295 | EGFPFEGIS |
| 11296 | EGFRFEGII |
| 11297 | EGHNYEAML |
| 11298 | EGIYFVKHD |
| 11299 | EGQNYEALL |
| 11300 | EGQNYEAVL |
| 11301 | EGQNYESML |
| 11302 | EGQNYETML |
| 11303 | EGRNYEAML |
| 11304 | EIAYDYFPM |
| 11305 | EIILKDMCH |
| 11306 | EIILKDMWN |
| 11307 | EIIVKDMWH |
| 11308 | EKAPGFICF |
| 11309 | EKCGPCARY |
| 11310 | EKCMCHDIS |
| 11311 | EKHDGLMRR |
| 11312 | EKPDGLMRQ |
| 11313 | EKPEPRYKE |
| 11314 | EKPQPWYKE |
| 11315 | EKPSITCRE |
| 11316 | EMCMDVPSV |
| 11317 | EQCLAAAGE |
| 11318 | EQCLAAAVE |
| 11319 | EQCLAAGAE |
| 11320 | EQCLAAPAE |
| 11321 | EQCLAASAE |
| 11322 | EQCVAAAAE |
| 11323 | EQDIYGAIV |
| 11324 | EQPVGQSHR |
| 11325 | EQTEGQSHR |
| 11326 | ESINRQACT |
| 11327 | EVAPGFICF |
| 11328 | EVEYDYFPM |
| 11329 | EVIYFVQHD |
| 11330 | EVLYFVKHD |
| 11331 | EVWCQVEPN |
| 11332 | EWACAHAMR |
| 11333 | EWDQPNYIE |
| 11334 | EWVCAHAMR |
| 11335 | EYFQARLWL |
| 11336 | EYRQPQSIA |
| 11337 | FACPVLWGQ |
| 11338 | FANPVLWGQ |
| 11339 | FASP1LWGQ |
| 11340 | FASPVLWGR |
| 11341 | FCWRDNEPE |
| 11342 | FDGPSVRGE |
| 11343 | FDKMYAPQA |
| 11344 | FDMCIEYSN |
| 11345 | FDMWGVGIP |
| 11346 | FDNHANTWA |
| 11347 | FDSPVLWGQ |
| 11348 | FEQTRFPMQ |
| 11349 | FEREFHYYD |
| 11350 | FEREFKYYD |
| 11351 | FERPPKLGI |
| 11352 | FEWEFQYYD |
| 11353 | FHDNARLFL |
| 11354 | FHLREKDDC |
| 11355 | FHYDCQDKV |
| 11356 | FHYDCRDNV |
| 11357 | FIAHKGQQW |
| 11358 | FIEFHVILV |
| 11359 | FIGKGYAIF |
| 11360 | FIGMGYAIC |
| 11361 | FIVHKGRQW |
| 11362 | FIVLKGQQW |
| 11363 | FIVMGYAIF |
| 11364 | FIVNKGQQW |
| 11365 | FLERYQHMD |
| 11366 | FLFMEPRNG |
| 11367 | FLGCYCHYA |
| 11368 | FLGCYCLYA |
| 11369 | FLGCYCPDA |
| 11370 | FLGCYCPSA |
| 11371 | FLGCYCPYG |
| 11372 | FLGCYCPYS |
| 11373 | FLGCYCRYA |
| 11374 | FLGCYFPYA |
| 11375 | FLGCYGPYA |
| 11376 | FLGCYRPYA |
| 11377 | FLGFYCPYA |
| 11378 | FLGMGYAIF |
| 11379 | FLGNTWLGP |
| 11380 | FLGWYCPYA |
| 11381 | FLGYYCPYA |
| 11382 | FLRNAWLGP |
| 11383 | FLRNTWLDP |
| 11384 | FLRNTWLGA |
| 11385 | FLRNTWLGS |
| 11386 | FLRNTWLSP |
| 11387 | FLRNTWLVP |
| 11388 | FMCNIGCFT |
| 11389 | FMGCYCPYA |
| 11390 | FNVCTMWAQ |
| 11391 | FPDCKNKAF |
| 11392 | FPLRENDDC |
| 11393 | FPTCWRYAK |
| 11394 | FPTIGLMAC |
| 11395 | FPYCKNKPF |
| 11396 | FQRNTWLGP |
| 11397 | FRIRCRVNK |
| 11398 | FRIRRRVNK |
| 11399 | FRRNTWLGP |
| 11400 | FSEQHAVND |
| 11401 | FSEQHAVNT |
| 11402 | FSEQHVVNN |
| 11403 | FSERHAVNN |
| 11404 | FSGWFRVCD |
| 11405 | FSPVERHNG |
| 11406 | FTSPVLWGQ |
| 11407 | FVCMEPRNG |
| 11408 | FVFMDPRNG |
| 11409 | FVFVEPRNG |
| 11410 | FVKGEFHFH |
| 11411 | FVQPFLHDG |
| 11412 | FWCRPRLHY |
| 11413 | FWPGHNPHN |
| 11414 | FWSRMIPLV |
| 11415 | FWTGHNPHI |
| 11416 | FWTGHNPPN |
| 11417 | FWTGRNPHN |
| 11418 | FYPGERHNG |
| 11419 | GCDGYALAI |
| 11420 | GCDPYNMVD |
| 11421 | GDDDCCDRK |
| 11422 | GDHHGMVGC |
| 11423 | GDKIKESDR |
| 11424 | GDKMGICHC |
| 11425 | GDKMGIHHC |
| 11426 | GDKMYAPQA |
| 11427 | GDPHGMGGC |
| 11428 | GDPHGMLGC |
| 11429 | GDPPGMVGC |
| 11430 | GDPQGMVGC |
| 11431 | GDVDCCDRT |
| 11432 | GDYHYRVNW |
| 11433 | GEAPGFICF |
| 11434 | GENKVNDPA |
| 11435 | GEYHCRVNW |
| 11436 | GEYKLNDPA |
| 11437 | GEYKVNDPP |
| 11438 | GEYRVNDPA |
| 11439 | GFCRGHYQA |
| 11440 | GFMCNLCGP |
| 11441 | GFQTKFHLC |
| 11442 | GGDGYAIAI |
| 11443 | GGRHGYLHD |
| 11444 | GGWQMCYDS |
| 11445 | GGYKVNDPA |
| 11446 | GIIHHCVSE |
| 11447 | GIIRHCFSE |
| 11448 | GIIRHCLSE |
| 11449 | GIIRHCVIE |
| 11450 | GIIRNCVSE |
| 11451 | GKHHSRIDG |
| 11452 | GLRDGNSIF |
| 11453 | GMIPYNWSW |
| 11454 | GMPATELWL |
| 11455 | GMRRDGLDV |
| 11456 | GMRWDRDQL |
| 11457 | GMSSHTPIY |
| 11458 | GNCNKRHNW |
| 11459 | GPKKGGQAM |
| 11460 | GPKQGGOSM |
| 11461 | GPVLPDVGG |
| 11462 | GPVMPDVGA |
| 11463 | GRSSHPP1Y |
| 11464 | GSKSGGADD |
| 11465 | GSKYGGDDD |
| 11466 | GSNSGGDDD |
| 11467 | GVRRVKIEW |
| 11468 | GWIEDKREV |
| 11469 | GWSEEKREV |
| 11470 | HDDWKKQPN |
| 11471 | HGAERFDRF |
| 11472 | HGAERVDRV |
| 11473 | HGLVDFDPH |
| 11474 | HKHHSRIDG |
| 11475 | HNHTRKDPV |
| 11476 | HVANEEVGG |
| 11477 | HVGNEEVSG |
| 11478 | HWRVQLPWN |
| 11479 | ICHANNVRV |
| 11480 | ICKARIEKY |
| 11481 | ICKPRLEKY |
| 11482 | ICPANNVRG |
| 11483 | ICPANNVRL |
| 11484 | ICPVNNVRV |
| 11485 | ICRPRIEKY |
| 11486 | ICSANNVRV |
| 11487 | ICSIDNNNY |
| 11488 | ICSMDNKNY |
| 11489 | IDHDNWDMR |
| 11490 | IEKDEMPVC |
| 11491 | IERPPKLGT |
| 11492 | IFLNIFELR |
| 11493 | IFLNIFEML |
| 11494 | IGANGWQCC |
| 11495 | IGLVDFDPH |
| 11496 | IHAPKLLWL |
| 11497 | IHCPDSWSQ |
| 11498 | IHCPEAWSQ |
| 11499 | IHCPESWSL |
| 11500 | IHGPCTPWD |
| 11501 | IHHEGRSVC |
| 11502 | IHPPKLLWL |
| 11503 | IHSPKLLWL |
| 11504 | IHTNMRVIS |
| 11505 | IHTNMRVIV |
| 11506 | IHTPRLLWL |
| 11507 | IIKFEWQEV |
| 11508 | IIKFEWQKF |
| 11509 | IIKFEWQQV |
| 11510 | IIKFEWQRV |
| 11511 | IKDQNKEWN |
| 11512 | ILRNTWLGP |
| 11513 | IMNEAHYRF |
| 11514 | IMNKDHYRF |
| 11515 | 1MNRAHYRF |
| 11516 | 1NGSNTLTN |
| 11517 | IPECWWRWH |
| 11518 | IPEFWLRWH |
| 11519 | IPEIWWRWH |
| 11520 | IPKDEMPVC |
| 11521 | IPPLKTEDN |
| 11522 | IPRNVYMCD |
| 11523 | IPRTVYMCD |
| 11524 | IQKDEMPFC |
| 11525 | IQKDEMPVW |
| 11526 | IQKYEMPVC |
| 11527 | IQRDEMPVC |
| 11528 | IRPNDSSFH |
| 11529 | IRPNEGSFH |
| 11530 | IRPNESSFP |
| 11531 | ISGKEMNST |
| 11532 | ISNEMSKIL |
| 11533 | IVADNTVCA |
| 11534 | IVDDHTVCA |
| 11535 | IVDTNTATK |
| 11536 | IVPRFLVEA |
| 11537 | IWPANNVRV |
| 11538 | KDDWAGYQM |
| 11539 | KDIREIWDI |
| 11540 | KDERGEWDI |
| 11541 | KDIRVIWDI |
| 11542 | KDMRDIWDI |
| 11543 | KDSWAGYQM |
| 11544 | KDWMPSYAL |
| 11545 | KDYWAEYQM |
| 11546 | KDYWAGCQM |
| 11547 | KDYWAGYKM |
| 11548 | KDYWAGYRM |
| 11549 | KDYWAVYQM |
| 11550 | KEGCHGRMG |
| 11551 | KEGCHVRVG |
| 11552 | KELSCDQNW |
| 11553 | KFLLAFEVT |
| 11554 | KFLYAAGWC |
| 11555 | KGIVIDRIL |
| 11556 | KHENKKDVL |
| 11557 | KIMQFCWDF |
| 11558 | KKFLCWEWS |
| 11559 | KLCNPVVFV |
| 11560 | KMCAYQPDT |
| 11561 | KMCHDERQV |
| 11562 | KMCPDERKV |
| 11563 | KMCPDERQL |
| 11564 | KMCTDERQV |
| 11565 | KMFPDERQV |
| 11556 | KMGPDERQV |
| 11567 | KMLIDEPTL |
| 11568 | KMLIDGATL |
| 11569 | KMLMDEATL |
| 11570 | KMLNDEATL |
| 11571 | KMRIDEATL |
| 11572 | KMWPDERQV |
| 11573 | KNFEELDND |
| 11574 | KNFEKLDNE |
| 11575 | KNFEKLDYD |
| 11576 | KNFEKLNND |
| 11577 | KNKC1ENRW |
| 11578 | KPCPVRPPH |
| 11579 | KPDDEFDCD |
| 11580 | KPVYLYCSD |
| 11581 | KQCLAAAAE |
| 11582 | KSEWQLMYG |
| 11583 | KTADEFDCD |
| 11584 | KWERYRDFI |
| 11585 | KYKREEYEK |
| 11586 | LCKLPEIRK |
| 11587 | LDAKMVQPS |
| 11588 | LDCDSVWSP |
| 11589 | LDLKMVQPS |
| 11590 | LEGEGMWAF |
| 11591 | LERKPRNDC |
| 11592 | LERKPRNYF |
| 11593 | LERKPRSYC |
| 11594 | LERQPRNYC |
| 11595 | LESEGMWSF |
| 11596 | LHHEGRSVC |
| 11597 | LKHPPQPKV |
| 11598 | LKQINRHPS |
| 11599 | LMDAIDSIW |
| 11600 | LMVAIDSIW |
| 11501 | LNYCDQYGD |
| 11602 | LNYCDQYVG |
| 11603 | LNYERRDNY |
| 11604 | LPAYTTPIV |
| 11605 | LPFGNKFPD |
| 11606 | LPGPVTVSW |
| 11607 | LPKPHFDKQ |
| 11608 | LPKPYFDKK |
| 11609 | LPLLKTEDN |
| 11610 | LPLTDAPMV |
| 11611 | LPPLETEDN |
| 11612 | LPPLKTEAN |
| 11613 | LPPLKTEDD |
| 11614 | LPPLKTEDT |
| 11615 | LPPLKTKDN |
| 11616 | LPPLKTVDN |
| 11617 | LPPLRTEDN |
| 11618 | LQRLGYSPD |
| 11619 | LQTYTTPIV |
| 11620 | LR1DPKDSF |
| 11621 | LSICHPVMP |
| 11622 | LSICKPVMP |
| 11623 | LWDHGASYK |
| 11624 | LWHHGASYM |
| 11625 | LYDQSRSQL |
| 11626 | LYPCKMPMN |
| 11627 | LYYPSRSQL |
| 11628 | LYYQSRSKL |
| 11629 | MCKPRIEKY |
| 11630 | MCLEDGKDW |
| 11631 | MCSIDNKNY |
| 11632 | MDKHGCCCL |
| 11633 | MDKLGCCCW |
| 11634 | MDMQGGKVC |
| 11635 | MDQHGCCON |
| 11635 | MDWCVQQSS |
| 11637 | MDWCVQQST |
| 11638 | MEADHKSDP |
| 11639 | MKGCFVHHS |
| 11640 | MKGYHHFIS |
| 11641 | MKGYFVHHY |
| 11642 | MMPCMVNFG |
| 11643 | MNKCIENRG |
| 11644 | MNKWIENRW |
| 11645 | MQFVDRLAM |
| 11646 | MQFVDRWAL |
| 11647 | MRCCNVPWS |
| 11648 | MRDRMKDEE |
| 11649 | MVIHPAISR |
| 11650 | MWDHRNETM |
| 11651 | MWDNRNESM |
| 11652 | NAMKRSPDV |
| 11653 | NAMQRSPDF |
| 11654 | NCENATDGD |
| 11655 | NCLVDFDPH |
| 11656 | NCMNATDWD |
| 11657 | NCNNELTDR |
| 11658 | NDMAQSYRE |
| 11659 | NDMEQSDRE |
| 11660 | NDMEQSYHE |
| 11661 | NELAYQDWS |
| 11662 | NELEYQHWS |
| 11663 | NFCPENAWQ |
| 11664 | NFEDQESHV |
| 11665 | NFGDLESHV |
| 11666 | NFITQEMYS |
| 11667 | NFNTQEMYS |
| 11668 | NFTTKEMYS |
| 11669 | NFTTMNMTC |
| 11670 | NFTTQEMYY |
| 11671 | NFWMDMHRI |
| 11672 | NGGTWANVE |
| 11673 | NGHNELTDR |
| 11674 | NGLDDFDPH |
| 11675 | NGLVDCDPH |
| 11676 | NGLVDFAPH |
| 11677 | NGLVDFDPL |
| 11678 | NGLVDFDRH |
| 11679 | NGLVDFDTH |
| 11680 | NGLVDFVPH |
| 11681 | NGLVHFDPH |
| 11682 | NGNNELADR |
| 11683 | NGNNELTDK |
| 11684 | NGNNGLTDR |
| 11685 | NGRVDFDPH |
| 11686 | NGWEGSEDD |
| 11687 | NGWSDVDRQ |
| 11688 | NHNVPACII |
| 11689 | NIEQMLAIG |
| 11690 | NKHHSRIDG |
| 11691 | NMHSEQTPL |
| 11692 | NMKFSVGMN |
| 11693 | NMKISVDMN |
| 11694 | NMKTESAHK |
| 11695 | NMKTKSADK |
| 11696 | NMKTKSAHE |
| 11697 | NMKTKSAHT |
| 11698 | NMKTKSAPK |
| 11699 | NMKTKSARK |
| 11700 | NMKTKSDHK |
| 11701 | NMKTKTAHK |
| 11702 | NMKTRSAHK |
| 11703 | NMPWNMEWN |
| 11704 | NMPWNMPWN |
| 11705 | NMPWNMQLN |
| 11706 | NMPWNMQWK |
| 11707 | NMPWNMQWS |
| 11708 | NMPWNVQWN |
| 11709 | NMQTKSAHK |
| 11710 | NNMIVAKIA |
| 11711 | NPCHGYLKM |
| 11712 | NPPCARECR |
| 11713 | NPPCARGGR |
| 11714 | NPPCARKWR |
| 11715 | NPPCARQWR |
| 11716 | NPRCGIFTL |
| 11717 | NQGLPCCQI |
| 11718 | NQGMHCCQI |
| 11719 | NQGMPCCRI |
| 11720 | NQNNLEYPI |
| 11721 | NRHPPAAIS |
| 11722 | NRNPPAAII |
| 11723 | NRNPPEALS |
| 11724 | NRNSFHQEE |
| 11725 | NRPWQMRWA |
| 11726 | NRTSFHKFE |
| 11727 | NSITANCSK |
| 11728 | NSITENCAK |
| 11729 | NSITENCSN |
| 11730 | NTKVKDEDN |
| 11731 | NVLGPPSFN |
| 11732 | NVNNELTDR |
| 11733 | NVTANYCCF |
| 11734 | NYDHFIAAS |
| 11735 | NYGKDMHKL |
| 11736 | NYNNFIAAS |
| 11737 | NYRESRSDL |
| 11738 | PAIHNHMCT |
| 11739 | PAIRNHMCP |
| 11740 | PAYKNSGGD |
| 11741 | PDFVAEQQP |
| 11742 | PETLWANIW |
| 11743 | PETLWTDIW |
| 11744 | PETPWTNIW |
| 11745 | PFCRGHYQA |
| 11746 | PFISPKQVS |
| 11747 | PF1SPREVS |
| 11748 | PHYTDLGP |
| 11749 | PFLYTDWGP |
| 11750 | PFNNWFAAG |
| 11751 | PGWQMCYDS |
| 11752 | PINFPYEWL |
| 11753 | PKFAFNQCY |
| 11754 | PKGMINWPS |
| 11755 | PKVRINWPS |
| 11756 | PKVVINWPS |
| 11757 | PMCMEPFPM |
| 11758 | PMNRDTLIS |
| 11759 | PPPLNRKWD |
| 11760 | PQAYTTPIV |
| 11761 | PQLYFTTDK |
| 11762 | PQTKKDCPA |
| 11763 | PRKMMQRIS |
| 11764 | PSDLKLVNN |
| 11765 | PSTIKHVDP |
| 11766 | PSTIKRIDP |
| 11767 | PWDGSIEFL |
| 11768 | QCLLWNDCK |
| 11769 | QELFHGKIA |
| 11770 | QFPRHEPIQ |
| 11771 | QFPRQEPLQ |
| 11772 | QFYNRSDDL |
| 11773 | NVTANYCCF |
| 11774 | QINPFYMWF |
| 11775 | QINQFCQIV |
| 11776 | QMCPDERQV |
| 11777 | QPCLVRPPH |
| 11778 | QPCTVRPPH |
| 11779 | QSMWETDRN |
| 11780 | QWCWMAVSI |
| 11781 | QWNMFQVIF |
| 11782 | RAAKVIPPT |
| 11783 | RADKFIPPT |
| 11784 | RADKVITPT |
| 11785 | RAYKVIPPT |
| 11786 | RCDLKEMWK |
| 11787 | RCYLKEMRK |
| 11788 | RDCHMRITD |
| 11789 | RDCWMVFII |
| 11790 | RDFVAGQQP |
| 11791 | RDFVGEQQP |
| 11792 | RDGKWALEN |
| 11793 | RDGKWVREN |
| 11794 | RDYHMLITD |
| 11795 | RGFHHADNV |
| 11796 | RGFNHADNG |
| 11797 | RHIYRKGWG |
| 11798 | RLRDGNSIF |
| 11799 | RMCPYEAWK |
| 11800 | RMCTYEPWK |
| 11801 | RPEFNAFQA |
| 11802 | RSFIDIVGT |
| 11803 | RTQPIGVDP |
| 11804 | RYCWMVVII |
| 11805 | SADYNFGFS |
| 11806 | SCGWDHGNL |
| 11807 | SCPANNVRV |
| 11808 | SCPVEFFPW |
| 11809 | SDASRTERD |
| 11810 | SDKMGIYHC |
| 11811 | SDLHNNHED |
| 11812 | SDNWGAQCC |
| 11813 | SDPHGMVGC |
| 11814 | SFGPSQVCC |
| 11815 | SFIGNAQWC |
| 11816 | SFIGNARWC |
| 11817 | SFLAHNNFH |
| 11818 | SFLANNHFH |
| 11819 | SFLANNTFH |
| 11820 | SFNHDRKYY |
| 11821 | SFYEWPHCE |
| 11822 | SGICCCDNA |
| 11823 | SGIGCCDNS |
| 11824 | SGWKMCYDS |
| 11825 | SGWQMCYDS |
| 11826 | SHDQALMFE |
| 11827 | SHFYEDARS |
| 11828 | SIIRHCVSE |
| 11829 | SIQPFLHDG |
| 11830 | SLNGYTLVC |
| 11831 | SLPEYSNVK |
| 11832 | SNPWPMGKV |
| 11833 | SPHHDKDPF |
| 11834 | SPMINLWPS |
| 11835 | SRKMMKRIS |
| 11836 | SRKMMPRIS |
| 11837 | SRQCPLEIG |
| 11838 | SSDLKLVNS |
| 11839 | SSGGDHGNL |
| 11840 | SSIHHQCCT |
| 11841 | SSIQHHCCT |
| 11842 | SSVWDHGNL |
| 11843 | SVQLFLHDG |
| 11844 | SVQPFLHDA |
| 11845 | SVQPFLYDG |
| 11846 | SVQPVLHDG |
| 11847 | SYDNWDFCC |
| 11848 | TCSIDNKNY |
| 11849 | TCTWIGAGS |
| 11850 | TDASRTERD |
| 11851 | TDIMKESIF |
| 11852 | TDYWAGYQM |
| 11853 | TFPDGEMYQ |
| 11854 | TGLVDFDPH |
| 11855 | TGTWIGTGS |
| 11856 | TGWQMCYDS |
| 11857 | TIDDHSFDQ |
| 11858 | TINCKWCFC |
| 11859 | TINPHKSDW |
| 11860 | TISCKWCVC |
| 11861 | TNICYDQIK |
| 11862 | TNICYDQIR |
| 11863 | TNNHEKTDW |
| 11864 | TPCCLHHPA |
| 11865 | TPPPHEVKF |
| 11866 | TQMFAMPPS |
| 11867 | TQPPLMNIL |
| 11868 | TRNPPAAIS |
| 11869 | TRPSAASIR |
| 11870 | TRPSAASVG |
| 11871 | TRPSASSIG |
| 11872 | TSICYDQIQ |
| 11873 | TSPPDQVPV |
| 11874 | TWDGSIEFL |
| 11875 | VADHRPMYS |
| 11876 | VAIVDGWIE |
| 11877 | VAPSESSWE |
| 11878 | VCLVDGKDW |
| 11879 | VCPANNVRV |
| 11880 | VCTIYYMCG |
| 11881 | VDCNKRHNW |
| 11882 | VDHCTAIGA |
| 11883 | VDIFDGWIE |
| 11884 | VDPFCAVRI |
| 11885 | VDPMGEAGT |
| 11886 | VDVDCCDRK |
| 11887 | VEFADNPWN |
| 11888 | VERGNKIAS |
| 11889 | VERSNKISS |
| 11890 | VFCRGHYQA |
| 11891 | VGTKEGPDP |
| 11892 | VHHEGRSFC |
| 11893 | VHHEGRSVF |
| 11894 | VHHKGRSVC |
| 11895 | VHLRENDDC |
| 11896 | VHPEGRSVC |
| 11897 | VHQEGRSVC |
| 11898 | VHREGRSVC |
| 11899 | VHYEGRSVC |
| 11900 | VISRECYEE |
| 11901 | VKCKDKYQS |
| 11902 | VKCQDKYQY |
| 11903 | VKHHSRIDG |
| 11904 | VLGLPPYPE |
| 11905 | VLLYMRNNQ |
| 11906 | VMAAEQLNQ |
| 11907 | VMIWPQILD |
| 11908 | VMPTDCILV |
| 11909 | VNCDKRHNW |
| 11910 | VNCNKRHNL |
| 11911 | VNCNKRHNM |
| 11912 | VNCNKRRNW |
| 11913 | VNCNKRYNW |
| 11914 | VNCNNRHNC |
| 11915 | VNCNRRHNW |
| 11916 | VNCSKRHNW |
| 11917 | VNCYKRHNW |
| 11918 | VNGNKRHNW |
| 11919 | VNLQDLSDR |
| 11920 | VNPSDQTNH |
| 11921 | VNSSDQNNH |
| 11922 | VPDFDPFWS |
| 11923 | VPIFDGWIE |
| 11924 | VPNFAAFCM |
| 11925 | VPPACRHKK |
| 11926 | VPPGCRHQK |
| 11927 | VPTFDPFWS |
| 11928 | VQFVDRWAM |
| 11929 | VQTKKDCPA |
| 11930 | VRFDMCKWT |
| 11931 | VRFEMMSWT |
| 11932 | VIDFHTDML |
| 11933 | VTDFNTDMQ |
| 11934 | VVFINYNDQ |
| 11935 | VVFTNYNDK |
| 11936 | VVPPGNVIL |
| 11937 | VVPPGNVLP |
| 11938 | VVYRDTCNG |
| 11939 | VWDHRNESM |
| 11940 | VYNWHACAI |
| 11941 | WAEDAYRRF |
| 11942 | WCACVFEYW |
| 11943 | WCERVFEYW |
| 11944 | WCEWVFEYW |
| 11945 | WCFKKELCN |
| 11946 | WCKLPEIRR |
| 11947 | WCQCVFEYW |
| 11948 | WCQLPEIRK |
| 11949 | WCYLMNLES |
| 11950 | WDHNCQATI |
| 11951 | WDHNYQDTI |
| 11952 | WDNNCQDTI |
| 11953 | WDQNCQDTI |
| 11954 | WERMGQIEC |
| 11955 | WERMGQIED |
| 11956 | WERMGQIEH |
| 11957 | WERMGQIES |
| 11958 | WERMGQIQY |
| 11959 | WERMGQMEY |
| 11960 | WEWDRPFMK |
| 11961 | WFFHYKPWM |
| 11962 | WFMKCNWWT |
| 11963 | WGCCEEMDS |
| 11964 | WINTGPLRH |
| 11965 | WKIKPDHRV |
| 11966 | WKLKNCKSD |
| 11967 | WLFEGKLDT |
| 11968 | WLFYGCEPN |
| 11969 | WLPHGPRME |
| 11970 | WLPNRRIDD |
| 11971 | WLQDGNSIF |
| 11972 | WLRDGDSIF |
| 11973 | WLRDGNSIS |
| 11974 | WLRDGNSIY |
| 11975 | WLREGNSIF |
| 11976 | WLRGGNSIF |
| 11977 | WLRVGNSIF |
| 11978 | WMGWDRDQL |
| 11979 | WMPNRRIDA |
| 11980 | WMPNRRIDG |
| 11981 | WMRCDRDQL |
| 11982 | WMRLDRDQL |
| 11983 | WMRWARDQL |
| 11984 | WMRWDQDQL |
| 11985 | WMRWDRAQL |
| 11986 | WMRWDREQL |
| 11987 | WMSDMLKAV |
| 11988 | WMWWDRDQL |
| 11989 | WNIPNRSQA |
| 11990 | WNNEHLKVW |
| 11991 | WNNFYCGCN |
| 11992 | WPFPVQFCD |
| 11993 | WPHHAKDPF |
| 11994 | WPHHDKDPV |
| 11995 | WPHHNKDPF |
| 11996 | WPRDGNSIF |
| 11997 | WPSEGLIGA |
| 11998 | WPVPVQVCD |
| 11999 | WQIWAKNEF |
| 12000 | WRFDGCEPN |
| 12001 | WRFYGCEPT |
| 12002 | WRFYGCERN |
| 12003 | WRFYGCESN |
| 12004 | WRGCMFMSK |
| 12005 | WRNCMFMSK |
| 12006 | WRSYGCEPN |
| 12007 | WSSEGLIGA |
| 12008 | WVWNGCRDM |
| 12009 | WYAQCWKAF |
| 12010 | WYCWMVFII |
| 12011 | WYDAGHKCK |
| 12012 | WYDAGNNCK |
| 12013 | WYDAVNKCK |
| 12014 | WYDDGNKCK |
| 12015 | WYECVFEYW |
| 12016 | WYYAGNKCK |
| 12017 | YAHYCWDPI |
| 12018 | YAVAVGISS |
| 12019 | YDFGGRVQT |
| 12020 | YDHHKIIWA |
| 12021 | YDHHKIIWV |
| 12022 | YDINYYPEE |
| 12023 | YDINYYPKD |
| 12024 | YDINYYPNE |
| 12025 | YDIPKSTCS |
| 12026 | YDNSKYCKN |
| 12027 | YDTNYYPKE |
| 12028 | YDYGGRVQK |
| 12029 | YEAKSLQPN |
| 12030 | YEENVLFMG |
| 12031 | YEINYYPKE |
| 12032 | YETGMWLNR |
| 12033 | YFDCSRAHS |
| 12034 | YFDCSRANP |
| 12035 | YFDCSRGHP |
| 12036 | YFDCSRTHP |
| 12037 | YFDRSRAHP |
| 12038 | YFDWSRAHP |
| 12039 | YGCNRSYQD |
| 12040 | YHANNMEPW |
| 12041 | YHDLATEWE |
| 12042 | YHDNALLFL |
| 12043 | YHENVLFMG |
| 12044 | YHINNMEPW |
| 12045 | YHPHHMYWR |
| 12046 | YHPRTALMN |
| 12047 | YHQHNACMR |
| 12048 | YHT1DMEPW |
| 12049 | YHT1NMEPW |
| 12050 | YHTNNMERW |
| 12051 | YHTNNMERW |
| 12052 | YHTNNMETW |
| 12053 | YHTNNMVPW |
| 12054 | YHTNNREPW |
| 12055 | YHTNNVEPW |
| 12056 | YHTSNMEPW |
| 12057 | YHTTNMEPW |
| 12058 | YHTYNMEPW |
| 12059 | YIVHKGQQW |
| 12060 | YIWLVMFFS |
| 12061 | YKAGDRFYI |
| 12062 | YKDCDRFYI |
| 12063 | YKDDDRFYI |
| 12064 | YKDGDRIYI |
| 12065 | YKDSDRFYI |
| 12066 | YKHHSRIDG |
| 12067 | YKYGDRFYI |
| 12068 | YLPSAELIK |
| 12069 | YMWICPPDQ |
| 12070 | YMWIHPPDQ |
| 12071 | YMWISPPDQ |
| 12072 | YMWIYAPDQ |
| 12073 | YMWEYPPDK |
| 12074 | YMWEYPPDL |
| 12075 | YMWIYPPDP |
| 12076 | YMWIYPPGQ |
| 12077 | YMWIYPTDQ |
| 12078 | YMWIYQPDQ |
| 12079 | YMWNYPPDQ |
| 12080 | YMWSYPPDQ |
| 12081 | YMWTYPPDQ |
| 12082 | YNMAHGDEP |
| 12083 | YNMVDGDEP |
| 12084 | YNMVHGDEA |
| 12085 | YNMVHGDES |
| 12086 | YNMVHGDET |
| 12087 | YMNVHGDGP |
| 12088 | YNMVHSDEP |
| 12089 | YNPRIALMN |
| 12090 | YNPRSALMN |
| 12091 | YNTVHGDEP |
| 12092 | YNVCILWAQ |
| 12093 | YNVCTMLAQ |
| 12094 | YNVVHGDEP |
| 12095 | YPEDRLNMR |
| 12096 | YPLGSAGSD |
| 12097 | YPQHNACMQ |
| 12098 | YPTNNMEPW |
| 12099 | YQAAARQNA |
| 12100 | YQADPRQNA |
| 12101 | YQATPRONA |
| 12102 | YQAYGRGKV |
| 12103 | YQDAPRQNA |
| 12104 | YQIFQYPLH |
| 12105 | YQLFQYPWH |
| 12106 | YQLLHTIEN |
| 12107 | YQLLHTIFQ |
| 12108 | YRTLQCKWE |
| 12109 | YRWIYPPDQ |
| 12110 | YRYLWPIVR |
| 12111 | YTGLNELQN |
| 12112 | YTICDVPDP |
| 12113 | YTPNFRIGD |
| 12114 | YVIPFEMDD |
| 12115 | YVIPVEMDN |
| 12116 | YYDCSRAHP |
| 12117 | YYPCVQYRQ |

### Example 34

### AAV5 Variants with Heart Tissue Tropism as Identified by Machine Learning

[0972] This example describes preferred properties of engineered AAV5 variants that display heart tissue tropism as identified by machine learning methods. The same bioinformatics pre-process, machine learning methods, and analyses as described in EXAMPLE 19 and FIGS. 19-FIG. 22 were carried out to identify preferred properties of engineered AAV5 variants that display heart tissue tropism.

[0973] Favored biophysical properties and favored amino acid residues at each position in the 581 to 589 region of an AAV5 VP capsid polypeptide, which are associated with a higher probability of heart tissue tropism are described below. Any of the below machine learning-derived positional amino acid preferences described in TABLE 52 can be present alone or in combination with each other or in combination with any of the amino acid preferences observed and described in EXAMPLE 13, TABLE 25. Listed below in TABLE 52 are a summary of positional features shared between the top important features for heart tropism extracted from the ML models.

TABLE 52
Machine Learning-Derived Heart Tissue Tropism Rules

Low solubility at Xaa1
Xaa1 is selected from N or E
Low hydropathy at Xaa1
Xaa1 is selected from H, N, Q, P, Y, D, or E
High mutability at Xaa1
Xaa1 is selected from A or E
High hydropathy at Xaa2
Xaa2 is selected from V or I
Medium mutability at Xaa2
Xaa2 is selected from V
Medium volume at Xaa2
Xaa2 is selected from V, E, or Q
High solubility at Xaa2
Xaa2 is selected from V or M
Low solubility at Xaa3
Xaa3 is selected from R or Q
Low surface accessibility at Xaa4
Xaa4 is selected from C
High solubility at Xaa4
Xaa4 is selected from C
Low charge at Xaa4
Xaa4 is selected from D, E, Y, W, V, P,
M, A, G, F, I, L, N, Q, S, T, or C
High hydropathy at Xaa4
Xaa4 is selected from C
High surface accessibility at Xaa5
Xaa5 is selected from D, E, R, K, N, or Q
Low solubility at Xaa5
Xaa5 is selected from D
Low mutability at Xaa6
Xaa6 is selected from C
Low solubility at Xaa6
Xaa6 is selected from D
High surface accessibility at Xaa8
Xaa8 is selected from D or N
High average flexibility at Xaa8
Xaa8 is selected from D, R, P, G, or S
Medium mol mass at Xaa9
Xaa9 is selected from N, D, L, or I

[0974] TABLE 53 below provides sequences of the 581 to 589 region for variant AAV VP1 capsid polypeptides that exhibited heart tissue tropism and comport to one or more of the rules provided in TABLE 52. The present disclosure, thus, provides for rAAVs composed of engineered AAV5 VP1 capsid polypeptides having a SEQ ID NO: 2, wherein the Xaa1 to Xaa9 region is any one of SEQ ID NO: 14118-SEQ ID NO: 15117 as disclosed in TABLE 53. Also encompassed herein are rAAVs composed of engineered AAV5 VP2 capsid polypeptides and engineered AAV5 VP3 capsid polypeptides having the sequences disclosed in the below table at the regions in AAV5 VP2 (amin acid residues 445 to 453) and AAV5 VP3 (amino acid residues 389-397) corresponding to the amino acids in the AAV5 VP1 581 to 589 region.

TABLE 53
Sequences of the 581 to 589 Region in AAV5
VP1 Capsid Polypeptide that Drive Heart
Tissue Tropism

| SEQ | |
|---|---|
| ID | 581-589 |
| NO | Sequence |
| 14118 | AADFFAIND |
| 14119 | AADIFAISD |
| 14120 | AADIFGIND |
| 14121 | AADIFVIND |
| 14122 | AADIYAIND |
| 14123 | AADMFAIND |
| 14124 | AAYIFAIND |
| 14125 | ACDCHHWDQ |
| 14126 | ACIEWNWGE |
| 14127 | AGDCCLAER |
| 14128 | AHECCLPNR |
| 14129 | AIQPRDMYS |
| 14130 | AKECTGLKN |
| 14131 | AKGMEKLRT |
| 14132 | AKNGDVLEM |
| 14133 | ALPCDNWRG |
| 14134 | APRCESCNM |
| 14135 | AQEDCITGL |
| 14136 | ASDYCYTER |
| 14137 | ATMNLSWAL |
| 14138 | AVCDDHKPN |
| 14139 | AVDWHCEVL |
| 14140 | AVESKDIPQ |
| 14141 | AVGDEQPID |
| 14142 | CCECGHWPN |
| 14143 | CDDCYLINR |
| 14144 | CDICKHEEY |
| 14145 | CDNCYAEPH |
| 14146 | CDWMASVSV |
| 14147 | CDWMPNVSV |
| 14148 | CDWMSNVSV |
| 14149 | CEYGWILKR |
| 14150 | CGDWDFGEW |
| 14151 | CKCCRMEKC |
| 14152 | CKFRDFAES |
| 14153 | CKMLCRPPV |
| 14154 | CKPGDFVRK |
| 14155 | CLECCTDSA |
| 14156 | CPDCGPTGP |
| 14157 | CPECSVDPW |
| 14158 | CQMLCRSPM |
| 14159 | CRDCCLRGW |
| 14160 | CRECSNERV |
| 14161 | CRECVHNRC |
| 14162 | CRICRATIW |
| 14163 | CSDPKNMSI |
| 14164 | CWECCNDSG |
| 14165 | CWECCPDSG |
| 14166 | CWECCTDGG |
| 14167 | CWECCTDNG |
| 14168 | CWECCTDRV |
| 14169 | CWECCTDSV |
| 14170 | CWECCTDSW |
| 14171 | CWECFTDSG |
| 14172 | CWECGTDSG |
| 14173 | CWECYTDSG |
| 14174 | CWEWCTDSG |
| 14175 | CWGCCTDSG |
| 14176 | CWVCCTDSG |
| 14177 | CYWCGWDNR |
| 14178 | DAMDQREQY |
| 14179 | DAVDEVKDE |
| 14180 | DCNQFNWSE |
| 14181 | DDDDFAEKG |
| 14182 | DDEILKEDG |
| 14183 | DDEVGKPKW |
| 14184 | DDVEKDETN |
| 14185 | DERERKTKD |
| 14186 | DFKALDVPC |
| 14187 | DFKVLDVQC |
| 14188 | DGCDDHKPN |
| 14189 | DGKIEPIRF |
| 14190 | DGMRCKEKK |
| 14191 | DGVGRPGDN |
| 14192 | DHREDNIDA |
| 14193 | DIDDLNFAT |
| 14194 | DIDFMECAF |
| 14195 | DIEEWEMAE |
| 14196 | DIEGQNNGM |
| 14197 | DIEHIRDPP |
| 14198 | DIEMFNENG |
| 14199 | DIEMNITAL |
| 14200 | DIGDIWMSQ |
| 14201 | DIEEYQKIE |
| 14202 | DIIPKDAAP |
| 14203 | DIKVLDSQP |
| 14204 | DILCICETS |
| 14205 | DINNNNCGY |
| 14206 | DIQPFDYYL |
| 14207 | DIQPNDGCS |
| 14208 | DIRDEDNIG |
| 14209 | DIRDSWTES |
| 14210 | DITEEDVTL |
| 14211 | DITHHNDGK |
| 14212 | DIVDHDHAG |
| 14213 | DIVECIQYN |
| 14214 | DIYNDSWST |
| 14215 | DLCRPNPKN |
| 14216 | DLIVATELF |
| 14217 | DLIVVTEWF |
| 14218 | DLPNSQPPH |
| 14219 | DLSEPTEWF |
| 14220 | DLTVATEWF |
| 14221 | DMDCPEDQQ |
| 14222 | DMFQLKPQN |
| 14223 | DMVDLDVNP |
| 14224 | DNVNMNDAI |
| 14225 | DQRCNKAPG |
| 14226 | DRCDSIILA |
| 14227 | DSDAKNMSI |
| 14228 | DSDPKNMSI |
| 14229 | DSDSKNMSI |
| 14230 | DSDTKNMSI |
| 14231 | DSNDQDTPE |
| 14232 | DSSEVDMNF |
| 14233 | DSYDDSWSI |
| 14234 | DSYNDGWST |
| 14235 | DSYNDSWSP |
| 14236 | DTAPKQEAE |
| 14237 | DTIQKKMDH |
| 14238 | DTIWADINN |
| 14239 | DVADWNGYD |
| 14240 | DVAERVEQI |
| 14241 | DVAGLDKNA |
| 14242 | DVAPMDQVE |
| 14243 | DVAPMHEVE |
| 14244 | DVAPMHQDE |
| 14245 | DVAPMHQIE |
| 14246 | DVAPMHRVE |
| 14247 | DVAPMNQVE |
| 14248 | DVCDDHKAN |
| 14249 | DVCDDHKPH |
| 14250 | DVCDDHKPI |
| 14251 | DVCDDHKPS |
| 14252 | DVCDDHKPT |
| 14253 | DVCDDHKQN |
| 14254 | DVCDDHKRN |
| 14255 | DVCDDHKSN |
| 14256 | DVCDDHKTN |
| 14257 | DVCDDHQPN |
| 14258 | DVCDDHTPN |
| 14259 | DVCDDPKPN |
| 14260 | DVCPFPDGK |
| 14261 | DVCPVDVQN |
| 14262 | DVDDIHVSF |
| 14263 | DVDEISDGV |
| 14264 | DVDIHEWPP |
| 14265 | DVDMIDTCP |
| 14266 | DVDPWDVTE |
| 14267 | DVDQMHHND |
| 14268 | DVEEKDNKA |
| 14269 | DVEEKDNKA |
| 14270 | DVEETEAAY |
| 14271 | DVEHCNTNA |
| 14272 | DVEHQDWGG |
| 14273 | DVEIHKWGG |
| 14274 | DVETIDNLK |
| 14275 | DVEWDNMKQ |
| 14276 | DVGDDHKPN |
| 14277 | DVGEDEFQP |
| 14278 | DVGEWTMNN |
| 14279 | DVGILDFNG |
| 14280 | DVGPMDCQP |
| 14281 | DVHEYDHPE |
| 14282 | DVHFFENSR |
| 14283 | DVIPRDGAE |
| 14284 | DVKDQSIML |
| 14285 | DVKEIDELC |
| 14286 | DVMPMPEAQ |
| 14287 | DVNEDGFNM |
| 14288 | DVNENEWTD |
| 14289 | DVRDSMKRD |
| 14290 | DVSDFIQHF |
| 14291 | DVSEGDDST |
| 14292 | DVSQIPITF |
| 14293 | DVTEYQWST |
| 14294 | DVTPNSWIE |
| 14295 | DVFPTSWSE |
| 14296 | DVTTLNESQ |
| 14297 | DVVDFSIVK |
| 14298 | DVVEQRECP |
| 14299 | DVYDDHKPN |
| 14300 | DVYEKMWAN |
| 14301 | DYFDMNLTD |
| 14302 | DYGPEDFSM |
| 14303 | EAAPRDSDD |
| 14304 | EAECKMWPT |
| 14305 | EAELGNVNM |
| 14306 | EAGCRMWPT |
| 14307 | EARIQCKID |
| 14308 | EARMDIWPI |
| 14309 | EAVNRPNMK |
| 14310 | ECGCMYWCY |
| 14311 | ECGCMYWGC |
| 14312 | ECGCMYWVY |
| 14313 | EDDWQRMLY |
| 14314 | EDRIQCKID |
| 14315 | EDRMDKIFT |
| 14316 | EDTGEREAW |
| 14317 | EDYAACFEF |
| 14318 | EEGMQMISQ |
| 14319 | EERCYDGSW |
| 14320 | EFHEFRASN |
| 14321 | EFRIQCKID |
| 14322 | EIAIYNFAN |
| 14323 | EIAPNMCPP |
| 14324 | EIAPREVVN |
| 14325 | EICPVDRTQ |
| 14326 | EICSFEEGH |
| 14327 | EIDDDMLEE |
| 14328 | EIDDTDQRW |
| 14329 | EIDDVGEPG |
| 14330 | EIDEFSASN |
| 14331 | EIDQKDISQ |
| 14332 | EIDRGDSYK |
| 14333 | EIEALMKER |
| 14334 | EIEEDDEWY |
| 14335 | EIEEFMKMR |
| 14336 | EIEQDNEPG |
| 14337 | EIEQSFLDS |
| 14338 | EIEVTAWAC |
| 14339 | EIEYIDAGG |
| 14340 | EIGCVDSAK |
| 14341 | EIGMQIAQE |
| 14342 | EIGTFDNSE |
| 14343 | EIHDQQIVF |
| 14344 | EIHDVDFGM |
| 14345 | EIHEFFHNR |
| 14346 | EIHEFGASN |
| 14347 | EIHEFPASN |
| 14348 | EIHEFRAAN |
| 14349 | EIHEFRAPN |
| 14350 | EIHEFRASI |
| 14351 | EIHEFRAST |
| 14352 | EIHEFRAYN |
| 14353 | EIHEFRDSN |
| 14354 | EIHEFRGSN |
| 14355 | EIHEFRSSN |
| 14356 | EIHEFSASN |
| 14357 | EIHEISTHD |
| 14358 | EIHGMDTCP |
| 14359 | EIHMFFQSF |
| 14360 | EIHPWHRTN |
| 14361 | EIIDTSCNC |
| 14362 | EIISMNDFM |
| 14363 | EILDYCSYN |
| 14364 | EILVRCEVD |
| 14365 | EIMPDSIMC |
| 14366 | EIMPNHNMI |
| 14367 | EINDQRPWP |
| 14368 | EINEFRASN |
| 14369 | EINPKSEDE |
| 14370 | EIPEFRASN |
| 14371 | EIQDIVKID |
| 14372 | EIQPLNAVN |
| 14373 | EIRCHHKFA |
| 14374 | EIRDMAHHG |
| 14375 | EIRDTHEMQ |
| 14376 | EIREFRASN |
| 14377 | EIREQCIGP |
| 14378 | EIRFEGNME |
| 14379 | EIRIQCKID |
| 14380 | EIRPWDCKW |
| 14381 | EIRTIDWQW |
| 14382 | EISDIHDLR |
| 14383 | EISEYCORS |
| 14384 | EISPYNDVE |
| 14385 | EISQIPPGW |
| 14386 | EITCLCVHS |
| 14387 | EITDFQYEN |
| 14388 | EITDKDVCT |
| 14389 | EITEFWGNY |
| 14390 | EITPKDSHT |
| 14391 | EITPKDSHT |
| 14392 | EIVDFDNYF |
| 14393 | EIVEQCGNR |
| 14394 | EIVHQDDVN |
| 14395 | EIYEFQMWD |
| 14396 | EIYEFRASN |
| 14397 | EKQMDGINH |
| 14398 | EKYFKMFDN |
| 14399 | ELRCTKLQN |
| 14400 | ELRIQCKID |
| 14401 | ELSDSMDSN |
| 14402 | EMHECPMAW |
| 14403 | EMKCIDVED |
| 14404 | EMRTYNKDY |
| 14405 | ENYPWEQLE |
| 14406 | EPRCENYME |
| 14407 | EQCRGEPDE |
| 14408 | EQKDNMMMN |
| 14409 | ERRCAWFNA |
| 14410 | ESDEREEAD |
| 14411 | ESDPINEAN |
| 14412 | ESGCKMWPT |
| 14413 | ESHEIRDHN |
| 14414 | ESQEAEWGW |
| 14415 | ESRCGDKGC |
| 14416 | ESRCVDNTV |
| 14417 | ESTDFDELN |
| 14418 | ESTELRTGN |
| 14419 | ESTNIPMAF |
| 14420 | ESVPKHEMI |
| 14421 | ETAGKSIHH |
| 14422 | ETEDYRTSN |
| 14423 | ETEEIQKGH |
| 14424 | ETHEFRASN |
| 14425 | EMIDKLWAN |
| 14426 | ETMNQSWGL |
| 14427 | ETNEEEDGN |
| 14428 | ETQMFEIGE |
| 14429 | EVACFDDKN |
| 14430 | EVACLGVIN |
| 14431 | EVAETDNFF |
| 14432 | EVAHENFRM |
| 14433 | EVAHLDATK |
| 14434 | EVAPECKFE |
| 14435 | EVCDLIHDN |
| 14436 | EVCEEEFDP |
| 14437 | EVDDKYHED |
| 14438 | EVDEGHNNE |
| 14439 | EVDGRNRGQ |
| 14440 | EVDPLEIAL |
| 14441 | EVECRHETC |
| 14442 | EVEELWNPF |
| 14443 | EVEEMNWGK |
| 14444 | EVEEQIELI |
| 14445 | EVESLPCSL |
| 14446 | EVEWSCRFE |
| 14447 | EVGGMGEVK |
| 14448 | EVGIQCKID |
| 14449 | EVGIQCKVD |
| 14450 | EVGPLNEWG |
| 14451 | EVGTHDCLD |
| 14452 | EVHDFHYIP |
| 14453 | EVHDKNTQF |
| 14454 | EVHEARPYF |
| 14455 | EVHEFRASN |
| 14456 | EVHELENIN |
| 14457 | EVHMIPEMQ |
| 14458 | EVHTEDYGK |
| 14459 | EVHVSEIMK |
| 14460 | EVIEWCNYE |
| 14461 | EVIMQCMMK |
| 14462 | EVIPTCHFG |
| 14463 | EVKPKDEAH |
| 14464 | EVKQWNEVM |
| 14465 | EVLIQCKID |
| 14466 | EVMHWNIEW |
| 14467 | EVMMFSCYE |
| 14468 | EVMSLESFE |
| 14469 | EVMYRCLMP |
| 14470 | EVPEIEHDK |
| 14471 | EVPIQCKID |
| 14472 | EVPTRDCCD |
| 14473 | EVQCDQIHP |
| 14474 | EVQDDSKAN |
| 14475 | EVQDDYESN |
| 14476 | EVQDLDMMD |
| 14477 | EVQDTDCSP |
| 14478 | EVQEDCMFE |
| 14479 | EVQIQCKID |
| 14480 | EVRCFHELE |
| 14481 | EVREKEPND |
| 14482 | EVRESDFRE |
| 14483 | EVRFDMRYE |
| 14484 | EVRIECKID |
| 14485 | EVRIHCKLD |
| 14486 | EVRIPCKID |
| 14487 | EVRIQCEID |
| 14488 | EVRIQCKFD |
| 14489 | EVRIQCKFG |
| 14490 | EVRIQCKIN |
| 14491 | EVRIQCKIV |
| 14492 | EVRIQCKIY |
| 14493 | EVRIQCKLD |
| 14494 | EVRIQCKLV |
| 14495 | EVRIQCKMD |
| 14496 | EVRIQCQID |
| 14497 | EVRIQCTID |
| 14498 | EVRIQFKID |
| 14499 | EVRIQWKID |
| 14500 | EVRIRCKID |
| 14501 | EVRIRCKMD |
| 14502 | EVRIYCKID |
| 14503 | EVRMQCKID |
| 14504 | EVRNKCKID |
| 14505 | EVRNQCKID |
| 14506 | EVRSECKID |
| 14507 | EVRSKCKID |
| 14508 | EVRSQCKID |
| 14509 | EVRTKCKID |
| 14510 | EVRTKNEAW |
| 14511 | EVRTQCKID |
| 14512 | EVRTQIIMD |
| 14513 | EVRVQCKID |
| 14514 | EVRYNPFHW |
| 14515 | EVSELDGAW |
| 14516 | EVSEVKENG |
| 14517 | EVSGTDELI |
| 14518 | EVSLWEIGC |
| 14519 | EVIDPNMLD |
| 14520 | EVIDYSGMF |
| 14521 | EVTEGCPMG |
| 14522 | EVTPMQDID |
| 14523 | EVTQIWLFP |
| 14524 | EVVDCNWLM |
| 14525 | EVVEFHWQQ |
| 14526 | EVVVRNMPT |
| 14527 | EVWIQCKID |
| 14528 | EVYDHDTYI |
| 14529 | EVYHICGAN |
| 14530 | EWIWCYDRG |
| 14531 | EWTMFIEAH |
| 14532 | FCDCGHWPN |
| 14533 | FCECGHWPN |
| 14534 | FDCHTFGYR |
| 14535 | FDECFPEYW |
| 14536 | FDKMFREIL |
| 14537 | FDRCRNANW |
| 14538 | FDRPGRNIL |
| 14539 | FEDCGWDKT |
| 14540 | FEIGGKTRT |
| 14541 | FENCRDAGR |
| 14542 | FERCEGDNH |
| 14543 | FHCICAMGH |
| 14544 | FHSLCAMGH |
| 14545 | FKFEPWEYW |
| 14546 | FKHSLRQWT |
| 14547 | FKHSQREWT |
| 14548 | FKHSRREWT |
| 14549 | FKKEDAGQF |
| 14550 | FKQDDRSEV |
| 14551 | FKVLPWWYH |
| 14552 | FLRCKKWHI |
| 14553 | FMRPCDMGM |
| 14554 | FNRCGRPKN |
| 14555 | FNVDCGTWF |
| 14556 | FPAFRGGSF |
| 14557 | FPIDFVPFR |
| 14558 | FPKASECNW |
| 14559 | FPKECECNW |
| 14560 | FPKGSECTW |
| 14561 | FPKHDWPTS |
| 14562 | FPPFCWSGM |
| 14563 | FPPWPLDLV |
| 14564 | FPRFGDDRM |
| 14565 | FPRGSECNW |
| 14566 | FPSCHQCNI |
| 14567 | FQPWPKYWC |
| 14568 | FQWRSEMKN |
| 14569 | FRHSLREWT |
| 14570 | FRMENRNAN |
| 14571 | FRQSPWPVV |
| 14572 | FRVTPKPEA |
| 14573 | FSDPKNMSI |
| 14574 | FWECCTDSG |
| 14575 | FWGCNWDPK |
| 14576 | FWQCPWQED |
| 14577 | GGDWDFGEW |
| 14578 | GKSADLLKQ |
| 14579 | GPDCECQRG |
| 14580 | GQPTPWLDH |
| 14581 | GRDCKYINW |
| 14582 | GRGCQIEKY |
| 14583 | GRPCCGYNY |
| 14584 | GRPCEPILQ |
| 14585 | GRYCECVEH |
| 14586 | GSDEFMAYG |
| 14587 | GTMNLSWGL |
| 14588 | GVCDDHKPN |
| 14589 | GWECCTDSG |
| 14590 | HARCVDNTV |
| 14591 | HCECGHWPN |
| 14592 | HDCKLKPIM |
| 14593 | HDRCFASYC |
| 14594 | HDRCFDSTA |
| 14595 | HGVGRSGDN |
| 14596 | HHFHVSLDI |
| 14597 | HHFQVNLDI |
| 14598 | HHFYVNLDI |
| 14599 | HHYHVNLDI |
| 14600 | HKGMEKNPV |
| 14601 | HKYIDWIDG |
| 14602 | HPFHVNLDI |
| 14603 | HPKCSEQYR |
| 14604 | HPRCATDHA |
| 14605 | HQRCPDRAD |
| 14606 | HRQCNLLDI |
| 14607 | HRSCDRMIM |
| 14608 | HSDPKNMSI |
| 14609 | HTPDRTEFE |
| 14610 | HTRCVDHDT |
| 14611 | HVDDLNDWA |
| 14612 | HVKCLDYQI |
| 14613 | IDICGIEHR |
| 14614 | IDRMGMILN |
| 14615 | IDYISFVDR |
| 14616 | IGIGRSGDN |
| 14617 | IIAQRDQLN |
| 14618 | IIGDFSQLG |
| 14619 | IIKEMDIHW |
| 14620 | IIPDREDIS |
| 14621 | IITQRDQVN |
| 14622 | IMDCDTNKY |
| 14623 | INDISFVDR |
| 14624 | INFISFVDR |
| 14625 | INYISFDDR |
| 14626 | INYISFIDR |
| 14627 | INYISTVAR |
| 14628 | INYISFVDP |
| 14629 | INYISFVDS |
| 14630 | INYISFVNR |
| 14631 | INYSSFVDR |
| 14632 | ISYISFVDR |
| 14633 | ITYISFVDR |
| 14634 | IVDQWNMGI |
| 14635 | IWDCMVEKF |
| 14636 | KDDCGTQER |
| 14637 | KDDFDPDQG |
| 14638 | KDEIEDFKS |
| 14639 | KDKFEWLTH |
| 14640 | KDWRGWEER |
| 14641 | KDWWEDDKQ |
| 14642 | KDWYAWEEW |
| 14643 | KEGCETDKS |
| 14644 | KEMCQWDAQ |
| 14645 | KRDCPWHNL |
| 14646 | KSRCADNTV |
| 14647 | KVIEFDMDI |
| 14648 | LAECMEEMC |
| 14649 | LCDYSWWRY |
| 14650 | LCPCRLWDW |
| 14651 | LCTDKMDGD |
| 14652 | LDECCYDTR |
| 14653 | LDEYARPQQ |
| 14654 | LDRCLVIVQ |
| 14655 | LDWAEHFNC |
| 14656 | LEFGGKTRT |
| 14657 | LEIGAKTRT |
| 14658 | LEIGGKTKT |
| 14659 | LERCLGLNQ |
| 14660 | LESAGKTRT |
| 14661 | LHECRKEIH |
| 14662 | LKDCHGDGR |
| 14663 | LKGCPCDTM |
| 14664 | LNCQCWPER |
| 14665 | LNGCDSRMR |
| 14666 | LTDGWDPER |
| 14667 | LWQECDEAW |
| 14668 | MDKEIETWP |
| 14669 | MDPODEMKF |
| 14670 | MDRCPPERT |
| 14671 | MDSCYDRVR |
| 14672 | MDWFKGERS |
| 14673 | MEGSCKQER |
| 14674 | MEILGTMKQ |
| 14675 | MEQQPGPKR |
| 14676 | MGDCQTLSY |
| 14677 | MHPRPRPEV |
| 14678 | MIDFREDVQ |
| 14679 | MIEPYEMHY |
| 14680 | MINDMKMFF |
| 14681 | MKWINIIDW |
| 14682 | MMFENHQRN |
| 14683 | MNRQRDHIR |
| 14684 | MPKFEDVDH |
| 14685 | MQIECTWSH |
| 14686 | MQLDCTWHN |
| 14687 | MRGCMDKTR |
| 14688 | MSDEWMCNN |
| 14689 | MTRCVDADY |
| 14690 | MVEEQEEND |
| 14691 | MVEICCSNK |
| 14692 | MVMIWDHDQ |
| 14693 | MVNPIDWQC |
| 14694 | MVRCVEGDD |
| 14695 | MYECGNIGE |
| 14696 | NCECGHWPN |
| 14697 | NERWDHDQL |
| 14698 | NESIDDIEQ |
| 14699 | NHWNQELDF |
| 14700 | NIALRDSMN |
| 14701 | NIDAWDNHN |
| 14702 | NIVDDQYGN |
| 14703 | NKPFDAFKW |
| 14704 | NKWHPMIVI |
| 14705 | NLDCRPVNG |
| 14706 | NMFPLKPQN |
| 14707 | NMFQLKPQH |
| 14708 | NMFQLKPQT |
| 14709 | NMIQLKPQN |
| 14710 | NNWLIRPNE |
| 14711 | NSDPKNMPI |
| 14712 | NSDPKNMSI |
| 14713 | NVNEWEECE |
| 14714 | NVREYDRYE |
| 14715 | NVVEQHEYN |
| 14716 | NWEFNARND |
| 14717 | PAEGGNVSD |
| 14718 | PAFCQRPEQ |
| 14719 | PCAMHNWGF |
| 14720 | PCDMNHWGC |
| 14721 | PCGMHNWGC |
| 14722 | PCGPIEYDE |
| 14723 | PCPCDHGGK |
| 14724 | PCSQPIHEP |
| 14725 | PCTMPYVEN |
| 14726 | PCTMTYVED |
| 14727 | PDCLRPVMK |
| 14728 | PDHCDPMPE |
| 14729 | PDHCVKNER |
| 14730 | PDICVWHDN |
| 14731 | PDIDMDMDY |
| 14732 | PDLRPRDAC |
| 14733 | PDRFPQIKS |
| 14734 | PDTEKEMRF |
| 14735 | PDTYVRERY |
| 14736 | PEAGDQFKT |
| 14737 | PEEMKYPLK |
| 14738 | PEVFTDIRP |
| 14739 | PEWGTSCNW |
| 14740 | PFACDGYEM |
| 14741 | PGGCRGIRY |
| 14742 | PGICGEPGK |
| 14743 | PGICVWHDN |
| 14744 | PGKCANERM |
| 14745 | PGPCVMEIW |
| 14746 | PHFHVNLDI |
| 14747 | PHPCMFPTM |
| 14748 | PICQGMMEN |
| 14749 | PIICVWHDN |
| 14750 | PKGSNMFDW |
| 14751 | PKKVFCPEE |
| 14752 | PKQCKVHEQ |
| 14753 | PKSCKFIDT |
| 14754 | PKYFECIYY |
| 14755 | PMDCGKHKK |
| 14756 | PMFHPRQYP |
| 14757 | PMMISYIQR |
| 14758 | PMRCGDDAK |
| 14759 | PNCKQWVDN |
| 14760 | PNDLKFETF |
| 14761 | PNICPLDEQ |
| 14762 | PNKLSGGEE |
| 14763 | PNRCHDDRG |
| 14764 | PPVRPWEEM |
| 14765 | PQFFSWSEY |
| 14766 | PQHAKCGEF |
| 14767 | PQRVLPMEY |
| 14768 | PREFEWYPH |
| 14769 | PRGCDCLQS |
| 14770 | PRRCDNWKT |
| 14771 | PSGPIQYDE |
| 14772 | PSKCEWTDN |
| 14773 | PSRCFDNTV |
| 14774 | PSRCVDNTV |
| 14775 | PTMNLSWGL |
| 14776 | PTNEEEDGN |
| 14777 | PVACVWHDN |
| 14778 | PVFCVWHDN |
| 14779 | PVGFDPPPF |
| 14780 | PVHDFDAAY |
| 14781 | PVHSHNIDN |
| 14782 | PVICDWHDN |
| 14783 | PVICGWHDN |
| 14784 | PVICGWHEN |
| 14785 | PVICLWHDN |
| 14786 | PVICVWHAN |
| 14787 | PVICVWHDH |
| 14788 | PVICVWHDS |
| 14789 | PVICVWHDT |
| 14790 | PVICVWHGN |
| 14791 | PVICVWHHN |
| 14792 | PVICVWHNN |
| 14793 | PVICVWPDN |
| 14794 | PVICVWYDN |
| 14795 | PVIFVWHDN |
| 14796 | PVIYIWHDN |
| 14797 | PVLCVWHDN |
| 14798 | PVLCVWHDN |
| 14799 | PVMCVWHDN |
| 14800 | PVNCVWHDN |
| 14801 | PVQCNWERE |
| 14802 | PVRCTKPRD |
| 14803 | PVSCVWHDN |
| 14804 | PVTCVWHDN |
| 14805 | PVVCVWHDN |
| 14806 | PWLDDSEME |
| 14807 | PWLWHKSAC |
| 14808 | PWQCKGPIN |
| 14809 | PWQFCYPWT |
| 14810 | PWRVQKHGV |
| 14811 | PWRWHKSAW |
| 14812 | PWRWHKSDC |
| 14813 | PWRWHKSPC |
| 14814 | PWRWHKSSC |
| 14815 | PWRWHKSTC |
| 14816 | PWRWHKSVC |
| 14817 | PWRWHRSAC |
| 14818 | PWRWRKSAC |
| 14819 | PWRWYKSAC |
| 14820 | PWSCOPEQA |
| 14821 | PWTYDKEFY |
| 14822 | PWVFTYPSN |
| 14823 | PYGPFEYDE |
| 14824 | PYGWRNIDQ |
| 14825 | PYIMEFHAF |
| 14826 | PYIMEFHPC |
| 14827 | PYIMEFHPV |
| 14828 | PYIMEFHTC |
| 14829 | PYSMEFHPF |
| 14830 | QANEEEDGN |
| 14831 | QCDCSWWRY |
| 14832 | QCDYSWWRD |
| 14833 | QCDYSWWRH |
| 14834 | QCDYSWWRN |
| 14835 | QDGTGEPKG |
| 14836 | QFRCVDNKV |
| 14837 | QIEFIWDAH |
| 14838 | QIEMTEISQ |
| 14839 | QLSEGEVLN |
| 14840 | QKNEEEDGN |
| 14841 | QKPCKVEQV |
| 14842 | QKRCCWHRC |
| 14843 | QLDSWVEKR |
| 14844 | QMEEIQIGH |
| 14845 | QNLEIIGAG |
| 14846 | QPICRRDKR |
| 14847 | QPMEWKMVR |
| 14848 | QPRCLDNTV |
| 14849 | QPRCYRNIS |
| 14850 | QSDEYNIAF |
| 14851 | QSRCEDNTV |
| 14852 | QSRCLDNTL |
| 14853 | QSRCVDITV |
| 14854 | QSRCVDNPG |
| 14855 | QSRCVDNRV |
| 14856 | QSRCVDNSV |
| 14857 | QSRCVDTTV |
| 14858 | QTHEEDDGN |
| 14859 | QTHEEEDGN |
| 14860 | QTNDKEDGN |
| 14861 | QTNEEEAGN |
| 14862 | QTNEEEDAN |
| 14863 | QTNEEEDGH |
| 14864 | QTNEEEDGT |
| 14865 | QTNEEEDSN |
| 14866 | QTNEEEDVN |
| 14867 | QTNEGEDGN |
| 14868 | QTNEQEDGN |
| 14869 | QTSVEEDGN |
| 14870 | QTTEEEDGN |
| 14871 | QTYEEEDGN |
| 14872 | QVGDDRSFA |
| 14873 | QVRIQCKID |
| 14874 | QWDDDQWST |
| 14875 | QWPDDQWST |
| 14876 | QYRCSDSAF |
| 14877 | RDCCDAWSR |
| 14878 | RDECRMESG |
| 14879 | RDKCRMESG |
| 14880 | RDPCRMESG |
| 14881 | RDPLNDSRY |
| 14882 | RDQCRMEAG |
| 14883 | RDQCRMECG |
| 14884 | RDQCRMEDG |
| 14885 | RDQCRMEFG |
| 14886 | RDQCRMEHG |
| 14887 | RDQCRMESA |
| 14888 | RDQCRMESD |
| 14889 | RDQCRMESR |
| 14890 | RDQCRMESS |
| 14891 | RDQCRMESV |
| 14892 | RDQCRMETC |
| 14893 | RDQCRMEYG |
| 14894 | RDQCRMKSG |
| 14895 | RDQCRVESG |
| 14896 | RDSHDEFEW |
| 14897 | REDCWPPEN |
| 14898 | REHIGFMKF |
| 14899 | REIGGKTRT |
| 14900 | REKCHQHQC |
| 14901 | RSRCVDNTV |
| 14902 | RWGCDLPQI |
| 14903 | RYQCRMESG |
| 14904 | SADIFAIND |
| 14905 | SCECGHWPI |
| 14906 | SCECGHWPN |
| 14907 | SDPGEILKR |
| 14908 | SGDGDFGEW |
| 14909 | SGDLDFGEW |
| 14910 | SGDWAFGEW |
| 14911 | SGDWDFGKW |
| 14912 | SGDWNFGEW |
| 14913 | SGRCPFSSK |
| 14914 | SIEECCEEM |
| 14915 | SMFQLKPQN |
| 14916 | SNDACIQSF |
| 14917 | SNECWNEMA |
| 14918 | SNGDCIQAF |
| 14919 | SNRCHDDRG |
| 14920 | SNVDCIQSF |
| 14921 | SPERMDYDG |
| 14922 | SPKGSECNW |
| 14923 | SQQWCEQPD |
| 14924 | SRPCCKDIR |
| 14925 | SSDPKNMSI |
| 14926 | STMDLSWGL |
| 14927 | STMNLSWGF |
| 14928 | SVDYEDEVW |
| 14929 | SVEPKSMTG |
| 14930 | SVETLDOSL |
| 14931 | SVICVWHDN |
| 14932 | SVLRRDEVN |
| 14933 | SVMDIDCHQ |
| 14934 | SWLDNILPK |
| 14935 | SYFWCFMDC |
| 14936 | TADIFAIND |
| 14937 | TAEIFAVND |
| 14938 | TDKYCDQKR |
| 14939 | TFSEIRDQC |
| 14940 | THPWEMTKE |
| 14941 | THRCHDDRG |
| 14942 | TIDSWFQER |
| 14943 | TIGEINDAN |
| 14944 | TKFHDGDWC |
| 14945 | TKMLDRDAE |
| 14946 | TNRCHDDRC |
| 14947 | TNRCHDDRD |
| 14948 | TNRCHDDRV |
| 14949 | TNRCHDHRG |
| 14950 | TNRCHDYRG |
| 14951 | TPPWESIRK |
| 14952 | TQPFSKDED |
| 14953 | TREHQIISP |
| 14954 | TRPCGTLSH |
| 14955 | TTHEGHEDN |
| 14956 | TVICVWHDN |
| 14957 | TVPCMWQTY |
| 14958 | TVWEQDLLE |
| 14959 | TWAPWCCDC |
| 14960 | TWAPWCCYY |
| 14961 | TWGPWCCYF |
| 14962 | TWPPWCCYF |
| 14963 | TWRCGDIGH |
| 14964 | TYRCHDDRG |
| 14965 | VADCKQPRF |
| 14966 | VDCSKILRR |
| 14967 | VDDRPKPEH |
| 14968 | VDRLFRMEF |
| 14969 | VDRQVRMEY |
| 14970 | VDSHKIIRR |
| 14971 | VEIRGKIRT |
| 14972 | VHEGKTFDI |
| 14973 | VHQDKIIGE |
| 14974 | VICEFEEGN |
| 14975 | VITEDDQAE |
| 14976 | VNEWEADAE |
| 14977 | VQLCDLLRR |
| 14978 | VRYSDMFWW |
| 14979 | WAEHDFPKG |
| 14980 | WCDDDMRRQ |
| 14981 | WCTEEWEEK |
| 14982 | WDCSMTKKH |
| 14983 | WDFSGRIDN |
| 14984 | WDHREERTH |
| 14985 | WDICSGLRQ |
| 14986 | WDKCIPMHW |
| 14987 | WDLVDPPKY |
| 14988 | WDMNGKDGS |
| 14989 | WDPRRPVKK |
| 14990 | WDRCLELNK |
| 14991 | WDSLEWDRA |
| 14992 | WDYSMPKKH |
| 14993 | WDYSMSKKH |
| 14994 | WDYSMTKKN |
| 14995 | WDYSMTKKP |
| 14996 | WEFTMAPEV |
| 14997 | WEKCGWPPI |
| 14998 | WELCMELNQ |
| 14999 | WEPCLELNQ |
| 15000 | WERCLELDQ |
| 15001 | WERCLELHQ |
| 15002 | WERCLELNL |
| 15003 | WERCLELNP |
| 15004 | WERCLEQNH |
| 15005 | WERCLEVNQ |
| 15006 | WERCLGLNQ |
| 15007 | WERCLGLTQ |
| 15008 | WERCLQLNQ |
| 15009 | WERCLVLNQ |
| 15010 | WERCMELNQ |
| 15011 | WERCQELNH |
| 15012 | WGAFRGVCE |
| 15013 | WHGFHKIMF |
| 15014 | WIAPRHMGL |
| 15015 | WKAFRGGIG |
| 15016 | WKDCKQMKM |
| 15017 | WKFGDKLIM |
| 15018 | WKGAPALER |
| 15019 | WKHCEREIN |
| 15020 | WKIDPCVLQ |
| 15021 | WKLGDGIQD |
| 15022 | WKRPPGGEH |
| 15023 | WKSHEWDPH |
| 15024 | WLECNPPEQ |
| 15025 | WLHPYSYCA |
| 15026 | WNLQDKPGE |
| 15027 | WNPARKDDI |
| 15028 | WNSCPWQLP |
| 15029 | WPCHDAPIW |
| 15030 | WPIGEKMVF |
| 15031 | WPKERVPKG |
| 15032 | WPNDDMTRM |
| 15033 | WQFTGKPTL |
| 15034 | WQHIMKPQI |
| 15035 | WQMLCRPPV |
| 15036 | WQRCLELNQ |
| 15037 | WRQFPCAEQ |
| 15038 | WRSCPKGLV |
| 15039 | WSRCVDNTV |
| 15040 | WTIEPEWYF |
| 15041 | WTKDDEQLE |
| 15042 | WVHPFSYCA |
| 15043 | WVHPYTYCA |
| 15044 | WVHQYSYCA |
| 15045 | WVHTYSYCA |
| 15046 | WVLDISHCG |
| 15047 | WVRCLELKQ |
| 15048 | WVYPYSYCA |
| 15049 | WWRVPCESH |
| 15050 | WYDWIHERT |
| 15051 | WYICQKDSM |
| 15052 | WYKCQDVDR |
| 15053 | YADPKNMSI |
| 15054 | YCECEHWPN |
| 15055 | YCECGHCPI |
| 15056 | YCECGHSPN |
| 15057 | YCECGHWPD |
| 15058 | YCECGHWPH |
| 15059 | YCECGHWPI |
| 15060 | YCECGHWPY |
| 15061 | YCECGHWQN |
| 15062 | YCECGHWSN |
| 15063 | YCECGHWTS |
| 15064 | YCECGNWPN |
| 15065 | YCECGRWPI |
| 15066 | YCECGRWPN |
| 15067 | YCECGYWPN |
| 15068 | YCEGGHWPN |
| 15069 | YCGCGIHQQ |
| 15070 | YDESVRISR |
| 15071 | YEEFPEIIM |
| 15072 | YEETRVEAR |
| 15073 | YELYQDIDN |
| 15074 | YERCHHQGD |
| 15075 | YGPCCHFQF |
| 15076 | YHKFGDMDI |
| 15077 | YHRCDEFFL |
| 15078 | YIRPEQPVC |
| 15079 | YKDRDICRL |
| 15080 | YKEHEAVQF |
| 15081 | YKFYPGLPT |
| 15082 | YKGMEKNAG |
| 15083 | YKGMEKNRV |
| 15084 | YKGMEKTPV |
| 15085 | YKMCDHDDC |
| 15086 | YKPCMTIDV |
| 15087 | YKQHEGEQF |
| 15088 | YPHCRLLGP |
| 15089 | YPHMDCSEE |
| 15090 | YRDCEQMEV |
| 15091 | YRDCRQFNR |
| 15092 | YRVLPRIKD |
| 15093 | YSDAKNMSI |
| 15094 | YSDGKNMSI |
| 15095 | YSDHQNMSI |
| 15096 | YSDPKDMSI |
| 15097 | YSDPKNISM |
| 15098 | YSDPKNMFI |
| 15099 | YSDPKNMPI |
| 15100 | YSDPKNMSV |
| 15101 | YSDPKNMTL |
| 15102 | YSDPKNMTT |
| 15103 | YSDPKNMYI |
| 15104 | YSDPKTMSI |
| 15105 | YSDTKKMSI |
| 15106 | YSGPKNMSI |
| 15107 | YSHPKHMSI |
| 15108 | YSYPKNMTI |
| 15109 | YVDPYEMYG |
| 15110 | YVFGQKDEM |
| 15111 | YVIEQKDEM |
| 15112 | YVIGQKDEV |
| 15113 | YVLDSWRTS |
| 15114 | YWECGHWPN |
| 15115 | YWGCPDQVR |
| 15116 | YYNHKIFEP |
| 15117 | YYNPKIVEP |

### Example 35

### AAV5 Variants with Lymph Node Tissue Tropism as Identified by Machine Learning

[0975] This example describes preferred properties of engineered AAV5 variants that display lymph node tissue tropism as identified by machine learning methods. The same bioinformatics pre-process, machine learning methods, and analyses as described in EXAMPLE 19 and FIGS. 19-FIG. 22 were carried out to identify preferred properties of engineered AAV5 variants that display lymph node tissue tropism.

[0976] Favored biophysical properties and favored amino acid residues at each position in the 581 to 589 region of an AAV5 VP capsid polypeptide, which are associated with a higher probability of lymph node tissue tropism are described below. Any of the below machine learning-derived positional amino acid preferences described in TABLE 54 can be present alone or in combination with each other or in combination with any of the amino acid preferences observed and described in EXAMPLE 16, TABLE 31. Listed below in TABLE 54 are a summary of positional features shared between the top important features for lymph node tropism extracted from the ML models.

TABLE 54
Machine Learning-Derived Lymph Node Tissue Tropism Rules

High average flexibility at Xaa1
Xaa1 is selected from D, E, P, G, Q, S, or R
High hbond donors at Xaa1
Xaa1 is selected from R
High mol mass at Xaa1
Xaa1 is selected from Y, W, R, or F
Low solubility at Xaa2
Xaa2 is selected from N or E
Low average flexibility at Xaa3
Xaa3 is selected from W, M, or F
Low mutability at Xaa3
Xaa3 is selected from R, H, K, P, Y, F, L, or C
Low mutability at Xaa4
Xaa4 is selected from C
High mutability at Xaa5
Xaa5 is selected from N
Medium mol mass at Xaa5
Xaa5 is selected from D, I, or N
High mol mass at Xaa6
Xaa6 is selected from Y, W, R, or F
High average flexibility at Xaa6
Xaa6 is selected from G or R
High average flexibility at Xaa7
Xaa7 is selected from D, E, K, P, I, N, Q, or S
Low solubility at Xaa7
Xaa7 is selected from N or E
Low solubility at Xaa8
Xaa8 is selected from N, E, or D
Medium mutability at Xaa8
Xaa8 is selected from R or H
Low mutability at Xaa9
Xaa9 is selected from P or K
High average flexibility at Xaa9
Xaa9 is selected from D, E, P, or S
High solubility at Xaa9
Xaa9 is selected from M or V

[0977] TABLE 55 below provides sequences of the 581 to 589 region for variant AAV VP1 capsid polypeptides that exhibited lymph node tissue tropism and comport to one or more of the rules provided in TABLE 54. The present disclosure, thus, provides for rAAVs composed of engineered AAV5 VP1 capsid polypeptides having a SEQ ID NO: 2, wherein the Xaa1 to Xaa9 region is any one of SEQ ID NO: 20118-SEQ ID NO: 21117, as disclosed in TABLE 55. Also encompassed herein are rAAVs composed of engineered AAV5 VP2 capsid polypeptides and engineered AAV5 VP3 capsid polypeptides having the sequences disclosed in the below table at the regions in AAV5 VP2 (amin acid residues 445 to 453) and AAV5 VP3 (amino acid residues 389-397) corresponding to the amino acids in the AAV5 VP1 581 to 589 region.

TABLE 55
Sequences of the 581 to 589 Region in AAV5
VP1 Capsid Polypeptide that Drive Lymph
Node Tissue Tropism

| SEQ | |
|---|---|
| ID | 581-589 |
| NO | Sequence |
| 20118 | ACKLDHMPP |
| 20119 | ADCCSCKAN |
| 20120 | ADDCTHKNH |
| 20121 | ADSCTHKNH |
| 20122 | ADYCAHKNH |
| 20123 | ADYCPHKNH |
| 20124 | ADYCTHKTH |
| 20125 | ADYCTHRNH |
| 20126 | ADYGTHKNH |
| 20127 | ADYWIHKNH |
| 20128 | AECCSIFSS |
| 20129 | AERLCIEWD |
| 20130 | AESKCDIGT |
| 20131 | AESRCDVGT |
| 20132 | AEWSWAEHS |
| 20133 | AFWGTDVWG |
| 20134 | AFWSPDVWG |
| 20135 | AGFRIDFRC |
| 20136 | AGGWLFEWH |
| 20137 | AGNNEDTQL |
| 20138 | AGQWGSLNP |
| 20139 | AGSNEDKQL |
| 20140 | AGTDQTMHM |
| 20141 | AHRWSWSES |
| 20142 | AISQDMFMQ |
| 20143 | AISQDMLMQ |
| 20144 | AMLCNRVCE |
| 20145 | ANCCSCKAD |
| 20146 | ANCCSCKDN |
| 20147 | ANCCSCKPN |
| 20148 | ANCCSCKTN |
| 20149 | ANCCSCKTS |
| 20150 | ANCCSGKAN |
| 20151 | ANCYSCKAN |
| 20152 | ASASHDFMG |
| 20153 | ASCEDEGIL |
| 20154 | ASGSNDFMG |
| 20155 | ATDRVVVNF |
| 20156 | ATSRCDVQT |
| 20157 | AVPWEWQEG |
| 20158 | CCAALIQSG |
| 20159 | CCDALIOSS |
| 20160 | CCDDLIQSG |
| 20161 | CCDPLIQSG |
| 20162 | CDMWWYQDP |
| 20163 | CEKYNLPKI |
| 20164 | CKDRPIIDC |
| 20165 | CLREAVVGI |
| 20166 | CVLNMEYCL |
| 20167 | CVQRLLFKC |
| 20168 | CVVNMEYYL |
| 20169 | DAAIKMDES |
| 20170 | DCIFFHCPK |
| 20171 | DDFGPNHRH |
| 20172 | DDHQPMQSR |
| 20173 | DDRGFTRSM |
| 20174 | DDWSWAEHS |
| 20175 | DECIMQRSK |
| 20176 | DEFDPNHRH |
| 20177 | DEFGPNHGH |
| 20178 | DEFGPNHIH |
| 20179 | DEFGPNHKH |
| 20180 | DEFGPNHRR |
| 20181 | DEFGPNHRY |
| 20182 | DEFGPNYRH |
| 20183 | DEFGPSHRH |
| 20184 | DEFGTNHRH |
| 20185 | DEIGPNHRH |
| 20186 | DEMGYDQLD |
| 20187 | DERCYDQLD |
| 20188 | DEWAWAEHS |
| 20189 | DEWPWAEHS |
| 20190 | DEWSGAEHS |
| 20191 | DEWSLAEHS |
| 20192 | DEWSWAAHS |
| 20193 | DEWSWAEHA |
| 20194 | DEWSWAERS |
| 20195 | DEWSWAGHS |
| 20196 | DEWSWAQHS |
| 20197 | DEWSWSEHS |
| 20198 | DEWSWTEHS |
| 20199 | DEWSWVEHS |
| 20200 | DEWTWAEHS |
| 20201 | DEWWSGHAH |
| 20202 | DEWWSGHAP |
| 20203 | DEYGPNHRH |
| 20204 | DFHSRTNIN |
| 20205 | DFLDKSTFF |
| 20206 | DFLHGTSIM |
| 20207 | DFLHVTSTM |
| 20208 | DFLPVTSIM |
| 20209 | DFLYVTSIM |
| 20210 | DGEWGSLNP |
| 20211 | DGFRIEFRC |
| 20212 | DGLKNDDRK |
| 20213 | DGNDQTMHM |
| 20214 | DGPDQTMHM |
| 20215 | DGQWGSIAL |
| 20216 | DGQWGSLNQ |
| 20217 | DGQWGSLNS |
| 20218 | DGTDPTMHM |
| 20219 | DGTDQTMHV |
| 20220 | DGTGQTMHM |
| 20221 | DGTNQTMHM |
| 20222 | DHQGPKLSK |
| 20223 | DMYMOQIWR |
| 20224 | DNNSPQEAS |
| 20225 | DNRCYKYWN |
| 20226 | DPICKVEDW |
| 20227 | DPIWLIKEC |
| 20228 | DPIWRVEDW |
| 20229 | DPIWTVEDW |
| 20230 | DPKWANCDC |
| 20231 | DPMWEREMF |
| 20232 | DPSWKVEDW |
| 20233 | DPVWKVEDW |
| 20234 | DQDAGGYDS |
| 20235 | DOWSWAEHS |
| 20236 | DRQWGSLNP |
| 20237 | DSKNONCEK |
| 20238 | DSLHVTSIM |
| 20239 | DSNYQGTKH |
| 20240 | DSPNQNCFK |
| 20241 | DSQNENCFK |
| 20242 | DSQNQKCFK |
| 20243 | DSQNQNRFK |
| 20244 | DSRNQNCFK |
| 20245 | DTFGLRFDD |
| 20246 | DTFGLRIDD |
| 20247 | DTFGQRVDD |
| 20248 | DTFWLRVDD |
| 20249 | DTQNQNCFK |
| 20250 | DTRCDKYWN |
| 20251 | DTRCSKYWN |
| 20252 | DTRCYKYWT |
| 20253 | DVQWGSLNP |
| 20254 | DWTDQTMHM |
| 20255 | EAHTNSIGK |
| 20256 | EANWVYIEA |
| 20257 | EARTNSICK |
| 20258 | ECEQDDTDI |
| 20259 | ECGLWNFSG |
| 20260 | ECKITESLT |
| 20261 | EDHLHGPGD |
| 20262 | EDHWLGPGD |
| 20263 | EDHWRGPGD |
| 20264 | EDRWHGPGD |
| 20265 | EDYWHGPGD |
| 20266 | EEAHSVKFV |
| 20267 | EEANSVKFA |
| 20268 | EEARCVNPC |
| 20269 | EEAYSVKFA |
| 20270 | EEDHSVKFA |
| 20271 | EEFARIPGN |
| 20272 | EEFDRIPGH |
| 20273 | EEFSRIPGH |
| 20274 | EEPETYTQM |
| 20275 | EEPRCGNPC |
| 20276 | EEPRCVDPC |
| 20277 | EEPRCVNPG |
| 20278 | EEPRCVNNV |
| 20279 | EEPRCVNPY |
| 20280 | EEPRCVNTC |
| 20281 | EEPRCVSPC |
| 20282 | EEPRCVTPC |
| 20283 | EFCENLTAI |
| 20284 | EFCENMTSI |
| 20285 | EFFCEADKA |
| 20286 | EFFCPADKA |
| 20287 | EFFCQADKT |
| 20288 | EFFCQADKV |
| 20289 | EFECOANKA |
| 20290 | EFFCQVDKA |
| 20291 | EFFFQADKA |
| 20292 | EFQQDDTDE |
| 20293 | EGIKFQTEL |
| 20294 | EGKYMDYFM |
| 20295 | EGNSNWVFQ |
| 20296 | EGPQNELNV |
| 20297 | EGVGLYEFA |
| 20298 | EHDNQDISV |
| 20299 | EHDTQAISV |
| 20300 | EHDTQDIIV |
| 20301 | EHDTQDSSV |
| 20302 | EHHALGVMG |
| 20303 | EHHDCVPWS |
| 20304 | EHHHSFGCP |
| 20305 | EHHNLGYHK |
| 20306 | EHHNVGYHT |
| 20307 | EHHPLGAMG |
| 20308 | EHHPVGVMG |
| 20309 | EHHTLGVMG |
| 20310 | EHLNLGYHT |
| 20311 | EHRNLGYHT |
| 20312 | EHVRGMEER |
| 20313 | EHVRGMVDR |
| 20314 | EHYTODISV |
| 20315 | EIAHKLDDI |
| 20316 | EIALKLDDL |
| 20317 | EINEDYAKI |
| 20318 | EKDQRGIGS |
| 20319 | EKRCHAIAL |
| 20320 | ELAGKAFDH |
| 20321 | ELYVILIWW |
| 20322 | EMPIEWDEQ |
| 20323 | EMRFNNFCY |
| 20324 | ENDTQDISV |
| 20325 | ENTMSIIEH |
| 20326 | ENTMTIIEH |
| 20327 | EPIKIENDA |
| 20328 | EPIQIFDDA |
| 20329 | EPIQIFNDS |
| 20330 | EPIQIFSDA |
| 20331 | EPIQIVNDA |
| 20332 | EPIQMENDA |
| 20333 | EPIQSFNDA |
| 20334 | EPIWKVEDW |
| 20335 | EPLQIENDA |
| 20336 | EPNIHAKCV |
| 20337 | EPPLSPSAS |
| 20338 | EPVEGEWNY |
| 20339 | EQHNLGYHT |
| 20340 | EQIASYDRV |
| 20341 | ERDTQDISV |
| 20342 | ESCEDEGLL |
| 20343 | ESCEDEGML |
| 20344 | ESCEDEGTL |
| 20345 | ESCEDEGVL |
| 20346 | ESCEDGGIL |
| 20347 | ESCEDQGIL |
| 20348 | ESCQDEGIL |
| 20349 | ESKYVFPNQ |
| 20350 | ESKYVEPNL |
| 20351 | ESKYVIPYQ |
| 20352 | ESKYVLSNQ |
| 20353 | ESKYVVPNQ |
| 20354 | ESMERWGYD |
| 20355 | ESTNDNITI |
| 20356 | ESTTDNIAI |
| 20357 | ETCGPGGYT |
| 20358 | ETHYNEFCK |
| 20359 | ETRCYKYWN |
| 20360 | ETVETHRDR |
| 20361 | EVGGVRIGL |
| 20362 | EVKRWMMAD |
| 20363 | EVKRWMMDD |
| 20364 | EVKRWMMGD |
| 20365 | EVKRWMMVG |
| 20366 | EVKRWMTVD |
| 20367 | EVPKNELNV |
| 20368 | EVQRWMMVD |
| 20369 | EVRRWMMVD |
| 20370 | EWAQPMIMD |
| 20371 | EWIQPMIMD |
| 20372 | EWTQPLIMD |
| 20373 | EWTQPMIMG |
| 20374 | FATPKEGFD |
| 20375 | FCDGCAPED |
| 20376 | FCDRCAAED |
| 20377 | FCDRCAPEG |
| 20378 | FCDRCAPEV |
| 20379 | FCDRCAPEY |
| 20380 | FCDRCAPKD |
| 20381 | FCDRCATED |
| 20382 | FCDRCDPED |
| 20383 | FCDRCTPED |
| 20384 | FCGRCAPED |
| 20385 | FFFFPENED |
| 20386 | FFICPENED |
| 20387 | FFIFAENED |
| 20388 | FFIFHENED |
| 20389 | FFIFLENED |
| 20390 | FEIFPEDED |
| 20391 | FEIFPEHED |
| 20392 | FEIFPEIED |
| 20393 | FFIFPENAD |
| 20394 | FFIFPENEA |
| 20395 | FFIFPENEV |
| 20396 | FFIEPENGD |
| 20397 | FFIEPENQD |
| 20398 | FFIEPENVD |
| 20399 | FFIFPETED |
| 20400 | FFIFPEYED |
| 20401 | FFIFRENED |
| 20402 | FEIFSENED |
| 20403 | FEIFTENED |
| 20404 | FEIIPENED |
| 20405 | FFIVPENED |
| 20406 | FFIYPENED |
| 20407 | FFLFPENED |
| 20408 | FFNINGSVE |
| 20409 | FFVFPENED |
| 20410 | FGLKNDDRK |
| 20411 | FHALWAECF |
| 20412 | FIDAKIWDV |
| 20413 | FIIFPENED |
| 20414 | FIYKCLFGF |
| 20415 | FLVFMIIEG |
| 20416 | FLVFMLIEV |
| 20417 | FNGNDMLMV |
| 20418 | FPEHKDQGI |
| 20419 | FQEHKDKGI |
| 20420 | FQEHKDQGV |
| 20421 | FTNAAPVQD |
| 20422 | FWESDRVMM |
| 20423 | FWKSDRVMV |
| 20424 | FWKTDRVMM |
| 20425 | FYGPNWEFH |
| 20426 | FYIEPENED |
| 20427 | FYLPNWEFH |
| 20428 | FYQQFFEGI |
| 20429 | FYREFFEGI |
| 20430 | FYRKFFEGI |
| 20431 | FYRPFFEGE |
| 20432 | FYRPNWECH |
| 20433 | FYRPNWEFD |
| 20434 | FYRPNWEFL |
| 20435 | FYRPNWEFY |
| 20436 | FYRPNWEEH |
| 20437 | FYRPNWEVH |
| 20438 | FYRQFFAGE |
| 20439 | FYROFFEGF |
| 20440 | FYRQFFEGL |
| 20441 | FYRQFFEGV |
| 20442 | FYRQFFQGE |
| 20443 | FYRQYFEGE |
| 20444 | GARKNGFMQ |
| 20445 | GARMNGFMR |
| 20446 | GARMNGFTQ |
| 20447 | GARTNGFMQ |
| 20448 | GCQQDDTDE |
| 20449 | GDCACKFSA |
| 20450 | GDCECKFAA |
| 20451 | GDCECKFSS |
| 20452 | GDCECTFSA |
| 20453 | GDCGCKFSA |
| 20454 | GDHLGNVWY |
| 20455 | GDHWHGPGD |
| 20456 | GDEPHRVAC |
| 20457 | GDMWWYQDP |
| 20458 | GDPADRNTC |
| 20459 | GDPGDRNTC |
| 20460 | GDPLDRNTC |
| 20461 | GDPVDHNTC |
| 20462 | GDPVDRNAC |
| 20463 | GDRLDREVF |
| 20464 | GDYCTHKNH |
| 20465 | GDYECKFSA |
| 20466 | GDYLGNIWY |
| 20467 | GEAQQRVVK |
| 20468 | GECECKFSA |
| 20469 | GEFGPNHRH |
| 20470 | GEFMEQGCG |
| 20471 | GEFWNWSRP |
| 20472 | GEFWTWSRT |
| 20473 | GEIPDRVAC |
| 20474 | GEIPHRVSC |
| 20475 | GEIPNRVAC |
| 20476 | GEIPPRVAC |
| 20477 | GEPVDRNTC |
| 20478 | GEWSWAEHS |
| 20479 | GFLHVISEM |
| 20480 | GFPDEGSLQ |
| 20481 | GFPDEKSLQ |
| 20482 | GFPDERNLQ |
| 20483 | GFPDERSLE |
| 20484 | GFPDERSLK |
| 20485 | GFTDERSLQ |
| 20486 | GLELGHVWG |
| 20487 | GPFHQDARA |
| 20488 | GPFKQDARA |
| 20489 | GPFLQDARA |
| 20490 | GPFQEDARA |
| 20491 | GPFQQDARS |
| 20492 | GPFQQDDRA |
| 20493 | GPFQQDGRA |
| 20494 | GPVQQDARA |
| 20495 | GSESNVKAN |
| 20496 | GSQCGVPND |
| 20497 | GTFSNVKAN |
| 20498 | GTISNVKDN |
| 20499 | GTESNVKPN |
| 20500 | GTESNVKSN |
| 20501 | GTESNVKTN |
| 20502 | GTESNVNAN |
| 20503 | GTESNVRAN |
| 20504 | GTKPDTFHG |
| 20505 | GTVSNVKAN |
| 20506 | GVDMCGLAE |
| 20507 | GVESCPDCE |
| 20508 | GVISCPECL |
| 20509 | GYAGVESLG |
| 20510 | GYAGVGELG |
| 20511 | HANQDPWDG |
| 20512 | HATLDPWDG |
| 20513 | HFCANRHIA |
| 20514 | HFCDNRHIA |
| 20515 | HFCFNRHIA |
| 20516 | HFCLNRHIA |
| 20517 | HFCVNRHIE |
| 20518 | HFCVNRHNA |
| 20519 | HFCVNRNEA |
| 20520 | HFCVNRPIA |
| 20521 | HFFVNRHEA |
| 20522 | HFGVNRHEA |
| 20523 | HGLDLGCAV |
| 20524 | HGLKNDDRK |
| 20525 | HGTDQTMHM |
| 20526 | HIRLWPFEG |
| 20527 | HPMDDACKQ |
| 20528 | HSANRDHFV |
| 20529 | HSEDRDHFV |
| 20530 | HSEHRDHFV |
| 20531 | HSENRDHFG |
| 20532 | HSENRDHEV |
| 20533 | HSENRDPFV |
| 20534 | HSENRDYFV |
| 20535 | HSGNRDHFV |
| 20536 | HSKNRDHFV |
| 20537 | HTHYNEFCK |
| 20538 | HTKYECYRF |
| 20539 | HTSLLHFDH |
| 20540 | HWPTHWNIP |
| 20541 | HWPTHWNIP |
| 20542 | HWWFRKRWV |
| 20543 | HWWYRKRWE |
| 20544 | HYTKSISHS |
| 20545 | IDMWWYQDP |
| 20546 | IFDTRWSNV |
| 20547 | IFNYSNHND |
| 20548 | IFPYSNHND |
| 20549 | IINCNGMNW |
| 20550 | IINRTGMNW |
| 20551 | IIRLWPFEG |
| 20552 | ELGQWESYV |
| 20553 | EPDWLWKHV |
| 20554 | EPYKNQNNE |
| 20555 | ESEWNFQDW |
| 20556 | EVCQNNANS |
| 20557 | IYRPNWEFH |
| 20558 | KDHNREHII |
| 20559 | KDNECVSHT |
| 20560 | KDPETYTQM |
| 20561 | KEPEAYTQM |
| 20562 | KEPENYTQM |
| 20563 | KEPETYIQM |
| 20564 | KEPETYTKM |
| 20565 | KEPGTYTQM |
| 20566 | KEPKTYTQM |
| 20567 | KERETYTQM |
| 20568 | KESETYTQM |
| 20569 | KETETYTQM |
| 20570 | KGIDMAMEL |
| 20571 | KELTDEFDS |
| 20572 | KIWNFTKMM |
| 20573 | KIWNVTKVM |
| 20574 | KEWSVTKMM |
| 20575 | KKPETYTQM |
| 20576 | KMQCLTFCD |
| 20577 | KNEDYLKWN |
| 20578 | KNNEYLKWN |
| 20579 | KPHHWNKKT |
| 20580 | KPPHWNKET |
| 20581 | KPPHWNNKT |
| 20582 | KOPETYTQM |
| 20583 | KRNEDVLEQ |
| 20584 | KSMERWAYD |
| 20585 | KSMGRWGYD |
| 20586 | KTHYNEFCK |
| 20587 | KTEWGWSDC |
| 20588 | KTWNVTKMM |
| 20589 | KYESEWMEL |
| 20590 | LAMDCRPEH |
| 20591 | LDDPDTSGQ |
| 20592 | LFCVNRHEA |
| 20593 | LGECCYRDP |
| 20594 | LGMDWGMTD |
| 20595 | LGSLNGAMA |
| 20596 | LGSSNGAMD |
| 20597 | LGSSNGAVA |
| 20598 | LHCALGQHS |
| 20599 | LHCELGEHS |
| 20600 | LHCELGQHP |
| 20601 | LHCGLGQHS |
| 20602 | LHCKLGQHS |
| 20503 | LHCVLGQHS |
| 20604 | LHGKVSMHR |
| 20605 | LHWELGQHS |
| 20606 | LIFPNGDFQ |
| 20607 | LIPLWPFEG |
| 20608 | LIQLWPFEG |
| 20609 | LIRLWQFEG |
| 20610 | LIRLWRFEG |
| 20611 | LKMDCRPEH |
| 20612 | LLICCYRDP |
| 20613 | LLINDWISP |
| 20614 | LLVYFFVPN |
| 20615 | LNVADLPIN |
| 20616 | LNVDDMPIN |
| 20617 | LNVHDLPIN |
| 20618 | LNVVDLPIN |
| 20619 | LPADLVDDW |
| 20620 | LPADLVQDW |
| 20621 | LPADLVYDW |
| 20622 | LPDDLVHDW |
| 20623 | LPPHWIGHY |
| 20624 | LPSDLVHDW |
| 20625 | LPVDLVHDW |
| 20626 | LQMANRDPF |
| 20527 | LQMANRDSC |
| 20628 | LQMANRDTF |
| 20629 | LQMDNRDSF |
| 20630 | LQMPNRDSF |
| 20631 | LQMSNRDSF |
| 20632 | LOTHSICRD |
| 20633 | LOTKSICRD |
| 20634 | LRCELGQHS |
| 20635 | LRMDCRPEH |
| 20636 | LSEWNFHDW |
| 20637 | LSICCYRDP |
| 20638 | LSMDCRPEH |
| 20639 | LTMDCGPEH |
| 20640 | LTMDCRAEH |
| 20641 | LTMDCRPED |
| 20642 | LTMDCRPER |
| 20643 | LTMDCRPEY |
| 20644 | LTMDCRPGH |
| 20645 | LTMDCRPKH |
| 20646 | LTMDCRPKR |
| 20647 | LTMDGRPEH |
| 20648 | LTMGCRPEH |
| 20649 | LTMPNSEGK |
| 20650 | LTMPNSEQK |
| 20651 | LTPDWIGHY |
| 20652 | LTPHWIGHS |
| 20653 | LTPHWIVHY |
| 20654 | LWFCCYRDP |
| 20655 | LWICCYQDP |
| 20555 | LWICCYRDA |
| 20657 | LWICFYRDP |
| 20658 | LWMCCYRDP |
| 20659 | LWNCCYRDP |
| 20660 | LWVCCYRDP |
| 20661 | MAGINGMAY |
| 20652 | MAGLNGMAN |
| 20663 | MAGLNGMAS |
| 20664 | MAGLNGMEY |
| 20665 | MAGLNGVAY |
| 20666 | MAGVNGMAY |
| 20667 | MAHNGNWNR |
| 20568 | MDMSKAWMI |
| 20669 | MELGKDWIQ |
| 20670 | MFENWNLGV |
| 20671 | MFETKKRVV |
| 20672 | MGGLNGMAY |
| 20673 | MGIDKAMEL |
| 20674 | MGIDMAMEF |
| 20675 | MHCELGQHS |
| 20676 | MHDDNLNWN |
| 20677 | MHSPLIQYG |
| 20678 | MIEDRDYFI |
| 20679 | MIETKKRVI |
| 20680 | MISPLIQYG |
| 20681 | MISWWKVDF |
| 20682 | MKDAGEWLV |
| 20683 | MKFIQMIWV |
| 20684 | MLSALIQYG |
| 20585 | MLSHLIQYG |
| 20686 | MLSPLIQYC |
| 20687 | MLSTLIQYG |
| 20688 | MNFIQMILV |
| 20689 | MNFIQMLWV |
| 20690 | MNFISVHMC |
| 20691 | MNICVLDGP |
| 20692 | MNICVLDGT |
| 20693 | MNSAYTMVY |
| 20694 | MNSTQTMAY |
| 20695 | MNVDDLPIN |
| 20696 | MSHCLYVFG |
| 20597 | MTCNDMAFY |
| 20698 | MTIDSMAPC |
| 20699 | MTKWDRLHD |
| 20700 | MTKWDRWRD |
| 20701 | MWICCYRDP |
| 20702 | MWYLWWNCL |
| 20703 | MYLDCCDFK |
| 20704 | MYLDCRNFK |
| 20705 | MYMDCCNFK |
| 20706 | MYVDCCNFK |
| 20707 | NATEGLGWV |
| 20708 | NCVLFECCG |
| 20709 | NCVLYEFCG |
| 20710 | NCVVYECCG |
| 20711 | NEWSWAEHS |
| 20712 | NGARADAKK |
| 20713 | NGLDLGCGV |
| 20714 | NGTDQTMHM |
| 20715 | NGTRVDAKK |
| 20716 | NKVNWNHSS |
| 20717 | NNGFDRYID |
| 20718 | NRILDVEHD |
| 20719 | NSENRDHFV |
| 20720 | NTAEGLGWV |
| 20721 | NTIEGLGWV |
| 20722 | NTTEGLGWG |
| 20723 | NTIQGLGWV |
| 20724 | NVMEKYECR |
| 20725 | NVMEKYECS |
| 20726 | NWSAPQFSD |
| 20727 | NWSGPQFTD |
| 20728 | NWSTPQFTD |
| 20729 | PECCGIFSS |
| 20730 | PECCSICSS |
| 20731 | PECCSIFAS |
| 20732 | PECCSIFCS |
| 20733 | PECCSIFSA |
| 20734 | PECCSIFST |
| 20735 | PECCSIFYS |
| 20736 | PECCSIVSS |
| 20737 | PECCSIYSS |
| 20738 | PECCSLFSS |
| 20739 | PECCSSFSS |
| 20740 | PECCSTFSS |
| 20741 | PECCSVFSS |
| 20742 | PECCTIFSS |
| 20743 | PECWSIFSS |
| 20744 | PECYSIFSS |
| 20745 | PEELGYCYV |
| 20746 | PEELLYCYV |
| 20747 | PEELWYCHV |
| 20748 | PEEQWYCYV |
| 20749 | PEFCSIFSS |
| 20750 | PEKGMVEHQ |
| 20751 | PERENLERC |
| 20752 | PEWCSIFSS |
| 20753 | PFAHMESDA |
| 20754 | PFEHMASDA |
| 20755 | PFEHMDSDA |
| 20755 | PHOWSWSES |
| 20757 | PHRWSWIES |
| 20758 | PHRWSWSEP |
| 20759 | PILWTNHSN |
| 20760 | PIPWTNHSN |
| 20761 | PIQWTNHIN |
| 20762 | PIQWTNHNN |
| 20763 | PIQWTNPSN |
| 20764 | PISWCTQDL |
| 20765 | PISWCTQHV |
| 20766 | PLINQCREL |
| 20767 | PMLCNRGCE |
| 20768 | PMLCNRLCE |
| 20769 | PMLCNRVGE |
| 20770 | PMLWNRVCE |
| 20771 | PMMCNRVCE |
| 20772 | PPLGAWWYG |
| 20773 | PPPNTFHDS |
| 20774 | PQCCSIFSS |
| 20775 | PRNNDDWRT |
| 20776 | PRQLWEVWQ |
| 20777 | PSRDCDSWE |
| 20778 | PTIWGWSDC |
| 20779 | PTMDCRPEH |
| 20780 | PTRCLPLWT |
| 20781 | PVEWAYWHM |
| 20782 | QAMRCLFDH |
| 20783 | QARENLERC |
| 20784 | QECCSIFSS |
| 20785 | QEGENLERC |
| 20786 | QEPETYTQM |
| 20787 | QEPHPFSEQ |
| 20788 | QERENFERC |
| 20789 | QERENLDRC |
| 20790 | QERENVERC |
| 20791 | QIGCCMLMW |
| 20792 | QIIEFEERV |
| 20793 | QITCCMLMW |
| 20794 | QIWNVTKMM |
| 20795 | QLTCPLLDD |
| 20796 | QMLCNRVCE |
| 20797 | QMPMPPVAD |
| 20798 | QNHYNEFCK |
| 20799 | QNIEYLKWN |
| 20800 | QSDKNWYGM |
| 20801 | QSDQNWYSM |
| 20802 | OSKRCLEDH |
| 20803 | QTDYNEFCK |
| 20804 | QTHNNEFCK |
| 20805 | QTHYNEFCE |
| 20806 | QTHYNEFCR |
| 20807 | QTIGGWSDC |
| 20808 | QTIWGWGDC |
| 20809 | QTIWGWIDC |
| 20810 | QTIWGWNDC |
| 20811 | QTIWGWSDF |
| 20812 | QTIWVWSDC |
| 20813 | QTNYNEFCK |
| 20814 | QVCSDWCEG |
| 20815 | RAHECHQCD |
| 20816 | RAHVCDQCD |
| 20817 | RAHVCHHCD |
| 20818 | RAHVCHPCD |
| 20819 | RAHVCHQCA |
| 20820 | RAHVCNQCD |
| 20821 | RAHVCQQCD |
| 20822 | RARPHQGQQ |
| 20823 | RDQLDREVF |
| 20824 | RDRLDRAVF |
| 20825 | RDRLDREAF |
| 20826 | RDRLDREGF |
| 20827 | RDRLDRELF |
| 20828 | RDRLDREVC |
| 20829 | RDRLDREVS |
| 20830 | RDRLDREVV |
| 20831 | RDRLDREVY |
| 20832 | RDRLDRQVF |
| 20833 | RDRLDWEVF |
| 20834 | RDRLGREGF |
| 20835 | RDRLGREVF |
| 20836 | RDRMDREVF |
| 20837 | RDRRDREVF |
| 20838 | RDRSYEQMD |
| 20839 | RDRVDREVF |
| 20840 | RECIPMNSA |
| 20841 | REFWTWSRP |
| 20842 | REPETYTQM |
| 20843 | RERPQQGQQ |
| 20844 | RFCVNRHIA |
| 20845 | RFPDERSLQ |
| 20846 | RGGPQQGQQ |
| 20847 | RGHVCHQCD |
| 20848 | RGRPEQGQQ |
| 20849 | RGRPQEGQQ |
| 20850 | RGRPQQGEQ |
| 20851 | RGRPQQGKQ |
| 20852 | RGRPQQGQR |
| 20853 | RGRSQQGQQ |
| 20854 | RHFLAWSEI |
| 20855 | RHIDFFEGG |
| 20856 | RHNDYETHN |
| 20857 | RHRWSWSES |
| 20858 | RHSDYETHN |
| 20859 | RHTDYETHT |
| 20860 | RHWWGAACV |
| 20861 | RGRPQQGKQ |
| 20862 | RIGHNGGGF |
| 20863 | RIRLWPFEG |
| 20864 | RIWNVTKMM |
| 20865 | RKPVEWHWE |
| 20866 | RLDLFIGRT |
| 20867 | RLGLFMGRT |
| 20868 | RLINDWIAP |
| 20869 | RLINDWIFP |
| 20870 | RLINDWIST |
| 20871 | RLNCLENHS |
| 20872 | RLNNDWISP |
| 20873 | RLNSLDNHS |
| 20874 | RLSNDWISP |
| 20875 | RLVNDWISP |
| 20876 | RMGSKEQED |
| 20877 | RMQCLTYCD |
| 20878 | RNPISVCSV |
| 20879 | RNPVDWHWE |
| 20880 | RNPVEWHWK |
| 20881 | RNPVEWNWE |
| 20882 | RPHVCHQCD |
| 20883 | RPWYHENDG |
| 20884 | RPWYHEYGG |
| 20885 | RRPNAHVDC |
| 20886 | RSDVCDNYD |
| 20887 | RSHVCHQCD |
| 20888 | RSMERWGYD |
| 20889 | RTDAQIGWQ |
| 20890 | RTDELIGWQ |
| 20891 | RTDEQIGWR |
| 20892 | RTDQQIGWQ |
| 20893 | RVGCLNVWG |
| 20894 | RVHVCHQCD |
| 20895 | RVMMDWQPD |
| 20896 | RWICCYRDP |
| 20897 | RYADMMSEY |
| 20898 | RYCLAWSEI |
| 20899 | RYFFAWSEI |
| 20900 | RYFLAWIEI |
| 20901 | RYFLAWSAI |
| 20902 | RYFLAWSES |
| 20903 | RYFLAWTEI |
| 20904 | RYFLDWSEI |
| 20905 | RYFSAWSEI |
| 20906 | RYTWAWSEI |
| 20907 | RYILAWSEI |
| 20908 | RYVLAWSEI |
| 20909 | SAPRLIEDR |
| 20910 | SCDRCAPED |
| 20911 | SCHTDDAKP |
| 20912 | SCKFDHMPP |
| 20913 | SCKLAHMPP |
| 20914 | SCKLDHMAP |
| 20915 | SCKLDHMSP |
| 20916 | SCKWDHMPP |
| 20917 | SCNPEDSIV |
| 20918 | SCNPEGSIG |
| 20919 | SDDGDHCTI |
| 20920 | SDDGYDIFG |
| 20921 | SDHGMHRDG |
| 20922 | SDMCWYQDP |
| 20923 | SDMGWYQDP |
| 20924 | SDMSWYQDP |
| 20925 | SDMWCYQDP |
| 20926 | SDMWGYQDP |
| 20927 | SDMWLYQDP |
| 20928 | SDMWWHQDP |
| 20929 | SDMWWYEDP |
| 20930 | SDMWWYKDP |
| 20931 | SDMWWYPDP |
| 20932 | SDMWWYQAP |
| 20933 | SDMWWYQDA |
| 20934 | SDMWWYQDH |
| 20935 | SDMWWYQDR |
| 20936 | SDMWWYQDT |
| 20937 | SDMWWYQHP |
| 20938 | SDMWWYQVP |
| 20939 | SDMWWYQYP |
| 20940 | SDMWWYRDP |
| 20941 | SDTWWYQDP |
| 20942 | SECCSIFSS |
| 20943 | SEGEHQCKA |
| 20944 | SEMWNYQDP |
| 20945 | SFWGPDVWG |
| 20946 | SGLKNDDRK |
| 20947 | SGMWWYQDP |
| 20948 | SMLCNRVCE |
| 20949 | SNCCSCKAN |
| 20950 | SNDCNLFDL |
| 20951 | SNDCSLCDL |
| 20952 | SNMWWYQDP |
| 20953 | SNNCNLCDL |
| 20954 | SPFQQDARA |
| 20955 | SSGSHDFMG |
| 20956 | SVFDNAFNN |
| 20957 | SVFDNGFDN |
| 20958 | SVLPDWGDS |
| 20959 | SVPRLIEDG |
| 20960 | SWKLDHMPP |
| 20961 | TCKLDHMPP |
| 20962 | TCNPEDSIG |
| 20963 | TCSELPERI |
| 20964 | TCVELPERI |
| 20965 | TDHNREHIS |
| 20966 | TDHNREHMI |
| 20967 | TDIDKQRDK |
| 20968 | TDVGDYWHA |
| 20969 | TDVMLAEWT |
| 20970 | TENDIGCAT |
| 20971 | TGGWMFFWH |
| 20972 | TGIDMAMEL |
| 20973 | TGLDFYRWF |
| 20974 | THNDIGCAT |
| 20975 | TKLNIRDRW |
| 20976 | TKTGNNVMH |
| 20977 | TKWNNLHIS |
| 20978 | TMLCNRVCE |
| 20979 | TMPMPPVAD |
| 20980 | TNCCSCKAN |
| 20981 | TNGFDKYID |
| 20982 | TNIDGLWPI |
| 20983 | TNNNDRFQV |
| 20984 | TNNVSEFMP |
| 20985 | TRLNDEDRG |
| 20986 | TSGSHDEMG |
| 20987 | TSMERWGYD |
| 20988 | TSPADHKWR |
| 20989 | TSSADHKWR |
| 20990 | TSTNDRFQV |
| 20991 | TTLNLRDRW |
| 20992 | TTMNIRDRW |
| 20993 | TTMRGFYHC |
| 20994 | TTTGNNVLH |
| 20995 | TTWNNLHII |
| 20996 | TYITKMDIV |
| 20997 | VCDRCAPED |
| 20998 | VEQLCIEWD |
| 20999 | VERLCIEWV |
| 21000 | VESNCIDDV |
| 21001 | VFQWINYYM |
| 21002 | VGTDQTMHM |
| 21003 | VHCELGQHS |
| 21004 | VHISNMEGD |
| 21005 | VLGQWIGYV |
| 21006 | VLGRWISYV |
| 21007 | VMEITNLWH |
| 21008 | VMGITHLWH |
| 21009 | VNCCSCKAN |
| 21010 | VNVHNWRCS |
| 21011 | VPHNFEFYT |
| 21012 | VSADKCNLN |
| 21013 | VSAGKCNVN |
| 21014 | VSCEDEGIL |
| 21015 | VSQNQNCFK |
| 21016 | VIKWDRWHD |
| 21017 | VWKSDRVMM |
| 21018 | VYRPNWEFH |
| 21019 | VYRQFFEGI |
| 21020 | VYTVNDGCV |
| 21021 | WEDSMFCQY |
| 21022 | WEHSMFCKY |
| 21023 | WEHSMFCRY |
| 21024 | WELSMFCQY |
| 21025 | WLYIWEKWP |
| 21026 | WLYTWEKWT |
| 21027 | WLYTWGKWP |
| 21028 | WLYTWVKWP |
| 21029 | WNPSNMFNI |
| 21030 | WRKAIPYVM |
| 21031 | WRKGITYVM |
| 21032 | WRKGTPYVM |
| 21033 | WRKGVPYVM |
| 21034 | WRKVIPYVM |
| 21035 | WRQGIPYVM |
| 21036 | WRRGIPYVM |
| 21037 | WVVNFIRQV |
| 21038 | WWIIEEHFK |
| 21039 | WWIIEEHGK |
| 21040 | WWVIEEHCK |
| 21041 | WYFLAWSEI |
| 21042 | YALKNDDRK |
| 21043 | YCHEYDEIV |
| 21044 | YCIFEYNGR |
| 21045 | YCIGCVDAI |
| 21046 | YCLKNDDRK |
| 21047 | YCNEFDEIV |
| 21048 | YCNEYDEII |
| 21049 | YCPAANWNW |
| 21050 | YCPEANWNL |
| 21051 | YCPEANWSW |
| 21052 | YCPEASWNW |
| 21053 | YCPETNWNW |
| 21054 | YCPGCGLMW |
| 21055 | YCPVANWNW |
| 21056 | YCREANWNW |
| 21057 | YCTEYDEIV |
| 21058 | YDHGMHRAG |
| 21059 | YDHGMHRDA |
| 21060 | YDHGMHRYG |
| 21061 | YDHGWKMAC |
| 21062 | YDIHPRFFH |
| 21063 | YDLCEHRWD |
| 21064 | YDPGMHRDG |
| 21065 | YEWSWAEHS |
| 21066 | YFCVNRHIA |
| 21067 | YFIFPENED |
| 21068 | YGIIMKIDL |
| 21069 | YGIRLKIDL |
| 21070 | YGIRNGKIG |
| 21071 | YGKISTIIN |
| 21072 | YGLENDDRK |
| 21073 | YGLKDDDRK |
| 21074 | YGLKNDARK |
| 21075 | YGLKNDDCK |
| 21076 | YGLKNDDRE |
| 21077 | YGLKNDDRR |
| 21078 | YGLKNDDSK |
| 21079 | YGLKNDGRK |
| 21080 | YGLKNDNRK |
| 21081 | YGLKNDYRK |
| 21082 | YGLMNDDRK |
| 21083 | YGLQNDDRK |
| 21084 | YGMKNDDRK |
| 21085 | YGMKNDDRR |
| 21086 | YGRKNDDRK |
| 21087 | YGVGYLMPA |
| 21088 | YGVKNDDRK |
| 21089 | YHLIAIGPS |
| 21090 | YHLIAIWPP |
| 21091 | YHLIAKWPS |
| 21092 | YHLIDIWPS |
| 21093 | YHPGCDCAC |
| 21094 | YLVGYLMPA |
| 21095 | YMKHFKNPS |
| 21096 | YMKHFRDPS |
| 21097 | YMKHFRNAS |
| 21098 | YMKHFRNSS |
| 21099 | YMKHIRNPS |
| 21100 | YMKHVRNPS |
| 21101 | YMKNFRNPS |
| 21102 | YMKQFRNPS |
| 21103 | YMKRFRNPS |
| 21104 | YMMHFRNPS |
| 21105 | YMRHFRNPS |
| 21106 | YNISIMEAG |
| 21107 | YQPGCDCSC |
| 21108 | YQPGCDCTC |
| 21109 | YSENRDHFV |
| 21110 | YSERKGEYG |
| 21111 | YITGLRVDD |
| 21112 | YTNVDGFPI |
| 21113 | YTPGNNVTR |
| 21114 | YVFDNAFDN |
| 21115 | YVKISTVIN |
| 21116 | YVLKNDDRK |
| 21117 | YWNEYDEIV |

### Example 36

### AAV5 Variants with Mammary Gland Tissue Tropism as Identified by Machine Learning

[0978] This example describes preferred properties of engineered AAV5 variants that display mammary gland tissue tropism as identified by machine learning methods. The same bioinformatics pre-process, machine learning methods, and analyses as described in EXAMPLE 19 and FIGS. 19-FIG. 22 were carried out to identify preferred properties of engineered AAV5 variants that display mammary gland tissue tropism.

[0979] Favored biophysical properties and favored amino acid residues at each position in the 581 to 589 region of an AAV5 VP capsid polypeptide, which are associated with a higher probability of mammary gland tissue tropism are described below. Any of the below machine learning-derived positional amino acid preferences described in TABLE 56 can be present alone or in combination with each other or in combination with any of the amino acid preferences observed and described in EXAMPLE 11, TABLE 21. Listed below in TABLE 56 are a summary of positional features shared between the top important features for mammary gland tropism extracted from the ML models.

TABLE 56
Machine Learning-Derived Mammary Gland Tissue Tropism Rules

Low surface accessibility at Xaa1
Xaa1 is selected from C
Medium mol mass at Xaa1
Xaa1 is selected from C
High surface accessibility at Xaa2
Xaa2 is selected from D, N, or Q
Low hydropathy at Xaa2
Xaa2 is selected from D, E, R, K, H, N, or Q
High average flexibility at Xaa3
Xaa3 is selected from D, E, R, P, G, or S
Medium mutability at Xaa3
Xaa3 is selected from R or H
High mutability at Xaa4
Xaa4 is selected from M, I, Q, or T
High solubility at Xaa4
Xaa4 is selected from W, F, I or L
High surface accessibility at Xaa4
Xaa4 is selected from E, R, or K
High solubility at Xaa5
Xaa5 is selected from W, F, I, or L
Low mutability at Xaa5
Xaa5 is selected from Y, F, or L
High hydropathy at Xaa6
Xaa6 is selected from V, I, or L
Medium mol mass at Xaa6
Xaa6 is selected from D, I, L, or N
Low surface accessibility at Xaa8
Xaa8 is selected from C
Low mutability at Xaa8
Xaa8 is selected from C, R, or H
Medium mutability at Xaa9
Xaa9 is selected from R or H

[0980] TABLE 57 below provides sequences of the 581 to 589 region for variant AAV VP1 capsid polypeptides that exhibited mammary gland tissue tropism and comport to one or more of the rules provided in TABLE 56. The present disclosure, thus, provides for rAAVs composed of engineered AAV5 VP1 capsid polypeptides having a SEQ ID NO: 2, wherein the Xaa1 to Xaa9 region is any one of SEQ ID NO: 23118-SEQ ID NO: 24117, as disclosed in TABLE 57. Also encompassed herein are rAAVs composed of engineered AAV5 VP2 capsid polypeptides and engineered AAV5 VP3 capsid polypeptides having the sequences disclosed in the below table at the regions in AAV5 VP2 (amin acid residues 445 to 453) and AAV5 VP3 (amino acid residues 389-397) corresponding to the amino acids in the AAV 5 VP1 581 to 589 region.

TABLE 57
Sequences of the 581 to 589 Region in AAV5
VP1 Capsid Polypeptide that Drive
Mammary Gland Tissue Tropism

| SEQ | 581-589 |
|---|---|
| ID NO | Sequence |
| 23118 | AAAQFGKHT |
| 23119 | AASKVKLHH |
| 23120 | ACDRFLAMY |
| 23121 | ACDRFMTMY |
| 23122 | ACDRFMVMY |
| 23123 | ACDRIMAMY |
| 23124 | ACDRVMAMY |
| 23125 | ACDRYIAEY |
| 23126 | ACDRYMAMY |
| 23127 | ADQCKWWCM |
| 23128 | ADQCQWWCV |
| 23129 | AELMALAPC |
| 23130 | AELMVLAQC |
| 23131 | AFDRFMAMY |
| 23132 | AFTIKDDWW |
| 23133 | AGAKYHDWL |
| 23134 | AGGKLKTIG |
| 23135 | AGGKLQTLV |
| 23136 | AIGQFMMHL |
| 23137 | AIQQFMMHL |
| 23138 | AIRLFMMHL |
| 23139 | AIRQFMMHR |
| 23140 | AIRQFMMHV |
| 23141 | AIRQFTMHL |
| 23142 | AIRRFMMHL |
| 23143 | AIWPAAWMD |
| 23144 | AKLMALAQC |
| 23145 | AKVNCVYYG |
| 23146 | AKVSTINGM |
| 23147 | ALREFWTWW |
| 23148 | ALRQFMMHL |
| 23149 | ANCKHDHCH |
| 23150 | ANCKPDHCH |
| 23151 | ANCKQHHCH |
| 23152 | ANCRQDHCH |
| 23153 | ANRKQDHCH |
| 23154 | ANRQFMMHL |
| 23155 | ANWKQDHCH |
| 23156 | ANYKQDHCH |
| 23157 | AQISTLNGM |
| 23158 | AQNGLGTVQ |
| 23159 | ARGKLQTEG |
| 23160 | ARGPMLAVK |
| 23161 | ARVSTLNGM |
| 23162 | ASARLYYCW |
| 23163 | ASDIFDGHQ |
| 23164 | ASDKMDGGS |
| 23165 | ASDKMDIGS |
| 23166 | ASERLHYCW |
| 23167 | ASERLYYCL |
| 23168 | ASKQWDHKH |
| 23169 | ASNKMDVGS |
| 23170 | ASQRLYYCW |
| 23171 | ASRQFMMHI |
| 23172 | ASVRLYYCW |
| 23173 | ASYKDQRYY |
| 23174 | ATQKITGTS |
| 23175 | ATRQFMMHL |
| 23176 | ATTQWGMCN |
| 23177 | AVHPMAYCF |
| 23178 | AWDRFMAMY |
| 23179 | CAHKEHVCH |
| 23180 | CAHWSYDCY |
| 23181 | CAHWTYECY |
| 23182 | CAHWTYNCY |
| 23183 | CAHWTYYCY |
| 23184 | CAHWYYDQR |
| 23185 | CANKENVCH |
| 23186 | CANKGHVCH |
| 23187 | CANWTYDCY |
| 23188 | CATKEHVCH |
| 23189 | CEGWGTYCL |
| 23190 | CEGWVTYCI |
| 23191 | CFCELEKMT |
| 23192 | CFCTYEIEH |
| 23193 | CFCTYKEQH |
| 23194 | CFCTYKNEH |
| 23195 | CFGFVNSVT |
| 23196 | CFGTYKEEH |
| 23197 | CFGVVNSVN |
| 23198 | CFRTYDLLS |
| 23199 | CFWMYDLLS |
| 23200 | CEYTYKIEH |
| 23201 | CGHWTYDCY |
| 23202 | CGLIMEMCC |
| 23203 | CGLIMEMCL |
| 23204 | CGLIMEMWW |
| 23205 | CGLIMEVCW |
| 23206 | CGLEMQMCW |
| 23207 | CGLEMVMCW |
| 23208 | CGLLMEMCW |
| 23209 | CGMIMEMCW |
| 23210 | CGPIMEMCW |
| 23211 | CGVIMEMCW |
| 23212 | CHFQYKNQA |
| 23213 | CHFRYQNQA |
| 23214 | CHMSFNQCY |
| 23215 | CHRKWEKQE |
| 23216 | CEALRLAWD |
| 23217 | CECSSPDHP |
| 23218 | CICSSPEQP |
| 23219 | CEDLQLAWD |
| 23220 | CEDLRLAWG |
| 23221 | CIDLRLAWH |
| 23222 | CIDLRLDWD |
| 23223 | CIDLRLVWD |
| 23224 | CIDLWLAWD |
| 23225 | CIEWGGMMG |
| 23226 | CIEWWDMMG |
| 23227 | CIEWWGKMG |
| 23228 | CIEWWGMMA |
| 23229 | CIEWWGMVG |
| 23230 | CIEWWSMMG |
| 23231 | CEGAHWHEP |
| 23232 | CEGINLDHH |
| 23233 | CEGLRLAWD |
| 23234 | CEGLRLDWD |
| 23235 | CIGRFDHKQ |
| 23236 | CIGWWGMMG |
| 23237 | CEGYKWFPG |
| 23238 | CIHADGKYS |
| 23239 | CIIPKLKER |
| 23240 | CIIPKMEER |
| 23241 | CIIPKMKAR |
| 23242 | CIIPKMKEK |
| 23243 | CIIPKMKKR |
| 23244 | CIIPKMMER |
| 23245 | CIIPKMRER |
| 23246 | CIIPKVKER |
| 23247 | CIIPRMKER |
| 23248 | CEIRKMKER |
| 23249 | CEISKMKER |
| 23250 | CIKNDWQRI |
| 23251 | CIKPDWQRI |
| 23252 | CIKTDWERI |
| 23253 | CIKTDWQGE |
| 23254 | CIKTDWQRN |
| 23255 | CIKTDWRRI |
| 23256 | CILPKMKER |
| 23257 | CILSSPEQP |
| 23258 | CIMGHCRQH |
| 23259 | CIMPKMKER |
| 23260 | CIMSDCRQH |
| 23261 | CIMSHCREH |
| 23262 | CIMSHCRKH |
| 23263 | CIMSHCRQD |
| 23264 | CIMSHCRQY |
| 23265 | CIMSHFRQH |
| 23266 | CIMSHGRQH |
| 23267 | CIMSHNRQH |
| 23268 | CIMSHWRQH |
| 23269 | CIMSHYRQH |
| 23270 | CIMSRCRQH |
| 23271 | CIMTDWQRI |
| 23272 | CENADGKYP |
| 23273 | CINRFDHKQ |
| 23274 | CINSDGKYS |
| 23275 | CIPSDRHFG |
| 23276 | CIPTYRHLV |
| 23277 | CIPTYRHLV |
| 23278 | CIRSHCRQH |
| 23279 | CIRSSTDQP |
| 23280 | CERTDWQRI |
| 23281 | CESREDHKL |
| 23282 | CISRYDHKQ |
| 23283 | CITADGKYS |
| 23284 | CETTMNVKT |
| 23285 | CITTYSHFG |
| 23286 | CIVLRLAWD |
| 23287 | CIVPKMKER |
| 23288 | CIVWWGMMG |
| 23289 | CKHPSWYMD |
| 23290 | CKKWTNQAH |
| 23291 | CKPWINQAH |
| 23292 | CKQWTNQAQ |
| 23293 | CKVHKHWDR |
| 23294 | CKVHRNWDR |
| 23295 | CKVRKNWDR |
| 23296 | CLAIFRLQS |
| 23297 | CLGATWVAA |
| 23298 | CLGSTWAAA |
| 23299 | CLGSTWFAA |
| 23300 | CLGSTWGAA |
| 23301 | CLGSTWVAT |
| 23302 | CMCLKKFYY |
| 23303 | CMCLKKYYY |
| 23304 | CMCLRKCYY |
| 23305 | CMCVKKCYY |
| 23306 | CMENYHQQY |
| 23307 | CMMSHCRQH |
| 23308 | CQDFRHDCA |
| 23309 | CQDFRHECS |
| 23310 | CQGKWEKQE |
| 23311 | CQKRIIMQA |
| 23312 | CQPKWEKQE |
| 23313 | CQQRLIMQA |
| 23314 | CQREWEKQE |
| 23315 | CQRKWEKQA |
| 23316 | CQRRWEKQE |
| 23317 | CRGKSHEHT |
| 23318 | CRGKSHNHT |
| 23319 | CRGKSRDHT |
| 23320 | CRGQSHDHT |
| 23321 | CRLIMEMCW |
| 23322 | CRRKSHDHT |
| 23323 | CSIWEDRSG |
| 23324 | CSMERRNEL |
| 23325 | CSMSHCRQH |
| 23326 | CSPNFQDQK |
| 23327 | CSRATWGAE |
| 23328 | CTDRMVKAA |
| 23329 | CTDRMVKAT |
| 23330 | CTGNYHQQY |
| 23331 | CTHKDIEMD |
| 23332 | CTHKQSIAV |
| 23333 | CTHRMVKAS |
| 23334 | CTLFSGRTA |
| 23335 | CTQSFVMYQ |
| 23336 | CTVFSGRAA |
| 23337 | CTVSSGRTA |
| 23338 | CVAIEMSVA |
| 23339 | CVCLKKCYY |
| 23340 | CVCTYKIEH |
| 23341 | CVFREIKTA |
| 23342 | CVGINLEHH |
| 23343 | CVGINLYHH |
| 23344 | CVGLNLDHH |
| 23345 | CVHGQYYGQ |
| 23346 | CVLIMEMCW |
| 23347 | CVLYYNQQC |
| 23348 | CVMCYNDCK |
| 23349 | CVMSHCRQH |
| 23350 | CVQGQYNQE |
| 23351 | CVQGQYYQA |
| 23352 | CVQGRYYQE |
| 23353 | CVQTMNGRS |
| 23354 | CVVINLDHH |
| 23355 | CVYREIKTS |
| 23356 | CVYREIQTA |
| 23357 | CVYREITTA |
| 23358 | CVYRELKTA |
| 23359 | CVYREVKTA |
| 23360 | CWAIERLRS |
| 23361 | CWAIERMQS |
| 23362 | CWAIVRLQS |
| 23363 | CWAQLNTDP |
| 23364 | CNAQLNTDS |
| 23365 | CWDIERLQS |
| 23366 | CWDIYNACD |
| 23367 | CWGIERLQS |
| 23368 | CWGQLNTDT |
| 23369 | CWPQLNTDT |
| 23370 | CWSIERLQS |
| 23371 | CWVMMKTQE |
| 23372 | CYCTYKIEH |
| 23373 | DAAKFGKHT |
| 23374 | DASKVKLHR |
| 23375 | DDLGAGRSE |
| 23376 | DDNWHAWFM |
| 23377 | DDVGAGRSD |
| 23378 | DDVMWQLIH |
| 23379 | DDWMPQWVD |
| 23380 | DEFIWLVMH |
| 23381 | DEISNQNSY |
| 23382 | DGGVTTYGG |
| 23383 | DHVIIKKNY |
| 23384 | DIRPSVSDS |
| 23385 | DKEWSVHMG |
| 23386 | DLDAQGAMW |
| 23387 | DLGMINNMA |
| 23388 | DMDAKGAMW |
| 23389 | DMDAQGSMW |
| 23390 | DMSIATWNP |
| 23391 | DPDKQGQGI |
| 23392 | DPKWEKYAM |
| 23393 | DPKWEKYGT |
| 23394 | DQAWSVHMG |
| 23395 | DQEWSVHMC |
| 23396 | DQEWSVNMG |
| 23397 | DQKWEKYGL |
| 23398 | DQKWEKYGM |
| 23399 | DQKWSVHMG |
| 23400 | DQVWSVHMG |
| 23401 | DREWSVHMG |
| 23402 | DSKWLDRPV |
| 23403 | DSSKVKLHH |
| 23404 | DTDKKGQGI |
| 23405 | DTDKQGQGF |
| 23406 | DTDKQGQGL |
| 23407 | DTDKQGQGM |
| 23408 | DTDKQGQGV |
| 23409 | DTDKQSQGI |
| 23410 | DTNKQGQGI |
| 23411 | DVDYRSKAW |
| 23412 | DVDYRYEAW |
| 23413 | DVFIDWSGR |
| 23414 | DVKTDTSRD |
| 23415 | DVRQILLCH |
| 23416 | DVRQILVCH |
| 23417 | DVRQIMMCH |
| 23418 | DVRQLLMCH |
| 23419 | DYFQYNEAR |
| 23420 | DYYQYNEAP |
| 23421 | EAISYVENV |
| 23422 | ECDIFDGHQ |
| 23423 | ECDILDGHQ |
| 23424 | ECDRYIAEH |
| 23425 | ECDRYIAQY |
| 23426 | ECDRYISEY |
| 23427 | ECGFIRLNE |
| 23428 | ECKPIAGDR |
| 23429 | ECYHVLANT |
| 23430 | EDIHMIAGH |
| 23431 | EDTHMIAGP |
| 23432 | EDTHMIVGH |
| 23433 | EEFDTIAAP |
| 23434 | EEFDTLAAP |
| 23435 | EEFDTVAAR |
| 23436 | EEFDTVATP |
| 23437 | EEFDTVGAP |
| 23438 | EEYDTVAAP |
| 23439 | EFDIDQCCT |
| 23440 | EGDIFDGHQ |
| 23441 | EGIWQGMDA |
| 23442 | EHVIIEKNY |
| 23443 | EHVILKKNY |
| 23444 | EHVIMKKNY |
| 23445 | EIKVVNSKD |
| 23446 | EIKYRRCRA |
| 23447 | EIKYRREMA |
| 23448 | EIKYRRSMA |
| 23449 | EIREGEECC |
| 23450 | EIRVVNSRD |
| 23451 | EISPAAWMD |
| 23452 | EKMESPECL |
| 23453 | EKTWLVVWC |
| 23454 | EMDAQGAMW |
| 23455 | EMRMNIQCE |
| 23456 | EPEGALDKT |
| 23457 | EPEGELDRT |
| 23458 | EPEGELYKT |
| 23459 | EPEGEVDKT |
| 23460 | EQEAYILRI |
| 23461 | ESDIFDAHQ |
| 23462 | ESDIFDGHE |
| 23463 | ESDIFDGHK |
| 23464 | ESDIFDGHP |
| 23465 | ESDIFDGHR |
| 23466 | ESDIFDGRQ |
| 23467 | ESDIFDVHQ |
| 23468 | ESDIFHGHQ |
| 23469 | ESDIFVGHQ |
| 23470 | ESDISDGHQ |
| 23471 | ESDIVDGHP |
| 23472 | ESDIVDGHQ |
| 23473 | ESDPMQLFT |
| 23474 | ESDPMQRFT |
| 23475 | ESDVFEGHQ |
| 23476 | ESKSCGLKG |
| 23477 | ESKSCGLRG |
| 23478 | ESNIFDGHQ |
| 23479 | ESTSCGLTG |
| 23480 | ESVDWIKCE |
| 23481 | ESWPAAWMD |
| 23482 | ETDEFDGHQ |
| 23483 | EVEAIRGIR |
| 23484 | EVEIFRLEG |
| 23485 | EVIAYVENV |
| 23486 | FDWMPQWVD |
| 23487 | FGGQLRVMY |
| 23488 | FGRERVWDS |
| 23489 | FGSLYRRRG |
| 23490 | FIGLRYKDQ |
| 23491 | FKLWKLFQA |
| 23492 | FKMDMTKRS |
| 23493 | FKMWKLFKA |
| 23494 | FKRWKLFQA |
| 23495 | FNIPCLFSR |
| 23496 | FNIQCLCSR |
| 23497 | FNIQCLFTR |
| 23498 | FNIQCLISR |
| 23499 | FNIQCLYSR |
| 23500 | FNIRCLFSR |
| 23501 | FNLQCLFSR |
| 23502 | FQTSMYCDW |
| 23503 | FRGHAMWDA |
| 23504 | FRGHGMWYA |
| 23505 | FRGHGTWDA |
| 23506 | FRGHGVWDA |
| 23507 | FRGLGMWDA |
| 23508 | FSEQNVSEA |
| 23509 | FSIQCLFSR |
| 23510 | FTEQIGRQM |
| 23511 | FTQQEDRQM |
| 23512 | FVCLRYKDQ |
| 23513 | FVGWYLNSP |
| 23514 | FVGWYWDSP |
| 23515 | FVGWYWNPP |
| 23516 | FVGWYWNSH |
| 23517 | FVGWYWNSR |
| 23518 | FVMGYNDCK |
| 23519 | GCGLVQRFM |
| 23520 | GHFTVLNWG |
| 23521 | GNCKQDHCH |
| 23522 | GRHTAVATG |
| 23523 | GSERLYYCW |
| 23524 | GSVMVAITG |
| 23525 | GYGRMNKAS |
| 23526 | HASICQGGD |
| 23527 | HAYIYETWP |
| 23528 | HDCDMQASE |
| 23529 | HDKWGWWRE |
| 23530 | HDRKACMIA |
| 23531 | HDVMWQLIH |
| 23532 | HDWMPQWVD |
| 23533 | HEAKLVPKA |
| 23534 | HEFIWLEMH |
| 23535 | HEYIYETLP |
| 23536 | HEYIYVTWP |
| 23537 | HFDFNHQCQ |
| 23538 | HFLEVAWGS |
| 23539 | HHRHIANNG |
| 23540 | HKHMILYHE |
| 23541 | HMDIQMVMP |
| 23542 | HMDIQMYMP |
| 23543 | HMDIQVFMP |
| 23544 | HMSIATWYP |
| 23545 | HMTFYLSRD |
| 23546 | HPSICEGGD |
| 23547 | HSEMAMLMQ |
| 23548 | HSEMVMWMQ |
| 23549 | HSGELYDAF |
| 23550 | HSGELYDCF |
| 23551 | HSGELYDSF |
| 23552 | HSGIHCCCG |
| 23553 | HSNFFHLND |
| 23554 | HSNFFHMTD |
| 23555 | HVDGNEACN |
| 23556 | HVDSNIACT |
| 23557 | HVDSNISCN |
| 23558 | HVDSNLACN |
| 23559 | HVDSNVACN |
| 23560 | HVNSNIACN |
| 23561 | HYCKIIPCH |
| 23562 | HYCKIIPSH |
| 23553 | HYCKIIPYN |
| 23564 | HYCKIITYH |
| 23565 | HYCKILPYH |
| 23566 | HYCKLIPYH |
| 23567 | HYCKMIPYH |
| 23568 | HYCKNIPYH |
| 23569 | HYCKTIPYH |
| 23570 | HYCMIIPYH |
| 23571 | HYCQIIPYH |
| 23572 | HYCRIIPYH |
| 23573 | HYFKIIPYH |
| 23574 | HYGKIIPYH |
| 23575 | HYYKIIPYH |
| 23576 | ICKIRSRLD |
| 23577 | ICTIGSRLD |
| 23578 | IDRKACMIA |
| 23579 | IGVQFLKDH |
| 23580 | IIGDKTQDD |
| 23581 | IIRDKTEDD |
| 23582 | IIRDKTQDG |
| 23583 | IIRDKTQND |
| 23584 | IIRDKTRDD |
| 23585 | IIRDRTQDD |
| 23586 | IIRDTTQDD |
| 23537 | IIREKTQDD |
| 23588 | IIRGKTQDD |
| 23589 | IIRYKTQDD |
| 23590 | IMRDKTQDD |
| 23591 | IPRTYQEMQ |
| 23592 | IQHQSRRHM |
| 23593 | IQLKAVPSC |
| 23594 | IQLKAVICC |
| 23595 | IQLKTVTSC |
| 23596 | IRGHGMWDA |
| 23597 | IRLKAVTSC |
| 23598 | IRRHQMTDK |
| 23599 | ISRDKTQDD |
| 23600 | ITRTYQEME |
| 23601 | ITRTYQEMK |
| 23602 | ITRTYQERQ |
| 23603 | IVRDKTQDD |
| 23604 | KANMWLACV |
| 23605 | KCGFIRLNE |
| 23606 | KCVIGKGRR |
| 23607 | KDFWEHECF |
| 23608 | KDFWEHLCF |
| 23609 | KDFWEHQCV |
| 23610 | KDFWERQCF |
| 23611 | KDFWEYQCF |
| 23612 | KDFWGHQCF |
| 23613 | KDFWKHQCF |
| 23614 | KDRMGINQC |
| 23615 | KDRMGLNQR |
| 23616 | KDRMGLNQW |
| 23617 | KDRMVLNQC |
| 23618 | KDTHMIAGH |
| 23619 | KDVTRLRCP |
| 23620 | KDVWEHQCF |
| 23621 | KEFDTVAAP |
| 23622 | KFDEDQCCT |
| 23623 | KKFWDTVIY |
| 23624 | KKHMILCHF |
| 23625 | KQTQIRRHM |
| 23626 | KSDIFDGHQ |
| 23627 | KSVDWIKCE |
| 23628 | KYAYILDCA |
| 23629 | KYAYSLYCA |
| 23630 | KYGYSLDCA |
| 23631 | KYTYSLDCA |
| 23632 | KYWNYAEAK |
| 23633 | LADIEYSHD |
| 23634 | LAGKEGAHF |
| 23635 | LCASRGLDA |
| 23636 | LCGAIIKAS |
| 23637 | LCGLIIKAS |
| 23638 | LCGPIIKAA |
| 23639 | LCGPIIKAP |
| 23640 | LCGPIIKAY |
| 23641 | LCGPIIKPS |
| 23642 | LCGPIIKSS |
| 23643 | LCGPIIRAS |
| 23644 | LCGPILKAS |
| 23645 | LCGPIVKAS |
| 23646 | LCGPLIKAS |
| 23647 | LCGQIIKAS |
| 23648 | LCTSRGLDP |
| 23649 | LDRKACLIA |
| 23650 | LDRKACMIG |
| 23651 | LDRKACMIS |
| 23652 | LDRKACMMA |
| 23653 | LDRKACMVA |
| 23654 | LDRKACVIA |
| 23655 | LDRKAFMIA |
| 23656 | LDRKAWMIA |
| 23657 | LDRKDCMIA |
| 23658 | LDRKPCMIA |
| 23659 | LDRKSCMIA |
| 23660 | LDRKVCMIA |
| 23661 | LDRQACMIA |
| 23662 | LDRRACMIA |
| 23663 | LFTDYWEQG |
| 23664 | LGILYRRRG |
| 23665 | LGSPYRRRG |
| 23666 | LIRDKTQDD |
| 23667 | LKAQFHWGA |
| 23668 | LKDQFHWCA |
| 23669 | LKDRFHWGA |
| 23670 | LKMDMTKHS |
| 23671 | LKVDMTKRS |
| 23672 | LLFFMKFAK |
| 23673 | LQMDMTKRS |
| 23674 | LQPQMRRHM |
| 23675 | LQPQNRRHM |
| 23676 | LQPQSRRHV |
| 23677 | LRCQMGDHW |
| 23678 | LRMDMTKRS |
| 23679 | LRVIQGDNY |
| 23680 | LTHKRESEW |
| 23681 | LTPKRESEC |
| 23682 | LTRKRESEC |
| 23683 | LWFYMKFAK |
| 23684 | MANKWLACV |
| 23685 | MANRWLACV |
| 23686 | MASMWLACV |
| 23687 | MATMWLACV |
| 23688 | MCGLRYYWA |
| 23689 | MCGPIIKAS |
| 23690 | MCLLIRACE |
| 23691 | MCLWILACE |
| 23692 | MCLWIRPCE |
| 23693 | MCRHIIPDN |
| 23694 | MEHQSRRHM |
| 23695 | MEPESRRHM |
| 23696 | MEPQSRRHI |
| 23697 | MEPQSRRHM |
| 23698 | MFEKYFQSM |
| 23699 | MFMKDELIA |
| 23700 | MFMKNELMA |
| 23701 | MHKHFEDHK |
| 23702 | MHKHFKGHK |
| 23703 | MHKHYKDHK |
| 23704 | MHKRFKDHK |
| 23705 | MHLLKDFCT |
| 23706 | MHQHFKDHK |
| 23707 | MHRHFKDHK |
| 23708 | MIDWGNKCT |
| 23709 | MKPQGRRHM |
| 23710 | MKPQSRRHI |
| 23711 | MLAGWNQDT |
| 23712 | MLGEWWPGC |
| 23713 | MLNWGNKCT |
| 23714 | MNKHFKDHK |
| 23715 | MPKHFKDHK |
| 23716 | MQHLSRRHM |
| 23717 | MQHQCRRHM |
| 23718 | MQHRSRRHM |
| 23719 | MQLQCRRHM |
| 23720 | MQLRSRRHM |
| 23721 | MQPDSRRHM |
| 23722 | MQPHIRRHM |
| 23723 | MQPHSRRDM |
| 23724 | MQPLSRRHM |
| 23725 | MQPPSRRRM |
| 23726 | MQPQFRRHM |
| 23727 | MQPQSRRDM |
| 23728 | MQPQSRRHK |
| 23729 | MQPQSRRNM |
| 23730 | MQPRGRRHM |
| 23731 | MQPRSRRHM |
| 23732 | MQRRSRRHM |
| 23733 | MQTESRRHM |
| 23734 | MQTQSLRHM |
| 23735 | MQTQSRRNM |
| 23736 | MRIIQGDNY |
| 23737 | MRPQCRRHM |
| 23738 | MRPQSRRHK |
| 23739 | MRPQSRRHM |
| 23740 | MRPQSRRHR |
| 23741 | MRPQSRRHR |
| 23742 | MSNMWLACV |
| 23743 | MSPKPAYWG |
| 23744 | MSTKPAYWA |
| 23745 | MSTKPFYWG |
| 23746 | MTAKMAGRM |
| 23747 | MTNMWLACV |
| 23748 | MVAIKQYHT |
| 23749 | MVGVIRDAS |
| 23750 | MVVIKQYQT |
| 23751 | MVVIKRYHT |
| 23752 | MWFFMKFAK |
| 23753 | MWGEWWPGG |
| 23754 | MWVIQGDNY |
| 23755 | MYKHFKDHK |
| 23756 | NDGMVHNCW |
| 23757 | NDHWHAWFM |
| 23758 | NDKWGWWRQ |
| 23759 | NDLMWQLIH |
| 23760 | NDNWDAWFM |
| 23761 | NDNWHAWFR |
| 23762 | NDNWHAWFV |
| 23763 | NDNWHAWIM |
| 23764 | NDNWHEWFM |
| 23765 | NDVMWELIH |
| 23766 | NDVMWHLIH |
| 23767 | NDVMWQLIR |
| 23768 | NDVMWQLIY |
| 23769 | NDVMWQLVH |
| 23770 | NDWMPQWVD |
| 23771 | NEISNQNTY |
| 23772 | NFDFNHQCH |
| 23773 | NFGIYHLQG |
| 23774 | NKHCIAMPC |
| 23775 | NKYCIAMAC |
| 23776 | NKYCIAMPF |
| 23777 | NKYCITMPC |
| 23778 | NKYCLAMPC |
| 23779 | NMDAQGAMW |
| 23780 | NNGEWDVCY |
| 23781 | NPKWEKYGM |
| 23782 | NQDWLLSVP |
| 23783 | NQEWSVHMG |
| 23784 | NVDVRESEW |
| 23785 | NWHEKRHRG |
| 23786 | NYKPSFLTR |
| 23787 | PCAIEESHD |
| 23788 | PCDRFMAMY |
| 23789 | PEDFENHDG |
| 23790 | PLRAEMSFH |
| 23791 | QCDRVWLNQ |
| 23792 | QCEFIRLNE |
| 23793 | QCGFIRLDG |
| 23794 | QCGFIRLHE |
| 23795 | QCGFIRLNG |
| 23796 | QCGFIRLNQ |
| 23797 | QCGFIRVNE |
| 23798 | QCGFLRLNE |
| 23799 | QCHIIVAPE |
| 23800 | QCHIMVARE |
| 23801 | QCHINVARE |
| 23802 | QCPIIVARE |
| 23803 | QDFWEHQCF |
| 23804 | QEFDTVAAP |
| 23805 | QEHMILCHF |
| 23806 | QETWLVVWC |
| 23807 | QFGFIRLNE |
| 23808 | QFHIDQCCT |
| 23809 | QGGFIRLNA |
| 23810 | QGGFIRLNG |
| 23811 | QIGCNVMIS |
| 23812 | QIGFNVMLS |
| 23813 | QIKYRRCMA |
| 23814 | QIWPAAWMD |
| 23815 | QKDMIICHF |
| 23816 | QKDMILCHF |
| 23817 | QKDWGRRVT |
| 23818 | QKEAYILRI |
| 23819 | QKHMIICHF |
| 23820 | QKHMILCGF |
| 23821 | QKHMILCRF |
| 23822 | QKHMILCYF |
| 23823 | QKHMLLCHF |
| 23824 | QKHMMLCHF |
| 23825 | QKHMSLCHF |
| 23826 | QKHMTLCHF |
| 23827 | QKHRILCHF |
| 23828 | QKHRLLCHF |
| 23829 | QKHTILCHF |
| 23830 | QKHVILCHF |
| 23831 | QKIWLVVWC |
| 23832 | QKKMILCHF |
| 23833 | QKNMILCHF |
| 23834 | QKPMILCHF |
| 23835 | QKPWLVVWC |
| 23836 | QKRMILCHF |
| 23837 | QKTWLIVWC |
| 23838 | QKTWLVGWC |
| 23839 | QKTWLVVWF |
| 23840 | QKTWLVVWV |
| 23841 | QKTWLVVWY |
| 23842 | QNYWCVCGA |
| 23843 | QPDPMKQWS |
| 23844 | QPKEWVIKD |
| 23845 | QPREWVIKE |
| 23846 | QQDPMKQWT |
| 23847 | QQEACILRI |
| 23848 | QQEAFILRI |
| 23849 | QQEAYILKI |
| 23850 | QQEAYILRL |
| 23851 | QQEAYILRV |
| 23852 | QQEEYILRI |
| 23853 | QQEGYILRI |
| 23854 | QQESYILRI |
| 23855 | QQEVYILRI |
| 23856 | QQHMILCHF |
| 23857 | QSDDWIKCE |
| 23858 | QSDIFDGHQ |
| 23859 | QSDRVWLNP |
| 23860 | QSEMAMWMQ |
| 23861 | QSGWLLEAK |
| 23862 | QSIDWIKCE |
| 23863 | QSLDWIKCE |
| 23864 | QSVDWIKGE |
| 23865 | QSVDWIKYE |
| 23866 | QSVDWIQCE |
| 23867 | QSVDWIRCE |
| 23868 | QSVDWLKCE |
| 23869 | QSVDWMKCE |
| 23870 | QSVDWVKCE |
| 23871 | QSNNWIKCE |
| 23872 | QSVYWIKCE |
| 23873 | QVKYRTCQW |
| 23874 | QVTSDGKIV |
| 23875 | QYSRMNKAS |
| 23876 | RAKTCIYKY |
| 23877 | RAKTCLYKC |
| 23878 | RCDGLWCHF |
| 23879 | RCGFIRLNE |
| 23880 | RCGFIRLNG |
| 23881 | RCMKLVGTA |
| 23882 | RCRNCGSNG |
| 23883 | RDFWEHQCF |
| 23884 | RDQCVASCA |
| 23885 | REAKVFEIK |
| 23886 | REAKVFEFK |
| 23887 | REPKVFELK |
| 23888 | RESKVFELK |
| 23889 | RETKVFELK |
| 23890 | RFKLLMTGR |
| 23891 | RKTWLVVWC |
| 23892 | RLKPSAVQR |
| 23893 | RLRNCGSNG |
| 23894 | RLVRDSKNT |
| 23895 | RLVRDSKTN |
| 23896 | RMIQPEHVV |
| 23897 | RMKWYLLCV |
| 23898 | RMKWYLTCV |
| 23899 | RMPIELMHG |
| 23900 | RNNWKVDSQ |
| 23901 | RNNWKVNSR |
| 23902 | RNYWCMCGA |
| 23903 | RPATVHASF |
| 23904 | RPEMVHASF |
| 23905 | RPERVHASF |
| 23906 | RQEAYILRI |
| 23907 | RQGCLLAWQ |
| 23908 | RQPQSRRHM |
| 23909 | RRDELLIPD |
| 23910 | RRIELLIPD |
| 23911 | RRKWYLPCV |
| 23912 | RRNELLLPD |
| 23913 | RRSELLIPD |
| 23914 | RRTELLIPD |
| 23915 | RSVDWIKCE |
| 23916 | RVADLMYIG |
| 23917 | RVGDVMYIG |
| 23918 | RVSDVMYIG |
| 23919 | RVTDVMYIG |
| 23920 | RVVRDSKNN |
| 23921 | RWGFIRLNE |
| 23922 | RWRHCGSNG |
| 23923 | RWRICGSNG |
| 23924 | RWRNCGGNG |
| 23925 | RWRNCGNNG |
| 23926 | RWRNCGSNA |
| 23927 | RWRNCSSNG |
| 23928 | RWRNGGSNG |
| 23929 | RWRSCGSNG |
| 23930 | RYCKIIPYH |
| 23931 | RYWNYAEAK |
| 23932 | SAGIFYAHK |
| 23933 | SAYIFYAHK |
| 23934 | SCGLVERFM |
| 23935 | SDQCQWWCM |
| 23936 | SGGLVQRFM |
| 23937 | SGNIYESGQ |
| 23938 | SIRDKTQDD |
| 23939 | SIRQFMMHL |
| 23940 | SIRQYMMHL |
| 23941 | SKGCIIAMQ |
| 23942 | SQVSTLNGM |
| 23943 | SSHAANFCG |
| 23944 | SSHATTFCG |
| 23945 | SSKYEMKFL |
| 23946 | STDKDIEMD |
| 23947 | STHKDIEMG |
| 23948 | STHKDIEMN |
| 23949 | STHKDIVMD |
| 23950 | STTQWGYCN |
| 23951 | SWHEKRHRG |
| 23952 | SWSMQSKST |
| 23953 | SYGQIEGYQ |
| 23954 | TCAVEVIHC |
| 23955 | TCDRFMAMY |
| 23956 | TCFIGKGRR |
| 23957 | TCGIGKGRR |
| 23958 | TCIIGKGRR |
| 23959 | TCIIGQGRR |
| 23960 | TCLIGKGRR |
| 23961 | TCVIAKGRR |
| 23962 | TCVIEKGRR |
| 23963 | TCVIGKGQR |
| 23964 | TCVIGQGRR |
| 23965 | TCVIGRGRR |
| 23966 | TCVIVKGRR |
| 23967 | TEDFENHDA |
| 23968 | TIRQFMMHL |
| 23969 | TKGCIIDMQ |
| 23970 | TKLNCVYYG |
| 23971 | YKVNCIYYG |
| 23972 | TLRAAMSFH |
| 23973 | TLRAEMSFR |
| 23974 | TLRAEMSIH |
| 23975 | TLRAVMSFH |
| 23976 | TNCKQDHCH |
| 23977 | TRVNCVYYG |
| 23978 | TSERLYYCW |
| 23979 | TSHATNFCG |
| 23980 | TSNKDQRYY |
| 23981 | TSSKDQRYY |
| 23982 | TSYKDERYY |
| 23983 | TSYKNQRYY |
| 23984 | TTTQWGMCN |
| 23985 | TVLAWGLCN |
| 23986 | TVRADMSFH |
| 23987 | TYKPSFWTR |
| 23988 | TYWNYAESK |
| 23989 | VASKTLWET |
| 23990 | VCFKLFHVG |
| 23991 | VDRKACMIA |
| 23992 | VFTDYWEKG |
| 23993 | VFTDYWERG |
| 23994 | VFVGKNAAW |
| 23995 | VGSLYRRRG |
| 23996 | VIRDKTQDD |
| 23997 | VLDAIHWHW |
| 23998 | VQPESRRHM |
| 23999 | VRFTVLNWG |
| 24000 | VRIQPQHNK |
| 24001 | VRLKPQHNK |
| 24002 | VRLQPKHNK |
| 24003 | VRLQPQHDK |
| 24004 | VRLQPQHDR |
| 24005 | VRLQPQHSR |
| 24006 | VRLQPQLNK |
| 24007 | VRLQPQRNK |
| 24008 | VSDPMQQFT |
| 24009 | VVHQMAYCF |
| 24010 | VWDWEHKCT |
| 24011 | VWFFMKFAK |
| 24012 | VWNGEHKCT |
| 24013 | WAAIEYSHD |
| 24014 | WADIDYSHD |
| 24015 | WADIEYGHD |
| 24016 | WADIEYSHA |
| 24017 | WAGIEYSHD |
| 24018 | WAYIEYSHD |
| 24019 | WCGPIIKAS |
| 24020 | WDFHSIFPG |
| 24021 | WDYHIIFPG |
| 24022 | WDYHSICPG |
| 24023 | WDYHSIFAG |
| 24024 | WDYHSIFPC |
| 24025 | WDYHSIYPG |
| 24026 | WDYHSVFPG |
| 24027 | WDYHTIFPG |
| 24028 | WQHGREADH |
| 24029 | WSNFALWCQ |
| 24030 | WSSFAVWCQ |
| 24031 | WSSFILWCQ |
| 24032 | YAQSFSQGI |
| 24033 | YAWMPQWVD |
| 24034 | YCFINSAYP |
| 24035 | YCPRLVEAS |
| 24036 | YDCDMKASE |
| 24037 | YDCDMQASG |
| 24038 | YDCDVQASE |
| 24039 | YDCVMQASE |
| 24040 | YDFDMQASE |
| 24041 | YDGMPQWVD |
| 24042 | YDLMPKWVD |
| 24043 | YDLMPQWVD |
| 24044 | YDWDMQASE |
| 24045 | YDWMAQWVD |
| 24046 | YDWMHQWID |
| 24047 | YDWMPEWVD |
| 24048 | YDWMPHWGD |
| 24049 | YDWMPHWVE |
| 24050 | YDWMPKWVD |
| 24051 | YDWMPPWVD |
| 24052 | YDWMPQLVD |
| 24053 | YDWMPQWAD |
| 24054 | YDWMPQWDA |
| 24055 | YDWMPQWDD |
| 24056 | YDWMPQWFD |
| 24057 | YDWMPQNGA |
| 24058 | YDWMPQWGD |
| 24059 | YDWMPQWID |
| 24060 | YDWMPQWIG |
| 24061 | YDWMPQWIV |
| 24062 | YDWMPQWLG |
| 24063 | YDWMPQWVA |
| 24064 | YDWMPQWVH |
| 24065 | YDWMPQWVV |
| 24066 | YDWMPQWVY |
| 24067 | YDWMRQWVD |
| 24068 | YDWMSQWVD |
| 24069 | YDWMTQWVD |
| 24070 | YDWRPQWVD |
| 24071 | YDWVPQWVD |
| 24072 | YDYDMQASE |
| 24073 | YEAPTILNP |
| 24074 | YEWMPQCVD |
| 24075 | YFCILDKMT |
| 24076 | YFCIMEKNT |
| 24077 | YFCIQEKMT |
| 24078 | YFCSWNTQE |
| 24079 | YFDFNHQCQ |
| 24080 | YGHEKRHRG |
| 24081 | YGLIMEMCW |
| 24082 | YGWMPQWVD |
| 24083 | YHGHIANNG |
| 24084 | YHMGFNQCY |
| 24085 | YHMNFNQCY |
| 24086 | YHMSFKQCY |
| 24087 | YHMTFNQCY |
| 24088 | YHRHIADNG |
| 24089 | YHRHTANNG |
| 24090 | YHRNIANNG |
| 24091 | YIRDGGSHD |
| 24092 | YIRDGVSHG |
| 24093 | YIRDGVSHH |
| 24094 | YIRVGGNNQ |
| 24095 | YIRVGVSHD |
| 24096 | YLHEKRHRG |
| 24097 | YLRSLKCGD |
| 24098 | YNWMPQWVD |
| 24099 | YQASIYCDW |
| 24100 | YQTSIYCDW |
| 24101 | YSDVLIYAN |
| 24102 | YSDVLVCAN |
| 24103 | YSDVMICAN |
| 24104 | YVDSNIACN |
| 24105 | YVLESNYCE |
| 24106 | YVRDGVSHD |
| 24107 | YVRQILMCH |
| 24108 | YVVESNYCQ |
| 24109 | YVWMPQWVD |
| 24110 | YWHEQRHRG |
| 24111 | YWHERRHRG |
| 24112 | YWREKRHRG |
| 24113 | YYCKIIPYH |
| 24114 | YYFQYNEAP |
| 24115 | YYKPSFWTR |
| 24116 | YYWHVSAFG |
| 24117 | YYWHVSTFW |

### Example 37

### AAV5 Variants with Lung Tissue Tropism as Identified by Machine Learning

[0981] This example describes preferred properties of engineered AAV5 variants that display lung tissue tropism as identified by machine learning methods. The same bioinformatics pre-process, machine learning methods, and analyses as described in EXAMPLE 19 and FIGS. 19-FIG. 22 were carried out to identify preferred properties of engineered AAV5 variants that display lung tissue tropism.

[0982] Favored biophysical properties and favored amino acid residues at each position in the 581 to 589 region of an AAV5 VP capsid polypeptide, which are associated with a higher probability of lung tissue tropism are described below. Any of the below machine learning-derived positional amino acid preferences described in TABLE 58 can be present alone or in combination with each other or in combination with any of the amino acid preferences observed and described in EXAMPLE 12, TABLE 23. Listed below in TABLE 58 are a summary of positional features shared between the top important features for lung tropism extracted from the ML models.

TABLE 58
Machine Learning-Derived Lung Tissue Tropism Rules

High mutability at Xaa1
Xaa1 is selected from D, E, M, A, I, Q, or T
High mol mass at Xaa2
Xaa2 is selected from F
Low mutability at Xaa2
Xaa2 is selected from Y, F, or L
Low mutability at Xaa3
Xaa3 is selected from K, V, P, or H
Low hydropathy at Xaa3
Xaa3 is selected from K or R
Low mutability at Xaa4
Xaa4 is selected from K or P
High average flexibility at Xaa4
Xaa4 is selected from D, E, P, or S
Low average flexibility at Xaa5
Xaa5 is selected from W, M, or F
High solubility at Xaa5
Xaa5 is selected from W, F, I, or L
Medium mutability at Xaa6
Xaa6 is selected from R or H
High surface accessibility at Xaa6
Xaa6 is selected from T
Low mutability at Xaa7
Xaa7 is selected from C
High solubility at Xaa7
Xaa7 is selected from W, V, M, F, I, or L
High mutability at Xaa8
Xaa8 is selected from D, E, M, A, I, Q, or T
Low hydropathy at Xaa8
Xaa8 is selected from R or K
High average flexibility at Xaa9
Xaa9 is selected from R or G

[0983] TABLE 59 below provides sequences of the 581 to 589 region for variant AAV VP1 capsid polypeptides that exhibited lung tissue tropism and comport to one or more of the rules provided in TABLE 58. The present disclosure, thus, provides for rAAVs composed of engineered AAV5 VP1 capsid polypeptides having a SEQ ID NO: 2, wherein the Xaa1 to Xaa9 region is any one of SEQ ID NO: 17118-SEQ ID NO: 18117, as disclosed in TABLE 59. Also encompassed herein are rAAVs composed of engineered AAV5 VP2 capsid polypeptides and engineered AAV5 VP3 capsid polypeptides having the sequences disclosed in the below table at the regions in AAV5 VP2 (amin acid residues 445 to 453) and AAV5 VP3 (amino acid residues 389-397) corresponding to the amino acids in the AAV5 VP1 581 to 589 region.

TABLE 59
Sequences of the 581 to 589 Region in AAV5
VP1 Capsid Polypeptide that Drive Lung
Tissue Tropism

| SEQ | 581-589 |
|---|---|
| ID NO | Sequence |
| 17118 | AAKAIHYWM |
| 17119 | AAMPFYWFE |
| 17120 | AANKMNAER |
| 17121 | ACSTVMDFS |
| 17122 | ACSTVTDFN |
| 17123 | ADADMMWMA |
| 17124 | ADCSSSDWS |
| 17125 | AEKAIHYWM |
| 17126 | AFCCDHNAA |
| 17127 | AFEDYGSWE |
| 17128 | AFKAPRRGV |
| 17129 | AFKATHRGV |
| 17130 | AFKATRGGV |
| 17131 | AFKATRLGV |
| 17132 | AFKATRQGV |
| 17133 | AFKATRRAV |
| 17134 | AFKATRRGA |
| 17135 | AFKATRRGM |
| 17136 | AFKATRRSV |
| 17137 | AFKSTRRGV |
| 17138 | AFKTTRRGV |
| 17139 | AFMPKESKE |
| 17140 | AFNPQEMWA |
| 17141 | AFNQQEVWA |
| 17142 | AFQSTDWGW |
| 17143 | AFVHWPIHG |
| 17144 | AFVNWPLHG |
| 17145 | AFVNWTIHG |
| 17146 | AFVTWPIHG |
| 17147 | AGDFSGYYG |
| 17148 | AGETNNGGY |
| 17149 | AGSASNWAD |
| 17150 | AGVERKITM |
| 17151 | AGYASHWAD |
| 17152 | AGYASNWGD |
| 17153 | AHCHFSNMQ |
| 17154 | AHMVENDTP |
| 17155 | AHWDFSNMQ |
| 17156 | AIHDQLEAM |
| 17157 | AKAFIEHTY |
| 17158 | AKEQGAVGR |
| 17159 | AKGAYNQGN |
| 17160 | AKGFLEHTY |
| 17161 | AKGSYNQGN |
| 17162 | AKGTYNHGN |
| 17163 | AKHFYQKFH |
| 17164 | AKISAAWDR |
| 17165 | AKNAMHNFF |
| 17166 | AKNYMHCYW |
| 17167 | AKRDHHYFA |
| 17168 | AKTDNHVLH |
| 17169 | ALTYCHWTD |
| 17170 | ALTYCNWAD |
| 17171 | AMKNLKRTG |
| 17172 | AMVCQAIVF |
| 17173 | AMVCQIIVF |
| 17174 | AMVCRVIVF |
| 17175 | ANSSNHSQE |
| 17176 | AQHNSESNI |
| 17177 | ARHVNFEMS |
| 17178 | ASKMSHKEA |
| 17179 | ASKRSGKQP |
| 17180 | ASMEHMKKA |
| 17181 | ASRIYCRHE |
| 17182 | ASRSLERQA |
| 17183 | ASYFMEITR |
| 17184 | ATEQWDFCR |
| 17185 | ATSVFCVFR |
| 17186 | ATTSNNLTR |
| 17187 | ATTSSNLTR |
| 17188 | ATTSYNLAR |
| 17189 | AVDPTFKPH |
| 17190 | AVEFLAHQY |
| 17191 | AVKCTEYSA |
| 17192 | AVNPAFKPH |
| 17193 | AVYPLFAPE |
| 17194 | AWKMMHCDI |
| 17195 | AWKMMHCHN |
| 17196 | AWKMMHFDN |
| 17197 | AWKMMHGDN |
| 17198 | AWKMMNCDN |
| 17199 | AWQMMHCDN |
| 17200 | AWRMMHCDN |
| 17201 | AWYASNWAD |
| 17202 | AYKNCHRHG |
| 17203 | AYRMFNNVQ |
| 17204 | CAKACDTSS |
| 17205 | CAKDCDASS |
| 17206 | CAKNCDTSS |
| 17207 | CARDCDTSS |
| 17208 | CDYVQREWD |
| 17209 | CDYVQRKWD |
| 17210 | CDWQRRWID |
| 17211 | CERRALKMI |
| 17212 | CESIMHPDQ |
| 17213 | CFKWTIVNG |
| 17214 | CFRQDRIIF |
| 17215 | CIESFIENH |
| 17216 | CIWQHNVTQ |
| 17217 | CKAHFGEME |
| 17218 | CKDHFGFMV |
| 17219 | CKDHFGVME |
| 17220 | CKEAFDVNE |
| 17221 | CLRQDRIIS |
| 17222 | CPEAFDVNE |
| 17223 | CQDHFGFME |
| 17224 | CSKDCDTSS |
| 17225 | CSPPIVMDR |
| 17226 | CSYFMEITR |
| 17227 | CTAPIVMDR |
| 17228 | CTKDCDTSS |
| 17229 | CTPPIAMDR |
| 17230 | CTPPIFMDR |
| 17231 | CTPPIIMDR |
| 17232 | CTPPILMDR |
| 17233 | CTPPIVTDR |
| 17234 | CTPPTVMDR |
| 17235 | CTSFACKSF |
| 17236 | CVKDCDTSS |
| 17237 | DADNYMIYQ |
| 17238 | DADYYMIYR |
| 17239 | DARVSNIRQ |
| 17240 | DCRWYGNNS |
| 17241 | DCTNNELKR |
| 17242 | DCTNNKVKR |
| 17243 | DCTNTKLKR |
| 17244 | DEPCEELAF |
| 17245 | DFIQSDTEF |
| 17246 | DFVQSDTGF |
| 17247 | DGCSLYAFS |
| 17248 | DGDYYMIYQ |
| 17249 | DGTNNKLKR |
| 17250 | DHCGPIAWP |
| 17251 | DHPYQHIEG |
| 17252 | DICCNYDAQ |
| 17253 | DIGMRPSGW |
| 17254 | DKHFYEKFH |
| 17255 | DKNYMHCHW |
| 17256 | DKNYMHWYW |
| 17257 | DKNYMHYYW |
| 17258 | DKNYTHCYW |
| 17259 | DKRDNHYFA |
| 17260 | DKRDYHYFA |
| 17261 | DKRNHHYFA |
| 17262 | DKRYHHYFA |
| 17263 | DKSYMHCYW |
| 17264 | DKTYMHCYW |
| 17265 | DMSHTFVAA |
| 17266 | DNAFVHCNQ |
| 17267 | DNAIVHCDQ |
| 17268 | DNAIVHCNE |
| 17269 | DNAIVHCNL |
| 17270 | DNAMVHCNQ |
| 17271 | DNAVVHCNQ |
| 17272 | DNGIVHCNQ |
| 17273 | DRCMQAKHG |
| 17274 | DRCMQTKHA |
| 17275 | DRNYMHCYW |
| 17276 | DSAIVHCNQ |
| 17277 | DSKEEGLAF |
| 17278 | DSMAMSARA |
| 17279 | DSMGMTARA |
| 17280 | DSREEGLTF |
| 17281 | DSRQLHHLG |
| 17282 | DSRQLHHTG |
| 17283 | DSRQLHRIG |
| 17284 | DSRQLHYIG |
| 17285 | DSRRLHHIG |
| 17286 | DTAIVHCNQ |
| 17287 | DTNQINDLS |
| 17288 | DTTPNESDR |
| 17289 | DVCTVFVTA |
| 17290 | DVDYYMIYQ |
| 17291 | DVVRVQKMA |
| 17292 | DWASNNWWP |
| 17293 | DWMTRHKVI |
| 17294 | DWMTRNKVI |
| 17295 | DWMTRYKLI |
| 17296 | DWMTRYKVL |
| 17297 | DWSANNWWP |
| 17298 | EAEYWSCGR |
| 17299 | EAEYWTCGP |
| 17300 | EAHYTNECR |
| 17301 | EARDSCWWG |
| 17302 | EARYCCWWG |
| 17303 | EARYSCWSG |
| 17305 | ECKQQGVRR |
| 17306 | EFCEMQSLC |
| 17307 | EFCHALVCQ |
| 17308 | EFEDYGGWE |
| 17309 | EFEMSVFSN |
| 17310 | EFFIFGAID |
| 17311 | EFFIIGAIG |
| 17312 | EFFIIGAIV |
| 17313 | EFFIIGAVD |
| 17314 | EFFIIGTID |
| 17315 | EFFIIVAID |
| 17316 | EFFIVGAID |
| 17317 | EFGHAMVCQ |
| 17318 | EFITSVQCS |
| 17319 | EFKKEFEAF |
| 17320 | EFKMSGFSN |
| 17321 | EFKMSVFSS |
| 17322 | EFKMSVFTN |
| 17323 | EFKMSVISN |
| 17324 | EFKMSVVSN |
| 17325 | EFKMTVFSN |
| 17326 | EFKQEFVAF |
| 17327 | EFKQEYEAF |
| 17328 | EFRMSVFSN |
| 17329 | EFTRKSGKF |
| 17330 | EFTRRSCKF |
| 17331 | EHGCTHMGN |
| 17332 | EHKQQGVRR |
| 17333 | EHQPFSMFS |
| 17334 | EHRQMHDAY |
| 17335 | EHRQMHDSF |
| 17336 | EHRQMHDSS |
| 17337 | EHSCNHMGN |
| 17338 | EHSYTHMGN |
| 17339 | EHTRQDVCD |
| 17340 | EKDHFGVMQ |
| 17341 | EKHHFDVMQ |
| 17342 | EKLMYDKDL |
| 17343 | EKLNHETGY |
| 17344 | EKLSHEAGY |
| 17345 | EKLTHEAGY |
| 17346 | EKMGYVHKG |
| 17347 | EMKDLKRTG |
| 17348 | EMKNLKRAG |
| 17349 | EMKNLKRNG |
| 17350 | EMKNLKRTC |
| 17351 | EMKNLKRTS |
| 17352 | EMKNLRRTG |
| 17353 | EMRPQKMSR |
| 17354 | ENAQFLVWP |
| 17355 | ENAQILVWA |
| 17356 | ENAQVLVWA |
| 17357 | ENAQYLVWA |
| 17358 | ENDSVSAIA |
| 17359 | ENEFIYCHP |
| 17360 | ENEWTYHQG |
| 17361 | ENGQFLVWA |
| 17362 | ENHRITGKS |
| 17363 | ENHSVSAIG |
| 17364 | ENSQASAFG |
| 17365 | ENSQFLVWA |
| 17366 | ENSQNSAFG |
| 17367 | ENSQTSPFG |
| 17368 | ENVMHSEFR |
| 17369 | ENVQFLVWA |
| 17370 | ENYRITGQS |
| 17371 | EPRPCNFWC |
| 17372 | EPRSCNFWG |
| 17373 | EPRSCNFWW |
| 17374 | EPRSCNYWC |
| 17375 | EQMGYVHKA |
| 17376 | ERAEFEMKQ |
| 17377 | ERNDFHWYM |
| 17378 | ERSCTHMGN |
| 17379 | ERSDFHWCM |
| 17380 | ERSEFEMKE |
| 17381 | ERSGFHWYM |
| 17382 | ESKMNHKEA |
| 17383 | ESKMSHKQA |
| 17384 | ESMFRDSDK |
| 17385 | ESMGICHNS |
| 17386 | ETIRDMSGF |
| 17387 | ETMAQSCYR |
| 17388 | ETRSCNFWC |
| 17389 | EVASQFFEH |
| 17390 | EVFKIDMIP |
| 17391 | EVGEMGILR |
| 17392 | EVGRIGWMS |
| 17393 | EVQKWFRKS |
| 17394 | EVRYSCWWG |
| 17395 | EVTDEHCCW |
| 17396 | EVTNEHCCL |
| 17397 | EVTNEHGCW |
| 17398 | EVVKIDMIS |
| 17399 | EVVKIDMTP |
| 17400 | EWKMMHCDN |
| 17401 | EWWRYMAYY |
| 17402 | EYICFNCYH |
| 17403 | EYKEQGVRR |
| 17404 | EYKKQGVPR |
| 17405 | EYKMSHKEA |
| 17406 | EYKPQGVRR |
| 17407 | EYKQEGVRR |
| 17408 | EYKQKGVRR |
| 17409 | EYKQPGVRR |
| 17410 | EYKQQCVRR |
| 17411 | EYKQQGLRR |
| 17412 | EYKQQSVRR |
| 17413 | EYQQQGVRR |
| 17414 | EYRQQGVRR |
| 17415 | EYTKQGVRR |
| 17416 | FAPKKCDTW |
| 17417 | FCKLQKLKA |
| 17418 | FCKLRKLKG |
| 17419 | FCKLRKLRA |
| 17420 | FCKMRKLKA |
| 17421 | FCKSRKLKA |
| 17422 | FEAPFNLSF |
| 17423 | FEAPINLGF |
| 17424 | FEAPINMSF |
| 17425 | FEVPINLSF |
| 17426 | FFKLRKLKA |
| 17427 | FGAPINLSF |
| 17428 | FGKLRKLKA |
| 17429 | FGRYRLLKG |
| 17430 | FGRYRLWEG |
| 17431 | FGRYRLWKA |
| 17432 | FGRYRLWQV |
| 17433 | FGRYRLWRG |
| 17434 | FHKKFHSKF |
| 17435 | FHKQFHSEF |
| 17436 | FHKQFHSRF |
| 17437 | FHKQYHSKF |
| 17438 | FLKQFHSKF |
| 17439 | FNIDCFNAA |
| 17440 | FNKQFHSKF |
| 17441 | FNVDCFSAA |
| 17442 | FRKQFHSKF |
| 17443 | GDYVQRQWD |
| 17444 | GERWAHNML |
| 17445 | GERWPHHML |
| 17446 | GERWPHNMW |
| 17447 | GERWPNNML |
| 17448 | GERWTHNMI |
| 17449 | GFDAEHGYQ |
| 17450 | GGNMRSSNI |
| 17451 | GHIHARDGA |
| 17452 | GIKQTLVRR |
| 17453 | GIRLKGDIM |
| 17454 | GIRLRGNIM |
| 17455 | GKRWPHNML |
| 17456 | GLRQDRIIF |
| 17457 | GNQPTHSPR |
| 17458 | GSETNNGGY |
| 17459 | GSIIESSAR |
| 17460 | GSI1KSSAR |
| 17461 | GSIIQGSAR |
| 17462 | GSISQSSAR |
| 17463 | GSIVQSSAR |
| 17464 | GSKMSHKEA |
| 17465 | GSMIQSSAR |
| 17466 | GSNIQSSAR |
| 17467 | GSQPTHSPR |
| 17468 | GTPPIVMDR |
| 17469 | GTRLKGNIM |
| 17470 | GVEFLAHRY |
| 17471 | GVKDNNRRL |
| 17472 | GWDKLMMLA |
| 17473 | GWHCFSFVV |
| 17474 | GWKMMHCDN |
| 17475 | GWNCFSFVV |
| 17476 | GYEPTHSPR |
| 17477 | GYKDCHRHG |
| 17478 | GYKPTHSPR |
| 17479 | GYQMFNNVQ |
| 17480 | GYQPTHSHR |
| 17481 | GYQPTNSPR |
| 17482 | GYRPTHSPR |
| 17483 | HATGVGKDR |
| 17484 | HAVTHGWHR |
| 17485 | HDAQFLPDE |
| 17486 | HGEMFDRNS |
| 17487 | HIEMRNSHM |
| 17488 | HIEMRNTHM |
| 17489 | HIEMRNVHM |
| 17490 | HIKCTHEDN |
| 17491 | HIQCTHEDD |
| 17492 | HIQCTHKDN |
| 17493 | HIQCTHQDN |
| 17494 | HMQCTHEDS |
| 17495 | HRIYIMKKM |
| 17496 | HRIYIMKQM |
| 17497 | HRNYIMKEM |
| 17498 | HSAGVGKDP |
| 17499 | HSEVKCVER |
| 17500 | HSNGVGKDR |
| 17501 | HSPTYKWKR |
| 17502 | HSTGIGKDR |
| 17503 | HSTGLGKDR |
| 17504 | HSTVVGKDR |
| 17505 | HTDGLFTDD |
| 17506 | HTKMTHGTA |
| 17507 | HTNCLFTDD |
| 17508 | HTRSKDFWN |
| 17509 | HVAANYDTF |
| 17510 | HVASNYDTS |
| 17511 | HVGTHGWHR |
| 17512 | HVITHGWHR |
| 17513 | HVVHLDDYW |
| 17514 | HVVTHGWQR |
| 17515 | HVVTLGWHR |
| 17516 | HVVTNGWHR |
| 17517 | IAIKQRDGA |
| 17518 | IANKQQLAR |
| 17519 | IAVKQPDGA |
| 17520 | IAVPCASFY |
| 17521 | IAVPSCWAR |
| 17522 | ICHDCMNYR |
| 17523 | ICVPSCWAR |
| 17524 | IEHDFNSAF |
| 17525 | IFHDCMNSR |
| 17526 | IFHDFMNYR |
| 17527 | IFSPQQLGA |
| 17528 | IGEKPVTDR |
| 17529 | IGGMFSRNA |
| 17530 | IGGMYSRHA |
| 17531 | IGRDIDTAF |
| 17532 | IGRDVDTSF |
| 17533 | IHEWIANVE |
| 17534 | IHEWLANVQ |
| 17535 | IHGLIPMDS |
| 17536 | IHKQFHSKF |
| 17537 | IHQWIANVQ |
| 17538 | IIANHSDMA |
| 17539 | IIANHSHMS |
| 17540 | IIANHSHMV |
| 17541 | IIKPTRAPA |
| 17542 | IIVNHSHMA |
| 17543 | IKHDFHSAF |
| 17544 | IKHDFNNAF |
| 17545 | IKHDFNSAC |
| 17546 | IKHDFNSDF |
| 17547 | IKHDFNSGF |
| 17548 | IKHDFNSPF |
| 17549 | IKHDFNSSF |
| 17550 | IKHDINSAF |
| 17551 | IKHDYNSAF |
| 17552 | IKHNFNSAF |
| 17553 | IKNAMHNFF |
| 17554 | IKNDFNSAF |
| 17555 | IKRDFNSAF |
| 17556 | IKYDFNSAF |
| 17557 | ILLYSCVKD |
| 17558 | IMLYSCVQD |
| 17559 | INATPNLRT |
| 17560 | INVDCFNAA |
| 17561 | INVDCFNAA |
| 17562 | IQHDFNSAF |
| 17563 | IRADLDVDH |
| 17564 | IRHDFNSAF |
| 17565 | ISAIADLDR |
| 17566 | ISAIADMDQ |
| 17567 | ISAPPNLRT |
| 17568 | ISAPSCWAR |
| 17569 | ISDPSCWAR |
| 17570 | ISEDIKDNG |
| 17571 | ISEDIKENA |
| 17572 | ISEDIKENS |
| 17573 | ISGPSCWAR |
| 17574 | ISIPSCWAR |
| 17575 | ISLPSCWAR |
| 17576 | ISNKQQLAR |
| 17577 | ISVHSCWAR |
| 17578 | ISVPGCWAR |
| 17579 | ISVPICWAR |
| 17580 | ISVPRCWAR |
| 17581 | ISVPSCWER |
| 17582 | ISVPSCWGR |
| 17583 | ISVPSCWSR |
| 17584 | ISVPTCWAR |
| 17585 | ISVSSCWAR |
| 17586 | ISVTSCWAR |
| 17587 | ITNKEQLAR |
| 17588 | ITNKQELAR |
| 17589 | ITNKQLLAR |
| 17590 | ITNKQPLAR |
| 17591 | ITNKQQLER |
| 17592 | ITNKQQLGR |
| 17593 | ITNKQQLPR |
| 17594 | ITNEMQLSR |
| 17595 | ITNKQQQAR |
| 17596 | ITNKRQLAR |
| 17597 | ITSKQQLAR |
| 17598 | ITTKQQLSR |
| 17599 | ITTQFMSKH |
| 17600 | IVAISCYDN |
| 17601 | IVGISCYDD |
| 17602 | IVGNSCYDN |
| 17603 | IVGTSCYDN |
| 17604 | IVKDNNRRL |
| 17605 | IWEKPATDR |
| 17606 | IWEKPVADR |
| 17607 | IWEKPVTAR |
| 17608 | IWEKSVTDR |
| 17609 | IWEKTVTDR |
| 17610 | IYSPNRQDR |
| 17611 | IYVPSCWAR |
| 17612 | KAEYWNCGR |
| 17613 | KCEMISLSR |
| 17614 | KEFCCCCKA |
| 17615 | KFGSFWPTG |
| 17616 | KGDHFDRNS |
| 17617 | KHFCCCCKA |
| 17618 | KHVMHSEFR |
| 17619 | KHWRHTMFL |
| 17620 | KKDHFDVMQ |
| 17621 | KKEPCNSGH |
| 17622 | KLREVGRLC |
| 17623 | KMEWFPHNS |
| 17624 | KMKNLKRTG |
| 17625 | KMRQQKMSR |
| 17626 | KNAPTNQPC |
| 17627 | KNEWIYHQG |
| 17628 | KNEWNYHQG |
| 17629 | KNEWTYHQA |
| 17630 | KNEWTYHQC |
| 17631 | KNVKHSEFR |
| 17632 | KNVMHSAFR |
| 17633 | KNVMHSQFR |
| 17634 | KNVMHSVFR |
| 17635 | KPLEMWPDF |
| 17636 | KPLLMLPDF |
| 17637 | KPMLMWPDF |
| 17638 | KPRSCNFWC |
| 17639 | KPVLMWPDF |
| 17640 | KQAPCNSGH |
| 17641 | KQFCCCCRA |
| 17642 | KQFCCCRKA |
| 17643 | KQFCCCWKA |
| 17644 | KQFCFCCKA |
| 17645 | KQFCWCCKA |
| 17646 | KRFCCCCKA |
| 17647 | KSESAASDN |
| 17648 | KSEVKCVER |
| 17649 | KSKMSHKEA |
| 17650 | KSRIMAPLW |
| 17651 | KTDYCYQCL |
| 17652 | KTERDMSGF |
| 17653 | KVGEMGIIR |
| 17654 | KVGEMGLLR |
| 17655 | KVGEMSILR |
| 17656 | KVGNEKSCE |
| 17657 | KVHTFFANE |
| 17658 | KVQPVRRFT |
| 17659 | KWEKPVTDR |
| 17660 | KYKQQGVRR |
| 17661 | LAAVSVFRR |
| 17662 | LACACQDAA |
| 17663 | LAETEKLWN |
| 17664 | LASANHGGN |
| 17665 | LCMHTMWSR |
| 17666 | LFDDVMVGR |
| 17667 | LFGESMVGT |
| 17668 | LGKVENERQ |
| 17669 | LGNFEDMPA |
| 17670 | LHYAFDQCM |
| 17671 | LKEPFNMTF |
| 17672 | LKKERGRAC |
| 17673 | LKKKRGRSC |
| 17674 | LQKKRGRAC |
| 17675 | LQSFRSMMD |
| 17676 | LQSPLLWER |
| 17677 | LRAPYNFWW |
| 17678 | LRIYIMKEM |
| 17679 | LRKKRGRAC |
| 17680 | LRTPFNFWW |
| 17681 | LRTPYDFWW |
| 17682 | LRTSYNFWW |
| 17683 | LRTTYNFWW |
| 17684 | LRYSFDQCM |
| 17685 | LSTGVGKDR |
| 17686 | LSYVQGDWR |
| 17687 | LTAVSGFRR |
| 17688 | LTFVQGDWR |
| 17689 | LTPVSVFRR |
| 17690 | LTRCNEKGN |
| 17691 | LTTGMIKNW |
| 17692 | LTYAQGDWR |
| 17693 | LTYVEGDWR |
| 17694 | LTYVKGDWR |
| 17695 | LTYVQGNWR |
| 17696 | LTYVQRDWR |
| 17697 | LVEFYSENL |
| 17698 | LVHELNQIK |
| 17699 | LVHNSPFDF |
| 17700 | LVKDEDNNC |
| 17701 | LVKMDWKEA |
| 17702 | LVNELNQIK |
| 17703 | LVRVINERQ |
| 17704 | LYCRMHNWA |
| 17705 | LYCRMNDWA |
| 17706 | MASIFQYPR |
| 17707 | MCDDLMVGR |
| 17708 | MCKSYERGA |
| 17709 | MCMHKMWSR |
| 17710 | MCYGFWCEI |
| 17711 | MFDDLMVAR |
| 17712 | MFDDLMVCR |
| 17713 | MFDDLMVGH |
| 17714 | MFDDLMVSR |
| 17715 | MFDDVMVGR |
| 17716 | MFDEVMVGR |
| 17717 | MFDNLMVGR |
| 17718 | MFDYLMVGR |
| 17719 | MFGDLMVGR |
| 17720 | MFHDCMNYR |
| 17721 | MFNDLMVGR |
| 17722 | MGIRDWKRV |
| 17723 | MGIREWRRV |
| 17724 | MGIWKSQRH |
| 17725 | MGTREWKRV |
| 17726 | MHNDKLMDE |
| 17727 | MHNDKWMDA |
| 17728 | MHSPNRQDR |
| 17729 | MHYSFDQCM |
| 17730 | MIHWDYHMD |
| 17731 | MIHWDYNME |
| 17732 | MIHWDYWME |
| 17733 | MILWDYHME |
| 17734 | MINWDYHME |
| 17735 | MIRSFTQWA |
| 17736 | MIWSNRKFM |
| 17737 | MIWYNRKCM |
| 17738 | MIWYNRKVM |
| 17739 | MIWYNRQFM |
| 17740 | MEYWDYHME |
| 17741 | MKDEHDDMP |
| 17742 | MKDEQDDTP |
| 17743 | MKETMDCSY |
| 17744 | MKKAHDRSA |
| 17745 | MKKKRGRAC |
| 17746 | MKLDYDVGC |
| 17747 | MKNEKNDNP |
| 17748 | MKWDYDVGG |
| 17749 | MMKPWACLE |
| 17750 | MMKPWVFLE |
| 17751 | MMKQWVCLE |
| 17752 | MMMMRATMD |
| 17753 | MMMMRVAMD |
| 17754 | MNTALFVNA |
| 17755 | MQIKVSWNR |
| 17756 | MQKAHDRAA |
| 17757 | MQKEHDRSA |
| 17758 | MQKPHDRSA |
| 17759 | MQKTHDRSA |
| 17760 | MQKWTEEGC |
| 17761 | MQLKGSWNR |
| 17762 | MQNEKNDHP |
| 17763 | MQNEKNDTP |
| 17764 | MQNEKNENP |
| 17765 | MQTKGSWNR |
| 17766 | MRDEQDDMP |
| 17767 | MRNDKWMDE |
| 17768 | MRNEKNDNP |
| 17769 | MRTPYNFWW |
| 17770 | MSRTCADWT |
| 17771 | MTAVSVFRR |
| 17772 | MTKQNKIHR |
| 17773 | MTSIFQHPR |
| 17774 | MTYVQGDWR |
| 17775 | MVDGLMKEY |
| 17776 | MVEREWKRV |
| 17777 | MVKCTEYSA |
| 17778 | MVKVENERQ |
| 17779 | MVWYNRKFM |
| 17780 | MWKCKSTYA |
| 17781 | MYNPNRQDR |
| 17782 | MYSANRQDR |
| 17783 | MYSPNHQDR |
| 17784 | MYSPNREDR |
| 17785 | MYSPNRHDR |
| 17786 | MYSPNRKDR |
| 17787 | MYSPNRQAR |
| 17788 | MYSQNRQDR |
| 17789 | MYSTNRQDR |
| 17790 | MYTPNRQDR |
| 17791 | NASNCFWCF |
| 17792 | NASTCFWCC |
| 17793 | NCRCYGNNS |
| 17794 | NESPYHMCL |
| 17795 | NFKTYRFCE |
| 17796 | NFVQYVHNY |
| 17797 | NGSNCFWCC |
| 17798 | NHAPAKNKA |
| 17799 | NECCNYDAK |
| 17800 | NECCNYDAP |
| 17801 | NKNAMHNFF |
| 17802 | NKNYMHCYW |
| 17803 | NLEMLAMFP |
| 17804 | NLEMLAMFR |
| 17805 | NMRSTEMGV |
| 17806 | NNAPEWLHG |
| 17807 | NNGVFHWKD |
| 17808 | NNPYQHIEG |
| 17809 | NNSVFHWKD |
| 17810 | NNVKIQYMG |
| 17811 | NNWAFHWKD |
| 17812 | NNWGFHWKD |
| 17813 | NNWVCHWKD |
| 17814 | NNWVFHWKA |
| 17815 | NNWVFHWKH |
| 17816 | NNWVFPWKD |
| 17817 | NNWVIHWKD |
| 17818 | NPRSKDFWN |
| 17819 | NQCGLKMYP |
| 17820 | NSAIKEEMA |
| 17821 | NSAIRQEMA |
| 17822 | NSDMKETGD |
| 17823 | NSRQLHHIG |
| 17824 | NSRSKDFWN |
| 17825 | NSSNCFWCC |
| 17826 | NTEPMWSCS |
| 17827 | NTRPRRLHM |
| 17828 | NTRRMRLHM |
| 17829 | NTRSKDFWY |
| 17830 | NTSNCFWCC |
| 17831 | NMIPLIEYR |
| 17832 | NVMTLIQYR |
| 17833 | PAEINKMHC |
| 17834 | PQAKIDMEF |
| 17835 | PQSPLLWER |
| 17836 | PQVKVDMEF |
| 17837 | PRRLLHFSQ |
| 17838 | PRYMGTKDA |
| 17839 | PSRLEHYGL |
| 17840 | PTKMTHGTS |
| 17841 | PTSFAETDY |
| 17842 | PVHTFFANE |
| 17843 | QAHTFFANE |
| 17844 | QAESDMPFP |
| 17845 | QFFWSLHAV |
| 17846 | QFGTFWPTG |
| 17847 | QGEPLMRYS |
| 17848 | QHQAFSMFS |
| 17849 | QHQPFTMFS |
| 17850 | QHSCTHMGN |
| 17851 | QICPSFDAD |
| 17852 | QINPSFDAD |
| 17853 | QEYPSFEAD |
| 17854 | QPITSFDAD |
| 17855 | QKATTDMYW |
| 17856 | QKSPLLWER |
| 17857 | QKTPTDMYW |
| 17858 | QMKNLKRTG |
| 17859 | QMVYAQKNM |
| 17860 | QNAWIECQL |
| 17861 | QNTWEQCQL |
| 17862 | QNVMHSEFR |
| 17863 | QPRSCNFWC |
| 17864 | QQEPLLWER |
| 17865 | QQQPFSMFS |
| 17866 | QQSPPLWER |
| 17867 | QQSPQLWDR |
| 17868 | QQSPQLWER |
| 17869 | QQSTLLWER |
| 17870 | QRHDLEVDL |
| 17871 | QSIRDMSGF |
| 17872 | QSQVKCVER |
| 17873 | QSREMAPLW |
| 17874 | QSSFAETDY |
| 17875 | QTERDMGGF |
| 17876 | QTIRDMNGF |
| 17877 | QTTFAETDY |
| 17878 | QTWAAHCTR |
| 17879 | QTWSAHCSR |
| 17880 | QTWTAHCSR |
| 17881 | QYVCFNCYH |
| 17882 | RACIPKFKE |
| 17883 | RACVPKFKQ |
| 17884 | RAEILQLQQ |
| 17885 | RARIPKFKQ |
| 17886 | RASIFQHPR |
| 17887 | RCDEWAEDQ |
| 17888 | RCDEWAKDK |
| 17889 | RCDEWAKDR |
| 17890 | RCDEWAKNQ |
| 17891 | RCDEWARDQ |
| 17892 | RCDEWVKDQ |
| 17893 | RCVPWMNQW |
| 17894 | RDAQFLPDQ |
| 17895 | RFDDLMVGR |
| 17896 | RGDEWAKDQ |
| 17897 | RGEILELQQ |
| 17898 | RGEILQLQR |
| 17899 | RHQPCECYE |
| 17900 | RHQPFSMFS |
| 17901 | RHWRHAMFL |
| 17902 | RHWRLTMFL |
| 17903 | RIMVHEWGD |
| 17904 | RLDHAETRA |
| 17905 | RMLAYKQRH |
| 17906 | RVDHAESRA |
| 17907 | RVVDLVDVY |
| 17908 | RWEKPVTDR |
| 17909 | SAEAAYENP |
| 17910 | SDCSYSDWS |
| 17911 | SEVHLEHNY |
| 17912 | SFCCDHNAG |
| 17913 | SFCCDHNAS |
| 17914 | SFCCDHNGA |
| 17915 | SFDERGVWC |
| 17916 | SFGSCNTCG |
| 17917 | SFHDEEGLF |
| 17918 | SFKATRRGV |
| 17919 | SFKLTIVNG |
| 17920 | SFKWPIVNG |
| 17921 | SFKWTILNG |
| 17922 | SFKWTIVDG |
| 17923 | SFKWTIVNA |
| 17924 | SFKWTIVND |
| 17925 | SFKWTIVNV |
| 17926 | SFKWTIVTG |
| 17927 | SGKDNNRRL |
| 17928 | SHIHKDSCW |
| 17929 | SIMKYDEMG |
| 17930 | SIMKYDQMV |
| 17931 | SIMLNECNT |
| 17932 | SIRLKGNWI |
| 17933 | SKISATWDR |
| 17934 | SKLHKQYCC |
| 17935 | SKYDTDSAC |
| 17936 | SLEMRPRQI |
| 17937 | SLKDNNRRL |
| 17938 | SLKMRPRKI |
| 17939 | SLKMRPRQS |
| 17940 | SLKMRPRQT |
| 17941 | SLQMRPRQI |
| 17942 | SLTASNWRD |
| 17943 | SMVCQVIVF |
| 17944 | SNDKNIHNG |
| 17945 | SNWVFHWKD |
| 17946 | SPREKNDYW |
| 17947 | SPREKNRYW |
| 17948 | SRIHKDICW |
| 17949 | SRINKDSCW |
| 17950 | SRLHKDSCW |
| 17951 | SRTMKDWWG |
| 17952 | SSAIKQEMA |
| 17953 | SSEQTGPHM |
| 17954 | SSHFMEITR |
| 17955 | SSIIQSSAR |
| 17956 | SSKQAGPHM |
| 17957 | SSRPRMKQP |
| 17958 | SSTASNWRD |
| 17959 | SSYFMAITR |
| 17960 | SSYFMEIAR |
| 17961 | SSYFMEVTR |
| 17962 | SSYFMKITR |
| 17963 | SSYFTEITR |
| 17964 | SSYIMEITR |
| 17965 | SSYVMEITR |
| 17966 | SSYYMEITR |
| 17967 | STDDKFWLG |
| 17968 | STDNRFWLG |
| 17969 | STDTKFWLG |
| 17970 | STEAAHENP |
| 17971 | STEASYENP |
| 17972 | STESAYENP |
| 17973 | STQQVFWNL |
| 17974 | STRPMRLHM |
| 17975 | STSILDKLI |
| 17976 | STSSLDKLV |
| 17977 | STTAYNLTR |
| 17978 | SVHAKMEGC |
| 17979 | SVHSKMQGC |
| 17980 | SVHSTMEGC |
| 17981 | SVKDINRRL |
| 17982 | SVKDNNGRL |
| 17983 | SVKDNNQRL |
| 17984 | SVKDNNRIL |
| 17985 | SVKDNNRKL |
| 17986 | SVKDNNRTL |
| 17987 | SVKDTNRRL |
| 17988 | SVKNNNRRL |
| 17989 | SVMQSIDSS |
| 17990 | SVNSKMEGC |
| 17991 | SVRDNNRRL |
| 17992 | SWAASNWRD |
| 17993 | SWKMMHCDN |
| 17994 | SWTSSNWRD |
| 17995 | SWTTSNWRD |
| 17996 | SWTVSNWRD |
| 17997 | SYQMFNNVQ |
| 17998 | TAQYLNREI |
| 17999 | TAREDYQHA |
| 18000 | TARLLEKYN |
| 18001 | TCMGFTSFP |
| 18002 | TFFVTASWS |
| 18003 | TFHQCERSV |
| 18004 | TFKNYRFCE |
| 18005 | TFKTYRYCE |
| 18006 | TFPNPVHRG |
| 18007 | TFRTYRFCE |
| 18008 | TFSNPVHRV |
| 18009 | TFVNWPIHG |
| 18010 | TKIFTENDQ |
| 18011 | TKNAMHHFF |
| 18012 | TKNDMHNFF |
| 18013 | TKNGMHNFF |
| 18014 | TKNPMHNFF |
| 18015 | TKTAMHNFF |
| 18016 | TITTEMIWA |
| 18017 | TNWVFHWKD |
| 18018 | TPEAEHHKI |
| 18019 | TRGMRDFCY |
| 18020 | TRMVLEWTY |
| 18021 | TSEVFTVNC |
| 18022 | TSQYVNREA |
| 18023 | TSVPSCWAR |
| 18024 | TTEQWDVCR |
| 18025 | TIEVEHHKI |
| 18026 | TVKCTGYSA |
| 18027 | TVKDENAAC |
| 18028 | TVKEENAAF |
| 18029 | TVKEENATC |
| 18030 | TVKEENSAC |
| 18031 | TVKEENTAC |
| 18032 | TVRCTEYSA |
| 18033 | TWKMMHCDN |
| 18034 | VARPWAMNS |
| 18035 | VATQSCKWM |
| 18036 | VAVTITDFD |
| 18037 | VAVTVRDFD |
| 18038 | VCKWMGRQQ |
| 18039 | VCSTVMDFN |
| 18040 | VEADNNDAD |
| 18041 | VFNQQEMWA |
| 18042 | VGKWMGKQQ |
| 18043 | VGVTVTDFD |
| 18044 | VHALIPMDS |
| 18045 | VHGLIPMDT |
| 18046 | VHRQMHDSY |
| 18047 | VICATQDAA |
| 18048 | VICATQDPS |
| 18049 | VICPTQDPA |
| 18050 | VICTTQDPA |
| 18051 | V1HDQLETM |
| 18052 | VINMNRRWS |
| 18053 | VKKKRGRAC |
| 18054 | VKNYMHCYW |
| 18055 | VKSFRSMMD |
| 18056 | VMRWPWDDT |
| 18057 | VPRSCNFWC |
| 18058 | VRTPYNFWW |
| 18059 | VSETNNGGY |
| 18060 | VSINTNQPG |
| 18061 | VSKMSHKEA |
| 18062 | VSKPIEVGY |
| 18063 | VSMSSIYDK |
| 18064 | VSMSSNSDK |
| 18065 | VSNQCCKAM |
| 18066 | VSRALERQA |
| 18067 | VSRSLERKA |
| 18068 | VSRSLERQG |
| 18069 | VSRSLERQT |
| 18070 | VSRSIKRQA |
| 18071 | VSRSLQRQA |
| 18072 | VSRSQERQA |
| 18073 | VSVPSCWAR |
| 18074 | VSVTVTDFD |
| 18075 | VTEHQQRGV |
| 18076 | VTKCNEKGN |
| 18077 | VINKQQLAR |
| 18078 | VINQCCKTM |
| 18079 | VTSQCCKAM |
| 18080 | VTTGIWKTW |
| 18081 | VVGGDKAAY |
| 18082 | VVKVINERQ |
| 18083 | VVSQTYRNR |
| 18084 | VWKQYILVI |
| 18085 | VWMQHMCLD |
| 18086 | VWQQYILII |
| 18087 | WCRQTMMDL |
| 18088 | WDAMDDKKA |
| 18089 | WETDMDMDA |
| 18090 | WFRRHDYFY |
| 18091 | WFRRHSYFY |
| 18092 | WGDKKATDR |
| 18093 | WGDKMAADA |
| 18094 | WGDKPATDR |
| 18095 | WGDKRATDR |
| 18096 | WKNDMDMDA |
| 18097 | WKTEMDMDA |
| 18098 | WNCVMPDNA |
| 18099 | WNTDMDMDA |
| 18100 | WVDKQATDR |
| 18101 | YCRCYGNNS |
| 18102 | YIMVHEWGD |
| 18103 | YMILQHDAL |
| 18104 | YMTLEHDAL |
| 18105 | YQSGGILRM |
| 18106 | YQSGGIRRM |
| 18107 | YQTGGIHRM |
| 18108 | YSHTYKWKR |
| 18109 | YSLTYKWKR |
| 18110 | YSPTYMWKR |
| 18111 | YSQLFTFFE |
| 18112 | YSSTYKWKR |
| 18113 | YSTTYGGRH |
| 18114 | YVTEVNSMI |
| 18115 | YWVDFVMPF |
| 18116 | YWVNFVVPF |
| 18117 | YWVTFVMPF |

### Example 38

### AAV5 Variants with Sciatic Nerve Tissue Tropism as Identified by Machine Learning

[0984] This example describes preferred properties of engineered AAV5 variants that display sciatic nerve tissue tropism as identified by machine learning methods. The same bioinformatics pre-process, machine learning methods, and analyses as described in EXAMPLE 19 and FIGS. 19-FIG. 22 were carried out to identify preferred properties of engineered AAV5 variants that display sciatic nerve tissue tropism.

[0985] Favored biophysical properties and favored amino acid residues at each position in the 581 to 589 region of an AAV5 VP capsid polypeptide, which are associated with a higher probability of sciatic nerve tissue tropism are described below. Any of the below machine learning-derived positional amino acid preferences described in TABLE 60 can be present alone or in combination with each other or in combination with any of the amino acid preferences observed and described in EXAMPLE 8, TABLE 15. Listed below in TABLE 60 are a summary of positional features shared between the top important features for sciatic nerve tropism extracted from the ML models.

TABLE 60
Machine Learning-Derived Sciatic Nerve Tissue Tropism Rules

High average flexibility at Xaa1
Xaa1 is selected from G or R
Low solubility at Xaa1
Xaa1 is selected from R or Q
Low mutability at Xaa1
Xaa1 is selected from C, L, F, Y, R, K, P, or H
High volume at Xaa1
Xaa1 is selected from Y or F
High surface accessibility at Xaa2
Xaa2 is selected from E, R, or K
Medium mutability at Xaa3
Xaa3 is selected from H or R
Medium average flexibility at Xaa3
Xaa3 is selected from V or Y
High mutability at Xaa4
Xaa4 is selected from N
High average flexibility at Xaa4
Xaa4 is selected from I, N, G, or R
Low solubility at Xaa4
Xaa4 is selected from N
Low mutability at Xaa6
Xaa6 is selected from C, L, F, or Y
High volume at Xaa6
Xaa6 is selected from K, M, I, or L
Low mutability at Xaa7
Xaa7 is selected from L, F, or Y
Medium mol mass at Xaa7
Xaa7 is selected from D, I, L, or N
High surface accessibility at Xaa8
Xaa8 is selected from S, Y, T, D, P, H, or N
Low mutability at Xaa9
Xaa9 is selected from C, H, or R
Medium solubility at Xaa9
Xaa9 is selected from Q, T, or C
Low surface accessibility at Xaa9
Xaa9 is selected from C

[0986] TABLE 61 below provides sequences of the 581 to 589 region for variant AAV VP1 capsid polypeptides that exhibited sciatic nerve tissue tropism and comport to one or more of the rules provided in TABLE 60. The present disclosure, thus, provides for rAAVs composed of engineered AAV5 VP1 capsid polypeptides having a SEQ ID NO: 2, wherein the Xaa1 to Xaa9 region is any one of SEQ ID NO: 26991-SEQ ID NO: 27990, as disclosed in TABLE 61. Also encompassed herein are rAAVs composed of engineered AAV5 VP2 capsid polypeptides and engineered AAV5 VP3 capsid polypeptides having the sequences disclosed in the below table at the regions in AAV5 VP2 (amin acid residues 445 to 453) and AAV5 VP3 (amino acid residues 389-397) corresponding to the amino acids in the AAV5 VP1 581 to 589 region.

TABLE 61
Sequences of the 581 to 589 Region in AAV5
VP1 Capsid Polypeptide that Drive Sciatic
Nerve Tissue Tropism

| HQ | 581-589 |
|---|---|
| ID NO | Sequence |
| 26991 | AAYLYNVPM |
| 26992 | AIRIAMCDW |
| 26993 | AIRTAMCDW |
| 26994 | AIRTTMCHW |
| 26995 | ANGCAIEYH |
| 26996 | ANGCTIENH |
| 26997 | ANGGAIENH |
| 26998 | ANGGAIENN |
| 26999 | ARYRMRYHG |
| 27000 | ASGCAIENH |
| 27001 | ATFGWMNWF |
| 27002 | ATSRQAVWA |
| 27003 | ATYLYNIPM |
| 27004 | AVLLWCEVQ |
| 27005 | AYPRNAKYI |
| 27006 | AYSRNAKYI |
| 27007 | CADWPCMSL |
| 27008 | CAGWACMSL |
| 27009 | CAKENNAIH |
| 27010 | CAKFTNAIY |
| 27011 | CAKFTNTIH |
| 27012 | CAKFITAIH |
| 27013 | CANWACMSL |
| 27014 | CCCEALMPK |
| 27015 | CCCEALMSQ |
| 27016 | CCCEAMMPQ |
| 27017 | CCCEAVMPQ |
| 27018 | CCCEVLMPQ |
| 27019 | CCCPDATNN |
| 27020 | CCCSDATNN |
| 27021 | CCGQVEFGW |
| 27022 | CCSGALMPQ |
| 27023 | CDGQVEFGW |
| 27024 | CEDPLCQSS |
| 27025 | CEDWACMSL |
| 27026 | CEHPLCQSS |
| 27027 | CEIPLCQSS |
| 27028 | CENPLCKSS |
| 27029 | CENPLCPSS |
| 27030 | CENPLCQSN |
| 27031 | CENPLGQSS |
| 27032 | CENPLRQSS |
| 27033 | CENPLWQ5S |
| 27034 | CENPQCQSS |
| 27035 | CENSLCQSS |
| 27036 | CETPLCQSS |
| 27037 | CEVNEEYDW |
| 27038 | CFAEPITDC |
| 27039 | CFGAEGYAG |
| 27040 | CFNEPITDC |
| 27041 | CFTAPITDC |
| 27042 | CFTEPIADC |
| 27043 | CFTEPINDC |
| 27044 | CFTEPITDR |
| 27045 | CFTEPITNC |
| 27046 | CFTESITDC |
| 27047 | CFTETITDC |
| 27048 | CGGKVEFGW |
| 27049 | CGGQAEFGW |
| 27050 | CGGQFEFGW |
| 27051 | CGGQIEFGW |
| 27052 | CGGQIEVGW |
| 27053 | CGGQVEAGW |
| 27054 | CGGQVECGW |
| 27055 | CGGQVEFDW |
| 27056 | CGGQVEFSL |
| 27057 | CGGQVEFSW |
| 27058 | CGGQVEFVW |
| 27059 | CGGQVEIGW |
| 27060 | CGGQVKFGW |
| 27061 | CGGQVQFGW |
| 27062 | CGKFTNAIH |
| 27063 | CGVQVEFGW |
| 27064 | CHPQHHYSH |
| 27065 | CHPQHRHSH |
| 27066 | CHPQLHHSH |
| 27067 | CKDTRKMRE |
| 27068 | CKEHRKMRE |
| 27069 | CKEPGKMRE |
| 27070 | CKEPRKMRA |
| 27071 | CKEPRKMRK |
| 27072 | CKEPRQMRE |
| 27073 | CKEPRRMRE |
| 27074 | CKETRKMRE |
| 27075 | CKKPRKMRE |
| 27076 | CKVNEEYDW |
| 27077 | CQIREDRHH |
| 27078 | CQNPLCQSS |
| 27079 | CQVNAEYDW |
| 27080 | CQVNEAYDW |
| 27081 | CQVNEEDDW |
| 27082 | CQVNEEFDW |
| 27083 | CQVNEEYNW |
| 27084 | CRCKDAWNM |
| 27085 | CRCNAAWNM |
| 27086 | CRCNDAGNM |
| 27087 | CRCNDAWHR |
| 27088 | CRCNDAWNK |
| 27089 | CRCNDAWNR |
| 27090 | CRCNDAWNV |
| 27091 | CRCNDAWIM |
| 27092 | CRCNDEWNM |
| 27093 | CRCNEAWNM |
| 27094 | CRCNGAWNM |
| 27095 | CRCSDAWNM |
| 27096 | CRFNDAWNM |
| 27097 | CRGQVEFGW |
| 27098 | CRVNEEYDW |
| 27099 | CSSCNHRVF |
| 27100 | CVFGWNNYQ |
| 27101 | CVGQVEFDW |
| 27102 | CVGQVEFGW |
| 27103 | CVKFTNAIH |
| 27104 | CVWSVGTEW |
| 27105 | CWAADSKPC |
| 27106 | CYPQHHHSH |
| 27107 | DDLDAWQTS |
| 27108 | DDLDLWQTS |
| 27109 | DDLDVGQTS |
| 27110 | DDLDVWETS |
| 27111 | DDLDVWKTS |
| 27112 | DDLDVWRTS |
| 27113 | DDMDVWQTS |
| 27114 | DDQDVWQTS |
| 27115 | DDRDVWQTS |
| 27116 | DFEMWDWVG |
| 27117 | DFEVWDWFG |
| 27118 | DFNHIGWWQ |
| 27119 | DFSHIAWWQ |
| 27120 | DFTHIAWWQ |
| 27121 | DFYFSGFLI |
| 27122 | DFYISGFLI |
| 27123 | DFYLSGFLI |
| 27124 | DPADKPSNS |
| 27125 | DPQDKPSNS |
| 27126 | DRIMISIQP |
| 27127 | DRVMISIQQ |
| 27128 | DRVMVSIQP |
| 27129 | DVMMPALKV |
| 27130 | DVMMRGLKV |
| 27131 | DVMMSGLKV |
| 27132 | DWRMVCVHC |
| 27133 | EACLYNIPM |
| 27134 | EAYFYNIPM |
| 27135 | EAYLCMIPM |
| 27136 | EAYLYHIPM |
| 27137 | EAYLYMIPM |
| 27138 | EAYLYNFPM |
| 27139 | EAYLYNIRM |
| 27140 | EAYLYNISM |
| 27141 | EAYLYNVPM |
| 27142 | EAYLYSIPM |
| 27143 | EAYMYNIPM |
| 27144 | EEYLYNIPM |
| 27145 | EFKRMTCNR |
| 27146 | EGSRKWFAC |
| 27147 | EGYLYNIPM |
| 27148 | EIGIMRHGH |
| 27149 | EIILDDEQR |
| 27150 | EIILDDQKR |
| 27151 | EIIVDDQQR |
| 27152 | EIIVDEQQR |
| 27153 | EIMLDDQQR |
| 27154 | EIVLDDQQR |
| 27155 | EKMIDTCLQ |
| 27156 | EKMRHTCLQ |
| 27157 | EKMTHPCLQ |
| 27158 | EKMTHTCLE |
| 27159 | EKMTHTCLK |
| 27160 | EKMTHTCLR |
| 27161 | EKMTHTCVQ |
| 27162 | EKMTHTCVR |
| 27163 | EKMTHTWLQ |
| 27164 | EPYLYNIPM |
| 27165 | EQMTHTCLP |
| 27166 | EQMTHTCLQ |
| 27167 | ERMTHTCLR |
| 27168 | ESHVRPLNM |
| 27169 | ETMKHKKRE |
| 27170 | ETMQYKKRE |
| 27171 | EWTRRMAAP |
| 27172 | EWTRRMEAS |
| 27173 | EWTRRMEAT |
| 27174 | EWTRRMEDP |
| 27175 | FAAANQNHM |
| 27176 | FAPIVKRHH |
| 27177 | FDLSTCYHQ |
| 27178 | FEKNSSQMR |
| 27179 | FGGQVELGW |
| 27180 | FHPYFPTYK |
| 27181 | FHVRFDRHH |
| 27182 | FIAANQNHM |
| 27183 | FKEPRKMRE |
| 27184 | FKIRFDRHH |
| 27185 | FKMDCGSCG |
| 27186 | FKMDCHGCG |
| 27187 | FKMDCHSCC |
| 27188 | FKMDCHSTG |
| 27189 | FKMDCHSGG |
| 27190 | FKMDCHTCG |
| 27191 | FKMDGHSCG |
| 27192 | FKMDWHSCG |
| 27193 | FKMGCHSCG |
| 27194 | FKMVCHSCG |
| 27195 | FKRDCHSCG |
| 27196 | FKRICLEAG |
| 27197 | FKRICWEAA |
| 27198 | FKRICWEGG |
| 27199 | FKRICWEPG |
| 27200 | FKRICWEVG |
| 27201 | FKRICWGAG |
| 27202 | FKRICWQAG |
| 27203 | FKRMCWEAG |
| 27204 | FKRTCWEAG |
| 27205 | FKRVCWEAG |
| 27206 | FKVDCHSCG |
| 27207 | FKVNRDDSW |
| 27208 | FKVRFDRHH |
| 27209 | FLIRFDRHH |
| 27210 | FNAGPLAYN |
| 27211 | FNLPFCYHQ |
| 27212 | FNLSFCYHL |
| 27213 | FNLSICYHQ |
| 27214 | FPGVMEAEI |
| 27215 | FPGVMQGEI |
| 27216 | FPHIVKRHH |
| 27217 | FPIRFDRHH |
| 27218 | FPIRFDRHL |
| 27219 | FPIRFDRHR |
| 27220 | FPIRFDRPH |
| 27221 | FPPIVKQHH |
| 27222 | FPPEVKRHY |
| 27223 | FPPTVKRHH |
| 27224 | FQIGFDRHH |
| 27225 | FQIKFDRHH |
| 27226 | FQILFDRHH |
| 27227 | FQIPFDRHH |
| 27228 | FQIQFDRHH |
| 27229 | FQIQIDRHH |
| 27230 | FQIRFARHH |
| 27231 | FQIRFDGHH |
| 27232 | FQIRFDRDH |
| 27233 | FQIRFDRHC |
| 27234 | FQIRFDRHD |
| 27235 | FQIRFDRHR |
| 27236 | FQIRFDRNR |
| 27237 | FQIRFDRPH |
| 27238 | FQIRFDRRQ |
| 27239 | FQIRFDRYH |
| 27240 | FQIRFGLHH |
| 27241 | FQIRFHRHH |
| 27242 | FQIRFNRHH |
| 27243 | FQIRFYRHH |
| 27244 | FQLRFDRHH |
| 27245 | FQMRFDRHQ |
| 27246 | FQSRFDRHH |
| 27247 | FQSRFDRHR |
| 27248 | FQTRFDRHH |
| 27249 | FQVRFDRHH |
| 27250 | FRIRFDRHH |
| 27251 | FRIRFDRHY |
| 27252 | FSAGALAYN |
| 27253 | FSAGGLAYN |
| 27254 | FSAGPLAYC |
| 27255 | FSAGPLAYY |
| 27256 | FSAGPLDYN |
| 27257 | FSAGPLSYI |
| 27258 | FSAGPLVYN |
| 27259 | FSAGPMDYN |
| 27260 | FSAGSLAYN |
| 27261 | FSAGTLAYS |
| 27262 | FSDGPLAYN |
| 27263 | FSIRFDRHH |
| 27264 | FSPGPLAYN |
| 27265 | FSTGPLSYN |
| 27266 | FSVGPLAYN |
| 27267 | FTPIVKRHH |
| 27268 | FTPQKDNSC |
| 27269 | FTPQKDTSC |
| 27270 | FTQEKDTSC |
| 27271 | FTQQKDASC |
| 27272 | FVAANQNNM |
| 27273 | GAHNELVGY |
| 27274 | GASRQAVWA |
| 27275 | GAYLYNIPM |
| 27276 | GAYLYNLPM |
| 27277 | GCCSDATNN |
| 27278 | GEVVVCILR |
| 27279 | GFAADSKPC |
| 27280 | GFNHAIWWQ |
| 27281 | GFTGMSDQD |
| 27282 | GFYLTREKK |
| 27283 | GGGQVEIGW |
| 27284 | GIANDDDRE |
| 27285 | GIANDDDWA |
| 27286 | GIANDDDWE |
| 27287 | GIANLDDWE |
| 27288 | GIANVADWA |
| 27289 | GIANVADWE |
| 27290 | GIANVDAWV |
| 27291 | GIANVDDLE |
| 27292 | GIANVDDWK |
| 27293 | GIANVDDWR |
| 27294 | GIANVDDWT |
| 27295 | GIANVDEWK |
| 27296 | GIANVDHWE |
| 27297 | GIANVDNWE |
| 27298 | GIANVDYWE |
| 27299 | GIANVEAWE |
| 27300 | GIANVGDWG |
| 27301 | GIDNFDDWE |
| 27302 | GIDNVDDLE |
| 27303 | GIDNVDDWG |
| 27304 | GIDNVDEWE |
| 27305 | GIDNVDGWE |
| 27306 | GIDNVDYWE |
| 27307 | GIGNVDDWE |
| 27308 | GIPNVDGWE |
| 27309 | GISNVDDWE |
| 27310 | GISNVDDWG |
| 27311 | GISRQAVWA |
| 27312 | GITNVDDWE |
| 27313 | GITNVDGWE |
| 27314 | GIVNVDDWE |
| 27315 | GIWRSREHY |
| 27316 | GIWRTREHH |
| 27317 | GKANDDDWE |
| 27318 | GKANVDDRE |
| 27319 | GLPNVDDWE |
| 27320 | GNWRTREHY |
| 27321 | GRANVDDCE |
| 27322 | GRCNDAWNM |
| 27323 | GSHARPLNM |
| 27324 | GSHVGPLNM |
| 27325 | GSHVGTLNM |
| 27326 | GSHVQPLNM |
| 27327 | GSHVRPLHM |
| 27328 | GSHVRPLSM |
| 27329 | GSHVRSLNM |
| 27330 | GTANVDDLE |
| 27331 | GTHNELVGY |
| 27332 | GTSRQALWA |
| 27333 | GTSRQAVWS |
| 27334 | GTSRRAVWA |
| 27335 | GVTDLQNIC |
| 27336 | GVVNVDDWE |
| 27337 | GVYRSMFQE |
| 27338 | GWAADAKPC |
| 27339 | GWAADSEHC |
| 27340 | GWAADSEPC |
| 27341 | GWAADSKAC |
| 27342 | GWAADSKHC |
| 27343 | GWAADSKLC |
| 27344 | GWAADSKRC |
| 27345 | GWAADSKSC |
| 27346 | GWAADSKTC |
| 27347 | GWAADSRPC |
| 27348 | GWAADSTPC |
| 27349 | GWAADTKPC |
| 27350 | GWAAEAKPC |
| 27351 | GWAAGSTPC |
| 27352 | GWAANSKPC |
| 27353 | GWADDSKPC |
| 27354 | GWADDSKTC |
| 27355 | GWAGDSKPC |
| 27356 | GWASDSKPC |
| 27357 | GWATDSKPC |
| 27358 | GWAVDSKPC |
| 27359 | GWAVNSKPC |
| 27360 | GWDDDSKPC |
| 27361 | GWGVDSKPC |
| 27362 | GWHQKCMGD |
| 27363 | GWSADSKPC |
| 27364 | GWTADSKPC |
| 27365 | GWYKKCMGD |
| 27366 | GWYQKCMGN |
| 27367 | GWYQKCVGD |
| 27368 | GWYQKYMGD |
| 27369 | HFNINIYNC |
| 27370 | HFYVSGFLI |
| 27371 | HGSRNWFAC |
| 27372 | HLACLKMEM |
| 27373 | HLDCLKMQM |
| 27374 | HLDCLQMEM |
| 27375 | HLDCLRMEM |
| 27376 | HLNCLKMEM |
| 27377 | HMDCLKMEM |
| 27378 | HQDCLKMEM |
| 27379 | HWRMACVHC |
| 27380 | HWRMGCVHC |
| 27381 | HWRMVCVHG |
| 27382 | HWRMVCVYC |
| 27383 | IRDWQAYWL |
| 27384 | IRDWQCYWL |
| 27385 | IRDWQGHWL |
| 27386 | IWGIYVHYC |
| 27387 | IWGIYVLYF |
| 27388 | IWGIYVYYF |
| 27389 | KAGCFVDVW |
| 27390 | KARFHRERS |
| 27391 | KDLDVWQTS |
| 27392 | KDRQIDQYH |
| 27393 | KENNTNRID |
| 27394 | KGAENIHWG |
| 27395 | KGAPWAYNC |
| 27396 | KGDAYIHWG |
| 27397 | KGDENIHWC |
| 27398 | KGDEYIHWA |
| 27399 | KGDEYIHWC |
| 27400 | KGDEYIQGG |
| 27401 | KGDEYIRWG |
| 27402 | KGDEYIYWG |
| 27403 | KGDEYVHWG |
| 27404 | KGDGYIHWG |
| 27405 | KGDVHIHWG |
| 27406 | KGDVYIHWG |
| 27407 | KGGAYIHWG |
| 27408 | KGGCFVDVW |
| 27409 | KGGEYIHWC |
| 27410 | KGGLWAYNC |
| 27411 | KGGPLAYNC |
| 27412 | KGGPWAHNC |
| 27413 | KGGPWGYNC |
| 27414 | KGGQWAYNC |
| 27415 | KGGRWAYNC |
| 27416 | KGGVYIHWG |
| 27417 | KGHEYIHWG |
| 27418 | KGNEYIHWG |
| 27419 | KGPEYIHWG |
| 27420 | KGTEYIHWG |
| 27421 | KGVAYIHWG |
| 27422 | KPRFHRERS |
| 27423 | KSGRGKLTW |
| 27424 | KSRLGKLTW |
| 27425 | KSRRAKLTW |
| 27426 | KSRRGKLAW |
| 27427 | KSRRGKLKW |
| 27428 | KSRRGKLPL |
| 27429 | KSRRGKLPW |
| 27430 | KSRRGKLRW |
| 27431 | KSRRGKLSW |
| 27432 | KSRRGKLTL |
| 27433 | KSRRGKMTW |
| 27434 | KSRRGKRTW |
| 27435 | KSRRGKVTW |
| 27436 | KSRRVKLTW |
| 27437 | KSWGWVDTA |
| 27438 | KTGHFNQRG |
| 27439 | KTRFHREPS |
| 27440 | KTRFHRERN |
| 27441 | KTRFHRERT |
| 27442 | KTRRGRLTW |
| 27443 | KTWFHRERS |
| 27444 | KVGCSVDVW |
| 27445 | KVGCVVDVW |
| 27446 | LEKNGSQMR |
| 27447 | LIKNSAQMR |
| 27448 | LEKNSSEMR |
| 27449 | LEKNSSKMR |
| 27450 | LEKNSSLMR |
| 27451 | LEKNSSPMR |
| 27452 | LEKNSSQMK |
| 27453 | LEKNSSQTR |
| 27454 | LEKNSSQVR |
| 27455 | LEKNTSQMR |
| 27456 | LEQNSSQMR |
| 27457 | LERNSSQMR |
| 27458 | LLDCLKMEM |
| 27459 | LMENHEFQD |
| 27460 | LQDNINYSY |
| 27461 | LYLPLCHRI |
| 27462 | MASIDKQNV |
| 27463 | MCTGELDGT |
| 27464 | MCTGELSGT |
| 27465 | MCTGEWNGT |
| 27466 | MCTGKLNGT |
| 27467 | MCTRELNGT |
| 27468 | MEKNSSQMR |
| 27469 | MEMTQEWMA |
| 27470 | MEQNLQLTM |
| 27471 | MFTGELNGT |
| 27472 | MICGTHDNV |
| 27473 | MIFGTHDHV |
| 27474 | MEFGTHDNF |
| 27475 | MEFGTHDNI |
| 27476 | MIIGTHDNC |
| 27477 | MMVTKEFNI |
| 27478 | MMVTKEFNL |
| 27479 | MNLCYSSMM |
| 27480 | MQIRFDRHH |
| 27481 | MQMAQEWMA |
| 27482 | MQMMQMCVP |
| 27483 | MQMTQEWMG |
| 27484 | MQMTQKWMA |
| 27485 | MTAYFKALC |
| 27486 | MWTGELNGT |
| 27487 | NDLDVWQTS |
| 27488 | NELLWCEVQ |
| 27489 | NEMLWCEVQ |
| 27490 | NFCHSGFLI |
| 27491 | NFDSLGFLI |
| 27492 | NFEMWDWFG |
| 27493 | NFHENEYNC |
| 27494 | NFHLSGFLI |
| 27495 | NFNEHEYNC |
| 27496 | NFNINIFNC |
| 27497 | NENINISNC |
| 27498 | NFNINTYNC |
| 27499 | NFNENVYNC |
| 27500 | NFNETEYNC |
| 27501 | NFNLSGFLI |
| 27502 | NFNMNIYNC |
| 27503 | NFSINIYNC |
| 27504 | NFSTNIYNC |
| 27505 | NFTINIYNC |
| 27506 | NFYCSGFLI |
| 27507 | NFYFSGFLL |
| 27508 | NFYHSGFLI |
| 27509 | NFYISGFLI |
| 27510 | NFYLGGFLI |
| 27511 | NFYLIGFLI |
| 27512 | NFYLSGFLM |
| 27513 | NFYLSGFLI |
| 27514 | NFYLTGFLI |
| 27515 | NFYLTGYLI |
| 27516 | NFYVSGFLI |
| 27517 | NKIDVQWLQ |
| 27518 | NMECEKFLT |
| 27519 | NMECERFLT |
| 27520 | NMECQQFLT |
| 27521 | NQEDVQWIQ |
| 27522 | NQEDVQWLK |
| 27523 | NQLDVQWLQ |
| 27524 | NQPCINTYW |
| 27525 | NQPCVNTCW |
| 27526 | NSRRGRLTW |
| 27527 | NVMMPGLKV |
| 27528 | PELLWCEVQ |
| 27529 | PEVMVCILR |
| 27530 | PIFGWMNWF |
| 27531 | PKYAWSTSP |
| 27532 | PKYHWHMYH |
| 27533 | PRLQIRKYL |
| 27534 | PSCVTQESE |
| 27535 | PSTTVMNVM |
| 27536 | PTFGWMDWF |
| 27537 | PTFGWMNLF |
| 27538 | PTFGWMMAN |
| 27539 | PTFGWMMAN |
| 27540 | PTFVWMNWF |
| 27541 | PTYGWMNWF |
| 27542 | PWGDMKDPQ |
| 27543 | PWGDMKDSH |
| 27544 | PWGVMKDPH |
| 27545 | PWGYMKDPH |
| 27546 | QAYLYNIPM |
| 27547 | QCRLHMQCP |
| 27548 | QCRQSHEQE |
| 27549 | QCSRNWFAC |
| 27550 | QDSRNWFAC |
| 27551 | QGGRNWFAC |
| 27552 | QGSGNWFAC |
| 27553 | QGSRNWFGC |
| 27554 | QGSRNWFSC |
| 27555 | QGSRNWYAC |
| 27556 | QGTRNWFAC |
| 27557 | QIGRFAMAH |
| 27558 | QIGRFAMPH |
| 27559 | QIGRFAMYH |
| 27560 | QIGRFTMSH |
| 27561 | QNSRHRYAW |
| 27562 | QSRRGKLTW |
| 27563 | QSSRNWFAC |
| 27564 | QTLGWAMGT |
| 27565 | RAEGWFKYD |
| 27566 | RAHNGLVGY |
| 27567 | RANMCDCFE |
| 27568 | RANNWTRRH |
| 27569 | RASECDYFE |
| 27570 | RASMCDFFE |
| 27571 | RASMCDGFE |
| 27572 | RASMCDYFE |
| 27573 | RASMWDCFE |
| 27574 | RCHNELVGY |
| 27575 | RDSMCDCFE |
| 27576 | RDVIVCILR |
| 27577 | REAMVCILR |
| 27578 | REDMACILR |
| 27579 | REDMGCILR |
| 27580 | REDMLCELR |
| 27581 | REDMVCMLR |
| 27582 | REDMVGILR |
| 27583 | REDTVCILR |
| 27584 | REFMVCILR |
| 27585 | REGMLCILR |
| 27586 | REGMVCILR |
| 27587 | REGVVCILR |
| 27588 | REIMVCILR |
| 27589 | RELMVCILR |
| 27590 | RETMVCILR |
| 27591 | REVKVCILR |
| 27592 | REVLVCILK |
| 27593 | REVMACILR |
| 27594 | REVMCCILR |
| 27595 | REVMFCILR |
| 27596 | REVMGCILR |
| 27597 | REVMGCMLR |
| 27598 | REVMICILR |
| 27599 | REVMLCILR |
| 27600 | REVMVCIII |
| 27601 | REVMVCIIK |
| 27602 | REVMVCIIR |
| 27603 | REVMVCIIT |
| 27604 | REVMVCILG |
| 27605 | REVMVCILK |
| 27606 | REVMVCIPR |
| 27607 | REVMVCIRR |
| 27608 | REVMVCIVI |
| 27609 | REVMVCIVR |
| 27610 | REVMVCLLR |
| 27611 | REVMVCTLR |
| 27612 | REVMVCVLK |
| 27613 | REVMVCVLR |
| 27614 | RFIGMSDQD |
| 27615 | RFNGMSDQD |
| 27616 | RFPGMSDQD |
| 27617 | RFTGMGDQD |
| 27618 | RFTGMNDQD |
| 27619 | RFTGMSAQD |
| 27620 | RFTGMSDED |
| 27621 | RFTGMSDKD |
| 27622 | RFTGMSDKV |
| 27623 | RFTGMSDQY |
| 27624 | RFTGMSDRD |
| 27625 | RFTGMSGQD |
| 27626 | RFTGMSHQD |
| 27627 | RFTGMSYQD |
| 27628 | RFTGMTDQD |
| 27629 | RFTGVSDQD |
| 27630 | RGHNGKGPM |
| 27631 | RGSMCDCFE |
| 27632 | RGVMQQMNH |
| 27633 | RIANVDEWE |
| 27634 | RIHNELVGY |
| 27635 | RIPNVDDWE |
| 27636 | RLDCLKMEM |
| 27637 | RMSGMLCTV |
| 27638 | RMSGMLFTL |
| 27639 | RMSGMVCTL |
| 27640 | RNHNEIVGY |
| 27641 | RNHNELVGC |
| 27642 | RNHNELVGY |
| 27643 | RNSRHKYAW |
| 27644 | RPDLNEEVC |
| 27645 | RPDLNEVEC |
| 27646 | RPGLNEEEC |
| 27647 | RPHNELVGY |
| 27648 | RPHNGLVGY |
| 27649 | RSHNGLVGY |
| 27650 | RSHVQPLNM |
| 27651 | RSRRGKLTW |
| 27652 | RSRRGKMTW |
| 27653 | RSSMCDCFE |
| 27654 | RSWRGKLTW |
| 27655 | RTDNEEVGY |
| 27656 | RTDNELVGD |
| 27657 | RTDNGLVGY |
| 27658 | RTEGWFEYD |
| 27659 | RTEGWFKSD |
| 27660 | RTEGWFKYA |
| 27661 | RTEGWFKYE |
| 27662 | RTEGWVKYD |
| 27663 | RTHEELVGY |
| 27664 | RTHNALVCY |
| 27665 | RTHNALVSY |
| 27666 | RTHNALVVY |
| 27667 | RTHNDLVGH |
| 27668 | RTHNDLVVY |
| 27669 | RTHNEFVGY |
| 27670 | RTHNEIFGY |
| 27671 | RTHNEIIGY |
| 27672 | RTHNEEVGF |
| 27673 | RTHNEIVGS |
| 27674 | RTHNEIVGY |
| 27675 | RTHNELFGH |
| 27676 | RTHNELFGS |
| 27677 | RTHNELEGY |
| 27678 | RTHNELGGY |
| 27679 | RTHNELHGY |
| 27680 | RTHNELEGY |
| 27681 | RTHNELLCY |
| 27682 | RTHNELLGF |
| 27683 | RTHNELVAH |
| 27684 | RTHNELVCD |
| 27685 | RTHNELVCH |
| 27686 | RTHNELVCS |
| 27687 | RTHNELVCY |
| 27688 | RTHNELVFY |
| 27689 | RTHNELVGE |
| 27690 | RTHNELVGF |
| 27691 | RTHNELVGG |
| 27692 | RTHNELVGH |
| 27693 | RTHNELVGQ |
| 27694 | RTHNELVGV |
| 27695 | RTHNELVIY |
| 27696 | RTHNELVRH |
| 27697 | RTHNELVRY |
| 27698 | RTHNELVSF |
| 27699 | RTHNELVSY |
| 27700 | RTHNELVVF |
| 27701 | RTHNELVVY |
| 27702 | RTHNEPVGY |
| 27703 | RTHNEVVGC |
| 27704 | RTHNEVVGD |
| 27705 | RTHNEVVGS |
| 27706 | RTHNGLVGF |
| 27707 | RTHNGLVGS |
| 27708 | RTHNKLGGY |
| 27709 | RTHNKLVGN |
| 27710 | RTHNKLVGY |
| 27711 | RTHNQLVGC |
| 27712 | RTHNQLVGY |
| 27713 | RTHNVLVGS |
| 27714 | RTHNWLVGY |
| 27715 | RTHSELVGY |
| 27716 | RTHSQLVGY |
| 27717 | RTHTKLVGY |
| 27718 | RTMGQFYYE |
| 27719 | RTNNEIVGY |
| 27720 | RTNNELAGY |
| 27721 | RTNNELIGY |
| 27722 | RTNNELVGS |
| 27723 | RTPNALVGY |
| 27724 | RTQGWFKYD |
| 27725 | RTQNELVGS |
| 27726 | RTQNELVVY |
| 27727 | RTQNGLVGY |
| 27728 | RTRNELEGY |
| 27729 | RTRNELLGY |
| 27730 | RTRNELVGY |
| 27731 | RTRNELVVY |
| 27732 | RTRNKLVGY |
| 27733 | RTRSELVGY |
| 27734 | RTYNELVGY |
| 27735 | RVGMQQMNH |
| 27736 | RVMAEMVWE |
| 27737 | RVSGMLCTL |
| 27738 | RVVMQPMNH |
| 27739 | RVVMVCILR |
| 27740 | RWAADSKPC |
| 27741 | RWGDMKDPH |
| 27742 | RWGDMKDPH |
| 27743 | RWHNGKAPM |
| 27744 | RWHNGKEPM |
| 27745 | RWHNGKGHM |
| 27746 | RWHNGKGPK |
| 27747 | RWHNGKGRM |
| 27748 | RWHNGKGSM |
| 27749 | RWHNGKVPM |
| 27750 | RWHNGQGPM |
| 27751 | RWHNGRGPM |
| 27752 | RWHTGKGPM |
| 27753 | RWNNGKGPM |
| 27754 | RWRMVCVHC |
| 27755 | RYGNVAHHA |
| 27756 | RYSNVAHYA |
| 27757 | RYTGMSDQD |
| 27758 | SATNWECSK |
| 27759 | SCCADATNN |
| 27760 | SCCSDAANK |
| 27761 | SCCSDAANN |
| 27762 | SCCSDANNN |
| 27763 | SCCSDATDN |
| 27764 | SCCSDATNH |
| 27765 | SCCSDATQN |
| 27766 | SCCSDATSN |
| 27767 | SCCYDATNN |
| 27768 | SCTTRVWEC |
| 27769 | SCWSDATNN |
| 27770 | SCYSDATNN |
| 27771 | SEVMVCVLR |
| 27772 | SEYHWHMYH |
| 27773 | SFCSDATNN |
| 27774 | SFCSDATNS |
| 27775 | SFYLSGFLI |
| 27776 | SKCHWHMYH |
| 27777 | SKFAWSTSP |
| 27778 | SKFHWHMYH |
| 27779 | SKYAWSTAP |
| 27780 | SKYAWSTSQ |
| 27781 | SKYAWSTSS |
| 27782 | SKYAWSTTP |
| 27783 | SKYDWSTSP |
| 27784 | SKYGWSTSP |
| 27785 | SKYHWDMYH |
| 27786 | SKYHWHEYP |
| 27787 | SKYHWHMYL |
| 27788 | SKYHWHMYR |
| 27789 | SKYHWNMYH |
| 27790 | SKYHWPMYH |
| 27791 | SKYHWQIYH |
| 27792 | SKYHWRMYH |
| 27793 | SKYLWHMYH |
| 27794 | SKYNWHMYH |
| 27795 | SKYNWHMYQ |
| 27796 | SKYPWSTSP |
| 27797 | SKYQWHMYH |
| 27798 | SKYRWHMYH |
| 27799 | SKYSWSTSP |
| 27800 | SKYTWSTSP |
| 27801 | SKYVWSTSP |
| 27802 | SKYYWHMYH |
| 27803 | SPTNWECSN |
| 27804 | SRYAWSTSQ |
| 27805 | SRYHWHMYH |
| 27806 | STFGWMNWF |
| 27807 | STMTDAPCG |
| 27808 | STTNWECSN |
| 27809 | SVCSDATNN |
| 27810 | SVMMSPHLM |
| 27811 | SWAADSKPC |
| 27812 | SYARKAYDC |
| 27813 | SYPRRVYDC |
| 27814 | TALLWCEVL |
| 27815 | TAYMTAMYC |
| 27816 | TCCSDATNN |
| 27817 | TDLLWCELQ |
| 27818 | TDLLWCEVH |
| 27819 | TDRQIAQYH |
| 27820 | TDRQIDQYL |
| 27821 | TDRQIDQYR |
| 27822 | TDRQIGQYH |
| 27823 | TDRQIHQYH |
| 27824 | TDRQVDQYH |
| 27825 | TELFWCDVQ |
| 27826 | TELFWCEVL |
| 27827 | TELLLCEVH |
| 27828 | TELLWCAVQ |
| 27829 | TELLWCEIK |
| 27830 | TELLWCEIQ |
| 27831 | TELLWCELQ |
| 27832 | TELLWCELR |
| 27833 | TELLWCEVA |
| 27834 | TELLWCEVE |
| 27835 | TELLWCEVG |
| 27836 | TELLWCGVQ |
| 27837 | TELLWCKVQ |
| 27838 | TELLWCQVQ |
| 27839 | TELLWCVVQ |
| 27840 | TELLWFEVQ |
| 27841 | TELLWGEVQ |
| 27842 | TELLWREVQ |
| 27843 | TELLWSEIQ |
| 27844 | TELSWCEVQ |
| 27845 | TELVWCEVK |
| 27846 | TEMLWCEVK |
| 27847 | TEMLWCEVL |
| 27848 | TEMLWCEVQ |
| 27849 | TERLWCEVL |
| 27850 | TFNINIYNC |
| 27851 | TRAMPDDNC |
| 27852 | TFWMPGNNC |
| 27853 | TFYLSGFLI |
| 27854 | TGLLWCEVQ |
| 27855 | TISHDEAHK |
| 27856 | TKLLWCEVK |
| 27857 | TKYAWSTSP |
| 27858 | TKYHWHMYH |
| 27859 | TMGEVVINL |
| 27860 | TMSEVVINL |
| 27861 | TNGCAIENH |
| 27862 | TPGIHRHCC |
| 27863 | TPGISRHCC |
| 27864 | TPGITRHCC |
| 27865 | TPGIYRHCC |
| 27866 | TPGLNRHCC |
| 27867 | TQLLWCEVQ |
| 27868 | TRRSWECSP |
| 27869 | TRYRMPYHG |
| 27870 | TRYRMRYHC |
| 27871 | TRYRMRYHS |
| 27872 | TRYRMRYNG |
| 27873 | TSCGYHDNN |
| 27874 | TSCGYNDNS |
| 27875 | TSCRYNDNN |
| 27876 | TSRSAAADL |
| 27877 | TSRTEAADL |
| 27878 | TSSHDEAHR |
| 27879 | TTFGWMNWF |
| 27880 | TTGINRHCC |
| 27881 | TTMPDAPCR |
| 27882 | TTSHDEAHK |
| 27883 | TVLLWCDVQ |
| 27884 | TVLLWCEVH |
| 27885 | TVLLWCEVQ |
| 27886 | TWEIQIDCI |
| 27887 | TWETQIDCI |
| 27888 | TWGSQIDCI |
| 27889 | TWQSQIDCI |
| 27890 | TYPRNAKYT |
| 27891 | VEDKINYSY |
| 27892 | VEKNSSQMR |
| 27893 | VGYRSMFQE |
| 27894 | VIGIIRHGH |
| 27895 | VISNVDDWE |
| 27896 | VLYRSMFQE |
| 27897 | VQAQINYSY |
| 27898 | VQDEINYSY |
| 27899 | VQDKFNYSY |
| 27900 | VQDKINFSY |
| 27901 | VQDKINYGY |
| 27902 | VQDKINYNY |
| 27903 | VQDKINYSH |
| 27904 | VQDKISYSY |
| 27905 | VQDKITYSY |
| 27906 | VQDKLNYSH |
| 27907 | VQDKLNYSY |
| 27908 | VQDKRNYSY |
| 27909 | VQDKSNYSY |
| 27910 | VQDKVNYSY |
| 27911 | VQDMLNYSY |
| 27912 | VQDMVNYSY |
| 27913 | VQDNINYSH |
| 27914 | VQDQINYSY |
| 27915 | VQDRINYSY |
| 27916 | VQDRVNYSY |
| 27917 | VQDTINFSY |
| 27918 | VQDTINYSF |
| 27919 | VQDTINYSY |
| 27920 | VQDTVNYSY |
| 27921 | VQENINYSY |
| 27922 | VQGRINYSY |
| 27923 | VQGTINYSY |
| 27924 | VQNKINYSY |
| 27925 | VQVKINYSY |
| 27926 | VQVRINYSY |
| 27927 | VQVTINYSY |
| 27928 | VRDKINYSY |
| 27929 | VRDWQGYWL |
| 27930 | VSRRGKLTW |
| 27931 | VTMPDAPCG |
| 27932 | VWEANPPFR |
| 27933 | VWEDNAPFR |
| 27934 | VWEDNPPVR |
| 27935 | VWENNPPFR |
| 27936 | WEKNSSQMR |
| 27937 | WEVMVCILR |
| 27938 | WHAMVNSGP |
| 27939 | WHDMGNSGP |
| 27940 | WMCDFSCIQ |
| 27941 | WMCEFSCIK |
| 27942 | WRDMVNSGP |
| 27943 | YAEVAVQKE |
| 27944 | YANSKIMSF |
| 27945 | YAQVAVQQE |
| 27946 | YGGQVEFGW |
| 27947 | YHGVICKEL |
| 27948 | YHPHFPTYK |
| 27949 | YHPYFPAYK |
| 27950 | YHPYFPTHK |
| 27951 | YHPYFPTNK |
| 27952 | YHPYFPTYQ |
| 27953 | YHPYFPTYR |
| 27954 | YHPYFSTYK |
| 27955 | YHPYVPTYR |
| 27956 | YIANPCANC |
| 27957 | YIDNPCGNC |
| 27958 | YIDNPCTNC |
| 27959 | YIDTPCANC |
| 27960 | YIHNRCANC |
| 27961 | YKLNRDDSW |
| 27962 | YKMDCHSCG |
| 27963 | YKVNGDDSW |
| 27964 | YKVNLDDSW |
| 27965 | YKVNQDDSW |
| 27966 | YKVNRDASW |
| 27967 | YKVNRDGSW |
| 27968 | YKVNRDVSW |
| 27969 | YKVNRDYSW |
| 27970 | YKVNRNDSW |
| 27971 | YNGGICKEL |
| 27972 | YNGVFCKEL |
| 27973 | YNGVICKVL |
| 27974 | YNGVICQEL |
| 27975 | YNGVICREL |
| 27976 | YNGVIGKEL |
| 27977 | YNGVLCKEL |
| 27978 | YNGVMCKEL |
| 27979 | YNGVTCKEL |
| 27980 | YNGVVCKEL |
| 27981 | YQIRFDRHH |
| 27982 | YRVNRDDSW |
| 27983 | YSAGPLAYN |
| 27984 | YSNSIKMSL |
| 27985 | YSNSVQMSF |
| 27986 | YSNTIQMSL |
| 27987 | YIGVICQEL |
| 27988 | YWRMVCVHC |
| 27989 | YYMHWINSG |
| 27990 | YYMHWVNAG |

### Example 39

### AAV5 Variants with Skeletal Muscle Tissue Tropism as Identified by Machine Learning

[0987] This example describes preferred properties of engineered AAV5 variants that display skeletal muscle tissue tropism as identified by machine learning methods. The same bioinformatics pre-process, machine learning methods, and analyses as described in EXAMPLE 19 and FIGS. 19-FIG. 22 were carried out to identify preferred properties of engineered AAV5 variants that display skeletal muscle tissue tropism.

[0988] Favored biophysical properties and favored amino acid residues at each position in the 581 to 589 region of an AAV5 VP capsid polypeptide, which are associated with a higher probability of skeletal muscle tissue tropism are described below. Any of the below machine learning-derived positional amino acid preferences described in TABLE 62 can be present alone or in combination with each other or in combination with any of the amino acid preferences observed and described in EXAMPLE 9, TABLE 17. Listed below in TABLE 62 are a summary of positional features shared between the top important features for skeletal muscle tropism extracted from the ML models.

TABLE 62
Machine Learning-Derived Skeletal Muscle Tissue Tropism Rules

High average flexibility at Xaa1
Xaa1 is selected from G or R
Or
Low average flexibility at Xaa1
Xaa1 is selected from W, M, F, or H
High mol mass at Xaa1
Xaa1 is selected from R, F, or W
Low hydropathy at Xaa2
Xaa2 is selected from K or R
Low mutability at Xaa2
Xaa2 is selected from C, R, or H
High average flexibility at Xaa2
Xaa2 is selected from G or R
High average flexibility at Xaa3
Xaa3 is selected from G or R
High hydrophilicity at Xaa4
Xaa4 is selected from D, E, R, K, or N
Low mutability at Xaa4
Xaa4 is selected from C, R, or H
Low mol mass at Xaa5
Xaa5 is selected from A
Low average flexibility at Xaa5
Xaa5 is selected from A or L
High mutability at Xaa5
Xaa5 is selected from D, A, or E
Low average flexibility at Xaa6
Xaa6 is selected from W, M, or F
Low mutability at Xaa6
Xaa6 is selected from C
High mol mass at Xaa6
Xaa6 is selected from W
Low goldman engelman steitz at Xaa7
Xaa7 is selected from R
High average flexibility at Xaa7
Xaa7 is selected from D, R, P, G, or S
High mutability at Xaa7
Xaa7 is selected from R, H, or N
Low solubility at Xaa7
Xaa7 is selected from R or Q
High hydrophilicity at Xaa8
Xaa8 is selected from D, E, R, K, or N
Low mutability at Xaa9
Xaa9 is selected from Y, F, or L

[0989] TABLE 63 below provides sequences of the 581 to 589 region for variant AAV VP1 capsid polypeptides that exhibited skeletal muscle tissue tropism and comport to one or more of the rules provided in TABLE 62. The present disclosure, thus, provides for rAAVs composed of engineered AAV5 VP1 capsid polypeptides having a SEQ ID NO: 2, wherein the Xaa1 to Xaa9 region is any one of SEQ ID NO: 29991-SEQ ID NO: 30990, as disclosed in TABLE 63. Also encompassed herein are rAAVs composed of engineered AAV5 VP2 capsid polypeptides and engineered AAV5 VP3 capsid polypeptides having the sequences disclosed in the below table at the regions in AAV5 VP2 (amin acid residues 445 to 453) and AAV5 VP3 (amino acid residues 389-397) corresponding to the amino acids in the AAV5 VP1 581 to 589 region.

TABLE 63
Sequences of the 581 to 589 Region in AAV5
VP1 Capsid Polypeptide that Drive
Skeletal Muscle Tissue Tropism

| SEQ | 581-589 |
|---|---|
| ID NO | sequence |
| 29991 | AAGDIGSVM |
| 29992 | AAGNIGSVM |
| 29993 | AANLLWRLW |
| 29994 | AANLLWRLY |
| 29995 | ACAWIESFT |
| 29996 | ACPDHHRWL |
| 29997 | ACPNVWWHM |
| 29998 | ACQCKVIGQ |
| 29999 | ACQCRVIWQ |
| 30000 | ACTWPGVGQ |
| 30001 | ACWDTHQSI |
| 30002 | ACWDTKQSI |
| 30003 | ACWDTLQSI |
| 30004 | ACWDTQKSI |
| 30005 | ACWDTQQGI |
| 30006 | ACWRHVQWN |
| 30007 | AFGEFDNHS |
| 30008 | AFIHIDREC |
| 30009 | AGGHCTYVA |
| 30010 | AGWIGACMA |
| 30011 | AHWNAIMRW |
| 30012 | AIFEPHRWH |
| 30013 | AIFEPRRWP |
| 30014 | AIIEPRRWH |
| 30015 | AIKWRSQDK |
| 30016 | AIRVDDSTI |
| 30017 | AIVSMDDWH |
| 30018 | AKREIENCH |
| 30019 | AMHKRWTND |
| 30020 | ANNVYCVKK |
| 30021 | APANTPWRK |
| 30022 | APRPPRSAR |
| 30023 | ARDNESNLI |
| 30024 | ARSGAQSMM |
| 30025 | ARSGFASNT |
| 30026 | ARSSFASNN |
| 30027 | ARSSFASNS |
| 30028 | ARSSFPSNT |
| 30029 | ARSSFSSNT |
| 30030 | ARSSFTSNT |
| 30031 | ARSSVASNT |
| 30032 | ASTEVFYMI |
| 30033 | ATGIDNNAT |
| 30034 | AWSCVHADV |
| 30035 | AWWARCKQQ |
| 30036 | AWWTPCKQQ |
| 30037 | AWWTRCKQL |
| 30038 | CADVRENAN |
| 30039 | CCEFWLASA |
| 30040 | CCELWLASS |
| 30041 | CCRHWRPTT |
| 30042 | CCRYWRPTP |
| 30043 | CGGKIDIGL |
| 30044 | CHQENFIFR |
| 30045 | CHQENFVFH |
| 30046 | CHQENFVFP |
| 30047 | CIETGLLNG |
| 30048 | CIRQYDAIH |
| 30049 | CITYEGWAD |
| 30050 | CKVSESAKN |
| 30051 | CPPICEGGT |
| 30052 | CTETTVRWP |
| 30053 | CTKTTVRWP |
| 30054 | CTPTTVRWP |
| 30055 | CTQSSVRWP |
| 30056 | CTQTAVRWP |
| 30057 | CTQTTIRWP |
| 30058 | CTQTTVRWR |
| 30059 | CTQTTVRYP |
| 30060 | CTRSTVRWP |
| 30061 | CTRTIVRWP |
| 30062 | CVGMDSYNG |
| 30063 | CYGHLTAMC |
| 30064 | DARASPDCL |
| 30065 | DARPQWDIP |
| 30066 | DARSSPDCI |
| 30067 | DCEEFDRIT |
| 30068 | DCLVQKAAL |
| 30069 | DCNVNPACF |
| 30070 | DCWAIHSSW |
| 30071 | DCWDTQQSI |
| 30072 | DEVHGFLSG |
| 30073 | DEVYSFLSG |
| 30074 | DFHSYCMSF |
| 30075 | DFIHVGDWE |
| 30076 | DFTHVGDWD |
| 30077 | DGDPNFRIQ |
| 30078 | DHGYRNNSM |
| 30079 | DILIDHDFF |
| 30080 | DKQHDCRAS |
| 30081 | DKQQDCRAY |
| 30082 | DQQHDCRAY |
| 30083 | DRSSLCADE |
| 30084 | DRYSLCADA |
| 30085 | DSGRIYAWI |
| 30086 | DSNVQFCID |
| 30087 | DSRSSPDCL |
| 30088 | DSTLQFCID |
| 30089 | DTRKWMKWH |
| 30090 | DVPIDHDFF |
| 30091 | DVVGDAACP |
| 30092 | DWWTRCKQQ |
| 30093 | EARLQWDIP |
| 30094 | EARPHWDIP |
| 30095 | EARPQWDIL |
| 30096 | EARPQWDIS |
| 30097 | EARPQWDIT |
| 30098 | EARPQWDLP |
| 30099 | EARPQWDSP |
| 30100 | EARPQWDVP |
| 30101 | ECWQHVQWN |
| 30102 | ECWRHVKWN |
| 30103 | ECWRHVQLN |
| 30104 | ECWRHVQWI |
| 30105 | ECWRHVQWK |
| 30106 | ECWRHVQWS |
| 30107 | ECWRQVQWN |
| 30108 | ECYRKVVFR |
| 30109 | ECYSIYCEQ |
| 30110 | EDNIRMMMI |
| 30111 | EFAMDWVSD |
| 30112 | EFWGSMRNG |
| 30113 | EFWSSMRTG |
| 30114 | EGRPQWDIP |
| 30115 | EILAAWTPP |
| 30116 | EKCFQWTSP |
| 30117 | EKCFQNTSS |
| 30118 | EKCYQWTSA |
| 30119 | EKDLSHATF |
| 30120 | EKDLSQDTF |
| 30121 | EKTSRHWKT |
| 30122 | EKVHCMWLH |
| 30123 | EQEGDYVDM |
| 30124 | EQGAVWTPP |
| 30125 | EQGTVWTPP |
| 30126 | EQVRAFRQI |
| 30127 | ERAGFKMMD |
| 30128 | ERAGFQMMH |
| 30129 | ERAGVKMMH |
| 30130 | ERAGYKMMH |
| 30131 | ERASFKMMH |
| 30132 | ERDGFKMMH |
| 30133 | ERGGEKMMH |
| 30134 | ERVGFKMMH |
| 30135 | ESRPQWDIP |
| 30136 | ETCEMETPG |
| 30137 | ETGNDNNAT |
| 30138 | ETPINSEKG |
| 30139 | EVGTDPSKN |
| 30140 | EVRPQWDIP |
| 30141 | FAGKIDIGL |
| 30142 | FAGPNSYWP |
| 30143 | FAMEASPDD |
| 30144 | FAVMIHYHN |
| 30145 | FAVMVHYPN |
| 30146 | FAVMVRYHN |
| 30147 | FCAAEWGCL |
| 30148 | FCPAEWACL |
| 30149 | FCPAEWGCV |
| 30150 | FCPAEWGGL |
| 30151 | FCPAEWGYL |
| 30152 | FCPAKWGCL |
| 30153 | FCPEHWFDI |
| 30154 | FCPEHWFNM |
| 30155 | FCPEHWFNN |
| 30156 | FCPEHWFNS |
| 30157 | FCPEHWLNI |
| 30158 | FCPEHWVNI |
| 30159 | FCPQHWFNI |
| 30160 | FCSAEWGCL |
| 30161 | FCTAEWGCL |
| 30162 | FCTEHWFNI |
| 30163 | FDLFASPDD |
| 30164 | FDMFASPAD |
| 30165 | FDMFASPDA |
| 30166 | FDMFASPGD |
| 30167 | FDVFASPDD |
| 30168 | FFELSKTVF |
| 30169 | FFELSQTEF |
| 30170 | FFRDCPYES |
| 30171 | FERDYPYEY |
| 30172 | EGGKEDIGL |
| 30173 | FGGKIAIGL |
| 30174 | FGGKIDIGV |
| 30175 | FGGKIDIVL |
| 30176 | FGGKIDVGL |
| 30177 | FGGKIHIGL |
| 30178 | FGGKINIGL |
| 30179 | FGGKLDIGL |
| 30180 | FGGTIDIGL |
| 30181 | FGLVHQKNA |
| 30182 | FGRKIDIGL |
| 30183 | EGVVHQKDA |
| 30184 | EHHLTEYHG |
| 30185 | FHHQPFYHG |
| 30186 | FHHQTEYRG |
| 30187 | FHHQTGYHG |
| 30188 | FHHQTQYHG |
| 30189 | FHKWGINLG |
| 30190 | FHKWWIHLG |
| 30191 | FHKWWINLA |
| 30192 | FHKWWINLS |
| 30193 | FHKWWINQG |
| 30194 | FHKWWISLG |
| 30195 | FHKWWITLG |
| 30196 | FHKWWLNLG |
| 30197 | FHRQTEYHG |
| 30198 | FLKWWINLG |
| 30199 | FMGATIPED |
| 30200 | FMGVTIPAD |
| 30201 | FMGVTIPEG |
| 30202 | FMGVTIPKD |
| 30203 | FMGVTIPVD |
| 30204 | FMKCENFNS |
| 30205 | FMKCENVNT |
| 30206 | FMKCESVNS |
| 30207 | FMKGENVNS |
| 30208 | FMTCENVNS |
| 30209 | FMWHANSCG |
| 30210 | FMWHANSGA |
| 30211 | FMWYANSCA |
| 30212 | FNINAWDWD |
| 30213 | ENVTAQDWD |
| 30214 | EPHHLWVGG |
| 30215 | FPYHLWIGG |
| 30216 | FPYHLWVAG |
| 30217 | FPYHVWVGG |
| 30218 | FPYRLWVGG |
| 30219 | FRECLQIVN |
| 30220 | FRECLQLVT |
| 30221 | FRECMQIVT |
| 30222 | FREGLQIVT |
| 30223 | FRGCLQIVT |
| 30224 | FRGIETEQG |
| 30225 | FRGIETGEG |
| 30226 | FRGIETGQV |
| 30227 | FRGIETVQG |
| 30228 | FRGTETGQG |
| 30229 | FRGVETGQG |
| 30230 | FRKCLQIVT |
| 30231 | FRRWQSNTT |
| 30232 | FTETTVRWP |
| 30233 | FTQPTVRWP |
| 30234 | FVLVHQKDA |
| 30235 | FWKFALLSF |
| 30236 | FWKLALHSF |
| 30237 | FWPQIQYRM |
| 30233 | FYGKSAPVG |
| 30239 | FYGKTALVG |
| 30240 | EYGKTAPVA |
| 30241 | FYGPVTKSC |
| 30242 | FYGQLTKSC |
| 30243 | FYGQTAPVG |
| 30244 | FYGQVTESC |
| 30245 | FYGQVTMSC |
| 30246 | FYGQVTQSC |
| 30247 | FYGQVTTSC |
| 30248 | FYKWWINLG |
| 30249 | GARPQWDIP |
| 30250 | GARSSPDCL |
| 30251 | GASWHDREH |
| 30252 | GATEVFYMI |
| 30253 | GCDMDAYSN |
| 30254 | GCDVDAYSN |
| 30255 | GDCGASNCY |
| 30256 | GFHNTELPI |
| 30257 | GGAKALRFN |
| 30258 | GGARALRFI |
| 30259 | GGARALRFS |
| 30260 | GGGCEDWPM |
| 30261 | GGPEIKHYI |
| 30262 | GHWNAIMRW |
| 30263 | GIDWEDVWE |
| 30264 | GIKWRSQDK |
| 30265 | GIRDDDSTI |
| 30266 | GIRGDDSTI |
| 30267 | GIRVDDNTI |
| 30268 | GIRVDDSTK |
| 30269 | GIRVDDSTV |
| 30270 | GMDEVEREG |
| 30271 | GMEEGEREG |
| 30272 | GMEELEREG |
| 30273 | GNIYHFNNV |
| 30274 | GPDGAKLNK |
| 30275 | GPDGAKRHK |
| 30276 | GPDGARRNK |
| 30277 | GPDKCTVNL |
| 30278 | GPGLKAWPC |
| 30279 | GPLATTDPV |
| 30280 | GPTEVEYMI |
| 30281 | GRDWAFCDY |
| 30282 | GRHWACCDY |
| 30283 | GRHWAFCDD |
| 30284 | GRHWAFCDF |
| 30285 | GRHWAFCDH |
| 30286 | GRHWAFCDN |
| 30287 | GRHWAFCGY |
| 30288 | GRHWAFCHY |
| 30289 | CRHWAFFDY |
| 30290 | GRHWAFGDY |
| 30291 | GRHWAVCDY |
| 30292 | GRHWDFCDY |
| 30293 | GRHWSFCDY |
| 30294 | GRHWTFCDY |
| 30295 | GRPWAFCDY |
| 30296 | GRQWAVCDY |
| 30297 | GRRWAFCDY |
| 30298 | GRVSGHVHW |
| 30299 | GRYSLCADE |
| 30300 | GRYWAFCDY |
| 30301 | GSAEVFYMI |
| 30302 | GSNEVFYMI |
| 30303 | GSPEVFYMI |
| 30304 | GSTELFYMI |
| 30305 | GSTEVFCMI |
| 30306 | GSTEVFYMV |
| 30307 | GSTEVFYVI |
| 30308 | GSTKVFYMI |
| 30309 | GVEPMSRAA |
| 30310 | GVRDAVHWC |
| 30311 | GWSARSVNM |
| 30312 | HALSVGEWD |
| 30313 | HARGEWDFH |
| 30314 | HCAHYWMQD |
| 30315 | HCIRHFCEV |
| 30316 | HCLLQKAAL |
| 30317 | HCSCHFCEV |
| 30318 | HCSHHFCEV |
| 30319 | HCSRHFCEA |
| 30320 | HCSRHFCKV |
| 30321 | HCSRHFCQV |
| 30322 | HCSRHFGEV |
| 30323 | HCSRHYCEV |
| 30324 | HCTRHFCEV |
| 30325 | HCTRYWMQD |
| 30326 | HCYRKVVFR |
| 30327 | HDIDGWQMA |
| 30328 | HDIWQWSIK |
| 30329 | HDMLQWSEK |
| 30330 | HDMWQNTEK |
| 30331 | HDQVKCLRK |
| 30332 | HDTWQWSEK |
| 30333 | HEIDGWQTA |
| 30334 | HEIDVWQMA |
| 30335 | HEVDGWQMA |
| 30336 | HEVHSFLSG |
| 30337 | HKRNLYALQ |
| 30338 | HLHFHWGLW |
| 30339 | HLWRTFEAQ |
| 30340 | HLYSDYWFG |
| 30341 | HLYSEYWFD |
| 30342 | HRDAHLLME |
| 30343 | HRYSLCADE |
| 30344 | HSHFHWGLW |
| 30345 | FETCHEVDG |
| 30346 | HTCSELVEG |
| 30347 | HTELSHDPW |
| 30348 | HTEWSHDQW |
| 30349 | HTLLLSREP |
| 30350 | IACMKCPNI |
| 30351 | IANNDLRFG |
| 30352 | ICEMGPYHG |
| 30353 | ICMSQEKRC |
| 30354 | IDVGAYVWS |
| 30355 | IFEQCQRMR |
| 30356 | IFRDCPYEY |
| 30357 | IGIVFQRDF |
| 30358 | IGLVFQRDF |
| 30359 | IGVVFPRDF |
| 30360 | IGVVFQRDC |
| 30361 | IGVVFQRDE |
| 30362 | IGVVFQRDV |
| 30363 | IGVVFQRDY |
| 30364 | IGVVFQRVF |
| 30365 | IHVEYFDAW |
| 30366 | IHWNAEMRW |
| 30367 | IIKWRSQDK |
| 30368 | IENKDHDKF |
| 30369 | IENKHHDRF |
| 30370 | EINKRHDKF |
| 30371 | INQMARHPK |
| 30372 | INVEYFDTW |
| 30373 | INVEYFEAW |
| 30374 | INVEYFVAW |
| 30375 | IRTSFHVNA |
| 30376 | ISNNDLRFV |
| 30377 | ISNNDLRVG |
| 30373 | ISNNDVRFG |
| 30379 | ISTNDLRFG |
| 30380 | ITCKFTQNG |
| 30381 | IICKMDFWQ |
| 30382 | ITTGSRPTK |
| 30383 | IVFPSLARG |
| 30334 | IWPQSQYRM |
| 30385 | KAHKTVQDK |
| 30386 | KAMSVPWGK |
| 30387 | KANGSMDHH |
| 30388 | KANYACDWD |
| 30389 | KCFSMDFSG |
| 30390 | KCMPGCNDW |
| 30391 | KCMPNVGWR |
| 30392 | KCNVNPACF |
| 30393 | KCQWVGREN |
| 30394 | KCVSMAFSG |
| 30395 | KCVSMDFAG |
| 30396 | KCVSMDFTG |
| 30397 | KCVSMGFSG |
| 30398 | KCVSMVFSG |
| 30399 | KCVSMYFSG |
| 30400 | KCVSVDFSG |
| 30401 | KCWRHVQWN |
| 30402 | KDHNRWNRV |
| 30403 | KDPNRWNRL |
| 30404 | KDVGDDAHG |
| 30405 | KDYNRWNRL |
| 30406 | KEHNRWNRL |
| 30407 | KFAKDWVSD |
| 30408 | KFAMDWDSD |
| 30409 | KFAMDWVSV |
| 30410 | KFVSMDFSG |
| 30411 | KHEADYVDM |
| 30412 | KHEPRQSPR |
| 30413 | KHKARQSPR |
| 30414 | KHKLRQSPR |
| 30415 | KHMPRQSPR |
| 30416 | KHSELWREN |
| 30417 | KKCFQWTSA |
| 30418 | KKVRAFRQI |
| 30419 | KMKDVEENG |
| 30420 | KMKPVQRVG |
| 30421 | KMMSFSEVD |
| 30422 | KQEGDDVDM |
| 30423 | KQEGDSVDM |
| 30424 | KQVRAFREE |
| 30425 | KQVRAFRPE |
| 30426 | KQVRAFRQL |
| 30427 | KQVRAFRQM |
| 30428 | KQVRAFRQS |
| 30429 | KQVRAFRQV |
| 30430 | KQVRAFRRE |
| 30431 | KQVRDFRQI |
| 30432 | KQVRPFRQE |
| 30433 | KQVRSFRQE |
| 30434 | KQVRVFRQI |
| 30435 | KRVHFEGGD |
| 30436 | KSMTELDQP |
| 30437 | KTCELFTPG |
| 30438 | KTCEMFTPA |
| 30439 | KTCEMFTPS |
| 30440 | KTCERFTPG |
| 30441 | KTCGMFTPG |
| 30442 | KTELAMVID |
| 30443 | KTELDRDSM |
| 30444 | KTEWAMAID |
| 30445 | KTEWAMVLD |
| 30446 | KTEWAVWVD |
| 30447 | KTESGFQDK |
| 30448 | KTKWAMVID |
| 30449 | KTMSGPWGK |
| 30450 | KVNYACDWH |
| 30451 | KVTYACDWD |
| 30452 | KWDSIFVEH |
| 30453 | KWDSIFVQR |
| 30454 | KYAANWLKD |
| 30455 | KYADNWLKA |
| 30456 | KYADNWVKD |
| 30457 | KYADYWLKD |
| 30458 | KYSDNWLKD |
| 30459 | KYSEVWREN |
| 30460 | KYSKLWREN |
| 30461 | KYWMRHvym |
| 30462 | LATSMCYQS |
| 30463 | LCHFLRTCK |
| 30464 | LDKIEHDWN |
| 30465 | LFCEVQSRE |
| 30466 | LIDREWFNW |
| 30467 | LSGPEHYEP |
| 30468 | LSGSIHYES |
| 30469 | LSVKMDRAK |
| 30470 | LSVQMDRSK |
| 30471 | LSVRMDRAK |
| 30472 | LTGQEAGKG |
| 30473 | LVCIRADTD |
| 30474 | LVGKYWPRD |
| 30475 | LVGPYWPRD |
| 30476 | MADHCCANS |
| 30477 | MADHCCTDS |
| 30478 | MAFSSMHQG |
| 30479 | MASLRGSDE |
| 30480 | MCYQNIAFQ |
| 30481 | MFGECYNNG |
| 30482 | MFKYYPYCD |
| 30483 | MFLECYNNG |
| 30484 | MFQSYPYCD |
| 30485 | MFQYYQYCD |
| 30486 | MFRECYDNG |
| 30487 | MFRECYKNG |
| 30488 | MFRECYNSG |
| 30489 | MFREWYNNG |
| 30490 | MFRKCYNNG |
| 30491 | MGDGLWVKV |
| 30492 | MHFKYPQRG |
| 30493 | MNINKIRNS |
| 30494 | MPVKKEYGG |
| 30495 | MRHWAFCDY |
| 30496 | MRIHFEGGD |
| 30497 | MRVHFEGGG |
| 30498 | MRVHFQGGD |
| 30499 | MRVRFEGGD |
| 30500 | MSSLKGSDE |
| 30501 | MSWLGAAGE |
| 30502 | MTLLMGHES |
| 30503 | MVCIHADTD |
| 30504 | MWLAKARQG |
| 30505 | MWVGKARQG |
| 30506 | MYKYGQDWY |
| 30507 | NAINVGEWD |
| 30508 | NAISVGKWD |
| 30509 | NALSVGEWD |
| 30510 | NARSSPDCL |
| 30511 | NCSRHFCEV |
| 30512 | NCWAIHGSW |
| 30513 | NCWAILSSW |
| 30514 | NDLGDDAHG |
| 30515 | NDVADDAHG |
| 30516 | NDVGDDDHG |
| 30517 | NDVGDEAHG |
| 30518 | NDVGGDAHG |
| 30519 | NDVGNDAHG |
| 30520 | NEIDGWQMA |
| 30521 | NEIMMWRAN |
| 30522 | NETMMWRTN |
| 30523 | NFLDYHDMV |
| 30524 | NFMDYNDMV |
| 30525 | NFMEYHDMV |
| 30526 | NHQADEHDA |
| 30527 | NIRPSDASG |
| 30528 | NIRPSDASS |
| 30529 | NIRPSDTSA |
| 30530 | NIRQSDASA |
| 30531 | NIRRSDASA |
| 30532 | NKRNLYAMQ |
| 30533 | NKRNLYAVQ |
| 30534 | NMGIASPWH |
| 30535 | NMVDENRFW |
| 30536 | NMVHEHRFW |
| 30537 | NMVHESRFW |
| 30538 | NMVHQNRFW |
| 30539 | NMVRENRFW |
| 30540 | NSISVGEWD |
| 30541 | NTSCWKLEN |
| 30542 | NTVIRYRHS |
| 30543 | NVNEDVQWQ |
| 30544 | NWVNGFVDH |
| 30545 | NWWAIHSSW |
| 30546 | NYVLFVDHE |
| 30547 | PAWDLVEML |
| 30548 | PAWDLVGMF |
| 30549 | PAWDLVGMH |
| 30550 | PAWDLVGMI |
| 30551 | PAWDPVGML |
| 30552 | PAWELVGMV |
| 30553 | PAWHLVGML |
| 30554 | PCDFDNQPH |
| 30555 | PCHFDNQPH |
| 30556 | PCLDHHRWL |
| 30557 | PCNFDSQPH |
| 30558 | PCNVDNQPH |
| 30559 | PCPDHHRLL |
| 30560 | PCPDHHRRL |
| 30561 | PCPDHHRWV |
| 30562 | PCPDHNRWL |
| 30563 | PCPDNHRWL |
| 30564 | PCPDPHRWL |
| 30565 | PCPEHHRWL |
| 30566 | PCPNVWWHM |
| 30567 | PCQCKVIWQ |
| 30568 | PCTDHHRWL |
| 30569 | PCTFDNQPH |
| 30570 | PCYRKVVFR |
| 30571 | PDGERCERF |
| 30572 | PDWRKEKKF |
| 30573 | PFMKDGECE |
| 30574 | PFMKDVKCE |
| 30575 | PGDPQEDTV |
| 30576 | PGIDLWHMA |
| 30577 | PGIEWWHMA |
| 30578 | PGWEGACMA |
| 30579 | PHFDKCQHF |
| 30580 | PEDWEDVWE |
| 30581 | PKAMAKICE |
| 30582 | PKGMAKICA |
| 30583 | PKGMAKIFE |
| 30584 | PKGMAKIWE |
| 30585 | PKGMARICE |
| 30586 | PKGMSKICE |
| 30587 | PKGMVKICE |
| 30588 | PKGNRTNQI |
| 30589 | PKVMAKICE |
| 30590 | PMHQRWTND |
| 30591 | PMMKKLCCG |
| 30592 | PNGEKCERF |
| 30593 | PQHISADPT |
| 30594 | PQHISSDPT |
| 30595 | PQLESPDPT |
| 30596 | PQRESPDPT |
| 30597 | PRDDESNLI |
| 30598 | PRDKIWFMN |
| 30599 | PRDNVSNLI |
| 30600 | PRFCISLKC |
| 30601 | PRGNESNLI |
| 30602 | PRMSYEEKG |
| 30603 | PRTSYEFKG |
| 30604 | PSKPFSKEE |
| 30605 | PSQPFSEEE |
| 30606 | PTWDLVGML |
| 30607 | PWCECHRLF |
| 30608 | PWSWCEFNK |
| 30609 | PWSWCEYNQ |
| 30610 | PWWTRCKQQ |
| 30611 | PYGEKCERF |
| 30612 | PYTHWKLNN |
| 30613 | QARIEDMAK |
| 30614 | QCEWQKMEH |
| 30615 | QCFLCGSAT |
| 30616 | QCHFLRNCK |
| 30617 | QCMPGCNDL |
| 30618 | QCPVECDHV |
| 30619 | QCVSMDFSG |
| 30620 | QCYREVVFR |
| 30621 | QFAMDWVSD |
| 30622 | QIRIEDMAK |
| 30623 | QKGNRTDQI |
| 30624 | QKGNRTTQI |
| 30625 | QKRGIEAVD |
| 30626 | QKRIEDMAK |
| 30627 | QLNICQATF |
| 30628 | QMHNTFCGW |
| 30629 | QMHSTFCSW |
| 30630 | QRDKVWFMN |
| 30631 | QRDRIWFMN |
| 30632 | QSVDVGLMH |
| 30633 | QTGDWWQYG |
| 30634 | QTGNWWEYG |
| 30635 | QTGNWWKYG |
| 30636 | QTGNWWQYA |
| 30637 | QTGTWWQYG |
| 30638 | QTISGFKDK |
| 30639 | QTISGFQYK |
| 30640 | QTIVAWHHS |
| 30641 | QTLSGFQDK |
| 30642 | QTQIEDMAK |
| 30643 | QTRIDDMAK |
| 30644 | QTRIEDMTK |
| 30645 | QTRIQDMAK |
| 30646 | QTRRLEPYH |
| 30647 | QTRVEDMAK |
| 30648 | QVCIHADTD |
| 30649 | RADVDMTSI |
| 30650 | RCEIWLASS |
| 30651 | RCISNEGMQ |
| 30652 | RCISNEWME |
| 30653 | RCISNEWMP |
| 30654 | RDHNRWNRL |
| 30655 | REEIARPWY |
| 30656 | REKIARPWY |
| 30657 | REQIACPWY |
| 30658 | REQIARPGY |
| 30659 | REQISRPWY |
| 30660 | REQLARPWY |
| 30661 | RETLEQVAY |
| 30662 | RFNLPNFYD |
| 30663 | RFNWPIFYD |
| 30664 | RFNWPNVYD |
| 30665 | RFPFRAQVW |
| 30666 | RFRFLAQVW |
| 30667 | RFRFRAKVW |
| 30668 | RFRFRAQGW |
| 30669 | RFRFRAQIW |
| 30670 | RFRFRTQVW |
| 30671 | RFRFRVQVW |
| 30672 | RFRIRAQVW |
| 30673 | RFRVRAQVW |
| 30674 | RFTWPNFYD |
| 30675 | RHDWQHRTV |
| 30676 | RHELTMSHH |
| 30677 | RHELTMSQY |
| 30678 | RHQPLHYFH |
| 30679 | RHVPLHYFH |
| 30680 | RIDFNVDCY |
| 30681 | RIDINVDCH |
| 30682 | RIDINVDWY |
| 30683 | RIDINVNCY |
| 30684 | RIDINVYCY |
| 30685 | RIDISVDCY |
| 30686 | RIDLNVDCY |
| 30687 | RIDVNVDCY |
| 30688 | RIGENVDCY |
| 30689 | RIMFFDKFT |
| 30690 | RIMYFDEFT |
| 30691 | RIMYFDKCT |
| 30692 | RIMYFDRFT |
| 30693 | RINWPNFYD |
| 30694 | RITYFDKFT |
| 30695 | RKDTPKAGH |
| 30696 | RLARDNNES |
| 30697 | RLARENNEA |
| 30698 | RLELDNNEA |
| 30699 | RLEQYNNEA |
| 30700 | RLERANNEA |
| 30701 | RLERDDNEA |
| 30702 | RLERDHNEA |
| 30703 | RLERDINEA |
| 30704 | RLERDNIEA |
| 30705 | RLERDNNAA |
| 30706 | RLERDNNAV |
| 30707 | RLERDNNED |
| 30708 | RLERDNNEP |
| 30709 | RLERDNNES |
| 30710 | RLERDNNET |
| 30711 | RLERDNTEA |
| 30712 | RLERDTNEA |
| 30713 | RLERHNNEA |
| 30714 | RLERNNNEA |
| 30715 | RLGRDNNEA |
| 30716 | RLKRDNNEA |
| 30717 | RLKRVNNEA |
| 30718 | RLQRDNNEA |
| 30719 | RLYSDYWFD |
| 30720 | RMGYEVDWQ |
| 30721 | RMMYFDKFT |
| 30722 | RNLDYNTAV |
| 30723 | RNLNYNTGV |
| 30724 | RNPNYNTAV |
| 30725 | RNVNYNTAV |
| 30726 | RPERDNNEA |
| 30727 | RQQIARPWY |
| 30728 | RRCCISLKC |
| 30729 | RRDSDSVCK |
| 30730 | RRFCVSLKC |
| 30731 | RTECVPDTK |
| 30732 | RTLDSEYFF |
| 30733 | RTLDSEYWF |
| 30734 | RTQCAPDTK |
| 30735 | RTQCVPATK |
| 30736 | RTQCVPDAK |
| 30737 | RTQWVPDTK |
| 30738 | RTVDSEYLF |
| 30739 | RVCPFCCCF |
| 30740 | RVCTFCGCF |
| 30741 | RVDINVDCY |
| 30742 | RVDNDMADG |
| 30743 | RVERDNNEA |
| 30744 | RVKRDNNEA |
| 30745 | RWEKMAYSW |
| 30746 | RYCDAWPDV |
| 30747 | SAWDLVGML |
| 30748 | SCENWGRQH |
| 30749 | SCETGGRQH |
| 30750 | SCETWGRHH |
| 30751 | SCETWGRPH |
| 30752 | SCETWSRQH |
| 30753 | SCETWVRQH |
| 30754 | SCEWSKQCK |
| 30755 | SCMDGTTGV |
| 30756 | SCMHGTIGV |
| 30757 | SCMNGATGV |
| 30758 | SCMVGPTGV |
| 30759 | SCMNGTAGV |
| 30760 | SCMNGTTVV |
| 30761 | SCMNVTTGV |
| 30762 | SCPWPTGEE |
| 30763 | SCQTWGRQH |
| 30764 | SCRHWRPTP |
| 30765 | SCVTWGRQH |
| 30766 | SCWDTQQSI |
| 30767 | SDKWYRVSF |
| 30768 | SFQHAQWMG |
| 30769 | SGWIAACMA |
| 30770 | SGWIRACMA |
| 30771 | SGWNGACMA |
| 30772 | SHFESHQWC |
| 30773 | SHGESHQWC |
| 30774 | SIMMPDYSC |
| 30775 | SITDANLGF |
| 30776 | SKIYAVDQS |
| 30777 | SKRDIENCH |
| 30778 | SKRDVQSMM |
| 30779 | SKREIENCQ |
| 30780 | SKREIETCH |
| 30781 | SKRELENCH |
| 30782 | SKRKIENCH |
| 30783 | SKWACHPKM |
| 30784 | SKWNCHPKM |
| 30785 | SLNELKRDQ |
| 30786 | SMAKHFTSS |
| 30787 | SMHKIWYRA |
| 30788 | SQEFVCAQE |
| 30789 | SRDNESNLI |
| 30790 | SREQVNCDA |
| 30791 | SRISFVCSD |
| 30792 | SRKQVNCDA |
| 30793 | SRLQVNCDA |
| 30794 | SRLSFVCSD |
| 30795 | SRQPVNCDA |
| 30796 | SRQQANCDA |
| 30797 | SRQQVHCDA |
| 30798 | SRQQVNCDV |
| 30799 | SRQQVNCEA |
| 30800 | SRQQVNGDA |
| 30801 | SRQRVNCDA |
| 30802 | SRSMSSSME |
| 30803 | SRSMYSGME |
| 30804 | SRVAFVCSD |
| 30805 | SSAIQCDAA |
| 30806 | SSGIECDAA |
| 30807 | SSGIQCDAT |
| 30808 | SSGIQCEAA |
| 30809 | SSGLQCDAA |
| 30810 | SSILTWTWI |
| 30811 | SSRIQCDAA |
| 30812 | STDNHWGHG |
| 30813 | STQATVRWP |
| 30814 | STQEDFDMF |
| 30815 | STQTSVRWP |
| 30816 | SVQWYRVSF |
| 30817 | SWCDCHRLF |
| 30818 | SWCECHRLL |
| 30819 | SWCECHRLV |
| 30820 | SWCECHRMF |
| 30821 | SWCECHRSF |
| 30822 | SWCECHRVF |
| 30823 | SWCGCHRLF |
| 30824 | SWCVCHRLF |
| 30825 | SWNELKRNQ |
| 30826 | SWSWCEFNQ |
| 30827 | SYTHLKLNN |
| 30828 | SYTPWKLNN |
| 30829 | TAWDLVGML |
| 30830 | TAWRKIKKE |
| 30831 | TCKWVGREN |
| 30832 | TCMFRVYDN |
| 30833 | TCPNVWWHK |
| 30834 | TCPNVWWHL |
| 30835 | TCPNVWWRM |
| 30836 | TCQWFGREN |
| 30837 | TDWPKIKKE |
| 30838 | TDWRKFKKF |
| 30839 | TDWRKLKKF |
| 30840 | TDWRKMKKF |
| 30841 | TDWRKVKKE |
| 30842 | TDWRRIKKF |
| 30843 | TEVKGWESD |
| 30844 | TFMDYHDMV |
| 30845 | TGEHNTFKD |
| 30846 | THQGDEHDA |
| 30847 | TISDIPGEP |
| 30848 | TISDIPGKP |
| 30849 | TLDECCRRG |
| 30850 | TLPCYQRYT |
| 30851 | TMPCYQRYT |
| 30852 | TNVEYFDAW |
| 30853 | TNWREMNAR |
| 30854 | TNWRKIKKF |
| 30855 | TPRPPRSGR |
| 30856 | TPRPSRSAR |
| 30857 | TPRTPRSAR |
| 30858 | TRSGAQAMM |
| 30859 | TSGTCMPIK |
| 30860 | TWMVVHRNN |
| 30861 | TYQWVGREN |
| 30862 | VAEMHWMVN |
| 30863 | VAIGFHWHA |
| 30864 | VAWAVSYVC |
| 30865 | VAWGVSYVG |
| 30866 | VCDIDAYSN |
| 30867 | VCEMGPYDG |
| 30868 | VCEMGPYNG |
| 30869 | VCEMGPYRG |
| 30870 | VCEMGQYHG |
| 30871 | VCERGPYHG |
| 30872 | VCQMGPYHG |
| 30873 | VCVAIMKDQ |
| 30874 | VCVAIMKGK |
| 30875 | VCVAIMQDK |
| 30876 | VCVMGPYHG |
| 30877 | VCWDTQQSI |
| 30878 | VCWMAGAQM |
| 30879 | VDKAWWNLI |
| 30880 | VDKVWWNLV |
| 30881 | VDRSYGPSG |
| 30882 | VEGDFDNHS |
| 30883 | VFVACHVNG |
| 30884 | VGDLNFRIQ |
| 30885 | VHLNADTKF |
| 30886 | VHWDAIMRW |
| 30887 | VHWNAIMRG |
| 30888 | VHWNAIMRL |
| 30889 | VHWNALMRW |
| 30890 | VHWNASMRW |
| 30891 | VHWQQCGHQ |
| 30892 | VIDRIWENW |
| 30893 | VIKGRSQDK |
| 30894 | VIKLRSQDK |
| 30895 | VIKWGSQDK |
| 30896 | VIKWRGQDK |
| 30897 | VIKWRSLDK |
| 30898 | VIKWRSRDK |
| 30899 | VIQWRSQDK |
| 30900 | VIRWRSQDK |
| 30901 | VLPCQRKRV |
| 30902 | VLWNAIMRW |
| 30903 | VMQNVWSCW |
| 30904 | VMSCHSRDH |
| 30905 | VPKNVNRDM |
| 30906 | VPKTANRDM |
| 30907 | VPKTVDRDM |
| 30908 | VPTIVNRDM |
| 30909 | VQDKCTVNL |
| 30910 | VRHWAFCDY |
| 30911 | VSVQMDRAK |
| 30912 | VTGKMDFWQ |
| 30913 | VTKNVWCSW |
| 30914 | VTKWRSQDQ |
| 30915 | VTMIMMDCH |
| 30916 | VTRDLKKEQ |
| 30917 | VVDMCRKGK |
| 30918 | VVRDLPNQY |
| 30919 | VWFGKCVNC |
| 30920 | VWLKSLDRM |
| 30921 | VWPKGMREM |
| 30922 | VWSCVHTDV |
| 30923 | WDVVAADGP |
| 30924 | WDVVATDVP |
| 30925 | WERAWLFGG |
| 30926 | WERFWHEYW |
| 30927 | WHGRLMITF |
| 30928 | WHQENFVFR |
| 30929 | WKDPFNRKI |
| 30930 | WLANGWFRE |
| 30931 | WLANSWFRG |
| 30932 | WLDNSWFRE |
| 30933 | WLPNSWFRE |
| 30934 | WLSNSWFRE |
| 30935 | WMCRNHHFD |
| 30936 | WMCRNHPFN |
| 30937 | WMCRNHPVD |
| 30938 | WMCRSHPFD |
| 30939 | WRCLCARID |
| 30940 | WRCMCARIA |
| 30941 | WRCMCARLD |
| 30942 | WRCMCARMD |
| 30943 | WRCMCARTD |
| 30944 | WRCMCARVD |
| 30945 | WRCMCSRID |
| 30946 | WRCMCTRID |
| 30947 | WRCWYAPLT |
| 30948 | WRELSNTGY |
| 30949 | WREWSHTGY |
| 30950 | WREWSNAGY |
| 30951 | WREWSNTAY |
| 30952 | WREWSNTCY |
| 30953 | WREWSNTVY |
| 30954 | WRGWSNTGY |
| 30955 | WRQWSNTGY |
| 30956 | WRRFASGWE |
| 30957 | WRRFASWLE |
| 30958 | WRRFSSWWE |
| 30959 | WRRFVSWWE |
| 30960 | WRTADEGDA |
| 30961 | WRTADESDT |
| 30962 | WRTAHESDA |
| 30963 | WRTGDESDA |
| 30964 | WTETTVRWP |
| 30965 | WTQTTVRWP |
| 30966 | WVANSWFRE |
| 30967 | WVCRNHPFD |
| 30968 | WYGHLNAMC |
| 30969 | WYSWRVRNR |
| 30970 | YARGIWDIH |
| 30971 | YARGIWDVH |
| 30972 | YARGTWDFH |
| 30973 | YCSRHFCEV |
| 30974 | YDRQWDFIA |
| 30975 | YEVHSFLSG |
| 30976 | YHDLCFAWY |
| 30977 | YHDLFFDWY |
| 30978 | YHDLFFGWY |
| 30979 | YKREIENCH |
| 30980 | YMGIASPWH |
| 30981 | YMWWEEGTL |
| 30982 | YMWWQAGTL |
| 30983 | YRQQVNCDA |
| 30984 | YRRLQSNTI |
| 30985 | YRRWESNTT |
| 30986 | YRRWQSNTI |
| 30987 | YRRWQSNTS |
| 30988 | YVKFNVNIN |
| 30989 | YVKFSVDIN |
| 30990 | YVKISVNIN |

### Example 40

### AAV5 Variants with Skin Tissue Tropism as Identified by Machine Learning

[0990] This example describes preferred properties of engineered AAV5 variants that display skin tissue tropism as identified by machine learning methods. The same bioinformatics pre-process, machine learning methods, and analyses as described in EXAMPLE 19 and FIGS. 19-FIG. 22 were carried out to identify preferred properties of engineered AAV5 variants that display skin tissue tropism.

[0991] Favored biophysical properties and favored amino acid residues at each position in the 581 to 589 region of an AAV5 VP capsid polypeptide, which are associated with a higher probability of skin tissue tropism are described below. Any of the below machine learning-derived positional amino acid preferences described in TABLE 64 can be present alone or in combination with each other or in combination with any of the amino acid preferences observed and described in EXAMPLE 17, TABLE 33. Listed below in TABLE 64 are a summary of positional features shared between the top important features for skin tropism extracted from the ML models.

TABLE 64
Machine Learning-Derived Skin Tissue Tropism Rules

Low surface accessibility at Xaa1
Xaa1 is selected from C
Low volume at Xaa1
Xaa1 is selected from C
Low mutability at Xaa1
Xaa1 is selected from C
High surface accessibility at Xaa2
Xaa2 is selected from R or K
High average flexibility at Xaa2
Xaa2 is selected from K, I, or N
Low mutability at Xaa2
Xaa2 is selected from P or K
High hydropathy at Xaa3
Xaa3 is selected from I or V
Low mutability at Xaa4
Xaa4 is selected from L, F, or Y
Low average flexibility at Xaa4
Xaa4 is selected from W, H, F, or M
High average flexibility at Xaa5
Xaa5 is selected from G, R, K, I, or N
High average flexibility at Xaa6
Xaa6 is selected from G, R, K, I, or N
High surface accessibility at Xaa8
Xaa8 is selected from M, G, or F
Low average flexibility at Xaa8
Xaa8 is selected from H, F, M, or W
Low mutability at Xaa8
Xaa8 is selected from L, F, or Y
High average flexibility at Xaa9
Xaa9 is selected from D, E, R, K, P, or G
High mutability at Xaa9
Xaa9 is selected from D, E, R, V, A, or H

[0992] TABLE 65 below provides sequences of the 581 to 589 region for variant AAV VP1 capsid poly peptides that exhibited skin tissue tropism and comport to one or more of the rules provided in TABLE 64. The present disclosure, thus, provides for rAAVs composed of engineered AAV5 VP1 capsid polypeptides having a SEQ ID NO: 2, wherein the Xaa1 to Xaa9 region is any one of SEQ ID NO: 32991-SEQ ID NO: 33990, as disclosed in TABLE 65. Also encompassed herein are rAAVs composed of engineered AAV5 VP2 capsid polypeptides and engineered AAV5 VP3 capsid polypeptides having the sequences disclosed in the below table at the regions in AAV5 VP2 (amin acid residues 445 to 453) and AAV5 VP3 (amino acid residues 389-397) corresponding to the amino acids in the AAV5 VP1 581 to 589 region.

TABLE 65
Sequences of the 581 to 589 Region in AAV5 VP1
Capsid Polypeptide that Drive Skin
Tissue Tropism

| SEQ | |
|---|---|
| ID | 581-589 |
| NO | Sequence |
| 32991 | AADAETPWF |
| 32992 | AADPRADCP |
| 32993 | AADPRGDCP |
| 32994 | AADPRIDCP |
| 32995 | AADPRVDCA |
| 32996 | AADPRVDCL |
| 32997 | AADPRVDCR |
| 32998 | AADPRVECP |
| 32999 | AADPTKSWC |
| 33000 | AADSETPWY |
| 33001 | AASPYITYR |
| 33002 | AEHCYRHKH |
| 33003 | AEPFPCDWS |
| 33004 | AFFYMDKLS |
| 33005 | AIVCRVNYP |
| 33006 | AKRDMDPAQ |
| 33007 | AKRDMDPAS |
| 33008 | AKRNMDPAP |
| 33009 | ANETHDNFH |
| 33010 | ANVGCIMIL |
| 33011 | ASARYIDFT |
| 33012 | ASWCSDERC |
| 33013 | ATAGCIMIL |
| 33014 | ATDPRVDCP |
| 33015 | ATVGFIMIL |
| 33016 | AVATRAMYY |
| 33017 | AVDPRVDCP |
| 33018 | CAFQCYRSP |
| 33019 | CAFVQQNFQ |
| 33020 | CAGMQATGD |
| 33021 | CAHHLNQTI |
| 33022 | CAIFNTVDQ |
| 33023 | CAIHTQSHS |
| 33024 | CAIMCSAGP |
| 33025 | CAIMFSAGQ |
| 33026 | CAIMFSAGT |
| 33027 | CAIMLKHMT |
| 33028 | CAIMLQHMA |
| 33029 | CAIMLQHMI |
| 33030 | CALHTRSHS |
| 33031 | CALMFSAGP |
| 33032 | CALPVRVAM |
| 33033 | CALPYAGSR |
| 33034 | CALSMYSHE |
| 33035 | CANHLNKTI |
| 33036 | CANHLNQTM |
| 33037 | CANHLNRTI |
| 33038 | CANHLSQTI |
| 33039 | CANHVNQTI |
| 33040 | CAPISAAPV |
| 33041 | CARLIDWCC |
| 33042 | CASMFSAGP |
| 33043 | CATHLNQTI |
| 33044 | CATVKMWHT |
| 33045 | CAVMFSAGP |
| 33046 | CAVMKFSEH |
| 33047 | CAVYFAKCA |
| 33048 | CAVYFGKCV |
| 33049 | CAVYFGRCA |
| 33050 | CAVYYGKCA |
| 33051 | CAYFKRHPD |
| 33052 | CAYFSMMDR |
| 33053 | CAYHLNQTI |
| 33054 | CCLYYVNVE |
| 33055 | CCTIKQMDI |
| 33056 | CCVWEFNYP |
| 33057 | CDHQFIDQA |
| 33058 | CEHFKRHPD |
| 33059 | CERLTQNVD |
| 33060 | CEYFKRDPD |
| 33061 | CEYFKRHPA |
| 33062 | CEYFKRHPG |
| 33063 | CEYFKRHTD |
| 33064 | CEYFKRRPD |
| 33065 | CEYFKRYPD |
| 33066 | CEYIKRHPD |
| 33067 | CFHPYHQAH |
| 33068 | CFHQYNQAH |
| 33069 | CFLWEFNYP |
| 33070 | CFMALSFHW |
| 33071 | CFMGLSTHL |
| 33072 | CFMVLSFHW |
| 33073 | CFPVYKDWS |
| 33074 | CFVGLSFHW |
| 33075 | CFVLEFNYP |
| 33076 | CFVWAFNYP |
| 33077 | CFVWEFDYP |
| 33078 | CFVWEFNDP |
| 33079 | CFVWEFNHP |
| 33080 | CFVWEFNSP |
| 33081 | CFVWEFSYP |
| 33082 | CFVWGFNYP |
| 33083 | CFVWGINYP |
| 33084 | CFVWQFNYP |
| 33085 | CFVWVFNYP |
| 33086 | CFYQYHQAH |
| 33087 | CHAPSIMGP |
| 33088 | CHCHIRHTG |
| 33089 | CHFMFNAGR |
| 33090 | CHFMIHAGR |
| 33091 | CHFMINAAR |
| 33092 | CHFMINACR |
| 33093 | CHFMINAGH |
| 33094 | CHFMINDGR |
| 33095 | CHFMINSGR |
| 33096 | CHFMINTGR |
| 33097 | CHFMINVGR |
| 33098 | CHFMLNAGR |
| 33099 | CHFMSNAGR |
| 33100 | CHFMTNAGR |
| 33101 | CHFMVNAGR |
| 33102 | CHFVINAGR |
| 33103 | CHHATNTSQ |
| 33104 | CHHFATASE |
| 33105 | CHHFATETE |
| 33106 | CHHFATQSE |
| 33107 | CHIMINAGR |
| 33108 | CHPVYKDWS |
| 33109 | CHSMINAGR |
| 33110 | CHTIKQMDI |
| 33111 | CHVMINAGR |
| 33112 | CHYMINAGR |
| 33113 | CIKACNDHE |
| 33114 | CIKACYDRE |
| 33115 | CIKACYDYE |
| 33116 | CIKACYHHE |
| 33117 | CIKACYNHE |
| 33118 | CIKAYNVMM |
| 33119 | CIKAYYDHE |
| 33120 | CIKGCYDHE |
| 33121 | C1KPCYDHE |
| 33122 | CIKSCYDHE |
| 33123 | CIKSYNVMV |
| 33124 | CIKTYNVMM |
| 33125 | CIKYYNVMM |
| 33126 | CILHKHNFP |
| 33127 | CILHKHSSP |
| 33128 | CILHKHSVP |
| 33129 | CILHKNSFP |
| 33130 | CILQKHSFP |
| 33131 | CILYKHSFP |
| 33132 | CIMHKHSFP |
| 33133 | CIQACYDHE |
| 33134 | CIQFTKHQE |
| 33135 | CIQLSKMGP |
| 33136 | CIQLTKMGP |
| 33137 | CIRSYNVMM |
| 33138 | CITACYDHE |
| 33139 | CITMVRSQT |
| 33140 | CKAHCPGQY |
| 33141 | CKCHFDQVE |
| 33142 | CKDFHWMND |
| 33143 | CKFDITKMA |
| 33144 | CKFDMASFF |
| 33145 | CKFDMPCFF |
| 33146 | CKFDMPGFF |
| 33147 | CKFDMPSCF |
| 33148 | CKFDMPSFI |
| 33149 | CKFDMPSFV |
| 33150 | CKFDMPSFY |
| 33151 | CKFDMPSVF |
| 33152 | CKFDMPTFF |
| 33153 | CKFDMQGFF |
| 33154 | CKFDMQSFF |
| 33155 | CKFDMSSFF |
| 33156 | CKFDMTSFF |
| 33157 | CKFHMPSFF |
| 33158 | CKFNMPSFF |
| 33159 | CKFYIPSFF |
| 33160 | CKGHFDQVE |
| 33161 | CKHFHWMND |
| 33162 | CKIDMPSFF |
| 33163 | CKIHFDQVE |
| 33164 | CKNFHLMND |
| 33165 | CKNFHRMND |
| 33166 | CKNFHWMDD |
| 33167 | CKNFHMVHD |
| 33168 | CKNFHWMNE |
| 33169 | CKNFHWMNH |
| 33170 | CKNFHWMSD |
| 33171 | CKNFHWRND |
| 33172 | CKNFLWMND |
| 33173 | CKNFPWMND |
| 33174 | CKNFYWMND |
| 33175 | CKNHFDQVE |
| 33176 | CKNIHWMND |
| 33177 | CKPQINDAY |
| 33178 | CKQQINDAC |
| 33179 | CKQQINDAD |
| 33180 | CKQQINDAF |
| 33181 | CKQQINDAH |
| 33182 | CKQQINDAN |
| 33183 | CKGQINDAS |
| 33184 | CKQQINDDY |
| 33185 | CKQQINDGY |
| 33186 | CKOQINDSY |
| 33187 | CKQQINHAY |
| 33188 | CKQQLNDAY |
| 33189 | CKRQINDAY |
| 33190 | CKSFHWMND |
| 33191 | CKSHFAQVE |
| 33192 | CKSHFDKVE |
| 33193 | CKSHFNQVE |
| 33194 | CKSHIDQVE |
| 33195 | CKSHVDQVE |
| 33196 | CKTFHWMND |
| 33197 | CKTHFDQVE |
| 33198 | CKTQCPGQY |
| 33199 | CKVDMPSFF |
| 33200 | CKYDFTKMA |
| 33201 | CKYDIPKMA |
| 33202 | CKYDISKMA |
| 33203 | CKYDITKMG |
| 33204 | CKYDITMIS |
| 33205 | CKYDITKMT |
| 33206 | CKYDITKMV |
| 33207 | CKYDITMMA |
| 33208 | CKYDITQMA |
| 33209 | CKYDLTKMA |
| 33210 | CKYDMPSFF |
| 33211 | CKYDNTKMA |
| 33212 | CKYDTTKMA |
| 33213 | CKYDVTKMA |
| 33214 | CKYFHWMND |
| 33215 | CLELRTQYA |
| 33216 | CLELVKAYE |
| 33217 | CLELVKDYE |
| 33218 | CMFHNHKGF |
| 33219 | CMFQCYRSP |
| 33220 | CMFVQQNFQ |
| 33221 | CMHLSCDWA |
| 33222 | CMHLVNMNS |
| 33223 | CMKACYDHE |
| 33224 | CMKFIRVGS |
| 33225 | CMPFIRVGS |
| 33226 | CMQFIRAGS |
| 33227 | CMQFIRIGS |
| 33228 | CMQFIRLGS |
| 33229 | CMQFIRVAS |
| 33230 | CMQFIRVGG |
| 33231 | CMQFIRVGN |
| 33232 | CMQFLRVGS |
| 33233 | CMQFNRVGS |
| 33234 | CMQFSRVGS |
| 33235 | CMQFTRVGS |
| 33236 | CMQFVRVGS |
| 33237 | CMQVIRVGS |
| 33238 | CMQYIRVGS |
| 33239 | CMRFIRVGS |
| 33240 | CMSWLTNQE |
| 33241 | CMVHNHKGS |
| 33242 | CMVHNHQGF |
| 33243 | CMYWLNNQE |
| 33244 | CMYWLTNKE |
| 33245 | CNCNLPYAI |
| 33246 | CNCPIRHTG |
| 33247 | CNCQIRHTG |
| 33248 | CNFMINAGR |
| 33249 | CNFQTNVHM |
| 33250 | CNFQTSVHL |
| 33251 | CNHKFIDQA |
| 33252 | CNHKVNSWI |
| 33253 | CNHPFIDQA |
| 33254 | CNHQFIDQG |
| 33255 | CNHQFIDQS |
| 33256 | CNHQFIDQT |
| 33257 | CNHQFIDQV |
| 33258 | CNHQFLDQA |
| 33259 | CNPQFIDQA |
| 33260 | CNYQTNVHL |
| 33261 | CPKPFLIKE |
| 33262 | CPKPVLIQE |
| 33263 | CQELRTQHA |
| 33264 | CQELRTQYT |
| 33265 | CQEVHAHMS |
| 33266 | CQEVYAHMT |
| 33267 | CQKWRSIWK |
| 33268 | CQQVYAHMS |
| 33269 | CQSHFDQVE |
| 33270 | CRAAHPVCA |
| 33271 | CRAAHSICA |
| 33272 | CRAAYSVCA |
| 33273 | CRATHSVCA |
| 33274 | CRAVHSVCA |
| 33275 | CRFMINAGR |
| 33276 | CRTAHSVCA |
| 33277 | CRVAHSVCA |
| 33278 | CSAMVRSQT |
| 33279 | CSGCHMKMP |
| 33280 | CSGCYMKMS |
| 33281 | CSHPVHDNE |
| 33282 | CHIAKHSFP |
| 33283 | CSLPYAWSR |
| 33284 | CSMIQNSFP |
| 33285 | CSTMVRSQA |
| 33286 | CSVCYMKMP |
| 33287 | CSVWEFNYP |
| 33288 | CTAMLQRKG |
| 33289 | CTAVKMWHT |
| 33290 | CTCGYNRGD |
| 33291 | CTCHIRHTG |
| 33292 | CTCNLPSAI |
| 33293 | CTCNVPYAI |
| 33294 | CTCWYNRGE |
| 33295 | CTEVLQRKG |
| 33296 | CTGCYMKMP |
| 33297 | CTGIQATGD |
| 33298 | CTGLLMHKE |
| 33299 | CTGQLMHEE |
| 33300 | CTGQLMHQE |
| 33301 | CTGQLMRKE |
| 33302 | CTGWYNRGD |
| 33303 | CTHAVHDNE |
| 33304 | CTHGFLTAP |
| 33305 | CTHGFLTSP |
| 33306 | CTHGFLTVP |
| 33307 | CTHGVLTGP |
| 33308 | CTHKVNTWI |
| 33309 | CTHPVHDHE |
| 33310 | CTHPVNDNE |
| 33311 | CTHQFIDQA |
| 33312 | CTHQVHDNE |
| 33313 | CTHTVHDNE |
| 33314 | CTHVFLTGP |
| 33315 | CTIFHTVDQ |
| 33316 | CTIFNNVDQ |
| 33317 | CTIFNTVDK |
| 33318 | CTIFTTVDQ |
| 33319 | CTIMFSAGP |
| 33320 | CTIRANLHF |
| 33321 | CTIYRNLLS |
| 33322 | CTKACYDHE |
| 33323 | CTKMLQRKG |
| 33324 | CTKSYNVMM |
| 33325 | CTLKVNSWI |
| 33326 | CTLMHIHTR |
| 33327 | CTLMHSHAR |
| 33328 | CTLMHSHNR |
| 33329 | CTLMHSHTI |
| 33330 | CTLMLSHTR |
| 33331 | CTMLANHDQ |
| 33332 | CTMLANHHQ |
| 33333 | CTMLANHYK |
| 33334 | CTMLANHYP |
| 33335 | CTMLANHYR |
| 33336 | CTMLANNYQ |
| 33337 | CTMLANYYQ |
| 33338 | CTMMANHYQ |
| 33339 | CTMVANHYQ |
| 33340 | CTMWANHYQ |
| 33341 | CTNFHWMND |
| 33342 | CTNVKMWHT |
| 33343 | CTNYHLKAG |
| 33344 | CTNYHVKAV |
| 33345 | CTPVKMWHT |
| 33346 | CTQFIKHQE |
| 33347 | CTQFPKHQE |
| 33348 | CTQFTQHQE |
| 33349 | CTQFTTHQE |
| 33350 | CIQLNKMGP |
| 33351 | CTTAWQGTW |
| 33352 | CTTFKMWHT |
| 33353 | CTTGWQGAW |
| 33354 | CTTVKMLHT |
| 33355 | CTTVKMWHA |
| 33356 | CTIVKMWHI |
| 33357 | CTTVKMWNT |
| 33358 | CTTVQMWHT |
| 33359 | CTTYRNLMS |
| 33360 | CTTYRNLPS |
| 33361 | CTTYRNVLS |
| 33362 | CTVFNTVDQ |
| 33363 | CTVLANHYQ |
| 33364 | CTYFSMMDP |
| 33365 | CTYFSMTDR |
| 33366 | CTYKVNSWI |
| 33367 | CTYVSMMDR |
| 33368 | CVAMKFSEH |
| 33369 | CVEPYTDHQ |
| 33370 | CVFQCNRSP |
| 33371 | CVFQCYGSP |
| 33372 | CVFQCYRGP |
| 33373 | CVFQCYRNP |
| 33374 | CVFQCYRTP |
| 33375 | CVFQYYRSP |
| 33376 | CVFVPQNFQ |
| 33377 | CVFVQENFQ |
| 33378 | CVFVQQHFQ |
| 33379 | CVFVQQSFQ |
| 33380 | CVRIQOTFQ |
| 33381 | CVFVRQNFQ |
| 33382 | CVGMKFSEH |
| 33383 | CVHLVHWQW |
| 33384 | CVHQYHQAH |
| 33385 | CVLMKFSEH |
| 33386 | CVLVQQNFP |
| 33387 | CVMGLSFHW |
| 33388 | CVRMIDWCC |
| 33389 | CVSISAAPV |
| 33390 | CVVMKFNEH |
| 33391 | CVVMKFSED |
| 33392 | CVVMKFSER |
| 33393 | CVVMKFSKH |
| 33394 | CVVMKFSVH |
| 33395 | CVVMKFTEH |
| 33396 | CVVMKYSEH |
| 33397 | CVVMTFSEH |
| 33398 | CVVVQQNFQ |
| 33399 | CVVWEFNYP |
| 33400 | CVYQCYRSP |
| 33401 | CVYWLTNQE |
| 33402 | CWAVTSMGS |
| 33403 | CWMPQQVAA |
| 33404 | CWVVTSMSS |
| 33405 | CYAIKQMDI |
| 33406 | CYHTTNTSQ |
| 33407 | CYHVYKDWS |
| 33408 | CYMGLSFHW |
| 33109 | CYPFYKDWS |
| 33410 | CYPLYKDWS |
| 33411 | CYPVSKDWS |
| 33412 | CYPVYKAWS |
| 33413 | CYPVYKDWT |
| 33414 | CYPVYKNWS |
| 33415 | CYPVYQDWA |
| 33416 | CYPVYTDWS |
| 33417 | CYSVYKDWS |
| 33418 | CYTIKHMDI |
| 33419 | CYTIKKMDI |
| 33420 | CYTIKQMAI |
| 33421 | CYTIKQMDL |
| 33422 | CYTIKQMDM |
| 33423 | CYTIKQMDS |
| 33424 | CYTIKQMGI |
| 33425 | CYTIKQMHI |
| 33426 | CYTIKQMNI |
| 33427 | CYTIKQVDI |
| 33428 | CYTMKQMDI |
| 33429 | CYTVYKDWS |
| 33430 | DEPCPCDWS |
| 33431 | DEPFPCDWA |
| 33432 | DEPFPCDWT |
| 33433 | DESFPCDWS |
| 33434 | DFVRTNLGV |
| 33435 | DHANQRVDR |
| 33436 | DIFERSMMF |
| 33437 | DKAGYGCHE |
| 33438 | DKEDPQQWL |
| 33439 | DKEEPEQWL |
| 33440 | DKGGNGCHE |
| 33441 | DKGGYGCNE |
| 33442 | DKGGYGGHE |
| 33443 | DKGGYSCHE |
| 33414 | DKSEESRQE |
| 33445 | DKSPWGANH |
| 33446 | DKVGYGCHE |
| 33447 | DQDGRCYKG |
| 33448 | DQDGRCYKQ |
| 33449 | DSEPSRGDH |
| 33450 | DSQPSRGDY |
| 33451 | DYAHQRVDR |
| 33452 | DYANERVDR |
| 33453 | DYANKRVDR |
| 33454 | DYANQRGDR |
| 33455 | DYATQRVDR |
| 33456 | DYCRRTFHH |
| 33457 | DYQPCHVHM |
| 33458 | DYSNQRVDR |
| 33459 | DYTNQRVDR |
| 33460 | EDESRHISW |
| 33461 | EDEYRHMSW |
| 33462 | EDKSRHMSW |
| 33463 | ERITRKAAD |
| 33464 | EFVTRKAAT |
| 33465 | EGEDRQAFW |
| 33466 | EHCNHDQGG |
| 33467 | EIFERSMMY |
| 33468 | EKAPWGANH |
| 33469 | ESARYIDFA |
| 33470 | ESARYLDFT |
| 33471 | FAEPYTDHQ |
| 33472 | FAERTTDHR |
| 33473 | FAQRATDHR |
| 33474 | FAQRNTDHR |
| 33475 | FAQRTTHHR |
| 33476 | FAQRTTNHR |
| 33477 | FFGTPYHMS |
| 33478 | FGHWAQDAS |
| 33479 | FGQLIIKHR |
| 33480 | FGQRTIDHR |
| 33481 | FHDRHFTFT |
| 33482 | FHDRPFNFT |
| 33483 | FHDRPFTFA |
| 33484 | F1CLIKSAS |
| 33485 | FICQIKSAA |
| 33486 | FKCAHDPTG |
| 33487 | FKMQMOYDS |
| 33488 | FKVQMQYDN |
| 33489 | FRAGMIVSC |
| 33490 | FRDAMIVSC |
| 33491 | FRDGMIFSC |
| 33492 | FRDGMTVSC |
| 33493 | FRDRPFTFT |
| 33494 | FRHGMIVSC |
| 33495 | FRNGMIVSC |
| 33496 | FTQQRCAQC |
| 33497 | FTQQRCGQC |
| 33498 | FTQRTTDHR |
| 33499 | FTRQRCVQC |
| 33500 | FVEPYTDHR |
| 33501 | FVEPYTHHQ |
| 33502 | FVQPYTDHQ |
| 33503 | FYWCCNREC |
| 33504 | FYWCYTREC |
| 33505 | FYWFCTREC |
| 33506 | GAAVIRKMQ |
| 33507 | GFAVIRKMQ |
| 33508 | GGWIMRSKR |
| 33509 | GIAVIRKMQ |
| 33510 | GILPSVKFQ |
| 33511 | GILPYGKFQ |
| 33512 | GILPYVKVQ |
| 33513 | GKCGFDVAA |
| 33514 | GKEDMPSFF |
| 33515 | GLAVIRKMQ |
| 33516 | GLEHCRPGT |
| 33517 | GLEWHTKNW |
| 33518 | GLQWHTKDW |
| 33519 | GNETSDNFH |
| 33520 | GSQWLNDSF |
| 33521 | GVAAIRKMQ |
| 33522 | GVAGIRKMQ |
| 33523 | GVAIIRKMQ |
| 33524 | GVALIRKMQ |
| 33525 | GVAVFRKMQ |
| 33526 | GVAV1RKME |
| 33527 | GVAVIRKMR |
| 33528 | GVEWHTKDW |
| 33529 | GVFPNMFAH |
| 33530 | GVFPNMFSP |
| 33531 | GVTVIRKMQ |
| 33532 | GVVVIRKMQ |
| 33533 | GVWIVRSKR |
| 33534 | GYANQRVDR |
| 33535 | HCCEKNGDL |
| 33536 | HCCFKNVDM |
| 33537 | HCCFKSGDM |
| 33538 | HCCFKTGDM |
| 33539 | HCCFKYGDM |
| 33540 | HCCERNGDM |
| 33541 | HKVNLKGDE |
| 33542 | HKVTIFKDR |
| 33543 | HQLEFDFVG |
| 33544 | HQMEFDFVG |
| 33545 | HRVT1FKDR |
| 33546 | HYCRSGDVQ |
| 33547 | IAAQIDDRE |
| 33548 | IAAQSDDRQ |
| 33549 | IAARSDDRE |
| 33550 | IADQSDDRE |
| 33551 | IAVCVIRDN |
| 33552 | ICARWHCGP |
| 33553 | ICLLITKTE |
| 33554 | ICLRWHCGP |
| 33555 | ICVRWHCGS |
| 33556 | ICVRWHCGT |
| 33557 | ICWLETKTE |
| 33558 | ICWLIAKTE |
| 33559 | ICWLIKKTE |
| 33560 | ICWLIPKTE |
| 33561 | ICWLISKTE |
| 33562 | ICWLITKNE |
| 33563 | ICWILTKTG |
| 33564 | ICWLITKTQ |
| 33565 | ICWSITKTE |
| 33566 | ICWWITKTE |
| 33567 | ISACVIRDN |
| 33568 | ISCRTQSDC |
| 33569 | ISVCVIRDT |
| 33570 | IVQQIRDFH |
| 33571 | IWECPRAGS |
| 33572 | IWECPRLGS |
| 33573 | KADRFMVDQ |
| 33574 | KAEHEEMWN |
| 33575 | KAEYFDASA |
| 33576 | KCAFNGIDE |
| 33577 | KCDYRNMHF |
| 33578 | KELLCSDDA |
| 33579 | KGDRFMVDP |
| 33580 | KGKPWGHHN |
| 33581 | KHCHSMQFG |
| 33582 | KHCRSMQFE |
| 33583 | KHCYSMQFE |
| 33584 | KIVCRVNYP |
| 33585 | KKLNIQKQS |
| 33586 | KLCFKEDAF |
| 33587 | KMCSSAKSY |
| 33588 | KMCTLTKAD |
| 33589 | KMFSSAKSY |
| 33590 | KMYPSAKSY |
| 33591 | KMYSSVKSY |
| 33592 | KQCHSMQFE |
| 33593 | KSAMPMNDD |
| 33594 | KSARCTLHM |
| 33595 | KSCLYFDAC |
| 33596 | KSCLYFDAF |
| 33597 | KSCLYFDSY |
| 33598 | KSSWTDSFG |
| 33599 | KSVRCKLHM |
| 33600 | KVCFKEDAI |
| 33601 | KVCFKEDGF |
| 33602 | KVCFKEDPF |
| 33603 | KVCFKEDSF |
| 33604 | KVCYKEDAF |
| 33605 | KWCLSIDYR |
| 33606 | KWELSIDYP |
| 33607 | KWELSIDYS |
| 33608 | KWFLSMDYR |
| 33609 | KWEPSIDYR |
| 33610 | KWFVSIDYR |
| 33611 | KWVLSIDYR |
| 33612 | KYARCKLHM |
| 33613 | LAAQSDDRE |
| 33614 | LAARIGEVK |
| 33615 | LAARIGKVE |
| 33616 | LAARSGEVE |
| 33617 | LCVRWHCGP |
| 33618 | LCWLITKTE |
| 33619 | LGIRNMELR |
| 33620 | LKHPAWKEE |
| 33621 | LKHPIWKEE |
| 33622 | LKHPNWKEE |
| 33623 | LKHPPWKEE |
| 33624 | LKHPSWKEE |
| 33625 | LKHPTWREE |
| 33626 | LKHYTWKEE |
| 33627 | LKLPTWKEE |
| 33628 | LKPPTWKEE |
| 33629 | MAANCEVFG |
| 33630 | MANENRGIR |
| 33631 | MANENRGVH |
| 33632 | MANENRVIH |
| 33633 | MASENRGIH |
| 33634 | MATPERQMP |
| 33635 | MAVNCEVFA |
| 33636 | MCIRSGFVV |
| 33637 | MCIRSGIIV |
| 33638 | MCLRSGFIV |
| 33639 | MCVRSGFIV |
| 33640 | MCWLITKTE |
| 33641 | MEDRLAHYY |
| 33642 | MEDRVAHYH |
| 33643 | MKHPTWKEE |
| 33644 | MKIPNIQTI |
| 33645 | MKMPRWGMP |
| 33646 | MKMTRWGML |
| 33647 | MKMTRWGMQ |
| 33648 | MKMTRWGMS |
| 33649 | MKTPTIQTI |
| 33650 | MKVTRWGMP |
| 33651 | MQNACFKNP |
| 33652 | MSVCVIRDN |
| 33653 | MVAHNRLAN |
| 33654 | MVANCEVFA |
| 33655 | MVEHNRLAD |
| 33656 | MVEHNRLAH |
| 33657 | MVEHNRLDN |
| 33658 | MVEHNRLGN |
| 33659 | MVEHNRVAN |
| 33660 | MVVYREHMG |
| 33661 | MVVYRENMA |
| 33662 | MVVYRETMG |
| 33663 | MYAERNADM |
| 33664 | MYVWRNDFA |
| 33665 | MYVVANDGA |
| 33666 | NAIRIFLFG |
| 33667 | NCCFKNGDM |
| 33668 | NCIHNWKHA |
| 33669 | NCIHNWQHT |
| 33670 | NFFYMDKLS |
| 33671 | NFQHVRMLE |
| 33672 | NEVETLKRI |
| 33673 | NGIRIFLFA |
| 33674 | NGIRIFLFV |
| 33675 | NGIRNFLFG |
| 33676 | NGIRSFLFG |
| 33677 | NGLRIFLFG |
| 33678 | NGVRIFLFG |
| 33679 | NKCAHDPTG |
| 33680 | NKCGFDVAA |
| 33681 | NSCRRTFHH |
| 33682 | NYANQRVDR |
| 33683 | NYCRRTFHL |
| 33684 | NYCRRTFHP |
| 33685 | NYCRRTFHQ |
| 33686 | NYCRRTFHR |
| 33687 | NYCRRTFHY |
| 33688 | NYCRRTFYH |
| 33689 | PANHARNPE |
| 33690 | PANHARNPQ |
| 33691 | PANHARNPR |
| 33692 | PANHARTPK |
| 33693 | PVCPTRYAD |
| 33694 | PVNHARNPK |
| 33695 | QAESRDVLD |
| 33696 | QAKSRDGLD |
| 33697 | QAKSRDVLA |
| 33698 | QAKSRDVLN |
| 33699 | QAKSRDVMD |
| 33700 | QCAYRNMHF |
| 33701 | QCCFKNGDM |
| 33702 | QCDYRDMHF |
| 33703 | QCDYRNMDF |
| 33704 | QCDYRNMNF |
| 33705 | QCHYRNMHF |
| 33706 | QCNYRNMHF |
| 33707 | QCVYRNMHF |
| 33708 | QFDYRNMHF |
| 33709 | QGGRILTSA |
| 33710 | QGKSRDVLD |
| 33711 | QGNDAIVWQ |
| 33712 | QHCNHDQGV |
| 33713 | QKIPVNDHQ |
| 33714 | QKLDIQKQS |
| 33715 | QKLKIQKQS |
| 33716 | QKLNIKKQS |
| 33717 | QKLNIQKQP |
| 33718 | QKLNMQKQS |
| 33719 | QKLNVQKQS |
| 33720 | QKLPVNDHQ |
| 33721 | QKVHVNDHQ |
| 33722 | QKVNIQKQS |
| 33723 | QKVPLNDHQ |
| 33724 | QKVPVSDHQ |
| 33725 | QKVPVTDHQ |
| 33726 | QKVQVNDHQ |
| 33727 | QMCTLTKTD |
| 33728 | QQVTIFKDR |
| 33729 | QSARYIDFT |
| 33730 | QTKGRDGAC |
| 33731 | QVKSRDVLD |
| 33732 | QWTRWLIVT |
| 33733 | RACFEMKHI |
| 33734 | RADVFNHRY |
| 33735 | RAQSQWDGC |
| 33736 | RASCGISMA |
| 33737 | RAVTPCHYN |
| 33738 | RCCFKNGDM |
| 33739 | RCVQPQKEA |
| 33740 | RCVQPQKKG |
| 33741 | RDLMYTDKA |
| 33742 | RHKWRSIWK |
| 33743 | RINPDIIAP |
| 33744 | RISHDIIAP |
| 33745 | RISPDIIAL |
| 33746 | RISPDIIAS |
| 33747 | RISPDIIGP |
| 33748 | RISPDILAP |
| 33749 | RISPDTIAP |
| 33750 | RISPEIIAP |
| 33751 | RISPNIIAP |
| 33752 | RISRDIIAP |
| 33753 | RIVCRVNYP |
| 33754 | RKHGLLFMG |
| 33755 | RKHGLLFMT |
| 33756 | RKHGLLFMV |
| 33757 | RKHGMLFMA |
| 33758 | RKHPTWKEE |
| 33759 | RKLNIQKQS |
| 33760 | RLHGMGDVP |
| 33761 | RMAHNFWDA |
| 33762 | RMAHTFWNA |
| 33763 | RMAPTFWDA |
| 33764 | RMARTFWDA |
| 33765 | RMHVLVIYT |
| 33766 | RMSPDIIAP |
| 33767 | RMYSSAKSY |
| 33768 | RPCFEMKHI |
| 33769 | RQEWRSIWK |
| 33770 | RQKLRSIWK |
| 33771 | RQKWRIIWK |
| 33772 | RQKWRNIWK |
| 33773 | RQKWRSFWK |
| 33774 | RQKWRSIWE |
| 33775 | RQKWRSIWQ |
| 33776 | RQKWRSIWR |
| 33777 | RQKWRSIWT |
| 33778 | RQKWRSMWK |
| 33779 | RQKWRSVWK |
| 33780 | RQQWRSIWK |
| 33781 | RQRWRSIWK |
| 33782 | RQTWRSIWK |
| 33783 | RSATPCHYN |
| 33784 | RSCFEMKHL |
| 33785 | RSCFEMRHI |
| 33786 | RSCFVMKHI |
| 33787 | RSCYEMKHI |
| 33788 | RSMWPPSSV |
| 33789 | RSVTPCHSN |
| 33790 | RSVTPCHYS |
| 33791 | RSVTPCHYT |
| 33792 | RSVTPCHYY |
| 33793 | RTHCHAKAD |
| 33794 | RTHGNAKAD |
| 33795 | RTHGPAKAD |
| 33796 | RTSWKWEYY |
| 33797 | RVAVTNHRY |
| 33798 | RVCFKEDAF |
| 33799 | RVDATNHRY |
| 33800 | RVDVINHRF |
| 33801 | RVEPTIVAD |
| 33802 | RVESQWDGC |
| 33803 | RVQSQWHGC |
| 33804 | RWFLSIDYR |
| 33805 | SADPRVDCP |
| 33806 | SADSETPWF |
| 33807 | SCWLITKTE |
| 33808 | SEHCYRHQH |
| 33809 | SEWMIWKCR |
| 33810 | SGCFWRHTS |
| 33811 | SGCFWRNAS |
| 33812 | SGCFWRNTP |
| 33813 | SGCFWRSTS |
| 33814 | SGCFWRTTS |
| 33815 | SGIRIFLFG |
| 33816 | SHCLYWMRH |
| 33817 | SHCMYWMKH |
| 33818 | SHCVYWMKH |
| 33819 | SHDVRMHML |
| 33820 | SHFLYWMKH |
| 33821 | SIVCRVNYP |
| 33822 | SKCGFDVAD |
| 33823 | SKCGFDVAG |
| 33824 | SKCGFDVAP |
| 33825 | SKCGFDVAV |
| 33826 | SKCGFNVAA |
| 33827 | SKCSFDVAA |
| 33828 | SKRDMDPAP |
| 33829 | SLGNRNADY |
| 33830 | SLQNRNADY |
| 33831 | SLRDRNADY |
| 33832 | SMDTSDWWE |
| 33833 | SQWMIWKCQ |
| 33834 | SVCPNRYAD |
| 33835 | SVCPTRHAD |
| 33836 | SVCPTRYAE |
| 33837 | SVCPTRYAH |
| 33838 | SVCPTRYAN |
| 33839 | SVRNRNADY |
| 33840 | TAAWRTDDR |
| 33841 | TADPRVDCP |
| 33842 | TADRWFDAS |
| 33843 | TADRWGDAS |
| 33844 | TAELRTDDR |
| 33845 | TAEPKMDHE |
| 33846 | TAEWRNDDR |
| 33847 | TAEWRTDAR |
| 33848 | TAEWRTDDW |
| 33849 | TAEWRTDYR |
| 33850 | TAGWRTDDR |
| 33851 | TAKWRTDDR |
| 33852 | TCILRQSPT |
| 33853 | TCLLRQSQT |
| 33854 | TCPRKDDDM |
| 33855 | TCTRKDDDK |
| 33856 | TCTRKDDDT |
| 33857 | TCWLITKTE |
| 33858 | TFVCRVNYP |
| 33859 | TGDRFMVDQ |
| 33860 | TGGRIGDSQ |
| 33861 | TIVCRINYP |
| 33862 | TIVCRVDYP |
| 33863 | TIVCRVHYP |
| 33864 | TIVCRVNYH |
| 33865 | TIVCRVNYR |
| 33866 | TIVCRVNYS |
| 33867 | TKKKLQCES |
| 33868 | TKKKMQCEA |
| 33869 | TKKKMQCEY |
| 33870 | TKKKMQCQS |
| 33871 | TKQKMQCES |
| 33872 | TLVCRVNYP |
| 33873 | TMKLGDMDG |
| 33874 | TSEWRTDDR |
| 33875 | TVAMVMDFC |
| 33876 | TVEHNRLAN |
| 33877 | TVVCRVNYP |
| 33878 | VAAQSDDRE |
| 33879 | VAQQIRDFH |
| 33880 | VAQRTTDHR |
| 33881 | VCMHLRQGG |
| 33882 | VCMHVRQGA |
| 33883 | VCMPVRQGG |
| 33884 | VCWLITKTE |
| 33885 | VCWMITKTE |
| 33886 | VCWVITKTE |
| 33887 | VDDKHITGY |
| 33888 | VDDKNITCY |
| 33889 | VDDKYITCY |
| 33890 | VEDKHITCY |
| 33891 | VEPFPCDWS |
| 33892 | VGGDYFRSD |
| 33893 | VKILSEMMT |
| 33894 | VKLLSEMMN |
| 33895 | VKMLSEMMN |
| 33896 | VPVDNLWND |
| 33897 | VVAVIRKMQ |
| 33898 | VVCMNHCDM |
| 33899 | VVEHNRLAN |
| 33900 | VVEPYTDHQ |
| 33901 | VVQQIRDFN |
| 33902 | VVQQIRDFP |
| 33903 | VVQQIRDFR |
| 33904 | VVQQLRDFH |
| 33905 | VVQQSRDFH |
| 33906 | VWECPRVGS |
| 33907 | WAEYRKTHA |
| 33908 | WAEYRKTHH |
| 33909 | WAEYRQTHD |
| 33910 | WAIRNMELR |
| 33911 | WAKYRKTHD |
| 33912 | WEHRFPASM |
| 33913 | WFAARQHFP |
| 33914 | WFIARQHFP |
| 33915 | WFVARKHFP |
| 33916 | WFVARQHFA |
| 33917 | WFVARQHFT |
| 33918 | WFVARQNFP |
| 33919 | WFVGRQHFP |
| 33920 | WGIRNMELG |
| 33921 | WGIRNMELQ |
| 33922 | WGIRNMEPR |
| 33923 | WGIRNMGLR |
| 33924 | WGIRNMKLR |
| 33925 | WGIRNMVLR |
| 33926 | WGIRNTELR |
| 33927 | WGNRNMELR |
| 33928 | WGSRNMELR |
| 33929 | WGVRNMELR |
| 33930 | WLVCRCAWE |
| 33931 | WSAKSTKKQ |
| 33932 | WSAKTTKEQ |
| 33933 | WSIRNMELR |
| 33934 | WVVCRCDWE |
| 33935 | WVVCRCSWE |
| 33936 | WVVCRCTWE |
| 33937 | YAARFACYQ |
| 33938 | YACAIQQHL |
| 33939 | YADRFAGYQ |
| 33940 | YANLGREHN |
| 33941 | YAPDRDGCD |
| 33942 | YDEQWNDNS |
| 33943 | YDIMNISPF |
| 33944 | YDIIVMSPC |
| 33945 | YDMMTISPF |
| 33946 | YENLAREHN |
| 33947 | YFASWIRNH |
| 33948 | YFNSWIRNH |
| 33949 | YFQSMGHMW |
| 33950 | YFRAMGHMW |
| 33951 | YFTGWIRNH |
| 33952 | YGCFWRNTS |
| 33953 | YHCQNYVAS |
| 33954 | YIALRATFQ |
| 33955 | YIDKIAGWL |
| 33956 | YIGLRATFE |
| 33957 | YIGLRATFK |
| 33958 | YIGLRATFP |
| 33959 | YIGVRATFQ |
| 33960 | YINKIAGWW |
| 33961 | YIPDRDGCD |
| 33962 | YIVLRATFQ |
| 33963 | YKCAHDPNG |
| 33964 | YKCAHDPTE |
| 33965 | YKCAYDPTG |
| 33966 | YKCGHDPTG |
| 33967 | YKCPHDPTG |
| 33968 | YKCSHDPTG |
| 33969 | YKCTHDPTG |
| 33970 | YKCVHDPTG |
| 33971 | YKFDMPSFF |
| 33972 | YKGAHDPTG |
| 33973 | YKGGYGCHE |
| 33974 | YLGLRATFQ |
| 33975 | YQDGRCYKE |
| 33976 | YSGQHFRTL |
| 33977 | YTMCKANWN |
| 33978 | YVHDRDGCD |
| 33979 | YVPDRAGCD |
| 33980 | YVPDRDGCA |
| 33981 | YVPDRDGCC |
| 33982 | YVPDRDGCG |
| 33983 | YVPDRDGYD |
| 33984 | YVPDRDVCD |
| 33985 | YVPDRNGCD |
| 33986 | YVPDRVGCD |
| 33987 | YVPYRDGCD |
| 33988 | YVRDRDGCD |
| 33989 | YVTDRDGCD |
| 33990 | YYCRRTFHH |

### Example 41

### AAV5 Variants with Spinal Cord Tissue Tropism as Identified by Machine Learning

[0993] This example describes preferred properties of engineered AAV5 variants that display spinal cord tissue tropism as identified by machine learning methods. The same bioinformatics pre-process, machine learning methods, and analyses as described in EXAMPLE 19 and FIGS. 19-FIG. 22 were carried out to identify preferred properties of engineered AAV5 variants that display spinal cord tissue tropism.

[0994] Favored biophysical properties and favored amino acid residues at each position in the 581 to 589 region of an AAV5 VP capsid polypeptide, which are associated with a higher probability of spinal cord tissue tropism are described below. Any of the below machine learning-derived positional amino acid preferences described in TABLE 66 can be present alone or in combination with each other or in combination with any of the amino acid preferences observed and described in EXAMPLE 10, TABLE 19. Listed below in TABLE 66 are a summary of positional features shared between the top important features for spinal cord tropism extracted from the ML models.

TABLE 66
Machine Learning-Derived Spinal Cord Tissue Tropism Rules

High volume at Xaa1
Xaa1 is selected from F, W, or Y
Low mutability at Xaa1
Xaa1 is selected from Y, F, L, or C
High solubility at Xaa1
Xaa1 is selected from W, F, I, or L
Low average flexibility at Xaa1
Xaa1 is selected from F, M, or W
Low hydropathy at Xaa2
Xaa2 is selected from P or Y
Low hydrophilicity at Xaa3
Xaa3 is selected from Y, W, V, M, F, I, or L
High solubility at Xaa3
Xaa3 is selected from W, F, I, or L
High volume at Xaa6
Xaa6 is selected from W, R, K, M, I, or L
High mol mass at Xaa6
Xaa6 is selected from W
High mol mass at Xaa8
Xaa8 is selected from W, E, K, M, H, or Q
High volume at Xaa8
Xaa8 is selected from W, K, M, I, or L
High goldman engelman steitz at Xaa8
Xaa8 is selected from V or L
High hydropathy at Xaa9
Xaa9 is selected from V or I
High solubility at Xaa9
Xaa9 is selected from W, F, I, or L

[0995] TABLE 67 below provides sequences of the 581 to 589 region for variant AAV VP1 capsid poly peptides that exhibited spinal cord tissue tropism and comport to one or more of the rules provided in TABLE 66. The present disclosure, thus, provides for rAAVs composed of engineered AAV5 VP1 capsid polypeptides having a SEQ ID NO: 2, wherein the Xaa1 to Xaa9 region is any one of SEQ ID NO: 35438-SEQ ID NO: 36437, as disclosed in TABLE 67. Also encompassed herein are rAAVs composed of engineered AAV5 VP2 capsid polypeptides and engineered AAV5 VP3 capsid polypeptides having the sequences disclosed in the below table at the regions in AAV5 VP2 (amin acid residues 445 to 453) and AAV5 VP3 (amino acid residues 389-397) corresponding to the amino acids in the AAV5 VP1 581 to 589 region.

TABLE 67
Sequences of the 581 to 589 Region in AAV5 VP1
Capsid Polypeptide that Drive Spinal Cord
Tissue Tropism

| SEQ | |
|---|---|
| ID | 581-589 |
| NO | Sequence |
| 35438 | ACLLFLVGI |
| 35439 | ACYWLLNWF |
| 35440 | ACYWNLNWF |
| 35441 | ACYWWMNWF |
| 35442 | ADHPENFSD |
| 35443 | ADWLRRNIW |
| 35444 | AEFRPKISR |
| 35445 | AFIQQNNQD |
| 35446 | AFIQQSDQD |
| 35447 | AFIQQSNED |
| 35448 | AFIQQSTQD |
| 35449 | AFIQRSNQD |
| 35450 | AFVQQSNQD |
| 35451 | AFWYSMAFP |
| 35452 | AGDRTISMW |
| 35453 | AHFRAYIQY |
| 35454 | AHKWFCEGS |
| 35455 | AHKWVCEDS |
| 35456 | AKNVFEFHV |
| 35457 | ALFAPNGEV |
| 35458 | ALFYMEKMP |
| 35459 | AMVLFLVDI |
| 35460 | AMWIRGIWG |
| 35461 | ANDMCNYYG |
| 35462 | AQGNKTYVI |
| 35463 | AQKKCLSFG |
| 35464 | AQKWFCEDS |
| 35465 | AQQKCLSFG |
| 35466 | AQVNKTYLI |
| 35467 | AQVNKTYVI |
| 35468 | AQVIKTYVI |
| 35469 | ATMFSVIHQ |
| 35470 | ATWVHYDMY |
| 35471 | AVIQQSNQD |
| 35472 | AWFDMEKMP |
| 35473 | AWFHMEKMP |
| 35474 | AWFNMEKMP |
| 35475 | AWFYKEKMP |
| 35476 | AWFYMFEMP |
| 35477 | AWFYMFKMS |
| 35478 | AWFYMENMP |
| 35479 | AWFYMGKMP |
| 35480 | AWFYREKMP |
| 35481 | AWLQGGIYN |
| 35482 | AWSYMEKMP |
| 35483 | CAVKQECSR |
| 35484 | CCCSEIGVN |
| 35485 | CHVMSVPCA |
| 35486 | CKNWYINMH |
| 35487 | CQWTPEIFQ |
| 35488 | CTQCYGDMP |
| 35489 | CWAFFRMRD |
| 35490 | CWGEFRMRV |
| 35491 | CWTEFRMRV |
| 35492 | CWVEFRMRV |
| 35493 | CWWTPEIFQ |
| 35494 | DAKSPCDSV |
| 35495 | DAKSPCESF |
| 35496 | DAVNDLTWP |
| 35497 | DCIPDWSST |
| 35498 | DCYWWLNWF |
| 35499 | DEANKTYVI |
| 35500 | DEDNKTYVI |
| 35501 | DEVNKTYVI |
| 35502 | DFILDWSST |
| 35503 | DFIPDWSSI |
| 35504 | DFIRDWSST |
| 35505 | DFITDWSST |
| 35506 | DFVPDWSST |
| 35507 | DFWYGMAFP |
| 35508 | DFWYSMACP |
| 35509 | DFWYSMAVP |
| 35510 | DFWYSMTFP |
| 35511 | DFWYSRAFP |
| 35512 | DFWYSVAFP |
| 35513 | DFWYTMAFP |
| 35514 | DHVNKPYVI |
| 35515 | DIIPDWSST |
| 35516 | DIRIVTDGR |
| 35517 | DIWYSMAFP |
| 35518 | DKGNKTYVI |
| 35519 | DKNVFEEDV |
| 35520 | DKNVFEQHV |
| 35521 | DKNVYEEHV |
| 35522 | DNVNKTYVI |
| 35523 | DPGNKTYVI |
| 35524 | DPVNKTYVL |
| 35525 | DPVNKTYVV |
| 35526 | DPVTKTYVI |
| 35527 | DQAEVLSDH |
| 35528 | DQANKTYVI |
| 35529 | DQDNKTYVI |
| 35530 | DQDTKTYVI |
| 35531 | DQGNKTYVI |
| 35532 | DQGSKTYVI |
| 35533 | DQINKPYVI |
| 35534 | DQINKTYVI |
| 35535 | DQINKTYVS |
| 35536 | DQLNKTYVI |
| 35537 | DQVDKTYVI |
| 35538 | DQVNKNYVI |
| 35539 | DQVNKPYEI |
| 35540 | DQVNKTHVI |
| 35541 | DQVNKTNVI |
| 35542 | DQVNKTSVI |
| 35543 | DQVNKTYAI |
| 35544 | DQVNKTYEI |
| 35545 | DQVNKTYML |
| 35546 | DQVNKTYVF |
| 35547 | DQVNKTYVN |
| 35548 | DQVNKTYVV |
| 35549 | DQVNMTYVI |
| 35550 | DQVNNTYMI |
| 35551 | DQVNQTYVI |
| 35552 | DQVNRTYVE |
| 35553 | DQVSKTYVE |
| 35554 | DQVTKTYVI |
| 35555 | DQVTQTYVE |
| 35556 | DRNVFEEHV |
| 35557 | DRVNKTYLE |
| 35558 | DRVNKTYVS |
| 35559 | DVNLKITTH |
| 35560 | DVNLQEATH |
| 35561 | DVYYCPEAI |
| 35562 | DWMQGGIYH |
| 35563 | DWMQGGIYY |
| 35564 | DYAQYYRTW |
| 35565 | DYDPDIKDP |
| 35566 | DYDPDLKDQ |
| 35567 | DYGPDIKDQ |
| 35568 | ECLLFLIGI |
| 35569 | ECMLFLVGI |
| 35570 | ECVSKWIVF |
| 35571 | EDWIRRNIW |
| 35572 | EDWLRCNEW |
| 35573 | EDWLRRDIW |
| 35574 | EFIQQSNQD |
| 35575 | EHFRAYAQY |
| 35576 | EHFRAYEQY |
| 35577 | EHFRDYTQY |
| 35578 | EHFRSYTQY |
| 35579 | EHWLRRNIW |
| 35580 | EIIPQFAYF |
| 35581 | EINREVREN |
| 35582 | EINRVVRQN |
| 35583 | EISREVRQN |
| 35584 | EKELKNSTQ |
| 35585 | ELIYKFKTD |
| 35586 | ELIYKIETD |
| 35587 | ELIYKMKTD |
| 35588 | ELVNKTYVE |
| 35589 | ELVYKIKTD |
| 35590 | EMINACFQT |
| 35591 | EMKCIGAAI |
| 35592 | EMKCMGAGI |
| 35593 | EMKCTGAGI |
| 35594 | EMKWLGAGI |
| 35595 | EMKYIGAGI |
| 35596 | EMWIGGIWG |
| 35597 | EMWIRGVWG |
| 35598 | EMWVRGVWG |
| 35599 | EQEEKNSTQ |
| 35600 | EQELKDSTQ |
| 35601 | EQELKNSTL |
| 35602 | EQELKTSTQ |
| 35603 | EQEVKNSTQ |
| 35604 | EQQLKNSTQ |
| 35605 | ERFRAYTQY |
| 35606 | ETFHNTATI |
| 35607 | ETWVHYDMY |
| 35608 | EYGTKVKMD |
| 35609 | EYSTKVKMD |
| 35610 | EYVTKVKMD |
| 35611 | FAEASITRW |
| 35612 | FASAFANTD |
| 35613 | FASAFSNSD |
| 35614 | FASAFVNSD |
| 35615 | FASVFANSD |
| 35616 | FCMEWEVMD |
| 35617 | FFMAWEVMD |
| 35618 | FFMDWEVMD |
| 35619 | FFMEWEGMD |
| 35620 | FFMEWELMD |
| 35621 | FFMEWEVKD |
| 35622 | FFMEWEVRD |
| 35623 | FFMEWEVTD |
| 35624 | FFMEWEVVD |
| 35625 | FFMEWKVMD |
| 35626 | FFMEWQVMD |
| 35627 | FFYECYSNK |
| 35628 | FIIGCMLIW |
| 35629 | FIIHCMLIW |
| 35630 | FIIRAMLIW |
| 35631 | FIIRCMLIL |
| 35632 | FIIRCMLVW |
| 35633 | FIIRCMVIW |
| 35634 | FIERCVLIW |
| 35635 | FIIRCVLVW |
| 35636 | FIIRGMLIW |
| 35637 | FIIRWMLEW |
| 35638 | FILRCLLEW |
| 35639 | FILRCMLIC |
| 35640 | FILRCMLIW |
| 35641 | FIVGGLAFA |
| 35642 | FIVRCMLIW |
| 35643 | FKFISYEGD |
| 35644 | FKHWYINMH |
| 35645 | FKICFSPTV |
| 35646 | FKNGYINMH |
| 35647 | FKNHYEGGP |
| 35648 | FKNLYENMH |
| 35649 | FKNWFINMH |
| 35650 | FKNWHINMH |
| 35651 | FKNWSINMH |
| 35652 | FKNWYEHMH |
| 35653 | FKNWYINMD |
| 35654 | FKNWYINMF |
| 35655 | FKNWYINML |
| 35655 | FKNWYINMN |
| 35657 | FKNWYINMP |
| 35658 | FKNWYINMR |
| 35659 | FKNWYINMY |
| 35660 | FKNWYINRH |
| 35661 | FKNWYINTH |
| 35662 | FKNWYINVH |
| 35663 | FKNWYESMH |
| 35664 | FKNWYLHMH |
| 35665 | FKNWYNNMH |
| 35666 | FKNWYVNNM |
| 35667 | FKSWYINMH |
| 35668 | FKVGGLAFA |
| 35669 | FKYWYINMH |
| 35670 | FLIRCMLIW |
| 35671 | FMIRCMLIW |
| 35672 | FPEASLTRW |
| 35673 | FQNWYINMH |
| 35674 | FRNWYINMH |
| 35675 | FRNWYMNMH |
| 35676 | FTFGGLAFA |
| 35677 | FTIGGLAFA |
| 35678 | FTNTKKQAF |
| 35679 | FTNWYINMD |
| 35680 | FTNWYINMH |
| 35681 | FTNWYINMN |
| 35682 | FTVAGLAFA |
| 35683 | FTVGGLAFG |
| 35684 | FTVGGLAFP |
| 35685 | FTVGGLAFT |
| 35686 | FTVGGLAFV |
| 35687 | FTVGGLGFA |
| 35688 | FTVGGLSFA |
| 35689 | FTVGGLTFA |
| 35690 | FTVGGMAFA |
| 35691 | FWCHIIGEY |
| 35692 | FWCNIIGIY |
| 35693 | FWGNIIGIY |
| 35694 | FWSNFIGIY |
| 35695 | FWSNIEGFY |
| 35696 | FWSNIEGIC |
| 35697 | FWSNIIGIH |
| 35698 | FWSNIIGIN |
| 35699 | FWSNIIGLY |
| 35700 | FWSNIIGMY |
| 35701 | FWSNIIGVY |
| 35702 | FWSNIMGIY |
| 35703 | FWSNLIGIY |
| 35704 | FWSNMIGEY |
| 35705 | FWSNVEGIY |
| 35706 | FWSSIIGIY |
| 35707 | FWSTIIGIY |
| 35708 | FWTNIIGIY |
| 35709 | FYMEWEVMD |
| 35710 | GCYWWLNWF |
| 35711 | GDEYYDEMG |
| 35712 | GDHTENFSD |
| 35713 | GEFRPKISR |
| 35714 | GFIQQSNQD |
| 35715 | GHVMTVPCA |
| 35716 | GIKYKDILS |
| 35717 | GINREVRQN |
| 35718 | GKNVFEEHV |
| 35719 | GQGNKTYVI |
| 35720 | GSASRNQRD |
| 35721 | GSSPGKGWM |
| 35722 | GSSSRNQRD |
| 35723 | GTWVHYDMF |
| 35724 | GWAEFRMRV |
| 35725 | GWAEFRVRV |
| 35726 | GWSEFRMRV |
| 35727 | HPVNKTYVI |
| 35728 | HQGNKTYVI |
| 35729 | HRFQEKGSR |
| 35730 | HRFQEKGTH |
| 35731 | HRFREKGSH |
| 35732 | HILLWYGIW |
| 35733 | HTLLWYGIY |
| 35734 | HVYCCPEAI |
| 35735 | ICHCCMAWG |
| 35736 | ICHCCMVWG |
| 35737 | ICHCCMYWG |
| 35738 | ICHWCMDWG |
| 35739 | ICYCCMDWG |
| 35740 | ICYWWLNCF |
| 35741 | ICYWWLNWF |
| 35742 | IDRWWVIDV |
| 35743 | IHIGTNSYA |
| 35744 | IHTATNSYA |
| 35745 | IHTGTNSYV |
| 35746 | IIYECYSNK |
| 35747 | IKHIAAESR |
| 35748 | IKHIATETR |
| 35749 | IKHISTESR |
| 35750 | IKNWYINMH |
| 35751 | IKNWYINMP |
| 35752 | IKSQTLTDC |
| 35753 | IMFHCREMG |
| 35754 | IMVHCRQMG |
| 35755 | IMVHCRVMG |
| 35756 | IRNMFEQYT |
| 35757 | IRSHTLTYC |
| 35758 | IRSQTITDC |
| 35759 | IRSQTLTDW |
| 35760 | IRSQTLTDY |
| 35761 | IRSQTLTNC |
| 35762 | IRSQTVTDC |
| 35763 | IRSRTLTDC |
| 35764 | IRWLRLHKK |
| 35765 | ISWIIRADI |
| 35766 | ISWINRADI |
| 35767 | ISWITRADV |
| 35768 | ISWITRAGI |
| 35769 | ISWITRTDI |
| 35770 | ITSQTLTDC |
| 35771 | ITWLHYDMY |
| 35772 | IWFYMEKMP |
| 35773 | IWSNIIGIY |
| 35774 | IWYWWLNWF |
| 35775 | KAVWDPSSM |
| 35776 | KCWDCHDAG |
| 35777 | KCWDCHEGG |
| 35778 | KEDFGWKHV |
| 35779 | KESRSQTGD |
| 35780 | KEVFGWKHM |
| 35781 | KGVWDPGSM |
| 35782 | KGVWDPSST |
| 35783 | KHIGSYTQF |
| 35784 | KHNMLYHMD |
| 35785 | KHYKWGHGQ |
| 35786 | KINREVRQN |
| 35787 | KKWSCHRGH |
| 35788 | KKYQDTHTF |
| 35789 | KMWIRGIWG |
| 35790 | KRIKMPPPR |
| 35791 | KRIKMPPTK |
| 35792 | KWHAGPGVV |
| 35793 | KWHCGPGVV |
| 35794 | KWHGGPGAV |
| 35795 | KWHGGPGDV |
| 35796 | KWHGGPGFV |
| 35797 | KWHGGPGVM |
| 35798 | KWHGGQGVV |
| 35799 | KWHGGRGVV |
| 35800 | KWLGGPGVV |
| 35801 | KWLYGWPIK |
| 35802 | KWYGGPGVV |
| 35803 | KYNMMYHMD |
| 35804 | KYNMRYHMD |
| 35805 | KYNMVYHMD |
| 35806 | KYNVLYHMD |
| 35807 | KYSMLYHMD |
| 35808 | LATMSLTWW |
| 35809 | LCYWWLNWF |
| 35810 | LEKWGHMGT |
| 35811 | LKICFGPTV |
| 35812 | LKIGFSPTV |
| 35813 | LPEIYLSFC |
| 35814 | LPKRYLSFC |
| 35815 | LPQIYLSFC |
| 35816 | LPTIYLSFC |
| 35817 | LQICFSPTV |
| 35818 | LRICFSPTV |
| 35819 | LRWVRLHKK |
| 35820 | LSKIYLSFC |
| 35821 | LSSCYYTTY |
| 35822 | LSWITRADI |
| 35823 | LVFLRGQHY |
| 35824 | LWFYMEEMP |
| 35825 | LWFYMEKMP |
| 35826 | LWSNMIGIY |
| 35827 | MFRIEAVCP |
| 35828 | MKFQDTHTF |
| 35829 | MKRDAAFCA |
| 35830 | MKREAAVCA |
| 35831 | MKRETAFCP |
| 35832 | MKRETAFCS |
| 35833 | MKRETAFCT |
| 35834 | MKRETAVCA |
| 35835 | MKRETGFCA |
| 35836 | MKYKDTHTF |
| 35837 | MKYQDTHTC |
| 35838 | MKYQDTHTI |
| 35839 | MKYWDTHTF |
| 35840 | MYFFVWRFM |
| 35841 | MYIFGWRFM |
| 35842 | MYIFVWGFM |
| 35843 | MYIFVWRFT |
| 35844 | MYIFVWRIM |
| 35845 | MYIFVWRVM |
| 35846 | MYIFYWRFM |
| 35847 | MYIIVWRFM |
| 35848 | MYISVWRFM |
| 35849 | MYIVVWRFM |
| 35850 | MYIYFWRFM |
| 35851 | MYIYVWRFM |
| 35852 | MYLFVWRFM |
| 35853 | NANDVQWYD |
| 35854 | NAPDVQWYD |
| 35855 | NATDFQWYD |
| 35856 | NATDGQWHD |
| 35857 | NATDVEWYD |
| 35858 | NATDVKWYD |
| 35859 | NATDVLWYD |
| 35860 | NATDVRWYD |
| 35861 | NCDRSLAEY |
| 35862 | NCHIDRVQD |
| 35863 | NCHVDHVQD |
| 35864 | NCKNLTYYI |
| 35865 | NFIPDWSST |
| 35866 | NFWYSMAFP |
| 35867 | NIDAHERYR |
| 35868 | NKNVFEEHV |
| 35869 | NLCRHLFQC |
| 35870 | NLCRHLFQF |
| 35871 | NNYKFQQDG |
| 35872 | NNYKGQQDG |
| 35873 | NNYKLQQDG |
| 35874 | NNYKVQEDG |
| 35875 | NPAYGRGHI |
| 35876 | NPELGKCEI |
| 35877 | NPGWRYMWF |
| 35878 | NPGWRYMWW |
| 35879 | NQAYGRGHI |
| 35880 | NQVNKTYVI |
| 35881 | NRAYGRGHV |
| 35882 | NSWITRADI |
| 35883 | NSWRHICDH |
| 35884 | NVAAHERYR |
| 35885 | NVCRHLFQF |
| 35886 | NVDAHERYK |
| 35887 | NVDAPERYR |
| 35888 | NVDVHERYR |
| 35889 | NVGAHERYR |
| 35890 | NVYYCPEAI |
| 35891 | NWCKHLFQF |
| 35892 | NWCRDLFQF |
| 35893 | NWCRHLFEC |
| 35894 | NWCRHLFEF |
| 35895 | NWCRHLFKF |
| 35896 | NWCRHLFKY |
| 35897 | NWCRHLFQC |
| 35898 | NWCRHLFQI |
| 35899 | NWCRHLFQV |
| 35900 | NWCRHLFQY |
| 35901 | NWCRHLFRF |
| 35902 | NWCRHLIQF |
| 35903 | NWCRHLVQF |
| 35904 | NWCRHRFQF |
| 35905 | NWCRILFQF |
| 35906 | NWCRLLFQF |
| 35907 | NWCRNLFQF |
| 35908 | NWCRQLFQV |
| 35909 | NWCRVLFHF |
| 35910 | NWFRHLFQF |
| 35911 | NWGRHLFQF |
| 35912 | NWWRHLFQF |
| 35913 | NYAQHYRTW |
| 35914 | NYSQYYRTW |
| 35915 | PADRTISMW |
| 35916 | PDDRTISMW |
| 35917 | PGDRTISKW |
| 35918 | PGDRTITMW |
| 35919 | PGDRTLSMW |
| 35920 | PGNRTISMW |
| 35921 | PHKWFCEDS |
| 35922 | PPDIGTQFI |
| 35923 | PPHIGTEFI |
| 35924 | PPHIGTKFI |
| 35925 | PPHLGTQFI |
| 35926 | PPHMGTQFI |
| 35927 | PPHTGTQFI |
| 35928 | PPLIGTQFI |
| 35929 | PRFQEKGSH |
| 35930 | PRHIGTQFI |
| 35931 | PWFYLEKMP |
| 35932 | PWFYMEEMP |
| 35933 | QCLLFLVGI |
| 35934 | QEKWGHKHT |
| 35935 | QEKWGHMHA |
| 35936 | QEKWGHVHT |
| 35937 | QTIIGNVWV |
| 35938 | QWFYMEKMP |
| 35939 | RAHWSDIAD |
| 35940 | RAPADWACA |
| 35941 | RDGSNWLCI |
| 35942 | RDPADWACG |
| 35943 | RDPADWACS |
| 35944 | RDPADWICA |
| 35945 | RDPADWVCA |
| 35946 | RDPSDWACA |
| 35947 | RDPTDWACA |
| 35948 | RDTADWACA |
| 35949 | REDFGWKHM |
| 35950 | RHIGSYTQF |
| 35951 | RHIHRYWEC |
| 35952 | RHKWFCEAS |
| 35953 | RHPADWACA |
| 35954 | RHVHPYWEC |
| 35955 | RHVHQYWEC |
| 35956 | RHVHRFWEC |
| 35957 | RHVHRYWVC |
| 35958 | RIMHSWYND |
| 35959 | RKEQDHWDK |
| 35960 | RKVESYCIT |
| 35961 | RKWSCHRAH |
| 35962 | RKWSCHRCH |
| 35963 | RKWSCHRGL |
| 35964 | RKWSCHRGY |
| 35965 | RKWSCHRVH |
| 35966 | RKWSCNRGH |
| 35967 | RKWYCHRGH |
| 35968 | RPHIGTQFI |
| 35969 | RPVQEDGCG |
| 35970 | RQNDTHRAN |
| 35971 | RQVQRYWEC |
| 35972 | RQWSCHRGH |
| 35973 | RRFQEKGSH |
| 35974 | RRIESYCIT |
| 35975 | RRIKMPPPK |
| 35976 | RTVKEDGCG |
| 35977 | RVPADWACA |
| 35978 | RWSYMKAGK |
| 35979 | RWSYMQAGI |
| 35980 | RWSYMQTGK |
| 35981 | RWSYMQVGK |
| 35982 | RWSYMRAGK |
| 35983 | RYIFVWRLM |
| 35984 | RYNMLYHMD |
| 35985 | RYPADWACA |
| 35986 | SAAWQFGES |
| 35987 | SAAWQFGVS |
| 35988 | SDDMCNYYG |
| 35989 | SDMIKLAEI |
| 35990 | SGADHYHLK |
| 35991 | SGFYMEMMP |
| 35992 | SGFYMEQMP |
| 35993 | SGFYMERMP |
| 35994 | SHKWFCEDS |
| 35995 | SHYWPMCWS |
| 35996 | SLFYMDKMP |
| 35997 | SLFYMEKML |
| 35998 | SLFYMEKMP |
| 35999 | SLLRFQPSI |
| 36000 | SLMLFLPSI |
| 36001 | SLMRCLPSI |
| 36002 | SLMRFLASI |
| 36003 | SLMRFLHSI |
| 36004 | SLMRFLPAI |
| 36005 | SLMRFLPST |
| 36006 | SLMRFLPSV |
| 36007 | SLMRFLPYI |
| 36008 | SLMRFLRSI |
| 36009 | SLMRFLSSI |
| 36010 | SLMRFLTSI |
| 36011 | SLMRFPPSI |
| 36012 | SLMFRVPSI |
| 36013 | SLMRVLPSI |
| 36014 | SLVRFLLSI |
| 36015 | SLVRFLPSI |
| 36016 | SMHDSNFNV |
| 36017 | SMHDYNFNI |
| 36018 | SMHDYTFNV |
| 36019 | SNDKCNYYG |
| 36020 | SNDMCDYYG |
| 36021 | SNDMCNHYG |
| 36022 | SNDMCNSYG |
| 36023 | SNNMCNYYG |
| 36024 | SPYWLMRMG |
| 36025 | SQDCGRPE1 |
| 36026 | SRMRFLPSI |
| 36027 | SRMRLLPSI |
| 36028 | SSASVNHTS |
| 36029 | SSDMCNYYG |
| 36030 | SSFYMEKMP |
| 36031 | SSSPGKGWK |
| 36032 | SSWITRADI |
| 36033 | STDMCNYYG |
| 36034 | SVADHYHRK |
| 36035 | SVADHYNLK |
| 36036 | SVADYYHLK |
| 36037 | SVAHHYHLK |
| 36038 | SVARQMHSW |
| 36039 | SVMRFLPSI |
| 36040 | SVSDHYHLK |
| 36041 | SWCFMEKMP |
| 36042 | SWCRHLFEF |
| 36043 | SWCRHLFQF |
| 36044 | SWCYIEKMP |
| 36045 | SWCYMEEMP |
| 36046 | SWCYMEQMP |
| 36047 | SWCYMVKMP |
| 36048 | SWFCVEKMP |
| 35049 | SWFDMEKMP |
| 35050 | SWFFMEKMP |
| 36051 | SWFFMVKMP |
| 36052 | SWFFVEKMP |
| 36053 | SWFHMEKMP |
| 36054 | SWFHMEKMQ |
| 36055 | SWFNMEQMP |
| 36056 | SWFSKEKMP |
| 36057 | SWFSVEKMP |
| 36058 | SWFYIERMP |
| 36059 | SWFYKETMP |
| 36060 | SWFYMAQMP |
| 35051 | SWFYMDKMT |
| 35052 | SWFYMDMMP |
| 36063 | SWFYMFAMP |
| 36064 | SWFYMEDMP |
| 36065 | SWFYMEEVP |
| 36066 | SWFYMEGMP |
| 36067 | SWFYMEKIR |
| 36068 | SWFYMEKMA |
| 36069 | SWFYMEKMI |
| 36070 | SWFYMEKMR |
| 36071 | SWFYMEKMT |
| 36072 | SWFYMEKRP |
| 35073 | SWFYMEKVP |
| 35074 | SWFYMEMMP |
| 36075 | SWFYMERMP |
| 36076 | SWFYMETMP |
| 36077 | SWFYMEWMP |
| 36078 | SWFYMKKMP |
| 36079 | SWFYMQKMP |
| 36080 | SWFYMVKMP |
| 36081 | SWFYRDKMP |
| 36082 | SWFYREKLP |
| 36083 | SWFYVEEMP |
| 36084 | SWFYVEKIP |
| 36085 | SWFYVEKMP |
| 36086 | SWIYMDKMP |
| 36087 | SWIYMEMIT |
| 36088 | SWIYMEQMP |
| 36089 | SWTYMEKMP |
| 36090 | SWVCMEKMP |
| 36091 | SWVYMEKMQ |
| 36092 | SWVYMEKMS |
| 36093 | SWVYMEMMP |
| 36094 | SWVYMEQmP |
| 36095 | SWVYMKKMP |
| 36096 | SWYCMEKMP |
| 36097 | SWYYDERSN |
| 36098 | SWYYMEEMP |
| 36099 | SWYYMEKMP |
| 36100 | TAEKFICFP |
| 36101 | TCARSLAEY |
| 36102 | TCDRSLAQY |
| 36103 | TCDRSLGEY |
| 36104 | TCDRSLPEY |
| 36105 | TCDRSLTEY |
| 36106 | TCDRSLVEY |
| 36107 | TCDRTLAEY |
| 36108 | TCKNLTYSI |
| 36109 | TCKNMTYYI |
| 36110 | TCKSITYYI |
| 36111 | TCNRSLAEY |
| 36112 | TCRNLTYYI |
| 36113 | TCTNLTYYI |
| 36114 | TDKWFCVDS |
| 36115 | THIASYTQF |
| 36116 | THICSYTQF |
| 36117 | THIGSYTEF |
| 36118 | THIGTYTQF |
| 36119 | THIVSYTQF |
| 36120 | THKWCCEDS |
| 36121 | THKWFCDYS |
| 36122 | THKWFCEDC |
| 36123 | THKWFCEDI |
| 36124 | THKWFCEDN |
| 36125 | THKWFCEDT |
| 36126 | THKWFCEHS |
| 36127 | THKWFCENI |
| 36128 | THKWFCENS |
| 36129 | THKWFCEVS |
| 36130 | THKWFCEYS |
| 36131 | THKWFCGDI |
| 36132 | THKWFCQDS |
| 36133 | THKWFCVDS |
| 36134 | THKWICEDI |
| 36135 | THKWVCEDS |
| 36136 | THRWFCEDS |
| 36137 | THRWFCEES |
| 36138 | THRWLCEDS |
| 36139 | TLMRFLPSI |
| 36140 | TPKWFCEDN |
| 36141 | TPKWFCEDS |
| 36142 | TPKWVCEDS |
| 36143 | TRKWFCEDS |
| 36144 | TSERFICFP |
| 36145 | TTDHFICFP |
| 36146 | TTELYICFP |
| 36147 | TWCRHLFQF |
| 36148 | TWFHMEKMP |
| 36149 | TWFYMDKMP |
| 36150 | TWFYMEKMP |
| 36151 | TWFYMEKMQ |
| 36152 | TWFYMEQMP |
| 36153 | TWLCGWPIK |
| 36154 | TWLFGWPIK |
| 36155 | TWLGGCKSV |
| 36156 | TWLYGWPFK |
| 36157 | TWLYGWPIQ |
| 36158 | TWLYGWPIR |
| 36159 | TWLYGWPIT |
| 36160 | TWLYGWPVK |
| 36161 | TWLYGWSIK |
| 36162 | TWLYGWTIK |
| 36163 | TWMYGWPIK |
| 36164 | TWPVGCKSV |
| 35155 | TWRGGCKSV |
| 35156 | TYAQYYRTW |
| 35157 | VAFRPKISR |
| 36168 | VCCWWLNWF |
| 36169 | VCSWWLNWF |
| 36170 | VCYWWLDWF |
| 36171 | VCYWWLHWI |
| 36172 | VCYMNLIWF |
| 36173 | VCYWWLNLF |
| 36174 | VCYWWLNWC |
| 36175 | VCYWWLNWI |
| 36176 | VCYWWLNWY |
| 36177 | VCYWWLSWL |
| 35178 | VCYWWLTWF |
| 35179 | VCYWWMNWF |
| 36180 | VEFGPKISR |
| 36181 | VEFKPKISR |
| 36182 | VEFRHKISR |
| 36183 | VEFRPEISR |
| 36184 | VEFRPKFSR |
| 36185 | VEFRPKLSR |
| 36186 | VEFRPKMSR |
| 36187 | VEFRPKTSR |
| 36188 | VEFRPKVSR |
| 36189 | VEFRPRISR |
| 35190 | VEFRPTISR |
| 35191 | VEFRRKISR |
| 36192 | VEFRSKISR |
| 36193 | VEFRTKISR |
| 36194 | VEFTPKISR |
| 36195 | VEYRPKISR |
| 36195 | VFIQQSNQD |
| 36197 | VFYWWLNWF |
| 36198 | VGYWWLNWF |
| 36199 | VIWVHYDMY |
| 36200 | VKFRPKISR |
| 36201 | VKKCHTCGA |
| 35202 | VKNWYINMH |
| 35203 | VKWVRLHKK |
| 36204 | VNWVHYDMY |
| 36205 | VQVNKTYVI |
| 36206 | VRWLRLHKK |
| 36207 | VRWVRIHKK |
| 36208 | VRWVRLHEK |
| 36209 | VRWVRLHKQ |
| 36210 | VRWVRLHKR |
| 36211 | VRWVRLHKT |
| 36212 | VRWVRLHRK |
| 36213 | VRWVRLHTK |
| 36214 | VRYWWLNCF |
| 36215 | VSWITRADI |
| 36216 | VTVGGLAFA |
| 36217 | VTWMHYDMY |
| 36218 | VTWVHYAMY |
| 36219 | VTWVHYDMF |
| 36220 | VTWVHYDMH |
| 36221 | VTWVHYNMY |
| 36222 | VTWVHYVMY |
| 36223 | VTWVHYYMY |
| 36224 | VVFLRDQHY |
| 36225 | VWSNIIGIY |
| 36226 | VWYWWLNWF |
| 36227 | VWYWWLNWL |
| 36228 | VYYWWLNWF |
| 36229 | WANFKTLNR |
| 36230 | WANFQTLNK |
| 36231 | WAPTPWRTH |
| 36232 | WCCKMWSWW |
| 36233 | WCMSQQYED |
| 36234 | WDGKFWETM |
| 36235 | WDIKFWETM |
| 36236 | WDLKFWETM |
| 36237 | WDMSQQYED |
| 36238 | WDNLRNTQI |
| 36239 | WDASSNTQI |
| 36240 | WDNWINTQI |
| 36241 | WDNWSDTQI |
| 36242 | WDNWSHTQI |
| 36243 | WDNWSITQI |
| 36244 | WDNWSNTEI |
| 36245 | WDNWSNTKI |
| 36246 | WDNWSNTKK |
| 36247 | WDNWSNTLI |
| 36248 | WDNWSNTPI |
| 36249 | WDNWSNTQM |
| 36250 | WDNWSNTQV |
| 36251 | WDNWSNTRI |
| 36252 | WDNWSTTQI |
| 36253 | WDNWTNTQI |
| 36254 | WDNWTNTQM |
| 36255 | WDSWSNTQI |
| 36256 | WDVKFWESM |
| 36257 | WDVKYWETM |
| 36258 | WDVMFWETM |
| 36259 | WENWSNSQI |
| 36260 | WFCKKWSWW |
| 36261 | WFCKMLSWW |
| 36262 | WFCKMWGWG |
| 36263 | WFCKMWGWW |
| 36264 | WFCKMWIWW |
| 36265 | WFCKMWSGW |
| 36266 | WFCKMWSLW |
| 36267 | WFCKMWSWG |
| 36268 | WFCKMWSWL |
| 36269 | WFCKMWTWW |
| 36270 | WFCKVWSWW |
| 36271 | WFCNLWSWW |
| 36272 | WFCQMWSWW |
| 36273 | WFCRMWSWW |
| 36274 | WFCTLWSWW |
| 36275 | WFCTMWSWW |
| 36276 | WFFKMWSWW |
| 36277 | WFGKMWSWW |
| 36278 | WFNMPHDRH |
| 36279 | WFWKMWSWW |
| 36280 | WFYKMWSWW |
| 36281 | WGNWSNTQI |
| 36282 | WGVKFWETM |
| 36283 | WHCSVYTCS |
| 36284 | WHRDEMLTP |
| 36285 | WHREEMLTT |
| 36286 | WHVKFWETM |
| 36287 | WHWDEMLTT |
| 36288 | WIAAMTYWC |
| 36289 | WICKMWSWW |
| 36290 | WIHAMTYWC |
| 36291 | WIHMPHDRH |
| 36292 | WINMAHDRH |
| 36293 | WINMHHDRH |
| 36294 | WINMPDDRH |
| 36295 | WINMPHARH |
| 36296 | WINMPHDGH |
| 36297 | WINMPHDKH |
| 36298 | WINMPHDRD |
| 36299 | WINMPHDRL |
| 36300 | WINMPHDRN |
| 36301 | WINMPHDRP |
| 36302 | WINMPHDRR |
| 36303 | WINMPHDRY |
| 36304 | WINMPHGRH |
| 36305 | WINMPLDRH |
| 36306 | WINMPNDRH |
| 36307 | WINMPPDRH |
| 36308 | WINMPRDRH |
| 36309 | WINMTHDRH |
| 36310 | WINRPHDRH |
| 36311 | WINVPHDRH |
| 36312 | WIPAKTYWC |
| 36313 | WIPAMAYWC |
| 36314 | WIPAMPYWC |
| 36315 | WIPAMTYLC |
| 36316 | WIPAMTYWF |
| 36317 | WIPAMTYWW |
| 36318 | WIPAMTYWY |
| 36319 | WIPARTYWC |
| 36320 | WIPAVTYWC |
| 36321 | WIPGMTYWC |
| 36322 | WIPSMTYWC |
| 36323 | WIPTMTYWC |
| 36324 | WIPVVTYWC |
| 36325 | WISAMTYWC |
| 36326 | WISMPHDRH |
| 36327 | WITAMTYWC |
| 36328 | WITMPHDRH |
| 35329 | WKNVCPSRQ |
| 36330 | WKSVCPSRQ |
| 36331 | WKTVCPSRH |
| 36332 | WLCQMWSWW |
| 36333 | WLPAMTYWC |
| 36334 | WMLLGLTWF |
| 36335 | WMLLGMAWC |
| 36336 | WMLLGMHWC |
| 36337 | WMLLGMNWC |
| 36338 | WMLLGMPWC |
| 36339 | WMLLGMTLC |
| 36340 | WMLLGMTWF |
| 36341 | WMLLGMTWG |
| 36342 | WMLLGMTWW |
| 36343 | WMLLGMTWY |
| 36344 | WMLLGTTWC |
| 36345 | WMLLGVTWC |
| 36346 | WMLLVMTWC |
| 36347 | WMLNQSRGW |
| 36348 | WMLQGMTWC |
| 36349 | WMMLGMTWC |
| 36350 | WMMMGLTWC |
| 36351 | WMNMPHDRH |
| 36352 | WMPNQSRVW |
| 36353 | WMVLGMNWC |
| 36354 | WMVLGMTWC |
| 36355 | WNCSVYTCI |
| 36356 | WNNWSNTQI |
| 36357 | WRLLGMTWC |
| 36358 | WSCKMWSWW |
| 36359 | WTLLGMTWC |
| 36360 | WVCKMWGWW |
| 36361 | MCKIMWSWW |
| 36362 | WVNLCADLI |
| 36363 | WVPAMTYWC |
| 36364 | WVPAPWRTH |
| 36365 | WVPPPWRTH |
| 36366 | WVPTHWRTH |
| 36367 | WVPTPGRTH |
| 36368 | WVPTPWQTH |
| 36369 | WVPTPWRSH |
| 36370 | WVPTPWRTN |
| 36371 | WVPTPWRTQ |
| 36372 | WVPTPWRTY |
| 36373 | WVPTTWRTH |
| 36374 | WVTLCAVLI |
| 36375 | WVTTPWRTH |
| 36376 | WYMSKQYED |
| 35377 | WYMSQEYED |
| 35378 | WYMSQQNED |
| 35379 | WYMSQQSED |
| 36380 | WYMSQQYAD |
| 36381 | WYMSQQYKD |
| 36382 | WYMSQQYQD |
| 36383 | WYMSQRYED |
| 36384 | WYMTQQYED |
| 36385 | WYTSQQYED |
| 36386 | WYVKFWETM |
| 36387 | WYVSQQYED |
| 36388 | YAQPDWFMT |
| 36389 | YAQRDWFMA |
| 36390 | YAWFYWADY |
| 36391 | YDQPDWFMA |
| 36392 | YDYWPMCWS |
| 36393 | YFMEWEVMD |
| 36394 | YFWYSMAFP |
| 36395 | YHYWHMCWS |
| 36396 | YHYWPMCWA |
| 36397 | YHYWPMCWC |
| 36398 | YHYWPMCWP |
| 36399 | YHYWPMCWI |
| 36400 | YHYWPMCWY |
| 36401 | YHYWPMGWS |
| 36402 | YIIRCMLIW |
| 36403 | YKNWYINMH |
| 36404 | YLEAKTIHA |
| 36405 | YLESKTIHP |
| 36406 | YPELGKGEI |
| 35407 | YPELGQCEI |
| 36408 | YPQPDWFMA |
| 36409 | YPYWPMCWS |
| 36410 | YSWFNWADY |
| 36411 | YSWFYWADC |
| 36412 | YSWFYWADF |
| 36413 | YSWFYWADS |
| 36414 | YSWFYWAVY |
| 36415 | YSWFYWPDY |
| 36416 | YSWFYWSDY |
| 36417 | YSWFYWTDY |
| 36418 | YSWFYWVDY |
| 35419 | YSWIYWADY |
| 36420 | YSWVYWADY |
| 36421 | YSWYYWADY |
| 35422 | YTALMWVWA |
| 35423 | YTELGKCEI |
| 36424 | YTLLWYGIC |
| 36425 | YTNFEAVLE |
| 36426 | YTNFEDALE |
| 36427 | YTNFEDVII |
| 36428 | YTNFEGVLI |
| 36429 | YTNFENVLI |
| 36430 | YTNEEDVLI |
| 36431 | YTNLDDVLE |
| 36432 | YTWFYWADY |
| 36433 | YWSHIIGIY |
| 35434 | YWSNIIGIY |
| 35435 | YYAQYYRTW |
| 35436 | YYWFYWADY |
| 36437 | YYWFYWSDY |

### Example 42

### AAV5 Variants with Spleen Tissue Tropism as Identified by Machine Learning

[0996] This example describes preferred properties of engineered AAV5 variants that display spleen tissue tropism as identified by machine learning methods. The same bioinformatics pre-process, machine learning methods, and analyses as described in EXAMPLE 19 and FIGS. 19-FIG. 22 were carried out to identify preferred properties of engineered AAV5 variants that display spleen tissue tropism.

[0997] Favored biophysical properties and favored amino acid residues at each position in the 581 to 589 region of an AAV5 VP capsid polypeptide, which are associated with a higher probability of spleen tissue tropism are described below. Any of the below machine learning-derived positional amino acid preferences described in TABLE 68 can be present alone or in combination with each other or in combination with any of the amino acid preferences observed and described in EXAMPLE 6, TABLE 11. Listed below in TABLE 68 are a summary of positional features shared between the top important features for spleen tropism extracted from the ML models.

TABLE 68
Machine Learning-Derived Spleen Tissue Tropism Rules

Low solubility at Xaa1
Xaa1 is selected from D or P
Or
High solubility
Xaa1 is selected from F, I, or L
Low hydropathy at Xaa1
Xaa1 is selected from Y or P
Low mutability at Xaa1
Xaa1 is selected from C, K, or P
Low solubility at Xaa2
Xaa2 is selected from D, Q, or R
Low hydropathy at Xaa2
Xaa2 is selected from D, E, R, K, H, N, or Q
Low charge at Xaa2
Xaa2 is selected from D or E
Low volume at Xaa2
Xaa2 is selected from T, N, P, or D
High average flexibility at Xaa2
Xaa2 is selected from D, E, R, P, G, Q, or S
Low solubility at Xaa3
Xaa3 is selected from D, E, P, or N
Low hydropathy at Xaa3
Xaa3 is selected from D, E, H, N, Q, or P
Low hydropathy at Xaa4
Xaa4 is selected from K or R
Low solubility at Xaa5
Xaa5 is selected from D, E, P, or N
High average flexibility at Xaa5
Xaa5 is selected from D, E, R, P, G, Q, or S
Low mutability at Xaa6
Xaa6 is selected from C
High surface accessibility at Xaa8
Xaa8 is selected from E, R, or K
Low solubility at Xaa8
Xaa8 is selected from E, P, R, K, N, or Q
Medium volume at Xaa8
Xaa8 is selected from E, D, R, K, V, P, M,
I, L, H, N, Q, or T
Medium mol mass at Xaa9
Xaa9 is selected from E, D, K, M, I, L, H, or N

[0998] TABLE 69 below provides sequences of the 581 to 589 region for variant AAV VP1 capsid polypeptides that exhibited spleen tissue tropism and comport to one or more of the rules provided in TABLE 68. The present disclosure, thus, provides for rAAVs composed of engineered AAV5 VP1 capsid polypeptides having a SEQ ID NO: 2, wherein the Xaa1 to Xaa9 region is any one of SEQ ID NO: 38438-SEQ ID NO: 39437, as disclosed in TABLE 69. Also encompassed herein are rAAVs composed of engineered AAV5 VP2 capsid polypeptides and engineered AAV5 VP3 capsid polypeptides having the sequences disclosed in the below table at the regions in AAV5 VP2 (amin acid residues 445 to 453) and AAV5 VP3 (amino acid residues 389-397) corresponding to the amino acids in the AAV5 VP1 581 to 589 region.

TABLE 69
Sequences of the 581 to 589 Region in AAV5 VP1
Capsid Polypeptide that Drive Spleen
Tissue Tropism

| SEQ | |
|---|---|
| ID | 581-589 |
| NO | Sequence |
| 38438 | ADDMCCSPN |
| 38439 | ADEDDCDDP |
| 38440 | ADEMEEEHG |
| 38441 | ADEMWPIRF |
| 38442 | ADHCNWSRT |
| 38443 | ADHCSWSRT |
| 38444 | ADMCECVKG |
| 38445 | ADNRTKPLC |
| 38446 | ADPDQKAMN |
| 38447 | ADQRDCWTT |
| 38448 | ADREPWPRN |
| 38449 | ADSRVRPKW |
| 38450 | AECKCCVKM |
| 38451 | AENQDDWQF |
| 38452 | AGDMWRHKM |
| 38453 | AGDTDMPED |
| 38454 | AGWEEAWCM |
| 38455 | AHDCDEPAL |
| 38456 | AIENNYCPM |
| 38457 | AIPHWDDKH |
| 38458 | APDFNREKN |
| 38459 | APDHWMEKM |
| 38460 | ARKCDFPAL |
| 38461 | CDAKRTPGM |
| 38462 | CDAWGELRG |
| 38463 | CDCKEQEED |
| 38464 | CDCKGRIPH |
| 38465 | CDDFCMCHC |
| 38466 | CDDHNHPRA |
| 38467 | CDDKQSHKE |
| 38468 | CDDKRFSKK |
| 38469 | CDDRERQQN |
| 38470 | CDDWGWDQM |
| 38471 | CDEIEMQGT |
| 38472 | CDELPMAGH |
| 38473 | CDEPHFWRC |
| 38474 | CDERRWDRP |
| 38475 | CDIRCENMG |
| 38476 | CDMCREWKW |
| 38477 | CDNKCWPHD |
| 38478 | CDNKPKNLS |
| 38479 | CDNRRNWWE |
| 38480 | CDPCNEFNK |
| 38481 | CDPMDACQE |
| 38482 | CDPNDMREH |
| 38483 | CDPRFVEAM |
| 38484 | CDPRTLPFY |
| 38485 | CDPWDWDIE |
| 38486 | CDPWDWEIE |
| 38487 | CDQFCEWRQ |
| 38488 | CDQFHWDKK |
| 38489 | CDRRCFDKH |
| 38490 | CDSCCGMHV |
| 38491 | CDTWPWSKK |
| 38492 | CDWCDQFRH |
| 38493 | CDYCDPRKF |
| 38494 | CDYRCLWYC |
| 38495 | CECYEPFEG |
| 38496 | CEDMDQWPW |
| 38497 | CELPDRCPQ |
| 38498 | CERVPVFSF |
| 38499 | CFDHRPLPC |
| 38500 | CFPCCWAKF |
| 38501 | CGAWWWNHM |
| 38502 | CGDEWAPRL |
| 38503 | CGDIDHPKS |
| 38504 | CGDWAWDRC |
| 38505 | CGEKCWHDI |
| 38506 | CGHDSKPRC |
| 38507 | CGHWCCSDY |
| 38508 | CGIEDKPEN |
| 38509 | CGLCRYYDM |
| 38510 | CGPEPCVRQ |
| 38511 | CGPEPCVRQ |
| 38512 | CGPWNEPEY |
| 38513 | CGTHCPLRQ |
| 38514 | CGYDCQPRF |
| 38515 | CHKFDRELW |
| 38516 | CHNHPMPPL |
| 38517 | CKDEFWPLM |
| 38518 | CKDFRMSPL |
| 38519 | CKDYCRDEL |
| 38520 | CKPYEWWVM |
| 38521 | CKYTDDEEQ |
| 38522 | CMTDWSGMM |
| 38523 | CNCKDYVEV |
| 38524 | CNDQHMEKD |
| 38525 | CNPPEEPVR |
| 38526 | CNTQPSPKD |
| 38527 | CPEYRMARF |
| 38528 | CPPPCSYLL |
| 38529 | CPQWCEYYE |
| 38530 | CQCDDNWEI |
| 38531 | CQERERGKW |
| 38532 | CQSECAKRG |
| 38533 | CRDCRDGEN |
| 38534 | CRDEGLEYE |
| 38535 | CRDGDEPRG |
| 38536 | CRDWGWICA |
| 38537 | CRNDNIERK |
| 38538 | CRPLDWKPD |
| 38539 | CRYWCSYKD |
| 38540 | CWDGCHRRL |
| 38541 | CWDHGAPEL |
| 38542 | CWEDCQYHE |
| 38543 | CYDDWQDRI |
| 38544 | DCDMFCMFN |
| 38545 | DDARRCHRK |
| 38546 | DDCFQRCRN |
| 38547 | DDDCNYTRN |
| 38548 | DDDEDLNYD |
| 38549 | DDDHPRPRS |
| 38550 | DDDNWHHKN |
| 38551 | DDDPGDAYW |
| 38552 | DDECEMYYN |
| 38553 | DDEDGGHYM |
| 38554 | DDEPKGIRM |
| 38555 | DDEVDGDHP |
| 38556 | DDGCNYTRN |
| 38557 | DDGPDTNRK |
| 38558 | DDGPDTYRR |
| 38559 | DDGPETYRK |
| 38560 | DDGVMDSVD |
| 38561 | DDHEEGFKA |
| 38562 | DDHQENTKT |
| 38563 | DDKGPRNSM |
| 38564 | DDKHDRIHH |
| 38565 | DDLKCWNNY |
| 38566 | DDMHDNMVH |
| 38567 | DDNCNYTRN |
| 38568 | DDNHPTPTL |
| 38569 | DDNREPQDT |
| 38570 | DDNWDVFRD |
| 38571 | DDPCVEFET |
| 38572 | DDPFDVTLQ |
| 38573 | DDPFWCQRL |
| 38574 | DDPQEVHGF |
| 38575 | DDPQRKGYC |
| 38576 | DDPWGDRHT |
| 38577 | DDQLEGWID |
| 38578 | DDQPDNNIY |
| 38579 | DDQRLLDDI |
| 38580 | DDQTDYPPT |
| 38581 | DDQYRIEQH |
| 38582 | DDRANVPKH |
| 38583 | DDSGPKSQI |
| 38584 | DDSIEHFKG |
| 38585 | DDSWPIPLG |
| 38586 | DDTEPMMNK |
| 38587 | DDTEPMPVR |
| 38588 | DDINEIEEY |
| 38589 | DDWKGWLRF |
| 38590 | DDWKPCEFA |
| 38591 | DDWMRPKRC |
| 38592 | DDYGHDDKN |
| 38593 | DECSESMRN |
| 38594 | DEGEEEPKL |
| 38595 | DEHKDPDEA |
| 38596 | DENKDEFWM |
| 38597 | DEQCRTHRK |
| 38598 | DEQHGGEMD |
| 38599 | DESCEWMNQ |
| 38600 | DESEERIQD |
| 38601 | DESSDDDEE |
| 38602 | DGCFDAQIN |
| 38603 | DGDHDARIH |
| 38604 | DGETDELRM |
| 38605 | DGFLDGEWW |
| 38606 | DGFMDGEWC |
| 38607 | DGKTSREVC |
| 38608 | DGPKDRIFN |
| 38609 | DGPVPWMMC |
| 38610 | DGSDGMSTN |
| 38611 | DGVFPRCGN |
| 38612 | DHCKWWLDV |
| 38613 | DHDCKCEEA |
| 38614 | DHDGDVPVF |
| 38615 | DHHCDRPQG |
| 38616 | DHQCEFPMV |
| 38617 | DHTCNWPPN |
| 38618 | DICFRVSMM |
| 38619 | DIEDTQMSW |
| 38620 | DIEQWIAAM |
| 38621 | DKDFWSAPN |
| 38622 | DKHLEWPNH |
| 38623 | DKKNECNWH |
| 38624 | DKTCDCEMT |
| 38625 | DLSDQYPEL |
| 38626 | DLWCMDAEW |
| 38627 | DLWTHWNPC |
| 38628 | DMDEGSSSN |
| 38629 | DMDKDGPRE |
| 38630 | DMWDWTYRM |
| 38631 | DNDTWQPRI |
| 38632 | DNEWDCAGN |
| 38633 | DNHREAWQD |
| 38634 | DNKRRVPEC |
| 38635 | DNQCEDPKP |
| 38636 | DPEMEYMGM |
| 38637 | DPKPRHDND |
| 38638 | DQDICGWVW |
| 38639 | DQDRRCDQP |
| 38640 | DQECDDHGI |
| 38641 | DQHGWRRPG |
| 38642 | DQKCERGRI |
| 38643 | DQNHRVDRH |
| 38644 | DQRHDHRQM |
| 38645 | DQSSGWPRD |
| 38646 | DQWNDECFF |
| 38647 | DRERWWPET |
| 38648 | DRKFERQTM |
| 38649 | DRKKPVPEW |
| 38650 | DRNQWLPRH |
| 38651 | DRPRPYCRN |
| 38652 | DRQYPPPNH |
| 38653 | DRSPWCPQF |
| 38654 | DRSQRCNRG |
| 38655 | DRTGRCMPP |
| 38656 | DRYLGWQFC |
| 38657 | DVDCCCVYN |
| 38658 | DWDCKTSRN |
| 38659 | DWKPADNKC |
| 38660 | DWNSDWPEY |
| 38661 | DWQRHPPKC |
| 38662 | DWRPPCFRF |
| 38663 | DWSKEIMGM |
| 38664 | DWTCNGHRH |
| 38665 | DYDWSDMKC |
| 38666 | DYENDEDGV |
| 38667 | DYKCCRPEY |
| 38668 | EDDFKPARD |
| 38669 | EDEGDLWFY |
| 38670 | EDEPDGKMG |
| 38671 | EDEQSGERE |
| 38672 | EDGHKVGFM |
| 38673 | EDHDIPRRN |
| 38674 | EDNRWIPPL |
| 38675 | EDPGDPDMM |
| 38676 | EDPHEEFDR |
| 38677 | EDQCCFELP |
| 38678 | EDTQPLFRH |
| 38679 | EEAHRGERC |
| 38680 | EEDHEQMCN |
| 38681 | EFDHWTMRM |
| 38682 | EFEHELDIW |
| 38683 | EFPVPLDFW |
| 38684 | EGAEGWTQD |
| 38685 | EGDPPMPVF |
| 38686 | EHDCQDDVN |
| 38687 | EHEWDAPSW |
| 38688 | EHKYRDMKH |
| 38689 | EHPMELEFC |
| 38690 | EIDFGTPET |
| 38691 | EIDYWWCPH |
| 38692 | EMDLCHYSN |
| 38693 | EMHPCFWIF |
| 38694 | EPSRCRPHV |
| 38695 | EQKQEPEFW |
| 38696 | ERCEGIQFC |
| 38697 | ERDAGDTIN |
| 38698 | ERHGEEIRD |
| 38699 | ERHYDIMLY |
| 38700 | ERKFYENRM |
| 38701 | ERQKDRLPD |
| 38702 | ESRYCMWGM |
| 38703 | ETRELITMM |
| 38704 | EVDEDPAFW |
| 38705 | EVDFCSAIM |
| 38706 | EVEHDVAVW |
| 38707 | EVTMGCMIN |
| 38708 | FDCDDVIER |
| 38709 | FDDCDAGRG |
| 38710 | FDDDDKAKC |
| 38711 | FDDYDLTVE |
| 38712 | FDETDFEAM |
| 38713 | FDFPDCHGW |
| 38714 | FDHDDEHKC |
| 38715 | FDHHEKWNN |
| 38716 | FDHRPNCHD |
| 38717 | FDNPDQRNA |
| 38718 | FDNRDSDKG |
| 38719 | FDNRRHWWE |
| 38720 | FDPFQFCVG |
| 38721 | FDPHHAKQQ |
| 38722 | FDPIYEMVE |
| 38723 | FDSFDEHHN |
| 38724 | FDWISKCSW |
| 38725 | FDWQWEDKC |
| 38726 | FDYKWMNAY |
| 38727 | FEDWGWPKG |
| 38728 | FEHRDNWKM |
| 38729 | FERWDRKEH |
| 38730 | FERYDKPYM |
| 38731 | FGEMDGGCY |
| 38732 | FGGCDGTPW |
| 38733 | FGWLDCCNQ |
| 38734 | FGWPDEQQW |
| 38735 | FHETQTPKT |
| 38736 | FKACDSECD |
| 38737 | FKCGNWGII |
| 38738 | FKDYRCGWC |
| 38739 | FKEGDAKKD |
| 38740 | FKGCSGELV |
| 38741 | FKMCPCVKG |
| 38742 | FKMSDILPH |
| 38743 | FKPCMCDPM |
| 38744 | FKPDPCFDD |
| 38745 | FKPTNIEKG |
| 38746 | FKWWDTMNQ |
| 38747 | FKYTDHGIQ |
| 38748 | FLNDWSNWF |
| 38749 | FNPFDCDIG |
| 38750 | FNTFDCEIG |
| 38751 | FRCNERRWN |
| 38752 | FRCYPNQRD |
| 38753 | FRDRDGNRM |
| 38754 | FRGGEMAKN |
| 38755 | FRNENEFEP |
| 38756 | FRPKCGPIH |
| 38757 | FRPKECALQ |
| 38758 | FRQCGEEYH |
| 38759 | FRQLDRERQ |
| 38760 | FRQWQTMET |
| 38761 | FRSEEKAEN |
| 38762 | FRSRNPPKH |
| 38763 | FRSYGIRLI |
| 38764 | FRTWPDDET |
| 38765 | FWEHADEEG |
| 38766 | FYDGPREMW |
| 38767 | FYVGPAMPM |
| 38768 | GADWDEPKE |
| 38769 | GDCIDGKPH |
| 38770 | GDDHDIEFM |
| 38771 | GDDHKSHRK |
| 38772 | GDDLDCWKN |
| 38773 | GDEDHGSKM |
| 38774 | GDELHFLRM |
| 38775 | GDERPGRRN |
| 38776 | GDLCRYWRD |
| 38777 | GDPDDDEIW |
| 38778 | GEAIDNEKW |
| 38779 | GEEEDRMIH |
| 38780 | GESCDEKSD |
| 38781 | GIPCWQDEW |
| 38782 | GKPEDGFDD |
| 38783 | GPMRRRINI |
| 38784 | GRCQPWYFH |
| 38785 | GRDCDEAPD |
| 38786 | GRDFYWKIE |
| 38787 | GRECSAQRM |
| 38788 | GRHGDDLEV |
| 38789 | GRPQCWYKH |
| 38790 | GRTCDYHDM |
| 38791 | HDATPTPRY |
| 38792 | HDCCEWWRA |
| 38793 | HDCWAEWIA |
| 38794 | HDDGDGFQF |
| 38795 | HDDIEAIRQ |
| 38796 | HDEGPEFKD |
| 38797 | HDELWVDRM |
| 38798 | HDESGEWLE |
| 38799 | HDHKWKPPE |
| 38800 | HDKWENPGQ |
| 38801 | HDLQPGMNN |
| 38802 | HDPCTQIKP |
| 38803 | HDPWNVLDW |
| 38804 | HDYEPKCMG |
| 38805 | HEFKDDMPH |
| 38806 | HENKEEQKD |
| 38807 | HEQWDNIPC |
| 38808 | HFECRTMPN |
| 38809 | HFEFWNGGM |
| 38810 | HGDHRGNRE |
| 38811 | HGSMDSVYW |
| 38812 | HHQHNEIEL |
| 38813 | HKECPRQRH |
| 38814 | HKGFEPERQ |
| 38815 | HKPCHGTEF |
| 38816 | HMEDWMLEM |
| 38817 | HNDTWQPRL |
| 38818 | HNEGERWPN |
| 38819 | HQCMWDWLT |
| 38820 | HRCCETTIN |
| 38821 | HRCPIDSRI |
| 38822 | HRECGVWDF |
| 38823 | HRSDDDQRF |
| 38824 | HRSDPPQKM |
| 38825 | HTCRLDVNM |
| 38826 | HVEEWAEKM |
| 38827 | HWSIDAPRK |
| 38828 | IDAKPYGRE |
| 38829 | IDAWEEHYE |
| 38830 | IDCCSFSPT |
| 38831 | IDCQRWCQQ |
| 38832 | IDCTPWIQT |
| 38833 | IDDDPEPTR |
| 38834 | IDDKKWIHA |
| 38835 | IDDRIWNCD |
| 38836 | IDDWLMDKP |
| 38837 | IDEWDCIDS |
| 38838 | IDFHDCFTK |
| 38839 | IDFNDWIPW |
| 38840 | IDGDDEHRA |
| 38841 | IDHKEAFFE |
| 38842 | IDIHEREHF |
| 38843 | IDKWEWNRD |
| 38844 | IDLQDCNPW |
| 38845 | IDMTDMVLW |
| 38846 | IDPEGESIS |
| 38847 | IDPFDWEGM |
| 38848 | IDPFWIFKF |
| 38849 | IDPPEQDIM |
| 38850 | IDPYDCDPT |
| 38851 | IECNDDCPE |
| 38852 | IEKFDDPPA |
| 38853 | IEPWEHMSN |
| 38854 | IEQKGWRRD |
| 38855 | IESDPCVAG |
| 38856 | IEWDPWIHL |
| 38857 | IEWFRWMMW |
| 38858 | IFDPRVKAW |
| 38859 | IGENMWIWH |
| 38860 | IHPMRIGPW |
| 38861 | IHTVPDWVM |
| 38862 | IIVEVEICH |
| 38863 | IKDGPEIDP |
| 38864 | IKFWDGLRD |
| 38865 | IKPCDEPVD |
| 38866 | IKPIGFWVN |
| 38867 | IKVKPDNIM |
| 38868 | IKWPDEHIW |
| 38869 | INPYGTPLN |
| 38870 | IPWCDYFFA |
| 38871 | IQDCNSIRY |
| 38872 | IQERMSIED |
| 38873 | IQLGEFWKE |
| 38874 | IQWMDMDPW |
| 38875 | IRDFGERRI |
| 38876 | IRDIDYLPW |
| 38877 | IRDMSCLPS |
| 38878 | IRGDEEDRN |
| 38879 | IRGDEMLED |
| 38880 | IRGREDMLQ |
| 38881 | IRHCDGDCE |
| 38882 | IRHEDGCTY |
| 38883 | IRPCAPARR |
| 38884 | IRPDGEELQ |
| 38885 | IRPNSSLEL |
| 38886 | IRPTEFTPN |
| 38887 | IRSCPMKCP |
| 38888 | ITCDWYYQM |
| 38889 | IVSPADIVP |
| 38890 | IWERDPDGE |
| 38891 | IYCMPYIRA |
| 38892 | KDCNHRAEN |
| 38893 | KDDCAAWNC |
| 38894 | KDEDDIWID |
| 38895 | KDHGHQLPP |
| 38896 | KDHLGGKRN |
| 38897 | KDHMGCPPH |
| 38898 | KDHWHPPKY |
| 38899 | KDKMKWLKE |
| 38900 | KDMCYLSKK |
| 38901 | KDNFWMYKT |
| 38902 | KDNGNKMDE |
| 38903 | KDRTQIWKQ |
| 38904 | KDSPWFERT |
| 38905 | KDSQRHDKE |
| 38906 | KDVFWENKF |
| 38907 | KDWSELYEY |
| 38908 | KDYIPQLRG |
| 38909 | KDYNDQEEN |
| 38910 | KEKIQDYPE |
| 38911 | KEWFDWCIT |
| 38912 | KPLKCWEPQ |
| 38913 | KRDYWCWPM |
| 38914 | LCSFDDSII |
| 38915 | LCSFGDSIS |
| 38916 | LDCMRWGFN |
| 38917 | LDCPPAPKM |
| 38918 | LDCRPEHPD |
| 38919 | LDDEESLVF |
| 38920 | LDDWDFKPW |
| 38921 | LDECEIECN |
| 38922 | LDEFKMEPQ |
| 38923 | LDGFDTNLE |
| 38924 | LDGTDAVRL |
| 38925 | LDHKWPDYI |
| 38926 | LDIRWYEHV |
| 38927 | LDLWRNWKI |
| 38928 | LDPCAWVKV |
| 38929 | LDPFAQPFS |
| 38930 | LDPTDPGRW |
| 38931 | LDRLEAPTG |
| 38932 | LDRNRVHRQ |
| 38933 | LDSCDPRLK |
| 38934 | LDTCEMLKQ |
| 38935 | LDTGEMLKQ |
| 38936 | LDTKRWPKY |
| 38937 | LDWKDKERG |
| 38938 | LDYRDIARD |
| 38939 | LEAGEKWNF |
| 38940 | LEAHEGEKF |
| 38941 | LEDLRLPRM |
| 38942 | LENKWCYKM |
| 38943 | LENRPELND |
| 38944 | LESCSPIVS |
| 38945 | LEWIHDWYH |
| 38946 | LEWYECVVT |
| 38947 | LGDCPGEPH |
| 38948 | LGLCDREMQ |
| 38949 | LGSFDDSIS |
| 38950 | LHDWWMREM |
| 38951 | LHQRDRIEF |
| 38952 | LKCGSLIDV |
| 38953 | LKLADWWTT |
| 38954 | LKLRDEVNE |
| 38955 | LKMERCMIA |
| 38956 | LKPFEDLLN |
| 38957 | LKQWDPWLC |
| 38958 | LLDCRGPEV |
| 38959 | LNDHEMPGM |
| 38960 | LNRCDAPKL |
| 38961 | LNWPDYHCM |
| 38962 | LQCREGLPM |
| 38963 | LQDEPEPPH |
| 38964 | LQDFRFCKQ |
| 38965 | LQDPACDPS |
| 38966 | LQHRDSVES |
| 38967 | LRCKWWRTV |
| 38968 | LRDFWECRL |
| 38969 | LRDWDGNRM |
| 38970 | LREVDYPSM |
| 38971 | LREWKWCPD |
| 38972 | LRPCEGGQD |
| 38973 | LRPDIAWEC |
| 38974 | LRPGGGLKK |
| 38975 | LRTIWSPRM |
| 38976 | LRTNDCNFH |
| 38977 | LRVMDPLEG |
| 38978 | LRYNDLKIH |
| 38979 | LTGCSDEVQ |
| 38980 | LWADGWELK |
| 38981 | LYQCTDPEK |
| 38982 | LYQPGEPKS |
| 38983 | MDACEGQNN |
| 38984 | MDARDECYQ |
| 38985 | MDCRREHRH |
| 38986 | MDDFEAIRW |
| 38987 | MDDSEVLKY |
| 38988 | MDEEFWPFN |
| 38989 | MDERDAHEE |
| 38990 | MDERWWIKI |
| 38991 | MDFEEMWVW |
| 38992 | MDHKDGYRQ |
| 38993 | MDHLHKPKT |
| 38994 | MDNHKKPRA |
| 38995 | MDPDPKCGM |
| 38996 | MDPSHGKIN |
| 38997 | MEGFDGWRM |
| 38998 | MEMYRWCRH |
| 38999 | MFDCRFPRY |
| 39000 | MFDFWNLTM |
| 39001 | MGECDWPMH |
| 39002 | MGMEDDWKH |
| 39003 | MHPWDALDM |
| 39004 | MHYFRYCKN |
| 39005 | MKDFWTEKW |
| 39006 | MMNHHDTRP |
| 39007 | MNPMAYTRN |
| 39008 | MQPFQMHRG |
| 39009 | MRCDGWIQF |
| 39010 | MRCDLKKKE |
| 39011 | MRDWEASKM |
| 39012 | MRQFGCPTE |
| 39013 | NDCMHNDRW |
| 39014 | NDDEPGWKQ |
| 39015 | NDDEPPSRL |
| 39016 | NDDFDCQEA |
| 39017 | NDDLDCCVK |
| 39018 | NDDRCFIRA |
| 39019 | NDEIDAQYH |
| 39020 | NDEIECIGH |
| 39021 | NDMFPSFDC |
| 39022 | NDPGNRPRE |
| 39023 | NDPRRPDSN |
| 39024 | NDRCEKPDI |
| 39025 | NDRPEADEH |
| 39026 | NDSMGEPKS |
| 39027 | NDSYGQPKV |
| 39028 | NDTGPHGRH |
| 39029 | NDTNRALKM |
| 39030 | NDYIDEFPY |
| 39031 | NDYVEEHPM |
| 39032 | NECCDRHPM |
| 39033 | NEDHENPSN |
| 39034 | NEDQEEDPC |
| 39035 | NEYRPPPQV |
| 39036 | NGYFDAMRH |
| 39037 | NHCDENWYW |
| 39038 | NHCKDWEEH |
| 39039 | NKPIWYVEM |
| 39040 | NPENHKCRF |
| 39041 | NQEKTEPKC |
| 39042 | NQEMEYHPS |
| 39043 | NQTCDQEEM |
| 39044 | NRDWFEWKM |
| 39045 | NRDWRFFRI |
| 39046 | NREQDELKW |
| 39047 | NREWPDYRD |
| 39048 | NRGVDRLKW |
| 39049 | NRPEGRGEC |
| 39050 | NRVLEIERK |
| 39051 | NRYFDAMRH |
| 39052 | NTDFECVGN |
| 39053 | NVCEQDIYE |
| 39054 | PDALDPCDP |
| 39055 | PDAYDDRNH |
| 39056 | PDCEPGNVE |
| 39057 | PDDCPWPNN |
| 39058 | PDDFDKFMW |
| 39059 | PDDFEGGPL |
| 39060 | PDDHESPRD |
| 39061 | PDDHETPTN |
| 39062 | PDDIHRFPK |
| 39063 | PDEQSLPFD |
| 39064 | PDEVPRCRA |
| 39065 | PDKLDRFVG |
| 39066 | PDLFEKCRI |
| 39067 | PDLRDHWQM |
| 39068 | PDNAQGPQC |
| 39069 | PDNEDARPK |
| 39070 | PDPADKCTY |
| 39071 | PDPEGEDEP |
| 39072 | PDPGIRWPM |
| 39073 | PDPHEDGNP |
| 39074 | PDPLGWLAH |
| 39075 | PDPPKKYED |
| 39076 | PDPPKQYED |
| 39077 | PDPQQMSRR |
| 39078 | PDPRYWIMN |
| 39079 | PDPSDKGTY |
| 39080 | PDPSPAKGV |
| 39081 | PDPSPYCKS |
| 39082 | PDPWPWMDD |
| 39083 | PDQDDMMHG |
| 39084 | PDQFENSFK |
| 39085 | PDQFIRWPM |
| 39086 | PDQHDPSNL |
| 39087 | PDQSHIDLM |
| 39088 | PDRCDLTDF |
| 39089 | PDRCNYVRH |
| 39090 | PDSGEQPVA |
| 39091 | PDSPGVCRC |
| 39092 | PDTMWREHG |
| 39093 | PDTYHYCEW |
| 39094 | PDVNQGPWL |
| 39095 | PDVSERMMD |
| 39096 | PECGDRGDR |
| 39097 | PEDCPDGKA |
| 39098 | PEDEWGFEY |
| 39099 | PEEDEHDVC |
| 39100 | PEEDSPWIM |
| 39101 | PEFGWWIAM |
| 39102 | PEHHFRWPH |
| 39103 | PEHKDHFET |
| 39104 | PEKLDLINY |
| 39105 | PEKYDIWPV |
| 39106 | PEMEDASLG |
| 39107 | PENDHGMEA |
| 39108 | PESFPAERC |
| 39109 | PESNDKRES |
| 39110 | PETGKAPHI |
| 39111 | PETIRGGKC |
| 39112 | PEVNEGIHL |
| 39113 | PEYPKKGKC |
| 39114 | PEYYDDDHS |
| 39115 | PFPRDWHDA |
| 39116 | PGAIDWQIM |
| 39117 | PGCCDRLVE |
| 39118 | PGDFGTAED |
| 39119 | PGGMCWWER |
| 39120 | PGGNDCLLF |
| 39121 | PGPKPWKEI |
| 39122 | PGPNDVNHC |
| 39123 | PGSHGPPVC |
| 39124 | PGTMDPPVN |
| 39125 | PGYNRLEPS |
| 39126 | PHCEEGPED |
| 39127 | PHDFWVIED |
| 39128 | PHDNDAYFW |
| 39129 | PHDRRKNDN |
| 39130 | PHEIEYYMN |
| 39131 | PHEWDMCAE |
| 39132 | PHNNHWIEP |
| 39133 | PHNQWMPKS |
| 39134 | PHRHGYRKD |
| 39135 | PHRQDRMIW |
| 39136 | PHTCCGPEE |
| 39137 | PHTDRLDIN |
| 39138 | PHWFNWPMC |
| 39139 | PHYNTVPEN |
| 39140 | PKCSNWLNM |
| 39141 | PKCTDWNGV |
| 39142 | PKDNPIEPK |
| 39143 | PKDTKGPET |
| 39144 | PKEQPCAEY |
| 39145 | PKEWDKPPH |
| 39146 | PKHEDCCPE |
| 39147 | PKKYDRDVM |
| 39148 | PKPWETSRC |
| 39149 | PKQGPAIFN |
| 39150 | PKSCGDGND |
| 39151 | PKTCNCKVT |
| 39152 | PKYHESAKS |
| 39153 | PLQDGCEMH |
| 39154 | PMHYWKSEM |
| 39155 | PMPLCCWSL |
| 39156 | PNALDMCVE |
| 39157 | PNEPWCPVV |
| 39158 | PNESNEIEH |
| 39159 | PNNAWIDKQ |
| 39160 | PNNEENDAM |
| 39161 | PNNNDQDKT |
| 39162 | PNPHDRPRW |
| 39163 | PNQLDKPAM |
| 39164 | PNQRNEIEH |
| 39165 | PNWGIEPGF |
| 39166 | PQCKPLVPM |
| 39167 | PQGCDKYLW |
| 39168 | PQHYDKWEI |
| 39169 | PQLPELEKW |
| 39170 | PQNGHICKG |
| 39171 | PQNYDQDKV |
| 39172 | PQPNRTSPH |
| 39173 | PQSEPQPYD |
| 39174 | PQSFWGSEM |
| 39175 | PRCDPCMGV |
| 39176 | PREGDWEGM |
| 39177 | PREMWECQC |
| 39178 | PREQRPSKS |
| 39179 | PRGLPTPMN |
| 39180 | PRNCPEDWS |
| 39181 | PRNYEAAEC |
| 39182 | PRRMPLVPH |
| 39183 | PRSDDDQRF |
| 39184 | PRSGDDQRF |
| 39185 | PRTDGCPWA |
| 39186 | PRYQDRCMW |
| 39187 | PTPDGSDKN |
| 39188 | PTVPQCPRH |
| 39189 | PVPHSCERR |
| 39190 | PWFHKRYKN |
| 39191 | PWNISCPKE |
| 39192 | PWPKWCWPA |
| 39193 | PWQFGHAKQ |
| 39194 | PWTYRGEDF |
| 39195 | PYDQRTDDA |
| 39196 | PYGPMCTMG |
| 39197 | PYKMNHPRE |
| 39198 | PYNCRRCPD |
| 39199 | PYNPNVDPH |
| 39200 | QDAMDPWRI |
| 39201 | QDCVERIKS |
| 39202 | QDEIDPSEH |
| 39203 | QDEIRMPFN |
| 39204 | QDEMDGYDQ |
| 39205 | QDFLPVLKW |
| 39206 | QDHCEPFEP |
| 39207 | QDHKDECNE |
| 39208 | QDHLADWRN |
| 39209 | QDKHEPGKW |
| 39210 | QDKMPCWQF |
| 39211 | QDMGEKLTH |
| 39212 | QDMHDKEPA |
| 39213 | QDPCSWLKN |
| 39214 | QDPHHNHRH |
| 39215 | QDPQWWMRC |
| 39216 | QDRYGVPEN |
| 39217 | QDTDEGDQC |
| 39218 | QENTPGYEG |
| 39219 | QEPTEITPM |
| 39220 | QKPSDEKRC |
| 39221 | QKQCDRTAW |
| 39222 | QMFMPYCPF |
| 39223 | QQPWCWWEK |
| 39224 | QRCDDWIHS |
| 39225 | QRCKPRCPM |
| 39226 | QRDPEDFET |
| 39227 | QRMHDCCDL |
| 39228 | QVECSWDKY |
| 39229 | RDAKDGGRP |
| 39230 | RDAYWAEDN |
| 39231 | RDCFWCIGE |
| 39232 | RDCHKGIKN |
| 39233 | RDDCWPFNP |
| 39234 | RDDLRLWPF |
| 39235 | RDDLWLWPF |
| 39236 | RDHNEKINY |
| 39237 | RDHNEQINC |
| 39238 | RDIKPWFEM |
| 39239 | RDLEKGDEG |
| 39240 | RDPAWIWDY |
| 39241 | RDTMFEWKF |
| 39242 | REEFPLCNQ |
| 39243 | REEKDWFKH |
| 39244 | RELDCMWEN |
| 39245 | REPHDAKNN |
| 39246 | REPYWCLGY |
| 39247 | REQLWVHPG |
| 39248 | REYPKAHRE |
| 39249 | RHDTWHDEG |
| 39250 | RKDYWSDDG |
| 39251 | RLEWWIHPM |
| 39252 | RNDFWPAGN |
| 39253 | RNQDWGDRQ |
| 39254 | RPEMRCFRN |
| 39255 | RPKCNLIEM |
| 39256 | RPNCYKAEH |
| 39257 | RPWEWWIRK |
| 39258 | RRPEWLKNY |
| 39259 | SDCHENDPH |
| 39260 | SDDWRDFDN |
| 39261 | SDENDVDDC |
| 39262 | SDENEMEPH |
| 39263 | SDEWPYYRQ |
| 39264 | SDNREWMRY |
| 39265 | SDPCKVLRH |
| 39266 | SDSADDPKF |
| 39267 | SDSKGRERV |
| 39268 | SDWDPSWDT |
| 39269 | SDYSELPQH |
| 39270 | SEHEPDITN |
| 39271 | SEKEGIPRD |
| 39272 | SEPPDWNTK |
| 39273 | SGPRTWIKK |
| 39274 | SHDIPVPIM |
| 39275 | SHHNPGPRT |
| 39276 | SHYPNRPKG |
| 39277 | SKDWPPFKA |
| 39278 | SKQYDPPKP |
| 39279 | SMPLWQDSN |
| 39280 | SMPMWWPKH |
| 39281 | SNERACEEV |
| 39282 | SQPTGWEEN |
| 39283 | SRDGDEPNH |
| 39284 | SREFWWDGT |
| 39285 | SREWDCGSH |
| 39286 | SRPPDWPRT |
| 39287 | TDDCYGPKG |
| 39288 | TDDHERGDC |
| 39289 | TDDNGEIRP |
| 39290 | TDDWYGPKC |
| 39291 | TDEIPEMRY |
| 39292 | TDFSDRLKW |
| 39293 | TDHCNWSRT |
| 39294 | TDHKDGFRI |
| 39295 | TDHNGEIRT |
| 39296 | TDNRWMDKW |
| 39297 | TDPPDGFDM |
| 39298 | TDSCEDCKI |
| 39299 | TEFECFWNT |
| 39300 | TESLEKGPM |
| 39301 | TREGPQLKC |
| 39302 | TRLKELLIW |
| 39303 | TWDRECEYD |
| 39304 | VDEFNVWKH |
| 39305 | VDFFDWLDH |
| 39306 | VDHITKWKF |
| 39307 | VDPCDDGNA |
| 39308 | VDQHERARN |
| 39309 | VDQRDMATD |
| 39310 | VDWFARWDS |
| 39311 | VEFLDEIRH |
| 39312 | VEKMREWPF |
| 39313 | VEPYEGVRM |
| 39314 | VLDCDNPVD |
| 39315 | VNPMAYTRN |
| 39316 | VRDCRWCIV |
| 39317 | VREFEEDKN |
| 39318 | VRPYADSRN |
| 39319 | VRRDDPPRP |
| 39320 | VRSCGGHDI |
| 39321 | VRSWDTDFE |
| 39322 | VYWREEIRI |
| 39323 | WDCEDGWQQ |
| 39324 | WDDHERGQV |
| 39325 | WDDRPALKG |
| 39326 | WDDRQCEQH |
| 39327 | WDEKPAGQV |
| 39328 | WDFCKCADI |
| 39329 | WDFNDGITP |
| 39330 | WDNFNPPKQ |
| 39331 | WDNWDDREP |
| 39332 | WDPGEGNNF |
| 39333 | WDPLEHRLH |
| 39334 | WDPSKVNIM |
| 39335 | WDQCGWHRQ |
| 39336 | WDRASWLEQ |
| 39337 | WDRCDCEIP |
| 39338 | WDRCPMPRN |
| 39339 | WDSCEGREP |
| 39340 | WDSHDFEIH |
| 39341 | WDSKRLNPP |
| 39342 | WDWIEVYRC |
| 39343 | WDYRNLNRQ |
| 39344 | WECQSRDED |
| 39345 | WEDEPPWKI |
| 39346 | WEEQRIPSE |
| 39347 | WEEWDMMRC |
| 39348 | WELPCEWTY |
| 39349 | WEPHPYQTN |
| 39350 | WFDSRKEEW |
| 39351 | WFECWTYPM |
| 39352 | WGCKENWNM |
| 39353 | WGDCDPRVG |
| 39354 | WGDCDYCEK |
| 39355 | WGHKPCKGY |
| 39356 | WGPCAFGQE |
| 39357 | WGPKPCRGY |
| 39358 | WGSCECHKC |
| 39359 | WGTKPCKGY |
| 39360 | WHANEVLKK |
| 39361 | WHDTNLEPH |
| 39362 | WHSWWTNIM |
| 39363 | WKACPLRET |
| 39364 | WKAYPWQPT |
| 39365 | WKCAEFRTC |
| 39366 | WKCPDKLDN |
| 39367 | WKDAEKKDD |
| 39368 | WKDHTVPDH |
| 39369 | WKDNESSEF |
| 39370 | WKDRDQCLH |
| 39371 | WKLVDLGIG |
| 39372 | WKSCGMDSL |
| 39373 | WKTTEAPRD |
| 39374 | WLDDRLEFF |
| 39375 | WNDYDEGEC |
| 39376 | WNPADGKQN |
| 39377 | WNPWDQLEF |
| 39378 | WPCPWFDHM |
| 39379 | WPPEPWCCC |
| 39380 | WPPWEWYED |
| 39381 | WPSCGCTVE |
| 39382 | WPVDSWIEN |
| 39383 | WQANHWDRT |
| 39384 | WQEDQVGRQ |
| 39385 | WQPWRHERH |
| 39386 | WQQFWWNEC |
| 39387 | WQYYPCIDK |
| 39388 | WRAPGPLEN |
| 39389 | WRCATIPIA |
| 39390 | WRCCQFWII |
| 39391 | WRCDDRDNC |
| 39392 | WRCPRLIDW |
| 39393 | WRDHPEDIQ |
| 39394 | WRDMDFYIN |
| 39395 | WRDQGFSTN |
| 39396 | WREMPMSEL |
| 39397 | WRHWDGLNL |
| 39398 | WRNQGDLVP |
| 39399 | WRNRPCLNE |
| 39400 | WRQCEFGVE |
| 39401 | WRSDGPIER |
| 39402 | WRSEEVEHC |
| 39403 | WRSRDHDHP |
| 39404 | WRTCDMPYF |
| 39405 | WRYAEWWNQ |
| 39406 | WRYTERIVH |
| 39407 | WNDCEPDTT |
| 39408 | WNDTDGNEG |
| 39409 | WYDNAGNKN |
| 39410 | WYPDEADHA |
| 39411 | WYQDWHPRM |
| 39412 | YDCCCGWKD |
| 39413 | YDCIPRCKP |
| 39414 | YDDAEMRGH |
| 39415 | YDEMYYCVG |
| 39416 | YDHRCYVRG |
| 39417 | YDNKPLPKH |
| 39418 | YDSCDCSRF |
| 39419 | YDTRWQPRC |
| 39420 | YDWKAADGW |
| 39421 | YDYRSYPVA |
| 39422 | YEAKETERP |
| 39423 | YEVDEEIKI |
| 39424 | YEVKEEPVS |
| 39425 | YGCFDRCMR |
| 39426 | YGDFEWCKR |
| 39427 | YGPEDLHKW |
| 39428 | YHDCRLHRP |
| 39429 | YKDARWPLW |
| 39430 | YKECHWHKE |
| 39431 | YKTVDVGPH |
| 39432 | YPNKDGERN |
| 39433 | YPWFDGWQW |
| 39434 | YQYFELPKW |
| 39435 | YRHEEYWHN |
| 39436 | YRHEPEDEG |
| 39437 | YRPGPTIRT |

### Example 43

### AAV5 Variants with Thyroid Gland Tissue Tropism as Identified by Machine Learning

[0999] This example describes preferred properties of engineered AAV5 variants that display thyroid gland tissue tropism as identified by machine learning methods. The same bioinformatics pre-process, machine learning methods, and analyses as described in EXAMPLE 19 and FIGS. 19-FIG. 22 were carried out to identify preferred properties of engineered AAV5 variants that display thyroid gland tissue tropism.

[1000] Favored biophysical properties and favored amino acid residues at each position in the 581 to 589 region of an AAV5 VP capsid polypeptide, which are associated with a higher probability of thyroid gland tissue tropism are described below. Any of the below machine learning-derived positional amino acid preferences described in TABLE 70 can be present alone or in combination with each other or in combination with any of the amino acid preferences observed and described in EXAMPLE 15, TABLE 29. Listed below in TABLE 70 are a summary of positional features shared between the top important features for thyroid gland tropism extracted from the ML models.

TABLE 70
Machine Learning-Derived Thyroid Gland Tissue Tropism Rules

High mutability at Xaa1
Xaa1 is selected from N
Low surface accessibility at Xaa2
Xaa2 is selected from F, G, or M
High solubility at Xaa3
Xaa3 is selected from F
Low mutability at Xaa3
Xaa3 is selected from Y, F, L, or C
Medium mol mass at Xaa3
Xaa3 is selected from D, E, R, K, V, P,
M, I, L, N, Q, T, or C
Low surface accessibility at Xaa3
Xaa3 is selected from V, I, L, or C
High goldman engelman steitz at Xaa4
Xaa4 is selected from L or V
Low surface accessibility at Xaa4
Xaa4 is selected from V, M, A, G, F, I, or L
Low mol mass at Xaa4
Xaa4 is selected from D, A, G, I, L, or N
High solubility at Xaa5
Xaa5 is selected from C, L, F, M, V, or Y
Or
Low solubility at Xaa5
Xaa5 is selected from D
Low average flexibility at Xaa5
Xaa5 is selected from F, M, or W
Low average flexibility at Xaa6
Xaa6 is selected from F, M, or W
High mutability at Xaa7
Xaa7 is selected from N
Low volume at Xaa7
Xaa7 is selected from P, N, or T
Low average flexibility at Xaa8
Xaa8 is selected from F, M, or W
Low surface accessibility at Xaa8
Xaa8 is selected from M, G, or F
Low mutability at Xaa9
Xaa9 is selected from R, K, P, H, or C
Low hydropathy at Xaa9
Xaa9 is selected from R

[1001] TABLE 71 below provides sequences of the 581 to 589 region for variant AAV VP1 capsid polypeptides that exhibited thyroid gland tissue tropism and comport to one or more of the rules provided in TABLE 70. The present disclosure, thus, provides for rAAVs composed of engineered AAV5 VP1 capsid polypeptides having a SEQ ID NO: 2, wherein the Xaa1 to Xaa9 region is any one of SEQ ID NO: 41438-SEQ ID NO: 42437, as disclosed in TABLE 71. Also encompassed herein are rAAVs composed of engineered AAV5 VP2 capsid polypeptides and engineered AAV5 VP3 capsid polypeptides having the sequences disclosed in the below table at the regions in AAV5 VP2 (amin acid residues 445 to 453) and AAV5 VP3 (amino acid residues 389-397) corresponding to the amino acids in the AAV5 VP1 581 to 589 region.

TABLE 71
Sequences of the 581 to 589 Region in AAV5 VP1
Capsid Polypeptide that Drive Thyroid
Gland Tissue Tropism

| SEQ | |
|---|---|
| ID | 581-589 |
| NO | Sequence |
| 41438 | AACAVWKGE |
| 41439 | AANWFTHDK |
| 41440 | ACWLWFYFG |
| 41441 | ADSADRVYN |
| 41442 | AFHHMMNTP |
| 41443 | AFKKPSLFR |
| 41444 | AFYNYEIMA |
| 41445 | AHAIMMRDF |
| 41446 | AHHALSFWR |
| 41447 | AHHEVSFWR |
| 41448 | AHNIMMRDF |
| 41449 | AHTIMMRDV |
| 41450 | AHTIMMRHF |
| 41451 | AHTIMMRYF |
| 41452 | AIHEPAENR |
| 41453 | AIHEPAGDR |
| 41454 | AIHKPAEDR |
| 41455 | AIHVPAEDR |
| 41456 | AKIPIDHFA |
| 41457 | AKSSIEFSA |
| 41458 | AKSSIEHSA |
| 41459 | AKSSIEYSG |
| 41460 | AMHEPAEDR |
| 41461 | AMMKMMKAN |
| 41462 | AMMLMMKAN |
| 41463 | AMMQMMKTN |
| 41464 | AMMQMMRAN |
| 41465 | ANERHWTSF |
| 41466 | ANVRHWTYF |
| 41467 | ARAMYVESF |
| 41468 | ARSSIEYSA |
| 41469 | ARTMYGESF |
| 41470 | ASDTMNCGS |
| 41471 | ASYHWTHAS |
| 41472 | ASYHWTHVG |
| 41473 | ATERHWTYF |
| 41474 | ATRDWMSCM |
| 41475 | AVDEVGSSN |
| 41476 | AVHEPAEDR |
| 41477 | AVILSSMYS |
| 41478 | AVTVDGNNR |
| 41479 | AWMDCPIMC |
| 41480 | AYDEKKNQM |
| 41481 | AYDKKKNQM |
| 41482 | AYDQRKNQM |
| 41483 | AYLINMLWM |
| 41484 | AYNQKKNQM |
| 41485 | CFENLQIMA |
| 41486 | CGGQFWQGI |
| 41487 | CKDEFIVGN |
| 41488 | CKIPIDHFA |
| 41489 | CKQKENGQN |
| 41490 | CKQQFIGQN |
| 41491 | CKQQFTGQN |
| 41492 | CKQRFNGQN |
| 41493 | CMESYDHGS |
| 41494 | CMFGMVNYP |
| 41495 | CMFGTVNYT |
| 41496 | CMKSFDHGS |
| 41497 | CMQKDGNDR |
| 41498 | CMRGDKRKR |
| 41499 | CMRGDORNR |
| 41500 | CMRGDTRNR |
| 41501 | CMRKDGNDR |
| 41502 | CMRMDCNDR |
| 41503 | CMRMDGNNR |
| 41504 | CMRMVGNDR |
| 41505 | CMRSDKRNR |
| 41506 | CMRVDGNDR |
| 41507 | CMVDANHVW |
| 41508 | CNFNNNDHV |
| 41509 | CTLFTNFQY |
| 41510 | CTLISNFQY |
| 41511 | CVGQFWEGI |
| 41512 | CVGQFWKGI |
| 41513 | CVGQFWRGI |
| 41514 | CVVQFWQGI |
| 41515 | DANDMSSDR |
| 41516 | DARFGINFG |
| 41517 | DARFGLNFA |
| 41518 | DARFYIAEG |
| 41519 | DARFYISEG |
| 41520 | DCVIDWCQM |
| 41521 | DDSARYWQV |
| 41522 | DDSSWDNLF |
| 41523 | DELKMGHNS |
| 41524 | DFEYTCNQH |
| 41525 | DFEYTCNQS |
| 41526 | DFQKPSLFR |
| 41527 | DGAHFRSCF |
| 41528 | DGIIDWCQM |
| 41529 | DGSQAGPDK |
| 41530 | DGVIDWCKM |
| 41531 | DGVIDWRQM |
| 41532 | DGVVDWCQM |
| 41533 | DHIACKKLC |
| 41534 | DHTACKKVC |
| 41535 | DHTACKRLC |
| 41536 | DHTGCKKLC |
| 41537 | DIFFKCEWV |
| 41538 | DIFFKCWIA |
| 41539 | DIHHLCNIF |
| 41540 | DIHHWCNIC |
| 41541 | DIHPWCNIF |
| 41542 | DINAKKNIC |
| 41543 | DINGKKNIR |
| 41544 | DINGKKNIW |
| 41545 | DINGKKNVC |
| 41546 | DINGRKNIC |
| 41547 | DIQHWCNIF |
| 41548 | DIYHFNHKS |
| 41549 | DIYHWCNIF |
| 41550 | DKEDDHRRA |
| 41551 | DKIAIDHFA |
| 41552 | DKIPIAHFA |
| 41553 | DKIPIDHFT |
| 41554 | DKIPMDHFA |
| 41555 | DKIPVDHFA |
| 41556 | DKISIDHFA |
| 41557 | DKLPIDHFA |
| 41558 | DKMLMVFKR |
| 41559 | DKMPIDHFA |
| 41560 | DKVPIDHFA |
| 41561 | DLHHWCNIF |
| 41562 | DLNGKKNIC |
| 41563 | DQLKMGHNI |
| 41564 | DRCFRDDFE |
| 41565 | DRCFRDDMV |
| 41566 | DRWTMQHWE |
| 41567 | DSGKANTQS |
| 41568 | DSKADHFVN |
| 41569 | DSKADHGVN |
| 41570 | DSKADNCVN |
| 41571 | DSKADPCVN |
| 41572 | DSKADRCVN |
| 41573 | DSKADYCVN |
| 41574 | DSMADDPHL |
| 41575 | DSMGDDQHL |
| 41576 | DSRFNESLG |
| 41577 | DTVPSHLGC |
| 41578 | DVLKMGHNI |
| 41579 | DVVIDWCQM |
| 41580 | DWIVDPPKP |
| 41581 | DWIVDTAKP |
| 41582 | DWIVDTPKA |
| 41583 | DWIVDTPKL |
| 41584 | DWIVDTPQP |
| 41585 | DWMDCSIMC |
| 41586 | ECERAKGEW |
| 41587 | ECERPKGEW |
| 41588 | ECERTKGGW |
| 41589 | ECERTKGKW |
| 41590 | ECERTKGQW |
| 41591 | ECERTRGEW |
| 41592 | ECKRTKGEW |
| 41593 | EDDGDDNIP |
| 41594 | EEIAGHVGA |
| 41595 | EFHQDMFEC |
| 41596 | EFSGYTNQE |
| 41597 | EFYDYEIMA |
| 41598 | EFYNYEIMT |
| 41599 | EFYNYGIMA |
| 41600 | EFYNYQIMA |
| 41601 | EHGAVHNAS |
| 41602 | EHGAVLNAN |
| 41603 | EHHGENHCN |
| 41604 | EHMTCMHCE |
| 41605 | EIHQDMFEF |
| 41606 | EKAMLLNGT |
| 41607 | EKAMLMNGA |
| 41608 | EKAMVLNGA |
| 41609 | EKEDDHRRP |
| 41610 | EKFMVMNSC |
| 41611 | ELMWWQWDR |
| 41612 | EMSSEMEKL |
| 41613 | ERFMVMNSF |
| 41614 | ERFMVMNSW |
| 41615 | ERFMVMSSC |
| 41616 | ERGAVHNAN |
| 41617 | ERHAFNHCN |
| 41618 | ERHGFNHCK |
| 41619 | ERHGFNHCS |
| 41620 | ERHGFNHWN |
| 41621 | ERHGINHCN |
| 41622 | ERHGVNHCN |
| 41623 | ERQTLAMDR |
| 41624 | ESMWYYVMA |
| 41625 | ESSWPLQWN |
| 41626 | ESTISPNHK |
| 41627 | ESVDHWGDW |
| 41628 | ETAMGTNLY |
| 41629 | ETAMLLNGA |
| 41630 | ETAYRENPC |
| 41631 | ETGPSMFSF |
| 41632 | ETGYGENPC |
| 41633 | ETGYQENPC |
| 41634 | ETGYRENSC |
| 41635 | EVSKFWRHT |
| 41636 | EVTVDGNNR |
| 41637 | EVVAGHVGA |
| 41638 | EYCHWWYKL |
| 41639 | EYERLGDSW |
| 41640 | EYMNCMHCE |
| 41641 | FAEPCMAIW |
| 41642 | FCERNMMAQ |
| 41643 | FCNRNVNRP |
| 41644 | FKFWTDNAD |
| 41645 | FKFWTDNTE |
| 41646 | FKFWTDNTN |
| 41647 | FKSIQCSWG |
| 41648 | FKSVQCSWA |
| 41649 | FMVEFAYMD |
| 41650 | FNQTMIFGA |
| 41651 | FNVPDLLGA |
| 41652 | FPANYYSNA |
| 41653 | FPGNYHSNA |
| 41654 | FPKFCKCIS |
| 41655 | FSDTMNCGS |
| 41656 | FSQTMIFCA |
| 41657 | FTRDWMSCM |
| 41658 | FVEPCMAIL |
| 41659 | FVEPCMAIS |
| 41660 | FVEPCMTIW |
| 41661 | FVERCMAIW |
| 41662 | FVQPCMAIW |
| 41663 | GAYFFDKYK |
| 41664 | GAYFFDKYS |
| 41665 | GAYFFHKYN |
| 41666 | GCQGFFNMK |
| 41667 | GCQGFFNMP |
| 41668 | GDAALYNWF |
| 41669 | GDGSWDNLF |
| 41670 | GDSSLDNLF |
| 41671 | GDSSWDNVF |
| 41672 | GDSVLYNWF |
| 41673 | GDTSWDNLF |
| 41674 | GELKMGHNI |
| 41675 | GFTVDGNNR |
| 41676 | GGPKAANDW |
| 41677 | GIHHWCNIF |
| 41678 | GKMVMVFKR |
| 41679 | GMRGDKRNR |
| 41680 | GRFMVMNSC |
| 41681 | GSSWPLLWN |
| 41682 | GSYHWTHAG |
| 41683 | GTADCRNSS |
| 41684 | GTGEWMHMA |
| 41685 | GVAKAANDW |
| 41686 | GVNVDGNNR |
| 41687 | GVPKAANDL |
| 41688 | GVPRAANDW |
| 41689 | GVPVDGNNR |
| 41690 | GVSVDGNNR |
| 41691 | GVTGDGNNR |
| 41692 | GVTIDGNNR |
| 41693 | GVTLDGNNR |
| 41694 | GVTVDANNR |
| 41695 | GVTVDGNDR |
| 41696 | GWMDCSIMC |
| 41697 | GYLINMLLM |
| 41698 | GYLISMLWM |
| 41699 | GYLIYMLWM |
| 41700 | GYLTNMLWM |
| 41701 | GYRINMLWM |
| 41702 | HAGSGSNVL |
| 41703 | HAGTGSNVL |
| 41704 | HHICFQHCK |
| 41705 | HIHHWCNIF |
| 41706 | HKISLFKVN |
| 41707 | HNLMGWYGP |
| 41708 | HQTLDMERF |
| 41709 | HQTLDMKKF |
| 41710 | HQTLDMKRV |
| 41711 | HRCFRDDME |
| 41712 | HSAYFRVGA |
| 41713 | HTGPGSNVL |
| 41714 | HVEYVIWPG |
| 41715 | HVEYVIWPV |
| 41716 | HVKYV1WPD |
| 41717 | HW1SFERHP |
| 41718 | HYEICHISK |
| 41719 | IADIVWQGQ |
| 41720 | IAHPFKCGG |
| 41721 | ICAIANTCN |
| 41722 | IDDDNWEQP |
| 41723 | IDDGDDNIP |
| 41724 | IEIALHACW |
| 41725 | IFAAPMPGM |
| 41726 | IFHSNPVVR |
| 41727 | IFHSTPIVR |
| 41728 | IFVAPMPGR |
| 41729 | IFVASMPGM |
| 41730 | IFWMKCGWR |
| 41731 | IGNRNVNRP |
| 41732 | IINWLYNEP |
| 41733 | IISIRMYQA |
| 41734 | IKFWTDNTD |
| 41735 | IMIEFAYMD |
| 41736 | IMLEFAYMD |
| 41737 | IMVEFADMD |
| 41738 | IMVEFSYMD |
| 41739 | IMVEFTYMD |
| 41740 | INDCCTMPD |
| 41741 | INDCCTMSD |
| 41742 | INVPD1LGA |
| 41743 | INVPDLLGG |
| 41744 | INVPDLLGS |
| 41745 | IPKFCKCSS |
| 41746 | IPKVCKCIS |
| 41747 | IPQFCKCIS |
| 41748 | IPWEYAMND |
| 41749 | IPWPYAMND |
| 41750 | ISDCFTCAD |
| 41751 | ISGMKSAMA |
| 41752 | ITETPGNTH |
| 41753 | ITGAKMYMG |
| 41754 | ITETPGNTH |
| 41755 | ITGATMYMG |
| 41756 | ITGIRMYQA |
| 41757 | ITSIGMYQA |
| 41758 | ITSIRMDQA |
| 41759 | ITSIRMFQA |
| 41760 | ITSIRMYKA |
| 41761 | ITSIRMYRA |
| 41762 | ITS1WMYQA |
| 41763 | 1TSLRMYQA |
| 41764 | ITSNRMYQA |
| 41765 | IVGADRCQA |
| 41766 | IVNACMAEK |
| 41767 | IVQSFWNIP |
| 41768 | IVVAVNQSL |
| 41769 | IWDFKCNQC |
| 41770 | IWEDYLHVG |
| 41771 | IWKDYLHMG |
| 41772 | IWKDYLHVA |
| 41773 | 1WKDYLYVG |
| 41774 | IYEERNAQM |
| 41775 | IYICGPMIN |
| 41776 | IYIREPMIN |
| 41777 | IYIRGPMLN |
| 41778 | IYIRVPMIN |
| 41779 | IYLRGPMIN |
| 41780 | IYRLREKQE |
| 41781 | IYTRGPMIN |
| 41782 | IYVRGPMIN |
| 41783 | KAFGWFHFD |
| 41784 | KAIGWFHFH |
| 41785 | KAIGWFHFN |
| 41786 | KAIGWFYFD |
| 41787 | KALGWFHFD |
| 41788 | KAMGWFHFD |
| 41789 | KAVAVNQSL |
| 41790 | KDAGDDNIP |
| 41791 | KDDADDNIP |
| 41792 | KDDGDDNIL |
| 41793 | KDDGDDNIQ |
| 41794 | KDDGDNNIP |
| 41795 | KDDGGDNIP |
| 41796 | KDGGDDNIP |
| 41797 | KDNGDDNIP |
| 41798 | KDRMLAGQR |
| 41799 | KDSHVHSFF |
| 41800 | KDYGDDNEP |
| 41801 | KECDPQHWW |
| 41802 | KEMRKQGMW |
| 41803 | KEYAPQHWW |
| 41804 | KEYDLQHWW |
| 41805 | KEYDPEHWW |
| 41806 | KEYDPQNWW |
| 41807 | KEYDPQYWW |
| 41808 | KEYDPRHWW |
| 41809 | KFSGYTNQE |
| 41810 | KFYNYEEMA |
| 41811 | KGRWMYHWW |
| 41812 | KHCHWWYKL |
| 41813 | KIEMLCCPG |
| 41814 | KIEMLCCQR |
| 41815 | KEEMLCCQV |
| 41816 | KIHQDMFEC |
| 41817 | KIKMLCCQG |
| 41818 | KIMWWQWDR |
| 41819 | KKRRDTHIY |
| 41820 | KLEMLCCQG |
| 41821 | KLYGRRHWH |
| 41822 | KMQNENRQM |
| 41823 | KNDGDDNIP |
| 41824 | KPEWTMMYD |
| 41825 | KPQWAMMYD |
| 41826 | KPYEDIARM |
| 41827 | KQEMQGVCR |
| 41828 | KQYDPQHWW |
| 41829 | KRETLAMDR |
| 41830 | KRFMVMNSC |
| 41831 | KRHGFNHCN |
| 41832 | KSFYMCQCG |
| 41833 | KSFYMCRCA |
| 41834 | KSFYMFRCG |
| 41835 | KSSMLEHSW |
| 41836 | KSTMCDNDA |
| 41837 | KTEMSDMNW |
| 41838 | KTEMSDMYW |
| 41839 | KTYVWEHES |
| 41840 | KVLICQNGQ |
| 41841 | KVVAVDQSL |
| 41842 | KVVAVNRSL |
| 41843 | KWEQEPNRN |
| 41844 | KWRQAEYDE |
| 41845 | KWTRTGSSF |
| 41846 | KYCHWWYRL |
| 41847 | KYCLWWYKL |
| 41848 | KYCNWWYKL |
| 41849 | KYRHWWYKL |
| 41850 | KYWHWWYKL |
| 41851 | LAETPGNTH |
| 41852 | LAIALHACW |
| 41853 | LAIPQPVNG |
| 41854 | LATIMQGFN |
| 41855 | LATIMQPFN |
| 41856 | LATTMRAFN |
| 41857 | LCAEFPHCR |
| 41858 | LCAEYPHGR |
| 41859 | LCTEFPHGR |
| 41860 | LDALPMTQA |
| 41861 | LEIAMHACW |
| 41862 | LEINWWYPG |
| 41863 | LELALHACW |
| 41864 | LELNWWYPG |
| 41865 | LEVNWWFPG |
| 41866 | LEVNWWYAG |
| 41867 | LEVNWWYPA |
| 41868 | LEVNWWYPV |
| 41869 | LEVNWWYQG |
| 41870 | LFAEFPHGR |
| 41871 | LFTAFRKFT |
| 41872 | LFTAFRQFA |
| 41873 | LFTAFRQFN |
| 41874 | LFWMKCGWR |
| 41875 | LGDYVNDEG |
| 41876 | LGERTMDRI |
| 41877 | LHTIDANRR |
| 41878 | LIMREPPFD |
| 41879 | LIMRESSFD |
| 41880 | LIMRLSPFD |
| 41881 | LIVRISPFD |
| 41882 | LKNTMWKCA |
| 41883 | LKSCIQFSC |
| 41884 | LKVNWWYPG |
| 41885 | LLKFIHLNE |
| 41886 | LLKIYESNQ |
| 41887 | LMEFTEDCN |
| 41888 | LMEFTEDGD |
| 41889 | LMEFTEDGS |
| 41890 | LMEFTEEGN |
| 41891 | LMEITEDGN |
| 41892 | LMEPYGNCD |
| 41893 | LMRGTVKNG |
| 41894 | LMRSTVRNG |
| 41895 | LMSCIKFSC |
| 41896 | LMSCIPFSC |
| 41897 | LMSCIQISC |
| 41898 | LMSCLQFSC |
| 41899 | LNGMKSAMA |
| 41900 | LNVPDLLGA |
| 41901 | LPKFCKCIS |
| 41902 | LPRCFIAAC |
| 41903 | LPRCVIAAY |
| 41904 | LPRYVIAAC |
| 41905 | LSCCANVFC |
| 41906 | LSCCNNVFC |
| 41907 | LSCCTNGFC |
| 41908 | LSCCTNIFC |
| 41909 | LSDFVNDEG |
| 41910 | LSDHSQAAV |
| 41911 | LSDYVNEEG |
| 41912 | LSDYVNNEG |
| 41913 | LSDYVTDEG |
| 41914 | LSLSGETQL |
| 41915 | LSSCRGMIA |
| 41916 | LSYHTPVMA |
| 41917 | LTAREKKCG |
| 41918 | LTDYVNDEG |
| 41919 | LTEIPGNTH |
| 41920 | LTEKPGNTH |
| 41921 | LTEPPGNTH |
| 41922 | LTERPGNTH |
| 41923 | LTETPGNTQ |
| 41924 | LTQEDFTQM |
| 41925 | LTQTPGNTH |
| 41926 | LTRADFTQM |
| 41927 | LTREDFAQM |
| 41928 | LTREDFNQM |
| 41929 | LTREDFSQM |
| 41930 | LTREDITQM |
| 41931 | LTRQDFTQM |
| 41932 | LTRVDFTQM |
| 41933 | LTSERMYQA |
| 41934 | LVGADRCQA |
| 41935 | LWCNENAMA |
| 41936 | LWCNENAME |
| 41937 | LWCNENAMG |
| 41938 | LWCNENAMN |
| 41939 | LWCNENPMD |
| 41940 | LWCTENAMD |
| 41941 | LWDFKCTQC |
| 41942 | LWGNENAMD |
| 41943 | LYAERNAQM |
| 41944 | LYEERHAQM |
| 41945 | LYEERNSQM |
| 41946 | LYEWRNAQM |
| 41947 | LYHHDILQT |
| 41948 | LYKERNAQM |
| 41949 | LYQERNAQM |
| 41950 | LYRWEVHNS |
| 41951 | LYTEYITKH |
| 41952 | LYYEAEHST |
| 41953 | LYYIPEHST |
| 41954 | MAGYLEKPF |
| 41955 | MAVTQSHQF |
| 41956 | MFVAPMPGM |
| 41957 | MGAYIMWDC |
| 41958 | MHVFSNVFG |
| 41959 | MIANYEGEM |
| 41960 | MIGNYEGEM |
| 41961 | MIHLPFGKR |
| 41962 | MIHLPFGQR |
| 41963 | MIHMPFGER |
| 41964 | MIVIYEGEM |
| 41965 | MIVNYEGEV |
| 41966 | MIVNYEGKM |
| 41967 | MIVRCSNTW |
| 41968 | MIVSYEGEM |
| 41969 | MLEQEPNRN |
| 41970 | MLFAENNGL |
| 41971 | MSSMLEHAW |
| 41972 | MSSMLERSW |
| 41973 | MTARRESAY |
| 41974 | MTARRESSY |
| 41975 | MTARRESTS |
| 41976 | MTARRGSTY |
| 41977 | MWEKEPNRN |
| 41978 | MWEQEANRN |
| 41979 | MWEQEPNQN |
| 41980 | MWFAANNGL |
| 41981 | MWGWPGDSF |
| 41982 | NAALYGGWI |
| 41983 | NACTGTWWR |
| 41984 | NAELFGGWI |
| 41985 | NAELSGGWI |
| 41986 | NAELYGGWV |
| 41987 | NAEQYGGWI |
| 41988 | NAEVYGGWI |
| 41989 | NAGLYGGWI |
| 41990 | NALVLQNVR |
| 41991 | NANDMGSDR |
| 41992 | NANDMSGDR |
| 41993 | NANDMSSDH |
| 41994 | NANDMSSNR |
| 41995 | NANDMSSYR |
| 41996 | NANVLSSDR |
| 41997 | NANVMSSDR |
| 41998 | NAQHAWENG |
| 41999 | NAVLYGGWI |
| 42000 | NAYENSHYP |
| 42001 | NAYLVHIPR |
| 42002 | NAYQCSHYP |
| 42003 | NAYQNSNYP |
| 42004 | NAYQTSHYP |
| 42005 | NCALERMPS |
| 42006 | NCAPARMPS |
| 42007 | NCAQERMPS |
| 42008 | NCLVNLCTY |
| 42009 | NCPPERMPS |
| 42010 | NCVVHLCTY |
| 42011 | NCVVNLCKY |
| 42012 | NCVVNPCTY |
| 42013 | NEAPMGLKY |
| 42014 | NEHPMGLKY |
| 42015 | NERPMGLKY |
| 42016 | NESPMGLKY |
| 42017 | NFWDQVHCV |
| 42018 | NFWNQVHCG |
| 42019 | NFWNQVHFV |
| 42020 | NFWSQVHCV |
| 42021 | NGAPERMPS |
| 42022 | NGCFVYWWL |
| 42023 | NGFMPAVMA |
| 42024 | NGRLLWQRY |
| 42025 | NGRLWWERY |
| 42026 | NGRLWWKRY |
| 42027 | NGRLWWQRC |
| 42028 | NGRLWWQRF |
| 42029 | NGVIINQCF |
| 42030 | NGVINDCEF |
| 42031 | NGVNMNQCF |
| 42032 | NGVSINQCF |
| 42033 | NGWLWWQRY |
| 42034 | NGYLVDIPR |
| 42035 | NGYLVNIPR |
| 42036 | NGYLVYIPR |
| 42037 | NHADYMRDA |
| 42038 | NHADYMRHA |
| 42039 | NHADYMRKA |
| 42040 | NHADYMRNV |
| 42041 | NHTACKKLC |
| 42042 | NHVDANLRA |
| 42043 | NHVNANRRA |
| 42044 | NHVNDNLRA |
| 42045 | NHVNTNLRA |
| 42046 | NIMSYSSWN |
| 42047 | NKMVMVFKR |
| 42048 | NLKWDWQNH |
| 42049 | NLKWREHHP |
| 42050 | NLKWRETHP |
| 42051 | NMCEYANVQ |
| 42052 | NMCKCANVQ |
| 42053 | NMCKFANVQ |
| 42054 | NMCKYANVP |
| 42055 | NMCKYANVR |
| 42056 | NMCKYPNVQ |
| 42057 | NMCKYSNVQ |
| 42058 | NMCRYANVQ |
| 42059 | NMHWQYQFE |
| 42060 | NMHWRYKFE |
| 42061 | NMIPMDSMP |
| 42062 | NMLPFNCNF |
| 42063 | NMPWRYQFE |
| 42064 | NMYWRYQFE |
| 42065 | NNCNMNVMR |
| 42066 | NNMHSDWCV |
| 42067 | NNMWCQKCP |
| 42068 | NNVNANLRA |
| 42069 | NPSQMDMDT |
| 42070 | NQAHCILNC |
| 42071 | NQLQMWYRV |
| 42072 | NQTHCIINC |
| 42073 | NRFASWEGM |
| 42074 | NSDEESGME |
| 42075 | NSLHNNEDA |
| 42076 | NSLHNNEHP |
| 42077 | NSLWCQKCP |
| 42078 | NSMWCEKCP |
| 42079 | NSMWCQECP |
| 42080 | NSMWCQKCL |
| 42081 | NSMWCQKCR |
| 42082 | NSMWCQKCT |
| 42083 | NSMWCQQCP |
| 42084 | NSMWCRKCP |
| 42085 | NSRHNNEDP |
| 42086 | NSSCIQECW |
| 42087 | NSSLIQECW |
| 42088 | NSSWIEECW |
| 42089 | NSSWIQECL |
| 42090 | NSSWIQQCW |
| 42091 | NSSWLQECW |
| 42092 | NSVHNNEDP |
| 42093 | NTADCRNSS |
| 42094 | NTDEESGMP |
| 42095 | NTKYAERSG |
| 42096 | NTQFAERSG |
| 42097 | NTQYADRSG |
| 42098 | NTQYAERCG |
| 42099 | NTQYAERPG |
| 42100 | NTQYAERSA |
| 42101 | NTQYSERSG |
| 42102 | NTRFADQTE |
| 42103 | NTRFPDQAE |
| 42104 | NTRFPDQTA |
| 42105 | NTRFSDQTE |
| 42106 | NTSWIQECW |
| 42107 | NTYQNSHYP |
| 42108 | NVFVAYCKY |
| 42109 | NVIVAYCKS |
| 42110 | NVLAFNCNF |
| 42111 | NVLPFNCHF |
| 42112 | NVLPFNGNF |
| 42113 | NVLPVNCNF |
| 42114 | NVLSHTMME |
| 42115 | NVLVHTMME |
| 42116 | NVMGHTMME |
| 42117 | NVNDMSSDR |
| 42118 | NVQCNRANG |
| 42119 | NVQCTRADG |
| 42120 | NVQCTRSNG |
| 42121 | NVYVAYCKS |
| 42122 | NWADSPWCY |
| 42123 | NWEHCWWAH |
| 42124 | NWENSPWCY |
| 42125 | NWEPCWWAY |
| 42126 | NWEPCWWDH |
| 42127 | NWEPCWWSH |
| 42128 | NWEPCWWTH |
| 42129 | NWERCWWAH |
| 42130 | NWVDSPWCY |
| 42131 | PDRMLAGQR |
| 42132 | PHICFQHCK |
| 42133 | PHTIMMRDF |
| 42134 | PIAKFANMS |
| 42135 | PLDWKLNNR |
| 42136 | PLDWPLNNR |
| 42137 | PLYGRRHWH |
| 42138 | PNILMMFEA |
| 42139 | PNIVMMFEP |
| 42140 | PNMLMMFEP |
| 42141 | PSPHEWMAF |
| 42142 | PSRPCIYHT |
| 42143 | PWAQTEKPN |
| 42144 | PWGETEKPN |
| 42145 | PWIPNQIKR |
| 42146 | PWTETEKPN |
| 42147 | QAWWKIFWH |
| 42148 | QEMRKKGMW |
| 42149 | QEMRKRGMW |
| 42150 | QEMRQQGMW |
| 42151 | QFSGYTNQV |
| 42152 | QFYNYEIMA |
| 42153 | QGQWMYHWW |
| 42154 | QGRWMYNWW |
| 42155 | QGRWMYYWW |
| 42156 | QGRWVYHWW |
| 42157 | QIHQDMFEC |
| 42158 | QIMRISPFD |
| 42159 | QIYGRRHWH |
| 42160 | QKAMLLNGA |
| 42161 | QLYGRRHLH |
| 42162 | QMSSEMEQL |
| 42163 | QNSNVMGCM |
| 42164 | QRHGFNHCN |
| 42165 | QSKWYYVMA |
| 42166 | QSRAGYMHY |
| 42167 | QSVDHWGDL |
| 42168 | QVHEWVFPR |
| 42169 | QVLICKNGQ |
| 42170 | QVLICQNAQ |
| 42171 | QVLICQNGL |
| 42172 | QVLICRNGQ |
| 42173 | QVINCQNGQ |
| 42174 | QVVICQNGQ |
| 42175 | QVV1DHPKY |
| 42176 | QWIRTGSSF |
| 42177 | QWTRAGSSF |
| 42178 | QYCHWWYKL |
| 42179 | RAIGWFHFD |
| 42180 | REISVKAVA |
| 42181 | REISVQAVA |
| 42182 | REMRKQGMW |
| 42183 | RFFAAELQL |
| 42184 | RFFAAEPQW |
| 42185 | RFFAAQLQW |
| 42186 | RFFADELQW |
| 42187 | RFFAVELQW |
| 42188 | RHICFKHCK |
| 42189 | RHMCFQHCK |
| 42190 | RMATMFTCR |
| 42191 | RMHDACFDN |
| 42192 | RMHDACYDT |
| 42193 | RMHDGCYDN |
| 42194 | RMHDTCYDN |
| 42195 | RMNDACYDN |
| 42196 | RMRDACYDN |
| 42197 | RMYDACYDN |
| 42198 | RPEYANHMH |
| 42199 | RQILDMKRF |
| 42200 | RSFYMCRCG |
| 42201 | RTEYADHMH |
| 42202 | RTKYANHMH |
| 42203 | RTYLWEHES |
| 42204 | RWFAENNGL |
| 42205 | RWRCRMRGN |
| 42206 | RYFAAELQW |
| 42207 | SANDMSSDR |
| 42208 | SANWCTHDK |
| 42209 | SANWFAHDK |
| 42210 | SASWFTHDK |
| 42211 | SATWFTHDK |
| 42212 | SCNIVEQVH |
| 42213 | SDAVLYNWF |
| 42214 | SIDIDYVHL |
| 42215 | SEYAAMRDP |
| 42216 | SEYAAMRDT |
| 42217 | SEYAAMRDY |
| 42218 | SEYAGMRDS |
| 42219 | SFTLLVGDY |
| 42220 | SGCAMHNMG |
| 42221 | SGCAMLDMG |
| 42222 | SGCAMLHMG |
| 42223 | SGCAMLNFG |
| 42224 | SGCAMLNMA |
| 42225 | SGCAMLNME |
| 42226 | SGCAMLNMV |
| 42227 | SGCAMLNVG |
| 42228 | SGCAMLYMG |
| 42229 | SGCAMPNMG |
| 42230 | SGCAMVNMG |
| 42231 | SGCGMLNMG |
| 42232 | SGCVMLNMG |
| 42233 | SGDYYDGMP |
| 42234 | SGFASWEGM |
| 42235 | SGLGMPNWP |
| 42236 | SGWAMLNMG |
| 42237 | SHMMNHAFW |
| 42238 | SHMMSNAFW |
| 42239 | SIKMCQSTV |
| 42240 | SIKVCESTV |
| 42241 | SIKVCQSNV |
| 42242 | SIKVCRSTV |
| 42243 | SIPSIGSEE |
| 42244 | SIVDFESAA |
| 42245 | SKSSIEYSA |
| 42246 | SLHSIGSEE |
| 42247 | SLPSIGNEE |
| 42248 | SLPSLGSEE |
| 42249 | SLPSVGSEE |
| 42250 | SMCKYANVQ |
| 42251 | SMIPMDSMT |
| 42252 | SMIPMDSVP |
| 42253 | SMSPMDSMP |
| 42254 | SMVPMDSMP |
| 42255 | SNERHWTYF |
| 42256 | SNMMSHAFW |
| 42257 | SNWWFMFEA |
| 42258 | SPQHCIGMP |
| 42259 | SRFASWDGM |
| 42260 | SRFASWEGV |
| 42261 | SSAYYDGMP |
| 42262 | SSDFYDGMP |
| 42263 | SSDYYAGMP |
| 42264 | SSDYYDGMT |
| 42265 | STAACRNSS |
| 42266 | STADCRNNS |
| 42267 | STADCRSSS |
| 42268 | STADGRNSS |
| 42269 | STADYRNSS |
| 42270 | STAGCRNSS |
| 42271 | STGDCRNSS |
| 42272 | STPDCRNSS |
| 42273 | STSADPNCG |
| 42274 | STSADPYCG |
| 42275 | STSGDPHCG |
| 42276 | STTDCRNSS |
| 42277 | STTFASSWE |
| 42278 | STWDWMSCM |
| 42279 | SVIQNEMRI |
| 42280 | SVLGHTMME |
| 42281 | SVLQNEMRI |
| 42282 | SVNMRFAKH |
| 42283 | SVNMRFTEH |
| 42284 | SVNWFTHDK |
| 42285 | SVVQNEMPI |
| 42286 | SVVQTEMRI |
| 42287 | SWIDMPMMQ |
| 42288 | SWTALGSVT |
| 42289 | SWTALSSVP |
| 42290 | SWTAVGSVP |
| 42291 | SWTIVEQVH |
| 42292 | SYLINMLWM |
| 42293 | SYMMSHAFW |
| 42294 | TACAGTWWR |
| 42295 | TASAIDHPK |
| 42296 | TASGIDHPQ |
| 42297 | TASGIDHPT |
| 42298 | TASGMDHPK |
| 42299 | TAVINDCEF |
| 42300 | TAWIYWNEF |
| 42301 | TDDGDDNIP |
| 42302 | TDRMMAGQR |
| 42303 | TFVAPMPGM |
| 42304 | TGVINNCEF |
| 42305 | TGVLNDCEF |
| 42306 | TGVMNDCEF |
| 42307 | TGVTNDCEF |
| 42308 | TGWVYWNEF |
| 42309 | THHELSFWR |
| 42310 | TIHEPAEDR |
| 42311 | TKVNHIMRP |
| 42312 | TNDIWLQFS |
| 42313 | TNDIWWQFA |
| 42314 | TNDIWWQFC |
| 42315 | TNDIWWQFF |
| 42316 | TNDIWWQVS |
| 42317 | TNDIMNQYS |
| 42318 | TNKMLACSS |
| 42319 | TQDIYEHMQ |
| 42320 | TRFASWEGM |
| 42321 | TSEFVAISM |
| 42322 | TTEMSDMHW |
| 42323 | TTSADPHCG |
| 42324 | TTWVYWNEF |
| 42325 | TVSGIDHPK |
| 42326 | TVVINDCEF |
| 42327 | TVWVYWNEF |
| 42328 | TYDQKKNQM |
| 42329 | VCAEFPHGR |
| 42330 | VCAIVNTCN |
| 42331 | VCNRNVNRP |
| 42332 | VCWLWFYCG |
| 42333 | VCWLWFYFA |
| 42334 | VCWLWFYFV |
| 42335 | VCWVWFYFG |
| 42336 | VCWWWFYFG |
| 42337 | VFHSNPIVR |
| 42338 | VFVAPMPGM |
| 42339 | VFWMKCGWK |
| 42340 | VFWMQCGWR |
| 42341 | VGIPERAMP |
| 42342 | VGWLWFYFG |
| 42343 | VHKWDTLRD |
| 42344 | VHMGEKMWS |
| 42345 | WHMGWKMWS |
| 42346 | VIARCSNTW |
| 42347 | VIIRCSNTW |
| 42348 | VILRCSNTW |
| 42349 | VIVNYEGEM |
| 42350 | VIVRCANTW |
| 42351 | VIVRCPNTW |
| 42352 | VIVRCSNTG |
| 42353 | VIVRGSNTW |
| 42354 | VKFWTDNTD |
| 42355 | VLVRCSNTW |
| 42356 | VMEFTEDGN |
| 42357 | VNDCCTMRD |
| 42358 | VPDLFNQFC |
| 42359 | VPHPFKCGG |
| 42360 | VSDFKIYMG |
| 42361 | VSDTLNCGS |
| 42362 | VSFLPDEYC |
| 42363 | VSFLPNQYC |
| 42364 | VSYHWTHAG |
| 42365 | VTAFKIYMG |
| 42366 | VTAREEKCG |
| 42367 | VTDFEIYMG |
| 42368 | VTGAMMYMG |
| 42369 | VTIHERRCN |
| 42370 | VTSEWMHMA |
| 42371 | VTVHEHRCN |
| 42372 | VVICKRFVG |
| 42373 | VVTVDGNNR |
| 42374 | VWFAENNGL |
| 42375 | VWMDCSIMC |
| 42376 | VYEERNAQM |
| 42377 | VYRLRERQE |
| 42378 | VYRVREKQE |
| 42379 | WDCLLHKWR |
| 42380 | WDCLLNRWR |
| 42381 | WDCLVNKWR |
| 42382 | WECLLNKWR |
| 42383 | WGEACKLDT |
| 42384 | WHCLLNKWR |
| 42385 | WHGMRMIRA |
| 42386 | WHGMRMIRT |
| 42387 | WHGMRMLRP |
| 42388 | WHGMRMVRP |
| 42389 | WKVIYHQPG |
| 42390 | WKVIYHQRG |
| 42391 | WMEHYGNCD |
| 42392 | WMEPYDNCD |
| 42393 | WMEPYGNCE |
| 42394 | WMEPYGNCN |
| 42395 | WMEPYGNYD |
| 42396 | WMESYGNCD |
| 42397 | WMGPYGNCD |
| 42398 | WMKSYDHGS |
| 42399 | WMSKQMFKG |
| 42400 | WMSQQMFKG |
| 42401 | WNCLLNKWR |
| 42402 | WSSVAHPGN |
| 42403 | WVGQFWQGI |
| 42404 | WWAPPWHAL |
| 42405 | WWTDMSSWK |
| 42406 | WWTDTSSWT |
| 42407 | WWTNMSSWT |
| 42408 | WYGMRMIRP |
| 42409 | YGYLVHIPR |
| 42410 | YHEICHISK |
| 42411 | YHTACKKLC |
| 42412 | YKFWTDNTD |
| 42413 | YLKDVDFDS |
| 42414 | YPQCVQWFW |
| 42415 | YPRCAQWFW |
| 42416 | YQHWAMVQR |
| 42417 | YQHWTMDQR |
| 42418 | YVEYVIWPD |
| 42419 | YVSQMWMRC |
| 42420 | YVSQVWMQC |
| 42421 | YWLLDHANF |
| 42422 | YYAICHISK |
| 42423 | YYEFCHISK |
| 42424 | YYEICDISK |
| 42425 | YYEICHICK |
| 42426 | YYEICHIST |
| 42427 | YYEICHLSK |
| 42428 | YYEICNISK |
| 42429 | YYEICPISK |
| 42430 | YYEICQISK |
| 42431 | YYEICRISK |
| 42432 | YYEICYISK |
| 42433 | YYELCHISK |
| 42434 | YYGICHISK |
| 42435 | YYKICHISK |
| 42436 | YYQICHISK |
| 42437 | YYVICHISK |

### Example 44

### Treatment of Rett Syndrome with an AAV5-Derived Virion Encapsidating a Therapeutic Payload

[1002] This example describes treatment of Rett syndrome with a variant AAV5-derived virion having any one of the engineered CNS tropic variant AAV5 VP capsid polypeptides disclosed herein, wherein the variant AAV5 virion encapsidates a therapeutic payload. Polynucleotide sequence encoding for AAV Rep, an AAV5-derived variant Cap and helper proteins and a therapeutic payload are transfected in cells to produce variant AAV5 virions, where the polynucleotide sequence encoding for the variant AAV5 Cap comprises at least one mutation in a region from a position corresponding to 581 to a position corresponding to 589 in the VP1 capsid polypeptide and where the polynucleotide sequence encoding for the variant AAV5 Cap encodes for an amino acid sequence of any one of SEQ ID NO: 7118-SEQ ID NO: 10117. The therapeutic payload is a guide RNA targeting an mRNA encoded for by a gene implicated in Rett syndrome, a suppressor tRNA targeting a premature termination codon (PTC) in a gene implicated in Rett syndrome, or a transgene. The mRNA targeted by the guide RNA is an mRNA encoded for by a gene encoding for MECP2. The suppressor tRNA targets a PTC in MECP2. The transgene is MECP2. The variant AAV5 virion encapsidating the payload is administered to a subject. The subject is a human or non-human animal. The route of administration is a systemic route of administration. The systemic route of administration is intravenous administration. Upon administration to the subject, the variant AAV5 virions encapsidating the therapeutic payload exhibit enhanced CNS tissue tropism as compared wildtype AAV5 virions encapsidating the therapeutic payload. Upon administration to the subject, a lower dose of the variant AAV5 virions encapsidating the therapeutic payload is administered as compared to wildtype AAV5 virions encapsidating the therapeutic payload. Upon administration to the subject, at least one symptom of Rett syndrome is alleviated or the subject is cured.

### Example 45

### Determination of Enriched Variants

[1003] This example illustrates determination of enriched variants in each of the following tissues: adrenal gland, bone marrow, CNS tissues, colon, heart, lung, lymph node, mammary gland, skeletal muscle or cardiac muscle, sciatic nerve, skeletal muscle, skin, spinal cord, spleen, and thyroid gland.

[1004] Capsid variants may be analyzed with respect to their observed abundance. Following filtering as described in EXAMPLE 19, variants are scored based on the number of repeated observations between animals, or tissue sections, or CNS regions, or sequencing samples. This results in a distribution of variant frequency and a variant may be ranked by its observation relative to the distribution of observational frequencies of all other variants through statistical methods.

[1005] Additionally, variant “enrichment” within a tissue may be calculated using the following equation, or variations of this equation:

$$Enrichment score = \frac{ \begin{matrix}variant 1 UMI count in tissue 1 \text{/} sum \\ of varients UMI count in tissue 1\end{matrix} }{\begin{matrix}variant 1 UMI count in all t issues \text{/} sum \\ of varients UMI count in all tissues\end{matrix}}$$

$$\frac{VARjk \text{/} {\sum }_{j = 1}^{n} VARjk}{{\sum }_{k = 1}^{m} VARjk \text{/} {\sum }_{k = 1}^{m} {\sum }_{j = 1}^{n} VARjk}$$

where VAR is the UMI count for variant j in tissue k for all n variants in all m tissues.

[1006] As with observations, this results in a distribution of variant enrichment frequency within each tissue and a variant may be ranked by its enrichment relative to the distribution of enrichment frequencies of all other variants through statistical methods.

[1007] The resulting observational and enrichment relative scores may then be summed, or averaged, or otherwise integrated, and variants are ranked by this integrated observation/enrichment score to identify candidates likely to infect a given tissue.

[1008] To generate the list of capsid variants present in each tissue based on the integrated observational and enrichment scores, preference was given to variants observed. Variants were ranked by the integrated score and up to 1000 of the top variants were included.

[1009] Enriched sequences for each tissue are described in the tables below. Also encompassed herein are rAAVs composed of engineered AAV5 VP2 capsid polypeptides and engineered AAV5 VP3 capsid polypeptides having the sequences disclosed in the below table at the regions in AAV5 VP2 (amin acid residues 445 to 453) and AAV5 VP3 (amino acid residues 389-397) corresponding to the amino acids in the AAV5 VP1 581 to 589 region.

TABLE 72
Sequences of the 581 to 589 Region in AAV5
VP1 Capsid Polypeptide that Drive
Adrenal Gland Tissue Tropism

| SEQ | 581-589 |
|---|---|
| ID NO | Sequence |
| 3118 | KIEYGHWIH |
| 3119 | TIDVKRWGQ |
| 3120 | CAIPRHVFP |
| 3121 | CSYKNQQHQ |
| 3122 | AAQKGQHYS |
| 3123 | AEMPTVNNI |
| 3124 | AERTKELHS |
| 3125 | AGWHNTFWG |
| 3126 | AHDAYTKNS |
| 3127 | ANVHSGQCQ |
| 3128 | AQVFSVGWT |
| 3129 | ASHRYILAE |
| 3130 | ATMTFHFSP |
| 3131 | ATVLEASPD |
| 3132 | AVHLKAACP |
| 3133 | AVMHKNADY |
| 3134 | AVMSIPFQS |
| 3135 | AVQSCWTGT |
| 3136 | CFHRCLFIL |
| 3137 | CHLSTCRWP |
| 3138 | CIHMLKLAN |
| 3139 | CIHQYGRVH |
| 3140 | CILRHIKEN |
| 3141 | CKMRQRPFR |
| 3142 | CLIRNVAGG |
| 3143 | CPHKFLMER |
| 3144 | CPRCYHRAQ |
| 3145 | CSGSKMRMG |
| 3146 | CTANRAMML |
| 3147 | CTQRRMTFP |
| 3148 | CTSYRLSTP |
| 3149 | CVMSYINWH |
| 3150 | CVNYNLGND |
| 3151 | CYKWIDMCN |
| 3152 | DHEWYCSLA |
| 3153 | DILRYHTQL |
| 3154 | DSFQTENSM |
| 3155 | DTWIMSQVH |
| 3156 | DVKAPHGCV |
| 3157 | EDGRADWHV |
| 3158 | EHDCYMAVV |
| 3159 | ETALLEFRR |
| 3160 | EVCQDYQQL |
| 3161 | EWKRRLKRR |
| 3162 | FCHLIMRYY |
| 3163 | FCNYVATDD |
| 3164 | FHLRSHWMP |
| 3165 | GECRESCVT |
| 3166 | GKSDCEHMY |
| 3167 | GMHETSVND |
| 3168 | GPPLFTMIG |
| 3169 | GTTQARIGS |
| 3170 | GTVCNNECR |
| 3171 | GYIQVHVFN |
| 3172 | GYQRAYVPF |
| 3173 | HALTWMRAK |
| 3174 | HFPYNFWYY |
| 3175 | HKIYGSTPY |
| 3176 | HSQPDKTGA |
| 3177 | HSYNWDEGG |
| 3178 | HVMTRNNVY |
| 3179 | IIQKTQHNT |
| 3180 | IKVQMECHM |
| 3181 | ILYNHWVIG |
| 3182 | IMEEARTYC |
| 3183 | IMSNYCLTA |
| 3184 | INKVQTFGL |
| 3185 | IRCCTKPLT |
| 3186 | KCATYPSHD |
| 3187 | KIGMEEVMS |
| 3188 | KILIRDCGV |
| 3189 | KKKYWKMED |
| 3190 | KMLYSSYTQ |
| 3191 | KNEWPCIGF |
| 3192 | KNKTSEYAC |
| 3193 | KTFFHLSFA |
| 3194 | KWADQRNSF |
| 3195 | LCMLAWIME |
| 3196 | LLQKMWAPT |
| 3197 | LMNRRADER |
| 3198 | LVHCFLKSA |
| 3199 | LYCLCKNWC |
| 3200 | LYGLKMMYN |
| 3201 | MANMVWQNW |
| 3202 | MGAMALELA |
| 3203 | MSKIKQRLN |
| 3204 | MVNRPATCV |
| 3205 | MVTPHDHWH |
| 3206 | NCDSKVVGH |
| 3207 | NCLKEEVVD |
| 3208 | NHHCCTPSP |
| 3209 | NHRWNFGKS |
| 3210 | NLVDCECRV |
| 3211 | NTCEGWSHF |
| 3212 | PHMPYSDQQ |
| 3213 | PQYSVCGGP |
| 3214 | PSARSEQQD |
| 3215 | QAGGSGFNE |
| 3216 | QESAYGRPL |
| 3217 | QQNGSNNFM |
| 3218 | QSTPTLGPK |
| 3219 | QVGTHNHME |
| 3220 | QWVHKQNLD |
| 3221 | QYADFKAQQ |
| 3222 | QYYMTIHHF |
| 3223 | RAETTKQLM |
| 3224 | RCWITEVSY |
| 3225 | RELSVQQTI |
| 3226 | RGKGHGTDL |
| 3227 | RGLKCYMRN |
| 3228 | TDLEQGMDQ |
| 3229 | TFDLWQWGH |
| 3230 | SCCWRGSME |
| 3231 | SHVCQEYMN |
| 3232 | SLPQTDQHV |
| 3233 | SNAEMSQLF |
| 3234 | SNKLMMDVM |
| 3235 | SPRCGGPFP |
| 3236 | SVCMHEGSQ |
| 3237 | SVGWSFEPK |
| 3238 | TDLEQGMDQ |
| 3239 | TFDLWQWGH |
| 3240 | TIEWKPSEL |
| 3241 | TYLHQPEDS |
| 3242 | TYSNDGLFN |
| 3243 | VAKETMNTW |
| 3244 | VCQVGFLND |
| 3245 | VGQPTEKSF |
| 3246 | VHCKVWGQC |
| 3247 | VMEGQRGWT |
| 3248 | VSAYRCSFE |
| 3249 | VVMHCAKEF |
| 3250 | VYHRLCRDT |
| 3251 | VYHRNATWV |
| 3252 | WPEQCNVNL |
| 3253 | YAQSVSESN |
| 3254 | YCERCQDFH |
| 3255 | YDEYPRNAT |
| 3256 | YDNYWAYNP |
| 3257 | YGVCLWNNG |
| 3258 | YETQQYASH |
| 3259 | YNPQQGKSK |
| 3260 | YPYAILVDE |
| 3261 | YWQWNTSGN |
| 3262 | YWVPDCYNF |
| 3263 | GVHATCMHA |
| 3264 | ADRQCLQGP |
| 3265 | ASDPNRWAG |
| 3266 | ATGTYNLQK |
| 3267 | CEHRYSKSS |
| 3268 | CIHWYGKSS |
| 3269 | CEHWYSKSA |
| 3270 | CEHWYSKSS |
| 3271 | CEHWYSKSY |
| 3272 | CLVSYSQGQ |
| 3273 | CLVSYSRGQ |
| 3274 | CMHWYSKSS |
| 3275 | CMQTDKLMN |
| 3276 | CMQTGKLMN |
| 3277 | CMQTVELMN |
| 3278 | CMQTVKLMK |
| 3279 | CMQTVKLMN |
| 3280 | CMQTVKLMS |
| 3281 | CMQTVKLMT |
| 3282 | CMQTVRLMN |
| 3283 | CSMARRYWG |
| 3284 | CSMTRGYWG |
| 3285 | CSMTRRYWG |
| 3286 | CSMTRRYWS |
| 3287 | CSPGMHLSP |
| 3288 | CSPSMHLSP |
| 3289 | CSPSMHPSP |
| 3290 | CSPSVHLSP |
| 3291 | CSVTRRYWG |
| 3292 | CTMYRNVSW |
| 3293 | CVGWQSTAP |
| 3294 | CVGWRSAAP |
| 3295 | CVGWRSTAP |
| 3296 | CVGWWSTAP |
| 3297 | CVHWYSKSS |
| 3298 | CVIPPRGCV |
| 3299 | CVIPPRGWV |
| 3300 | CVQWELNSA |
| 3301 | CVQWERNSA |
| 3302 | CVQWERNSV |
| 3303 | CYPSMHLSP |
| 3304 | DHDEIFVAR |
| 3305 | DHDEMFVAR |
| 3306 | DHNEIFVAR |
| 3307 | DIQCANEGY |
| 3308 | EGEHCWKWE |
| 3309 | EGIHCWKGM |
| 3310 | EIDPNRWAG |
| 3311 | ESAPNRWAG |
| 3312 | ESDPNRGAG |
| 3313 | ESDPNRLAG |
| 3314 | ESDPNRWAC |
| 3315 | ESDPNRWAD |
| 3316 | ESDPNRWAG |
| 3317 | ESDPNRWSG |
| 3318 | FSLFCGQYS |
| 3319 | FSLFCRQYS |
| 3320 | GICFALNAP |
| 3321 | GIQCANEGY |
| 3322 | GLTIDHQLV |
| 3323 | GLTIDHQLV |
| 3324 | GLTTDPQLV |
| 3325 | GLTTNHQLV |
| 3326 | GVQCANEGY |
| 3327 | IICFALNAP |
| 3328 | IMLSCHNMK |
| 3329 | IMLSCHNMR |
| 3330 | EMLSCRNMK |
| 3331 | IMLSYHNMK |
| 3332 | KGEAMCQSL |
| 3333 | KGEAMYQSL |
| 3334 | KGEAVCQSL |
| 3335 | KGHIMCQSL |
| 3336 | KGGAMCQSL |
| 3337 | KSDPNRWAG |
| 3338 | KSFAGTTHM |
| 3339 | KSVAGTTHM |
| 3340 | KVEAMCQSL |
| 3341 | LEWYPNHHN |
| 3342 | LEWYPNHLN |
| 3343 | LEWYPNHRN |
| 3344 | LEWYPNHSN |
| 3345 | LEWYPYHRN |
| 3346 | LECFALNAP |
| 3347 | MVYCNRKSN |
| 3348 | QFHVPQSDS |
| 3349 | QFHVPQSGS |
| 3350 | QFRVPQSDS |
| 3351 | QNNNLYTQV |
| 3352 | SAGMLAQMC |
| 3353 | SAGMRAQMC |
| 3354 | SAGMRTQMC |
| 3355 | SAGMWAWMC |
| 3356 | SAGVRAWMC |
| 3357 | SAVMRAQMC |
| 3358 | SEQYVAYSG |
| 3359 | SKQYVAYSE |
| 3360 | SKQYVAYSG |
| 3361 | SKQYVTYSG |
| 3362 | TASKYEGRT |
| 3363 | TATEYEGRT |
| 3364 | TATKYEGRT |
| 3365 | TKPSMEVNC |
| 3366 | VEANSACQN |
| 3367 | VEANSECQN |
| 3368 | VEANSEFQN |
| 3369 | VEANSGCQN |
| 3370 | VICFALNAP |
| 3371 | VICFALNAS |
| 3372 | VICFALNTP |
| 3373 | VSLFCRQYS |
| 3374 | WCVHAYWQV |
| 3375 | WRVHAYWQV |
| 3376 | WRVHSYWQV |
| 3377 | YIHWYSKSS |
| 3378 | WGQSYNYWP |
| 3379 | SIRSIVKGE |
| 3380 | GMLEFMNMT |
| 3381 | QMYWVQNWE |
| 3382 | STDPHTSHH |
| 3383 | TLTEVNRLA |
| 3384 | SCASCRFPL |
| 3385 | ETHWDIDSN |
| 3386 | EAAHQTNIW |
| 3387 | MGTEWTQSY |
| 3388 | QQSFFFGEQ |
| 3389 | CVDTNRMWQ |
| 3390 | DVCKATTTE |
| 3391 | TTYPHNTHG |
| 3392 | KGLITENNY |
| 3393 | LHKAYVTDS |
| 3394 | KQATNNNGW |
| 3395 | CFARTLSYD |
| 3396 | MPYPLNVKE |
| 3397 | EQTHTWLCR |
| 3398 | ELKYVMMTA |
| 3399 | LARTTTNSE |
| 3400 | TLTTDKTYS |
| 3401 | TRSYFDQSC |
| 3402 | PYIMEFHPF |
| 3403 | KIRDCDGNV |
| 3404 | EIRQFVKGA |
| 3405 | APFFTFTNH |
| 3406 | TQCKQLTVM |
| 3407 | CQNTAVRAI |
| 3408 | KAVLFLKDC |
| 3409 | DVTQHTSCT |
| 3410 | VCQYCELGG |
| 3411 | AVVCKMNYH |
| 3412 | PCQQLMCFM |
| 3413 | TVNRAMREE |
| 3414 | EVLKFCKEW |
| 3415 | SMSHNGQCL |
| 3416 | TNMLAMRGD |
| 3417 | MLAFDPMGR |
| 3418 | ASFFLNPLE |
| 3419 | QKAIVAQND |
| 3420 | ISMRSECED |
| 3421 | ISWISHASP |
| 3422 | CVEQYVEQG |
| 3423 | STTAYHQDY |
| 3424 | GWDMLSVAK |
| 3425 | MITNNCNIS |
| 3426 | TCHPNMSVP |
| 3427 | MEHTMDFGV |
| 3428 | KEFQLQMEP |
| 3429 | TIVVIPIKS |
| 3430 | SSIYKEIQE |
| 3431 | GTRIYGKVS |
| 3432 | FFVLGCQGI |
| 3433 | QSGMLTITA |
| 3434 | YVDHWTLGD |
| 3435 | SRYVNNGTV |
| 3436 | AAQYMGIMK |
| 3437 | AEDTPYTIY |
| 3438 | DCVLTMVDK |
| 3439 | MTIKMEQQY |
| 3440 | NSQLSMTFG |
| 3441 | NMPSLRTRI |
| 3442 | EIHMFGQSE |
| 3443 | MVMMREPSN |
| 3444 | MNANETHGA |
| 3445 | WTTSIAVDT |
| 3446 | NDVWQPHPN |
| 3447 | GLSMVLHFV |
| 3448 | RCADNPYFR |
| 3449 | AFLHGQMWQ |
| 3450 | NANWVEYYD |
| 3451 | AIYTTASFD |
| 3452 | EAGCKMWPT |
| 3453 | DARFDQWHH |
| 3454 | ATGTYNLQE |
| 3455 | TTTNQFMFQ |
| 3456 | VCRLDNGPQ |
| 3457 | EYACMLMTQ |
| 3458 | YDYWMQAPT |
| 3459 | SHAQPIASH |
| 3460 | DFNGSNWLP |
| 3461 | RVNGSTCRH |
| 3462 | HIHMSDRGA |
| 3463 | NAYYDSHCE |
| 3464 | THVKRFDYE |
| 3465 | KKHKGWCRA |
| 3466 | MPWLDKPPC |
| 3467 | RRTDHGEPI |
| 3468 | GNECFHNVE |
| 3469 | YPTMTFPEE |
| 3470 | KVNCRMIIM |
| 3471 | WPNIKHQPI |
| 3472 | QCTAHNTCM |
| 3473 | DMTLQSVSS |
| 3474 | YFPSIQCYE |
| 3475 | RYPCCQSPF |
| 3476 | WKATPGGQC |
| 3477 | GHLENNNEW |
| 3478 | MNSFYRAEW |
| 3479 | QWFTKGVGE |
| 3480 | INYISFVDR |
| 3481 | KMAGIGCWY |
| 3482 | LEIGGKTRT |
| 3483 | NGVGRSGDN |
| 3484 | AGMYKCQED |
| 3485 | YSDPKNMSI |
| 3486 | DVKSWAVCD |
| 3487 | TVNWYSGFG |
| 3488 | AAAGFSAPS |
| 3489 | AAARDRRQT |
| 3490 | AACAQVYHS |
| 3491 | AACGVLWSE |
| 3492 | AAEREKAHG |
| 3493 | AAGPITCLD |
| 3494 | AAGHHANLG |
| 3495 | AAGYARTYD |
| 3496 | AANLNEGAK |
| 3497 | AANPHMHMR |
| 3498 | AASHLIVHE |
| 3499 | AATITYAPS |
| 3500 | AATMAPWMA |
| 3501 | AAVKKLSDD |
| 3502 | AAYLPSLVH |
| 3503 | ACCRMTTQQ |
| 3504 | ACDFIGQNE |
| 3505 | ACELQEMAM |
| 3506 | ACGQAIHHS |
| 3507 | ACIFRHQFY |
| 3508 | ACLEVYCQD |
| 3509 | ACLSSPIFE |
| 3510 | ACMTVYRSC |
| 3511 | ACQPSPSYT |
| 3512 | ACTQRQEEM |
| 3513 | ACYCYFMFI |
| 3514 | ACYRQHATK |
| 3515 | ADIWIQFDA |
| 3516 | ADRLINSSK |
| 3517 | ADYQTQTYN |
| 3518 | AECLSTKWV |
| 3519 | AEQWKLGSI |
| 3520 | AERDCEKGP |
| 3521 | AERMFHQHF |
| 3522 | AFCSMNATS |
| 3523 | AFIEQVMNC |
| 3524 | AFMAIMWTL |
| 3525 | AFQQPHKAN |
| 3526 | AGDRYTSED |
| 3527 | AGISLWCHN |
| 3528 | AGLTMQKCE |
| 3529 | AGSSCNTFH |
| 3530 | AHAEFAVDP |
| 3531 | AHAQYQSVA |
| 3532 | AHMPREWMA |
| 3533 | AHTAIGSCP |
| 3534 | AHVCLSGQW |
| 3535 | AHVDYNTCD |
| 3536 | AHVGVELAE |
| 3537 | AHYHVHSHG |
| 3538 | AIAHGSDYE |
| 3539 | AIDHRTMCY |
| 3540 | AIEKQPNFE |
| 3541 | AIESSMHCC |
| 3542 | AIGKSNQGL |
| 3543 | AIIHQSTAW |
| 3544 | AILDQNSLQ |
| 3545 | AINTIPMAQ |
| 3546 | AISQIMSNE |
| 3547 | AITAHLAHD |
| 3548 | AITQMEWIN |
| 3549 | AIVPESAAQ |
| 3550 | AKANRCEAE |
| 3551 | AKMPQCAWA |
| 3552 | AKMQNMACA |
| 3553 | AKNLTMLCR |
| 3554 | AKSYANDWA |
| 3555 | ALHHFVKAQ |
| 3556 | ALLMQTFAH |
| 3557 | ALMVFKSMW |
| 3558 | ALMVNQGNA |
| 3559 | ALNLSWWPM |
| 3560 | ALTAITTSS |
| 3561 | ALTNHMICP |
| 3562 | ALTYRDSMY |
| 3563 | AMLKYAYPG |
| 3564 | AMSWTQKGG |
| 3565 | AMVGYHCRE |
| 3566 | ANFPVNTLE |
| 3567 | ANGSVNCEE |
| 3568 | ANGTLAECG |
| 3569 | ANMYSNVTS |
| 3570 | ANTSGWTSG |
| 3571 | APDQANVYE |
| 3572 | APMSYSDMD |
| 3573 | APRVHSGNC |
| 3574 | APSPKAVYF |
| 3575 | AQEFIPSHP |
| 3576 | AQGTQCANL |
| 3577 | AQKQADINA |
| 3578 | AQRMAKIWA |
| 3579 | ARELLHWYG |
| 3580 | ARMPVSCLP |
| 3581 | ARSRTLSDG |
| 3582 | ARTECHHCG |
| 3583 | ARYKLMPHH |
| 3584 | ASCRLAQCC |
| 3585 | ASEGAGSWE |
| 3586 | ASEPITFVS |
| 3587 | ASFGYMIDD |
| 3588 | ASGIIKSNG |
| 3589 | ASGPIGTAA |
| 3590 | ASHGDGVGT |
| 3591 | ASKPVELGH |
| 3592 | ASLMKPEAV |
| 3593 | ASMAYCAQE |
| 3594 | ASMKRQENL |
| 3595 | ASMTDFVGV |
| 3596 | ASMWQHFVI |
| 3597 | ASQGVWQSH |
| 3598 | ASSTAWQWP |
| 3599 | ASTLCNRGQ |
| 3600 | ASTWQGHTD |
| 3601 | ASVESRIRI |
| 3602 | ATAAENIYE |
| 3603 | ATAVIANAN |
| 3604 | ATCKPDSCD |
| 3605 | ATDQFGHHD |
| 3606 | ATGKMMFPS |
| 3607 | ATHCINRAH |
| 3608 | ATIGRSCWD |
| 3609 | ATMPWDGNE |
| 3610 | ATMQESDRI |
| 3611 | ATSPSEHTN |
| 3612 | ATSSQVATI |
| 3613 | ATTFTRHNV |
| 3614 | ATTIWHNHM |
| 3615 | ATVFMQETT |
| 3616 | ATVHMERDC |
| 3617 | ATVMTVHQG |
| 3618 | ATYNPGVNW |
| 3619 | AVCSMHGTI |
| 3620 | AVDIIAWDT |
| 3621 | AVEEMVAKG |
| 3622 | AVEKCMTLH |
| 3623 | AVEPHCFGH |
| 3624 | AVGCYTMSG |
| 3625 | AVKMFIDRN |
| 3626 | AVMAQKIAD |
| 3627 | AVQKEYQYL |
| 3628 | AVSQFQCSQ |
| 3629 | AVVEHAVNR |
| 3630 | AVVRSVTRD |
| 3631 | AWDSKSNWD |
| 3632 | AWEMYHVID |
| 3633 | AWGTMNHWL |
| 3634 | AWHMYEMSE |
| 3635 | AWTEYSLSC |
| 3636 | AWYHHCHYD |
| 3637 | AYAFVGRDN |
| 3638 | AYDRMGGTY |
| 3639 | AYEQMPESC |
| 3640 | AYHNVKEWN |
| 3641 | AYSSTLHAE |
| 3642 | AYYEPRGWN |
| 3643 | CAAQEQRSR |
| 3644 | CAAWRQTQE |
| 3645 | CAAWYYGRT |
| 3646 | CAFRTAQMA |
| 3647 | CALIKHQQP |
| 3648 | CAMFRNVAQ |
| 3649 | CAMKGNVAQ |
| 3650 | CAMLKMKYD |
| 3651 | CAMPFRQSV |
| 3652 | CAMSRMVFS |
| 3653 | CAMWTSASP |
| 3654 | CAMYYHRAC |
| 3655 | CAQWIKEQQ |
| 3656 | CASAFVSYQ |
| 3657 | CAVGRHMAL |
| 3658 | CAYAYANLC |
| 3659 | CCEFKMWRG |
| 3660 | CCMWKNSWE |
| 3661 | CCNSRNVFP |
| 3662 | CCTKLQVLA |
| 3663 | CCTLKRCYD |
| 3664 | CDGQLDFHW |
| 3665 | CFFRVRLCI |
| 3666 | CFHIRNIDR |
| 3667 | CFHPTDQGW |
| 3668 | CFKYTFMQH |
| 3669 | CGAKMSRAA |
| 3670 | CGTIVHWST |
| 3671 | CGTTIAYCP |
| 3672 | CHFTQHKSD |
| 3673 | CHHWFNHAT |
| 3674 | CHLTTNVNE |
| 3675 | CIAIITRGP |
| 3676 | CIARKMVDD |
| 3677 | CIFPRNMAT |
| 3678 | CIGSIPMAA |
| 3679 | CIHAIPRER |
| 3680 | CIHARMVGM |
| 3681 | CIHDHKECV |
| 3682 | CINWTRKAP |
| 3683 | CIRLLCRDK |
| 3684 | CIRYEMGAA |
| 3685 | CITQRQAMW |
| 3686 | CIVLRSMGQ |
| 3687 | CIVVYSRSQ |
| 3688 | CIWKHSHFV |
| 3689 | CKAHYHDNF |
| 3690 | CKDAMNTGG |
| 3691 | CKFLLNQAR |
| 3692 | CKIASNEAF |
| 3693 | CKMEFMRVE |
| 3694 | CLCLTWAFG |
| 3695 | CLGYEKQCP |
| 3696 | CLHYTIVNN |
| 3697 | CLMEVQWGT |
| 3698 | CMDEVHMCT |
| 3699 | CMMPYSRTN |
| 3700 | CMYQSRAAY |
| 3701 | CNTPYWQQA |
| 3702 | CPFLMNRAF |
| 3703 | CQQRYNVGF |
| 3704 | CSAYYMKCS |
| 3705 | CSCWYQVQF |
| 3706 | CSDNLYCAM |
| 3707 | CSECWCKYW |
| 3708 | CSHDFTQYQ |
| 3709 | CSIQWWQWG |
| 3710 | CSKLHDHIN |
| 3711 | CSLQQMSIR |
| 3712 | CSNMYVASE |
| 3713 | CSQPMSMPN |
| 3714 | CSQSFQWSK |
| 3715 | CSSMWFLWG |
| 3716 | CSSPMSLQD |
| 3717 | CSTSRMASY |
| 3718 | CSVNRHHYW |
| 3719 | CSYELITNG |
| 3720 | CTFHTMRGH |
| 3721 | CTFIRHAMQ |
| 3722 | CTFLRSTFA |
| 3723 | CTFNQIRGP |
| 3724 | CTFQPNRVC |
| 3725 | CTGFMGWCM |
| 3726 | CTHPNALSP |
| 3727 | CTIAIRDSS |
| 3728 | CTIMAMQSH |
| 3729 | CTIRKQQMT |
| 3730 | CTKFEHRSL |
| 3731 | CTKHMLQGE |
| 3732 | CTMHMDAKY |
| 3733 | CTMWCYGCP |
| 3734 | CTNVPMKYE |
| 3735 | CTRQTTFHG |
| 3736 | CTVSKNYGQ |
| 3737 | CTYQYQAGM |
| 3738 | CTYTPLRAP |
| 3739 | CVCYHNSSQ |
| 3740 | CVDQHHLTP |
| 3741 | CVFAFGMKH |
| 3742 | CVFAHNRGF |
| 3743 | CVFMDRMAY |
| 3744 | CVFPRHHMF |
| 3745 | CVGLVMRPQ |
| 3746 | CVGPFGSMM |
| 3747 | CVHCYNRGY |
| 3748 | CVHIRNIGW |
| 3749 | CVHTVIRGW |
| 3750 | CVIMIGELS |
| 3751 | CVIQRMHVY |
| 3752 | CVKWCNRCS |
| 3753 | CVLASRADR |
| 3754 | CVLMRWAWP |
| 3755 | CVMPRHRFP |
| 3756 | CVMSHLSGK |
| 3757 | CVMTYWEAH |
| 3758 | CVMVWAEKG |
| 3759 | CVNHARQMS |
| 3760 | CVNPTTTFG |
| 3761 | CVPSYYNNR |
| 3762 | CVSYMFSQC |
| 3763 | CVISLYGQY |
| 3764 | CVVEYPWTW |
| 3765 | CVVGKAKLA |
| 3766 | CWCCWNNPG |
| 3767 | CWEWTMINC |
| 3768 | CWNDEPEKC |
| 3769 | CWNYVHFAQ |
| 3770 | CWRVDRNHS |
| 3771 | CWSNVHRGS |
| 3772 | CWSVRHAWQ |
| 3773 | CWWLWNARE |
| 3774 | CYCCLRCHW |
| 3775 | CYCTNEHPS |
| 3776 | CYPACECTQ |
| 3777 | CYVYRHVIC |
| 3778 | CYYLSIVVC |
| 3779 | DAASDMFDP |
| 3780 | DAGYFTLHA |
| 3781 | DAIRWNKMV |
| 3782 | DALMREAGH |
| 3783 | DAMYYNFIT |
| 3784 | DAQSSPTAF |
| 3785 | DARFKPMMC |
| 3786 | DASMYYECS |
| 3787 | DATHMMCMH |
| 3788 | DCEPREGYW |
| 3789 | DFGAEKASE |
| 3790 | DFHYNSDWW |
| 3791 | DFLIHGYSG |
| 3792 | DFMKMQQHG |
| 3793 | DFYTMAEHF |
| 3794 | DGFKMQFDR |
| 3795 | DGTDWDQFS |
| 3796 | DHSFHWAYD |
| 3797 | DHSHNHNFF |
| 3798 | DHVPISTYF |
| 3799 | DIERSSRSM |
| 3800 | DIKCTMTES |
| 3801 | DIMCGQEHK |
| 3802 | DITINSFGS |
| 3803 | DKCRKDWHF |
| 3804 | DKKFLECVI |
| 3805 | DKLLMPFDR |
| 3806 | DKLYVDVMA |
| 3807 | DKMLAMVAD |
| 3808 | DKNDKWHAM |
| 3809 | DKYLCYTTP |
| 3810 | DLYVSQKAH |
| 3811 | DMAQPQAAE |
| 3812 | DMEWEHCHL |
| 3813 | DMFMIHAVQ |
| 3814 | DMHMWVHGM |
| 3815 | DMMYVRKDA |
| 3816 | DMYQFPMHG |
| 3817 | DNQMKNEMR |
| 3818 | DNRCIIGHN |
| 3819 | DNSTQIIGE |
| 3820 | DPCWIWKTI |
| 3821 | DPGRFQIGN |
| 3822 | DPPKEPKEG |
| 3823 | DPRDYDHHS |
| 3824 | DPTGEGDII |
| 3825 | DQGVMRQNE |
| 3826 | DQMGHTWQG |
| 3827 | DQMIQVEFT |
| 3828 | DQQPYVSGL |
| 3829 | DQRYGTSFS |
| 3830 | DRCYFGMGH |
| 3831 | DRNWYRHPG |
| 3832 | DRRPVDCMN |
| 3833 | DSASIPNYE |
| 3834 | DSFRKGTFA |
| 3835 | DSFTYTHGW |
| 3836 | DSIFPPHTI |
| 3837 | DSMLNGMGW |
| 3838 | DSQAAPTCP |
| 3839 | DSRTVFVDN |
| 3840 | DSVDWFTSG |
| 3841 | DTFGVACYL |
| 3842 | DTGMDAKYP |
| 3843 | DTKSYQAPA |
| 3844 | DTKWLHWMH |
| 3845 | DTTNRNMYS |
| 3846 | DVAEAWKHA |
| 3847 | DVAWHHWTF |
| 3848 | DVDRGRSMS |
| 3849 | DVDRIMPQP |
| 3850 | DVDWTYMTL |
| 3851 | DVHFKMTMA |
| 3852 | DVLCLHNHF |
| 3853 | DVLFTDVGF |
| 3854 | DVTFRWGIC |
| 3855 | DVTLMENAR |
| 3856 | DVWFNHTVS |
| 3857 | DVYPPQGLM |
| 3858 | DVYQLHAMQ |
| 3859 | DWAKSDRIT |
| 3860 | DWFIQYHRG |
| 3861 | DWSWYFQGS |
| 3862 | DYAAISSMA |
| 3863 | DYAKQDSSC |
| 3864 | DYNLAGLLP |
| 3865 | DYRQWDQQY |
| 3866 | DYVQVNQQP |
| 3867 | EAASADCQD |
| 3868 | EAAYGCKIG |
| 3869 | EADKYPYCP |
| 3870 | EADWNIGDT |
| 3871 | EAERIVRGP |
| 3872 | EAFCLHGWA |
| 3873 | EAGFWTQQA |
| 3874 | EAGSFQHCA |
| 3875 | EAHNVEDNP |
| 3876 | EAHPHWWVT |
| 3877 | EANDSLKAN |
| 3878 | EANLSNVRA |
| 3879 | ECFPSIQNL |
| 3880 | ECGLSHDCG |
| 3881 | ECHVRDSHL |
| 3882 | ECIKQSECA |
| 3883 | ECIQVVRGS |
| 3884 | ECKDVEDIF |
| 3885 | ECMLCPEAS |
| 3886 | ECQTSPVAY |
| 3887 | ECRAGDPVN |
| 3888 | ECSLKDHHS |
| 3889 | ECTANTHYY |
| 3890 | ECWMQNEHA |
| 3891 | EDCALHQSE |
| 3892 | EDHWLFWKQ |
| 3893 | EETILIDCH |
| 3894 | EEVMLGCLQ |
| 3895 | EFAADAHGM |
| 3896 | EFAGITDMG |
| 3897 | EFCEYAQAT |
| 3898 | EFHQQVNTW |
| 3899 | EFMHAYEAT |
| 3900 | EFSECHAFD |
| 3901 | EFSNPCSFG |
| 3902 | EFVKAFMQI |
| 3903 | EGHGAVLNP |
| 3904 | EGKWIGLQT |
| 3905 | EGMKSWNST |
| 3906 | EGRSSENND |
| 3907 | EGSPYFMAK |
| 3908 | EHALEHTQL |
| 3909 | EHELLKQYE |
| 3910 | EHGMILRLG |
| 3911 | EHLFLIHEA |
| 3912 | EHRQKMAST |
| 3913 | EHRTAFFYS |
| 3914 | EHVFEEVHS |
| 3915 | EIDNVCRQA |
| 3916 | EIGCAHAEE |
| 3917 | EIGRNCALF |
| 3918 | EILLSMMEQ |
| 3919 | EILQPQVMI |
| 3920 | EIMCKGTMG |
| 3921 | EIQQVGRDF |
| 3922 | EIRHWGWLV |
| 3923 | EISNVRCAP |
| 3924 | EIVPTMHCK |
| 3925 | EIVYQHISQ |
| 3926 | EKHNFTQMV |
| 3927 | EKKFNHQIN |
| 3928 | EKLYSVSVA |
| 3929 | EKRLESAGW |
| 3930 | EKSNLFTVR |
| 3931 | EKYMYHDVQ |
| 3932 | ELDFIIMPG |
| 3933 | ELNGAWWKA |
| 3934 | EMGAVGSFK |
| 3935 | EMHRNELAM |
| 3936 | EMMVKPSYC |
| 3937 | EMRIQTAQQ |
| 3938 | EMVLCVTHE |
| 3939 | ENDQIAHEQ |
| 3940 | ENGYMHQYL |
| 3941 | ENIKTPFGT |
| 3942 | ENTYQDTIP |
| 3943 | EPKDVSHMT |
| 3944 | EPQSFNHWS |
| 3945 | EQARIDTEG |
| 3946 | EQDQTKTMH |
| 3947 | EQELPVTLK |
| 3948 | EQPQKPSAW |
| 3949 | EQTKVMHCC |
| 3950 | EQVSKGVYA |
| 3951 | ERGPTDNLH |
| 3952 | ERHESHQEF |
| 3953 | ERINKFNAD |
| 3954 | ERRSAESLQ |
| 3955 | ESAQSEGEF |
| 3956 | ESDIGHPYK |
| 3957 | ESDIMRSPM |
| 3958 | ESEQSQDNH |
| 3959 | ESGPKWRFP |
| 3960 | ESNGFVNGV |
| 3961 | ESSRTGSHA |
| 3962 | ESTESHFCE |
| 3963 | ESTQMCTCC |
| 3964 | ESVKFGKMP |
| 3965 | ESYTLYQHL |
| 3966 | ETACNHTAW |
| 3967 | ETASQQHDA |
| 3968 | ETCNRGRLF |
| 3969 | ETFAMNAAW |
| 3970 | ETHFYEVKF |
| 3971 | ETLAKGYDW |
| 3972 | ETLRMFGVY |
| 3973 | ETMPNKLQY |
| 3974 | ETNIDNRAM |
| 3975 | ETRINIEAH |
| 3976 | ETTNAAWFR |
| 3977 | ETVSGMHER |
| 3978 | EVCFDVCGE |
| 3979 | EVCMAVVDN |
| 3980 | EVDHQFHFC |
| 3981 | EVGPGSHCE |
| 3982 | EVNHMMCDM |
| 3983 | EVQKCMFVE |
| 3984 | EVRWIPWHY |
| 3985 | EVSLFSCEF |
| 3986 | EVYITGHEI |
| 3987 | EWKFCWDAI |
| 3988 | EWQHVGATC |
| 3989 | EYCRSNFQH |
| 3990 | EYESCICAS |
| 3991 | EYLRFIAHD |
| 3992 | FACMRQMAY |
| 3993 | FATGKHHYL |
| 3994 | FATHTYDYW |
| 3995 | FAVPSKVTM |
| 3996 | FCYRMTDDR |
| 3997 | FDMEGFREL |
| 3998 | FERTVHTDK |
| 3999 | FGDWKHGDG |
| 4000 | FGPGSHGNN |
| 4001 | FKGPYHYQS |
| 4002 | FLFYLNMHE |
| 4003 | FLMRRNGAD |
| 4004 | FLTERCQTE |
| 4005 | FMNHFMMWT |
| 4006 | FMQKECVEE |
| 4007 | FNADIAHCD |
| 4008 | FNMLVLETW |
| 4009 | FNSSFMGQA |
| 4010 | FPHKWNAMS |
| 4011 | FPVDMQWMY |
| 4012 | FQGPIAPME |
| 4013 | FSAMFRRHC |
| 4014 | FSGNLSTYA |
| 4015 | FSKLTGQDF |
| 4016 | FSLKTESRI |
| 4017 | FTDDDVNRF |
| 4018 | FTGLCDIWQ |
| 4019 | FTRALLDMG |
| 4020 | FVRTKEDLV |
| 4021 | GADDKGTHC |
| 4022 | GADIYEETS |
| 4023 | GADKLFMYG |
| 4024 | GADNVQKIC |
| 4025 | GADPFEGQN |
| 4026 | GAEIEQLAF |
| 4027 | GAEYDQRVW |
| 4028 | GAHFIMSSL |
| 4029 | GAQFCTQAR |
| 4030 | GARHNGIFT |
| 4031 | GARQFNCLE |
| 4032 | GASKLSHER |
| 4033 | GASRYQWGN |
| 4034 | GATDCGSCP |
| 4035 | GAVECSEYK |
| 4036 | GAVPHPVCA |
| 4037 | GAVQKLIQC |
| 4038 | GAVSANWQS |
| 4039 | GCASIGEHE |
| 4040 | GCDWLMCEL |
| 4041 | GCERMERVW |
| 4042 | GCFFSQRGY |
| 4043 | GCFYTQRAY |
| 4044 | GCGKLGVDR |
| 4045 | GCHQLMNFG |
| 4046 | GCIRSISWP |
| 4047 | GCIRVDSGE |
| 4048 | GCMHYVLTE |
| 4049 | GCMQSIHMQ |
| 4050 | GCRFVILDH |
| 4051 | GCTKYGRHN |
| 4052 | GCVVKNTHS |
| 4053 | GDKWISIQD |
| 4054 | GEMCNVSGN |
| 4055 | GEDQRGMEG |
| 4056 | GGTEIAMCF |
| 4057 | GHAMFNSRD |
| 4058 | GHFQTMMAQ |
| 4059 | GHITCATMS |
| 4060 | GHKQCFHQT |
| 4061 | GHNCCHMIE |
| 4062 | GHVQESWMW |
| 4063 | GIAQKNRNP |
| 4064 | GIEHLQNTS |
| 4065 | GIMCSGMCP |
| 4066 | GIMSVMGIG |
| 4067 | GINHRHVSA |
| 4068 | GKKDQVKGG |
| 4069 | GKTELHVEV |
| 4070 | GLGFKHSMG |
| 4071 | GLVEIHYTE |
| 4072 | GLYPHQAMF |
| 4073 | GMAVINEVE |
| 4074 | GMGKYNQWW |
| 4075 | GMGMVEIVG |
| 4076 | GMWVNPMAL |
| 4077 | GNQHWDVCG |
| 4078 | GQCYCYVQP |
| 4079 | GQSGLHVCY |
| 4080 | GRIQRMESD |
| 4081 | GSAQEPIWA |
| 4082 | GSILSIGFH |
| 4083 | GSSWIDQQG |
| 4084 | GSTRCVKWV |
| 4085 | GTEHHPFFD |
| 4086 | GTERLPAHQ |
| 4087 | GTEYERHTF |
| 4088 | GTFWRDSQL |
| 4089 | GTGKHAWCY |
| 4090 | GTHYDASAG |
| 4091 | GTIRLDTQY |
| 4092 | GTLEKRAIF |
| 4093 | GTLSYMMWW |
| 4094 | GTSTIRAEH |
| 4095 | GTYIELACF |
| 4096 | GVCFKLTDN |
| 4097 | GVFQCPQSV |
| 4098 | GVHQKNCPE |
| 4099 | GVKAREIEI |
| 4100 | GVNDLRHVA |
| 4101 | GVNHRMDHF |
| 4102 | GVRVFMSDV |
| 4103 | GVSMCYNWN |
| 4104 | GVSSTHQHR |
| 4105 | GVVANLNST |
| 4106 | GVVKMENMA |
| 4107 | GVYTTEQCV |
| 4108 | GWEYHPAFG |
| 4109 | GWTNYALMT |
| 4110 | GYHWTNTAS |
| 4111 | GYLPLEIIA |
| 4112 | GYMPCMCQD |
| 4113 | GYVQDFHGP |
| 4114 | HAEQALSVA |
| 4115 | HAGSCTLND |
| 4116 | HAGSWQYGP |
| 4117 | HAMPFCGRS |

TABLE 73
Sequences of the 581 to 589 Region in AAV5
VP1 Capsid Polypeptide that Drive Bone
Marrow Tissue Tropism

| SEQ | 581-589 |
|---|---|
| ID NO | Sequence |
| 6118 | DVDVVFRWV |
| 6119 | GNMHNFSAW |
| 6120 | QVVKFTGYH |
| 6121 | VQMNLDAAP |
| 6122 | YSFATGNAA |
| 6123 | MVDPYGCEG |
| 6124 | CEMQVQLCV |
| 6125 | AVDHYSNGA |
| 6126 | AAQTLECHK |
| 6127 | ADHLACALQ |
| 6128 | ADSDVHSEP |
| 6129 | AHENYRYHQ |
| 6130 | AHLNCDKSM |
| 6131 | AHRCGCFKC |
| 6132 | AILKMTKVL |
| 6133 | AKTGGEPDS |
| 6134 | AKVNMMKQF |
| 6135 | ANNTYPVCA |
| 6136 | AQWISPWPT |
| 6137 | ASKFEIACF |
| 6138 | ATCLIVCEA |
| 6139 | ATNNADCGV |
| 6140 | CARANCVLS |
| 6141 | CEDGPLYID |
| 6142 | CMRHGDRCA |
| 6143 | CRIDHMETY |
| 6144 | CVMEDNEAP |
| 6145 | CWEEGMPFY |
| 6146 | CWILHHRCG |
| 6147 | CYEHDHGQA |
| 6148 | CYNDNWVDV |
| 6149 | DAHKSMKSQ |
| 6150 | DCLHCWDFC |
| 6151 | DENWRDTCG |
| 6152 | DFLEEHSHM |
| 6153 | DFNFLRQQA |
| 6154 | DFTQLRMSG |
| 6155 | DGSKNQHSY |
| 6156 | DIAQLILTT |
| 6157 | DIGRNVGEC |
| 6158 | DILGKGEPC |
| 6159 | DIMSYATGI |
| 6160 | DKNYPTHKQ |
| 6161 | DLGCVQENF |
| 6162 | DQECNEEGF |
| 6163 | DTDCHSYMD |
| 6164 | DTNDYTSCD |
| 6165 | DVERSESRR |
| 6166 | DVSYHKKMH |
| 6167 | DVVSMKWGV |
| 6168 | ELASSWLVI |
| 6169 | ELLEFNAMQ |
| 6170 | ENAYKTYPL |
| 6171 | ERNRLHHRY |
| 6172 | ESHALHMCN |
| 6173 | ESSYWDKPK |
| 6174 | EVVRQXVIC |
| 6175 | EYSWSAQYN |
| 6176 | FAAMCNKWD |
| 6177 | FCSTYNAGT |
| 6178 | FEQSEHKPT |
| 6179 | FSHAHNWMT |
| 6180 | FSHRFDAIF |
| 6181 | FSTPARENN |
| 6182 | FTAQLAVWM |
| 6183 | GDMCEDMCT |
| 6184 | GHDFQKHAE |
| 6185 | GLHQFSICM |
| 6186 | GPAVPEQYG |
| 6187 | GRMLVDRHA |
| 6188 | GTGPMHHKW |
| 6189 | GYDPPEGMV |
| 6190 | GYYSMHHEE |
| 6191 | HATTVEFCE |
| 6192 | HESKTAHRP |
| 6193 | HFHQQRKTY |
| 6194 | HGEPFCMAP |
| 6195 | HHQQCKLDW |
| 6196 | HKMECAQSM |
| 6197 | HPHQIPIKI |
| 6198 | HRPEQLHEG |
| 6199 | HSWMRKSQC |
| 6200 | HWCIMKGMR |
| 6201 | ICEYFRVQA |
| 6202 | ECEYRYCEF |
| 6203 | IDAWGHFSE |
| 6204 | EGYSTWPRE |
| 6205 | ELNTCLVDQ |
| 6206 | EMDVRVKRS |
| 6207 | IMVMINTPY |
| 6208 | ENTNYPCIN |
| 6209 | EPCILELVV |
| 6210 | EPVMPCNCE |
| 6211 | IWILRARGD |
| 6212 | KDDTQSHMF |
| 6213 | KEQRPPNAG |
| 6214 | KFVQYQHYV |
| 6215 | KGRWIFEYA |
| 6216 | KHDGEIRVL |
| 6217 | KHEVGQDGG |
| 6218 | KEYLNQELR |
| 6219 | KLQMGQDNS |
| 6220 | KLSDHFMMY |
| 6221 | KQNDTVKIP |
| 6222 | KTDRMAMMM |
| 6223 | LAFTMMWPW |
| 6224 | LATFWGHQD |
| 6225 | LCAPTQWYM |
| 6226 | LCGKAGLYH |
| 6227 | LDLCMLFLF |
| 6228 | LEMQRGMET |
| 6229 | LEDKDEARK |
| 6230 | LEKEHSGIQ |
| 6231 | LGLTEGQSM |
| 6232 | LNGWWDCTR |
| 6233 | LPCTSIMWY |
| 6234 | LPEHEQQMH |
| 6235 | LPENRNKRH |
| 6236 | LPKSKYMFQ |
| 6237 | LQANEWNMC |
| 6238 | LQQPIVHIE |
| 6239 | LVMCPPFFG |
| 6240 | LYDVVHREW |
| 6241 | MGHYCHARR |
| 6242 | MHQFRCHYD |
| 6243 | MMAPLKVFD |
| 6244 | MNMEDRCTF |
| 6245 | MNNRWSDCD |
| 6246 | MTEPVLLDT |
| 6247 | MVQHEEQWE |
| 6248 | NCWLPDNPE |
| 6249 | NFKQHDTFC |
| 6250 | NGFYWVFVM |
| 6251 | NLCPNTVDV |
| 6252 | NMGCPMMTE |
| 6253 | NNSHLYHDN |
| 6254 | NWDSPSNKS |
| 6255 | NYFPTHAAW |
| 6256 | PDQVDRNTP |
| 6257 | PEKAKMVWH |
| 6258 | PPADPATES |
| 6259 | PQTMMCKRW |
| 6260 | PSMLWSVVV |
| 6261 | QEGNGFHNT |
| 6262 | QEKLWEQGS |
| 6263 | QEVRSEHYS |
| 6264 | QFGPGCFKP |
| 6265 | QQIWLCQEI |
| 6266 | QQLCVDESH |
| 6267 | QRPTCKNTA |
| 6268 | QSMVSCYEG |
| 6269 | QTRKNEIGI |
| 6270 | QWMLRKEVQ |
| 6271 | QWTACQATN |
| 6272 | QYMLAEDWR |
| 6273 | RADGLATVV |
| 6274 | RCNMMGKGA |
| 6275 | RDRYCDPHQ |
| 6276 | RDRYCDPLQ |
| 6277 | RKFWLAGKF |
| 6278 | RLQIIMYRV |
| 6279 | RMKGAKRWY |
| 6280 | RNEYQSACW |
| 6281 | RRNMPIPSW |
| 6282 | RSMYANNDV |
| 6283 | RYNNCPNLW |
| 6284 | SAMSRAVYY |
| 6285 | SEKTQEVCL |
| 6286 | SGEGETKMY |
| 6287 | SELETPYAN |
| 6288 | SLCWEVDLM |
| 6289 | SLYETPYHT |
| 6290 | SMYTNCTFF |
| 6291 | SQKQECGDT |
| 6292 | SWLPENPVH |
| 6293 | SYAYSHSAT |
| 6294 | TNVYQNVEA |
| 6295 | TPPCCVIQF |
| 6296 | TQEACHHDP |
| 6297 | TRSYFDQSC |
| 6298 | TSNTFQRHG |
| 6299 | TVKYHQDQD |
| 6300 | TVNNDPNGE |
| 6301 | VCHAFTCNL |
| 6302 | VCTIRAECP |
| 6303 | VDTIRFPRM |
| 6304 | VEKTHNKWM |
| 6305 | VESMNHASM |
| 6306 | VGECRLKAV |
| 6307 | VHYYACHRF |
| 6308 | VKEPATYKY |
| 6309 | VNAGEVYRS |
| 6310 | VPSHMPHHP |
| 6311 | VTDAAMFMG |
| 6312 | VTNPLEGRE |
| 6313 | VVEMNGDDD |
| 6314 | VVGVPARAQ |
| 6315 | VVQYRLDPP |
| 6316 | VYTSTQPQE |
| 6317 | WTHTVISDW |
| 6318 | WWDHLPELM |
| 6319 | YAFNTPWMT |
| 6320 | YVEFEDQNG |
| 6321 | YVYDAQRQD |
| 6322 | YWRYHYYYM |
| 6323 | QNKAFLDAV |
| 6324 | FDHNAKVLD |
| 6325 | YNNIMQIMV |
| 6326 | FWLGLFPAK |
| 6327 | NNDHYDSES |
| 6328 | MCQNVEKEY |
| 6329 | QMDWVAECR |
| 6330 | MSSRKEFLT |
| 6331 | SCRMVYGRA |
| 6332 | AVHKQTAAW |
| 6333 | DCAWMQKEW |
| 6334 | QKNVSTKYD |
| 6335 | DYVDQCQVS |
| 6336 | TAVLYETEF |
| 6337 | VPDYVPMNW |
| 6338 | TSRDGGWAY |
| 6339 | LPLPMQSMC |
| 6140 | DGGRANTLH |
| 6341 | QADNGTMRV |
| 6342 | MFSHGHVMG |
| 6343 | PYHNPWECR |
| 6344 | TTYPHNTHG |
| 6345 | EQTYYKITW |
| 6346 | TSLCAKPHF |
| 6347 | FCHEVFSHT |
| 6348 | CKVDIHDYM |
| 6349 | ETSTHCCKV |
| 6350 | PAYRMECCE |
| 6351 | GMVELGSCW |
| 6352 | EAMTCTKNH |
| 6353 | DNVFSNSPN |
| 6354 | HILIMQGVS |
| 6355 | MHGIARMQQ |
| 6356 | HMDHCQCHE |
| 6357 | EKFWFKTMN |
| 6358 | QLDTYMEGR |
| 6359 | NMKPKDVFR |
| 6360 | QPGVRTDDY |
| 6361 | WCNWQFAQH |
| 6362 | GILVQGGSM |
| 6363 | ILKQASCKG |
| 6364 | AIIQWACWA |
| 6365 | WPTMLSAHM |
| 6366 | DFNGSNWLP |
| 6367 | FTEPMCMQG |
| 6368 | KTDKAGLME |
| 6369 | KWEQRSKMS |
| 6370 | TLHYFHGYQ |
| 6371 | MNHQCMLWD |
| 6372 | IYCLCQDSD |
| 6373 | TLNSRHPEC |
| 6374 | ACTKQKTVQ |
| 6375 | KTCLCIFTK |
| 6376 | SSNFNHHID |
| 6377 | QFMMGQQTP |
| 6378 | IAVASHAHG |
| 6379 | KTGMGDLFL |
| 6380 | RITQGESGM |
| 6381 | STVGQNHCG |
| 6382 | KVNCRMIIM |
| 6383 | YVDHWTLGD |
| 6384 | TMPDRDPTY |
| 6385 | QKAIVAQND |
| 6386 | CMEVTCFVV |
| 6387 | LESVKMDCN |
| 6388 | VLKSNLTGM |
| 6389 | AWMCCARHD |
| 6390 | RNDNTCHAY |
| 6391 | MYDTMGAWC |
| 6392 | ILEAIVNFW |
| 6393 | AHAWLQHWA |
| 6394 | ATGLIDHQW |
| 6395 | DVKSWAVCD |
| 6396 | PDLWYEKSS |
| 6397 | SECEVLCSL |
| 6398 | RYPCCQSPF |
| 6399 | MNSFYRAEW |
| 6400 | RTRISQMFG |
| 6401 | RDVGEDNSA |
| 6402 | ATGTYNLQE |
| 6403 | DQEAQVVTG |
| 6404 | PMELWRTWY |
| 6405 | ASMHEETCL |
| 6406 | DMTLQSVSS |
| 6407 | EVAFTTSSD |
| 6408 | SPQQPSVFH |
| 6409 | KSTYYNLKW |
| 6410 | SQERMDYDG |
| 6411 | MNLQIGSKG |
| 6412 | EIHMFGQSE |
| 6413 | MPWLDKPPC |
| 6414 | QCTAHNTCM |
| 6415 | DQRHGNVSP |
| 6416 | EAGCKMWPT |
| 6417 | ATMNLSWGL |
| 6418 | QAKMILDGT |
| 6419 | INYISFVDR |
| 6420 | WKATPGGQC |
| 6421 | YCECGHWPN |
| 6422 | SNVACIQAF |
| 6423 | QSRCVDNTV |
| 6424 | YSDPKNMSI |
| 6425 | ASKQGTHDY |
| 6426 | NHSLCWDSK |
| 6427 | HSMMPGWPS |
| 6428 | EWMQNWISM |
| 6429 | AAADVEGYT |
| 6430 | AAAPWCEFR |
| 6431 | AAAWPEWTM |
| 6432 | AACNEDHHW |
| 6433 | AACSRHYES |
| 6434 | AAELYKCEN |
| 6435 | AAFEGEACF |
| 6436 | AAFEWMRAP |
| 6437 | AAGWRDGRR |
| 6438 | AAHCEYSTI |
| 6439 | AAKTFYWAR |
| 6440 | AALASDHDF |
| 6441 | AAQFLHIVK |
| 6442 | AASCGYHGW |
| 6443 | AASQAQSLT |
| 6444 | AAVCTQFSL |
| 6445 | AAVGSAQIE |
| 6446 | AAWDIELNE |
| 6447 | AAWVSGKLY |
| 6448 | ACALDGASN |
| 6449 | ACEFGSLNQ |
| 6450 | ACFHANNWH |
| 6451 | ACHVQLSDA |
| 6452 | ACKHEISHA |
| 6453 | ACLNMWEER |
| 6454 | ACPSAELCY |
| 6455 | ACTSSQVKG |
| 6456 | ACVFKCWWP |
| 6457 | ADCQPQSFN |
| 6458 | ADWLYMQSC |
| 6459 | ADYDMLTAY |
| 6460 | AEAMCSQDH |
| 6461 | AEIQNWFAK |
| 6462 | AEQHTLGMG |
| 6463 | AFDTMVCGT |
| 6464 | AFFTNMSPS |
| 6465 | AFGPYWMEK |
| 6466 | AFHLWKEDQ |
| 6467 | AFKSFDSHI |
| 6468 | AFRAICAHG |
| 6469 | AFWIEQMDY |
| 6470 | AGDLWEIGS |
| 6471 | AGEHSRSER |
| 6472 | AGFPFEKFA |
| 6473 | AGGHIHADH |
| 6474 | AGQFRKLPY |
| 6475 | AGWPTSREM |
| 6476 | AHMGQVWWF |
| 6477 | AHSQLVSDR |
| 6478 | AHVLNTFGN |
| 6479 | AIEFWDDAL |
| 6480 | AIFHACNSG |
| 6481 | AIFRSEITY |
| 6482 | AIGNLTGAQ |
| 6483 | AIQASMDAF |
| 6484 | AIRCESDAA |
| 6485 | AISVGEVTT |
| 6486 | AISVRHQHH |
| 6487 | AITDALLYR |
| 6488 | AITSASAKN |
| 6489 | AIVGWKTPP |
| 6490 | AIWIEEFFH |
| 6491 | AKAHVCTIP |
| 6492 | AKDQLNITR |
| 6493 | AKEVTTCNW |
| 6494 | AKHIGVTFG |
| 6495 | AKKMWHCDQ |
| 6496 | AKYGPWENN |
| 6497 | AKYQWQSYP |
| 6498 | ALAWKNYDK |
| 6499 | ALCTENAER |
| 6500 | ALGPLHQGD |
| 6501 | ALMPSMFLS |
| 6502 | ALQQNSLGE |
| 6503 | ALVYAHWWG |
| 6504 | ALYEADQFD |
| 6505 | ALYQIKWGF |
| 6506 | AMDVIIEGA |
| 6507 | AMEYLRLQH |
| 6508 | AMGTTEVQV |
| 6509 | AMHLQERMP |
| 6510 | AMHNREGAI |
| 6511 | AMIQCAMPP |
| 6512 | AMWWGQAMG |
| 6513 | ANAAIREHL |
| 6514 | ANAERCNLA |
| 6515 | ANCRKDPMP |
| 6516 | ANENCSKGS |
| 6517 | ANGPHTDCI |
| 6518 | ANILWYHAS |
| 6519 | ANKCLDMRD |
| 6520 | ANLMSAKME |
| 6521 | ANPLCELQQ |
| 6522 | APRLTEACL |
| 6523 | APSWRNHMC |
| 6524 | APVLITNQQ |
| 6525 | AQDHRHSDW |
| 6526 | AQDWSATQG |
| 6527 | AQEKRLYGQ |
| 6528 | AQFSHLHSY |
| 6529 | AQHSHHECY |
| 6530 | AQSMPYSRH |
| 6531 | AQWNQLYGS |
| 6532 | ARATWPRTA |
| 6533 | ARAVDGLNN |
| 6534 | ARFIREHEW |
| 6535 | ARLWIPGEP |
| 6536 | ARRMDDDWI |
| 6537 | ASCAFAEQY |
| 6538 | ASCTYYHKW |
| 6539 | ASEHYMEVF |
| 6540 | ASGIEGEQG |
| 6541 | ASGWIQAKT |
| 6542 | ASIEKAEMH |
| 6543 | ASMDHNLDD |
| 6544 | ASMTKHNNF |
| 6545 | ASNHRLEKY |
| 6546 | ASQPFNPWV |
| 6547 | ASSARSIFE |
| 6548 | ASTAPVADQ |
| 6549 | ASTNSVWHV |
| 6550 | ASVMQLLCP |
| 6551 | ASWLYDNNC |
| 6552 | ATAMPQVRY |
| 6553 | ATCCYTHFD |
| 6554 | ATDDQMIKG |
| 6555 | ATDHSHPWP |
| 6556 | ATDPCACNI |
| 6557 | ATDVVDECH |
| 6558 | ATELYMNGH |
| 6559 | ATERWLEGN |
| 6560 | ATHDAMVTN |
| 6561 | ATKCYEYTW |
| 6562 | ATMPQECGA |
| 6563 | ATNHSHPWP |
| 6564 | ATQFGMTED |
| 6565 | ATQSVWMLN |
| 6566 | ATQTDYNIP |
| 6567 | ATSLPAHYD |
| 6568 | ATTLHERTH |
| 6569 | ATTYWHRGG |
| 6570 | ATYYWQFVW |
| 6571 | AVELAPCTN |
| 6572 | AVFWTHQEE |
| 6573 | AVMPNHWQW |
| 6574 | AVMYPMRLH |
| 6575 | AVNLKQFKT |
| 6576 | AVNPAWKHD |
| 6577 | AVNWKQDGY |
| 6578 | AVRDHELNN |
| 6579 | AVSMACLNT |
| 6580 | AVVDWQALE |
| 6581 | AVVPLMESA |
| 6582 | AVYEALRCL |
| 6583 | AVYFVPCRP |
| 6584 | AWEMEMEYE |
| 6585 | AWNPSGFMG |
| 6586 | AWIRCIVCA |
| 6587 | AWVMSVMLA |
| 6588 | AWVNCISGS |
| 6589 | AYAETSTHP |
| 6590 | AYDNHYLAP |
| 6591 | AYQHHEGVV |
| 6592 | AYIESQHNL |
| 6593 | CAADCGKGW |
| 6594 | CADPQERCD |
| 6595 | CAQNLNLWL |
| 6596 | CASAVQEDC |
| 6597 | CASEHSCWH |
| 6598 | CATFQNDVL |
| 6599 | CCELLIENT |
| 6600 | CDGRRLSMH |
| 6601 | CDVQQPTMM |
| 6602 | CDYHFKNWG |
| 6603 | CEPLVEIHG |
| 6604 | CFDYMELSP |
| 6605 | CFEDCFYCH |
| 6606 | CFEPQCVIN |
| 6607 | CFVPDTEWG |
| 6608 | CGQQNFRIP |
| 6509 | CHADLFWEQ |
| 6610 | CHNTANHIQ |
| 6611 | CHSYFWMPD |
| 6612 | CIATQAFMY |
| 6613 | CIHQDAPPH |
| 6614 | CISQAVMPP |
| 6615 | CKERCGYAN |
| 6616 | CKLQKCYYM |
| 6617 | CLCYFCCDA |
| 6618 | CLHCPIRRR |
| 6619 | CLSACDLLV |
| 6620 | CMMMYNTCR |
| 6621 | CMMQCMDMM |
| 6622 | CMNPRSYYF |
| 6623 | CNAKQQAAW |
| 6624 | CNCASRTEF |
| 6625 | CNDLRNQWE |
| 6626 | CNNPTTRRW |
| 6627 | CNWSKSSIA |
| 6628 | CPGVLQSCD |
| 6629 | CPQQCIWYG |
| 6630 | CQVEKVENE |
| 6631 | CQVPAWYDP |
| 6632 | CRVNDVMQN |
| 6633 | CSCTTDTDP |
| 6634 | CSDWYVECK |
| 6635 | CSEVLEDNA |
| 6636 | CSLPHVVHY |
| 6637 | CSQRIHSHC |
| 6638 | CSSDYSTLS |
| 6639 | CTCQAKIFS |
| 6640 | CTDRFAIGA |
| 6641 | CTFPNVHEA |
| 6642 | CTHSAFHYV |
| 6643 | CTIWKQCGH |
| 6644 | CTMCYYQNN |
| 6645 | CTQMVIHQE |
| 6646 | CTTAIGPSG |
| 6647 | CTVILPKVG |
| 6648 | CTWFDCSQE |
| 6649 | CVDTHHANV |
| 6650 | CVHATFDYT |
| 6651 | CVTTDHCAW |
| 6652 | CWENTNVTC |
| 6653 | CWEVVNTFR |
| 6654 | CWFIKRACA |
| 6655 | CWYVWDLWP |
| 6656 | DACFVNQPN |
| 6657 | DACSHTWAD |
| 6658 | DAEDTPATV |
| 6659 | DAGKFRKYV |
| 6660 | DAHQENLNW |
| 6661 | DAKDMMMTC |
| 6662 | DALENHAAV |
| 6663 | DALSYMQME |
| 6664 | DANEFILMH |
| 6665 | DANNTLQHS |
| 6666 | DANYYFVWQ |
| 6667 | DAWPNQQMW |
| 6668 | DCAQNWSGS |
| 6669 | DCEWMSTGA |
| 6670 | DCGFQTAHT |
| 6671 | DCHKWDTNQ |
| 6672 | DCKMHQAAM |
| 6673 | DCKWLALYP |
| 6674 | DCMQDPAYR |
| 6675 | DCMVMSQGH |
| 6676 | DCNFRHQDP |
| 6677 | DCPEWGVGC |
| 6678 | DCQMILGDY |
| 6679 | DCQPMEWWE |
| 6680 | DCRHFQSQE |
| 6681 | DCTEIVSGM |
| 6682 | DCTMYCKQS |
| 6683 | DCTPYQGGH |
| 6684 | DCYSKRFTP |
| 6685 | DCYYLKYSA |
| 6686 | DDEYNLTGL |
| 6687 | DDPNYAWEA |
| 6688 | DDQLYAWGM |
| 6689 | DDSLLFHMD |
| 6690 | DEASDLQYA |
| 6691 | DEHPHPEHC |
| 6692 | DEIQIGGSF |
| 6693 | DEMTFEQLF |
| 6694 | DEQHICMQT |
| 6695 | DESEMTSGG |
| 6696 | DEWWWSREE |
| 6697 | DFASRCNYV |
| 6698 | DFCFNESYW |
| 6699 | DFHCYSTER |
| 6700 | DFMTLVTHQ |
| 6701 | DFQAYSWNH |
| 6702 | DFRHVDKHA |
| 6703 | DFTQGMCTP |
| 6704 | DGDAQSCAY |
| 6705 | DGDCLQRHL |
| 6706 | DGFNYELQP |
| 6707 | DGGHMMNQD |
| 6708 | DGHNFDGHN |
| 6709 | DGIWTHKAD |
| 6710 | DGQFIFSQN |
| 6711 | DGYNMLWDP |
| 6712 | DHCEMHDCW |
| 6713 | DHFHMELTK |
| 6714 | DHQSYYTQK |
| 6715 | DIEFYCAYP |
| 6716 | DIEMFGSEM |
| 6717 | DIEYQSMGS |
| 6718 | DIGWLAPTA |
| 6719 | DIICDCDMF |
| 6720 | DILLDSRHS |
| 6721 | DITLIMSVH |
| 6722 | DKGQLCSLQ |
| 6723 | DKIWIWQAS |
| 6724 | DKLARSVSC |
| 6725 | DKMELNAHW |
| 6726 | DKQQAKDQL |
| 6727 | DKQRPMCVC |
| 6728 | DKQWFWEGH |
| 6729 | DKTSCMSFR |
| 6730 | DKTYLTRME |
| 6731 | DLAVMGKCT |
| 6732 | DLMWYEGAS |
| 6733 | DLQTSYHDQ |
| 6734 | DMARALKFF |
| 6735 | DMCTMAYTG |
| 6736 | DMEYSVCHS |
| 6737 | DMKMYEFGP |
| 6738 | DMLMNLMEP |
| 6739 | DMNFTEQYA |
| 6740 | DMTWTMGRQ |
| 6741 | DNACHTPFW |
| 6742 | DNAVLDGVP |
| 6743 | DNMPQPVCH |
| 6744 | DNRFIQDAR |
| 6745 | DNSSEGSWF |
| 6746 | DNVYKGPWA |
| 6747 | DPCPYIDHQ |
| 6748 | DPYPQGRQK |
| 6749 | DQADCNWTW |
| 6750 | DQASYDIHG |
| 6751 | DQCPLRSGT |
| 6752 | DQKSQMQTR |
| 6753 | DQLEFICWP |
| 6754 | DQNSYGCIP |
| 6755 | DQYVPATGY |
| 6756 | DRAVKFSIL |
| 6757 | DRGDQVMQT |
| 6758 | DRGFAHLCQ |
| 6759 | DRSTQDKFD |
| 6760 | DRTVQVRVD |
| 6761 | DRTYTYCWS |
| 6762 | DRVMMQRND |
| 6763 | DRWGMEEHQ |
| 6764 | DRWQIPSKL |
| 6765 | DSATFKSAD |
| 6766 | DSECKNCMC |
| 6767 | DSGGNMQVY |
| 6768 | DSGKQPADQ |
| 6769 | DSHCEVRFE |
| 6770 | DSIQRLSAG |
| 6771 | DSNTGQKAY |
| 6772 | DSVEWTVHE |
| 6773 | DSVRMLGKP |
| 6774 | DSWTGWNFA |
| 6775 | DTCKYLWTP |
| 6776 | DTCSRKHWM |
| 6777 | DTDEYQKAQ |
| 6778 | DTEWKYKHN |
| 6779 | DTKMQHTCT |
| 6780 | DTKWYPSTG |
| 6781 | DTMLGPQMQ |
| 6782 | DTMTCNRHQ |
| 6783 | DTNHATMAC |
| 6784 | DTNITDQWR |
| 6785 | DTQYTRDFV |
| 6786 | DTSWDRIFV |
| 6787 | DTYMEADSI |
| 6788 | DVAEFTGVV |
| 6789 | DVETTKAIN |
| 6790 | DVFKHLQCT |
| 6791 | DVGACFIQD |
| 6792 | DVGMINGPR |
| 6793 | DVLPAVECP |
| 6794 | DVLTSQELY |
| 6795 | DVMHDSRCS |
| 6796 | DVMPIECQT |
| 6797 | DVNIVCMDD |
| 6798 | DVRSMYVMG |
| 6799 | DVTHGDPAK |
| 6800 | DVTKHALAP |
| 6801 | DVVDGEASQ |
| 6802 | DVVHGGTQL |
| 6803 | DVVKNQGIG |
| 6804 | DVVQNDCEF |
| 6805 | DVYWDECVF |
| 6806 | DWACQEDAG |
| 6807 | DWCWYTCSW |
| 6808 | DWNYRHWFN |
| 6809 | DWVETAQES |
| 6810 | DWYMHDQPM |
| 6811 | DYEQSQKWW |
| 6812 | DYGTAGYPR |
| 6813 | DYIMHHHCG |
| 6814 | DYLCINGFS |
| 6815 | DYNSKMDFH |
| 6816 | DYRPENTGC |
| 6817 | DYTTAIYTD |
| 6818 | DYVRRAWMP |
| 6819 | EAAWVVRKR |
| 6820 | EADNTQRSS |
| 6821 | EADSKFVDQ |
| 6822 | EAFAYDHKD |
| 6823 | EAGFDAPGR |
| 6824 | EAGIDKCCH |
| 6825 | EAHMIGRHT |
| 6826 | EAICVEREY |
| 6827 | EAKLQQEIE |
| 6828 | EAMGCILRG |
| 6829 | EAMHGDAIW |
| 6830 | EARAHQNEI |
| 6831 | EASANWLKC |
| 6832 | EASGLHKIF |
| 6833 | EASNRMIDN |
| 6834 | EATLGGWCD |
| 6835 | EATPFVRFR |
| 6836 | EATVWTWNP |
| 6837 | EAWHFYEWP |
| 6838 | EAYVNKDQW |
| 6839 | ECDFPMGTE |
| 6840 | ECEVSHFID |
| 6841 | ECHHLWCDY |
| 6842 | ECHQMNEDQ |
| 6843 | ECMQRYIGV |
| 6844 | ECNQNWDEF |
| 6845 | ECQNQFGWM |
| 6846 | ECRCIPTVW |
| 6847 | ECRSEMGLP |
| 6848 | ECTRGELTH |
| 6849 | ECVHKHSGS |
| 6850 | ECYHMELMT |
| 6851 | EDTRFHQWT |
| 6852 | EEAEQEEWN |
| 6853 | EEMHDDGDA |
| 6854 | EESQRDMIT |
| 6855 | EFAAEMTPA |
| 6856 | EFCKANGPL |
| 6857 | EFDGCQYFA |
| 6858 | EFEQFTRYA |
| 6859 | EFHQITGSS |
| 6860 | EFMMPMIYD |
| 6861 | EFMPTVDTK |
| 6862 | EFQWWNMSK |
| 6863 | EFTHWMQMQ |
| 6864 | EFTQLAYTY |
| 6865 | EGCWHGHTF |
| 6866 | EGHAFNTFN |
| 6867 | EGKPRLHDA |
| 6868 | EGKTDVMSY |
| 6869 | EGWTVMVDQ |
| 6870 | EHCNHDMNT |
| 6871 | EHCQEMRWH |
| 6872 | EHEAMLVND |
| 6873 | EHEFLGAKS |
| 6874 | EHFRACVVF |
| 6875 | EHFSTYMRE |
| 6876 | EHGYSHTLA |
| 6877 | EHQEQQLVH |
| 6878 | EHSYIMANP |
| 6879 | EHTNLEKYA |
| 6880 | EHTTWHQYT |
| 6881 | EIATHWQKG |
| 6882 | EICHYNEQY |
| 6883 | EIDAMIPMT |
| 6884 | EIDLVTRWE |
| 6885 | EIEEQGWSG |
| 6886 | EIFLNPQYY |
| 6887 | EIGYRHRDC |
| 6888 | EIGYWCGCA |
| 6889 | EIHQVTHYE |
| 6890 | EKHLLNCDS |
| 6891 | EKMVAEFQC |
| 6892 | EKMVAEFQC |
| 6893 | EKQFGVKNR |
| 6894 | EKTWHQRNM |
| 6895 | ELATLVDWN |
| 6896 | ELAWFMNTE |
| 6897 | ELCKTVFLA |
| 6898 | ELGAAVMVC |
| 6899 | ELGFWHGKG |
| 6900 | ELLNPDNPI |
| 6901 | ELMLGNMFW |
| 6902 | ELMMNLIGM |
| 6903 | ELRCRDSDQ |
| 6904 | ELRPITWVD |
| 6905 | ELTKKVKAS |
| 6906 | EMIHRHQVD |
| 6907 | EMKKLCDAC |
| 6908 | EMKPWCQAL |
| 6909 | EMMLVHQPS |
| 6910 | EMNAVFSTD |
| 6911 | EMTKNDSFM |
| 6912 | EMYFMSEGT |
| 6913 | ENIQSIADV |
| 6914 | ENKEYPDSN |
| 6915 | ENMCNQGIG |
| 6916 | ENRLCVGTV |
| 6917 | ENVVAIQTI |
| 6918 | ENYKEIPYG |
| 6919 | EPTASKHDR |
| 6920 | EPTNIPDGF |
| 6921 | EPVRRTVMG |
| 6922 | EPWMPSIAL |
| 6923 | EPWSIGKAA |
| 6924 | EPYCEGVAW |
| 6925 | EQETHEALG |
| 6926 | EQHVIAMDH |
| 6927 | EQIKQLNWA |
| 6928 | EQMKYYWFE |
| 6929 | EQNEQKDMW |
| 6930 | EQVPFCFTE |
| 6931 | ERACSMADR |
| 6932 | ERCHYPYIK |
| 6933 | ERETLGDQR |
| 6934 | ERGMQVWPP |
| 6935 | ERKYIMQFD |
| 6936 | ERRSHTETA |
| 6937 | ERYRGVIAC |
| 6938 | ESCILEEHM |
| 6939 | ESCIMQCMI |
| 6940 | ESCLFHMRQ |
| 6941 | ESENNKFGH |
| 6942 | ESEPNKHNP |
| 6943 | ESFPNKIQG |
| 6944 | ESGVEDMQN |
| 6945 | ESHHKGDHM |
| 6946 | ESKSHWTIG |
| 6947 | ESKVGYELG |
| 6948 | ESLTHEDGY |
| 6949 | ESRAVLSMP |
| 6950 | ESRLTMTCP |
| 6951 | ESVNRYFKQ |
| 6952 | ETAYTTRTE |
| 6953 | ETDHRKHYC |
| 6954 | ETECWHKSH |
| 6955 | ETEMICEFQ |
| 6956 | ETFACPSCR |
| 6957 | ETGMFKFSG |
| 6958 | ETGWKQNIE |
| 6959 | ETHFCIRNS |
| 6960 | ETHQMGMDR |
| 6961 | ETILDQHGG |
| 6962 | ETISRVGMQ |
| 6963 | ETLFNSYGR |
| 6964 | ETLPLYWQC |
| 6965 | ETNKQLNLW |
| 6966 | ETQQNIWSW |
| 6967 | ETQSPMCCL |
| 6968 | ETSCTCEVC |
| 6969 | ETSGQGVLW |
| 6970 | ETTWNVICP |
| 6971 | EVADPMTWV |
| 6972 | EVCPGSIRS |
| 6973 | EVERKVNQE |
| 6974 | EVGNPTQYD |
| 6975 | EVHYCGNCG |
| 6976 | EVIMSHLIT |
| 6977 | EVKYFWHCA |
| 6978 | EVLMDWSWE |
| 6979 | EVLQLLKAD |
| 6980 | EVLYGGQQW |
| 6981 | EVNSGRDWW |
| 6982 | EVQGFIDDR |
| 6983 | EVQHIHFPY |
| 6984 | EVQKILFLQ |
| 6985 | EVQRNGIGM |
| 6986 | EVSHFKVDE |
| 6987 | EVSIQPQMN |
| 6988 | EVSYTIGDI |
| 6989 | EVVHLMMRG |
| 6990 | EVWSPMHNG |
| 6991 | EWGWAWLVG |
| 6992 | EWKMANVMQ |
| 6993 | EWRHAWNCW |
| 6994 | EWRMFINTA |
| 6995 | EWTPEMNEG |
| 6996 | EWYLRHHMI |
| 6997 | EWYQIRHID |
| 6998 | EYAIKICNH |
| 6999 | EYASTACYD |
| 7000 | EYDHIDVWL |
| 7001 | EYEGYKSAA |
| 7002 | EYEPIASGP |
| 7003 | EYEWLMAAA |
| 7004 | EYFDNRCAQ |
| 7005 | EYFHVVGVD |
| 7006 | EYFPTARTF |
| 7007 | EYKSRGREV |
| 7008 | EYMERWFND |
| 7009 | EYSDSMVWP |
| 7010 | EYVRWNKQC |
| 7011 | EYYLLGCAD |
| 7012 | EYYRKQCAI |
| 7013 | FAASSEIYG |
| 7014 | FAAYDMVSE |
| 7015 | FACPEALGT |
| 7016 | FADPHTWFS |
| 7017 | FAEDIHYGA |
| 7018 | FAIEPGLCT |
| 7019 | FATIVVHEE |
| 7020 | FATVSPGWE |
| 7021 | FAYENRLCD |
| 7022 | FCFIEDLAM |
| 7023 | FCFMYPFHW |
| 7024 | FCFYNRCWQ |
| 7025 | FCHLEQCMI |
| 7026 | FCSCCHCRT |
| 7027 | FCVINELGT |
| 7028 | FCYQKLNYN |
| 7029 | FDMQLTAYA |
| 7030 | FDQPIQQCP |
| 7031 | FEHVIRTMW |
| 7032 | FEKWRHPRH |
| 7033 | FGAKYHDGQ |
| 7034 | FGEPANVNA |
| 7035 | FGGLCWLVV |
| 7036 | FGGLVIDAS |
| 7037 | FGKQRNEDY |
| 7038 | FGLWQQAGY |
| 7039 | FHAEWKGPP |
| 7040 | FHTRVNACD |
| 7041 | FICQQGDSL |
| 7042 | FIRGSPMNM |
| 7043 | FIRMIIVDD |
| 7044 | FKAEYQSGH |
| 7045 | FLINPAWQG |
| 7046 | FLWGIRVLA |
| 7047 | FMGKTDVNM |
| 7048 | FMLTMDFWA |
| 7049 | FMNVYFEHA |
| 7050 | FMQVGGINT |
| 7051 | FMTSLRDRF |
| 7052 | FNCEGQLYE |
| 7053 | FNDEYPCSQ |
| 7054 | FNDSEPEVI |
| 7055 | FNFQKTMDC |
| 7056 | FNLEEWWSP |
| 7057 | FNLQYAGLQ |
| 7058 | FNVPFAKDD |
| 7059 | FPRESSNLL |
| 7060 | FQAGLANCA |
| 7061 | FQFTAMWYM |
| 7062 | FQGHSRDGM |
| 7063 | FQLYQNHGA |
| 7064 | FQMTKQTQS |
| 7065 | FQMVEQQPQ |
| 7066 | FQNLLDGCW |
| 7067 | FQTRPSCSF |
| 7068 | FRVRWWHYR |
| 7069 | FRWNIDVTY |
| 7070 | FSANMNADI |
| 7071 | FSDGLNHSD |
| 7072 | FSQHFNRYP |
| 7073 | FSQLMNTPP |
| 7074 | FTFDQPSGY |
| 7075 | FTHPSTDQQ |
| 7076 | FTILLFVHN |
| 7077 | FTLLNSEGF |
| 7078 | FTMRYQKLH |
| 7079 | FVETTQVMN |
| 7080 | FVKSFNNDV |
| 7081 | FVQSSCQQS |
| 7082 | FVVDKYIYA |
| 7083 | FWNNNLFQS |
| 7084 | FWRGITCNF |
| 7085 | FYRLDRCEM |
| 7086 | GACDVLSGE |
| 7087 | GADEPQATL |
| 7088 | GADYFTECH |
| 7089 | GAGHYITAW |
| 7090 | GANAMITEE |
| 7091 | GAYEYASKM |
| 7092 | GCASEHGRS |
| 7093 | GCCQGSPFA |
| 7094 | GCELIPIRP |
| 7095 | GCEMKYQSF |
| 7096 | GCLELEHYE |
| 7097 | GCTIAEGAC |
| 7098 | GCTQGEQAT |
| 7099 | GCVGAGCDM |
| 7100 | GDCFKQTFH |
| 7101 | GDGNRPTDI |
| 7102 | GDHCSLSEE |
| 7103 | GDHKTIVMF |
| 7104 | GDKYCGVHT |
| 7105 | GDLFWKKIH |
| 7106 | GDYTKMVNQ |
| 7107 | GECTYVGGD |
| 7108 | GFAQYGMAL |
| 7109 | GFEQYDCEM |
| 7110 | GFFCFVTQW |
| 7111 | GFMEHPNSA |
| 7112 | GFMEKCYDG |
| 7113 | GFNALQQAP |
| 7114 | GFNCEKPDA |
| 7115 | GGGHCWQNA |
| 7116 | GGHMKMQME |
| 7117 | GGRAFAGYK |

TABLE 74
Sequences of the 581 to 589 Region in AAV5
VP1 Capsid Polypeptide that Drive CNS
Tissue Tropism

| SEQ | 581-589 |
|---|---|
| ID NO | Sequence |
| 9118 | AAMESCAEI |
| 9119 | EKYQIHWDR |
| 9120 | VTGTYNLQE |
| 9121 | ATGTYSLQE |
| 9122 | ATGTYNLRE |
| 9123 | ATDTYNLQE |
| 9124 | MWTKFNEYG |
| 9125 | QTLGGHMWT |
| 9126 | TLCHTDNMV |
| 9127 | GIAYEVLWD |
| 9128 | SRLPVHECP |
| 9129 | TIGTYNLQE |
| 9130 | MWTEFNEDG |
| 9131 | TFVYGERDR |
| 9132 | GQQTIEMSY |
| 9133 | NYAMRRDSY |
| 9134 | KPLASEGQY |
| 9135 | AAFVMNGDG |
| 9136 | RVAGEGEQP |
| 9137 | TCGHTRFFI |
| 9138 | ESAEPRMIP |
| 9139 | TTSQNSEAM |
| 9140 | NTQVISRWT |
| 9141 | AGCNTQNGH |
| 9142 | VGPLYAYYS |
| 9143 | QHSRAYMWY |
| 9144 | DIREVSDGK |
| 9145 | TMAQKGLWF |
| 9146 | QCEYSNCCY |
| 9147 | NGTQCLNMD |
| 9148 | MTDNNGPLF |
| 9149 | CPEHNQVGV |
| 9150 | EMYVQRHSL |
| 9151 | LINSIVCGD |
| 9152 | ACKPCNGWD |
| 9153 | PLTIEVNCT |
| 9154 | SKGWADLCP |
| 9155 | DMTLQSVSS |
| 9156 | RVIEMFTGT |
| 9157 | RMFWDTSDR |
| 9158 | SMQYFFKTE |
| 9159 | SFKGEHLQN |
| 9160 | TTYPHNTHG |
| 9161 | KSTMLEHHD |
| 9162 | TCKWYEESE |
| 9163 | DICQKQSPN |
| 9164 | ILEAIVNFW |
| 9165 | DYEVCGNWS |
| 9166 | EWNCWWWHD |
| 9167 | SPNGRGLCG |
| 9168 | TSMEFTQHQ |
| 9169 | ASFFLNPLE |
| 9170 | METNNCNIS |
| 9171 | MAEQMERDF |
| 9172 | VLTIMWKNN |
| 9173 | IATHNHILN |
| 9174 | MYDTMGAWC |
| 9175 | CKQLFCELG |
| 9176 | MWTEFNENG |
| 9177 | ECVSDYACC |
| 9178 | AGESQFDCF |
| 9179 | RGKPILNQQ |
| 9180 | KSAQVYWHP |
| 9181 | AIGPALCLT |
| 9182 | QNKHNWWIM |
| 9183 | MASQGGQVR |
| 9184 | CGHLLRRAE |
| 9185 | WGDNKNFMG |
| 9186 | FVFAMEPGF |
| 9187 | TFMFNSEWS |
| 9188 | MAQPYGRTA |
| 9189 | CKNHYMMAA |
| 9190 | NSGVLIGME |
| 9191 | LAESKKRNK |
| 9192 | AFNGANSWT |
| 9193 | YTELMKKAC |
| 9194 | ETNDNMILH |
| 9195 | QFMMGQQTP |
| 9196 | VKAWWHDHQ |
| 9197 | GKEAHDQLN |
| 9198 | QVHMQRYYG |
| 9199 | MFVVNQNWA |
| 9200 | ELINDREWG |
| 9201 | DVTQTRYCY |
| 9202 | QTGVMAAFG |
| 9203 | ESRQVQDCY |
| 9204 | IMNPTAQNN |
| 9205 | CCCVPRSEY |
| 9206 | NRIQMTDFQ |
| 9207 | QPYWVAVDP |
| 9208 | KMLHKVWID |
| 9209 | QWMHCQLSR |
| 9210 | GHMFETFWG |
| 9211 | NCPMYDMIS |
| 9212 | CCCQFSFWN |
| 9213 | TLEPAYRHE |
| 9214 | NLSNLVSCR |
| 9215 | DRKQADQIY |
| 9216 | QPKMWMMAS |
| 9217 | KEFQLQMEP |
| 9218 | QMKGATEFC |
| 9219 | LETMMRHGE |
| 9220 | LCKFANGAA |
| 9221 | FAQQIINAS |
| 9222 | EMYLKRCCT |
| 9223 | EKRLEGWVY |
| 9224 | NVWSPAVRD |
| 9225 | DEYQQESFQ |
| 9226 | EICMRSGFI |
| 9227 | AVKAPSQMS |
| 9228 | QTDILRDVQ |
| 9229 | DNYWEVPFA |
| 9230 | INMPVSKDQ |
| 9231 | ENQSTMSHT |
| 9232 | ENTPYAHIG |
| 9233 | LESVKMDCN |
| 9234 | WCEAVGDYA |
| 9235 | SMSHNGQCL |
| 9236 | HAETDHVGL |
| 9237 | QCTLEISYV |
| 9238 | SGQPVDCMF |
| 9239 | AAAWSCMQW |
| 9240 | RTVPTQEMS |
| 9241 | LTPRSEGLP |
| 9242 | GDVSYDAEA |
| 9243 | QHKWHDVGV |
| 9244 | TAFQSLQQM |
| 9245 | REFAISGGN |
| 9246 | PHAETHWYT |
| 9247 | NLAPMIQVC |
| 9248 | STGSSKDQD |
| 9249 | HFEVRSVQR |
| 9250 | TMRLFWDMG |
| 9251 | NFVNHQPLP |
| 9252 | GKGQWTAQE |
| 9253 | VHGQEDLSL |
| 9254 | YESEYVMMV |
| 9255 | GVRNALNLS |
| 9256 | HMEQCWCNE |
| 9257 | MFFPGFVAH |
| 9258 | QCFLWNDCQ |
| 9259 | LIHWLKHDL |
| 9260 | KCAWIEVTP |
| 9261 | YPVHMMPPL |
| 9262 | PCCWEQSTN |
| 9263 | CSMPQQCME |
| 9264 | RRTDHGEPE |
| 9265 | GSKEEMHTE |
| 9266 | SQMKYAHNQ |
| 9267 | EFNWLLWSG |
| 9268 | AEDTRYTIY |
| 9269 | RTAEDCPFQ |
| 9270 | AKCTILNFQ |
| 9271 | WFSIIMSKL |
| 9272 | QTAEWYCGA |
| 9273 | MHGIARMQQ |
| 9274 | VTKYCDHEQ |
| 9275 | DFNGSNWLP |
| 9276 | IHFTSQSCL |
| 9277 | QVKWTADPD |
| 9278 | CIQPTWDSY |
| 9279 | DVKAFMGGV |
| 9280 | DPGWYGLAP |
| 9281 | DHLSNDAEM |
| 9282 | NSIGWDSAS |
| 9283 | TNFPTSMHG |
| 9284 | RQTTYDCLD |
| 9285 | SAKCCINAV |
| 9286 | VHHKTNRSY |
| 9287 | FGSMQANDR |
| 9288 | AVETGESAM |
| 9289 | MVENGLRLQ |
| 9290 | AIEHGAWKC |
| 9291 | SMMEQKEQQ |
| 9292 | AFLHGQMWQ |
| 9293 | IEFTHSRKV |
| 9294 | NWKLPTCMT |
| 9295 | EHKGCMQAI |
| 9296 | ATGTYNLQE |
| 9297 | NGNHYNAMR |
| 9298 | QHEQSNHIW |
| 9299 | IGRLNASTP |
| 9300 | MSNLEYYEA |
| 9301 | TSCCYESSS |
| 9302 | WINEANCLM |
| 9303 | VESAMINQA |
| 9304 | EPRLYCAQE |
| 9305 | WPNIKHQPI |
| 9306 | FTHSCCCLS |
| 9307 | SFSDTHLGW |
| 9308 | SDSKVQWGM |
| 9309 | WDGWVITHF |
| 9310 | QTNGHPYFP |
| 9311 | QTSHQDQDC |
| 9312 | HMGIAYNDH |
| 9313 | TFVRKPSLM |
| 9314 | QQLCYMSDE |
| 9315 | KVAEGQNML |
| 9316 | LHYRPTEQC |
| 9317 | KTGMGDLFL |
| 9318 | AQCHDMWGH |
| 9319 | ATGLTDHQW |
| 9320 | QWAPLQTWA |
| 9321 | SPHNCQHMG |
| 9322 | ISMRSECED |
| 9323 | KIAAWNDFL |
| 9324 | RFDQFWDTY |
| 9325 | HQCNCLLSQ |
| 9326 | MAMWIADTH |
| 9327 | AVHTADVCC |
| 9328 | SCAPDTQFG |
| 9329 | CWILHHRCS |
| 9330 | QVGIEFVVC |
| 9331 | TIVVIPIKS |
| 9332 | MPWLDKPPC |
| 9333 | YMSWYQIRN |
| 9334 | AVYLDHVES |
| 9335 | KACMSHQGR |
| 9336 | TSIEGLKTM |
| 9337 | AWSYTGACY |
| 9338 | QCVDCPPYC |
| 9339 | VTCNWCVMP |
| 9340 | KCADLIIRS |
| 9341 | NVCDNGHEI |
| 9342 | MMKRNRFIC |
| 9343 | SRVMIHVYV |
| 9344 | WKATPGGQC |
| 9345 | WYTSIAVDT |
| 9346 | DTHHVHGWQ |
| 9347 | MGYAKHDSH |
| 9348 | GCEEVGRCQ |
| 9349 | KTMGIGGGP |
| 9350 | RVWSLEWHL |
| 9351 | EQPNMGDYG |
| 9352 | FGEFTMDEN |
| 9353 | KFGFMYNEF |
| 9354 | ERFHSYPLG |
| 9355 | FLYTEMFQH |
| 9356 | GSVMLMVIR |
| 9357 | KMAGIGQNY |
| 9358 | RTRISQMFG |
| 9359 | AQARTIGLG |
| 9360 | MIRPSINGS |
| 9361 | TKGRNDHME |
| 9362 | ATIAQWCVH |
| 9363 | RYNNCPNLW |
| 9364 | FKIEWSQDI |
| 9365 | KKHKGWCRA |
| 9366 | GAANRIQSW |
| 9367 | NWIGNMQWA |
| 9368 | CMEVTCFVV |
| 9369 | RVEMGCEPR |
| 9370 | SQIQIRQAD |
| 937/ | KIGCMYSSQ |
| 9372 | MWHELIADQ |
| 9373 | PQEAQIGAP |
| 9374 | KTQIHMGDE |
| 9375 | LPSHCNLGS |
| 9376 | KVESTTQLC |
| 9377 | AYAMRNYTS |
| 9378 | IIRQSEQYH |
| 9379 | AHAWLQHWA |
| 9380 | HAVMMCPAP |
| 9381 | EVAFTTSSD |
| 9382 | PLNQEQIPQ |
| 9383 | TSVIRLFWI |
| 9384 | QFAQLWCAK |
| 9385 | GIWVRDTYN |
| 9386 | LCTSTERQG |
| 9387 | DRVNLMWKD |
| 9388 | CYMNFIVDG |
| 9389 | QLSKPSVQC |
| 9390 | GITMHPMHH |
| 9391 | LPPPEEKWL |
| 9392 | TTTNQFMFQ |
| 9393 | RCGEIMGLD |
| 9394 | MQLRIHTNS |
| 9395 | ICHIRTRGN |
| 9396 | MSGPNDTEF |
| 9397 | NTQYSAKND |
| 9398 | KQKTQNRNA |
| 9399 | TRETMNEWH |
| 9400 | ERQAHNHYA |
| 9401 | SKGWADPCP |
| 9402 | RTEAHLPAP |
| 9403 | GNECFHNVE |
| 9404 | ECIFAPRMS |
| 9405 | YFPSIQCYE |
| 9406 | SSIYKEIQE |
| 9407 | THVKRFDYE |
| 9408 | LYMMALLPT |
| 9409 | SGALKNREE |
| 9410 | EASIQASWN |
| 9411 | ACIPQMHSA |
| 9412 | LHSYQWRLG |
| 9413 | ACVERLHHK |
| 9414 | TVNWYSGFG |
| 9415 | IAKQNFMKT |
| 9416 | FTQAIHHPD |
| 9417 | YHCCFAMQS |
| 9418 | NLERCNTMM |
| 9419 | HMHNLPVKP |
| 9420 | HCWVNEKCE |
| 9421 | FADMITNQF |
| 9422 | RQAWPKDGM |
| 9423 | CSESYRGPD |
| 9424 | VLKSNLTGM |
| 9425 | NAYYDSHCE |
| 9426 | YPAQYTAFS |
| 9427 | GLFEGSPGA |
| 9428 | VTMIHNAFH |
| 9429 | IYMSTGNTP |
| 9430 | YIGMKSCSG |
| 9431 | MFMTNVNSF |
| 9432 | IAQSEADYW |
| 9433 | AVHNVKDVH |
| 9434 | HIHMSDRGA |
| 9435 | GLFHPQFGQ |
| 9436 | GPRHIEEDG |
| 9437 | AYHCYMSWM |
| 9438 | ITASIKDQW |
| 9439 | PAHINDQYM |
| 9440 | AAMSSSHSY |
| 9441 | MNSFYRAEW |
| 9442 | QATGMHRWQ |
| 9443 | SSRMQMQGP |
| 9444 | MEHTMDFGV |
| 9445 | YLEMYSKDW |
| 9446 | QWFTKGVGE |
| 9447 | KNCIMLASN |
| 9448 | AYAPSKNAM |
| 9449 | GLSMVLHFV |
| 9450 | SPQQPSVFH |
| 9451 | PGGCYRMMF |
| 9452 | KTCLCIFTK |
| 9453 | ACHTGQSGM |
| 9454 | DIEFLDCEN |
| 9455 | WTLWVMKIN |
| 9456 | DVKSWAVCD |
| 9457 | LCAVCGDCD |
| 9458 | DQEAQVVTG |
| 9459 | HFQPVFMQP |
| 9460 | GHLFNNNEW |
| 9461 | YDYWMQAPT |
| 9462 | ASMHEETCL |
| 9463 | DCVLTMVDK |
| 9464 | MLPLEMKNL |
| 9465 | IMTIIPYGP |
| 9466 | LIEKQRWML |
| 9467 | VSVQSRAQL |
| 9468 | THSSCWYQD |
| 9469 | VFNLMLQDK |
| 9470 | HIKVEHEEV |
| 9471 | MMLGYMEQD |
| 9472 | TQCKQLTVM |
| 9473 | QSSHCKQMV |
| 9474 | WGGMPNNQG |
| 9475 | FLTCDQFEW |
| 9476 | RVNGSTCRH |
| 9477 | ETHAAMNSM |
| 9478 | DAKLTMHSA |
| 9479 | RYPCCQSPF |
| 9480 | WGENAWHHN |
| 9481 | TSNHNMALE |
| 9482 | NPGWQTIGQ |
| 9483 | CAWHMKQGN |
| 9484 | NVMGTQAKE |
| 9485 | TYIQYPTNA |
| 9486 | DGMHRELYS |
| 9487 | QSAHPEPMC |
| 9488 | QAKMILDGT |
| 9489 | VHVHCMIGS |
| 9490 | TAALGHSFC |
| 9491 | DTRRNLCCD |
| 9492 | ENTMWQSSQ |
| 9493 | NQREWHGLA |
| 9494 | PDLWYEKSS |
| 9495 | ESSQEIKTC |
| 9496 | YVDHWTLGD |
| 9497 | NHSLCWDSK |
| 9498 | SECEVLCSL |
| 9499 | DQRHGNVSP |
| 9500 | MCFPYSCAA |
| 9501 | ASKQGTHDY |
| 9502 | GNKHCMLGT |
| 9503 | GTKLIWPYQ |
| 9504 | QCTAHNTCM |
| 9505 | ACDQVNTVQ |
| 9506 | IECSPRESI |
| 9507 | RCADNPYFR |
| 9508 | QESMCNYWQ |
| 9509 | AGMYKCQED |
| 9510 | SQAHQNRTC |
| 9511 | MGRQKDNVY |
| 9512 | NANYWFYYD |
| 9513 | EFVLGCQGI |
| 9514 | QRSVFHQRS |
| 9515 | PIWQGYWPW |
| 9516 | HSMMPGWPS |
| 9517 | GVHHRCRMT |
| 9518 | IQAVMASGW |
| 9519 | IAKIGNCVW |
| 9520 | CVDTNRMWQ |
| 9521 | ARWFSTVEQ |
| 9522 | VFKPLDKRY |
| 9523 | EVRIQCKID |
| 9524 | NGVGRSGDN |
| 9525 | CVEQYVEQG |
| 9526 | LSAQRLVCD |
| 9527 | KGNPLDGDT |
| 9528 | PVICVWHDN |
| 9529 | EIHMFGQSE |
| 9530 | YCECGHWPN |
| 9531 | TYESLQNSW |
| 9532 | INYISFVDR |
| 9533 | MWGCKLEVC |
| 9534 | CQMLCRPPV |
| 9535 | RDQCRMESG |
| 9536 | WVHPYSYCA |
| 9537 | QSRCVDNTV |
| 9538 | GRALGKKQG |
| 9539 | SNVACIQAF |
| 9540 | HQYVHNWRQ |
| 9541 | SVLHVQALA |
| 9542 | ATMNLSWGL |
| 9543 | WERCLELNQ |
| 9544 | TKMIIFDSW |
| 9545 | CWECCTDSG |
| 9546 | YSDPKNMSI |
| 9547 | FPKGSECNW |
| 9548 | EAGCKMWPT |
| 9549 | KDGRNPHCL |
| 9550 | LEIGGKTRT |
| 9551 | YKGMEKNPV |
| 9552 | DLIVATEWF |
| 9553 | WHTIMTYES |
| 9554 | DTAFMHHHV |
| 9555 | FQWRTEMNN |
| 9556 | SGDWDFGEW |
| 9557 | MNLQIGSKG |
| 9558 | CNGYWMCMS |
| 9559 | SQERMDYDG |
| 9560 | SVGYIYDQS |
| 9561 | GTWSDPWPN |
| 9562 | YPTMTFPEE |
| 9563 | AAQYMGIMK |
| 9564 | HTVMEWSPT |
| 9565 | GQHTISHAG |
| 9566 | RYQSHCWLH |
| 9567 | LSTMFPEQT |
| 9568 | NIGVIPHIQ |
| 9569 | PWTTPENYT |
| 9570 | YNCPWDQQY |
| 9571 | QWHDDQWST |
| 9572 | DYAQPTGPD |
| 9573 | FKHSLREWT |
| 9574 | AARMVGEFY |
| 9575 | GSMPSTVPH |
| 9576 | ALAKFQCWS |
| 9577 | AADIFAIND |
| 9578 | QHHWKWSTE |
| 9579 | AAGAFLSGC |
| 9580 | FDVQFMRVD |
| 9581 | ALQYCQGKD |
| 9582 | NERDQCQWP |
| 9583 | CRMITMMNE |
| 9584 | EWHARHHYW |
| 9585 | STSWLNDLT |
| 9586 | DEGYIMFAP |
| 9587 | QMVTQLNWE |
| 9588 | VVTQYVDAP |
| 9589 | TVIRDSRSY |
| 9590 | DEAKKSCWQ |
| 9591 | AVNEAQDNR |
| 9592 | NERSGSVLE |
| 9593 | TYASTRNFH |
| 9594 | IRRSMQQQN |
| 9595 | GFQRTHVDQ |
| 9596 | HKHRMCKAR |
| 9597 | TAGQQPTFM |
| 9598 | VQMNLDAAP |
| 9599 | KDHQLWEVW |
| 9600 | GDCIIVISW |
| 9601 | RDVGEDNSA |
| 9602 | PWMHTMLNP |
| 9603 | ETSTHCCKV |
| 9604 | QVNMFMMPC |
| 9605 | NADMSFRNR |
| 9606 | FRLDYDYKN |
| 9607 | TNAAYEMWF |
| 9608 | TTTITNRLC |
| 9609 | KIQPMMVKA |
| 9610 | LFRAYAWFQ |
| 9611 | DVIRDMIAE |
| 9612 | ALTHDDGRT |
| 9613 | KTYSAMYSP |
| 9614 | NCMWISSTQ |
| 9615 | TILPKKTLC |
| 9616 | VTTHMNCAD |
| 9617 | PPRFLQTTG |
| 9618 | VSVPKRQGP |
| 9619 | VFGSTRSAA |
| 9620 | TSDQCGNED |
| 9621 | GAKYIQNTD |
| 9622 | MRYHWDEAG |
| 9623 | SSEYSQFAI |
| 9624 | GVFWPDSFR |
| 9625 | GAYSLHDWR |
| 9626 | MTALPPSKN |
| 9627 | HGFKCQYSF |
| 9628 | YGGSEHWGP |
| 9629 | TTAYHRSDH |
| 9630 | NTHTGNDRL |
| 9631 | YPQPCSCHS |
| 9632 | VSGFDRVAF |
| 9633 | SRLYKKRLF |
| 9634 | CCKSKEVCA |
| 9635 | TYDTRNHCL |
| 9636 | SFKSVSQYN |
| 9637 | QAAVTKEYW |
| 9638 | EIIQAHLIN |
| 9639 | KTGATNLAW |
| 9640 | GQFRSGAYR |
| 9641 | PMMIIPYVD |
| 9642 | EPLVCISAG |
| 9643 | KGGLSTTNA |
| 9644 | KSTYYNLKW |
| 9645 | DVGIGVDQG |
| 9646 | MCDNFPSAH |
| 9647 | IKHITRNTY |
| 9648 | GNMHNFSAW |
| 9649 | CSIQINNCR |
| 9650 | MREKLVHDC |
| 9651 | EQPHISIKG |
| 9652 | EMSISHGCH |
| 9653 | RSDEMYVTP |
| 9654 | SFSYDVVMN |
| 9655 | GDMCEDMCT |
| 9656 | TVTQGSIGH |
| 9657 | RKDQSDLWP |
| 9658 | MAAITQNVA |
| 9659 | NSTPMACME |
| 9660 | PLSSEWRWA |
| 9661 | CHLKICMHS |
| 9662 | DVWWTLTRD |
| 9663 | DATTSTECH |
| 9664 | AMLQKKRQD |
| 9665 | TIAMPSWTY |
| 9666 | NGYVVDNHS |
| 9667 | GHHQCYKAD |
| 9668 | SANQRYHDW |
| 9669 | DCAWMQKEW |
| 9670 | KVNCRMIIM |
| 9671 | KCRYKDCQC |
| 9672 | NTSELLMAQ |
| 9673 | QGKQLYHMC |
| 9674 | NWYTTWIDE |
| 9675 | QAGNSMWAK |
| 9676 | RMYATEHCS |
| 9677 | NDMQMNWVH |
| 9678 | MHDGYRGMQ |
| 9679 | WVEPEQCFG |
| 9680 | TRCCEPYFQ |
| 9681 | LSAKQQFFC |
| 9682 | ECTKSMQSG |
| 9683 | NCHQLGDNM |
| 9684 | PCQQLMCFM |
| 9685 | YTKYNWKAA |
| 9686 | GTIRMPEHR |
| 9687 | VCHNPDPFT |
| 9688 | SLTQYQWRG |
| 9689 | TLNSRHPEC |
| 9690 | IMTMQMDTA |
| 9691 | YMHFRQYPI |
| 9692 | QTMCITIHP |
| 9693 | QEAGYTRHN |
| 9694 | MNHQCMLWD |
| 9695 | PWYNWDRRC |
| 9696 | DASQIPITF |
| 9697 | IHRVVCRDH |
| 9698 | HHMPIWLGL |
| 9699 | AEVPYVMQQ |
| 9700 | CVLSRSTMR |
| 9701 | AKRECTHIP |
| 9702 | TESQIPWVR |
| 9703 | STRPIACHS |
| 9704 | AWKMAHNSF |
| 9705 | RNDNTCHAY |
| 9706 | IEHCSNRYA |
| 9707 | AVEDYWRYF |
| 9708 | KHIVGQDGG |
| 9709 | ERFKTFCEE |
| 9710 | LVQKWMRTC |
| 9711 | DARDQQMGT |
| 9712 | NMPSLRTRI |
| 9713 | GSQQTTLSC |
| 9714 | GYFYALFFM |
| 9715 | GFRILDACL |
| 9716 | ETDCMEGGH |
| 9717 | YPDTADIFW |
| 9718 | QFMGVSSHS |
| 9719 | VHPGFEKLA |
| 9720 | NTFEQCTEH |
| 9721 | NNRRQFGYV |
| 9722 | QQSFFFGEQ |
| 9723 | QSMVACYTI |
| 9724 | DSMVYNRPQ |
| 9725 | TRDAKVANG |
| 9726 | SVKDPMDWG |
| 9727 | TMTVRMEQP |
| 9728 | ACNTLEHMA |
| 9729 | KIRDCDGNV |
| 9730 | IAYHYDQQN |
| 9731 | QTNEEEDGN |
| 9732 | NHILTPVVF |
| 9733 | QSYPTMYQC |
| 9734 | ECGCMYWGY |
| 9735 | EGVNRPNMK |
| 9736 | HATGLVNFM |
| 9737 | NMFQLKPQN |
| 9738 | NDVWQPHPN |
| 9739 | TQPEDHWLA |
| 9740 | IWITCPYAA |
| 9741 | TCHPNMSVP |
| 9742 | SNVMATKNW |
| 9743 | VDRLFRMEY |
| 9744 | FNIQCLFSR |
| 9745 | PYGPIEYDE |
| 9746 | DYFQYNEAP |
| 9747 | TTCYFVASQ |
| 9748 | AVVCKMNYH |
| 9749 | QVSFVGCNH |
| 9750 | ATGTYNLQA |
| 9751 | RKWMNAKAT |
| 9752 | ENHPTWEKS |
| 9753 | KAVLFLKDC |
| 9754 | ARYMYEKDA |
| 9755 | SHAQPIASH |
| 9756 | ATGTHNLQE |
| 9757 | IPRPFFTHM |
| 9758 | SCQLLNDGG |
| 9759 | DGEFLHEVL |
| 9760 | LFMTYSARN |
| 9761 | QVSFNARYA |
| 9762 | DILAFDGSC |
| 9763 | NTGVKFCAC |
| 9764 | IGQYFNFHF |
| 9765 | AEHMVVDHE |
| 9766 | MQHLPPAMT |
| 9767 | RAEQKFVLL |
| 9768 | QGKEFICGP |
| 9769 | KCNDIVLYH |
| 9770 | STWSANRMT |
| 9771 | STWSANMIT |
| 9772 | QCGCAPMDS |
| 9773 | CCLWSYWAF |
| 9774 | QFCICCDGM |
| 9775 | CVFSRNNYQ |
| 9776 | LTCMHASTP |
| 9777 | GYAQRGFFM |
| 9778 | HLMPRNQCF |
| 9779 | DIATMRNTW |
| 9780 | GKVQWSAQE |
| 9781 | AHQTAWAWI |
| 9782 | GCQCTGHPI |
| 9783 | EPLYSWVGI |
| 9784 | EIYSQLTDL |
| 9785 | KMEVNMSEL |
| 9786 | NVTTMFGQK |
| 9787 | CKVDIHDYM |
| 9788 | ENCMSRMKP |
| 9789 | HPLPNTEIC |
| 9790 | KIGVNSHYD |
| 9791 | GGDGRVHNK |
| 9792 | SIRYDFYVP |
| 9793 | SNTPMPYHG |
| 9794 | HVTMNQLYS |
| 9795 | QHLMTFSHE |
| 9796 | GREITQVMS |
| 9797 | GRWMCNEAE |
| 9798 | TWALAMRGD |
| 9799 | MYTGMRCWR |
| 9800 | LAAIQHCAM |
| 9801 | LQIGTGNME |
| 9802 | AQQQILNSN |
| 9803 | CASSKSHYL |
| 9804 | CLYHSMMKQ |
| 9805 | FKPFAQQWN |
| 9806 | KAVSYHHDG |
| 9807 | ICHTEVMFN |
| 9808 | QCQSQEWFH |
| 9809 | WCTQFDEYT |
| 9810 | PACKEWCFC |
| 9811 | IHNRYAQAP |
| 9812 | ASSRFGSYG |
| 9813 | EFGEMLGVD |
| 9814 | CEMQVQLCV |
| 9815 | DFMWYHICS |
| 9816 | EFDWLLGTI |
| 9817 | IATKSNCHK |
| 9818 | QPFCFSIGA |
| 9819 | QFHVWFEQK |
| 9820 | EMSPIDWHY |
| 9821 | ARAYYDSYS |
| 9822 | TVRHQMDAY |
| 9823 | VKFRITTEC |
| 9824 | SDHQYRGCL |
| 9825 | TSSDHYALP |
| 9826 | GTDLSNHFQ |
| 9827 | RAERYFKDE |
| 9828 | SKGDLCHQQ |
| 9829 | EAQPSEING |
| 9830 | TVCGSFHGC |
| 9831 | QTPKYFVHQ |
| 9832 | KTDKAGLME |
| 9833 | VPTGRRVKL |
| 9834 | GAQSMQFSC |
| 9835 | TQEACHHEW |
| 9836 | MKTIMQDYF |
| 9837 | MFSHGHVMF |
| 9838 | SVSTKPHVE |
| 9839 | RAIYNMITE |
| 9840 | MFTPCQEGL |
| 9841 | KNAVLNASD |
| 9842 | DVYMAVVGS |
| 9843 | CIMLNGCFQ |
| 9844 | RHWYIALYA |
| 9845 | CWQLFNKQN |
| 9846 | KPCNPVGQE |
| 9847 | SSVVMAKQP |
| 9848 | NAKYSMLYG |
| 9849 | GMWAQDSSG |
| 9850 | YPKRCAEGD |
| 9851 | VKHTAVDVP |
| 9852 | GEGVEQMDG |
| 9853 | MCRPVMMIE |
| 9854 | GTNAYMAHK |
| 9855 | NIQLLHSYC |
| 9856 | MWAETADPA |
| 9857 | QIKTHSNVF |
| 9858 | RLETTRYIW |
| 9859 | VTMTTKSVW |
| 9860 | TMPDRDPTY |
| 9861 | TVWIQSYSN |
| 9862 | CVKPFLTGW |
| 9863 | LIWSVYQDE |
| 9864 | MPHHSPDCW |
| 9865 | HGYQMAYAQ |
| 9866 | QVYMMEDNM |
| 9867 | VTNWLSLQS |
| 9868 | MVFLEQHGR |
| 9869 | KRTDLHAAD |
| 9870 | QTEIGHWEE |
| 9871 | TMGLGMNAI |
| 9872 | VLKSCDRHG |
| 9873 | TYWCPLMMN |
| 9874 | ANGTRECQS |
| 9875 | DSQYHVKCG |
| 9876 | MALPLHVLS |
| 9877 | TRNVHEYGM |
| 9878 | QTQICHSWM |
| 9879 | TEEVQFVVH |
| 9880 | DSATFKSAD |
| 9881 | CGCQVKCHT |
| 9882 | EAYITYNKA |
| 9883 | CTHHNLKAA |
| 9884 | AWSDLMNCW |
| 9885 | MTIKMEQQY |
| 9886 | KATHCDKYV |
| 9887 | AHEDPNTWC |
| 9888 | AWMCCARHD |
| 9889 | QWEEVWWEA |
| 9890 | NAIPYFVQA |
| 9891 | ITSHWLSTN |
| 9892 | KSPCCMSVQ |
| 9893 | AGYQCGYNE |
| 9894 | ETNGVEDWY |
| 9895 | SMKQMTKSF |
| 9896 | YACWLQDAL |
| 9897 | KWEQRSKMS |
| 9898 | KTQTHTSEP |
| 9899 | GNVLLGCQP |
| 9900 | HAKQANGMV |
| 9901 | KCEGEEVGR |
| 9902 | HSTNLFEAK |
| 9903 | GWADFRELQ |
| 9904 | ETEIRQMDG |
| 9905 | KITVHDRIP |
| 9906 | VCGWWHQYW |
| 9907 | IADDYFMCH |
| 9908 | GVWMPHGWR |
| 9909 | MSLQHHFCT |
| 9910 | YNNDMKQRR |
| 9911 | QGVACLDQL |
| 9912 | RITQGESGM |
| 9913 | ASGHMTMCM |
| 9914 | NTNRAHYWH |
| 9915 | TIKQQMEMM |
| 9916 | CQNTAVRAI |
| 9917 | AVAEIRPEP |
| 9918 | YSFATGNAA |
| 9919 | SYLWRSVYC |
| 9920 | AVDHYSNGA |
| 9921 | ASIATMDRI |
| 9922 | NHKMVQDAL |
| 9923 | QRALPHPIK |
| 9924 | LTHNTPFPK |
| 9925 | SIAQDQVWS |
| 9926 | CCRQIWVQY |
| 9927 | CWGPIMHPF |
| 9928 | GNKSPDECF |
| 9929 | GHRPKLCDQ |
| 9930 | QVACHMTNP |
| 9931 | QYVQCAAKD |
| 9932 | QDEPMNLSC |
| 9933 | GMRTHSVMN |
| 9934 | GTNHRDCLV |
| 9935 | LMKYQWIGN |
| 9936 | KIDQTQWQR |
| 9937 | TLHYFHGYQ |
| 9938 | QSQWWDTCN |
| 9939 | WKPEQRHTP |
| 9940 | IYCLCQDSD |
| 9941 | DMKQKAEYT |
| 9942 | CIPTYRHFG |
| 9943 | VRQFGTWAT |
| 9944 | ICIRGARAD |
| 9945 | TSSKHLVFD |
| 9946 | MIKLINCVN |
| 9947 | IESNTNKFP |
| 9948 | GIKKPNEDN |
| 9949 | AMTRCKAGH |
| 9950 | HGNMVLVIG |
| 9951 | LIQSYPHQC |
| 9952 | GGALARSSI |
| 9953 | QKAIVAQND |
| 9954 | KTLPFAIYH |
| 9955 | KIQPTNHHE |
| 9956 | KMGMHDMAM |
| 9957 | QENDERIWY |
| 9958 | APFFTFTNH |
| 9959 | YSDMFHKDH |
| 9960 | RMVLAYGNF |
| 9961 | GQDCWGLAM |
| 9962 | PRWQSEKCQ |
| 9963 | NTAKLGWGL |
| 9964 | MVMMREPSN |
| 9965 | MDGRDEIIH |
| 9966 | VCRLDNGPQ |
| 9967 | MTGIGKCWN |
| 9968 | EIHTGRPGS |
| 9969 | QIIYRCRST |
| 9970 | KCLPYMEMF |
| 9971 | PNGYRPFCC |
| 9972 | QGQSGTQYA |
| 9973 | LVSQWDYDM |
| 9974 | ESCHLQHGE |
| 9975 | TSEPHCSYA |
| 9976 | LSVQAQWDS |
| 9977 | FVPWCHSFG |
| 9978 | MKEDNKFAV |
| 9979 | KTGWDSHWS |
| 9980 | TGMTFNSFR |
| 9981 | NGYLVHACQ |
| 9982 | QVEWFMAQY |
| 9983 | YTWPYPETH |
| 9984 | IQCKYIHFT |
| 9985 | SNVNLMNSR |
| 9986 | ATKFFCSSE |
| 9987 | MREMPMVGA |
| 9988 | SMQEYQKHI |
| 9989 | KSMPPGQGD |
| 9990 | ECRMAVQSC |
| 9991 | VRWGHTCFY |
| 9992 | VKRLENEWH |
| 9993 | TNRCHDDRG |
| 9994 | TTKNAISFE |
| 9995 | EAELENVNM |
| 9996 | IQNPAMWGT |
| 9997 | CDWMANVSV |
| 9998 | EQTHTWLCR |
| 9999 | AKYLPELYY |
| 10000 | EIHEFRASN |
| 10001 | WLIGMWNTG |
| 10002 | WHVQSKRWT |
| 10003 | TTDQQCTGH |
| 10004 | NISPYEMAV |
| 10005 | YYNHKIVEP |
| 10006 | AKPTHDVGS |
| 10007 | HTNQQANAP |
| 10008 | VTKLAENVY |
| 10009 | DVCDDHKPN |
| 10010 | IAHWKCHYP |
| 10011 | YWEKVPCMK |
| 10012 | NWEFNARHD |
| 10013 | VRLQPQHNK |
| 10014 | KCTEYVHTC |
| 10015 | VPTPWMGIS |
| 10016 | HHFHVNLDI |
| 10017 | DSRTQGGLC |
| 10018 | VRADNMPVM |
| 10019 | LLPIMHTHW |
| 10020 | ISLWVMHYP |
| 10021 | MWTEFNEHG |
| 10022 | MWAEFNEYG |
| 10023 | QVHIGSWPP |
| 10024 | YEMTSKCTY |
| 10025 | HMSQAGVVS |
| 10026 | DQSMMTIGQ |
| 10027 | MPSWYIAQA |
| 10028 | GAGPVQSEE |
| 10029 | FGGMTPYGV |
| 10030 | VCSNVRSYC |
| 10031 | HGNSFLVHW |
| 10032 | MWTEFNEYW |
| 10033 | DITSLGCIM |
| 10034 | NRPLMSCCF |
| 10035 | EFWWMNYMG |
| 10036 | TSQYSSVST |
| 10037 | MGTEWTQSY |
| 10038 | MWTEFDEYG |
| 10039 | KQLFMKEWN |
| 10040 | EFKCVSDCL |
| 10041 | KTIAQTYYG |
| 10042 | VQMQYERLF |
| 10043 | MDVQQIISG |
| 10044 | NPIKFQCAH |
| 10045 | NSVHVHASN |
| 10046 | CAEGQRALT |
| 10047 | QAIDMEFPL |
| 10048 | FNESGWPTW |
| 10049 | NARVMAKRE |
| 10050 | LNDPHCSQN |
| 10051 | YFADAWLKT |
| 10052 | NIHYHMRRN |
| 10053 | QMEVHWHMW |
| 10054 | REEWKNASN |
| 10055 | ISTKFGKEI |
| 10056 | AIHQESMIQ |
| 10057 | QEYHIYFPF |
| 10058 | TLTHCYSKD |
| 10059 | GCLTSECAY |
| 10060 | AWFNTYSVH |
| 10061 | GYGHTFRDA |
| 10062 | FIDEKQCHE |
| 10063 | HMSFCNFKV |
| 10064 | SVETARCSG |
| 10065 | SSEHYSASF |
| 10066 | LMKTSPSYW |
| 10067 | YGNSVTCTS |
| 10068 | KHITWNHCL |
| 10069 | DTSKTGKHV |
| 10070 | LTQYKALAQ |
| 10071 | TRIVEPDAN |
| 10072 | LADCMLNHH |
| 10073 | VPMWAHWQN |
| 10074 | SVTPDSITT |
| 10075 | QRNNLFVHD |
| 10076 | IHGIDCYEI |
| 10077 | GIDLMRQIN |
| 10078 | MKNQPTGAS |
| 10079 | QKSMLNSIQ |
| 10080 | ICNMDFRCA |
| 10081 | KTVLKMQDM |
| 10082 | RLGMNWKQI |
| 10083 | TPKSEGICC |
| 10084 | GVITVDAKG |
| 10085 | AIGPDRSNN |
| 10086 | EQEISDQCR |
| 10087 | MQYRGMSAS |
| 10088 | MISQMGLKN |
| 10089 | AFARQEYAN |
| 10090 | TYLHQPEDS |
| 10091 | TKLSMMGCE |
| 10092 | EELRYTCHT |
| 10093 | GSCCLNNET |
| 10094 | KKTLYEMAC |
| 10095 | RWGVMDLCN |
| 10096 | NVEDVGMIE |
| 10097 | QSWWHSDTC |
| 10098 | AADGYVAQD |
| 10099 | ITTPLHHHN |
| 10100 | NAQRLAVGM |
| 10101 | HVIGMGAGE |
| 10102 | RQYFEDNAG |
| 10103 | KSELNRFTY |
| 10104 | SALYRWGHV |
| 10105 | HRAGMSNIP |
| 10106 | MARQCHSFH |
| 10107 | ICKHLNVWP |
| 10108 | TNGKSSSYS |
| 10109 | HAVNFDCKK |
| 10110 | QISAWNEFF |
| 10111 | MMTPMAVEP |
| 10112 | KISTTWADK |
| 10113 | EVDQYYSLA |
| 10114 | GTMSFPTGC |
| 10115 | MIMANNRCW |
| 10116 | GIGHIGNAT |
| 10117 | GGSYVSAPD |

TABLE 75
Sequences of the 581 to 589 Region in AAV5
VP1 Capsid Polypeptide that Drive Colon
Tissue Tropism

| SEQ | 581-589 |
|---|---|
| ID NO | Sequence |
| 12118 | AQWYMWCWD |
| 12119 | ASHYHEKVW |
| 12120 | IANWRWGPD |
| 12121 | RVNGSTCRH |
| 12122 | YNRLMHQLW |
| 12123 | ETTMMIVSP |
| 12124 | STAKTGTTT |
| 12125 | LPPLKTEDN |
| 12126 | QTQICHSWM |
| 12127 | QSLWYWQQE |
| 12128 | KMGMHDMAM |
| 12129 | IRPQYAKMD |
| 12130 | MNANETHGA |
| 12131 | MSVAAGRGM |
| 12132 | QTMCITIHP |
| 12133 | CMEAQGECY |
| 12134 | FPQTMHAQA |
| 12135 | KPLASIGQY |
| 12136 | CCCQFSFWN |
| 12137 | DAELMWQIE |
| 12138 | ENTMWQSSQ |
| 12139 | KIDQTQWQR |
| 12140 | EQEISDQCR |
| 12141 | GKIAHDQLN |
| 12142 | MCFPYSCAA |
| 12143 | LSVQAQWDS |
| 12144 | MMNQCQVWN |
| 12145 | TQEACHHDP |
| 12146 | DFNGSNWLP |
| 12147 | HFEVRSVQR |
| 12148 | MAEQMERDF |
| 12149 | TGMAMSEQS |
| 12150 | PCCWEQSTN |
| 12151 | NWYTTWIDE |
| 12152 | CCKSKEVCA |
| 12153 | LESVKMDCN |
| 12154 | PHVSGEGKI |
| 12155 | TYDTRNHCL |
| 12156 | MAAITQNVA |
| 12157 | PDLWYEKSs |
| 12158 | AHAWLQHWA |
| 12159 | MAMWIADTH |
| 12160 | LCAVCGDCD |
| 12161 | RITQGESGM |
| 12162 | GNKSPDECF |
| 12163 | KNCIMLASN |
| 12164 | EKRLEGWVY |
| 12165 | LETMMRHGE |
| 12166 | EQPNMGDYG |
| 12167 | QSQWWDTCN |
| 12168 | LMKYQWIGN |
| 12169 | QISKPSVQC |
| 12170 | AIEHGAWKC |
| 12171 | SLTQYQWRG |
| 12172 | TIVVIPIKS |
| 12173 | CSMPQQCME |
| 12174 | QTAEWYCGA |
| 12175 | GNECFHNVE |
| 12176 | VGPLYAYYS |
| 12177 | WTLQVMKIN |
| 12178 | TSEPHCSYA |
| 12179 | AVHTADVCC |
| 12180 | QHSRAYMWY |
| 12181 | HMEQCWCNE |
| 12182 | AYAPSKNAM |
| 12183 | DNYWIVPFA |
| 12184 | QRSVFHQRS |
| 12185 | HEVMMCPAP |
| 12186 | KTMGIGGGP |
| 12187 | TLNSRHPEC |
| 12188 | PLNQEQIPQ |
| 12189 | AQCHDMWGH |
| 12190 | KACMSHQGR |
| 12191 | TTTNQFMFQ |
| 12192 | VLKSNLTGM |
| 12193 | MFMTNVNSF |
| 12194 | SSRMQMQGP |
| 12195 | RYPCCQSPF |
| 12196 | NARVMAKRE |
| 12197 | GLSMVLHFV |
| 12198 | VSVQSRAQL |
| 12199 | DMTLQSVSS |
| 12200 | MTDNNGPLF |
| 12201 | PLTIEVNCT |
| 12202 | YVDHWILGD |
| 12203 | NQREWHGLA |
| 12204 | SECEVLCSL |
| 12205 | CAWHMKQGN |
| 12206 | ATGTYNLQE |
| 12207 | KCADLIIRS |
| 12208 | QSRCVDNTV |
| 12209 | ATMNLSWGL |
| 12210 | SVLHVQALA |
| 12211 | KMAGIGCWY |
| 12212 | YDYWMQAPT |
| 12213 | HSMMPGWPS |
| 12214 | MFWTTPSHW |
| 12215 | TKHCFYGGC |
| 12216 | AMNWWAAPQ |
| 12217 | AMNWWDAPH |
| 12218 | AMNWWDAPP |
| 12219 | AMNWWGAPQ |
| 12220 | CDRPDVNWF |
| 12221 | CDRPDVNWV |
| 12222 | CHSLHQVWA |
| 12223 | CHSLHQVWD |
| 12224 | CHSLHQVWG |
| 12225 | CHSLRQVWD |
| 12226 | CKTMKDIER |
| 12227 | DMQQNDPCC |
| 12228 | DVDFRAWAT |
| 12229 | DVHLFPTEQ |
| 12230 | ECHYRMFQI |
| 12231 | ECPYRMFQI |
| 12232 | EHHWGDIID |
| 12233 | ESAHECEHD |
| 12234 | ESAHECGHD |
| 12235 | ESAHEWEHD |
| 12236 | EYHYRMFQI |
| 12237 | FAVECVDCT |
| 12238 | FEVECVDCT |
| 12239 | FEVGCVDCT |
| 12240 | FLGFKRYGG |
| 12241 | FLSFERYGG |
| 12242 | FLSFKRYGC |
| 12243 | FLSFKRYGG |
| 12244 | FLSFKRYGS |
| 12245 | FLSFQRYGG |
| 12246 | FLSFRRYGG |
| 12247 | FNLTAHEDN |
| 12248 | GLEINMLNC |
| 12249 | HCAKFECMF |
| 12250 | IANTNPRGR |
| 12251 | IEAPKVNEY |
| 12252 | IEDPEVNEY |
| 12253 | IEDPKVNAY |
| 12254 | IEDPKVNEC |
| 12255 | IEDPKVNEH |
| 12256 | IEDPKVSEY |
| 12257 | IEDPRVNEY |
| 12258 | IEDPTVNEY |
| 12259 | IEDRKVNEY |
| 12260 | IGDPKVNEY |
| 12261 | IYTYQWDWI |
| 12262 | IYTYQWDWT |
| 12263 | IYTYQWGWT |
| 12264 | KCHYRMFQI |
| 12265 | KDTEGLEAP |
| 12266 | KDTEGLGAP |
| 12267 | LASQKRDCD |
| 12268 | LEDPKVNEY |
| 12269 | LINHWMHDN |
| 12270 | LINKWMHDN |
| 12271 | LINQWMHNN |
| 12272 | LLNQWMHDN |
| 12273 | LSSQKRDCA |
| 12274 | LSSQKRDCG |
| 12275 | LSSQKRDCN |
| 12276 | LSSQKRDGD |
| 122T7 | LSSQRRDCD |
| 12278 | MCATQHCEA |
| 12279 | MCEQYWTED |
| 12280 | MCEQYWTGD |
| 12281 | MGEQYWTED |
| 12282 | MGRMELDGV |
| 12283 | MHMQQNQMM |
| 12284 | MHMRQNQMM |
| 12285 | MHMWQNQMM |
| 12286 | MRATQHCEA |
| 12287 | MSRMELDGV |
| 12288 | MSRMEQDGV |
| 12289 | MSRMGLDGV |
| 12290 | MSWMELDGV |
| 12291 | NDDPGQAVG |
| 12292 | NVHLFPNEQ |
| 12293 | NVHLFPTAQ |
| 12294 | NVHLFPTEQ |
| 12295 | NVHLFPTGQ |
| 12296 | NVHLFPTKQ |
| 12297 | PACYSDVLN |
| 12298 | PEFLGEVDA |
| 12299 | PEFPGAVDA |
| 12300 | PEFPGEGDA |
| 12301 | PEFPGEVDA |
| 12302 | PEFPGEVDS |
| 12303 | PEFPGEVDV |
| 12304 | PEFPGEVYA |
| 12305 | PGFPGEVDA |
| 12306 | PKFPGEVDA |
| 12307 | PQCLHHHWY |
| 12308 | PQCLHNHWY |
| 12309 | PQCLHSHWY |
| 12310 | PQCLRNHWY |
| 12311 | PQCLYNHWY |
| 12312 | QPVGLFAFA |
| 12313 | QSKSEGIHI |
| 12314 | QTDILDYAW |
| 12315 | QTDILDYDW |
| 12316 | QTDILDYYW |
| 12317 | RDRPDVNWV |
| 12318 | RLEINMLHC |
| 12319 | RLEINMLNC |
| 12320 | RLEINMRNC |
| 12321 | RLGINMLNC |
| 12322 | SCHQCDLCD |
| 12323 | SCHQCNLCD |
| 12324 | SCHQCSLCD |
| 12325 | SCIFRHWLT |
| 12326 | SCSPDAWET |
| 12327 | SCSPDDWGT |
| 12328 | SCSPDGWET |
| 12329 | SCSPGDWET |
| 12330 | SLQRWFCRT |
| 12331 | SLQRWVCRT |
| 12332 | STIHAIEQG |
| 12333 | SYHQCNLCD |
| 12334 | TMNWWDAPQ |
| 12335 | TSVQSVDRG |
| 12336 | TSVRSVDRD |
| 12337 | TSVRSVDRG |
| 12338 | VQCIHHDYH |
| 12339 | VQCIHHDYR |
| 12340 | VQCIHHGYR |
| 12341 | HQCIHHNYR |
| 12342 | VQCIHPDYR |
| 12343 | VQCIHRDYR |
| 12344 | VQCIRHDYR |
| 12345 | WKPPLSDAP |
| 12346 | WPSMQCAAH |
| 12347 | WPSMQCAAN |
| 12348 | WPSMQCAAR |
| 12349 | LSSQKRDCD |
| 12350 | IEDPKVNEY |
| 12351 | SCSPDDWET |
| 12352 | AMNWWDAPQ |
| 12353 | LINQWMHDN |
| 12354 | AAEQRFNPE |
| 12355 | AAILMSNAG |
| 12356 | ACMMMWPYV |
| 12357 | ADTGSTAVI |
| 12358 | AESVEDYHT |
| 12359 | AFELHYHHQ |
| 12360 | AFKFKMLGQ |
| 12361 | AFKWSHIHL |
| 12362 | AGVQYTWCG |
| 12363 | AIDQFSGCK |
| 12364 | AIEYRKYDR |
| 12365 | AIFMMSGPG |
| 12366 | AKWMITIGC |
| 12367 | ALDWCTRQA |
| 12368 | ALICVNVFG |
| 12369 | AMHTQGSLG |
| 12370 | AMTQEQMAD |
| 12371 | ANNSCYRPY |
| 12372 | APLPWWVVP |
| 12373 | ARRYNPELQ |
| 12374 | ARSPWMHMS |
| 12375 | ASDAKPAQL |
| 12376 | ASDDQRDSK |
| 12377 | ASHPCYSMH |
| 12378 | ATDIWCAFC |
| 12379 | ATNDSPHLA |
| 12380 | ATSWNTAIG |
| 12381 | ATYVYERFE |
| 12382 | AWCITYGLG |
| 12383 | AYERYDCYD |
| 12384 | AYTKMAAQG |
| 12385 | AYVAVASQW |
| 12386 | AYVPEFRDT |
| 12387 | CATRKDEMF |
| 12388 | CEECQEMLT |
| 12389 | CFRICVSEY |
| 12390 | CGEDMKIWQ |
| 12391 | CGGCLNLGT |
| 12392 | CGGTHGMMG |
| 12393 | CHVDRAMHH |
| 12394 | CHVSVPVDC |
| 12395 | CLANVDNFD |
| 12396 | CIEYTHRLA |
| 12397 | CILNTCSFC |
| 12398 | CEPPLSDKE |
| 12399 | CKAPAQDFR |
| 12400 | CKAPTRSYR |
| 12401 | CKSIGCMDE |
| 12402 | CNDMTAQYV |
| 12403 | CPDQYRAYP |
| 12404 | CQGFVKGQS |
| 12405 | CRENMERVS |
| 12406 | CTKKDNMDN |
| 12407 | CTNRHTPFI |
| 12408 | CWATEWQMP |
| 12409 | CWEQEWPFW |
| 12410 | CWQNKINHE |
| 12411 | CYVMRRIYC |
| 12412 | DADQAAKAC |
| 12413 | DAGMCEKED |
| 12414 | DANEASSGR |
| 12415 | DCMVFINYL |
| 12416 | DDCTNGSME |
| 12417 | DDVNNVAEA |
| 12418 | DDWQKLGVP |
| 12419 | DELYTGPCA |
| 12420 | DFNTKTSSL |
| 12421 | DGEFQAYWE |
| 12422 | DGGMERGVS |
| 12423 | DGNKREWLS |
| 12424 | DGSPKNTSS |
| 12425 | DHIQMHRFN |
| 12426 | DINANMDRK |
| 12427 | DEQSNCSEA |
| 12428 | DESEQNRMC |
| 12429 | DESQHPEGS |
| 12430 | DEYLSNGTY |
| 12431 | DKCMLMDAS |
| 12432 | DNENCVQKT |
| 12433 | DQNEEGTKP |
| 12434 | DREGYCNNW |
| 12435 | DRQGCNAPR |
| 12436 | DSMWRTKEL |
| 12437 | DSMYASSMP |
| 12438 | DSRQVKKEN |
| 12439 | DSTWLEAQQ |
| 12440 | DTGVYSSWE |
| 12441 | DTSADKSGW |
| 12442 | DTWISHWWC |
| 12443 | DVKSENHDW |
| 12444 | DVNVAASWV |
| 12445 | DVVQEFWAK |
| 12446 | DWHHEHNPN |
| 12447 | DWQRVKTMW |
| 12448 | DWSTEEWTA |
| 12449 | DYWSYPNYF |
| 12450 | DYYESWWMH |
| 12451 | EAHQSTLST |
| 12452 | EAKFLGGCW |
| 12453 | EANHYIEEQ |
| 12454 | EAPKVTVWG |
| 12455 | EASMKWWSN |
| 12456 | ECDHHEEHY |
| 12457 | ECQCCECQD |
| 12458 | ECRMRLDNS |
| 12459 | EDRNCSECL |
| 12460 | EEKPNYHTA |
| 12461 | EFDYYCLKT |
| 12462 | EFETKNWEH |
| 12463 | EHECPNSGM |
| 12464 | EHETTMAEA |
| 12465 | EICSHLCWA |
| 12466 | EIILGGYHN |
| 12467 | EKGWSEPGN |
| 12468 | EKQQIEIAS |
| 12469 | EMMSQSACA |
| 12470 | ENESSHTNP |
| 12471 | ENKVCVYMM |
| 12472 | EPYQKDCEL |
| 12473 | EQQAPDHVK |
| 12474 | ERGVMCHFW |
| 12475 | ESENPMGPY |
| 12476 | ESHMMRISE |
| 12477 | ETQTHYTSC |
| 12478 | ETWLMHHHV |
| 12479 | ETYEGGCCM |
| 12480 | EVGWEPPYM |
| 12481 | EVNYVKCND |
| 12482 | EVINRTIPR |
| 12483 | EWKCSQNLT |
| 12484 | EWKYSQNLT |
| 12485 | EYNQCTEGM |
| 12486 | EYYQSVKMS |
| 12487 | FAQLHAVGN |
| 12488 | FASAMDVTL |
| 12489 | FDRHRWQPL |
| 12490 | FEHFDLSAS |
| 12491 | FLGNEKSYE |
| 12492 | FLQNVGFEN |
| 12493 | FMMAFKLDC |
| 12494 | FMQPIKQMD |
| 12495 | FNPWDKYGW |
| 12496 | FQPHIRDVG |
| 12497 | FQYRPAEHV |
| 12498 | FRVLQGNSV |
| 12499 | FTETTHCGH |
| 12500 | FTSGHGYME |
| 12501 | FVHKTEGED |
| 12502 | FVHTVTVNP |
| 12503 | FYFPEGMRP |
| 12504 | GDGRAETWQ |
| 12505 | GEDCPSAEE |
| 12506 | GELVRRLSQ |
| 12507 | GFCYPNKMI |
| 12508 | GFTQDPVGH |
| 12509 | GGDTGEYLF |
| 12510 | GHEPNKHFQ |
| 12511 | GHQVIEYMF |
| 12512 | GHYVIHKTN |
| 12513 | GIITPSMGS |
| 12514 | GMNPQLECP |
| 12515 | GQPENGKQE |
| 12516 | GSARQDGKP |
| 12517 | GSCLGISDM |
| 12518 | GSMQIAQEG |
| 12519 | GSMQSPTRR |
| 12520 | GSNSHLPLQ |
| 12521 | GSNSHLPLR |
| 12522 | GSTSKDSSM |
| 12523 | GTHPCGCPE |
| 12524 | GTSFNVHGA |
| 12525 | GVDHFFWVS |
| 12526 | GVHSAFYQT |
| 12527 | GVEWEHDEN |
| 12528 | GYNHVDSWS |
| 12529 | HCHLCSLRG |
| 12530 | HDERMWAMD |
| 12531 | HEPRTECTF |
| 12532 | HEQIGPEYR |
| 12533 | HFGYMHCSQ |
| 12534 | HNEHKVGYG |
| 12535 | HPLKEPEGK |
| 12535 | HPLKIPIGK |
| 12537 | HQNHPPAFD |
| 12538 | HSFEEHDEG |
| 12539 | HSNPRCVFF |
| 12540 | HTDQDRHAE |
| 12541 | HTSPCWGSY |
| 12542 | HVEMPAPGC |
| 12543 | HWIHMVNQQ |
| 12544 | ECEWTIAQW |
| 12545 | ECKPEGGEK |
| 12546 | EDNMPKCRP |
| 12547 | IDVHNGFDQ |
| 12548 | IDVRPHFAD |
| 12549 | IEMSEQPNC |
| 12550 | IETRMESMG |
| 12551 | IFSHWFAGW |
| 12552 | IGCLYTSNW |
| 12553 | IGDQAMECS |
| 12554 | IKCEPWVSG |
| 12555 | ILAQENRWA |
| 12556 | IMEWKNTMV |
| 12557 | IMMHRVMSD |
| 12558 | IMRDMVLPV |
| 12559 | IMTNYHYLD |
| 12560 | IMVKRTVNA |
| 12561 | INCKPSVQF |
| 12562 | INVDKDQFL |
| 12563 | IQCSTNSWE |
| 12564 | IQFVTWRFE |
| 12565 | IQGPSWHKN |
| 12566 | IQQVDMMCP |
| 12567 | IRWVEPMCQ |
| 12568 | ISPCPTVVA |
| 12569 | ISPNMQWYP |
| 12570 | IVFQGDTGT |
| 12571 | IVTVNCAGE |
| 12572 | IWCNGQMDD |
| 12573 | IYTYFIEWF |
| 12574 | KAFPIDLIA |
| 12575 | KDDHCAFWN |
| 12576 | KEGVDQEFF |
| 12577 | KEKQNAKCL |
| 12578 | KHHPTDADN |
| 12579 | KICMYHLID |
| 12580 | KIFWTTEFH |
| 12581 | KKTEEHHCQ |
| 12582 | KMMHLPQEE |
| 12583 | KMVQDEMWC |
| 12584 | KQEPMHCSA |
| 12585 | KSDQVWQGE |
| 12586 | KSTIFKMRH |
| 12587 | KTECFFSMH |
| 12588 | KTFPAADVK |
| 12589 | KVEFTATVM |
| 12590 | KVNIYSDTL |
| 12591 | LAERWEQNN |
| 12592 | LAHEPYWSP |
| 12593 | LALCDAVND |
| 12594 | LALHSQFCE |
| 12595 | LASPKQMVA |
| 12596 | LCAPYNREV |
| 12597 | LCGCCMMHY |
| 12598 | LCGNDKKCD |
| 12599 | LCHFIKGVY |
| 12600 | LDQGMYFHK |
| 12601 | LECWNKIAR |
| 12602 | LGYHVKDFM |
| 12603 | LIAFLVDRI |
| 12604 | LIMPLTTQM |
| 12605 | LMKMWISMG |
| 12606 | LPDFWRTRN |
| 12607 | LPIFVQGDF |
| 12608 | LRAIIDCGW |
| 12609 | LSATMVWAQ |
| 12610 | LSIQDNRGQ |
| 12611 | LSTSSQLTP |
| 12612 | LSVAVQESN |
| 12613 | LSWMACAQA |
| 12614 | LSYVMDTAA |
| 12615 | LTQFSCVSH |
| 12616 | LWVWWMKDH |
| 12617 | LYEEHHACW |
| 12618 | MAASGMLCY |
| 12619 | MADGRPRMP |
| 12620 | MATCYHDHW |
| 12621 | MCAQPCNLP |
| 12622 | MCVHKFLTG |
| 12623 | MDGPWMGKL |
| 12624 | MEHVPTRDQ |
| 12625 | MEMPLMDVI |
| 12626 | MGTQYQFTG |
| 12627 | MHAETDIQM |
| 12628 | MHFTSWPVD |
| 12629 | MKIMCENVR |
| 12630 | MNMEKLQID |
| 12631 | MNRIMMVAD |
| 12632 | MNSPRRECI |
| 12633 | MQIILEFPR |
| 12634 | MQTAHPVYL |
| 12635 | MRNHGDFDF |
| 12636 | MSILASVRV |
| 12637 | MSIRGNWGY |
| 12638 | MSKPCRVCE |
| 12639 | MTDPGMKRR |
| 12640 | MWVQRETGG |
| 12641 | NAAIWEHVH |
| 12642 | NACTKVKMT |
| 12643 | NAYNFTKDC |
| 12644 | NCENKQNVI |
| 12645 | NCPCHTDAY |
| 12646 | NCREHPEEG |
| 12647 | NDIECEMAS |
| 12648 | NEYEKLFPR |
| 12649 | NFMSMYGFE |
| 12650 | NHFPILIDH |
| 12651 | NHKLHTGPG |
| 12652 | NHWMGEKEC |
| 12653 | NIGFAIVDP |
| 12654 | NIGKERMEN |
| 12655 | NIGTHMGHT |
| 12656 | NIYVTRAHC |
| 12657 | NKSPTWTES |
| 12658 | NLHTPAGCM |
| 12659 | NLVCRESSC |
| 12660 | NPCIKASYF |
| 12661 | NPNGPLHYD |
| 12662 | NQMPKEKWD |
| 12663 | NRTGVTPST |
| 12664 | NRVDAMIHY |
| 12665 | NRWMMGMKP |
| 12666 | NSTEQEIIQ |
| 12667 | NTMTSAPVC |
| 12668 | NTNMAWKQF |
| 12659 | NVTELHNPK |
| 12670 | NVTETGPDA |
| 12671 | NYASEEFLT |
| 12672 | NYMGIDEQK |
| 12673 | NYSMPVDWS |
| 12674 | PCVEPNAAM |
| 12675 | PDARGMHFL |
| 12676 | PEHPRDWLM |
| 12677 | PHAGQGNKG |
| 12678 | PHGPITNPE |
| 12679 | PIAIKDQGW |
| 12680 | PLASMENGP |
| 12681 | PKILFMFSF |
| 12682 | PIMIARYDP |
| 12683 | PMAPDWRNS |
| 12684 | PMTLPLECW |
| 12685 | PNEWYLWAC |
| 12686 | PPNMTSCDW |
| 12687 | PQDQSCAGQ |
| 12688 | PQHWKSVGA |
| 12689 | PTAMWLTHM |
| 12690 | PVATYNVSR |
| 12691 | PVEPSCQMK |
| 12692 | PVEVMQWKP |
| 12693 | PYEPQTINC |
| 12694 | PYVDKWANH |
| 12695 | QAAPVHAKG |
| 12696 | QAEATHAEF |
| 12697 | QATCTRYGH |
| 12698 | QCGCCKMKW |
| 12699 | QCIQIDMER |
| 12700 | QDDEYHMTP |
| 12701 | QEIAKKWSN |
| 12702 | QETGPKSST |
| 12703 | QFKDSRGAG |
| 12704 | QGDPVKFMS |
| 12705 | QGKAKQIQH |
| 12706 | QGTHSQNDD |
| 12707 | QIAQQPCMW |
| 12708 | QIDNVNQDP |
| 12709 | QITKKDNLM |
| 12710 | QKLVHKESF |
| 12711 | QNEKYGKTL |
| 12712 | QQGPLQRIM |
| 12713 | QQKRVCDQM |
| 12714 | QRPWHDLTY |
| 12715 | QSAQSHSHV |
| 12716 | WSNHEFRWF |
| 12717 | QVAVDQSPF |
| 12718 | WVYALSKHW |
| 12719 | QWDRCLVQV |
| 12720 | QWFVQGITL |
| 12721 | QYKVKERGM |
| 12722 | QYNSHFLYG |
| 12723 | RCDQHDDQW |
| 12724 | RCTDCSYFY |
| 12725 | RDQQIHHED |
| 12726 | REVKPMHVH |
| 12727 | RNDVCCEMQ |
| 12728 | RNLYENQGC |
| 12729 | RPCSKSHEF |
| 12730 | RPESEHPEG |
| 12731 | RPREGEWPG |
| 12732 | RSLHYGNSV |
| 12733 | RSPPCDSFP |
| 12734 | RTNDHPDKH |
| 12735 | RVDCETPYH |
| 12736 | RVGNERLHH |
| 12737 | RWYHYLLRN |
| 12738 | RYCLLDEIE |
| 12739 | SCKHDDMGK |
| 12740 | SCKWIQSNR |
| 12741 | SCLDHQDID |
| 12742 | SCNCKKNKI |
| 12743 | SDKGRQHYN |
| 12744 | SDNNAPEFQ |
| 12745 | SEGVYNQVY |
| 12746 | SFHVAQGDY |
| 12747 | SFIAPCDLS |
| 12748 | SGCTWDMSP |
| 12749 | SGPDTVFFT |
| 12750 | SHASGIECT |
| 12751 | SHESTNAGA |
| 12752 | SHMQDKNYT |
| 12753 | SHVEPVMGF |
| 12754 | SIRWFYTDC |
| 12755 | SIVNHNEAR |
| 12756 | SIWGCNVGG |
| 12757 | SKHEWDMHV |
| 12758 | SLDRFNQSG |
| 12759 | SLILMHEQT |
| 12760 | SLNWWFWGG |
| 12761 | SMGPLWDPL |
| 12762 | SMHTVINKG |
| 12763 | SNDCRNEFT |
| 12764 | SNSCEYQIM |
| 12765 | SPCFYPDCS |
| 12766 | SPICLQHDR |
| 12767 | SQKNSRHLS |
| 12768 | SSALITRKE |
| 12769 | SSSFWENKP |
| 12770 | SSSSHLAAD |
| 12771 | SSVCKTACW |
| 12772 | STARDLYLM |
| 12773 | STSHPDNSI |
| 12774 | SVFDVWCDQ |
| 12775 | SVMQGSSIQ |
| 12776 | SVWSTRMQK |
| 12777 | SWEILHDCH |
| 12778 | SWHWMTTQN |
| 12779 | SWYGNEEDQ |
| 12780 | SYHDHEQGI |
| 12781 | SYQLPILHS |
| 12782 | SYSYVNDEA |
| 12783 | TCKGMDNAI |
| 12784 | TCTEPIVEC |
| 12785 | TCVQMEHVK |
| 12786 | TCYWDNCWY |
| 12787 | TDRWTRVMS |
| 12788 | TEDQYNNIH |
| 12789 | TERWGWLPH |
| 12790 | TFWCAQLGV |
| 12791 | TFWIRMAAG |
| 12792 | TGLYYEMQE |
| 12793 | TGQNGWSKT |
| 12794 | TGVVDTAYS |
| 12795 | THSKSDCAY |
| 12796 | THTVRDSHI |
| 12797 | TIDRCNWHY |
| 12798 | TILHGMLLE |
| 12799 | TITHEQPGP |
| 12800 | TIVPYEYNQ |
| 12801 | TMDPCRKSC |
| 12802 | TMGVYSFDW |
| 12803 | TMMLVVLRG |
| 12804 | TNGIGGKKE |
| 12805 | TQLHWNDGR |
| 12806 | TQQALPLAC |
| 12807 | TSAPDRLSS |
| 12808 | TTEQIRDID |
| 12809 | TTVSCVCKG |
| 12810 | TVLRRCNYE |
| 12811 | TVYAWLLSM |
| 12812 | TWFVGQSTR |
| 12813 | TWQRTENNK |
| 12814 | TYLMNQFHM |
| 12815 | VCKMPMYQH |
| 12816 | VCRCTKYTA |
| 12817 | VDPNLQYPW |
| 12818 | VDWFTAPAP |
| 12819 | VFCNYQKKA |
| 12820 | VGSKWHVLG |
| 12821 | VGYSTVGEW |
| 12822 | VHHDLGESK |
| 12823 | VHHHGYPTS |
| 12824 | VHKEWHWQC |
| 12825 | VHMYPMTQV |
| 12826 | VKPNETDLH |
| 12827 | VLGFDHDPQ |
| 12828 | VLLMDGRTF |
| 12829 | VLRYVNSAG |
| 12830 | VMELMMHNH |
| 12831 | VPLVNDGRC |
| 12832 | VPTICMATY |
| 12833 | VQNEADMNP |
| 12834 | VRAMPFDPD |
| 12835 | VRNTEMDWF |
| 12836 | VSAPECHIY |
| 12837 | VSMWYDRDD |
| 12838 | VTFMITMFH |
| 12839 | VVDHFFWVS |
| 12840 | VVITDGGQV |
| 12841 | VYMIFSGWQ |
| 12842 | WALAPELWY |
| 12843 | WAMDNMNRC |
| 12844 | WDHRYQTGH |
| 12845 | WDQCTMINQ |
| 12846 | WDSPQTNFT |
| 12847 | WFHTRHPQE |
| 12848 | WGPCKHPWQ |
| 12849 | WGVVKMVLC |
| 12850 | WHDKLRNNK |
| 12851 | WIDGIVDIC |
| 12852 | WINGPASRY |
| 12853 | WIQLNHQEV |
| 12854 | WITAFDSIG |
| 12855 | WITVKEFST |
| 12856 | WLISNSPQW |
| 12857 | WRCPPEQWW |
| 12858 | WVSADTYEH |
| 12859 | YASLWESGW |
| 12860 | YCMTVICSE |
| 12861 | YDECQKIFV |
| 12862 | YDGCMWMPF |
| 12863 | YDQKGGQCW |
| 12864 | YEDIIWNMH |
| 12865 | YENVGSKAW |
| 12866 | YGHRRDEAR |
| 12867 | YHSHLDAGQ |
| 12868 | YKLNCFARP |
| 12869 | YLDCPHTQF |
| 12870 | YPMAKNRGD |
| 12871 | YPRHWTLQH |
| 12872 | YQHVWSQER |
| 12873 | YQNPDAPAL |
| 12874 | YQQQLMMNE |
| 12875 | YSDAVYCSM |
| 12876 | YTDALGMEP |
| 12877 | YTPLPAVNG |
| 12878 | YWLCYPKLC |
| 12879 | EKLTADAAI |
| 12880 | INSESEWNP |
| 12881 | QTTEFALVQ |
| 12882 | SGLYSQCGG |
| 12883 | SDVHMFCML |
| 12884 | QSNLMEFHS |
| 12885 | EAQNIHDPH |
| 12886 | HTTLNYMSN |
| 12887 | AATPQKNQE |
| 12888 | AFCRGHYQA |
| 12889 | AGAPPLAVH |
| 12890 | AGWQMCFDS |
| 12891 | AGWQMCYGS |
| 12892 | AHPILQGWD |
| 12893 | AHYQQSTDR |
| 12894 | AIGHGAWKC |
| 12895 | AMCMLSHIH |
| 12896 | ANELSWHPR |
| 12897 | AQGCKFYNG |
| 12898 | ATVTRARSM |
| 12899 | CACHMKQGN |
| 12900 | CDSLSLLQN |
| 12901 | CFCQCGMPS |
| 12902 | CHHSGESHQ |
| 12903 | CKGRANWYM |
| 12904 | CKWLAIPCR |
| 12905 | CQVGLQNCW |
| 12906 | CTKMNTMIE |
| 12907 | CWALNGQLG |
| 12908 | DALPERRYF |
| 12909 | DAMQKISCV |
| 12910 | DFIYHHQAP |
| 12911 | DGVVTVTNL |
| 12912 | DHDLATEWE |
| 12913 | DKHHSRIDG |
| 12914 | DMNMYLGSQ |
| 12915 | DSKITQFNH |
| 12916 | DVETNNWRC |
| 12917 | DVHDSQMCY |
| 12918 | DYNDFNWYF |
| 12919 | ELGTYDGMG |
| 12920 | EMQMEERLP |
| 12921 | EPGRMHHSW |
| 12922 | EQCLAAAAE |
| 12923 | ESRPMIQPF |
| 12924 | EVCGHQKIQ |
| 12925 | EVHVTACGN |
| 12926 | EVVRIENPM |
| 12927 | EWFCYCGTC |
| 12928 | EYHKTQWGH |
| 12929 | FALIYHKDE |
| 12930 | FASPVLWGQ |
| 12931 | FEGFIERQH |
| 12932 | FGHRYDSAY |
| 12933 | FGNPMQICP |
| 12934 | FGVNDMDSA |
| 12935 | FHCICWTHM |
| 12936 | FKYDCYQRN |
| 12937 | FLGCYCPYA |
| 12938 | FLRNTWLGP |
| 12939 | FMPYCVHSG |
| 12940 | FPSWMMKAP |
| 12941 | FSTAHMFGW |
| 12942 | FWCRPRLHD |
| 12943 | FYHHLPEEP |
| 12944 | GAGRMNCNV |
| 12945 | GANMMHMMN |
| 12946 | GCLISECAY |
| 12947 | GDKMGIYHC |
| 12948 | GEMPYCNRQ |
| 12949 | GFKVEQPYE |
| 12950 | GHTNCFAMS |
| 12951 | GIDEAKADY |
| 12952 | GKYWLQRSV |
| 12953 | GLFHPQFVQ |
| 12954 | GNISTFCWQ |
| 12955 | GQHHEETIY |
| 12956 | GQILFRSHT |
| 12957 | GQNPKMSAE |
| 12958 | GSCCLHIHH |
| 12959 | GTQHEKMYQ |
| 12960 | GTTQCTVHT |
| 12961 | GYDSSEAFE |
| 12962 | GYVIEGFDE |
| 12963 | HCPCKCTWL |
| 12964 | HERHATLMR |
| 12965 | HLLGNLEYM |
| 12966 | HNVCTMWAQ |
| 12967 | HQIQFCPCP |
| 12968 | HTQEELITP |
| 12969 | HTYCYWQSC |
| 12970 | IAAKVQNHD |
| 12971 | ICAAPNSAK |
| 12972 | IDHDNWDML |
| 12973 | IIGQTSIQD |
| 12974 | IKEHIPYWD |
| 12975 | IMNKAHYRF |
| 12976 | IQAGHQATM |
| 12977 | IVDMNTATK |
| 12978 | KCFTHAIVG |
| 12979 | KDWIPSYAL |
| 12980 | KEGCHVRMG |
| 12981 | KMQGGNGYG |
| 12982 | KNAYNMTIQ |
| 12983 | KPEILHFHD |
| 12984 | KTAENVWAM |
| 12985 | KTESIVKLQ |
| 12986 | KTIQHGTAD |
| 12987 | KYSDFCCPV |
| 12988 | KYTEALSCG |
| 12989 | LAMCALDNF |
| 12990 | LAMRALDNF |
| 12991 | LCSTEGMHT |
| 12992 | LCSTKGMHT |
| 12993 | LDTKRTFKK |
| 12994 | LGEATWQAV |
| 12995 | LMMKCCAMH |
| 12996 | LPDRDWHKW |
| 12997 | LQTKKDCPA |
| 12998 | LVVEKPSES |
| 12999 | MACKKAQDV |
| 13000 | MAKRVELVT |
| 13001 | MCHSFPTRP |
| 13002 | MEVEAEKPN |
| 13003 | MMKYYDAIG |
| 13004 | MMMPQMWSG |
| 13005 | MNRNVEMDH |
| 13006 | MTDKLYQED |
| 13007 | MTNWLMRGR |
| 13008 | MVNNWDWFY |
| 13009 | NCDFMVASI |
| 13010 | NCQPYGEPT |
| 13011 | NCSHYTQHY |
| 13012 | NGLLDFDPH |
| 13013 | NGLVDFDPH |
| 13014 | NIAPGGTIF |
| 13015 | NLEAMDCNY |
| 13016 | NMCTTFRLL |
| 13017 | NMKTKSAHK |
| 13018 | NNHRLNDAN |
| 13019 | NTMQSPAWV |
| 13020 | NVTPTDREG |
| 13021 | PCGRTCFNG |
| 13022 | PMMSFIFHH |
| 13023 | PQTAAQKSD |
| 13024 | PTEVTVSDM |
| 13025 | PTQWAMGDY |
| 13026 | QAAYCRCTF |
| 13027 | QATHDLMHQ |
| 13028 | QATLHHCTN |
| 13029 | QCLLWNDCQ |
| 13030 | QGQEKEWYY |
| 13031 | QHMELQEHD |
| 13032 | QPCIPVQIA |
| 13033 | QQLYFTIDK |
| 13034 | QVIPVTYRK |
| 13035 | QVKMGVIDQ |
| 13036 | QVLATMNNK |
| 13037 | QWRQMDRMQ |
| 13038 | RDDQPPMVW |
| 13039 | RDEVAEQQP |
| 13040 | REERYFKDE |
| 13041 | RIEMHQSVT |
| 13042 | RKAEQEDVY |
| 13043 | RLVTYPHTA |
| 13044 | RNATKIKLT |
| 13045 | RNCLTDAWD |
| 13046 | RSDQECSKA |
| 13047 | RTCKTIGYY |
| 13048 | RTEPTFVDP |
| 13049 | RTYQYEYEV |
| 13050 | SCWRETMKE |
| 13051 | SLENEARRC |
| 13052 | SLHIHGNGP |
| 13053 | SMGMCELPI |
| 13054 | SNAHMQVGC |
| 13055 | SNAYHAWKN |
| 13056 | SQDLECNAA |
| 13057 | SSGWDHGNL |
| 13058 | SSTWQNVDK |
| 13059 | STHPLNLYH |
| 13060 | SVQPFLHDG |
| 13061 | TADRQLVHS |
| 13062 | TCGKMHGPN |
| 13063 | TLWDNTNTP |
| 13064 | TPSWENVGA |
| 13065 | TRGHHCAED |
| 13066 | TVTCPEVRF |
| 13067 | VNQLHIHVQ |
| 13068 | VPWYEGPYE |
| 13069 | VRFEMMSCT |
| 13070 | VTKCGWMLQ |
| 13071 | WDNSKGYNV |
| 13072 | WNNEDLKVW |
| 13073 | YATQMRHLE |
| 13074 | YCLMDKEDT |
| 13075 | YDGKTFLHW |
| 13076 | YFDCSRAHP |
| 13077 | YGTKCERCY |
| 13078 | YGTKSERCY |
| 13079 | YHDLFFAWY |
| 13080 | YHTNNMEPW |
| 13081 | YMHVPPSIH |
| 13082 | YMWIYPPDQ |
| 13083 | YNVCTMWAQ |
| 13084 | YIQLYCSHL |
| 13085 | YVPCERCEW |
| 13086 | YVQSYWNES |
| 13087 | YWERHCMTI |
| 13088 | YYGWLLVMV |
| 13089 | AGWQMCYDS |
| 13090 | VNCNKRHNW |
| 13091 | PYCSIKQAS |
| 13092 | CQTHWEKGD |
| 13093 | EMISNNCHP |
| 13094 | RQRYMGMQF |
| 13095 | SYLFSKHSE |
| 13096 | KAISLHAHG |
| 13097 | GIGEMQCTE |
| 13098 | ILERYQHMD |
| 13099 | IQKDEMPVC |
| 13100 | GTQFWMSVE |
| 13101 | QMSWGKYHQ |
| 13102 | KDYWAGYQM |
| 13103 | ICDLYSQER |
| 13104 | EEAPGFICF |
| 13105 | DLPNDMGAV |
| 13106 | GMHATELWL |
| 13107 | LMHPQMTMC |
| 13108 | AAKKGRDLH |
| 13109 | RHIYRKGWR |
| 13110 | GEFADNPWN |
| 13111 | ERQMKLRCA |
| 13112 | TDSSDQLQI |
| 13113 | YNMVHGDEP |
| 13114 | NIKMLVHCG |
| 13115 | MKGYFVHHS |
| 13116 | MLRTQIHCA |
| 13117 | CKDNTFVSY |

TABLE 76
Sequences of the 581 to 589 Region in AAV5
VP1 Capsid Polypeptide that Drive Heart
Tissue Tropism

| SEQ | 581-589 |
|---|---|
| ID NO | Sequence |
| 15118 | ADIDQIMCQ |
| 15119 | ADIDQIVCQ |
| 15120 | ADIDQVMCQ |
| 15121 | AHKYDWEYI |
| 15122 | ARSDWRCMC |
| 15123 | AWCEGNCLE |
| 15124 | CCCIMSVMC |
| 15125 | CCCIMSVMG |
| 15126 | CSRIMALSN |
| 15127 | DNRTEGYFT |
| 15128 | ECHLLSDYD |
| 15129 | EDWHGWNEH |
| 15130 | ELYMQMHWP |
| 15131 | ENRLRLAHE |
| 15132 | EQTMFNSPP |
| 15133 | FAMVVITEY |
| 15134 | FFPHDGTIV |
| 15135 | FYQMFHASG |
| 15136 | GFPPRWKIP |
| 15137 | GHCCSNGPT |
| 15138 | GKQQCPAQI |
| 15139 | GKQQCPTQT |
| 15140 | GNRTEGYFT |
| 15141 | HDCALYGRF |
| 15142 | HLNPMTGSN |
| 15143 | HNVMCDACC |
| 15144 | ICKYPMIPH |
| 15145 | ICKYPMISH |
| 15146 | ICMYPMIPH |
| 15147 | IDEFWYGPF |
| 15148 | IDPRRNNDL |
| 15149 | KINPSMPMD |
| 15150 | KPDTSVGIG |
| 15151 | KPDTSVGIV |
| 15152 | KWPCHWHHE |
| 15153 | KWPCHWHHG |
| 15154 | LCINKYFNY |
| 15155 | LEPKMKLAD |
| 15156 | LEPKMKLAE |
| 15157 | LVCEVACKD |
| 15158 | MFTQNAGKI |
| 15159 | MSCPKFHIV |
| 15160 | NEDSLWNMH |
| 15161 | NEDSPWNMH |
| 15162 | NEDSPWSMH |
| 15163 | NNRCKDQTE |
| 15164 | PFTQHVAYI |
| 15165 | PFTQHVAYS |
| 15166 | PQQFAWNND |
| 15167 | PTAIQAYMR |
| 15168 | QHVSTEPPY |
| 15169 | QIADGWGWE |
| 15170 | QMCATMNHE |
| 15171 | QMQHCMDYL |
| 15172 | QVGWKECVM |
| 15173 | RCQQFHGQI |
| 15174 | RDINIDPCC |
| 15175 | SAMVVTTEY |
| 15176 | SFTQHVAYS |
| 15177 | SKQQCPAQI |
| 15178 | SNRTEGYFT |
| 15179 | TDIDQIMCQ |
| 15180 | TDRHDGVFA |
| 15181 | TEYQNARTM |
| 15182 | TITCEADNW |
| 15183 | VFRNRWLEW |
| 15184 | VIEVEQACT |
| 15185 | VIKVEQACT |
| 15186 | VPNPKNFGW |
| 15187 | VSVVQNEAL |
| 15188 | YCSIIGRSC |
| 15189 | YFALCPPYT |
| 15190 | YHAFYWQPY |
| 15191 | AADHWVCQF |
| 15192 | AAFQCAKQG |
| 15193 | AAGMHWNAA |
| 15194 | AAHMGHGWP |
| 15195 | AANQEQECL |
| 15196 | AAPCPDRFV |
| 15197 | AASDSNRIH |
| 15198 | ACCDKTRPE |
| 15199 | ACMFWHRCG |
| 15200 | ADGRGMDCP |
| 15201 | AEENWRQCA |
| 15202 | AEHDLKIVS |
| 15203 | AEVEQYAEA |
| 15204 | AFDPTFIDT |
| 15205 | AFEAFDYDH |
| 15206 | AFFLTPAEP |
| 15207 | AFGNLEVHM |
| 15208 | AGAPLIHQQ |
| 15209 | AGAQQYWAD |
| 15210 | AGECQLLMT |
| 15211 | AHNCNGHVP |
| 15212 | AHNWPAMYT |
| 15213 | AHNYCGYYV |
| 15214 | AHQPDQYCK |
| 15215 | AIAHCVQIE |
| 15216 | AIEGLTGRD |
| 15217 | AIEYMNMGF |
| 15218 | AIKDMRLAL |
| 15219 | AISSHWQWP |
| 15220 | AKNEECDCN |
| 15221 | AKVEMEEWN |
| 15222 | ALAWQMRAQ |
| 15223 | AMNDELKMQ |
| 15224 | AMVIIYTDF |
| 15225 | AMVLMFLYQ |
| 15226 | ANNQHRARA |
| 15227 | APFMSEDCS |
| 15228 | APLMTAFDP |
| 15229 | APMSQWHTV |
| 15230 | APNGYTMFY |
| 15231 | APSAHHTHL |
| 15232 | APYWDCFDR |
| 15233 | AQGPMSVQL |
| 15234 | ARPIFPWIV |
| 15235 | ASTVVYAEM |
| 15236 | ASWLADNLC |
| 15237 | ATAFRHRIN |
| 15238 | ATARLNWDA |
| 15239 | ATDQYWFPT |
| 15240 | ATEIKGSHS |
| 15241 | ATESKWDQD |
| 15242 | ATHIHYHGL |
| 15243 | ATIEGDGVL |
| 15244 | ATIRVITIG |
| 15245 | ATNYVVRHT |
| 15246 | ATSVMAWWD |
| 15247 | ATWRICSSG |
| 15248 | AVDFCQTYD |
| 15249 | AVHAAYCYW |
| 15250 | AVHAGPQAI |
| 15251 | AVKPREAWM |
| 15252 | AVMYNDTYD |
| 15253 | AVPCQLSGA |
| 15254 | AVQERFLQN |
| 15255 | AVQSQTKNM |
| 15256 | AVQWVEHEK |
| 15257 | AVRCDPYRF |
| 15258 | AVSTTVDWY |
| 15259 | ALTTPDVYV |
| 15260 | AVVAMNHHT |
| 15261 | AWGEMNFSV |
| 15262 | AWMPFIDSG |
| 15263 | AWPDIMWAS |
| 15264 | AWRGSKMSN |
| 15265 | AWSVQGPYG |
| 15266 | AWVDQEIPA |
| 15267 | AWVGAEHAG |
| 15268 | AYEHITDGR |
| 15269 | AYTDTNAGY |
| 15270 | AYVEKMRFD |
| 15271 | AYYHEMAVP |
| 15272 | CAAMQQGRD |
| 15273 | CAEAIIKNF |
| 15274 | CAHSNKGGA |
| 15275 | CAMQPCLAV |
| 15276 | CAVDKCMPH |
| 15277 | CCSSFRDMV |
| 15278 | CCWLANGGG |
| 15279 | CDMLTRMQY |
| 15280 | CDPWSWTQI |
| 15281 | CDSTRFCCV |
| 15282 | CEVARWLDY |
| 15283 | CEWKHHAKF |
| 15284 | CFHDPYEKQ |
| 15285 | CGCYSPFLE |
| 15286 | CGSDCNPAY |
| 15287 | CGYQLFECF |
| 15288 | CHNEDLCVW |
| 15289 | CHTMQDIKD |
| 15290 | CIGCPNEWC |
| 15291 | CIQHIAESE |
| 15292 | CISEMDDQR |
| 15293 | CISFSNKWV |
| 15294 | CKAAGPWTD |
| 15295 | CKDSFASVW |
| 15296 | CKPRLCEVP |
| 15297 | CKYMIHPDC |
| 15298 | CLYPLQLEW |
| 15299 | CMDQYRIQF |
| 15300 | CNACQAIEC |
| 15301 | CNKAVQKTS |
| 15302 | CNMPQITGA |
| 15303 | CNPAKSKDG |
| 15304 | CPCKGRRLG |
| 15305 | CPCLYCNIA |
| 15306 | CPEFGFICE |
| 15307 | CQIPKKIGM |
| 15308 | CQTAFYVGH |
| 15309 | CRDRDMAHQ |
| 15310 | CRLKKYYLK |
| 15311 | CSPRKSHFC |
| 15312 | CSRFMDSQW |
| 15313 | CSVDKEDMD |
| 15314 | CTKLSGLNA |
| 15315 | CTKWQRTLG |
| 15316 | CTLEFPSFL |
| 15317 | CVGIMTNGK |
| 15318 | CVGWAMGLG |
| 15319 | CVHKQGENE |
| 15320 | CVIQSNTHV |
| 15321 | CVQPTYADH |
| 15322 | CVTLEMQQG |
| 15323 | CWAMDWGDT |
| 15324 | CWQFTRCAS |
| 15325 | CYYHTCLGG |
| 15326 | DACFYGNFE |
| 15327 | DAENCMLGW |
| 15328 | DAGYCQSGV |
| 15329 | DALSFQSSA |
| 15330 | DANRKDLRG |
| 15331 | DAQAGWRFN |
| 15332 | DASSGFTWT |
| 15333 | DATDWKCAW |
| 15334 | DAVKAEVMW |
| 15335 | DAWAKGYEW |
| 15336 | DAWSANEAW |
| 15337 | DAYWMQWWL |
| 15338 | DCASFPAVD |
| 15339 | DCQGWTAWD |
| 15340 | DCVKAIQGW |
| 15341 | DCVQMNVNV |
| 15342 | DDCWQDRHV |
| 15343 | DDVWKELDV |
| 15344 | DEAYRMPLQ |
| 15345 | DEGAAAKAI |
| 15346 | DEGTSQTKT |
| 15347 | DEHDGCKKS |
| 15348 | DEMYVSSQF |
| 15349 | DFAQRNSAC |
| 15350 | DFGMKNYLA |
| 15351 | DFKFEMTDR |
| 15352 | DFLYSPEGI |
| 15353 | DFSTPYQFG |
| 15354 | DGCTSKDNQ |
| 15355 | DGIHSLTGW |
| 15356 | DGNQLCRLT |
| 15357 | DGNYERVDV |
| 15358 | DGPCAQYRG |
| 15359 | DGPMFATDI |
| 15360 | DHHGAGYNR |
| 15361 | DHISDYQHY |
| 15362 | DIILRIRIK |
| 15363 | DIKAILSKD |
| 15364 | DILGVHLGS |
| 15365 | DIQWQHEWM |
| 15366 | DISCNLQFL |
| 15367 | DKMLKTDLM |
| 15368 | DKNSCCLNP |
| 15369 | DKPVGRYGH |
| 15370 | DKQFVEDNQ |
| 15371 | DKRFQKSYS |
| 15372 | DLMMHYEHK |
| 15373 | DLQMSVNTG |
| 15374 | DLSQMNKNY |
| 15375 | DMGEVQVGI |
| 15376 | DMNPDACVR |
| 15377 | DMQVLNTDD |
| 15378 | DMSEVDKVF |
| 15379 | DMTIAAWAC |
| 15380 | DMTKVTPFL |
| 15381 | DNACVHCAE |
| 15382 | DNCWLNDSA |
| 15383 | DNEPNNRKS |
| 15384 | DNESWSAWD |
| 15385 | DPHQGIAGE |
| 15386 | DPPIVQQWH |
| 15387 | DQKWDTLKP |
| 15388 | DQRRKTNIR |
| 15389 | DQTTLRLMG |
| 15390 | DQYWAWADS |
| 15391 | DRLEDKESQ |
| 15392 | DRMQFFVRN |
| 15393 | DRMTCDTDR |
| 15394 | DSEWTIDEH |
| 15395 | DSGEVRTAS |
| 15396 | DSKVFEWKC |
| 15397 | DSQLTNACG |
| 15398 | DTELVHNGW |
| 15399 | DTLSSDAFL |
| 15400 | DTMCYAWCK |
| 15401 | DTQPWVPCG |
| 15402 | DTRESGFWV |
| 15403 | DTRIKMMLP |
| 15404 | DVAKKNMDG |
| 15405 | DVASEGHEI |
| 15406 | DVCMLVDLP |
| 15407 | DVCMSNELT |
| 15408 | DVDCCEFCT |
| 15409 | DVDFHWQGM |
| 15410 | DVDHKWQYD |
| 15411 | DVDPMPCFY |
| 15412 | DVGIMDYWS |
| 15413 | DVLQHQGAL |
| 15414 | DVMMCFHWR |
| 15415 | DVPDKPWYH |
| 15416 | DVQLDQEWD |
| 15417 | DVQRKTSGE |
| 15418 | DVRFESEQG |
| 15419 | DVRPPAVNE |
| 15420 | DWPCDDFRK |
| 15421 | DYLSFCWKD |
| 15422 | DYNKDPKLV |
| 15423 | EACMHRTVL |
| 15424 | EADFVGPNS |
| 15425 | EAEEHCTFW |
| 15426 | EAEEYEPWK |
| 15427 | EAFQEDAHP |
| 15428 | EANSEYNVY |
| 15429 | EATKSVETR |
| 15430 | EAVTARVQH |
| 15431 | ECDDYDCHY |
| 15432 | ECTRSGKWG |
| 15433 | EDHVMTKKD |
| 15434 | EDIEKNTFE |
| 15435 | EDKQAQTCQ |
| 15436 | EDRSSCVWM |
| 15437 | EEEPLSEMA |
| 15438 | EEKMSVDRK |
| 15439 | EETVSKRKK |
| 15440 | EFIFHIHDQ |
| 15441 | EFMQSFFIE |
| 15442 | EGEDYMDIE |
| 15443 | EGNQFWMFS |
| 15444 | EGQTSNIWE |
| 15445 | EGVTTLQSS |
| 15446 | EHDTMEGFG |
| 15447 | EHGQEEMIM |
| 15448 | EHTAMWMHG |
| 15449 | EICNKGQPD |
| 15450 | EIEGVKANV |
| 15451 | EIGGNPEYD |
| 15452 | EIGYCMTCD |
| 15453 | EEKLPMEQD |
| 15454 | EIKPMVASH |
| 15455 | EILNHTRLW |
| 15456 | EIMDTKQCS |
| 15457 | EIMTMEFQD |
| 15458 | EINTPFEMS |
| 15459 | EINVTQTHQ |
| 15460 | ELQQMDDAP |
| 15461 | EIVATYGQN |
| 15462 | EIVELATQY |
| 15463 | EKHAFSYSF |
| 15464 | EKHMTMAGI |
| 15465 | EKMAREWQT |
| 15466 | EKMWPLNWG |
| 15467 | EKVMQMHMQ |
| 15468 | ELWKAMPPE |
| 15469 | EMEINPTVE |
| 15470 | EMHMTNTGW |
| 15471 | EMTKYLNHA |
| 15472 | ENHCWSAKE |
| 15473 | ENNAERWMF |
| 15474 | ENVQCELMQ |
| 15475 | ENWTWKPEE |
| 15476 | EPMYFIVCS |
| 15477 | EPVNFNEQV |
| 15478 | EQDGHNINE |
| 15479 | EQEQFHICG |
| 15480 | EQMLWNQIS |
| 15481 | EQQWNSVNE |
| 15482 | ERIMHLHES |
| 15483 | ERMPLTCMS |
| 15484 | ERSEHPCMF |
| 15485 | ESCWPQVTG |
| 15486 | ESEPEVYGW |
| 15487 | ESHNTTEGH |
| 15488 | ESLENPNDR |
| 15489 | ETDNFSDCA |
| 15490 | ETFVTCTGA |
| 15491 | ETHHGQMFC |
| 15492 | ETHMYERRE |
| 15493 | ETHVVQNDN |
| 15494 | ETELAPSGT |
| 15495 | ETLMTVKKC |
| 15496 | ETVRQGNPE |
| 15497 | EVARKVQNE |
| 15498 | EVAWMGRQN |
| 15499 | EVDPWGHME |
| 15500 | EVHVNWKDE |
| 15501 | EVIDHGHME |
| 15502 | EVLEWRHYQ |
| 15503 | EVNESGEYV |
| 15504 | EVTEPVKAI |
| 15505 | EVTKHLVAC |
| 15506 | EVWTPCFPI |
| 15507 | EWCNEWCGP |
| 15508 | EWDEWLISF |
| 15509 | EWIHLYCCF |
| 15510 | EWIPYAVGN |
| 15511 | EYDYIFNHH |
| 15512 | EYEADTITC |
| 15513 | EYMGFRCDR |
| 15514 | EYMSIMMNH |
| 15515 | EYNPTNHIL |
| 15516 | EYPAEFAQC |
| 15517 | EYQQLARHW |
| 15518 | FACMPNEFL |
| 15519 | FAFDTQMVF |
| 15520 | FAPPTHTLE |
| 15521 | FCHNIFTEC |
| 15522 | FDHSERQYH |
| 15523 | FEKTRIAAW |
| 15524 | FEMGQKSLS |
| 15525 | FFEFRPSTK |
| 15526 | FGMVMPMWA |
| 15527 | FGPDSTHLC |
| 15528 | EGQIIMTDG |
| 15529 | FGWYYFWDP |
| 15530 | FHSCSRMGL |
| 15531 | FIDTACSHG |
| 15532 | FIGDIYAGG |
| 15533 | FIGMQSALE |
| 15534 | FITMRQEGP |
| 15535 | FIVILNNSD |
| 15536 | FNPDTDQDH |
| 15537 | FPFGTMHGS |
| 15538 | FPFLTKSPK |
| 15539 | FPQLPQNEA |
| 15540 | FSMDKQQFQ |
| 15541 | FTCEYTYAY |
| 15542 | FTELSMVQD |
| 15543 | FTKQADELP |
| 15544 | FTNFEYSME |
| 15545 | FTQGGEVYA |
| 15546 | FTSWMDVQD |
| 15547 | FTTQPSVAW |
| 15548 | FVPQWVQIP |
| 15549 | FVSSYYAIH |
| 15550 | FVSTESVWN |
| 15551 | FYIMMEKML |
| 15552 | GACCKQIGE |
| 15553 | GAKWQAQPD |
| 15554 | GATQHECWC |
| 15555 | GAYDTVWGW |
| 15556 | GCATWHNLY |
| 15557 | GCMLRSVTG |
| 15558 | GCNLLSVSN |
| 15559 | GDAFSCVFP |
| 15560 | GDDPMFFEK |
| 15561 | GEHTGMMLY |
| 15562 | GFMAVVQSW |
| 15563 | GGRCYFWED |
| 15564 | GGRLYKPEW |
| 15565 | GHASWAMWY |
| 15566 | GHGHKWIYS |
| 15567 | GHMYLLDME |
| 15568 | GHTCPCKWD |
| 15569 | GIDTDDVGH |
| 15570 | GIGMFCVTN |
| 15571 | GKARRCATW |
| 15572 | GKDVKQCCD |
| 15573 | GKLGLDCQD |
| 15574 | GKVVDAHMG |
| 15575 | GLQNKGYPT |
| 15576 | GLSIEISTP |
| 15577 | GLSLHKSDH |
| 15578 | GMADMVHGP |
| 15579 | GMASHSHYI |
| 15580 | GNEFIECRQ |
| 15581 | GNEFIECRQ |
| 15582 | GNHWGWSIS |
| 15583 | GPEMTVAQT |
| 15584 | GQIPCSSWG |
| 15585 | GQVDNMMAT |
| 15586 | GRELEIEPQ |
| 15587 | GSDRATGKE |
| 15588 | GSEFCILNE |
| 15589 | GSKPSSKQS |
| 15590 | GSSHFNDLG |
| 15591 | GTCHGPVLM |
| 15592 | GTCQVQLHS |
| 15593 | GTEIKTLHG |
| 15594 | GTEVIGLNT |
| 15595 | GVFLGYAQR |
| 15596 | GVISDGKYA |
| 15597 | GVKDFDVCT |
| 15598 | GVMVNPCNM |
| 15599 | GVSAEGKAQ |
| 15600 | GVSGMQITG |
| 15601 | GVTMNTECE |
| 15602 | GVVATDCEI |
| 15603 | GVYMESAVR |
| 15604 | GWETPLVWF |
| 15605 | GWWNHYLFW |
| 15606 | GYIYHKMYT |
| 15607 | HAAETEIHQ |
| 15608 | HCDTHVNLE |
| 15609 | HCKSGQQML |
| 15610 | HCTCYDAIF |
| 15611 | HDKWKWSDR |
| 15612 | HENYYREGA |
| 15613 | HFLQMEHGH |
| 15614 | HFMYDMNFQ |
| 15615 | HILKHVHTP |
| 15616 | HISFHTIPG |
| 15617 | HITGEYIAP |
| 15618 | HKESSEGAT |
| 15619 | HLNNCHWRR |
| 15620 | HMGQMYWHM |
| 15621 | HMVDINLIA |
| 15622 | HNGVMMHSH |
| 15623 | HNKACITAL |
| 15624 | HPNNFNRAH |
| 15625 | HPVHYNMCS |
| 15626 | HSCTMMGGD |
| 15627 | HSMGIFSNL |
| 15628 | HSMVQWNST |
| 15629 | HVEMANAGK |
| 15630 | HVIPHNRSE |
| 15631 | HVMPWLCQW |
| 15632 | HVMTLVDYD |
| 15633 | HVNTEQKYY |
| 15634 | HWNCNCRNA |
| 15635 | HWPQRLNEH |
| 15636 | HWSWFASFV |
| 15637 | HWTNQDSNK |
| 15638 | HYHQYTRLP |
| 15639 | IADVIHSKW |
| 15640 | IAETLIGVL |
| 15641 | IAHGASAYL |
| 15642 | IAYSLLANY |
| 15643 | ICMFEEEQW |
| 15644 | ICPPFQRQV |
| 15645 | ICPYAEVSD |
| 15646 | ICSNPWNKE |
| 15647 | IDCQGKCDW |
| 15648 | IEDDPLHAE |
| 15649 | IEHRFMIAG |
| 15650 | IEPIHNWKK |
| 15651 | IESVTHLCD |
| 15652 | IGELDEACD |
| 15653 | IGFMDNTSC |
| 15654 | IGIPIHMWD |
| 15655 | IGQSIVTMQ |
| 15656 | IHMFRMWPE |
| 15657 | IHPQIAEGM |
| 15658 | IIDVFPRHT |
| 15659 | IIFFLCRDP |
| 15660 | IKQPANDTD |
| 15661 | IKYGMRHTN |
| 15662 | ILVMVWLGQ |
| 15663 | IMRWHYGMV |
| 15664 | INASSCDYW |
| 15665 | INRNYWDFI |
| 15666 | INSELPVDV |
| 15667 | INYSSVATV |
| 15668 | IPQPTMMQD |
| 15669 | IQEYIQDAD |
| 15670 | IRESWIGQF |
| 15671 | IRYVTAYYK |
| 15672 | ISEIMPSNP |
| 15673 | ISMYQSTQV |
| 15674 | ISNWRCSQK |
| 15675 | ITCSNEKDF |
| 15676 | ITENRGYYH |
| 15677 | ITSNELPME |
| 15678 | IVEFMHCDD |
| 15679 | IVEMYAKNN |
| 15680 | IVHDEPRHN |
| 15681 | IVHDIWGQA |
| 15682 | IVKYRAYPG |
| 15683 | IVNKNCSQP |
| 15684 | IVPFGCGGF |
| 15685 | IWKCLNTQN |
| 15686 | IWTCCKGGG |
| 15687 | IVWDYEITR |
| 15688 | IYEARTIVR |
| 15689 | KALPGMSAG |
| 15690 | KAPGVCTRS |
| 15691 | KCDMKRGQF |
| 15692 | KCELMSNQT |
| 15693 | KCWYKFITN |
| 15694 | KDALFDFPC |
| 15695 | KDDGMCYGR |
| 15696 | KDEDWNWCD |
| 15697 | KDFWAMSMV |
| 15698 | KDIGKAAGY |
| 15699 | KDVMFREMH |
| 15700 | KECEQLMFP |
| 15701 | KFDHDSEFY |
| 15702 | KFEPRYGDC |
| 15703 | KGIHEPISC |
| 15704 | KHDSDWMWY |
| 15705 | KHIQDARWF |
| 15706 | KHWREMITV |
| 15707 | KIDDDSRVY |
| 15708 | KIQYDDFDG |
| 15709 | KIVDIDWWA |
| 15710 | KLMWFASTD |
| 15711 | KLSNDRFIY |
| 15712 | KMQTVMRAL |
| 15713 | KNDMLKKKG |
| 15714 | KPIPQTVWL |
| 15715 | KPQAHYYTI |
| 15716 | KQLLTRMYM |
| 15717 | KQPEPTPLA |
| 15718 | KRMQEMTCR |
| 15719 | KSASPTQPY |
| 15720 | KSPAIHTEE |
| 15721 | KSSGVWMCC |
| 15722 | KTEWYDMKN |
| 15723 | KVEENLRSM |
| 15724 | KVIPEDQNC |
| 15725 | KWDSTCYRW |
| 15726 | KWTEFDRCD |
| 15727 | KYEEQYHFH |
| 15728 | KYQPDGWCY |
| 15729 | LAAGVWDQE |
| 15730 | LACKREAMW |
| 15731 | LAVCKTHEP |
| 15732 | LCHPGEHWQ |
| 15733 | LCVTGEDTH |
| 15734 | LDESWSVAG |
| 15735 | LDPNRCMDQ |
| 15736 | LGFWETQIM |
| 15737 | LGHMQASTP |
| 15738 | LGNQYWWHF |
| 15739 | LHEIHLETN |
| 15740 | LHLPQLLHD |
| 15741 | LHSAWMHLA |
| 15742 | LIAHWIHSF |
| 15743 | LIAPYFGQL |
| 15744 | LICTMSDMN |
| 15745 | LIDHIQNQH |
| 15746 | LKEMTWINW |
| 15747 | LKQFRHMDG |
| 15748 | LLYMAHCPP |
| 15749 | LMDGCTPFM |
| 15750 | LMEVYRSKA |
| 15751 | LMHYGMVWP |
| 15752 | LMSKENNCN |
| 15753 | LNGECVVGY |
| 15754 | LNTDVAEAF |
| 15755 | LNVGKKGYG |
| 15756 | LQQCEPMKS |
| 15757 | LQSEHNEDE |
| 15758 | LSICDQYDV |
| 15759 | LSMRCMDQW |
| 15760 | LSNFSWQYG |
| 15761 | LSVKHVHYS |
| 15762 | LTCMWGVYP |
| 15763 | LTTLVEAIP |
| 15764 | LTTQWNAKG |
| 15765 | LTVFSNGGV |
| 15766 | LTVWFGPFS |
| 15767 | LVDTWNNHR |
| 15768 | LWCKTWHNY |
| 15769 | LWDGEAWCW |
| 15770 | LWNMIKPLY |
| 15771 | LYELQQFGA |
| 15772 | LYHWWGYIE |
| 15773 | LYQSTFDWR |
| 15774 | MAADRWPLG |
| 15775 | MAGQSAAYW |
| 15776 | MAHIEGVAN |
| 15777 | MASDTDYSF |
| 15778 | MAVMIANAA |
| 15779 | MCGLTKFRP |
| 15780 | MCPPYQQAE |
| 15781 | MCSSQHSYS |
| 15782 | MDDDNDPVF |
| 15783 | MDKDSEIMG |
| 15784 | MEEYNTTTC |
| 15785 | MEGGHPYRT |
| 15786 | MESKYWHSD |
| 15787 | MFHDTLGMF |
| 15788 | MFMRLGTLP |
| 15789 | MFNMYEGSQ |
| 15790 | MFNWAEMED |
| 15791 | MFTDNITKC |
| 15792 | MGIQTNYEA |
| 15793 | MGNMPASMA |
| 15794 | MGRTFFEEF |
| 15795 | MGRWENIWC |
| 15796 | MHDMLMGQM |
| 15797 | MHFQAWSGA |
| 15798 | MHIGVFTQA |
| 15799 | MIAFWSTWR |
| 15800 | MIAWWGSPG |
| 15801 | MIKPLICNK |
| 15802 | MIKQTGAEW |
| 15803 | MINNSKTPY |
| 15804 | MIRTQCCWI |
| 15805 | MISQMMSNA |
| 15806 | MIYWTVDQQ |
| 15807 | MKASKDGGK |
| 15808 | MKEEWGHIP |
| 15809 | MLSWVYPCM |
| 15810 | MMAMKTDSH |
| 15811 | MMCQIMHSC |
| 15812 | MMNGMMGGN |
| 15813 | MMQEIGAEA |
| 15814 | MMRGPESDR |
| 15815 | MMVQQMFFI |
| 15816 | MNESTHIHP |
| 15817 | MPCCWWVVT |
| 15818 | MPCPLPKYR |
| 15819 | MPGYQIHNA |
| 15820 | MPKDWVPDA |
| 15821 | MPLTHSMHN |
| 15822 | MPNAFYQAC |
| 15823 | MPSQNGTKH |
| 15824 | MQLGEHSWY |
| 15825 | MQLLGDSEY |
| 15826 | MQSQEDHSP |
| 15827 | MRVWRYCDR |
| 15828 | MSSCKKMDA |
| 15829 | MTGEKTGNA |
| 15830 | MTLSWWGIG |
| 15831 | MTMLKMAGR |
| 15832 | MTNGNTVGA |
| 15833 | MTNIMQQGK |
| 15834 | MVDGDLPMK |
| 15835 | MVDKGFAGQ |
| 15836 | MVESELMMC |
| 15837 | MVGCCCHFG |
| 15838 | MVGPAQIEL |
| 15839 | MVHFTSHPI |
| 15840 | MVLTDAHTA |
| 15841 | MVQCMGQLA |
| 15842 | MVQPGHFES |
| 15843 | MVVASSASD |
| 15844 | MWDSVYYPF |
| 15845 | MYAPRCQTE |
| 15846 | MYGYTMNSG |
| 15847 | MYSCWTVNT |
| 15848 | MYSNLVHWS |
| 15849 | MYSYPHRRS |
| 15850 | MYTTHCHGM |
| 15851 | NAGLVNLGK |
| 15852 | NAQEEPESW |
| 15853 | NARYDKDNL |
| 15854 | NAVEQYVHH |
| 15855 | NCKEKEDCQ |
| 15856 | NCMASGWRG |
| 15857 | NCWINTRLP |
| 15858 | NDAKNLEGW |
| 15859 | NEKEYSWAA |
| 15860 | NEKHMSYCF |
| 15861 | NERHTFCVD |
| 15862 | NEWLMYLLT |
| 15863 | NFALATTTE |
| 15864 | NFTHREKEC |
| 15865 | NGKCCHPGP |
| 15866 | NHALMHGFQ |
| 15867 | NHCINSTEL |
| 15868 | NHESKDASW |
| 15869 | NIGFQMTMG |
| 15870 | NIGYANLWC |
| 15871 | NIQFQVGNY |
| 15872 | NIQWITDVG |
| 15873 | NIVHYCNPS |
| 15874 | NKSDEQLVQ |
| 15875 | NLTFCLFMG |
| 15876 | NMGVYQFLG |
| 15877 | NMVEYKQTA |
| 15878 | NNDCENPPL |
| 15879 | NNEFDVQHS |
| 15880 | NNMEIMKTC |
| 15881 | NPKQTHWDY |
| 15882 | NPRGEFMAH |
| 15883 | NQLQPICKP |
| 15884 | NSAHELHSP |
| 15885 | NSGTCPAPH |
| 15886 | NSSTVCNNR |
| 15887 | NSVMQMCVD |
| 15888 | NTFMPNGAN |
| 15889 | NTHMAHKSE |
| 15890 | NTQTLMTNG |
| 15891 | NTSLVRESE |
| 15892 | NVECVQQQW |
| 15893 | NVHDDHGAR |
| 15894 | NVMAGHDHE |
| 15895 | NVMFEQDDR |
| 15896 | NVQMQTLSW |
| 15897 | NVWTCDVCS |
| 15898 | NWFKMQAGM |
| 15899 | NYAETPCYS |
| 15900 | NYNFYATHV |
| 15901 | NYQNNMTFN |
| 15902 | PDVLHPNND |
| 15903 | PFRTDVRGS |
| 15904 | PGGTPRPEY |
| 15905 | PGKTWLWEL |
| 15906 | PGLDSTMHY |
| 15907 | PHPKSHKQH |
| 15908 | PIKYKHRQP |
| 15909 | PIRREWHLW |
| 15910 | PKEQYEWKD |
| 15911 | PKVDKRHKL |
| 15912 | PLASMWQHD |
| 15913 | PLMLLSKAM |
| 15914 | PLTFRGHNH |
| 15915 | PMEKFYCGC |
| 15916 | PNTERTYEC |
| 15917 | PQHAGRHHE |
| 15918 | PTDFIWPMM |
| 15919 | PTDQDQMLE |
| 15920 | PTKMHNHPW |
| 15921 | PVKLETHES |
| 15922 | PWGRSLVHC |
| 15923 | PWPSMACQK |
| 15924 | PYAPKNCCV |
| 15925 | QAIGRDQSF |
| 15926 | QAMWGNGQG |
| 15927 | QASVHVMAD |
| 15928 | QDHALVYRN |
| 15929 | QDYYSKPEW |
| 15930 | QEGIRTDVS |
| 15931 | QEMPLPMKS |
| 15932 | QFAEWWTMA |
| 15933 | QFILSHRRD |
| 15934 | QFLPCNFRC |
| 15935 | QFMTCQNYP |
| 15936 | QFVSWYTYR |
| 15937 | QGEMPDMFK |
| 15938 | QGNSPYHEA |
| 15939 | QGQPEVVVW |
| 15940 | QGQPTDASG |
| 15941 | QGYHFAWND |
| 15942 | QHALNQAVA |
| 15943 | QHIHEIGKK |
| 15944 | QIAMATMFR |
| 15945 | QIDNVRHHP |
| 15946 | QIMANACQN |
| 15947 | QITDMQDMQ |
| 15948 | QLVEAQLPP |
| 15949 | QLVEKEDMN |
| 15950 | QMSPAGCTE |
| 15951 | QNKVTQREC |
| 15952 | QPSPGHAYP |
| 15953 | QQDAAFHWT |
| 15954 | QQGFIVYWH |
| 15955 | QQIHMGHQA |
| 15956 | QQTLFRTGS |
| 15957 | QQYRASNFA |
| 15958 | QSCVTLQTN |
| 15959 | QSEFLVKHI |
| 15960 | QSMDCNWDG |
| 15961 | QSPSDIQCT |
| 15962 | QTADHRKGM |
| 15963 | QTATMAVWN |
| 15964 | QTDHFDSCR |
| 15965 | QTRAIVLLD |
| 15966 | QTYAQTHRT |
| 15967 | QVDWLKSSF |
| 15968 | QVEDELANY |
| 15969 | QVEMKDCDQ |
| 15970 | QVFPCDYEN |
| 15971 | QVMRCDFDD |
| 15972 | QVNLENHSC |
| 15973 | QVSVDCSQC |
| 15974 | QVVVIVWQA |
| 15975 | QVWINNVNI |
| 15976 | QWGTMMKNQ |
| 15977 | QWMTGMCWE |
| 15978 | QYAHISAHS |
| 15979 | QYQSVSNFS |
| 15980 | RCAQYEVAG |
| 15981 | RCLKRKTCF |
| 15982 | RCTGFDDFE |
| 15983 | RDETSFRHC |
| 15984 | RDSDKERCK |
| 15985 | RFHTDYRRH |
| 15986 | RFVMRPKES |
| 15987 | RGEQGVLTL |
| 15988 | RGLFDNWIF |
| 15989 | RGTYSYSAR |
| 15990 | RHLDQIPWP |
| 15991 | RHSWHPHFE |
| 15992 | RHYFYQDDD |
| 15993 | RIHEGSISG |
| 15994 | RKKGELCSR |
| 15995 | RKWCEFDAI |
| 15996 | RMCCSDSGE |
| 15997 | RMEQQGVMN |
| 15998 | RMESHIAQT |
| 15999 | RMHMPWCHG |
| 16000 | RNPHMDQSM |
| 16001 | RPIHDFGVY |
| 16002 | RTDQMELAT |
| 16003 | RTETKSTYF |
| 16004 | RTYWLDDGK |
| 16005 | RVDQEGGRD |
| 16006 | RYECYRSPF |
| 16007 | SAESRQGES |
| 16008 | SATPVGKEY |
| 16009 | SAVHRNDVA |
| 16010 | SAVHYTYMD |
| 16011 | SCAFVDEWS |
| 16012 | SCDAVDGLW |
| 16013 | SCDLKHDSG |
| 16014 | SCTDFNSMG |
| 16015 | SDHYNPEPY |
| 16016 | SEEESKEGG |
| 16017 | SEFCAWKCD |
| 16018 | SELVRWKHS |
| 16019 | SEQNRGSHT |
| 16020 | SERKDQRMW |
| 16021 | SEWQEFFFN |
| 16022 | SFRIANQTN |
| 16023 | SFYSTGIWG |
| 16024 | SGPDMTAGN |
| 16025 | SHRWVMKEH |
| 16026 | SHSHQPSAS |
| 16027 | SECGAVQNF |
| 16028 | SIKGRDWGD |
| 16029 | SIMVSTHNN |
| 16030 | SIQPLAATT |
| 16031 | SKMEEALRM |
| 16032 | SLRLELRPQ |
| 16033 | SMKHRMQAF |
| 16034 | SMLQFLSDD |
| 16035 | SMYFKPTQD |
| 16036 | SNEMCGFAM |
| 16037 | SNLQIQDAK |
| 16038 | SNSPTCYAY |
| 16039 | SNTMRLNAE |
| 16040 | SNYAPFYCD |
| 16041 | SPHCYESTP |
| 16042 | SPMVKKSGT |
| 16043 | SPMYEMSAF |
| 16044 | SPNHDAGQN |
| 16045 | SQDTEHCWA |
| 16046 | SQGCQVKQC |
| 16047 | SQMPHSKAA |
| 16048 | SQSNFEIME |
| 16049 | SRHWRPQSC |
| 16050 | SSGLYWKKN |
| 16051 | SSLNYSPGA |
| 16052 | STAAYQFEE |
| 16053 | STAEDQADH |
| 16054 | STAPDNTAF |
| 16055 | STDALWQEN |
| 16056 | STDCIFFQH |
| 16057 | STDSMDAEA |
| 16058 | STEHLGRND |
| 16059 | STEPSGIHQ |
| 16060 | STGQDQEHT |
| 16061 | STHGQASAI |
| 16062 | STKQVEALG |
| 16063 | STVNTSSPE |
| 16064 | SVCIDIPCI |
| 16065 | SVDYTNALT |
| 16066 | SVENYERCQ |
| 16067 | SVRFDGNDW |
| 16068 | SVTVNNVHC |
| 16069 | SWAVLHQAQ |
| 16070 | SWDMEWDGP |
| 16071 | SWDVPLYNP |
| 16072 | SYCNLQFMR |
| 16073 | SYEKSVNMG |
| 16074 | SYQAVFGSI |
| 16075 | SYVQRHCVF |
| 16076 | TAFSGWKEQ |
| 16077 | TAGLGIESV |
| 16078 | TAMDCMCGT |
| 16079 | TAMKFPGGE |
| 16080 | TASPAFDES |
| 16081 | TASSWLMHQ |
| 16082 | TATGMNRCE |
| 16083 | TATSWWAFK |
| 16084 | TAVWMDKTS |
| 16085 | TCFMGWRCL |
| 16086 | TCRMGMEIG |
| 16087 | TDQTCSKCE |
| 16088 | TEEICQLRE |
| 16089 | TEKDNEEHQ |
| 16090 | TEKMSHCSE |
| 16091 | TESQSGGQP |
| 16092 | TFARRADYA |
| 16093 | TFPVGYNYT |
| 16094 | TGEWQQGKP |
| 16095 | THMTIDDAS |
| 16096 | TIGVDPSCQ |
| 16097 | TIKHILNHK |
| 16098 | TIKNYCQGR |
| 16099 | TIKYDLHFA |
| 16100 | TEMPRHRHA |
| 16101 | TITTFWDFE |
| 16102 | TKRPFKGQW |
| 16103 | TLHHNSDAK |
| 16104 | TLIYNAQVT |
| 16105 | TMDQKNDMD |
| 16106 | TMGTAAKSH |
| 16107 | TMPVDVMIP |
| 16108 | TMPWQGNHC |
| 16109 | TMQNTEPGI |
| 16110 | TMRFFGEGD |
| 16111 | TNADSWDQE |
| 16112 | TNGVPPWWS |
| 16113 | TNHINFGWI |
| 16114 | TNHSFWEQG |
| 16115 | TPDCYSMGA |
| 16116 | TPNCGINHE |
| 16117 | TQCNTDQRT |

TABLE 77
Sequences of the 581 to 589 Region in AAV5
VP1 Capsid Polypeptide that Drive Lung
Tissue Tropism

| SEQ | 581-589 |
|---|---|
| ID NO | Sequence |
| 18118 | QTNTMQMLS |
| 18119 | GPRHIEEDG |
| 18120 | RKADVEYQG |
| 18121 | SCDMQQAHQ |
| 18122 | DILMFEWFD |
| 18123 | DIRMFAWFD |
| 18124 | DIRMFELFD |
| 18125 | DIRMFEWFD |
| 18126 | DIRMFEWFG |
| 18127 | DIRMFEWFN |
| 18128 | DIRMFEWFY |
| 18129 | DIRMFEWVD |
| 18130 | DIRMFKWFD |
| 18131 | DIRMFVWFD |
| 18132 | DIRMIEWFD |
| 18133 | DIRMVEWFD |
| 18134 | DIRVFEWFD |
| 18135 | DMRMFEWFD |
| 18136 | EGKQAYFFP |
| 18137 | ELKQAYFFP |
| 18138 | EPKRLLRTV |
| 18139 | EPKRLLWIV |
| 18140 | EWEQAYFFP |
| 18141 | EWKPAYFFP |
| 18142 | EWKQACFFP |
| 18143 | EWKQASFFP |
| 18144 | EWKQAYFFA |
| 18145 | EWKQAYFFP |
| 18146 | EWKRAYFFP |
| 18147 | EWRQAYFFP |
| 18148 | GIRMFEWED |
| 18149 | GMAHRFRGR |
| 18150 | GMAHWFRGR |
| 18151 | GMTHRFRGR |
| 18152 | HIESFTYCN |
| 18153 | HTESFAYCN |
| 18154 | HTESFTYCN |
| 18155 | HTESFTYCS |
| 18155 | HTESFTYCT |
| 18157 | HTKSFTYCN |
| 18158 | HTQFINGRG |
| 18159 | HTQFTDGRG |
| 18160 | HTQFTNGRG |
| 18151 | GMTHRFRGR |
| 18152 | NERMFEWFD |
| 18153 | NESFPNQSE |
| 18154 | NTESFTYCN |
| 18155 | HTESFTYCS |
| 18166 | QLNARWYRC |
| 18167 | QLNARWYRW |
| 18168 | QLNAWWYRC |
| 18169 | QLSARWYRC |
| 18170 | RLDYRHYSK |
| 18171 | RLNYRHCSK |
| 18172 | RLNYRHYSK |
| 18173 | RLNYRHYSR |
| 18174 | RLNYRHYST |
| 18175 | RLNYRPYSK |
| 18176 | RLNYWHYSK |
| 18177 | SKNLCTMAG |
| 18178 | SKNLYTMAC |
| 18179 | SKNLYTMAD |
| 18180 | SKNLYTMAG |
| 18181 | SKNLYTMAV |
| 18182 | SKNLYTMSG |
| 18183 | SKNLYTMVG |
| 18184 | SKNLYTVAG |
| 18185 | TMTSTLQST |
| 18186 | VWKQAYFFP |
| 18187 | GTKLIWPYQ |
| 18188 | CSTLAKHDE |
| 18189 | DVIHTTHSG |
| 18190 | DFMWYHICS |
| 18191 | DVEFCMKQY |
| 18192 | MMLGYMEQD |
| 18193 | DFNGSNWLP |
| 18194 | AGRFKFPQP |
| 18195 | AMYQCPSMD |
| 18196 | ANWKHWQWR |
| 18197 | ATVNSDTLT |
| 18198 | AVGHFEYVL |
| 18199 | AVWTMLEHC |
| 18200 | CQVWWENRD |
| 18201 | CQYAVTKMG |
| 18202 | CSGVDCTGA |
| 18203 | DCSSCMKDL |
| 18204 | DRKLGDAHG |
| 18205 | DTARWDVMT |
| 18206 | DVVNCTVHT |
| 18207 | EICSRGRTI |
| 18208 | ELGHCLLYE |
| 18209 | ELQSFMQYG |
| 18210 | ERFKTFCEE |
| 18211 | FASSHWYQG |
| 18212 | FYLWDTRET |
| 18213 | GEANMAPSR |
| 18214 | GMSEQIAIT |
| 18215 | GWSTDWTET |
| 18216 | IASKFNICC |
| 18217 | IFVYCEKMP |
| 18218 | ITSSPNHIF |
| 18219 | IVDTSARYQ |
| 18220 | KANWVESME |
| 18221 | KTGWGGETG |
| 18222 | KWKVETTCY |
| 18223 | LLCTCGWCE |
| 18224 | LSYENDAFQ |
| 18225 | MCSHNLPKS |
| 18226 | MHTMTNAMK |
| 18227 | MNTHEQWGG |
| 18228 | MSLMPHGWH |
| 18229 | MTDLMYIQP |
| 18230 | MVECLYYHG |
| 18231 | MVFLQCQQN |
| 18232 | MWNTSNLFH |
| 18233 | NVNLQMMMT |
| 18234 | NYNGYSDAQ |
| 18235 | PSTKPPKCK |
| 18236 | QDWSDFNDC |
| 18237 | QNVQLENSQ |
| 18238 | SKTKKRFAW |
| 18239 | SRYDTNCWW |
| 18240 | STHNRLDWQ |
| 18241 | TGDEIVGTY |
| 18242 | TSIPPRHNP |
| 18243 | VAAYNFPTC |
| 18244 | VMEGVRNME |
| 18245 | WTHMYENED |
| 18246 | WYNQGAEYH |
| 18247 | WYWRLDCLW |
| 18248 | YATEPGVFP |
| 18249 | YCHRSDCDR |
| 18250 | YMDEMITEL |
| 18251 | AAMPTHHTM |
| 18252 | AANIMISQA |
| 18253 | AANVTQDTS |
| 18254 | AAPKYSAHQ |
| 18255 | AAQPHFVVA |
| 18256 | AASDWCRYS |
| 18257 | AASWQEFFP |
| 18258 | AAYFVGENC |
| 18259 | ACEWKQHWA |
| 18260 | ACGKMHGPN |
| 18261 | ACGVVLKAA |
| 18262 | ACKQFKKHA |
| 18263 | ACLQQDIAM |
| 18264 | ADAHQRTVS |
| 18265 | ADGQMLQAH |
| 18266 | ADRQSQMHL |
| 18267 | AFLELAMYP |
| 18268 | AFTEGQLNE |
| 18269 | AGNRWWWSI |
| 18270 | AHASWKCWF |
| 18271 | AIGTLAPNL |
| 18272 | AILMQQGAG |
| 18273 | AIMHPPYCE |
| 18274 | AIQSGNWSS |
| 18275 | AKLEQMDSA |
| 18276 | AKTHCHCWW |
| 18277 | ALHHCIKKA |
| 18278 | ALIQFMMDQ |
| 18279 | AMAYSWTMA |
| 18280 | AMCFNKCWQ |
| 18281 | AMSQQHDHQ |
| 18282 | AMSTLGECP |
| 18283 | APQFYVSYD |
| 18284 | APTKVHCQG |
| 18285 | AQNPFDIDA |
| 18285 | AQNREGAKL |
| 18287 | AQTFCSFDR |
| 18288 | ARSGENGHE |
| 18289 | ASGCLQQIS |
| 18290 | ASEDVASWG |
| 18291 | ASTPWCWFE |
| 18292 | ATDNSDTLT |
| 18293 | ATGIDPLGA |
| 18294 | ATMIKFECT |
| 18295 | ATYISAHDA |
| 18295 | ATYISAHDA |
| 18297 | AVESPERYH |
| 18298 | AVNDWNNDW |
| 18299 | AVTRPSNKM |
| 18300 | AWDPMTSTF |
| 18301 | AWGGFNAEM |
| 18302 | AWILFWWFV |
| 18303 | AYCSEERSP |
| 18304 | AYENVQHPN |
| 18305 | AYEPFASSF |
| 18306 | AYNRMMLTC |
| 18307 | CAFPVNITA |
| 18308 | CAGVTSHGE |
| 18309 | CAICNAQCP |
| 18310 | CAQSVHFHK |
| 18311 | CAYEVYDGK |
| 18312 | CFCKNGTYL |
| 18313 | CGEWLNECS |
| 18314 | CHHFNMPSQ |
| 18315 | CILHVTDNG |
| 18316 | CKSNWHIFK |
| 18317 | CLMSNITHI |
| 18318 | SPFQHLGPK |
| 18319 | CQQYWNAAW |
| 18320 | CSAVYLANH |
| 18321 | CVDEYYNSS |
| 18322 | CVIDWKAMS |
| 18323 | CVTKTMWTG |
| 18324 | CWRSGSMNL |
| 18325 | CWSITNQDH |
| 18326 | CYASMSASY |
| 18327 | CYDWYEGAE |
| 18328 | CYSENDHQV |
| 18329 | DAAHMGYEP |
| 18330 | DAGHSFQIF |
| 18331 | DAGPIWYSS |
| 18332 | DANQRATNS |
| 18333 | DANSLNSWP |
| 18334 | DARSMAPVE |
| 18335 | DAYSVHHYV |
| 18336 | DCNSLINVA |
| 18337 | DCRHTILYV |
| 18338 | DDMLMQFQH |
| 18339 | DFGCMDYGP |
| 18340 | DFHSYLKQQ |
| 18341 | DGFQQGEGI |
| 18342 | DINRSGNQC |
| 18343 | DKWCCEMTA |
| 18344 | DLEY1WHWG |
| 18345 | DLIGSGPWF |
| 18346 | DMHECIGCS |
| 18347 | DMHRQHLIE |
| 18348 | DMLKFHFNY |
| 18349 | DMMDNQIAS |
| 18350 | DNIRYPCHS |
| 18351 | DNQFFNGDY |
| 18352 | DPVWLPFMF |
| 18353 | DQFARHKKY |
| 18354 | DRPKKNLCC |
| 18355 | DRPSTGWYL |
| 18356 | DSDIVNDYC |
| 18357 | DTKVKKEFG |
| 18358 | DTMLRLCYP |
| 18359 | DTNWMQWNH |
| 18360 | DTSLNDGWM |
| 18361 | DVCCQFSAY |
| 18362 | DVLVATQVQ |
| 18363 | DYQRKTRYS |
| 18364 | EACKCSVVP |
| 18365 | EAFYLQKPG |
| 18366 | EAIQDAHQM |
| 18367 | EANKGASQD |
| 18368 | ECCNMSPPG |
| 18369 | ECGRFAPME |
| 18370 | ECHKCEVCV |
| 18371 | EDRPMAMME |
| 18372 | EEDKYNVVQ |
| 18373 | EEKKLTVIM |
| 18374 | EFGTYDNIG |
| 18375 | EFRYGPQYG |
| 18376 | EFVIAEETS |
| 18377 | EGANYHWDH |
| 18378 | EGAQQESVG |
| 18379 | EGARYTKFH |
| 18380 | EGGMGPQQS |
| 18381 | EGKWMSVHH |
| 18382 | EGRPQYTDP |
| 18383 | EGSFVLSTE |
| 18384 | EHAPMVHAL |
| 18385 | EHQRMKFRN |
| 18386 | EHVQKVNYP |
| 18387 | EHYCVTAWY |
| 18388 | EIDLWRTPT |
| 18389 | EIHDEASCY |
| 18390 | EIHKEMGFG |
| 18391 | EIMFYMRKQ |
| 18392 | EINIKKKQM |
| 18393 | EINKMAALG |
| 18394 | EIRTVESAG |
| 18395 | EISWIPREN |
| 18396 | EKHSVENYG |
| 18397 | EKIDWQSCV |
| 18398 | EMAICAEHS |
| 18399 | EMGRLPNHN |
| 18400 | EMVDQIVDF |
| 18401 | EMYPEAAAK |
| 18402 | ENYPPSQCA |
| 18403 | EPNHPESLA |
| 18404 | EQKVGNQLS |
| 18405 | ERCMSEWSF |
| 18406 | ERWSGTRRG |
| 18407 | ERYHFMTHQ |
| 18408 | ESKYNRKYN |
| 18409 | ESRDAVCPD |
| 18410 | ETCHTYAQH |
| 18411 | ETHGDRKSR |
| 18412 | ETICCDSAH |
| 18413 | ETMGVHYCE |
| 18414 | ETRMQRRSQ |
| 18415 | ETWPLIDDA |
| 18416 | EVADCLKHF |
| 18417 | EVCNEMPEP |
| 18418 | EVELDERLS |
| 18419 | EVELYGCIC |
| 18420 | EVESQEHLH |
| 18421 | EVTRETDYM |
| 18422 | EYCMLEDYQ |
| 18423 | EYNRRYLLE |
| 18424 | EYQNYQLVT |
| 18425 | EYTRTQWAH |
| 18426 | FHHLNTPEM |
| 18427 | FIFEEQRWA |
| 18428 | FKETWLFPT |
| 18429 | FLCCPKECP |
| 18430 | FQRLEMKQH |
| 18431 | FQRWEMKQH |
| 18432 | FSGKYDQRG |
| 18433 | FSQYPSAFA |
| 18434 | FSRPFEQYH |
| 18435 | FVAQMWDDH |
| 18436 | FYRQLDEAG |
| 18437 | GASSKSLDA |
| 18438 | GDIYYKCWV |
| 18439 | GDLWNNHLE |
| 18440 | GFEDRGNQE |
| 18441 | GFMLRMSTD |
| 18442 | GFSLFMMNR |
| 18443 | GGMTVLIEY |
| 18444 | GHQLMFFKF |
| 18445 | GIKEQRRFV |
| 18446 | GIRMDLCTF |
| 18447 | GITHDFMAG |
| 18448 | GIVIKPHGE |
| 18449 | GIYPQFTWQ |
| 18450 | GKEFALSAF |
| 18451 | GLATLGLSG |
| 18452 | GLGMVHRMH |
| 18453 | GMMWRSKWI |
| 18454 | GMRCWRHRL |
| 18455 | GMRYSEWHW |
| 18456 | GMVDVCDCC |
| 18457 | GQHTIHKNS |
| 18458 | GQTVQPCST |
| 18459 | GSCCLNNET |
| 18460 | GSLTMPDAH |
| 18461 | GSYYVNWDQ |
| 18462 | GTCLQDNYN |
| 18463 | GTGWEASAD |
| 18464 | GTGWGASAD |
| 18465 | GTLSSSIVE |
| 18466 | GTNQVCLFT |
| 18467 | GVDWRHQQN |
| 18468 | GVISEGISA |
| 18469 | GVMVIAGMG |
| 18470 | GVNQYDEMI |
| 18471 | GVVQMVIGD |
| 18472 | GWMDLMSAR |
| 18473 | GYDHHGTEH |
| 18474 | HCMEYIHHA |
| 18475 | HDCEFLKDE |
| 18476 | HEVERRRAK |
| 18477 | HGMQLEAFF |
| 18478 | HHNIKEAWM |
| 18479 | HIESYMCRD |
| 18480 | HIRHRDENG |
| 18481 | HKNRLLRSV |
| 18482 | HKSRATHTG |
| 18483 | HNHILIQTS |
| 18484 | HPMDGLIQV |
| 18485 | HSEHQGRMV |
| 18486 | HSFWIAQMQ |
| 18487 | HSGIGLTMQ |
| 18488 | HSWLENSAC |
| 18489 | HVEYVQKYE |
| 18490 | HVFQVSDED |
| 18491 | HWHNVISKD |
| 18492 | IADTPDALQ |
| 18493 | IEDISKKWA |
| 18494 | IFQPCFRDW |
| 18495 | IGQSTQYCA |
| 18496 | IHQSVIQKG |
| 18497 | IISRYDNDD |
| 18498 | IKYSIDHFN |
| 18499 | IMELTHHNA |
| 18500 | INAVPWQLL |
| 18501 | IPAGMTPWC |
| 18502 | IQAPTENNN |
| 18503 | IRPMYETEE |
| 18504 | ISAPGCVFC |
| 18505 | ISDRMNYMN |
| 18506 | ISERVHQTE |
| 18507 | ISQFGANVH |
| 18508 | ISSDKKHMG |
| 18509 | ITAPRMVET |
| 18510 | ITGCIQKAK |
| 18511 | ITKWSLGNP |
| 18512 | IVRTMDNEQ |
| 18513 | IYATNIAWP |
| 18514 | IYMHKIALF |
| 18515 | IYSQIGRED |
| 18516 | KCAGWMPSS |
| 18517 | KDVEECNSL |
| 18518 | KEYPRIGRM |
| 18519 | KGSNDGADK |
| 18520 | KHQSTCGQD |
| 18521 | KMDFWAVPI |
| 18522 | KQSELGIGC |
| 18523 | KSSNYHSWP |
| 18524 | KTEQGGDAE |
| 18525 | KTTDECWHV |
| 18526 | KVEDVGDYA |
| 18527 | KVTEAAKTM |
| 18528 | KWCMFFDQH |
| 18529 | KYELSQCFG |
| 18530 | KYHQAGQLC |
| 18531 | LADSSMLWE |
| 18532 | LADVQFLYV |
| 18533 | LADWSYEAS |
| 18534 | LATDVPVSE |
| 18535 | LCFQSVHEE |
| 18536 | LCTAVFRDQ |
| 18537 | LFMHMIWGA |
| 18538 | LFNCTVWLE |
| 18539 | LFRYQRKTC |
| 18540 | LGDWAPASI |
| 18541 | LGNSFKRAR |
| 18542 | LGQQAMPLK |
| 18543 | LHFKIEQVD |
| 18544 | LHNNMNAFG |
| 18545 | LIALDMCHP |
| 18546 | LIQSYVNTG |
| 18547 | LIRAKHRTM |
| 18548 | LKKEVQRYQ |
| 18549 | LKSEVSIME |
| 18550 | LMYWKNGMS |
| 18551 | LNAWVNRHS |
| 18552 | LNHKYERMT |
| 18553 | LNKYNPHKT |
| 18554 | LQDLTQLCK |
| 18555 | LRQCPLNKL |
| 18556 | LSDQCLDLA |
| 18557 | LSNQQWYAG |
| 18558 | LSRSGHDQE |
| 18559 | LSTDNNIQF |
| 18560 | LSTMEWKTN |
| 18561 | LSTNPQHCG |
| 18562 | LTAMKKQNA |
| 18563 | LTEVKWCNC |
| 18564 | LTGYLNDMT |
| 18565 | LVDKNMFIN |
| 18566 | LVTQWVPAY |
| 18567 | LWAWSGEPK |
| 18568 | LWNDMHFHG |
| 18569 | MAGRDDGRA |
| 18570 | MAIIRLAEM |
| 18571 | MAKSSRNDQ |
| 18572 | MAPKFSSYG |
| 18573 | MASFPMFNK |
| 18574 | MCQHEQATF |
| 18575 | MCTSVTNMG |
| 18576 | MEHSTHDDD |
| 18577 | MENYQWLAP |
| 18578 | MFGCIIGDF |
| 18579 | MGSKRKPWT |
| 18580 | MGVKVDGTN |
| 18581 | MHDGYRGMQ |
| 18582 | MHHCYQTFA |
| 18583 | MHIAQMLGP |
| 18584 | MHSNLHWYG |
| 18585 | MHSPCSGPW |
| 18586 | MIDVLSWLE |
| 18587 | MIESQGDLQ |
| 18588 | MILPSMAWC |
| 18589 | MISCGGDDH |
| 18590 | MKDHWDFYG |
| 18591 | MMIGTYMGE |
| 18592 | MMNQTCCHM |
| 18593 | MMVVRGKVE |
| 18594 | MNSCNNYCM |
| 18595 | MPVERNVTP |
| 18596 | MQEDCMSGE |
| 18597 | MQNEDVPHT |
| 18598 | MQQECVDMW |
| 18599 | MQQGYGIFA |
| 18600 | MRFILLADW |
| 18601 | MSQCIVMHR |
| 18602 | MTMQDINGQ |
| 18603 | MVWNTSMDP |
| 18604 | MYTMQQSGI |
| 18605 | NAAPISHIF |
| 18606 | NCENEWRLN |
| 18607 | NCERRKSAG |
| 18608 | NCGSLPVTE |
| 18609 | NERPYEGMG |
| 18610 | NFFSLHMMS |
| 18611 | NGCECHECW |
| 18612 | NGFQTRMRV |
| 18613 | NGWMNQSAG |
| 18614 | NIQWQWMTG |
| 18615 | NLNVMFSME |
| 18616 | NQEGQGMFT |
| 18617 | NSAHIMKDG |
| 18618 | NSMHGDCQW |
| 18619 | NTCPVESAH |
| 18620 | NTDNNWTSG |
| 18621 | NTNLLEITH |
| 18622 | NTTYRTEYF |
| 18623 | NVVFKQSAH |
| 18624 | NVWVIKDIC |
| 18625 | NVYFSWMWT |
| 18626 | NWTCLMSIP |
| 18627 | NYPLQWGVE |
| 18628 | PATDQIDEC |
| 18629 | PATRVFADI |
| 18630 | PDWMDWNHY |
| 18631 | PFVKSNIAL |
| 18632 | PKQLFWYWW |
| 18633 | PLFAITTIE |
| 18634 | PLTMGHGEC |
| 18635 | PQHNCGYNN |
| 18636 | PSENNKRKK |
| 18637 | PVDWIIAAE |
| 18638 | QAIFVRQLN |
| 18639 | QCGHDHQYT |
| 18640 | QCKYSERGT |
| 18641 | QFAEKPGSW |
| 18642 | QFEGGDSMG |
| 18643 | QGTGRYAWG |
| 18644 | QGYRKLMNQ |
| 18645 | QHHTYMCIS |
| 18646 | QIMFNHQNL |
| 18647 | QIVGNQKRE |
| 18648 | QKMEMEEGS |
| 18649 | QLETFTVHN |
| 18650 | QNDVMMGNH |
| 18651 | QQSFFFGEQ |
| 18652 | QQSSMATEY |
| 18653 | QQWDVAMMC |
| 18654 | QRVDQQSLG |
| 18655 | QSEWWRRHA |
| 18656 | QSHSMMYFG |
| 18657 | QSHSTDYCS |
| 18658 | QSQPDNKGM |
| 18659 | QSQYKAECK |
| 18660 | QSSGEERGT |
| 18661 | QSSWDGQDD |
| 18662 | QSTQTSYIS |
| 18663 | QSTSDECNL |
| 18664 | QTDIWMMWA |
| 18665 | QTDSVMECT |
| 18666 | QTTHFRYFH |
| 18667 | QTTQKSEER |
| 18668 | QVDTRYMNE |
| 18669 | QVGMVAISQ |
| 18670 | QVLWANNHD |
| 18671 | QVSFEWYKC |
| 18672 | QWPLNPYGK |
| 18673 | QWRILDVVK |
| 18674 | QYAMSYAGE |
| 18675 | QYYEHEFLD |
| 18676 | RADHTIDFS |
| 18677 | RCDTSQWWQ |
| 18678 | REGWPGHKY |
| 18679 | RENLCNVPP |
| 18680 | RGGLIHFST |
| 18681 | RHLDIQNHD |
| 18682 | RHMESLNSA |
| 18683 | RIHLWENNP |
| 18684 | RLCWMTPCC |
| 18685 | RLENFHEAH |
| 18686 | RMELRMIFP |
| 18687 | RMEPLHCCE |
| 18688 | RPYPAMFKG |
| 18689 | RQHHVGNEV |
| 18690 | RQPPLKWKR |
| 18691 | RTDFLACHC |
| 18692 | RTDFLACHC |
| 18693 | RTINFSLMI |
| 18694 | RTMYWPSVN |
| 18695 | RVDFTPIVH |
| 18696 | RVGMDPRDG |
| 18697 | RWAEMHFID |
| 18698 | RWAYLEEFR |
| 18699 | SAGWDGKVC |
| 18700 | SAVNYTMFG |
| 18701 | SAYVVCSHD |
| 18702 | SCDPRHVDE |
| 18703 | SEANMAPSR |
| 18704 | SELDQYTMA |
| 18705 | SFLITAYEA |
| 18706 | SGHPRHMCY |
| 18707 | SHMPFSDMC |
| 18708 | SHMQMNWVD |
| 18709 | SHTECHTWG |
| 18710 | SIISDEYFT |
| 18711 | SITPRDEKP |
| 18712 | SKIKPADPN |
| 18713 | SLSVKFKTN |
| 18714 | SMQQAHGWK |
| 18715 | SPGSCQAFE |
| 18716 | SQNQYIKAA |
| 18717 | SREICQLEY |
| 18718 | SSPWKDFRQ |
| 18719 | SSQIKTSSF |
| 18720 | STACAESGW |
| 18721 | STHPYMLSK |
| 18722 | STHQPDCFR |
| 18723 | STMCMVRDS |
| 18724 | STTHLQYYC |
| 18725 | SVGPQLYLT |
| 18726 | SVGTWQNMG |
| 18727 | SVHKAENWW |
| 18728 | SVLMQMGSE |
| 18729 | SVTTCHMPL |
| 18730 | TADHNLFDY |
| 18731 | TADWEDQTP |
| 18732 | TATEGVWGC |
| 18733 | TCCYDQRGP |
| 18734 | TCDSNATWY |
| 18735 | TCEHRLMAT |
| 18736 | TCGTTANFE |
| 18737 | TEVATGHWG |
| 18738 | TGEYTNSWD |
| 18739 | THGCGQIMP |
| 18740 | THLSCRMWG |
| 18741 | TIGIPYSHD |
| 18742 | TKKDLDRQW |
| 18743 | TLALDCKWP |
| 18744 | TLCIREIMM |
| 18745 | TLTMMQGCS |
| 18746 | TMFAVTVKN |
| 18747 | TMGFLWYEQ |
| 18748 | TNKMLGRAP |
| 18749 | TPGRNNQGM |
| 18750 | TPIGVQKLA |
| 18751 | TPSQQAEQC |
| 18752 | TQAPIWENL |
| 18753 | TQEHSHEVS |
| 18754 | TSDVRLTEE |
| 18755 | TSGHMRNMF |
| 18756 | TSIDETELF |
| 18757 | TSIWINAVK |
| 18758 | TSQQFITAY |
| 18759 | TSSWLQCYI |
| 18760 | TSTWPGVIA |
| 18761 | TTAISLIGE |
| 18762 | TTAYSPNDR |
| 18763 | TTNLEQMIP |
| 18764 | TTQDGQMYS |
| 18765 | TTQSMQSGS |
| 18766 | TVCMFWVWC |
| 18767 | TVDPFKRIW |
| 18768 | TVEEAVWAN |
| 18769 | TVMMPMRLD |
| 18770 | TVNICLQHQ |
| 18771 | TWNCTFTGG |
| 18772 | VAHQSPNMM |
| 18773 | VAQPCGQYF |
| 18774 | VCIDHRAYS |
| 18775 | VCQQWLTQN |
| 18776 | VDYPRKCDK |
| 18777 | VGEPLAMFM |
| 18778 | VGQWFFKAG |
| 18779 | VIDCCYSCG |
| 18780 | VIEQHIQQF |
| 18781 | VKWDKKTKQ |
| 18782 | VISTIGKDS |
| 18783 | VLHRTSYKH |
| 18784 | VMEEDKRSA |
| 18785 | VMKGVDKFH |
| 18786 | VNRCCYPNY |
| 18787 | VPEHMDRDQ |
| 18788 | VQGLLIFVS |
| 18789 | VQHVRYWHS |
| 18790 | VSFPTNTMQ |
| 18791 | VSLPHSKHL |
| 18792 | VSNHWMYHL |
| 18793 | VTAWWDTAE |
| 18794 | VTEVYERST |
| 18795 | VTGESETPN |
| 18796 | VTGTMLKDA |
| 18797 | VTKMPDFAP |
| 18798 | VTQYNPKMG |
| 18799 | VTRQVIESQ |
| 18800 | VTWSTHQWL |
| 18801 | VVWDVDYYF |
| 18802 | VWDALQNPM |
| 18803 | VYVQEGNCS |
| 18804 | WAHTNMVYT |
| 18805 | WFCFEDSPS |
| 18806 | WFMCDYNGD |
| 18807 | WGWSPWKKI |
| 18808 | WKTKVENPE |
| 18809 | WWCWMAGPV |
| 18810 | WWTHKYFYL |
| 18811 | YAHEEDQNP |
| 18812 | YAWISEYEA |
| 18813 | YDVTKLGEQ |
| 18814 | YEAWKVNID |
| 18815 | YHCCWTSHP |
| 18816 | YHNIATPIP |
| 18817 | YPNTWCVVV |
| 18818 | YQGPAVLCA |
| 18819 | YRTHCFKGH |
| 18820 | YSCHFNQKT |
| 18821 | YWNGRLKWD |
| 18822 | ITISNVEND |
| 18823 | CCFPHYFVG |
| 18824 | MFELHDHQF |
| 18825 | RLCDTHKCL |
| 18826 | NNRALMSVE |
| 18827 | DSCIKGLAC |
| 18828 | MREKLVHDC |
| 18829 | TTYHHRNTL |
| 18830 | TWNTWQQDF |
| 18831 | DSASPIMGM |
| 18832 | MMAMKQGFY |
| 18833 | KACMSHQGR |
| 18834 | TIGEMVNPS |
| 18835 | NWNHCHQWR |
| 18836 | SEDKDQGAQ |
| 18837 | CAVAGGEWM |
| 18838 | NTMLSWGSP |
| 18839 | CSIRGESAF |
| 18840 | TIDWCEPHC |
| 18841 | SFSHTDLEA |
| 18842 | AIEHGAWKC |
| 18843 | TLTTDKTYS |
| 18844 | KDGRNPHCL |
| 18845 | WHCVAPNSF |
| 18846 | ACIPQMHSA |
| 18847 | NYAMRRDSY |
| 18848 | IYMSTGNTP |
| 18849 | GYRNYFIWP |
| 18850 | MFTPCQEGL |
| 18851 | GSTWGASWH |
| 18852 | GQFRSGAYR |
| 18853 | VYILEGGIH |
| 18854 | NTQVISRWT |
| 18855 | CYMNFIVDG |
| 18856 | NHKMVQDAL |
| 18857 | DVYMAVVGS |
| 18858 | GITMHPMHH |
| 18859 | QMTSSTNCA |
| 18860 | MHGIARMQQ |
| 18861 | RVWSLEWHL |
| 18862 | EVYCYQLQS |
| 18863 | QENDERIWY |
| 18864 | AMTRCKAGH |
| 18865 | KPLASIGQY |
| 18866 | GAANRIQSW |
| 18867 | GHMFETFWG |
| 18868 | EAQPSEING |
| 18869 | ECLEVKRTC |
| 18870 | FGDHLRVMY |
| 18871 | WTHCTNNQI |
| 18872 | NAYYDSHCE |
| 18873 | EKYQIHWDR |
| 18874 | QALVGNAAE |
| 18875 | QSSSSYLWG |
| 18876 | LESVKMDCN |
| 18877 | QRSVFHQRS |
| 18878 | NDVWQPHPN |
| 18879 | EDQWISNPF |
| 18880 | DHLSNDAEM |
| 18881 | LHKAYVTDS |
| 18882 | AVDHYSNGA |
| 18883 | DMKQKAEYT |
| 18884 | IMYLKRCCT |
| 18885 | DQRHGNVSP |
| 18886 | RVTIMFTGT |
| 18887 | TTYPHNTHG |
| 18888 | PPRFLQTTG |
| 18889 | YPTMTFPEE |
| 18890 | GCEEVGRCQ |
| 18891 | MAAITQNVA |
| 18892 | WPTILSAHM |
| 18893 | KCLPYMEMF |
| 18894 | AHAWLQHWA |
| 18895 | PDLWYEKSS |
| 18896 | DTRRNLCCD |
| 18897 | LIEKQRWML |
| 18898 | ENQSTMSHT |
| 18899 | QWMHCQLSR |
| 18900 | ICHIRTRGN |
| 18901 | YISEYVMMV |
| 18902 | QATGMHRWQ |
| 18903 | MFMTNVNSF |
| 18904 | KTVETYAAH |
| 18905 | HIKVEHEEV |
| 18906 | KMAGIGCWY |
| 18907 | QCTAHNTCM |
| 18908 | RTRISQMFG |
| 18909 | MGYAKHDSH |
| 18910 | PIWQGYWPW |
| 18911 | RCGEIMGLD |
| 18912 | LPSHCNLGS |
| 18913 | PAHINDQYM |
| 18914 | DRVNLMWKD |
| 18915 | QCVDCPPYC |
| 18916 | AVHTADVCC |
| 18917 | NQREWHGLA |
| 18918 | HIHMSDRGA |
| 18919 | PCCWEQSTN |
| 18920 | AFLHGQMWQ |
| 18921 | PLTIEVNCT |
| 18922 | IAKIGNCVW |
| 18923 | YFPSIQCYE |
| 18924 | NMPSLRTRI |
| 18925 | CKNHYMMAA |
| 18926 | SECEVLCSL |
| 18927 | ERQAHNHYA |
| 18928 | ERFHSYPLG |
| 18929 | MAEQMERDF |
| 18930 | DQEAWVVTG |
| 18931 | ACVERLHHK |
| 18932 | NHSLCWDSK |
| 18933 | MYDTMGAWC |
| 18934 | QRNEMSASR |
| 18935 | GHLENNNEW |
| 18936 | MLPLEMKNL |
| 18937 | ATGTYNLQE |
| 18938 | YVDHWTLGD |
| 18939 | IAQSEADYW |
| 18940 | LINSIVCGD |
| 18941 | LVQKWMRTC |
| 18942 | AAMESCAFI |
| 18943 | DMTLQSVSS |
| 18944 | AEDTPYTIY |
| 18945 | HFQPVFMQP |
| 18946 | LSPWPQTDQ |
| 18947 | AGMYKCQED |
| 18948 | PHAETHWYT |
| 18949 | YPDTADIFW |
| 18950 | VTMIHNAFH |
| 18951 | DLIVATEWF |
| 18952 | HSMMPGWPS |
| 18953 | IWITCPYAA |
| 18954 | PYGPIEYDE |
| 18955 | ATMNLSWGL |
| 18956 | NGVGRSGDN |
| 18957 | RCADNPYFR |
| 18958 | WERCLELNQ |
| 18959 | SNVACIQAF |
| 18960 | INYISFVDR |
| 18961 | LEIGGKTRT |
| 18962 | YDYWMQAPT |
| 18963 | QSAHPEPMC |
| 18964 | ASMHEETCL |
| 18965 | DMIDPVRHG |
| 18966 | ADRSNSSCF |
| 18967 | AEYSTNLHS |
| 18968 | AFSYCMAHM |
| 18969 | AIDYKTDWT |
| 18970 | AKACHLWGK |
| 18971 | ALQMAYEWS |
| 18972 | ANDIAEHWG |
| 18973 | ANVCIITHC |
| 18974 | APFMMQCFS |
| 18975 | APYPSWPTY |
| 18976 | AQWRIMFEA |
| 18977 | ARDCWWSDG |
| 18978 | ARDRPHRGS |
| 18979 | ASCRCLNWH |
| 18980 | ASQRSGRQP |
| 18981 | ATEHVRSWW |
| 18982 | ATIMFIEIS |
| 18983 | ATKCVLGLG |
| 18984 | ATMYMERAD |
| 18985 | ATYEHSCTK |
| 18986 | AVNHAQCGF |
| 18987 | CARLGGRGN |
| 18988 | CCTELNMSG |
| 18989 | CFEFLWEHE |
| 18990 | CLVRIQKDH |
| 18991 | CQAIINADT |
| 18992 | CSTMPKLPE |
| 18993 | CTMSPGYDQ |
| 18994 | CVVMAVDNT |
| 18995 | CWGWAPPDD |
| 18996 | CWPQSCKPE |
| 18997 | DGENMDEMA |
| 18998 | DIGRFEAYY |
| 18999 | DIKLVEAYA |
| 19000 | DKDEFQMAP |
| 19001 | DNDMYHSMQ |
| 19002 | DNNFKDKEE |
| 19003 | DSFYPQLQN |
| 19004 | DSQLESTLA |
| 19005 | DTINWIASQ |
| 19006 | DTLKSDNYI |
| 19007 | DTRGKAFFP |
| 19008 | DVITVYWDS |
| 19009 | DVTDDQIHM |
| 19010 | DVVKSWQMG |
| 19011 | DYSLLWMYE |
| 19012 | ECAFEHVDE |
| 19013 | ECMQYFPEW |
| 19014 | EDRLIVRMD |
| 19015 | EHITEQDLW |
| 19016 | EIGMEYGHS |
| 19017 | EINNAIASR |
| 19018 | EIQQMCVKW |
| 19019 | EIYMCKEGN |
| 19020 | EMSWKMKPT |
| 19021 | ENHPPWLHC |
| 19022 | ERDSLWFGK |
| 19023 | ESPQIHIYS |
| 19024 | ETVQDVGLH |
| 19025 | EVSWVPTTK |
| 19026 | EVVNSQFNL |
| 19027 | EYEWVDEPQ |
| 19028 | EYFKLRQFG |
| 19029 | EYSNETHQE |
| 19030 | FEADNTMVH |
| 19031 | FGHFEIKKM |
| 19032 | FIKLTTLPS |
| 19033 | FLEAMQRTP |
| 19034 | FLQYSMSGN |
| 19035 | FMDECLRVD |
| 19036 | FNSSEQQQM |
| 19037 | FSHKESVWC |
| 19038 | FTHWVNEQL |
| 19039 | FVKVVWGHK |
| 19040 | GDNMDQTQG |
| 19041 | GFKKFHFTF |
| 19042 | GKERFHRID |
| 19043 | GMSLKNYEE |
| 19044 | GNYHLDQDE |
| 19045 | GPNGDVARY |
| 19046 | GQQTMEMSY |
| 19047 | GTMHALKDE |
| 19048 | GTQSERDIQ |
| 19049 | GVEFVPIGN |
| 19050 | HCIFKDPKI |
| 19051 | HEVDRPAPC |
| 19052 | HITNYGYCG |
| 19053 | HNPATECRC |
| 19054 | HPLTQMVLE |
| 19055 | HPLTQMVLG |
| 19056 | HRRRAKVWV |
| 19057 | HTRYWGFAL |
| 19058 | IAGMHEFQQ |
| 19059 | IFILIEWHH |
| 19060 | IKTITYHST |
| 19061 | ILWSQHEVL |
| 19062 | ENISTPVNC |
| 19063 | ISHQCHQIH |
| 19064 | ISTQMSWDG |
| 19065 | ITFCCRAAK |
| 19066 | ITQYTTYEG |
| 19057 | IVAEHDPGF |
| 19068 | IVMPALMCK |
| 19069 | IYKLFQHGM |
| 19070 | IYRLFQHGM |
| 19071 | KADNRNWSC |
| 19072 | KAQPSEENG |
| 19073 | KCLPYMKMF |
| 19074 | KCTAEKAQC |
| 19075 | KCTVEKAQC |
| 19076 | KEREERRFW |
| 19077 | KKYFPTGIG |
| 19078 | KLDYHGVRQ |
| 19079 | KMVQVEHYT |
| 19080 | KVMTAEIAD |
| 19081 | LACACQDAP |
| 19082 | LDGSCYHWG |
| 19083 | LKATCTAMD |
| 19084 | LTTVYNWQH |
| 19085 | LVEMGCEPR |
| 19086 | LWTMDTVRP |
| 19087 | LYVGWMNCL |
| 19088 | MCYHTGHFA |
| 19089 | MGGMIVMCQ |
| 19090 | MHCRTFSHN |
| 19091 | MHMRTNEGS |
| 19092 | MILTEGIIE |
| 19093 | MLHMMPWID |
| 19094 | MMAMKQRFY |
| 19095 | MMGGKFGTT |
| 19096 | MNNEVWKAS |
| 19097 | MNQHWPPQI |
| 19098 | MPLSMKAKK |
| 19099 | MSDTMDMGE |
| 19100 | MSIMCCSDC |
| 19101 | MSNVCICTG |
| 19102 | MTGHNESFT |
| 19103 | MTVAGQSRD |
| 19104 | MTWTRNSGT |
| 19105 | MVDREKKKE |
| 19106 | MVSSETGSH |
| 19107 | MWKRHCGMG |
| 19108 | MWMQMLSAM |
| 19109 | MYCLEFMND |
| 19110 | MYTGMRCWH |
| 19111 | NAPNDLKNY |
| 19112 | NASCQYRGA |
| 19113 | NASCQYRGV |
| 19114 | NATHMYNAH |
| 19115 | NGCIVAEAA |
| 19116 | NGYIVHACQ |
| 19117 | NGYQARTKS |

TABLE 78
Sequences of the 581 to 589 Region in AAV5
VP1 Capsid Polypeptide that Drive Lymph
Node Tissue Tropism

| SEQ | 581-589 |
|---|---|
| ID NO | sequence |
| 21118 | AVDCHNSWI |
| 21119 | VQQYHITQE |
| 21120 | AAAKWDDVW |
| 21121 | AACKEKRNN |
| 21122 | AACTMAVAR |
| 21123 | AACYDVNKA |
| 21124 | AADLKGYIG |
| 21125 | AAELNSSQS |
| 21126 | AAENCQCPF |
| 21127 | AAEWKVGQA |
| 21128 | AAGEEWSAL |
| 21129 | AAMSCADAS |
| 21130 | AANESTHDC |
| 21131 | AAPYLTGRD |
| 21132 | AASPITVLK |
| 21133 | AASQMMNHG |
| 21134 | AATMNGQCM |
| 21135 | AAVGYFHTS |
| 21136 | AAVMESFWR |
| 21137 | AAVMSLCTV |
| 21138 | ACATTNFYD |
| 21139 | ACDPSHKHQ |
| 21140 | ACDPYSINF |
| 21141 | ACETWQWRE |
| 21142 | ACEWWFNKE |
| 21143 | ACIMQMTQD |
| 21144 | ACKLLDSHL |
| 21145 | ACMPICMSA |
| 21146 | ACTYRMTWH |
| 21147 | ACVDLVVDK |
| 21148 | ACVKHLYDW |
| 21149 | ADAWETPYP |
| 21150 | ADCHTQNVA |
| 21151 | ADCRYNLAC |
| 21152 | ADCSDQMSQ |
| 21153 | ADFDGILWY |
| 21154 | ADIQFARMP |
| 21155 | ADLDINQYW |
| 21156 | ADLHKRHNW |
| 21157 | ADNLTPHQW |
| 21158 | AEHKWPEEL |
| 21159 | AEQFVDVAG |
| 21160 | AESPVAYQQ |
| 21161 | AEWVEQAVH |
| 21162 | AFEHQYCHL |
| 21163 | AFEIVHGAN |
| 21164 | AFETLRNVK |
| 21165 | AFGEFVILA |
| 21166 | AFGHFPGIG |
| 21167 | AFHMMEKWE |
| 21168 | AFISKWVHP |
| 21169 | AFITQVPWY |
| 21170 | AFMNTYVAD |
| 21171 | AFMPWMHTY |
| 21172 | AFMQTICDM |
| 21173 | AFQYSNQAH |
| 21174 | AFRDISKMI |
| 21175 | AFRLLGYSY |
| 21176 | AFRNFTHCP |
| 21177 | AFSLNNCTH |
| 21178 | AFTCCGYEN |
| 21179 | AGDQKYVGC |
| 21180 | AGEEYTTDF |
| 21181 | AGEITKSMF |
| 21182 | AGHRDRAET |
| 21183 | AGLYLTNED |
| 21184 | AGNAMDFCF |
| 21185 | AGNEVQTMP |
| 21186 | AGQYKLIFW |
| 21187 | AGYCSQWRF |
| 21188 | AHAECKFWS |
| 21189 | AHAKWWDYQ |
| 21190 | AHALNEWYA |
| 21191 | AHAMVVNQG |
| 21192 | AHCYVLRHE |
| 21193 | AHELSYSLP |
| 21194 | AHFDYDIFW |
| 21195 | AHGLFMCMN |
| 21196 | AHHEVCWQH |
| 21197 | AHHLQICHT |
| 21198 | AHLWVQGSH |
| 21199 | AHMHTHAIM |
| 21200 | AHNQINDNL |
| 21201 | AHPHFEENG |
| 21202 | AHSWWHRAE |
| 21203 | AIAECIGFT |
| 21204 | AICQLLGDF |
| 21205 | AIEPKEDWM |
| 21206 | AIGHGENYR |
| 21207 | AIHETIAGT |
| 21208 | AIHYLWQDQ |
| 21209 | AIMPVRDGQ |
| 21210 | AIPCEMNAN |
| 21211 | AIQLSQDLM |
| 21212 | AISVMHYDM |
| 21213 | AITDTSCCN |
| 21214 | AITTQGDFY |
| 21215 | AITYQGQGV |
| 21216 | AIVPITFNM |
| 21217 | AIVYKNWAK |
| 21218 | AIWRANEST |
| 21219 | AIYSLDFEQ |
| 21220 | AKFFPHTNT |
| 21221 | AKGLNLDIM |
| 21222 | AKHLFDAAP |
| 21223 | AKHRCMSEW |
| 21224 | AKMWECNPK |
| 21225 | AKNSLYNYH |
| 21226 | AKYWNPELQ |
| 21227 | ALHWWQCLT |
| 21228 | ALINQPDSA |
| 21229 | ALMMYFENQ |
| 21230 | ALTEQCVYG |
| 21231 | ALVLWDMLH |
| 21232 | AMAGPQFSA |
| 21233 | AMAHKGMDA |
| 21234 | AMAQPVKCA |
| 21235 | AMHITQYKT |
| 21236 | AMHQNIFGI |
| 21237 | AMQQWVSGC |
| 21238 | AMQQWVSGC |
| 21239 | AMSLQYKNE |
| 21240 | AMTSRGSYP |
| 21241 | AMVFNMQLG |
| 21242 | AMVSSWLVG |
| 21243 | AMYVMYHGM |
| 21244 | ANDCRGMSE |
| 21245 | ANDLLTMQF |
| 21246 | ANFGSHAAM |
| 21247 | ANHFESSRS |
| 21248 | ANHPNMLIP |
| 21249 | ANMIRKGYG |
| 21250 | ANSFEVCGM |
| 21251 | ANSYYHQYC |
| 21252 | ANVEQAMCA |
| 21253 | ANVPMFRMD |
| 21254 | ANYFPTKFP |
| 21255 | APGCVNQLH |
| 21256 | APLTSYPTL |
| 21257 | APPVFYMPQ |
| 21258 | APTVINMLK |
| 21259 | APWQFNHQW |
| 21260 | AQCPMTWSL |
| 21261 | AQEVTITHE |
| 21262 | AWLLLIVMA |
| 21263 | AQRADWTYL |
| 21264 | AQWPLHRDT |
| 21265 | AQYGRNFAG |
| 21266 | ARMQEPIQV |
| 21267 | ARNANCPRM |
| 21268 | ARQINEHQE |
| 21269 | ARVDDGQMT |
| 21270 | ASANNPVFF |
| 21271 | ASASYEGEQ |
| 21272 | ASAVAKEWD |
| 21273 | ASDGEEKPC |
| 21274 | ASDHLNPFV |
| 21275 | ASDPWNWWP |
| 21276 | ASGWIQLMC |
| 21277 | ASMAYLKGE |
| 21278 | ASNFHSGLY |
| 21279 | ASNFVMEFP |
| 21280 | ASNKICNFK |
| 21281 | ASREEVKHP |
| 21282 | ASTHASESQ |
| 21283 | ASTSQCQFQ |
| 21284 | ASTTIGQEM |
| 21285 | ASVELGGYS |
| 21286 | ASVKDFTVQ |
| 21287 | ASYGDGPMW |
| 21288 | ATAEGEDCT |
| 21289 | ATECAWYHG |
| 21290 | ATFICLTSI |
| 21291 | ATHEYASWD |
| 21292 | ATHPVMLDA |
| 21293 | ATICSGWDR |
| 21294 | ATEGWERYN |
| 21295 | ATEMVCRFE |
| 21296 | ATKELAVQW |
| 21297 | ATKLDFHPT |
| 21298 | ATLTFQQHH |
| 21299 | ATMLRKEVW |
| 21300 | ATMSPECMR |
| 21301 | ATNWEGEDS |
| 21302 | ATNYVTNHD |
| 21303 | ATRVGGSTW |
| 21304 | ATSAHSCSS |
| 21305 | ATSENCNAW |
| 21306 | ATVDYWQAW |
| 21307 | ATWTDSWKV |
| 21308 | ATYCEQYMY |
| 21309 | AVAGVVWDN |
| 21310 | AVAMGGQDD |
| 21311 | AVANWFQHM |
| 21312 | AVCEGEITP |
| 21313 | AVCSKELDH |
| 21314 | AVDHMAMES |
| 21315 | AVDQINMEQ |
| 21316 | AVELSMRAV |
| 21317 | AVEPYCSML |
| 21318 | AVESTAIES |
| 21319 | AVEHQGSGA |
| 21320 | AVITWSQYH |
| 21321 | AVKPSVEPW |
| 21322 | AVMPQGHYG |
| 21323 | AVMTAQGWV |
| 21324 | AVNPFPCQT |
| 21325 | AVQSGIETC |
| 21326 | AVSAAMQMD |
| 21327 | AVSDKPYQH |
| 21328 | AVSFYQYGC |
| 21329 | AVTHKWCEE |
| 21330 | AVTILLYPI |
| 21331 | AWAKDVMQC |
| 21332 | AWVISQNEN |
| 21333 | AYASSQDSL |
| 21334 | AYENTFPNP |
| 21335 | AYEPFWCWG |
| 21336 | AYHHVDYHW |
| 21337 | AYNQNIGTG |
| 21338 | AYYDLFNQC |
| 21339 | CADFMVSWG |
| 21340 | CADWCNTQP |
| 21341 | CADYQYQQD |
| 21342 | CAIGYWEHD |
| 21343 | CAMMDDRGD |
| 21344 | CAQLFWLPQ |
| 21345 | CASDLMENR |
| 21346 | CASDSLVNG |
| 21347 | CAVNWNVKE |
| 21348 | CAVQFNYCV |
| 21349 | CAYQAMDFF |
| 21350 | CCCNRCHEY |
| 21351 | CCFSTFECY |
| 21352 | CCGDTRCET |
| 21353 | CCGLPARLL |
| 21354 | CCERSFVCA |
| 21355 | CCKTYQRAG |
| 21356 | CCMTYNNQG |
| 21357 | CCPGNGDEW |
| 21358 | CCPMRHANF |
| 21359 | CCSGNTGMY |
| 21360 | CDHGCWCKG |
| 21361 | CDHVVCMAP |
| 21362 | CDWAAYHCW |
| 21363 | CEGIQVVDF |
| 21364 | CEVTINGAE |
| 21365 | CFAELSNVA |
| 21366 | CGDHYRKGH |
| 21367 | CGHLQQFIL |
| 21368 | CGIGVNMHH |
| 21369 | CGIWNNNAF |
| 21370 | CGRQMEDAA |
| 21371 | CGTQSFIWG |
| 21372 | CGWCGLSKI |
| 21373 | CHAIFCRCA |
| 21374 | CHDGSFNPH |
| 21375 | CHGQYVTWG |
| 21376 | CHHRMHRAQ |
| 21377 | CHMGINRLN |
| 21378 | CHSPFNHWG |
| 21379 | CHWYCSKVP |
| 21380 | CIDEGVSPD |
| 21381 | CIETSDQER |
| 21382 | CIEYTPMGR |
| 21383 | CIGFYMCAG |
| 21384 | CIGVINGMN |
| 21385 | CIHYVQHCQ |
| 21386 | CIILRSNDG |
| 21387 | CILCQPHKW |
| 21388 | CIWKNVPPW |
| 21389 | CKDAYRSHA |
| 21390 | CKFMYLMKE |
| 21391 | CKLTMKRQN |
| 21392 | CKSTHDMAW |
| 21393 | CLHCGTFST |
| 21394 | CLHCHSLQC |
| 21395 | CLMLQSHHT |
| 21396 | CLRAVDNCF |
| 21397 | CMQSESMYC |
| 21398 | CNATWGVFA |
| 21399 | CNAVKNNDM |
| 21400 | CNEVYTHIH |
| 21401 | CNNYSMVHR |
| 21402 | CNNYSMVHR |
| 21403 | CNRLHDTWT |
| 21404 | CNRSEIQFR |
| 21405 | CNVERDPYL |
| 21406 | CPCFYINYP |
| 21407 | CPETRHVVH |
| 21408 | CPKDCRIVI |
| 21409 | CPLSWIQQE |
| 21410 | CPQPSNRTW |
| 21411 | CPQQIQHYN |
| 21412 | CPTEVREKK |
| 21413 | CQGFGVPWD |
| 21414 | CQHLHTSYW |
| 21415 | CQKALMQLG |
| 21416 | CQTCLQFCD |
| 21417 | CQVEFQMTT |
| 21418 | CRDHYDRSC |
| 21419 | CRFEHQYNC |
| 21420 | CRKLQSIEA |
| 21421 | CRTNGHYYM |
| 21422 | CRVEPVDSD |
| 21423 | CSACTPFSK |
| 21424 | CSADMNSMP |
| 21425 | CSADMQQDI |
| 21426 | CSDASHHFG |
| 21427 | CSEAEGDWY |
| 21428 | CSFNVMNTA |
| 21429 | CSKPDCQWD |
| 21430 | CSMQNNRMY |
| 21431 | CSMYYCWTG |
| 21432 | CSNSQDFGA |
| 21433 | CSTEMQMNC |
| 21434 | CSYQRTEYF |
| 21435 | CTATPEIIH |
| 21436 | CTEININQG |
| 21437 | CTFVRELQC |
| 21438 | CTGDVDQSE |
| 21439 | CTGLAQHWW |
| 21440 | CTGQRHASP |
| 21441 | CTHHYMEQH |
| 21442 | CTKHMDGQA |
| 21443 | CTNDWCRSD |
| 21444 | CTNLISSYC |
| 21445 | CTQVIEECP |
| 21446 | CTTYQDEMN |
| 21447 | CTWWIPLVY |
| 21448 | CTYTELQYM |
| 21449 | CVDQLSLGH |
| 21450 | CVHAISCVG |
| 21451 | CVIGRWLYM |
| 21452 | CVISMAYQW |
| 21453 | CVLKYNHHY |
| 21454 | CVMMQAGGE |
| 21455 | CVSYSGQHD |
| 21456 | CVVNAHQMR |
| 21457 | CVVRAQSAM |
| 21458 | CVVTMSMSD |
| 21459 | CWMFPDYWN |
| 21460 | CWMSFSAYE |
| 21461 | CYESTEGEH |
| 21462 | CYHEYCCNM |
| 21463 | CYKYGPPSQ |
| 21464 | CYMVFMFKA |
| 21465 | CYQDIEAGY |
| 21466 | CYQFKKLTN |
| 21467 | CYQSEKNGY |
| 21468 | CYSGVAMAS |
| 21469 | CYVTKSWDH |
| 21470 | CYWFMYKPK |
| 21471 | DAAQTEQYP |
| 21472 | DAAYSNWFF |
| 21473 | DACKESSNI |
| 21474 | DADEPWLDR |
| 21475 | DADRAIMHE |
| 21476 | DAEDCHTHK |
| 21477 | DAEGQVCYM |
| 21478 | DAETVDSQF |
| 21479 | DAFLEQELC |
| 21480 | DAGKPQYSI |
| 21481 | DAHDYDSNF |
| 21482 | DAHNYWGWQ |
| 21483 | DAHWVEKTN |
| 21484 | DAIPYKQPT |
| 21485 | DAKFCGQGH |
| 21486 | DALYEMGTT |
| 21487 | DAMPSDRWW |
| 21488 | DANFTMMTD |
| 21489 | DANNKKYHV |
| 21490 | DARHYFGLQ |
| 21491 | DARPDYEMQ |
| 21492 | DARTIVLTH |
| 21493 | DASDCCYSY |
| 21494 | DASLWSVPM |
| 21495 | DASMHGTVP |
| 21496 | DASPTRLVY |
| 21497 | DASVNRVIE |
| 21498 | DATKIPMQQ |
| 21499 | DATQNHFQY |
| 21500 | DAVDVAMAM |
| 21501 | DAVYYLFQA |
| 21502 | DAWHSTCNS |
| 21503 | DAYYDHRGC |
| 21504 | DCGWLAYEW |
| 21505 | DCKCPQPDL |
| 21506 | DCPWKAFHA |
| 21507 | DCRGLSSIF |
| 21508 | DCSVFWIGA |
| 21509 | DCTFTQQQW |
| 21510 | DDKPWVIMA |
| 21511 | DDLQPMERT |
| 21512 | DDVNGAVIM |
| 21513 | DDVNKMRKE |
| 21514 | DDVWMWQWV |
| 21515 | DDYKKWRHP |
| 21516 | DDYKPHCKF |
| 21517 | DECYNLFTV |
| 21518 | DEDDYNMPY |
| 21519 | DEHLITMQT |
| 21520 | DEQWSPYTI |
| 21521 | DEYVPEAYF |
| 21522 | DFAACQDYL |
| 21523 | DEAFENWMG |
| 21524 | DFAWQECWC |
| 21525 | DFEKVSEQA |
| 21526 | DFGCQEQMT |
| 21527 | DFGPRCCFG |
| 21528 | DFGVQKSNE |
| 21529 | DFHDQYVID |
| 21530 | DFEWQQCSN |
| 21531 | DFIEGTREG |
| 21532 | DFSRMAGGP |
| 21533 | DFTAFKNDM |
| 21534 | DGCPSGNWP |
| 21535 | DGELGKEDI |
| 21536 | DGEDFEKIG |
| 21537 | DGGFQQAEW |
| 21538 | DGHSDLLLS |
| 21539 | DGKHLDTDP |
| 21540 | DGKKTMHET |
| 21541 | DGQLHMFYA |
| 21542 | DGSGSEWHR |
| 21543 | DGTADDKRY |
| 21544 | DGTETIYNM |
| 21545 | DGTYANHMG |
| 21546 | DGTYKCPEP |
| 21547 | DHCNFMAPY |
| 21548 | DHDWLQNMG |
| 21549 | DHEVVQNMP |
| 21550 | DHKLIQMHT |
| 21551 | DHLICQNGP |
| 21552 | DHMWVNWSQ |
| 21553 | DHPFNVKQE |
| 21554 | DHQLTMEGM |
| 21555 | DHSMYATQE |
| 21556 | DECDKNHEG |
| 21557 | DIEFDITCD |
| 21558 | DEGEFWTAH |
| 21559 | DIHRFAEQF |
| 21560 | DIHVITKGI |
| 21561 | DIKQHQLWG |
| 21562 | DILDVVKQG |
| 21563 | DIMINDLYS |
| 21564 | DIQHLTESG |
| 21565 | DIQQHNIAA |
| 21566 | DEQVPLAYR |
| 21567 | DIRRMVASL |
| 21568 | DISMESWMP |
| 21569 | DITETQCGS |
| 21570 | DIYYSMRGR |
| 21571 | DKACMLWDS |
| 21572 | DKCAIEFAS |
| 21573 | DKGALEFWI |
| 21574 | DKGEWQCYK |
| 21575 | DKGFIQHVA |
| 21576 | DKMTLPFSP |
| 21577 | DKPCSICGC |
| 21578 | DKRWSANQW |
| 21579 | DKWPPLEPH |
| 21580 | DLAWQYQPA |
| 21581 | DLEDAHVGL |
| 21582 | DLHGEGVLA |
| 21583 | DLEAGNWPA |
| 21584 | DLPSPRRED |
| 21585 | DLRVNHWHH |
| 21586 | DLVCAQWRE |
| 21587 | DMAAFHYAG |
| 21588 | DMAANHTFP |
| 21589 | DMALYHSNV |
| 21590 | DMDCYTMME |
| 21591 | DMDSPFPWD |
| 21592 | DMDTYYGHG |
| 21593 | DMFTFAHNS |
| 21594 | DMGFVNRHE |
| 21595 | DMIHYPLYG |
| 21596 | DMLMLVTHD |
| 21597 | DMMGFWDKP |
| 21598 | DMNELAWAY |
| 21599 | DMRVGNGYF |
| 21600 | DMSVIQDGA |
| 21601 | DMTRNPEWE |
| 21602 | DNAACIEMS |
| 21603 | DNAEMNSFD |
| 21604 | DNCYSCEAT |
| 21605 | DNEGWLMAE |
| 21606 | DNEVWLSAV |
| 21607 | DNHALEFDC |
| 21608 | DNMQRKWAG |
| 21609 | DNQIRSIRS |
| 21610 | DNQSKESQA |
| 21611 | DNSDFKWHW |
| 21612 | DNVPYCYYQ |
| 21613 | DNYINQEAA |
| 21614 | DPAHTTKIC |
| 21615 | DPDRTPSQH |
| 21616 | DPEEHNNYG |
| 21617 | DPEFQQWTH |
| 21618 | DPIDEVNAQ |
| 21619 | DPNRIDNQY |
| 21620 | DPSEVRARV |
| 21621 | DQCFMTYDT |
| 21622 | DQDNPSCWL |
| 21623 | DQEPNWNGV |
| 21624 | DQFDSHSQG |
| 21625 | DQGCKLRRC |
| 21626 | DQGMGSCKD |
| 21627 | DQHGASTVF |
| 21628 | DQIPMKSMM |
| 21629 | DQKMYVDED |
| 21630 | DQKSVQCYE |
| 21631 | DQLEGGESN |
| 21632 | DQLGLRDNT |
| 21633 | DQQPALDAQ |
| 21634 | DQWSILTES |
| 21635 | DRAKECQCE |
| 21636 | DRLQCDECS |
| 21637 | DRNTAMTGG |
| 21638 | DRQINWQQE |
| 21639 | DRSDKGCLY |
| 21640 | DRSVHVRAS |
| 21641 | DRVEERAYG |
| 21642 | DRYLFTHWH |
| 21643 | DRYQWAKRH |
| 21644 | DSALQFIDR |
| 21645 | DSAMFGQYK |
| 21646 | DSANVGWCT |
| 21647 | DSAPGKMWP |
| 21648 | DSAPLQSQL |
| 21649 | DSAPPPNVI |
| 21650 | DSDEGSEHI |
| 21651 | DSDLYEGWM |
| 21652 | DSEWLHWHA |
| 21653 | DSGFAMWTP |
| 21654 | DSHFYDQWQ |
| 21655 | DSHPIAHGE |
| 21656 | DSMKGTMFQ |
| 21657 | DSMMHDCHF |
| 21658 | DSMNGVEAS |
| 21659 | DSNEEQRQG |
| 21660 | DSPEQFGLD |
| 21661 | DSQHTAGWP |
| 21662 | DSQLIKQWM |
| 21663 | DSQPMFACV |
| 21664 | DSREAVAVD |
| 21665 | DSRQDHWFE |
| 21666 | DSVHSYEQK |
| 21667 | DSVPNLKAY |
| 21668 | DSYPNQACT |
| 21669 | DTCTTCVSL |
| 21670 | DTCVTAANH |
| 21671 | DTDTRCIPC |
| 21672 | DTEGDHREG |
| 21673 | DTELSMVEP |
| 21674 | DTFFHGAFE |
| 21675 | DTGIWAYVG |
| 21676 | DTHRIIMDD |
| 21677 | DTILEQYGP |
| 21678 | DTIQWDQGI |
| 21679 | DTKMVPYMP |
| 21680 | DTKPENNWI |
| 21681 | DTMHCLSCD |
| 21682 | DTMPTMDLM |
| 21683 | DTQWQEWCE |
| 21684 | DTRDNWLIR |
| 21685 | DTRTPAVWP |
| 21686 | DTSQTSNNT |
| 21687 | DTSRCLAYW |
| 21688 | DTWILDFEV |
| 21689 | DTYAEIMYG |
| 21690 | DTYPLVIGS |
| 21691 | DVAMTSLIA |
| 21692 | DVCDSIGYC |
| 21693 | DVCEQRNWL |
| 21694 | DVDDSQCEY |
| 21695 | DVDDWFHQS |
| 21696 | DVDHICEGH |
| 21697 | DVDMDTNRG |
| 21698 | DVENHYMGS |
| 21699 | DVEPMKNDF |
| 21700 | DVESRYDCG |
| 21701 | DVFCMLASH |
| 21702 | DVFIQQAYS |
| 21703 | DVFMGARFE |
| 21704 | DVFPCQKTE |
| 21705 | DVFQCEELS |
| 21706 | DVGFNRISR |
| 21707 | DVGIQHRPL |
| 21708 | DVGLFHGGF |
| 21709 | DVGPQKNIV |
| 21710 | DVHMADGNN |
| 21711 | DVILTYDRA |
| 21712 | DVIRTHDGV |
| 21713 | DVKCMQNTF |
| 21714 | DVKGNNGGG |
| 21715 | DVKIVWSGE |
| 21716 | DVKLAGMIH |
| 21717 | DVKPAMNQA |
| 21718 | DVKPGWMGD |
| 21719 | DVKWMESWL |
| 21720 | DVKYLTHQW |
| 21721 | DVLLLEHER |
| 21722 | DVLTNLNGF |
| 21723 | DVNFVGEPE |
| 21724 | DVNSYKLYG |
| 21725 | DVQTIRMEH |
| 21726 | DVRERDSDD |
| 21727 | DVRTEPTIT |
| 21728 | DVRTVTQHG |
| 21729 | DVSQSDWQP |
| 21730 | DVTAQRAWK |
| 21731 | DVTAYSESI |
| 21732 | DVTEDVVSP |
| 21733 | DVTENREVW |
| 21734 | DVTIYWNDY |
| 21735 | DVTLNEGVV |
| 21736 | DVTPEDACV |
| 21737 | DVVALQASK |
| 21738 | DVVANLTSS |
| 21739 | SVVEQFHWT |
| 21740 | DVVIVDCAN |
| 21741 | DVVVSQMAM |
| 21742 | DVWAQSQVL |
| 21743 | DVWLQIDGQ |
| 21744 | DVWWVEGEY |
| 21745 | DWASPKSYV |
| 21746 | DWCMSMVWT |
| 21747 | DWDQQRQYF |
| 21748 | DWGAMWVCG |
| 21749 | DWGHRIFEH |
| 21750 | DWHHPPVDH |
| 21751 | DWKPIYEAS |
| 21752 | DWPIRSAPI |
| 21753 | DYCTGACDC |
| 21754 | DYDVASFYH |
| 21755 | DYEGPIRPN |
| 21756 | DYEHYWHET |
| 21757 | DYKLHPIGY |
| 21758 | DYKMDVMPC |
| 21759 | DYNMMHWAA |
| 21760 | DYQRCTFLP |
| 21761 | EACSNSHEK |
| 21762 | EADCVHRVW |
| 21763 | EADVSLMHC |
| 21764 | EAEAEVIIR |
| 21765 | EAECTWASL |
| 21766 | EAELKTNFM |
| 21767 | EAESGGAYK |
| 21768 | EAEYRNWNP |
| 21769 | EAGMFVHRA |
| 21770 | EAGQWLGSP |
| 21771 | EAHAWEKTE |
| 21772 | EAHEEWSFD |
| 21773 | EAHVNVYKY |
| 21774 | EAKCMHDFS |
| 21775 | EAMIWNNTM |
| 21776 | EANQILSAH |
| 21777 | EANSSQSQF |
| 21778 | EANWEHSCI |
| 21779 | EAQTTGSTW |
| 21780 | EASLIKEDK |
| 21781 | EASSLYSQQ |
| 21782 | EASWSLHGQ |
| 21783 | EATGESFWF |
| 21784 | EAWHPGCCQ |
| 21785 | EAWMCVEAQ |
| 21786 | EAWSMNAPY |
| 21787 | EAYFDTAEC |
| 21788 | ECAPWVVLS |
| 21789 | ECCIGDNMM |
| 21790 | ECEMMDYSK |
| 21791 | ECFATGEFM |
| 21792 | ECHKCSKLN |
| 21793 | ECKLSVCGY |
| 21794 | ECMHAEWQA |
| 21795 | ECMLIGTDG |
| 21796 | ECPDYMRKD |
| 21797 | ECQMHRTFA |
| 21798 | ECRPWGMHE |
| 21799 | ECSESAEAK |
| 21800 | ECTVMQRGA |
| 21801 | ECWFCDIWR |
| 21802 | EDLHQWAQH |
| 21803 | EDMFCPTKA |
| 21804 | EEDFRNEAM |
| 21805 | EEDMQRTVQ |
| 21806 | EEEAGKWMC |
| 21807 | EELEQIWHG |
| 21808 | EESLDVVMK |
| 21809 | EFCYEPDWD |
| 21810 | EFETFWEVG |
| 21811 | EFGTMHYAP |
| 21812 | EFGTSQKDA |
| 21813 | EFGYSPGVS |
| 21814 | EFIHAENWY |
| 21815 | EFKARMVTP |
| 21816 | EFLVNTSWL |
| 21817 | EFMCSCMLN |
| 21818 | EFMTYETNV |
| 21819 | EFNSIMHWW |
| 21820 | EFQWRACFQ |
| 21821 | EFRMASSDA |
| 21822 | EFSDVQRTA |
| 21823 | EFSITMAPW |
| 21824 | EFSKMSGTA |
| 21825 | EFVEKWLWG |
| 21826 | EGAELEWDH |
| 21827 | EGAQLDVMS |
| 21828 | EGDMTTNQY |
| 21829 | EGEELRVAY |
| 21830 | EGEEYTLPS |
| 21831 | EGFLGFGQN |
| 21832 | EGFYLEGDP |
| 21833 | EGKEWIFYE |
| 21834 | EGMKTQQTF |
| 21835 | EGMWPHSAF |
| 21836 | EGQRLTWAQ |
| 21837 | EGRQHFVYA |
| 21838 | EGSQWRTSI |
| 21839 | EGTMSNGWQ |
| 21840 | EGVRLNLYG |
| 21841 | EGWFMKKQD |
| 21842 | EGYEYHTQR |
| 21843 | EHATESWAG |
| 21844 | EHATIENWP |
| 21845 | EHDGVWMYP |
| 21846 | EHEDTIAHD |
| 21847 | EHFPQQSGD |
| 21848 | EHGPCMSGC |
| 21849 | EHIGCGYWQ |
| 21850 | EHIRFGHYW |
| 21851 | EHKPDGANY |
| 21852 | EHLKLLIAC |
| 21853 | EHMSICDAP |
| 21854 | EHNSEDCIC |
| 21855 | EHPMENTYQ |
| 21856 | EHQFMWQDH |
| 21857 | EHRDHDAWA |
| 21858 | EHVKCNHFF |
| 21859 | EIAGSEMHL |
| 21860 | EIAKWNCEL |
| 21861 | EIAQL0FDQ |
| 21862 | EICAFDVGW |
| 21863 | EICVIECEQ |
| 21864 | EIDYHICSG |
| 21865 | EIEMAVAYA |
| 21866 | EIETSAREQ |
| 21867 | EIFQYMHHH |
| 21868 | EIGIGAPDY |
| 21869 | EIHHGHAVP |
| 21870 | EIIAQKWTQ |
| 21871 | EIIMYEQHM |
| 21872 | EIIPTSMFG |
| 21873 | EIITVRDDE |
| 21874 | EIIYREVDA |
| 21875 | EILSDDDMP |
| 21876 | EIMHRCHFW |
| 21877 | EIMIQVIRD |
| 21878 | EIMMEHDNK |
| 21879 | EIMWPLAGN |
| 21880 | EINLGHQHN |
| 21881 | EIQMILTAV |
| 21882 | EIRSHDTGH |
| 21883 | ELSWQDRDL |
| 21884 | EITFNQYGH |
| 21885 | EITWESNIA |
| 21886 | EIVDLTVME |
| 21887 | EIVEHDYRE |
| 21888 | EIVYMMCPC |
| 21889 | EKAGNLERK |
| 21890 | EKDQYKMGS |
| 21891 | EKEQFSHKG |
| 21892 | EKGMIDLVY |
| 21893 | EKGMNMHAG |
| 21894 | EKHQLSVQQ |
| 21895 | EKQWLSRQD |
| 21896 | EKSGYHFSC |
| 21897 | EKVICLYRG |
| 21898 | EKVTLNMDM |
| 21899 | EKYMNFMCP |
| 21900 | ELADQNQIQ |
| 21901 | ELAWIWQIH |
| 21902 | ELCCNDMFK |
| 21903 | ELERTVKEF |
| 21904 | ELGYSEKVC |
| 21905 | ELLTCIECG |
| 21906 | ELNFCWQQR |
| 21907 | ELYMNNHTE |
| 21908 | EMAELNQHV |
| 21909 | EMDQVPWGF |
| 21910 | EMEFPDMCM |
| 21911 | EMEWQDSWW |
| 21912 | EMGFGKQGM |
| 21913 | EMGMPSYMK |
| 21914 | EMKEAWLSA |
| 21915 | EMMVLCENE |
| 21916 | EMPTICKNC |
| 21917 | EMQCYQTYH |
| 21918 | EMSECSITA |
| 21919 | EMTPQQFWH |
| 21920 | EMWICHEGG |
| 21921 | EMWSRGMVN |
| 21922 | EMYPFSKQL |
| 21923 | ENAEEKDHM |
| 21924 | ENAIKHHDS |
| 21925 | ENAQRHNYA |
| 21926 | ENDAEVPDH |
| 21927 | ENEAMAKWF |
| 21928 | ENFMLRPCN |
| 21929 | ENHASAHVR |
| 21930 | ENHIEFWWP |
| 21931 | ENLESRLQH |
| 21932 | ENLHCDCLY |
| 21933 | ENLRMGKWE |
| 21934 | ENVKLDQCD |
| 21935 | ENWHLVAHR |
| 21935 | ENYCQCCLE |
| 21937 | ENYRHHTGP |
| 21938 | EPEWLGHEE |
| 21939 | EPGPMQCWD |
| 21940 | EPGQFFHDC |
| 21941 | EPLDNVGCG |
| 21942 | EPMNGKVME |
| 21943 | EPNAQMTAA |
| 21944 | EPQEVENMT |
| 21945 | EPTLVGEVP |
| 21946 | EPTNIWAVH |
| 21947 | EPTSATWVY |
| 21948 | EPVHLPEWM |
| 21949 | EQFGCGQWL |
| 21950 | EQKMKQIAQ |
| 21951 | EQKSTQTFH |
| 21952 | EQLDSHWWK |
| 21953 | EQLDVKYWH |
| 21954 | EQLIEWSSH |
| 21955 | EQNMLDADC |
| 21956 | EQQPMASFT |
| 21957 | EQQYLAQGK |
| 21958 | EQTATMRWD |
| 21959 | EQVYYWNTP |
| 21960 | EQWYDEEPH |
| 21961 | EQYYFNQLR |
| 21962 | ERFYQHAAK |
| 21963 | ERGYNMAQH |
| 21964 | ERIQWTHMG |
| 21965 | ERTAPSSRG |
| 21966 | ERTMVHQYW |
| 21967 | ERVDQENCH |
| 21968 | ERVTDEHEE |
| 21969 | ERYHMRWEP |
| 21970 | ESANYMNLF |
| 21971 | ESCYMMMNW |
| 21972 | ESGMLFYFM |
| 21973 | ESKAHAQTP |
| 21974 | ESKTTSCAF |
| 21975 | ESLRAENMP |
| 21976 | ESMGFEECG |
| 21977 | ESMKLIQCD |
| 21978 | ESMNEMTYK |
| 21979 | ESNDNGNQW |
| 21980 | ESNPVCVLK |
| 21981 | ESRCAWLSD |
| 21982 | ESRKEIGYA |
| 21983 | ESRRHHWAH |
| 21984 | ESSDESNYL |
| 21985 | ESTLLLCHG |
| 21986 | ESTNLQCVL |
| 21987 | ESVISLDQQ |
| 21988 | ESYETQLAC |
| 21989 | ESYFSETQP |
| 21990 | ESYEVEDNT |
| 21991 | ESYKCIRDC |
| 21992 | ETAHYSMRE |
| 21993 | ETANQEWER |
| 21994 | ETASKNVQT |
| 21995 | ETCILAVDG |
| 21996 | ETDEEYEVG |
| 21997 | ETDQQYDQY |
| 21998 | ETEEIVNMA |
| 21999 | ETEGYLFSP |
| 22000 | ETEPPDTQG |
| 22001 | ETESMMFCN |
| 22002 | ETHTYDDCS |
| 22003 | ETEAMQYRC |
| 22004 | ETKCYAMLG |
| 22005 | ETKEYDCNG |
| 22006 | ETKLAIDEF |
| 22007 | ETKSVLDEH |
| 22008 | ETMCPKGPL |
| 22009 | ETMNQIGSC |
| 22010 | ETNLFEHST |
| 22011 | ETPGTKQCS |
| 22012 | ETQRDRHTN |
| 22013 | ETRDYLEAD |
| 22014 | ETRQMDGNN |
| 22015 | ETSMRFESL |
| 22016 | ETSRMNVDA |
| 22017 | ETTCYAYME |
| 22018 | ETVERQCEQ |
| 22019 | EVAETSHSY |
| 22020 | EVANGKGDH |
| 22021 | EVCLGQRYA |
| 22022 | EVDRHLGMQ |
| 22023 | EVEACKYEY |
| 22024 | EVECTHRGE |
| 22025 | EVEVWSVYH |
| 22026 | EVFPYGCQN |
| 22027 | EVGMEVHPD |
| 22028 | EVGTCYFSK |
| 22029 | EVHKNDKMH |
| 22030 | EVHSMDTQW |
| 22031 | EVIQTSDNR |
| 22032 | EVKFEMLCQ |
| 22033 | EVKHKQDWA |
| 22034 | EVKNKGGFC |
| 22035 | EVKPCLVVQ |
| 22036 | EVKTRMCAG |
| 22037 | EVLKAQREV |
| 22038 | EVLLSTDEA |
| 22039 | EVLPYEWCE |
| 22040 | EVMIRKLDM |
| 22041 | EVMYSERTW |
| 22042 | EVNMEMQLA |
| 22043 | EVQGEKCLN |
| 22044 | EVQQFHRDQ |
| 22045 | EVQRWSGYH |
| 22046 | EVRGAEANH |
| 22047 | EVSKLATTY |
| 22048 | EVSQFGIMN |
| 22049 | EVTFWTCEG |
| 22050 | EVTIRSHYQ |
| 22051 | EVILEPDSW |
| 22052 | EVVHSMSDG |
| 22053 | EVVNVPMRT |
| 22054 | EVYRNTMKC |
| 22055 | EWAGKQTDM |
| 22056 | EWAYMGSYP |
| 22057 | EWDDTSNSG |
| 22058 | EWHFPKAMN |
| 22059 | EWNDYPSWY |
| 22050 | EWRHVELHY |
| 22061 | EYAGHHCFY |
| 22062 | EYCMCMWGA |
| 22063 | EYCNVMIPC |
| 22064 | EYDDVPEPQ |
| 22065 | EYEQDCRFQ |
| 22065 | EYHDKHWAG |
| 22067 | EYHTEWIGM |
| 22068 | EYEGEELHK |
| 22069 | EYILWHWCT |
| 22070 | EYISTQADA |
| 22071 | EYKYYTYIF |
| 22072 | EYMATEHGN |
| 22073 | EYMHYYGSE |
| 22074 | EYPLESTYK |
| 22075 | EYPLPVTLQ |
| 22076 | EYSQLHPSP |
| 22077 | EYTCRLLYD |
| 22078 | EYWEGQQSC |
| 22079 | EYWQESAWS |
| 22080 | FACEIQYSD |
| 22081 | FAEDCQRFD |
| 22082 | FALNGEEKW |
| 22083 | FASRYDGHH |
| 22084 | FAVFCWAER |
| 22085 | FAYCESEED |
| 22086 | FCDACLGGY |
| 22087 | FCELYFHCA |
| 22088 | FCLDPNFYY |
| 22089 | FCTGASHAH |
| 22090 | FDDCTWQGP |
| 22091 | FDHATMQFG |
| 22092 | FDRCNESYC |
| 22093 | FEPHGCQIE |
| 22094 | FEQADMMQM |
| 22095 | FEQYIRNIK |
| 22096 | FERLFMGWT |
| 22097 | FEVMRAIRC |
| 22098 | FFTKISWSW |
| 22099 | FGTAVMVWE |
| 22100 | FGWDAYCRV |
| 22101 | FHQYHYQAM |
| 22102 | FHWWGAVVK |
| 22103 | FICDVQMGD |
| 22104 | FIEFYMGEQ |
| 22105 | FIEGEMHIR |
| 22106 | FIGLQWSYP |
| 22107 | FIPISHQHP |
| 22108 | FIRSYNVEC |
| 22109 | FIRVSWWLA |
| 22110 | FIYTDFRMT |
| 22111 | FKEELMKYQ |
| 22112 | FKFEQENNS |
| 22113 | FKKPMVCHV |
| 22114 | FKLVSGDQW |
| 22115 | FKQIDHYPR |
| 22116 | FMAELKTDD |
| 22117 | FMKSKLETV |

TABLE 79
Sequences of the 581 to 589 Region in AAV5
VP1 Capsid Polypeptide that Drive
Mammary Gland Tissue Tropism

| SEQ | 581-589 |
|---|---|
| ID NO | Sequence |
| 24118 | FGDHLRVMY |
| 24119 | LPTQYQQQN |
| 24120 | TKKIIESSS |
| 24121 | IMYLKRCCT |
| 24122 | TSDQCGNED |
| 24123 | GQFPHYGIF |
| 24124 | YTELMKKAC |
| 24125 | LGMHYKDNC |
| 24126 | KMGTMDFNH |
| 24127 | QWDDEWDMD |
| 24128 | THACMYHEY |
| 24129 | LEQCHDHCA |
| 24130 | TKVNCVYYG |
| 24131 | QELGVNCAA |
| 24132 | QKDWGPRVT |
| 24133 | APMTCKEFL |
| 24134 | ASWFPVLFP |
| 24135 | CTYAAMMSY |
| 24136 | CVQCECNQN |
| 24137 | DMFRPDVRC |
| 24138 | DTDNKPHFA |
| 24139 | DTHIFIRHA |
| 24140 | EFHFKCRTD |
| 24141 | EHHAMMLHE |
| 24142 | FSHMPTSGG |
| 24143 | FVCPRAFNM |
| 24144 | FWMNCWVTV |
| 24145 | GQYIAVNYS |
| 24146 | HYEMPQAMQ |
| 24147 | KCGNEGRMS |
| 24148 | LQKGWANCE |
| 24149 | LSTLITMMD |
| 24150 | LTDFHPKML |
| 24151 | MAMKLIEGN |
| 24152 | NFCKQGNTC |
| 24153 | NIRCGNDAS |
| 24154 | NQQPGQHSQ |
| 24155 | NVVCVRYKS |
| 24156 | QATMDAWVH |
| 24157 | QIPKAWNRY |
| 24158 | QTTINDSSQ |
| 24159 | SADRTAMFH |
| 24160 | SARTDCQCK |
| 24161 | SDSKVQWGM |
| 24162 | SEDHFGFWV |
| 24163 | SHWFFHFDL |
| 24164 | STSWLNDLT |
| 24165 | TEFSQQYKC |
| 24166 | VAFEYGERA |
| 24167 | VCGWWHQYW |
| 24168 | VHTEMSNID |
| 24169 | VTQRPLHHS |
| 24170 | WLYLAFAQN |
| 24171 | WWKPCNCQY |
| 24172 | YATQMQHLE |
| 24173 | YMGSTNIWM |
| 24174 | GVGPSHGER |
| 24175 | GVMHHGIFD |
| 24176 | AISMYWSSW |
| 24177 | AVQCYIHPS |
| 24178 | CSTIHAGHP |
| 24179 | DIGMYWSSW |
| 24180 | DISMCWSSW |
| 24181 | DISMDWSSW |
| 24182 | DISMYWGSW |
| 24183 | DISMYWSGW |
| 24184 | DISMYWSSL |
| 24185 | DISMYWSSW |
| 24186 | DMSMYWSSW |
| 24187 | GISMYWSSW |
| 24188 | KPMINEIVY |
| 24189 | LHALINQGS |
| 24190 | LHALVNQGS |
| 24191 | LHALVNQGY |
| 24192 | LRALVNQGS |
| 24193 | MCLRDHNGL |
| 24194 | MPMINEIVY |
| 24195 | MYLCDHNGL |
| 24196 | MYLRDDNGL |
| 24197 | MYLRDHDGL |
| 24198 | MYLRDHNCL |
| 24199 | MYLRDHNDL |
| 24200 | MYLRDHNGL |
| 24201 | MYLRDHNSL |
| 24202 | MYLRDHNVL |
| 24203 | MYLRDHSGL |
| 24204 | MYLRDHTGL |
| 24205 | MYLRDRNGL |
| 24206 | MYLRGHNGL |
| 24207 | MYLRNHNGL |
| 24208 | NISMYWSSW |
| 24209 | QCYAIAHLI |
| 24210 | RCCAIAHLI |
| 24211 | RCYAIADLI |
| 24212 | RCYAIAHLI |
| 24213 | RCYAIAHLL |
| 24214 | RCYAIAHLV |
| 24215 | RCYAIAHVI |
| 24216 | RCYAIAHWI |
| 24217 | RCYAIALLI |
| 24218 | RCYAIAPLI |
| 24219 | RCYAIARLI |
| 24220 | RCYAIGHLI |
| 24221 | RCYAISHLI |
| 24222 | RCYAITHLI |
| 24223 | RCYAIVHLI |
| 24224 | RCYAVAHLI |
| 24225 | RCYDIAHLI |
| 24226 | RCYSIAHLI |
| 24227 | RCYTIAHLI |
| 24228 | RGYAIAHLI |
| 24229 | RWYAIAHLI |
| 24230 | SEQCYIHPS |
| 24231 | SVQCCEHPS |
| 24232 | SVQCYIHPS |
| 24233 | SVQCYIRPS |
| 24234 | SVQCYMHPS |
| 24235 | SVQCYVHPS |
| 24236 | SVQFYIHPS |
| 24237 | TPMIDEIVY |
| 24238 | TPMINEIFY |
| 24239 | TPMINEIVC |
| 24240 | TPMINEIVY |
| 24241 | TPMINEMVY |
| 24242 | TPMINEVVY |
| 24243 | TPMINGIVY |
| 24244 | TPMISEIVY |
| 24245 | TPMVNEIVY |
| 24246 | VYLRDHNGL |
| 24247 | YSTIHAGHP |
| 24248 | RVTIMFTGT |
| 24249 | GTRENTCNG |
| 24250 | AVGSLRTFQ |
| 24251 | CNTPYEFWA |
| 24252 | DLRLMACCG |
| 24253 | RRREGISGL |
| 24254 | VTYYSMTQQ |
| 24255 | MASRKSMED |
| 24256 | GMVELGSCW |
| 24257 | TVTITKWRD |
| 24258 | QHTQQLVQN |
| 24259 | SGNMYESGE |
| 24260 | QDFRMNAGA |
| 24261 | GLSMVLHFV |
| 24262 | AMTRCKAGH |
| 24263 | GSNRNPIMM |
| 24264 | ASAGRNWTA |
| 24265 | TYWTKQSEV |
| 24266 | CIWSSPDQP |
| 24267 | NYLQMCWFN |
| 24268 | TTYPHNTHG |
| 24269 | TCTNSEPHP |
| 24270 | ECQYEMNDD |
| 24271 | THAQMSLRD |
| 24272 | KYASMDIYS |
| 24273 | AQSKSLMRC |
| 24274 | TVMQCGTMP |
| 24275 | TAFQSLQQM |
| 24276 | HMDEVCSKD |
| 24277 | YVSLCNDGN |
| 24278 | RVEYVTDSH |
| 24279 | MCQNVEKEY |
| 24280 | NSTPMACME |
| 24281 | TSEPHCSYA |
| 24282 | DPGWYGLAP |
| 24283 | CWGPIMHPF |
| 24284 | LSVQAQWDS |
| 24285 | IAKIGNCVW |
| 24286 | KAVSYHHDG |
| 24287 | SLTQYQWRG |
| 24288 | MATCYMYAD |
| 24289 | APFFTFTNH |
| 24290 | TRMQAVDHE |
| 24291 | FWMQTEHGT |
| 24292 | GCEEVGRCQ |
| 24293 | IKHITRNTY |
| 24294 | WKWYGLPHH |
| 24295 | ESTFWQHTF |
| 24296 | SQMKYAHNQ |
| 24297 | AEVPYVMQQ |
| 24298 | TCGHTRFFI |
| 24299 | NTSGELIMP |
| 24300 | DRVNLMWKD |
| 24301 | AVHTADVCC |
| 24302 | EFVLGCQGE |
| 24303 | DVKAFMGGV |
| 24304 | TTSQNSEAM |
| 24305 | YASSCQNAM |
| 24306 | QSMVACYTE |
| 24307 | MGYAKHDSH |
| 24308 | SSRMQMQGP |
| 24309 | SQIQIRQAD |
| 24310 | VHHKTNRSY |
| 24311 | RVNGSTCRH |
| 24312 | NGNHYNAMR |
| 24313 | WITSEAVDT |
| 24314 | FTEPMCMQG |
| 24315 | DVKSWAVCD |
| 24316 | AYHCYMSWM |
| 24317 | RYPCCQSPF |
| 24318 | AHAWLQHWA |
| 24319 | HQCNCLLSW |
| 24320 | TNFPTSMHG |
| 24321 | QRNEMSASR |
| 24322 | QRNEMSASR |
| 24323 | WDGWVTTHF |
| 24324 | PAHINDQYM |
| 24325 | VLKSNLTGM |
| 24326 | ATGTYNLQE |
| 24327 | LINSIVCGD |
| 24328 | ACHTGQSGM |
| 24329 | DHLSNDAEM |
| 24330 | SECEVLCSL |
| 24331 | VFNLMLQDK |
| 24332 | ILINDREWG |
| 24333 | QWETKGVGE |
| 24334 | NVMGTQAKE |
| 24335 | YSDPKNMSE |
| 24336 | LEIGGKTRT |
| 24337 | ASMHEETCL |
| 24338 | WERCLELNQ |
| 24339 | MPWLDKPPC |
| 24340 | ATMNLSWGL |
| 24341 | WVHPYSYCA |
| 24342 | QSRCVDNTV |
| 24343 | NRIQMTDFQ |
| 24344 | SNVACEQAF |
| 24345 | INYISEVDR |
| 24346 | EVRIQCKID |
| 24347 | SVLHVQALA |
| 24348 | CWILHHRCS |
| 24349 | KMAGIGCWY |
| 24350 | LCAVCGDCD |
| 24351 | HSMMPGWPS |
| 24352 | DQEAQVVTG |
| 24353 | ISLVWMHYP |
| 24354 | AACNGLEYQ |
| 24355 | AADCYHWFR |
| 24356 | AAEWDRFAE |
| 24357 | AAGLQVDSW |
| 24358 | AAMASAFVY |
| 24359 | AAMLGWESE |
| 24360 | AASPKTMNE |
| 24361 | ACDRFMAMY |
| 24362 | ACSVSECTE |
| 24363 | ACYDYYQQV |
| 24364 | ACYSYEFEE |
| 24365 | ADCFIFAEY |
| 24366 | AELEIMWDD |
| 24367 | AFGVYPSVS |
| 24368 | AFNHVHEGT |
| 24369 | AFTIEDDWW |
| 24370 | AGVQENVSV |
| 24371 | AILTVCIGA |
| 24372 | AINMSGSGN |
| 24373 | AKNDNLCAD |
| 24374 | AKRQKVVLS |
| 24375 | AKWRGTLIN |
| 24376 | ALCDYMSWH |
| 24377 | AMEYRSWHT |
| 24378 | ANCIRPFTS |
| 24379 | ANCKQDHCH |
| 24380 | ANICTIESD |
| 24381 | ANIRGRSMK |
| 24382 | ANQVTGSWK |
| 24383 | ANTQYPAHM |
| 24384 | ANWPMACDQ |
| 24385 | APFRKQMPG |
| 24386 | APWHSNDMR |
| 24387 | AQNVLDTVQ |
| 24388 | AQNVLGTVQ |
| 24389 | AQVSTLNGM |
| 24390 | AREDPCAPR |
| 24391 | ARGWDYKCP |
| 24392 | ASERLYYCW |
| 24393 | ASILQFTVD |
| 24394 | ASKPTRKVT |
| 24395 | ASQYQQSLS |
| 24396 | ATAINQRQA |
| 24397 | ATECKLNYL |
| 24398 | ATERQTLLN |
| 24399 | ATTCITSDD |
| 24400 | ATTKGMSGW |
| 24401 | ATTLINQEW |
| 24402 | AVGHFYTNS |
| 24403 | AVHTADVFC |
| 24404 | AVEFMSVCE |
| 24405 | AVTQQVDEN |
| 24406 | AWCNIDMST |
| 24407 | AWSCIMSYD |
| 24408 | AYENFHWYD |
| 24409 | AYHDSGHEW |
| 24410 | AYYQLQMSS |
| 24411 | CADVPITMA |
| 24412 | CAEQWAAMI |
| 24413 | CAHWTYDCY |
| 24414 | CAHWYYEQR |
| 24415 | CANKEHVCH |
| 24416 | CANWKDHGY |
| 24417 | CAQHRDTAF |
| 24418 | CASLKVEDS |
| 24419 | CASTYTGIN |
| 24420 | CATAMFRYQ |
| 24421 | CATKSMMYG |
| 24422 | CAWLSQTAS |
| 24423 | CCMPLQSFG |
| 24424 | CEGFEMRVE |
| 24425 | CEGWGTYCI |
| 24426 | CEHGNENWP |
| 24427 | CFGFVNSVN |
| 24428 | CFMWNWHHE |
| 24429 | CFRMYDLLS |
| 24430 | CFTNNVVWT |
| 24431 | CGCSEVTPH |
| 24432 | CGLIMEMCW |
| 24433 | CGWWFNAAE |
| 24434 | CHAEYSHEQ |
| 24435 | CHFQYQNQA |
| 24436 | CHLLLTDCY |
| 24437 | CHMMDWQCG |
| 24438 | CHMQFMEAG |
| 24439 | CHTEYSHEQ |
| 24440 | CIDLRLAWD |
| 24441 | CIEWWGMMG |
| 24442 | CIIPKMKER |
| 24443 | CILHRYVIE |
| 24444 | CILLKKCMA |
| 24445 | CINADGKYS |
| 24446 | CIQAVIGGT |
| 24447 | CIRLTEYLG |
| 24448 | CIRTMNGSW |
| 24449 | CISREDHKQ |
| 24450 | CKQWTNQAH |
| 24451 | CKVHKNWDR |
| 24452 | CLGSTWVAA |
| 24453 | CMCLKKCYY |
| 24454 | CMQQYDNGQ |
| 24455 | CMREQMNAC |
| 24456 | CNKDINQSC |
| 24457 | CNWLFMTQW |
| 24458 | CPGPMMQMA |
| 24459 | CPKPIGCGG |
| 24460 | CQDFRHECA |
| 24461 | CQQRIIMQA |
| 24462 | CQRKWEKQE |
| 24463 | CRTELGSMY |
| 24464 | CSAKVPMPT |
| 24465 | CSAQIKAAC |
| 24466 | CSCAMYNFH |
| 24467 | CSDQYQTQN |
| 24468 | CSGRLGSLY |
| 24469 | CSHHLMTFG |
| 24470 | CSHNFQDQK |
| 24471 | CSIWEDKSG |
| 24472 | CSMECRNEL |
| 24473 | CSTTMNVKT |
| 24474 | CSVITQTTG |
| 24475 | CTDKLLNAG |
| 24476 | CTDRMVKAS |
| 24477 | CTENYHQQY |
| 24478 | CTGQYMGYI |
| 24479 | CTHQQSLAV |
| 24480 | CTLKQNMPA |
| 24481 | CTQLSVNMQ |
| 24482 | CTQSFVLYQ |
| 24483 | CTVFSGRTA |
| 24484 | CTVRQNHKP |
| 24485 | CVAIDMSVA |
| 24486 | CVEYLKQLY |
| 24487 | CVGDREPWG |
| 24488 | CVGINLDHH |
| 24489 | CVGKQIMAE |
| 24490 | CVIHPPNFD |
| 24491 | CVLYYNQHC |
| 24492 | CVQGQYYQE |
| 24493 | CVQHNLVGY |
| 24494 | CVQTMNGKS |
| 24495 | CVYREIKTA |
| 24496 | CWAIERLQS |
| 24497 | CWAQLNTDT |
| 24498 | SWEMMKTQE |
| 24499 | CWNIYNACD |
| 24500 | CWSSWQKRD |
| 24501 | CYDGWWCPS |
| 24502 | CYKFVGAAD |
| 24503 | CYRDVRARG |
| 24504 | CYVYWTTCP |
| 24505 | DAAQFGKHT |
| 24506 | DACWGHEYA |
| 24507 | DAGTNSFCG |
| 24508 | DAGVTTYGG |
| 24509 | DASKVKLHH |
| 24510 | DASSYLHLC |
| 24511 | DCAKFPFMI |
| 24512 | DCEDIKKWE |
| 24513 | DCGQFSIIE |
| 24514 | DDHWDWLCY |
| 24515 | DDLGAGRSD |
| 24516 | DDLSMTNDC |
| 24517 | DEEFYPPAW |
| 24518 | DEFIWLEMH |
| 24519 | DETVFRNPV |
| 24520 | DFEYFSTKD |
| 24521 | DGFQYDAHC |
| 24522 | DGVQVDWGR |
| 24523 | DHKEYMDKG |
| 24524 | DHRQWKVLA |
| 24525 | DICHYIRNE |
| 24526 | DIMRYINTA |
| 24527 | DIRTSVSDS |
| 24528 | DITQMVVGC |
| 24529 | DIVIKIGMG |
| 24530 | DKGCKCQWG |
| 24531 | DKKPVEDDM |
| 24532 | DKVVQQCKD |
| 24533 | DLEHKHQFF |
| 24534 | DLRCDPQMW |
| 24535 | DMDAQGAMW |
| 24536 | DMYFTRHTW |
| 24537 | DMYSMVKHN |
| 24538 | DNFPWCTGN |
| 24539 | DQCVLSRGH |
| 24540 | DQEWSVHMG |
| 24541 | DQFCTYDYT |
| 24542 | DQGPSESDL |
| 24543 | DQKVMFECY |
| 24544 | DQQCAQMGV |
| 24545 | DRQCCKLTF |
| 24546 | DSHRLPGNW |
| 24547 | DSMHYYMMH |
| 24548 | DSNYEEKVI |
| 24549 | DSQYMCVHR |
| 24550 | DSRQFENQC |
| 24551 | DSTGRPMMG |
| 24552 | DSVAHSSQK |
| 24553 | DTDRGLVYE |
| 24554 | DTHAVEFAA |
| 24555 | DTHWWNILC |
| 24556 | DTYGIQDFQ |
| 24557 | DVDFEWSQW |
| 24558 | DVEPEYCAG |
| 24559 | DVFIDWSGQ |
| 24560 | DVIMGPIAN |
| 24561 | DVINRYECG |
| 24562 | DVKQQPLAI |
| 24563 | DVKTDTSPD |
| 24564 | DVLLADTEP |
| 24565 | DVRDNEPER |
| 24566 | DVRQILMCH |
| 24567 | DVWQNSGAL |
| 24568 | DWNQVDNYY |
| 24569 | DWPAQKGWA |
| 24570 | DWQPMLHMN |
| 24571 | DYLAMNLHF |
| 24572 | DYMHMLTAQ |
| 24573 | DYMQNQYGT |
| 24574 | EAEIFRLEG |
| 24575 | EALMPMLGA |
| 24576 | EASTQWLMQ |
| 24577 | EATCDPPYN |
| 24578 | EATIMDQVV |
| 24579 | EATKQSWTH |
| 24580 | EAYLTIDKL |
| 24581 | ECDRYIAEY |
| 24582 | ECGLWWGSE |
| 24583 | ECKPIAGDK |
| 24584 | ECPNVNTAQ |
| 24585 | ECVANPFQP |
| 24586 | ECYHVLANS |
| 24587 | EDTHMIAGH |
| 24588 | EEFDTVAAP |
| 24589 | EFMLSSKDI |
| 24590 | EFYHFMYKD |
| 24591 | EGVESMLYA |
| 24592 | EHDWITVYE |
| 24593 | EHVIIKKNY |
| 24594 | EICVVTGEQ |
| 24595 | EIEMMGRGE |
| 24596 | EIKVVNSRD |
| 24597 | EIKYRRCMA |
| 24598 | EIRECEECC |
| 24599 | EITDWGVVP |
| 24600 | EITYRRCMA |
| 24601 | EIYMRHNFP |
| 24602 | EKAHSWQDP |
| 24603 | EKISICSQY |
| 24604 | EKMESPECI |
| 24605 | EKPYHEEKE |
| 24606 | ELLMINAMS |
| 24607 | EMARNIEQN |
| 24608 | EMRMNIQWE |
| 24609 | ENCEPMHCE |
| 24610 | ENCHITKMD |
| 24611 | ENSYTHDTI |
| 24612 | ENTLFMRYH |
| 24613 | EPKQEEWYV |
| 24614 | EPVTFVGQA |
| 24615 | EPYFCCCVP |
| 24616 | ERDHVNESC |
| 24617 | ERSWYYDQY |
| 24618 | ESCEGILTF |
| 24619 | ESDPMQQFT |
| 24620 | ESEYNSSYN |
| 24621 | ESKSCGLTG |
| 24622 | ESNLTPWSQ |
| 24623 | ESRWMDEHT |
| 24624 | ESTHKFMQD |
| 24625 | ESYSTAEMA |
| 24626 | ETEWAWVTQ |
| 24627 | ETLPIEIRS |
| 24628 | ETSKWHAVC |
| 24629 | ETVLHQWAA |
| 24630 | EVAMLEEDK |
| 24631 | EVCLRHYWQ |
| 24632 | EVDCKVSHV |
| 24633 | EVDVHDEWV |
| 24634 | EVEAIRGIQ |
| 24635 | EVEFMSYRW |
| 24636 | EVISYVENV |
| 24637 | EVLHRDLHM |
| 24638 | EVMCSDVPK |
| 24639 | EVNCTHLYN |
| 24640 | EYARKTKGW |
| 2464/ | EYPYRYEFS |
| 24642 | EYRWMPNHL |
| 24643 | FACQCKGCS |
| 24644 | FAKYMNHGG |
| 24645 | FDEPMIHQW |
| 24646 | FEYIWVYWY |
| 24647 | FFCPKHKWP |
| 24648 | FICLRYKDQ |
| 24649 | FIWVCHTYK |
| 24650 | FKMWKLFQA |
| 24651 | FLELMQIGL |
| 24652 | FLRYMVCAH |
| 24653 | FMEQDIGHA |
| 24654 | FNGSICDTY |
| 24655 | FNNNDVHPI |
| 24656 | FPSAYQHQH |
| 24657 | FQSMGEIWC |
| 24658 | FRGHGMWDA |
| 24659 | FRLCSDVRC |
| 24660 | ESNLVEVSK |
| 24661 | FSTCTSCCA |
| 24662 | FTCPYKFGM |
| 24663 | FTEQEDRQM |
| 24664 | FTMASAQAD |
| 24665 | FVCLGRKGP |
| 24666 | FVGWYWNSP |
| 24667 | FWKIKSGGA |
| 24668 | FWQMKSCLP |
| 24669 | FWVLDMCQA |
| 24670 | FWYPKDRMV |
| 24671 | GACERRDAM |
| 24672 | GADQCMLWE |
| 24673 | GAIYENKLG |
| 24674 | GCAPLVQDD |
| 24675 | GCAYQAVNP |
| 24676 | GCISTLNGM |
| 24677 | GCMKLVGTA |
| 24678 | GEVVPHISW |
| 24679 | GFHLEEKYD |
| 24680 | GEKQYATYI |
| 24681 | GGHFDGWQR |
| 24682 | GGMWLQNVS |
| 24683 | GGWFMGVMG |
| 24684 | GHREFQMPY |
| 24685 | GHVAYPPDQ |
| 24686 | GIARMFRWV |
| 24687 | GIGYKWFPG |
| 24688 | GLMPVMNYT |
| 24689 | GNATKIKLN |
| 24690 | GNRRCWVPF |
| 24691 | GQGGNCKSH |
| 24692 | GSHEYWEMA |
| 24693 | GSLFQNYQW |
| 24694 | GSYMACRMD |
| 24695 | GTCNEQMDS |
| 24696 | GTDCFWWHE |
| 24697 | GTSFVGNPL |
| 24698 | GTYVCQNHD |
| 24699 | GVAHPEAVC |
| 24700 | GVTEHNEVC |
| 24701 | GVVDESYDP |
| 24702 | GVVGLNTCV |
| 24703 | GWCNRYFWD |
| 24704 | GWIRYKNSE |
| 24705 | GYFGKCKRI |
| 24706 | HADMEQGNS |
| 24707 | HADSNIACN |
| 24708 | HAESMVCHH |
| 24709 | HASLNLNPS |
| 24710 | HCIWNWSDA |
| 24711 | HEAKQVPKA |
| 24712 | HERCSELEY |
| 24713 | HEYIYETWP |
| 24714 | HFYVGSPED |
| 24715 | HHQYIDCFV |
| 24716 | HIDPDHWHG |
| 24717 | HKLYEDRIN |
| 24718 | HKNDLAAVQ |
| 24719 | HKSDMWWTA |
| 24720 | HLPAPELYL |
| 24721 | HMDIQMFMP |
| 24722 | HNFCMYWPQ |
| 24723 | HNHSADSFA |
| 24724 | HPELLDRFE |
| 24725 | HPSSIWSIL |
| 24726 | HQNKFEWSP |
| 24727 | HRNEQLIRA |
| 24728 | HSGELYDGF |
| 24729 | HSMLETTGK |
| 24730 | HSNFFHMND |
| 24731 | HSYQQCAVG |
| 24732 | HTPQVLKGE |
| 24733 | HTTAHQNWA |
| 24734 | HTTFALVMH |
| 24735 | HVDSNIACN |
| 24736 | HVKSPTFQT |
| 24737 | HVKVHEMMI |
| 24738 | HVMPKQGFN |
| 24739 | HYCKIIPYH |
| 24740 | HYEYCFGIF |
| 24741 | IAGTYTNWY |
| 24742 | IAMDNQNTD |
| 24743 | IAQDTGTLH |
| 24744 | ICKIGSRLD |
| 24745 | IEGHWAQFP |
| 24746 | IEIATVNVH |
| 24747 | IFMVHDSDY |
| 24748 | IFVGKNAAW |
| 24749 | IGIQFLKDH |
| 24750 | IGTYGWIEA |
| 24751 | IHDASTKDQ |
| 24752 | IHMHEVGVY |
| 24753 | IIKDVGDFG |
| 24754 | IIPQVDQYY |
| 24755 | IIRDKTQDD |
| 24756 | IKCDKCQDQ |
| 24757 | IKGRFDWDC |
| 24758 | IMEYVHKPG |
| 24759 | IQAATNLWQ |
| 24760 | IQGEVTVTA |
| 24761 | IQGPEAIMK |
| 24762 | IQGVQWMNH |
| 24763 | IREEMHEQF |
| 24764 | ISGLAQMGM |
| 24765 | ISICYHMFP |
| 24766 | ISMQICAGW |
| 24767 | ITCQSNEQH |
| 24768 | ITGTRFAEV |
| 24769 | ITMPAEAFQ |
| 24770 | ITTKYQIDH |
| 24771 | ITTPQLNSV |
| 24772 | IVDHLPRHG |
| 24773 | IVGLATTAM |
| 24774 | IVHPTLNTP |
| 24775 | IVMREHGAC |
| 24776 | IWADLECGR |
| 24777 | IWDLAGDAM |
| 24778 | IYNQRQMCP |
| 24779 | KACDRQIYE |
| 24780 | KACEMYASF |
| 24781 | KADAKVPCC |
| 24782 | KADVRSAQH |
| 24783 | KASNDYLCR |
| 24784 | KCDGLWCHF |
| 24785 | KDRMGLNQC |
| 24786 | KDVTKLRCP |
| 24787 | KEPITAEHK |
| 24788 | KFAGAGIGW |
| 24789 | KGKLEYRIR |
| 24790 | KGLDVPHWG |
| 24791 | KHCEILCNW |
| 24792 | KIAEWEDWM |
| 24793 | KICSQLDSP |
| 24794 | KKFWDTVIC |
| 24795 | KKNCREPEQ |
| 24796 | KMQAMGVNW |
| 24797 | KPTKYEWLH |
| 24798 | KREAWMVGN |
| 24799 | KSLIQQSWD |
| 24800 | KSMVIRHAQ |
| 24801 | KTCHPEGMP |
| 24802 | KTNMHAKSV |
| 24803 | KTNRTYMWR |
| 24804 | KVEACQSVE |
| 24805 | KVGAHVAQE |
| 24806 | KVGIHDSLV |
| 24807 | KVKWKDKDL |
| 24808 | KVYYIISHQ |
| 24809 | KWIMWIEYN |
| 24310 | KYHNVPSKI |
| 24811 | KYQYYQEGP |
| 24812 | LAGCLCYTN |
| 24813 | LAGCLWYTN |
| 24814 | LAICHSNLA |
| 24815 | LANMPNMGF |
| 24816 | LATQACSCN |
| 24817 | LCASRGLDP |
| 24818 | LCGPIIKAS |
| 24819 | LCIRLWTSA |
| 24820 | LCPNWWRYQ |
| 24321 | LDRKACMIA |
| 24322 | LEAELMGHC |
| 24823 | LEVDMHASY |
| 24824 | LFEQKMVWS |
| 24825 | LFSPYEACC |
| 24826 | LFVVTTTNN |
| 24827 | LGSLYRRRG |
| 24828 | LGYHVQEAG |
| 24829 | LHCQMGDHW |
| 24830 | LHEIQKPNH |
| 24831 | LHSQADGLY |
| 24332 | LHTPQHDCH |
| 24333 | LKDQFHWGA |
| 24334 | LKELIQFGN |
| 24835 | LKMDMTKRS |
| 24836 | LLPPMMMGQ |
| 24837 | LNLYWFWSA |
| 24838 | LNPMTQNHE |
| 24839 | LPLQVSNMA |
| 24840 | LPRLNLVDR |
| 24841 | LQDVIVDCE |
| 24842 | LQTPQHHGA |
| 24843 | LRYYIEMDR |
| 24844 | LSQMLAHTA |
| 24845 | LSVWAIRND |
| 24846 | LTHKRESEC |
| 24847 | LTMGFEIGW |
| 24848 | LTNPWHYFA |
| 24849 | LTVIIFDDA |
| 24850 | LVAMVPQSY |
| 24851 | LVDQGKCMQ |
| 24852 | LWHWLWLKT |
| 24853 | LWTRMVYFG |
| 24854 | LYAHGNCYP |
| 24855 | LYASVMQSE |
| 24856 | LYKMVTKLH |
| 24857 | MAPTVVRKK |
| 24858 | MATPKEVMQ |
| 24859 | MCAGWCDDQ |
| 24860 | MCGLRYYWP |
| 24861 | MCLWIRACE |
| 24862 | MCPNHKPCW |
| 24863 | MESLCVYFY |
| 24864 | MFMKNELIA |
| 24865 | MGCQSQKPK |
| 24866 | MGMFNTMAE |
| 24867 | MHETHTWGA |
| 24868 | MHMSTLDAK |
| 24869 | MHVQQQRYG |
| 24870 | MIYKDYNHA |
| 24871 | MIYPCMTSC |
| 24872 | MKHESDGGF |
| 24873 | MLAGWWQET |
| 24874 | MMIVQCSNK |
| 24875 | MMKWTEYMV |
| 24876 | MMTLKNTMD |
| 24877 | MNFNSLAQW |
| 24878 | MNLPKSHDC |
| 24879 | MNMYYTGEV |
| 24880 | MNNIYECIP |
| 24881 | MNSHNHTST |
| 24882 | MNTPTFHQI |
| 24883 | MPTMMGSYM |
| 24884 | MQFRTNNAN |
| 24885 | MQNISCPQC |
| 24886 | MQPRYNCEG |
| 24887 | MQSFVGVMW |
| 24888 | MRALSVSQG |
| 24889 | MRTMFYTSP |
| 24890 | MRVIQGDNY |
| 24891 | MSFTYVGGS |
| 24892 | MSTKPAYWG |
| 24893 | MSTKPVYWG |
| 24894 | MTDLQLIER |
| 24895 | MTEILQITG |
| 24896 | MTEPFMQDL |
| 24897 | MTIGYFVQA |
| 24898 | MTNRMQALQ |
| 24899 | MTRFKIYHE |
| 24900 | MTTHCNTAI |
| 24901 | MVNCAVTYQ |
| 24902 | MVSDTQHGK |
| 24903 | MVSYDVLGK |
| 24904 | MVSYNVLGK |
| 24905 | MVTTQQIVC |
| 24906 | MVVIKQYHT |
| 24907 | MVVVIRDAS |
| 24908 | MWGEWWPGC |
| 24909 | MWQEFQWQY |
| 24910 | MYIPRNGEP |
| 24911 | NACMVTGCG |
| 24912 | NAEWQRDTF |
| 24913 | NASPCQIFG |
| 24914 | NCFVMYCGR |
| 24915 | NDKWGWWRE |
| 24916 | NDVMWQLIH |
| 24917 | NFDFNHQCQ |
| 24918 | NFEIYHLQC |
| 24919 | NEGIYHLQC |
| 24920 | NFNWTRADC |
| 24921 | NFRTINAHP |
| 24922 | NGDPVFRMA |
| 24923 | NIEGIEFNA |
| 24924 | NIVGATEWD |
| 24925 | NKDDTCFQF |
| 24926 | NKYCIAMPC |
| 24927 | NLGETITNA |
| 24928 | NMIHLWTTE |
| 24929 | NMNQNPTMS |
| 24930 | NMYWCMQIH |
| 24931 | NNRETMIHG |
| 24932 | NNREWDVCY |
| 24933 | NPPDVGCPS |
| 24934 | NPQSLCYSC |
| 24935 | NQHWLLSVP |
| 24936 | NQMPCWVFF |
| 24937 | NSCFIAENC |
| 24938 | NSGIATADH |
| 24939 | NSIQYGQAP |
| 24940 | NSKSPSEGC |
| 24941 | NSQPWYRHS |
| 24942 | NSTAHAFAY |
| 24943 | NSTAHPMMW |
| 24944 | NTHVCNLHE |
| 24945 | NTLFWDGNP |
| 24946 | NVEERNRHF |
| 24947 | NVEKQVAMG |
| 24948 | NVHHTTQIP |
| 24949 | NVMSALDLS |
| 24950 | NVTQWDEDL |
| 24951 | NVVQCNGPH |
| 24952 | NWFGINSWH |
| 24953 | PANYSMPNC |
| 24954 | PDGYRRSHG |
| 24955 | PDWCQDPGM |
| 24956 | PEELYLYRK |
| 24957 | PEYRQWMLI |
| 24958 | PFLFTVIHN |
| 24959 | PFVHDDMAR |
| 24960 | PGEENEPPA |
| 24961 | PIWTQHHTM |
| 24962 | PLQQYDGCS |
| 24963 | PQHCNTMWG |
| 24964 | PQIDSLQDY |
| 24965 | PRNDDNCLP |
| 24966 | PVIWLPVDS |
| 24967 | PWDKEEPQG |
| 24968 | PYAIEESHD |
| 24969 | PYIRRVHVS |
| 24970 | QAACAMATT |
| 24971 | QADKQFYGN |
| 24972 | QAGYQSALY |
| 24973 | QANGENLDH |
| 24974 | QCDRVWLNP |
| 24975 | QCIPKQKDY |
| 24976 | QCQTLDCCD |
| 24977 | QCWYCELCP |
| 24978 | QESEVHVFG |
| 24979 | QFQLVTIQG |
| 24980 | QGAFHTAWT |
| 24981 | QGEKCVPDF |
| 24982 | QGIMTSCQT |
| 24983 | QGVRMVGNS |
| 24984 | QHCMHSMVE |
| 24985 | QHQHDLPTG |
| 24986 | QIAVVSCQR |
| 24987 | QIAVVCSQW |
| 24988 | QIFKALVGE |
| 24989 | QIGWDDAIT |
| 24990 | QIISETGWE |
| 24991 | QKFCNIHEY |
| 24992 | QKQTSISFS |
| 24993 | QKTWLVVWC |
| 24994 | QMATPVDMT |
| 24995 | QMGCTFQTP |
| 24996 | QMGLLDTYP |
| 24997 | QMYMDFTQP |
| 24998 | QNYWCMCGA |
| 24999 | QPKEWVIKE |
| 25000 | QPRNDCNEH |
| 25001 | QQAMYTSSG |
| 25002 | QQDPMKQWS |
| 25003 | QQEVEQTMG |
| 25004 | QQEYFDDMQ |
| 25005 | QQSAVGAHY |
| 25006 | QQVYEMKWH |
| 25007 | QRVMSGKPL |
| 25008 | QSDPQPVIW |
| 25009 | QSGIHCCCG |
| 25010 | QSGWFLEAK |
| 25011 | QSHFCFENA |
| 25012 | QSIPEWSCA |
| 25013 | QSNGQKDSQ |
| 25014 | QSVDWIKCE |
| 25015 | QTDMANKMG |
| 25016 | QTGWLHSYG |
| 25017 | QTKTGEIQK |
| 25018 | QIKTGKSAT |
| 25019 | QVHTKWDGM |
| 25020 | QVQYRTCDW |
| 25021 | QWTEKTFEG |
| 25022 | QYEPLGRAM |
| 25023 | QYKSTQRRN |
| 25024 | QYYMLSESA |
| 25025 | RAKTCIYKC |
| 25026 | RAMCILHNQ |
| 25027 | RAMPTAAQI |
| 25028 | RDLFIQFGP |
| 25029 | RDMDMQMWC |
| 25030 | REAKVFELK |
| 25031 | REGCYNTQE |
| 25032 | RFELLMTGR |
| 25033 | RGFWVEKSG |
| 25034 | RGSAKDAWG |
| 25035 | RISSEGMWC |
| 25036 | RLHIDDEDH |
| 25037 | RLVRDSKNN |
| 25038 | RMEELINDK |
| 25039 | RMVTWDQSE |
| 25040 | RNMCRHNDI |
| 25041 | RPETVHASF |
| 25042 | RQGCLLAWP |
| 25043 | RQICNEPWN |
| 25044 | RRNELLIPD |
| 25045 | RSEMVNTQM |
| 25046 | RSQWHNSID |
| 25047 | RSSEYLTQQ |
| 25048 | RTLVKGAQC |
| 25049 | RTQGCGPSR |
| 25050 | RVADVMYIG |
| 25051 | RVECRPWGE |
| 25052 | RVMDNACDM |
| 25053 | RWDYYWTGM |
| 25054 | RWRNCGSNG |
| 25055 | SACIFYAHK |
| 25056 | SAEMWVKDE |
| 25057 | SALPCNTAQ |
| 25058 | SARTEERES |
| 25059 | SATTMPRTD |
| 25060 | SCFINSAYP |
| 25061 | SCGLVQRFM |
| 25062 | SCGQVEHYC |
| 25063 | SCQMYTYGI |
| 25064 | SCRLRFNYA |
| 25065 | SCTTCHSWQ |
| 25066 | SFASMYNIK |
| 25067 | SFMYKTQAL |
| 25068 | SFYKNGMSN |
| 25069 | SGGFCNYAT |
| 25070 | SIGPASNAL |
| 25071 | SIHMAEGVE |
| 25072 | SIHRWNWMG |
| 25073 | SINPESQGS |
| 25074 | SISPSMGEK |
| 25075 | SIVHPPTTS |
| 25076 | SKGCIIDMQ |
| 25077 | SKLLVTRNH |
| 25078 | SKRLVTRNH |
| 25079 | SLKDVDLWH |
| 25080 | SLYKHEIWW |
| 25081 | SMFPFNMGP |
| 25082 | SMTDCDFHQ |
| 25083 | SNHPNMHTY |
| 25084 | SQGNTRYSY |
| 25085 | SRCLRHQEC |
| 25086 | SRMDMNHGL |
| 25087 | SRTMYKWMP |
| 25088 | SRTNIEWGG |
| 25089 | SRYKCQHRN |
| 25090 | SSDQLIMWG |
| 25091 | SSHATNFCG |
| 25092 | SSHTTNFCG |
| 25093 | SSTGMQSST |
| 25094 | SSTTHSRMQ |
| 25095 | STFPKWTSE |
| 25096 | STHFRTEDR |
| 25097 | STLVYPCGP |
| 25098 | STSAQPNFD |
| 25099 | STTQWGMCN |
| 25100 | STVSQMNYF |
| 25101 | SVCPSHMWM |
| 25102 | SVFSFHSDT |
| 25103 | SWDVRVTAQ |
| 25104 | SWSMQNKST |
| 25105 | SWVSADEVP |
| 25106 | SYGQIECYQ |
| 25107 | SYLRAHHKD |
| 25108 | TAALMGNMA |
| 25109 | TALDNSTGI |
| 25110 | TAQLMQTAC |
| 25111 | TAYLNNWVP |
| 25112 | TAYPEYCGN |
| 25113 | TCAPQGKQE |
| 25114 | TCAVFVFHC |
| 25115 | TCEEYYNPF |
| 25116 | TCELMQVMH |
| 25117 | TCQNIAMQL |

TABLE 80
Sequences of the 581 to 589 Region in AAV5 VP1
Capsid Polypeptide that Drive Sciatic Nerve
Tissue Tropism

| SEQ | |
|---|---|
| ID | 581-589 |
| NO | Sequence |
| 27991 | EIILDDQQR |
| 27992 | LDDNAWRHR |
| 27993 | LGGKPYALD |
| 27994 | GSQQTTLSC |
| 27995 | TWESQIDCI |
| 27996 | VVGLKPMHM |
| 27997 | NFNINIYNC |
| 27998 | ANHATGGQS |
| 27999 | EFKRMTCNK |
| 28000 | NKHQGMHRM |
| 28001 | KGGPWAYNC |
| 28002 | VLIPIGQHY |
| 28003 | DPFECTVWP |
| 28004 | TVQWNFAHM |
| 28005 | TAYMTDMYC |
| 28006 | SATNWECSN |
| 28007 | KVDAEGFHF |
| 28008 | VWEDNPPFR |
| 28009 | SVLMSPHLM |
| 28010 | LEKNSSQMR |
| 28011 | CRCNDAWNM |
| 28012 | AAPFMWRDL |
| 28013 | ACKYPPHVR |
| 28014 | ANKMFMEQA |
| 28015 | ANKMFMGQA |
| 28016 | ANKMVMEQA |
| 28017 | AWSEFQWFD |
| 28018 | CYRCLPPEA |
| 28019 | DIDRHAHFD |
| 28020 | DKGYSLYQP |
| 28021 | DRDWSDVRR |
| 28022 | DRGWSDVRR |
| 28023 | EHGYMRCTK |
| 28024 | EHGYMRCTR |
| 28025 | EHGYMRCTT |
| 28026 | EHGYMRYTK |
| 28027 | EIECLQTVA |
| 28028 | EIEFLGTVA |
| 28029 | EIEFLQTVS |
| 28030 | EIEFLQTVV |
| 28031 | EIEILQTVA |
| 28032 | EIEVLQTVA |
| 28033 | EIFLDDQQR |
| 28034 | EIILDAQQR |
| 28035 | EIILDDEQR |
| 28036 | EIILDDQQC |
| 28037 | EIILDDQQH |
| 28038 | EIILDDQRR |
| 28039 | EIILDGQQR |
| 28040 | EIILDVQQR |
| 28041 | EIILGDQQR |
| 28042 | ELALGVLWK |
| 28043 | FPPFCALCT |
| 28044 | FPPFYALCT |
| 28045 | FPPFYAPCT |
| 28046 | FPPFYTLCT |
| 28047 | FTAYPQAVM |
| 28048 | GAIVFDLCD |
| 28049 | GAWDYMYEC |
| 28050 | GCFWAANSC |
| 28051 | GCFWAANSG |
| 28052 | GCFWATNSG |
| 28053 | GIILDDQQR |
| 28054 | GMPTNHQYI |
| 28055 | GMPTNRQYI |
| 28056 | GMSTNRQYI |
| 28057 | GNLIDWQHI |
| 28058 | GNLIDWRHI |
| 28059 | HADFERHSQ |
| 28060 | HADFGRHSQ |
| 28061 | HLSFMDLGS |
| 28062 | HLSFMNLCS |
| 28063 | HLSFMNLDS |
| 28064 | HLSFMNLGI |
| 28065 | HLSFMNLGS |
| 28066 | HLSFMSLGS |
| 28067 | HLSFVNLGS |
| 28068 | IALTVTRFP |
| 28069 | IQHWMSHSH |
| 28070 | IQHWMSHSR |
| 28071 | ISHCHEDHK |
| 28072 | ISHSHEDHK |
| 28073 | ISHYHFDHE |
| 28074 | ISHYHFDHK |
| 28075 | ISHYHEDHR |
| 28076 | ISHYHFDQK |
| 28077 | ISHYHFGHK |
| 28078 | ITQCTMMGV |
| 28079 | KLPGSHAER |
| 28080 | KLPGSHTER |
| 28081 | KLPGSRAER |
| 28082 | KYASVLEQA |
| 28083 | KYASVPEQA |
| 28084 | LDLKWWCTF |
| 28085 | MFFQKPKWS |
| 28086 | MIALRMEGN |
| 28087 | MIDLRMEGN |
| 28088 | MIDLRMEGT |
| 28089 | MIDLRMGGN |
| 28090 | MIDLRVEGN |
| 28091 | MIDLWMEGN |
| 28092 | MQEQQKAYE |
| 28093 | MQEQQKTYA |
| 28094 | MQEQQKTYE |
| 28095 | MQEQQRTYE |
| 28096 | MQQSEQCYP |
| 28097 | MQQSEQCYQ |
| 28098 | MQQSEQFYQ |
| 28099 | MQQSGQCYQ |
| 28100 | MREQQKTYE |
| 28101 | MSFQEPKWS |
| 28102 | MSFQKPKWS |
| 28103 | MSFQKPMWS |
| 28104 | MSFQKPRWS |
| 28105 | MSFQKTKWS |
| 28106 | NCLPWGQFC |
| 28107 | NCLPWSQFC |
| 28108 | NCLSWSQFC |
| 28109 | NLRECTIMN |
| 28110 | NLREGTIMN |
| 28111 | NLWECTIMN |
| 28112 | NRGCSDRIS |
| 28113 | NWLPWSQFC |
| 28114 | NYIEACAMN |
| 28115 | PREICWSHS |
| 28116 | PVCSTHFWQ |
| 28117 | PVSMGTKRE |
| 28118 | PVSMGTRRE |
| 28119 | QCRHEGSNG |
| 28120 | QCRHEWSNG |
| 28121 | QCYTFNDTK |
| 28122 | QHNYVSVVE |
| 28123 | QHNYVSVVG |
| 28124 | QHVGLQAEK |
| 28125 | RENTEDQIR |
| 28126 | RHGHGHHYD |
| 28127 | RHSHGHHYD |
| 28128 | RHSHGHHYG |
| 28129 | RHSHGHHYY |
| 28130 | RHSHGPHYD |
| 28131 | RLSFMNLGS |
| 28132 | SIEVRPPLC |
| 28133 | SIEVWPPLC |
| 28134 | SKAKYKTQM |
| 28135 | SMEFEDQCV |
| 28136 | SMEFGDQCV |
| 28137 | SMEVEDQCV |
| 28138 | SVEVRPPLC |
| 28139 | TFCFVQTLV |
| 28140 | TFCFVQTRV |
| 28141 | TEKENWMDN |
| 28142 | TEKENWMDS |
| 28143 | TFKENWMDT |
| 28144 | TFKFNWMGN |
| 28145 | TFKFNWMYN |
| 28146 | TFKVNWMDN |
| 28147 | TFRFNWMDN |
| 28148 | TFTENWMDN |
| 28149 | THCPFQHDI |
| 28150 | THCQFPHDI |
| 28151 | THCQFQHDI |
| 28152 | THCQFQHDM |
| 28153 | TNKMFMEQA |
| 28154 | VAIVFDLCD |
| 28155 | VAIVFGLCD |
| 28156 | VAWDCMYEC |
| 28157 | VAWDDMYEC |
| 28158 | VAWDYMYEC |
| 28159 | VAWDYMYEG |
| 28160 | VAWGYMYEC |
| 28161 | WANLRQMDL |
| 28162 | WGNLRQMDL |
| 28163 | WSSREYLHK |
| 28164 | WVNLRQMDL |
| 28165 | WVNLRQMGL |
| 28166 | WNVLWQMDL |
| 28167 | YYYSSKSSV |
| 28168 | YYYSSTSSV |
| 28169 | WSSREYWHR |
| 28170 | WSSRGYWHK |
| 28171 | WSSREDWHK |
| 28172 | MHNPLWFSS |
| 28173 | ACVDHMEER |
| 28174 | AGYTIHTVA |
| 28175 | AGYTIHTVE |
| 28176 | AIHLPSACW |
| 28177 | AITMDAQPN |
| 28178 | ATIDHNSPG |
| 28179 | AVGSEDSSD |
| 28180 | CAHIMDELG |
| 28181 | CDINVLIMM |
| 28182 | CDINVLIMV |
| 28183 | CDKLDKPAV |
| 28184 | CDKLDKPTV |
| 28185 | CFAHMQIAN |
| 28186 | CISNHNSTY |
| 28187 | CLSMFVGNT |
| 28188 | CVKLYVNED |
| 28189 | CVKLYVNGD |
| 28190 | CVRKCDLCG |
| 28191 | DMPWVDYMG |
| 28192 | DMTFEAYPT |
| 28193 | NATEEPYPT |
| 28194 | NATEETYPT |
| 28195 | DNDVEMAAK |
| 28196 | DSDNGPNIF |
| 28197 | EAHPHMMSQ |
| 28198 | EAQPHMMSQ |
| 28199 | ECGRYGVFS |
| 28200 | EFMEVMDQV |
| 28201 | EGGFQDFCE |
| 28202 | EGGFRDFWE |
| 28203 | EMLRCCDCT |
| 28204 | EQLDVQEVY |
| 28205 | EVDVSNDNC |
| 28206 | EVDVSNNNC |
| 28207 | EVSDGTPTV |
| 28208 | FALWSNCAE |
| 28209 | FALWSNCGE |
| 28210 | FALWSNCVE |
| 28211 | FDCHNASKP |
| 28212 | FLTEMONHA |
| 28213 | FLTGMQWHA |
| 28214 | FVADWIWPA |
| 28215 | FVADWIWPT |
| 28216 | EVADWIWSA |
| 28217 | GCFTFWDHQ |
| 28218 | GCLQVNQME |
| 28219 | GCNMIPKHD |
| 28220 | GDMPERETG |
| 28221 | GHVSTSNQG |
| 28222 | GQHSLVTMY |
| 28223 | GVQFRYSMP |
| 28224 | GVRVQDSHH |
| 28225 | GVTHKAKHE |
| 28226 | GVWVQDSHH |
| 28227 | HSDYEMNDD |
| 28228 | HYTEGYRQT |
| 28229 | IADHFLAHF |
| 28230 | IADLCNCEN |
| 28231 | IGAPVDTIN |
| 28232 | IGTAFRNSG |
| 28233 | KCESDYLPE |
| 28234 | KTNWWDGQC |
| 28235 | LAIRKIANH |
| 28236 | LAIRKITNH |
| 28237 | LARYCEKTP |
| 28238 | LCMESIMMI |
| 28239 | LCMESLMMI |
| 28240 | LCTESLMMI |
| 28241 | LDRRSSAYS |
| 28242 | LFSAWNDFA |
| 28243 | LFSAWNDFV |
| 28244 | LMCYMQKIT |
| 28245 | LMGYMQKIT |
| 28246 | LMSTMFNTF |
| 28247 | LQVHWWLLL |
| 28248 | LTIPLHAWS |
| 28249 | LYGQVVAID |
| 28250 | MAIFDSAAV |
| 28251 | MFWSGNKQG |
| 28252 | MQCDFLHDT |
| 28253 | MQKDVEQMW |
| 28254 | MSMCYGIKG |
| 28255 | NAMTQGNHQ |
| 28256 | NAMTQINHQ |
| 28257 | NAMTQVNHQ |
| 28258 | NAMTQVNHR |
| 28259 | NHNPTNRNC |
| 28260 | NKPCKYMYK |
| 28261 | NPTTVCLKM |
| 28262 | NTHEGTDGN |
| 28263 | NTTPNCNSW |
| 28264 | NTWPYPENS |
| 28265 | NYLQFGHKQ |
| 28266 | PGTQPYMGW |
| 28267 | PQEIKSTSC |
| 28268 | PRECHQSHQ |
| 28269 | QASFKQMGD |
| 28270 | QASFKQMGG |
| 28271 | QATCYDTSP |
| 28272 | QFTHNQAAN |
| 28273 | QGIQIGKCQ |
| 28274 | QHVAFNRWH |
| 28275 | QILDQQEPP |
| 28276 | QINNVVDNR |
| 28277 | QISMNVAFR |
| 28278 | QMAEFTYYG |
| 28279 | QMFDTWKCW |
| 28280 | QTSSYDAHC |
| 28281 | QTSSYDTHC |
| 28282 | QVTGIPWFY |
| 28283 | QWEDRTQMS |
| 28284 | RATCYDTSP |
| 28285 | REMEYQGER |
| 28286 | RPPNFVATG |
| 28287 | SAMPETTIF |
| 28288 | SAMPGTTIF |
| 28289 | SQPMLKVNA |
| 28290 | SSSDLCQNR |
| 28291 | TCMPFGTSQ |
| 28292 | TFKLTTGGE |
| 28293 | THDDCQWWE |
| 28294 | TIHLPSACW |
| 28295 | TIKLTTGGE |
| 28296 | VIMWNYEHY |
| 28297 | VSVSIYSGW |
| 28298 | VTMVKRKGT |
| 28299 | YDDWYSNVY |
| 28300 | YPMPMCCQP |
| 28301 | YHAPMCCQS |
| 28302 | WCRTPQREN |
| 28303 | GMTNEVQAA |
| 28304 | EGGFRDFCE |
| 28305 | RYEISERRC |
| 28306 | SAISCQCAK |
| 28307 | EVQRNIYSP |
| 28308 | HCTEGYRQT |
| 28309 | SAPEFSVIC |
| 28310 | MFRQFYIQG |
| 28311 | STVGQNHCG |
| 28312 | EFCHQHSAI |
| 28313 | TGWNFPVSC |
| 28314 | GCLTSECAY |
| 28315 | TMFYCHGPN |
| 28316 | HITPMITMW |
| 28317 | AITRHVADT |
| 28318 | QRSVFHQRS |
| 28319 | VKRLENEWH |
| 28320 | MMAMKQGFY |
| 28321 | EGRTISYGN |
| 28322 | STCYPFAMG |
| 28323 | QIIYRCRST |
| 28324 | GTAVSRQSK |
| 28325 | GCEEVGRCQ |
| 28326 | QHCFRAMED |
| 28327 | MNSFYRAEW |
| 28328 | VCHNPDPFT |
| 28329 | NGYLVHACQ |
| 28330 | NPGWQTIGQ |
| 28331 | LCAVCGDCD |
| 28332 | ATLMSDGGG |
| 28333 | YFPSIQCYE |
| 28334 | GAANRIQSW |
| 28335 | MFMTNVNSF |
| 28336 | VSVQSRAQL |
| 28337 | PLTIEVNCT |
| 28338 | KTMGIGGGP |
| 28339 | NRIQMTDFQ |
| 28340 | DFNGSNWLP |
| 28341 | FAIWKRNES |
| 28342 | HFQPVFMQP |
| 28343 | DQEAQVVTG |
| 28344 | SECEVLCSL |
| 28345 | AAMESCAEI |
| 28346 | NQREWHGLA |
| 28347 | NYVNQGMGP |
| 28348 | NISPYEMAV |
| 28349 | ATGTYNLQE |
| 28350 | HATGLVNFM |
| 28351 | NAIPYFVQA |
| 28352 | CVEQYVEQG |
| 28353 | AVAEIRPEP |
| 28354 | ASKQGTHDY |
| 28355 | SSEYSQFAI |
| 28356 | TMTVRMEQP |
| 28357 | MWGCKLFVC |
| 28358 | AGMYKCQED |
| 28359 | TYESLQNSW |
| 28360 | TKMIIFSDW |
| 28361 | LCKFANGAA |
| 28362 | INYISFVDR |
| 28363 | RQAWPKDQM |
| 28364 | QSAHPEPMC |
| 28365 | YCECGHWPN |
| 28366 | SQERMDYDG |
| 28367 | WINEANCLM |
| 28368 | SNVACIQAF |
| 28369 | YTKYNWKAA |
| 28370 | NYAMRRDSY |
| 28371 | PVICVWHDN |
| 28372 | SFKSVSQYN |
| 28373 | ENTMWQSSQ |
| 28374 | NAYYDSHCE |
| 28375 | KCADLIIRS |
| 28376 | EKRLEGWVY |
| 28377 | KDGRNPHCL |
| 28378 | QSRCVDNTV |
| 28379 | ATMNLSWGL |
| 28380 | YSDPKNMSI |
| 28381 | PDLWYEKSS |
| 28382 | TFVRKPSLM |
| 28383 | PYGPIEYDE |
| 28384 | EPRLYCAQE |
| 28385 | DRKQADQIY |
| 28386 | KGNPLDGDT |
| 28387 | GLFEGSPGA |
| 28388 | DIEFLDCEN |
| 28389 | EIHMFGQSE |
| 28390 | WGGMPNNQG |
| 28391 | SVLHVQALA |
| 28392 | ASMHEETCL |
| 28393 | MHGIARMQQ |
| 28394 | EAGCKMWPT |
| 28395 | KMAGIGCWY |
| 28396 | AVYLDHVFS |
| 28397 | GHLFNNNEW |
| 28398 | SNSHPFQSH |
| 28399 | LSAQRLVCD |
| 28400 | TVNWYSGFG |
| 28401 | YIGMKSCSG |
| 28402 | NHSLCWDSK |
| 28403 | PIWQGYWPW |
| 28404 | AELFYDAMY |
| 28405 | CQVNEEYDW |
| 28406 | DTEAIMVVD |
| 28407 | ESWRTLCQI |
| 28408 | GHHNTPDMQ |
| 28409 | GWDKKQNCG |
| 28410 | IKADVDAME |
| 28411 | LTTTVPTKQ |
| 28412 | MAEPVKRCK |
| 28413 | MCHKVMDII |
| 28414 | MSECKNPAY |
| 28415 | TEVEISASF |
| 28416 | TTVAGPHTT |
| 28417 | VSFWYDCHH |
| 28418 | AACYDYKDH |
| 28419 | AAKLPVAKG |
| 28420 | AEFLTYEQK |
| 28421 | AFWQDLYYV |
| 28422 | AGGGSVQCN |
| 28423 | AHLNCDKSM |
| 28424 | AMATCQMQH |
| 28425 | AMGRLHDSK |
| 28426 | AMMLTDLML |
| 28427 | APHWMEISS |
| 28428 | AVMWTVLHF |
| 28429 | CADWACMSL |
| 28430 | CAVKQASAM |
| 28431 | CCWFVYEST |
| 28432 | CFTESITDC |
| 28433 | CIIVRSTAA |
| 28434 | CIKYNSSIG |
| 28435 | CQSNKQQFC |
| 28436 | CVFSWNNYQ |
| 28437 | CYEITMNQG |
| 28438 | DCLISECAY |
| 28439 | DFETWDWFG |
| 28440 | DFNHIAWWQ |
| 28441 | DHHGIDTTL |
| 28442 | DIWLWDTFA |
| 28443 | DRPNHSTDG |
| 28444 | DSMFIIMNF |
| 28445 | DSMFTIMNF |
| 28446 | DVASWCQCP |
| 28447 | DYENCFESY |
| 28448 | DYGYVSINF |
| 28449 | DYTTHWQYA |
| 28550 | EEKYQPCLK |
| 28451 | EFKRMTRNK |
| 28452 | EGTQTHSAT |
| 28453 | EIKFPACGL |
| 28454 | EKLNKTWAG |
| 28455 | ENDHRDYNI |
| 28456 | ENYMCYHSL |
| 28457 | EQAPLDVMF |
| 28458 | ETMEHKKRE |
| 28459 | ETMQHKKRA |
| 28460 | ETMQHKKRE |
| 28461 | EVADENGNY |
| 28462 | EVCMAVVDN |
| 28463 | FKRICWEAG |
| 28464 | FNLSSCYHQ |
| 28465 | FTEYEHRAS |
| 28466 | FVAANQNHM |
| 28467 | GAAVSRKGY |
| 28468 | GAEQHTNWP |
| 28469 | GDIRTYPAE |
| 28470 | GFTQNYAQN |
| 28471 | GLIHSTHTV |
| 28472 | GMTNEDQAA |
| 28473 | GNPHLIEHC |
| 28474 | GRAHGNVRI |
| 28475 | GRVLLMAQD |
| 28476 | GSFPCYSLG |
| 28477 | GSFPCYSLS |
| 28478 | GSTEVEYMI |
| 28479 | GTAVSKQSK |
| 28480 | GTNHSAEVY |
| 28481 | GTRATKHHV |
| 28482 | HAPPHGTWA |
| 28483 | HAVNDHSWM |
| 28484 | HCKVKECQY |
| 28485 | HDEWLGHGM |
| 28486 | HIDRPPCCM |
| 28487 | HWMEQPPYG |
| 28488 | IQCNLCEAW |
| 28489 | IQYNLCEAW |
| 28490 | IWGICVHYF |
| 28491 | KENTINRID |
| 28492 | KHHMFVDKH |
| 28493 | KKDEWHCYP |
| 28494 | KMCWWPEAM |
| 28495 | KONASDQVH |
| 28496 | KQVDPLDFW |
| 28497 | KSDFRVLHQ |
| 28498 | KSEYVVGVP |
| 28499 | KTREHRERS |
| 28500 | KVDAEGSHF |
| 28501 | KVMVVDSVY |
| 28502 | LATMWFCAD |
| 28503 | LCYHFWKVN |
| 28504 | LEMHYKDNC |
| 28505 | LFRSHWDAQ |
| 28506 | LKASLREQW |
| 28507 | LMENYEIQD |
| 28508 | LMQKWMRTC |
| 28509 | LYLPHCHRI |
| 28510 | LYLSHCHRI |
| 28511 | LYMWQNQHV |
| 28512 | MATCYMYVD |
| 28513 | MCSYFNNRE |
| 28514 | MEFYGRAGN |
| 28515 | MESGTLLGV |
| 28516 | MFCEFPKCG |
| 28517 | MFGTKMSQY |
| 28518 | NWREFPKCG |
| 28519 | NIDLGNRGF |
| 28520 | MIDWGGEWG |
| 28521 | MMLHKQKDY |
| 28522 | MMWKENAGW |
| 28523 | MSECKNHAY |
| 28524 | MSNYHITHE |
| 28525 | MTAHKENHP |
| 28526 | MTAQSPLIP |
| 28527 | MTDYFKALC |
| 28528 | NCDHWFGTL |
| 28529 | NDKSWLKHC |
| 28530 | NETDVGTDV |
| 28531 | NQREWHGLS |
| 28532 | NRGYANVAW |
| 28533 | NTFVKNEFW |
| 28534 | NTLTMQSYL |
| 28535 | NTLTMRSYL |
| 28536 | NTNYWFYYD |
| 28537 | NVEGTRMRP |
| 28538 | NVEHSHCVG |
| 28539 | PKLCSHQTE |
| 28540 | PRLQSRKYL |
| 28541 | PSCITQESI |
| 28542 | PSTTIMNVM |
| 28543 | PTFGWMNWF |
| 28544 | QCERYHAAD |
| 28545 | QCRLDMQCP |
| 28546 | QFEDYWAIN |
| 28547 | QGQKQNTTM |
| 28548 | QHFVQGTYP |
| 28549 | QICPQSMMP |
| 28550 | QKDERHCYP |
| 28551 | QMFMQMSGH |
| 28552 | QNSRHKYAW |
| 28553 | QTLGCEMGT |
| 28554 | QTLGWEMGT |
| 28555 | QTVETYAAH |
| 28556 | QVGQYQNTI |
| 28557 | RANDGYYIN |
| 28558 | RDGFQEFTP |
| 28559 | RFTGMSDQD |
| 28560 | RNMSRQEGM |
| 28561 | RRFVQGTYP |
| 28562 | RTMGMDWFT |
| 28563 | RVAMQQMNH |
| 28564 | SAWQWAQMN |
| 28565 | SCAVCGDCD |
| 28566 | SCTARAWIC |
| 28567 | SESQEGVYG |
| 28568 | SGALKNREG |
| 28569 | SKYHWHMYH |
| 28570 | SRDAAAYSA |
| 28571 | STEWAALGV |
| 28572 | STFISSGER |
| 28573 | SYIPFDTQK |
| 28574 | TAAGYIVDV |
| 28575 | TAYMIDMYC |
| 28576 | TCNVSWKHA |
| 28577 | TCSYFNNRE |
| 28578 | TGKVDGMQY |
| 28579 | TLPKMYMWP |
| 28580 | TMRTTMCIK |
| 28581 | TMRTTMCIT |
| 28582 | TPGINRHCC |
| 28583 | TTFITETMD |
| 28584 | TTHQTAFEW |
| 28585 | TVNEALTCH |
| 28586 | TVRWCHWCL |
| 28587 | TWAMHPSHE |
| 28588 | VAWSCDKFA |
| 28589 | VEDMGQVEA |
| 28590 | VGQNFNTGR |
| 28591 | VGTDCATSL |
| 28592 | VPSLNTSAG |
| 28593 | VQKETDEVC |
| 28594 | VSDDYECGI |
| 28595 | VTQWKYGDT |
| 28596 | VIRNEEWFP |
| 28597 | VTYTNGMAE |
| 28598 | VVTVHVRGH |
| 28599 | WQIGGCPEE |
| 28600 | WTHTYATGR |
| 28601 | YAEVAVQQE |
| 28602 | YAMPLYFWE |
| 28603 | YAPQNEKPE |
| 28604 | DFKFHSTGS |
| 28605 | MMVIKEVNL |
| 28606 | RTEGWFKYD |
| 28607 | TSMWGLETS |
| 28608 | FPGVMEGEI |
| 28609 | TAKQHFMVW |
| 28610 | FKMDCHSCG |
| 28611 | ATWPERWQN |
| 28612 | LMENYEFQD |
| 28613 | ESYHYKLMT |
| 28614 | QPIHFQQRD |
| 28615 | VVNQQEFYY |
| 28616 | AQKITDEVC |
| 28617 | DVRSSMDHC |
| 28618 | FNLSFCYHQ |
| 28619 | RWHNGKGPM |
| 28620 | RYSNVAHHA |
| 28621 | FAMEQVKCD |
| 28622 | DRVMESIQP |
| 28623 | AGSGSVQCN |
| 28624 | LPTLRVADK |
| 28625 | DTDDWTCVF |
| 28626 | SWHNNWTMD |
| 28627 | WHDMVNSGP |
| 28628 | RQCTDEECW |
| 28629 | RVVMQQMNH |
| 28630 | DRLNHSTDG |
| 28631 | FLIQGDLTF |
| 28632 | FPPIVKRHH |
| 28633 | LCEGQQWHA |
| 28634 | SGSIYHHMC |
| 28635 | VVMWQFDSQ |
| 28636 | RPDLNEIEC |
| 28637 | SADNKIGGP |
| 28638 | HAYQTMSEQ |
| 28639 | CFTEPITDC |
| 28640 | MTFVCNFGT |
| 28641 | TSCGYNDNN |
| 28642 | HPMFPNTED |
| 28643 | AFAAYCSRE |
| 28644 | CAKFTNAIH |
| 28645 | NHQDNSAYP |
| 28646 | IWGIYVHYF |
| 28647 | YWWGFCWGL |
| 28648 | KVEGYGWTR |
| 28649 | YDQYGDRTM |
| 28650 | EIGIIRHGH |
| 28651 | VDHTLDFYH |
| 28652 | TVVINACLE |
| 28653 | LRHWFFSNM |
| 28654 | AMTRQNGWM |
| 28655 | WMCEFSCIQ |
| 28656 | LTTKDDKEQ |
| 28657 | PECKGAVDP |
| 28658 | FQTPVANVC |
| 28659 | QVGQYQNMI |
| 28660 | QNADQAMSG |
| 28661 | RFVLCDYME |
| 28662 | HSEMHNHHA |
| 28663 | TAFANAHTF |
| 28664 | KVGCFVDVW |
| 28665 | NWRMVHGRW |
| 28666 | GVNDLQNIC |
| 28667 | CVVNRGSIT |
| 28668 | DTHTCSGFS |
| 28669 | DFEMWDWFG |
| 28670 | TRRSWECAP |
| 28671 | SCTTRAWEC |
| 28672 | MIEPNDHGK |
| 28673 | KKDERHCYP |
| 28674 | CHCQMEAEW |
| 28675 | RVEMQYWEN |
| 28676 | DWTINDGWS |
| 28677 | TVREDCCEN |
| 28678 | SSQKYKDWE |
| 28679 | CVWSVGAEW |
| 28680 | DTAATMEPK |
| 28681 | EPRPETEGC |
| 28682 | MVTERKPWS |
| 28683 | SYDKEHAWV |
| 28684 | RANTWTRRH |
| 28685 | HLTILHCPE |
| 28686 | YCGWKEFRR |
| 28687 | MASFVEHCI |
| 28688 | KAMGMLEWA |
| 28689 | EEKDPHMDS |
| 28690 | MDNNYHQFG |
| 28691 | W1QWVRKMG |
| 28692 | NEWSRWLTG |
| 28693 | FQNVEIEKF |
| 28694 | QNMFGNQPY |
| 28695 | CKQRNCDGN |
| 28696 | LCNNADMRC |
| 28697 | VKQSMPMKG |
| 28698 | MANLKHQLA |
| 28699 | EDFVTTSEL |
| 28700 | LKRTVGVCQ |
| 28701 | ALILYARKH |
| 28702 | ASIKFEGQE |
| 28703 | SQKQFSMQH |
| 28704 | CDNAGEFGQ |
| 28705 | NRCQFGKDW |
| 28706 | VTNEFNGPR |
| 28707 | GYKCGCVCC |
| 28708 | ACEQIFEGI |
| 28709 | AHGWSQGAS |
| 28710 | AHGWSQGES |
| 28711 | AHRWSQGES |
| 28712 | AEHEVQSSF |
| 28713 | AELKITKVL |
| 28714 | AMINPKNDH |
| 28715 | AMINPNNDH |
| 28716 | AMTNPNNDH |
| 28717 | ANEEMMAAD |
| 28718 | APAPTLREW |
| 28719 | AQSPGIHQE |
| 28720 | AQSPGMHQE |
| 28721 | ATDQPANLC |
| 28722 | ATDQPVNLC |
| 28723 | ATGTQLNQD |
| 28724 | AVHNVKDVH |
| 28725 | CASSYPRDL |
| 28726 | CASYYPRAL |
| 28727 | CASYYPRDL |
| 28728 | CEFEKMDYG |
| 28729 | CEFKKMDYG |
| 28730 | CEFKKVDYG |
| 28731 | CFCKYDMQM |
| 28732 | CFCKYEMQM |
| 28733 | CFCTYDMQM |
| 28734 | CGMCHECTL |
| 28735 | CGTAYWTAY |
| 28736 | CGTTYWTAY |
| 28737 | CPKAWEKAA |
| 28738 | CPKDWAKAA |
| 28739 | CPKDWEKAA |
| 28740 | CPKDWGKAA |
| 28741 | CPKGWEKAA |
| 28742 | CQMLLHAFK |
| 28743 | CQMLLRAFK |
| 28744 | COTETILCG |
| 28745 | COTKTILCG |
| 28746 | CQTKTMLCG |
| 28747 | CTKECMLWP |
| 28748 | CTKEYMLWP |
| 28749 | CVECNQPVR |
| 28750 | CVMCHACTL |
| 28751 | CVMCHECTL |
| 28752 | DAGCMGGWF |
| 28753 | DCARQHYYA |
| 28754 | DICLEPAQT |
| 28755 | DICLETAQT |
| 28756 | DICLETTQT |
| 28757 | DICSETAQT |
| 28758 | DKSHVDQDK |
| 28759 | DLYTYIMEN |
| 28760 | DLYTYIMGN |
| 28761 | DLYTYLMEN |
| 28762 | DLYTYMMEN |
| 28763 | DLYTYVMEN |
| 28764 | DMEEHTHSC |
| 28765 | DNLCIGAFG |
| 28766 | DNLCIGASG |
| 28767 | DNPCIGAFG |
| 28768 | DQRMLLKEL |
| 28769 | DQRMLLKGL |
| 28770 | DSCSIKCDE |
| 28771 | DSCSITCDE |
| 28772 | DSCTHHEGF |
| 28773 | DSHTANFRG |
| 28774 | DSHTVNFRG |
| 28775 | DSYTHHEGF |
| 28776 | DYASLAGQA |
| 28777 | DYASLEGQA |
| 28778 | DYASLEGRA |
| 28779 | DYASLGGQA |
| 28780 | DYASLVGQA |
| 28781 | DYGPKDFFA |
| 28782 | DYGPKEFFA |
| 28783 | EAIFAMTST |
| 28784 | EAYAMKQNT |
| 28785 | EDQVASHWI |
| 28786 | EFMCVDQLE |
| 28787 | EFMCVDQSE |
| 28788 | EGVIISLLE |
| 28789 | EMMQTCVQH |
| 28790 | EMMRTCVQH |
| 28791 | EQICSEIDQ |
| 28792 | EQVMDTWQL |
| 28793 | ESLSGGEHP |
| 28794 | ESLSNGEHP |
| 28795 | ESLSSGEHP |
| 28796 | ESLYSGEHP |
| 28797 | ESQSSGEHP |
| 28798 | ETQYWYARQ |
| 28799 | EVFLESQDE |
| 28800 | EVERESQDE |
| 28801 | EVKYKGNYN |
| 28802 | FADLILSDG |
| 28803 | FGDKMTVTS |
| 28804 | FSPNTPRSD |
| 28805 | FSPNTQRSD |
| 28806 | FWSHVGLQE |
| 28807 | FWSPVGLQE |
| 28808 | GASYFSQPV |
| 28809 | GCTWEQHAE |
| 28810 | GCTWEQHGE |
| 28811 | GCTWEQHVE |
| 28812 | GKSHVDQDK |
| 28813 | GKSHVEQDK |
| 28814 | GKSHVNQDK |
| 28815 | GKSPVDQDK |
| 28816 | GQDCWGLAM |
| 28817 | GRRYPECTT |
| 28818 | GRWYPECTT |
| 28819 | GSSYFGQPV |
| 28820 | GSSYFIQPV |
| 28821 | GSSYFNQPV |
| 28822 | GSSYFSQPV |
| 28823 | GTSYFSQPV |
| 28824 | GTYGSSFYM |
| 28825 | GVAHYHHHP |
| 28826 | GVAHYHHHQ |
| 28827 | GVAHYHHRQ |
| 28828 | GVAHYQHHQ |
| 28829 | GVAHYRHHQ |
| 28830 | GVAPYHHHQ |
| 28831 | GVFECSTCQ |
| 28832 | GYTWEQHVE |
| 28833 | HAVWRQSSH |
| 28834 | HCWGHAFFF |
| 28835 | HCWGHEFFF |
| 28836 | HCWGHGEFF |
| 28837 | HCYSTSEME |
| 28838 | HCYSTSETE |
| 28839 | HTDDLKKVI |
| 28840 | HTIITNQPY |
| 28841 | HVFSANVDK |
| 28842 | HVFSANVNK |
| 28843 | HVVWRQSSH |
| 28844 | IAHAAMHDG |
| 28845 | IAHEAMHDG |
| 28846 | IAHEAMRDG |
| 28847 | IAHEAMYDG |
| 28848 | IAHGAMHDG |
| 28849 | ICFQHQIRK |
| 28850 | ICFQYQIRK |
| 28851 | ICMAKNGWW |
| 28852 | ICMDKHGWW |
| 28853 | ICMDKNGWW |
| 28854 | ICMDKSGWW |
| 28855 | IIGFMPPTG |
| 28856 | ISNPLMTQM |
| 28857 | ITTAYPECD |
| 28858 | IVAIAHGEH |
| 28859 | IVASAHGEH |
| 28860 | KAIPQGSSC |
| 28861 | KARQDDVNT |
| 28862 | KHDEYHTYT |
| 28863 | KHNPSRHGI |
| 28864 | KQVNFNAKN |
| 28865 | KSDTQCRFF |
| 28866 | KSDTQWRFF |
| 28867 | KTVPECESS |
| 28868 | KTVQECESS |
| 28869 | KTVQEGESS |
| 28870 | KTVQEWESS |
| 28871 | LAAMQQGPW |
| 28872 | LAMRRFDNF |
| 28873 | LCFQHQIRK |
| 28874 | LENKNDCSM |
| 28875 | LFNKNGCSM |
| 28876 | LFNKNGCSV |
| 28877 | LFRAYAWFQ |
| 28878 | LGRKPYALD |
| 28879 | LGSDFNAND |
| 28880 | LLTGQNSSH |
| 28881 | LMWIALEAW |
| 28882 | LPWIHTNAN |
| 28883 | LSHKPADPT |
| 28884 | LSMQWAVIH |
| 28885 | LSMQWAVLH |
| 28886 | LSMQWVVLH |
| 28887 | LTCYHNELS |
| 28888 | LVMRRFDNF |
| 28889 | MADLIVEHD |
| 28890 | MAEHRKQEH |
| 28891 | MCHRASDQN |
| 28892 | MCQRASDQN |
| 28893 | MDGQAWKEA |
| 28894 | MGHKPVLSS |
| 28895 | MIRADIRLI |
| 28896 | MIRAVIRLE |
| 28897 | MIREAIRLI |
| 28898 | MIREDIRLI |
| 28899 | MIREGIRLI |
| 28900 | MIREVIRLI |
| 28901 | MIREVMRLI |
| 28902 | MERGVIRLI |
| 28903 | MERVVIRLI |
| 28904 | MLTGQNSSH |
| 28905 | MLYICMMAT |
| 28906 | MNMCFGQST |
| 28907 | MSMQWAVLH |
| 28908 | MTTVIYDSC |
| 28909 | MVEMDHWAK |
| 28910 | MVETDHWAK |
| 28911 | MYQRASDQN |
| 28912 | NATSIYDID |
| 28913 | NATSIYDVD |
| 28914 | NFEMQPRAD |
| 28915 | NFMLVNGPL |
| 28916 | NNEPYQKFN |
| 28917 | NNEPYRKFN |
| 28918 | NNFNDAAGL |
| 28919 | NNFNDEAGL |
| 28920 | NPDYRNEMP |
| 28921 | NTRPFEKDI |
| 28922 | PERRIGQWY |
| 28923 | PGICKANWT |
| 28924 | PGIRKANWT |
| 28925 | PMFPDSMSS |
| 28926 | PMSPDSMSS |
| 28927 | QCSYCQQVY |
| 28928 | QHVPVGPPA |
| 28929 | QHVQVGPPA |
| 28930 | QIMWFPPEE |
| 28931 | QLCSPPMLD |
| 28932 | QLCYPPMLD |
| 28933 | QLERTGVHP |
| 28934 | QLHYYNVGH |
| 28935 | QMFQGLWSH |
| 28936 | QPERTGVHP |
| 28937 | QQERFPHSW |
| 28938 | QRVQVGPPA |
| 28939 | QSDTQCRFF |
| 28940 | RHVQVGPPA |
| 28941 | RIHYELYIC |
| 28942 | RPEAVICWN |
| 28943 | RPEDVICWN |
| 28944 | SAAAVPSWH |
| 28945 | SAADVPSWH |
| 28946 | SAAVKSEPP |
| 28947 | SADVKSEPP |
| 28948 | SAHMYHAGY |
| 28949 | SATQNWNEH |
| 28950 | SATVKSEPP |
| 28951 | SDTWAMYHH |
| 28952 | SGTWAMYHH |
| 28953 | SHATFMMGN |
| 28954 | SKSHVDQDK |
| 28955 | SRDWPASMN |
| 28956 | SRDWPESMN |
| 28957 | SRDWSESMN |
| 28958 | SSPNTQRSD |
| 28959 | STHIYWICP |
| 28960 | STHIYWICS |
| 28961 | STHVYWICP |
| 28962 | STVPQMRWT |
| 28963 | SVSPHTPMH |
| 28964 | SVSQHTPMH |
| 28965 | SYCPVVQWD |
| 28966 | SYCQVVQWD |
| 28967 | TDPLVMMEH |
| 28968 | TECLCVYNF |
| 28969 | TLSSGARDM |
| 28970 | TMMFEQNSK |
| 28971 | TTDQPANLC |
| 28972 | TVETDHWAK |
| 28973 | VAEHRKQEH |
| 28974 | VAEHRQQEH |
| 28975 | VDGQAWKEA |
| 28976 | VKEQTYAAN |
| 28977 | VLAGLECQY |
| 28978 | VNEEMMAAD |
| 28979 | VTDRNAWVG |
| 28980 | VTEHRKQEH |
| 28981 | VTGTQLNQD |
| 28982 | VTNRWKRKS |
| 28983 | VTNRWKRMS |
| 28984 | VVECASHSG |
| 28985 | VVNQFEHWM |
| 28986 | WIHSELYIC |
| 28987 | WIHYELYIC |
| 28988 | WSFSERPGS |
| 28989 | WTGYSWSVA |
| 28990 | YAVMSHPAG |

TABLE 81
Sequences of the 581 to 589 Region in AAV5 VP1
Capsid Polypeptide that Drive Skeletal Muscle
Tissue Tropism

| SEQ | |
|---|---|
| ID | 581-589 |
| NO | Sequence |
| 30991 | ACIFVVLPL |
| 30992 | ACIFVVLPL |
| 30993 | AGKEVSAGM |
| 30994 | AKKGMRHDQ |
| 30995 | AKKGMWHDQ |
| 30996 | APSKPWLHF |
| 30997 | ARLCKRKQA |
| 30998 | AWVEHAAFM |
| 30999 | AYIFVVLPL |
| 31000 | CAWDKHHKM |
| 31001 | CAWDKHHKV |
| 31002 | CDPHWAWCE |
| 31003 | CDPHWDWCE |
| 31004 | CDPHWDWWE |
| 31005 | CDPHWGWCE |
| 31006 | CFVHTSCQN |
| 31007 | CPWFGLCNW |
| 31008 | CPWFSLCNW |
| 31009 | CPWFSLWNW |
| 31010 | CRTCDEDGA |
| 31011 | CRTCDEDVA |
| 31012 | DDCQFDNEN |
| 31013 | DDFGTLPRM |
| 31014 | DENIKIIYG |
| 31015 | DENIKVIYG |
| 31016 | DIDPLRNSG |
| 31017 | DIDQLRNSC |
| 31018 | DIDQLRNSG |
| 31019 | DKLKFVKQW |
| 31020 | DKPKFVKQW |
| 31021 | DLRSPGFYA |
| 31022 | DMTPKNMQM |
| 31023 | DRAMYHKVV |
| 31024 | DRAMYRKVG |
| 31025 | DRAMYRKVV |
| 31026 | DRTMYRKVV |
| 31027 | DVYQFWTSF |
| 31028 | EACYMCRNV |
| 31029 | EAYDVAAVN |
| 31030 | EAYDVATVN |
| 31031 | EFECFHNGP |
| 31032 | EFGCFHNGP |
| 31033 | ELNLPVRWY |
| 31034 | ERRMEVLNA |
| 31035 | ETYDVAAVN |
| 31036 | EVECFHNGP |
| 31037 | FTDTHEMVL |
| 31038 | FYPRPELTG |
| 31039 | GCIQFESTG |
| 31040 | GDGYLEDSW |
| 31041 | GMAPKNMQM |
| 31042 | GMTPKNMQM |
| 31043 | GNKDCYGSM |
| 31044 | GRNFQESLQ |
| 31045 | GTMLTTEDL |
| 31046 | GVWQIHARE |
| 31047 | GVWQIPARE |
| 31048 | GVWRIHARE |
| 31049 | GTTTMQTLH |
| 31050 | HLDAIWPLW |
| 31051 | HLDEEWPLW |
| 31052 | HLDEIWPSW |
| 31053 | HLDESWPLW |
| 31054 | HMQWMGFRG |
| 31055 | HSRCSHYDW |
| 31056 | HTPHDDYRS |
| 31057 | HYMSMTTYE |
| 31058 | IAYTLQFQW |
| 31059 | ICNEQEFVA |
| 31060 | ICNEQEVVA |
| 31061 | ICNKQEFVA |
| 31062 | IDHCGCTQP |
| 31063 | IFRCFGVEY |
| 31064 | ILARWSEKE |
| 31065 | IPAFPLRMV |
| 31066 | IPEFPLRMV |
| 31067 | EPEFPLRRV |
| 31068 | EVEMPFCST |
| 31069 | KENLKTNWW |
| 31070 | KQEGDYVDM |
| 31071 | KVKACEGSK |
| 31072 | KVKSCAGSK |
| 31073 | KVKSCEESK |
| 31074 | KVKSCEGAK |
| 31075 | KVKSCEGSK |
| 31076 | KVKSWEGSK |
| 31077 | KVRSCEGSK |
| 31078 | KWMQDITYF |
| 31079 | LALNAPNFC |
| 31080 | LELPDSEKV |
| 31081 | LELPVSEKV |
| 31082 | LLPLFTPYV |
| 31083 | LMWIGQVVE |
| 31084 | LMWTGQVVE |
| 31085 | LQAQEQFHE |
| 31086 | LRNCECNDH |
| 31087 | LRTMVQNDH |
| 31088 | LRTMVRNDH |
| 31089 | LTGWRIVVV |
| 31090 | LVLNAPNFC |
| 31091 | LWTMVQNDH |
| 31092 | MAGYNDSCM |
| 31093 | MAGYNDSWM |
| 31094 | MAGYNGSCM |
| 31095 | MAGYSDSCM |
| 31096 | MIEWQFCTS |
| 31097 | MMIGNQMHC |
| 31098 | MPGYNDSCM |
| 31099 | MRGNCEIKR |
| 31100 | MTGYNDSCM |
| 31101 | NAPCMWMPD |
| 31102 | NAPCMWMPY |
| 31103 | NAPCMWMSY |
| 31104 | NDFHIEPIH |
| 31105 | NEDPGAGCN |
| 31106 | NEDPGAGCY |
| 31107 | NGFHIEPIH |
| 31108 | NGFRIEPIH |
| 31109 | NLQSMFCEP |
| 31110 | NQPSSDDRQ |
| 31111 | NVAQPTIHR |
| 31112 | NVTQPTEHR |
| 31113 | PFECEANEQ |
| 31114 | PFGCEANEQ |
| 31115 | PHEQKMLDR |
| 31116 | PPCGLKCMN |
| 31117 | PPCGLKCMS |
| 31118 | PQAQEQFHI |
| 31119 | QFFHTLWKY |
| 31120 | QFSHTLWKY |
| 31121 | QNWHMKNKM |
| 31122 | QNWHMKNNM |
| 31123 | QSTQICHNR |
| 31124 | RFWPRKVQP |
| 31125 | RFWQRKVQP |
| 31126 | RKDDQMYAL |
| 31127 | RKEGCTSHG |
| 31128 | RSGMARYAY |
| 31129 | RTMLTTEDL |
| 31130 | SHYFCTMST |
| 31131 | SPPCCKKEL |
| 31132 | SWKLKLCQT |
| 31133 | SWRLKLCQT |
| 31134 | TCCLPWQRI |
| 31135 | TGKEASAGM |
| 31136 | TGKEDSAGM |
| 31137 | TGKEGSAGM |
| 31138 | TGKEVSAGM |
| 31139 | TKKGMRHDQ |
| 31140 | TSFSFPDCM |
| 31141 | TVSCGPADM |
| 31142 | TVSCGPTDM |
| 31143 | TWVEHAAFM |
| 31144 | VDLHHPEYR |
| 31145 | VVKFSWKPW |
| 31146 | VVPQPPLET |
| 31147 | VVQFSWKPW |
| 31148 | WNPHHDFEA |
| 31149 | WNPHHDFED |
| 31150 | WNPHHDFEG |
| 31151 | WNPHRDFED |
| 31152 | YGNCRGHRL |
| 31153 | YGNCWGHRL |
| 31154 | YIDQLRNSG |
| 31155 | YNPYRFINK |
| 31156 | YNPYRFMNK |
| 31157 | AENLPRWGM |
| 31158 | CIETGILNG |
| 31159 | CTQTTVRWP |
| 31160 | EKVHCMWWH |
| 31161 | ETHEMNVCM |
| 31162 | FCPAEWGCL |
| 31163 | GRHWAFCDY |
| 31164 | HCSRHFCEV |
| 31165 | HQQSEAFVS |
| 31166 | EACMGEVQG |
| 31167 | KAHQTVQDK |
| 31168 | KCVSMDFSG |
| 31159 | CTQTTVRQP |
| 31170 | NAISVGEWD |
| 31171 | NKRNLYALQ |
| 31172 | NMVHENRFW |
| 31173 | PAWDLVGML |
| 31174 | PKGMAKICE |
| 31175 | QKKGIEAVD |
| 31175 | RFRFRAQVW |
| 31177 | RLERDNNEA |
| 31178 | VIKWRSQDK |
| 31179 | WLANSWFRE |
| 31180 | YMWWQEGTL |
| 31181 | YVVGDAACP |
| 31182 | KFAMDWVSD |
| 31183 | LNELPRAEY |
| 31184 | ISLQEMMGK |
| 31185 | VGECVASAP |
| 31186 | MREMPMVGA |
| 31187 | AAANYDQIE |
| 31188 | AACCPFAIM |
| 31189 | AAGMSGQFE |
| 31190 | AANEKPTHQ |
| 31191 | AAVQFVLSC |
| 31192 | ACMSRAMFD |
| 31193 | ACQCKVIWQ |
| 31194 | ACTWPGVGP |
| 31195 | ADQSWYIKG |
| 31196 | AEIYNCEFK |
| 31197 | AEVEADQRM |
| 31198 | AFANALACY |
| 31199 | AFEYFGNPI |
| 31200 | AFNRIGRYT |
| 31201 | AFYYLGHDS |
| 31202 | AGSTAMQSQ |
| 31203 | AGTSEDMMP |
| 31204 | AHMENELEM |
| 31205 | AHNYSLAEQ |
| 31206 | AHRQLDAEW |
| 31207 | AIAWWHEPM |
| 31208 | AIDWEDVWE |
| 31209 | AIEMQRQTD |
| 31210 | AIFEPRRWH |
| 31211 | AIQLHFEWG |
| 31212 | AKGNTNNNA |
| 31213 | ALVHKDLYG |
| 31214 | AMMELMWTD |
| 31215 | ANHHCGLAC |
| 31216 | ANHLFVIEH |
| 31217 | APDDENCDF |
| 31218 | AQATESSQP |
| 31219 | AQVEYTYET |
| 31220 | AQYPTLEYA |
| 31221 | ASFFSSVAQ |
| 31222 | ATDALSTSL |
| 31223 | ATDNHWGHG |
| 31224 | ATENVMWTC |
| 31225 | ATGLHITTC |
| 31226 | ATHERDFFV |
| 31227 | ATHEVITPA |
| 31228 | ATNWGPMSP |
| 31229 | ATQEFLGLN |
| 31230 | ATVATYINT |
| 31231 | AVGEVDAYS |
| 31232 | AVIYSSYNW |
| 31233 | AVMYYGYES |
| 31234 | AVWIEPRQW |
| 31235 | AVYLNEFNM |
| 31236 | AWFCPLLYN |
| 31237 | AWSARSVNM |
| 31238 | AYGWENQFE |
| 31239 | AYHELTSCA |
| 31240 | CADSKMTST |
| 31241 | CAHFAMNNH |
| 31242 | CAVCPALSA |
| 31243 | CCRHWRPTP |
| 31244 | CEHDMCQPT |
| 31245 | CEQVQIGDE |
| 31246 | CFICCHCFQ |
| 31247 | CGEHDKFKS |
| 31248 | CGGCEDWPM |
| 31249 | CHMYHRREG |
| 31250 | CHPHDEHKT |
| 31251 | CHQENFVFR |
| 31252 | CIASFTDGK |
| 31253 | CKVNESAKN |
| 31254 | CNPRPQMVG |
| 31255 | CNTKFLSQS |
| 31256 | CQKTFELHG |
| 31257 | CQMPERWTN |
| 31258 | CSGRGEIEF |
| 31259 | CTCDYTAQY |
| 31260 | CTCEGGSTA |
| 31261 | CVLGHIHHG |
| 31262 | CVMQRAADL |
| 31263 | CVQPHVDPM |
| 31264 | CVTCTNVYG |
| 31265 | CWSQEANRG |
| 31266 | CWTDNDDMD |
| 31267 | CYGHLNAMC |
| 31268 | DAEHSPNIM |
| 31269 | DAKHHQMVH |
| 31270 | DAKPYQRNI |
| 31271 | DATATGQWS |
| 31272 | DAWTMASAM |
| 31273 | DCEEFDRTP |
| 31274 | DCKWEHHSD |
| 31275 | DCPQDEQMN |
| 31276 | DDEPKTDWC |
| 31277 | DDMWQRDWF |
| 31278 | DDPAGHCYV |
| 31279 | DEHKRLDIC |
| 31280 | DEVPNKCDC |
| 31281 | DFKPKQHDH |
| 31282 | DFNWQDSGY |
| 31283 | DFSSINCQS |
| 31284 | DGMCNGGHP |
| 31285 | DGVSDHQRP |
| 31286 | DHTDMLCFG |
| 31287 | DIFPNCKTD |
| 31288 | DIFPSMNMS |
| 31289 | DIFQLTDDS |
| 31290 | DIHEWQVMS |
| 31291 | DIHGSQEFA |
| 31292 | DINENMSVE |
| 31293 | DIVCKFASP |
| 31294 | DLWRTFEAQ |
| 31295 | DNHDCGRSH |
| 31296 | DNHGYDRHY |
| 31297 | DNRCCWHMN |
| 31298 | DNRWWVAFS |
| 31299 | DNVIMTTVG |
| 31300 | DPSNCMRIM |
| 31301 | DQEVCTAMD |
| 31302 | DQLNVNESG |
| 31303 | DQNIFLSID |
| 31304 | DRSDGGFVG |
| 31305 | DSGEGLHNK |
| 31306 | DSLLMREAY |
| 31307 | DSRRIYAWI |
| 31308 | DSYCVNHEH |
| 31309 | DTAYVWCEM |
| 31310 | DTNRCMMQS |
| 31311 | DTQLDDIAG |
| 31312 | DTYPMQSAD |
| 31313 | DVDDLVEIM |
| 31314 | DVEDHDSQQ |
| 31315 | DVIANIHSR |
| 31316 | DVMHNHVKA |
| 31317 | DYRQYLEVQ |
| 31318 | EADKQYDDQ |
| 31319 | EAGMKQLCA |
| 31320 | EAEQFPSRG |
| 31321 | EAQDKWAGA |
| 31322 | EAQSIACPT |
| 31323 | EAYMMVCSH |
| 31324 | ECLFLRNVE |
| 31325 | ECNRMAMAQ |
| 31326 | ECNVNPACE |
| 31327 | ECSDWTHMQ |
| 31328 | ECWRHVQWN |
| 31329 | ECYSIYCEE |
| 31330 | EDNIRIMMI |
| 31331 | EDYHYTHTE |
| 31332 | EEAYVNCSV |
| 31333 | EFDEFNTRG |
| 31334 | EFESGLLDH |
| 31335 | EFHSYCMSF |
| 31336 | EFIHIDREC |
| 31337 | EFKCVDATE |
| 31338 | EFMEAHCGC |
| 31339 | EFMPEISTG |
| 31340 | EFRHLKHGG |
| 31341 | EGLENNDMF |
| 31342 | EHAGCQLWS |
| 31343 | EHEQLPSCY |
| 31344 | EFIFFDDNG |
| 31345 | EHKLVMCFP |
| 31346 | EHKWYTTLG |
| 31347 | EIHHFEYWS |
| 31348 | EIIHVVGND |
| 31349 | EILKNYTEA |
| 31350 | EIRPQDTEM |
| 31351 | EKAKRISGW |
| 31352 | EKPMMQNEC |
| 31353 | EKYSIIAHS |
| 31354 | ELAYLWPPH |
| 31355 | ELHSVNYML |
| 31356 | EMCVQHNTS |
| 31357 | EMEAKAFQD |
| 31358 | EMFYCGAYH |
| 31359 | EMMASAQSN |
| 31360 | EMMPLHQQP |
| 31361 | ENFSFYKCT |
| 31362 | ENIHYACSN |
| 31363 | ENLVINHIS |
| 31364 | ENNKWYSAW |
| 31365 | ENRCFSDEQ |
| 31366 | EPHWFFAES |
| 31367 | EPQATQKAI |
| 31368 | EQRIVQQAT |
| 31369 | ERCESHRAS |
| 31370 | ERQTCWRGS |
| 31371 | ESADMACSQ |
| 31372 | ESHSYVIAA |
| 31373 | ESRCVLEQG |
| 31374 | ESTNSHWGA |
| 31375 | ESVDVGLMH |
| 31376 | ETEPHTFFS |
| 31377 | ETGIDNNAT |
| 31378 | ETNLECGQK |
| 31379 | ETQYCRGQQ |
| 31380 | EVAHKLKHA |
| 31381 | EVDEVSPSA |
| 31382 | EVGTNPSKN |
| 31383 | EVRVDPCCL |
| 31384 | EVSHDAQCT |
| 31385 | EVTEVQTKA |
| 31386 | EWAMWKPYA |
| 31387 | EWSDEHLKA |
| 31388 | EWVREDGLP |
| 31389 | EYGVVKTPP |
| 31390 | EYMNYEHES |
| 31391 | EYSQNHSEV |
| 31392 | FAAHYGQND |
| 31393 | FAAPNSYWP |
| 31394 | FAKTDVWCG |
| 31395 | FANQGAIHP |
| 31396 | FCPEHWFNI |
| 31397 | FDMFASPDD |
| 31398 | FDNSCPKRW |
| 31399 | FFALNPNYP |
| 31400 | FFELSQTVF |
| 31401 | FGGKIDIGL |
| 31402 | FHCRGYLGQ |
| 31403 | FHHAMTEWQ |
| 31404 | FKPVNAPQL |
| 31405 | FLESWEKDQ |
| 31406 | FLPPNCIEW |
| 31407 | FLWLMQAIN |
| 31408 | FMEQYMMVD |
| 31409 | FMGQQNVAC |
| 31410 | FPQHMNVCV |
| 31411 | FRAQLPTCS |
| 31412 | FRGIETGQG |
| 31413 | FSGCYCMRI |
| 31414 | FYGQVTKSC |
| 31415 | FYQTIGQQE |
| 31416 | GAFMDMLIS |
| 31417 | GAIDYHTQM |
| 31418 | GAMLAQLSC |
| 31419 | GASWNDREH |
| 31420 | GEPELPNNA |
| 31421 | GEFIYQNRI |
| 31422 | GGARALRFN |
| 31423 | GGIQLDREW |
| 31424 | GHRKAFLAT |
| 31425 | GIFQYMSKH |
| 31426 | GIGPIMSAM |
| 31427 | GIIQVRMEW |
| 31428 | GINQEYTKC |
| 31429 | GITLTELQF |
| 31430 | GLRHDPAQF |
| 31431 | GMAYLQNEG |
| 31432 | GMQWMDRQA |
| 31433 | GMVQKQHGR |
| 31434 | GNVVWLARP |
| 31435 | GPDGAKRNK |
| 31436 | GPIGMDWED |
| 31437 | GPISGRYSV |
| 31438 | GPVVSPCKP |
| 31439 | GQFEDLLVL |
| 31440 | GQGLKAWPC |
| 31441 | GQVAFDKDY |
| 31442 | GRHDWMDKE |
| 31443 | GSLFSHFWV |
| 31444 | GSYNRLHDN |
| 31445 | GTDRNYAQC |
| 31446 | GTEQVSAEA |
| 31447 | GVHHNEHCR |
| 31448 | GVKFFEYDQ |
| 31449 | GVMVWNQLR |
| 31450 | GVYMEHNFE |
| 31451 | GVYSNCHDG |
| 31452 | GWYCMRQKI |
| 31453 | GYCGLMQYP |
| 31454 | GVTDDGVGY |
| 31455 | HADHAMAYF |
| 31456 | HASLQCMKT |
| 31457 | HCEGGQTIV |
| 31458 | HDLSYIDMA |
| 31459 | HEDRKHAGE |
| 31460 | HEDVGWCSR |
| 31461 | HEEFEYWNL |
| 31462 | HEHKRSSTE |
| 31463 | HEIDGWQMA |
| 31464 | HFDEITAGT |
| 31465 | HFERSPYWI |
| 31466 | HFQPLFEYN |
| 31467 | HGTEVCHWS |
| 31468 | HHEEHDIFA |
| 31469 | HHSFTIPYQ |
| 31470 | HILHLYICW |
| 31471 | HNFYPVTGG |
| 31472 | HPEEFRGFT |
| 31473 | HPGTYAIHA |
| 31474 | HPHAGGINK |
| 31475 | HPVWVRSDH |
| 31476 | HQETFFHGP |
| 31477 | HRDPHLLME |
| 31478 | HSFLDNNAD |
| 31479 | HSGMDHAQY |
| 31480 | HSMQGAPLY |
| 31481 | HSRWFEDYE |
| 31482 | HSTCPCVVR |
| 31483 | HSYPTAFYY |
| 31484 | HTGMEHMLY |
| 31485 | HTKQMDVDM |
| 31486 | HVIDHTGIL |
| 31487 | HVKINGTGK |
| 31488 | HWYMMEDYV |
| 31489 | HYFTKYKVD |
| 31490 | IAGLFLKTY |
| 31491 | IAMISLYNG |
| 31492 | IANCNTKHL |
| 31493 | IAVQQFYAA |
| 31494 | IAYQLTEIT |
| 31495 | ICFTPMHDS |
| 31496 | ICLPKMYFG |
| 31497 | IDIDMCYDY |
| 31498 | IDPPHKMLD |
| 31499 | IFGCTSAAE |
| 31500 | IGCHRMLNP |
| 31501 | IGNCDTFTK |
| 31502 | IGVVFQRDF |
| 31503 | IHHALQCHK |
| 31504 | IHVTSKTVK |
| 31505 | IIQGPVKAN |
| 31506 | ILMSMYING |
| 31507 | ILVNQQNGQ |
| 31508 | IMEITNVHE |
| 31509 | IMELTHHNA |
| 31510 | INEMARHPK |
| 31511 | INYTYLWAE |
| 31512 | IPGYAEFCE |
| 31513 | IPGYLEIHR |
| 31514 | IPTYRNRDH |
| 31515 | IQGVLPAMA |
| 31516 | IQMDFMLWR |
| 31517 | IRPTQRPCA |
| 31518 | ISGKSHGDR |
| 31519 | ISQWEHSCW |
| 31520 | ISTDCAEFK |
| 31521 | ITETEAALY |
| 31522 | ITKHHMRNC |
| 31523 | ITSEGFSFT |
| 31524 | IVANGHWLQ |
| 31525 | IVEQCQRMR |
| 31526 | IVFQSLARG |
| 31527 | IVTMGITEI |
| 31528 | IYEIMDYLA |
| 31529 | IYFMFYCSV |
| 31530 | IYPQCALQW |
| 31531 | KATYMEFDT |
| 31532 | KCEEFAHPQ |
| 31533 | KCFLCGSAT |
| 31534 | KCFWAELWA |
| 31535 | KEAVLNHWT |
| 31536 | KHELVTRMY |
| 31537 | KHKPRQSPR |
| 31538 | KHVCLVSWY |
| 31539 | KMEWLAAGP |
| 31540 | KMMAFSEVD |
| 31541 | KNNEPPMFF |
| 31542 | KSYCFMCPT |
| 31543 | KTCEMFTPG |
| 31544 | KTTILEDCC |
| 31545 | KTVEWWGRW |
| 31546 | KVVDCGRYQ |
| 31547 | KWADAEYGH |
| 31548 | KWCYHLFCQ |
| 31549 | LANVWVCME |
| 31550 | LAPEIECRH |
| 31551 | LATSKCSAM |
| 31552 | LATSMCYQA |
| 31553 | LATYGEWHN |
| 31554 | LCDYMHMGS |
| 31555 | LCEENSVDP |
| 31556 | LCFHYMLAQ |
| 31557 | LCWGPLHIS |
| 31558 | LCYFGSRWY |
| 31559 | LCYRTEKWD |
| 31560 | LDSQWMYYN |
| 31561 | LEEAVAAGN |
| 31562 | LESTSFCTY |
| 31563 | LEYDWNGWW |
| 31564 | LFCIVQSRQ |
| 31565 | LGWSNYECA |
| 31566 | LHIRYQSAP |
| 31567 | LHNSYWSLA |
| 31568 | LHWCSQHGH |
| 31569 | LIGFRTMFG |
| 31570 | LILGAKFMG |
| 31571 | LITWDGPTF |
| 31572 | LKFWASEKG |
| 31573 | LKYQFWTYD |
| 31574 | LMMPYMGTH |
| 31575 | LNITLVMGC |
| 31576 | LNPHVSQIW |
| 31577 | LPCKEVCCR |
| 31578 | LPGTPPDNC |
| 31579 | LPKWKEEIY |
| 31580 | LPPMKQDEE |
| 31581 | LQHHKYSSM |
| 31582 | LRCIDPPCQ |
| 31583 | LRNNNCSDI |
| 31584 | LRRWDDFQT |
| 31585 | LRSIEEKLS |
| 31586 | LRSLVAEDF |
| 31587 | LSDRCDVSG |
| 31588 | LSEVMMQPG |
| 31589 | LSHIKVEQD |
| 31590 | LSKNCEYWE |
| 31591 | LSTGNIQFM |
| 31592 | LTKPMPIIL |
| 31593 | LTMISMFSD |
| 31594 | LTRPRVQKL |
| 31595 | LTSRSDFDL |
| 31596 | LVDMCRKGK |
| 31597 | LVGQYWPRD |
| 31598 | LVGSYQHFQ |
| 31599 | LVTRGVSPL |
| 31600 | LWDQTQIAI |
| 31601 | LYAVENQHW |
| 31602 | LYCQQAANW |
| 31603 | LYDHYAAAS |
| 31604 | LYNWMKLIH |
| 31605 | MADLKWEDS |
| 31606 | MAFVSKYIM |
| 31607 | MAHDIPVPV |
| 31608 | MAHQLNHNS |
| 31609 | MATDISGWF |
| 31610 | MAWTHCHKP |
| 31611 | MCLCNMVIQ |
| 31612 | MCSARRQDT |
| 31613 | MCTQPSVKP |
| 31614 | MCYQNIAFP |
| 31615 | MDEQRQHEE |
| 31616 | MDFPSCEMC |
| 31617 | MDHQLCIQY |
| 31618 | MDPILRCLH |
| 31619 | MDPRAHGKV |
| 31620 | MEQWDPDEW |
| 31621 | MFELFQEGW |
| 31622 | MFGGFVKMK |
| 31623 | MFIKWRRYW |
| 31624 | MFMWWNYFP |
| 31625 | MFRISRFMA |
| 31626 | MGILKGEFS |
| 31627 | MGTSCCNYE |
| 31628 | MHLQKHIGC |
| 31629 | MHYLVMRDA |
| 31630 | MIDPKMGDR |
| 31631 | MIHKKDGMY |
| 31632 | MIMQCNCSM |
| 31633 | MKQLSNDGE |
| 31634 | MMDLAYHWQ |
| 31635 | MMEYTHSFE |
| 31636 | MNLPDPSVG |
| 31637 | MNVPWYKDR |
| 31638 | MPCFSVAAA |
| 31639 | MPHPEIRPG |
| 31640 | MQEPMRCAI |
| 31641 | MSFLFFVFM |
| 31642 | MSLLMGHES |
| 31543 | MTEVMREIR |
| 31544 | MTIILPMTS |
| 31645 | MTKPWSIIE |
| 31646 | MTKQTLCHL |
| 31647 | MTQLCEPWL |
| 31648 | MVIQAIWPV |
| 31649 | MVIQDGHEY |
| 31650 | MVMVMEAHN |
| 31651 | MVQWEWCDN |
| 31652 | MYLEKDLSG |
| 31653 | MYQLCHAFA |
| 31654 | NAEFDNNRG |
| 31555 | NAIPWINMD |
| 31555 | NAVAQIVSD |
| 31557 | NCCPGFAIA |
| 31658 | NCPWPTGEE |
| 31659 | NCRMHNAWF |
| 31660 | NDDRCSIEL |
| 31651 | NEQWWVWYR |
| 31652 | NETMMWRAN |
| 31653 | NFHYIGTLG |
| 31664 | NFIFMQDMT |
| 31565 | NFMDYHDMV |
| 31666 | NGMLETDHV |
| 31567 | NIYMPHTCL |
| 31568 | NMATANTCV |
| 31569 | NMDGKNCRT |
| 31670 | NNEMPGWRA |
| 31671 | NNMPMDAFH |
| 31672 | NNMSAHHSK |
| 31673 | NNYHYPHIG |
| 31674 | NNYLELHRY |
| 31675 | NPSSHNQLN |
| 31676 | NQNIWKHNV |
| 31677 | NQRPYDQWA |
| 31678 | NRGCYEMEN |
| 31679 | NRTFKAECH |
| 31680 | NSIFCLENQ |
| 31681 | NSNQDQWRI |
| 31682 | NTCCWKLEN |
| 31683 | NTVERYRQS |
| 31684 | NVCLEPMDP |
| 31685 | NVEWQVRGP |
| 31686 | NVQWADIGG |
| 31687 | NYKQPVQAP |
| 31688 | NYNETKFFG |
| 31689 | NYWQAQEFY |
| 31690 | PAEVWTHSE |
| 31691 | PCCQEHCQR |
| 31692 | PCNFDNQPH |
| 31693 | PDAAYWFDG |
| 31694 | PDCPYKCYC |
| 31695 | PDGEKCERF |
| 31696 | PDNYIQNHH |
| 31697 | PDQWDFEQY |
| 31698 | PEFMTEMCT |
| 31699 | PFHMALAEE |
| 31700 | PFYHMCAAP |
| 31701 | PGCMIVSQN |
| 31702 | PGELGDENF |
| 31703 | PHNWRSVSW |
| 31704 | PMMQKLCCG |
| 31705 | PNNEGGMKP |
| 31706 | PPGSHKGEN |
| 31707 | PPPDRTFAA |
| 31708 | PQEFREMCP |
| 31709 | PQLKEGQLY |
| 31710 | PQNGMLHYS |
| 31711 | PRAENDESR |
| 31712 | PTETDRFFQ |
| 31713 | PTTNWHYVQ |
| 31714 | PTYHWDSKT |
| 31715 | PVEHVEKEM |
| 31716 | PWHEYAGFT |
| 31717 | PWLAEPRGG |
| 31718 | PWQSGSDGD |
| 31719 | PYASQECIS |
| 31720 | PYPAIELGK |
| 31721 | PYSPHKQSA |
| 31722 | QANVNGHDF |
| 31723 | QCAFIPNSV |
| 31724 | QCEHDRQIM |
| 31725 | QCPVECEHV |
| 31726 | QCYRKVVFR |
| 31727 | QDIWPVCRE |
| 31728 | QEDDFRNKS |
| 31729 | QEKIAMRTN |
| 31730 | QFTSQNEGP |
| 31731 | QFVGRERQV |
| 31732 | QGFYTHTGY |
| 31733 | QHMPRHIWH |
| 31734 | QHWQFCTNA |
| 31735 | QIADQTGIV |
| 31736 | QIGPTISEY |
| 31737 | QIMNYCYFN |
| 31738 | QISCLEHGL |
| 31739 | QISYHIQHH |
| 31740 | QITQHPCEQ |
| 31741 | QITSMKCAN |
| 31742 | QIVQSRSAV |
| 31743 | QIYNWEKMT |
| 31744 | QKGNRTNQI |
| 31745 | QLIVCDTGH |
| 31746 | QMGSRMEMC |
| 31747 | QMHSTFCGW |
| 31748 | QMPIGGCSE |
| 31749 | QNSHKHWDH |
| 31750 | QPCVDWPYF |
| 31751 | QQAPGQMFY |
| 31752 | QQDRLWTTG |
| 31753 | QQKDQAWRH |
| 31754 | QQMIRQLSE |
| 31755 | QQMWGCACC |
| 31756 | QQNVLEHHF |
| 31757 | QQSPVEQCY |
| 31758 | QRQNVQQTW |
| 31759 | QSDAELKYY |
| 31760 | QSDLQHWWY |
| 31761 | QSKELSCMK |
| 31762 | QSKSGQHIA |
| 31763 | QTCTSQDYS |
| 31764 | QTLESMIYH |
| 31765 | QTMEYEIGG |
| 31766 | QTTQTDCTK |
| 31767 | QTVEMSATV |
| 31768 | QVDEWGGHE |
| 31769 | QVDNREGDV |
| 31770 | QVKCMQMWP |
| 31771 | QVVHNEFIH |
| 31772 | QVWITDAPI |
| 31773 | QVWITAKEE |
| 31774 | QYDAFAVLA |
| 31775 | QYMDQDVAI |
| 31776 | RADEDMTSI |
| 31777 | RADHWGSWP |
| 31778 | RENIHCEGE |
| 31779 | RHELTMSHY |
| 31780 | RHEPLHYFH |
| 31781 | RHWLNGCSN |
| 31782 | RIDINVDCY |
| 31783 | RIELMACTT |
| 31784 | RIKYEHCQL |
| 31785 | RIMYFDKFT |
| 31786 | RITYFDDQC |
| 31787 | RNGFRWTVL |
| 31788 | RPEAYWVPV |
| 31789 | RRDSDSVFK |
| 31790 | RRFCISLKC |
| 31791 | RSAEGISHW |
| 31792 | RSHHHQRMM |
| 31793 | RTIEEENTS |
| 31794 | RTVEIESWV |
| 31795 | RVDDENGGN |
| 31796 | RVDHDMADG |
| 31797 | RVESQACFQ |
| 31798 | RVSVDESDK |
| 31799 | RWEQMAYSW |
| 31800 | SAGVVVQSI |
| 31801 | SATMVADKE |
| 31802 | SAYMALHPL |
| 31803 | SCEWPKQCK |
| 31804 | SCTHWNTWR |
| 31805 | SDAPEHDGQ |
| 31806 | SDLKEETAY |
| 31807 | SDQWYRVSF |
| 31808 | SHMVVTSQG |
| 31809 | SHVESHQWC |
| 31810 | SIDVTSCAF |
| 31811 | SIHPLNQEE |
| 31812 | SIRVYPELS |
| 31813 | SISPERDMD |
| 31814 | SIVSEVCPN |
| 31815 | SKMAGFPHW |
| 31816 | SKWTCHPKM |
| 31817 | SLKMVDVAV |
| 31818 | SMFKYEARD |
| 31819 | SMHEKQHFE |
| 31820 | SNLDFPNQE |
| 31821 | SNPIMAKGV |
| 31822 | SNPQSVCRG |
| 31823 | SNPRTQTMV |
| 31824 | SNSPHPAVF |
| 31825 | SNVILDFEN |
| 31826 | SNVVKQASD |
| 31827 | SNYRALYGH |
| 31828 | SRDGWPNCI |
| 31829 | SREPIIKGH |
| 31830 | SSGGIWYFD |
| 31831 | SSMEMWTCN |
| 31832 | SSRFAPPPE |
| 31833 | SSRPPSGWV |
| 31834 | SSSQCCTPI |
| 31835 | STHHFSYGE |
| 31836 | SVEAGEKEG |
| 31837 | SVKEEMFSP |
| 31838 | SVLESDECK |
| 31839 | SVNDTVDYF |
| 31840 | SVWDMVKMQ |
| 31841 | SWCPEYWEI |
| 31842 | SWHYLAMQC |
| 31843 | SYHAHQPHC |
| 31844 | SYKQVTAPR |
| 31845 | SYLSFGAPW |
| 31846 | TAAEQKADN |
| 31847 | TAHCTDWQH |
| 31848 | TASMMECAD |
| 31849 | TATTHQRCP |
| 31850 | TCPNVWWHM |
| 31851 | TCVIRNMMI |
| 31852 | TEAPWWSGH |
| 31853 | TEEVDSMAC |
| 31854 | TEGNWDSCW |
| 31855 | TEKAIVYYP |
| 31856 | TFGYMATQV |
| 31857 | TGFHNTFRD |
| 31858 | THCHRHHID |
| 31859 | THEHSGVYG |
| 31860 | THKWDADAK |
| 31861 | TIATVRTCT |
| 31862 | TIDLVYLDK |
| 31863 | TIIPIDWTE |
| 31864 | TILPTCKQA |
| 31865 | TIPCYQRYT |
| 31866 | TISDEPGQP |
| 31867 | TKFMPRGYI |
| 31868 | TLFYHDWYM |
| 31869 | TLSSHWKER |
| 31870 | TMTKRDDFW |
| 31871 | TNTAFMNGT |
| 31872 | TNTSMPAAW |
| 31873 | TNWREMNPR |
| 31874 | TPWFWQETA |
| 31875 | TQTELYCCP |
| 31876 | TRHCHECLG |
| 31877 | TSDEAEHYT |
| 31878 | TSFMCQKFP |
| 31879 | TSGPCMPIK |
| 31880 | TSQHAIWNA |
| 31881 | TSTLVSNNV |
| 31882 | TTEFVRIKG |
| 31883 | TTNDDNCNN |
| 31884 | TISEKNFDD |
| 31885 | TTTRDEAFM |
| 31886 | TVCTTKSMG |
| 31887 | TVRCMIQLG |
| 31888 | TVSDDWCWE |
| 31889 | TWETTGQFV |
| 31890 | TWMFVHRNN |
| 31891 | TWSDNHAAQ |
| 31892 | TWTNKLCDM |
| 31893 | TYEDHVDRF |
| 31894 | TYEWSMLDR |
| 31895 | TYQNELACY |
| 31896 | VATMAHYGY |
| 31897 | VCIGYDHTP |
| 31898 | VCPLPNQLH |
| 31899 | VCSOTTLWH |
| 31900 | VDKVWWNLI |
| 31901 | VETCRDCEG |
| 31902 | VFGEFDNHS |
| 31903 | VFHFQTKGM |
| 31904 | VFKFDFSYP |
| 31905 | VGDPNFRIQ |
| 31906 | VHAQTIQRE |
| 31907 | VHHTEPERQ |
| 31908 | VHWPQCGHQ |
| 31909 | VIHAPTHKT |
| 31910 | VIPPSIFNN |
| 31911 | VEYHTSYYW |
| 31912 | VKECRRTDQ |
| 31913 | VKSEWYDEQ |
| 31914 | VLGDWSNIC |
| 31915 | VLIPILVAQ |
| 31916 | VLVNVDQLG |
| 31917 | VMPNWKEQT |
| 31918 | VMSCYSRDH |
| 31919 | VMTFRQKAC |
| 31920 | VPGPMIYEF |
| 31921 | VPKTVNRDM |
| 31922 | VQSVRRITG |
| 31923 | VRMICTSSC |
| 31924 | VRVWDYKGT |
| 31925 | VSALQQTQQ |
| 31926 | VSCHWGLAN |
| 31927 | VSRLRQNHW |
| 31928 | VTDHAWTMP |
| 31929 | VTMLMAGMQ |
| 31930 | VTSYWEFQE |
| 31931 | VTYHHHNFL |
| 31932 | VVNFVGAEG |
| 31933 | VVWMNSNHD |
| 31934 | VWFYPQWDS |
| 31935 | VWSCVHADV |
| 31936 | VYWFPDQMM |
| 31937 | WCNGHGSIF |
| 31938 | WDLYLKTMG |
| 31939 | WEAGECDLM |
| 31940 | WEKFWHEYW |
| 31941 | WEWPMTWTT |
| 31942 | WHIFVVIGI |
| 31943 | WIPHCKCPA |
| 31944 | WKAHTEHLG |
| 31945 | WKCWYAPLT |
| 31946 | WLIWGIIEQ |
| 31947 | WMCRNHPFD |
| 31948 | WQMTTRYYM |
| 31949 | WSSTQDQTN |
| 31950 | WTVGDEQPM |
| 31951 | WVEPQTTIY |
| 31952 | WVEPSSKPP |
| 31953 | WWQTFCYGE |
| 31954 | YADMDQAVQ |
| 31955 | YAMSRKQTI |
| 31956 | YATVEEDLQ |
| 31957 | YEHWYEHDD |
| 31958 | YERLFDEQT |
| 31959 | YFRDQEEGQ |
| 31960 | YFSLLMENC |
| 31961 | YHSDYHHNN |
| 31962 | YIEPNHHSG |
| 31963 | YIQRGTDSM |
| 31964 | YLVRQWAIM |
| 31965 | YMSKHEADI |
| 31966 | YNNNHLMMC |
| 31967 | YQQQMTFHN |
| 31968 | YQYFPDNKK |
| 31969 | YRHGSVDGP |
| 31970 | YSCNRLTRF |
| 31971 | YTQLNASQW |
| 31972 | YTTFQGYWA |
| 31973 | YVAEPYYHG |
| 31974 | YVCNICPTP |
| 31975 | YVGQTSSSE |
| 31976 | YVGTIPTFS |
| 31977 | AAEENEAAD |
| 31978 | AAGPDALRP |
| 31979 | AAGTVCLPM |
| 31980 | AAGTVEFGH |
| 31981 | AAGWGGATS |
| 31982 | AAMEVMVKC |
| 31983 | AAMHESCNW |
| 31984 | AAPCCLYYT |
| 31985 | ACAWIENFT |
| 31986 | ACHATTLRY |
| 31987 | ACKQDSELV |
| 31988 | ACMSRAMFN |
| 31989 | ACTRPMVLA |
| 31990 | ACVEHYVAQ |

TABLE 82
Sequences of the 581 to 589 Region in AAV5 VP1
Capsid Polypeptide that Drive Skin Tissue
Tropism
SEQ

| ID | 581-589 |
|---|---|
| NO | Sequence |
| 33991 | NMWYSFVMI |
| 33992 | FWLGISPAK |
| 33993 | DSQYHVKCG |
| 33994 | AIEWKSTVT |
| 33995 | AIEWRSTVT |
| 33996 | ANAHQAESF |
| 33997 | ANAHQAGSF |
| 33998 | ANLEQSLMA |
| 33999 | ANLEQSLMT |
| 34000 | ANLKQSLMA |
| 34001 | ANTHQAESF |
| 34002 | ATKNRWPIA |
| 34003 | ATKNRWPIV |
| 34004 | CCHGWHNGA |
| 34005 | CCHGWHNGS |
| 34006 | CCHGWYNGS |
| 34007 | CECEKLGTS |
| 34008 | CEGEKLGTS |
| 34009 | CEYEKLGTS |
| 34010 | CFHGWHNGS |
| 34011 | CIALLEQYM |
| 34012 | CNATYQQND |
| 34013 | CSCQWYISV |
| 34014 | CSCRWYISV |
| 34015 | CSYRWYISV |
| 34016 | CYLWCAYQH |
| 34017 | CYLWCDYQH |
| 34018 | CYLWCDYQR |
| 34019 | CYLWCDYRH |
| 34020 | CYLWCVYQH |
| 34021 | CYLWYDYQH |
| 34022 | DHPPVKEVS |
| 34023 | DNLNFNSPT |
| 34024 | DRPPVKEVS |
| 34025 | DTYQNYMFM |
| 34026 | DVHPSNNVQ |
| 34027 | DVHPSNTVQ |
| 34028 | EGPWMFAQG |
| 34029 | EGPWMFTQG |
| 34030 | EYQCWGRFT |
| 34031 | EYQCWGWFT |
| 34032 | GYELQLQMN |
| 34033 | HMYDNELNP |
| 34034 | IAEPQWHKQ |
| 34035 | ITEPQWHKQ |
| 34036 | MCFMAFRFD |
| 34037 | MDYCCEHFP |
| 34038 | MHYCCEHFP |
| 34039 | MLFLKRNIA |
| 34040 | MRFMAFRFD |
| 34041 | MRFMAFRFG |
| 34042 | MRFMAFWFD |
| 34043 | PTPPMQHTA |
| 34044 | QAAHEPQIC |
| 34045 | RHIVHKRTE |
| 34046 | RMYDNELNP |
| 34047 | RRIVHKRTA |
| 34048 | RRIVHKRTE |
| 34049 | RRIVHKRTG |
| 34050 | RSKCPVEIH |
| 34051 | RSKCPVEIR |
| 34052 | TIEWKSTVT |
| 34053 | TNAHQAESF |
| 34054 | TNLEQSLMA |
| 34055 | TTHPMQHTA |
| 34056 | TTPPMQHTA |
| 34057 | WCHGWHNGS |
| 34058 | WPAQGRITT |
| 34059 | YSCRWYISV |
| 34060 | AAVQMSSLS |
| 34061 | ACANTDQRG |
| 34062 | ACMSILEKE |
| 34063 | AEHQNNCAF |
| 34064 | AELPEGWMC |
| 34065 | AGFYEHRSN |
| 34066 | AHGCTNAMS |
| 34067 | AIRISSLVT |
| 34068 | AIVHHGKEP |
| 34069 | AKNYQFQVG |
| 34070 | ALDSCMVSE |
| 34071 | AMIHRNDHC |
| 34072 | ARGMCQDLQ |
| 34073 | ASEVHHAEF |
| 34074 | ASHCMILHT |
| 34075 | ASVDNSGSP |
| 34076 | ASWCLNHMA |
| 34077 | ATSTRQQHA |
| 34078 | AVDPAWHGC |
| 34079 | AVSAFQQDN |
| 34080 | AVSMKAFAI |
| 34081 | CAAHVVLTF |
| 34082 | CAKAKKMTA |
| 34083 | CAQQIYSQT |
| 34084 | CCARIAVAE |
| 34085 | CDTESLAML |
| 34086 | CEHCCITQF |
| 34087 | CEHCCITRF |
| 34088 | CFAFQNMDD |
| 34089 | CFQSNITAN |
| 34090 | CFRSADNWW |
| 34091 | CGAHIMSGH |
| 34092 | CIQWWEMWN |
| 34093 | CKQYIVTDV |
| 34094 | CLNRIQTAS |
| 34095 | CMMPWQSQS |
| 34096 | CMTLILAQE |
| 34097 | CMVWTNVSP |
| 34098 | CNRSIQCMV |
| 34099 | CPGRYWKVG |
| 34100 | CPKLIRQFA |
| 34101 | CPNVWARPW |
| 34102 | CQCRYFDWC |
| 34103 | CSAFTAHQS |
| 34104 | CTFDCNGYW |
| 34105 | CTFSTSEQP |
| 34106 | CTSWVWMQG |
| 34107 | CVAWHAHSA |
| 34108 | CVKQTFTDS |
| 34109 | CVLPLFQET |
| 34110 | CVMAGAIHR |
| 34111 | CVNPMAVAC |
| 34112 | CVQYTRIGR |
| 34113 | CVSPENGMM |
| 34114 | CVWLKQMYE |
| 34115 | CWMNTHIGE |
| 34116 | CWQYQMVTA |
| 34117 | DASPVSRSV |
| 34118 | DFVLRSDPA |
| 34119 | DGTHMDTWL |
| 34120 | DIVGPNTGF |
| 34121 | DKGFKTNSL |
| 34122 | DKHLFDMCR |
| 34123 | DLYTISTRD |
| 34124 | DMFMWNTQE |
| 34125 | DMQCYKRPG |
| 34126 | DMTNCQRCR |
| 34127 | DQRWENQHA |
| 34128 | DTYLNVMFE |
| 34129 | DVAKKRTAG |
| 34130 | DVCRKGEQF |
| 34131 | DVPLNECDT |
| 34132 | DWRRNTEKQ |
| 34133 | DYAVMKIAM |
| 34134 | EAEEGMGSW |
| 34135 | EARMWHHQW |
| 34136 | ECLESGIQT |
| 34137 | EGWLMMKTG |
| 34138 | EHIHGKFFL |
| 34139 | EIERDTSHE |
| 34140 | EIHTSEMDL |
| 34141 | EIKSWHQVY |
| 34142 | EKNSPWQFA |
| 34143 | ELCWHHGVA |
| 34144 | ENKHHEAFY |
| 34145 | ERMNMIRYA |
| 34146 | ESKIEEAME |
| 34147 | ESVHDNGGH |
| 34148 | ETHHNACSP |
| 34149 | ETHRMTWTT |
| 34150 | ETHTVDADM |
| 34151 | EVNIECCNG |
| 34152 | EVWTWQDAH |
| 34153 | FFIGRHSGG |
| 34154 | FPCMSWKQA |
| 34155 | FVFPKHVTL |
| 34156 | FVVPISAYQ |
| 34157 | GACNYMAHM |
| 34158 | GACVMFVGR |
| 34159 | GAQCFIMTP |
| 34160 | GHCACWVAG |
| 34161 | GHFLTTCSF |
| 34162 | GIGFVDMQL |
| 34163 | GIVDCIAAM |
| 34164 | GNDKFLVHN |
| 34165 | GQVATISQF |
| 34166 | GSSQIVKAE |
| 34167 | GTCPYRAIS |
| 34168 | GTFMSSRQS |
| 34169 | GTTAKTEQI |
| 34170 | GTVNFEKMS |
| 34171 | GVNDYRDAG |
| 34172 | GYAMKYLNA |
| 34173 | HAYWCQMFM |
| 34174 | HCDVIVGDW |
| 34175 | HCVPHVGYQ |
| 34176 | HFMCCWFKR |
| 34177 | HHAASATCF |
| 34178 | HIQGMNMWG |
| 34179 | HKMRAIWFA |
| 34180 | HMGMMQCQE |
| 34181 | HNMCPCVDY |
| 34182 | HSGPFCRHG |
| 34183 | HSSPFCRHG |
| 34184 | HSSSKEACF |
| 34185 | HTNWKDGYG |
| 34186 | HTYPAHWLQ |
| 34187 | HWCMLINVE |
| 34188 | IDIDRGHYG |
| 34189 | IFGCIQSAR |
| 34190 | IGFQYGSVE |
| 34191 | IGVSLLNDP |
| 34192 | IIKESVYCQ |
| 34193 | IISMTNRGP |
| 34194 | IMFYTNERV |
| 34195 | IMSKTPSFL |
| 34196 | INVEGGFEY |
| 34197 | IPMEWEHAG |
| 34198 | IRVHDNRQQ |
| 34199 | ISVDCMQRI |
| 34200 | ITAPKWQEK |
| 34201 | ITVEAVHHC |
| 34202 | IWDVRQDMD |
| 34203 | KFDTFIGYQ |
| 34204 | KFWCGHMEE |
| 34205 | KMTSVSWSV |
| 34206 | KNDLEAFSA |
| 34207 | KNGDTMAVG |
| 34208 | KPKCTYPLA |
| 34209 | KTDILDTIV |
| 34210 | KTQEFEVQP |
| 34211 | KVESTTQLC |
| 34212 | KWSYNHFRV |
| 34213 | LAKCGRWSV |
| 34214 | LATLLAQIY |
| 34215 | LCWFLLGVP |
| 34216 | LENCMWGGN |
| 34217 | LFWPDCHFP |
| 34218 | LGLQEWNTP |
| 34219 | LGMPCAWCP |
| 34220 | LIYPWKPGA |
| 34221 | LPEKWNIWK |
| 34222 | LQMNYKAQN |
| 34223 | LSAYLTEAG |
| 34224 | LSIPKEQCW |
| 34225 | LSMWRWESE |
| 34226 | LSNFFGAMQ |
| 34227 | LSSTFPHWH |
| 34228 | LTAKPCTAP |
| 34229 | LTGLQEMAA |
| 34230 | LVQFIYPFE |
| 34231 | LVQFTYPFE |
| 34232 | LWSLRSANF |
| 34233 | LYLMDIAMC |
| 34234 | LYLMDITMC |
| 34235 | LYNLFMHTE |
| 34236 | MAIVDPRSC |
| 34237 | MAQKKCKCP |
| 34238 | MAYCYLMHN |
| 34239 | MDGSYHWDQ |
| 34240 | MFMCYINDN |
| 34241 | MGVEVTQAM |
| 34242 | MIDRHWTAS |
| 34243 | MIRPSINGS |
| 34244 | MITLLPNWP |
| 34245 | MLFKAQAFF |
| 34246 | MLFMAQAFF |
| 34247 | MMCTFDFAG |
| 34248 | MMEIQESCE |
| 34249 | MPEHGMDNW |
| 34250 | MPPWYRHHL |
| 34251 | MQLEANKYH |
| 34252 | MRCIEVKGF |
| 34253 | MSDHLSNGA |
| 34254 | MTHDRAMQC |
| 34255 | MTQCNTEHL |
| 34256 | MTTVHWHSS |
| 34257 | MVLHEMFVY |
| 34258 | MVNPCLLGN |
| 34259 | MVTCAGPTV |
| 34260 | NAGSSGQGA |
| 34261 | NCKYRMELE |
| 34262 | NCVRYKNMD |
| 34263 | NFQMEMDAF |
| 34264 | NFSLTNNGQ |
| 34265 | NILVLCQNN |
| 34266 | NKLDQDNWK |
| 34267 | NKYCFPTSW |
| 34268 | NLMAHGVAP |
| 34269 | NMPNTHCNG |
| 34270 | NQVCWPRIV |
| 34271 | NRLSFMHYG |
| 34272 | NTEFSHLFP |
| 34273 | NVNVNKHNH |
| 34274 | NVNVNKHNR |
| 34275 | NVRDTMRGF |
| 34276 | NVRVEFIQC |
| 34277 | NVVHVGDVK |
| 34278 | PACNCPKTH |
| 34279 | PIWPGVLQH |
| 34280 | PTIKTQFSC |
| 34281 | PTMSLFNEQ |
| 34282 | QAKYVTESA |
| 34283 | QAMKHAFYQ |
| 34284 | QATIWNNRE |
| 34285 | QCCQQPCHN |
| 34286 | QCCQTLFQS |
| 34287 | QCFDNQDEH |
| 34288 | QEAGECKWC |
| 34289 | QHQCYYNQQ |
| 34290 | QIMCNTTGH |
| 34291 | QKSWIVGEK |
| 34292 | QPIFYDRSQ |
| 34293 | QQDGDQQPL |
| 34294 | QQKAISSLP |
| 34295 | QSNNALMGN |
| 34296 | QTFSFAPGY |
| 34297 | QVMDLVYPT |
| 34298 | RAEPFPEEK |
| 34299 | RCEHDKLCL |
| 34300 | RCWFSELHE |
| 34301 | REVYGLFMD |
| 34302 | RGLMCEMMN |
| 34303 | RHMFHEAGW |
| 34304 | RKPPFGPPY |
| 34305 | RLMSGAIVE |
| 34306 | RNKHDMIGC |
| 34307 | RRDCMDSAF |
| 34308 | RVAAPWLPE |
| 34309 | RVILAMGPY |
| 34310 | SAHQFQDYQ |
| 34311 | SAPQFQDYQ |
| 34312 | SDMPHPPLS |
| 34313 | SGCRYNQEQ |
| 34314 | SGLQLMWHH |
| 34315 | SHKFMDLMM |
| 34316 | SHQLIRREN |
| 34317 | SIRYDFYVP |
| 34318 | SLCSMLCTR |
| 34319 | SLCWMHAHH |
| 34320 | SMASVSEIK |
| 34321 | SMEQYWTSN |
| 34322 | SMGVPQAAN |
| 34323 | SMMPKCKAS |
| 34324 | SMQCEVVGP |
| 34325 | SMQCEVVGS |
| 34326 | SMQEYQKHI |
| 34327 | SMYQFADPM |
| 34328 | SQDIESLWP |
| 34329 | SRMQFHNQE |
| 34330 | SRWCPKVPF |
| 34331 | SSGEGKAED |
| 34332 | SSRPKYFCV |
| 34333 | STCHVGKMQ |
| 34334 | STCSIDAQM |
| 34335 | SVCWSNKVP |
| 34336 | SVDRQFVHS |
| 34337 | SVQLWGYQP |
| 34338 | SVRYECSHG |
| 34339 | SYQSCESMQ |
| 34340 | SYSWKQYGV |
| 34341 | TALGIYAHK |
| 34342 | TCIRAMTSC |
| 34343 | TCRPSDWAW |
| 34344 | TCYQNQRSH |
| 34345 | TEWEQNWTP |
| 34346 | TFGTTAIHN |
| 34347 | TGNASNDCW |
| 34348 | THFSKMSDQ |
| 34349 | TKCSWNHIS |
| 34350 | TLCIVPPLI |
| 34351 | TMSTCQQML |
| 34352 | TNQLYRGFW |
| 34353 | TSFMPPSEA |
| 34354 | TSGFFHMYY |
| 34355 | TSHCIPEVE |
| 34356 | TTIGWHVCQ |
| 34357 | TYCKSYRTR |
| 34358 | TYKCWIADN |
| 34359 | VAVDLSWCG |
| 34360 | VFASEWCGS |
| 34361 | VGTKHDVWY |
| 34362 | VKKRDNQST |
| 34363 | VKKRVNQST |
| 34364 | VMKHQHSGR |
| 34365 | VQGYKDSNE |
| 34326 | VSCYTHRQD |
| 34367 | VTFCVHRYQ |
| 34368 | VTTSRWELI |
| 34369 | VYILEGGIH |
| 34370 | WFRITDTCG |
| 34371 | WIITKSTEF |
| 34372 | WMTCFPMQN |
| 34373 | WRDFFNFSH |
| 34374 | WTKMQQNDT |
| 34375 | WVAVLNLNA |
| 34376 | WWQLMNLLP |
| 34377 | YCGIYWNSF |
| 34378 | YEHIDWTFC |
| 34379 | YLHKRCWPS |
| 34380 | YRLLTCASA |
| 34381 | YSALNSYAC |
| 34382 | YSQLFQMTN |
| 34383 | YTFWINNHA |
| 34384 | DTSPVEYAH |
| 34385 | GMVDDKWLY |
| 34386 | QKNVSTKYD |
| 34387 | YCHQEDRIT |
| 34388 | SQETFQKMD |
| 34389 | SRYVNNGTV |
| 34390 | DGDFLQNHH |
| 34391 | ICHTEVMFN |
| 34392 | QTANVKAMY |
| 34393 | SAICQNYDA |
| 34394 | MALTVYWKG |
| 34395 | DTSKTGKHV |
| 34396 | TQCKQLTVM |
| 34397 | KTMGIGGGP |
| 34398 | RVMMGNNQA |
| 34399 | MNSFYRAEW |
| 34400 | AAGHIGSVM |
| 34401 | AAILTDYDE |
| 34402 | AATGFTFFE |
| 34403 | ACDQQQRES |
| 34404 | AHAPQFGPC |
| 34405 | APEIHDYCA |
| 34406 | AYMWEEQAT |
| 34407 | CSMPSVNSD |
| 34408 | CSSCNCHCS |
| 34409 | CTKAYRKPG |
| 34410 | DCMLVPVSG |
| 34411 | DEPFPCDWS |
| 34412 | DGRQVWFFQ |
| 34413 | DHSQNTEPT |
| 34414 | DKFSLPSQD |
| 34415 | DNVTIKKVQ |
| 34416 | DQCPGHISV |
| 34417 | DYCNKKRPV |
| 34418 | EAYANMFHG |
| 34419 | EDEQHLWND |
| 34420 | EEGTVPEVL |
| 34421 | ELPRNYPDP |
| 34422 | EQMPLTNVP |
| 34423 | EQPSVNYLR |
| 34424 | EQTGDFVHH |
| 34425 | ERQARNHYA |
| 34426 | EVNCDWHWQ |
| 34427 | FGPCLMNER |
| 34428 | FGQLIIKHP |
| 34429 | FKMFNWPAY |
| 34430 | FSGVYKQYE |
| 34431 | GDSYYMWKA |
| 34432 | GERGHGERY |
| 34433 | GFHDCSMMI |
| 34434 | GIHEIVVNQ |
| 34435 | GKCIMQMCM |
| 34436 | GLSMVMHFV |
| 34437 | GSMQHRRDC |
| 34438 | GSMRHQRDC |
| 34439 | HGYEHMMSG |
| 34440 | HTERWHMLG |
| 34441 | HTHDWYSAG |
| 34442 | HVYEHMMSG |
| 34443 | IAGISMHNH |
| 34444 | IDDPTMFEV |
| 34445 | IHWHCWPKW |
| 34446 | IIQQYGCST |
| 34447 | IMQPPWHTG |
| 34448 | KEPMPRGFL |
| 34449 | KICHEDISV |
| 34450 | KQALYDTFK |
| 34451 | KQMPLTNVP |
| 34452 | LAYPHERDG |
| 34453 | LHYDTMKNE |
| 34454 | LLANYMVHT |
| 34455 | LPIEQVKWF |
| 34456 | LWSWYDQPS |
| 34457 | MCWSWQDAY |
| 34458 | MQTPQAVMS |
| 34459 | MSMKYLEQT |
| 34460 | MTFQDAATY |
| 34461 | MTIDIDQWC |
| 34462 | MTVIWIWSH |
| 34463 | NNVEQHCQV |
| 34464 | PEYQFECIF |
| 34465 | PGWSVANCS |
| 34466 | PKVNLKGDE |
| 34467 | PQVMWPGWF |
| 34468 | PSTHHTQGM |
| 34469 | PVEELYGTF |
| 34470 | QFFACGVYD |
| 34471 | QPTSHMNMN |
| 34472 | QTIWFIDDN |
| 34473 | FDLMYTDQA |
| 34474 | RIEWEMISD |
| 34475 | SCATAHARE |
| 34476 | SHEKYWYFS |
| 34477 | SKCIMQMCM |
| 34478 | SMFMGRRTE |
| 34479 | SPYSCWMQE |
| 34480 | SRYLYYNYH |
| 34481 | SSYYFMGTP |
| 34482 | SVNRMDQDH |
| 34483 | TCELTMCYL |
| 34484 | THSSCWYQA |
| 34485 | TIRPVMWGH |
| 34486 | TKPPLGCSS |
| 34487 | TQTNKTFMK |
| 34488 | TVCEPKCAA |
| 34489 | TVICIPSGS |
| 34490 | VIWYCFCTL |
| 34491 | VMGIVEPSK |
| 34492 | VMWNQNKTE |
| 34493 | VVHNVKDVH |
| 34494 | WTSILDHSS |
| 34495 | WVASSYKPG |
| 34496 | WYQPRFGRQ |
| 34497 | YDAVWRKYT |
| 34498 | YDEHWNDNS |
| 34499 | YDIMTISPF |
| 34500 | YHKDYMCLG |
| 34501 | YTGRFTCMS |
| 34502 | AATTYNQHA |
| 34503 | ACEQQQRES |
| 34504 | AGDWYIALI |
| 34505 | AGHLQFTCP |
| 34506 | AGVRTQCDN |
| 34507 | ALCSCNQLF |
| 34508 | AMRKIGVWH |
| 34509 | AQGHKCYCS |
| 34510 | AQTNKTFMK |
| 34511 | ASMPVWKHY |
| 34512 | ATIMMHQFG |
| 34513 | AYVEHNASR |
| 34514 | CKTHCPGQY |
| 34515 | CNHQFIDQA |
| 34516 | CSCSYQDMM |
| 34517 | CVNMEMMTA |
| 34518 | CYEQVNSND |
| 34519 | DCADMGYRR |
| 34520 | DCEWMIRLG |
| 34521 | DDEYPAHWD |
| 34522 | DHLPMNQER |
| 34523 | DHQWTDAWV |
| 34524 | DIGYRSTTF |
| 34525 | DRAYRPWND |
| 34526 | DSKSYWMDH |
| 34527 | DVGCLQNMY |
| 34528 | EAYTNMFHG |
| 34529 | ECRMYWFED |
| 34530 | EMMHKMDAG |
| 34531 | ESRQVHVGN |
| 34532 | ESSYVNGIG |
| 34533 | FASYDNTHL |
| 34534 | FGEDGGFKG |
| 34535 | FGPRENNHN |
| 34536 | FHGNYQHDS |
| 34537 | FLCLPQGHI |
| 34538 | FQKVVEWQA |
| 34539 | FQRPNFSLT |
| 34540 | FQSLNKNQS |
| 34541 | FVTQQHSHE |
| 34542 | FWNHHDVAR |
| 34543 | GLCSLNNMP |
| 34544 | GSMQHQRDC |
| 34545 | HEWWGPVSH |
| 34546 | HKELILQPT |
| 34547 | HVQHWMNDR |
| 34548 | IADIDLTSF |
| 34549 | ICQPDMKQS |
| 34550 | IPKYKQFFD |
| 34551 | ISAQCPHVH |
| 34552 | ISHWQQRAE |
| 34553 | ISKAQQHNP |
| 34554 | KHDLTQQRQ |
| 34555 | KHVITGGWW |
| 34556 | KKPWDDHTR |
| 34557 | KLESMAMSM |
| 34558 | KLVCVDAYQ |
| 34559 | KMNTGDNYH |
| 34560 | KQPTPVNGI |
| 34561 | KSARCKLHM |
| 34562 | KSLSGEKNY |
| 34563 | LDMWGDFLL |
| 34564 | LDQSMDIAP |
| 34565 | LQSHSQCFR |
| 34566 | LTWGANAYT |
| 34567 | LVCFADIMQ |
| 34568 | LYRLVAQMN |
| 34569 | MDQLVINSK |
| 34570 | MIKTVAKKE |
| 34571 | MILYFWKSH |
| 34572 | MLAPIDCNT |
| 34573 | MLGPLWKDQ |
| 34574 | MNTRKDPPL |
| 34575 | MTGWSSKQS |
| 34576 | MTYQHVAGA |
| 34577 | MVCGNQRNN |
| 34578 | MVLADNEFI |
| 34579 | NNDRWAIPQ |
| 34580 | NPGWYGLAP |
| 34581 | NQKGHDYSQ |
| 34582 | NQVEVIYQS |
| 34583 | NTSYVTMCT |
| 34584 | PAFVCESPQ |
| 34585 | PKPPLGCSS |
| 34586 | QCEMKHHLA |
| 34587 | QDPHKCRRS |
| 34588 | QPAAKNKWN |
| 34589 | QQNTEVKWE |
| 34590 | QVVVRVQDH |
| 34591 | SCEHCNKPY |
| 34592 | SCHKYTDGN |
| 34593 | SDPDIACVH |
| 34594 | SFCTMQHSV |
| 34595 | SHQWSRQMM |
| 34596 | SNTYAGFQW |
| 34597 | SRMGLELVN |
| 34598 | SSMIMCGYV |
| 34599 | TGTNLHQCQ |
| 34600 | TMHIKRNSH |
| 34601 | TMQCISHLS |
| 34602 | TMRGSNHEP |
| 34603 | TSMKTHFDR |
| 34604 | TSNHENRAD |
| 34605 | TWNEPHQNQ |
| 34606 | VDDQHPTQK |
| 34607 | VIFMPIVHC |
| 34608 | VLVDHPVNE |
| 34609 | WYQSYLNWS |
| 34610 | YAQHEFRLD |
| 34611 | YERQMATPG |
| 34612 | YHPLQSDFG |
| 34613 | YPHHEQHAT |
| 34614 | ATQFYQACI |
| 34615 | GFHDRSMMI |
| 34616 | NCWVNEKCE |
| 34617 | QGSKQMYQA |
| 34618 | RTHGHAKAD |
| 34619 | TSKSISHMD |
| 34620 | YTQFCAAMW |
| 34621 | AQDINRLQA |
| 34622 | IAQSEADYW |
| 34623 | DAVIHTGFA |
| 34624 | DHLNEEQTK |
| 34625 | LHQFEAYYK |
| 34626 | KQQMMIVGN |
| 34627 | YKTSWGQHV |
| 34628 | VDNTDPWIM |
| 34629 | ANIPIEMVC |
| 34630 | TGNHEDPDN |
| 34631 | MMAMKQGFY |
| 34632 | ALTHDDGRT |
| 34633 | AEHCYRHQH |
| 34634 | IEFGVKISG |
| 34635 | KELLCSHDA |
| 34636 | LGDQKLVDE |
| 34637 | HCTETHHTN |
| 34638 | TVGFRFDRA |
| 34639 | GGAEIVSAD |
| 34640 | YIQFEAYAN |
| 34641 | KVHFAKVRI |
| 34642 | LIAYKSHAH |
| 34643 | SPQQPSVFH |
| 34644 | PAEAKQRFD |
| 34645 | MKVSNWVFP |
| 34646 | TIAFNGAVC |
| 34647 | MNTNVMQKD |
| 34648 | PANHARNPK |
| 34649 | YYTKHEQDP |
| 34650 | RQAWPKDGM |
| 34651 | QTAEWYCGA |
| 34652 | THVKRFDYE |
| 34653 | EISICTAKF |
| 34654 | CSECQAIHS |
| 34655 | KERMQVSKA |
| 34656 | FHNAPEHHE |
| 34657 | EPRLYCAQE |
| 34658 | DIEFLDCEN |
| 34659 | DATKEMSWK |
| 34660 | QQAMWLHSS |
| 34661 | CADPQERCD |
| 34662 | TTYPHNTHG |
| 34663 | AVNQWMHSL |
| 34664 | CTNYHVKAG |
| 34665 | WPNIKHQPI |
| 34666 | KNCIMLASN |
| 34667 | PLTIEVNCT |
| 34668 | ATGTYNLQE |
| 34669 | WATWPEPLQ |
| 34670 | YVDHWTLGD |
| 34671 | GLFEGSPGA |
| 34672 | SVLHVQALA |
| 34673 | NGVGRSGDN |
| 34674 | MNLQIGSKG |
| 34675 | NWTGNMQWA |
| 34676 | EVRIQCKID |
| 34677 | SNVACIQAF |
| 34678 | ATMNLSWGL |
| 34679 | QSAHPEPMC |
| 34680 | DHSQNPEPT |
| 34681 | EECPNCEAP |
| 34682 | GWNYMFGSA |
| 34683 | HHTMPIDWN |
| 34684 | GTMPMTGQC |
| 34685 | AQAAAVICW |
| 34686 | DQLAHNAQE |
| 34687 | INMPCPNTK |
| 34688 | RMWMEQYQA |
| 34689 | IMQMHPASG |
| 34690 | IPSHMDAHQ |
| 34691 | HTDSDCRHS |
| 34692 | SYLPRHHKG |
| 34693 | ASDCDGKTW |
| 34694 | QIIMLQHEN |
| 34695 | EICHEDISV |
| 34696 | KTTPAPDQG |
| 34697 | SWYLYYNYH |
| 34698 | LSIRNGMCD |
| 34699 | QFMYCAKGN |
| 34700 | HSSCKNCPW |
| 34701 | DGDYACFKN |
| 34702 | QFLGGPKIQ |
| 34703 | RAVHARQYQ |
| 34704 | EHTQRMDMA |
| 34705 | IVTMQMDSW |
| 34706 | QEINDLKMH |
| 34707 | YTYLHQSSG |
| 34708 | DDRRNTKWE |
| 34709 | VCCSIGPEH |
| 34710 | ALKSFNWCS |
| 34711 | TNDWGEKNA |
| 34712 | CWPEAMIDD |
| 34713 | GAETEPKDS |
| 34714 | CPTYKNKDQ |
| 34715 | HVGAGGMPG |
| 34716 | VTHMTCVEG |
| 34717 | AYMWEGQAT |
| 34718 | KCGNVLCEV |
| 34719 | EHDWRMFHQ |
| 34720 | GPKEHNLCD |
| 34721 | ANSLEGGFE |
| 34722 | YLHERTDKD |
| 34723 | VAEAGYCYK |
| 34724 | KECCFPPCE |
| 34725 | IGEVFDAFS |
| 34726 | AFDGEMSWE |
| 34727 | IEMPTESKH |
| 34728 | YRLHCCNRA |
| 34729 | DAMAYGQFM |
| 34730 | ITELMGCLH |
| 34731 | RGMAHHHLC |
| 34732 | TGGWQRGAF |
| 34733 | FCWSMCEAC |
| 34734 | FCIKDQHVR |
| 34735 | PVTHPQTSK |
| 34736 | RSGVQCCAE |
| 34737 | IWQQCNQKN |
| 34738 | KQSDKWGDD |
| 34739 | MIVHQVSQI |
| 34740 | TSNKKGEAA |
| 34741 | TMFYCHGPN |
| 34742 | LCMNDDRLN |
| 34743 | DCLKKNHSL |
| 34744 | RMDCKWEDL |
| 34745 | TGWNFPVSC |
| 34746 | GSQQMQASQ |
| 34747 | NSKACRGCT |
| 34748 | QCLWVDSNV |
| 34749 | EFCHQHSAI |
| 34750 | HQNLLICNE |
| 34751 | FAGFTPVWM |
| 34752 | NSPHSGVGD |
| 34753 | DKTCYLTCP |
| 34754 | CHGFSGCQT |
| 34755 | NSRLLIKHL |
| 34756 | NCKPDQIAM |
| 34757 | TAMVSECKD |
| 34758 | YDYYKMREG |
| 34759 | SAPEFSVIC |
| 34760 | REAWGIRDS |
| 34761 | KIETRPTCT |
| 34762 | HCTEGYRQT |
| 34763 | MCLNMAKQG |
| 34764 | QNPNCKVMW |
| 34765 | YFHWHDCIG |
| 34766 | KYINFDHHQ |
| 34767 | SFFHQTINP |
| 34768 | KAGYQEGSC |
| 34769 | IACISMHNH |
| 34770 | QPGVRTDDY |
| 34771 | QCQNWRHLS |
| 34772 | LIEMCCSSL |
| 34773 | PTEFRVCPV |
| 34774 | DVCNQSGMS |
| 34775 | RYEISERRC |
| 34776 | NCERWFQIE |
| 34777 | DRREKQLMK |
| 34778 | ENQARCIFE |
| 34779 | ESTHMLYEM |
| 34780 | TWHQGWAEY |
| 34781 | EGGFRDFCE |
| 34782 | AFARQEYAN |
| 34783 | ASSFCKFAS |
| 34784 | ASSRFGSYG |
| 34785 | CHQPKNSDR |
| 34786 | CIAKQIARC |
| 34787 | CMYHEQPGR |
| 34788 | CPQCDVMTS |
| 34789 | CSHETGAMC |
| 34790 | CSNCRQIMG |
| 34791 | CSVCLKYEQ |
| 34792 | CTLKTQAET |
| 34793 | CVKFSHHHA |
| 34794 | DANHCMWWQ |
| 34795 | DCVKSSDGI |
| 34796 | DGCPMTRDL |
| 34797 | DGLFEGHIP |
| 34798 | DIKWQHGAH |
| 34799 | DMYDHEWLM |
| 34800 | DPKCFWVSY |
| 34801 | DWIVMSQKA |
| 34802 | EFNWLLWSG |
| 34803 | EIAHDTSMS |
| 34804 | EIGHKQMAI |
| 34805 | EIVQPQYYA |
| 34806 | EMHKVPSGM |
| 34807 | EVTAVEHIW |
| 34808 | EWTKKTADH |
| 34809 | FLHISSWYQ |
| 34810 | FNMNTNDSG |
| 34811 | GCKKSEWIT |
| 34812 | GGSMLGNGY |
| 34813 | GNKLKNDQM |
| 34814 | HCLAGESYV |
| 34815 | HFHEVAWGS |
| 34816 | HPETMIYGW |
| 34817 | ICNAMLGSE |
| 34818 | IFNHLLPTE |
| 34819 | IRVMFGKHN |
| 34820 | KAIWQGTEN |
| 34821 | KFICTTIAC |
| 34822 | KICPTEYAS |
| 34823 | KIVNQENMK |
| 34824 | KNTMCDNDA |
| 34825 | KSDKVWYVL |
| 34826 | KTQTHTSEP |
| 34827 | KWEQRSKMS |
| 34828 | LMAQWEQTG |
| 34829 | LMAYCYANN |
| 34830 | LMHGVMDHV |
| 34831 | LTQKNLSWQ |
| 34832 | LWPQVMEQR |
| 34833 | MAGHYFNSR |
| 34834 | MAIDNLECK |
| 34835 | MAIISQIEF |
| 34836 | MATISQIEF |
| 34837 | MIHTPDAGC |
| 34838 | MIKFPAKQQ |
| 34839 | MMGSNHCSS |
| 34840 | MNSFYRAEL |
| 34841 | MSPFFWEQG |
| 34842 | MTSTQIRAG |
| 34843 | MYMEQACYD |
| 34844 | NADEKYNNT |
| 34845 | NAPMMACQI |
| 34846 | NGLFEGHIP |
| 34847 | NWDRGDKCI |
| 34848 | QCMVMTEAD |
| 34849 | QDFRMNAGA |
| 34850 | QDFWMNAGA |
| 34851 | QILPHMYAY |
| 34852 | QNNVITVDW |
| 34853 | QPFLHRPCA |
| 34854 | QPFLHRPCV |
| 34855 | QQPRKINLC |
| 34856 | QTMCITIHP |
| 34857 | QWDEFKMRM |
| 34858 | QYQTHPMMH |
| 34859 | QTWWPATHD |
| 34860 | RCEPFNWRE |
| 34861 | REVHVNQNN |
| 34862 | RGSQQMETH |
| 34863 | RKKVEVVVE |
| 34864 | RLKLSAVQR |
| 34865 | RSTWGHIQR |
| 34866 | RVNWEQRMN |
| 34867 | RYQPFSRQW |
| 34868 | SALAHHANF |
| 34869 | SALAHRANF |
| 34870 | SAMCSGSLL |
| 34871 | SANQAHGEF |
| 34872 | SANQRYHDW |
| 34873 | SAVQEERYN |
| 34874 | SAVQKERYN |
| 34875 | SDHQYRGCL |
| 34876 | SMTTWWMFP |
| 34877 | SNSHPFQSH |
| 34878 | SWRWHHWHW |
| 34879 | SYVMNLLGQ |
| 34880 | TAHIMTDVI |
| 34881 | TIDGMMGDH |
| 34882 | TLPKMHMWP |
| 34883 | TQQYTWRDA |
| 34884 | TSYLRKIHS |
| 34885 | TTAGKFAAQ |
| 34886 | TWARYKVGE |
| 34887 | TYDTFGCME |
| 34888 | TYRTRHTDC |
| 34889 | VKHLFYWLP |
| 34890 | VLKSCDRHG |
| 34891 | VVKHGVTTN |
| 34892 | WGATSEFMG |
| 34893 | WHCVAPNSF |
| 34894 | WNDLVRCEE |
| 34895 | WWQPVEYAW |
| 34896 | YHAPMLMCN |
| 34897 | YLAMMMSGD |
| 34898 | YLAMTMSGD |
| 34899 | YQNHYQKKW |
| 34900 | YSVVMRTSY |
| 34901 | YWDACYDQK |
| 34902 | DADCYVPAD |
| 34903 | EGKVPGQFA |
| 34904 | ACDLVKKDQ |
| 34905 | ACEAYQDEK |
| 34906 | AFSQQDYSF |
| 34907 | AGQLNFCSI |
| 34908 | AHNVRCATA |
| 34909 | ALCWKQMDH |
| 34910 | AMCWYYHMQ |
| 34911 | ANVISPQSN |
| 34912 | ASCNTHHEV |
| 34913 | ASGTKYRCN |
| 34914 | ASTMFIDVE |
| 34915 | ATHNVHMFH |
| 34916 | ATMAYRHVN |
| 34917 | AVDCSDHSY |
| 34918 | AVEQWVNHD |
| 34919 | AVVIAQKVV |
| 34920 | AWELVVHQA |
| 34921 | AWNFIRVGN |
| 34922 | CAANVTKMG |
| 34923 | CAAPTFADK |
| 34924 | CAEHLTPSE |
| 34925 | CAGLLGFHW |
| 34926 | CAGVQTTWW |
| 34927 | CAHYFAHAG |
| 34928 | CAKWFDVQI |
| 34929 | CAQSWCSFE |
| 34930 | CCFLINWDR |
| 34931 | CCGWYHEFG |
| 34932 | CCMEVFMYN |
| 34933 | CFTMPVHWG |
| 34934 | CHIQLHAGI |
| 34935 | CIHYKEQYA |
| 34936 | CIHYKEQYE |
| 34937 | CIIHQSKYG |
| 34938 | CIMSRQQDC |
| 34939 | CIRRDDHHH |
| 34940 | CIRWFDWLG |
| 34941 | CIWYTQMGT |
| 34942 | CKETVETVY |
| 34943 | CKMQLFSHG |
| 34944 | CLGWCTACP |
| 34945 | CLTALMKLS |
| 34946 | CLVRYFRDG |
| 34947 | CMTKTSKMS |
| 34948 | CQCSIMSIE |
| 34949 | CRGHIWSMD |
| 34950 | CSACIASAT |
| 34951 | CSLKGPPTH |
| 34952 | CSSSLFSAC |
| 34953 | CSTPITAAV |
| 34954 | CSTPITTAV |
| 34955 | CTCAGVVTC |
| 34956 | CTNLYAMAC |
| 34957 | CTQHMYVKD |
| 34958 | CTWKMMWGG |
| 34959 | CTWTTGEAS |
| 34960 | CVCLAEYVV |
| 34961 | CVFYLPHSP |
| 34962 | CVMSRWNYD |
| 34963 | CVQHFHWDK |
| 34964 | CVRFLNRVA |
| 34965 | CVTRCMARD |
| 34966 | CVVYHNHHT |
| 34967 | CWAQMNHVF |
| 34968 | CWMGIKRQD |
| 34969 | CWMLQHKMM |
| 34970 | CWSINYNYY |
| 34971 | CWTIRHGGP |
| 34972 | CWYLWYNMP |
| 34973 | CYYMLQAAD |
| 34974 | DDDTENDFM |
| 34975 | DGGQTHVSY |
| 34976 | DIHNYLMSE |
| 34977 | DISMNQDVN |
| 34978 | DKRCNKWDP |
| 34979 | DMRLQDHVR |
| 34980 | DNFFTQYLA |
| 34981 | DQESLNAHY |
| 34982 | DREQNEMLG |
| 34983 | DSSSSIGHW |
| 34984 | DTCRRLINE |
| 34985 | DVDWANSLL |
| 34986 | DVRLIGHEA |
| 34987 | DYARCQSVW |
| 34988 | EAEPNGFGL |
| 34989 | EAGDVRRFG |
| 34990 | EAGPHSDTW |

TABLE 83
Sequences of the 581 to 589 Region in AAV5 VP1
Capsid Polypeptide that Drive Spinal Cord
Tissue Tropism

| SEQ | |
|---|---|
| ID | 581-589 |
| NO | Sequence |
| 36438 | GCLQIERRH |
| 36439 | EVTRNHHEN |
| 36440 | CCKPQCKCQ |
| 36441 | MVFLEQHGR |
| 36442 | YITCQYSHH |
| 36443 | ELVPYYTGS |
| 36444 | AWSDLMNCW |
| 36445 | MEEPYTSYN |
| 36446 | NWYTTWIDE |
| 36447 | MMKRNRFIC |
| 36448 | ACVERLHHK |
| 36449 | ECRMAVQSC |
| 36450 | APFFTFTNH |
| 36451 | ASLVKWDFE |
| 36452 | ATMWGDCDY |
| 36453 | AWKMAHNSF |
| 36454 | CHHDVNVPI |
| 36455 | CEMLNGCFQ |
| 36456 | DLCAGNKSQ |
| 36457 | DLCEGNKSQ |
| 36458 | DLCGGNKSQ |
| 36459 | DPMKEFVSH |
| 36460 | EKEWRPLQW |
| 36461 | ESNGMYFDR |
| 36462 | GNCVYHCYE |
| 36463 | HITCQYSHH |
| 36464 | KHMPTLQWQ |
| 36465 | KSTEQMHRA |
| 36466 | KVNCRMIIM |
| 36467 | LNLARYEAP |
| 36468 | MGMWKVWAC |
| 36469 | MTGDSGKFR |
| 36470 | NIHAVFVQS |
| 36471 | NIHDVFVQS |
| 36472 | NITLVMGQH |
| 36473 | QCCVTYVNS |
| 36474 | QEFYCWIDG |
| 36475 | QNEGRGSIV |
| 36476 | RTAMFESRL |
| 36477 | SHARKVYDC |
| 36478 | SIYQKWVTN |
| 36479 | SKCPWFHNG |
| 36480 | SKNERNYDI |
| 36481 | SQCVMQFPL |
| 36482 | SYARKVYDC |
| 36483 | TAALGHSFC |
| 36484 | TQGMYVESY |
| 36485 | TTLLVQAEW |
| 36486 | VIIYPQFKC |
| 36487 | YGGMEFEDC |
| 36488 | YGGVEFEDC |
| 36489 | YQTLCMHQD |
| 36490 | YSKVFYFFS |
| 36491 | YTQAMCITA |
| 36492 | ADQHTSPTS |
| 36493 | AIILLCHAE |
| 36494 | ATRCWWREI |
| 36495 | CIIARSTAA |
| 36496 | CNIHWTMAE |
| 36497 | CNNRLDVFN |
| 36498 | CVHERANAN |
| 36499 | DERPNMFWS |
| 36500 | DNAVNSHVF |
| 36501 | DNYYYWGSL |
| 36502 | EDFVTTSEL |
| 36503 | ETANGMCST |
| 36504 | EVKQGFTQG |
| 36505 | EWHYRNKDA |
| 36506 | GEPDHSPAN |
| 36507 | GIKSCWQNS |
| 36508 | GITEQPLAR |
| 36509 | GSKGMAFCS |
| 36510 | GVNEFLDTN |
| 36511 | HMGYVNNQS |
| 36512 | HQHEAPMDE |
| 36513 | HTTPCARSR |
| 36514 | KSDGQMRQS |
| 36515 | KTYSAMYSP |
| 36516 | LFYMKEDMR |
| 36517 | LPTLRVADK |
| 36518 | MHMSYHWHE |
| 36519 | MHMSYHWRE |
| 36520 | MMLSDDRTP |
| 36521 | NIDQWKHOQ |
| 36522 | QISMAHFLP |
| 36523 | QMEQWHRGG |
| 36524 | QNWAALACP |
| 36525 | QVSVSVIAW |
| 36526 | SITEQPLAR |
| 36527 | SMAICMHDN |
| 36528 | SMQSAEPSC |
| 36529 | STHQSEFTT |
| 36530 | STVYRWDMP |
| 36531 | SVMLKANEV |
| 36532 | SVYHCWRSQ |
| 36533 | TAEVRWPCP |
| 36534 | TASFAQRRS |
| 36535 | TDDPPLLTY |
| 36536 | TFCESMPWV |
| 36537 | TIRYEGMSG |
| 36538 | TKKQMEWQM |
| 36539 | TQQTGWVYN |
| 36540 | TTYIPASAA |
| 36541 | VCHNPDPFT |
| 36542 | VSSDKQVLE |
| 36543 | WECQWDMSM |
| 36544 | WFCYLSPMI |
| 36545 | WFEPSNLIK |
| 36546 | LGMHYKDNC |
| 36547 | ATGTYDLQE |
| 36548 | APKAPKMYH |
| 36549 | DMVTTRSPF |
| 36550 | DQVNKTYVI |
| 36551 | DWSVWIMET |
| 36552 | FLTTVLRVC |
| 36553 | HLTTIPGDR |
| 36554 | IFYECYSNK |
| 36555 | MYIFVWRFM |
| 36556 | PEKVWSDLK |
| 36557 | SWFYMEKMP |
| 36558 | TWLYGWPIK |
| 36559 | VMPIAWQQD |
| 36560 | VQKCHTCGA |
| 36561 | VQKCRTCGA |
| 36562 | WMLLGMTWC |
| 36563 | FTNTKEQAF |
| 36564 | YSWFYWADY |
| 36565 | VRWVRLHKK |
| 36566 | VCYWWLNWF |
| 36567 | THKWFCEDS |
| 36568 | DPYSSKYES |
| 36569 | EDWLRRNIW |
| 36570 | KHYKWGHCQ |
| 36571 | ESVPLRETT |
| 36572 | SSSPGKGWM |
| 36573 | GSTSRNQRD |
| 36574 | AHTQYQGQN |
| 36575 | KFDVIRQAM |
| 36576 | GTIPKOHEF |
| 36577 | QKAIVTQND |
| 36578 | MDYHCQVED |
| 36579 | ERQSTHGQY |
| 36580 | KCWDCHEAG |
| 36581 | NHDEKLWAP |
| 36582 | DGMHRELYS |
| 36583 | AKMWQLENP |
| 36584 | LTNRTQESW |
| 36585 | STALMDANM |
| 36586 | KQAGYDFFH |
| 36587 | SPQQPSVFH |
| 36588 | TTYPHNTHG |
| 36589 | CMEAQGECY |
| 36590 | ISLVWMHYP |
| 36591 | NNGPIWISS |
| 36592 | AHLHNQFMP |
| 36593 | RTEAHLPAP |
| 36594 | EGASPLACT |
| 36595 | DANHCMWWQ |
| 36596 | EKYQIHWDR |
| 36597 | KQEWHVHTE |
| 36598 | KLYGLNHSC |
| 36599 | QSSSSYLWG |
| 36600 | DIRIVSDGK |
| 36601 | MALPLHVLS |
| 36602 | QTMCITIHP |
| 36603 | RHWYIALYA |
| 36604 | LSAKQQFFC |
| 36605 | GEGVEQMDG |
| 36606 | RQIGTGNME |
| 36607 | IMTIIPYGP |
| 36608 | VNDDYECGI |
| 36609 | NTQYSAKND |
| 36610 | SRTICVHGN |
| 36611 | KHIVGQDGG |
| 36612 | KCLPYMEMF |
| 36613 | KAYMMMEGP |
| 36614 | SVTYHEWHP |
| 36615 | YSDMFHKDH |
| 36616 | GNECFHNVE |
| 36617 | IAKIGNCVW |
| 36618 | SGNQIVQAP |
| 36619 | ASFFLNPLE |
| 36620 | DMKQKAEYT |
| 36621 | MMEATHKLS |
| 36622 | GCEEVGRCQ |
| 36623 | CIHPVLVTM |
| 36624 | YDWGRVTLN |
| 36625 | QKAIVAQND |
| 36626 | TFTYEAKFW |
| 36627 | ISWISHASP |
| 36628 | PCQQLMCFM |
| 36629 | VSVQSRAQL |
| 36630 | NVCDNGHEI |
| 36631 | HFQPVFMQP |
| 36632 | HMEQCWCNE |
| 36633 | LPPPEEKWL |
| 36634 | ESAEPRMIP |
| 36635 | ICIRGARAD |
| 36636 | KKHKGWCRA |
| 36637 | AEVPYVMQQ |
| 36638 | MAEQMERDF |
| 36639 | ITASIKDQW |
| 36640 | ETDCMEGGH |
| 36641 | QFAQLWCAK |
| 36642 | KACMSHQGR |
| 36643 | GLFEGSPGA |
| 36644 | AYHCYMSWM |
| 36645 | GQQTIEMSY |
| 36646 | ATGTYNLQE |
| 36647 | GHLFNNNEW |
| 36648 | FAQQIINAS |
| 36649 | AGMYKCQED |
| 36650 | LEIGGKTRT |
| 36651 | NWTGNMQWA |
| 36652 | DIEFLDCEN |
| 36653 | KMAGIGCWY |
| 36654 | QCTAHNTCM |
| 36655 | LHGIINQDN |
| 36656 | AAGREYWLY |
| 36657 | AAVPVNKLT |
| 36658 | ADQSYNEYY |
| 36659 | AELCNNIIK |
| 36660 | AEYTHDCAM |
| 36661 | AGHVFWDGE |
| 36662 | AIGPSWMGV |
| 36663 | AIRPHHAKS |
| 36664 | AQKMEDQSL |
| 36665 | AQKMKDQSL |
| 36666 | ATEMFVQHD |
| 36667 | ATIAQWCIH |
| 35668 | AYQWFMSQP |
| 36669 | CDSIYHHMP |
| 36670 | CHFKYPRIE |
| 36671 | CSYIESWQI |
| 36672 | CIGHFSCQQ |
| 36673 | CTYTMATNR |
| 36674 | DAHKFARYP |
| 36675 | DAKSPCDSF |
| 36676 | DAVNDLTCP |
| 36677 | DDTEMSYCY |
| 36678 | DFWYSMAFP |
| 36679 | DGAWVKMMY |
| 36680 | DQAELLSDH |
| 36681 | DQFRALDLR |
| 36682 | DVASYCQLQ |
| 36683 | EAGMWPSKA |
| 36684 | EAWMVMNDQ |
| 36685 | ECRSNDYDR |
| 36686 | EDVFYQCNH |
| 36687 | EFRRNELGA |
| 36688 | EFWVCTRNH |
| 36689 | EGEARCHWH |
| 36690 | EHFRAYTQY |
| 36691 | EIKCSGGYA |
| 36692 | EKRESFGCG |
| 36693 | ENEMYMKQD |
| 36694 | EQDRGPMQC |
| 36695 | ESMKFRTFS |
| 36696 | FASAFANSD |
| 36697 | FMHSYEKFD |
| 36698 | FNIAESTPM |
| 36699 | FNPNRITKT |
| 36700 | FNVFIDRSN |
| 36701 | FQRRTQLIT |
| 36702 | FTVFYRLQW |
| 36703 | FTVGGLAFA |
| 36704 | GDEYYDTMG |
| 36705 | GDLSRDQED |
| 36706 | GFRTQDMIE |
| 36707 | GPCMETQHH |
| 36708 | GSEQKIHIN |
| 36709 | GTQSYLVKN |
| 36710 | HATFTWRCL |
| 36711 | HFWITEQMD |
| 36712 | HGCVETNEH |
| 36713 | HMLKMEMFN |
| 36714 | HNDQYEHDE |
| 36715 | HVDNDNMHE |
| 36716 | HVYYCPEAI |
| 36717 | IACPMGIHD |
| 36718 | IAESYRMMH |
| 36719 | IDSWMMIPS |
| 36720 | IGEPQAYMT |
| 36721 | INHGVNHQW |
| 36722 | ISMRSECKD |
| 36723 | ISWITRADI |
| 36724 | IVNLQHYHG |
| 36725 | IVSTSGNND |
| 36726 | IWEDMKGKF |
| 36727 | KAHLVLAGD |
| 36728 | KAMTDAANW |
| 36729 | KCAITETSD |
| 36730 | KFTTAMTEF |
| 36731 | KIVESHGTN |
| 36732 | KKTEEMPVT |
| 36733 | KPCTQAAEP |
| 36734 | KSYSCEQTS |
| 36735 | KTHVMHWEV |
| 36736 | KTYSVMYSP |
| 36737 | KVCNHELFG |
| 36738 | LAAMSLTWW |
| 36739 | LDGVFFEFF |
| 36740 | LFRSHTCHH |
| 36741 | LRTQLLLQD |
| 36742 | LSDSYVRKF |
| 36743 | LVKGREQFN |
| 36744 | LVQCHHVHC |
| 36745 | MAMWARTEP |
| 36746 | MDSQHNKWQ |
| 36747 | MEQFDHCP1 |
| 36748 | MFRIEAACP |
| 36749 | MGAHFMNPP |
| 36750 | MKTFWDATF |
| 36751 | MVGPSWDTT |
| 36752 | MYYLMQKTG |
| 36753 | NAMLWRMHN |
| 36754 | NCCQEHNVG |
| 36755 | NEGKWFWAS |
| 36756 | NHDEKLWVP |
| 36757 | NHPVGWDND |
| 36758 | NHVTMCVLR |
| 36759 | NIVDCDDVR |
| 36760 | NLGWQEWDS |
| 36761 | NNPFSRYMP |
| 36762 | NSMWLCTNQ |
| 36763 | NSVMMTMIA |
| 36764 | NSVVMTMIA |
| 36765 | NTIKVEDLG |
| 36766 | NWGDQRRHV |
| 36767 | NYAQYYRAW |
| 36768 | NYCTYHSTH |
| 36769 | PADHKQTSV |
| 36770 | PFCESACHI |
| 36771 | PGDRTISMW |
| 36772 | PGMMYQFAW |
| 36773 | PHVCGEGKI |
| 36774 | PKGWADPCP |
| 36775 | PNWGLDMAP |
| 36776 | PTCIIMKGN |
| 36777 | PITHRIGSY |
| 36778 | QAARMQKYQ |
| 36779 | QAVSAVDKC |
| 36780 | QDLEWIAGC |
| 36781 | QHHPINCAT |
| 36782 | QHMVTSHNP |
| 36783 | QHNTSYPSF |
| 36784 | QPTLPDEHE |
| 36785 | QTVPPMVQE |
| 36786 | QWIVFTCII |
| 36787 | QWSDIMNCD |
| 36788 | QYAHHYNIE |
| 36789 | QYVDMYTQQ |
| 36790 | RCDTHRSCT |
| 36791 | RDSSNWLCI |
| 36792 | RNYLPLQFD |
| 36793 | RSMLGCHTN |
| 36794 | RTEACTSLP |
| 36795 | RTQWCIADP |
| 36796 | RTYYEENGR |
| 36797 | SATDMTMLT |
| 36798 | SDYEKFLAY |
| 36799 | SEHWHEDAW |
| 36800 | SGNSQNAFM |
| 36801 | SHQHMWHQT |
| 36802 | SIETMDTNA |
| 36803 | SILNAMSLQ |
| 36804 | SNYFNNFGF |
| 36805 | SNYFNNFWF |
| 36806 | SPPNLRAFP |
| 36807 | SPSIDRFWV |
| 36808 | SPYWVMRMG |
| 35809 | SQKVHIDNN |
| 35810 | STHYASTYL |
| 36811 | SVADHYHLK |
| 36812 | SVAMQMHSW |
| 36813 | SVCWIWWTF |
| 36814 | SVKPHYSCW |
| 36815 | SVVYEAIWA |
| 36816 | SWHAEVVNQ |
| 36817 | TAIHMNWRQ |
| 36818 | TAPLVYPHC |
| 36819 | TASDAENYQ |
| 36820 | TCDRSLAEY |
| 35821 | TCDWSLAEY |
| 35822 | TCGYTHIFS |
| 36823 | TCQHNQHVA |
| 36824 | TCSPDEQLD |
| 36825 | TEALAQFMA |
| 36825 | TEKEFMYIC |
| 36827 | THIGSYTQF |
| 36828 | THQYWYGQE |
| 36829 | TIKGQHGMT |
| 36830 | TISDHGAEW |
| 36831 | TLLFAHDYA |
| 36832 | TRATSLTPC |
| 35833 | TTIAQWCVH |
| 35834 | TTNQNSEAM |
| 36835 | TWHNPRNDK |
| 36836 | VCQYCELRG |
| 36837 | VRMVPESEW |
| 36838 | VINWLSLQY |
| 36839 | VVLPWGLRE |
| 36840 | WKFMFEKWR |
| 36841 | WKTVCPSRQ |
| 36842 | WLAPCAKCG |
| 36843 | WNCSVYTCS |
| 36844 | WSPLYQTVR |
| 36845 | YIHTVENND |
| 36846 | YQNHYQKKW |
| 36847 | IKHIATESR |
| 36848 | VMGTGRMQH |
| 36849 | NWGDQRQHV |
| 36850 | LVFLRDQHY |
| 36851 | CRWTPEIFQ |
| 36852 | KRIKMPPPK |
| 36853 | SWYYDEQSN |
| 36854 | NNYKVQQDG |
| 36855 | HHQLHLKDS |
| 36856 | QDDVLDVTE |
| 36857 | VKNHYEGGP |
| 36858 | KPSQCLPHN |
| 36859 | DYDPDIKDQ |
| 36860 | CDSIYRHMP |
| 36861 | GAMMGNSLP |
| 36862 | CTQGYGDMP |
| 36863 | MIYTGWDMM |
| 36864 | IGKEFIVMP |
| 36865 | TVNTYEHCW |
| 36866 | ECASVDISY |
| 36867 | VNSCRHAWY |
| 36868 | AVFAPNGEV |
| 36869 | KIESRNHYS |
| 36870 | NSQYAHEPP |
| 36871 | AIGHMTQLP |
| 36872 | QIIPQFAYF |
| 36873 | YFMTWGKCD |
| 36874 | IKHGGWGFH |
| 36875 | ECVSKWVVF |
| 36876 | SPPNWRAFP |
| 36877 | AFIQQSNQD |
| 36878 | VSNQFKYND |
| 36879 | QMHRLFNDE |
| 36880 | SKMEEVMDP |
| 36881 | MEQPTCMME |
| 36882 | QPGTQEVLQ |
| 36883 | GCQG1PRMQ |
| 36884 | YSDNLERCG |
| 36885 | YANQAMDYM |
| 36886 | TWPGGCKSV |
| 36887 | AVDDCESER |
| 36888 | KGVWDPSSM |
| 36889 | MTGIVLQNN |
| 36890 | QVNYYTKGM |
| 36891 | QIGSHSFSC |
| 36892 | EINREVRQN |
| 36893 | QTIIGNVWG |
| 36894 | EIGLNGAGT |
| 36895 | RTVQEDGCG |
| 36896 | NCHIDHVQD |
| 36897 | EIKCSVKLE |
| 36898 | WVPTPWRTH |
| 36899 | CTSTMHAFQ |
| 36900 | MSANMMTKG |
| 36901 | LFNYEGRTQ |
| 36902 | CPNLPGMIN |
| 36903 | SAAWQFGGS |
| 36904 | MMATAPELQ |
| 36905 | NYAQYYRTW |
| 36906 | SQDCGRPES |
| 36907 | HEAQKEDCN |
| 36908 | EMDSITQFH |
| 36909 | FHMNSWLSR |
| 36910 | YWIPTHVLN |
| 36911 | WYEMMVGYH |
| 36912 | WDVKFWETM |
| 36913 | SGTSIHTYL |
| 36914 | ECVEWNAPD |
| 36915 | MIEGHAAPR |
| 36916 | PILLCHAPE |
| 36917 | VFLPIARDQ |
| 36918 | FPEASITRW |
| 36919 | PKGVSCPNL |
| 36920 | KHDGEIRVL |
| 36921 | DSDPITVDL |
| 36922 | SDCEKFLAY |
| 36923 | DNVVMWWNQ |
| 36924 | KDFNFEAQG |
| 36925 | PYGQCMRTF |
| 36926 | TNKPKNVLM |
| 36927 | TLGMLLENI |
| 36928 | DVNLQITTH |
| 36929 | ENDYVHGCM |
| 36930 | IDLSHCRCT |
| 36931 | NRTAGSCAC |
| 36932 | LAKPKCKLT |
| 36933 | ATGLPARFP |
| 36934 | NHAWTKPWQ |
| 36935 | CCTQFKCVS |
| 36936 | AHVFEPQRV |
| 36937 | ALFCYNDHV |
| 36938 | AMMPCVGWQ |
| 36939 | AQLCCHNET |
| 36940 | ASCEWSWRL |
| 36941 | AVHWTQKRE |
| 36942 | AVTKCMKTP |
| 36943 | AWAEWCEYS |
| 36944 | AWKDIPSAA |
| 36945 | AWMHAQLSR |
| 36946 | AWMHTQLSR |
| 36947 | AWTEWCEYS |
| 36948 | AYYQTICAA |
| 36949 | CCDLWDDMS |
| 36950 | CCGPSATAQ |
| 36951 | CFCMKEWPN |
| 36952 | CIPPPGYKD |
| 36953 | CKEAWADCT |
| 36954 | CKNVETQMA |
| 36955 | CSAAFQLQP |
| 36956 | CSTKAHRQY |
| 36957 | CTEQIHRHV |
| 36958 | CTQQEASMM |
| 36959 | CVLQENANA |
| 36960 | CVTYLDAWA |
| 36961 | CWGFACLLI |
| 36962 | CWWFACLLI |
| 36963 | DADSSIQLG |
| 36964 | DADSTIQLG |
| 36965 | DAGIGMKFY |
| 36966 | DELWWIANG |
| 36967 | DFAYQCYLN |
| 36968 | DFRTFNQES |
| 36969 | DHEHYTWFG |
| 36970 | DHHTCLEQY |
| 36971 | DKRAWDWLR |
| 36972 | DLMKIDKWD |
| 36973 | DMHMLNCCE |
| 36974 | DMHMLNCCG |
| 36975 | DPLKHCYDN |
| 36976 | DRHNHDVAI |
| 36977 | DRHNHDVTI |
| 36978 | DSRQQMSLE |
| 36979 | DTEYQTNAN |
| 36980 | DVAHKDDML |
| 36981 | DVQQANGRY |
| 36982 | DVTMAEVIG |
| 36983 | DVWTLPECS |
| 36984 | DYEVCGNWS |
| 36985 | DYEYVMSIK |
| 36986 | DYNESDMQN |
| 36987 | EEMLVTRAS |
| 36988 | EHETVWHNP |
| 36989 | EHNIYNNGL |
| 36990 | EIMQPMQGM |
| 36991 | ELNCLSRYV |
| 36992 | ENGPVRRIG |
| 36993 | ENQRMRQIN |
| 36994 | ERTDTNLWS |
| 36995 | ERTDTNVWS |
| 35996 | ESGSTRNDG |
| 36997 | ESYEHQMHR |
| 36998 | ETHRTSNNC |
| 36999 | ETHYPKCQE |
| 37000 | ETHYPKYQE |
| 37001 | ETKFRLFPK |
| 37002 | EVMIAAALP |
| 37003 | EVMIAAALS |
| 37004 | EVVGYPIIC |
| 37005 | EWDDWYSQS |
| 37006 | FAQLKWMMS |
| 37007 | FICQIPETK |
| 37008 | FWHCINACP |
| 37009 | FWPCINACP |
| 37010 | GAPRYHESR |
| 37011 | GATRQEHAF |
| 37012 | GATWQEHAF |
| 37013 | GELWWIANG |
| 37014 | GFVQKVNDT |
| 37015 | GICWPNWYH |
| 37016 | GQNIVEMSW |
| 37017 | GVYKTNQPQ |
| 37018 | GYEGFEIVD |
| 37019 | GYEGSEIVD |
| 37020 | GYEYVMSIK |
| 37021 | HCSPDDMKC |
| 37022 | HDFPFWSKG |
| 37023 | HIHFDEWNC |
| 37024 | HKGFLQEWI |
| 37025 | HPAGYEKWW |
| 37026 | HQKSEWPNT |
| 37027 | HSDRDEIEE |
| 37028 | HSDRDEIEG |
| 37029 | HVLHQDFFI |
| 37030 | HVLHQDFFT |
| 37031 | HWNTGMLTN |
| 37032 | HWYVVLRDW |
| 37033 | IAKDMHEMS |
| 37034 | IAVLHSSQR |
| 37035 | IFALIPDAN |
| 37036 | ILDNDQVTY |
| 37037 | ILQCHEAIG |
| 37038 | IMLMCTPRK |
| 37039 | IPGFKHSDW |
| 37040 | ISTTFQWYS |
| 37041 | ITGAVOPFL |
| 37042 | KGGACDACI |
| 37043 | KKGWEFMYG |
| 37044 | KKGWEVMYG |
| 37045 | KVDPIRHGQ |
| 37046 | KVPTDGANS |
| 37047 | KYVRWFQAW |
| 37048 | LAESHYPFE |
| 37049 | LDTKWDQHI |
| 37050 | LDTKWDQHV |
| 37051 | LGGMHPCNN |
| 37052 | LGGMHPYNN |
| 37053 | LINKFPQQE |
| 37054 | LISKFPQQE |
| 37055 | LMEMTLRMG |
| 37056 | LNNHMKKYP |
| 37057 | LRISKWMTG |
| 37058 | LVCDSGYAA |
| 37059 | LVRIWHETM |
| 37060 | LWECYGTHG |
| 37061 | MAFMQGLGW |
| 37062 | MDGQACLNQ |
| 37063 | MDNQEDRCE |
| 37064 | MFALIPDAN |
| 37065 | MHAQRMKYP |
| 37066 | MHTQRMKYP |
| 37067 | MLMYLGHLT |
| 37068 | MLMYLGHRT |
| 37069 | MNEDCMQTS |
| 37070 | MNHEHGPIT |
| 37071 | MPRHKHSQT |
| 37072 | MSDDVVLAL |
| 37073 | MTVQNVPEM |
| 37074 | MVDGPAASG |
| 37075 | MYYVTQMCN |
| 37076 | NAWMYVNMS |
| 37077 | NAYPWHLFC |
| 37078 | NAYSWHLFC |
| 37079 | NIIKCVECC |
| 37080 | NIIKCVEGC |
| 37081 | NLRIHAHRT |
| 37082 | NPMRPSVEQ |
| 37083 | NVPIRALQK |
| 37084 | PIALYANCS |
| 37085 | PIELYANCS |
| 37086 | PIGLYANCS |
| 37087 | PLTTDCSPN |
| 37088 | QGFADGRPT |
| 37089 | QHLEINCVS |
| 37090 | QLVYNMWDC |
| 37091 | QMCMNISHY |
| 37092 | QMCPSCCVT |
| 37093 | QPDYEEPPS |
| 37094 | QPWVPSILH |
| 37095 | QVETVPYLS |
| 37096 | QYGHFQFEY |
| 37097 | QYRVDSYPF |
| 37098 | RCQDKVMPY |
| 37099 | RCSHDDMKC |
| 37100 | RCSPDVMKC |
| 37101 | RFDMWWLEI |
| 37102 | RHKDTEWFI |
| 37103 | RIEMFWCNN |
| 37104 | RIEMFWCTN |
| 37105 | RIKMFWCNN |
| 37106 | RLDCNQFWE |
| 37107 | SALTEPPFP |
| 37108 | SAPTELPFP |
| 37109 | SCGQFEWDN |
| 37110 | SGSWEAFGF |
| 37111 | SGSWEDFGF |
| 37112 | SGSWEGFGF |
| 37113 | SHVFEPQRV |
| 37114 | SIEMEWCNN |
| 37115 | SMHTWQTAK |
| 37116 | SMHTWQTTK |
| 37117 | SNERRHMCA |
| 37118 | SPMGVAMNG |
| 37119 | SSIPWNYYT |
| 37120 | SVTYLDAWA |
| 37121 | TCAGFCAPE |
| 37122 | TCLHDYGYG |
| 37123 | TLFCYNDHV |
| 37124 | TNAYQYHVG |
| 37125 | TPEHGLMVG |
| 37126 | TQCEIFEAH |
| 37127 | TRKVAEEMW |
| 37128 | TRPVEMQPG |
| 37129 | TVEPEYFQA |
| 37130 | TVEPEYFQD |
| 37131 | TVEPEYFRD |
| 37132 | TVFMNAHWA |
| 37133 | TVNEGEYGP |
| 37134 | TWSYDPASS |
| 37135 | VAEPSWQNN |
| 37136 | VCTLNNHTM |
| 37137 | VGNETHLGD |
| 37138 | VGNKTHLGD |
| 37139 | VHITVCRYG |
| 37140 | VIYCHPMVP |
| 37141 | VMDWWLDEN |
| 37142 | VPHTTCHTH |
| 37143 | VPHTTYHTH |
| 37144 | VQKWGLMQQ |
| 37145 | VSGSTWNDG |
| 37146 | VTEFIMHCG |
| 37147 | VTEVIMHCG |
| 37148 | VTHTVHQET |
| 37149 | VVVVNGVTE |
| 37150 | VYQRFCGKR |
| 37151 | WINPTEMGA |
| 37152 | WEVLSDTIG |
| 37153 | WKHCWMLMQ |
| 37154 | WLRILRAPH |
| 37155 | WLRILRAPY |
| 37156 | WSQEQITFD |
| 37157 | YNGKWPRLT |
| 37158 | YNMCSAGSE |
| 37159 | YNMYSAGSE |
| 37160 | YSGCWWQHG |
| 37161 | YSNRIPIGF |
| 37162 | YVPPNYTEQ |
| 37163 | LHWPITVQP |
| 37164 | VLNKNWTMC |
| 37165 | ISDCMDNYW |
| 37166 | YCVNMQYDV |
| 37167 | NSEREYAIR |
| 37168 | RAQSHMEDY |
| 37169 | EKFSANKFQ |
| 37170 | RSGQGEGHM |
| 37171 | GSHQLMWIG |
| 37172 | YMWGTELGC |
| 37173 | VTNLYEGSG |
| 37174 | EMWHHLSTP |
| 37175 | WWRATFGQA |
| 37176 | NWQWIAVQD |
| 37177 | HNLYGVYWG |
| 37178 | NQSANWLQN |
| 37179 | TGGQNYAHE |
| 37180 | CSEPDPAWN |
| 37181 | AFSSERVYA |
| 37182 | CCILWESGT |
| 37183 | CPQCDVMTS |
| 37184 | QSSFWPAPT |
| 37185 | SKWHFYLRQ |
| 37186 | VRFIRTSLQ |
| 37187 | KAEMKMGCN |
| 37188 | MANHSISAD |
| 37189 | IDRCCWDYA |
| 37190 | EPGLLWHTQ |
| 37191 | HTHDVRVHK |
| 37192 | WKPAAYSNC |
| 37193 | CGHTACSQC |
| 37194 | DICLTHDHC |
| 37195 | REIRDDYIY |
| 37196 | VYTPKYQDL |
| 37197 | KCESWKDFF |
| 37198 | QNEPEKQVK |
| 37199 | LASYESVEY |
| 37200 | HMHFDEWNC |
| 37201 | KPFHVEMSL |
| 37202 | GRHYIAAGY |
| 37203 | TTMTHSTLD |
| 37204 | AEICHKRED |
| 37205 | DAAEELRNA |
| 37206 | LIAHDHKCF |
| 37207 | YTKIESVHL |
| 37208 | ALMMDDITP |
| 37209 | TQSHWNKMS |
| 37210 | KTFQYMGPT |
| 37211 | SNHESMHMD |
| 37212 | SCGQFEWGN |
| 37213 | VEPYMFAPM |
| 37214 | TTETRNWVL |
| 37215 | TAQQFAHSG |
| 37216 | EANPYTATK |
| 37217 | FQGMCQLRE |
| 37218 | IIIQRSRTY |
| 37219 | DFTEEGEAY |
| 37220 | MVKLDAQDA |
| 37221 | EIMQPLQGM |
| 37222 | VPNRNCQFS |
| 37223 | CIHSVHFAA |
| 37224 | MFAKWMSGS |
| 37225 | ESESWIHMP |
| 37226 | SALTELPFP |
| 37227 | FGLQMMYIV |
| 37228 | PAPMSEYNF |
| 37229 | ECALAQYGS |
| 37230 | SHMGKHHHM |
| 37231 | ITAKQEVTS |
| 37232 | AADCGSFDH |
| 37233 | AADCGSFYH |
| 37234 | ADHTENFSD |
| 37235 | AEDCGSFDH |
| 37236 | AEDTPYNIY |
| 37237 | AESPQRWAL |
| 37238 | AEWSEGECA |
| 37239 | AEWSEWECA |
| 37240 | AEWSEWEGA |
| 37241 | AGQKHWHYS |
| 37242 | AIDHHTEVV |
| 37243 | ATETFNEDN |
| 37244 | AVCMEEREP |
| 37245 | AWCWQVILM |
| 37246 | CAPKQECSR |
| 37247 | CDVWWFPNL |
| 37248 | CNRQKYTAK |
| 37249 | CNSSESHYY |
| 37250 | CWTMLMFST |
| 37251 | CYQHLNTMN |
| 37252 | DANHCMWWR |
| 37253 | DDHCCTIPT |
| 37254 | DEPTLEEDM |
| 37255 | DGTLAILCT |
| 37256 | DGTLAIMCA |
| 37257 | DGTLAIMCT |
| 37258 | DGYQKYQEQ |
| 37259 | DIACLMNST |
| 37260 | DIEGYGHSW |
| 37261 | DISQTTITK |
| 37262 | DKLPMAMDP |
| 37263 | DKNVFEEHV |
| 37264 | DNCQVENHL |
| 37265 | DPPHRNCTI |
| 37266 | DQEKCLSFG |
| 37267 | EARMPDDWS |
| 37268 | EARMPNDWP |
| 37269 | EFGFKIHRY |
| 37270 | EIEHACNSG |
| 37271 | ELQYYKEHT |
| 37272 | ELYGLNHSC |
| 37273 | EMaRGRIVG |
| 37274 | ESCHLQHEE |
| 37275 | ESCHPQHGE |
| 37276 | EVCTDDGNV |
| 37277 | EYATKVKMD |
| 37278 | FHCAMEGRT |
| 37279 | FSRHWECVQ |
| 37280 | FSRRWECVQ |
| 37281 | FWSNIIGIY |
| 37282 | GFNMNNMVA |
| 37283 | GHLDPFDCG |
| 37284 | GLCIYDHRH |
| 37285 | GMSMSQSHK |
| 37286 | GNECFHNVA |
| 37287 | GNNTFNQDQ |
| 37288 | GQNINRGVC |
| 37289 | GTAGPCRSS |
| 37290 | GWCWQVILM |
| 37291 | GYNKWGRNE |
| 37292 | HEGLIMRLA |
| 37293 | HIGNKHIEC |
| 37294 | HMEQCRCNE |
| 37295 | HMYATEHCS |
| 37296 | IACRTHQTE |
| 37297 | IARRTHQTE |
| 37298 | ICHCCMDWG |
| 37299 | ICIRGARAA |
| 37300 | ICIRGVRAD |
| 37301 | ICTFYQPSP |
| 37302 | IHSPFMPYH |
| 37303 | ITTARNQYN |
| 37304 | IVSPFQTGT |
| 37305 | IYRLCQDSD |
| 37306 | KAEVKSPAP |
| 37307 | KATMTNCCF |
| 37308 | KCEGEEAGR |
| 37309 | KEDFGWKHM |
| 37310 | KKEQDHRDK |
| 37311 | KQAGYGFEH |
| 37312 | KYEVPGKYG |
| 37313 | LGSPFYERG |
| 37314 | LHSYQWPLG |
| 37315 | LKVVQAYEC |
| 37316 | LNNRTQESW |
| 37317 | LQLIVVSQT |
| 37318 | LQYPTACGC |
| 37319 | LSAKRQFFC |
| 37320 | LTNRTQESR |
| 37321 | MAIQVFMYD |
| 37322 | MAIQVIMSD |
| 37323 | MGTILQEVA |
| 37324 | MHAEDVTSV |
| 37325 | MISAPPDTY |
| 37326 | MKRGTAFCA |
| 37327 | MKYQDTHTF |
| 37328 | MTIQVFMSD |
| 37329 | MVASVAAEE |
| 37330 | MYMHHALSP |
| 37331 | NGKTNPCQK |
| 37332 | NGTQCLNMG |
| 37333 | NGTQCPNMD |
| 37334 | NISWIQDYM |
| 37335 | NMMTLWSHI |
| 37336 | NPGWRYMWC |
| 37337 | NQDEKLWAP |
| 37338 | NSEKVYGMF |
| 37339 | NSNHYNAMR |
| 37340 | NTEPTLVTR |
| 37341 | NTEYSAKND |
| 37342 | NVDAHEQYR |
| 37343 | NVDRQHAQG |
| 37344 | NVRNGTNTC |
| 37345 | NVYVTPVVC |
| 37346 | NYRCFDPMH |
| 37347 | PMMIIPYVA |
| 37348 | PNGHHWMIP |
| 37349 | QAPVIPIMT |
| 37350 | QHNSCKDAW |
| 37351 | QMNCLKLGP |
| 37352 | QNIATMRGF |
| 37353 | QNICLGVPT |
| 37354 | QSFPCMFKD |
| 37355 | QSPVPNRYA |
| 37356 | QTESEGWRL |
| 37357 | QVNKGAPQE |
| 37358 | RADWSDIAD |
| 37359 | RCNLYLEYS |
| 37360 | RDGDANCSL |
| 37361 | REKWGHMHT |
| 37362 | REQHIAGAD |
| 37363 | RGLVQDCCR |
| 37364 | RHVHRYWEC |
| 37365 | RVKAYAPTT |
| 37366 | RWSYMQADK |
| 37367 | SAMYGSTWA |
| 37368 | SAVYTAACN |
| 37369 | SGMTWNFHA |
| 37370 | SHIQLNAWW |
| 37371 | SIFMEVAWC |
| 37372 | SIQRNCAFW |
| 37373 | SLMRFLPSI |
| 37374 | SMGWAILEG |
| 37375 | SMPVGTEID |
| 37376 | SSASVNHTN |
| 37377 | SSDMQVCWT |
| 37378 | SSDNSHQGR |
| 37379 | SSKFHERQH |
| 37380 | STDNTGTAC |
| 37381 | STGSCAPLY |
| 37382 | TAVKSEAST |
| 37383 | TDHTENFSD |
| 37384 | TFANPPENA |
| 37385 | THGIYGTHD |
| 37386 | TISWLDTEV |
| 37387 | TISWPDTEV |
| 37388 | TKDAWNGLC |
| 37389 | TMSNYGCPQ |
| 37390 | TQIMRVISV |
| 37391 | TTQRDGQWY |
| 37392 | TVGPAGISE |
| 37393 | VDGLQCCCP |
| 37394 | VDIMRNDTG |
| 37395 | VEFRPKISR |
| 37396 | VGIMWNDTG |
| 37397 | VNWEVRAYI |
| 37398 | VSYWFQWGS |
| 37399 | VTATSPGIE |
| 37400 | VVTKPAYFV |
| 37401 | WADLWQYQW |
| 37402 | WATPPLQRC |
| 37403 | WRIRPQQEI |
| 37404 | WRMFESAPG |
| 37405 | YAQPDWVMA |
| 37406 | YCMWYATPP |
| 37407 | YHVPYQHLP |
| 37408 | YHWHINSFD |
| 37409 | YPELGKCEI |
| 37410 | YTGHTNNGR |
| 37411 | YTGLMWVWA |
| 37412 | AMVLFLVDN |
| 37413 | CALKQECSR |
| 37414 | CHNQMWQIC |
| 37415 | CISQTFRYY |
| 37416 | CWAEFRMRV |
| 37417 | CWMLGRDCC |
| 37418 | DGAAPLTFC |
| 37419 | DIAMNPRMC |
| 37420 | DITLWMATE |
| 37421 | DLMWHVNAI |
| 37422 | EMCHSMGDF |
| 37423 | EMCVMSFGY |
| 37424 | FFGWKKSNY |
| 37425 | FGREGCPTE |
| 37426 | FVELHCHTE |
| 37427 | GDTVMLVPS |
| 37428 | GGPFKVASS |
| 37429 | GTEHNTATI |
| 37430 | HTRVVESTG |
| 37431 | IAKIGNCVC |
| 37432 | IHTGTNSYA |
| 37433 | IMVHCREMG |
| 37434 | IPQVCQFGQ |
| 37435 | IRSQTLTDC |
| 37436 | IVHKLESVN |
| 37437 | KEARSQTGD |

TABLE 84
Sequences of the 581 to 589 Region in AAV5 VP1
Capsid Polypeptide that Drive Spleen Tissue Tropism

| SEQ | |
|---|---|
| ID | 581-589 |
| NO | Sequence |
| 39438 | CTTYYCWQE |
| 39439 | TMMYYESGQ |
| 39440 | YNMVHGDEP |
| 39441 | WGSLEWDRA |
| 39442 | DSGTKKRMH |
| 39443 | QHELEGNRF |
| 39444 | TEESLVRTY |
| 39445 | DDYYQLHES |
| 39446 | LLEHPEKDL |
| 39447 | LWQHTCIHG |
| 39448 | SDFTLGYHH |
| 39449 | MIEQWDACS |
| 39450 | PQYDCWKGS |
| 39451 | NHYPDQEAE |
| 39452 | EQPHCKWTA |
| 39453 | SHNNNPSGE |
| 39454 | EVADIVSLA |
| 39455 | LVELSIKQQ |
| 39456 | LWEHTFDCD |
| 39457 | VQSFENQAC |
| 39458 | VFRVKCAAD |
| 39459 | QSDWISIPC |
| 39460 | RANTWTRRH |
| 39461 | KVPSQLVFE |
| 39462 | ENCMSRMKP |
| 39463 | RLTEDMPDM |
| 39464 | NNGVHIFCE |
| 39465 | SHMSYGQVQ |
| 39466 | DVCDDHKPN |
| 39467 | GDNMVQWVS |
| 39468 | GYASIVKRD |
| 39469 | DNYMQLNCV |
| 39470 | DVAPMHQVE |
| 39471 | QLRCEYQHT |
| 39472 | EASIQASWN |
| 39473 | PCAMHNWGC |
| 39474 | MNANETHGA |
| 39475 | CECHWAYPS |
| 39476 | GFQRTHVDQ |
| 39477 | MEPHYWEWP |
| 39478 | RYMNAAKFF |
| 39479 | MNEYIMSMH |
| 39480 | IYMSTGNTP |
| 39481 | QQTKNNSTD |
| 39482 | EIYSQLTDL |
| 39483 | VTKLAENVY |
| 39484 | WDYSMTKKH |
| 39485 | FKHSLREWT |
| 39486 | ALAKFQCWS |
| 39487 | FCDLAHHYE |
| 39488 | PWTTPENYT |
| 39489 | NLAPMIQVC |
| 39490 | EAELENVNM |
| 39491 | YMALDLIPY |
| 39492 | TTKNAISFE |
| 39493 | STLMPDEMA |
| 39494 | LSAQRLVCD |
| 39495 | EPMPMPVWN |
| 39496 | HYVFGMSST |
| 39497 | GHNVTAMAI |
| 39498 | LWSRFISMD |
| 39499 | VPTPWMGIS |
| 39500 | IAYHYDQQN |
| 39501 | IEHCSNRYA |
| 39502 | FAQQIINAS |
| 39503 | YVLYSWRTS |
| 39504 | VINWLSLQS |
| 39505 | QMVTQLNWE |
| 39506 | IQNPAMWGT |
| 39507 | EFAHEWYVN |
| 39508 | PYGQCMRTF |
| 39509 | INYISFVDR |
| 39510 | GVNDLQNIC |
| 39511 | CSKATWGAE |
| 39512 | DYVDQCQVS |
| 39513 | MCGCGWAKG |
| 39514 | NAELQQADI |
| 39515 | ESSQEIKTC |
| 39516 | AIRQFMMHL |
| 39517 | QTQICHSWM |
| 39518 | WFDRSWHIL |
| 39519 | FRAVYYYHS |
| 39520 | TFHQSDYWE |
| 39521 | CGCQVKCHT |
| 39522 | WNWLKVMHE |
| 39523 | MASQGGQVR |
| 39524 | DVEFCMKQY |
| 39525 | INMPVSKDQ |
| 39526 | QMCVWMTRQ |
| 39527 | SSEYSQFAI |
| 39528 | DSIIKDQSD |
| 39529 | EHPEWKCMY |
| 39530 | WKATPGGQC |
| 39531 | STARHNMQL |
| 39532 | RYQSHCWLH |
| 39533 | TFAKSDWLA |
| 39534 | NSQLSMTFG |
| 39535 | RFDQFWDTY |
| 39536 | QTSHQDQDC |
| 39537 | DHELTRSEA |
| 39538 | MITNNCNIS |
| 39539 | FNESGWPTW |
| 39540 | MWGCKLFVC |
| 39541 | SKGWADLCP |
| 39542 | HIHDTMSDY |
| 39543 | WHTIMTYES |
| 39544 | SFVHMFQGH |
| 39545 | WVHPYSYCA |
| 39546 | QVSFNARYA |
| 39547 | FSTSYCHED |
| 39548 | WLIGMWNTG |
| 39549 | NSTMEHSRW |
| 39550 | KYEFLLKYI |
| 39551 | HCDSPAATP |
| 39552 | DIEFLDCEN |
| 39553 | YSDPKNMSI |
| 39554 | ACIPQMHSA |
| 39555 | NCMHLQGCQ |
| 39556 | SRVMIHVYV |
| 39557 | SMFTHQLAQ |
| 39558 | DVTPTSWIE |
| 39559 | WCEAVGDYA |
| 39560 | GDMYYWKIQ |
| 39561 | GWDMLSVAK |
| 39562 | NMEPLKLQA |
| 39563 | CWECCTDSG |
| 39564 | GNECFHNVE |
| 39565 | LSTMFPEQT |
| 39566 | TAFQSLQQM |
| 39567 | NGVGRSGDN |
| 39568 | QAWPKTEYI |
| 39569 | YNNDMKQRR |
| 39570 | MLHTSECVQ |
| 39571 | GSHWYDCNQ |
| 39572 | PTNYGWMWR |
| 39573 | AHEDPNTWC |
| 39574 | QSMVACYTI |
| 39575 | PWRWHKSAC |
| 39576 | WINEANCLM |
| 39577 | LSPWPQTDQ |
| 39578 | LETMMRHGE |
| 39579 | LGSPFYECG |
| 39580 | ACQFYISRP |
| 39581 | VFKPLDKRY |
| 39582 | TFVRKPSLM |
| 39583 | NDMQMNWVH |
| 39584 | HAKQANGMV |
| 39585 | VKFRITTEC |
| 39586 | CVEQPVEQG |
| 39587 | MQPMESATW |
| 39588 | VEDRVFACC |
| 39589 | EVRIQCKID |
| 39590 | KQKTQNRNA |
| 39591 | KVAEGQNML |
| 39592 | YPTMTFPEE |
| 39593 | ASKQGTHDY |
| 39594 | YVIGQKDEM |
| 39595 | PHASGYTCI |
| 39596 | EKRLEGWVY |
| 39597 | NLSNLVSCR |
| 39598 | YTELMKKAC |
| 39599 | QCTAHNTCM |
| 39600 | TWAPWCCYF |
| 39601 | ICHIRTRGN |
| 39602 | CICRTWDSY |
| 39603 | EQELKNSTQ |
| 39604 | NGYLVHACQ |
| 39605 | NADMSFRNR |
| 39606 | DQRHGNVSP |
| 39607 | TWYMNWMWH |
| 39608 | KGNPLDGDT |
| 39609 | VTMIHNAFH |
| 39610 | SFKSVSQYN |
| 39611 | AFGLTTGHT |
| 39612 | CVLSRSTMR |
| 39613 | LCKFANGAA |
| 39614 | QSYPTMYQC |
| 39615 | QPYWVAVDP |
| 39616 | CKYKTKSIR |
| 39617 | QCTLEISYV |
| 39618 | EICMRSGFI |
| 39619 | WVDQNVAQD |
| 39620 | YYNHKIVEP |
| 39621 | QHEQSNHIW |
| 39622 | YVDHWTLGD |
| 39623 | NIQLLHSYC |
| 39624 | IMNPTAQNN |
| 39625 | ATMNLSWGL |
| 39626 | HTNYTVGYE |
| 39627 | PWMHIMLNP |
| 39628 | EAGPRKRDV |
| 39629 | LEIGGKTRT |
| 39630 | ARWFSTVEQ |
| 39631 | KSDAQRNVA |
| 39632 | WERCLELNQ |
| 39633 | RCADNPYFR |
| 39634 | QTDILRDVQ |
| 39635 | MDGRDEIIH |
| 39636 | ASDMQFWST |
| 39637 | CSIQINNCR |
| 39638 | P1WQGYWPW |
| 39639 | GAANRIQSW |
| 39640 | SGDWDFGEW |
| 39641 | TQCKQLTVM |
| 39642 | MHGIARMQQ |
| 39643 | LMKTSPSYW |
| 39644 | KMHGNERCF |
| 39645 | RYPCCQSPF |
| 39646 | AVYLDHVFS |
| 39647 | ITAARNQYN |
| 39648 | VGNVMIKMC |
| 39649 | HHFHVNLDI |
| 39650 | NRIQMTDFQ |
| 39651 | QISKPSVQC |
| 39652 | DVMQYQNHM |
| 39653 | MQHTDWTSG |
| 39654 | CWILHHRCS |
| 39655 | FSWPIHEPD |
| 39656 | RDQCRMESG |
| 39657 | QIKTHSNVF |
| 39658 | DSAKQWHHQ |
| 39659 | SVLHVQALA |
| 39660 | ETNDNMILH |
| 39661 | FQWRTEMNN |
| 39662 | FQTCDFWAT |
| 39663 | TVNWYSGFG |
| 39664 | YNFDYMKDG |
| 39665 | KCADLIIRS |
| 39666 | CCLWSYWAF |
| 39667 | FQTLILSGL |
| 39668 | ILINDREWG |
| 39669 | EPEGELDKT |
| 39670 | MYAGWLNHG |
| 39671 | FLTCDQFEW |
| 39672 | NMFQLKPQN |
| 39673 | PYGPIEYDE |
| 39674 | GGDGRVHNK |
| 39675 | VDRLFRMEY |
| 39676 | QWFTKGVGE |
| 39677 | QSRCVDNTV |
| 39678 | QIIYRCRST |
| 39679 | KDGRNPHCL |
| 39680 | AIGPALCLT |
| 39681 | TQPEDHWLA |
| 39682 | TGMTFNSFR |
| 39683 | NAIPYFVQA |
| 39684 | DVKSWAVCD |
| 39685 | VLPMGPVDP |
| 39686 | CDHVTKHPT |
| 39687 | SNVACIQAF |
| 39688 | THVKRFDYE |
| 39689 | VFNLMLQDK |
| 39690 | ECGCMYWGY |
| 39691 | MYTGMRCWR |
| 39692 | MDNCPPMWN |
| 39693 | ATMWMQWWD |
| 39694 | TNSCECVDR |
| 39695 | GHLFNNNEW |
| 39696 | ASMHEETCL |
| 39697 | VCDGHTAFP |
| 39698 | TISQIPWVR |
| 39699 | KNCIMLASN |
| 39700 | QGKQLYHMC |
| 39701 | YFPSIQCYE |
| 39702 | KMAGIGCWY |
| 39703 | GGALARSSI |
| 39704 | PDLWYEKSS |
| 39705 | NVWTNIAEM |
| 39706 | HIKVEHEEV |
| 39707 | EHVQCSADM |
| 39708 | LYMMALLPT |
| 39709 | ASIATMDRI |
| 39710 | YKGMEKNPV |
| 39711 | QMKGATEFC |
| 39712 | AADIFAIND |
| 39713 | NSGVLIGME |
| 39714 | TSNHNMALE |
| 39715 | LIEKQRWML |
| 39716 | SGFFVHTSN |
| 39717 | QSSHCKQMV |
| 39718 | RDYIERREP |
| 39719 | RQAWPKDGM |
| 39720 | QHHWKWSTE |
| 39721 | YCECGHWPN |
| 39722 | HMGIAYNDH |
| 39723 | LCAVCGDCD |
| 39724 | TPLMMCQAS |
| 39725 | TYESLQNSW |
| 39726 | GRALGKKQG |
| 39727 | YTKYNWKAA |
| 39728 | TATCGIEVE |
| 39729 | MPWLDKPPC |
| 39730 | TRQWMCVHC |
| 39731 | DQEAQVVTG |
| 39732 | MVENGLRLQ |
| 39733 | EAGCKMWPT |
| 39734 | AIGCFQNGG |
| 39735 | GLFEGSPGA |
| 39736 | YLNKNPHQM |
| 39737 | CQMLCRPPV |
| 39738 | VNLPYGYAK |
| 39739 | LMTPQVKQA |
| 39740 | SQERMDYDG |
| 39741 | NTHTGNDRL |
| 39742 | QGHKTMHVF |
| 39743 | FGGMTPYGV |
| 39744 | SECEVLCSL |
| 39745 | EIHMFGQSE |
| 39746 | QAKMILDGT |
| 39747 | VSDECYFDM |
| 39748 | REWMFTLMA |
| 39749 | CNGYWMCMS |
| 39750 | QIRSLITHD |
| 39751 | QFAQLWCAK |
| 39752 | RYNNCPNLW |
| 39753 | EVAFTTSSD |
| 39754 | YVKMCSMRN |
| 39755 | HTVMEWSPT |
| 39756 | TFMFNSEWS |
| 39757 | AGMYKCQED |
| 39758 | FCILASDMA |
| 39759 | DLIVATEWF |
| 39760 | QGFSTDVKP |
| 39761 | FMIMAKTQA |
| 39762 | QSAHPEPMC |
| 39763 | YDYWMQAPT |
| 39764 | VVCRMWHQP |
| 39765 | GSKIIMHTE |
| 39766 | NHSLCWDSK |
| 39767 | TSSKHLVFD |
| 39768 | TKMIIFDSW |
| 39769 | ENTMWQSSQ |
| 39770 | PVICVWHDN |
| 39771 | NWTGNMQWA |
| 39772 | MNLQIGSKG |
| 39773 | DRKQADQIY |
| 39774 | GGNAGRDTT |
| 39775 | WGGMPNNQG |
| 39776 | HSMMPGWPS |
| 39777 | DSDTWAMHE |
| 39778 | EGIMNHAPT |
| 39779 | FQVMDHANP |
| 39780 | NSNSMNCVS |
| 39781 | QQVLGLAGN |
| 39782 | QSSPDQRAL |
| 39783 | AAPIAHSMR |
| 39784 | ADPTTETPH |
| 39785 | AFNEMEQGD |
| 39786 | AHAPWCWAV |
| 39787 | AMTESVSCS |
| 39788 | ANYALHYDR |
| 39789 | AREFWHCRD |
| 39790 | ATNIKESVN |
| 39791 | AVHAFPWSF |
| 39792 | AVKDMKKWD |
| 39793 | CDEDLYVTP |
| 39794 | CHIQVDHHF |
| 39795 | CMDGQLKWF |
| 39796 | CPWNSQVTL |
| 39797 | CQQYAAWAV |
| 39798 | CRIASFKAI |
| 39799 | CSAYCHACE |
| 39800 | CSSDRDGLP |
| 39801 | DDGHHVPIM |
| 39802 | DDMFAQYFS |
| 39803 | DHSMWTWAE |
| 39804 | DICNATCWV |
| 39805 | DITQTDMWG |
| 39806 | DIWTAKENV |
| 39807 | DLAMTMVNP |
| 39808 | DSGPQTQMV |
| 39809 | DTAINQCWI |
| 39810 | DVEPSECSW |
| 39811 | DVQNANQMF |
| 39812 | DVRYELPYR |
| 39813 | EAVGMPLCN |
| 39814 | EDWYWMNLC |
| 39815 | EFKVYQNCH |
| 39816 | EKYTFCIFL |
| 39817 | ELLYTLMFH |
| 39818 | EMEAQLLGE |
| 39819 | EPCLVNISH |
| 39820 | EQNASMTMH |
| 39821 | ERDHIPCYA |
| 39822 | ESSNTQPWH |
| 39323 | ETASDPQTI |
| 39824 | ETKYSYEVG |
| 39825 | ETTDGYGQV |
| 39826 | ETVWNDEQS |
| 39827 | EVALQMFSQ |
| 39828 | EVCQNINEA |
| 39829 | EVMPITGYG |
| 39830 | FHELRHVDT |
| 39831 | FKDWNTVGM |
| 39332 | FKTRETTEI |
| 39333 | FMHHTVRSF |
| 39834 | FMPAKSVAD |
| 39835 | FMRSVQWNA |
| 39836 | FSGMETRPP |
| 39837 | FTLVATNIH |
| 39838 | FVSSVTQVA |
| 39839 | GAGDMPMLD |
| 39840 | GDQGPRQQL |
| 39841 | GFHPIPWFP |
| 39842 | GIEMDLCNG |
| 39843 | GIGPQLNWA |
| 39844 | GIRFFEKGI |
| 39845 | GMHMPCDKN |
| 39846 | GQAKYWMGT |
| 39847 | GYKPDRLHD |
| 39848 | HMVINQMDM |
| 39849 | HPRQGWMHS |
| 39850 | IAGYRHNTD |
| 39851 | IFHNYDLTG |
| 39852 | INDARQHFG |
| 39853 | INVAMQKEG |
| 39854 | IRGDEMLED |
| 39855 | ISNYVGFHG |
| 39856 | IVLHMSEGY |
| 39857 | KAMPEQLWP |
| 39858 | KAVSYQNPF |
| 39859 | KMHRRIWGA |
| 39860 | KNTETMYSE |
| 39861 | KNWPMDKHL |
| 39862 | KVNEMVAEV |
| 39863 | KVTEYCDCG |
| 39864 | LIICTWKAG |
| 39865 | LIMEAMLFS |
| 39866 | LLRRNDELK |
| 39867 | LMDCHSVIP |
| 39868 | LMQMDKPNG |
| 39869 | LPHMCKCKG |
| 39870 | LTMADGLMR |
| 39871 | LTNEVREEN |
| 39872 | LTWISHGVN |
| 39873 | MAMEYIEMY |
| 39874 | MARIYPGTC |
| 39875 | MAYMEHHVG |
| 39876 | MEMEYEEFM |
| 39877 | MKQDSTQGM |
| 39878 | MPLCGYNVR |
| 39879 | MTDQPPSKV |
| 39880 | MVWNVAMMD |
| 39881 | NDELCVYCW |
| 39882 | NGVEQIKHE |
| 39883 | NMVMFVMDN |
| 39884 | NQICHQYDA |
| 39885 | NSTVHWQQN |
| 39886 | NTQWYMMNA |
| 39887 | NVEDNRKVF |
| 39888 | NYRNQKNCH |
| 39889 | QRATTKRHA |
| 39890 | QVHPVNHWG |
| 39891 | QVQVVDEWS |
| 39892 | QYQHERGWL |
| 39893 | RGGYIVAGI |
| 39894 | RGYWDVREG |
| 39895 | SAECMTVSS |
| 39896 | SIWHYQHMQ |
| 39897 | SIYKYTALN |
| 39898 | SMLLSNQNQ |
| 39899 | SNQCLPYDC |
| 39900 | SSAVIMKFP |
| 39901 | STHTVSWDM |
| 39902 | STQPSAKQV |
| 39903 | SVDYVEGYC |
| 39904 | TAMAYTSCE |
| 39905 | TCQHAPSPM |
| 39906 | TFEQIPCWT |
| 39907 | TFHVCQTMG |
| 39908 | TMQVMEVIS |
| 39909 | TNLRPMTER |
| 39910 | TNNTMRHEF |
| 39911 | TRFSSQGKM |
| 39912 | TSHAQTQMD |
| 39913 | TSRTRNCTH |
| 39914 | TYALDMVST |
| 39915 | TYGLYDDSY |
| 39916 | VAMYYESEM |
| 39917 | VDNKFMEHK |
| 39918 | VDPCANEGH |
| 39919 | VIEEMTMVC |
| 39920 | VIMPMQPRC |
| 39921 | VMLHLIHYP |
| 39922 | VPCIWVLKD |
| 39923 | VSTCCQANG |
| 39924 | VVECSGRAN |
| 39925 | VWVVRNHAD |
| 39926 | WCAGATMQW |
| 39927 | WEKLSQRNR |
| 39928 | WEMNDMQDY |
| 39929 | WINIPCHCI |
| 39930 | WKCIVPGQD |
| 39931 | YMVWSMMMI |
| 39932 | AAAMCGYQV |
| 39933 | AAAPSDDEP |
| 39934 | AADREKSWM |
| 39935 | AADTQSYIR |
| 39936 | AADTYVNHM |
| 39937 | AADYDDQQW |
| 39938 | AAEEGHTWS |
| 39939 | AAFQPDVNF |
| 39940 | AAHEKQCAA |
| 39941 | AAHTWHVAW |
| 39942 | AAHYNDGCT |
| 39943 | AAISMLWVE |
| 39944 | AAKEATSEG |
| 39945 | AAKWKAKCA |
| 39946 | AANPIESVD |
| 39947 | AAPLKRGLP |
| 39948 | AASHTEGFL |
| 39949 | AASPCNDFW |
| 39950 | AASQCFCMP |
| 39951 | AATFKSRHA |
| 39952 | AAWHANLSR |
| 39953 | ACDVKKHFG |
| 39954 | ACHAYPSAW |
| 39955 | ACMEAIMTT |
| 39956 | ACTDFMSAC |
| 39957 | ACVEYIDSA |
| 39958 | ADAVQLMCP |
| 39959 | ADCDYGRKF |
| 39960 | ADCIFESDG |
| 39961 | ADMYANENE |
| 39962 | ADPKYVPTT |
| 39963 | ADQCNPLCA |
| 39964 | ADQCTMLRF |
| 39965 | AEMCKTLIT |
| 39966 | AEPCKLKHF |
| 39967 | AEPRHDKAC |
| 39968 | AFKGHYMAA |
| 39969 | AFNSGMAKI |
| 39970 | AFVENMWNF |
| 39971 | AGALPQAWA |
| 39972 | AGCFFTGIK |
| 39973 | AGDHFLLVG |
| 39974 | AGRMRFAKM |
| 39975 | AGSYYGVIN |
| 39976 | AHCVPWSWT |
| 39977 | AHEATSCMV |
| 39978 | AHGCGFAWP |
| 39979 | AHKQMDWHT |
| 39980 | AHLPLMLGT |
| 39981 | AHQGVAGTY |
| 39982 | AHVDNNLLF |
| 39983 | AIAAENDCT |
| 39984 | AIAEHWEGR |
| 39985 | AIAEYAQQG |
| 39986 | AIAWYMGEA |
| 39987 | AIECSWGWI |
| 39988 | AIKMDGDFQ |
| 39989 | AILPMLMQS |
| 39990 | AINIMDQEA |
| 39991 | AIPDYQIYE |
| 39992 | AISHNMKTP |
| 39993 | AISSCARQI |
| 39994 | AITMSMPTW |
| 39995 | AITVGCGWA |
| 39996 | AIVEYWSSC |
| 39997 | AIYYCLSDW |
| 39998 | AKCTWRSYH |
| 39999 | AKEDQHQFQ |
| 40000 | AKEYMMLSY |
| 40001 | AKLKQAWSG |
| 40002 | AKMDWKLPM |
| 40003 | AKQQPEKQY |
| 40004 | AKSCWPSVW |
| 40005 | AKTHNPNTD |
| 40006 | ALCSRDSSN |
| 40007 | ALLAMQLAT |
| 40008 | AMLHTMGHW |
| 40009 | AMMNWQMMN |
| 40010 | AMMTVEYFN |
| 40011 | AMREWRVFP |
| 40012 | AMTSMIQSG |
| 40013 | AMYGKAAGD |
| 40014 | AMYNPYTQK |
| 40015 | ANCQPSRVC |
| 40016 | ANHTKLKMY |
| 40017 | ANMENWVQS |
| 40018 | ANMSATYYE |
| 40019 | APAPNVRYS |
| 40020 | APNMMNWIA |
| 40021 | APVIGWGAY |
| 40022 | AQDNNNCAA |
| 40023 | AQEPVQGNY |
| 40024 | AQHVAIFNL |
| 40025 | AQMYRWVMT |
| 40026 | AQPLEHHYN |
| 40027 | AQQEVKCGY |
| 40028 | AQSHGTEMF |
| 40029 | AQTWGGAGS |
| 40030 | ARDHGKWNW |
| 40031 | ARDLYHRSE |
| 40032 | ARITWNVCT |
| 40033 | ARKQIVGMD |
| 40034 | ARQHMRRQP |
| 40035 | ASADVHYAQ |
| 40036 | ASANRKQMD |
| 40037 | ASAWQMMMP |
| 40038 | ASCEMTQTN |
| 40039 | ASDQFMADE |
| 40040 | ASHKDGWAT |
| 40041 | ASHNFSDEG |
| 40042 | ASNMHANAH |
| 40043 | ASRDYDLAP |
| 40044 | ASSSCNGGH |
| 40045 | ASTLGCDCC |
| 40046 | ASVTRVAVL |
| 40047 | ASVVSDECN |
| 40048 | ATAFGGEYY |
| 40049 | ATCYLMKLD |
| 40050 | ATDDECCVG |
| 40051 | ATDDVRCLW |
| 40052 | ATDGYSKWD |
| 40053 | ATDPERSQW |
| 40054 | ATDTWDRAS |
| 40055 | ATEYQPNTW |
| 40056 | ATFSCDPWN |
| 40057 | ATGEEDVNW |
| 40058 | ATGFGTEDS |
| 40059 | ATHEMKGMN |
| 40060 | ATIQHEAGM |
| 40061 | ATKFFRMET |
| 40062 | ATLTWNYSQ |
| 40063 | ATNFDVGHE |
| 40064 | ATNSNYEHR |
| 40065 | ATNWMRDQT |
| 40066 | ATSEQRIVV |
| 40067 | ATSLAHCVC |
| 40068 | ATTDNYHDR |
| 40069 | ATTHETVLY |
| 40070 | ATTNSSGSH |
| 40071 | AVAMLVDVW |
| 40072 | AVAMLVDVW |
| 40073 | AVCNDDHSA |
| 40074 | AVCRPSTSY |
| 40075 | AVDCYGLFS |
| 40076 | AVELETQWW |
| 40077 | AVFYPYITD |
| 40078 | AVGHNGSHR |
| 40079 | AVLNSWPAC |
| 40080 | AVMPYCELE |
| 40081 | AVQDKVCTC |
| 40082 | AVVLTDWNE |
| 40083 | AWAFHHAVP |
| 40084 | AWANYIRHE |
| 40085 | AWEFVNYPP |
| 40086 | AWEVNGHYH |
| 40087 | AWWFEAPMV |
| 40088 | AYAPEPMCP |
| 40089 | AYLNFYDGP |
| 40090 | AYLQFQIQG |
| 40091 | AYMTSNSFG |
| 40092 | AYSRATTHI |
| 40093 | AYVAKKNMN |
| 40094 | CANEHNHTA |
| 40095 | CAPVSTRKA |
| 40096 | CAQSIPEAW |
| 40097 | CATCHILHM |
| 40098 | CCCEENYRR |
| 40099 | CCEQFELGS |
| 40100 | CCLPGWGSL |
| 40101 | CCNLSDEHH |
| 40102 | CCRSGDCMP |
| 40103 | CCTVTQAPE |
| 40104 | CCYHTQLLH |
| 40105 | CDMALVGGD |
| 40106 | CDNNWPIKQ |
| 40107 | CDWSNIYDV |
| 40108 | CDYLLAQCC |
| 40109 | CEDFCMVNR |
| 40110 | CEFRPVVDH |
| 40111 | CEHTGSFQS |
| 40112 | CFDRSIGYE |
| 40113 | CFHYLMNTW |
| 40114 | CFMDGWPFV |
| 40115 | CGAICDAVV |
| 40116 | CGEPPHIQD |
| 40117 | CGRHWDPWF |
| 40118 | CGTGMNGAF |
| 40119 | CHTLKSGEH |
| 40120 | CHYPYCVPL |
| 40121 | CIGFAMESG |
| 40122 | CIQRYTTEQ |
| 40123 | CIRVQEFGG |
| 40124 | CIVEEMAHW |
| 40125 | CIYEQERKM |
| 40126 | CKNGPAYVP |
| 40127 | CLFYDEAMG |
| 40128 | CLHVPHNSL |
| 40129 | CLLVAECLQ |
| 40130 | CLQFKCRLS |
| 40131 | CLQHTSMKC |
| 40132 | CLSDNYHNQ |
| 40133 | CLVSIKDCH |
| 40134 | CMACTDIYM |
| 40135 | CMGNEDMST |
| 40136 | CMIEKNMDY |
| 40137 | CMPLSMGTR |
| 40138 | CMQNSIKEC |
| 40139 | CMRDCNHYG |
| 40140 | CNASKFWQD |
| 40141 | CNQQIQFFG |
| 40142 | CNRQGCMHE |
| 40143 | CNVYRFHEA |
| 40144 | CPCHEIHPQ |
| 40145 | CPFFHNKLA |
| 40146 | CPQCLPVTE |
| 40147 | CPYCARQHE |
| 40148 | CPYQDVFQH |
| 40149 | CQFEYQIFQ |
| 40150 | CQHLVRQGL |
| 40151 | CQLSDSFLF |
| 40152 | CQMGFCCHS |
| 40153 | CQQFYERVD |
| 40154 | CQQGSPNDW |
| 40155 | CQVESIGPH |
| 40156 | CRCWSQGHQ |
| 40157 | CREDKLEAR |
| 40158 | CRIPMPARC |
| 40159 | CRVWEPLRM |
| 40160 | CSEMMQIHC |
| 40161 | CSESGLWCS |
| 40162 | CSKGDCQPH |
| 40163 | CSLLFVSCV |
| 40164 | CSMYWDWLF |
| 40165 | CSTHIAQSE |
| 40166 | CSTSFSQRG |
| 40167 | CSYNDMDRC |
| 40168 | CTCMTKCVD |
| 40169 | CTELVQFIG |
| 40170 | CTFSIACDH |
| 40171 | CTGIPKCVK |
| 40172 | CTNQHKLSS |
| 40173 | CVCQYHQTN |
| 40174 | CVDPGVSWP |
| 40175 | CVIHMKTKI |
| 40176 | CVKQYMFAQ |
| 40177 | CVMDAMAIP |
| 40178 | CVMTEDFQF |
| 40179 | CVSESNIWH |
| 40180 | CVYRHQREY |
| 40181 | CWDSTLYGY |
| 40182 | CYEPYHRHV |
| 40183 | CYFFARNEM |
| 40184 | CYGHRQIKD |
| 40185 | CYKLSNYIV |
| 40186 | CYQWHHDGT |
| 40187 | DACKTINQF |
| 40188 | DACLYWAPW |
| 40189 | DADAWQMVT |
| 40190 | DAGMPWFMN |
| 40191 | DAGPSVVVQ |
| 40192 | DAKCGRMVA |
| 40193 | DAMPSCEFS |
| 40194 | DAQLLVMRM |
| 40195 | DAQWPLQRD |
| 40196 | DARFTFVES |
| 40197 | DCAEWLVRD |
| 40198 | DCGRAQMMA |
| 40199 | DCHGAFDRE |
| 40200 | DCSLMGSDP |
| 40201 | DCSRHHMAQ |
| 40202 | DCSTQRTIW |
| 40203 | DCWSEQQPM |
| 40204 | DCYHIDMGC |
| 40205 | DDAPLKITA |
| 40206 | DDDKKHACR |
| 40207 | DDGQCDRKG |
| 40203 | DEHCDSPAI |
| 40209 | DEMKWLNCS |
| 40210 | DFCKQCNGL |
| 40211 | DFDWEVNPT |
| 40212 | DFEPNEEHY |
| 40213 | DFLVFSVQG |
| 40214 | DFSENGHTF |
| 40215 | DFSERRIVV |
| 40216 | DFSQFNQGH |
| 40217 | DFTLSFDAH |
| 40213 | DGPLTCEQA |
| 40219 | DGPMSKQEL |
| 40220 | DGQCPNAWV |
| 40221 | DGTHNHLQG |
| 40222 | DGTYLMFHA |
| 40223 | DGVDKEWYE |
| 40224 | DHQANRTCC |
| 40225 | DHTWQHEGH |
| 40226 | DICAQSPGA |
| 40227 | DIDSVQEVP |
| 40228 | DIDVGHSFT |
| 40229 | DIFLNKCTY |
| 40230 | DIGTRVCWH |
| 40231 | DIHNDIQHG |
| 40232 | DILPVQAPG |
| 40233 | DIMPYASQG |
| 40234 | DIQIQTYQS |
| 40235 | DIQLYNNAF |
| 40236 | DISAMAGWY |
| 40237 | D1WQASTRA |
| 40238 | DKESWCEVT |
| 40239 | DKHTYEHGM |
| 40240 | DKRCFQQSN |
| 40241 | DKSSTARGM |
| 40242 | DKYDTDWAF |
| 40243 | DKYSNKCLF |
| 40244 | DLEGTEQSL |
| 40245 | DLEYIWRQD |
| 40246 | DLIMGRKKQ |
| 40247 | DLMLNFHLD |
| 40248 | DLQHFMSYP |
| 40249 | DLTQRISMS |
| 40250 | DLVNCNNAN |
| 40251 | DMAFMHSIC |
| 40252 | DMCKKMLSW |
| 40253 | DMIGSQAEL |
| 40254 | DMVYLAGNA |
| 40255 | DNEDVLHMG |
| 40256 | DNGWFENMA |
| 40257 | DNQCNEITL |
| 40258 | DNRDQHWRT |
| 40259 | DNRNERRQS |
| 40260 | DNTVNTIIW |
| 40261 | DNVGRVNSV |
| 40262 | DNWKPTRIG |
| 40263 | DPEQAYTKH |
| 40264 | DPLLKSEWG |
| 40265 | DPNNYKGYY |
| 40266 | DPPLHWVTM |
| 40267 | DQAFEWFIY |
| 40268 | DQCKTLFYT |
| 40269 | DQGQVGCFV |
| 40270 | DQGYMPTKT |
| 40271 | DQLNQQAMS |
| 40272 | DQPFMNRQH |
| 40273 | DQRICGEKC |
| 40274 | DQWLMQCKN |
| 40275 | DRCNKIWPD |
| 40276 | DRGWQNWTY |
| 40277 | DRKQAQRNG |
| 40278 | DRNTIRKMA |
| 40279 | DRPHGQMMT |
| 40280 | DSKLLCCSC |
| 40281 | DSKMAGQAN |
| 40282 | DSKQAFVMT |
| 40283 | DSKTIQVYW |
| 40284 | DSLIQDFLH |
| 40285 | DSLLANQDG |
| 40286 | DSQYQAIQF |
| 40287 | DSRHLACYT |
| 40288 | DSRILQAGD |
| 40289 | DSRMCPPYN |
| 40290 | DSRQPNAGL |
| 40291 | DSRVDSDDY |
| 40292 | DSVNSCAFP |
| 40293 | DTDWIDCMG |
| 40294 | DTEFRVMDW |
| 40295 | DTISEQMRT |
| 40296 | DTMLKFVST |
| 40297 | DTNIDLKPP |
| 40298 | DTRIDSVYE |
| 40299 | DTRQWDDGL |
| 40300 | DTSQYGNHV |
| 40301 | DTVQLMGSQ |
| 40302 | DTYELESQL |
| 40303 | DVAQWFEAS |
| 40304 | DVARCMDCQ |
| 40305 | DVASKDDWP |
| 40306 | DVCKYQHNP |
| 40307 | DVCYAGLTE |
| 40308 | DVDDRMEMC |
| 40309 | DVFNAGPPF |
| 40310 | DVHVPCVIG |
| 40311 | DVIMCNCPK |
| 40312 | DVMSMFTDV |
| 40313 | DVRSGNFYP |
| 40314 | DVSICVTCT |
| 40315 | DVSWHYAQG |
| 40316 | DVTDNGTCC |
| 40317 | DVVNEDTGP |
| 40318 | DVWEHSHPS |
| 40319 | DVWTPWNAS |
| 40320 | DWAKYWHFP |
| 40321 | DWESDYYQN |
| 40322 | DWFQCHCAA |
| 40323 | DWILELMST |
| 40324 | DWKLFNAWK |
| 40325 | DWMEGSENG |
| 40326 | DYELTPSWY |
| 40327 | DYGESKLEP |
| 40328 | DYGMPECVD |
| 40329 | DYILLTTWE |
| 40330 | DYRWIKGLA |
| 40331 | DYSQFGGGQ |
| 40332 | EAAFIDAHC |
| 40333 | EADWDSCWM |
| 40334 | EAEWVLCCK |
| 40335 | EAGPLKDCC |
| 40336 | EAHMRRYSK |
| 40337 | EAHSVRYLM |
| 40338 | EALACQDPG |
| 40339 | EAMRRSNLH |
| 40340 | EAMRRYRSP |
| 40341 | EANDYNQNC |
| 40342 | EANRIDAVS |
| 40343 | EANRVLCMN |
| 40344 | EAPLPKWQC |
| 40345 | EASCYWEGR |
| 40346 | EASMGRNGH |
| 40347 | EAYPQKECA |
| 40348 | EAYTVSGYA |
| 40349 | ECANHEKTY |
| 40350 | ECDFRMIWD |
| 40351 | ECEFPDVYA |
| 40352 | ECGEFTCML |
| 40353 | ECKVYSGGK |
| 40354 | ECQRPHPIQ |
| 40355 | ECRMIWNHK |
| 40356 | ECRPWVWPG |
| 40357 | ECSAFHWQP |
| 40358 | ECSCEEIPC |
| 40359 | ECSQMISSE |
| 40360 | ECTMTNASN |
| 40361 | ECWNWESFI |
| 40362 | ECWNYLMSW |
| 40363 | EDCLFPACF |
| 40364 | EDDPVSVAD |
| 40365 | EDFHCFPLS |
| 40366 | EDIAPAHGT |
| 40367 | EDIKQQMVC |
| 40368 | EDKRDAWAR |
| 40369 | EDMTVNWSS |
| 40370 | EDQLCHRTH |
| 40371 | EDQWVQMCA |
| 40372 | EDWHTFYWK |
| 40373 | EECVTGLHA |
| 40374 | EEEPLYVDN |
| 40375 | EFDQIGLFN |
| 40376 | EFLLHHCAP |
| 40377 | EFLPKSDQH |
| 40378 | EFMSHSTGA |
| 40379 | EFNPAMWIV |
| 40380 | EFPGKHWVW |
| 40381 | EFRQMGACG |
| 40382 | EFVVLPEAI |
| 40383 | EFYQQAYQH |
| 40384 | EGEQPSMAI |
| 40385 | EGHGCDPWF |
| 40386 | EGIKKEGMP |
| 40387 | EGLNDDSRA |
| 40388 | EGLSMNEYW |
| 40389 | EGQTSSECF |
| 40390 | EGRLTMKHH |
| 40391 | EGYQHPNEF |
| 40392 | EHDPYMKVF |
| 40393 | EHDWPADRI |
| 40394 | EHEQDCEQI |
| 40395 | EHPIDWRKE |
| 40396 | EHQLAHESA |
| 40397 | EHQLPQVDF |
| 40398 | EHRFRVKLA |
| 40399 | EHRQEQTRL |
| 40400 | EIASGSMYW |
| 40401 | EIATNYYSQ |
| 40402 | EICQINHSG |
| 40403 | EIEMDGAHW |
| 40404 | EIEVFWKMH |
| 40405 | EIGIRLGQD |
| 40406 | EIGWHMNYV |
| 40407 | EIGYRSMMT |
| 40408 | EIHEGQLAQ |
| 40409 | EILKPGAHM |
| 40410 | EIMISIGHT |
| 40411 | EIMTRYGGH |
| 40412 | EISCKKWNQ |
| 40413 | EIVYSVFGL |
| 40414 | EIWASQQVN |
| 40415 | EKEFVHSCD |
| 40416 | EKEPLHCDG |
| 40417 | EKFMLWFWG |
| 40418 | EKGCVGPVS |
| 40419 | EKHTMTWHN |
| 40420 | EKKFRTADA |
| 40421 | EKMCEWLTD |
| 40422 | EKMFTLSDS |
| 40423 | EKYGTQREN |
| 40424 | EKYHVDHHA |
| 40425 | EKYTYNMGT |
| 40426 | ELCKGNCFL |
| 40427 | ELFSFGHRE |
| 40428 | ELTLRMNWG |
| 40429 | EMAIRWDYT |
| 40430 | EMAMNGRTG |
| 40431 | EMCGSSKVY |
| 40432 | EMESWDYCQ |
| 40433 | EMGEHHSTL |
| 40434 | EMHMIKKHY |
| 40435 | EMIKTAWAS |
| 40436 | EMTNAETFT |
| 40437 | ENESCMHIE |

TABLE 85
Sequences of the 581 to 589 Region in
AAV5 VP1 Capsid Polypeptide
that Drive Thyroid Gland Tissue Tropism

| SEQ | |
|---|---|
| ID | 581-589 |
| NO | Sequence |
| 42438 | KGVWCKIDV |
| 42439 | QQFPHNRQC |
| 42440 | DLKERMRGF |
| 42441 | ISTKWDYIA |
| 42442 | ISWISHASP |
| 42443 | DKTVQTSAR |
| 42444 | RMYATEHCS |
| 42445 | GLWLNVAPR |
| 42446 | SMHYYDTFE |
| 42447 | FNIHGDLLC |
| 42448 | WMSEQMFKG |
| 42449 | ILNMKACDV |
| 42450 | VFKRVVGFA |
| 42451 | QMQNENRQM |
| 42452 | RTREPFWWW |
| 42453 | MQYRGMSAS |
| 42454 | VSDTMNCGS |
| 42455 | EAEPWDYWA |
| 42456 | IAWADGLEF |
| 42457 | IAWCDGLEF |
| 42458 | IAWSDGLEF |
| 42459 | IAWSDGMEF |
| 42460 | IAWYDGLEF |
| 42461 | IVWSDGLEF |
| 42462 | MAWSDGLEF |
| 42463 | MWIEFNEYG |
| 42464 | MWPEFNEYG |
| 42465 | MWTECNEYG |
| 42466 | MWTEFDEYG |
| 42467 | MWTEFNAYG |
| 42468 | MWTEFNECG |
| 42469 | MWTEFNESG |
| 42470 | MWTEFNEYE |
| 42471 | MWTEFNEYV |
| 42472 | MWTEFNGYG |
| 42473 | MWTEFNKYG |
| 42474 | MWTEFNVYG |
| 42475 | MWTEFSEYG |
| 42476 | MWTEFTEYG |
| 42477 | MWTESNEYG |
| 42478 | MWTEVNEYG |
| 42479 | MWTGFNEYG |
| 42480 | SAWSDGLEF |
| 42481 | VWTEFNEYG |
| 42482 | MWAEFNEYG |
| 42483 | MWTEFNEYW |
| 42484 | MWTEFNENG |
| 42485 | MWTEFNEHG |
| 42486 | LFLQLYRHC |
| 42487 | LWRSLQDGN |
| 42488 | QISVYDTKY |
| 42489 | AMHCQPAFA |
| 42490 | NAIPYFVQA |
| 42491 | GLNICKNQQ |
| 42492 | MMVQWGAMA |
| 42493 | MTSTSSRGE |
| 42494 | DGQNRDQMC |
| 42495 | DKIDTCCFL |
| 42496 | NTQVISRWT |
| 42497 | GTMCREQMI |
| 42498 | KTCLCIFTK |
| 42499 | EASIQASWN |
| 42500 | HACSLLQQY |
| 42501 | RVTIMFTGT |
| 42502 | LWGWPLHKL |
| 42503 | TKQFVHNED |
| 42504 | AQIQPAMFP |
| 42505 | KGNSVTHVQ |
| 42506 | LIHWLKHDL |
| 42507 | ICHTEVMFN |
| 42508 | RVMMGNNQA |
| 42509 | SPQQPSVFH |
| 42510 | LTLRQGYIT |
| 42511 | EFVLGCQGI |
| 42512 | YSSHHSMDY |
| 42513 | SVTYHEWHP |
| 42514 | GCLQMPCHE |
| 42515 | MVENGLRLQ |
| 42516 | SRCTVMDPG |
| 42517 | IVQPMCYQQ |
| 42518 | DVKAFMGGV |
| 42519 | AYAPSKNAM |
| 42520 | NVYMRTCNM |
| 42521 | NAAYQMAAY |
| 42522 | LVQKWMRTC |
| 42523 | EKHFMQVDR |
| 42524 | LEIVMHSLP |
| 42525 | NQREWHGLA |
| 42526 | LADGCCCVN |
| 42527 | AVETGESAM |
| 42528 | RCADNPYFR |
| 42529 | ETHTVSREC |
| 42530 | QAAWIPFAG |
| 42531 | AVEDYWRYF |
| 42532 | QYVQCAAKD |
| 42533 | ACIPQMHSA |
| 42534 | AVTGHVIGA |
| 42535 | WGDARMIGP |
| 42536 | TGMAMSEQS |
| 42537 | VFNLMLQDK |
| 42538 | VTCNWCVMP |
| 42539 | DANHCMWWQ |
| 42540 | QISKPSVQC |
| 42541 | WTTSIAVDT |
| 42542 | QTSHQDQDC |
| 42543 | QAKMILDGT |
| 42544 | IHNRYAQAP |
| 42545 | NWYTTWIDE |
| 42546 | CMEVTCFVV |
| 42547 | AYRVKEVAY |
| 42548 | APVHPTQSM |
| 42549 | QKAIVAQND |
| 42550 | AQGFKPSDG |
| 42551 | NANYWFYYD |
| 42552 | TRETMNEWH |
| 42553 | GVWMPHGWR |
| 42554 | AVHNVKDVH |
| 42555 | ETSTHCCKV |
| 42556 | FQDERTTHH |
| 42557 | KSNLCYHVQ |
| 42558 | DTRRNLCCD |
| 42559 | AEHMVVDHE |
| 42560 | DVYTMHELH |
| 42561 | MKEDNKFAV |
| 42562 | MFFPGFVAH |
| 42563 | RFDQFWDTY |
| 42564 | HFQPVFMQP |
| 42565 | DIEFLDCEN |
| 42566 | QCLQTNPYN |
| 42567 | RTMDCEYTG |
| 42568 | MSGPNDTEF |
| 42569 | IGDEYATHT |
| 42570 | SFSDTHLGW |
| 42571 | YFPSIQCYE |
| 42572 | IRLMTPDEN |
| 42573 | ICHIRTRGN |
| 42574 | MCDNFPSAH |
| 42575 | SSIYKEIQE |
| 42576 | PMMIIPYVD |
| 42577 | PLTIEVNCT |
| 42578 | NVCDNGHEI |
| 42579 | KIAAWNDFL |
| 42580 | HQCNCLLSW |
| 42581 | GAANRIQSW |
| 42582 | DVWWTLTRD |
| 42583 | CSESYRGPD |
| 42584 | TISQIPWVR |
| 42585 | MFMTNVNSF |
| 42586 | GKGQWTAQE |
| 42587 | SGALKNREE |
| 42588 | LHSYQWRLG |
| 42589 | DVKSWAVCD |
| 42590 | LPSHCNLGS |
| 42591 | GQQTIEMSY |
| 42592 | QWFTKGVGE |
| 42593 | QRNEMSASF |
| 42594 | YPAQYTAFS |
| 42595 | DHLSNDAEM |
| 42596 | DQEAQVVTG |
| 42597 | ASMHEETCL |
| 42598 | TTYPHNTHG |
| 42599 | QFAQLWCAK |
| 42600 | MTDNNGPLF |
| 42601 | RYPCCQSPF |
| 42602 | CAWHMKQGN |
| 42603 | TSVIRLFWI |
| 42604 | TTTNQFMFQ |
| 42605 | MMLGYMEQD |
| 42606 | GLFEGSPGA |
| 42607 | AEDTPYTIY |
| 42608 | QHKWHDVGV |
| 42609 | NRIQMTDFQ |
| 42610 | YVDHWTLGD |
| 42611 | ACVERLHHK |
| 42612 | DQRHGNVSP |
| 42613 | ATGTYNLQE |
| 42614 | EAGCKMWPT |
| 42615 | KQKTQNRNA |
| 42616 | ASKQGTHDY |
| 42617 | TYESLQNSW |
| 42618 | MNLQIGSKG |
| 42619 | GRALGKKQG |
| 42620 | EVRIQCKID |
| 42621 | PHAETHWYT |
| 42622 | WERCLELNQ |
| 42623 | AGMYKCQED |
| 42624 | TVNWYSGFG |
| 42625 | ATMNLSWGL |
| 42626 | QSSHCKQMV |
| 42627 | YSDPKWMSI |
| 42628 | GHLFNNNEW |
| 42629 | DINTCRVCY |
| 42630 | MSDQKEHMS |
| 42631 | AGCSISWTP |
| 42632 | AVIVTADMQ |
| 42633 | AWQQNTFWY |
| 42634 | AWTQASRGN |
| 42635 | AWYKAWSHV |
| 42636 | DFFLMKIAD |
| 42637 | DLDFWNGQS |
| 42638 | DVQEAMNLV |
| 42639 | DVRLATAWH |
| 42640 | DVYATPVVC |
| 42641 | ECVEGQSCW |
| 42642 | ETKYWWVNF |
| 42643 | EVTQCDFFV |
| 42644 | FTGASFHIA |
| 42645 | GCMYIRHAY |
| 42646 | GIDAHAIIY |
| 42647 | GTMCRERMI |
| 42648 | GYMCIRHAY |
| 42649 | HAYSLLQQY |
| 42650 | HLAPYCQQA |
| 42651 | HLTMWLVMT |
| 42652 | IHDLVPAYD |
| 42653 | IKQFWTKKM |
| 42654 | ITHRYGWNL |
| 42655 | KGMHSMPGI |
| 42656 | KLTIDTACR |
| 42657 | KQAGMLLGW |
| 42658 | KSNDSDNEF |
| 42659 | LMWTRNTAH |
| 42660 | LNICKTNQA |
| 42661 | LRHANRRTY |
| 42662 | LVKAHCAWS |
| 42663 | MAELCMEGH |
| 42664 | MYMPATMAV |
| 42665 | NAEDVDQGE |
| 42666 | NCCFVYWWL |
| 42667 | NDRHVPCRD |
| 42668 | NLMTDWWDI |
| 42669 | PPEQFQSGK |
| 42670 | PVQKWMRTC |
| 42671 | QACLQIMWN |
| 42672 | QGYRSSEMQ |
| 42673 | QKALNVHHA |
| 42674 | QMHMVHKCE |
| 42675 | QNMLMQAGV |
| 42676 | QYIDTYHWT |
| 42677 | QYQTHPMMH |
| 42678 | RNKSPDECF |
| 42679 | RTAHRDDFA |
| 42680 | RVEYPPFTS |
| 42681 | SFLVMNRMG |
| 42682 | TDLWYEKSS |
| 42683 | TEAKRTIDW |
| 42684 | TGCYHVHMD |
| 42685 | TICKCKISN |
| 42686 | TIQQCMHLG |
| 42687 | TPQNNAMSM |
| 42688 | TRRTCPIAM |
| 42689 | VRWGYTCFY |
| 42690 | YFEHMMITT |
| 42691 | YFHMIDQIP |
| 42692 | YNDFNRGEW |
| 42693 | YSNCQPTHM |
| 42694 | ADGWWMDSL |
| 42695 | AHLEMMNQF |
| 42696 | ALLMFSLSN |
| 42697 | AMLDSHSAF |
| 42698 | AQSRMHTMD |
| 42699 | ARTMYVESF |
| 42700 | ASEYFPVFK |
| 42701 | ASIWPEGKD |
| 42702 | AVICKRFVG |
| 42703 | AVIMTADMQ |
| 42704 | AVKANDTVH |
| 42705 | AWDANLAFV |
| 42706 | CAHTDKVHH |
| 42707 | CEIVVSHVE |
| 42708 | CLRSDIGKQ |
| 42709 | CNEKGYHWH |
| 42710 | CTLSFMEDK |
| 42711 | CVRFTPTHN |
| 42712 | DCAWQTNTS |
| 42713 | DCMCNFAGM |
| 42714 | DFFPMKIAD |
| 42715 | DHRYMMSSV |
| 42716 | DISLKLCHQ |
| 42717 | DITWPNHSY |
| 42718 | EEGATSGWP |
| 42719 | EIQPMMRKP |
| 42720 | EMTLQSVSS |
| 42721 | EPKYWWVNF |
| 42722 | ESILPGKIL |
| 42723 | FASLCNNGL |
| 42724 | FASLSGPPN |
| 42725 | FTCNHLAFY |
| 42726 | GEEADEYHM |
| 42727 | GGMAHAIIN |
| 42728 | GLENVVVGL |
| 42729 | GNDFFVNIY |
| 42730 | HASSEHVQD |
| 42731 | HMGPYMESE |
| 42732 | IAMRTLNQK |
| 42733 | IAMTAILCD |
| 42734 | IATWGEQQM |
| 42735 | IECEWPQDE |
| 42736 | IECKWPQDK |
| 42737 | ITPKFMFPS |
| 42738 | KASEHLPGF |
| 42739 | KGLTIQKYA |
| 42740 | KMCTHDLAC |
| 42741 | KPQPTGIFT |
| 42742 | KTDFVFLPQ |
| 42743 | KVVPAEHQY |
| 42744 | LAGPKLWEQ |
| 42745 | LAHMIEITA |
| 42746 | LCGHCGESC |
| 42747 | LCKYCFTAD |
| 42748 | LRSLWEAWH |
| 42749 | LTKFLHKGD |
| 42750 | MGYKRAASR |
| 42751 | MMFRPNSAH |
| 42752 | MNKFREEYG |
| 42753 | MPQGAVNSD |
| 42754 | MSSFMASRE |
| 42755 | MTNNKMMYE |
| 42756 | NCVVNLCTY |
| 42757 | NEPLFMMGS |
| 42758 | NGVWCKIDV |
| 42759 | NLSPINWHL |
| 42760 | NQLPEMIET |
| 42761 | NRDGVPQSY |
| 42762 | NSSMIEWDC |
| 42763 | NTAHLQDGW |
| 42764 | NTRLVFGIT |
| 42765 | NTSIWERDQ |
| 42766 | NTWVPHEFY |
| 42767 | NVFVAYCKS |
| 42768 | NVMRVPTGQ |
| 42769 | PRNQLGPGI |
| 42770 | PSSQFKCDQ |
| 42771 | PTIACGNMV |
| 42772 | PWKYCCMDQ |
| 42773 | PYVDKWANH |
| 42774 | QIHRAGAKQ |
| 42775 | QNRLVNRQH |
| 42776 | QRDFAWQFC |
| 42777 | QRQGQPHYW |
| 42778 | QSFSYDAKE |
| 42779 | RFKTCRYMY |
| 42780 | RKVRIDGDT |
| 42781 | RNEKGYHWH |
| 42782 | RPEDVPVAP |
| 42783 | RSFMCGLIG |
| 42784 | RYKSRGALT |
| 42785 | SATILANEV |
| 42786 | SIVDCQGAF |
| 42787 | SLVPVSKTR |
| 42788 | SWTCCATQC |
| 42789 | SYDEICSTV |
| 42790 | TAILNQEIH |
| 42791 | TFSPARHPK |
| 42792 | TGHPLSNCL |
| 42793 | TLGYVWSVG |
| 42794 | TNERFTIQC |
| 42795 | TQDIWYNYV |
| 42796 | VCYCSSTAK |
| 42797 | VDQPTTHWG |
| 42798 | VHGQYPCQE |
| 42799 | VHNWFLTWW |
| 42800 | VLTTIWKNN |
| 42801 | VNAQQNWGV |
| 42802 | WANTQWQDD |
| 42803 | WGYNYQCAF |
| 42804 | WLKYKKTWI |
| 42805 | WPDQNMFAV |
| 42806 | WYTFLQFIT |
| 42807 | YCNAYMIGM |
| 42808 | MEHVVSVQP |
| 42809 | NTRFPDQTE |
| 42810 | ACLSPDHDR |
| 42811 | AMCMLSHIH |
| 42812 | ANRNCVTPH |
| 42813 | ARMINDNDP |
| 42814 | ATWSADVTA |
| 42815 | CNFTVCNMS |
| 42816 | CTAEMAPMT |
| 42817 | CTDGKHASW |
| 42818 | DEISDPEEF |
| 42819 | DGAQDKWAC |
| 42820 | DLIYKGQNG |
| 42821 | DRPKRQVLY |
| 42822 | DSHIDQFGF |
| 42823 | DTEKGQAWW |
| 42824 | EDILEITKH |
| 42825 | EMAGMREFQ |
| 42826 | ENNPSHTQL |
| 42827 | EPYKQMGAG |
| 42828 | ERTLTKAGS |
| 42829 | ETVMMEVRD |
| 42830 | EVTKCEPPS |
| 42831 | EVTKCGPPS |
| 42832 | GQKSYDGCH |
| 42833 | GVDNQDFSW |
| 42834 | HAKCNRNIK |
| 42835 | HQHDDRPDM |
| 42836 | HVMEWLQCP |
| 42837 | IAGPIEIGM |
| 42838 | IKQYPQNKP |
| 42839 | IQAVMASGW |
| 42840 | ITDEYFMNM |
| 42841 | KACSMQQEW |
| 42842 | KGVALCDYQ |
| 42843 | KIYMQCDQE |
| 42844 | KPEWNHTSA |
| 42845 | LANHAKMGL |
| 42846 | LFSKEKHHR |
| 42847 | LMSPYNFLT |
| 42848 | LMYQDDMFE |
| 42849 | LQHQLHVYE |
| 42850 | LSQCQSYVA |
| 42851 | LTKPCWPWA |
| 42852 | MAAGNYTCA |
| 42853 | MCSSDLEGC |
| 42854 | MDCCARQAP |
| 42855 | MPSCINGPY |
| 42856 | MTNRCAKYK |
| 42857 | MVTFRENPA |
| 42858 | NASVGAWAQ |
| 42859 | NEQVATPMA |
| 42860 | NIGYMNVLF |
| 42861 | NLRECTIMN |
| 42862 | NSLLRHGEQ |
| 42863 | QLHQCPAVG |
| 42864 | QSQPDHVSW |
| 42865 | QYECESDNS |
| 42866 | RNDYSDQYD |
| 42867 | RSDQHSPHM |
| 42868 | SCQRNQQTN |
| 42869 | SFHNCMLDP |
| 42870 | SSTNNQTVD |
| 42871 | STCVTEMFY |
| 42872 | TCFNQNNTW |
| 42873 | TFFQAVVIA |
| 42874 | TMASWECYQ |
| 42875 | TMDSIQWFE |
| 42876 | TQKAHKNPG |
| 42877 | TTDSKLLGH |
| 42878 | TVEDRRKQG |
| 42879 | VADCPHHFD |
| 42880 | VHPYAESVD |
| 42881 | VVMVQHRTA |
| 42882 | VVPHPFPAY |
| 42883 | WWEACPAAS |
| 42884 | YCTTLSMES |
| 42885 | YFVMQWFHY |
| 42886 | YMVQDRDEW |
| 42887 | YMYSNMQTM |
| 42888 | GTSEWMHMA |
| 42889 | TVGTAKSQI |
| 42890 | DEKFGQVED |
| 42891 | GTPDMRLTL |
| 42892 | STAFASSWE |
| 42893 | HIQCQGDSW |
| 42894 | NNDIRIEGN |
| 42895 | WAPLPYNWC |
| 42896 | LVDGYRMRW |
| 42897 | DLCVHANVR |
| 42898 | TLLPHWQAT |
| 42899 | SIPMGNNWG |
| 42900 | FNTLGLLFD |
| 42901 | ENMHKMGML |
| 42902 | RNSHGWRLD |
| 42903 | QCARPWYRS |
| 42904 | MWGWPGDAF |
| 42905 | KVIRKDSCV |
| 42906 | MSPNTKDCT |
| 42907 | NGRLWWQRY |
| 42908 | TYSQPPVSG |
| 42909 | HFTHTESAH |
| 42910 | SRFWNRWDF |
| 42911 | CLGPWNVKS |
| 42912 | CCMSKMPDE |
| 42913 | MTHPYWEDS |
| 42914 | THNVKTDYP |
| 42915 | LDYHFPFEA |
| 42916 | WETLEHWRG |
| 42917 | DANWRTWQH |
| 42918 | CVVPYYRFT |
| 42919 | HHEPYGSNC |
| 42920 | THHHVLEVP |
| 42921 | AAMILESHK |
| 42922 | CMRGKWDRL |
| 42923 | VTMIYDLHQ |
| 42924 | LDHHAEVLQ |
| 42925 | MFYPFQCGN |
| 42926 | FASHQMNMM |
| 42927 | PPESQESST |
| 42928 | PDPKAWSNY |
| 42929 | IRDLVPAYD |
| 42930 | QCPCSRLIC |
| 42931 | TICKCTISN |
| 42932 | DEEFCEMSA |
| 42933 | LPRPGILME |
| 42934 | PYGKAAEKL |
| 42935 | EKMRYPPMI |
| 42936 | SFRCCWDWH |
| 42937 | KPPGSRWIT |
| 42938 | LACVAHWPS |
| 42939 | MSHEMFWVD |
| 42940 | KNTMCDNDA |
| 42941 | AVKMPVEQS |
| 42942 | FTANEDQCH |
| 42943 | CRRGQLLYE |
| 42944 | DKIMMAEMD |
| 42945 | PIAFGCERA |
| 42946 | ETGYRENPC |
| 42947 | RFADYCKEE |
| 42948 | NWVFYTNFP |
| 42949 | WECQIQDMK |
| 42950 | DIYHFNHRS |
| 42951 | NSFANNFVM |
| 42952 | DAQWSFEGA |
| 42953 | RINCNYGQM |
| 42954 | CHPPMTNMG |
| 42955 | WPDSNMTGV |
| 42956 | QTIMRHAQT |
| 42957 | VERLCACQA |
| 42958 | VMMYNDSIS |
| 42959 | AWDANLAFA |
| 42960 | DAGKFGVDI |
| 42961 | NQSVCYSSV |
| 42962 | LRHDVFSQA |
| 42963 | DFAAQQRAQ |
| 42964 | SAGPFFDHY |
| 42965 | CMASVNYFD |
| 42966 | CWARMQGYM |
| 42967 | CFVDSVFMY |
| 42968 | APRNVHCGT |
| 42969 | GRCFMPPGR |
| 42970 | KNHAHEFIE |
| 42971 | IIAVSMRGR |
| 42972 | LPRMPECSV |
| 42973 | TTMVQMGAW |
| 42974 | TLVSCDQGN |
| 42975 | SADRMISHE |
| 42976 | MPHHSPDCW |
| 42977 | TPSQMDMDT |
| 42978 | SCNFEFLWM |
| 42979 | TTVDYAGTG |
| 42980 | WKCCQDQLL |
| 42981 | SWFAGQWEW |
| 42982 | EITDKYWGE |
| 42983 | CRGSLSNAN |
| 42984 | KAYMMMEGP |
| 42985 | VPLGFNFAG |
| 42986 | AVSNWLETS |
| 42987 | MWTVARMFP |
| 42988 | ITHKYGWNL |
| 42989 | QGRWACWYS |
| 42990 | NHASFKRFM |
| 42991 | RNMALHHPT |
| 42992 | MWTKFNEYG |
| 42993 | HLLKKDASD |
| 42994 | GQAGVHNLS |
| 42995 | SFFREDYSF |
| 42996 | RCTDCSYFY |
| 42997 | IKRAYDNNG |
| 42998 | SQQHCQHDQ |
| 42999 | QGDFFNICP |
| 43000 | CMQKYIPDV |
| 43001 | PSLWKEKVW |
| 43002 | YGTAMDSLY |
| 43003 | IHQCIVCAP |
| 43004 | HLAPYCQQE |
| 43005 | MIQSGQKDF |
| 43006 | EVDQYYSLA |
| 43007 | KIQMAVSLD |
| 43008 | LINQWMHDN |
| 43009 | HTHDVRVHK |
| 43010 | MPASNWVAE |
| 43011 | RTVHRDDFA |
| 43012 | TSRDGGWAY |
| 43013 | KNETFIAST |
| 43014 | EVAGCATAV |
| 43015 | MWTEFNEDG |
| 43016 | QPGHTYNAP |
| 43017 | MESHHHAHA |
| 43018 | DCVCCSELV |
| 43019 | TKQPVHFLG |
| 43020 | AMNWWDAPQ |
| 43021 | YFMTCSTYP |
| 43022 | GSFMSCEKN |
| 43023 | VDQHGWNDM |
| 43024 | HHSWQPQKY |
| 43025 | QFCTSCASN |
| 43026 | KMLLVMDGD |
| 43027 | ERTCIATMW |
| 43028 | GVDNRQWLF |
| 43029 | NEAPYSTWQ |
| 43030 | SGNIDVHTM |
| 43031 | AADNYSWVV |
| 43032 | AAHRGECMA |
| 43033 | AAVPRMWAM |
| 43034 | AAWGYNQFF |
| 43035 | AAWVDKWWV |
| 43036 | AAYMSSECL |
| 43037 | ACCCHENVL |
| 43038 | ACEHPLNYD |
| 43039 | ACGVTQMNP |
| 43040 | ACQYDVETL |
| 43041 | AEDVDEGCD |
| 43042 | AEIRNVACW |
| 43043 | AFFMDHMWH |
| 43044 | AGINCQWCP |
| 43045 | AHFPFFVYW |
| 43046 | AIFSREENG |
| 43047 | AIGIDHQAF |
| 43048 | AIGNFHMAY |
| 43049 | AIIWGAIQE |
| 43050 | AIQMPDVTY |
| 43051 | AKDMHVANE |
| 43052 | AKLSNCAIP |
| 43053 | AKMGFDRFT |
| 43054 | AKSHHDDSA |
| 43055 | ALEYIRQGT |
| 43056 | ALHHYPVYH |
| 43057 | ALHVVMDVG |
| 43058 | AMDYLMEHV |
| 43059 | AMGNQRNYY |
| 43060 | AMHAQQNRE |
| 43061 | AMIASHHCQ |
| 43062 | AMKFAGECA |
| 43063 | AMKFAGEGA |
| 43064 | AMMHRNNET |
| 43065 | ANAYQINGQ |
| 43066 | ANCMDFHIT |
| 43067 | ANFYNEEAT |
| 43068 | ANHHQTYDT |
| 43069 | ANQISVRGV |
| 43070 | APCWEGSMR |
| 43071 | APESARPAN |
| 43072 | APIWNDSLM |
| 43073 | APQVSKRFA |
| 43074 | APSTFANWG |
| 43075 | APVNMENPI |
| 43076 | AQQCSRLMF |
| 43077 | AQRPCDDWQ |
| 43078 | AQTMSHCFW |
| 43079 | ARAAQLSYW |
| 43080 | ARQCNPNCT |
| 43081 | ASLDQAEQN |
| 43082 | ATENEHAMP |
| 43083 | ATNQRKAYT |
| 43084 | ATTNMFVDT |
| 43085 | ATVKYNCHW |
| 43086 | AVAFGSQED |
| 43087 | AVGFCQYSS |
| 43088 | AVNHTPIWA |
| 43089 | AVNYGHEGG |
| 43090 | AVIDKCDNP |
| 43091 | AVTSYDNMQ |
| 43092 | AWTLNNNHW |
| 43093 | AYTDIWNFW |
| 43094 | CAAMAYEKG |
| 43095 | CAEVQGETS |
| 43096 | CASGFGRLA |
| 43097 | CAWVMQWHH |
| 43098 | CCHFDEFYM |
| 43099 | CDNSENFLT |
| 43100 | CDTRWYCLC |
| 43101 | CEAEKVEQP |
| 43102 | CEGVANPWE |
| 43103 | CFPLCSFST |
| 43104 | CFTPHESMQ |
| 43105 | CGESWAGFN |
| 43106 | CGPNVSMMP |
| 43107 | CGVVESGMN |
| 43108 | CHKPYHLGI |
| 43109 | CHYEYSKFG |
| 43110 | CIETVHFHF |
| 43111 | CIWPYQAIQ |
| 43112 | CKPLECQLV |
| 43113 | CLCLIVDCE |
| 43114 | CLLGEVMFD |
| 43115 | CLTDSQDLP |
| 43116 | CMHWGWIPM |
| 43117 | CMKIFKFNS |
| 43118 | CMMTYMHLG |
| 43119 | CMNCRHQCL |
| 43120 | CMQKIDHSW |
| 43121 | CMSVSTRWY |
| 43122 | CMVCPGREE |
| 43123 | CNDRYMFAH |
| 43124 | CPCTFADEQ |
| 43125 | CPKPSDGSF |
| 43126 | CPLTSWHFE |
| 43127 | CQHRTHCCM |
| 43128 | CQIPEGHEG |
| 43129 | CQVKRNATG |
| 43130 | CSLRLIAES |
| 43131 | CTALCYSRQ |
| 43132 | CTVIDINKN |
| 43133 | CTWLTQHQF |
| 43134 | CVAIENVNF |
| 43135 | CVRQTVTLC |
| 43136 | CVSHYASQM |
| 43137 | CWPFAINHI |
| 43138 | CWTMFCPPT |
| 43139 | CWTQMKFWG |
| 43140 | CYHQYETRC |
| 43141 | CYKSTQGAE |
| 43142 | DAGDENAPE |
| 43143 | DAKMGAEFS |
| 43144 | DAKNECASW |
| 43145 | DALLHRHYE |
| 43146 | DAREYWRYQ |
| 43147 | DASPKGGAS |
| 43148 | DAWLHEQGT |
| 43149 | DCNAADPGR |
| 43150 | DCQYVVNDC |
| 43151 | DCRMCERHV |
| 43152 | DCRWMSIMG |
| 43153 | DDGKTYCLY |
| 43154 | DDRNVWSAD |
| 43155 | DDVRQGDCW |
| 43156 | DEIDIGREG |
| 43157 | DEMLKQFNG |
| 43158 | DFNVTAFRD |
| 43159 | DFVGCSHWG |
| 43160 | DGTPISCVG |
| 43161 | DHDDTRLHR |
| 43162 | DHDKREIVT |
| 43163 | DHFYIAKQY |
| 43164 | DHGFEGGWP |
| 43165 | DIWHTQDME |
| 43166 | DKAQIKMYG |
| 43167 | DKDEHDTQD |
| 43168 | DKKQSCDTS |
| 43169 | DKQLMMLHT |
| 43170 | DKRWQKMVR |
| 43171 | DKSQMHKWG |
| 43172 | DLCFMEQLH |
| 43173 | DLEVTSASQ |
| 43174 | DLHDVVFVV |
| 43175 | DMHGIENAR |
| 43176 | DMPEDSIHW |
| 43177 | DNKSIVMSQ |
| 43178 | DNNVQKCGQ |
| 43179 | DNQPTVCHT |
| 43180 | DNRPPLFWQ |
| 43181 | DPEYTVVLT |
| 43182 | DQHPSFLGC |
| 43183 | DQNESGFGC |
| 43184 | DQWQATIAE |
| 43185 | DRCQTVIDW |
| 43186 | DRKCMIPNK |
| 43187 | DRQQMDCYQ |
| 43188 | DRTPLHQQQ |
| 43189 | DSAELHWPH |
| 43190 | DSFTFLKKA |
| 43191 | DSGILETCD |
| 43192 | DSHAYWMYP |
| 43193 | DSNFSYLGH |
| 43194 | DSQFKMAAW |
| 43195 | DTAAQKWEA |
| 43196 | DTDTVLQSS |
| 43197 | DTEWNHHNT |
| 43198 | DTFQPHWYS |
| 43199 | DTKHSSYDS |
| 43200 | DTMTKEKRH |
| 43201 | DTMVDEYDE |
| 43202 | DVCSTFGWM |
| 43203 | DVDQEQDPI |
| 43204 | DVGIHEWCT |
| 43205 | DVGLSGFER |
| 43206 | DVHFLGEFF |
| 43207 | DVLFEGQGS |
| 43208 | DVNPASHFC |
| 43209 | DVQSWCRQG |
| 43210 | DWKPEMDGS |
| 43211 | DWRMKKSSY |
| 43212 | DWSHTQYGA |
| 43213 | DWVCMDWCQ |
| 43214 | EADDHDQNR |
| 43215 | EAHISAEFK |
| 43216 | EAIFHDVEM |
| 43217 | EAKTSYRMW |
| 43218 | EARETAIMC |
| 43219 | EATQHETRV |
| 43220 | ECMCVQFCQ |
| 43221 | ECTMIEYMG |
| 43222 | EDCNTNERS |
| 43223 | EDIQFDGDS |
| 43224 | EDKTQEMWI |
| 43225 | EDLLMNSNT |
| 43226 | EEPAMKIFM |
| 43227 | EFEHFNYQD |
| 43228 | EFRWQQSTP |
| 43229 | EFTDQADWE |
| 43230 | EFTQDNWGQ |
| 43231 | EFYPSTPCS |
| 43232 | EGNWWHEYA |
| 43233 | EGTDGDMFS |
| 43234 | EHESMCCGW |
| 43235 | EHKLWEGFA |
| 43236 | EHYQKHCYL |
| 43237 | EIFQAFLLS |
| 43238 | EIQRNHAIQ |
| 43239 | EIWMMNGEY |
| 43240 | EKAELVRDL |
| 43241 | EKCLLMNAR |
| 43242 | EKLYSTLQP |
| 43243 | ELAEYGNGW |
| 43244 | ELEVSKLWW |
| 43245 | ELEWMMHCA |
| 43246 | EMMYKKLDQ |
| 43247 | EMTMEGQDI |
| 43248 | EMVQGDTHE |
| 43249 | ENDFLCAWT |
| 43250 | ENMWGYANH |
| 43251 | ENNEYWHVE |
| 43252 | EPEMQNQNQ |
| 43253 | EPRVHTWRK |
| 43254 | ERDYCAYTS |
| 43255 | ERKMCFCHP |
| 43256 | ESAWKHFVP |
| 43257 | ESKWNNPDA |
| 43258 | ESMLAIMST |
| 43259 | ESNRMMGCG |
| 43260 | ESRANATLR |
| 43261 | ESVHEGTSS |
| 43262 | ESYPNNHDL |
| 43263 | ESYYKPDFQ |
| 43264 | ETFFLPNCN |
| 43265 | ETMCGNELG |
| 43266 | ETMDREEDK |
| 43267 | ETMFYHIDH |
| 43268 | ETQAGAPCN |
| 43269 | ETQSAAYDE |
| 43270 | ETTWQCIDP |
| 43271 | EVAQNTPHQ |
| 43272 | EVGDCMPQE |
| 43273 | EVGQHEATI |
| 43274 | EVSTQTKLS |
| 43275 | EVTYWQEWT |
| 43276 | EVYQGMLYF |
| 43277 | EVYQQQKDH |
| 43278 | EWKMWYLQG |
| 43279 | EWTDWRDEG |
| 43280 | EYEFEGNAP |
| 43281 | EYRQAQSFS |
| 43282 | FAEQEHMAS |
| 43283 | FAIQEYHIT |
| 43284 | FATLQAAQD |
| 43285 | FATTTYADC |
| 43286 | FCHYLVYDD |
| 43287 | FFRCEKITA |
| 43288 | FISTFERHI |
| 43289 | FITEIQDYT |
| 43290 | FITRHPVYD |
| 43291 | FKYMWNFSN |
| 43292 | FLKNKDCLL |
| 43293 | FLLQYMQPS |
| 43294 | FLVQLSDGV |
| 43295 | FMGFCGPYQ |
| 43296 | FMNPIGVNG |
| 43297 | FMSSRVINF |
| 43298 | FPAFPKEAC |
| 43299 | FQHDRHTYL |
| 43300 | FQIPFCRSF |
| 43301 | FQMHHKWDL |
| 43302 | FSAMYPHMN |
| 43303 | FTALLHYDI |
| 43304 | FTAYMQEFA |
| 43305 | FTCPVSHFE |
| 43306 | FTPWPQCCQ |
| 43307 | FTTQFIDGK |
| 43308 | FTWTQCVVP |
| 43309 | FVEVRMMCH |
| 43310 | FVKMRLSDD |
| 43311 | FVTVWRTTG |
| 43312 | FVWNTMSTE |
| 43313 | FYLPMEHMD |
| 43314 | FYTETNHAP |
| 43315 | GAGLYMVMG |
| 43316 | GATCNMFSY |
| 43317 | GAVWQQGSD |
| 43318 | GDSQLNHWM |
| 43319 | GEVEFVPRN |
| 43320 | GFTTMYKHG |
| 43321 | GHEVQNWPM |
| 43322 | GHHQRTTIN |
| 43323 | GHKHGIFAG |
| 43324 | GHKTPSGPG |
| 43325 | GHMCDCTSM |
| 43326 | GIDENHAGL |
| 43327 | GIGCPQQWE |
| 43328 | GIIPWMHFM |
| 43329 | GIKANIGTK |
| 43330 | GKCENKLST |
| 43331 | GKHKTYEPS |
| 43332 | GLQAFCFQS |
| 43333 | GLQHYGEID |
| 43334 | GMCENVSSF |
| 43335 | GMPEDSIHW |
| 43336 | GMQVIHVTG |
| 43337 | GPPMYKDCM |
| 43338 | GPYKNITFQ |
| 43339 | GQGFRRQHR |
| 43340 | GQVEMFADR |
| 43341 | GQVSSTWWH |
| 43342 | GRNNNTTEQ |
| 43343 | GSAPFQCIG |
| 43344 | GSHQFSGPH |
| 43345 | GSNPPMMQY |
| 43346 | GTGTCMWAE |
| 43347 | GTQPVNWLI |
| 43348 | GTVMRGMAL |
| 43349 | GVAPLMDQA |
| 43350 | GVEFQHNQA |
| 43351 | GVGCEILGA |
| 43352 | GVHPDNWRN |
| 43353 | GVQLAMSDC |
| 43354 | GVQSLHFNS |
| 43355 | GVTCKDMYH |
| 43356 | GWSQEGHFA |
| 43357 | GWWGLVHNQ |
| 43358 | GWWYYGQCR |
| 43359 | GYASHQHWQ |
| 43360 | HAGCSTRTG |
| 43361 | HAIHKWPRW |
| 43362 | HALGRVANR |
| 43363 | HAMLNEICD |
| 43364 | HATQRSADA |
| 43365 | HAYLAGWCN |
| 43366 | HCQDLQIGM |
| 43367 | HCWAQYLRF |
| 43368 | HGARGEQFA |
| 43369 | HGCYVAHCG |
| 43370 | HGEMCAFFQ |
| 43371 | HGRCIWPMW |
| 43372 | HGYADCKAH |
| 43373 | HHCNTSEFV |
| 43374 | HHEIKVIFE |
| 43375 | HHILNVWTE |
| 43376 | HHNFRMAMN |
| 43377 | HIAIVCLMD |
| 43378 | HLLHVCLEK |
| 43379 | HMIRGYCDY |
| 43380 | HNGMDTQWH |
| 43381 | HNHHECRQM |
| 43382 | HPPPLPWQS |
| 43383 | HQDQPEWAK |
| 43384 | HRIAEICRP |
| 43385 | HSEMLDLQE |
| 43386 | HSQGFDVTQ |
| 43387 | HTADMRAYD |
| 43388 | HTLFHRDCA |
| 43389 | HVATKEECT |
| 43390 | HVEPLEETM |
| 43391 | HYDPYNRTL |
| 43392 | HYYTPDRMT |
| 43393 | IACMENLSL |
| 43394 | IAFWIDGQC |
| 43395 | IAHWCHKCW |
| 43396 | IATGRESAI |
| 43397 | IATGWESAI |
| 43398 | IAWEKCDAW |
| 43399 | ICHSGGWST |
| 43400 | ICRREWNPV |
| 43401 | IDWVGHMGA |
| 43402 | IECNYCKFY |
| 43403 | IECYKGMFC |
| 43404 | IEPEGHLVT |
| 43405 | IEYPNKWRW |
| 43406 | IFAVMADMS |
| 43407 | IFHPQWKQG |
| 43408 | IFKHCKHDE |
| 43409 | IGAGFYYKP |
| 43410 | IGEAFASTG |
| 43411 | IGLLTSLHD |
| 43412 | IGRVKCART |
| 43413 | IGVMPGIVA |
| 43414 | IHSAHHWAS |
| 43415 | IHSQMIEAP |
| 43416 | IIGRFESMS |
| 43417 | IINPLRHGD |
| 43418 | ILDPQHWSM |
| 43419 | ILTHVSDAC |
| 43420 | IMGNYIQAN |
| 43421 | IMMDWEGNW |
| 43422 | IMWVLNELE |
| 43423 | INEGIGRHF |
| 43424 | INHGTTATF |
| 43425 | INMPAVMKF |
| 43426 | IPGTRIAWA |
| 43427 | IQCYYKGEQ |
| 43428 | IRFGSREAK |
| 43429 | IRGQANSCV |
| 43430 | ISEVENWYD |
| 43431 | ISNKLTMPV |
| 43432 | ISTMIEYSN |
| 43433 | ITEYAQQDC |
| 43434 | ITHHRDNWF |
| 43435 | ITKIMRQAE |
| 43436 | IVMPVAAFH |
| 43437 | IVQCFVDSQ |

TABLE 86
Sequences of the 581 to 589 Region in AAV5 VP1
Capsid Polypeptide that Drive Liver Tissue Tropism

| SEQ | |
|---|---|
| ID | 581-589 |
| NO | Sequence |
| 45438 | AFEKVNCPD |
| 45439 | ILIFIQNCP |
| 45440 | ASQRTHHVD |
| 45441 | ATNLINKLF |
| 45442 | EVLLGCQNY |
| 45443 | FYMLSNQGS |
| 45444 | GSVGMLDGQ |
| 45445 | GVNIMFRQQ |
| 45446 | KGEPGMNYY |
| 45447 | KIAVYADWA |
| 45448 | KNAWMDCVN |
| 45449 | KNGAGDAHY |
| 45450 | LAKMYWDMG |
| 45451 | LTQSFQTYH |
| 45452 | MIVQQSTGC |
| 45453 | NRDYYRGNY |
| 45454 | QAVQLWSHV |
| 45455 | QCGSMQGVY |
| 45456 | REAEYWRDQ |
| 45457 | SSFYAQREG |
| 45458 | VIISRHMDS |
| 45459 | VTHLFGSQA |
| 45460 | AAEAGIHQA |
| 45461 | ACQSYWNEA |
| 45462 | DATFCTYMR |
| 45463 | DKTSRLADQ |
| 45464 | KANMCEKIC |
| 45465 | KPNNFDTQF |
| 45466 | NINKFTCHE |
| 45467 | NSAIEYQNE |
| 45468 | QATPSEWEN |
| 45469 | QSLMCWNMG |
| 45470 | SARYQIEGC |
| 45471 | SIVHSGLSF |
| 45472 | TFYPTQNQH |
| 45473 | TSNWLNFFP |
| 45474 | VAAQSDTVN |
| 45475 | VFKLISNQA |
| 45476 | VVVRSNECA |
| 45477 | YHNQDRHYL |
| 45478 | HIKVEHEEV |
| 45479 | ACASTSPNA |
| 45480 | AHSRMDWTP |
| 45481 | AIGRRRLTH |
| 45482 | AKGHDKACC |
| 45483 | AMGSLMRAS |
| 45484 | ARNSMPFGM |
| 45485 | CGTGEDCED |
| 45486 | DKCNVTRAD |
| 45487 | DMSDCYEHA |
| 45488 | DNILRDVMA |
| 45489 | DVANHITQM |
| 45490 | DVDWNMGVE |
| 45491 | DVNQYTMRH |
| 45492 | DWRNKRNHA |
| 45493 | DYVFWGFPC |
| 45494 | EAAKLVEPT |
| 45495 | ECHVCTHKA |
| 45496 | ELPRYYGQM |
| 45497 | ETHRRCKMS |
| 45498 | FAKHCVMTA |
| 45499 | FDEALWKNN |
| 45500 | FTMRMASGF |
| 45501 | GTHTQQWHH |
| 45502 | HVFFAPLEG |
| 45503 | HYMGLLCGC |
| 45504 | IFDVYARWT |
| 45505 | IHIGKNDNC |
| 45506 | IHKFCFKGY |
| 45507 | ISGFTKHEW |
| 45508 | IVKQCYDCH |
| 45509 | KAANDHHVA |
| 45510 | KHVILRQLP |
| 45511 | KIVSNESMT |
| 45512 | KVDGCQKLC |
| 45513 | LMYGVGTCF |
| 45514 | LNNHHGTGS |
| 45515 | MFQWRWIDG |
| 45516 | MGFPKMSAW |
| 45517 | MQVVLQHTS |
| 45518 | MYYQIENDP |
| 45519 | NSICMGGWK |
| 45520 | NVCTKRENE |
| 45521 | NYCKYNKMR |
| 45522 | PESVKMDCN |
| 45523 | QVYYVHTER |
| 45524 | RASHDGCCD |
| 45525 | RIFWDFHAT |
| 45526 | RVPRCVYEC |
| 45527 | TDALTDSMH |
| 45528 | TEDDRWRHA |
| 45529 | TIWERQSFH |
| 45530 | TQGMYVESY |
| 45531 | TSNIFQRHG |
| 45532 | TVNVDSQYN |
| 45533 | VASSHRESQ |
| 45534 | VIKVNTVNP |
| 45535 | VSGMLAACN |
| 45536 | VVNVWGCAP |
| 45537 | WNIVLMFYC |
| 45538 | WWVVVPCFM |
| 45539 | YCTGLGSMD |
| 45540 | YFALNDITH |
| 45541 | YNLQWFKHY |
| 45542 | YSDNGRRFD |
| 45543 | YSIIWRVYR |
| 45544 | YSMDVMMSI |
| 45545 | YVHKPPDQG |
| 45546 | EVRSTRKNH |
| 45547 | LDGPIGMGT |
| 45548 | GAYSLHDWR |
| 45549 | IMVERWQHA |
| 45550 | MCDNFPSAH |
| 45551 | NGMDKPVDA |
| 45552 | AAWQSEIAN |
| 45553 | ACILDGFTL |
| 45554 | CAYNAPDWP |
| 45555 | EFTPEHRCW |
| 45556 | ETLKNIMEK |
| 45557 | GFSPISSPC |
| 45558 | GIDTISTSI |
| 45559 | GSEWKTFGD |
| 45560 | IMMCVWRSF |
| 45561 | KAFDNELHN |
| 45562 | KGEMEMSMA |
| 45563 | KKCDTMIGQ |
| 45564 | KMEHMWKMP |
| 45565 | MNGFCFGEA |
| 45566 | MVKQAQTMC |
| 45567 | NGKQFESGP |
| 45568 | NSASYCNPT |
| 45569 | NTLVNMESP |
| 45570 | TNSVMQNME |
| 45571 | TTGPKHCSV |
| 45572 | YSTYSEKSC |
| 45573 | YVETTKVWP |
| 45574 | TSERHSCMV |
| 45575 | ATAFKMLNT |
| 45576 | SPNGRGLCG |
| 45577 | AACWTVPQH |
| 45578 | AAESQGHRH |
| 45579 | AAHCIPNHD |
| 45580 | AAISSGFPA |
| 45581 | AAKVFPDGM |
| 45582 | AAMCCHLGV |
| 45583 | AAQCCTFGT |
| 45584 | AATASGYAS |
| 45585 | AAVFNDVEK |
| 45586 | AAVGINTRE |
| 45587 | AAVGSNEFA |
| 45588 | AAWMGNAVM |
| 45589 | ACAYSVASE |
| 45590 | ACCKAGFLV |
| 45591 | ACEYKVVNQ |
| 45592 | ACHNNVYHG |
| 45593 | ACKANTAQM |
| 45594 | ACKFTELSM |
| 45595 | ACLTKNWTR |
| 45596 | ADNVMHWWT |
| 45597 | ADSQSRVMP |
| 45598 | ADYHEGMFP |
| 45599 | AEHQHLACV |
| 45600 | AEMRTMGSQ |
| 45601 | AFAGTLQHP |
| 45602 | AFAWAHCPV |
| 45603 | AFMPQSWTQ |
| 45604 | AFMRNFDYP |
| 45605 | AFMSTGMLA |
| 45606 | AFMVTASNL |
| 45607 | AFNHWHYRN |
| 45608 | AFRSVVIKW |
| 45609 | AGCNRCWKQ |
| 45610 | AGDKWMASF |
| 45611 | AGGFWCEPF |
| 45612 | AGKWWWQYH |
| 45613 | AGVTLPVTL |
| 45614 | AHIAVFDCD |
| 45615 | AHLDMWWSN |
| 45616 | AHMCTQQSG |
| 45617 | AHMTEIAFA |
| 45618 | AHNMDVWCI |
| 45619 | AHPPTQYNH |
| 45620 | AHTLRQFWE |
| 45621 | AIACAHMGG |
| 45622 | AIEFHEAFT |
| 45623 | AILFLKGND |
| 45624 | AINGTGTFT |
| 45625 | AINWPMHIE |
| 45626 | AIQHPNQWC |
| 45627 | AIQNEENPG |
| 45628 | AIQTTETEE |
| 45629 | AISDKQPWR |
| 45630 | AITPCLEFK |
| 45631 | AIVEGVKHY |
| 45632 | AIVPIWTTN |
| 45633 | AIVQEDVEE |
| 45634 | AIVTASCPP |
| 45635 | AKCCSQLDY |
| 45636 | AKCYKEWWP |
| 45637 | AKDQYGLLS |
| 45638 | AKGLTHLTC |
| 45639 | AKLWRYRWI |
| 45640 | AKMLKDRAA |
| 45641 | AKMPYMSTH |
| 45642 | AKQMTAAQM |
| 45643 | AKSCEESRP |
| 45644 | AKSEFSVSI |
| 45645 | AKSGWTLME |
| 45646 | ALAHNFNGM |
| 45647 | ALDTFCRWP |
| 45648 | ALGLNSNHG |
| 45649 | ALMTWVRDC |
| 45650 | ALWYSKKEC |
| 45651 | AMASVRGGD |
| 45652 | AMENWYSYQ |
| 45653 | AMLDGMTSG |
| 45654 | AMLMSKEVA |
| 45655 | AMMQGVSNQ |
| 45656 | AMNVIASHF |
| 45657 | AMSCYTLWC |
| 45658 | AMSFTQFCS |
| 45659 | AMSPIVDAP |
| 45660 | AMSRLMMFS |
| 45661 | AMVEPQCQG |
| 45662 | AMWFCSVGD |
| 45663 | AMWRLNNVF |
| 45664 | ANCTQENQT |
| 45665 | ANECKQNVE |
| 45666 | ANHVTDTSC |
| 45667 | ANKMIVLNH |
| 45668 | ANKSVGEWR |
| 45669 | ANLFYSDRD |
| 45670 | ANLLGHYQA |
| 45671 | ANMLTNCDT |
| 45672 | ANMNCDKFS |
| 45673 | ANNVHCVKK |
| 45674 | ANNVTQAER |
| 45675 | ANQCHMGYT |
| 45676 | ANTRFPMKD |
| 45677 | APDTWVPVY |
| 45678 | APGNHNNWW |
| 45679 | APHCEKENG |
| 45680 | APISWQMAL |
| 45681 | APSMRKIIP |
| 45682 | APSNPRKVA |
| 45683 | AQAEKPCSY |
| 45684 | AQAKEWKTK |
| 45685 | AQCYKFNGH |
| 45686 | AQHTVWRFA |
| 45687 | AQLPFCQQD |
| 45688 | AQQKGGITF |
| 45689 | AQSAISVMV |
| 45690 | AQSAWHSWP |
| 45691 | ARLACCSAD |
| 45692 | ARMYYDDQP |
| 45693 | ARRLWQNDQ |
| 45694 | ARVQENHVG |
| 45695 | ASGMQGSWH |
| 45696 | ASIMQTKGI |
| 45697 | ASKPGIIFD |
| 45698 | ASMPFLSYT |
| 45699 | ASNILDLPE |
| 45700 | ASQWKIHGA |
| 45701 | ASSPFSQVR |
| 45702 | ASTCKKLAM |
| 45703 | ASYSILKQR |
| 45704 | ATAHIAPPS |
| 45705 | ATDTMQFIW |
| 45706 | ATIAQWCVH |
| 45707 | ATKLGCSRI |
| 45708 | ATLGHVMMC |
| 45709 | ATLTNQHAE |
| 45710 | ATMMKWDAN |
| 45711 | ATMWLEDQC |
| 45712 | ATRAMQVLE |
| 45713 | ATRLAFHQG |
| 45714 | ATRLITYAV |
| 45715 | ATSFTQFCS |
| 45716 | ATSGQTYSV |
| 45717 | ATSMCMHPR |
| 45718 | ATSPHLAWG |
| 45719 | ATVKFSDCV |
| 45720 | ATYKIDTSC |
| 45721 | AVAIRSWCG |
| 45722 | AVAMEFNVV |
| 45723 | AVDPMCFDE |
| 45724 | AVESICSTE |
| 45725 | AVFIPGQFW |
| 45726 | AVGMCQMDL |
| 45727 | AVLIAGAGH |
| 45728 | AVLKAEVVK |
| 45729 | AVPFPWGCC |
| 45730 | AVQLWWWHN |
| 45731 | AVRFYSTPI |
| 45732 | AVRWSQTPG |
| 45733 | AVTVVGTQI |
| 45734 | AVVAQCQSW |
| 45735 | AVVGWTAGQ |
| 45736 | AVYIMTQLQ |
| 45737 | AWAEPDMRW |
| 45738 | AWDAESCYK |
| 45739 | AWEKIHRSP |
| 45740 | AWITCLIAP |
| 45741 | AWMHDTCTK |
| 45742 | AWRSVASNH |
| 45743 | AWTHHFTLD |
| 45744 | AWWRVTHEQ |
| 45745 | AYAPSLHNN |
| 45746 | AYCEIPTNP |
| 45747 | AYDHVLESR |
| 45748 | AYEYRNHEF |
| 45749 | AYFPNSWGQ |
| 45750 | AYNRVWSCG |
| 45751 | AYPQCFQNP |
| 45752 | AYQAKYDLA |
| 45753 | AYTETSYLH |
| 45754 | AYTLCLCNE |
| 45755 | CANCPMFPT |
| 45756 | CAQFKMTYF |
| 45757 | CARQPMPPA |
| 45758 | CAYAIMPCE |
| 45759 | CCFQFELEC |
| 45760 | CCIFIWWLY |
| 45761 | CCSNKSRFV |
| 45762 | CCSPLCQQP |
| 45763 | CCVPMMNVC |
| 45764 | CCVTAWKNQ |
| 45765 | CDAIYVSCG |
| 45766 | CDCLFMLHQ |
| 45767 | CDNGYETNE |
| 45768 | CFCQGFRKR |
| 45769 | CFEHWADFE |
| 45770 | CFEKKQTDG |
| 45771 | CGEQKDQIG |
| 45772 | CGHLYNRDF |
| 45773 | CGLDYAMCQ |
| 45774 | CGRHWKEWE |
| 45775 | CGRQCKACF |
| 45776 | CHCQWMCQN |
| 45777 | CHGAHQKLE |
| 45778 | CHMPWHIHE |
| 45779 | CHMSTVMKV |
| 45780 | CHQETFLDA |
| 45781 | CHTGLMDAM |
| 45782 | CHVQFDGFG |
| 45783 | CICREGKFY |
| 45784 | CIMACQDRT |
| 45785 | CIMGMQWQF |
| 45786 | CIRHQNHYW |
| 45787 | CITAEQCGE |
| 45788 | CITPQFTSS |
| 45789 | CIVKRMECF |
| 45790 | CKAMTLAEM |
| 45791 | CKCYEMEVS |
| 45792 | CKEPHTMHE |
| 45793 | CKKPLGTRI |
| 45794 | CKNEYRIHT |
| 45795 | CKSVNPRMM |
| 45796 | CKVEWWHGN |
| 45797 | CKYEISSGL |
| 45798 | CLVSCPALN |
| 45799 | CLYVPLFAD |
| 45800 | CMEGGLMDW |
| 45801 | CMEMMKWAN |
| 45802 | CMFWANCSQ |
| 45803 | CMGSGFAEL |
| 45804 | CMKMWDCGK |
| 45805 | CMMPVLEEC |
| 45806 | CMRWFLLGS |
| 45807 | CNEVPSVMP |
| 45808 | CNSQKSYAH |
| 45809 | CNSWNCAYA |
| 45810 | CPDVGFQSG |
| 45811 | CPHLFVFDW |
| 45812 | CPPSNNPCE |
| 45813 | CPSRTWAIE |
| 45814 | CPTIIVKDW |
| 45815 | CPVANTTHP |
| 45816 | CQEFNSHTD |
| 45817 | CQNFSSLPW |
| 45818 | CQSVSANHI |
| 45819 | CRARRNPRL |
| 45820 | CRIRKRHIT |
| 45821 | CSCDEMEID |
| 45822 | CSDACQAMV |
| 45823 | CSDMLTKCN |
| 45824 | CSEHENLGI |
| 45825 | CSEKFNLHC |
| 45826 | CSETQVSTG |
| 45827 | CSQPHQMAS |
| 45828 | CSQRCMSFG |
| 45829 | CSRSDLLCG |
| 45830 | CSVWCIYYR |
| 45831 | CSYPAHRFH |
| 45832 | CTEVMAMGT |
| 45833 | CTFSSDKSD |
| 45834 | CTKLVNWYT |
| 45835 | CTLRCIMHT |
| 45836 | CTMRSGVGT |
| 45837 | CTPTILRGV |
| 45838 | CTQSQCHLC |
| 45839 | CTTEVRGTP |
| 45840 | CTTMKMNQA |
| 45841 | CTWFIQGPK |
| 45842 | CTYLAKLKC |
| 45843 | CVAAWGENG |
| 45844 | CVDNPFVLV |
| 45845 | CVFMGMMWD |
| 45846 | CVGRWWNFY |
| 45847 | CVHISDFGD |
| 45848 | CVIQGHSIE |
| 45849 | CVMAIESRG |
| 45850 | CVNRQHRIN |
| 45851 | CVPASGGWD |
| 45852 | CVTMKEFAM |
| 45853 | CWRQYVAGQ |
| 45854 | CYCTCEQPD |
| 45855 | CYELTMPLD |
| 45856 | DADRNNMSV |
| 45857 | DAEMLCYDY |
| 45858 | DAFWSNLHL |
| 45859 | DAHWGALSV |
| 45860 | DAIPKKWYG |
| 45861 | DALANNESR |
| 45862 | DALSMLRAP |
| 45863 | DALTNRASH |
| 45864 | DASMMWSRG |
| 45865 | DASYEYQSL |
| 45866 | DCAQTGEYG |
| 45867 | DCKNHYQSS |
| 45868 | DCMWYNRID |
| 45869 | DCPRSKMMT |
| 45870 | DCPTYYWRD |
| 45871 | DCSCHELAL |
| 45872 | DCYHICVIP |
| 45873 | DDELCPQCN |
| 45874 | DDHQSTWMN |
| 45875 | DDRCVQAAK |
| 45876 | DFAVSTSFD |
| 45877 | DFCMKEKAV |
| 45878 | DGCVHNQAI |
| 45879 | DGPICKGIY |
| 45880 | DGTHPCWNG |
| 45881 | DHCKTALPN |
| 45882 | DHERQRWLH |
| 45883 | DHIRQHTCS |
| 45884 | DHLKIRGAY |
| 45885 | DHQKRNVIQ |
| 45886 | DHQLVLVSG |
| 45887 | DHTVLFEGQ |
| 45888 | DHWITGPCR |
| 45889 | DHYLGHASY |
| 45890 | DICWKGWCF |
| 45891 | DIDRFTDVQ |
| 45892 | DIECKEIAI |
| 45893 | DIEITMQEN |
| 45894 | DIGPQDHWP |
| 45895 | DIHWMDHDF |
| 45896 | DIIEKVNEM |
| 45897 | DILERMNRA |
| 45898 | DINMNAQER |
| 45899 | DIRKDQHKN |
| 45900 | DIVIKKCNA |
| 45901 | DKASNQHNG |
| 45902 | DKFAAHALA |
| 45903 | DKGHHNSMH |
| 45904 | DKIDFSSVM |
| 45905 | DKKFGQFMS |
| 45906 | DKKWEEICA |
| 45907 | DKLELIGLD |
| 45908 | DKNFWVHWF |
| 45909 | DKTEMVIID |
| 45910 | DLASVGRWN |
| 45911 | DLCKMKEDK |
| 45912 | DLFRQERLF |
| 45913 | DLINWWHLQ |
| 45914 | DLKPWNPAW |
| 45915 | DLRLKVISR |
| 45916 | DLSRSFLAQ |
| 45917 | DLVIIYMFH |
| 45918 | DMELQFMYA |
| 45919 | DMGNYPCFE |
| 45920 | DMMLRHCVF |
| 45921 | DMRSNLPWH |
| 45922 | DMSHECVDA |
| 45923 | DMSHECVGA |
| 45924 | DMVDLEMYP |
| 45925 | DMWDEGDGD |
| 45926 | DNADMFNIG |
| 45927 | DNAKRPMTI |
| 45928 | DNENAIPMG |
| 45929 | DNGNMFQQH |
| 45930 | DNKLTEPCN |
| 45931 | DNKYYMSKC |
| 45932 | DNMEFESPG |
| 45933 | DNNAMINCT |
| 45934 | DNPVTRCTD |
| 45935 | DNSWFVQGG |
| 45936 | DNVYTMHQW |
| 45937 | DPMYIPVNH |
| 45938 | DQCLCHTQA |
| 45939 | DQGLWENIP |
| 45940 | DQYFEGWRK |
| 45941 | DRCVMTDVL |
| 45942 | DRFMEFTGA |
| 45943 | DRFWSKYKD |
| 45944 | DRGMPTNWC |
| 45945 | DRGQSFQMF |
| 45946 | DRGTVNRDC |
| 45947 | DRSILHAHP |
| 45948 | DRTIIQNIP |
| 45949 | DRTSYPLHL |
| 45950 | DSAWYYWHP |
| 45951 | DSCHSRIIL |
| 45952 | DSELVRDYI |
| 45953 | DSIGLERGG |
| 45954 | DSKIAHGRQ |
| 45955 | DSLRKYQCR |
| 45956 | DSLTVNMAH |
| 45957 | DSMAAHCAV |
| 45958 | DSNGIAHVP |
| 45959 | DSNKWAGLG |
| 45960 | DSNTHLPIG |
| 45961 | DSPQIVDVY |
| 45962 | DSQGINKLH |
| 45963 | DSRHSTFCL |
| 45964 | DSRHYANFM |
| 45965 | DSTPDRSIW |
| 45966 | DSTRIITQY |
| 45967 | DSYTMNWFY |
| 45968 | DTAAEVNMQ |
| 45969 | DTAEYRAGY |
| 45970 | DTDCARAIG |
| 45971 | DTDRQVKQS |
| 45972 | DTFEYTNAF |
| 45973 | DTKEYKIAY |
| 45974 | DTLQRACML |
| 45975 | DTLWYVNFA |
| 45976 | DTMMMPSSE |
| 45977 | DTMTTCYNS |
| 45978 | DTQNMKSSK |
| 45979 | DTRWWGMYA |
| 45980 | DTSSHECCD |
| 45981 | DTVHSGWQD |
| 45982 | DTVNQQKTW |
| 45983 | DVCKKGQCV |
| 45984 | DVCSQGQVP |
| 45985 | DVEMMIQRA |
| 45986 | DVEYYDHCF |
| 45987 | DVGYSAVWA |
| 45988 | DVKWGTSNL |
| 45989 | DVLPMEWCV |
| 45990 | DVLWGNRDS |
| 45991 | DVMAMAPSC |
| 45992 | DVNAGTRFP |
| 45993 | DVTDCKWGF |
| 45994 | DVWYPEFIG |
| 45995 | DWAHWAAYP |
| 45996 | DWCTDMTRK |
| 45997 | DWHNLVEYP |
| 45998 | DWLNLGRYM |
| 45999 | DYFREHMCP |
| 46000 | DYKLRARNA |
| 46001 | DYNGLSVPI |
| 46002 | DYYQWDGQI |
| 46003 | EADRWSSPN |
| 46004 | EAGRQAWTD |
| 46005 | EAHLDWIYP |
| 46006 | EAHWFTNYN |
| 46007 | EAKPWSGYL |
| 46008 | EAKRYHVDG |
| 46009 | EANMKEGLI |
| 46010 | EATIKALVF |
| 46011 | EATWTHADE |
| 46012 | ECDPRQMMC |
| 46013 | ECHQGSNME |
| 46014 | ECMDQQATW |
| 46015 | ECMQQCFVR |
| 46016 | ECQPFATVT |
| 46017 | ECVYNPANN |
| 46018 | EEKYKDAQW |
| 46019 | EEPGSQMTV |
| 46020 | EERPWKRDL |
| 46021 | EETEGIEPH |
| 46022 | EFDAAVIEK |
| 46023 | EFGYEHIVP |
| 46024 | EFRNSSCTN |
| 46025 | EGAHNKFDR |
| 46026 | EGCIPGGWS |
| 46027 | EGGSCNTQM |
| 46028 | EGNFIMGCS |
| 46029 | EGNQEGLNM |
| 46030 | EGNREGLNM |
| 46031 | EGNYMAGLG |
| 46032 | EGWHFPAME |
| 46033 | EHDGTPFNE |
| 46034 | EHDHQPSYA |
| 46035 | EHERFCQGR |
| 46036 | EHHRRGAFK |
| 46037 | EHMFNKDCT |
| 46038 | EHQRGHACN |
| 46039 | EHSYLLHDT |
| 46040 | EICSEINMK |
| 46041 | EIEQEEGGC |
| 46042 | EIGLYWIKC |
| 46043 | EIGYKQMYF |
| 46044 | EIKASHNYD |
| 46045 | EINQGDEDG |
| 46046 | EIQSVMPQP |
| 46047 | EISNLRQGF |
| 46048 | EISPHKILP |
| 46049 | EITGGHASW |
| 46050 | EIVWYFQDT |
| 46051 | EKAMRNGQA |
| 46052 | EKCCCLQWE |
| 46053 | EKEIKMLFG |
| 46054 | EKGPYWHQH |
| 46055 | EKHAMECVS |
| 46056 | EKIAPNHQA |
| 46057 | EKKMWVYTG |
| 46058 | EKLMAYIML |
| 46059 | EKLPIQMFN |
| 46060 | EKMPWLISN |
| 46061 | EKNWYQHIW |
| 46062 | EKQTRNQDG |
| 46063 | ELHHPIRRS |
| 46064 | ELMASNRCH |
| 46065 | ELMFVMHGT |
| 46066 | ELPMMNMAQ |
| 46067 | ELSFKTAQG |
| 46068 | ELTMANCMN |
| 46069 | EMERKNMFE |
| 46070 | EMGCDNKSF |
| 46071 | EMHLYHICH |
| 46072 | EMTSTMKSH |
| 46073 | EMYRALGHG |
| 46074 | ENGPMCDSN |
| 46075 | ENHSPNVDP |
| 46076 | ENILAIPAL |
| 46077 | ENKWQPKQA |
| 46078 | ENNSRQLIN |
| 46079 | EPCMRNLFG |
| 46080 | EPIRTEGAE |
| 46081 | EPLCHQIMP |
| 46082 | EPLVDEFGG |
| 46083 | EPRECFHIE |
| 46084 | EPWVMKLNK |
| 46085 | EQADYRAVQ |
| 46086 | EQERYEWDP |
| 46087 | EQGCQLVTT |
| 46088 | EQHPRMNFH |
| 46089 | EQIHQLRFG |
| 46090 | EQKWQWCQY |
| 46091 | EQQMLLQLS |
| 46092 | EQYMVNTRD |
| 46093 | ERCPWSVGE |
| 46094 | ERENSLWMS |
| 46095 | ERFLLEAVE |
| 46096 | ERGKWHALS |
| 46097 | ERQPFTMQW |
| 46098 | ERSWTHAHW |
| 46099 | ERTTKAEGY |
| 46100 | ERVARLQFT |
| 46101 | ESAKFVCEY |
| 46102 | ESCEDGIRT |
| 46103 | ESGFRKLRV |
| 46104 | ESHMHDHWI |
| 46105 | ESILVCATP |
| 46106 | ESIQLRSSQ |
| 46107 | ESSFVHEEQ |
| 46108 | ESTEPMSAT |
| 46109 | ESTLKTTYA |
| 46110 | ETCTEPKYW |
| 46111 | ETEMTSWQN |
| 46112 | ETKAVISAQ |
| 46113 | ETLERDWDY |
| 46114 | ETMKDVRFM |
| 46115 | ETNQLSGYC |
| 46116 | ETPKFNWSN |
| 46117 | ETRTDVPML |
| 46118 | ETTAAFKPG |
| 46119 | ETYDNNLQA |
| 46120 | ETYVCWFGS |
| 46121 | EVATSYARV |
| 46122 | EVDQAPMMI |
| 46123 | EVHRSELQR |
| 46124 | EVIGFLYHA |
| 46125 | EVMAMCDRY |
| 46126 | EVMPMCDRY |
| 46127 | EVQLTYLHE |
| 46128 | EVVTKHDSR |
| 45129 | EWCKQWMRF |
| 46130 | EWMTCGVSG |
| 46131 | EWSMLQYNH |
| 46132 | EWYIANISD |
| 46133 | EYELTQPAP |
| 46134 | EYIFENEMC |
| 46135 | EYLLCRGEA |
| 46136 | FADHFEAMF |
| 46137 | FAEHEIEHS |
| 46138 | FAIIRNDSH |
| 46139 | FAIMSSDHP |
| 46140 | FALNTEISA |
| 46141 | FAPFLKAGH |
| 46142 | FAQMNKDRC |
| 46143 | FARHPLKCA |
| 46144 | FASQHAVQA |
| 46145 | FCFWMPTTN |
| 46146 | FCGKLTHVG |
| 46147 | FDWRCGCWS |
| 46148 | FEQPPMHHQ |
| 46149 | FEVTMTVPE |
| 46150 | FFQRFLSAW |
| 46151 | FGAMTSDTI |
| 46152 | FGAYYNDRG |
| 46153 | FGETYNHSH |
| 46154 | FGEWITFYF |
| 46155 | FGHKIEAPH |
| 46156 | FGQHVWQGF |
| 46157 | FGRYFQFDL |
| 46158 | FGWWYKTFT |
| 46159 | FHAPTECMA |
| 46160 | FHFQFTMDK |
| 46161 | FHHLFDCNL |
| 46162 | FHLACIHAQ |
| 46163 | FHMTRYKMT |
| 46164 | FHRPSEGQE |
| 46165 | FIRLFMKLN |
| 46166 | FKECTNGMH |
| 46167 | FKMATAECP |
| 46168 | FKPCKDDDV |
| 46169 | FKVTEYELP |
| 46170 | FMDEIAVTM |
| 46171 | FMGFMGVMG |
| 46172 | FMQIWNKYS |
| 46173 | FMRMEMMGQ |
| 46174 | FMRPFLEPD |
| 46175 | FNFCFNHQF |
| 46176 | FNGIDQMRY |
| 46177 | FNMLLQVNR |
| 46178 | FNTTCQMSI |
| 46179 | FPICNQERE |
| 46180 | FPQRPCTYA |
| 46181 | FPTNQNDPH |
| 46182 | FPTQMHYNA |
| 46183 | FQAKMHTLA |
| 46184 | FQDWPVTWC |
| 46185 | FQQQTGTRC |
| 46186 | FRFSTQHEA |
| 46187 | FRLNLLKTN |
| 46188 | FSEVTLQES |
| 46189 | FSKTGHCKF |
| 46190 | FSQCPETCC |
| 46191 | FSQGPGMHF |
| 46192 | FSQHQEHMR |
| 46193 | FSQRVEKTW |
| 46194 | FSSEAADYD |
| 46195 | FSTFTKPSP |
| 46196 | FSVPLGATT |
| 46197 | FSVSAQHSC |
| 46198 | FTFRVGEVN |
| 46199 | FTHGSVLHD |
| 46200 | FTMLGMEAI |
| 46201 | FTNPHAFYP |
| 46202 | FTQHIVGET |
| 46203 | FYIKYVYFD |
| 46204 | FVDHYYGHQ |
| 46205 | FVNHTRCNP |
| 46206 | FVRHDVIGQ |
| 46207 | FVTHWEYYP |
| 46208 | FVTMMQIAF |
| 46209 | FVTMRYEGH |
| 46210 | FWTSYTTNP |
| 46211 | FYGQNYWWY |
| 46212 | FYPRSWPQA |
| 46213 | GAARYGYNI |
| 46214 | GADSSGGWN |
| 46215 | GAFIRDFDI |
| 46216 | GAGSVQEIH |
| 46217 | GAGTTMRPD |
| 46218 | GAHWWGGCV |
| 46219 | GAIPLLNWL |
| 46220 | GAKMQIAFW |
| 46221 | GAKQHMPCY |
| 46222 | GAVNSEVCE |
| 46223 | GCCWSYYCG |
| 46224 | GCDTTKFDA |
| 46225 | GCFIYWKDS |
| 46226 | GCVKDRCWM |
| 46227 | GCWNERCQN |
| 46228 | GCYWACWLT |
| 46229 | GDNYTAWVG |
| 46230 | GEFMMFDRG |
| 46231 | GEGWNDDLG |
| 46232 | GEREYWNWE |
| 46233 | GFACLDHFD |
| 46234 | GFDIVLKDF |
| 46235 | GFELNMRIS |
| 46236 | GFGNTFCIT |
| 46237 | GFGTVSMER |
| 46238 | GFGYMWCKG |
| 46239 | GFLLTYGED |
| 46240 | GFMIGNQYL |
| 46241 | GFRVIISNW |
| 46242 | GFSCLICFD |
| 46243 | GFTQTCMTN |
| 46244 | GGLLYIECY |
| 46245 | GGTIDGHVG |
| 46246 | GGVKFNNWW |
| 46247 | GHMFVNIDQ |
| 46248 | GHMMMMECW |
| 46249 | GHSLTMRAH |
| 46250 | GHTARDIHA |
| 46251 | GHTHSQPAA |
| 46252 | GHTPGGSFY |
| 46253 | GIANTSDSY |
| 46254 | GICCILWDR |
| 46255 | GIDSMVIQR |
| 46256 | GIHEIMVQR |
| 46257 | GIHMVTAMS |
| 46258 | GIKFTQQDL |
| 46259 | GILRQIEKP |
| 46260 | GISICGQNW |
| 46261 | GKDTPNSFP |
| 46262 | GKGEVLAVA |
| 46263 | GKGTMEFGN |
| 46264 | GKGYGQHDG |
| 46265 | GKILWMSAR |
| 46266 | GKMQVLHSA |
| 46267 | GKNMLIDGG |
| 46268 | GKPYTQIIR |
| 46269 | GKSTCKRDV |
| 46270 | GLEMRNQAM |
| 46271 | GLFQQAMQG |
| 46272 | GLGCLMQGN |
| 46273 | GLSVGQRIE |
| 46274 | GLYERLACC |
| 46275 | GMHYSQCQH |
| 46276 | GMKAVFIGD |
| 46277 | GMWVNHGAK |
| 46278 | GNEHCVKYA |
| 46279 | GNEKIERYD |
| 46280 | GNEMPNYGG |
| 46281 | GNHVNYNMH |
| 46282 | GPEKLTWGP |
| 46283 | GPPHYRNPE |
| 46284 | GQFIFDEFV |
| 46285 | GQGFMLWNG |
| 46286 | GQGKNWVSW |
| 46287 | GQGMCDRKT |
| 46288 | GQLNCMKGS |
| 46289 | GQQENPVFT |
| 46290 | GQTSPLMYP |
| 46291 | GRAPMCAAA |
| 46292 | GRLVVHQFK |
| 45293 | GRNMFLWWW |
| 46294 | GRSLSQSEW |
| 46295 | GRYQSSQFC |
| 46296 | GSASHNVWY |
| 46297 | GSDYWLCDK |
| 46298 | GSFYAQYEE |
| 46299 | GSFYCQWNN |
| 46300 | GSGKMWQED |
| 46301 | GSLLFNPEE |
| 46302 | GSMKEMMMR |
| 46303 | GSMVASSWC |
| 46304 | GSNQRDCSR |
| 46305 | GSRPTPADW |
| 46306 | GSSHYMEFY |
| 46307 | GSYTKPTNV |
| 46308 | GTAHNVFMG |
| 46309 | GTCLDQTGC |
| 46310 | GTETHCDFE |
| 46311 | GTGAFTQVP |
| 46312 | GTIAFSDNN |
| 46313 | GTIPMNCFW |
| 46314 | GTKMFQESI |
| 46315 | GTMFWGWTG |
| 46316 | GTNNIINVR |
| 46317 | GTQHFWMDH |
| 46318 | GTRWIHDMA |
| 46319 | GTSQEKRGQ |
| 46320 | GVAAVGLYK |
| 46321 | GVIVPISRS |
| 46322 | GVLKQANQQ |
| 46323 | GVQNTALPR |
| 46324 | GVTSPVGTC |
| 46325 | GVVDNQQCL |
| 46326 | GVWPHYENK |
| 46327 | GWCITKARN |
| 46328 | GWDHFMQNT |
| 46329 | GWMDYIAAH |
| 46330 | GWYNWMIQY |
| 46331 | GYESKNTWY |
| 46332 | GYEWVQEIE |
| 46333 | GYFPNHWCK |
| 46334 | GYHCTGAHS |
| 46335 | GYICEGTCH |
| 46336 | GYNERFEHK |
| 46337 | GYNPMMSAA |
| 46338 | GYSQKPRTP |
| 46339 | GYTYNQQVC |
| 46340 | HADAENQVM |
| 46341 | HAIPHTMWH |
| 46342 | HAIQEGTVP |
| 46343 | HAIYWIPQV |
| 46344 | HAMATECGP |
| 46345 | HAMLSHGCC |
| 46346 | HANESISMT |
| 46347 | HASYQSSFG |
| 46348 | HATSQELCQ |
| 46349 | HATTFEWDS |
| 46350 | HAYALAVEH |
| 46351 | HCCSANNSP |
| 46352 | HCELISRIA |
| 46353 | HCELLPVNE |
| 46354 | HCFMAHCSY |
| 46355 | HCMNWMING |
| 46356 | HCQILPHWA |
| 46357 | HCVNEHAWE |
| 46358 | HDGFPWADE |
| 46359 | HERNWPFAC |
| 46360 | HESCLKLAG |
| 46361 | HEWAGELQT |
| 46362 | HEYGFGEAR |
| 46363 | HFANICVRG |
| 46364 | HFEHLWCQS |
| 46365 | HFGHYLGMF |
| 46366 | HFISHDYHN |
| 46367 | HFMPNNFLA |
| 46368 | HFVNSYCWW |
| 46369 | HGAQFARCS |
| 46370 | HGNEVDHSM |
| 46371 | HHAVMNKMD |
| 46372 | HHEVTTKFQ |
| 46373 | HHFHSGCCW |
| 46374 | HHPPELDRM |
| 46375 | HHTDRNGGD |
| 46376 | HHVLKGDMA |
| 46377 | HIDGATVSG |
| 46378 | HIKWDCWCP |
| 46379 | HINAFDNIR |
| 46380 | HISWWPACG |
| 46381 | HITTLYMEA |
| 46382 | HKLVAHERH |
| 46383 | HKPMCDRVF |
| 46384 | HLMGLCAMS |
| 46385 | HLQSISHCH |
| 46386 | HLVGMSLTQ |
| 46387 | HMEMPYKLG |
| 46388 | HMKCDVWQP |
| 46389 | HMLKKEDMN |
| 46390 | HMTTVNLQY |
| 46391 | HNGKSVLEW |
| 46392 | HNKMTYNYE |
| 46393 | HNNMFFWDR |
| 46394 | HNRAHENDK |
| 46395 | HNSVVNDHE |
| 46396 | HNTQNGFAD |
| 46397 | HNWYKRIVQ |
| 46398 | HPGIDLVCG |
| 46399 | HQCFWIYGS |
| 46400 | HQFQFYQWM |
| 46401 | HQPPIMNQG |
| 46402 | HRCTMQPDI |
| 46403 | HRCTPYNRD |
| 46404 | HRDHDITDF |
| 46405 | HRFSPPMET |
| 46406 | HRHFEMSVI |
| 46407 | HRMVIRKSQ |
| 46408 | HRVQCDEAP |
| 46409 | HSCTSGNPG |
| 46410 | HSESIDVWS |
| 46411 | HSETQRHQM |
| 46412 | HSGPWSNCE |
| 46413 | HSMQTKEDW |
| 46414 | HSSALFDME |
| 46415 | HSTQAGGMY |
| 46416 | HSTTACVHN |
| 46417 | HSVMWGKEN |
| 46418 | HTDKWWRDI |
| 46419 | HTEKGGEQA |
| 46420 | HTIHGAGLI |
| 46421 | HTIPVPMAA |
| 46422 | HTNTCLFEE |
| 46423 | HTQIIGGSD |
| 46424 | HTQWFNMGE |
| 46425 | HVDQYYRSA |
| 46426 | HVDTEKGRE |
| 46427 | HVELSQLHS |
| 46428 | HVEWVNAEK |
| 46429 | HVLPVCYRM |
| 46430 | HVMFPWGMW |
| 46431 | HVMYQHWMM |
| 46432 | HVNIEHQGT |
| 46433 | HVSDCCKSQ |
| 46434 | HVVKYPLSG |
| 46435 | HVYRGNGME |
| 46436 | HWDECNYVG |
| 46437 | HWDQFNGQF |

### Example 46

### Treatment of Spinal Muscular Atrophy (SMA) with an AAV5-Derived Virion Encapsidating a Therapeutic Payload

[1010] This example describes treatment of spinal muscular atrophy (SMA) with a variant AAV5-derived virion having any one of the engineered CNS tropic variant AAV5 VP capsid polypeptides disclosed herein, wherein the variant AAV5 virion encapsidates a therapeutic payload. Polynucleotide sequence encoding for AAV Rep, an AAV5-derived variant Cap and helper proteins and a therapeutic payload are transfected in cells to produce variant AAV5 virions, where the polynucleotide sequence encoding for the variant AAV5 Cap comprises at least one mutation in a region from a position corresponding to 581 to a position corresponding to 589 in the VP1 capsid polypeptide and where the polynucleotide sequence encoding for the variant AAV5 Cap encodes for an amino acid sequence of any one of SEQ ID NO: 34991-SEQ ID NO: 37437. The therapeutic payload is a guide RNA targeting an mRNA encoded for by a gene implicated in SMA or a transgene. The mRNA targeted by the guide RNA is an mRNA encoded for by a gene encoding for survival motor neuron (SMN) protein. The transgene is SMN. The variant AAV5 virion encapsidating the payload is administered to a subject. The subject is a human or non-human animal. The route of administration is a systemic route of administration. The systemic route of administration is intravenous administration. Upon administration to the subject, the variant AAV5 virions encapsidating the therapeutic payload exhibit enhanced spinal cord tropism as compared to wildtype AAV5 virions encapsidating the therapeutic payload. Upon administration to the subject, a lower dose of the variant AAV5 virions encapsidating the therapeutic payload is administered as compared to wildtype AAV5 virions encapsidating the therapeutic payload. Upon administration to the subject, at least one symptom of SMA is alleviated or the subject is cured.

### 2. Certain Sequences

>AAV5
VP1, from Chiorini et al., J. Virol. 73(2): 1309-1319 (1999)
[SEQ ID NO: 1]
MSFVDHPPDWLEEVGEGLREFLGLEAGPPKPKPNQQHQDQARGLVLPGYN
YLGPGNGLDRGEPVNRADEVAREHDISYNEQLEAGDNPYLKYNHADAEFQ
EKLADDTSFGGNLGKAVFQAKKRVLEPFGLVEEGAKTAPTGKRIDDHFPK
RKKLRTEEDSKPSTSSDAEAGPSGSQQLQIPAQPASSLGADTMSAGGGGP
LGDNNQGADGVGNASGDWHCDSTWMGDRVVTKSTRTWVLPSYNNHQYREI
KSGSVDGSNANAYFGYSTPWGYFDFNREHSHWSPRDWQRLINNYWGFRPR
SLRVKIFNIQVFEVTVQDSTTTIANNLTSTVQVFTDDDYQLPYVVGNGTE
GCLPAFPPQVFTLPQYGYATLNRDNTENPTERSSFFCLEYFPSKMLRTGN
NFEFTYNFEEVPFHSSFAPSQNLFKLANPLVDQYLYRFVSTNNTGGVQFN
KNLAGRYANTYKNWFPGPMGRTQGWNLGSGVNRASVSAFATTNRMELEGA
SYQVPPQPNGMTNNLQGSNTYALENTMIFNSQPANPGTTATYLEGNMLIT
SESETQPVNRVAYNVGGQMATNNQSSTTAPATGTYNLQEIVPGSVWMERD
VYLQGPIWAKLPETGAEFHPSPAMGGEGLKHPPPMMLIKNIPVPGNITSF
SDVPVSSFITQYSTGQVTVEMEWELKKENSKRWNPEIQYTNNYNDPQFVD
FAPDSTGEYRTTRPIGTRYLTRPL
>AAV5 Library scaffold
[SEQ ID NO: 2]
MSFVDHPPDWLEEVGEGLREFLGLEAGPPKPKPNQQHQDQARGLVLPGYN
YLGPGNGLDRGEPVNRADEVAREHDISYNEQLEAGDNPYLKYNHADAEFQ
EKLADDTSFGGNLGKAVFQAKKRVLEPFGLVEEGAKTAPTGKRIDDHFPK
RKKARTEEDSKPSTSSDAEAGPSGSQQLQIPAQPASSLGADTMSAGGGGP
LGDNNQGADGVGNASGDWHCDSTWMGDRVVTKSTRTWVLPSYNNHQYREI
KSGSVDGSNANAYEGYSTPWGYFDFNRFHSHWSPRDWQRLINNYWGFRPR
SLRVKIFNIQVKEVTVQDSTTTIANNLTSTVQVFTDDDYQLPYVVGNGTE
GCLPAFPPQVFTLPQYGYATLNRDNTENPTERSSFFCLEYFPSKMLRTGN
NFEFTYNFEEVPFHSSFAPSQNLFKLANPLVDQYLYRFVSTNNTGGVQFN
KNLAGRYANTYKNWFPGPMGRTQGWNLGSGVNRASVSAFATTNRMELEGA
SYQVPPQPNGMTNNLQGSNTYALENTMIFNSQPANPGTTATYLEGNMLIT
SESETQPVNRVAYNVGGQMATNNQSSTTAP
Xaa1, Xaa2, Xaa3, Xaa4, Xaa5, Xaa6, Xaa7, Xaa8, Xaa9
IVPGSVWMERDVYLQGPIWAKIPETGAHFHPSPAMGGFGLKEPPPMMLIK
NTPVPGNITSFSDVPVSSFITQYSTGQVTVEMEWELKKENSKRWNPEIQY
TNNYNDPQFVDFAPDSTGEYRTTRPIGTRYLTRPL
Xaa1, Xaa2, Xaa3, Xaa4, Xaa5, Xaa6, Xaa7, Xaa8, and Xaa9 are
each independently selected from A, R, N, D, C, E, Q, G, H, I,
L, K, M, F, P, S, T, W, Y, and V
SEQ ID NO: 3
MSFVDHPPDWLEEVGEGLREFLGLEAGPPKPKPNQQHQDQARGLVLPGYN
YLGPGNGLDRGEPVNPADEVAREHDISYNEQLEAGDNPYLKYNHADAEFQ
EKLADDTSFGGNLGKAVFQAKKRVLEPFGLVEEGAKTAPTGKRIDDHFPK
RKKLRTEEDSKPSTSSDAEAGPSGSQQLQIPAQPASSLGADTMSAGGGGP
LGDNNQGADGVGNASGDWHCDSTWMGDRVVTKSTRTWVLPSYNNHQYREI
KSGSVDGSNANAYFGYSTPWGYFDFNRFHSHWSPRDWQRLINNYWGFRPR
SLRVKIFNIQVKEVTVQDSTTTIANNLTSTVQVFTDDDYQLPYVVGNGTE
GCLPAFPPQVFTTYQYGYATLNRDNTENPTERSSFFCLEYFPSKMLRTGN
NFEFTYNFEEVPFHSSFAPSQNLFKLANPLVDQYLYRFVSTNNTGGVQFN
KNLAGRYANTYKNWFPGPMGRTQGWNLGSGVNRASVSAFATTNRMELEGA
SYQVPPQPNGMTNNLQGSNTYALENTMIFNSQPANPGTTATYLEGNMLIT
SESETQPVNRVAYNVGGQMATNNQSSTTAPATGT
Xaa5
NLQEIVPGSVWMERDVYLQGPIWAKIPETGAHFHPSPAMGGFGLKHPPPMM
LIKNTPVPGNITSFSDVPVSSFITQYSTGQVTVEMEWELKKENSKRWNPEI
QYTNNYNDPQFVDFAPDSTGEYRTTRPIGTRYLTRPL
Wherein Xaa5 is V (Y585V)
SEQ ID NO: 4
MSFVDHPPDWLEEVGEGLREFLGLEAGPPKPKPNQQHQDQARGLVLPGYN
YLGPGNGLDRGEPVNRADEVAREHDISYNEQLEAGDNPYLKYNHADAESQ
EKLADDTSFGGNLGKAVFQAKKRVLEPFGLVEEGAKTAPTGKRIDDHFPK
RKKARTEEDSKPSTSSDAEAGPSGSQQLQIPAQPASSLGADTMSAGGGGP
LGDNNQGADGVGNASGDWHCDSTWMGDRVVTKSTRTWVLPSYNNHQYREI
KSGSVDGSNANAYFGYSTPWGYFDFNRFHSHWSPRDWQRLINNYWGFRPR
SLRVKIFNIQVKEVTVQDSTTTIANNLTSTVQVFTDDDYQLPYVVGNGTE
GCLPAFPPQVFTLPQYGYATLNRDNTENPTERSSFFCLEYFPSKMLRTGN
NFEFTYNFEEVPFHSSFAPSQNLFKLANPLVDQYLYRFVSTNNTGGVQFN
KNLAGRYANTYKNWFPGPMGRTQGWNLGSGVNRASVSAFATTNRMELEGA
SYQVPPQPNGMTNNLQGSNTYALENTMIFNSQPANPGTTATYLEGNMLIT
SESETQPVNRVAYNVGGQMATNNQSSTTAPATGTYN
Xaa7
QEIVPGSVWMERDVYLQGPIWAKIPETGAHFHPSPAMGGFGLKHPPPMMLI
KNTPVPGNITSFSDVPVSSFITQYSTGQVTVEMEWELKKENSKRWNPEIQY
TNNYNDPQFVDFAPDSTGEYRTTRPIGTRYLTRPL
Wherein Xaa7 is T (L587T)
SEQ ID NO: 5
MSFVDHPPDWLEEVGEGLREFLGLEAGPPKPKPNQQHQDQARGLVLPGYN
YLGPGNGLDRGEPVNRADEVAREHDISYNEQLEAGDNPYLKYNHADAEFQ
EKLADDTSFGGNLGKAVFQAKKRVLEPFGLVEEGAKTAPTGKRIDDHFPK
RKKARTEEDSKPSTSSDAEAGPSGSQQLQIPAQPASSLGADTMSAGGGGP
LGDNNQGADGVGNASGDWHCDSTWMGDRVVTKSTRTWVLPSYNNHQYREI
KSGSVDGSNANAYFGYSTPWGYFDFNRFHSHWSPRDWQRLINNYWGFRPR
SLRVKIFNIQVKEVTVQDSTTTIANNLTSTVQVFTDDDYQLPYVVGNGTE
GCLPAFPPQVFTLPQYGYATLNRDNTENPTERSSFFCLEYFPSKMLRTGN
NFEFTYNFEEVPFHSSFAPSQNLFKLANPLVDQYLYRFVSTNNTGGVQFN
KNLAGRYANTYKNWFPGPMGRTQGWNLGSGVNRASVSAFATTNRMELEGA
SYQVPPQPNGMTNNLQGSNTYALENTMIFNSQPANPGTTATYLEGNMLIT
SESETQPVNRVAYNVGGQMATNNQSSTTAPXaa1TGT
YNLQEIVPGSVWMERDVYLQGPIWAKIPETGAHFHPSPAMGGFGLKHPPPMM
LIKNTPVPGNITSFSDVPVSSFITQYSTGQVTVEMEWELKKENSKRWNPEI
QYTNNYNDPQFVDFAPDSTGEYRTTRPIGTRYLTRPL
Wherein Xaa1 is T (A581T)
SEQ ID NO: 6
MSFVDHPPDWLEEVGEGLREFLGLEAGPPKPKPNQQHQDQARGLVLPGYN
YLGPGNGLDRGEPVNRADEVAREHDISYNEQLEAGDNPYLKYNHADAEFQ
EKLADDTSFGGNLGKAVFQAKKRVLEPFGLVEEGAKTAPTGKRIDDHFPK
RKKLRTEEDSKPSTSSDAEAGPSGSQQLQIPAQPASSLGADTMSAGGGGP
LGDNNQGADGVGNASGDWHCDSTWMGDRVVTKSTRTWVLPSYNNHQYREI
KSGSVDGSNANAYFGYSTPWGYFDFNRFHSHWSPRDWQRLINNYWGFRPR
SLRVKIFNIQVKEVTVQDSTTTIANNLTSTVQVFTDDDYQLPYVVGNGTE
GCLPAFPPQVFTLPQYGYATLNRDNTENPTERSSFFCLEYFPSKMLRTGN
NFEFTYNFEEVPFHSSFAPSQNLFKLANPLVDQYLYRFVSTNNTGGVQFN
KNLAGRYANTYKNWFPGPMGRTQGWNLGSGVNRASVSAFATTNRMELEGA
SYQVPPQPNGMTNNLQGSNTYALENTMIFNSQPANPGTTATYLEGNMLIT
SESETQPVNRVAYNVGGQMATNNQSSTTAPA
Xaa
GTYNLQEIVPGSVWMERDVYLQGPIWAKIPETGAHFHPSPAMGGFGLKHPP
PMMLIKNTPVPGNITSFSDVFVSSFITQYSTGQVTVEMEWELKKENSKRWN
PEIQYTNNYNDPQFVDFAPDSTGEYRTTRPIGTRYLTRPL
Wherein Xaa2 is A (T582A)
SEQ ID NO: 7
MSFVDHPPDWLEEVGEGLREFLGLEAGPPKPKPNQQHQDQARGLVLPGYN
YLGPGNGLDRGEPVNRADEVAREHDISYNEQLEAGDNPYLKYNHADAEFQ
EKLADDTSFGGNLGKAVFQAKKRVLEPFGLVEEGAKTAPTGKRIDDHFPK
RKKARTEEDSKPSTSSDAEAGPSGSQQLQIPAQPASSLGADTMSAGGGGP
LGDNNQGADGVGNASGDWHCDSTWMGDRVVTKSTRTWVIPSYNNHQYREI
KSGSVDGSNANAYFGYSTPWGYFDFNRFHSHWSPRDWQRLINNYWGFRPR
SLRVKIFNIQVKEVTVQDSTTTIANNLTSTVQVFTDDDYQLPYVVGNGTE
GCLPAFPPQVFTLPQYGYATLNRDNTENPTERSSFFCLEYFPSKMLRTGN
NFEFTYNFEEVPFHSSFAPSQNLFKLANPLVDQYLYRFVSTNNTGGVQFN
KNLAGRYANTYKNWFPGPMGRIQGWNLGSGVNHASVSAFATTNRMELEGA
SYQVPPQPNGMTNNLQGSNTYALENTMIFNSQPANPGTTATYLEGNMLIT
SESETQPVNRVAYNVGGQMATNNQSSTTAPATG
Xaa4
YNLQEIVPGSVWMERDVYLQGPIWAKIPETGAHFHPSPAMGGFGLKHPPP
MMLIKNTPVPGNITSFSDVPVSSFITQYSTGQVTVEMEWELKKENSKRWN
PEIQYTNNYNDPQFVDFAPDSTGEYRTTRPIGTRYLTRPL
Wherein Xaa4 is A (T584A)
SEQ ID NO: 8
MSFVDHPPDWLEEVGEGLREFLGLEAGPPKPKPNQQHQDQARGLVLPGYN
YLGPGNGLDRGEPVNRADEVAREHDISYNEQLEAGDNPYLKYNHADAEFQ
EKLADDTSFGGNLGKAVFQAKKRVLEPFGLVEEGAKTAPTGKRIDDHFPK
RKKARTEEDSKPSTSSDAEAGPSGSQQLQTPAQPASSLGADTMSAGGGGP
LGDNNQGADGVGNASGDWHCDSTWMGDRVVTKSTRTWVLPSYNNHQYREI
KSGSVDGSNANAYFGYSTPWGYFDFNRFHSHWSPRDWQRLINNYWGFRPR
SLRVKIFNIQVKEVTVQDSTTTIANNLTSTVQVFTDDDYQLPYVVGNGTE
GCLPAFPPQVFTLPQYGYATLNRDNTENPTERSSFFCLEYFPSKMLRTGN
NFEFTYNFEEVPFHSSFAPSQNLFKLANPLVDQYLYREVSINNTGGVQFN
HNLAGRYANTYKNWFPGPMGRTQGWNLGSGVNRASVSAFATTNRMELEGA
SYQVPPQPNGMTNNLQGSNTYALENTMIFNSQPANPGTTATYLEGNMLIT
SESETQPVNRVAYNVGGQMAINNQSSTAPATGT
Xaa5
NXaa7QEIVPGSVWMERDVYLQGPIWAKIPETGAHFHPSPAMGGFGLKHPPPMM
LIKNTPVPGNITSFSDVPVSSFITQYSTGQVTVEMEWELKKENSKRWNPEI
QYTNNYNDPQFVDFAPDSTGEYRTTRPIGTRYLTRPL
Wherein Xaa5 is V (Y585V) and Xaa7 is T (L587T)
(581-589 sialic acid binding region of AAV5 VP1 capsid and
reference for Xaa1-Xaa9)
SEQ ID NO: 9
ATGTYNLQE
(FIG. 10, Middle Variant DNA)
SEQ ID NO: 111
AATCCAGCTATGTTCAATTGCGATTAC
(FIG. 10, Middle Variant; amino acid)
SEQ ID NO: 112
NPAMFNCDY
(FIG. 10, Right Variant, DNA)
SEQ ID NO: 113
AAGTTGACCGCCCACATCTACGCCTTG
(FIG. 10, Right Variant; amino acid)
SEQ ID NO: 114
KLTAHIYAL
SEQ ID NO: 115-1114 (TABLE 8, wherein the listed AAs represent
Xaa1-Xaa9 of SEQ ID NO: 2)
AAV5 VP2 sequence
(SEQ ID NO: 1115)
TAPTGKRIDDHFTKRKKARTEEDSKPSTSSDAEAGPSGSQQLQIPAQPASSLGADTMSAGGG
GPLGDNNQGADGVGNASGDWHCDSTWMGDRVVTKSTRTWVLPSYNNHQYREIKSGSVDGSNA
NAYFGYSTPWGYFDFNRFHSHWSPRDWQRLINNYWGFRPRSLRVKIFNIQVKEVTVQDSTTT
IANNLTSTVQVFTDDDYQLPYVVGNGTEGCLPAFPPQVFTLPQYGYATLNRDNTENPTERSS
FFCLEYFPSKMLRTGNNFEFTYNFEEVPFHSSFAPSQNLFKLANPLVDQYLYRFVSTNNTGG
VQFNKNLAGRYANTYKNWFPGPMGRTQGWNLGSGVNRASVSAFATTNRMELEGASYQVPPQP
NGMTNNLQGSNTYALENTMIFNSQPANPGTTATYLEGNMLITSESETQPVNRVAYNVGGQMA
TNNQSSTTAPATGTYNLQEIVPGSVWMERDVYLQGPIWAKIPETGAHFHPSPAMGGFGLKHP
PPMMLIKNTPVPGNITSFSDVPVSSFITQYSTGQVTVEMEWELKKENSKRWNPEIQYTNNYN
DPQFVDFAPDSTGEYPTTRPIGTRYLTRPL
AAV5 VP3 sequence
(SEQ ID NO: 1116)
MSAGGGGPLGDNNQGADGVGNASGDWHCDSTWMGDRVVTKSTRTWVLPSYNNH
QYREIKSGSVDGSNANAYFGYSTPWGYFDFNRFHSHWSPRDWQRLINNYWGFRPRS
LRVKIFNIQVKEVTVQDSTTTIANNLTSTVQVFTDDDYQLPYVVGNGTEGCLPAFPPQ
VFTLPQYGYATLNRDNTENPTERSSFFCLEYFPSKMLRTGNNFEFTYNFEEVPFHSSF
APSQNLFKLANPLVDQYLYRFVSTNNTGGVQFNKNLAGRYANTYKNWFPGPMGRT
QGWNLGSGVNRASVSAFATTNRMELEGASYQVPPQPNGMTNNLQGSNTYALENTM
IFNSQPANPGTTATYLEGNMLITSESETQPVNRVAYNVGGQMATNNQSSTTAPATGT
YNILQEIVPGSVWMERDVYLQGPIWAKIPETGAHFHPSPAMGGFGLKHPPPMMLIKN
TPVPGNITSFSDVPVSSFITQYSTGQVTVEMEWELKKENSKRWNPEIQYTNNYNDPQF
VDFAPDSTGEYRTTRPIGTRYLTRPL

### 3. Equivalents and Incorporation by Reference

[1012] All references cited herein are incorporated by reference to the same extent as if each individual publication, database entry (e.g., Genbank sequences or GeneID entries), patent application, or patent, was specifically and individually indicated incorporated by reference in its entirety, for all purposes. This statement of incorporation by reference is intended by Applicants, pursuant to 37 C.F.R. § 1.57(b)(1), to relate to each and every individual publication, database entry (e.g., Genbank sequences or GeneID entries), patent application, or patent, each of which is clearly identified in compliance with 37 C.F.R. § 1.57(b)(2), even if such citation is not immediately adjacent to a dedicated statement of incorporation by reference. The inclusion of dedicated statements of incorporation by reference, if any, within the specification does not in any way weaken this general statement of incorporation by reference. Citation of the references herein is not intended as an admission that the reference is pertinent prior art, nor does it constitute any admission as to the contents or date of these publications or documents.

[1013] While the invention has been particularly shown and described with reference to a preferred embodiment and various alternate embodiments, it is understood by persons skilled in the relevant art that various changes in form and details can be made therein without departing from the spirit and scope of the invention.

1.-87. (canceled)

88. A method of screening for engineered tissue tropic recombinant AAV (rAAV) virions, the method comprising:
providing a library of rAAV virions, wherein the library encodes for at least 0.5×10⁹ unique AAV viral protein (VP) capsid polypeptides;
administering the library to a subject;
harvesting a tissue from the subject; and
sequencing the tissue to identify the engineered tissue tropic rAAV virions.

The application's sequence listing, which the Patent Office published only in electronic form, follows.

SEQUENCE LISTING (47439 sequences)

SEQ ID NO: 1 - protein, 724 aa, Adeno-associated virus - 5
MSFVDHPPDWLEEVGEGLREFLGLEAGPPKPKPNQQHQDQARGLVLPGYNYLGPGNGLDRGEPVNRADEVAREHDISYNEQLEAGDNPYLKYNHADAEFQEKLADDTSFGGNLGKAVFQAKKRVLEPFGLVEEGAKTAPTGKRIDDHFPKRKKARTEEDSKPSTSSDAEAGPSGSQQLQIPAQPASSLGADTMSAGGGGPLGDNNQGADGVGNASGDWHCDSTWMGDRVVTKSTRTWVLPSYNNHQYREIKSGSVDGSNANAYFGYSTPWGYFDFNRFHSHWSPRDWQRLINNYWGFRPRSLRVKIFNIQVKEVTVQDSTTTIANNLTSTVQVFTDDDYQLPYVVGNGTEGCLPAFPPQVFTLPQYGYATLNRDNTENPTERSSFFCLEYFPSKMLRTGNNFEFTYNFEEVPFHSSFAPSQNLFKLANPLVDQYLYRFVSTNNTGGVQFNKNLAGRYANTYKNWFPGPMGRTQGWNLGSGVNRASVSAFATTNRMELEGASYQVPPQPNGMTNNLQGSNTYALENTMIFNSQPANPGTTATYLEGNMLITSESETQPVNRVAYNVGGQMATNNQSSTTAPATGTYNLQEIVPGSVWMERDVYLQGPIWAKIPETGAHFHPSPAMGGFGLKHPPPMMLIKNTPVPGNITSFSDVPVSSFITQYSTGQVTVEMEWELKKENSKRWNPEIQYTNNYNDPQFVDFAPDSTGEYRTTRPIGTRYLTRPL

SEQ ID NO: 2 - protein, 724 aa, Artificial Sequence
  Description of Artificial Sequence: Synthetic polypeptide
  MOD_RES (581)..(589): A, R, N, D, C, E, Q, G, H, I, L, K, M, F, P, S, T, W, Y, or V
MSFVDHPPDWLEEVGEGLREFLGLEAGPPKPKPNQQHQDQARGLVLPGYNYLGPGNGLDRGEPVNRADEVAREHDISYNEQLEAGDNPYLKYNHADAEFQEKLADDTSFGGNLGKAVFQAKKRVLEPFGLVEEGAKTAPTGKRIDDHFPKRKKARTEEDSKPSTSSDAEAGPSGSQQLQIPAQPASSLGADTMSAGGGGPLGDNNQGADGVGNASGDWHCDSTWMGDRVVTKSTRTWVLPSYNNHQYREIKSGSVDGSNANAYFGYSTPWGYFDFNRFHSHWSPRDWQRLINNYWGFRPRSLRVKIFNIQVKEVTVQDSTTTIANNLTSTVQVFTDDDYQLPYVVGNGTEGCLPAFPPQVFTLPQYGYATLNRDNTENPTERSSFFCLEYFPSKMLRTGNNFEFTYNFEEVPFHSSFAPSQNLFKLANPLVDQYLYRFVSTNNTGGVQFNKNLAGRYANTYKNWFPGPMGRTQGWNLGSGVNRASVSAFATTNRMELEGASYQVPPQPNGMTNNLQGSNTYALENTMIFNSQPANPGTTATYLEGNMLITSESETQPVNRVAYNVGGQMATNNQSSTTAPXXXXXXXXXIVPGSVWMERDVYLQGPIWAKIPETGAHFHPSPAMGGFGLKHPPPMMLIKNTPVPGNITSFSDVPVSSFITQYSTGQVTVEMEWELKKENSKRWNPEIQYTNNYNDPQFVDFAPDSTGEYRTTRPIGTRYLTRPL

SEQ ID NO: 3 - protein, 724 aa, Artificial Sequence
  Description of Artificial Sequence: Synthetic polypeptide
MSFVDHPPDWLEEVGEGLREFLGLEAGPPKPKPNQQHQDQARGLVLPGYNYLGPGNGLDRGEPVNRADEVAREHDISYNEQLEAGDNPYLKYNHADAEFQEKLADDTSFGGNLGKAVFQAKKRVLEPFGLVEEGAKTAPTGKRIDDHFPKRKKARTEEDSKPSTSSDAEAGPSGSQQLQIPAQPASSLGADTMSAGGGGPLGDNNQGADGVGNASGDWHCDSTWMGDRVVTKSTRTWVLPSYNNHQYREIKSGSVDGSNANAYFGYSTPWGYFDFNRFHSHWSPRDWQRLINNYWGFRPRSLRVKIFNIQVKEVTVQDSTTTIANNLTSTVQVFTDDDYQLPYVVGNGTEGCLPAFPPQVFTLPQYGYATLNRDNTENPTERSSFFCLEYFPSKMLRTGNNFEFTYNFEEVPFHSSFAPSQNLFKLANPLVDQYLYRFVSTNNTGGVQFNKNLAGRYANTYKNWFPGPMGRTQGWNLGSGVNRASVSAFATTNRMELEGASYQVPPQPNGMTNNLQGSNTYALENTMIFNSQPANPGTTATYLEGNMLITSESETQPVNRVAYNVGGQMATNNQSSTTAPATGTVNLQEIVPGSVWMERDVYLQGPIWAKIPETGAHFHPSPAMGGFGLKHPPPMMLIKNTPVPGNITSFSDVPVSSFITQYSTGQVTVEMEWELKKENSKRWNPEIQYTNNYNDPQFVDFAPDSTGEYRTTRPIGTRYLTRPL

SEQ ID NO: 4 - protein, 724 aa, Artificial Sequence
  Description of Artificial Sequence: Synthetic polypeptide
MSFVDHPPDWLEEVGEGLREFLGLEAGPPKPKPNQQHQDQARGLVLPGYNYLGPGNGLDRGEPVNRADEVAREHDISYNEQLEAGDNPYLKYNHADAEFQEKLADDTSFGGNLGKAVFQAKKRVLEPFGLVEEGAKTAPTGKRIDDHFPKRKKARTEEDSKPSTSSDAEAGPSGSQQLQIPAQPASSLGADTMSAGGGGPLGDNNQGADGVGNASGDWHCDSTWMGDRVVTKSTRTWVLPSYNNHQYREIKSGSVDGSNANAYFGYSTPWGYFDFNRFHSHWSPRDWQRLINNYWGFRPRSLRVKIFNIQVKEVTVQDSTTTIANNLTSTVQVFTDDDYQLPYVVGNGTEGCLPAFPPQVFTLPQYGYATLNRDNTENPTERSSFFCLEYFPSKMLRTGNNFEFTYNFEEVPFHSSFAPSQNLFKLANPLVDQYLYRFVSTNNTGGVQFNKNLAGRYANTYKNWFPGPMGRTQGWNLGSGVNRASVSAFATTNRMELEGASYQVPPQPNGMTNNLQGSNTYALENTMIFNSQPANPGTTATYLEGNMLITSESETQPVNRVAYNVGGQMATNNQSSTTAPATGTYNTQEIVPGSVWMERDVYLQGPIWAKIPETGAHFHPSPAMGGFGLKHPPPMMLIKNTPVPGNITSFSDVPVSSFITQYSTGQVTVEMEWELKKENSKRWNPEIQYTNNYNDPQFVDFAPDSTGEYRTTRPIGTRYLTRPL

SEQ ID NO: 5 - protein, 724 aa, Artificial Sequence
  Description of Artificial Sequence: Synthetic polypeptide
MSFVDHPPDWLEEVGEGLREFLGLEAGPPKPKPNQQHQDQARGLVLPGYNYLGPGNGLDRGEPVNRADEVAREHDISYNEQLEAGDNPYLKYNHADAEFQEKLADDTSFGGNLGKAVFQAKKRVLEPFGLVEEGAKTAPTGKRIDDHFPKRKKARTEEDSKPSTSSDAEAGPSGSQQLQIPAQPASSLGADTMSAGGGGPLGDNNQGADGVGNASGDWHCDSTWMGDRVVTKSTRTWVLPSYNNHQYREIKSGSVDGSNANAYFGYSTPWGYFDFNRFHSHWSPRDWQRLINNYWGFRPRSLRVKIFNIQVKEVTVQDSTTTIANNLTSTVQVFTDDDYQLPYVVGNGTEGCLPAFPPQVFTLPQYGYATLNRDNTENPTERSSFFCLEYFPSKMLRTGNNFEFTYNFEEVPFHSSFAPSQNLFKLANPLVDQYLYRFVSTNNTGGVQFNKNLAGRYANTYKNWFPGPMGRTQGWNLGSGVNRASVSAFATTNRMELEGASYQVPPQPNGMTNNLQGSNTYALENTMIFNSQPANPGTTATYLEGNMLITSESETQPVNRVAYNVGGQMATNNQSSTTAPTTGTYNLQEIVPGSVWMERDVYLQGPIWAKIPETGAHFHPSPAMGGFGLKHPPPMMLIKNTPVPGNITSFSDVPVSSFITQYSTGQVTVEMEWELKKENSKRWNPEIQYTNNYNDPQFVDFAPDSTGEYRTTRPIGTRYLTRPL

SEQ ID NO: 6 - protein, 724 aa, Artificial Sequence
  Description of Artificial Sequence: Synthetic polypeptide
MSFVDHPPDWLEEVGEGLREFLGLEAGPPKPKPNQQHQDQARGLVLPGYNYLGPGNGLDRGEPVNRADEVAREHDISYNEQLEAGDNPYLKYNHADAEFQEKLADDTSFGGNLGKAVFQAKKRVLEPFGLVEEGAKTAPTGKRIDDHFPKRKKARTEEDSKPSTSSDAEAGPSGSQQLQIPAQPASSLGADTMSAGGGGPLGDNNQGADGVGNASGDWHCDSTWMGDRVVTKSTRTWVLPSYNNHQYREIKSGSVDGSNANAYFGYSTPWGYFDFNRFHSHWSPRDWQRLINNYWGFRPRSLRVKIFNIQVKEVTVQDSTTTIANNLTSTVQVFTDDDYQLPYVVGNGTEGCLPAFPPQVFTLPQYGYATLNRDNTENPTERSSFFCLEYFPSKMLRTGNNFEFTYNFEEVPFHSSFAPSQNLFKLANPLVDQYLYRFVSTNNTGGVQFNKNLAGRYANTYKNWFPGPMGRTQGWNLGSGVNRASVSAFATTNRMELEGASYQVPPQPNGMTNNLQGSNTYALENTMIFNSQPANPGTTATYLEGNMLITSESETQPVNRVAYNVGGQMATNNQSSTTAPAAGTYNLQEIVPGSVWMERDVYLQGPIWAKIPETGAHFHPSPAMGGFGLKHPPPMMLIKNTPVPGNITSFSDVPVSSFITQYSTGQVTVEMEWELKKENSKRWNPEIQYTNNYNDPQFVDFAPDSTGEYRTTRPIGTRYLTRPL

SEQ ID NO: 7 - protein, 724 aa, Artificial Sequence
  Description of Artificial Sequence: Synthetic polypeptide
MSFVDHPPDWLEEVGEGLREFLGLEAGPPKPKPNQQHQDQARGLVLPGYNYLGPGNGLDRGEPVNRADEVAREHDISYNEQLEAGDNPYLKYNHADAEFQEKLADDTSFGGNLGKAVFQAKKRVLEPFGLVEEGAKTAPTGKRIDDHFPKRKKARTEEDSKPSTSSDAEAGPSGSQQLQIPAQPASSLGADTMSAGGGGPLGDNNQGADGVGNASGDWHCDSTWMGDRVVTKSTRTWVLPSYNNHQYREIKSGSVDGSNANAYFGYSTPWGYFDFNRFHSHWSPRDWQRLINNYWGFRPRSLRVKIFNIQVKEVTVQDSTTTIANNLTSTVQVFTDDDYQLPYVVGNGTEGCLPAFPPQVFTLPQYGYATLNRDNTENPTERSSFFCLEYFPSKMLRTGNNFEFTYNFEEVPFHSSFAPSQNLFKLANPLVDQYLYRFVSTNNTGGVQFNKNLAGRYANTYKNWFPGPMGRTQGWNLGSGVNRASVSAFATTNRMELEGASYQVPPQPNGMTNNLQGSNTYALENTMIFNSQPANPGTTATYLEGNMLITSESETQPVNRVAYNVGGQMATNNQSSTTAPATGAYNLQEIVPGSVWMERDVYLQGPIWAKIPETGAHFHPSPAMGGFGLKHPPPMMLIKNTPVPGNITSFSDVPVSSFITQYSTGQVTVEMEWELKKENSKRWNPEIQYTNNYNDPQFVDFAPDSTGEYRTTRPIGTRYLTRPL

SEQ ID NO: 8 - protein, 724 aa, Artificial Sequence
  Description of Artificial Sequence: Synthetic polypeptide
MSFVDHPPDWLEEVGEGLREFLGLEAGPPKPKPNQQHQDQARGLVLPGYNYLGPGNGLDRGEPVNRADEVAREHDISYNEQLEAGDNPYLKYNHADAEFQEKLADDTSFGGNLGKAVFQAKKRVLEPFGLVEEGAKTAPTGKRIDDHFPKRKKARTEEDSKPSTSSDAEAGPSGSQQLQIPAQPASSLGADTMSAGGGGPLGDNNQGADGVGNASGDWHCDSTWMGDRVVTKSTRTWVLPSYNNHQYREIKSGSVDGSNANAYFGYSTPWGYFDFNRFHSHWSPRDWQRLINNYWGFRPRSLRVKIFNIQVKEVTVQDSTTTIANNLTSTVQVFTDDDYQLPYVVGNGTEGCLPAFPPQVFTLPQYGYATLNRDNTENPTERSSFFCLEYFPSKMLRTGNNFEFTYNFEEVPFHSSFAPSQNLFKLANPLVDQYLYRFVSTNNTGGVQFNKNLAGRYANTYKNWFPGPMGRTQGWNLGSGVNRASVSAFATTNRMELEGASYQVPPQPNGMTNNLQGSNTYALENTMIFNSQPANPGTTATYLEGNMLITSESETQPVNRVAYNVGGQMATNNQSSTTAPATGTVNTQEIVPGSVWMERDVYLQGPIWAKIPETGAHFHPSPAMGGFGLKHPPPMMLIKNTPVPGNITSFSDVPVSSFITQYSTGQVTVEMEWELKKENSKRWNPEIQYTNNYNDPQFVDFAPDSTGEYRTTRPIGTRYLTRPL

SEQ ID NO: 9 - protein, 9 aa, Adeno-associated virus - 5
ATGTYNLQE

SEQ ID NO: 10 - protein, 9 aa, Artificial Sequence
  Description of Artificial Sequence: Synthetic peptide
IAVASHAHG

SEQ ID NO: 11 - protein, 9 aa, Artificial Sequence
  Description of Artificial Sequence: Synthetic peptide
SAYPKSEDV

SEQ ID NO: 12 - protein, 9 aa, Artificial Sequence
  Description of Artificial Sequence: Synthetic peptide
SSMQCAMRP

SEQ ID NO: 13 - protein, 9 aa, Artificial Sequence
  Description of Artificial Sequence: Synthetic peptide
ITVVVGEVN

SEQ ID NO: 14 - protein, 9 aa, Artificial Sequence
  Description of Artificial Sequence: Synthetic peptide
SEAGDRCSD

SEQ ID NO: 15 - protein, 9 aa, Artificial Sequence
  Description of Artificial Sequence: Synthetic peptide
ECACGHVHL

SEQ ID NO: 16 - protein, 9 aa, Artificial Sequence
  Description of Artificial Sequence: Synthetic peptide
TFTNAGKMC

SEQ ID NO: 17 - protein, 9 aa, Artificial Sequence
  Description of Artificial Sequence: Synthetic peptide
LASPYLIDA

SEQ ID NO: 18 - protein, 9 aa, Artificial Sequence
  Description of Artificial Sequence: Synthetic peptide
TTQLYEVGS

SEQ ID NO: 19 - protein, 9 aa, Artificial Sequence
  Description of Artificial Sequence: Synthetic peptide
TVHPIDHAT

SEQ ID NO: 20 - protein, 9 aa, Artificial Sequence
  Description of Artificial Sequence: Synthetic peptide
TWMMVHRYV

SEQ ID NO: 21 - protein, 9 aa, Artificial Sequence
  Description of Artificial Sequence: Synthetic peptide
VWYRCDVRH

SEQ ID NO: 22 - protein, 9 aa, Artificial Sequence
  Description of Artificial Sequence: Synthetic peptide
HWADKALDW

SEQ ID NO: 23 - protein, 9 aa, Artificial Sequence
  Description of Artificial Sequence: Synthetic peptide
MHTMKNCGW

SEQ ID NO: 24 - protein, 9 aa, Artificial Sequence
  Description of Artificial Sequence: Synthetic peptide
LCNRMQADQ

SEQ ID NO: 25 - protein, 9 aa, Artificial Sequence
  Description of Artificial Sequence: Synthetic peptide
WKATPGGQC

SEQ ID NO: 26 - protein, 9 aa, Artificial Sequence
  Description of Artificial Sequence: Synthetic peptide
ARHTFPYQT

SEQ ID NO: 27 - protein, 9 aa, Artificial Sequence
  Description of Artificial Sequence: Synthetic peptide
MHMSYHWRE

SEQ ID NO: 28 - protein, 9 aa, Artificial Sequence
  Description of Artificial Sequence: Synthetic peptide
MPKAEIFVP

SEQ ID NO: 29 - protein, 9 aa, Artificial Sequence
  Description of Artificial Sequence: Synthetic peptide
DKTICQHQL

SEQ ID NO: 30 - protein, 9 aa, Artificial Sequence
  Description of Artificial Sequence: Synthetic peptide
TTRGSERCS

SEQ ID NO: 31 - protein, 9 aa, Artificial Sequence
  Description of Artificial Sequence: Synthetic peptide
HTPLAWHGD

SEQ ID NO: 32 - protein, 9 aa, Artificial Sequence
  Description of Artificial Sequence: Synthetic peptide
SCTPFQQHG

SEQ ID NO: 33 - protein, 9 aa, Artificial Sequence
  Description of Artificial Sequence: Synthetic peptide
AHQLAMVMN

SEQ ID NO: 34 - protein, 9 aa, Artificial Sequence
  Description of Artificial Sequence: Synthetic peptide
AAAQRSRYV

SEQ ID NO: 35 - protein, 9 aa, Artificial Sequence
  Description of Artificial Sequence: Synthetic peptide
DCMTSMLGP

SEQ ID NO: 36 - protein, 9 aa, Artificial Sequence
  Description of Artificial Sequence: Synthetic peptide
RYLFAVWRY

SEQ ID NO: 37 - protein, 9 aa, Artificial Sequence
  Description of Artificial Sequence: Synthetic peptide
MMNMQMDRM

SEQ ID NO: 38 - protein, 9 aa, Artificial Sequence
  Description of Artificial Sequence: Synthetic peptide
AVQWIQWVG

SEQ ID NO: 39 - protein, 9 aa, Artificial Sequence
  Description of Artificial Sequence: Synthetic peptide
QSQPHVQYN

SEQ ID NO: 40 - protein, 9 aa, Artificial Sequence
  Description of Artificial Sequence: Synthetic peptide
THTFAYHNN

SEQ ID NO: 41 - protein, 9 aa, Artificial Sequence
  Description of Artificial Sequence: Synthetic peptide
GWQDEQMHL

SEQ ID NO: 42 - protein, 9 aa, Artificial Sequence
  Description of Artificial Sequence: Synthetic peptide
TSKQETPQQ

SEQ ID NO: 43 - protein, 9 aa, Artificial Sequence
  Description of Artificial Sequence: Synthetic peptide
CSNSPACLC

SEQ ID NO: 44 - protein, 9 aa, Artificial Sequence
  Description of Artificial Sequence: Synthetic peptide
VDAHTETNG

SEQ ID NO: 45 - protein, 9 aa, Artificial Sequence
  Description of Artificial Sequence: Synthetic peptide
CNEKGYHWH

SEQ ID NO: 46 - protein, 9 aa, Artificial Sequence
  Description of Artificial Sequence: Synthetic peptide
IADIGRMQW

SEQ ID NO: 47 - protein, 9 aa, Artificial Sequence
  Description of Artificial Sequence: Synthetic peptide
TEWPYGVAF

SEQ ID NO: 48 - protein, 9 aa, Artificial Sequence
  Description of Artificial Sequence: Synthetic peptide
QCQYQTAWW

SEQ ID NO: 49 - protein, 9 aa, Artificial Sequence
  Description of Artificial Sequence: Synthetic peptide
GPSGIFHCG

SEQ ID NO: 50 - protein, 9 aa, Artificial Sequence
  Description of Artificial Sequence: Synthetic peptide
MAHAIDALQ

SEQ ID NO: 51 - protein, 9 aa, Artificial Sequence
  Description of Artificial Sequence: Synthetic peptide
MHHCYQTFA

SEQ ID NO: 52 - protein, 9 aa, Artificial Sequence
  Description of Artificial Sequence: Synthetic peptide
GQTVFHYDG

SEQ ID NO: 53 - protein, 9 aa, Artificial Sequence
  Description of Artificial Sequence: Synthetic peptide
CNAIIAMPC

SEQ ID NO: 54 - protein, 9 aa, Artificial Sequence
  Description of Artificial Sequence: Synthetic peptide
GTITLMPTQ

SEQ ID NO: 55 - protein, 9 aa, Artificial Sequence
  Description of Artificial Sequence: Synthetic peptide
TVQCEMDVC

SEQ ID NO: 56 - protein, 9 aa, Artificial Sequence
  Description of Artificial Sequence: Synthetic peptide
CQHNTPFVQ

SEQ ID NO: 57 - protein, 9 aa, Artificial Sequence
  Description of Artificial Sequence: Synthetic peptide
RWTDTNFRG

SEQ ID NO: 58 - protein, 9 aa, Artificial Sequence
  Description of Artificial Sequence: Synthetic peptide
KYEQKWMMD

SEQ ID NO: 59 - protein, 9 aa, Artificial Sequence
  Description of Artificial Sequence: Synthetic peptide
MLYSTTCWK

SEQ ID NO: 60 - protein, 9 aa, Artificial Sequence
  Description of Artificial Sequence: Synthetic peptide
ASWVGSFAQ

SEQ ID NO: 61 - protein, 9 aa, Artificial Sequence
  Description of Artificial Sequence: Synthetic peptide
TTKQYHTME

SEQ ID NO: 62 - protein, 9 aa, Artificial Sequence
  Description of Artificial Sequence: Synthetic peptide
PGGCYRMME

SEQ ID NO: 63 - protein, 9 aa, Artificial Sequence
  Description of Artificial Sequence: Synthetic peptide
RNAVCLYRH

SEQ ID NO: 64 - protein, 9 aa, Artificial Sequence
  Description of Artificial Sequence: Synthetic peptide
VIHEMLSAC

SEQ ID NO: 65 - protein, 9 aa, Artificial Sequence
  Description of Artificial Sequence: Synthetic peptide
YGEQKYNHS

SEQ ID NO: 66 - protein, 9 aa, Artificial Sequence
  Description of Artificial Sequence: Synthetic peptide
ANQWENAVK

SEQ ID NO: 67 - protein, 9 aa, Artificial Sequence
  Description of Artificial Sequence: Synthetic peptide
TSAWWWCSP

SEQ ID NO: 68 - protein, 9 aa, Artificial Sequence
  Description of Artificial Sequence: Synthetic peptide
EQTMMDLVY

SEQ ID NO: 69 - protein, 9 aa, Artificial Sequence
  Description of Artificial Sequence: Synthetic peptide
YAMPRNPNV

SEQ ID NO: 70 - protein, 9 aa, Artificial Sequence
  Description of Artificial Sequence: Synthetic peptide
MHKVWWMKN

SEQ ID NO: 71 - protein, 9 aa, Artificial Sequence
  Description of Artificial Sequence: Synthetic peptide
AILQMYTAQ

SEQ ID NO: 72 - protein, 9 aa, Artificial Sequence
  Description of Artificial Sequence: Synthetic peptide
CSTPANSCP

SEQ ID NO: 73 - protein, 9 aa, Artificial Sequence
  Description of Artificial Sequence: Synthetic peptide
KVVEAELWQ

SEQ ID NO: 74 - protein, 9 aa, Artificial Sequence
  Description of Artificial Sequence: Synthetic peptide
IANIDPSRV

SEQ ID NO: 75 - protein, 9 aa, Artificial Sequence
  Description of Artificial Sequence: Synthetic peptide
QLTTTKPLR

SEQ ID NO: 76 - protein, 9 aa, Artificial Sequence
  Description of Artificial Sequence: Synthetic peptide
ACWRFECDD

SEQ ID NO: 77 - protein, 9 aa, Artificial Sequence
  Description of Artificial Sequence: Synthetic peptide
QINPEHGGC

SEQ ID NO: 78 - protein, 9 aa, Artificial Sequence
  Description of Artificial Sequence: Synthetic peptide
MAPPFHVYE

SEQ ID NO: 79 - protein, 9 aa, Artificial Sequence
  Description of Artificial Sequence: Synthetic peptide
DNWGTWTWT

SEQ ID NO: 80 - protein, 9 aa, Artificial Sequence
  Description of Artificial Sequence: Synthetic peptide
DESSCVAHG

SEQ ID NO: 81 - protein, 9 aa, Artificial Sequence
  Description of Artificial Sequence: Synthetic peptide
VAATFNNKV

SEQ ID NO: 82 - protein, 9 aa, Artificial Sequence
  Description of Artificial Sequence: Synthetic peptide
HVVPEPWAF

SEQ ID NO: 83 - protein, 9 aa, Artificial Sequence
  Description of Artificial Sequence: Synthetic peptide
TQMPALAEW

SEQ ID NO: 84 - protein, 9 aa, Artificial Sequence
  Description of Artificial Sequence: Synthetic peptide
NVTNQQYDH

SEQ ID NO: 85 - protein, 9 aa, Artificial Sequence
  Description of Artificial Sequence: Synthetic peptide
NMTEYVAYR

SEQ ID NO: 86 - protein, 9 aa, Artificial Sequence
  Description of Artificial Sequence: Synthetic peptide
NVSTVHQPL

SEQ ID NO: 87 - protein, 9 aa, Artificial Sequence
  Description of Artificial Sequence: Synthetic peptide
QTGPMLHSW

SEQ ID NO: 88 - protein, 9 aa, Artificial Sequence
  Description of Artificial Sequence: Synthetic peptide
ECMHKHASY

SEQ ID NO: 89 - protein, 9 aa, Artificial Sequence
  Description of Artificial Sequence: Synthetic peptide
LQAHVVRCT

SEQ ID NO: 90 - protein, 9 aa, Artificial Sequence
  Description of Artificial Sequence: Synthetic peptide
VGDRYSSMG

SEQ ID NO: 91 - protein, 9 aa, Artificial Sequence
  Description of Artificial Sequence: Synthetic peptide
PQGLIPMWA

SEQ ID NO: 92 - protein, 9 aa, Artificial Sequence
  Description of Artificial Sequence: Synthetic peptide
MYVHKGYRS

SEQ ID NO: 93 - protein, 9 aa, Artificial Sequence
  Description of Artificial Sequence: Synthetic peptide
AVPQYQKAE

SEQ ID NO: 94 - protein, 9 aa, Artificial Sequence
  Description of Artificial Sequence: Synthetic peptide
ERMMILCSP

SEQ ID NO: 95 - protein, 9 aa, Artificial Sequence
  Description of Artificial Sequence: Synthetic peptide
NFGFTCPVY

SEQ ID NO: 96 - protein, 9 aa, Artificial Sequence
  Description of Artificial Sequence: Synthetic peptide
SQIWNVAAY

SEQ ID NO: 97 - protein, 9 aa, Artificial Sequence
  Description of Artificial Sequence: Synthetic peptide
MWGQQGTWA

SEQ ID NO: 98 - protein, 9 aa, Artificial Sequence
  Description of Artificial Sequence: Synthetic peptide
QAMMMTMMN

SEQ ID NO: 99 - protein, 9 aa, Artificial Sequence
  Description of Artificial Sequence: Synthetic peptide
AHTANEFSP

SEQ ID NO: 100 - protein, 9 aa, Artificial Sequence
  Description of Artificial Sequence: Synthetic peptide
DAHYVYEKG

SEQ ID NO: 101 - protein, 9 aa, Artificial Sequence
  Description of Artificial Sequence: Synthetic peptide
CNNWIWAHE

SEQ ID NO: 102 - protein, 9 aa, Artificial Sequence
  Description of Artificial Sequence: Synthetic peptide
NHNLMWVVS

SEQ ID NO: 103 - protein, 9 aa, Artificial Sequence
  Description of Artificial Sequence: Synthetic peptide
ATMWGDCDY

SEQ ID NO: 104 - protein, 9 aa, Artificial Sequence
  Description of Artificial Sequence: Synthetic peptide
EWMQEFAGP

SEQ ID NO: 105 - protein, 9 aa, Artificial Sequence
  Description of Artificial Sequence: Synthetic peptide
QDGSVEWAF

SEQ ID NO: 106 - protein, 9 aa, Artificial Sequence
  Description of Artificial Sequence: Synthetic peptide
WCPQPPGGN

SEQ ID NO: 107 - protein, 9 aa, Artificial Sequence
  Description of Artificial Sequence: Synthetic peptide
AECQIWYDW

SEQ ID NO: 108 - protein, 9 aa, Artificial Sequence
  Description of Artificial Sequence: Synthetic peptide
NAVKFVCED

SEQ ID NO: 109 - protein, 9 aa, Artificial Sequence
  Description of Artificial Sequence: Synthetic peptide
TQCFASCVA

SEQ ID NO: 110 - protein, 9 aa, Artificial Sequence
  Description of Artificial Sequence: Synthetic peptide
TVNNHDIGY

SEQ ID NO: 111 - DNA, 27 bp, Artificial Sequence
  Description of Artificial Sequence: Synthetic oligonucleotide
aatccagctatgttcaattgcgattac

SEQ ID NO: 112 - protein, 9 aa, Artificial Sequence
  Description of Artificial Sequence: Synthetic peptide
NPAMFNCDY

SEQ ID NO: 113 - DNA, 27 bp, Artificial Sequence
  Description of Artificial Sequence: Synthetic oligonucleotide
aagttgaccgcccacatctacgccttg

SEQ ID NO: 114 - protein, 9 aa, Artificial Sequence
  Description of Artificial Sequence: Synthetic peptide
KLTAHIYAL

SEQ ID NO: 115 - protein, 9 aa, Artificial Sequence
  Description of Artificial Sequence: Synthetic peptide
RVTIMFTGT

SEQ ID NO: 116 - protein, 9 aa, Artificial Sequence
  Description of Artificial Sequence: Synthetic peptide
YTGCIDGFL

SEQ ID NO: 117 - protein, 9 aa, Artificial Sequence
  Description of Artificial Sequence: Synthetic peptide
TNMSTQPCW

SEQ ID NO: 118 - protein, 9 aa, Artificial Sequence
  Description of Artificial Sequence: Synthetic peptide
VWTTVCNDY

SEQ ID NO: 119 - protein, 9 aa, Artificial Sequence
  Description of Artificial Sequence: Synthetic peptide
DYANTLKQS

SEQ ID NO: 120 - protein, 9 aa, Artificial Sequence
  Description of Artificial Sequence: Synthetic peptide
EFVLGCQGI

SEQ ID NO: 121 - protein, 9 aa, Artificial Sequence
  Description of Artificial Sequence: Synthetic peptide
TIMWTMMRE

SEQ ID NO: 122 - protein, 9 aa, Artificial Sequence
  Description of Artificial Sequence: Synthetic peptide
SPMVVTHSD

SEQ ID NO: 123 - protein, 9 aa, Artificial Sequence
  Description of Artificial Sequence: Synthetic peptide
DWYDIWTLV

SEQ ID NO: 124 - protein, 9 aa, Artificial Sequence
  Description of Artificial Sequence: Synthetic peptide
REFAISGGN

SEQ ID NO: 125 - protein, 9 aa, Artificial Sequence
  Description of Artificial Sequence: Synthetic peptide
SITNCNHDR

SEQ ID NO: 126 - protein, 9 aa, Artificial Sequence
  Description of Artificial Sequence: Synthetic peptide
HIQEELEEQ

SEQ ID NO: 127 - protein, 9 aa, Artificial Sequence
  Description of Artificial Sequence: Synthetic peptide
DINGKKNIC

SEQ ID NO: 128 - protein, 9 aa, Artificial Sequence
  Description of Artificial Sequence: Synthetic peptide
TLAEHFTSH

SEQ ID NO: 129 - protein, 9 aa, Artificial Sequence
  Description of Artificial Sequence: Synthetic peptide
QCQSQEWFH

SEQ ID NO: 130 - protein, 9 aa, Artificial Sequence
  Description of Artificial Sequence: Synthetic peptide
ARSGINGHE

SEQ ID NO: 131 - protein, 9 aa, Artificial Sequence
  Description of Artificial Sequence: Synthetic peptide
CIRQYDAID

SEQ ID NO: 132 - protein, 9 aa, Artificial Sequence
  Description of Artificial Sequence: Synthetic peptide
ILIFESRIG

SEQ ID NO: 133 - protein, 9 aa, Artificial Sequence
  Description of Artificial Sequence: Synthetic peptide
HFADNQVVQ

SEQ ID NO: 134 - protein, 9 aa, Artificial Sequence
  Description of Artificial Sequence: Synthetic peptide
NESHVERHC

SEQ ID NO: 135 - protein, 9 aa, Artificial Sequence
  Description of Artificial Sequence: Synthetic peptide
TMVTSVTLP

SEQ ID NO: 136 - protein, 9 aa, Artificial Sequence
  Description of Artificial Sequence: Synthetic peptide
PTLSCPYHK

SEQ ID NO: 137 - protein, 9 aa, Artificial Sequence
  Description of Artificial Sequence: Synthetic peptide
TVAKVLSGH

SEQ ID NO: 138 - protein, 9 aa, Artificial Sequence
  Description of Artificial Sequence: Synthetic peptide
KIFITTDEG

SEQ ID NO: 139 - protein, 9 aa, Artificial Sequence
  Description of Artificial Sequence: Synthetic peptide
KSAQVYWHP

SEQ ID NO: 140 - protein, 9 aa, Artificial Sequence
  Description of Artificial Sequence: Synthetic peptide
CSALFAQHD

SEQ ID NO: 141 - protein, 9 aa, Artificial Sequence
  Description of Artificial Sequence: Synthetic peptide
AGSACMPAH

SEQ ID NO: 142 - protein, 9 aa, Artificial Sequence
  Description of Artificial Sequence: Synthetic peptide
IVIWQGEWI

SEQ ID NO: 143 - protein, 9 aa, Artificial Sequence
  Description of Artificial Sequence: Synthetic peptide
SYCEVEDAP

SEQ ID NO: 144 - protein, 9 aa, Artificial Sequence
  Description of Artificial Sequence: Synthetic peptide
DCSWWLQLG

SEQ ID NO: 145 - protein, 9 aa, Artificial Sequence
  Description of Artificial Sequence: Synthetic peptide
NFCKQGNTC

SEQ ID NO: 146 - protein, 9 aa, Artificial Sequence
  Description of Artificial Sequence: Synthetic peptide
HIHDTMSDY

SEQ ID NO: 147 - protein, 9 aa, Artificial Sequence
  Description of Artificial Sequence: Synthetic peptide
QYVHMLGEC

SEQ ID NO: 148 - protein, 9 aa, Artificial Sequence
  Description of Artificial Sequence: Synthetic peptide
RQHHCLPVN

SEQ ID NO: 149 - protein, 9 aa, Artificial Sequence
  Description of Artificial Sequence: Synthetic peptide
AHVDHQCSG

SEQ ID NO: 150 - protein, 9 aa, Artificial Sequence
  Description of Artificial Sequence: Synthetic peptide
SFSDTHLGW

SEQ ID NO: 151 - protein, 9 aa, Artificial Sequence
  Description of Artificial Sequence: Synthetic peptide
AASQMWQRG

SEQ ID NO: 152 - protein, 9 aa, Artificial Sequence
  Description of Artificial Sequence: Synthetic peptide
NDCTCRAIM

SEQ ID NO: 153 - protein, 9 aa, Artificial Sequence
  Description of Artificial Sequence: Synthetic peptide
NSHEYLDRH

SEQ ID NO: 154 - protein, 9 aa, Artificial Sequence
  Description of Artificial Sequence: Synthetic peptide
DWIWGTDMW

SEQ ID NO: 155 - protein, 9 aa, Artificial Sequence
  Description of Artificial Sequence: Synthetic peptide
MIFYRTYGF

SEQ ID NO: 156 - protein, 9 aa, Artificial Sequence
  Description of Artificial Sequence: Synthetic peptide
HPAPLNMPH

SEQ ID NO: 157 - protein, 9 aa, Artificial Sequence
  Description of Artificial Sequence: Synthetic peptide
SQQHCQHDQ

SEQ ID NO: 158 - protein, 9 aa, Artificial Sequence
  Description of Artificial Sequence: Synthetic peptide
HEVMMCPAP

SEQ ID NO: 159 - protein, 9 aa, Artificial Sequence
  Description of Artificial Sequence: Synthetic peptide
KRTDLHAAD

SEQ ID NO: 160 - protein, 9 aa, Artificial Sequence
  Description of Artificial Sequence: Synthetic peptide
EYFKPKSQD

SEQ ID NO: 161 - protein, 9 aa, Artificial Sequence
  Description of Artificial Sequence: Synthetic peptide
KLAHSWCIW

SEQ ID NO: 162 - protein, 9 aa, Artificial Sequence
  Description of Artificial Sequence: Synthetic peptide
NAMANFSVR

SEQ ID NO: 163 - protein, 9 aa, Artificial Sequence
  Description of Artificial Sequence: Synthetic peptide
EVTTPRPPT

SEQ ID NO: 164 - protein, 9 aa, Artificial Sequence
  Description of Artificial Sequence: Synthetic peptide
YFHDEQIDY

SEQ ID NO: 165 - protein, 9 aa, Artificial Sequence
  Description of Artificial Sequence: Synthetic peptide
LTHQGGRQR

SEQ ID NO: 166 - protein, 9 aa, Artificial Sequence
  Description of Artificial Sequence: Synthetic peptide
AQWYMWCWD

SEQ ID NO: 167 - protein, 9 aa, Artificial Sequence
  Description of Artificial Sequence: Synthetic peptide
RMMWQSHCD

SEQ ID NO: 168 - protein, 9 aa, Artificial Sequence
  Description of Artificial Sequence: Synthetic peptide
EIHKRIAMT

SEQ ID NO: 169 - protein, 9 aa, Artificial Sequence
  Description of Artificial Sequence: Synthetic peptide
CMSCCKWPH

SEQ ID NO: 170 - protein, 9 aa, Artificial Sequence
  Description of Artificial Sequence: Synthetic peptide
DFQRPTETQ

SEQ ID NO: 171 - protein, 9 aa, Artificial Sequence
  Description of Artificial Sequence: Synthetic peptide
SFMPCHCRG

SEQ ID NO: 172 - protein, 9 aa, Artificial Sequence
  Description of Artificial Sequence: Synthetic peptide
LTHNTPFPK

SEQ ID NO: 173 - protein, 9 aa, Artificial Sequence
  Description of Artificial Sequence: Synthetic peptide
HYVVRHEDP

SEQ ID NO: 174 - protein, 9 aa, Artificial Sequence
  Description of Artificial Sequence: Synthetic peptide
FQEAPPHVH

SEQ ID NO: 175 - protein, 9 aa, Artificial Sequence
  Description of Artificial Sequence: Synthetic peptide
YAELEWKVC

SEQ ID NO: 176 - protein, 9 aa, Artificial Sequence
  Description of Artificial Sequence: Synthetic peptide
RCVAEPNEP

SEQ ID NO: 177 - protein, 9 aa, Artificial Sequence
  Description of Artificial Sequence: Synthetic peptide
GLIFHQSLS

SEQ ID NO: 178 - protein, 9 aa, Artificial Sequence
  Description of Artificial Sequence: Synthetic peptide
ASHGMDEYN

SEQ ID NO: 179 - protein, 9 aa, Artificial Sequence
  Description of Artificial Sequence: Synthetic peptide
PIACRAINW

SEQ ID NO: 180 - protein, 9 aa, Artificial Sequence
  Description of Artificial Sequence: Synthetic peptide
NCKPDQIAM

SEQ ID NO: 181 - protein, 9 aa, Artificial Sequence
  Description of Artificial Sequence: Synthetic peptide
FRMWFTECI

SEQ ID NO: 182 - protein, 9 aa, Artificial Sequence
  Description of Artificial Sequence: Synthetic peptide
MGYAKHDSH

SEQ ID NO: 183 - protein, 9 aa, Artificial Sequence
  Description of Artificial Sequence: Synthetic peptide
DTSCLELMQ

SEQ ID NO: 184 - protein, 9 aa, Artificial Sequence
  Description of Artificial Sequence: Synthetic peptide
KVAGGHETT

SEQ ID NO: 185 - protein, 9 aa, Artificial Sequence
  Description of Artificial Sequence: Synthetic peptide
YSRYHHSLL

SEQ ID NO: 186 - protein, 9 aa, Artificial Sequence
  Description of Artificial Sequence: Synthetic peptide
VADTWQVHC

SEQ ID NO: 187 - protein, 9 aa, Artificial Sequence
  Description of Artificial Sequence: Synthetic peptide
LWGYGAVNM

SEQ ID NO: 188 - protein, 9 aa, Artificial Sequence
  Description of Artificial Sequence: Synthetic peptide
FGRQAYVAW

SEQ ID NO: 189 - protein, 9 aa, Artificial Sequence
  Description of Artificial Sequence: Synthetic peptide
EEVQFTQQD

SEQ ID NO: 190 - protein, 9 aa, Artificial Sequence
  Description of Artificial Sequence: Synthetic peptide
GTGHIGNAT

SEQ ID NO: 191 - protein, 9 aa, Artificial Sequence
  Description of Artificial Sequence: Synthetic peptide
AYTYNSKLY

SEQ ID NO: 192 - protein, 9 aa, Artificial Sequence
  Description of Artificial Sequence: Synthetic peptide
FIFRKCDHW

SEQ ID NO: 193 - protein, 9 aa, Artificial Sequence
  Description of Artificial Sequence: Synthetic peptide
QCVDCPPYC

SEQ ID NO: 194 - protein, 9 aa, Artificial Sequence
  Description of Artificial Sequence: Synthetic peptide
ETPPLCHGP

SEQ ID NO: 195 - protein, 9 aa, Artificial Sequence
  Description of Artificial Sequence: Synthetic peptide
RMTPNNCQR

SEQ ID NO: 196 - protein, 9 aa, Artificial Sequence
  Description of Artificial Sequence: Synthetic peptide
NSTPMACME

SEQ ID NO: 197 - protein, 9 aa, Artificial Sequence
  Description of Artificial Sequence: Synthetic peptide
STHPLNLYH

SEQ ID NO: 198 - protein, 9 aa, Artificial Sequence
  Description of Artificial Sequence: Synthetic peptide
TTVPDPGPR

SEQ ID NO: 199 - protein, 9 aa, Artificial Sequence
  Description of Artificial Sequence: Synthetic peptide
LIWSVYQDE

SEQ ID NO: 200 - protein, 9 aa, Artificial Sequence
  Description of Artificial Sequence: Synthetic peptide
YDNHQKARN

SEQ ID NO: 201 - protein, 9 aa, Artificial Sequence
  Description of Artificial Sequence: Synthetic peptide
SIYQKWVTN

SEQ ID NO: 202 - protein, 9 aa, Artificial Sequence
  Description of Artificial Sequence: Synthetic peptide
MQSMQHWHP

SEQ ID NO: 203 - protein, 9 aa, Artificial Sequence
  Description of Artificial Sequence: Synthetic peptide
TLVSCDQGN

SEQ ID NO: 204 - protein, 9 aa, Artificial Sequence
  Description of Artificial Sequence: Synthetic peptide
WSITGQPWF

SEQ ID NO: 205 - protein, 9 aa, Artificial Sequence
  Description of Artificial Sequence: Synthetic peptide
YQKVEYWNY

SEQ ID NO: 206 - protein, 9 aa, Artificial Sequence
  Description of Artificial Sequence: Synthetic peptide
AHYQQSTDR

SEQ ID NO: 207 - protein, 9 aa, Artificial Sequence
  Description of Artificial Sequence: Synthetic peptide
QVRVITHKS

SEQ ID NO: 208 - protein, 9 aa, Artificial Sequence
  Description of Artificial Sequence: Synthetic peptide
WAAKPGDPK

SEQ ID NO: 209 - protein, 9 aa, Artificial Sequence
  Description of Artificial Sequence: Synthetic peptide
RSDNDWCFL

SEQ ID NO: 210 - protein, 9 aa, Artificial Sequence
  Description of Artificial Sequence: Synthetic peptide
ETHRGTVGL

SEQ ID NO: 211 - protein, 9 aa, Artificial Sequence
  Description of Artificial Sequence: Synthetic peptide
KCSVQEKKA

SEQ ID NO: 212 - protein, 9 aa, Artificial Sequence
  Description of Artificial Sequence: Synthetic peptide
WVEPEQCFG

SEQ ID NO: 213 - protein, 9 aa, Artificial Sequence
  Description of Artificial Sequence: Synthetic peptide
NHQQCPKCP

SEQ ID NO: 214 - protein, 9 aa, Artificial Sequence
  Description of Artificial Sequence: Synthetic peptide
AAHSAPFFD

SEQ ID NO: 215 - protein, 9 aa, Artificial Sequence
  Description of Artificial Sequence: Synthetic peptide
KGQRRDSVS

SEQ ID NO: 216 - protein, 9 aa, Artificial Sequence
  Description of Artificial Sequence: Synthetic peptide
DVMQNQCKS

SEQ ID NO: 217 - protein, 9 aa, Artificial Sequence
  Description of Artificial Sequence: Synthetic peptide
ALVYSGWIC

SEQ ID NO: 218 - protein, 9 aa, Artificial Sequence
  Description of Artificial Sequence: Synthetic peptide
FAKARHNWR

SEQ ID NO: 219 - protein, 9 aa, Artificial Sequence
  Description of Artificial Sequence: Synthetic peptide
TYIQYPTNA

SEQ ID NO: 220 - protein, 9 aa, Artificial Sequence
  Description of Artificial Sequence: Synthetic peptide
VSKFIAASW

SEQ ID NO: 221 - protein, 9 aa, Artificial Sequence
  Description of Artificial Sequence: Synthetic peptide
RQREGKHGN

SEQ ID NO: 222 - protein, 9 aa, Artificial Sequence
  Description of Artificial Sequence: Synthetic peptide
MAAHTKYRF

SEQ ID NO: 223 - protein, 9 aa, Artificial Sequence
  Description of Artificial Sequence: Synthetic peptide
FVGLMNQCG

SEQ ID NO: 224 - protein, 9 aa, Artificial Sequence
  Description of Artificial Sequence: Synthetic peptide
TWQSMVNSE

SEQ ID NO: 225 - protein, 9 aa, Artificial Sequence
  Description of Artificial Sequence: Synthetic peptide
SAITCRMLK

SEQ ID NO: 226 - protein, 9 aa, Artificial Sequence
  Description of Artificial Sequence: Synthetic peptide
SRHYEQFEC

SEQ ID NO: 227 - protein, 9 aa, Artificial Sequence
  Description of Artificial Sequence: Synthetic peptide
VTAGQLGLN

SEQ ID NO: 228 - protein, 9 aa, Artificial Sequence
  Description of Artificial Sequence: Synthetic peptide
DSQYHVKCG

SEQ ID NO: 229 - protein, 9 aa, Artificial Sequence
  Description of Artificial Sequence: Synthetic peptide
LSECSDRAN

SEQ ID NO: 230 - protein, 9 aa, Artificial Sequence
  Description of Artificial Sequence: Synthetic peptide
YAYPTEGQI

SEQ ID NO: 231 - protein, 9 aa, Artificial Sequence
  Description of Artificial Sequence: Synthetic peptide
KRFVDMPEM

SEQ ID NO: 232 - protein, 9 aa, Artificial Sequence
  Description of Artificial Sequence: Synthetic peptide
VHKFQGNFG

SEQ ID NO: 233 - protein, 9 aa, Artificial Sequence
  Description of Artificial Sequence: Synthetic peptide
RGHEPPMWL

SEQ ID NO: 234 - protein, 9 aa, Artificial Sequence
  Description of Artificial Sequence: Synthetic peptide
QKCYCDEQC

SEQ ID NO: 235 - protein, 9 aa, Artificial Sequence
  Description of Artificial Sequence: Synthetic peptide
RHAPTDISP

SEQ ID NO: 236 - protein, 9 aa, Artificial Sequence
  Description of Artificial Sequence: Synthetic peptide
MTGIGKCWN

SEQ ID NO: 237 - protein, 9 aa, Artificial Sequence
  Description of Artificial Sequence: Synthetic peptide
QAYCCMHQY

SEQ ID NO: 238 - protein, 9 aa, Artificial Sequence
  Description of Artificial Sequence: Synthetic peptide
KHDDCCTGT

SEQ ID NO: 239 - protein, 9 aa, Artificial Sequence
  Description of Artificial Sequence: Synthetic peptide
KWYQFGMVA

SEQ ID NO: 240 - protein, 9 aa, Artificial Sequence
  Description of Artificial Sequence: Synthetic peptide
LTWECKFGG

SEQ ID NO: 241 - protein, 9 aa, Artificial Sequence
  Description of Artificial Sequence: Synthetic peptide
AIVQQHYYP

SEQ ID NO: 242 - protein, 9 aa, Artificial Sequence
  Description of Artificial Sequence: Synthetic peptide
EENVWMQYQ

SEQ ID NO: 243 - protein, 9 aa, Artificial Sequence
  Description of Artificial Sequence: Synthetic peptide
NSQPMDFLP

SEQ ID NO: 244 - protein, 9 aa, Artificial Sequence
  Description of Artificial Sequence: Synthetic peptide
FDTAFQGDI

SEQ ID NO: 245 - protein, 9 aa, Artificial Sequence
  Description of Artificial Sequence: Synthetic peptide
QMEARMDCE

SEQ ID NO: 246 - protein, 9 aa, Artificial Sequence
  Description of Artificial Sequence: Synthetic peptide
NWVPQIEHW

SEQ ID NO: 247 - protein, 9 aa, Artificial Sequence
  Description of Artificial Sequence: Synthetic peptide
VAILGLNPT

SEQ ID NO: 248 - protein, 9 aa, Artificial Sequence
  Description of Artificial Sequence: Synthetic peptide
ANVPMCSLQ

SEQ ID NO: 249 - protein, 9 aa, Artificial Sequence
  Description of Artificial Sequence: Synthetic peptide
LIPMDWIGM

SEQ ID NO: 250 - protein, 9 aa, Artificial Sequence
  Description of Artificial Sequence: Synthetic peptide
IYCGNSDMQ

SEQ ID NO: 251 - protein, 9 aa, Artificial Sequence
  Description of Artificial Sequence: Synthetic peptide
PAETLMDGF

SEQ ID NO: 252 - protein, 9 aa, Artificial Sequence
  Description of Artificial Sequence: Synthetic peptide
FSYQIQCQN

SEQ ID NO: 253 - protein, 9 aa, Artificial Sequence
  Description of Artificial Sequence: Synthetic peptide
TMRLFWDMG

SEQ ID NO: 254 - protein, 9 aa, Artificial Sequence
  Description of Artificial Sequence: Synthetic peptide
QRVPMQLVE

SEQ ID NO: 255 - protein, 9 aa, Artificial Sequence
  Description of Artificial Sequence: Synthetic peptide
AMTRQNGWM

SEQ ID NO: 256 - protein, 9 aa, Artificial Sequence
  Description of Artificial Sequence: Synthetic peptide
GMRTHSVMN

SEQ ID NO: 257 - protein, 9 aa, Artificial Sequence
  Description of Artificial Sequence: Synthetic peptide
LITVQHIRN

SEQ ID NO: 258 - protein, 9 aa, Artificial Sequence
  Description of Artificial Sequence: Synthetic peptide
TTYPHNTHG

SEQ ID NO: 259 - protein, 9 aa, Artificial Sequence
  Description of Artificial Sequence: Synthetic peptide
RIEMDEWEA

SEQ ID NO: 260 - protein, 9 aa, Artificial Sequence
  Description of Artificial Sequence: Synthetic peptide
DNTPEHCYM

SEQ ID NO: 261 - protein, 9 aa, Artificial Sequence
  Description of Artificial Sequence: Synthetic peptide
SSVVMAKQP

SEQ ID NO: 262 - protein, 9 aa, Artificial Sequence
  Description of Artificial Sequence: Synthetic peptide
CLVRIQKDH

SEQ ID NO: 263 - protein, 9 aa, Artificial Sequence
  Description of Artificial Sequence: Synthetic peptide
TLPKMHMWP

SEQ ID NO: 264 - protein, 9 aa, Artificial Sequence
  Description of Artificial Sequence: Synthetic peptide
MPHHSPDCW

SEQ ID NO: 265 - protein, 9 aa, Artificial Sequence
  Description of Artificial Sequence: Synthetic peptide
QELECHACS

SEQ ID NO: 266 - protein, 9 aa, Artificial Sequence
  Description of Artificial Sequence: Synthetic peptide
HMHNLPVKP

SEQ ID NO: 267 - protein, 9 aa, Artificial Sequence
  Description of Artificial Sequence: Synthetic peptide
GIAVWFDFQ

SEQ ID NO: 268 - protein, 9 aa, Artificial Sequence
  Description of Artificial Sequence: Synthetic peptide
ANRSRPTWQ

SEQ ID NO: 269 - protein, 9 aa, Artificial Sequence
  Description of Artificial Sequence: Synthetic peptide
KTFPILEAW

SEQ ID NO: 270 - protein, 9 aa, Artificial Sequence
  Description of Artificial Sequence: Synthetic peptide
ALQYCQGKD

SEQ ID NO: 271 - protein, 9 aa, Artificial Sequence
  Description of Artificial Sequence: Synthetic peptide
YHFEYMTSF

SEQ ID NO: 272 - protein, 9 aa, Artificial Sequence
  Description of Artificial Sequence: Synthetic peptide
VCGHRNDGN

SEQ ID NO: 273 - protein, 9 aa, Artificial Sequence
  Description of Artificial Sequence: Synthetic peptide
EICAAMDSF

SEQ ID NO: 274 - protein, 9 aa, Artificial Sequence
  Description of Artificial Sequence: Synthetic peptide
YWFVLNPCV

SEQ ID NO: 275 - protein, 9 aa, Artificial Sequence
  Description of Artificial Sequence: Synthetic peptide
QQNPCLGGM

SEQ ID NO: 276 - protein, 9 aa, Artificial Sequence
  Description of Artificial Sequence: Synthetic peptide
FNWFVRAYI

SEQ ID NO: 277 - protein, 9 aa, Artificial Sequence
  Description of Artificial Sequence: Synthetic peptide
DCDPYNMVD

SEQ ID NO: 278 - protein, 9 aa, Artificial Sequence
  Description of Artificial Sequence: Synthetic peptide
RTGDAGMSP

SEQ ID NO: 279 - protein, 9 aa, Artificial Sequence
  Description of Artificial Sequence: Synthetic peptide
LEFNGHLFN

SEQ ID NO: 280 - protein, 9 aa, Artificial Sequence
  Description of Artificial Sequence: Synthetic peptide
VYVAAGGGC

SEQ ID NO: 281 - protein, 9 aa, Artificial Sequence
  Description of Artificial Sequence: Synthetic peptide
MTTGLMAYE

SEQ ID NO: 282 - protein, 9 aa, Artificial Sequence
  Description of Artificial Sequence: Synthetic peptide
MAIDNLECK

SEQ ID NO: 283 - protein, 9 aa, Artificial Sequence
  Description of Artificial Sequence: Synthetic peptide
QKAIVAQND

SEQ ID NO: 284 - protein, 9 aa, Artificial Sequence
  Description of Artificial Sequence: Synthetic peptide
GGDGRVHNK

SEQ ID NO: 285 - protein, 9 aa, Artificial Sequence
  Description of Artificial Sequence: Synthetic peptide
THDAARKTA

SEQ ID NO: 286 - protein, 9 aa, Artificial Sequence
  Description of Artificial Sequence: Synthetic peptide
TWNEPHQNQ

SEQ ID NO: 287 - protein, 9 aa, Artificial Sequence
  Description of Artificial Sequence: Synthetic peptide
ANRADWQHL

SEQ ID NO: 288 - protein, 9 aa, Artificial Sequence
  Description of Artificial Sequence: Synthetic peptide
CTKAYRKPG

SEQ ID NO: 289 - protein, 9 aa, Artificial Sequence
  Description of Artificial Sequence: Synthetic peptide
RTAVIQCIE

SEQ ID NO: 290 - protein, 9 aa, Artificial Sequence
  Description of Artificial Sequence: Synthetic peptide
WKVSPIQGF

SEQ ID NO: 291 - protein, 9 aa, Artificial Sequence
  Description of Artificial Sequence: Synthetic peptide
MCGEYQPGS

SEQ ID NO: 292 - protein, 9 aa, Artificial Sequence
  Description of Artificial Sequence: Synthetic peptide
NHHPYTFHQ

SEQ ID NO: 293 - protein, 9 aa, Artificial Sequence
  Description of Artificial Sequence: Synthetic peptide
NPRYCLSLS

SEQ ID NO: 294 - protein, 9 aa, Artificial Sequence
  Description of Artificial Sequence: Synthetic peptide
SRASQQSMW

SEQ ID NO: 295 - protein, 9 aa, Artificial Sequence
  Description of Artificial Sequence: Synthetic peptide
VLKSCDRHG

SEQ ID NO: 296 - protein, 9 aa, Artificial Sequence
  Description of Artificial Sequence: Synthetic peptide
KEARSQTGD

SEQ ID NO: 297 - protein, 9 aa, Artificial Sequence
  Description of Artificial Sequence: Synthetic peptide
FANGCTGSI

SEQ ID NO: 298 - protein, 9 aa, Artificial Sequence
  Description of Artificial Sequence: Synthetic peptide
GAMAAPYHD

SEQ ID NO: 299 - protein, 9 aa, Artificial Sequence
  Description of Artificial Sequence: Synthetic peptide
YEHPIMWPV

SEQ ID NO: 300 - protein, 9 aa, Artificial Sequence
  Description of Artificial Sequence: Synthetic peptide
CYGWTGCKC

SEQ ID NO: 301 - protein, 9 aa, Artificial Sequence
  Description of Artificial Sequence: Synthetic peptide
AAAMRDKTD

SEQ ID NO: 302 - protein, 9 aa, Artificial Sequence
  Description of Artificial Sequence: Synthetic peptide
KLRIGVVCN

SEQ ID NO: 303 - protein, 9 aa, Artificial Sequence
  Description of Artificial Sequence: Synthetic peptide
TPHSIHTDK

SEQ ID NO: 304 - protein, 9 aa, Artificial Sequence
  Description of Artificial Sequence: Synthetic peptide
QTETWEFGA

SEQ ID NO: 305 - protein, 9 aa, Artificial Sequence
  Description of Artificial Sequence: Synthetic peptide
KAEMKMGCN

SEQ ID NO: 306 - protein, 9 aa, Artificial Sequence
  Description of Artificial Sequence: Synthetic peptide
VPICCNLPM

SEQ ID NO: 307 - protein, 9 aa, Artificial Sequence
  Description of Artificial Sequence: Synthetic peptide
LPSHCNLGS

SEQ ID NO: 308 - protein, 9 aa, Artificial Sequence
  Description of Artificial Sequence: Synthetic peptide
SMNRTHLER

SEQ ID NO: 309 - protein, 9 aa, Artificial Sequence
  Description of Artificial Sequence: Synthetic peptide
FGEFTMDEN

SEQ ID NO: 310 - protein, 9 aa, Artificial Sequence
  Description of Artificial Sequence: Synthetic peptide
YTAHNANVV

SEQ ID NO: 311 - protein, 9 aa, Artificial Sequence
  Description of Artificial Sequence: Synthetic peptide
GTMKHNGRA

SEQ ID NO: 312 - protein, 9 aa, Artificial Sequence
  Description of Artificial Sequence: Synthetic peptide
EHYCKDNVL

SEQ ID NO: 313 - protein, 9 aa, Artificial Sequence
  Description of Artificial Sequence: Synthetic peptide
TKRMMEDSG

SEQ ID NO: 314 - protein, 9 aa, Artificial Sequence
  Description of Artificial Sequence: Synthetic peptide
CERDCNCTA

SEQ ID NO: 315 - protein, 9 aa, Artificial Sequence
  Description of Artificial Sequence: Synthetic peptide
TGRVTADMA

SEQ ID NO: 316 - protein, 9 aa, Artificial Sequence
  Description of Artificial Sequence: Synthetic peptide
YNGDRLFCF

SEQ ID NO: 317 - protein, 9 aa, Artificial Sequence
  Description of Artificial Sequence: Synthetic peptide
NHEVVAFMQ

SEQ ID NO: 318 - protein, 9 aa, Artificial Sequence
  Description of Artificial Sequence: Synthetic peptide
QNEICVHHE

SEQ ID NO: 319 - protein, 9 aa, Artificial Sequence
  Description of Artificial Sequence: Synthetic peptide
LRSGMIVSG

SEQ ID NO: 320 - protein, 9 aa, Artificial Sequence
  Description of Artificial Sequence: Synthetic peptide
QPKMWMMAS

SEQ ID NO: 321 - protein, 9 aa, Artificial Sequence
  Description of Artificial Sequence: Synthetic peptide
DVRHSWSEK

SEQ ID NO: 322 - protein, 9 aa, Artificial Sequence
  Description of Artificial Sequence: Synthetic peptide
EILQDVYYL

SEQ ID NO: 323 - protein, 9 aa, Artificial Sequence
  Description of Artificial Sequence: Synthetic peptide
SVVNNLKAS

SEQ ID NO: 324 - protein, 9 aa, Artificial Sequence
  Description of Artificial Sequence: Synthetic peptide
RCTDCSYFY

SEQ ID NO: 325 - protein, 9 aa, Artificial Sequence
  Description of Artificial Sequence: Synthetic peptide
GSTSRNQRD

SEQ ID NO: 326 - protein, 9 aa, Artificial Sequence
  Description of Artificial Sequence: Synthetic peptide
LDCNAMPST

SEQ ID NO: 327 - protein, 9 aa, Artificial Sequence
  Description of Artificial Sequence: Synthetic peptide
QGRWACWYS

SEQ ID NO: 328 - protein, 9 aa, Artificial Sequence
  Description of Artificial Sequence: Synthetic peptide
TIEWYPDSQ

SEQ ID NO: 329 - protein, 9 aa, Artificial Sequence
  Description of Artificial Sequence: Synthetic peptide
KAVSYHHDG

SEQ ID NO: 330 - protein, 9 aa, Artificial Sequence
  Description of Artificial Sequence: Synthetic peptide
TMEHCQRPQ

SEQ ID NO: 331 - protein, 9 aa, Artificial Sequence
  Description of Artificial Sequence: Synthetic peptide
RMFWDTSDR

SEQ ID NO: 332 - protein, 9 aa, Artificial Sequence
  Description of Artificial Sequence: Synthetic peptide
MCNPKMMSS

SEQ ID NO: 333 - protein, 9 aa, Artificial Sequence
  Description of Artificial Sequence: Synthetic peptide
DSHDMFVYK

SEQ ID NO: 334 - protein, 9 aa, Artificial Sequence
  Description of Artificial Sequence: Synthetic peptide
LTCYHNELS

SEQ ID NO: 335 - protein, 9 aa, Artificial Sequence
  Description of Artificial Sequence: Synthetic peptide
AVVEHAVNR

SEQ ID NO: 336 - protein, 9 aa, Artificial Sequence
  Description of Artificial Sequence: Synthetic peptide
CGQMVICSE

SEQ ID NO: 337 - protein, 9 aa, Artificial Sequence
  Description of Artificial Sequence: Synthetic peptide
NLRDAHWCM

SEQ ID NO: 338 - protein, 9 aa, Artificial Sequence
  Description of Artificial Sequence: Synthetic peptide
ESSQEIKTC

SEQ ID NO: 339 - protein, 9 aa, Artificial Sequence
  Description of Artificial Sequence: Synthetic peptide
AKMWQLENP

SEQ ID NO: 340 - protein, 9 aa, Artificial Sequence
  Description of Artificial Sequence: Synthetic peptide
GTIPKQHEF

SEQ ID NO: 341 - protein, 9 aa, Artificial Sequence
  Description of Artificial Sequence: Synthetic peptide
ARDCYWKAR

SEQ ID NO: 342 - protein, 9 aa, Artificial Sequence
  Description of Artificial Sequence: Synthetic peptide
AADREQGWW

SEQ ID NO: 343 - protein, 9 aa, Artificial Sequence
  Description of Artificial Sequence: Synthetic peptide
DSVQQRWYV

SEQ ID NO: 344 - protein, 9 aa, Artificial Sequence
  Description of Artificial Sequence: Synthetic peptide
KCGQDWIHG

SEQ ID NO: 345 - protein, 9 aa, Artificial Sequence
  Description of Artificial Sequence: Synthetic peptide
QVYAPEIEG

SEQ ID NO: 346 - protein, 9 aa, Artificial Sequence
  Description of Artificial Sequence: Synthetic peptide
CCCVPRSIY

SEQ ID NO: 347 - protein, 9 aa, Artificial Sequence
  Description of Artificial Sequence: Synthetic peptide
AAHGEMKTA

SEQ ID NO: 348 - protein, 9 aa, Artificial Sequence
  Description of Artificial Sequence: Synthetic peptide
QFWLMHEWP

SEQ ID NO: 349 - protein, 9 aa, Artificial Sequence
  Description of Artificial Sequence: Synthetic peptide
KFAMDWVSD

SEQ ID NO: 350 - protein, 9 aa, Artificial Sequence
  Description of Artificial Sequence: Synthetic peptide
TSDSVINWL

SEQ ID NO: 351 - protein, 9 aa, Artificial Sequence
  Description of Artificial Sequence: Synthetic peptide
QIIYRCRST

SEQ ID NO: 352 - protein, 9 aa, Artificial Sequence
  Description of Artificial Sequence: Synthetic peptide
GYDLRGADE

SEQ ID NO: 353 - protein, 9 aa, Artificial Sequence
  Description of Artificial Sequence: Synthetic peptide
CIRFMMREG

SEQ ID NO: 354 - protein, 9 aa, Artificial Sequence
  Description of Artificial Sequence: Synthetic peptide
HSNTHGYPL

SEQ ID NO: 355 - protein, 9 aa, Artificial Sequence
  Description of Artificial Sequence: Synthetic peptide
HGNMPHCYP

SEQ ID NO: 356 - protein, 9 aa, Artificial Sequence
  Description of Artificial Sequence: Synthetic peptide
VGLSIKMYG

SEQ ID NO: 357 - protein, 9 aa, Artificial Sequence
  Description of Artificial Sequence: Synthetic peptide
ESWRYKHQA

SEQ ID NO: 358 - protein, 9 aa, Artificial Sequence
  Description of Artificial Sequence: Synthetic peptide
PKRYQAWTW

SEQ ID NO: 359 - protein, 9 aa, Artificial Sequence
  Description of Artificial Sequence: Synthetic peptide
SCSQKLMMQ

SEQ ID NO: 360 - protein, 9 aa, Artificial Sequence
  Description of Artificial Sequence: Synthetic peptide
ALVTYRSMQ

SEQ ID NO: 361 - protein, 9 aa, Artificial Sequence
  Description of Artificial Sequence: Synthetic peptide
ALNSDMAAW

SEQ ID NO: 362 - protein, 9 aa, Artificial Sequence
  Description of Artificial Sequence: Synthetic peptide
NHSLCWDSK

SEQ ID NO: 363 - protein, 9 aa, Artificial Sequence
  Description of Artificial Sequence: Synthetic peptide
KKEDYAKFF

SEQ ID NO: 364 - protein, 9 aa, Artificial Sequence
  Description of Artificial Sequence: Synthetic peptide
RQYLYKRQQ

SEQ ID NO: 365 - protein, 9 aa, Artificial Sequence
  Description of Artificial Sequence: Synthetic peptide
TAMPEHRWD

SEQ ID NO: 366 - protein, 9 aa, Artificial Sequence
  Description of Artificial Sequence: Synthetic peptide
GFCTIPVAD

SEQ ID NO: 367 - protein, 9 aa, Artificial Sequence
  Description of Artificial Sequence: Synthetic peptide
IAVQKRLFC

SEQ ID NO: 368 - protein, 9 aa, Artificial Sequence
  Description of Artificial Sequence: Synthetic peptide
LAEIKDWVP

SEQ ID NO: 369 - protein, 9 aa, Artificial Sequence
  Description of Artificial Sequence: Synthetic peptide
MLPMFMGQN

SEQ ID NO: 370 - protein, 9 aa, Artificial Sequence
  Description of Artificial Sequence: Synthetic peptide
NVRTYIDDS

SEQ ID NO: 371 - protein, 9 aa, Artificial Sequence
  Description of Artificial Sequence: Synthetic peptide
YFWISKALY

SEQ ID NO: 372 - protein, 9 aa, Artificial Sequence
  Description of Artificial Sequence: Synthetic peptide
ISYQPNPME

SEQ ID NO: 373 - protein, 9 aa, Artificial Sequence
  Description of Artificial Sequence: Synthetic peptide
ACDDWCWMC

SEQ ID NO: 374 - protein, 9 aa, Artificial Sequence
  Description of Artificial Sequence: Synthetic peptide
QTEMKKCAR

SEQ ID NO: 375 - protein, 9 aa, Artificial Sequence
  Description of Artificial Sequence: Synthetic peptide
ATTHKVKDN

SEQ ID NO: 376 - protein, 9 aa, Artificial Sequence
  Description of Artificial Sequence: Synthetic peptide
DTFKCMNVS

SEQ ID NO: 377 - protein, 9 aa, Artificial Sequence
  Description of Artificial Sequence: Synthetic peptide
QSFSYDAKE

SEQ ID NO: 378 - protein, 9 aa, Artificial Sequence
  Description of Artificial Sequence: Synthetic peptide
VIGCQQGLG

SEQ ID NO: 379 - protein, 9 aa, Artificial Sequence
  Description of Artificial Sequence: Synthetic peptide
YGPEILKLT

SEQ ID NO: 380 - protein, 9 aa, Artificial Sequence
  Description of Artificial Sequence: Synthetic peptide
WAAQMYQQE

SEQ ID NO: 381 - protein, 9 aa, Artificial Sequence
  Description of Artificial Sequence: Synthetic peptide
DIACLDQWQ

SEQ ID NO: 382 - protein, 9 aa, Artificial Sequence
  Description of Artificial Sequence: Synthetic peptide
TSLVMPSLP

SEQ ID NO: 383 - protein, 9 aa, Artificial Sequence
  Description of Artificial Sequence: Synthetic peptide
MHSQQRAIK

SEQ ID NO: 384 - protein, 9 aa, Artificial Sequence
  Description of Artificial Sequence: Synthetic peptide
VRQSVPHWA

SEQ ID NO: 385 - protein, 9 aa, Artificial Sequence
  Description of Artificial Sequence: Synthetic peptide
DTRPSRDSS

SEQ ID NO: 386 - protein, 9 aa, Artificial Sequence
  Description of Artificial Sequence: Synthetic peptide
RSGAKCYCD

SEQ ID NO: 387 - protein, 9 aa, Artificial Sequence
  Description of Artificial Sequence: Synthetic peptide
ECKTHRDVY

SEQ ID NO: 388 - protein, 9 aa, Artificial Sequence
  Description of Artificial Sequence: Synthetic peptide
DFLHVTSIM

SEQ ID NO: 389 - protein, 9 aa, Artificial Sequence
  Description of Artificial Sequence: Synthetic peptide
QTKFMDDMH

SEQ ID NO: 390 - protein, 9 aa, Artificial Sequence
  Description of Artificial Sequence: Synthetic peptide
TSMTERRTV

SEQ ID NO: 391 - protein, 9 aa, Artificial Sequence
  Description of Artificial Sequence: Synthetic peptide
WTTWAIPCC

SEQ ID NO: 392 - protein, 9 aa, Artificial Sequence
  Description of Artificial Sequence: Synthetic peptide
LPTLRVADK

SEQ ID NO: 393 - protein, 9 aa, Artificial Sequence
  Description of Artificial Sequence: Synthetic peptide
KTGTTMEPM

SEQ ID NO: 394 - protein, 9 aa, Artificial Sequence
  Description of Artificial Sequence: Synthetic peptide
TKQFVHNED

SEQ ID NO: 395 - protein, 9 aa, Artificial Sequence
  Description of Artificial Sequence: Synthetic peptide
TCQEPHNIT

SEQ ID NO: 396 - protein, 9 aa, Artificial Sequence
  Description of Artificial Sequence: Synthetic peptide
QKVASMGCW

SEQ ID NO: 397 - protein, 9 aa, Artificial Sequence
  Description of Artificial Sequence: Synthetic peptide
CKGHDAGEY

SEQ ID NO: 398 - protein, 9 aa, Artificial Sequence
  Description of Artificial Sequence: Synthetic peptide
FPWSRPKCW

SEQ ID NO: 399 - protein, 9 aa, Artificial Sequence
  Description of Artificial Sequence: Synthetic peptide
HAMSLSTFQ

SEQ ID NO: 400 - protein, 9 aa, Artificial Sequence
  Description of Artificial Sequence: Synthetic peptide
MTCVWHSDF

SEQ ID NO: 401 - protein, 9 aa, Artificial Sequence
  Description of Artificial Sequence: Synthetic peptide
VKAWWHDHQ

SEQ ID NO: 402 - protein, 9 aa, Artificial Sequence
  Description of Artificial Sequence: Synthetic peptide
DVLKCFINE

SEQ ID NO: 403 - protein, 9 aa, Artificial Sequence
  Description of Artificial Sequence: Synthetic peptide
PIKGVAVQE

SEQ ID NO: 404 - protein, 9 aa, Artificial Sequence
  Description of Artificial Sequence: Synthetic peptide
LSRLYPNTY

SEQ ID NO: 405 - protein, 9 aa, Artificial Sequence
  Description of Artificial Sequence: Synthetic peptide
KQTVMTDTS

SEQ ID NO: 406 - protein, 9 aa, Artificial Sequence
  Description of Artificial Sequence: Synthetic peptide
SATPHWYCH

SEQ ID NO: 407 - protein, 9 aa, Artificial Sequence
  Description of Artificial Sequence: Synthetic peptide
KTTDLFQYE

SEQ ID NO: 408 - protein, 9 aa, Artificial Sequence
  Description of Artificial Sequence: Synthetic peptide
VTWINLRSG

SEQ ID NO: 409 - protein, 9 aa, Artificial Sequence
  Description of Artificial Sequence: Synthetic peptide
IHQLVGAFW

SEQ ID NO: 410 - protein, 9 aa, Artificial Sequence
  Description of Artificial Sequence: Synthetic peptide
CVNLMAVNN

SEQ ID NO: 411 - protein, 9 aa, Artificial Sequence
  Description of Artificial Sequence: Synthetic peptide
EKQKLTVSS

SEQ ID NO: 412 - protein, 9 aa, Artificial Sequence
  Description of Artificial Sequence: Synthetic peptide
RLDHWATCD

SEQ ID NO: 413 - protein, 9 aa, Artificial Sequence
  Description of Artificial Sequence: Synthetic peptide
AVEFWLERM

SEQ ID NO: 414 - protein, 9 aa, Artificial Sequence
  Description of Artificial Sequence: Synthetic peptide
KTNNTVCHS

SEQ ID NO: 415 - protein, 9 aa, Artificial Sequence
  Description of Artificial Sequence: Synthetic peptide
HHLRNVHHC

SEQ ID NO: 416 - protein, 9 aa, Artificial Sequence
  Description of Artificial Sequence: Synthetic peptide
ARGTCNYCY

SEQ ID NO: 417 - protein, 9 aa, Artificial Sequence
  Description of Artificial Sequence: Synthetic peptide
STEENEALY

SEQ ID NO: 418 - protein, 9 aa, Artificial Sequence
  Description of Artificial Sequence: Synthetic peptide
KKQQISIRL

SEQ ID NO: 419 - protein, 9 aa, Artificial Sequence
  Description of Artificial Sequence: Synthetic peptide
SAAEKAMDQ

SEQ ID NO: 420 - protein, 9 aa, Artificial Sequence
  Description of Artificial Sequence: Synthetic peptide
TAPGGSTPQ

SEQ ID NO: 421 - protein, 9 aa, Artificial Sequence
  Description of Artificial Sequence: Synthetic peptide
QTNQVVVVE

SEQ ID NO: 422 - protein, 9 aa, Artificial Sequence
  Description of Artificial Sequence: Synthetic peptide
DSTPNLFDP

SEQ ID NO: 423 - protein, 9 aa, Artificial Sequence
  Description of Artificial Sequence: Synthetic peptide
DVASYCQLQ

SEQ ID NO: 424 - protein, 9 aa, Artificial Sequence
  Description of Artificial Sequence: Synthetic peptide
TQCKQLTVM

SEQ ID NO: 425 - protein, 9 aa, Artificial Sequence
  Description of Artificial Sequence: Synthetic peptide
TMEHHECMW

SEQ ID NO: 426 - protein, 9 aa, Artificial Sequence
  Description of Artificial Sequence: Synthetic peptide
DVLVCEILW

SEQ ID NO: 427 - protein, 9 aa, Artificial Sequence
  Description of Artificial Sequence: Synthetic peptide
NIYSGINNP

SEQ ID NO: 428 - protein, 9 aa, Artificial Sequence
  Description of Artificial Sequence: Synthetic peptide
MFPKKMCLH

SEQ ID NO: 429 - protein, 9 aa, Artificial Sequence
  Description of Artificial Sequence: Synthetic peptide
THQNTWLFY

SEQ ID NO: 430 - protein, 9 aa, Artificial Sequence
  Description of Artificial Sequence: Synthetic peptide
NHGYRNNSM

SEQ ID NO: 431 - protein, 9 aa, Artificial Sequence
  Description of Artificial Sequence: Synthetic peptide
QMHICMYEG

SEQ ID NO: 432 - protein, 9 aa, Artificial Sequence
  Description of Artificial Sequence: Synthetic peptide
KWEVMSAAY

SEQ ID NO: 433 - protein, 9 aa, Artificial Sequence
  Description of Artificial Sequence: Synthetic peptide
QRMIVDALQ

SEQ ID NO: 434 - protein, 9 aa, Artificial Sequence
  Description of Artificial Sequence: Synthetic peptide
TMGVSSYSM

SEQ ID NO: 435 - protein, 9 aa, Artificial Sequence
  Description of Artificial Sequence: Synthetic peptide
TGAGIKEAH

SEQ ID NO: 436 - protein, 9 aa, Artificial Sequence
  Description of Artificial Sequence: Synthetic peptide
VPWVEFRLQ

SEQ ID NO: 437 - protein, 9 aa, Artificial Sequence
  Description of Artificial Sequence: Synthetic peptide
QPWPHLINK

SEQ ID NO: 438 - protein, 9 aa, Artificial Sequence
  Description of Artificial Sequence: Synthetic peptide
SSLCRAYDN

SEQ ID NO: 439 - protein, 9 aa, Artificial Sequence
  Description of Artificial Sequence: Synthetic peptide
CVKSRQDSD

SEQ ID NO: 440 - protein, 9 aa, Artificial Sequence
  Description of Artificial Sequence: Synthetic peptide
NYILTQLGM

SEQ ID NO: 441 - protein, 9 aa, Artificial Sequence
  Description of Artificial Sequence: Synthetic peptide
FGGVEDSWM

SEQ ID NO: 442 - protein, 9 aa, Artificial Sequence
  Description of Artificial Sequence: Synthetic peptide
SVKDPMDWG

SEQ ID NO: 443 - protein, 9 aa, Artificial Sequence
  Description of Artificial Sequence: Synthetic peptide
YSDRFQFQF

SEQ ID NO: 444 - protein, 9 aa, Artificial Sequence
  Description of Artificial Sequence: Synthetic peptide
NCPMYDMIS

SEQ ID NO: 445 - protein, 9 aa, Artificial Sequence
  Description of Artificial Sequence: Synthetic peptide
IWGIYVHYF

SEQ ID NO: 446 - protein, 9 aa, Artificial Sequence
  Description of Artificial Sequence: Synthetic peptide
FTPELWENY

SEQ ID NO: 447 - protein, 9 aa, Artificial Sequence
  Description of Artificial Sequence: Synthetic peptide
AHSRMDWTP

SEQ ID NO: 448 - protein, 9 aa, Artificial Sequence
  Description of Artificial Sequence: Synthetic peptide
QPFQRKVEE

SEQ ID NO: 449 - protein, 9 aa, Artificial Sequence
  Description of Artificial Sequence: Synthetic peptide
DYENCFESY

SEQ ID NO: 450 - protein, 9 aa, Artificial Sequence
  Description of Artificial Sequence: Synthetic peptide
IEVYHFTNS

SEQ ID NO: 451 - protein, 9 aa, Artificial Sequence
  Description of Artificial Sequence: Synthetic peptide
KALTHDARN

SEQ ID NO: 452 - protein, 9 aa, Artificial Sequence
  Description of Artificial Sequence: Synthetic peptide
KTQMKRLRM

SEQ ID NO: 453 - protein, 9 aa, Artificial Sequence
  Description of Artificial Sequence: Synthetic peptide
KAPWAPMDS

SEQ ID NO: 454 - protein, 9 aa, Artificial Sequence
  Description of Artificial Sequence: Synthetic peptide
ETVMMPMSI

SEQ ID NO: 455 - protein, 9 aa, Artificial Sequence
  Description of Artificial Sequence: Synthetic peptide
DYVDQCQVS

SEQ ID NO: 456 - protein, 9 aa, Artificial Sequence
  Description of Artificial Sequence: Synthetic peptide
RACVGSPLW

SEQ ID NO: 457 - protein, 9 aa, Artificial Sequence
  Description of Artificial Sequence: Synthetic peptide
KIMHSWYND

SEQ ID NO: 458 - protein, 9 aa, Artificial Sequence
  Description of Artificial Sequence: Synthetic peptide
RHEPTQSVS

SEQ ID NO: 459 - protein, 9 aa, Artificial Sequence
  Description of Artificial Sequence: Synthetic peptide
DPKGQSIQA

SEQ ID NO: 460 - protein, 9 aa, Artificial Sequence
  Description of Artificial Sequence: Synthetic peptide
RTTSRDVFD

SEQ ID NO: 461 - protein, 9 aa, Artificial Sequence
  Description of Artificial Sequence: Synthetic peptide
QCMVMTEAD

SEQ ID NO: 462 - protein, 9 aa, Artificial Sequence
  Description of Artificial Sequence: Synthetic peptide
VQHNSESNI

SEQ ID NO: 463 - protein, 9 aa, Artificial Sequence
  Description of Artificial Sequence: Synthetic peptide
WHESTTIGS

SEQ ID NO: 464 - protein, 9 aa, Artificial Sequence
  Description of Artificial Sequence: Synthetic peptide
RHEQYVVAT

SEQ ID NO: 465 - protein, 9 aa, Artificial Sequence
  Description of Artificial Sequence: Synthetic peptide
VVCTDTRAL

SEQ ID NO: 466 - protein, 9 aa, Artificial Sequence
  Description of Artificial Sequence: Synthetic peptide
EHHAMMLHE

SEQ ID NO: 467 - protein, 9 aa, Artificial Sequence
  Description of Artificial Sequence: Synthetic peptide
KACMSHQGR

SEQ ID NO: 468 - protein, 9 aa, Artificial Sequence
  Description of Artificial Sequence: Synthetic peptide
DSPAYTTQY

SEQ ID NO: 469 - protein, 9 aa, Artificial Sequence
  Description of Artificial Sequence: Synthetic peptide
ICELTHCNY

SEQ ID NO: 470 - protein, 9 aa, Artificial Sequence
  Description of Artificial Sequence: Synthetic peptide
KATDLMVNG

SEQ ID NO: 471 - protein, 9 aa, Artificial Sequence
  Description of Artificial Sequence: Synthetic peptide
PQSHEKQLL

SEQ ID NO: 472 - protein, 9 aa, Artificial Sequence
  Description of Artificial Sequence: Synthetic peptide
CHCHYNPFC

SEQ ID NO: 473 - protein, 9 aa, Artificial Sequence
  Description of Artificial Sequence: Synthetic peptide
EAECVAGER

SEQ ID NO: 474 - protein, 9 aa, Artificial Sequence
  Description of Artificial Sequence: Synthetic peptide
EFWTTHSKG

SEQ ID NO: 475 - protein, 9 aa, Artificial Sequence
  Description of Artificial Sequence: Synthetic peptide
GHVLLGWYP

SEQ ID NO: 476 - protein, 9 aa, Artificial Sequence
  Description of Artificial Sequence: Synthetic peptide
YCQQLFLCD

SEQ ID NO: 477 - protein, 9 aa, Artificial Sequence
  Description of Artificial Sequence: Synthetic peptide
AKEPVRLYP

SEQ ID NO: 478 - protein, 9 aa, Artificial Sequence
  Description of Artificial Sequence: Synthetic peptide
EERLFTGCH

SEQ ID NO: 479 - protein, 9 aa, Artificial Sequence
  Description of Artificial Sequence: Synthetic peptide
QTSPKFCMC

SEQ ID NO: 480 - protein, 9 aa, Artificial Sequence
  Description of Artificial Sequence: Synthetic peptide
WMNQCGCKD

SEQ ID NO: 481 - protein, 9 aa, Artificial Sequence
  Description of Artificial Sequence: Synthetic peptide
NYSRGKENE

SEQ ID NO: 482 - protein, 9 aa, Artificial Sequence
  Description of Artificial Sequence: Synthetic peptide
DIQRWEHEG

SEQ ID NO: 483 - protein, 9 aa, Artificial Sequence
  Description of Artificial Sequence: Synthetic peptide
MMAMKQGFY

SEQ ID NO: 484 - protein, 9 aa, Artificial Sequence
  Description of Artificial Sequence: Synthetic peptide
KVNACGNLT

SEQ ID NO: 485 - protein, 9 aa, Artificial Sequence
  Description of Artificial Sequence: Synthetic peptide
ETTHRREWS

SEQ ID NO: 486 - protein, 9 aa, Artificial Sequence
  Description of Artificial Sequence: Synthetic peptide
PTVEEVVVQ

SEQ ID NO: 487 - protein, 9 aa, Artificial Sequence
  Description of Artificial Sequence: Synthetic peptide
SIEPRKTVG

SEQ ID NO: 488 - protein, 9 aa, Artificial Sequence
  Description of Artificial Sequence: Synthetic peptide
QTIMRHAQT

SEQ ID NO: 489 - protein, 9 aa, Artificial Sequence
  Description of Artificial Sequence: Synthetic peptide
RIETVSVPL

SEQ ID NO: 490 - protein, 9 aa, Artificial Sequence
  Description of Artificial Sequence: Synthetic peptide
SRTICVHGN

SEQ ID NO: 491 - protein, 9 aa, Artificial Sequence
  Description of Artificial Sequence: Synthetic peptide
GACKYSMCL

SEQ ID NO: 492 - protein, 9 aa, Artificial Sequence
  Description of Artificial Sequence: Synthetic peptide
GWDQNCKDS

SEQ ID NO: 493 - protein, 9 aa, Artificial Sequence
  Description of Artificial Sequence: Synthetic peptide
ASINCHLTE

SEQ ID NO: 494 - protein, 9 aa, Artificial Sequence
  Description of Artificial Sequence: Synthetic peptide
HYMELLCGC

SEQ ID NO: 495 - protein, 9 aa, Artificial Sequence
  Description of Artificial Sequence: Synthetic peptide
ITRTYQEMQ

SEQ ID NO: 496 - protein, 9 aa, Artificial Sequence
  Description of Artificial Sequence: Synthetic peptide
RANENHPFT

SEQ ID NO: 497 - protein, 9 aa, Artificial Sequence
  Description of Artificial Sequence: Synthetic peptide
LNKMQSYSA

SEQ ID NO: 498 - protein, 9 aa, Artificial Sequence
  Description of Artificial Sequence: Synthetic peptide
NGYLVHACQ

SEQ ID NO: 499 - protein, 9 aa, Artificial Sequence
  Description of Artificial Sequence: Synthetic peptide
LMAYCYANN

SEQ ID NO: 500 - protein, 9 aa, Artificial Sequence
  Description of Artificial Sequence: Synthetic peptide
KESKEHRWA

SEQ ID NO: 501 - protein, 9 aa, Artificial Sequence
  Description of Artificial Sequence: Synthetic peptide
FTTMCEHTA

SEQ ID NO: 502 - protein, 9 aa, Artificial Sequence
  Description of Artificial Sequence: Synthetic peptide
ATMWVQAYG

SEQ ID NO: 503 - protein, 9 aa, Artificial Sequence
  Description of Artificial Sequence: Synthetic peptide
RGQFHLIMD

SEQ ID NO: 504 - protein, 9 aa, Artificial Sequence
  Description of Artificial Sequence: Synthetic peptide
DLVDLRSWM

SEQ ID NO: 505 - protein, 9 aa, Artificial Sequence
  Description of Artificial Sequence: Synthetic peptide
LGAVLNNMV

SEQ ID NO: 506 - protein, 9 aa, Artificial Sequence
  Description of Artificial Sequence: Synthetic peptide
MYRQKEMQT

SEQ ID NO: 507 - protein, 9 aa, Artificial Sequence
  Description of Artificial Sequence: Synthetic peptide
RLEDTVGGS

SEQ ID NO: 508 - protein, 9 aa, Artificial Sequence
  Description of Artificial Sequence: Synthetic peptide
ACHYRLDNC

SEQ ID NO: 509 - protein, 9 aa, Artificial Sequence
  Description of Artificial Sequence: Synthetic peptide
LNNAGYRPC

SEQ ID NO: 510 - protein, 9 aa, Artificial Sequence
  Description of Artificial Sequence: Synthetic peptide
SFSHTDLEA

SEQ ID NO: 511 - protein, 9 aa, Artificial Sequence
  Description of Artificial Sequence: Synthetic peptide
ATEPLKFQY

SEQ ID NO: 512 - protein, 9 aa, Artificial Sequence
  Description of Artificial Sequence: Synthetic peptide
NQNPYDMMG

SEQ ID NO: 513 - protein, 9 aa, Artificial Sequence
  Description of Artificial Sequence: Synthetic peptide
FKIEWSQDI

SEQ ID NO: 514 - protein, 9 aa, Artificial Sequence
  Description of Artificial Sequence: Synthetic peptide
QIGHQYKWD

SEQ ID NO: 515 - protein, 9 aa, Artificial Sequence
  Description of Artificial Sequence: Synthetic peptide
SWSQLQHTD

SEQ ID NO: 516 - protein, 9 aa, Artificial Sequence
  Description of Artificial Sequence: Synthetic peptide
QMMDFQHPA

SEQ ID NO: 517 - protein, 9 aa, Artificial Sequence
  Description of Artificial Sequence: Synthetic peptide
LFTQRGWGN

SEQ ID NO: 518 - protein, 9 aa, Artificial Sequence
  Description of Artificial Sequence: Synthetic peptide
TATQREAFV

SEQ ID NO: 519 - protein, 9 aa, Artificial Sequence
  Description of Artificial Sequence: Synthetic peptide
KENPSEYEM

SEQ ID NO: 520 - protein, 9 aa, Artificial Sequence
  Description of Artificial Sequence: Synthetic peptide
KEFQLQMEP

SEQ ID NO: 521 - protein, 9 aa, Artificial Sequence
  Description of Artificial Sequence: Synthetic peptide
KSAGIRTLL

SEQ ID NO: 522 - protein, 9 aa, Artificial Sequence
  Description of Artificial Sequence: Synthetic peptide
MSEKGYAWV

SEQ ID NO: 523 - protein, 9 aa, Artificial Sequence
  Description of Artificial Sequence: Synthetic peptide
VYCGKDFQA

SEQ ID NO: 524 - protein, 9 aa, Artificial Sequence
  Description of Artificial Sequence: Synthetic peptide
CVKLVMANC

SEQ ID NO: 525 - protein, 9 aa, Artificial Sequence
  Description of Artificial Sequence: Synthetic peptide
ALRPYMDDR

SEQ ID NO: 526 - protein, 9 aa, Artificial Sequence
  Description of Artificial Sequence: Synthetic peptide
CSIQINNCR

SEQ ID NO: 527 - protein, 9 aa, Artificial Sequence
  Description of Artificial Sequence: Synthetic peptide
GTRINTCNG

SEQ ID NO: 528 - protein, 9 aa, Artificial Sequence
  Description of Artificial Sequence: Synthetic peptide
FGAVELDAP

SEQ ID NO: 529 - protein, 9 aa, Artificial Sequence
  Description of Artificial Sequence: Synthetic peptide
YCQRGHLSC

SEQ ID NO: 530 - protein, 9 aa, Artificial Sequence
  Description of Artificial Sequence: Synthetic peptide
HRMNNHAWF

SEQ ID NO: 531 - protein, 9 aa, Artificial Sequence
  Description of Artificial Sequence: Synthetic peptide
NADEKYNNT

SEQ ID NO: 532 - protein, 9 aa, Artificial Sequence
  Description of Artificial Sequence: Synthetic peptide
MGATKSDDF

SEQ ID NO: 533 - protein, 9 aa, Artificial Sequence
  Description of Artificial Sequence: Synthetic peptide
SMHDYNFNV

SEQ ID NO: 534 - protein, 9 aa, Artificial Sequence
  Description of Artificial Sequence: Synthetic peptide
GNECFHNVE

SEQ ID NO: 535 - protein, 9 aa, Artificial Sequence
  Description of Artificial Sequence: Synthetic peptide
GVWMPHGWR

SEQ ID NO: 536 - protein, 9 aa, Artificial Sequence
  Description of Artificial Sequence: Synthetic peptide
EIWPAAWMD

SEQ ID NO: 537 - protein, 9 aa, Artificial Sequence
  Description of Artificial Sequence: Synthetic peptide
APKWQIVDP

SEQ ID NO: 538 - protein, 9 aa, Artificial Sequence
  Description of Artificial Sequence: Synthetic peptide
HAMHWWSPM

SEQ ID NO: 539 - protein, 9 aa, Artificial Sequence
  Description of Artificial Sequence: Synthetic peptide
QCKYSERGT

SEQ ID NO: 540 - protein, 9 aa, Artificial Sequence
  Description of Artificial Sequence: Synthetic peptide
TCCMWTFIW

SEQ ID NO: 541 - protein, 9 aa, Artificial Sequence
  Description of Artificial Sequence: Synthetic peptide
ETGYRENPC

SEQ ID NO: 542 - protein, 9 aa, Artificial Sequence
  Description of Artificial Sequence: Synthetic peptide
MEMFTMKSC

SEQ ID NO: 543 - protein, 9 aa, Artificial Sequence
  Description of Artificial Sequence: Synthetic peptide
PQGFCKPQC

SEQ ID NO: 544 - protein, 9 aa, Artificial Sequence
  Description of Artificial Sequence: Synthetic peptide
KTTFDVACY

SEQ ID NO: 545 - protein, 9 aa, Artificial Sequence
  Description of Artificial Sequence: Synthetic peptide
WCRTPQREN

SEQ ID NO: 546 - protein, 9 aa, Artificial Sequence
  Description of Artificial Sequence: Synthetic peptide
GSQQMQASQ

SEQ ID NO: 547 - protein, 9 aa, Artificial Sequence
  Description of Artificial Sequence: Synthetic peptide
ITGSPQNGC

SEQ ID NO: 548 - protein, 9 aa, Artificial Sequence
  Description of Artificial Sequence: Synthetic peptide
GTVEAPQSF

SEQ ID NO: 549 - protein, 9 aa, Artificial Sequence
  Description of Artificial Sequence: Synthetic peptide
LNCPSKDET

SEQ ID NO: 550 - protein, 9 aa, Artificial Sequence
  Description of Artificial Sequence: Synthetic peptide
CSNTETHGV

SEQ ID NO: 551 - protein, 9 aa, Artificial Sequence
  Description of Artificial Sequence: Synthetic peptide
QMEQWHRGG

SEQ ID NO: 552 - protein, 9 aa, Artificial Sequence
  Description of Artificial Sequence: Synthetic peptide
IPFNSMIYC

SEQ ID NO: 553 - protein, 9 aa, Artificial Sequence
  Description of Artificial Sequence: Synthetic peptide
RVEQWRGQQ

SEQ ID NO: 554 - protein, 9 aa, Artificial Sequence
  Description of Artificial Sequence: Synthetic peptide
WNMPWGFYH

SEQ ID NO: 555 - protein, 9 aa, Artificial Sequence
  Description of Artificial Sequence: Synthetic peptide
MISCMDSWN

SEQ ID NO: 556 - protein, 9 aa, Artificial Sequence
  Description of Artificial Sequence: Synthetic peptide
TSRALDVAA

SEQ ID NO: 557 - protein, 9 aa, Artificial Sequence
  Description of Artificial Sequence: Synthetic peptide
FFRWRWGLG

SEQ ID NO: 558 - protein, 9 aa, Artificial Sequence
  Description of Artificial Sequence: Synthetic peptide
FPKCAIWHY

SEQ ID NO: 559 - protein, 9 aa, Artificial Sequence
  Description of Artificial Sequence: Synthetic peptide
NMIKRCSQG

SEQ ID NO: 560 - protein, 9 aa, Artificial Sequence
  Description of Artificial Sequence: Synthetic peptide
GTSVNTLMM

SEQ ID NO: 561 - protein, 9 aa, Artificial Sequence
  Description of Artificial Sequence: Synthetic peptide
MRQRTYICQ

SEQ ID NO: 562 - protein, 9 aa, Artificial Sequence
  Description of Artificial Sequence: Synthetic peptide
RGCMAECMP

SEQ ID NO: 563 - protein, 9 aa, Artificial Sequence
  Description of Artificial Sequence: Synthetic peptide
MPMPVYQRD

SEQ ID NO: 564 - protein, 9 aa, Artificial Sequence
  Description of Artificial Sequence: Synthetic peptide
ALNKTLAES

SEQ ID NO: 565 - protein, 9 aa, Artificial Sequence
  Description of Artificial Sequence: Synthetic peptide
EAGMWPSKA

SEQ ID NO: 566 - protein, 9 aa, Artificial Sequence
  Description of Artificial Sequence: Synthetic peptide
AAVKEQQVM

SEQ ID NO: 567 - protein, 9 aa, Artificial Sequence
  Description of Artificial Sequence: Synthetic peptide
SAQYSGFDT

SEQ ID NO: 568 - protein, 9 aa, Artificial Sequence
  Description of Artificial Sequence: Synthetic peptide
LILDFNKID

SEQ ID NO: 569 - protein, 9 aa, Artificial Sequence
  Description of Artificial Sequence: Synthetic peptide
MSAVSLGRS

SEQ ID NO: 570 - protein, 9 aa, Artificial Sequence
  Description of Artificial Sequence: Synthetic peptide
RWGSPMAVP

SEQ ID NO: 571 - protein, 9 aa, Artificial Sequence
  Description of Artificial Sequence: Synthetic peptide
KTVTNGDAG

SEQ ID NO: 572 - protein, 9 aa, Artificial Sequence
  Description of Artificial Sequence: Synthetic peptide
YTMSMQMQR

SEQ ID NO: 573 - protein, 9 aa, Artificial Sequence
  Description of Artificial Sequence: Synthetic peptide
AHEHYRIFP

SEQ ID NO: 574 - protein, 9 aa, Artificial Sequence
  Description of Artificial Sequence: Synthetic peptide
GKFPMPTHS

SEQ ID NO: 575 - protein, 9 aa, Artificial Sequence
  Description of Artificial Sequence: Synthetic peptide
KIENRGQCR

SEQ ID NO: 576 - protein, 9 aa, Artificial Sequence
  Description of Artificial Sequence: Synthetic peptide
MWEMRRAMG

SEQ ID NO: 577 - protein, 9 aa, Artificial Sequence
  Description of Artificial Sequence: Synthetic peptide
HGSSYNTVQ

SEQ ID NO: 578 - protein, 9 aa, Artificial Sequence
  Description of Artificial Sequence: Synthetic peptide
VIKAFQHFN

SEQ ID NO: 579 - protein, 9 aa, Artificial Sequence
  Description of Artificial Sequence: Synthetic peptide
EVRCNKCRS

SEQ ID NO: 580 - protein, 9 aa, Artificial Sequence
  Description of Artificial Sequence: Synthetic peptide
LALQFQYNS

SEQ ID NO: 581 - protein, 9 aa, Artificial Sequence
  Description of Artificial Sequence: Synthetic peptide
GVITVDAKG

SEQ ID NO: 582 - protein, 9 aa, Artificial Sequence
  Description of Artificial Sequence: Synthetic peptide
CLHHHYPVT

SEQ ID NO: 583 - protein, 9 aa, Artificial Sequence
  Description of Artificial Sequence: Synthetic peptide
AFCRGHYQA

SEQ ID NO: 584 - protein, 9 aa, Artificial Sequence
  Description of Artificial Sequence: Synthetic peptide
KTGWDSHWS

SEQ ID NO: 585 - protein, 9 aa, Artificial Sequence
  Description of Artificial Sequence: Synthetic peptide
RYEMMDTSD

SEQ ID NO: 586 - protein, 9 aa, Artificial Sequence
  Description of Artificial Sequence: Synthetic peptide
DIFWSSMDF

SEQ ID NO: 587 - protein, 9 aa, Artificial Sequence
  Description of Artificial Sequence: Synthetic peptide
MSTHVLKWV

SEQ ID NO: 588 - protein, 9 aa, Artificial Sequence
  Description of Artificial Sequence: Synthetic peptide
CDVWWFPNL

SEQ ID NO: 589 - protein, 9 aa, Artificial Sequence
  Description of Artificial Sequence: Synthetic peptide
IVFHNKFQH

SEQ ID NO: 590 - protein, 9 aa, Artificial Sequence
  Description of Artificial Sequence: Synthetic peptide
SHIQSASNL

SEQ ID NO: 591 - protein, 9 aa, Artificial Sequence
  Description of Artificial Sequence: Synthetic peptide
VKQLRQDGF

SEQ ID NO: 592 - protein, 9 aa, Artificial Sequence
  Description of Artificial Sequence: Synthetic peptide
DKCLNNKFY

SEQ ID NO: 593 - protein, 9 aa, Artificial Sequence
  Description of Artificial Sequence: Synthetic peptide
RNDWQQVFS

SEQ ID NO: 594 - protein, 9 aa, Artificial Sequence
  Description of Artificial Sequence: Synthetic peptide
QRREQCTST

SEQ ID NO: 595 - protein, 9 aa, Artificial Sequence
  Description of Artificial Sequence: Synthetic peptide
YHWSYEGAT

SEQ ID NO: 596 - protein, 9 aa, Artificial Sequence
  Description of Artificial Sequence: Synthetic peptide
TDFDKRQVP

SEQ ID NO: 597 - protein, 9 aa, Artificial Sequence
  Description of Artificial Sequence: Synthetic peptide
QISMKGEHG

SEQ ID NO: 598 - protein, 9 aa, Artificial Sequence
  Description of Artificial Sequence: Synthetic peptide
LVGERKNAY

SEQ ID NO: 599 - protein, 9 aa, Artificial Sequence
  Description of Artificial Sequence: Synthetic peptide
DPMKIFVSH

SEQ ID NO: 600 - protein, 9 aa, Artificial Sequence
  Description of Artificial Sequence: Synthetic peptide
KQTRTDYAY

SEQ ID NO: 601 - protein, 9 aa, Artificial Sequence
  Description of Artificial Sequence: Synthetic peptide
AVAMIRPNQ

SEQ ID NO: 602 - protein, 9 aa, Artificial Sequence
  Description of Artificial Sequence: Synthetic peptide
ESTHMLYEM

SEQ ID NO: 603 - protein, 9 aa, Artificial Sequence
  Description of Artificial Sequence: Synthetic peptide
VDADYCSCS

SEQ ID NO: 604 - protein, 9 aa, Artificial Sequence
  Description of Artificial Sequence: Synthetic peptide
EMVRMQRGT

SEQ ID NO: 605 - protein, 9 aa, Artificial Sequence
  Description of Artificial Sequence: Synthetic peptide
NCDHRFGTL

SEQ ID NO: 606 - protein, 9 aa, Artificial Sequence
  Description of Artificial Sequence: Synthetic peptide
SVVFSAAEV

SEQ ID NO: 607 - protein, 9 aa, Artificial Sequence
  Description of Artificial Sequence: Synthetic peptide
NARPMCGQV

SEQ ID NO: 608 - protein, 9 aa, Artificial Sequence
  Description of Artificial Sequence: Synthetic peptide
TEATEMTYY

SEQ ID NO: 609 - protein, 9 aa, Artificial Sequence
  Description of Artificial Sequence: Synthetic peptide
AYGSFEKDW

SEQ ID NO: 610 - protein, 9 aa, Artificial Sequence
  Description of Artificial Sequence: Synthetic peptide
MNSFYRAEW

SEQ ID NO: 611 - protein, 9 aa, Artificial Sequence
  Description of Artificial Sequence: Synthetic peptide
MIDNCKICL

SEQ ID NO: 612 - protein, 9 aa, Artificial Sequence
  Description of Artificial Sequence: Synthetic peptide
VCRGSPLAE

SEQ ID NO: 613 - protein, 9 aa, Artificial Sequence
  Description of Artificial Sequence: Synthetic peptide
DTRMDQCCY

SEQ ID NO: 614 - protein, 9 aa, Artificial Sequence
  Description of Artificial Sequence: Synthetic peptide
LVDCSNTCQ

SEQ ID NO: 615 - protein, 9 aa, Artificial Sequence
  Description of Artificial Sequence: Synthetic peptide
INKNMDAAY

SEQ ID NO: 616 - protein, 9 aa, Artificial Sequence
  Description of Artificial Sequence: Synthetic peptide
TGMTFNSFR

SEQ ID NO: 617 - protein, 9 aa, Artificial Sequence
  Description of Artificial Sequence: Synthetic peptide
AWKIAHNSF

SEQ ID NO: 618 - protein, 9 aa, Artificial Sequence
  Description of Artificial Sequence: Synthetic peptide
NFMQMSIMG

SEQ ID NO: 619 - protein, 9 aa, Artificial Sequence
  Description of Artificial Sequence: Synthetic peptide
WIKHCWPPH

SEQ ID NO: 620 - protein, 9 aa, Artificial Sequence
  Description of Artificial Sequence: Synthetic peptide
NLWNIAMQQ

SEQ ID NO: 621 - protein, 9 aa, Artificial Sequence
  Description of Artificial Sequence: Synthetic peptide
EHMDRADDA

SEQ ID NO: 622 - protein, 9 aa, Artificial Sequence
  Description of Artificial Sequence: Synthetic peptide
AQDVYYPGS

SEQ ID NO: 623 - protein, 9 aa, Artificial Sequence
  Description of Artificial Sequence: Synthetic peptide
FPQTMHAQA

SEQ ID NO: 624 - protein, 9 aa, Artificial Sequence
  Description of Artificial Sequence: Synthetic peptide
TFGCIESMQ

SEQ ID NO: 625 - protein, 9 aa, Artificial Sequence
  Description of Artificial Sequence: Synthetic peptide
KFFYTELMH

SEQ ID NO: 626 - protein, 9 aa, Artificial Sequence
  Description of Artificial Sequence: Synthetic peptide
GRLGPGTWK

SEQ ID NO: 627 - protein, 9 aa, Artificial Sequence
  Description of Artificial Sequence: Synthetic peptide
ASTDGTWKD

SEQ ID NO: 628 - protein, 9 aa, Artificial Sequence
  Description of Artificial Sequence: Synthetic peptide
DARPFLAWM

SEQ ID NO: 629 - protein, 9 aa, Artificial Sequence
  Description of Artificial Sequence: Synthetic peptide
KFHSKERMN

SEQ ID NO: 630 - protein, 9 aa, Artificial Sequence
  Description of Artificial Sequence: Synthetic peptide
SLQHFPECA

SEQ ID NO: 631 - protein, 9 aa, Artificial Sequence
  Description of Artificial Sequence: Synthetic peptide
VCVSAHHHF

SEQ ID NO: 632 - protein, 9 aa, Artificial Sequence
  Description of Artificial Sequence: Synthetic peptide
AVIFELDAT

SEQ ID NO: 633 - protein, 9 aa, Artificial Sequence
  Description of Artificial Sequence: Synthetic peptide
EQADQMQVD

SEQ ID NO: 634 - protein, 9 aa, Artificial Sequence
  Description of Artificial Sequence: Synthetic peptide
MSQFKAYLF

SEQ ID NO: 635 - protein, 9 aa, Artificial Sequence
  Description of Artificial Sequence: Synthetic peptide
EMSIQSSLG

SEQ ID NO: 636 - protein, 9 aa, Artificial Sequence
  Description of Artificial Sequence: Synthetic peptide
GTGYRTFIG

SEQ ID NO: 637 - protein, 9 aa, Artificial Sequence
  Description of Artificial Sequence: Synthetic peptide
KASHTVTGT

SEQ ID NO: 638 - protein, 9 aa, Artificial Sequence
  Description of Artificial Sequence: Synthetic peptide
NSVALENRG

SEQ ID NO: 639 - protein, 9 aa, Artificial Sequence
  Description of Artificial Sequence: Synthetic peptide
NEGPLMCWF

SEQ ID NO: 640 - protein, 9 aa, Artificial Sequence
  Description of Artificial Sequence: Synthetic peptide
NNELQSRPK

SEQ ID NO: 641 - protein, 9 aa, Artificial Sequence
  Description of Artificial Sequence: Synthetic peptide
NGTQCLNMD

SEQ ID NO: 642 - protein, 9 aa, Artificial Sequence
  Description of Artificial Sequence: Synthetic peptide
SSTWQNVDK

SEQ ID NO: 643 - protein, 9 aa, Artificial Sequence
  Description of Artificial Sequence: Synthetic peptide
YMVPYSNYP

SEQ ID NO: 644 - protein, 9 aa, Artificial Sequence
  Description of Artificial Sequence: Synthetic peptide
WFDRPMCMF

SEQ ID NO: 645 - protein, 9 aa, Artificial Sequence
  Description of Artificial Sequence: Synthetic peptide
LECTALVAM

SEQ ID NO: 646 - protein, 9 aa, Artificial Sequence
  Description of Artificial Sequence: Synthetic peptide
QVQSGQFIF

SEQ ID NO: 647 - protein, 9 aa, Artificial Sequence
  Description of Artificial Sequence: Synthetic peptide
KMETMICFD

SEQ ID NO: 648 - protein, 9 aa, Artificial Sequence
  Description of Artificial Sequence: Synthetic peptide
QSDAVHEPA

SEQ ID NO: 649 - protein, 9 aa, Artificial Sequence
  Description of Artificial Sequence: Synthetic peptide
GYMCEDAGI

SEQ ID NO: 650 - protein, 9 aa, Artificial Sequence
  Description of Artificial Sequence: Synthetic peptide
EIHPGDLND

SEQ ID NO: 651 - protein, 9 aa, Artificial Sequence
  Description of Artificial Sequence: Synthetic peptide
EFSKACTNE

SEQ ID NO: 652 - protein, 9 aa, Artificial Sequence
  Description of Artificial Sequence: Synthetic peptide
KSTYYNLKW

SEQ ID NO: 653 - protein, 9 aa, Artificial Sequence
  Description of Artificial Sequence: Synthetic peptide
TSSRTNPWG

SEQ ID NO: 654 - protein, 9 aa, Artificial Sequence
  Description of Artificial Sequence: Synthetic peptide
SFKGFHLQN

SEQ ID NO: 655 - protein, 9 aa, Artificial Sequence
  Description of Artificial Sequence: Synthetic peptide
CDEWDNLTH

SEQ ID NO: 656 - protein, 9 aa, Artificial Sequence
  Description of Artificial Sequence: Synthetic peptide
DAGIGMKFY

SEQ ID NO: 657 - protein, 9 aa, Artificial Sequence
  Description of Artificial Sequence: Synthetic peptide
LGDQAGYHV

SEQ ID NO: 658 - protein, 9 aa, Artificial Sequence
  Description of Artificial Sequence: Synthetic peptide
IIVWMMMYR

SEQ ID NO: 659 - protein, 9 aa, Artificial Sequence
  Description of Artificial Sequence: Synthetic peptide
GADEWLLTM

SEQ ID NO: 660 - protein, 9 aa, Artificial Sequence
  Description of Artificial Sequence: Synthetic peptide
QSYPTMYQC

SEQ ID NO: 661 - protein, 9 aa, Artificial Sequence
  Description of Artificial Sequence: Synthetic peptide
DRTWTMTQM

SEQ ID NO: 662 - protein, 9 aa, Artificial Sequence
  Description of Artificial Sequence: Synthetic peptide
TSWTTEHRM

SEQ ID NO: 663 - protein, 9 aa, Artificial Sequence
  Description of Artificial Sequence: Synthetic peptide
TLRICELHG

SEQ ID NO: 664 - protein, 9 aa, Artificial Sequence
  Description of Artificial Sequence: Synthetic peptide
CQASHEHAH

SEQ ID NO: 665 - protein, 9 aa, Artificial Sequence
  Description of Artificial Sequence: Synthetic peptide
ESAEPRMIP

SEQ ID NO: 666 - protein, 9 aa, Artificial Sequence
  Description of Artificial Sequence: Synthetic peptide
FWMQLWCLP

SEQ ID NO: 667 - protein, 9 aa, Artificial Sequence
  Description of Artificial Sequence: Synthetic peptide
QGYCRNCTG

SEQ ID NO: 668 - protein, 9 aa, Artificial Sequence
  Description of Artificial Sequence: Synthetic peptide
ESCLVRRGW

SEQ ID NO: 669 - protein, 9 aa, Artificial Sequence
  Description of Artificial Sequence: Synthetic peptide
QIRCTCGWP

SEQ ID NO: 670 - protein, 9 aa, Artificial Sequence
  Description of Artificial Sequence: Synthetic peptide
HAYQHDHSS

SEQ ID NO: 671 - protein, 9 aa, Artificial Sequence
  Description of Artificial Sequence: Synthetic peptide
DMAVSEAHC

SEQ ID NO: 672 - protein, 9 aa, Artificial Sequence
  Description of Artificial Sequence: Synthetic peptide
WAGMAYHAQ

SEQ ID NO: 673 - protein, 9 aa, Artificial Sequence
  Description of Artificial Sequence: Synthetic peptide
FQQDIQIGQ

SEQ ID NO: 674 - protein, 9 aa, Artificial Sequence
  Description of Artificial Sequence: Synthetic peptide
VVHKGRWKE

SEQ ID NO: 675 - protein, 9 aa, Artificial Sequence
  Description of Artificial Sequence: Synthetic peptide
MQLRQSDKW

SEQ ID NO: 676 - protein, 9 aa, Artificial Sequence
  Description of Artificial Sequence: Synthetic peptide
YVRQFPIEL

SEQ ID NO: 677 - protein, 9 aa, Artificial Sequence
  Description of Artificial Sequence: Synthetic peptide
IIHRTEGAA

SEQ ID NO: 678 - protein, 9 aa, Artificial Sequence
  Description of Artificial Sequence: Synthetic peptide
GQYWGQGWL

SEQ ID NO: 679 - protein, 9 aa, Artificial Sequence
  Description of Artificial Sequence: Synthetic peptide
GSTHMNQEG

SEQ ID NO: 680 - protein, 9 aa, Artificial Sequence
  Description of Artificial Sequence: Synthetic peptide
INAGDKPNT

SEQ ID NO: 681 - protein, 9 aa, Artificial Sequence
  Description of Artificial Sequence: Synthetic peptide
LGTAMREMQ

SEQ ID NO: 682 - protein, 9 aa, Artificial Sequence
  Description of Artificial Sequence: Synthetic peptide
PGGGDRPAC

SEQ ID NO: 683 - protein, 9 aa, Artificial Sequence
  Description of Artificial Sequence: Synthetic peptide
QDVQMWYQI

SEQ ID NO: 684 - protein, 9 aa, Artificial Sequence
  Description of Artificial Sequence: Synthetic peptide
QARAVMTAD

SEQ ID NO: 685 - protein, 9 aa, Artificial Sequence
  Description of Artificial Sequence: Synthetic peptide
GAHDPKVWY

SEQ ID NO: 686 - protein, 9 aa, Artificial Sequence
  Description of Artificial Sequence: Synthetic peptide
GTLGYHITG

SEQ ID NO: 687 - protein, 9 aa, Artificial Sequence
  Description of Artificial Sequence: Synthetic peptide
SMLMMITGM

SEQ ID NO: 688 - protein, 9 aa, Artificial Sequence
  Description of Artificial Sequence: Synthetic peptide
RDDYGIYDN

SEQ ID NO: 689 - protein, 9 aa, Artificial Sequence
  Description of Artificial Sequence: Synthetic peptide
HLVTTRHSH

SEQ ID NO: 690 - protein, 9 aa, Artificial Sequence
  Description of Artificial Sequence: Synthetic peptide
ITDLRCWLK

SEQ ID NO: 691 - protein, 9 aa, Artificial Sequence
  Description of Artificial Sequence: Synthetic peptide
IMVRELMSS

SEQ ID NO: 692 - protein, 9 aa, Artificial Sequence
  Description of Artificial Sequence: Synthetic peptide
NAEHCFMGQ

SEQ ID NO: 693 - protein, 9 aa, Artificial Sequence
  Description of Artificial Sequence: Synthetic peptide
NNLQWMYAK

SEQ ID NO: 694 - protein, 9 aa, Artificial Sequence
  Description of Artificial Sequence: Synthetic peptide
SPMPFLNVL

SEQ ID NO: 695 - protein, 9 aa, Artificial Sequence
  Description of Artificial Sequence: Synthetic peptide
CEQQLIAEG

SEQ ID NO: 696 - protein, 9 aa, Artificial Sequence
  Description of Artificial Sequence: Synthetic peptide
NDKYAFADR

SEQ ID NO: 697 - protein, 9 aa, Artificial Sequence
  Description of Artificial Sequence: Synthetic peptide
WIKRHIPSG

SEQ ID NO: 698 - protein, 9 aa, Artificial Sequence
  Description of Artificial Sequence: Synthetic peptide
REGAKHCVN

SEQ ID NO: 699 - protein, 9 aa, Artificial Sequence
  Description of Artificial Sequence: Synthetic peptide
CDDWTFERQ

SEQ ID NO: 700 - protein, 9 aa, Artificial Sequence
  Description of Artificial Sequence: Synthetic peptide
GVGPSHGER

SEQ ID NO: 701 - protein, 9 aa, Artificial Sequence
  Description of Artificial Sequence: Synthetic peptide
ESTFWQHTF

SEQ ID NO: 702 - protein, 9 aa, Artificial Sequence
  Description of Artificial Sequence: Synthetic peptide
MFVCCTIIV

SEQ ID NO: 703 - protein, 9 aa, Artificial Sequence
  Description of Artificial Sequence: Synthetic peptide
QKYEPRFFG

SEQ ID NO: 704 - protein, 9 aa, Artificial Sequence
  Description of Artificial Sequence: Synthetic peptide
AHVKIQLSW

SEQ ID NO: 705 - protein, 9 aa, Artificial Sequence
  Description of Artificial Sequence: Synthetic peptide
TFSHMLSVE

SEQ ID NO: 706 - protein, 9 aa, Artificial Sequence
  Description of Artificial Sequence: Synthetic peptide
LRPLQHIQL

SEQ ID NO: 707 - protein, 9 aa, Artificial Sequence
  Description of Artificial Sequence: Synthetic peptide
MANGNWGVW

SEQ ID NO: 708 - protein, 9 aa, Artificial Sequence
  Description of Artificial Sequence: Synthetic peptide
VTDAAMFMG

SEQ ID NO: 709 - protein, 9 aa, Artificial Sequence
  Description of Artificial Sequence: Synthetic peptide
WHEEKPANS

SEQ ID NO: 710 - protein, 9 aa, Artificial Sequence
  Description of Artificial Sequence: Synthetic peptide
KCQRMSVQQ

SEQ ID NO: 711 - protein, 9 aa, Artificial Sequence
  Description of Artificial Sequence: Synthetic peptide
DDRIGHCRN

SEQ ID NO: 712 - protein, 9 aa, Artificial Sequence
  Description of Artificial Sequence: Synthetic peptide
IAPEARCGT

SEQ ID NO: 713 - protein, 9 aa, Artificial Sequence
  Description of Artificial Sequence: Synthetic peptide
GCSSSVNMR

SEQ ID NO: 714 - protein, 9 aa, Artificial Sequence
  Description of Artificial Sequence: Synthetic peptide
RKRVRAYSE

SEQ ID NO: 715 - protein, 9 aa, Artificial Sequence
  Description of Artificial Sequence: Synthetic peptide
QEPKEDHIV

SEQ ID NO: 716 - protein, 9 aa, Artificial Sequence
  Description of Artificial Sequence: Synthetic peptide
SILPYPIDV

SEQ ID NO: 717 - protein, 9 aa, Artificial Sequence
  Description of Artificial Sequence: Synthetic peptide
ILDIINTET

SEQ ID NO: 718 - protein, 9 aa, Artificial Sequence
  Description of Artificial Sequence: Synthetic peptide
RFMLESWLH

SEQ ID NO: 719 - protein, 9 aa, Artificial Sequence
  Description of Artificial Sequence: Synthetic peptide
NSAHVHYFH

SEQ ID NO: 720 - protein, 9 aa, Artificial Sequence
  Description of Artificial Sequence: Synthetic peptide
LVKGHMTTS

SEQ ID NO: 721 - protein, 9 aa, Artificial Sequence
  Description of Artificial Sequence: Synthetic peptide
DKYANVHNE

SEQ ID NO: 722 - protein, 9 aa, Artificial Sequence
  Description of Artificial Sequence: Synthetic peptide
RYCTPDHEV

SEQ ID NO: 723 - protein, 9 aa, Artificial Sequence
  Description of Artificial Sequence: Synthetic peptide
RYHRRHDKP

SEQ ID NO: 724 - protein, 9 aa, Artificial Sequence
  Description of Artificial Sequence: Synthetic peptide
SMRMFEHSC

SEQ ID NO: 725 - protein, 9 aa, Artificial Sequence
  Description of Artificial Sequence: Synthetic peptide
SRCNKPTVR

SEQ ID NO: 726 - protein, 9 aa, Artificial Sequence
  Description of Artificial Sequence: Synthetic peptide
TFHQSDYWE

SEQ ID NO: 727 - protein, 9 aa, Artificial Sequence
  Description of Artificial Sequence: Synthetic peptide
VLQMPWLYT

SEQ ID NO: 728 - protein, 9 aa, Artificial Sequence
  Description of Artificial Sequence: Synthetic peptide
VCTPPLNMQ

SEQ ID NO: 729 - protein, 9 aa, Artificial Sequence
  Description of Artificial Sequence: Synthetic peptide
LNSDRLIEY

SEQ ID NO: 730 - protein, 9 aa, Artificial Sequence
  Description of Artificial Sequence: Synthetic peptide
CETYVPVIY

SEQ ID NO: 731 - protein, 9 aa, Artificial Sequence
  Description of Artificial Sequence: Synthetic peptide
WVPTFHARY

SEQ ID NO: 732 - protein, 9 aa, Artificial Sequence
  Description of Artificial Sequence: Synthetic peptide
CEIRTYEWS

SEQ ID NO: 733 - protein, 9 aa, Artificial Sequence
  Description of Artificial Sequence: Synthetic peptide
KHDGFSVVG

SEQ ID NO: 734 - protein, 9 aa, Artificial Sequence
  Description of Artificial Sequence: Synthetic peptide
AWYHTQDDM

SEQ ID NO: 735 - protein, 9 aa, Artificial Sequence
  Description of Artificial Sequence: Synthetic peptide
WMCEFSCIQ

SEQ ID NO: 736 - protein, 9 aa, Artificial Sequence
  Description of Artificial Sequence: Synthetic peptide
AMVMSKTES

SEQ ID NO: 737 - protein, 9 aa, Artificial Sequence
  Description of Artificial Sequence: Synthetic peptide
NFCCLECCI

SEQ ID NO: 738 - protein, 9 aa, Artificial Sequence
  Description of Artificial Sequence: Synthetic peptide
RTSPALLCA

SEQ ID NO: 739 - protein, 9 aa, Artificial Sequence
  Description of Artificial Sequence: Synthetic peptide
DITLWMATE

SEQ ID NO: 740 - protein, 9 aa, Artificial Sequence
  Description of Artificial Sequence: Synthetic peptide
AVAEIRPEP

SEQ ID NO: 741 - protein, 9 aa, Artificial Sequence
  Description of Artificial Sequence: Synthetic peptide
SARVTTMLY

SEQ ID NO: 742 - protein, 9 aa, Artificial Sequence
  Description of Artificial Sequence: Synthetic peptide
TLRAEMSFH

SEQ ID NO: 743 - protein, 9 aa, Artificial Sequence
  Description of Artificial Sequence: Synthetic peptide
ASKQNGINC

SEQ ID NO: 744 - protein, 9 aa, Artificial Sequence
  Description of Artificial Sequence: Synthetic peptide
RRCPALTIR

SEQ ID NO: 745 - protein, 9 aa, Artificial Sequence
  Description of Artificial Sequence: Synthetic peptide
ARPLVCQAL

SEQ ID NO: 746 - protein, 9 aa, Artificial Sequence
  Description of Artificial Sequence: Synthetic peptide
MMLGYMGQD

SEQ ID NO: 747 - protein, 9 aa, Artificial Sequence
  Description of Artificial Sequence: Synthetic peptide
QEHIYKHSN

SEQ ID NO: 748 - protein, 9 aa, Artificial Sequence
  Description of Artificial Sequence: Synthetic peptide
DQNTFPETG

SEQ ID NO: 749 - protein, 9 aa, Artificial Sequence
  Description of Artificial Sequence: Synthetic peptide
KSEGWLLGD

SEQ ID NO: 750 - protein, 9 aa, Artificial Sequence
  Description of Artificial Sequence: Synthetic peptide
SPCFDVFEE

SEQ ID NO: 751 - protein, 9 aa, Artificial Sequence
  Description of Artificial Sequence: Synthetic peptide
TINKFPWVC

SEQ ID NO: 752 - protein, 9 aa, Artificial Sequence
  Description of Artificial Sequence: Synthetic peptide
IRFTTQIVD

SEQ ID NO: 753 - protein, 9 aa, Artificial Sequence
  Description of Artificial Sequence: Synthetic peptide
SVWEKTQMR

SEQ ID NO: 754 - protein, 9 aa, Artificial Sequence
  Description of Artificial Sequence: Synthetic peptide
CPCHKWASC

SEQ ID NO: 755 - protein, 9 aa, Artificial Sequence
  Description of Artificial Sequence: Synthetic peptide
HDHAAKQLD

SEQ ID NO: 756 - protein, 9 aa, Artificial Sequence
  Description of Artificial Sequence: Synthetic peptide
RPVGKLYMI

SEQ ID NO: 757 - protein, 9 aa, Artificial Sequence
  Description of Artificial Sequence: Synthetic peptide
MWGCKLFVC

SEQ ID NO: 758 - protein, 9 aa, Artificial Sequence
  Description of Artificial Sequence: Synthetic peptide
KHNPSRHDI

SEQ ID NO: 759 - protein, 9 aa, Artificial Sequence
  Description of Artificial Sequence: Synthetic peptide
NPYQCIVAG

SEQ ID NO: 760 - protein, 9 aa, Artificial Sequence
  Description of Artificial Sequence: Synthetic peptide
CMRGGQKLT

SEQ ID NO: 761 - protein, 9 aa, Artificial Sequence
  Description of Artificial Sequence: Synthetic peptide
DVDTSQFDR

SEQ ID NO: 762 - protein, 9 aa, Artificial Sequence
  Description of Artificial Sequence: Synthetic peptide
VCVKWRNVN

SEQ ID NO: 763 - protein, 9 aa, Artificial Sequence
  Description of Artificial Sequence: Synthetic peptide
WASPSVWRR

SEQ ID NO: 764 - protein, 9 aa, Artificial Sequence
  Description of Artificial Sequence: Synthetic peptide
YFHYRYDYG

SEQ ID NO: 765 - protein, 9 aa, Artificial Sequence
  Description of Artificial Sequence: Synthetic peptide
KVYYIISHQ

SEQ ID NO: 766 - protein, 9 aa, Artificial Sequence
  Description of Artificial Sequence: Synthetic peptide
QTYRGDWQK

SEQ ID NO: 767 - protein, 9 aa, Artificial Sequence
  Description of Artificial Sequence: Synthetic peptide
RVDKAGAIF

SEQ ID NO: 768 - protein, 9 aa, Artificial Sequence
  Description of Artificial Sequence: Synthetic peptide
VFNLMLQDK

SEQ ID NO: 769 - protein, 9 aa, Artificial Sequence
  Description of Artificial Sequence: Synthetic peptide
VKKPQYDMH

SEQ ID NO: 770 - protein, 9 aa, Artificial Sequence
  Description of Artificial Sequence: Synthetic peptide
QYVQCAAKD

SEQ ID NO: 771 - protein, 9 aa, Artificial Sequence
  Description of Artificial Sequence: Synthetic peptide
EGCYFWKQV

SEQ ID NO: 772 - protein, 9 aa, Artificial Sequence
  Description of Artificial Sequence: Synthetic peptide
TMKTWIYRN

SEQ ID NO: 773 - protein, 9 aa, Artificial Sequence
  Description of Artificial Sequence: Synthetic peptide
GWESFPHCG

SEQ ID NO: 774 - protein, 9 aa, Artificial Sequence
  Description of Artificial Sequence: Synthetic peptide
QKAEHLFVG

SEQ ID NO: 775 - protein, 9 aa, Artificial Sequence
  Description of Artificial Sequence: Synthetic peptide
PDSIPNSWC

SEQ ID NO: 776 - protein, 9 aa, Artificial Sequence
  Description of Artificial Sequence: Synthetic peptide
CHGRMLCYI

SEQ ID NO: 777 - protein, 9 aa, Artificial Sequence
  Description of Artificial Sequence: Synthetic peptide
NQQRTYNSG

SEQ ID NO: 778 - protein, 9 aa, Artificial Sequence
  Description of Artificial Sequence: Synthetic peptide
LDTKTLANS

SEQ ID NO: 779 - protein, 9 aa, Artificial Sequence
  Description of Artificial Sequence: Synthetic peptide
FAPEFDNHC

SEQ ID NO: 780 - protein, 9 aa, Artificial Sequence
  Description of Artificial Sequence: Synthetic peptide
REFAISGGS

SEQ ID NO: 781 - protein, 9 aa, Artificial Sequence
  Description of Artificial Sequence: Synthetic peptide
AFKTFGHVN

SEQ ID NO: 782 - protein, 9 aa, Artificial Sequence
  Description of Artificial Sequence: Synthetic peptide
ASSRLAEVI

SEQ ID NO: 783 - protein, 9 aa, Artificial Sequence
  Description of Artificial Sequence: Synthetic peptide
RMSAEKERS

SEQ ID NO: 784 - protein, 9 aa, Artificial Sequence
  Description of Artificial Sequence: Synthetic peptide
TMGLGVNAI

SEQ ID NO: 785 - protein, 9 aa, Artificial Sequence
  Description of Artificial Sequence: Synthetic peptide
PADWDREHG

SEQ ID NO: 786 - protein, 9 aa, Artificial Sequence
  Description of Artificial Sequence: Synthetic peptide
PELRPCAPR

SEQ ID NO: 787 - protein, 9 aa, Artificial Sequence
  Description of Artificial Sequence: Synthetic peptide
PDTQSAFWI

SEQ ID NO: 788 - protein, 9 aa, Artificial Sequence
  Description of Artificial Sequence: Synthetic peptide
KFKWLVRMT

SEQ ID NO: 789 - protein, 9 aa, Artificial Sequence
  Description of Artificial Sequence: Synthetic peptide
MTNRCAKYK

SEQ ID NO: 790 - protein, 9 aa, Artificial Sequence
  Description of Artificial Sequence: Synthetic peptide
AQPRTCQII

SEQ ID NO: 791 - protein, 9 aa, Artificial Sequence
  Description of Artificial Sequence: Synthetic peptide
IVVFGQMGY

SEQ ID NO: 792 - protein, 9 aa, Artificial Sequence
  Description of Artificial Sequence: Synthetic peptide
KVVEMFRWY

SEQ ID NO: 793 - protein, 9 aa, Artificial Sequence
  Description of Artificial Sequence: Synthetic peptide
CQTHWEKGD

SEQ ID NO: 794 - protein, 9 aa, Artificial Sequence
  Description of Artificial Sequence: Synthetic peptide
SGTEHVALH

SEQ ID NO: 795 - protein, 9 aa, Artificial Sequence
  Description of Artificial Sequence: Synthetic peptide
LCDLIMTDE

SEQ ID NO: 796 - protein, 9 aa, Artificial Sequence
  Description of Artificial Sequence: Synthetic peptide
PTLDRWEYH

SEQ ID NO: 797 - protein, 9 aa, Artificial Sequence
  Description of Artificial Sequence: Synthetic peptide
QLPIYIQKS

SEQ ID NO: 798 - protein, 9 aa, Artificial Sequence
  Description of Artificial Sequence: Synthetic peptide
HLAWIVNED

SEQ ID NO: 799 - protein, 9 aa, Artificial Sequence
  Description of Artificial Sequence: Synthetic peptide
HYFKWLFVE

SEQ ID NO: 800 - protein, 9 aa, Artificial Sequence
  Description of Artificial Sequence: Synthetic peptide
KFTWKKYFA

SEQ ID NO: 801 - protein, 9 aa, Artificial Sequence
  Description of Artificial Sequence: Synthetic peptide
HTWPPLFYW

SEQ ID NO: 802 - protein, 9 aa, Artificial Sequence
  Description of Artificial Sequence: Synthetic peptide
TWMPKVEYK

SEQ ID NO: 803 - protein, 9 aa, Artificial Sequence
  Description of Artificial Sequence: Synthetic peptide
ALTAVHAGT

SEQ ID NO: 804 - protein, 9 aa, Artificial Sequence
  Description of Artificial Sequence: Synthetic peptide
TLNSWHPEC

SEQ ID NO: 805 - protein, 9 aa, Artificial Sequence
  Description of Artificial Sequence: Synthetic peptide
AHMSYCLSR

SEQ ID NO: 806 - protein, 9 aa, Artificial Sequence
  Description of Artificial Sequence: Synthetic peptide
TDYPWVLHG

SEQ ID NO: 807 - protein, 9 aa, Artificial Sequence
  Description of Artificial Sequence: Synthetic peptide
WFSIIMSKL

SEQ ID NO: 808 - protein, 9 aa, Artificial Sequence
  Description of Artificial Sequence: Synthetic peptide
SVKVKNGFT

SEQ ID NO: 809 - protein, 9 aa, Artificial Sequence
  Description of Artificial Sequence: Synthetic peptide
NHIFKKVTW

SEQ ID NO: 810 - protein, 9 aa, Artificial Sequence
  Description of Artificial Sequence: Synthetic peptide
KPPACIGGK

SEQ ID NO: 811 - protein, 9 aa, Artificial Sequence
  Description of Artificial Sequence: Synthetic peptide
PPDARQSLR

SEQ ID NO: 812 - protein, 9 aa, Artificial Sequence
  Description of Artificial Sequence: Synthetic peptide
RQTGTGNME

SEQ ID NO: 813 - protein, 9 aa, Artificial Sequence
  Description of Artificial Sequence: Synthetic peptide
EQFADQAPR

SEQ ID NO: 814 - protein, 9 aa, Artificial Sequence
  Description of Artificial Sequence: Synthetic peptide
ISISAQDID

SEQ ID NO: 815 - protein, 9 aa, Artificial Sequence
  Description of Artificial Sequence: Synthetic peptide
KFTLQQMAS

SEQ ID NO: 816 - protein, 9 aa, Artificial Sequence
  Description of Artificial Sequence: Synthetic peptide
SFSGTHLGW

SEQ ID NO: 817 - protein, 9 aa, Artificial Sequence
  Description of Artificial Sequence: Synthetic peptide
NHSDTDTAQ

SEQ ID NO: 818 - protein, 9 aa, Artificial Sequence
  Description of Artificial Sequence: Synthetic peptide
AFCYSYYQN

SEQ ID NO: 819 - protein, 9 aa, Artificial Sequence
  Description of Artificial Sequence: Synthetic peptide
EGKITKAAV

SEQ ID NO: 820 - protein, 9 aa, Artificial Sequence
  Description of Artificial Sequence: Synthetic peptide
VQCLWWHKE

SEQ ID NO: 821 - protein, 9 aa, Artificial Sequence
  Description of Artificial Sequence: Synthetic peptide
QNLMYCSSV

SEQ ID NO: 822 - protein, 9 aa, Artificial Sequence
  Description of Artificial Sequence: Synthetic peptide
RRWLNPAYN

SEQ ID NO: 823 - protein, 9 aa, Artificial Sequence
  Description of Artificial Sequence: Synthetic peptide
PWFYKDWPH

SEQ ID NO: 824 - protein, 9 aa, Artificial Sequence
  Description of Artificial Sequence: Synthetic peptide
QALWLESDN

SEQ ID NO: 825 - protein, 9 aa, Artificial Sequence
  Description of Artificial Sequence: Synthetic peptide
TLNLRHPEC

SEQ ID NO: 826 - protein, 9 aa, Artificial Sequence
  Description of Artificial Sequence: Synthetic peptide
APEFRNRLT

SEQ ID NO: 827 - protein, 9 aa, Artificial Sequence
  Description of Artificial Sequence: Synthetic peptide
DVMRMGHYL

SEQ ID NO: 828 - protein, 9 aa, Artificial Sequence
  Description of Artificial Sequence: Synthetic peptide
ERRAHNHYA

SEQ ID NO: 829 - protein, 9 aa, Artificial Sequence
  Description of Artificial Sequence: Synthetic peptide
TSHKMMVLS

SEQ ID NO: 830 - protein, 9 aa, Artificial Sequence
  Description of Artificial Sequence: Synthetic peptide
EVDRNTNWC

SEQ ID NO: 831 - protein, 9 aa, Artificial Sequence
  Description of Artificial Sequence: Synthetic peptide
MALPLRVLS

SEQ ID NO: 832 - protein, 9 aa, Artificial Sequence
  Description of Artificial Sequence: Synthetic peptide
PCKSTRSIL

SEQ ID NO: 833 - protein, 9 aa, Artificial Sequence
  Description of Artificial Sequence: Synthetic peptide
TTDGMMGDH

SEQ ID NO: 834 - protein, 9 aa, Artificial Sequence
  Description of Artificial Sequence: Synthetic peptide
YPVHLMPPL

SEQ ID NO: 835 - protein, 9 aa, Artificial Sequence
  Description of Artificial Sequence: Synthetic peptide
ECWMAVQSC

SEQ ID NO: 836 - protein, 9 aa, Artificial Sequence
  Description of Artificial Sequence: Synthetic peptide
ERTACKTKS

SEQ ID NO: 837 - protein, 9 aa, Artificial Sequence
  Description of Artificial Sequence: Synthetic peptide
GTARHNMQL

SEQ ID NO: 838 - protein, 9 aa, Artificial Sequence
  Description of Artificial Sequence: Synthetic peptide
GTVDAQDRE

SEQ ID NO: 839 - protein, 9 aa, Artificial Sequence
  Description of Artificial Sequence: Synthetic peptide
RQIGTGNTE

SEQ ID NO: 840 - protein, 9 aa, Artificial Sequence
  Description of Artificial Sequence: Synthetic peptide
SPDGRGLCG

SEQ ID NO: 841 - protein, 9 aa, Artificial Sequence
  Description of Artificial Sequence: Synthetic peptide
TLNSRHLEC

SEQ ID NO: 842 - protein, 9 aa, Artificial Sequence
  Description of Artificial Sequence: Synthetic peptide
VLTDGACAA

SEQ ID NO: 843 - protein, 9 aa, Artificial Sequence
  Description of Artificial Sequence: Synthetic peptide
AHMYYCLSR

SEQ ID NO: 844 - protein, 9 aa, Artificial Sequence
  Description of Artificial Sequence: Synthetic peptide
AMLMSDGGG

SEQ ID NO: 845 - protein, 9 aa, Artificial Sequence
  Description of Artificial Sequence: Synthetic peptide
AQGFKPSGG

SEQ ID NO: 846 - protein, 9 aa, Artificial Sequence
  Description of Artificial Sequence: Synthetic peptide
ATGTYNLEE

SEQ ID NO: 847 - protein, 9 aa, Artificial Sequence
  Description of Artificial Sequence: Synthetic peptide
AYAASKNAM

SEQ ID NO: 848 - protein, 9 aa, Artificial Sequence
  Description of Artificial Sequence: Synthetic peptide
CAWYMKQGN

SEQ ID NO: 849 - protein, 9 aa, Artificial Sequence
  Description of Artificial Sequence: Synthetic peptide
CCRQIWIQY

SEQ ID NO: 850 - protein, 9 aa, Artificial Sequence
  Description of Artificial Sequence: Synthetic peptide
CMKTFPMNA

SEQ ID NO: 851 - protein, 9 aa, Artificial Sequence
  Description of Artificial Sequence: Synthetic peptide
DRINLMWKD

SEQ ID NO: 852 - protein, 9 aa, Artificial Sequence
  Description of Artificial Sequence: Synthetic peptide
DRVDLMWKD

SEQ ID NO: 853 - protein, 9 aa, Artificial Sequence
  Description of Artificial Sequence: Synthetic peptide
DSATFESAD

SEQ ID NO: 854 - protein, 9 aa, Artificial Sequence
  Description of Artificial Sequence: Synthetic peptide
EFEMRDSGY

SEQ ID NO: 855 - protein, 9 aa, Artificial Sequence
  Description of Artificial Sequence: Synthetic peptide
EKYQIHRDR

SEQ ID NO: 856 - protein, 9 aa, Artificial Sequence
  Description of Artificial Sequence: Synthetic peptide
HNQRTYPAL

SEQ ID NO: 857 - protein, 9 aa, Artificial Sequence
  Description of Artificial Sequence: Synthetic peptide
KMTNSSENS

SEQ ID NO: 858 - protein, 9 aa, Artificial Sequence
  Description of Artificial Sequence: Synthetic peptide
KQPTFPMLA

SEQ ID NO: 859 - protein, 9 aa, Artificial Sequence
  Description of Artificial Sequence: Synthetic peptide
LMRWYNRCW

SEQ ID NO: 860 - protein, 9 aa, Artificial Sequence
  Description of Artificial Sequence: Synthetic peptide
LRCTVMDPG

SEQ ID NO: 861 - protein, 9 aa, Artificial Sequence
  Description of Artificial Sequence: Synthetic peptide
LYQKDQRFG

SEQ ID NO: 862 - protein, 9 aa, Artificial Sequence
  Description of Artificial Sequence: Synthetic peptide
MHVNRRIDQ

SEQ ID NO: 863 - protein, 9 aa, Artificial Sequence
  Description of Artificial Sequence: Synthetic peptide
NCKSDQIAM

SEQ ID NO: 864 - protein, 9 aa, Artificial Sequence
  Description of Artificial Sequence: Synthetic peptide
NNHRLNDAN

SEQ ID NO: 865 - protein, 9 aa, Artificial Sequence
  Description of Artificial Sequence: Synthetic peptide
QPKVHGNYL

SEQ ID NO: 866 - protein, 9 aa, Artificial Sequence
  Description of Artificial Sequence: Synthetic peptide
QVEDRYWSY

SEQ ID NO: 867 - protein, 9 aa, Artificial Sequence
  Description of Artificial Sequence: Synthetic peptide
RRGYVNIWE

SEQ ID NO: 868 - protein, 9 aa, Artificial Sequence
  Description of Artificial Sequence: Synthetic peptide
SPCPTWDGL

SEQ ID NO: 869 - protein, 9 aa, Artificial Sequence
  Description of Artificial Sequence: Synthetic peptide
SRLLVHECP

SEQ ID NO: 870 - protein, 9 aa, Artificial Sequence
  Description of Artificial Sequence: Synthetic peptide
SSMQCVMRP

SEQ ID NO: 871 - protein, 9 aa, Artificial Sequence
  Description of Artificial Sequence: Synthetic peptide
SVTYHEWHL

SEQ ID NO: 872 - protein, 9 aa, Artificial Sequence
  Description of Artificial Sequence: Synthetic peptide
TCICSHTYP

SEQ ID NO: 873 - protein, 9 aa, Artificial Sequence
  Description of Artificial Sequence: Synthetic peptide
TGMAVSEQS

SEQ ID NO: 874 - protein, 9 aa, Artificial Sequence
  Description of Artificial Sequence: Synthetic peptide
TIEHGAWKC

SEQ ID NO: 875 - protein, 9 aa, Artificial Sequence
  Description of Artificial Sequence: Synthetic peptide
TPLTKWLPI

SEQ ID NO: 876 - protein, 9 aa, Artificial Sequence
  Description of Artificial Sequence: Synthetic peptide
VSIPNLGWP

SEQ ID NO: 877 - protein, 9 aa, Artificial Sequence
  Description of Artificial Sequence: Synthetic peptide
YCHLEDRIT

SEQ ID NO: 878 - protein, 9 aa, Artificial Sequence
  Description of Artificial Sequence: Synthetic peptide
EWMVIMAKN

SEQ ID NO: 879 - protein, 9 aa, Artificial Sequence
  Description of Artificial Sequence: Synthetic peptide
RVAIMFTGT

SEQ ID NO: 880 - protein, 9 aa, Artificial Sequence
  Description of Artificial Sequence: Synthetic peptide
IPDIMRRCP

SEQ ID NO: 881 - protein, 9 aa, Artificial Sequence
  Description of Artificial Sequence: Synthetic peptide
ERTACKMRS

SEQ ID NO: 882 - protein, 9 aa, Artificial Sequence
  Description of Artificial Sequence: Synthetic peptide
YTTVEGRIT

SEQ ID NO: 883 - protein, 9 aa, Artificial Sequence
  Description of Artificial Sequence: Synthetic peptide
DLEFCVMER

SEQ ID NO: 884 - protein, 9 aa, Artificial Sequence
  Description of Artificial Sequence: Synthetic peptide
YAQRTCWSE

SEQ ID NO: 885 - protein, 9 aa, Artificial Sequence
  Description of Artificial Sequence: Synthetic peptide
DRVNLTWKD

SEQ ID NO: 886 - protein, 9 aa, Artificial Sequence
  Description of Artificial Sequence: Synthetic peptide
DSTPNLLDP

SEQ ID NO: 887 - protein, 9 aa, Artificial Sequence
  Description of Artificial Sequence: Synthetic peptide
EPLYSWVGV

SEQ ID NO: 888 - protein, 9 aa, Artificial Sequence
  Description of Artificial Sequence: Synthetic peptide
KQLFMKFWS

SEQ ID NO: 889 - protein, 9 aa, Artificial Sequence
  Description of Artificial Sequence: Synthetic peptide
FVGLMSQCG

SEQ ID NO: 890 - protein, 9 aa, Artificial Sequence
  Description of Artificial Sequence: Synthetic peptide
KPCSSMSIQ

SEQ ID NO: 891 - protein, 9 aa, Artificial Sequence
  Description of Artificial Sequence: Synthetic peptide
SIYQKWVTS

SEQ ID NO: 892 - protein, 9 aa, Artificial Sequence
  Description of Artificial Sequence: Synthetic peptide
TLSSRHPEC

SEQ ID NO: 893 - protein, 9 aa, Artificial Sequence
  Description of Artificial Sequence: Synthetic peptide
AQTNNTCSI

SEQ ID NO: 894 - protein, 9 aa, Artificial Sequence
  Description of Artificial Sequence: Synthetic peptide
IPSHVHLGE

SEQ ID NO: 895 - protein, 9 aa, Artificial Sequence
  Description of Artificial Sequence: Synthetic peptide
MALPPHVLS

SEQ ID NO: 896 - protein, 9 aa, Artificial Sequence
  Description of Artificial Sequence: Synthetic peptide
MGCIGNCIL

SEQ ID NO: 897 - protein, 9 aa, Artificial Sequence
  Description of Artificial Sequence: Synthetic peptide
QTQHYGSTT

SEQ ID NO: 898 - protein, 9 aa, Artificial Sequence
  Description of Artificial Sequence: Synthetic peptide
RVDRNTNWC

SEQ ID NO: 899 - protein, 9 aa, Artificial Sequence
  Description of Artificial Sequence: Synthetic peptide
TYDTRSHCL

SEQ ID NO: 900 - protein, 9 aa, Artificial Sequence
  Description of Artificial Sequence: Synthetic peptide
ARVDHQCSG

SEQ ID NO: 901 - protein, 9 aa, Artificial Sequence
  Description of Artificial Sequence: Synthetic peptide
NGSHYNAMR

SEQ ID NO: 902 - protein, 9 aa, Artificial Sequence
  Description of Artificial Sequence: Synthetic peptide
QTQLYQNDE

SEQ ID NO: 903 - protein, 9 aa, Artificial Sequence
  Description of Artificial Sequence: Synthetic peptide
SPYGRGLCG

SEQ ID NO: 904 - protein, 9 aa, Artificial Sequence
  Description of Artificial Sequence: Synthetic peptide
TYSLAMSLG

SEQ ID NO: 905 - protein, 9 aa, Artificial Sequence
  Description of Artificial Sequence: Synthetic peptide
WVGNANRPA

SEQ ID NO: 906 - protein, 9 aa, Artificial Sequence
  Description of Artificial Sequence: Synthetic peptide
AHVDHQCGG

SEQ ID NO: 907 - protein, 9 aa, Artificial Sequence
  Description of Artificial Sequence: Synthetic peptide
APEFNVARR

SEQ ID NO: 908 - protein, 9 aa, Artificial Sequence
  Description of Artificial Sequence: Synthetic peptide
CCQQIWVQY

SEQ ID NO: 909 - protein, 9 aa, Artificial Sequence
  Description of Artificial Sequence: Synthetic peptide
CITARSTAA

SEQ ID NO: 910 - protein, 9 aa, Artificial Sequence
  Description of Artificial Sequence: Synthetic peptide
CTIARSTAA

SEQ ID NO: 911 - protein, 9 aa, Artificial Sequence
  Description of Artificial Sequence: Synthetic peptide
DVIRTTHSG

SEQ ID NO: 912 - protein, 9 aa, Artificial Sequence
  Description of Artificial Sequence: Synthetic peptide
GSQQTTPSC

SEQ ID NO: 913 - protein, 9 aa, Artificial Sequence
  Description of Artificial Sequence: Synthetic peptide
GYATFPDSD

SEQ ID NO: 914 - protein, 9 aa, Artificial Sequence
  Description of Artificial Sequence: Synthetic peptide
ISSTMVEHG

SEQ ID NO: 915 - protein, 9 aa, Artificial Sequence
  Description of Artificial Sequence: Synthetic peptide
KLLFMKFWN

SEQ ID NO: 916 - protein, 9 aa, Artificial Sequence
  Description of Artificial Sequence: Synthetic peptide
KVDRNTYWC

SEQ ID NO: 917 - protein, 9 aa, Artificial Sequence
  Description of Artificial Sequence: Synthetic peptide
LFRAYAWSQ

SEQ ID NO: 918 - protein, 9 aa, Artificial Sequence
  Description of Artificial Sequence: Synthetic peptide
LITRDTGLA

SEQ ID NO: 919 - protein, 9 aa, Artificial Sequence
  Description of Artificial Sequence: Synthetic peptide
LSECSDRTN

SEQ ID NO: 920 - protein, 9 aa, Artificial Sequence
  Description of Artificial Sequence: Synthetic peptide
NCKPNQIAM

SEQ ID NO: 921 - protein, 9 aa, Artificial Sequence
  Description of Artificial Sequence: Synthetic peptide
PAVPADEFF

SEQ ID NO: 922 - protein, 9 aa, Artificial Sequence
  Description of Artificial Sequence: Synthetic peptide
QATDMHRWQ

SEQ ID NO: 923 - protein, 9 aa, Artificial Sequence
  Description of Artificial Sequence: Synthetic peptide
STARHNTQL

SEQ ID NO: 924 - protein, 9 aa, Artificial Sequence
  Description of Artificial Sequence: Synthetic peptide
THMNYCLSR

SEQ ID NO: 925 - protein, 9 aa, Artificial Sequence
  Description of Artificial Sequence: Synthetic peptide
TSHRMMVFS

SEQ ID NO: 926 - protein, 9 aa, Artificial Sequence
  Description of Artificial Sequence: Synthetic peptide
AMTRCMAGH

SEQ ID NO: 927 - protein, 9 aa, Artificial Sequence
  Description of Artificial Sequence: Synthetic peptide
CPEHNLVGV

SEQ ID NO: 928 - protein, 9 aa, Artificial Sequence
  Description of Artificial Sequence: Synthetic peptide
CPEHSQVGV

SEQ ID NO: 929 - protein, 9 aa, Artificial Sequence
  Description of Artificial Sequence: Synthetic peptide
DRANLMWKD

SEQ ID NO: 930 - protein, 9 aa, Artificial Sequence
  Description of Artificial Sequence: Synthetic peptide
DRVNLMWKG

SEQ ID NO: 931 - protein, 9 aa, Artificial Sequence
  Description of Artificial Sequence: Synthetic peptide
DWGYCHSKA

SEQ ID NO: 932 - protein, 9 aa, Artificial Sequence
  Description of Artificial Sequence: Synthetic peptide
EFVLGYQGI

SEQ ID NO: 933 - protein, 9 aa, Artificial Sequence
  Description of Artificial Sequence: Synthetic peptide
EKYQIHWDH

SEQ ID NO: 934 - protein, 9 aa, Artificial Sequence
  Description of Artificial Sequence: Synthetic peptide
EQFVDRAPR

SEQ ID NO: 935 - protein, 9 aa, Artificial Sequence
  Description of Artificial Sequence: Synthetic peptide
ERQAHSHYA

SEQ ID NO: 936 - protein, 9 aa, Artificial Sequence
  Description of Artificial Sequence: Synthetic peptide
FIYQKWVTN

SEQ ID NO: 937 - protein, 9 aa, Artificial Sequence
  Description of Artificial Sequence: Synthetic peptide
GQFRSGAHR

SEQ ID NO: 938 - protein, 9 aa, Artificial Sequence
  Description of Artificial Sequence: Synthetic peptide
HTNEQYLQH

SEQ ID NO: 939 - protein, 9 aa, Artificial Sequence
  Description of Artificial Sequence: Synthetic peptide
HVNTSCKQS

SEQ ID NO: 940 - protein, 9 aa, Artificial Sequence
  Description of Artificial Sequence: Synthetic peptide
KYSPIQEHN

SEQ ID NO: 941 - protein, 9 aa, Artificial Sequence
  Description of Artificial Sequence: Synthetic peptide
LCLQGAKMD

SEQ ID NO: 942 - protein, 9 aa, Artificial Sequence
  Description of Artificial Sequence: Synthetic peptide
LMSITSAVE

SEQ ID NO: 943 - protein, 9 aa, Artificial Sequence
  Description of Artificial Sequence: Synthetic peptide
LTHNIPFPK

SEQ ID NO: 944 - protein, 9 aa, Artificial Sequence
  Description of Artificial Sequence: Synthetic peptide
MALPLHALS

SEQ ID NO: 945 - protein, 9 aa, Artificial Sequence
  Description of Artificial Sequence: Synthetic peptide
MCQSVEKEY

SEQ ID NO: 946 - protein, 9 aa, Artificial Sequence
  Description of Artificial Sequence: Synthetic peptide
NGNRYNAMR

SEQ ID NO: 947 - protein, 9 aa, Artificial Sequence
  Description of Artificial Sequence: Synthetic peptide
NHRSREIDI

SEQ ID NO: 948 - protein, 9 aa, Artificial Sequence
  Description of Artificial Sequence: Synthetic peptide
NIVRSRSIT

SEQ ID NO: 949 - protein, 9 aa, Artificial Sequence
  Description of Artificial Sequence: Synthetic peptide
NKTCYLTCP

SEQ ID NO: 950 - protein, 9 aa, Artificial Sequence
  Description of Artificial Sequence: Synthetic peptide
PQARVDMEF

SEQ ID NO: 951 - protein, 9 aa, Artificial Sequence
  Description of Artificial Sequence: Synthetic peptide
QAAGMHRWQ

SEQ ID NO: 952 - protein, 9 aa, Artificial Sequence
  Description of Artificial Sequence: Synthetic peptide
REFVISGGN

SEQ ID NO: 953 - protein, 9 aa, Artificial Sequence
  Description of Artificial Sequence: Synthetic peptide
SMREYQKHI

SEQ ID NO: 954 - protein, 9 aa, Artificial Sequence
  Description of Artificial Sequence: Synthetic peptide
SPHSCQHMG

SEQ ID NO: 955 - protein, 9 aa, Artificial Sequence
  Description of Artificial Sequence: Synthetic peptide
SRLSVHECP

SEQ ID NO: 956 - protein, 9 aa, Artificial Sequence
  Description of Artificial Sequence: Synthetic peptide
STTRHNMQL

SEQ ID NO: 957 - protein, 9 aa, Artificial Sequence
  Description of Artificial Sequence: Synthetic peptide
TFHFSILLT

SEQ ID NO: 958 - protein, 9 aa, Artificial Sequence
  Description of Artificial Sequence: Synthetic peptide
TPQPMNVAA

SEQ ID NO: 959 - protein, 9 aa, Artificial Sequence
  Description of Artificial Sequence: Synthetic peptide
TYIQHPTNA

SEQ ID NO: 960 - protein, 9 aa, Artificial Sequence
  Description of Artificial Sequence: Synthetic peptide
VAGRFGSNT

SEQ ID NO: 961 - protein, 9 aa, Artificial Sequence
  Description of Artificial Sequence: Synthetic peptide
VSMPSLGWP

SEQ ID NO: 962 - protein, 9 aa, Artificial Sequence
  Description of Artificial Sequence: Synthetic peptide
YDNHQKARI

SEQ ID NO: 963 - protein, 9 aa, Artificial Sequence
  Description of Artificial Sequence: Synthetic peptide
AHMIYCLSR

SEQ ID NO: 964 - protein, 9 aa, Artificial Sequence
  Description of Artificial Sequence: Synthetic peptide
AHMNYCLSH

SEQ ID NO: 965 - protein, 9 aa, Artificial Sequence
  Description of Artificial Sequence: Synthetic peptide
AQWIQQKHG

SEQ ID NO: 966 - protein, 9 aa, Artificial Sequence
  Description of Artificial Sequence: Synthetic peptide
ARTLREGWG

SEQ ID NO: 967 - protein, 9 aa, Artificial Sequence
  Description of Artificial Sequence: Synthetic peptide
ASKLEVQEQ

SEQ ID NO: 968 - protein, 9 aa, Artificial Sequence
  Description of Artificial Sequence: Synthetic peptide
AVEHGAWKC

SEQ ID NO: 969 - protein, 9 aa, Artificial Sequence
  Description of Artificial Sequence: Synthetic peptide
AVETGESAV

SEQ ID NO: 970 - protein, 9 aa, Artificial Sequence
  Description of Artificial Sequence: Synthetic peptide
CCRQIWVQH

SEQ ID NO: 971 - protein, 9 aa, Artificial Sequence
  Description of Artificial Sequence: Synthetic peptide
CGGQETGLA

SEQ ID NO: 972 - protein, 9 aa, Artificial Sequence
  Description of Artificial Sequence: Synthetic peptide
CNSWCTGSL

SEQ ID NO: 973 - protein, 9 aa, Artificial Sequence
  Description of Artificial Sequence: Synthetic peptide
DCRHTTLYV

SEQ ID NO: 974 - protein, 9 aa, Artificial Sequence
  Description of Artificial Sequence: Synthetic peptide
DESTCVAHG

SEQ ID NO: 975 - protein, 9 aa, Artificial Sequence
  Description of Artificial Sequence: Synthetic peptide
DGMHRELHS

SEQ ID NO: 976 - protein, 9 aa, Artificial Sequence
  Description of Artificial Sequence: Synthetic peptide
DKYGLGIFH

SEQ ID NO: 977 - protein, 9 aa, Artificial Sequence
  Description of Artificial Sequence: Synthetic peptide
DRVYLMWKD

SEQ ID NO: 978 - protein, 9 aa, Artificial Sequence
  Description of Artificial Sequence: Synthetic peptide
DTDYKPHFA

SEQ ID NO: 979 - protein, 9 aa, Artificial Sequence
  Description of Artificial Sequence: Synthetic peptide
DVHDGQLCY

SEQ ID NO: 980 - protein, 9 aa, Artificial Sequence
  Description of Artificial Sequence: Synthetic peptide
DVYDSQLCY

SEQ ID NO: 981 - protein, 9 aa, Artificial Sequence
  Description of Artificial Sequence: Synthetic peptide
DYAPTNTMM

SEQ ID NO: 982 - protein, 9 aa, Artificial Sequence
  Description of Artificial Sequence: Synthetic peptide
DYSQVNCER

SEQ ID NO: 983 - protein, 9 aa, Artificial Sequence
  Description of Artificial Sequence: Synthetic peptide
DYSQVNREK

SEQ ID NO: 984 - protein, 9 aa, Artificial Sequence
  Description of Artificial Sequence: Synthetic peptide
EEYYTWECH

SEQ ID NO: 985 - protein, 9 aa, Artificial Sequence
  Description of Artificial Sequence: Synthetic peptide
ETHHEYRDD

SEQ ID NO: 986 - protein, 9 aa, Artificial Sequence
  Description of Artificial Sequence: Synthetic peptide
EYACMLMTR

SEQ ID NO: 987 - protein, 9 aa, Artificial Sequence
  Description of Artificial Sequence: Synthetic peptide
FLRPKRHFS

SEQ ID NO: 988 - protein, 9 aa, Artificial Sequence
  Description of Artificial Sequence: Synthetic peptide
GCQLGFQIT

SEQ ID NO: 989 - protein, 9 aa, Artificial Sequence
  Description of Artificial Sequence: Synthetic peptide
GQFRRGAYR

SEQ ID NO: 990 - protein, 9 aa, Artificial Sequence
  Description of Artificial Sequence: Synthetic peptide
GSLSKDTPL

SEQ ID NO: 991 - protein, 9 aa, Artificial Sequence
  Description of Artificial Sequence: Synthetic peptide
GSQQTTLSR

SEQ ID NO: 992 - protein, 9 aa, Artificial Sequence
  Description of Artificial Sequence: Synthetic peptide
HCHQEDRIT

SEQ ID NO: 993 - protein, 9 aa, Artificial Sequence
  Description of Artificial Sequence: Synthetic peptide
HHECLYQIY

SEQ ID NO: 994 - protein, 9 aa, Artificial Sequence
  Description of Artificial Sequence: Synthetic peptide
HVDQHRIQA

SEQ ID NO: 995 - protein, 9 aa, Artificial Sequence
  Description of Artificial Sequence: Synthetic peptide
IADIGRKQW

SEQ ID NO: 996 - protein, 9 aa, Artificial Sequence
  Description of Artificial Sequence: Synthetic peptide
IAWPTDCSF

SEQ ID NO: 997 - protein, 9 aa, Artificial Sequence
  Description of Artificial Sequence: Synthetic peptide
IYCPCQDSD

SEQ ID NO: 998 - protein, 9 aa, Artificial Sequence
  Description of Artificial Sequence: Synthetic peptide
KAALFLKDC

SEQ ID NO: 999 - protein, 9 aa, Artificial Sequence
  Description of Artificial Sequence: Synthetic peptide
KAGMDQTAV

SEQ ID NO: 1000 - protein, 9 aa, Artificial Sequence
  Description of Artificial Sequence: Synthetic peptide
KCRMAVQSC

SEQ ID NO: 1001 - protein, 9 aa, Artificial Sequence
  Description of Artificial Sequence: Synthetic peptide
KPLASIGQH

SEQ ID NO: 1002 - protein, 9 aa, Artificial Sequence
  Description of Artificial Sequence: Synthetic peptide
KQLFMEFWN

SEQ ID NO: 1003 - protein, 9 aa, Artificial Sequence
  Description of Artificial Sequence: Synthetic peptide
KSLQEQGGA

SEQ ID NO: 1004 - protein, 9 aa, Artificial Sequence
  Description of Artificial Sequence: Synthetic peptide
KTQLSDHKH

SEQ ID NO: 1005 - protein, 9 aa, Artificial Sequence
  Description of Artificial Sequence: Synthetic peptide
LDHTNLMKL

SEQ ID NO: 1006 - protein, 9 aa, Artificial Sequence
  Description of Artificial Sequence: Synthetic peptide
LIQWYNRCW

SEQ ID NO: 1007 - protein, 9 aa, Artificial Sequence
  Description of Artificial Sequence: Synthetic peptide
LMKTSPCYW

SEQ ID NO: 1008 - protein, 9 aa, Artificial Sequence
  Description of Artificial Sequence: Synthetic peptide
LMLGYMEQD

SEQ ID NO: 1009 - protein, 9 aa, Artificial Sequence
  Description of Artificial Sequence: Synthetic peptide
LSECSDQAN

SEQ ID NO: 1010 - protein, 9 aa, Artificial Sequence
  Description of Artificial Sequence: Synthetic peptide
LVVIDPAHY

SEQ ID NO: 1011 - protein, 9 aa, Artificial Sequence
  Description of Artificial Sequence: Synthetic peptide
MALPLYVLS

SEQ ID NO: 1012 - protein, 9 aa, Artificial Sequence
  Description of Artificial Sequence: Synthetic peptide
MCQMSRRSI

SEQ ID NO: 1013 - protein, 9 aa, Artificial Sequence
  Description of Artificial Sequence: Synthetic peptide
MMLGYMERD

SEQ ID NO: 1014 - protein, 9 aa, Artificial Sequence
  Description of Artificial Sequence: Synthetic peptide
MTQVHQALV

SEQ ID NO: 1015 - protein, 9 aa, Artificial Sequence
  Description of Artificial Sequence: Synthetic peptide
NACPQHDFG

SEQ ID NO: 1016 - protein, 9 aa, Artificial Sequence
  Description of Artificial Sequence: Synthetic peptide
NALWMTKAP

SEQ ID NO: 1017 - protein, 9 aa, Artificial Sequence
  Description of Artificial Sequence: Synthetic peptide
NCRHTILYV

SEQ ID NO: 1018 - protein, 9 aa, Artificial Sequence
  Description of Artificial Sequence: Synthetic peptide
NDCTCRAIL

SEQ ID NO: 1019 - protein, 9 aa, Artificial Sequence
  Description of Artificial Sequence: Synthetic peptide
NFANHQPLP

SEQ ID NO: 1020 - protein, 9 aa, Artificial Sequence
  Description of Artificial Sequence: Synthetic peptide
NQRGLCKDE

SEQ ID NO: 1021 - protein, 9 aa, Artificial Sequence
  Description of Artificial Sequence: Synthetic peptide
PACLLRRML

SEQ ID NO: 1022 - protein, 9 aa, Artificial Sequence
  Description of Artificial Sequence: Synthetic peptide
PANPSFSYL

SEQ ID NO: 1023 - protein, 9 aa, Artificial Sequence
  Description of Artificial Sequence: Synthetic peptide
PCQQLMCFT

SEQ ID NO: 1024 - protein, 9 aa, Artificial Sequence
  Description of Artificial Sequence: Synthetic peptide
PDARQSLRH

SEQ ID NO: 1025 - protein, 9 aa, Artificial Sequence
  Description of Artificial Sequence: Synthetic peptide
PIYQKWVTN

SEQ ID NO: 1026 - protein, 9 aa, Artificial Sequence
  Description of Artificial Sequence: Synthetic peptide
PNGCRPFCC

SEQ ID NO: 1027 - protein, 9 aa, Artificial Sequence
  Description of Artificial Sequence: Synthetic peptide
PQHAGRAEH

SEQ ID NO: 1028 - protein, 9 aa, Artificial Sequence
  Description of Artificial Sequence: Synthetic peptide
QCFLWNDYQ

SEQ ID NO: 1029 - protein, 9 aa, Artificial Sequence
  Description of Artificial Sequence: Synthetic peptide
QHLMTLSHE

SEQ ID NO: 1030 - protein, 9 aa, Artificial Sequence
  Description of Artificial Sequence: Synthetic peptide
QPLSRNGAR

SEQ ID NO: 1031 - protein, 9 aa, Artificial Sequence
  Description of Artificial Sequence: Synthetic peptide
QPQLRNGAR

SEQ ID NO: 1032 - protein, 9 aa, Artificial Sequence
  Description of Artificial Sequence: Synthetic peptide
QRQSQEWFH

SEQ ID NO: 1033 - protein, 9 aa, Artificial Sequence
  Description of Artificial Sequence: Synthetic peptide
QTGVMAAIG

SEQ ID NO: 1034 - protein, 9 aa, Artificial Sequence
  Description of Artificial Sequence: Synthetic peptide
QVVIIECKN

SEQ ID NO: 1035 - protein, 9 aa, Artificial Sequence
  Description of Artificial Sequence: Synthetic peptide
RDRRVRDEC

SEQ ID NO: 1036 - protein, 9 aa, Artificial Sequence
  Description of Artificial Sequence: Synthetic peptide
RLETTRYIW

SEQ ID NO: 1037 - protein, 9 aa, Artificial Sequence
  Description of Artificial Sequence: Synthetic peptide
RMARVSVHG

SEQ ID NO: 1038 - protein, 9 aa, Artificial Sequence
  Description of Artificial Sequence: Synthetic peptide
RQHHCLPVI

SEQ ID NO: 1039 - protein, 9 aa, Artificial Sequence
  Description of Artificial Sequence: Synthetic peptide
RQVGTGNME

SEQ ID NO: 1040 - protein, 9 aa, Artificial Sequence
  Description of Artificial Sequence: Synthetic peptide
RSTRFTGIA

SEQ ID NO: 1041 - protein, 9 aa, Artificial Sequence
  Description of Artificial Sequence: Synthetic peptide
RTNEQYPQH

SEQ ID NO: 1042 - protein, 9 aa, Artificial Sequence
  Description of Artificial Sequence: Synthetic peptide
RTRISQMSG

SEQ ID NO: 1043 - protein, 9 aa, Artificial Sequence
  Description of Artificial Sequence: Synthetic peptide
RTRTSQMFG

SEQ ID NO: 1044 - protein, 9 aa, Artificial Sequence
  Description of Artificial Sequence: Synthetic peptide
RVNGSTCGH

SEQ ID NO: 1045 - protein, 9 aa, Artificial Sequence
  Description of Artificial Sequence: Synthetic peptide
SATTSGTAF

SEQ ID NO: 1046 - protein, 9 aa, Artificial Sequence
  Description of Artificial Sequence: Synthetic peptide
SATYHEWHP

SEQ ID NO: 1047 - protein, 9 aa, Artificial Sequence
  Description of Artificial Sequence: Synthetic peptide
SEAKYDTAT

SEQ ID NO: 1048 - protein, 9 aa, Artificial Sequence
  Description of Artificial Sequence: Synthetic peptide
SKRWYGHSA

SEQ ID NO: 1049 - protein, 9 aa, Artificial Sequence
  Description of Artificial Sequence: Synthetic peptide
SMQEYQKHV

SEQ ID NO: 1050 - protein, 9 aa, Artificial Sequence
  Description of Artificial Sequence: Synthetic peptide
SRCTVVDPG

SEQ ID NO: 1051 - protein, 9 aa, Artificial Sequence
  Description of Artificial Sequence: Synthetic peptide
SSWMQMQGP

SEQ ID NO: 1052 - protein, 9 aa, Artificial Sequence
  Description of Artificial Sequence: Synthetic peptide
TAMVSECID

SEQ ID NO: 1053 - protein, 9 aa, Artificial Sequence
  Description of Artificial Sequence: Synthetic peptide
TEFHMMIQT

SEQ ID NO: 1054 - protein, 9 aa, Artificial Sequence
  Description of Artificial Sequence: Synthetic peptide
TGRWLVYQA

SEQ ID NO: 1055 - protein, 9 aa, Artificial Sequence
  Description of Artificial Sequence: Synthetic peptide
TLNSRHPEY

SEQ ID NO: 1056 - protein, 9 aa, Artificial Sequence
  Description of Artificial Sequence: Synthetic peptide
TSEPHCSFA

SEQ ID NO: 1057 - protein, 9 aa, Artificial Sequence
  Description of Artificial Sequence: Synthetic peptide
TVDGMMGDH

SEQ ID NO: 1058 - protein, 9 aa, Artificial Sequence
  Description of Artificial Sequence: Synthetic peptide
TVPKWDNIS

SEQ ID NO: 1059 - protein, 9 aa, Artificial Sequence
  Description of Artificial Sequence: Synthetic peptide
TYHCYMSWM

SEQ ID NO: 1060 - protein, 9 aa, Artificial Sequence
  Description of Artificial Sequence: Synthetic peptide
TYIQCPTNA

SEQ ID NO: 1061 - protein, 9 aa, Artificial Sequence
  Description of Artificial Sequence: Synthetic peptide
TYIQYPANA

SEQ ID NO: 1062 - protein, 9 aa, Artificial Sequence
  Description of Artificial Sequence: Synthetic peptide
VHGQTDLSL

SEQ ID NO: 1063 - protein, 9 aa, Artificial Sequence
  Description of Artificial Sequence: Synthetic peptide
VPVPFLSLR

SEQ ID NO: 1064 - protein, 9 aa, Artificial Sequence
  Description of Artificial Sequence: Synthetic peptide
VSFQRMNNM

SEQ ID NO: 1065 - protein, 9 aa, Artificial Sequence
  Description of Artificial Sequence: Synthetic peptide
VSTPNLGWP

SEQ ID NO: 1066 - protein, 9 aa, Artificial Sequence
  Description of Artificial Sequence: Synthetic peptide
VSVQGRAQL

SEQ ID NO: 1067 - protein, 9 aa, Artificial Sequence
  Description of Artificial Sequence: Synthetic peptide
VTEVLNQDV

SEQ ID NO: 1068 - protein, 9 aa, Artificial Sequence
  Description of Artificial Sequence: Synthetic peptide
YATHMQHLE

SEQ ID NO: 1069 - protein, 9 aa, Artificial Sequence
  Description of Artificial Sequence: Synthetic peptide
YCHQEDRII

SEQ ID NO: 1070 - protein, 9 aa, Artificial Sequence
  Description of Artificial Sequence: Synthetic peptide
YETDSEGYD

SEQ ID NO: 1071 - protein, 9 aa, Artificial Sequence
  Description of Artificial Sequence: Synthetic peptide
YPAHMMPPL

SEQ ID NO: 1072 - protein, 9 aa, Artificial Sequence
  Description of Artificial Sequence: Synthetic peptide
YWCPSQRWR

SEQ ID NO: 1073 - protein, 9 aa, Artificial Sequence
  Description of Artificial Sequence: Synthetic peptide
QLKYAVGAN

SEQ ID NO: 1074 - protein, 9 aa, Artificial Sequence
  Description of Artificial Sequence: Synthetic peptide
MNHQCMLWD

SEQ ID NO: 1075 - protein, 9 aa, Artificial Sequence
  Description of Artificial Sequence: Synthetic peptide
RHQRVMPTY

SEQ ID NO: 1076 - protein, 9 aa, Artificial Sequence
  Description of Artificial Sequence: Synthetic peptide
NSGIATADH

SEQ ID NO: 1077 - protein, 9 aa, Artificial Sequence
  Description of Artificial Sequence: Synthetic peptide
ACHTGQSGM

SEQ ID NO: 1078 - protein, 9 aa, Artificial Sequence
  Description of Artificial Sequence: Synthetic peptide
SHWFFHFDL

SEQ ID NO: 1079 - protein, 9 aa, Artificial Sequence
  Description of Artificial Sequence: Synthetic peptide
DVTQTRYCY

SEQ ID NO: 1080 - protein, 9 aa, Artificial Sequence
  Description of Artificial Sequence: Synthetic peptide
FSEQNVSAA

SEQ ID NO: 1081 - protein, 9 aa, Artificial Sequence
  Description of Artificial Sequence: Synthetic peptide
GPLYSWVGI

SEQ ID NO: 1082 - protein, 9 aa, Artificial Sequence
  Description of Artificial Sequence: Synthetic peptide
NAGMKGVDV

SEQ ID NO: 1083 - protein, 9 aa, Artificial Sequence
  Description of Artificial Sequence: Synthetic peptide
CTEAGMTFG

SEQ ID NO: 1084 - protein, 9 aa, Artificial Sequence
  Description of Artificial Sequence: Synthetic peptide
PMNDMQFVP

SEQ ID NO: 1085 - protein, 9 aa, Artificial Sequence
  Description of Artificial Sequence: Synthetic peptide
SGRRSGGRP

SEQ ID NO: 1086 - protein, 9 aa, Artificial Sequence
  Description of Artificial Sequence: Synthetic peptide
DVAQYGLGS

SEQ ID NO: 1087 - protein, 9 aa, Artificial Sequence
  Description of Artificial Sequence: Synthetic peptide
NPTDLLQHE

SEQ ID NO: 1088 - protein, 9 aa, Artificial Sequence
  Description of Artificial Sequence: Synthetic peptide
QAQCIAMQR

SEQ ID NO: 1089 - protein, 9 aa, Artificial Sequence
  Description of Artificial Sequence: Synthetic peptide
DGMHRELCS

SEQ ID NO: 1090 - protein, 9 aa, Artificial Sequence
  Description of Artificial Sequence: Synthetic peptide
DGTHRELYS

SEQ ID NO: 1091 - protein, 9 aa, Artificial Sequence
  Description of Artificial Sequence: Synthetic peptide
KWCQFGMVA

SEQ ID NO: 1092 - protein, 9 aa, Artificial Sequence
  Description of Artificial Sequence: Synthetic peptide
LTHNTPFPE

SEQ ID NO: 1093 - protein, 9 aa, Artificial Sequence
  Description of Artificial Sequence: Synthetic peptide
PMPTADVLH

SEQ ID NO: 1094 - protein, 9 aa, Artificial Sequence
  Description of Artificial Sequence: Synthetic peptide
QGEEVWWEA

SEQ ID NO: 1095 - protein, 9 aa, Artificial Sequence
  Description of Artificial Sequence: Synthetic peptide
RMVTMERDR

SEQ ID NO: 1096 - protein, 9 aa, Artificial Sequence
  Description of Artificial Sequence: Synthetic peptide
RVNGSTCWH

SEQ ID NO: 1097 - protein, 9 aa, Artificial Sequence
  Description of Artificial Sequence: Synthetic peptide
RWYQFGMVA

SEQ ID NO: 1098 - protein, 9 aa, Artificial Sequence
  Description of Artificial Sequence: Synthetic peptide
TFLEYQALG

SEQ ID NO: 1099 - protein, 9 aa, Artificial Sequence
  Description of Artificial Sequence: Synthetic peptide
TTGVCSFAQ

SEQ ID NO: 1100 - protein, 9 aa, Artificial Sequence
  Description of Artificial Sequence: Synthetic peptide
YHKQMAVWW

SEQ ID NO: 1101 - protein, 9 aa, Artificial Sequence
  Description of Artificial Sequence: Synthetic peptide
AVSVACLNT

SEQ ID NO: 1102 - protein, 9 aa, Artificial Sequence
  Description of Artificial Sequence: Synthetic peptide
CDSPSLLQS

SEQ ID NO: 1103 - protein, 9 aa, Artificial Sequence
  Description of Artificial Sequence: Synthetic peptide
CMYLPALQY

SEQ ID NO: 1104 - protein, 9 aa, Artificial Sequence
  Description of Artificial Sequence: Synthetic peptide
CSSWANGCD

SEQ ID NO: 1105 - protein, 9 aa, Artificial Sequence
  Description of Artificial Sequence: Synthetic peptide
EDCPKVFTI

SEQ ID NO: 1106 - protein, 9 aa, Artificial Sequence
  Description of Artificial Sequence: Synthetic peptide
EFALGCQGI

SEQ ID NO: 1107 - protein, 9 aa, Artificial Sequence
  Description of Artificial Sequence: Synthetic peptide
ERGEMRATG

SEQ ID NO: 1108 - protein, 9 aa, Artificial Sequence
  Description of Artificial Sequence: Synthetic peptide
ERGGMKATG

SEQ ID NO: 1109 - protein, 9 aa, Artificial Sequence
  Description of Artificial Sequence: Synthetic peptide
GRVHGNVCI

SEQ ID NO: 1110 - protein, 9 aa, Artificial Sequence
  Description of Artificial Sequence: Synthetic peptide
HVWSLEWHL

SEQ ID NO: 1111 - protein, 9 aa, Artificial Sequence
  Description of Artificial Sequence: Synthetic peptide
IPGHVHFGE

SEQ ID NO: 1112 - protein, 9 aa, Artificial Sequence
  Description of Artificial Sequence: Synthetic peptide
IWGVYVHYF

SEQ ID NO: 1113 - protein, 9 aa, Artificial Sequence
  Description of Artificial Sequence: Synthetic peptide
NHDEKLWAP

SEQ ID NO: 1114 - protein, 9 aa, Artificial Sequence
  Description of Artificial Sequence: Synthetic peptide
NVWSLAVRD

SEQ ID NO: 1115 - protein, 588 aa, Adeno-associated virus - 5
TAPTGKRIDDHFPKRKKARTEEDSKPSTSSDAEAGPSGSQQLQIPAQPASSLGADTMSAGGGGPLGDNNQGADGVGNASGDWHCDSTWMGDRVVTKSTRTWVLPSYNNHQYREIKSGSVDGSNANAYFGYSTPWGYFDFNRFHSHWSPRDWQRLINNYWGFRPRSLRVKIFNIQVKEVTVQDSTTTIANNLTSTVQVFTDDDYQLPYVVGNGTEGCLPAFPPQVFTLPQYGYATLNRDNTENPTERSSFFCLEYFPSKMLRTGNNFEFTYNFEEVPFHSSFAPSQNLFKLANPLVDQYLYRFVSTNNTGGVQFNKNLAGRYANTYKNWFPGPMGRTQGWNLGSGVNRASVSAFATTNRMELEGASYQVPPQPNGMTNNLQGSNTYALENTMIFNSQPANPGTTATYLEGNMLITSESETQPVNRVAYNVGGQMATNNQSSTTAPATGTYNLQEIVPGSVWMERDVYLQGPIWAKIPETGAHFHPSPAMGGFGLKHPPPMMLIKNTPVPGNITSFSDVPVSSFITQYSTGQVTVEMEWELKKENSKRWNPEIQYTNNYNDPQFVDFAPDSTGEYRTTRPIGTRYLTRPL

SEQ ID NO: 1116 - protein, 532 aa, Adeno-associated virus - 5
MSAGGGGPLGDNNQGADGVGNASGDWHCDSTWMGDRVVTKSTRTWVLPSYNNHQYREIKSGSVDGSNANAYFGYSTPWGYFDFNRFHSHWSPRDWQRLINNYWGFRPRSLRVKIFNIQVKEVTVQDSTTTIANNLTSTVQVFTDDDYQLPYVVGNGTEGCLPAFPPQVFTLPQYGYATLNRDNTENPTERSSFFCLEYFPSKMLRTGNNFEFTYNFEEVPFHSSFAPSQNLFKLANPLVDQYLYRFVSTNNTGGVQFNKNLAGRYANTYKNWFPGPMGRTQGWNLGSGVNRASVSAFATTNRMELEGASYQVPPQPNGMTNNLQGSNTYALENTMIFNSQPANPGTTATYLEGNMLITSESETQPVNRVAYNVGGQMATNNQSSTTAPATGTYNLQEIVPGSVWMERDVYLQGPIWAKIPETGAHFHPSPAMGGFGLKHPPPMMLIKNTPVPGNITSFSDVPVSSFITQYSTGQVTVEMEWELKKENSKRWNPEIQYTNNYNDPQFVDFAPDSTGEYRTTRPIGTRYLTRPL

SEQ ID NO: 1117 - protein, 9 aa, Artificial Sequence
  Description of Artificial Sequence: Synthetic peptide
KRLQQMETM

SEQ ID NO: 1118 - protein, 9 aa, Artificial Sequence
  Description of Artificial Sequence: Synthetic peptide
CAAQYWLTP

SEQ ID NO: 1119 - protein, 9 aa, Artificial Sequence
  Description of Artificial Sequence: Synthetic peptide
CARFVERWP

SEQ ID NO: 1120 - protein, 9 aa, Artificial Sequence
  Description of Artificial Sequence: Synthetic peptide
CCAKFQMCT

SEQ ID NO: 1121 - protein, 9 aa, Artificial Sequence
  Description of Artificial Sequence: Synthetic peptide
CEADGNWMR

SEQ ID NO: 1122 - protein, 9 aa, Artificial Sequence
  Description of Artificial Sequence: Synthetic peptide
CIDMVQSWS

SEQ ID NO: 1123 - protein, 9 aa, Artificial Sequence
  Description of Artificial Sequence: Synthetic peptide
CMLLAEKMF

SEQ ID NO: 1124 - protein, 9 aa, Artificial Sequence
  Description of Artificial Sequence: Synthetic peptide
CMYPKSTDR

SEQ ID NO: 1125 - protein, 9 aa, Artificial Sequence
  Description of Artificial Sequence: Synthetic peptide
CSLPYVREG

SEQ ID NO: 1126 - protein, 9 aa, Artificial Sequence
  Description of Artificial Sequence: Synthetic peptide
CSVKMPGFR

SEQ ID NO: 1127 - protein, 9 aa, Artificial Sequence
  Description of Artificial Sequence: Synthetic peptide
CTANVWTAQ

SEQ ID NO: 1128 - protein, 9 aa, Artificial Sequence
  Description of Artificial Sequence: Synthetic peptide
CTVVMMRQP

SEQ ID NO: 1129 - protein, 9 aa, Artificial Sequence
  Description of Artificial Sequence: Synthetic peptide
CVIPLRMYM

SEQ ID NO: 1130 - protein, 9 aa, Artificial Sequence
  Description of Artificial Sequence: Synthetic peptide
CVIQTSRGI

SEQ ID NO: 1131 - protein, 9 aa, Artificial Sequence
  Description of Artificial Sequence: Synthetic peptide
CAAYRGLLE

SEQ ID NO: 1132 - protein, 9 aa, Artificial Sequence
  Description of Artificial Sequence: Synthetic peptide
CAFQPVRWF

SEQ ID NO: 1133 - protein, 9 aa, Artificial Sequence
  Description of Artificial Sequence: Synthetic peptide
CAFQRMMYQ

SEQ ID NO: 1134 - protein, 9 aa, Artificial Sequence
  Description of Artificial Sequence: Synthetic peptide
CAHQPQRDR

SEQ ID NO: 1135 - protein, 9 aa, Artificial Sequence
  Description of Artificial Sequence: Synthetic peptide
CANYAFMTE

SEQ ID NO: 1136 - protein, 9 aa, Artificial Sequence
  Description of Artificial Sequence: Synthetic peptide
CAPLVNSFC

SEQ ID NO: 1137 - protein, 9 aa, Artificial Sequence
  Description of Artificial Sequence: Synthetic peptide
CARMFAAQW

SEQ ID NO: 1138 - protein, 9 aa, Artificial Sequence
  Description of Artificial Sequence: Synthetic peptide
CCHFQHKAG

SEQ ID NO: 1139 - protein, 9 aa, Artificial Sequence
  Description of Artificial Sequence: Synthetic peptide
CCLQPELTM

SEQ ID NO: 1140 - protein, 9 aa, Artificial Sequence
  Description of Artificial Sequence: Synthetic peptide
CCRPFVLHQ

SEQ ID NO: 1141 - protein, 9 aa, Artificial Sequence
  Description of Artificial Sequence: Synthetic peptide
CDVKCKKED

SEQ ID NO: 1142 - protein, 9 aa, Artificial Sequence
  Description of Artificial Sequence: Synthetic peptide
CEMIANTNN

SEQ ID NO: 1143 - protein, 9 aa, Artificial Sequence
  Description of Artificial Sequence: Synthetic peptide
CFNIIQRYD

SEQ ID NO: 1144 - protein, 9 aa, Artificial Sequence
  Description of Artificial Sequence: Synthetic peptide
CFRQVQAMS

SEQ ID NO: 1145 - protein, 9 aa, Artificial Sequence
  Description of Artificial Sequence: Synthetic peptide
CGDWLWRNL

SEQ ID NO: 1146 - protein, 9 aa, Artificial Sequence
  Description of Artificial Sequence: Synthetic peptide
CHGHRPFDA

SEQ ID NO: 1147 - protein, 9 aa, Artificial Sequence
  Description of Artificial Sequence: Synthetic peptide
CHIDYDLGF

SEQ ID NO: 1148 - protein, 9 aa, Artificial Sequence
  Description of Artificial Sequence: Synthetic peptide
CHMKFNKFG

SEQ ID NO: 1149 - protein, 9 aa, Artificial Sequence
  Description of Artificial Sequence: Synthetic peptide
CIGKCWPPM

SEQ ID NO: 1150 - protein, 9 aa, Artificial Sequence
  Description of Artificial Sequence: Synthetic peptide
CIGRVNGTR

SEQ ID NO: 1151 - protein, 9 aa, Artificial Sequence
  Description of Artificial Sequence: Synthetic peptide
CIKLTMDDR

SEQ ID NO: 1152 - protein, 9 aa, Artificial Sequence
  Description of Artificial Sequence: Synthetic peptide
CIKSKFSWQ

SEQ ID NO: 1153 - protein, 9 aa, Artificial Sequence
  Description of Artificial Sequence: Synthetic peptide
CINEKQIRW

SEQ ID NO: 1154 - protein, 9 aa, Artificial Sequence
  Description of Artificial Sequence: Synthetic peptide
CIVKFSNTQ

SEQ ID NO: 1155 - protein, 9 aa, Artificial Sequence
  Description of Artificial Sequence: Synthetic peptide
CKMATNGMT

SEQ ID NO: 1156 - protein, 9 aa, Artificial Sequence
  Description of Artificial Sequence: Synthetic peptide
CKMYMHESR

SEQ ID NO: 1157 - protein, 9 aa, Artificial Sequence
  Description of Artificial Sequence: Synthetic peptide
CLMALKRSG

SEQ ID NO: 1158 - protein, 9 aa, Artificial Sequence
  Description of Artificial Sequence: Synthetic peptide
CLSSYSRYQ

SEQ ID NO: 1159 - protein, 9 aa, Artificial Sequence
  Description of Artificial Sequence: Synthetic peptide
CLVKYPQFG

SEQ ID NO: 1160 - protein, 9 aa, Artificial Sequence
  Description of Artificial Sequence: Synthetic peptide
CMYFIAEWH

SEQ ID NO: 1161 - protein, 9 aa, Artificial Sequence
  Description of Artificial Sequence: Synthetic peptide
CPDEPRWFP

SEQ ID NO: 1162 - protein, 9 aa, Artificial Sequence
  Description of Artificial Sequence: Synthetic peptide
CPFKVFAHG

SEQ ID NO: 1163 - protein, 9 aa, Artificial Sequence
  Description of Artificial Sequence: Synthetic peptide
CPMIDEFPT

SEQ ID NO: 1164 - protein, 9 aa, Artificial Sequence
  Description of Artificial Sequence: Synthetic peptide
CPTWSCQQW

SEQ ID NO: 1165 - protein, 9 aa, Artificial Sequence
  Description of Artificial Sequence: Synthetic peptide
CPWQIKVAA

SEQ ID NO: 1166 - protein, 9 aa, Artificial Sequence
  Description of Artificial Sequence: Synthetic peptide
CQMEQHYSP

SEQ ID NO: 1167 - protein, 9 aa, Artificial Sequence
  Description of Artificial Sequence: Synthetic peptide
CSAPLRHWY

SEQ ID NO: 1168 - protein, 9 aa, Artificial Sequence
  Description of Artificial Sequence: Synthetic peptide
CSIFGPTYP

SEQ ID NO: 1169 - protein, 9 aa, Artificial Sequence
  Description of Artificial Sequence: Synthetic peptide
CSKFIVDWE

SEQ ID NO: 1170 - protein, 9 aa, Artificial Sequence
  Description of Artificial Sequence: Synthetic peptide
CSLRYFMAR

SEQ ID NO: 1171 - protein, 9 aa, Artificial Sequence
  Description of Artificial Sequence: Synthetic peptide
CSRTMEVGL

SEQ ID NO: 1172 - protein, 9 aa, Artificial Sequence
  Description of Artificial Sequence: Synthetic peptide
CSSVRWMSP

SEQ ID NO: 1173 - protein, 9 aa, Artificial Sequence
  Description of Artificial Sequence: Synthetic peptide
CSSYSFQHS

SEQ ID NO: 1174 - protein, 9 aa, Artificial Sequence
  Description of Artificial Sequence: Synthetic peptide
CTFMANWGF

SEQ ID NO: 1175 - protein, 9 aa, Artificial Sequence
  Description of Artificial Sequence: Synthetic peptide
CTGQRGFAN

SEQ ID NO: 1176 - protein, 9 aa, Artificial Sequence
  Description of Artificial Sequence: Synthetic peptide
CTMDQWQTA

SEQ ID NO: 1177 - protein, 9 aa, Artificial Sequence
  Description of Artificial Sequence: Synthetic peptide
CTTHFYRAR

SEQ ID NO: 1178 - protein, 9 aa, Artificial Sequence
  Description of Artificial Sequence: Synthetic peptide
CVAPVRLQD

SEQ ID NO: 1179 - protein, 9 aa, Artificial Sequence
  Description of Artificial Sequence: Synthetic peptide
CVAYRLVNP

SEQ ID NO: 1180 - protein, 9 aa, Artificial Sequence
  Description of Artificial Sequence: Synthetic peptide
CVFMRLTSG

SEQ ID NO: 1181 - protein, 9 aa, Artificial Sequence
  Description of Artificial Sequence: Synthetic peptide
CVFVRNNMM

SEQ ID NO: 1182 - protein, 9 aa, Artificial Sequence
  Description of Artificial Sequence: Synthetic peptide
CVGSLMRIQ

SEQ ID NO: 1183 - protein, 9 aa, Artificial Sequence
  Description of Artificial Sequence: Synthetic peptide
CVHLTSSSA

SEQ ID NO: 1184 - protein, 9 aa, Artificial Sequence
  Description of Artificial Sequence: Synthetic peptide
CVKQYMQPP

SEQ ID NO: 1185 - protein, 9 aa, Artificial Sequence
  Description of Artificial Sequence: Synthetic peptide
CVRHTENWC

SEQ ID NO: 1186 - protein, 9 aa, Artificial Sequence
  Description of Artificial Sequence: Synthetic peptide
CVTTRHKQC

SEQ ID NO: 1187 - protein, 9 aa, Artificial Sequence
  Description of Artificial Sequence: Synthetic peptide
CVWSAPVEC

SEQ ID NO: 1188 - protein, 9 aa, Artificial Sequence
  Description of Artificial Sequence: Synthetic peptide
CVYQSRFSC

SEQ ID NO: 1189 - protein, 9 aa, Artificial Sequence
  Description of Artificial Sequence: Synthetic peptide
CWNENTYEA

SEQ ID NO: 1190 - protein, 9 aa, Artificial Sequence
  Description of Artificial Sequence: Synthetic peptide
CWNGIQRQA

SEQ ID NO: 1191 - protein, 9 aa, Artificial Sequence
  Description of Artificial Sequence: Synthetic peptide
CYTRFHYSE

SEQ ID NO: 1192 - protein, 9 aa, Artificial Sequence
  Description of Artificial Sequence: Synthetic peptide
CYVFRHHYC

SEQ ID NO: 1193 - protein, 9 aa, Artificial Sequence
  Description of Artificial Sequence: Synthetic peptide
HVASTSYVT

SEQ ID NO: 1194 - protein, 9 aa, Artificial Sequence
  Description of Artificial Sequence: Synthetic peptide
HVFDTDRWM

SEQ ID NO: 1195 - protein, 9 aa, Artificial Sequence
  Description of Artificial Sequence: Synthetic peptide
HVFHLDEAN

SEQ ID NO: 1196 - protein, 9 aa, Artificial Sequence
  Description of Artificial Sequence: Synthetic peptide
HVKDTDVQI

SEQ ID NO: 1197 - protein, 9 aa, Artificial Sequence
  Description of Artificial Sequence: Synthetic peptide
HVQARQNPG

SEQ ID NO: 1198 - protein, 9 aa, Artificial Sequence
  Description of Artificial Sequence: Synthetic peptide
HVSDKNHAK

SEQ ID NO: 1199 - protein, 9 aa, Artificial Sequence
  Description of Artificial Sequence: Synthetic peptide
HVVPQNWNW

SEQ ID NO: 1200 - protein, 9 aa, Artificial Sequence
  Description of Artificial Sequence: Synthetic peptide
HVVQRLTIP

SEQ ID NO: 1201 - protein, 9 aa, Artificial Sequence
  Description of Artificial Sequence: Synthetic peptide
IVEARLEFN

SEQ ID NO: 1202 - protein, 9 aa, Artificial Sequence
  Description of Artificial Sequence: Synthetic peptide
IVEDFEIVI

SEQ ID NO: 1203 - protein, 9 aa, Artificial Sequence
  Description of Artificial Sequence: Synthetic peptide
IVFYRFEFV

SEQ ID NO: 1204 - protein, 9 aa, Artificial Sequence
  Description of Artificial Sequence: Synthetic peptide
IVLPTMLLA

SEQ ID NO: 1205 - protein, 9 aa, Artificial Sequence
  Description of Artificial Sequence: Synthetic peptide
IVVIAKMTT

SEQ ID NO: 1206 - protein, 9 aa, Artificial Sequence
  Description of Artificial Sequence: Synthetic peptide
IVVSTWHEQ

SEQ ID NO: 1207 - protein, 9 aa, Artificial Sequence
  Description of Artificial Sequence: Synthetic peptide
IVWLQRVGD

SEQ ID NO: 1208 - protein, 9 aa, Artificial Sequence
  Description of Artificial Sequence: Synthetic peptide
KVDHTINQM

SEQ ID NO: 1209 - protein, 9 aa, Artificial Sequence
  Description of Artificial Sequence: Synthetic peptide
KVDTEKNMM

SEQ ID NO: 1210 - protein, 9 aa, Artificial Sequence
  Description of Artificial Sequence: Synthetic peptide
KVTGHEQDV

SEQ ID NO: 1211 - protein, 9 aa, Artificial Sequence
  Description of Artificial Sequence: Synthetic peptide
KVVLWEHFQ

SEQ ID NO: 1212 - protein, 9 aa, Artificial Sequence
  Description of Artificial Sequence: Synthetic peptide
LVCTHTKAA

SEQ ID NO: 1213 - protein, 9 aa, Artificial Sequence
  Description of Artificial Sequence: Synthetic peptide
LVDDDYQMD

SEQ ID NO: 1214 - protein, 9 aa, Artificial Sequence
  Description of Artificial Sequence: Synthetic peptide
LVEIPCSNW

SEQ ID NO: 1215 - protein, 9 aa, Artificial Sequence
  Description of Artificial Sequence: Synthetic peptide
LVHSCQHTE

SEQ ID NO: 1216 - protein, 9 aa, Artificial Sequence
  Description of Artificial Sequence: Synthetic peptide
LVLQSFHHS

SEQ ID NO: 1217 - protein, 9 aa, Artificial Sequence
  Description of Artificial Sequence: Synthetic peptide
LVNCYTYRA

SEQ ID NO: 1218 - protein, 9 aa, Artificial Sequence
  Description of Artificial Sequence: Synthetic peptide
LVQVMDMKP

SEQ ID NO: 1219 - protein, 9 aa, Artificial Sequence
  Description of Artificial Sequence: Synthetic peptide
LVVIFEGRH

SEQ ID NO: 1220 - protein, 9 aa, Artificial Sequence
  Description of Artificial Sequence: Synthetic peptide
LVWMDPHWG

SEQ ID NO: 1221 - protein, 9 aa, Artificial Sequence
  Description of Artificial Sequence: Synthetic peptide
MVAAKEKHD

SEQ ID NO: 1222 - protein, 9 aa, Artificial Sequence
  Description of Artificial Sequence: Synthetic peptide
MVAHNGLGF

SEQ ID NO: 1223 - protein, 9 aa, Artificial Sequence
  Description of Artificial Sequence: Synthetic peptide
MVCMLVHHC

SEQ ID NO: 1224 - protein, 9 aa, Artificial Sequence
  Description of Artificial Sequence: Synthetic peptide
MVDHSYQQE

SEQ ID NO: 1225 - protein, 9 aa, Artificial Sequence
  Description of Artificial Sequence: Synthetic peptide
MVEVIEGGQ

SEQ ID NO: 1226 - protein, 9 aa, Artificial Sequence
  Description of Artificial Sequence: Synthetic peptide
MVHGNHECW

SEQ ID NO: 1227 - protein, 9 aa, Artificial Sequence
  Description of Artificial Sequence: Synthetic peptide
MVNPMHCCN

SEQ ID NO: 1228 - protein, 9 aa, Artificial Sequence
  Description of Artificial Sequence: Synthetic peptide
MVRKYEKMH

SEQ ID NO: 1229 - protein, 9 aa, Artificial Sequence
  Description of Artificial Sequence: Synthetic peptide
MVSCNQHDS

SEQ ID NO: 1230 - protein, 9 aa, Artificial Sequence
  Description of Artificial Sequence: Synthetic peptide
MVSHVVASE

SEQ ID NO: 1231 - protein, 9 aa, Artificial Sequence
  Description of Artificial Sequence: Synthetic peptide
MVSVDQMSV

SEQ ID NO: 1232 - protein, 9 aa, Artificial Sequence
  Description of Artificial Sequence: Synthetic peptide
MVWSRADWS

SEQ ID NO: 1233 - protein, 9 aa, Artificial Sequence
  Description of Artificial Sequence: Synthetic peptide
NVAIILSTD

SEQ ID NO: 1234 - protein, 9 aa, Artificial Sequence
  Description of Artificial Sequence: Synthetic peptide
NVAVEHNMG

SEQ ID NO: 1235 - protein, 9 aa, Artificial Sequence
  Description of Artificial Sequence: Synthetic peptide
NVEDTRKGS

SEQ ID NO: 1236 - protein, 9 aa, Artificial Sequence
  Description of Artificial Sequence: Synthetic peptide
NVFLAHQRA

SEQ ID NO: 1237 - protein, 9 aa, Artificial Sequence
  Description of Artificial Sequence: Synthetic peptide
NVHNSGRFD

SEQ ID NO: 1238 - protein, 9 aa, Artificial Sequence
  Description of Artificial Sequence: Synthetic peptide
NVIGTENMS

SEQ ID NO: 1239 - protein, 9 aa, Artificial Sequence
  Description of Artificial Sequence: Synthetic peptide
NVKSEHRES

SEQ ID NO: 1240 - protein, 9 aa, Artificial Sequence
  Description of Artificial Sequence: Synthetic peptide
NVLLEKAFW

SEQ ID NO: 1241 - protein, 9 aa, Artificial Sequence
  Description of Artificial Sequence: Synthetic peptide
NVNRGHLLE

SEQ ID NO: 1242 - protein, 9 aa, Artificial Sequence
  Description of Artificial Sequence: Synthetic peptide
NVNWQARND

SEQ ID NO: 1243 - protein, 9 aa, Artificial Sequence
  Description of Artificial Sequence: Synthetic peptide
NVTHKQGCS

SEQ ID NO: 1244 - protein, 9 aa, Artificial Sequence
  Description of Artificial Sequence: Synthetic peptide
NVYPDSMHG

SEQ ID NO: 1245 - protein, 9 aa, Artificial Sequence
  Description of Artificial Sequence: Synthetic peptide
PVNFFEHPM

SEQ ID NO: 1246 - protein, 9 aa, Artificial Sequence
  Description of Artificial Sequence: Synthetic peptide
QVDIDTQNA

SEQ ID NO: 1247 - protein, 9 aa, Artificial Sequence
  Description of Artificial Sequence: Synthetic peptide
QVDPHGNMH

SEQ ID NO: 1248 - protein, 9 aa, Artificial Sequence
  Description of Artificial Sequence: Synthetic peptide
QVDRWCTAA

SEQ ID NO: 1249 - protein, 9 aa, Artificial Sequence
  Description of Artificial Sequence: Synthetic peptide
QVEYAHSRA

SEQ ID NO: 1250 - protein, 9 aa, Artificial Sequence
  Description of Artificial Sequence: Synthetic peptide
QVFMQHDIE

SEQ ID NO: 1251 - protein, 9 aa, Artificial Sequence
  Description of Artificial Sequence: Synthetic peptide
QVGNPLKEF

SEQ ID NO: 1252 - protein, 9 aa, Artificial Sequence
  Description of Artificial Sequence: Synthetic peptide
QVIEWGRSG

SEQ ID NO: 1253 - protein, 9 aa, Artificial Sequence
  Description of Artificial Sequence: Synthetic peptide
QVIIRKWFA

SEQ ID NO: 1254 - protein, 9 aa, Artificial Sequence
  Description of Artificial Sequence: Synthetic peptide
QVLMAQFSR

SEQ ID NO: 1255 - protein, 9 aa, Artificial Sequence
  Description of Artificial Sequence: Synthetic peptide
QVQKCMQYV

SEQ ID NO: 1256 - protein, 9 aa, Artificial Sequence
  Description of Artificial Sequence: Synthetic peptide
QVQKGACPS

SEQ ID NO: 1257 - protein, 9 aa, Artificial Sequence
  Description of Artificial Sequence: Synthetic peptide
QVQSGPYWG

SEQ ID NO: 1258 - protein, 9 aa, Artificial Sequence
  Description of Artificial Sequence: Synthetic peptide
QVQTENMCD

SEQ ID NO: 1259 - protein, 9 aa, Artificial Sequence
  Description of Artificial Sequence: Synthetic peptide
QVRCGIKTG

SEQ ID NO: 1260 - protein, 9 aa, Artificial Sequence
  Description of Artificial Sequence: Synthetic peptide
QVTFHAYVC

SEQ ID NO: 1261 - protein, 9 aa, Artificial Sequence
  Description of Artificial Sequence: Synthetic peptide
QVTIQNDYD

SEQ ID NO: 1262 - protein, 9 aa, Artificial Sequence
  Description of Artificial Sequence: Synthetic peptide
QVWNPHLCM

SEQ ID NO: 1263 - protein, 9 aa, Artificial Sequence
  Description of Artificial Sequence: Synthetic peptide
RVATEHFRE

SEQ ID NO: 1264 - protein, 9 aa, Artificial Sequence
  Description of Artificial Sequence: Synthetic peptide
RVDNPFVSY

SEQ ID NO: 1265 - protein, 9 aa, Artificial Sequence
  Description of Artificial Sequence: Synthetic peptide
RVSECTENY

SEQ ID NO: 1266 - protein, 9 aa, Artificial Sequence
  Description of Artificial Sequence: Synthetic peptide
RVTEEVGSR

SEQ ID NO: 1267 - protein, 9 aa, Artificial Sequence
  Description of Artificial Sequence: Synthetic peptide
SVDQHDHLL

SEQ ID NO: 1268 - protein, 9 aa, Artificial Sequence
  Description of Artificial Sequence: Synthetic peptide
SVERYPLTA

SEQ ID NO: 1269 - protein, 9 aa, Artificial Sequence
  Description of Artificial Sequence: Synthetic peptide
SVFDVVHEE

SEQ ID NO: 1270 - protein, 9 aa, Artificial Sequence
  Description of Artificial Sequence: Synthetic peptide
SVHVRIVEP

SEQ ID NO: 1271 - protein, 9 aa, Artificial Sequence
  Description of Artificial Sequence: Synthetic peptide
SVKQHHVDW

SEQ ID NO: 1272 - protein, 9 aa, Artificial Sequence
  Description of Artificial Sequence: Synthetic peptide
SVLGMPAYR

SEQ ID NO: 1273 - protein, 9 aa, Artificial Sequence
  Description of Artificial Sequence: Synthetic peptide
SVMDANTWR

SEQ ID NO: 1274 - protein, 9 aa, Artificial Sequence
  Description of Artificial Sequence: Synthetic peptide
SVNKDVRHC

SEQ ID NO: 1275 - protein, 9 aa, Artificial Sequence
  Description of Artificial Sequence: Synthetic peptide
SVNSYMDSV

SEQ ID NO: 1276 - protein, 9 aa, Artificial Sequence
  Description of Artificial Sequence: Synthetic peptide
SVPRKSKCS

SEQ ID NO: 1277 - protein, 9 aa, Artificial Sequence
  Description of Artificial Sequence: Synthetic peptide
SVRSYHSQP

SEQ ID NO: 1278 - protein, 9 aa, Artificial Sequence
  Description of Artificial Sequence: Synthetic peptide
SVTQPLYCQ

SEQ ID NO: 1279 - protein, 9 aa, Artificial Sequence
  Description of Artificial Sequence: Synthetic peptide
SVVKRNDDV

SEQ ID NO: 1280 - protein, 9 aa, Artificial Sequence
  Description of Artificial Sequence: Synthetic peptide
TVAHFLNGG

SEQ ID NO: 1281 - protein, 9 aa, Artificial Sequence
  Description of Artificial Sequence: Synthetic peptide
TVALSEQYR

SEQ ID NO: 1282 - protein, 9 aa, Artificial Sequence
  Description of Artificial Sequence: Synthetic peptide
TVAVRYETL

SEQ ID NO: 1283 - protein, 9 aa, Artificial Sequence
  Description of Artificial Sequence: Synthetic peptide
TVCSTIVDW

SEQ ID NO: 1284 - protein, 9 aa, Artificial Sequence
  Description of Artificial Sequence: Synthetic peptide
TVDWRWGDF

SEQ ID NO: 1285 - protein, 9 aa, Artificial Sequence
  Description of Artificial Sequence: Synthetic peptide
TVEHKMDAP

SEQ ID NO: 1286 - protein, 9 aa, Artificial Sequence
  Description of Artificial Sequence: Synthetic peptide
TVISDYEDC

SEQ ID NO: 1287 - protein, 9 aa, Artificial Sequence
  Description of Artificial Sequence: Synthetic peptide
TVKMLQHWT

SEQ ID NO: 1288 - protein, 9 aa, Artificial Sequence
  Description of Artificial Sequence: Synthetic peptide
TVMKEQANM

SEQ ID NO: 1289 - protein, 9 aa, Artificial Sequence
  Description of Artificial Sequence: Synthetic peptide
TVNDHGPCI

SEQ ID NO: 1290 - protein, 9 aa, Artificial Sequence
  Description of Artificial Sequence: Synthetic peptide
TVNKWHQTA

SEQ ID NO: 1291 - protein, 9 aa, Artificial Sequence
  Description of Artificial Sequence: Synthetic peptide
TVNQCMTHC

SEQ ID NO: 1292 - protein, 9 aa, Artificial Sequence
  Description of Artificial Sequence: Synthetic peptide
TVYFVWDSQ

SEQ ID NO: 1293 - protein, 9 aa, Artificial Sequence
  Description of Artificial Sequence: Synthetic peptide
VVGATATGM

SEQ ID NO: 1294 - protein, 9 aa, Artificial Sequence
  Description of Artificial Sequence: Synthetic peptide
VVGPPGHHY

SEQ ID NO: 1295 - protein, 9 aa, Artificial Sequence
  Description of Artificial Sequence: Synthetic peptide
VVMFWQEGD

SEQ ID NO: 1296 - protein, 9 aa, Artificial Sequence
  Description of Artificial Sequence: Synthetic peptide
VVMQQYRSH

SEQ ID NO: 1297 - protein, 9 aa, Artificial Sequence
  Description of Artificial Sequence: Synthetic peptide
VVNKDKWRI

SEQ ID NO: 1298 - protein, 9 aa, Artificial Sequence
  Description of Artificial Sequence: Synthetic peptide
VVQWPTSLL

SEQ ID NO: 1299 - protein, 9 aa, Artificial Sequence
  Description of Artificial Sequence: Synthetic peptide
VVSAAKSSG

SEQ ID NO: 1300 - protein, 9 aa, Artificial Sequence
  Description of Artificial Sequence: Synthetic peptide
VVSHKQRCS

SEQ ID NO: 1301 - protein, 9 aa, Artificial Sequence
  Description of Artificial Sequence: Synthetic peptide
VVSKYQIVP

SEQ ID NO: 1302 - protein, 9 aa, Artificial Sequence
  Description of Artificial Sequence: Synthetic peptide
VVTCRHQGS

SEQ ID NO: 1303 - protein, 9 aa, Artificial Sequence
  Description of Artificial Sequence: Synthetic peptide
VVVPMSNCE

SEQ ID NO: 1304 - protein, 9 aa, Artificial Sequence
  Description of Artificial Sequence: Synthetic peptide
WVMCISGHY

SEQ ID NO: 1305 - protein, 9 aa, Artificial Sequence
  Description of Artificial Sequence: Synthetic peptide
YVMFNTWRE

SEQ ID NO: 1306 - protein, 9 aa, Artificial Sequence
  Description of Artificial Sequence: Synthetic peptide
YVTMSDERP

SEQ ID NO: 1307 - protein, 9 aa, Artificial Sequence
  Description of Artificial Sequence: Synthetic peptide
AVGFMECAN

SEQ ID NO: 1308 - protein, 9 aa, Artificial Sequence
  Description of Artificial Sequence: Synthetic peptide
DVKDRNELH

SEQ ID NO: 1309 - protein, 9 aa, Artificial Sequence
  Description of Artificial Sequence: Synthetic peptide
EVSAEEGQN

SEQ ID NO: 1310 - protein, 9 aa, Artificial Sequence
  Description of Artificial Sequence: Synthetic peptide
GVMPRWGLF

SEQ ID NO: 1311 - protein, 9 aa, Artificial Sequence
  Description of Artificial Sequence: Synthetic peptide
GVVNLVKMQ

SEQ ID NO: 1312 - protein, 9 aa, Artificial Sequence
  Description of Artificial Sequence: Synthetic peptide
IVMYDHFNQ

SEQ ID NO: 1313 - protein, 9 aa, Artificial Sequence
  Description of Artificial Sequence: Synthetic peptide
KVILDSFRQ

SEQ ID NO: 1314 - protein, 9 aa, Artificial Sequence
  Description of Artificial Sequence: Synthetic peptide
KVMPEPVTE

SEQ ID NO: 1315 - protein, 9 aa, Artificial Sequence
  Description of Artificial Sequence: Synthetic peptide
LVHLFQYHL

SEQ ID NO: 1316 - protein, 9 aa, Artificial Sequence
  Description of Artificial Sequence: Synthetic peptide
QVVACMHHT

SEQ ID NO: 1317 - protein, 9 aa, Artificial Sequence
  Description of Artificial Sequence: Synthetic peptide
RVDYSAIHM

SEQ ID NO: 1318 - protein, 9 aa, Artificial Sequence
  Description of Artificial Sequence: Synthetic peptide
SVIMHHDQH

SEQ ID NO: 1319 - protein, 9 aa, Artificial Sequence
  Description of Artificial Sequence: Synthetic peptide
VVEMNGDDD

SEQ ID NO: 1320 - protein, 9 aa, Artificial Sequence
  Description of Artificial Sequence: Synthetic peptide
VVEYAPWAW

SEQ ID NO: 1321 - protein, 9 aa, Artificial Sequence
  Description of Artificial Sequence: Synthetic peptide
AVAKGVGVT

SEQ ID NO: 1322 - protein, 9 aa, Artificial Sequence
  Description of Artificial Sequence: Synthetic peptide
AVMATGVTQ

SEQ ID NO: 1323 - protein, 9 aa, Artificial Sequence
  Description of Artificial Sequence: Synthetic peptide
AVSGNWMMT

SEQ ID NO: 1324 - protein, 9 aa, Artificial Sequence
  Description of Artificial Sequence: Synthetic peptide
AVSKSGCGM

SEQ ID NO: 1325 - protein, 9 aa, Artificial Sequence
  Description of Artificial Sequence: Synthetic peptide
DVAAVQVLE

SEQ ID NO: 1326 - protein, 9 aa, Artificial Sequence
  Description of Artificial Sequence: Synthetic peptide
DVASYEQAY

SEQ ID NO: 1327 - protein, 9 aa, Artificial Sequence
  Description of Artificial Sequence: Synthetic peptide
DVEWQQSWT

SEQ ID NO: 1328 - protein, 9 aa, Artificial Sequence
  Description of Artificial Sequence: Synthetic peptide
DVGGLNREY

SEQ ID NO: 1329 - protein, 9 aa, Artificial Sequence
  Description of Artificial Sequence: Synthetic peptide
DVHEVMSCG

SEQ ID NO: 1330 - protein, 9 aa, Artificial Sequence
  Description of Artificial Sequence: Synthetic peptide
DVHICTVHI

SEQ ID NO: 1331 - protein, 9 aa, Artificial Sequence
  Description of Artificial Sequence: Synthetic peptide
DVKGMLDGF

SEQ ID NO: 1332 - protein, 9 aa, Artificial Sequence
  Description of Artificial Sequence: Synthetic peptide
DVKMQQKYF

SEQ ID NO: 1333 - protein, 9 aa, Artificial Sequence
  Description of Artificial Sequence: Synthetic peptide
DVMGHAKLA

SEQ ID NO: 1334 - protein, 9 aa, Artificial Sequence
  Description of Artificial Sequence: Synthetic peptide
DVRAYLNKE

SEQ ID NO: 1335 - protein, 9 aa, Artificial Sequence
  Description of Artificial Sequence: Synthetic peptide
DVRYNQNAW

SEQ ID NO: 1336 - protein, 9 aa, Artificial Sequence
  Description of Artificial Sequence: Synthetic peptide
DVSFMGWDC

SEQ ID NO: 1337 - protein, 9 aa, Artificial Sequence
  Description of Artificial Sequence: Synthetic peptide
DVTHHFAKQ

SEQ ID NO: 1338 - protein, 9 aa, Artificial Sequence
  Description of Artificial Sequence: Synthetic peptide
EVAHFLANE

SEQ ID NO: 1339 - protein, 9 aa, Artificial Sequence
  Description of Artificial Sequence: Synthetic peptide
EVDNMQMGE

SEQ ID NO: 1340 - protein, 9 aa, Artificial Sequence
  Description of Artificial Sequence: Synthetic peptide
EVGVSAPMM

SEQ ID NO: 1341 - protein, 9 aa, Artificial Sequence
  Description of Artificial Sequence: Synthetic peptide
EVSGMFHPA

SEQ ID NO: 1342 - protein, 9 aa, Artificial Sequence
  Description of Artificial Sequence: Synthetic peptide
EVTTMLKAC

SEQ ID NO: 1343 - protein, 9 aa, Artificial Sequence
  Description of Artificial Sequence: Synthetic peptide
EVWINMAPE

SEQ ID NO: 1344 - protein, 9 aa, Artificial Sequence
  Description of Artificial Sequence: Synthetic peptide
EVYMEPANW

SEQ ID NO: 1345 - protein, 9 aa, Artificial Sequence
  Description of Artificial Sequence: Synthetic peptide
GVFFRYEHG

SEQ ID NO: 1346 - protein, 9 aa, Artificial Sequence
  Description of Artificial Sequence: Synthetic peptide
GVFSTGVVT

SEQ ID NO: 1347 - protein, 9 aa, Artificial Sequence
  Description of Artificial Sequence: Synthetic peptide
GVGVGLGTQ

SEQ ID NO: 1348 - protein, 9 aa, Artificial Sequence
  Description of Artificial Sequence: Synthetic peptide
GVHQESGQN

SEQ ID NO: 1349 - protein, 9 aa, Artificial Sequence
  Description of Artificial Sequence: Synthetic peptide
GVNKLSYEN

SEQ ID NO: 1350 - protein, 9 aa, Artificial Sequence
  Description of Artificial Sequence: Synthetic peptide
GVRIPMAAD

SEQ ID NO: 1351 - protein, 9 aa, Artificial Sequence
  Description of Artificial Sequence: Synthetic peptide
GVSQFMAET

SEQ ID NO: 1352 - protein, 9 aa, Artificial Sequence
  Description of Artificial Sequence: Synthetic peptide
HVGAHTRSD

SEQ ID NO: 1353 - protein, 9 aa, Artificial Sequence
  Description of Artificial Sequence: Synthetic peptide
HVGKMPGGS

SEQ ID NO: 1354 - protein, 9 aa, Artificial Sequence
  Description of Artificial Sequence: Synthetic peptide
HVNSFQPDR

SEQ ID NO: 1355 - protein, 9 aa, Artificial Sequence
  Description of Artificial Sequence: Synthetic peptide
IVCTTFEDS

SEQ ID NO: 1356 - protein, 9 aa, Artificial Sequence
  Description of Artificial Sequence: Synthetic peptide
IVDQTCMHA

SEQ ID NO: 1357 - protein, 9 aa, Artificial Sequence
  Description of Artificial Sequence: Synthetic peptide
IVGIWQWMG

SEQ ID NO: 1358 - protein, 9 aa, Artificial Sequence
  Description of Artificial Sequence: Synthetic peptide
IVKNLEQYM

SEQ ID NO: 1359 - protein, 9 aa, Artificial Sequence
  Description of Artificial Sequence: Synthetic peptide
IVKTLICYN

SEQ ID NO: 1360 - protein, 9 aa, Artificial Sequence
  Description of Artificial Sequence: Synthetic peptide
KVDVITVKD

SEQ ID NO: 1361 - protein, 9 aa, Artificial Sequence
  Description of Artificial Sequence: Synthetic peptide
KVGAHNDEV

SEQ ID NO: 1362 - protein, 9 aa, Artificial Sequence
  Description of Artificial Sequence: Synthetic peptide
KVTWLDLED

SEQ ID NO: 1363 - protein, 9 aa, Artificial Sequence
  Description of Artificial Sequence: Synthetic peptide
LVEAVMNAT

SEQ ID NO: 1364 - protein, 9 aa, Artificial Sequence
  Description of Artificial Sequence: Synthetic peptide
LVKACTDQH

SEQ ID NO: 1365 - protein, 9 aa, Artificial Sequence
  Description of Artificial Sequence: Synthetic peptide
LVKQYGLIH

SEQ ID NO: 1366 - protein, 9 aa, Artificial Sequence
  Description of Artificial Sequence: Synthetic peptide
LVLMDRQAY

SEQ ID NO: 1367 - protein, 9 aa, Artificial Sequence
  Description of Artificial Sequence: Synthetic peptide
LVSQTPRKV

SEQ ID NO: 1368 - protein, 9 aa, Artificial Sequence
  Description of Artificial Sequence: Synthetic peptide
LVVDHAEWS

SEQ ID NO: 1369 - protein, 9 aa, Artificial Sequence
  Description of Artificial Sequence: Synthetic peptide
MVALTDQLG

SEQ ID NO: 1370 - protein, 9 aa, Artificial Sequence
  Description of Artificial Sequence: Synthetic peptide
MVDSNACLC

SEQ ID NO: 1371 - protein, 9 aa, Artificial Sequence
  Description of Artificial Sequence: Synthetic peptide
MVHPSQNVD

SEQ ID NO: 1372 - protein, 9 aa, Artificial Sequence
  Description of Artificial Sequence: Synthetic peptide
MVKEAPYYR

SEQ ID NO: 1373 - protein, 9 aa, Artificial Sequence
  Description of Artificial Sequence: Synthetic peptide
MVSEYATNA

SEQ ID NO: 1374 - protein, 9 aa, Artificial Sequence
  Description of Artificial Sequence: Synthetic peptide
MVTGISKSS

SEQ ID NO: 1375 - protein, 9 aa, Artificial Sequence
  Description of Artificial Sequence: Synthetic peptide
NVESNYNLI

SEQ ID NO: 1376 - protein, 9 aa, Artificial Sequence
  Description of Artificial Sequence: Synthetic peptide
NVEWGTVQS

SEQ ID NO: 1377 - protein, 9 aa, Artificial Sequence
  Description of Artificial Sequence: Synthetic peptide
NVFMTSFQC

SEQ ID NO: 1378 - protein, 9 aa, Artificial Sequence
  Description of Artificial Sequence: Synthetic peptide
NVFQPEDHC

SEQ ID NO: 1379 - protein, 9 aa, Artificial Sequence
  Description of Artificial Sequence: Synthetic peptide
NVTWEDVQE

SEQ ID NO: 1380 - protein, 9 aa, Artificial Sequence
  Description of Artificial Sequence: Synthetic peptide
PVAAAEPRN

SEQ ID NO: 1381 - protein, 9 aa, Artificial Sequence
  Description of Artificial Sequence: Synthetic peptide
QVAEPGGRF

SEQ ID NO: 1382 - protein, 9 aa, Artificial Sequence
  Description of Artificial Sequence: Synthetic peptide
QVDSWPVLS

SEQ ID NO: 1383 - protein, 9 aa, Artificial Sequence
  Description of Artificial Sequence: Synthetic peptide
QVGCTVGPG

SEQ ID NO: 1384 - protein, 9 aa, Artificial Sequence
  Description of Artificial Sequence: Synthetic peptide
RVQHSGAHW

SEQ ID NO: 1385 - protein, 9 aa, Artificial Sequence
  Description of Artificial Sequence: Synthetic peptide
RVTNTWECM

SEQ ID NO: 1386 - protein, 9 aa, Artificial Sequence
  Description of Artificial Sequence: Synthetic peptide
RVYTTGKCS

SEQ ID NO: 1387 - protein, 9 aa, Artificial Sequence
  Description of Artificial Sequence: Synthetic peptide
SVHHSRWGY

SEQ ID NO: 1388 - protein, 9 aa, Artificial Sequence
  Description of Artificial Sequence: Synthetic peptide
SVNQAMARK

SEQ ID NO: 1389 - protein, 9 aa, Artificial Sequence
  Description of Artificial Sequence: Synthetic peptide
SVSVMTYSE

SEQ ID NO: 1390 - protein, 9 aa, Artificial Sequence
  Description of Artificial Sequence: Synthetic peptide
TVAMDPDYA

SEQ ID NO: 1391 - protein, 9 aa, Artificial Sequence
  Description of Artificial Sequence: Synthetic peptide
TVATEPAQQ

SEQ ID NO: 1392 - protein, 9 aa, Artificial Sequence
  Description of Artificial Sequence: Synthetic peptide
TVDFFVMDC

SEQ ID NO: 1393 - protein, 9 aa, Artificial Sequence
  Description of Artificial Sequence: Synthetic peptide
TVDHCVGTV

SEQ ID NO: 1394 - protein, 9 aa, Artificial Sequence
  Description of Artificial Sequence: Synthetic peptide
TVGLNERNG

SEQ ID NO: 1395 - protein, 9 aa, Artificial Sequence
  Description of Artificial Sequence: Synthetic peptide
TVHWWECVQ

SEQ ID NO: 1396 - protein, 9 aa, Artificial Sequence
  Description of Artificial Sequence: Synthetic peptide
TVQTNFTSK

SEQ ID NO: 1397 - protein, 9 aa, Artificial Sequence
  Description of Artificial Sequence: Synthetic peptide
TVTQEWMMK

SEQ ID NO: 1398 - protein, 9 aa, Artificial Sequence
  Description of Artificial Sequence: Synthetic peptide
TVVGLITNA

SEQ ID NO: 1399 - protein, 9 aa, Artificial Sequence
  Description of Artificial Sequence: Synthetic peptide
VVEKRMDRS

SEQ ID NO: 1400 - protein, 9 aa, Artificial Sequence
  Description of Artificial Sequence: Synthetic peptide
VVHGYVCKQ

SEQ ID NO: 1401 - protein, 9 aa, Artificial Sequence
  Description of Artificial Sequence: Synthetic peptide
VVHPLAYCT

SEQ ID NO: 1402 - protein, 9 aa, Artificial Sequence
  Description of Artificial Sequence: Synthetic peptide
VVNKQQISE

SEQ ID NO: 1403 - protein, 9 aa, Artificial Sequence
  Description of Artificial Sequence: Synthetic peptide
VVTSPDAFQ

SEQ ID NO: 1404 - protein, 9 aa, Artificial Sequence
  Description of Artificial Sequence: Synthetic peptide
VVVHTQCNP

SEQ ID NO: 1405 - protein, 9 aa, Artificial Sequence
  Description of Artificial Sequence: Synthetic peptide
WVTPTNHKP

SEQ ID NO: 1406 - protein, 9 aa, Artificial Sequence
  Description of Artificial Sequence: Synthetic peptide
YVAEYGLGA

SEQ ID NO: 1407 - protein, 9 aa, Artificial Sequence
  Description of Artificial Sequence: Synthetic peptide
YVEERGSQR

SEQ ID NO: 1408 - protein, 9 aa, Artificial Sequence
  Description of Artificial Sequence: Synthetic peptide
YVIVHMKGM

SEQ ID NO: 1409 - protein, 9 aa, Artificial Sequence
  Description of Artificial Sequence: Synthetic peptide
YVTPNIAVH

SEQ ID NO: 1410 - protein, 9 aa, Artificial Sequence
  Description of Artificial Sequence: Synthetic peptide
HCMRQSESG

SEQ ID NO: 1411 - protein, 9 aa, Artificial Sequence
  Description of Artificial Sequence: Synthetic peptide
HSMPEAVAY

SEQ ID NO: 1412 - protein, 9 aa, Artificial Sequence
  Description of Artificial Sequence: Synthetic peptide
HTMEILPGL

SEQ ID NO: 1413 - protein, 9 aa, Artificial Sequence
  Description of Artificial Sequence: Synthetic peptide
HTMHDSCFN

SEQ ID NO: 1414 - protein, 9 aa, Artificial Sequence
  Description of Artificial Sequence: Synthetic peptide
HTMLWAKDE

SEQ ID NO: 1415 - protein, 9 aa, Artificial Sequence
  Description of Artificial Sequence: Synthetic peptide
ICMSYLSWD

SEQ ID NO: 1416 - protein, 9 aa, Artificial Sequence
  Description of Artificial Sequence: Synthetic peptide
IPMFSIHGN

SEQ ID NO: 1417 - protein, 9 aa, Artificial Sequence
  Description of Artificial Sequence: Synthetic peptide
KAMLEGPYL

SEQ ID NO: 1418 - protein, 9 aa, Artificial Sequence
  Description of Artificial Sequence: Synthetic peptide
KNMINEAAP

SEQ ID NO: 1419 - protein, 9 aa, Artificial Sequence
  Description of Artificial Sequence: Synthetic peptide
KSMWEHAIF

SEQ ID NO: 1420 - protein, 9 aa, Artificial Sequence
  Description of Artificial Sequence: Synthetic peptide
KTMEDVIHA

SEQ ID NO: 1421 - protein, 9 aa, Artificial Sequence
  Description of Artificial Sequence: Synthetic peptide
KYMSYERES

SEQ ID NO: 1422 - protein, 9 aa, Artificial Sequence
  Description of Artificial Sequence: Synthetic peptide
LAMTLAVGQ

SEQ ID NO: 1423 - protein, 9 aa, Artificial Sequence
  Description of Artificial Sequence: Synthetic peptide
LCMDYALVD

SEQ ID NO: 1424 - protein, 9 aa, Artificial Sequence
  Description of Artificial Sequence: Synthetic peptide
LCMLLASQQ

SEQ ID NO: 1425 - protein, 9 aa, Artificial Sequence
  Description of Artificial Sequence: Synthetic peptide
LSMCFRDDY

SEQ ID NO: 1426 - protein, 9 aa, Artificial Sequence
  Description of Artificial Sequence: Synthetic peptide
MCMVERRGS

SEQ ID NO: 1427 - protein, 9 aa, Artificial Sequence
  Description of Artificial Sequence: Synthetic peptide
MFMSQHVED

SEQ ID NO: 1428 - protein, 9 aa, Artificial Sequence
  Description of Artificial Sequence: Synthetic peptide
MNMHTDCTT

SEQ ID NO: 1429 - protein, 9 aa, Artificial Sequence
  Description of Artificial Sequence: Synthetic peptide
NAMWTTEYE

SEQ ID NO: 1430 - protein, 9 aa, Artificial Sequence
  Description of Artificial Sequence: Synthetic peptide
NEMKFSYSH

SEQ ID NO: 1431 - protein, 9 aa, Artificial Sequence
  Description of Artificial Sequence: Synthetic peptide
NIMNWQNGD

SEQ ID NO: 1432 - protein, 9 aa, Artificial Sequence
  Description of Artificial Sequence: Synthetic peptide
NLMPTNHAM

SEQ ID NO: 1433 - protein, 9 aa, Artificial Sequence
  Description of Artificial Sequence: Synthetic peptide
NSMQHCVCP

SEQ ID NO: 1434 - protein, 9 aa, Artificial Sequence
  Description of Artificial Sequence: Synthetic peptide
NTMHPVGMM

SEQ ID NO: 1435 - protein, 9 aa, Artificial Sequence
  Description of Artificial Sequence: Synthetic peptide
NTMMVGRCE

SEQ ID NO: 1436 - protein, 9 aa, Artificial Sequence
  Description of Artificial Sequence: Synthetic peptide
PIMFEGECK

SEQ ID NO: 1437 - protein, 9 aa, Artificial Sequence
  Description of Artificial Sequence: Synthetic peptide
QCMMKSSYE

SEQ ID NO: 1438 - protein, 9 aa, Artificial Sequence
  Description of Artificial Sequence: Synthetic peptide
QFMPYLGFA

SEQ ID NO: 1439 - protein, 9 aa, Artificial Sequence
  Description of Artificial Sequence: Synthetic peptide
QGMENQWHQ

SEQ ID NO: 1440 - protein, 9 aa, Artificial Sequence
  Description of Artificial Sequence: Synthetic peptide
QHMYANCLP

SEQ ID NO: 1441 - protein, 9 aa, Artificial Sequence
  Description of Artificial Sequence: Synthetic peptide
QKMTRQHWG

SEQ ID NO: 1442 - protein, 9 aa, Artificial Sequence
  Description of Artificial Sequence: Synthetic peptide
QSMEQEFVT

SEQ ID NO: 1443 - protein, 9 aa, Artificial Sequence
  Description of Artificial Sequence: Synthetic peptide
QSMMALKDY

SEQ ID NO: 1444 - protein, 9 aa, Artificial Sequence
  Description of Artificial Sequence: Synthetic peptide
QSMMTDRTY

SEQ ID NO: 1445 - protein, 9 aa, Artificial Sequence
  Description of Artificial Sequence: Synthetic peptide
REMTKVGGR

SEQ ID NO: 1446 - protein, 9 aa, Artificial Sequence
  Description of Artificial Sequence: Synthetic peptide
RGMYRCGWD

SEQ ID NO: 1447 - protein, 9 aa, Artificial Sequence
  Description of Artificial Sequence: Synthetic peptide
RNMYISQWE

SEQ ID NO: 1448 - protein, 9 aa, Artificial Sequence
  Description of Artificial Sequence: Synthetic peptide
RSMGNEQDP

SEQ ID NO: 1449 - protein, 9 aa, Artificial Sequence
  Description of Artificial Sequence: Synthetic peptide
SEMKLVNLP

SEQ ID NO: 1450 - protein, 9 aa, Artificial Sequence
  Description of Artificial Sequence: Synthetic peptide
SEMVKHNFE

SEQ ID NO: 1451 - protein, 9 aa, Artificial Sequence
  Description of Artificial Sequence: Synthetic peptide
SGMKQVGAA

SEQ ID NO: 1452 - protein, 9 aa, Artificial Sequence
  Description of Artificial Sequence: Synthetic peptide
SGMLVGIYN

SEQ ID NO: 1453 - protein, 9 aa, Artificial Sequence
  Description of Artificial Sequence: Synthetic peptide
SHMVSNSAV

SEQ ID NO: 1454 - protein, 9 aa, Artificial Sequence
  Description of Artificial Sequence: Synthetic peptide
SSMSKHFVA

SEQ ID NO: 1455 - protein, 9 aa, Artificial Sequence
  Description of Artificial Sequence: Synthetic peptide
STMPGTDQK

SEQ ID NO: 1456 - protein, 9 aa, Artificial Sequence
  Description of Artificial Sequence: Synthetic peptide
TAMHQTMLN

SEQ ID NO: 1457 - protein, 9 aa, Artificial Sequence
  Description of Artificial Sequence: Synthetic peptide
TAMMSGHLV

SEQ ID NO: 1458 - protein, 9 aa, Artificial Sequence
  Description of Artificial Sequence: Synthetic peptide
TAMVVEYDQ

SEQ ID NO: 1459 - protein, 9 aa, Artificial Sequence
  Description of Artificial Sequence: Synthetic peptide
TCMKNINYQ

SEQ ID NO: 1460 - protein, 9 aa, Artificial Sequence
  Description of Artificial Sequence: Synthetic peptide
TCMLGAEAA

SEQ ID NO: 1461 - protein, 9 aa, Artificial Sequence
  Description of Artificial Sequence: Synthetic peptide
TCMQLATMQ

SEQ ID NO: 1462 - protein, 9 aa, Artificial Sequence
  Description of Artificial Sequence: Synthetic peptide
TCMTLRHIG

SEQ ID NO: 1463 - protein, 9 aa, Artificial Sequence
  Description of Artificial Sequence: Synthetic peptide
TCMYYWKQP

SEQ ID NO: 1464 - protein, 9 aa, Artificial Sequence
  Description of Artificial Sequence: Synthetic peptide
THMLCPRMD

SEQ ID NO: 1465 - protein, 9 aa, Artificial Sequence
  Description of Artificial Sequence: Synthetic peptide
TNMSYQRSD

SEQ ID NO: 1466 - protein, 9 aa, Artificial Sequence
  Description of Artificial Sequence: Synthetic peptide
TRMPVNQSC

SEQ ID NO: 1467 - protein, 9 aa, Artificial Sequence
  Description of Artificial Sequence: Synthetic peptide
TWMEWHANA

SEQ ID NO: 1468 - protein, 9 aa, Artificial Sequence
  Description of Artificial Sequence: Synthetic peptide
TYMGTHNHS

SEQ ID NO: 1469 - protein, 9 aa, Artificial Sequence
  Description of Artificial Sequence: Synthetic peptide
VFMPDVYDK

SEQ ID NO: 1470 - protein, 9 aa, Artificial Sequence
  Description of Artificial Sequence: Synthetic peptide
VKMPYHYEG

SEQ ID NO: 1471 - protein, 9 aa, Artificial Sequence
  Description of Artificial Sequence: Synthetic peptide
VQMQEVPHY

SEQ ID NO: 1472 - protein, 9 aa, Artificial Sequence
  Description of Artificial Sequence: Synthetic peptide
WFMHYSWKH

SEQ ID NO: 1473 - protein, 9 aa, Artificial Sequence
  Description of Artificial Sequence: Synthetic peptide
WKMEGDCFK

SEQ ID NO: 1474 - protein, 9 aa, Artificial Sequence
  Description of Artificial Sequence: Synthetic peptide
EIMCAYVKA

SEQ ID NO: 1475 - protein, 9 aa, Artificial Sequence
  Description of Artificial Sequence: Synthetic peptide
GAMPNPYHE

SEQ ID NO: 1476 - protein, 9 aa, Artificial Sequence
  Description of Artificial Sequence: Synthetic peptide
GTMWSTKSC

SEQ ID NO: 1477 - protein, 9 aa, Artificial Sequence
  Description of Artificial Sequence: Synthetic peptide
HPMFMIPGY

SEQ ID NO: 1478 - protein, 9 aa, Artificial Sequence
  Description of Artificial Sequence: Synthetic peptide
HYMLKEYFA

SEQ ID NO: 1479 - protein, 9 aa, Artificial Sequence
  Description of Artificial Sequence: Synthetic peptide
IHMNTIVGE

SEQ ID NO: 1480 - protein, 9 aa, Artificial Sequence
  Description of Artificial Sequence: Synthetic peptide
IMMAQWFAH

SEQ ID NO: 1481 - protein, 9 aa, Artificial Sequence
  Description of Artificial Sequence: Synthetic peptide
PSMPNIKPS

SEQ ID NO: 1482 - protein, 9 aa, Artificial Sequence
  Description of Artificial Sequence: Synthetic peptide
PYMQYWYWE

SEQ ID NO: 1483 - protein, 9 aa, Artificial Sequence
  Description of Artificial Sequence: Synthetic peptide
REMLRDKMP

SEQ ID NO: 1484 - protein, 9 aa, Artificial Sequence
  Description of Artificial Sequence: Synthetic peptide
SAMQVMTMC

SEQ ID NO: 1485 - protein, 9 aa, Artificial Sequence
  Description of Artificial Sequence: Synthetic peptide
TAMSICMYG

SEQ ID NO: 1486 - protein, 9 aa, Artificial Sequence
  Description of Artificial Sequence: Synthetic peptide
TFMDKGLIR

SEQ ID NO: 1487 - protein, 9 aa, Artificial Sequence
  Description of Artificial Sequence: Synthetic peptide
ANMFRNGMQ

SEQ ID NO: 1488 - protein, 9 aa, Artificial Sequence
  Description of Artificial Sequence: Synthetic peptide
ASMFWNYQV

SEQ ID NO: 1489 - protein, 9 aa, Artificial Sequence
  Description of Artificial Sequence: Synthetic peptide
DRMVIKSAE

SEQ ID NO: 1490 - protein, 9 aa, Artificial Sequence
  Description of Artificial Sequence: Synthetic peptide
EAMRAMTPI

SEQ ID NO: 1491 - protein, 9 aa, Artificial Sequence
  Description of Artificial Sequence: Synthetic peptide
EAMYWQCAI

SEQ ID NO: 1492 - protein, 9 aa, Artificial Sequence
  Description of Artificial Sequence: Synthetic peptide
EIMWEGVGS

SEQ ID NO: 1493 - protein, 9 aa, Artificial Sequence
  Description of Artificial Sequence: Synthetic peptide
ENMHKEYVQ

SEQ ID NO: 1494 - protein, 9 aa, Artificial Sequence
  Description of Artificial Sequence: Synthetic peptide
EPMEHYLRS

SEQ ID NO: 1495 - protein, 9 aa, Artificial Sequence
  Description of Artificial Sequence: Synthetic peptide
GAMTMCCEW

SEQ ID NO: 1496 - protein, 9 aa, Artificial Sequence
  Description of Artificial Sequence: Synthetic peptide
GKMMGLHSH

SEQ ID NO: 1497 - protein, 9 aa, Artificial Sequence
  Description of Artificial Sequence: Synthetic peptide
ILMEYDHDK

SEQ ID NO: 1498 - protein, 9 aa, Artificial Sequence
  Description of Artificial Sequence: Synthetic peptide
IMMHRVMSD

SEQ ID NO: 1499 - protein, 9 aa, Artificial Sequence
  Description of Artificial Sequence: Synthetic peptide
KAMEVHFQK

SEQ ID NO: 1500 - protein, 9 aa, Artificial Sequence
  Description of Artificial Sequence: Synthetic peptide
KAMGLPSWY

SEQ ID NO: 1501 - protein, 9 aa, Artificial Sequence
  Description of Artificial Sequence: Synthetic peptide
KSMWEDRIC

SEQ ID NO: 1502 - protein, 9 aa, Artificial Sequence
  Description of Artificial Sequence: Synthetic peptide
LAMPWDTLQ

SEQ ID NO: 1503 - protein, 9 aa, Artificial Sequence
  Description of Artificial Sequence: Synthetic peptide
LCMLRMMGH

SEQ ID NO: 1504 - protein, 9 aa, Artificial Sequence
  Description of Artificial Sequence: Synthetic peptide
LIMAHWLDM

SEQ ID NO: 1505 - protein, 9 aa, Artificial Sequence
  Description of Artificial Sequence: Synthetic peptide
LIMDSKMGQ

SEQ ID NO: 1506 - protein, 9 aa, Artificial Sequence
  Description of Artificial Sequence: Synthetic peptide
LLMPVLHQM

SEQ ID NO: 1507 - protein, 9 aa, Artificial Sequence
  Description of Artificial Sequence: Synthetic peptide
MGMKREGSG

SEQ ID NO: 1508 - protein, 9 aa, Artificial Sequence
  Description of Artificial Sequence: Synthetic peptide
MQMSKNKHP

SEQ ID NO: 1509 - protein, 9 aa, Artificial Sequence
  Description of Artificial Sequence: Synthetic peptide
MRMIHWMHC

SEQ ID NO: 1510 - protein, 9 aa, Artificial Sequence
  Description of Artificial Sequence: Synthetic peptide
NKMEWHKYC

SEQ ID NO: 1511 - protein, 9 aa, Artificial Sequence
  Description of Artificial Sequence: Synthetic peptide
NWMQNTEGH

SEQ ID NO: 1512 - protein, 9 aa, Artificial Sequence
  Description of Artificial Sequence: Synthetic peptide
PEMSFEFTT

SEQ ID NO: 1513 - protein, 9 aa, Artificial Sequence
  Description of Artificial Sequence: Synthetic peptide
PGMNMVRKE

SEQ ID NO: 1514 - protein, 9 aa, Artificial Sequence
  Description of Artificial Sequence: Synthetic peptide
PTMWWYLLV

SEQ ID NO: 1515 - protein, 9 aa, Artificial Sequence
  Description of Artificial Sequence: Synthetic peptide
QCMIVSGMT

SEQ ID NO: 1516 - protein, 9 aa, Artificial Sequence
  Description of Artificial Sequence: Synthetic peptide
QGMHAMFYA

SEQ ID NO: 1517 - protein, 9 aa, Artificial Sequence
  Description of Artificial Sequence: Synthetic peptide
QMMQLYCGA

SEQ ID NO: 1518 - protein, 9 aa, Artificial Sequence
  Description of Artificial Sequence: Synthetic peptide
SAMVHSNKS

SEQ ID NO: 1519 - protein, 9 aa, Artificial Sequence
  Description of Artificial Sequence: Synthetic peptide
SHMSYLMSH

SEQ ID NO: 1520 - protein, 9 aa, Artificial Sequence
  Description of Artificial Sequence: Synthetic peptide
TCMPNIQCP

SEQ ID NO: 1521 - protein, 9 aa, Artificial Sequence
  Description of Artificial Sequence: Synthetic peptide
TFMHQFGTY

SEQ ID NO: 1522 - protein, 9 aa, Artificial Sequence
  Description of Artificial Sequence: Synthetic peptide
TQMMTPVGA

SEQ ID NO: 1523 - protein, 9 aa, Artificial Sequence
  Description of Artificial Sequence: Synthetic peptide
TWMADWHQE

SEQ ID NO: 1524 - protein, 9 aa, Artificial Sequence
  Description of Artificial Sequence: Synthetic peptide
VAMQSMQEH

SEQ ID NO: 1525 - protein, 9 aa, Artificial Sequence
  Description of Artificial Sequence: Synthetic peptide
VAMQTHQCY

SEQ ID NO: 1526 - protein, 9 aa, Artificial Sequence
  Description of Artificial Sequence: Synthetic peptide
WWMHGRVGR

SEQ ID NO: 1527 - protein, 9 aa, Artificial Sequence
  Description of Artificial Sequence: Synthetic peptide
YCMLKHKAG

SEQ ID NO: 1528 - protein, 9 aa, Artificial Sequence
  Description of Artificial Sequence: Synthetic peptide
YCMWQQTSN

SEQ ID NO: 1529 - protein, 9 aa, Artificial Sequence
  Description of Artificial Sequence: Synthetic peptide
YKMDHNNTY

SEQ ID NO: 1530 - protein, 9 aa, Artificial Sequence
  Description of Artificial Sequence: Synthetic peptide
YSMTWNQQT

SEQ ID NO: 1531 - protein, 9 aa, Artificial Sequence
  Description of Artificial Sequence: Synthetic peptide
HTGKADVSV

SEQ ID NO: 1532 - protein, 9 aa, Artificial Sequence
  Description of Artificial Sequence: Synthetic peptide
IMEKLRRSS

SEQ ID NO: 1533 - protein, 9 aa, Artificial Sequence
  Description of Artificial Sequence: Synthetic peptide
IPFKAVMVG

SEQ ID NO: 1534 - protein, 9 aa, Artificial Sequence
  Description of Artificial Sequence: Synthetic peptide
IRVKPGCRV

SEQ ID NO: 1535 - protein, 9 aa, Artificial Sequence
  Description of Artificial Sequence: Synthetic peptide
ITGKYPMTA

SEQ ID NO: 1536 - protein, 9 aa, Artificial Sequence
  Description of Artificial Sequence: Synthetic peptide
KLEKTVVYS

SEQ ID NO: 1537 - protein, 9 aa, Artificial Sequence
  Description of Artificial Sequence: Synthetic peptide
LDIKMDFLC

SEQ ID NO: 1538 - protein, 9 aa, Artificial Sequence
  Description of Artificial Sequence: Synthetic peptide
LMHKDQVSP

SEQ ID NO: 1539 - protein, 9 aa, Artificial Sequence
  Description of Artificial Sequence: Synthetic peptide
LNVKTGNAW

SEQ ID NO: 1540 - protein, 9 aa, Artificial Sequence
  Description of Artificial Sequence: Synthetic peptide
LTTKQPDMP

SEQ ID NO: 1541 - protein, 9 aa, Artificial Sequence
  Description of Artificial Sequence: Synthetic peptide
MASKLHMAV

SEQ ID NO: 1542 - protein, 9 aa, Artificial Sequence
  Description of Artificial Sequence: Synthetic peptide
NSLKYEFSE

SEQ ID NO: 1543 - protein, 9 aa, Artificial Sequence
  Description of Artificial Sequence: Synthetic peptide
NTGKTGQFN

SEQ ID NO: 1544 - protein, 9 aa, Artificial Sequence
  Description of Artificial Sequence: Synthetic peptide
PCAKSYDQS

SEQ ID NO: 1545 - protein, 9 aa, Artificial Sequence
  Description of Artificial Sequence: Synthetic peptide
PKDKGVICE

SEQ ID NO: 1546 - protein, 9 aa, Artificial Sequence
  Description of Artificial Sequence: Synthetic peptide
QEVKGQWWP

SEQ ID NO: 1547 - protein, 9 aa, Artificial Sequence
  Description of Artificial Sequence: Synthetic peptide
QIFKQTEVQ

SEQ ID NO: 1548 - protein, 9 aa, Artificial Sequence
  Description of Artificial Sequence: Synthetic peptide
QITKPILDR

SEQ ID NO: 1549 - protein, 9 aa, Artificial Sequence
  Description of Artificial Sequence: Synthetic peptide
QLAKAMTQS

SEQ ID NO: 1550 - protein, 9 aa, Artificial Sequence
  Description of Artificial Sequence: Synthetic peptide
QPVKYPQTN

SEQ ID NO: 1551 - protein, 9 aa, Artificial Sequence
  Description of Artificial Sequence: Synthetic peptide
RISKDGSDR

SEQ ID NO: 1552 - protein, 9 aa, Artificial Sequence
  Description of Artificial Sequence: Synthetic peptide
RIVKRYHNG

SEQ ID NO: 1553 - protein, 9 aa, Artificial Sequence
  Description of Artificial Sequence: Synthetic peptide
SLCKMLTAK

SEQ ID NO: 1554 - protein, 9 aa, Artificial Sequence
  Description of Artificial Sequence: Synthetic peptide
SYKKPVKYM

SEQ ID NO: 1555 - protein, 9 aa, Artificial Sequence
  Description of Artificial Sequence: Synthetic peptide
SYNKVMTQH

SEQ ID NO: 1556 - protein, 9 aa, Artificial Sequence
  Description of Artificial Sequence: Synthetic peptide
TACKTEGGP

SEQ ID NO: 1557 - protein, 9 aa, Artificial Sequence
  Description of Artificial Sequence: Synthetic peptide
TCVKTTHGA

SEQ ID NO: 1558 - protein, 9 aa, Artificial Sequence
  Description of Artificial Sequence: Synthetic peptide
TDGKTRMQQ

SEQ ID NO: 1559 - protein, 9 aa, Artificial Sequence
  Description of Artificial Sequence: Synthetic peptide
TETKWQHLE

SEQ ID NO: 1560 - protein, 9 aa, Artificial Sequence
  Description of Artificial Sequence: Synthetic peptide
TIHKYCHHQ

SEQ ID NO: 1561 - protein, 9 aa, Artificial Sequence
  Description of Artificial Sequence: Synthetic peptide
TSTKHHWWC

SEQ ID NO: 1562 - protein, 9 aa, Artificial Sequence
  Description of Artificial Sequence: Synthetic peptide
TSVKKPHLA

SEQ ID NO: 1563 - protein, 9 aa, Artificial Sequence
  Description of Artificial Sequence: Synthetic peptide
TTLKCTNTW

SEQ ID NO: 1564 - protein, 9 aa, Artificial Sequence
  Description of Artificial Sequence: Synthetic peptide
TWIKPHQQL

SEQ ID NO: 1565 - protein, 9 aa, Artificial Sequence
  Description of Artificial Sequence: Synthetic peptide
VCEKSNDYA

SEQ ID NO: 1566 - protein, 9 aa, Artificial Sequence
  Description of Artificial Sequence: Synthetic peptide
VCFKMLLGN

SEQ ID NO: 1567 - protein, 9 aa, Artificial Sequence
  Description of Artificial Sequence: Synthetic peptide
VECKTMAHQ

SEQ ID NO: 1568 - protein, 9 aa, Artificial Sequence
  Description of Artificial Sequence: Synthetic peptide
VNAKWQTAS

SEQ ID NO: 1569 - protein, 9 aa, Artificial Sequence
  Description of Artificial Sequence: Synthetic peptide
VSCKIYHYA

SEQ ID NO: 1570 - protein, 9 aa, Artificial Sequence
  Description of Artificial Sequence: Synthetic peptide
VSGKECSED

SEQ ID NO: 1571 - protein, 9 aa, Artificial Sequence
  Description of Artificial Sequence: Synthetic peptide
VTYKYYCDF

SEQ ID NO: 1572 - protein, 9 aa, Artificial Sequence
  Description of Artificial Sequence: Synthetic peptide
WYQKQAEHG

SEQ ID NO: 1573 - protein, 9 aa, Artificial Sequence
  Description of Artificial Sequence: Synthetic peptide
YCSKSVRCC

SEQ ID NO: 1574 - protein, 9 aa, Artificial Sequence
  Description of Artificial Sequence: Synthetic peptide
NFSKCAKYD

SEQ ID NO: 1575 - protein, 9 aa, Artificial Sequence
  Description of Artificial Sequence: Synthetic peptide
VCTKGFLNS

SEQ ID NO: 1576 - protein, 9 aa, Artificial Sequence
  Description of Artificial Sequence: Synthetic peptide
AAHKEMKDT

SEQ ID NO: 1577 - protein, 9 aa, Artificial Sequence
  Description of Artificial Sequence: Synthetic peptide
ACGKMHGPN

SEQ ID NO: 1578 - protein, 9 aa, Artificial Sequence
  Description of Artificial Sequence: Synthetic peptide
AFLKQSIIH

SEQ ID NO: 1579 - protein, 9 aa, Artificial Sequence
  Description of Artificial Sequence: Synthetic peptide
AGSKRFDWF

SEQ ID NO: 1580 - protein, 9 aa, Artificial Sequence
  Description of Artificial Sequence: Synthetic peptide
AILKMTKVL

SEQ ID NO: 1581 - protein, 9 aa, Artificial Sequence
  Description of Artificial Sequence: Synthetic peptide
DTGKFMCKW

SEQ ID NO: 1582 - protein, 9 aa, Artificial Sequence
  Description of Artificial Sequence: Synthetic peptide
EHQKNINMH

SEQ ID NO: 1583 - protein, 9 aa, Artificial Sequence
  Description of Artificial Sequence: Synthetic peptide
ESEKVWMMT

SEQ ID NO: 1584 - protein, 9 aa, Artificial Sequence
  Description of Artificial Sequence: Synthetic peptide
EWRKKKKRT

SEQ ID NO: 1585 - protein, 9 aa, Artificial Sequence
  Description of Artificial Sequence: Synthetic peptide
FCRKIEQAN

SEQ ID NO: 1586 - protein, 9 aa, Artificial Sequence
  Description of Artificial Sequence: Synthetic peptide
FICKTLHQH

SEQ ID NO: 1587 - protein, 9 aa, Artificial Sequence
  Description of Artificial Sequence: Synthetic peptide
GCDKTRFEN

SEQ ID NO: 1588 - protein, 9 aa, Artificial Sequence
  Description of Artificial Sequence: Synthetic peptide
GILKFRDFM

SEQ ID NO: 1589 - protein, 9 aa, Artificial Sequence
  Description of Artificial Sequence: Synthetic peptide
ICWKFLVSN

SEQ ID NO: 1590 - protein, 9 aa, Artificial Sequence
  Description of Artificial Sequence: Synthetic peptide
IEVKYWNHH

SEQ ID NO: 1591 - protein, 9 aa, Artificial Sequence
  Description of Artificial Sequence: Synthetic peptide
IWYKWWVMF

SEQ ID NO: 1592 - protein, 9 aa, Artificial Sequence
  Description of Artificial Sequence: Synthetic peptide
KCDKPMLKP

SEQ ID NO: 1593 - protein, 9 aa, Artificial Sequence
  Description of Artificial Sequence: Synthetic peptide
KMEKVERMP

SEQ ID NO: 1594 - protein, 9 aa, Artificial Sequence
  Description of Artificial Sequence: Synthetic peptide
LDLKHNMCD

SEQ ID NO: 1595 - protein, 9 aa, Artificial Sequence
  Description of Artificial Sequence: Synthetic peptide
MCIKCDAND

SEQ ID NO: 1596 - protein, 9 aa, Artificial Sequence
  Description of Artificial Sequence: Synthetic peptide
NCNKCKNRT

SEQ ID NO: 1597 - protein, 9 aa, Artificial Sequence
  Description of Artificial Sequence: Synthetic peptide
NQCKINVGT

SEQ ID NO: 1598 - protein, 9 aa, Artificial Sequence
  Description of Artificial Sequence: Synthetic peptide
QQLKTNINF

SEQ ID NO: 1599 - protein, 9 aa, Artificial Sequence
  Description of Artificial Sequence: Synthetic peptide
RIEKLQCDY

SEQ ID NO: 1600 - protein, 9 aa, Artificial Sequence
  Description of Artificial Sequence: Synthetic peptide
STLKTYAYN

SEQ ID NO: 1601 - protein, 9 aa, Artificial Sequence
  Description of Artificial Sequence: Synthetic peptide
TGTKITMQT

SEQ ID NO: 1602 - protein, 9 aa, Artificial Sequence
  Description of Artificial Sequence: Synthetic peptide
TIHKDGEFS

SEQ ID NO: 1603 - protein, 9 aa, Artificial Sequence
  Description of Artificial Sequence: Synthetic peptide
VLQKFGHSF

SEQ ID NO: 1604 - protein, 9 aa, Artificial Sequence
  Description of Artificial Sequence: Synthetic peptide
VTGKHIAQN

SEQ ID NO: 1605 - protein, 9 aa, Artificial Sequence
  Description of Artificial Sequence: Synthetic peptide
YCYKTAVAA

SEQ ID NO: 1606 - protein, 9 aa, Artificial Sequence
  Description of Artificial Sequence: Synthetic peptide
HCALVNRLR

SEQ ID NO: 1607 - protein, 9 aa, Artificial Sequence
  Description of Artificial Sequence: Synthetic peptide
HFAMVWAGE

SEQ ID NO: 1608 - protein, 9 aa, Artificial Sequence
  Description of Artificial Sequence: Synthetic peptide
HIGYVEAMR

SEQ ID NO: 1609 - protein, 9 aa, Artificial Sequence
  Description of Artificial Sequence: Synthetic peptide
HTKPVNAQP

SEQ ID NO: 1610 - protein, 9 aa, Artificial Sequence
  Description of Artificial Sequence: Synthetic peptide
IHQYVNFVH

SEQ ID NO: 1611 - protein, 9 aa, Artificial Sequence
  Description of Artificial Sequence: Synthetic peptide
INNTVAHQE

SEQ ID NO: 1612 - protein, 9 aa, Artificial Sequence
  Description of Artificial Sequence: Synthetic peptide
KALMVQQFD

SEQ ID NO: 1613 - protein, 9 aa, Artificial Sequence
  Description of Artificial Sequence: Synthetic peptide
KCLMVDWGV

SEQ ID NO: 1614 - protein, 9 aa, Artificial Sequence
  Description of Artificial Sequence: Synthetic peptide
KHGQVSIHD

SEQ ID NO: 1615 - protein, 9 aa, Artificial Sequence
  Description of Artificial Sequence: Synthetic peptide
KMDRVGYSA

SEQ ID NO: 1616 - protein, 9 aa, Artificial Sequence
  Description of Artificial Sequence: Synthetic peptide
KWNNVENNE

SEQ ID NO: 1617 - protein, 9 aa, Artificial Sequence
  Description of Artificial Sequence: Synthetic peptide
KYSPVEWMY

SEQ ID NO: 1618 - protein, 9 aa, Artificial Sequence
  Description of Artificial Sequence: Synthetic peptide
LGQHVQCWQ

SEQ ID NO: 1619 - protein, 9 aa, Artificial Sequence
  Description of Artificial Sequence: Synthetic peptide
LKSWVCATS

SEQ ID NO: 1620 - protein, 9 aa, Artificial Sequence
  Description of Artificial Sequence: Synthetic peptide
LMKCVMCRD

SEQ ID NO: 1621 - protein, 9 aa, Artificial Sequence
  Description of Artificial Sequence: Synthetic peptide
MASPVNSEF

SEQ ID NO: 1622 - protein, 9 aa, Artificial Sequence
  Description of Artificial Sequence: Synthetic peptide
MCLFVRVSQ

SEQ ID NO: 1623 - protein, 9 aa, Artificial Sequence
  Description of Artificial Sequence: Synthetic peptide
MHGMVHAFE

SEQ ID NO: 1624 - protein, 9 aa, Artificial Sequence
  Description of Artificial Sequence: Synthetic peptide
MLIHVNHKS

SEQ ID NO: 1625 - protein, 9 aa, Artificial Sequence
  Description of Artificial Sequence: Synthetic peptide
MQDQVCKIG

SEQ ID NO: 1626 - protein, 9 aa, Artificial Sequence
  Description of Artificial Sequence: Synthetic peptide
MQQPVNKHM

SEQ ID NO: 1627 - protein, 9 aa, Artificial Sequence
  Description of Artificial Sequence: Synthetic peptide
MRQTVDRPE

SEQ ID NO: 1628 - protein, 9 aa, Artificial Sequence
  Description of Artificial Sequence: Synthetic peptide
MYHAVQCMP

SEQ ID NO: 1629 - protein, 9 aa, Artificial Sequence
  Description of Artificial Sequence: Synthetic peptide
MYYQVSKQD

SEQ ID NO: 1630 - protein, 9 aa, Artificial Sequence
  Description of Artificial Sequence: Synthetic peptide
NAENVDNGV

SEQ ID NO: 1631 - protein, 9 aa, Artificial Sequence
  Description of Artificial Sequence: Synthetic peptide
NFEFVERYR

SEQ ID NO: 1632 - protein, 9 aa, Artificial Sequence
  Description of Artificial Sequence: Synthetic peptide
NGHEVPVEE

SEQ ID NO: 1633 - protein, 9 aa, Artificial Sequence
  Description of Artificial Sequence: Synthetic peptide
NKQVVQMTA

SEQ ID NO: 1634 - protein, 9 aa, Artificial Sequence
  Description of Artificial Sequence: Synthetic peptide
NLPLVHSLE

SEQ ID NO: 1635 - protein, 9 aa, Artificial Sequence
  Description of Artificial Sequence: Synthetic peptide
NLQRVEMGV

SEQ ID NO: 1636 - protein, 9 aa, Artificial Sequence
  Description of Artificial Sequence: Synthetic peptide
NMQNVARCY

SEQ ID NO: 1637 - protein, 9 aa, Artificial Sequence
  Description of Artificial Sequence: Synthetic peptide
NSWDVGSFN

SEQ ID NO: 1638 - protein, 9 aa, Artificial Sequence
  Description of Artificial Sequence: Synthetic peptide
NTYPVLSDW

SEQ ID NO: 1639 - protein, 9 aa, Artificial Sequence
  Description of Artificial Sequence: Synthetic peptide
PEYFVVYMY

SEQ ID NO: 1640 - protein, 9 aa, Artificial Sequence
  Description of Artificial Sequence: Synthetic peptide
PMVSVSGYY

SEQ ID NO: 1641 - protein, 9 aa, Artificial Sequence
  Description of Artificial Sequence: Synthetic peptide
QGGAVMHEE

SEQ ID NO: 1642 - protein, 9 aa, Artificial Sequence
  Description of Artificial Sequence: Synthetic peptide
QIQPVNALF

SEQ ID NO: 1643 - protein, 9 aa, Artificial Sequence
  Description of Artificial Sequence: Synthetic peptide
QQLSVHMWH

SEQ ID NO: 1644 - protein, 9 aa, Artificial Sequence
  Description of Artificial Sequence: Synthetic peptide
QSGWVQIAA

SEQ ID NO: 1645 - protein, 9 aa, Artificial Sequence
  Description of Artificial Sequence: Synthetic peptide
QWQYVMTDK

SEQ ID NO: 1646 - protein, 9 aa, Artificial Sequence
  Description of Artificial Sequence: Synthetic peptide
RCWSVEASQ

SEQ ID NO: 1647 - protein, 9 aa, Artificial Sequence
  Description of Artificial Sequence: Synthetic peptide
RDQRVLKVM

SEQ ID NO: 1648 - protein, 9 aa, Artificial Sequence
  Description of Artificial Sequence: Synthetic peptide
RTTGVGDIS

SEQ ID NO: 1649 - protein, 9 aa, Artificial Sequence
  Description of Artificial Sequence: Synthetic peptide
SAWCVPGQL

SEQ ID NO: 1650 - protein, 9 aa, Artificial Sequence
  Description of Artificial Sequence: Synthetic peptide
SCHLVIKHH

SEQ ID NO: 1651 - protein, 9 aa, Artificial Sequence
  Description of Artificial Sequence: Synthetic peptide
SFAPVAHIE

SEQ ID NO: 1652 - protein, 9 aa, Artificial Sequence
  Description of Artificial Sequence: Synthetic peptide
SGRHVLIEI

SEQ ID NO: 1653 - protein, 9 aa, Artificial Sequence
  Description of Artificial Sequence: Synthetic peptide
SITAVWSDE

SEQ ID NO: 1654 - protein, 9 aa, Artificial Sequence
  Description of Artificial Sequence: Synthetic peptide
SQNMVDSQC

SEQ ID NO: 1655 - protein, 9 aa, Artificial Sequence
  Description of Artificial Sequence: Synthetic peptide
SSCIVNIAS

SEQ ID NO: 1656 - protein, 9 aa, Artificial Sequence
  Description of Artificial Sequence: Synthetic peptide
SSNLVGAGE

SEQ ID NO: 1657 - protein, 9 aa, Artificial Sequence
  Description of Artificial Sequence: Synthetic peptide
STELVKYID

SEQ ID NO: 1658 - protein, 9 aa, Artificial Sequence
  Description of Artificial Sequence: Synthetic peptide
TMHPVCCPM

SEQ ID NO: 1659 - protein, 9 aa, Artificial Sequence
  Description of Artificial Sequence: Synthetic peptide
TMREVQCEW

SEQ ID NO: 1660 - protein, 9 aa, Artificial Sequence
  Description of Artificial Sequence: Synthetic peptide
TPAHVCRGY

SEQ ID NO: 1661 - protein, 9 aa, Artificial Sequence
  Description of Artificial Sequence: Synthetic peptide
VNDMVLAVV

SEQ ID NO: 1662 - protein, 9 aa, Artificial Sequence
  Description of Artificial Sequence: Synthetic peptide
VSFCVRKQS

SEQ ID NO: 1663 - protein, 9 aa, Artificial Sequence
  Description of Artificial Sequence: Synthetic peptide
YALTVPHSE

SEQ ID NO: 1664 - protein, 9 aa, Artificial Sequence
  Description of Artificial Sequence: Synthetic peptide
YTPNVHYMV

SEQ ID NO: 1665 - protein, 9 aa, Artificial Sequence
  Description of Artificial Sequence: Synthetic peptide
ECANVIKFN

SEQ ID NO: 1666 - protein, 9 aa, Artificial Sequence
  Description of Artificial Sequence: Synthetic peptide
GACTVQNMT

SEQ ID NO: 1667 - protein, 9 aa, Artificial Sequence
  Description of Artificial Sequence: Synthetic peptide
HIEWVSMHR

SEQ ID NO: 1668 - protein, 9 aa, Artificial Sequence
  Description of Artificial Sequence: Synthetic peptide
MGQNVNHAG

SEQ ID NO: 1669 - protein, 9 aa, Artificial Sequence
  Description of Artificial Sequence: Synthetic peptide
QAAFVNYGP

SEQ ID NO: 1670 - protein, 9 aa, Artificial Sequence
  Description of Artificial Sequence: Synthetic peptide
RGFHVIVDQ

SEQ ID NO: 1671 - protein, 9 aa, Artificial Sequence
  Description of Artificial Sequence: Synthetic peptide
RYDLVSYHQ

SEQ ID NO: 1672 - protein, 9 aa, Artificial Sequence
  Description of Artificial Sequence: Synthetic peptide
VFDTVFAYC

SEQ ID NO: 1673 - protein, 9 aa, Artificial Sequence
  Description of Artificial Sequence: Synthetic peptide
VKKYVDVHF

SEQ ID NO: 1674 - protein, 9 aa, Artificial Sequence
  Description of Artificial Sequence: Synthetic peptide
VQSAVSMCS

SEQ ID NO: 1675 - protein, 9 aa, Artificial Sequence
  Description of Artificial Sequence: Synthetic peptide
APVFVEQMG

SEQ ID NO: 1676 - protein, 9 aa, Artificial Sequence
  Description of Artificial Sequence: Synthetic peptide
ASTAVLVQR

SEQ ID NO: 1677 - protein, 9 aa, Artificial Sequence
  Description of Artificial Sequence: Synthetic peptide
DAGFVREPV

SEQ ID NO: 1678 - protein, 9 aa, Artificial Sequence
  Description of Artificial Sequence: Synthetic peptide
EAVPVESGD

SEQ ID NO: 1679 - protein, 9 aa, Artificial Sequence
  Description of Artificial Sequence: Synthetic peptide
EEKEVICMC

SEQ ID NO: 1680 - protein, 9 aa, Artificial Sequence
  Description of Artificial Sequence: Synthetic peptide
EFEQVGFMM

SEQ ID NO: 1681 - protein, 9 aa, Artificial Sequence
  Description of Artificial Sequence: Synthetic peptide
EGTMVKQGE

SEQ ID NO: 1682 - protein, 9 aa, Artificial Sequence
  Description of Artificial Sequence: Synthetic peptide
EHNCVYLTE

SEQ ID NO: 1683 - protein, 9 aa, Artificial Sequence
  Description of Artificial Sequence: Synthetic peptide
EMHYVCCQT

SEQ ID NO: 1684 - protein, 9 aa, Artificial Sequence
  Description of Artificial Sequence: Synthetic peptide
EPFRVTQCG

SEQ ID NO: 1685 - protein, 9 aa, Artificial Sequence
  Description of Artificial Sequence: Synthetic peptide
FASIVFGGE

SEQ ID NO: 1686 - protein, 9 aa, Artificial Sequence
  Description of Artificial Sequence: Synthetic peptide
FEYMVLNWH

SEQ ID NO: 1687 - protein, 9 aa, Artificial Sequence
  Description of Artificial Sequence: Synthetic peptide
FQAPVTKAS

SEQ ID NO: 1688 - protein, 9 aa, Artificial Sequence
  Description of Artificial Sequence: Synthetic peptide
GLGYVHRSN

SEQ ID NO: 1689 - protein, 9 aa, Artificial Sequence
  Description of Artificial Sequence: Synthetic peptide
GWQSVWNAP

SEQ ID NO: 1690 - protein, 9 aa, Artificial Sequence
  Description of Artificial Sequence: Synthetic peptide
GYNWVQEQR

SEQ ID NO: 1691 - protein, 9 aa, Artificial Sequence
  Description of Artificial Sequence: Synthetic peptide
HAVMVYSDY

SEQ ID NO: 1692 - protein, 9 aa, Artificial Sequence
  Description of Artificial Sequence: Synthetic peptide
HTKGVVHQP

SEQ ID NO: 1693 - protein, 9 aa, Artificial Sequence
  Description of Artificial Sequence: Synthetic peptide
IARHVDHDL

SEQ ID NO: 1694 - protein, 9 aa, Artificial Sequence
  Description of Artificial Sequence: Synthetic peptide
IQTEVHTVY

SEQ ID NO: 1695 - protein, 9 aa, Artificial Sequence
  Description of Artificial Sequence: Synthetic peptide
KQQDVTMNA

SEQ ID NO: 1696 - protein, 9 aa, Artificial Sequence
  Description of Artificial Sequence: Synthetic peptide
KYIDVWDAR

SEQ ID NO: 1697 - protein, 9 aa, Artificial Sequence
  Description of Artificial Sequence: Synthetic peptide
LGVDVLADY

SEQ ID NO: 1698 - protein, 9 aa, Artificial Sequence
  Description of Artificial Sequence: Synthetic peptide
MQVLVSMTP

SEQ ID NO: 1699 - protein, 9 aa, Artificial Sequence
  Description of Artificial Sequence: Synthetic peptide
NTIDVQLGG

SEQ ID NO: 1700 - protein, 9 aa, Artificial Sequence
  Description of Artificial Sequence: Synthetic peptide
QKAYVSVSG

SEQ ID NO: 1701 - protein, 9 aa, Artificial Sequence
  Description of Artificial Sequence: Synthetic peptide
QSPAVNCAW

SEQ ID NO: 1702 - protein, 9 aa, Artificial Sequence
  Description of Artificial Sequence: Synthetic peptide
RIEQVDVFN

SEQ ID NO: 1703 - protein, 9 aa, Artificial Sequence
  Description of Artificial Sequence: Synthetic peptide
RIGGVADAD

SEQ ID NO: 1704 - protein, 9 aa, Artificial Sequence
  Description of Artificial Sequence: Synthetic peptide
RWECVTGGY

SEQ ID NO: 1705 - protein, 9 aa, Artificial Sequence
  Description of Artificial Sequence: Synthetic peptide
TCIRVWQWA

SEQ ID NO: 1706 - protein, 9 aa, Artificial Sequence
  Description of Artificial Sequence: Synthetic peptide
TMRYVNTCV

SEQ ID NO: 1707 - protein, 9 aa, Artificial Sequence
  Description of Artificial Sequence: Synthetic peptide
TSHNVANFG

SEQ ID NO: 1708 - protein, 9 aa, Artificial Sequence
  Description of Artificial Sequence: Synthetic peptide
VEQMVMPPH

SEQ ID NO: 1709 - protein, 9 aa, Artificial Sequence
  Description of Artificial Sequence: Synthetic peptide
VYTVVDEHS

SEQ ID NO: 1710 - protein, 9 aa, Artificial Sequence
  Description of Artificial Sequence: Synthetic peptide
WFPVVWSHN

SEQ ID NO: 1711 - protein, 9 aa, Artificial Sequence
  Description of Artificial Sequence: Synthetic peptide
YHVLVEGDR

SEQ ID NO: 1712 - protein, 9 aa, Artificial Sequence
  Description of Artificial Sequence: Synthetic peptide
HGIALNLGT

SEQ ID NO: 1713 - protein, 9 aa, Artificial Sequence
  Description of Artificial Sequence: Synthetic peptide
HRDYANSWN

SEQ ID NO: 1714 - protein, 9 aa, Artificial Sequence
  Description of Artificial Sequence: Synthetic peptide
IGTRFNAQT

SEQ ID NO: 1715 - protein, 9 aa, Artificial Sequence
  Description of Artificial Sequence: Synthetic peptide
ILDDCNCKC

SEQ ID NO: 1716 - protein, 9 aa, Artificial Sequence
  Description of Artificial Sequence: Synthetic peptide
IPRMLNHVE

SEQ ID NO: 1717 - protein, 9 aa, Artificial Sequence
  Description of Artificial Sequence: Synthetic peptide
ISYQPNPME

SEQ ID NO: 1718 - protein, 9 aa, Artificial Sequence
  Description of Artificial Sequence: Synthetic peptide
KASELNQVL

SEQ ID NO: 1719 - protein, 9 aa, Artificial Sequence
  Description of Artificial Sequence: Synthetic peptide
KHLDCNERE

SEQ ID NO: 1720 - protein, 9 aa, Artificial Sequence
  Description of Artificial Sequence: Synthetic peptide
KLSNMNHPI

SEQ ID NO: 1721 - protein, 9 aa, Artificial Sequence
  Description of Artificial Sequence: Synthetic peptide
KMEQGNMDS

SEQ ID NO: 1722 - protein, 9 aa, Artificial Sequence
  Description of Artificial Sequence: Synthetic peptide
KMFHSNQEA

SEQ ID NO: 1723 - protein, 9 aa, Artificial Sequence
  Description of Artificial Sequence: Synthetic peptide
KNWVCNLLT

SEQ ID NO: 1724 - protein, 9 aa, Artificial Sequence
  Description of Artificial Sequence: Synthetic peptide
KTEVTNGPT

SEQ ID NO: 1725 - protein, 9 aa, Artificial Sequence
  Description of Artificial Sequence: Synthetic peptide
LCIRKNYTH

SEQ ID NO: 1726 - protein, 9 aa, Artificial Sequence
  Description of Artificial Sequence: Synthetic peptide
LCQFNNATD

SEQ ID NO: 1727 - protein, 9 aa, Artificial Sequence
  Description of Artificial Sequence: Synthetic peptide
LEAECNSMQ

SEQ ID NO: 1728 - protein, 9 aa, Artificial Sequence
  Description of Artificial Sequence: Synthetic peptide
LGDERNCGQ

SEQ ID NO: 1729 - protein, 9 aa, Artificial Sequence
  Description of Artificial Sequence: Synthetic peptide
LHDNWNRYT

SEQ ID NO: 1730 - protein, 9 aa, Artificial Sequence
  Description of Artificial Sequence: Synthetic peptide
LPFRSNNAQ

SEQ ID NO: 1731 - protein, 9 aa, Artificial Sequence
  Description of Artificial Sequence: Synthetic peptide
LTVQNNGIR

SEQ ID NO: 1732 - protein, 9 aa, Artificial Sequence
  Description of Artificial Sequence: Synthetic peptide
MCAYMNKKE

SEQ ID NO: 1733 - protein, 9 aa, Artificial Sequence
  Description of Artificial Sequence: Synthetic peptide
MPNLSNSFQ

SEQ ID NO: 1734 - protein, 9 aa, Artificial Sequence
  Description of Artificial Sequence: Synthetic peptide
NGAEMNWHE

SEQ ID NO: 1735 - protein, 9 aa, Artificial Sequence
  Description of Artificial Sequence: Synthetic peptide
NGNQFNNCT

SEQ ID NO: 1736 - protein, 9 aa, Artificial Sequence
  Description of Artificial Sequence: Synthetic peptide
NSTQPNLWF

SEQ ID NO: 1737 - protein, 9 aa, Artificial Sequence
  Description of Artificial Sequence: Synthetic peptide
NYTIYNPAE

SEQ ID NO: 1738 - protein, 9 aa, Artificial Sequence
  Description of Artificial Sequence: Synthetic peptide
PIETTNHMD

SEQ ID NO: 1739 - protein, 9 aa, Artificial Sequence
  Description of Artificial Sequence: Synthetic peptide
PMYANNYFC

SEQ ID NO: 1740 - protein, 9 aa, Artificial Sequence
  Description of Artificial Sequence: Synthetic peptide
PTQPLNQHG

SEQ ID NO: 1741 - protein, 9 aa, Artificial Sequence
  Description of Artificial Sequence: Synthetic peptide
QAWCANTFH

SEQ ID NO: 1742 - protein, 9 aa, Artificial Sequence
  Description of Artificial Sequence: Synthetic peptide
QCFYANRGD

SEQ ID NO: 1743 - protein, 9 aa, Artificial Sequence
  Description of Artificial Sequence: Synthetic peptide
QHQQFNLTT

SEQ ID NO: 1744 - protein, 9 aa, Artificial Sequence
  Description of Artificial Sequence: Synthetic peptide
QIDMMNCNR

SEQ ID NO: 1745 - protein, 9 aa, Artificial Sequence
  Description of Artificial Sequence: Synthetic peptide
QQLPENLYQ

SEQ ID NO: 1746 - protein, 9 aa, Artificial Sequence
  Description of Artificial Sequence: Synthetic peptide
QTDVINKFP

SEQ ID NO: 1747 - protein, 9 aa, Artificial Sequence
  Description of Artificial Sequence: Synthetic peptide
QTGMENHQN

SEQ ID NO: 1748 - protein, 9 aa, Artificial Sequence
  Description of Artificial Sequence: Synthetic peptide
QYSWSNINT

SEQ ID NO: 1749 - protein, 9 aa, Artificial Sequence
  Description of Artificial Sequence: Synthetic peptide
RIEANNWGV

SEQ ID NO: 1750 - protein, 9 aa, Artificial Sequence
  Description of Artificial Sequence: Synthetic peptide
RIICQNAVA

SEQ ID NO: 1751 - protein, 9 aa, Artificial Sequence
  Description of Artificial Sequence: Synthetic peptide
SEKVINASC

SEQ ID NO: 1752 - protein, 9 aa, Artificial Sequence
  Description of Artificial Sequence: Synthetic peptide
SIAVKNMCH

SEQ ID NO: 1753 - protein, 9 aa, Artificial Sequence
  Description of Artificial Sequence: Synthetic peptide
SKRDNNCEV

SEQ ID NO: 1754 - protein, 9 aa, Artificial Sequence
  Description of Artificial Sequence: Synthetic peptide
SMQRYNSKP

SEQ ID NO: 1755 - protein, 9 aa, Artificial Sequence
  Description of Artificial Sequence: Synthetic peptide
SSLCRNMWP

SEQ ID NO: 1756 - protein, 9 aa, Artificial Sequence
  Description of Artificial Sequence: Synthetic peptide
STYGRNLYP

SEQ ID NO: 1757 - protein, 9 aa, Artificial Sequence
  Description of Artificial Sequence: Synthetic peptide
SWSNINHQT

SEQ ID NO: 1758 - protein, 9 aa, Artificial Sequence
  Description of Artificial Sequence: Synthetic peptide
TCGEYNHRC

SEQ ID NO: 1759 - protein, 9 aa, Artificial Sequence
  Description of Artificial Sequence: Synthetic peptide
TFQEKNVMH

SEQ ID NO: 1760 - protein, 9 aa, Artificial Sequence
  Description of Artificial Sequence: Synthetic peptide
THQMTNTYS

SEQ ID NO: 1761 - protein, 9 aa, Artificial Sequence
  Description of Artificial Sequence: Synthetic peptide
TIAQDNKEA

SEQ ID NO: 1762 - protein, 9 aa, Artificial Sequence
  Description of Artificial Sequence: Synthetic peptide
TLITTNRQY

SEQ ID NO: 1763 - protein, 9 aa, Artificial Sequence
  Description of Artificial Sequence: Synthetic peptide
TMVQNNMCF

SEQ ID NO: 1764 - protein, 9 aa, Artificial Sequence
  Description of Artificial Sequence: Synthetic peptide
TRQPFNMSL

SEQ ID NO: 1765 - protein, 9 aa, Artificial Sequence
  Description of Artificial Sequence: Synthetic peptide
TSSEFNRQR

SEQ ID NO: 1766 - protein, 9 aa, Artificial Sequence
  Description of Artificial Sequence: Synthetic peptide
TSVACNSTD

SEQ ID NO: 1767 - protein, 9 aa, Artificial Sequence
  Description of Artificial Sequence: Synthetic peptide
TTVFWNNFK

SEQ ID NO: 1768 - protein, 9 aa, Artificial Sequence
  Description of Artificial Sequence: Synthetic peptide
TWVPDNADS

SEQ ID NO: 1769 - protein, 9 aa, Artificial Sequence
  Description of Artificial Sequence: Synthetic peptide
TYQVNNWSD

SEQ ID NO: 1770 - protein, 9 aa, Artificial Sequence
  Description of Artificial Sequence: Synthetic peptide
VANHHNEIQ

SEQ ID NO: 1771 - protein, 9 aa, Artificial Sequence
  Description of Artificial Sequence: Synthetic peptide
VIGTANAAP

SEQ ID NO: 1772 - protein, 9 aa, Artificial Sequence
  Description of Artificial Sequence: Synthetic peptide
VMGMINGAW

SEQ ID NO: 1773 - protein, 9 aa, Artificial Sequence
  Description of Artificial Sequence: Synthetic peptide
VPLVINKEQ

SEQ ID NO: 1774 - protein, 9 aa, Artificial Sequence
  Description of Artificial Sequence: Synthetic peptide
VSSQFNGPS

SEQ ID NO: 1775 - protein, 9 aa, Artificial Sequence
  Description of Artificial Sequence: Synthetic peptide
VTHCKNVAC

SEQ ID NO: 1776 - protein, 9 aa, Artificial Sequence
  Description of Artificial Sequence: Synthetic peptide
VWYPQNAVE

SEQ ID NO: 1777 - protein, 9 aa, Artificial Sequence
  Description of Artificial Sequence: Synthetic peptide
WCNYLNQGM

SEQ ID NO: 1778 - protein, 9 aa, Artificial Sequence
  Description of Artificial Sequence: Synthetic peptide
WQCTENWQN

SEQ ID NO: 1779 - protein, 9 aa, Artificial Sequence
  Description of Artificial Sequence: Synthetic peptide
FYWAHNICE

SEQ ID NO: 1780 - protein, 9 aa, Artificial Sequence
  Description of Artificial Sequence: Synthetic peptide
KYEILNCNH

SEQ ID NO: 1781 - protein, 9 aa, Artificial Sequence
  Description of Artificial Sequence: Synthetic peptide
LYAMLNKFF

SEQ ID NO: 1782 - protein, 9 aa, Artificial Sequence
  Description of Artificial Sequence: Synthetic peptide
MGNYQNTHY

SEQ ID NO: 1783 - protein, 9 aa, Artificial Sequence
  Description of Artificial Sequence: Synthetic peptide
RKDEANGQT

SEQ ID NO: 1784 - protein, 9 aa, Artificial Sequence
  Description of Artificial Sequence: Synthetic peptide
YFIIQNHLD

SEQ ID NO: 1785 - protein, 9 aa, Artificial Sequence
  Description of Artificial Sequence: Synthetic peptide
YTRSNNWDY

SEQ ID NO: 1786 - protein, 9 aa, Artificial Sequence
  Description of Artificial Sequence: Synthetic peptide
AAFMPNNYY

SEQ ID NO: 1787 - protein, 9 aa, Artificial Sequence
  Description of Artificial Sequence: Synthetic peptide
AALFPNWSN

SEQ ID NO: 1788 - protein, 9 aa, Artificial Sequence
  Description of Artificial Sequence: Synthetic peptide
AEECSNHNV

SEQ ID NO: 1789 - protein, 9 aa, Artificial Sequence
  Description of Artificial Sequence: Synthetic peptide
AHSMTNLVG

SEQ ID NO: 1790 - protein, 9 aa, Artificial Sequence
  Description of Artificial Sequence: Synthetic peptide
AWFDHNEHQ

SEQ ID NO: 1791 - protein, 9 aa, Artificial Sequence
  Description of Artificial Sequence: Synthetic peptide
AYARSNRQD

SEQ ID NO: 1792 - protein, 9 aa, Artificial Sequence
  Description of Artificial Sequence: Synthetic peptide
DATIANAQV

SEQ ID NO: 1793 - protein, 9 aa, Artificial Sequence
  Description of Artificial Sequence: Synthetic peptide
DIAEKNRMM

SEQ ID NO: 1794 - protein, 9 aa, Artificial Sequence
  Description of Artificial Sequence: Synthetic peptide
DWKTSNAEY

SEQ ID NO: 1795 - protein, 9 aa, Artificial Sequence
  Description of Artificial Sequence: Synthetic peptide
EGDWYNYGT

SEQ ID NO: 1796 - protein, 9 aa, Artificial Sequence
  Description of Artificial Sequence: Synthetic peptide
GIIFSNTCM

SEQ ID NO: 1797 - protein, 9 aa, Artificial Sequence
  Description of Artificial Sequence: Synthetic peptide
GPPPYNAWF

SEQ ID NO: 1798 - protein, 9 aa, Artificial Sequence
  Description of Artificial Sequence: Synthetic peptide
GSQRTNTSC

SEQ ID NO: 1799 - protein, 9 aa, Artificial Sequence
  Description of Artificial Sequence: Synthetic peptide
GTSRYNAFI

SEQ ID NO: 1800 - protein, 9 aa, Artificial Sequence
  Description of Artificial Sequence: Synthetic peptide
IALLTNDLA

SEQ ID NO: 1801 - protein, 9 aa, Artificial Sequence
  Description of Artificial Sequence: Synthetic peptide
ICGRLNNNP

SEQ ID NO: 1802 - protein, 9 aa, Artificial Sequence
  Description of Artificial Sequence: Synthetic peptide
INAPQNMSW

SEQ ID NO: 1803 - protein, 9 aa, Artificial Sequence
  Description of Artificial Sequence: Synthetic peptide
ISGYHNVDE

SEQ ID NO: 1804 - protein, 9 aa, Artificial Sequence
  Description of Artificial Sequence: Synthetic peptide
IYHTLNHCM

SEQ ID NO: 1805 - protein, 9 aa, Artificial Sequence
  Description of Artificial Sequence: Synthetic peptide
KAEMSNAIT

SEQ ID NO: 1806 - protein, 9 aa, Artificial Sequence
  Description of Artificial Sequence: Synthetic peptide
KAIPENSHR

SEQ ID NO: 1807 - protein, 9 aa, Artificial Sequence
  Description of Artificial Sequence: Synthetic peptide
KIHSPNQDE

SEQ ID NO: 1808 - protein, 9 aa, Artificial Sequence
  Description of Artificial Sequence: Synthetic peptide
LKSPHNENG

SEQ ID NO: 1809 - protein, 9 aa, Artificial Sequence
  Description of Artificial Sequence: Synthetic peptide
LLEVKNHDH

SEQ ID NO: 1810 - protein, 9 aa, Artificial Sequence
  Description of Artificial Sequence: Synthetic peptide
LSDLQNKGA

SEQ ID NO: 1811 - protein, 9 aa, Artificial Sequence
  Description of Artificial Sequence: Synthetic peptide
LSHTSNMGH

SEQ ID NO: 1812 - protein, 9 aa, Artificial Sequence
  Description of Artificial Sequence: Synthetic peptide
LTYLANQSD

SEQ ID NO: 1813 - protein, 9 aa, Artificial Sequence
  Description of Artificial Sequence: Synthetic peptide
MGKSRNGSE

SEQ ID NO: 1814 - protein, 9 aa, Artificial Sequence
  Description of Artificial Sequence: Synthetic peptide
MISMWNRSN

SEQ ID NO: 1815 - protein, 9 aa, Artificial Sequence
  Description of Artificial Sequence: Synthetic peptide
MMDPTNFGS

SEQ ID NO: 1816 - protein, 9 aa, Artificial Sequence
  Description of Artificial Sequence: Synthetic peptide
MNNITNWNP

SEQ ID NO: 1817 - protein, 9 aa, Artificial Sequence
  Description of Artificial Sequence: Synthetic peptide
MTGRANKFD

SEQ ID NO: 1818 - protein, 9 aa, Artificial Sequence
  Description of Artificial Sequence: Synthetic peptide
NNQWMNSLE

SEQ ID NO: 1819 - protein, 9 aa, Artificial Sequence
  Description of Artificial Sequence: Synthetic peptide
NQIRNNMER

SEQ ID NO: 1820 - protein, 9 aa, Artificial Sequence
  Description of Artificial Sequence: Synthetic peptide
NTYMHNREG

SEQ ID NO: 1821 - protein, 9 aa, Artificial Sequence
  Description of Artificial Sequence: Synthetic peptide
NWNDSNDCC

SEQ ID NO: 1822 - protein, 9 aa, Artificial Sequence
  Description of Artificial Sequence: Synthetic peptide
QCYTFNDTK

SEQ ID NO: 1823 - protein, 9 aa, Artificial Sequence
  Description of Artificial Sequence: Synthetic peptide
QRDLANGQF

SEQ ID NO: 1824 - protein, 9 aa, Artificial Sequence
  Description of Artificial Sequence: Synthetic peptide
QTASWNMEM

SEQ ID NO: 1825 - protein, 9 aa, Artificial Sequence
  Description of Artificial Sequence: Synthetic peptide
RCEPFNWRE

SEQ ID NO: 1826 - protein, 9 aa, Artificial Sequence
  Description of Artificial Sequence: Synthetic peptide
RMAQINQQG

SEQ ID NO: 1827 - protein, 9 aa, Artificial Sequence
  Description of Artificial Sequence: Synthetic peptide
STALMNEYQ

SEQ ID NO: 1828 - protein, 9 aa, Artificial Sequence
  Description of Artificial Sequence: Synthetic peptide
SWWLTNTAV

SEQ ID NO: 1829 - protein, 9 aa, Artificial Sequence
  Description of Artificial Sequence: Synthetic peptide
TADFYNDQM

SEQ ID NO: 1830 - protein, 9 aa, Artificial Sequence
  Description of Artificial Sequence: Synthetic peptide
TASSANLSW

SEQ ID NO: 1831 - protein, 9 aa, Artificial Sequence
  Description of Artificial Sequence: Synthetic peptide
TFEICNSPQ

SEQ ID NO: 1832 - protein, 9 aa, Artificial Sequence
  Description of Artificial Sequence: Synthetic peptide
TFLRLNDFV

SEQ ID NO: 1833 - protein, 9 aa, Artificial Sequence
  Description of Artificial Sequence: Synthetic peptide
TFSQHNHKA

SEQ ID NO: 1834 - protein, 9 aa, Artificial Sequence
  Description of Artificial Sequence: Synthetic peptide
TKCTTNQQC

SEQ ID NO: 1835 - protein, 9 aa, Artificial Sequence
  Description of Artificial Sequence: Synthetic peptide
TSALNNNSK

SEQ ID NO: 1836 - protein, 9 aa, Artificial Sequence
  Description of Artificial Sequence: Synthetic peptide
TSHDNNAQI

SEQ ID NO: 1837 - protein, 9 aa, Artificial Sequence
  Description of Artificial Sequence: Synthetic peptide
TTFHINEYP

SEQ ID NO: 1838 - protein, 9 aa, Artificial Sequence
  Description of Artificial Sequence: Synthetic peptide
VCVPKNGIH

SEQ ID NO: 1839 - protein, 9 aa, Artificial Sequence
  Description of Artificial Sequence: Synthetic peptide
VGAQTNCLQ

SEQ ID NO: 1840 - protein, 9 aa, Artificial Sequence
  Description of Artificial Sequence: Synthetic peptide
VYNLLNHYQ

SEQ ID NO: 1841 - protein, 9 aa, Artificial Sequence
  Description of Artificial Sequence: Synthetic peptide
VYRIANTQY

SEQ ID NO: 1842 - protein, 9 aa, Artificial Sequence
  Description of Artificial Sequence: Synthetic peptide
YAKSRNIVG

SEQ ID NO: 1843 - protein, 9 aa, Artificial Sequence
  Description of Artificial Sequence: Synthetic peptide
HKESLGHHC

SEQ ID NO: 1844 - protein, 9 aa, Artificial Sequence
  Description of Artificial Sequence: Synthetic peptide
HRHPCGHIP

SEQ ID NO: 1845 - protein, 9 aa, Artificial Sequence
  Description of Artificial Sequence: Synthetic peptide
HSAPSFHTQ

SEQ ID NO: 1846 - protein, 9 aa, Artificial Sequence
  Description of Artificial Sequence: Synthetic peptide
IDKLYWHWG

SEQ ID NO: 1847 - protein, 9 aa, Artificial Sequence
  Description of Artificial Sequence: Synthetic peptide
IDQPIQHAS

SEQ ID NO: 1848 - protein, 9 aa, Artificial Sequence
  Description of Artificial Sequence: Synthetic peptide
IGKMNDHGM

SEQ ID NO: 1849 - protein, 9 aa, Artificial Sequence
  Description of Artificial Sequence: Synthetic peptide
IIQYNGHQA

SEQ ID NO: 1850 - protein, 9 aa, Artificial Sequence
  Description of Artificial Sequence: Synthetic peptide
IKTELAHQY

SEQ ID NO: 1851 - protein, 9 aa, Artificial Sequence
  Description of Artificial Sequence: Synthetic peptide
KAAGDSHTP

SEQ ID NO: 1852 - protein, 9 aa, Artificial Sequence
  Description of Artificial Sequence: Synthetic peptide
KADAPIHWS

SEQ ID NO: 1853 - protein, 9 aa, Artificial Sequence
  Description of Artificial Sequence: Synthetic peptide
KAECKPHHE

SEQ ID NO: 1854 - protein, 9 aa, Artificial Sequence
  Description of Artificial Sequence: Synthetic peptide
KATELGHCG

SEQ ID NO: 1855 - protein, 9 aa, Artificial Sequence
  Description of Artificial Sequence: Synthetic peptide
KCTAMRHKE

SEQ ID NO: 1856 - protein, 9 aa, Artificial Sequence
  Description of Artificial Sequence: Synthetic peptide
KTEQATHTC

SEQ ID NO: 1857 - protein, 9 aa, Artificial Sequence
  Description of Artificial Sequence: Synthetic peptide
KTSEWHHVG

SEQ ID NO: 1858 - protein, 9 aa, Artificial Sequence
  Description of Artificial Sequence: Synthetic peptide
LATSRVHFG

SEQ ID NO: 1859 - protein, 9 aa, Artificial Sequence
  Description of Artificial Sequence: Synthetic peptide
LGGWMEHSF

SEQ ID NO: 1860 - protein, 9 aa, Artificial Sequence
  Description of Artificial Sequence: Synthetic peptide
LSDHLHHYT

SEQ ID NO: 1861 - protein, 9 aa, Artificial Sequence
  Description of Artificial Sequence: Synthetic peptide
MCHHRHHAE

SEQ ID NO: 1862 - protein, 9 aa, Artificial Sequence
  Description of Artificial Sequence: Synthetic peptide
MFRERIHHD

SEQ ID NO: 1863 - protein, 9 aa, Artificial Sequence
  Description of Artificial Sequence: Synthetic peptide
NCIFIEHPT

SEQ ID NO: 1864 - protein, 9 aa, Artificial Sequence
  Description of Artificial Sequence: Synthetic peptide
NKVGCQHSY

SEQ ID NO: 1865 - protein, 9 aa, Artificial Sequence
  Description of Artificial Sequence: Synthetic peptide
NMKVDAHSN

SEQ ID NO: 1866 - protein, 9 aa, Artificial Sequence
  Description of Artificial Sequence: Synthetic peptide
NSSYEEHDQ

SEQ ID NO: 1867 - protein, 9 aa, Artificial Sequence
  Description of Artificial Sequence: Synthetic peptide
NTCFIGHNE

SEQ ID NO: 1868 - protein, 9 aa, Artificial Sequence
  Description of Artificial Sequence: Synthetic peptide
PGSQYVHWI

SEQ ID NO: 1869 - protein, 9 aa, Artificial Sequence
  Description of Artificial Sequence: Synthetic peptide
QASYRTHHD

SEQ ID NO: 1870 - protein, 9 aa, Artificial Sequence
  Description of Artificial Sequence: Synthetic peptide
QCAIMRHYC

SEQ ID NO: 1871 - protein, 9 aa, Artificial Sequence
  Description of Artificial Sequence: Synthetic peptide
QIAEIIHFG

SEQ ID NO: 1872 - protein, 9 aa, Artificial Sequence
  Description of Artificial Sequence: Synthetic peptide
QIYPEHHKE

SEQ ID NO: 1873 - protein, 9 aa, Artificial Sequence
  Description of Artificial Sequence: Synthetic peptide
QRKHYVHVF

SEQ ID NO: 1874 - protein, 9 aa, Artificial Sequence
  Description of Artificial Sequence: Synthetic peptide
QWDTLRHTP

SEQ ID NO: 1875 - protein, 9 aa, Artificial Sequence
  Description of Artificial Sequence: Synthetic peptide
RICFHQHWG

SEQ ID NO: 1876 - protein, 9 aa, Artificial Sequence
  Description of Artificial Sequence: Synthetic peptide
RKECEDHGG

SEQ ID NO: 1877 - protein, 9 aa, Artificial Sequence
  Description of Artificial Sequence: Synthetic peptide
RTLEWFHRG

SEQ ID NO: 1878 - protein, 9 aa, Artificial Sequence
  Description of Artificial Sequence: Synthetic peptide
SFSWTYHQD

SEQ ID NO: 1879 - protein, 9 aa, Artificial Sequence
  Description of Artificial Sequence: Synthetic peptide
TAVMYAHDC

SEQ ID NO: 1880 - protein, 9 aa, Artificial Sequence
  Description of Artificial Sequence: Synthetic peptide
TREINDHGI

SEQ ID NO: 1881 - protein, 9 aa, Artificial Sequence
  Description of Artificial Sequence: Synthetic peptide
TRGSMYHHC

SEQ ID NO: 1882 - protein, 9 aa, Artificial Sequence
  Description of Artificial Sequence: Synthetic peptide
TTVRNFHAE

SEQ ID NO: 1883 - protein, 9 aa, Artificial Sequence
  Description of Artificial Sequence: Synthetic peptide
TYCCYHHQG

SEQ ID NO: 1884 - protein, 9 aa, Artificial Sequence
  Description of Artificial Sequence: Synthetic peptide
TYECAAHYP

SEQ ID NO: 1885 - protein, 9 aa, Artificial Sequence
  Description of Artificial Sequence: Synthetic peptide
VAQPYIHSH

SEQ ID NO: 1886 - protein, 9 aa, Artificial Sequence
  Description of Artificial Sequence: Synthetic peptide
VNKPAGHIQ

SEQ ID NO: 1887 - protein, 9 aa, Artificial Sequence
  Description of Artificial Sequence: Synthetic peptide
VRDLLHHDM

SEQ ID NO: 1888 - protein, 9 aa, Artificial Sequence
  Description of Artificial Sequence: Synthetic peptide
VYETLKHRG

SEQ ID NO: 1889 - protein, 9 aa, Artificial Sequence
  Description of Artificial Sequence: Synthetic peptide
VYETMGHEE

SEQ ID NO: 1890 - protein, 9 aa, Artificial Sequence
  Description of Artificial Sequence: Synthetic peptide
WYYYPAHHK

SEQ ID NO: 1891 - protein, 9 aa, Artificial Sequence
  Description of Artificial Sequence: Synthetic peptide
YEVTIPHAI

SEQ ID NO: 1892 - protein, 9 aa, Artificial Sequence
  Description of Artificial Sequence: Synthetic peptide
ETRWWPHIE

SEQ ID NO: 1893 - protein, 9 aa, Artificial Sequence
  Description of Artificial Sequence: Synthetic peptide
MSCMKEHSP

SEQ ID NO: 1894 - protein, 9 aa, Artificial Sequence
  Description of Artificial Sequence: Synthetic peptide
NCAPMEHHV

SEQ ID NO: 1895 - protein, 9 aa, Artificial Sequence
  Description of Artificial Sequence: Synthetic peptide
QGLNYEHQE

SEQ ID NO: 1896 - protein, 9 aa, Artificial Sequence
  Description of Artificial Sequence: Synthetic peptide
SCRHIYHEA

SEQ ID NO: 1897 - protein, 9 aa, Artificial Sequence
  Description of Artificial Sequence: Synthetic peptide
SMNQAIHLE

SEQ ID NO: 1898 - protein, 9 aa, Artificial Sequence
  Description of Artificial Sequence: Synthetic peptide
AAYMTDHMN

SEQ ID NO: 1899 - protein, 9 aa, Artificial Sequence
  Description of Artificial Sequence: Synthetic peptide
ASTSIVHAH

SEQ ID NO: 1900 - protein, 9 aa, Artificial Sequence
  Description of Artificial Sequence: Synthetic peptide
DSFLNRHTE

SEQ ID NO: 1901 - protein, 9 aa, Artificial Sequence
  Description of Artificial Sequence: Synthetic peptide
DTCSRKHWM

SEQ ID NO: 1902 - protein, 9 aa, Artificial Sequence
  Description of Artificial Sequence: Synthetic peptide
ESFYQRHVT

SEQ ID NO: 1903 - protein, 9 aa, Artificial Sequence
  Description of Artificial Sequence: Synthetic peptide
ESVVGPHWD

SEQ ID NO: 1904 - protein, 9 aa, Artificial Sequence
  Description of Artificial Sequence: Synthetic peptide
ETDVCRHGV

SEQ ID NO: 1905 - protein, 9 aa, Artificial Sequence
  Description of Artificial Sequence: Synthetic peptide
HQNASMHMP

SEQ ID NO: 1906 - protein, 9 aa, Artificial Sequence
  Description of Artificial Sequence: Synthetic peptide
HYIQIQHDY

SEQ ID NO: 1907 - protein, 9 aa, Artificial Sequence
  Description of Artificial Sequence: Synthetic peptide
IMVALMHED

SEQ ID NO: 1908 - protein, 9 aa, Artificial Sequence
  Description of Artificial Sequence: Synthetic peptide
IYNQFPHYG

SEQ ID NO: 1909 - protein, 9 aa, Artificial Sequence
  Description of Artificial Sequence: Synthetic peptide
KHSPDHHFE

SEQ ID NO: 1910 - protein, 9 aa, Artificial Sequence
  Description of Artificial Sequence: Synthetic peptide
KMAMLRHAT

SEQ ID NO: 1911 - protein, 9 aa, Artificial Sequence
  Description of Artificial Sequence: Synthetic peptide
KSVGWCHAF

SEQ ID NO: 1912 - protein, 9 aa, Artificial Sequence
  Description of Artificial Sequence: Synthetic peptide
LQQPIVHIE

SEQ ID NO: 1913 - protein, 9 aa, Artificial Sequence
  Description of Artificial Sequence: Synthetic peptide
LTETEHHDQ

SEQ ID NO: 1914 - protein, 9 aa, Artificial Sequence
  Description of Artificial Sequence: Synthetic peptide
MATHCLHWR

SEQ ID NO: 1915 - protein, 9 aa, Artificial Sequence
  Description of Artificial Sequence: Synthetic peptide
MMPEIMHVL

SEQ ID NO: 1916 - protein, 9 aa, Artificial Sequence
  Description of Artificial Sequence: Synthetic peptide
NMGLLYHTN

SEQ ID NO: 1917 - protein, 9 aa, Artificial Sequence
  Description of Artificial Sequence: Synthetic peptide
NTEPMTHWN

SEQ ID NO: 1918 - protein, 9 aa, Artificial Sequence
  Description of Artificial Sequence: Synthetic peptide
PMKPMHHGY

SEQ ID NO: 1919 - protein, 9 aa, Artificial Sequence
  Description of Artificial Sequence: Synthetic peptide
QCTFYFHWR

SEQ ID NO: 1920 - protein, 9 aa, Artificial Sequence
  Description of Artificial Sequence: Synthetic peptide
QHVQEIHGA

SEQ ID NO: 1921 - protein, 9 aa, Artificial Sequence
  Description of Artificial Sequence: Synthetic peptide
QIYHNHHTA

SEQ ID NO: 1922 - protein, 9 aa, Artificial Sequence
  Description of Artificial Sequence: Synthetic peptide
QSCVGLHQI

SEQ ID NO: 1923 - protein, 9 aa, Artificial Sequence
  Description of Artificial Sequence: Synthetic peptide
SATSKSHTF

SEQ ID NO: 1924 - protein, 9 aa, Artificial Sequence
  Description of Artificial Sequence: Synthetic peptide
SCDEYMHHP

SEQ ID NO: 1925 - protein, 9 aa, Artificial Sequence
  Description of Artificial Sequence: Synthetic peptide
SCVLKVHFP

SEQ ID NO: 1926 - protein, 9 aa, Artificial Sequence
  Description of Artificial Sequence: Synthetic peptide
SLCMHRHDF

SEQ ID NO: 1927 - protein, 9 aa, Artificial Sequence
  Description of Artificial Sequence: Synthetic peptide
SMGPTVHQM

SEQ ID NO: 1928 - protein, 9 aa, Artificial Sequence
  Description of Artificial Sequence: Synthetic peptide
TAGHEGHIC

SEQ ID NO: 1929 - protein, 9 aa, Artificial Sequence
  Description of Artificial Sequence: Synthetic peptide
TCEWWIHMD

SEQ ID NO: 1930 - protein, 9 aa, Artificial Sequence
  Description of Artificial Sequence: Synthetic peptide
TFGWFMHIP

SEQ ID NO: 1931 - protein, 9 aa, Artificial Sequence
  Description of Artificial Sequence: Synthetic peptide
TFSQHSHKA

SEQ ID NO: 1932 - protein, 9 aa, Artificial Sequence
  Description of Artificial Sequence: Synthetic peptide
TRQQLFHTQ

SEQ ID NO: 1933 - protein, 9 aa, Artificial Sequence
  Description of Artificial Sequence: Synthetic peptide
TTGSTKHIG

SEQ ID NO: 1934 - protein, 9 aa, Artificial Sequence
  Description of Artificial Sequence: Synthetic peptide
VMPCYWHTT

SEQ ID NO: 1935 - protein, 9 aa, Artificial Sequence
  Description of Artificial Sequence: Synthetic peptide
WDGTKVHWL

SEQ ID NO: 1936 - protein, 9 aa, Artificial Sequence
  Description of Artificial Sequence: Synthetic peptide
YHVILVHQA

SEQ ID NO: 1937 - protein, 9 aa, Artificial Sequence
  Description of Artificial Sequence: Synthetic peptide
YPTVFEHSE

SEQ ID NO: 1938 - protein, 9 aa, Artificial Sequence
  Description of Artificial Sequence: Synthetic peptide
HIGYMPRSY

SEQ ID NO: 1939 - protein, 9 aa, Artificial Sequence
  Description of Artificial Sequence: Synthetic peptide
HLCPNQFSP

SEQ ID NO: 1940 - protein, 9 aa, Artificial Sequence
  Description of Artificial Sequence: Synthetic peptide
HSNGLGPSC

SEQ ID NO: 1941 - protein, 9 aa, Artificial Sequence
  Description of Artificial Sequence: Synthetic peptide
HSQIFMLSW

SEQ ID NO: 1942 - protein, 9 aa, Artificial Sequence
  Description of Artificial Sequence: Synthetic peptide
IGSQIFTST

SEQ ID NO: 1943 - protein, 9 aa, Artificial Sequence
  Description of Artificial Sequence: Synthetic peptide
IGSSIMSST

SEQ ID NO: 1944 - protein, 9 aa, Artificial Sequence
  Description of Artificial Sequence: Synthetic peptide
IIHQQHNST

SEQ ID NO: 1945 - protein, 9 aa, Artificial Sequence
  Description of Artificial Sequence: Synthetic peptide
ITSRRGMSE

SEQ ID NO: 1946 - protein, 9 aa, Artificial Sequence
  Description of Artificial Sequence: Synthetic peptide
KAEPLRLSP

SEQ ID NO: 1947 - protein, 9 aa, Artificial Sequence
  Description of Artificial Sequence: Synthetic peptide
KAFIRDESY

SEQ ID NO: 1948 - protein, 9 aa, Artificial Sequence
  Description of Artificial Sequence: Synthetic peptide
KGDWTVKSY

SEQ ID NO: 1949 - protein, 9 aa, Artificial Sequence
  Description of Artificial Sequence: Synthetic peptide
KGGHKDESP

SEQ ID NO: 1950 - protein, 9 aa, Artificial Sequence
  Description of Artificial Sequence: Synthetic peptide
KIWAHMCSP

SEQ ID NO: 1951 - protein, 9 aa, Artificial Sequence
  Description of Artificial Sequence: Synthetic peptide
KMFLLEQSD

SEQ ID NO: 1952 - protein, 9 aa, Artificial Sequence
  Description of Artificial Sequence: Synthetic peptide
LASCNWRSQ

SEQ ID NO: 1953 - protein, 9 aa, Artificial Sequence
  Description of Artificial Sequence: Synthetic peptide
LAYPCYASA

SEQ ID NO: 1954 - protein, 9 aa, Artificial Sequence
  Description of Artificial Sequence: Synthetic peptide
LFSFLWRSA

SEQ ID NO: 1955 - protein, 9 aa, Artificial Sequence
  Description of Artificial Sequence: Synthetic peptide
LIDQYTNST

SEQ ID NO: 1956 - protein, 9 aa, Artificial Sequence
  Description of Artificial Sequence: Synthetic peptide
LIEQTCVSN

SEQ ID NO: 1957 - protein, 9 aa, Artificial Sequence
  Description of Artificial Sequence: Synthetic peptide
LKVDFLLSN

SEQ ID NO: 1958 - protein, 9 aa, Artificial Sequence
  Description of Artificial Sequence: Synthetic peptide
LMEQFDYSQ

SEQ ID NO: 1959 - protein, 9 aa, Artificial Sequence
  Description of Artificial Sequence: Synthetic peptide
LQGEQSASD

SEQ ID NO: 1960 - protein, 9 aa, Artificial Sequence
  Description of Artificial Sequence: Synthetic peptide
LYEQYKASY

SEQ ID NO: 1961 - protein, 9 aa, Artificial Sequence
  Description of Artificial Sequence: Synthetic peptide
MQQYAYISH

SEQ ID NO: 1962 - protein, 9 aa, Artificial Sequence
  Description of Artificial Sequence: Synthetic peptide
MSIRHMISY

SEQ ID NO: 1963 - protein, 9 aa, Artificial Sequence
  Description of Artificial Sequence: Synthetic peptide
NCGVSMKSN

SEQ ID NO: 1964 - protein, 9 aa, Artificial Sequence
  Description of Artificial Sequence: Synthetic peptide
NCHSKCYSS

SEQ ID NO: 1965 - protein, 9 aa, Artificial Sequence
  Description of Artificial Sequence: Synthetic peptide
NTAHCWESD

SEQ ID NO: 1966 - protein, 9 aa, Artificial Sequence
  Description of Artificial Sequence: Synthetic peptide
QGSFAHVSQ

SEQ ID NO: 1967 - protein, 9 aa, Artificial Sequence
  Description of Artificial Sequence: Synthetic peptide
QHKVMGRSW

SEQ ID NO: 1968 - protein, 9 aa, Artificial Sequence
  Description of Artificial Sequence: Synthetic peptide
QTRCDFLSH

SEQ ID NO: 1969 - protein, 9 aa, Artificial Sequence
  Description of Artificial Sequence: Synthetic peptide
RADHYRASK

SEQ ID NO: 1970 - protein, 9 aa, Artificial Sequence
  Description of Artificial Sequence: Synthetic peptide
RCEAEGGSK

SEQ ID NO: 1971 - protein, 9 aa, Artificial Sequence
  Description of Artificial Sequence: Synthetic peptide
RFHVMETSM

SEQ ID NO: 1972 - protein, 9 aa, Artificial Sequence
  Description of Artificial Sequence: Synthetic peptide
RSNIEHLSE

SEQ ID NO: 1973 - protein, 9 aa, Artificial Sequence
  Description of Artificial Sequence: Synthetic peptide
RTDSFYESD

SEQ ID NO: 1974 - protein, 9 aa, Artificial Sequence
  Description of Artificial Sequence: Synthetic peptide
RTIDPVQSS

SEQ ID NO: 1975 - protein, 9 aa, Artificial Sequence
  Description of Artificial Sequence: Synthetic peptide
RTVEHQASA

SEQ ID NO: 1976 - protein, 9 aa, Artificial Sequence
  Description of Artificial Sequence: Synthetic peptide
SLGCREISL

SEQ ID NO: 1977 - protein, 9 aa, Artificial Sequence
  Description of Artificial Sequence: Synthetic peptide
SLHAWAISA

SEQ ID NO: 1978 - protein, 9 aa, Artificial Sequence
  Description of Artificial Sequence: Synthetic peptide
SNFEFQKSH

SEQ ID NO: 1979 - protein, 9 aa, Artificial Sequence
  Description of Artificial Sequence: Synthetic peptide
TCGLFSGSY

SEQ ID NO: 1980 - protein, 9 aa, Artificial Sequence
  Description of Artificial Sequence: Synthetic peptide
TFTRPEQSQ

SEQ ID NO: 1981 - protein, 9 aa, Artificial Sequence
  Description of Artificial Sequence: Synthetic peptide
TGKWISPSN

SEQ ID NO: 1982 - protein, 9 aa, Artificial Sequence
  Description of Artificial Sequence: Synthetic peptide
TKENLAASY

SEQ ID NO: 1983 - protein, 9 aa, Artificial Sequence
  Description of Artificial Sequence: Synthetic peptide
TMLVHHGSM

SEQ ID NO: 1984 - protein, 9 aa, Artificial Sequence
  Description of Artificial Sequence: Synthetic peptide
TSFLLGVSS

SEQ ID NO: 1985 - protein, 9 aa, Artificial Sequence
  Description of Artificial Sequence: Synthetic peptide
TTHDEGVSI

SEQ ID NO: 1986 - protein, 9 aa, Artificial Sequence
  Description of Artificial Sequence: Synthetic peptide
VAAHPLTSD

SEQ ID NO: 1987 - protein, 9 aa, Artificial Sequence
  Description of Artificial Sequence: Synthetic peptide
VFRMATESE

SEQ ID NO: 1988 - protein, 9 aa, Artificial Sequence
  Description of Artificial Sequence: Synthetic peptide
VGQVIDRSW

SEQ ID NO: 1989 - protein, 9 aa, Artificial Sequence
  Description of Artificial Sequence: Synthetic peptide
VTTRNPFST

SEQ ID NO: 1990 - protein, 9 aa, Artificial Sequence
  Description of Artificial Sequence: Synthetic peptide
VYQVCTISD

SEQ ID NO: 1991 - protein, 9 aa, Artificial Sequence
  Description of Artificial Sequence: Synthetic peptide
WCQRFQTSS

SEQ ID NO: 1992 - protein, 9 aa, Artificial Sequence
  Description of Artificial Sequence: Synthetic peptide
WITEIELSG

SEQ ID NO: 1993 - protein, 9 aa, Artificial Sequence
  Description of Artificial Sequence: Synthetic peptide
YFALSGFSS

SEQ ID NO: 1994 - protein, 9 aa, Artificial Sequence
  Description of Artificial Sequence: Synthetic peptide
EIHHLPSSH

SEQ ID NO: 1995 - protein, 9 aa, Artificial Sequence
  Description of Artificial Sequence: Synthetic peptide
GTAETYISA

SEQ ID NO: 1996 - protein, 9 aa, Artificial Sequence
  Description of Artificial Sequence: Synthetic peptide
HSEQMHQSD

SEQ ID NO: 1997 - protein, 9 aa, Artificial Sequence
  Description of Artificial Sequence: Synthetic peptide
LAKSCSSSQ

SEQ ID NO: 1998 - protein, 9 aa, Artificial Sequence
  Description of Artificial Sequence: Synthetic peptide
NASLDMISV

SEQ ID NO: 1999 - protein, 9 aa, Artificial Sequence
  Description of Artificial Sequence: Synthetic peptide
SSEPFTKSN

SEQ ID NO: 2000 - protein, 9 aa, Artificial Sequence
  Description of Artificial Sequence: Synthetic peptide
VADMGPWSG

SEQ ID NO: 2001 - protein, 9 aa, Artificial Sequence
  Description of Artificial Sequence: Synthetic peptide
APHSYAMSY

SEQ ID NO: 2002 - protein, 9 aa, Artificial Sequence
  Description of Artificial Sequence: Synthetic peptide
ASHIKWNSH

SEQ ID NO: 2003 - protein, 9 aa, Artificial Sequence
  Description of Artificial Sequence: Synthetic peptide
DAQQAPNSS

SEQ ID NO: 2004 - protein, 9 aa, Artificial Sequence
  Description of Artificial Sequence: Synthetic peptide
EDWIMHASF

SEQ ID NO: 2005 - protein, 9 aa, Artificial Sequence
  Description of Artificial Sequence: Synthetic peptide
EPSFESDSN

SEQ ID NO: 2006 - protein, 9 aa, Artificial Sequence
  Description of Artificial Sequence: Synthetic peptide
ESKWWIQSD

SEQ ID NO: 2007 - protein, 9 aa, Artificial Sequence
  Description of Artificial Sequence: Synthetic peptide
FGKDTFVSS

SEQ ID NO: 2008 - protein, 9 aa, Artificial Sequence
  Description of Artificial Sequence: Synthetic peptide
GANNIYVSM

SEQ ID NO: 2009 - protein, 9 aa, Artificial Sequence
  Description of Artificial Sequence: Synthetic peptide
GKSLMMTSF

SEQ ID NO: 2010 - protein, 9 aa, Artificial Sequence
  Description of Artificial Sequence: Synthetic peptide
GNTQQPMSF

SEQ ID NO: 2011 - protein, 9 aa, Artificial Sequence
  Description of Artificial Sequence: Synthetic peptide
GTAAMEQSC

SEQ ID NO: 2012 - protein, 9 aa, Artificial Sequence
  Description of Artificial Sequence: Synthetic peptide
IDASLDMSW

SEQ ID NO: 2013 - protein, 9 aa, Artificial Sequence
  Description of Artificial Sequence: Synthetic peptide
ISEPCYVSI

SEQ ID NO: 2014 - protein, 9 aa, Artificial Sequence
  Description of Artificial Sequence: Synthetic peptide
LMNSYCVSH

SEQ ID NO: 2015 - protein, 9 aa, Artificial Sequence
  Description of Artificial Sequence: Synthetic peptide
LNVEAELSF

SEQ ID NO: 2016 - protein, 9 aa, Artificial Sequence
  Description of Artificial Sequence: Synthetic peptide
LSLPGVPSM

SEQ ID NO: 2017 - protein, 9 aa, Artificial Sequence
  Description of Artificial Sequence: Synthetic peptide
NMTGIHVSP

SEQ ID NO: 2018 - protein, 9 aa, Artificial Sequence
  Description of Artificial Sequence: Synthetic peptide
NTFATGNSP

SEQ ID NO: 2019 - protein, 9 aa, Artificial Sequence
  Description of Artificial Sequence: Synthetic peptide
QCYESMTSW

SEQ ID NO: 2020 - protein, 9 aa, Artificial Sequence
  Description of Artificial Sequence: Synthetic peptide
QICQTDASA

SEQ ID NO: 2021 - protein, 9 aa, Artificial Sequence
  Description of Artificial Sequence: Synthetic peptide
SCVFRLASG

SEQ ID NO: 2022 - protein, 9 aa, Artificial Sequence
  Description of Artificial Sequence: Synthetic peptide
SDPHAGPSD

SEQ ID NO: 2023 - protein, 9 aa, Artificial Sequence
  Description of Artificial Sequence: Synthetic peptide
SLWILRMSN

SEQ ID NO: 2024 - protein, 9 aa, Artificial Sequence
  Description of Artificial Sequence: Synthetic peptide
SSCGNMVSN

SEQ ID NO: 2025 - protein, 9 aa, Artificial Sequence
  Description of Artificial Sequence: Synthetic peptide
THWQYEASH

SEQ ID NO: 2026 - protein, 9 aa, Artificial Sequence
  Description of Artificial Sequence: Synthetic peptide
TNAQFSNSW

SEQ ID NO: 2027 - protein, 9 aa, Artificial Sequence
  Description of Artificial Sequence: Synthetic peptide
TTGVSEGSA

SEQ ID NO: 2028 - protein, 9 aa, Artificial Sequence
  Description of Artificial Sequence: Synthetic peptide
VANYHPYSM

SEQ ID NO: 2029 - protein, 9 aa, Artificial Sequence
  Description of Artificial Sequence: Synthetic peptide
VIRYGDLSQ

SEQ ID NO: 2030 - protein, 9 aa, Artificial Sequence
  Description of Artificial Sequence: Synthetic peptide
VMGPQPVSV

SEQ ID NO: 2031 - protein, 9 aa, Artificial Sequence
  Description of Artificial Sequence: Synthetic peptide
VSVMLAASD

SEQ ID NO: 2032 - protein, 9 aa, Artificial Sequence
  Description of Artificial Sequence: Synthetic peptide
HFYSQSTLP

SEQ ID NO: 2033 - protein, 9 aa, Artificial Sequence
  Description of Artificial Sequence: Synthetic peptide
HGAIHAVLP

SEQ ID NO: 2034 - protein, 9 aa, Artificial Sequence
  Description of Artificial Sequence: Synthetic peptide
HHECMWMFP

SEQ ID NO: 2035 - protein, 9 aa, Artificial Sequence
  Description of Artificial Sequence: Synthetic peptide
HTEARMVEP

SEQ ID NO: 2036 - protein, 9 aa, Artificial Sequence
  Description of Artificial Sequence: Synthetic peptide
IGNYYHKWP

SEQ ID NO: 2037 - protein, 9 aa, Artificial Sequence
  Description of Artificial Sequence: Synthetic peptide
IIRHHEFAP

SEQ ID NO: 2038 - protein, 9 aa, Artificial Sequence
  Description of Artificial Sequence: Synthetic peptide
IIWQQDIGP

SEQ ID NO: 2039 - protein, 9 aa, Artificial Sequence
  Description of Artificial Sequence: Synthetic peptide
IQSECVVVP

SEQ ID NO: 2040 - protein, 9 aa, Artificial Sequence
  Description of Artificial Sequence: Synthetic peptide
KNESAKQCP

SEQ ID NO: 2041 - protein, 9 aa, Artificial Sequence
  Description of Artificial Sequence: Synthetic peptide
KSVNLCVDP

SEQ ID NO: 2042 - protein, 9 aa, Artificial Sequence
  Description of Artificial Sequence: Synthetic peptide
KTSFSEMPP

SEQ ID NO: 2043 - protein, 9 aa, Artificial Sequence
  Description of Artificial Sequence: Synthetic peptide
KTSMTFYNP

SEQ ID NO: 2044 - protein, 9 aa, Artificial Sequence
  Description of Artificial Sequence: Synthetic peptide
LARSDCRQP

SEQ ID NO: 2045 - protein, 9 aa, Artificial Sequence
  Description of Artificial Sequence: Synthetic peptide
LFYPEWDGP

SEQ ID NO: 2046 - protein, 9 aa, Artificial Sequence
  Description of Artificial Sequence: Synthetic peptide
LGCDTEQMP

SEQ ID NO: 2047 - protein, 9 aa, Artificial Sequence
  Description of Artificial Sequence: Synthetic peptide
LHEFHKSYP

SEQ ID NO: 2048 - protein, 9 aa, Artificial Sequence
  Description of Artificial Sequence: Synthetic peptide
LQLRSDWCP

SEQ ID NO: 2049 - protein, 9 aa, Artificial Sequence
  Description of Artificial Sequence: Synthetic peptide
LTIHSQREP

SEQ ID NO: 2050 - protein, 9 aa, Artificial Sequence
  Description of Artificial Sequence: Synthetic peptide
MACLFRACP

SEQ ID NO: 2051 - protein, 9 aa, Artificial Sequence
  Description of Artificial Sequence: Synthetic peptide
MEGAIGQNP

SEQ ID NO: 2052 - protein, 9 aa, Artificial Sequence
  Description of Artificial Sequence: Synthetic peptide
MGANIAQMP

SEQ ID NO: 2053 - protein, 9 aa, Artificial Sequence
  Description of Artificial Sequence: Synthetic peptide
MGSSRMIYP

SEQ ID NO: 2054 - protein, 9 aa, Artificial Sequence
  Description of Artificial Sequence: Synthetic peptide
MHIFHSLCP

SEQ ID NO: 2055 - protein, 9 aa, Artificial Sequence
  Description of Artificial Sequence: Synthetic peptide
MKSECMSGP

SEQ ID NO: 2056 - protein, 9 aa, Artificial Sequence
  Description of Artificial Sequence: Synthetic peptide
MWGHISEMP

SEQ ID NO: 2057 - protein, 9 aa, Artificial Sequence
  Description of Artificial Sequence: Synthetic peptide
NFHMKSMCP

SEQ ID NO: 2058 - protein, 9 aa, Artificial Sequence
  Description of Artificial Sequence: Synthetic peptide
NLHDFIFAP

SEQ ID NO: 2059 - protein, 9 aa, Artificial Sequence
  Description of Artificial Sequence: Synthetic peptide
NWNLWDTYP

SEQ ID NO: 2060 - protein, 9 aa, Artificial Sequence
  Description of Artificial Sequence: Synthetic peptide
PEFEFFTTP

SEQ ID NO: 2061 - protein, 9 aa, Artificial Sequence
  Description of Artificial Sequence: Synthetic peptide
QCDEQEYNP

SEQ ID NO: 2062 - protein, 9 aa, Artificial Sequence
  Description of Artificial Sequence: Synthetic peptide
QGQRFYNYP

SEQ ID NO: 2063 - protein, 9 aa, Artificial Sequence
  Description of Artificial Sequence: Synthetic peptide
QYARLDCLP

SEQ ID NO: 2064 - protein, 9 aa, Artificial Sequence
  Description of Artificial Sequence: Synthetic peptide
RADIGSLCP

SEQ ID NO: 2065 - protein, 9 aa, Artificial Sequence
  Description of Artificial Sequence: Synthetic peptide
RCILKREQP

SEQ ID NO: 2066 - protein, 9 aa, Artificial Sequence
  Description of Artificial Sequence: Synthetic peptide
RETVAMDMP

SEQ ID NO: 2067 - protein, 9 aa, Artificial Sequence
  Description of Artificial Sequence: Synthetic peptide
RFEFLMAPP

SEQ ID NO: 2068 - protein, 9 aa, Artificial Sequence
  Description of Artificial Sequence: Synthetic peptide
SAYIGEQGP

SEQ ID NO: 2069 - protein, 9 aa, Artificial Sequence
  Description of Artificial Sequence: Synthetic peptide
SLRVCIGQP

SEQ ID NO: 2070 - protein, 9 aa, Artificial Sequence
  Description of Artificial Sequence: Synthetic peptide
STHLKLSDP

SEQ ID NO: 2071 - protein, 9 aa, Artificial Sequence
  Description of Artificial Sequence: Synthetic peptide
STNLIGQNP

SEQ ID NO: 2072 - protein, 9 aa, Artificial Sequence
  Description of Artificial Sequence: Synthetic peptide
TCGWSHAMP

SEQ ID NO: 2073 - protein, 9 aa, Artificial Sequence
  Description of Artificial Sequence: Synthetic peptide
TGNLWQSMP

SEQ ID NO: 2074 - protein, 9 aa, Artificial Sequence
  Description of Artificial Sequence: Synthetic peptide
TSQAPMCNP

SEQ ID NO: 2075 - protein, 9 aa, Artificial Sequence
  Description of Artificial Sequence: Synthetic peptide
YCDRSGIWP

SEQ ID NO: 2076 - protein, 9 aa, Artificial Sequence
  Description of Artificial Sequence: Synthetic peptide
YFYEAKLMP

SEQ ID NO: 2077 - protein, 9 aa, Artificial Sequence
  Description of Artificial Sequence: Synthetic peptide
YNGYTSVCP

SEQ ID NO: 2078 - protein, 9 aa, Artificial Sequence
  Description of Artificial Sequence: Synthetic peptide
YRDRFFAVP

SEQ ID NO: 2079 - protein, 9 aa, Artificial Sequence
  Description of Artificial Sequence: Synthetic peptide
YSHPRDGAP

SEQ ID NO: 2080 - protein, 9 aa, Artificial Sequence
  Description of Artificial Sequence: Synthetic peptide
ACQLLHWQP

SEQ ID NO: 2081 - protein, 9 aa, Artificial Sequence
  Description of Artificial Sequence: Synthetic peptide
DWDSMCWWP

SEQ ID NO: 2082 - protein, 9 aa, Artificial Sequence
  Description of Artificial Sequence: Synthetic peptide
EDTMAQMWP

SEQ ID NO: 2083 - protein, 9 aa, Artificial Sequence
  Description of Artificial Sequence: Synthetic peptide
LCHFRLVGP

SEQ ID NO: 2084 - protein, 9 aa, Artificial Sequence
  Description of Artificial Sequence: Synthetic peptide
NQTGHMPAP

SEQ ID NO: 2085 - protein, 9 aa, Artificial Sequence
  Description of Artificial Sequence: Synthetic peptide
QAPAYMWGP

SEQ ID NO: 2086 - protein, 9 aa, Artificial Sequence
  Description of Artificial Sequence: Synthetic peptide
WHSRKQWPP

SEQ ID NO: 2087 - protein, 9 aa, Artificial Sequence
  Description of Artificial Sequence: Synthetic peptide
YTKYLMTEP

SEQ ID NO: 2088 - protein, 9 aa, Artificial Sequence
  Description of Artificial Sequence: Synthetic peptide
AFATCSMMP

SEQ ID NO: 2089 - protein, 9 aa, Artificial Sequence
  Description of Artificial Sequence: Synthetic peptide
APVCGQDPP

SEQ ID NO: 2090 - protein, 9 aa, Artificial Sequence
  Description of Artificial Sequence: Synthetic peptide
DADERQILP

SEQ ID NO: 2091 - protein, 9 aa, Artificial Sequence
  Description of Artificial Sequence: Synthetic peptide
DERNSFWFP

SEQ ID NO: 2092 - protein, 9 aa, Artificial Sequence
  Description of Artificial Sequence: Synthetic peptide
DIHTNTIEP

SEQ ID NO: 2093 - protein, 9 aa, Artificial Sequence
  Description of Artificial Sequence: Synthetic peptide
DSGWWATMP

SEQ ID NO: 2094 - protein, 9 aa, Artificial Sequence
  Description of Artificial Sequence: Synthetic peptide
GLTMNRCYP

SEQ ID NO: 2095 - protein, 9 aa, Artificial Sequence
  Description of Artificial Sequence: Synthetic peptide
GMFWLTQAP

SEQ ID NO: 2096 - protein, 9 aa, Artificial Sequence
  Description of Artificial Sequence: Synthetic peptide
GWWVATMLP

SEQ ID NO: 2097 - protein, 9 aa, Artificial Sequence
  Description of Artificial Sequence: Synthetic peptide
HAELTMNVP

SEQ ID NO: 2098 - protein, 9 aa, Artificial Sequence
  Description of Artificial Sequence: Synthetic peptide
IACCSEAIP

SEQ ID NO: 2099 - protein, 9 aa, Artificial Sequence
  Description of Artificial Sequence: Synthetic peptide
KGDYQADAP

SEQ ID NO: 2100 - protein, 9 aa, Artificial Sequence
  Description of Artificial Sequence: Synthetic peptide
LEKSMMTAP

SEQ ID NO: 2101 - protein, 9 aa, Artificial Sequence
  Description of Artificial Sequence: Synthetic peptide
LRYLSDADP

SEQ ID NO: 2102 - protein, 9 aa, Artificial Sequence
  Description of Artificial Sequence: Synthetic peptide
MCRANGDMP

SEQ ID NO: 2103 - protein, 9 aa, Artificial Sequence
  Description of Artificial Sequence: Synthetic peptide
MCTLRHWQP

SEQ ID NO: 2104 - protein, 9 aa, Artificial Sequence
  Description of Artificial Sequence: Synthetic peptide
MFELFVMGP

SEQ ID NO: 2105 - protein, 9 aa, Artificial Sequence
  Description of Artificial Sequence: Synthetic peptide
MSTPNMTQP

SEQ ID NO: 2106 - protein, 9 aa, Artificial Sequence
  Description of Artificial Sequence: Synthetic peptide
NAEQWCCGP

SEQ ID NO: 2107 - protein, 9 aa, Artificial Sequence
  Description of Artificial Sequence: Synthetic peptide
NMTPLMTLP

SEQ ID NO: 2108 - protein, 9 aa, Artificial Sequence
  Description of Artificial Sequence: Synthetic peptide
QAQPNVNYP

SEQ ID NO: 2109 - protein, 9 aa, Artificial Sequence
  Description of Artificial Sequence: Synthetic peptide
QAYTDDTGP

SEQ ID NO: 2110 - protein, 9 aa, Artificial Sequence
  Description of Artificial Sequence: Synthetic peptide
QWGGNQQTP

SEQ ID NO: 2111 - protein, 9 aa, Artificial Sequence
  Description of Artificial Sequence: Synthetic peptide
QYEEMAWGP

SEQ ID NO: 2112 - protein, 9 aa, Artificial Sequence
  Description of Artificial Sequence: Synthetic peptide
SAYMLRYQP

SEQ ID NO: 2113 - protein, 9 aa, Artificial Sequence
  Description of Artificial Sequence: Synthetic peptide
SGQQFIFCP

SEQ ID NO: 2114 - protein, 9 aa, Artificial Sequence
  Description of Artificial Sequence: Synthetic peptide
SPGHNMVGP

SEQ ID NO: 2115 - protein, 9 aa, Artificial Sequence
  Description of Artificial Sequence: Synthetic peptide
SSVHTLYFP

SEQ ID NO: 2116 - protein, 9 aa, Artificial Sequence
  Description of Artificial Sequence: Synthetic peptide
SYNYEHAWP

SEQ ID NO: 2117 - protein, 9 aa, Artificial Sequence
  Description of Artificial Sequence: Synthetic peptide
TCNMQRAVP

SEQ ID NO: 2118 - protein, 9 aa, Artificial Sequence
  Description of Artificial Sequence: Synthetic peptide
AAGGFLSGC

SEQ ID NO: 2119 - protein, 9 aa, Artificial Sequence
  Description of Artificial Sequence: Synthetic peptide
AAVQKERYN

SEQ ID NO: 2120 - protein, 9 aa, Artificial Sequence
  Description of Artificial Sequence: Synthetic peptide
ACYFMMRQN

SEQ ID NO: 2121 - protein, 9 aa, Artificial Sequence
  Description of Artificial Sequence: Synthetic peptide
AFGHAMKQF

SEQ ID NO: 2122 - protein, 9 aa, Artificial Sequence
  Description of Artificial Sequence: Synthetic peptide
AIGCIQNGG

SEQ ID NO: 2123 - protein, 9 aa, Artificial Sequence
  Description of Artificial Sequence: Synthetic peptide
AIGCVQNGG

SEQ ID NO: 2124 - protein, 9 aa, Artificial Sequence
  Description of Artificial Sequence: Synthetic peptide
AIGGFPNGG

SEQ ID NO: 2125 - protein, 9 aa, Artificial Sequence
  Description of Artificial Sequence: Synthetic peptide
AIGYFQNGG

SEQ ID NO: 2126 - protein, 9 aa, Artificial Sequence
  Description of Artificial Sequence: Synthetic peptide
AILKLTKVL

SEQ ID NO: 2127 - protein, 9 aa, Artificial Sequence
  Description of Artificial Sequence: Synthetic peptide
AILKMTKVM

SEQ ID NO: 2128 - protein, 9 aa, Artificial Sequence
  Description of Artificial Sequence: Synthetic peptide
AILKTTKVL

SEQ ID NO: 2129 - protein, 9 aa, Artificial Sequence
  Description of Artificial Sequence: Synthetic peptide
AIMKMTKVL

SEQ ID NO: 2130 - protein, 9 aa, Artificial Sequence
  Description of Artificial Sequence: Synthetic peptide
ALGHRHHQC

SEQ ID NO: 2131 - protein, 9 aa, Artificial Sequence
  Description of Artificial Sequence: Synthetic peptide
ALNKTLAEG

SEQ ID NO: 2132 - protein, 9 aa, Artificial Sequence
  Description of Artificial Sequence: Synthetic peptide
ANMFRNGML

SEQ ID NO: 2133 - protein, 9 aa, Artificial Sequence
  Description of Artificial Sequence: Synthetic peptide
ANMFRNGMR

SEQ ID NO: 2134 - protein, 9 aa, Artificial Sequence
  Description of Artificial Sequence: Synthetic peptide
ANYIQYVWE

SEQ ID NO: 2135 - protein, 9 aa, Artificial Sequence
  Description of Artificial Sequence: Synthetic peptide
AQMQYERLF

SEQ ID NO: 2136 - protein, 9 aa, Artificial Sequence
  Description of Artificial Sequence: Synthetic peptide
ARAPNEGVI

SEQ ID NO: 2137 - protein, 9 aa, Artificial Sequence
  Description of Artificial Sequence: Synthetic peptide
ARQWMCVHC

SEQ ID NO: 2138 - protein, 9 aa, Artificial Sequence
  Description of Artificial Sequence: Synthetic peptide
ARTLYMINR

SEQ ID NO: 2139 - protein, 9 aa, Artificial Sequence
  Description of Artificial Sequence: Synthetic peptide
ARVIEHKAG

SEQ ID NO: 2140 - protein, 9 aa, Artificial Sequence
  Description of Artificial Sequence: Synthetic peptide
ASMFWHYQV

SEQ ID NO: 2141 - protein, 9 aa, Artificial Sequence
  Description of Artificial Sequence: Synthetic peptide
ATCKHTDHL

SEQ ID NO: 2142 - protein, 9 aa, Artificial Sequence
  Description of Artificial Sequence: Synthetic peptide
ATCYFVSSQ

SEQ ID NO: 2143 - protein, 9 aa, Artificial Sequence
  Description of Artificial Sequence: Synthetic peptide
ATFKHTDHF

SEQ ID NO: 2144 - protein, 9 aa, Artificial Sequence
  Description of Artificial Sequence: Synthetic peptide
ATFKHTDHW

SEQ ID NO: 2145 - protein, 9 aa, Artificial Sequence
  Description of Artificial Sequence: Synthetic peptide
ATLKHTDHL

SEQ ID NO: 2146 - protein, 9 aa, Artificial Sequence
  Description of Artificial Sequence: Synthetic peptide
ATNKYANAT

SEQ ID NO: 2147 - protein, 9 aa, Artificial Sequence
  Description of Artificial Sequence: Synthetic peptide
ATVKHTDHL

SEQ ID NO: 2148 - protein, 9 aa, Artificial Sequence
  Description of Artificial Sequence: Synthetic peptide
AVGLNERNG

SEQ ID NO: 2149 - protein, 9 aa, Artificial Sequence
  Description of Artificial Sequence: Synthetic peptide
AVGNRHHQC

SEQ ID NO: 2150 - protein, 9 aa, Artificial Sequence
  Description of Artificial Sequence: Synthetic peptide
AWGMQDQRY

SEQ ID NO: 2151 - protein, 9 aa, Artificial Sequence
  Description of Artificial Sequence: Synthetic peptide
AWMCRGVYC

SEQ ID NO: 2152 - protein, 9 aa, Artificial Sequence
  Description of Artificial Sequence: Synthetic peptide
AWMCRHVYC

SEQ ID NO: 2153 - protein, 9 aa, Artificial Sequence
  Description of Artificial Sequence: Synthetic peptide
AWMCRNFYC

SEQ ID NO: 2154 - protein, 9 aa, Artificial Sequence
  Description of Artificial Sequence: Synthetic peptide
AWMCRNVDC

SEQ ID NO: 2155 - protein, 9 aa, Artificial Sequence
  Description of Artificial Sequence: Synthetic peptide
AWMCRNVHC

SEQ ID NO: 2156 - protein, 9 aa, Artificial Sequence
  Description of Artificial Sequence: Synthetic peptide
AWMCRNVNC

SEQ ID NO: 2157 - protein, 9 aa, Artificial Sequence
  Description of Artificial Sequence: Synthetic peptide
AWMCRNVYY

SEQ ID NO: 2158 - protein, 9 aa, Artificial Sequence
  Description of Artificial Sequence: Synthetic peptide
AWMCRSVYC

SEQ ID NO: 2159 - protein, 9 aa, Artificial Sequence
  Description of Artificial Sequence: Synthetic peptide
AWMCRTVYC

SEQ ID NO: 2160 - protein, 9 aa, Artificial Sequence
  Description of Artificial Sequence: Synthetic peptide
AWMFRNVYC

SEQ ID NO: 2161 - protein, 9 aa, Artificial Sequence
  Description of Artificial Sequence: Synthetic peptide
AWMRRNVYC

SEQ ID NO: 2162 - protein, 9 aa, Artificial Sequence
  Description of Artificial Sequence: Synthetic peptide
AWRCRNVYC

SEQ ID NO: 2163 - protein, 9 aa, Artificial Sequence
  Description of Artificial Sequence: Synthetic peptide
AWVCRNVYC

SEQ ID NO: 2164 - protein, 9 aa, Artificial Sequence
  Description of Artificial Sequence: Synthetic peptide
AWVMKDQQY

SEQ ID NO: 2165 - protein, 9 aa, Artificial Sequence
  Description of Artificial Sequence: Synthetic peptide
AWVMKNQRY

SEQ ID NO: 2166 - protein, 9 aa, Artificial Sequence
  Description of Artificial Sequence: Synthetic peptide
AYCHRAHNG

SEQ ID NO: 2167 - protein, 9 aa, Artificial Sequence
  Description of Artificial Sequence: Synthetic peptide
CAGIHLNEG

SEQ ID NO: 2168 - protein, 9 aa, Artificial Sequence
  Description of Artificial Sequence: Synthetic peptide
CAGIHLNES

SEQ ID NO: 2169 - protein, 9 aa, Artificial Sequence
  Description of Artificial Sequence: Synthetic peptide
CAGIHMNEA

SEQ ID NO: 2170 - protein, 9 aa, Artificial Sequence
  Description of Artificial Sequence: Synthetic peptide
CARFVARWP

SEQ ID NO: 2171 - protein, 9 aa, Artificial Sequence
  Description of Artificial Sequence: Synthetic peptide
CARFVEGWP

SEQ ID NO: 2172 - protein, 9 aa, Artificial Sequence
  Description of Artificial Sequence: Synthetic peptide
CARFVERWH

SEQ ID NO: 2173 - protein, 9 aa, Artificial Sequence
  Description of Artificial Sequence: Synthetic peptide
CARFVERWR

SEQ ID NO: 2174 - protein, 9 aa, Artificial Sequence
  Description of Artificial Sequence: Synthetic peptide
CAVIHLNEA

SEQ ID NO: 2175 - protein, 9 aa, Artificial Sequence
  Description of Artificial Sequence: Synthetic peptide
CAVPPSRYP

SEQ ID NO: 2176 - protein, 9 aa, Artificial Sequence
  Description of Artificial Sequence: Synthetic peptide
CAVPTARYP

SEQ ID NO: 2177 - protein, 9 aa, Artificial Sequence
  Description of Artificial Sequence: Synthetic peptide
CAVPTSRYL

SEQ ID NO: 2178 - protein, 9 aa, Artificial Sequence
  Description of Artificial Sequence: Synthetic peptide
CAVPTSRYT

SEQ ID NO: 2179 - protein, 9 aa, Artificial Sequence
  Description of Artificial Sequence: Synthetic peptide
CAVQKERYN

SEQ ID NO: 2180 - protein, 9 aa, Artificial Sequence
  Description of Artificial Sequence: Synthetic peptide
CAVVMMRQP

SEQ ID NO: 2181 - protein, 9 aa, Artificial Sequence
  Description of Artificial Sequence: Synthetic peptide
CCAKFKMCT

SEQ ID NO: 2182 - protein, 9 aa, Artificial Sequence
  Description of Artificial Sequence: Synthetic peptide
CCEDMKIWQ

SEQ ID NO: 2183 - protein, 9 aa, Artificial Sequence
  Description of Artificial Sequence: Synthetic peptide
CCVFRHHYC

SEQ ID NO: 2184 - protein, 9 aa, Artificial Sequence
  Description of Artificial Sequence: Synthetic peptide
CDIDYDLGF

SEQ ID NO: 2185 - protein, 9 aa, Artificial Sequence
  Description of Artificial Sequence: Synthetic peptide
CECIVQMAT

SEQ ID NO: 2186 - protein, 9 aa, Artificial Sequence
  Description of Artificial Sequence: Synthetic peptide
CECLVQMGT

SEQ ID NO: 2187 - protein, 9 aa, Artificial Sequence
  Description of Artificial Sequence: Synthetic peptide
CFDIIQRYD

SEQ ID NO: 2188 - protein, 9 aa, Artificial Sequence
  Description of Artificial Sequence: Synthetic peptide
CFKFKFRLV

SEQ ID NO: 2189 - protein, 9 aa, Artificial Sequence
  Description of Artificial Sequence: Synthetic peptide
CFKFKVRLA

SEQ ID NO: 2190 - protein, 9 aa, Artificial Sequence
  Description of Artificial Sequence: Synthetic peptide
CFKSKFSWQ

SEQ ID NO: 2191 - protein, 9 aa, Artificial Sequence
  Description of Artificial Sequence: Synthetic peptide
CFNIIERYD

SEQ ID NO: 2192 - protein, 9 aa, Artificial Sequence
  Description of Artificial Sequence: Synthetic peptide
CGEDMKMWQ

SEQ ID NO: 2193 - protein, 9 aa, Artificial Sequence
  Description of Artificial Sequence: Synthetic peptide
CGKDIKIWQ

SEQ ID NO: 2194 - protein, 9 aa, Artificial Sequence
  Description of Artificial Sequence: Synthetic peptide
CGKDMQIWQ

SEQ ID NO: 2195 - protein, 9 aa, Artificial Sequence
  Description of Artificial Sequence: Synthetic peptide
CHGRVAHHE

SEQ ID NO: 2196 - protein, 9 aa, Artificial Sequence
  Description of Artificial Sequence: Synthetic peptide
CHLRDCSPI

SEQ ID NO: 2197 - protein, 9 aa, Artificial Sequence
  Description of Artificial Sequence: Synthetic peptide
CHMDYDLGF

SEQ ID NO: 2198 - protein, 9 aa, Artificial Sequence
  Description of Artificial Sequence: Synthetic peptide
CHRFIQPSY

SEQ ID NO: 2199 - protein, 9 aa, Artificial Sequence
  Description of Artificial Sequence: Synthetic peptide
CHRFIQRSY

SEQ ID NO: 2200 - protein, 9 aa, Artificial Sequence
  Description of Artificial Sequence: Synthetic peptide
CHRYIQQSY

SEQ ID NO: 2201 - protein, 9 aa, Artificial Sequence
  Description of Artificial Sequence: Synthetic peptide
CHSRDCSPL

SEQ ID NO: 2202 - protein, 9 aa, Artificial Sequence
  Description of Artificial Sequence: Synthetic peptide
CIKSMFSWQ

SEQ ID NO: 2203 - protein, 9 aa, Artificial Sequence
  Description of Artificial Sequence: Synthetic peptide
CILQTRKGN

SEQ ID NO: 2204 - protein, 9 aa, Artificial Sequence
  Description of Artificial Sequence: Synthetic peptide
CKIGTQKGQ

SEQ ID NO: 2205 - protein, 9 aa, Artificial Sequence
  Description of Artificial Sequence: Synthetic peptide
CKIVAQKGQ

SEQ ID NO: 2206 - protein, 9 aa, Artificial Sequence
  Description of Artificial Sequence: Synthetic peptide
CKIVIQKGQ

SEQ ID NO: 2207 - protein, 9 aa, Artificial Sequence
  Description of Artificial Sequence: Synthetic peptide
CKIVTQKSQ

SEQ ID NO: 2208 - protein, 9 aa, Artificial Sequence
  Description of Artificial Sequence: Synthetic peptide
CKLVTQKGQ

SEQ ID NO: 2209 - protein, 9 aa, Artificial Sequence
  Description of Artificial Sequence: Synthetic peptide
CKMVTQKGQ

SEQ ID NO: 2210 - protein, 9 aa, Artificial Sequence
  Description of Artificial Sequence: Synthetic peptide
CKMYMHEAR

SEQ ID NO: 2211 - protein, 9 aa, Artificial Sequence
  Description of Artificial Sequence: Synthetic peptide
CKMYMQESR

SEQ ID NO: 2212 - protein, 9 aa, Artificial Sequence
  Description of Artificial Sequence: Synthetic peptide
CKMYMRESR

SEQ ID NO: 2213 - protein, 9 aa, Artificial Sequence
  Description of Artificial Sequence: Synthetic peptide
CLMALNRSG

SEQ ID NO: 2214 - protein, 9 aa, Artificial Sequence
  Description of Artificial Sequence: Synthetic peptide
CLMAMKRSG

SEQ ID NO: 2215 - protein, 9 aa, Artificial Sequence
  Description of Artificial Sequence: Synthetic peptide
CLMGLKRSG

SEQ ID NO: 2216 - protein, 9 aa, Artificial Sequence
  Description of Artificial Sequence: Synthetic peptide
CLSPFARAM

SEQ ID NO: 2217 - protein, 9 aa, Artificial Sequence
  Description of Artificial Sequence: Synthetic peptide
CLVALKRSG

SEQ ID NO: 2218 - protein, 9 aa, Artificial Sequence
  Description of Artificial Sequence: Synthetic peptide
CMKRYMMLP

SEQ ID NO: 2219 - protein, 9 aa, Artificial Sequence
  Description of Artificial Sequence: Synthetic peptide
CPDEPKWFP

SEQ ID NO: 2220 - protein, 9 aa, Artificial Sequence
  Description of Artificial Sequence: Synthetic peptide
CRKQGHGEK

SEQ ID NO: 2221 - protein, 9 aa, Artificial Sequence
  Description of Artificial Sequence: Synthetic peptide
CSIVRWMSP

SEQ ID NO: 2222 - protein, 9 aa, Artificial Sequence
  Description of Artificial Sequence: Synthetic peptide
CSKFIVAWE

SEQ ID NO: 2223 - protein, 9 aa, Artificial Sequence
  Description of Artificial Sequence: Synthetic peptide
CSKFIVGWE

SEQ ID NO: 2224 - protein, 9 aa, Artificial Sequence
  Description of Artificial Sequence: Synthetic peptide
CSKFIVVWE

SEQ ID NO: 2225 - protein, 9 aa, Artificial Sequence
  Description of Artificial Sequence: Synthetic peptide
CSSFRWMSP

SEQ ID NO: 2226 - protein, 9 aa, Artificial Sequence
  Description of Artificial Sequence: Synthetic peptide
CSSVRWMGP

SEQ ID NO: 2227 - protein, 9 aa, Artificial Sequence
  Description of Artificial Sequence: Synthetic peptide
CSSVRWMST

SEQ ID NO: 2228 - protein, 9 aa, Artificial Sequence
  Description of Artificial Sequence: Synthetic peptide
CTFVMMRQP

SEQ ID NO: 2229 - protein, 9 aa, Artificial Sequence
  Description of Artificial Sequence: Synthetic peptide
CTGQRGFTN

SEQ ID NO: 2230 - protein, 9 aa, Artificial Sequence
  Description of Artificial Sequence: Synthetic peptide
CTGVMMRQP

SEQ ID NO: 2231 - protein, 9 aa, Artificial Sequence
  Description of Artificial Sequence: Synthetic peptide
CTIRGNSSC

SEQ ID NO: 2232 - protein, 9 aa, Artificial Sequence
  Description of Artificial Sequence: Synthetic peptide
CTLRGNASC

SEQ ID NO: 2233 - protein, 9 aa, Artificial Sequence
  Description of Artificial Sequence: Synthetic peptide
CTVGMMRQP

SEQ ID NO: 2234 - protein, 9 aa, Artificial Sequence
  Description of Artificial Sequence: Synthetic peptide
CTVLMMRQP

SEQ ID NO: 2235 - protein, 9 aa, Artificial Sequence
  Description of Artificial Sequence: Synthetic peptide
CTVLMTRQP

SEQ ID NO: 2236 - protein, 9 aa, Artificial Sequence
  Description of Artificial Sequence: Synthetic peptide
CTVVLMRQP

SEQ ID NO: 2237 - protein, 9 aa, Artificial Sequence
  Description of Artificial Sequence: Synthetic peptide
CTVVMMREP

SEQ ID NO: 2238 - protein, 9 aa, Artificial Sequence
  Description of Artificial Sequence: Synthetic peptide
CTVVMVRQP

SEQ ID NO: 2239 - protein, 9 aa, Artificial Sequence
  Description of Artificial Sequence: Synthetic peptide
CVDTYRMWQ

SEQ ID NO: 2240 - protein, 9 aa, Artificial Sequence
  Description of Artificial Sequence: Synthetic peptide
CVHQRMHVT

SEQ ID NO: 2241 - protein, 9 aa, Artificial Sequence
  Description of Artificial Sequence: Synthetic peptide
CVIQTSRGT

SEQ ID NO: 2242 - protein, 9 aa, Artificial Sequence
  Description of Artificial Sequence: Synthetic peptide
CVKFKVRLV

SEQ ID NO: 2243 - protein, 9 aa, Artificial Sequence
  Description of Artificial Sequence: Synthetic peptide
CVLEFSRQW

SEQ ID NO: 2244 - protein, 9 aa, Artificial Sequence
  Description of Artificial Sequence: Synthetic peptide
CVLKFSREW

SEQ ID NO: 2245 - protein, 9 aa, Artificial Sequence
  Description of Artificial Sequence: Synthetic peptide
CVLKFSRHW

SEQ ID NO: 2246 - protein, 9 aa, Artificial Sequence
  Description of Artificial Sequence: Synthetic peptide
CVLKFSRQG

SEQ ID NO: 2247 - protein, 9 aa, Artificial Sequence
  Description of Artificial Sequence: Synthetic peptide
CVLKFSRQS

SEQ ID NO: 2248 - protein, 9 aa, Artificial Sequence
  Description of Artificial Sequence: Synthetic peptide
CVLKFSRRW

SEQ ID NO: 2249 - protein, 9 aa, Artificial Sequence
  Description of Artificial Sequence: Synthetic peptide
CVLKVSRQW

SEQ ID NO: 2250 - protein, 9 aa, Artificial Sequence
  Description of Artificial Sequence: Synthetic peptide
CVLKYSRQW

SEQ ID NO: 2251 - protein, 9 aa, Artificial Sequence
  Description of Artificial Sequence: Synthetic peptide
CVLQTSRGI

SEQ ID NO: 2252 - protein, 9 aa, Artificial Sequence
  Description of Artificial Sequence: Synthetic peptide
CVMQTSRGI

SEQ ID NO: 2253 - protein, 9 aa, Artificial Sequence
  Description of Artificial Sequence: Synthetic peptide
CVNKLSYEN

SEQ ID NO: 2254 - protein, 9 aa, Artificial Sequence
  Description of Artificial Sequence: Synthetic peptide
CVRHTENWR

SEQ ID NO: 2255 - protein, 9 aa, Artificial Sequence
  Description of Artificial Sequence: Synthetic peptide
CVSLFARAM

SEQ ID NO: 2256 - protein, 9 aa, Artificial Sequence
  Description of Artificial Sequence: Synthetic peptide
CVSPFARAK

SEQ ID NO: 2257 - protein, 9 aa, Artificial Sequence
  Description of Artificial Sequence: Synthetic peptide
CVSPFARAT

SEQ ID NO: 2258 - protein, 9 aa, Artificial Sequence
  Description of Artificial Sequence: Synthetic peptide
CVSPFARGM

SEQ ID NO: 2259 - protein, 9 aa, Artificial Sequence
  Description of Artificial Sequence: Synthetic peptide
CVSPFARSM

SEQ ID NO: 2260 - protein, 9 aa, Artificial Sequence
  Description of Artificial Sequence: Synthetic peptide
CVSPFARVM

SEQ ID NO: 2261 - protein, 9 aa, Artificial Sequence
  Description of Artificial Sequence: Synthetic peptide
CVSPFGRAM

SEQ ID NO: 2262 - protein, 9 aa, Artificial Sequence
  Description of Artificial Sequence: Synthetic peptide
CVSPFVRAM

SEQ ID NO: 2263 - protein, 9 aa, Artificial Sequence
  Description of Artificial Sequence: Synthetic peptide
CVSQFARAM

SEQ ID NO: 2264 - protein, 9 aa, Artificial Sequence
  Description of Artificial Sequence: Synthetic peptide
CVSSFARAM

SEQ ID NO: 2265 - protein, 9 aa, Artificial Sequence
  Description of Artificial Sequence: Synthetic peptide
CVTTRHKQG

SEQ ID NO: 2266 - protein, 9 aa, Artificial Sequence
  Description of Artificial Sequence: Synthetic peptide
CVWPFKFDF

SEQ ID NO: 2267 - protein, 9 aa, Artificial Sequence
  Description of Artificial Sequence: Synthetic peptide
CVWPMKFDF

SEQ ID NO: 2268 - protein, 9 aa, Artificial Sequence
  Description of Artificial Sequence: Synthetic peptide
CWDVTCQEN

SEQ ID NO: 2269 - protein, 9 aa, Artificial Sequence
  Description of Artificial Sequence: Synthetic peptide
CYGRVAHLE

SEQ ID NO: 2270 - protein, 9 aa, Artificial Sequence
  Description of Artificial Sequence: Synthetic peptide
CYRFIQQSY

SEQ ID NO: 2271 - protein, 9 aa, Artificial Sequence
  Description of Artificial Sequence: Synthetic peptide
CYVFRHHDC

SEQ ID NO: 2272 - protein, 9 aa, Artificial Sequence
  Description of Artificial Sequence: Synthetic peptide
DASSNDRNT

SEQ ID NO: 2273 - protein, 9 aa, Artificial Sequence
  Description of Artificial Sequence: Synthetic peptide
DCESPEKQN

SEQ ID NO: 2274 - protein, 9 aa, Artificial Sequence
  Description of Artificial Sequence: Synthetic peptide
DCESSEKPN

SEQ ID NO: 2275 - protein, 9 aa, Artificial Sequence
  Description of Artificial Sequence: Synthetic peptide
DCQSPEKPN

SEQ ID NO: 2276 - protein, 9 aa, Artificial Sequence
  Description of Artificial Sequence: Synthetic peptide
DEDVCKFVF

SEQ ID NO: 2277 - protein, 9 aa, Artificial Sequence
  Description of Artificial Sequence: Synthetic peptide
DEVACKFVF

SEQ ID NO: 2278 - protein, 9 aa, Artificial Sequence
  Description of Artificial Sequence: Synthetic peptide
DEVDCKFVF

SEQ ID NO: 2279 - protein, 9 aa, Artificial Sequence
  Description of Artificial Sequence: Synthetic peptide
DEVVCKFMF

SEQ ID NO: 2280 - protein, 9 aa, Artificial Sequence
  Description of Artificial Sequence: Synthetic peptide
DEVVCKIVF

SEQ ID NO: 2281 - protein, 9 aa, Artificial Sequence
  Description of Artificial Sequence: Synthetic peptide
DFKLFHNRE

SEQ ID NO: 2282 - protein, 9 aa, Artificial Sequence
  Description of Artificial Sequence: Synthetic peptide
DFKLFHNRP

SEQ ID NO: 2283 - protein, 9 aa, Artificial Sequence
  Description of Artificial Sequence: Synthetic peptide
DFKLFNNRA

SEQ ID NO: 2284 - protein, 9 aa, Artificial Sequence
  Description of Artificial Sequence: Synthetic peptide
DFKVFHNRA

SEQ ID NO: 2285 - protein, 9 aa, Artificial Sequence
  Description of Artificial Sequence: Synthetic peptide
DFQLFHNRA

SEQ ID NO: 2286 - protein, 9 aa, Artificial Sequence
  Description of Artificial Sequence: Synthetic peptide
DFRLFHNRA

SEQ ID NO: 2287 - protein, 9 aa, Artificial Sequence
  Description of Artificial Sequence: Synthetic peptide
DFRWFIRMN

SEQ ID NO: 2288 - protein, 9 aa, Artificial Sequence
  Description of Artificial Sequence: Synthetic peptide
DMKRPTRYN

SEQ ID NO: 2289 - protein, 9 aa, Artificial Sequence
  Description of Artificial Sequence: Synthetic peptide
DMQRPPRYN

SEQ ID NO: 2290 - protein, 9 aa, Artificial Sequence
  Description of Artificial Sequence: Synthetic peptide
DMQRPSRYN

SEQ ID NO: 2291 - protein, 9 aa, Artificial Sequence
  Description of Artificial Sequence: Synthetic peptide
DNNMIVRCV

SEQ ID NO: 2292 - protein, 9 aa, Artificial Sequence
  Description of Artificial Sequence: Synthetic peptide
DNQWMNSLE

SEQ ID NO: 2293 - protein, 9 aa, Artificial Sequence
  Description of Artificial Sequence: Synthetic peptide
DNSMIVRCA

SEQ ID NO: 2294 - protein, 9 aa, Artificial Sequence
  Description of Artificial Sequence: Synthetic peptide
DQPHLHRIG

SEQ ID NO: 2295 - protein, 9 aa, Artificial Sequence
  Description of Artificial Sequence: Synthetic peptide
DRCLVEWVS

SEQ ID NO: 2296 - protein, 9 aa, Artificial Sequence
  Description of Artificial Sequence: Synthetic peptide
DRCLVKWVA

SEQ ID NO: 2297 - protein, 9 aa, Artificial Sequence
  Description of Artificial Sequence: Synthetic peptide
DRMDFHFFF

SEQ ID NO: 2298 - protein, 9 aa, Artificial Sequence
  Description of Artificial Sequence: Synthetic peptide
DSKQIAKAM

SEQ ID NO: 2299 - protein, 9 aa, Artificial Sequence
  Description of Artificial Sequence: Synthetic peptide
DVCNVLGWK

SEQ ID NO: 2300 - protein, 9 aa, Artificial Sequence
  Description of Artificial Sequence: Synthetic peptide
DVDVVARPM

SEQ ID NO: 2301 - protein, 9 aa, Artificial Sequence
  Description of Artificial Sequence: Synthetic peptide
DVKLFHNRA

SEQ ID NO: 2302 - protein, 9 aa, Artificial Sequence
  Description of Artificial Sequence: Synthetic peptide
DVRGLNREY

SEQ ID NO: 2303 - protein, 9 aa, Artificial Sequence
  Description of Artificial Sequence: Synthetic peptide
DVRNFFDHC

SEQ ID NO: 2304 - protein, 9 aa, Artificial Sequence
  Description of Artificial Sequence: Synthetic peptide
DWHQYDGCE

SEQ ID NO: 2305 - protein, 9 aa, Artificial Sequence
  Description of Artificial Sequence: Synthetic peptide
DWNQHDGCE

SEQ ID NO: 2306 - protein, 9 aa, Artificial Sequence
  Description of Artificial Sequence: Synthetic peptide
DWNQYAGCE

SEQ ID NO: 2307 - protein, 9 aa, Artificial Sequence
  Description of Artificial Sequence: Synthetic peptide
DWNQYDGGE

SEQ ID NO: 2308 - protein, 9 aa, Artificial Sequence
  Description of Artificial Sequence: Synthetic peptide
DWNQYNGCE

SEQ ID NO: 2309 - protein, 9 aa, Artificial Sequence
  Description of Artificial Sequence: Synthetic peptide
DWSQYDGCE

SEQ ID NO: 2310 - protein, 9 aa, Artificial Sequence
  Description of Artificial Sequence: Synthetic peptide
DYKQTAKAM

SEQ ID NO: 2311 - protein, 9 aa, Artificial Sequence
  Description of Artificial Sequence: Synthetic peptide
ECAHVIKFN

SEQ ID NO: 2312 - protein, 9 aa, Artificial Sequence
  Description of Artificial Sequence: Synthetic peptide
ECHKMRCLE

SEQ ID NO: 2313 - protein, 9 aa, Artificial Sequence
  Description of Artificial Sequence: Synthetic peptide
ECHKMRCVE

SEQ ID NO: 2314 - protein, 9 aa, Artificial Sequence
  Description of Artificial Sequence: Synthetic peptide
ECNKMRCIE

SEQ ID NO: 2315 - protein, 9 aa, Artificial Sequence
  Description of Artificial Sequence: Synthetic peptide
EETKKVKHW

SEQ ID NO: 2316 - protein, 9 aa, Artificial Sequence
  Description of Artificial Sequence: Synthetic peptide
EHKKNINMH

SEQ ID NO: 2317 - protein, 9 aa, Artificial Sequence
  Description of Artificial Sequence: Synthetic peptide
EKRHISRAP

SEQ ID NO: 2318 - protein, 9 aa, Artificial Sequence
  Description of Artificial Sequence: Synthetic peptide
EQRHISRAR

SEQ ID NO: 2319 - protein, 9 aa, Artificial Sequence
  Description of Artificial Sequence: Synthetic peptide
EQRHISRTP

SEQ ID NO: 2320 - protein, 9 aa, Artificial Sequence
  Description of Artificial Sequence: Synthetic peptide
ERVIEHRAG

SEQ ID NO: 2321 - protein, 9 aa, Artificial Sequence
  Description of Artificial Sequence: Synthetic peptide
ERVLEHKAG

SEQ ID NO: 2322 - protein, 9 aa, Artificial Sequence
  Description of Artificial Sequence: Synthetic peptide
EYDVNMRQM

SEQ ID NO: 2323 - protein, 9 aa, Artificial Sequence
  Description of Artificial Sequence: Synthetic peptide
FGKDAFVSS

SEQ ID NO: 2324 - protein, 9 aa, Artificial Sequence
  Description of Artificial Sequence: Synthetic peptide
FGKDTFASS

SEQ ID NO: 2325 - protein, 9 aa, Artificial Sequence
  Description of Artificial Sequence: Synthetic peptide
FGKDTFLSS

SEQ ID NO: 2326 - protein, 9 aa, Artificial Sequence
  Description of Artificial Sequence: Synthetic peptide
FGKDTFVSA

SEQ ID NO: 2327 - protein, 9 aa, Artificial Sequence
  Description of Artificial Sequence: Synthetic peptide
FGKDTVVSS

SEQ ID NO: 2328 - protein, 9 aa, Artificial Sequence
  Description of Artificial Sequence: Synthetic peptide
FGMDTFVSS

SEQ ID NO: 2329 - protein, 9 aa, Artificial Sequence
  Description of Artificial Sequence: Synthetic peptide
FMMHRVMSD

SEQ ID NO: 2330 - protein, 9 aa, Artificial Sequence
  Description of Artificial Sequence: Synthetic peptide
FMMHRVMSG

SEQ ID NO: 2331 - protein, 9 aa, Artificial Sequence
  Description of Artificial Sequence: Synthetic peptide
FMMMAKTQA

SEQ ID NO: 2332 - protein, 9 aa, Artificial Sequence
  Description of Artificial Sequence: Synthetic peptide
FQKLRDVCF

SEQ ID NO: 2333 - protein, 9 aa, Artificial Sequence
  Description of Artificial Sequence: Synthetic peptide
FREQGHGEK

SEQ ID NO: 2334 - protein, 9 aa, Artificial Sequence
  Description of Artificial Sequence: Synthetic peptide
FRKEGHGEK

SEQ ID NO: 2335 - protein, 9 aa, Artificial Sequence
  Description of Artificial Sequence: Synthetic peptide
FRKPGHGEK

SEQ ID NO: 2336 - protein, 9 aa, Artificial Sequence
  Description of Artificial Sequence: Synthetic peptide
FRKQAHGEK

SEQ ID NO: 2337 - protein, 9 aa, Artificial Sequence
  Description of Artificial Sequence: Synthetic peptide
FRKQGHGAK

SEQ ID NO: 2338 - protein, 9 aa, Artificial Sequence
  Description of Artificial Sequence: Synthetic peptide
FRKQGHGEE

SEQ ID NO: 2339 - protein, 9 aa, Artificial Sequence
  Description of Artificial Sequence: Synthetic peptide
FRKQGHGQK

SEQ ID NO: 2340 - protein, 9 aa, Artificial Sequence
  Description of Artificial Sequence: Synthetic peptide
FRKQGNGEK

SEQ ID NO: 2341 - protein, 9 aa, Artificial Sequence
  Description of Artificial Sequence: Synthetic peptide
FRKQGPGEK

SEQ ID NO: 2342 - protein, 9 aa, Artificial Sequence
  Description of Artificial Sequence: Synthetic peptide
FRKQVHGEK

SEQ ID NO: 2343 - protein, 9 aa, Artificial Sequence
  Description of Artificial Sequence: Synthetic peptide
FRNQVHGEK

SEQ ID NO: 2344 - protein, 9 aa, Artificial Sequence
  Description of Artificial Sequence: Synthetic peptide
FSSCCRQKG

SEQ ID NO: 2345 - protein, 9 aa, Artificial Sequence
  Description of Artificial Sequence: Synthetic peptide
FTSNRNWEA

SEQ ID NO: 2346 - protein, 9 aa, Artificial Sequence
  Description of Artificial Sequence: Synthetic peptide
FTSNRNWQD

SEQ ID NO: 2347 - protein, 9 aa, Artificial Sequence
  Description of Artificial Sequence: Synthetic peptide
FTSNRNWQP

SEQ ID NO: 2348 - protein, 9 aa, Artificial Sequence
  Description of Artificial Sequence: Synthetic peptide
GAHHRCRMT

SEQ ID NO: 2349 - protein, 9 aa, Artificial Sequence
  Description of Artificial Sequence: Synthetic peptide
GAWMQGFHP

SEQ ID NO: 2350 - protein, 9 aa, Artificial Sequence
  Description of Artificial Sequence: Synthetic peptide
GCAKFQMCT

SEQ ID NO: 2351 - protein, 9 aa, Artificial Sequence
  Description of Artificial Sequence: Synthetic peptide
GCAKTRFEN

SEQ ID NO: 2352 - protein, 9 aa, Artificial Sequence
  Description of Artificial Sequence: Synthetic peptide
GCDKNRFEN

SEQ ID NO: 2353 - protein, 9 aa, Artificial Sequence
  Description of Artificial Sequence: Synthetic peptide
GCDKTRFAN

SEQ ID NO: 2354 - protein, 9 aa, Artificial Sequence
  Description of Artificial Sequence: Synthetic peptide
GCDKTRFES

SEQ ID NO: 2355 - protein, 9 aa, Artificial Sequence
  Description of Artificial Sequence: Synthetic peptide
GCDKTRFEY

SEQ ID NO: 2356 - protein, 9 aa, Artificial Sequence
  Description of Artificial Sequence: Synthetic peptide
GCHKMRCIE

SEQ ID NO: 2357 - protein, 9 aa, Artificial Sequence
  Description of Artificial Sequence: Synthetic peptide
GEGIRKMNN

SEQ ID NO: 2358 - protein, 9 aa, Artificial Sequence
  Description of Artificial Sequence: Synthetic peptide
GEGIRQMNT

SEQ ID NO: 2359 - protein, 9 aa, Artificial Sequence
  Description of Artificial Sequence: Synthetic peptide
GEGVRQMNN

SEQ ID NO: 2360 - protein, 9 aa, Artificial Sequence
  Description of Artificial Sequence: Synthetic peptide
GEVVCKFVF

SEQ ID NO: 2361 - protein, 9 aa, Artificial Sequence
  Description of Artificial Sequence: Synthetic peptide
GFDRQDAHR

SEQ ID NO: 2362 - protein, 9 aa, Artificial Sequence
  Description of Artificial Sequence: Synthetic peptide
GFKLFHNRA

SEQ ID NO: 2363 - protein, 9 aa, Artificial Sequence
  Description of Artificial Sequence: Synthetic peptide
GMKTRCDDD

SEQ ID NO: 2364 - protein, 9 aa, Artificial Sequence
  Description of Artificial Sequence: Synthetic peptide
GMKTRCDYA

SEQ ID NO: 2365 - protein, 9 aa, Artificial Sequence
  Description of Artificial Sequence: Synthetic peptide
GMKTRCDYV

SEQ ID NO: 2366 - protein, 9 aa, Artificial Sequence
  Description of Artificial Sequence: Synthetic peptide
GMKTRCHYD

SEQ ID NO: 2367 - protein, 9 aa, Artificial Sequence
  Description of Artificial Sequence: Synthetic peptide
GMKTRCNYD

SEQ ID NO: 2368 - protein, 9 aa, Artificial Sequence
  Description of Artificial Sequence: Synthetic peptide
GMKTRCVYD

SEQ ID NO: 2369 - protein, 9 aa, Artificial Sequence
  Description of Artificial Sequence: Synthetic peptide
GMQTRCDYD

SEQ ID NO: 2370 - protein, 9 aa, Artificial Sequence
  Description of Artificial Sequence: Synthetic peptide
GMRTRCDYD

SEQ ID NO: 2371 - protein, 9 aa, Artificial Sequence
  Description of Artificial Sequence: Synthetic peptide
GRAFVKIDT

SEQ ID NO: 2372 - protein, 9 aa, Artificial Sequence
  Description of Artificial Sequence: Synthetic peptide
GRICMQGMK

SEQ ID NO: 2373 - protein, 9 aa, Artificial Sequence
  Description of Artificial Sequence: Synthetic peptide
GRIFMLGMK

SEQ ID NO: 2374 - protein, 9 aa, Artificial Sequence
  Description of Artificial Sequence: Synthetic peptide
GRIFVKIDT

SEQ ID NO: 2375 - protein, 9 aa, Artificial Sequence
  Description of Artificial Sequence: Synthetic peptide
GRLFVKIDT

SEQ ID NO: 2376 - protein, 9 aa, Artificial Sequence
  Description of Artificial Sequence: Synthetic peptide
GRWFQIGTE

SEQ ID NO: 2377 - protein, 9 aa, Artificial Sequence
  Description of Artificial Sequence: Synthetic peptide
GTFKHTDHL

SEQ ID NO: 2378 - protein, 9 aa, Artificial Sequence
  Description of Artificial Sequence: Synthetic peptide
GVAYRESQA

SEQ ID NO: 2379 - protein, 9 aa, Artificial Sequence
  Description of Artificial Sequence: Synthetic peptide
GVDKLSYEN

SEQ ID NO: 2380 - protein, 9 aa, Artificial Sequence
  Description of Artificial Sequence: Synthetic peptide
GVHHRWRMT

SEQ ID NO: 2381 - protein, 9 aa, Artificial Sequence
  Description of Artificial Sequence: Synthetic peptide
GVKPRWGLF

SEQ ID NO: 2382 - protein, 9 aa, Artificial Sequence
  Description of Artificial Sequence: Synthetic peptide
GVKTRCDYD

SEQ ID NO: 2383 - protein, 9 aa, Artificial Sequence
  Description of Artificial Sequence: Synthetic peptide
GVWMQGIHP

SEQ ID NO: 2384 - protein, 9 aa, Artificial Sequence
  Description of Artificial Sequence: Synthetic peptide
GWEKKINFQ

SEQ ID NO: 2385 - protein, 9 aa, Artificial Sequence
  Description of Artificial Sequence: Synthetic peptide
GWEKKINGQ

SEQ ID NO: 2386 - protein, 9 aa, Artificial Sequence
  Description of Artificial Sequence: Synthetic peptide
GWEKKLNVQ

SEQ ID NO: 2387 - protein, 9 aa, Artificial Sequence
  Description of Artificial Sequence: Synthetic peptide
GWEKKVNVQ

SEQ ID NO: 2388 - protein, 9 aa, Artificial Sequence
  Description of Artificial Sequence: Synthetic peptide
GWEKTINVQ

SEQ ID NO: 2389 - protein, 9 aa, Artificial Sequence
  Description of Artificial Sequence: Synthetic peptide
GWFFKNYYC

SEQ ID NO: 2390 - protein, 9 aa, Artificial Sequence
  Description of Artificial Sequence: Synthetic peptide
GWKKKINVQ

SEQ ID NO: 2391 - protein, 9 aa, Artificial Sequence
  Description of Artificial Sequence: Synthetic peptide
GWMCRNVYC

SEQ ID NO: 2392 - protein, 9 aa, Artificial Sequence
  Description of Artificial Sequence: Synthetic peptide
GWQKKINVQ

SEQ ID NO: 2393 - protein, 9 aa, Artificial Sequence
  Description of Artificial Sequence: Synthetic peptide
HACCLLQQY

SEQ ID NO: 2394 - protein, 9 aa, Artificial Sequence
  Description of Artificial Sequence: Synthetic peptide
HACSLLKQY

SEQ ID NO: 2395 - protein, 9 aa, Artificial Sequence
  Description of Artificial Sequence: Synthetic peptide
HACSLLQQF

SEQ ID NO: 2396 - protein, 9 aa, Artificial Sequence
  Description of Artificial Sequence: Synthetic peptide
HIEWVSMQR

SEQ ID NO: 2397 - protein, 9 aa, Artificial Sequence
  Description of Artificial Sequence: Synthetic peptide
HIQWVSMHR

SEQ ID NO: 2398 - protein, 9 aa, Artificial Sequence
  Description of Artificial Sequence: Synthetic peptide
HMEWVSMHR

SEQ ID NO: 2399 - protein, 9 aa, Artificial Sequence
  Description of Artificial Sequence: Synthetic peptide
HRADIMCWN

SEQ ID NO: 2400 - protein, 9 aa, Artificial Sequence
  Description of Artificial Sequence: Synthetic peptide
HREAIMCWN

SEQ ID NO: 2401 - protein, 9 aa, Artificial Sequence
  Description of Artificial Sequence: Synthetic peptide
HREDIMCGN

SEQ ID NO: 2402 - protein, 9 aa, Artificial Sequence
  Description of Artificial Sequence: Synthetic peptide
HREDIMCWD

SEQ ID NO: 2403 - protein, 9 aa, Artificial Sequence
  Description of Artificial Sequence: Synthetic peptide
HREDIMCWI

SEQ ID NO: 2404 - protein, 9 aa, Artificial Sequence
  Description of Artificial Sequence: Synthetic peptide
HREDIRCWN

SEQ ID NO: 2405 - protein, 9 aa, Artificial Sequence
  Description of Artificial Sequence: Synthetic peptide
HRGDIMCWN

SEQ ID NO: 2406 - protein, 9 aa, Artificial Sequence
  Description of Artificial Sequence: Synthetic peptide
HRKDIMCWN

SEQ ID NO: 2407 - protein, 9 aa, Artificial Sequence
  Description of Artificial Sequence: Synthetic peptide
HRQDIMCWN

SEQ ID NO: 2408 - protein, 9 aa, Artificial Sequence
  Description of Artificial Sequence: Synthetic peptide
HRTETECWC

SEQ ID NO: 2409 - protein, 9 aa, Artificial Sequence
  Description of Artificial Sequence: Synthetic peptide
HSCSLLQQY

SEQ ID NO: 2410 - protein, 9 aa, Artificial Sequence
  Description of Artificial Sequence: Synthetic peptide
HVGALTRSD

SEQ ID NO: 2411 - protein, 9 aa, Artificial Sequence
  Description of Artificial Sequence: Synthetic peptide
IARHIDHDL

SEQ ID NO: 2412 - protein, 9 aa, Artificial Sequence
  Description of Artificial Sequence: Synthetic peptide
IAWHVDHDL

SEQ ID NO: 2413 - protein, 9 aa, Artificial Sequence
  Description of Artificial Sequence: Synthetic peptide
ICHLRHIAA

SEQ ID NO: 2414 - protein, 9 aa, Artificial Sequence
  Description of Artificial Sequence: Synthetic peptide
ICHLRHIPV

SEQ ID NO: 2415 - protein, 9 aa, Artificial Sequence
  Description of Artificial Sequence: Synthetic peptide
ICHLRHISG

SEQ ID NO: 2416 - protein, 9 aa, Artificial Sequence
  Description of Artificial Sequence: Synthetic peptide
ICHLRHNAG

SEQ ID NO: 2417 - protein, 9 aa, Artificial Sequence
  Description of Artificial Sequence: Synthetic peptide
ICHLRHVAG

SEQ ID NO: 2418 - protein, 9 aa, Artificial Sequence
  Description of Artificial Sequence: Synthetic peptide
ICTTLIQGM

SEQ ID NO: 2419 - protein, 9 aa, Artificial Sequence
  Description of Artificial Sequence: Synthetic peptide
ICTTQIKGM

SEQ ID NO: 2420 - protein, 9 aa, Artificial Sequence
  Description of Artificial Sequence: Synthetic peptide
ICYKWWVMF

SEQ ID NO: 2421 - protein, 9 aa, Artificial Sequence
  Description of Artificial Sequence: Synthetic peptide
IDAALDMSW

SEQ ID NO: 2422 - protein, 9 aa, Artificial Sequence
  Description of Artificial Sequence: Synthetic peptide
IEVKYWNRH

SEQ ID NO: 2423 - protein, 9 aa, Artificial Sequence
  Description of Artificial Sequence: Synthetic peptide
IEYVRSCPW

SEQ ID NO: 2424 - protein, 9 aa, Artificial Sequence
  Description of Artificial Sequence: Synthetic peptide
IFMAFDHLE

SEQ ID NO: 2425 - protein, 9 aa, Artificial Sequence
  Description of Artificial Sequence: Synthetic peptide
IGMDKPVDA

SEQ ID NO: 2426 - protein, 9 aa, Artificial Sequence
  Description of Artificial Sequence: Synthetic peptide
IHMKPQESP

SEQ ID NO: 2427 - protein, 9 aa, Artificial Sequence
  Description of Artificial Sequence: Synthetic peptide
IHMKQQDSP

SEQ ID NO: 2428 - protein, 9 aa, Artificial Sequence
  Description of Artificial Sequence: Synthetic peptide
IHMKQQESA

SEQ ID NO: 2429 - protein, 9 aa, Artificial Sequence
  Description of Artificial Sequence: Synthetic peptide
IHMKQQEST

SEQ ID NO: 2430 - protein, 9 aa, Artificial Sequence
  Description of Artificial Sequence: Synthetic peptide
IHMKQQQSP

SEQ ID NO: 2431 - protein, 9 aa, Artificial Sequence
  Description of Artificial Sequence: Synthetic peptide
IHMKQRESP

SEQ ID NO: 2432 - protein, 9 aa, Artificial Sequence
  Description of Artificial Sequence: Synthetic peptide
IHMKTIVGE

SEQ ID NO: 2433 - protein, 9 aa, Artificial Sequence
  Description of Artificial Sequence: Synthetic peptide
IHMRQQESP

SEQ ID NO: 2434 - protein, 9 aa, Artificial Sequence
  Description of Artificial Sequence: Synthetic peptide
IILHNMKSW

SEQ ID NO: 2435 - protein, 9 aa, Artificial Sequence
  Description of Artificial Sequence: Synthetic peptide
IMLALMHED

SEQ ID NO: 2436 - protein, 9 aa, Artificial Sequence
  Description of Artificial Sequence: Synthetic peptide
IMLHRVMSD

SEQ ID NO: 2437 - protein, 9 aa, Artificial Sequence
  Description of Artificial Sequence: Synthetic peptide
IMMAHWFAH

SEQ ID NO: 2438 - protein, 9 aa, Artificial Sequence
  Description of Artificial Sequence: Synthetic peptide
IMMAQWFAQ

SEQ ID NO: 2439 - protein, 9 aa, Artificial Sequence
  Description of Artificial Sequence: Synthetic peptide
IMMAQWFGH

SEQ ID NO: 2440 - protein, 9 aa, Artificial Sequence
  Description of Artificial Sequence: Synthetic peptide
IMMAQWFSH

SEQ ID NO: 2441 - protein, 9 aa, Artificial Sequence
  Description of Artificial Sequence: Synthetic peptide
IMMAQWIAH

SEQ ID NO: 2442 - protein, 9 aa, Artificial Sequence
  Description of Artificial Sequence: Synthetic peptide
IMMHRMMSD

SEQ ID NO: 2443 - protein, 9 aa, Artificial Sequence
  Description of Artificial Sequence: Synthetic peptide
IMMHRVMSE

SEQ ID NO: 2444 - protein, 9 aa, Artificial Sequence
  Description of Artificial Sequence: Synthetic peptide
IMMHRVMSV

SEQ ID NO: 2445 - protein, 9 aa, Artificial Sequence
  Description of Artificial Sequence: Synthetic peptide
IMMHRVMSY

SEQ ID NO: 2446 - protein, 9 aa, Artificial Sequence
  Description of Artificial Sequence: Synthetic peptide
IMMHRVMYD

SEQ ID NO: 2447 - protein, 9 aa, Artificial Sequence
  Description of Artificial Sequence: Synthetic peptide
IMMLRVMSD

SEQ ID NO: 2448 - protein, 9 aa, Artificial Sequence
  Description of Artificial Sequence: Synthetic peptide
IMMNRVMSD

SEQ ID NO: 2449 - protein, 9 aa, Artificial Sequence
  Description of Artificial Sequence: Synthetic peptide
IMMQRVMSD

SEQ ID NO: 2450 - protein, 9 aa, Artificial Sequence
  Description of Artificial Sequence: Synthetic peptide
IMMVQWFAH

SEQ ID NO: 2451 - protein, 9 aa, Artificial Sequence
  Description of Artificial Sequence: Synthetic peptide
IMMYRVMSD

SEQ ID NO: 2452 - protein, 9 aa, Artificial Sequence
  Description of Artificial Sequence: Synthetic peptide
IMVALMHEG

SEQ ID NO: 2453 - protein, 9 aa, Artificial Sequence
  Description of Artificial Sequence: Synthetic peptide
IVCRMWHQP

SEQ ID NO: 2454 - protein, 9 aa, Artificial Sequence
  Description of Artificial Sequence: Synthetic peptide
IWHKWWVMF

SEQ ID NO: 2455 - protein, 9 aa, Artificial Sequence
  Description of Artificial Sequence: Synthetic peptide
IWYKWWAMF

SEQ ID NO: 2456 - protein, 9 aa, Artificial Sequence
  Description of Artificial Sequence: Synthetic peptide
IWYKWWLMF

SEQ ID NO: 2457 - protein, 9 aa, Artificial Sequence
  Description of Artificial Sequence: Synthetic peptide
IWYKWWVMC

SEQ ID NO: 2458 - protein, 9 aa, Artificial Sequence
  Description of Artificial Sequence: Synthetic peptide
IWYKWWVMV

SEQ ID NO: 2459 - protein, 9 aa, Artificial Sequence
  Description of Artificial Sequence: Synthetic peptide
IWYKWWVMY

SEQ ID NO: 2460 - protein, 9 aa, Artificial Sequence
  Description of Artificial Sequence: Synthetic peptide
KAIPENSNR

SEQ ID NO: 2461 - protein, 9 aa, Artificial Sequence
  Description of Artificial Sequence: Synthetic peptide
KALEVHFQK

SEQ ID NO: 2462 - protein, 9 aa, Artificial Sequence
  Description of Artificial Sequence: Synthetic peptide
KAMEFHFQK

SEQ ID NO: 2463 - protein, 9 aa, Artificial Sequence
  Description of Artificial Sequence: Synthetic peptide
KAMPEPVTE

SEQ ID NO: 2464 - protein, 9 aa, Artificial Sequence
  Description of Artificial Sequence: Synthetic peptide
KAQDFATEN

SEQ ID NO: 2465 - protein, 9 aa, Artificial Sequence
  Description of Artificial Sequence: Synthetic peptide
KAQEFATED

SEQ ID NO: 2466 - protein, 9 aa, Artificial Sequence
  Description of Artificial Sequence: Synthetic peptide
KAQEFATEH

SEQ ID NO: 2467 - protein, 9 aa, Artificial Sequence
  Description of Artificial Sequence: Synthetic peptide
KAQKFATEN

SEQ ID NO: 2468 - protein, 9 aa, Artificial Sequence
  Description of Artificial Sequence: Synthetic peptide
KAQQFATEN

SEQ ID NO: 2469 - protein, 9 aa, Artificial Sequence
  Description of Artificial Sequence: Synthetic peptide
KAREFATEN

SEQ ID NO: 2470 - protein, 9 aa, Artificial Sequence
  Description of Artificial Sequence: Synthetic peptide
KASTEAGDK

SEQ ID NO: 2471 - protein, 9 aa, Artificial Sequence
  Description of Artificial Sequence: Synthetic peptide
KATTEASDK

SEQ ID NO: 2472 - protein, 9 aa, Artificial Sequence
  Description of Artificial Sequence: Synthetic peptide
KCDKPMLEP

SEQ ID NO: 2473 - protein, 9 aa, Artificial Sequence
  Description of Artificial Sequence: Synthetic peptide
KCDKPMLQP

SEQ ID NO: 2474 - protein, 9 aa, Artificial Sequence
  Description of Artificial Sequence: Synthetic peptide
KCDTFRGME

SEQ ID NO: 2475 - protein, 9 aa, Artificial Sequence
  Description of Artificial Sequence: Synthetic peptide
KCEPFRGME

SEQ ID NO: 2476 - protein, 9 aa, Artificial Sequence
  Description of Artificial Sequence: Synthetic peptide
KCETFLGME

SEQ ID NO: 2477 - protein, 9 aa, Artificial Sequence
  Description of Artificial Sequence: Synthetic peptide
KCGILYYQG

SEQ ID NO: 2478 - protein, 9 aa, Artificial Sequence
  Description of Artificial Sequence: Synthetic peptide
KCGNLYYQG

SEQ ID NO: 2479 - protein, 9 aa, Artificial Sequence
  Description of Artificial Sequence: Synthetic peptide
KCGSLNYQG

SEQ ID NO: 2480 - protein, 9 aa, Artificial Sequence
  Description of Artificial Sequence: Synthetic peptide
KCGSLYCQG

SEQ ID NO: 2481 - protein, 9 aa, Artificial Sequence
  Description of Artificial Sequence: Synthetic peptide
KCGSLYHQG

SEQ ID NO: 2482 - protein, 9 aa, Artificial Sequence
  Description of Artificial Sequence: Synthetic peptide
KCGSLYSQG

SEQ ID NO: 2483 - protein, 9 aa, Artificial Sequence
  Description of Artificial Sequence: Synthetic peptide
KCGSLYYQV

SEQ ID NO: 2484 - protein, 9 aa, Artificial Sequence
  Description of Artificial Sequence: Synthetic peptide
KCGSMYYQG

SEQ ID NO: 2485 - protein, 9 aa, Artificial Sequence
  Description of Artificial Sequence: Synthetic peptide
KCGTLYYQG

SEQ ID NO: 2486 - protein, 9 aa, Artificial Sequence
  Description of Artificial Sequence: Synthetic peptide
KCYFMMRQN

SEQ ID NO: 2487 - protein, 9 aa, Artificial Sequence
  Description of Artificial Sequence: Synthetic peptide
KDCQYIGAC

SEQ ID NO: 2488 - protein, 9 aa, Artificial Sequence
  Description of Artificial Sequence: Synthetic peptide
KDCQYIGSW

SEQ ID NO: 2489 - protein, 9 aa, Artificial Sequence
  Description of Artificial Sequence: Synthetic peptide
KDCQYLGAW

SEQ ID NO: 2490 - protein, 9 aa, Artificial Sequence
  Description of Artificial Sequence: Synthetic peptide
KFELNQTAV

SEQ ID NO: 2491 - protein, 9 aa, Artificial Sequence
  Description of Artificial Sequence: Synthetic peptide
KFELNRKAV

SEQ ID NO: 2492 - protein, 9 aa, Artificial Sequence
  Description of Artificial Sequence: Synthetic peptide
KFETFRGME

SEQ ID NO: 2493 - protein, 9 aa, Artificial Sequence
  Description of Artificial Sequence: Synthetic peptide
KFGLNQKAV

SEQ ID NO: 2494 - protein, 9 aa, Artificial Sequence
  Description of Artificial Sequence: Synthetic peptide
KFIDVWDAR

SEQ ID NO: 2495 - protein, 9 aa, Artificial Sequence
  Description of Artificial Sequence: Synthetic peptide
KGEYQADAP

SEQ ID NO: 2496 - protein, 9 aa, Artificial Sequence
  Description of Artificial Sequence: Synthetic peptide
KHDPMCGQL

SEQ ID NO: 2497 - protein, 9 aa, Artificial Sequence
  Description of Artificial Sequence: Synthetic peptide
KHEQMCVQL

SEQ ID NO: 2498 - protein, 9 aa, Artificial Sequence
  Description of Artificial Sequence: Synthetic peptide
KHERMCVQL

SEQ ID NO: 2499 - protein, 9 aa, Artificial Sequence
  Description of Artificial Sequence: Synthetic peptide
KHETMCVQL

SEQ ID NO: 2500 - protein, 9 aa, Artificial Sequence
  Description of Artificial Sequence: Synthetic peptide
KHKINAVER

SEQ ID NO: 2501 - protein, 9 aa, Artificial Sequence
  Description of Artificial Sequence: Synthetic peptide
KHKPMCVQL

SEQ ID NO: 2502 - protein, 9 aa, Artificial Sequence
  Description of Artificial Sequence: Synthetic peptide
KHKYEDPMV

SEQ ID NO: 2503 - protein, 9 aa, Artificial Sequence
  Description of Artificial Sequence: Synthetic peptide
KHKYEDTMG

SEQ ID NO: 2504 - protein, 9 aa, Artificial Sequence
  Description of Artificial Sequence: Synthetic peptide
KHQINTVER

SEQ ID NO: 2505 - protein, 9 aa, Artificial Sequence
  Description of Artificial Sequence: Synthetic peptide
KHQPMCVQL

SEQ ID NO: 2506 - protein, 9 aa, Artificial Sequence
  Description of Artificial Sequence: Synthetic peptide
KHSSHMEAC

SEQ ID NO: 2507 - protein, 9 aa, Artificial Sequence
  Description of Artificial Sequence: Synthetic peptide
KIHYHFEDK

SEQ ID NO: 2508 - protein, 9 aa, Artificial Sequence
  Description of Artificial Sequence: Synthetic peptide
KINYHFEDE

SEQ ID NO: 2509 - protein, 9 aa, Artificial Sequence
  Description of Artificial Sequence: Synthetic peptide
KINYHFEDQ

SEQ ID NO: 2510 - protein, 9 aa, Artificial Sequence
  Description of Artificial Sequence: Synthetic peptide
KISGLNDAT

SEQ ID NO: 2511 - protein, 9 aa, Artificial Sequence
  Description of Artificial Sequence: Synthetic peptide
KKDEANGQT

SEQ ID NO: 2512 - protein, 9 aa, Artificial Sequence
  Description of Artificial Sequence: Synthetic peptide
KKDPMQTYP

SEQ ID NO: 2513 - protein, 9 aa, Artificial Sequence
  Description of Artificial Sequence: Synthetic peptide
KMGTEVSQQ

SEQ ID NO: 2514 - protein, 9 aa, Artificial Sequence
  Description of Artificial Sequence: Synthetic peptide
KMRMIFRKD

SEQ ID NO: 2515 - protein, 9 aa, Artificial Sequence
  Description of Artificial Sequence: Synthetic peptide
KNEPMCVQL

SEQ ID NO: 2516 - protein, 9 aa, Artificial Sequence
  Description of Artificial Sequence: Synthetic peptide
KPVEYASAP

SEQ ID NO: 2517 - protein, 9 aa, Artificial Sequence
  Description of Artificial Sequence: Synthetic peptide
KQDFHHGLA

SEQ ID NO: 2518 - protein, 9 aa, Artificial Sequence
  Description of Artificial Sequence: Synthetic peptide
KQLYHIPTC

SEQ ID NO: 2519 - protein, 9 aa, Artificial Sequence
  Description of Artificial Sequence: Synthetic peptide
KQQYVTMNA

SEQ ID NO: 2520 - protein, 9 aa, Artificial Sequence
  Description of Artificial Sequence: Synthetic peptide
KQRDISRAP

SEQ ID NO: 2521 - protein, 9 aa, Artificial Sequence
  Description of Artificial Sequence: Synthetic peptide
KQRHISRAP

SEQ ID NO: 2522 - protein, 9 aa, Artificial Sequence
  Description of Artificial Sequence: Synthetic peptide
KQSAHMEAC

SEQ ID NO: 2523 - protein, 9 aa, Artificial Sequence
  Description of Artificial Sequence: Synthetic peptide
KQSPHMEAC

SEQ ID NO: 2524 - protein, 9 aa, Artificial Sequence
  Description of Artificial Sequence: Synthetic peptide
KQSSHMEAF

SEQ ID NO: 2525 - protein, 9 aa, Artificial Sequence
  Description of Artificial Sequence: Synthetic peptide
KRDLANGQF

SEQ ID NO: 2526 - protein, 9 aa, Artificial Sequence
  Description of Artificial Sequence: Synthetic peptide
KRIIEHPCA

SEQ ID NO: 2527 - protein, 9 aa, Artificial Sequence
  Description of Artificial Sequence: Synthetic peptide
KRMDFHFFF

SEQ ID NO: 2528 - protein, 9 aa, Artificial Sequence
  Description of Artificial Sequence: Synthetic peptide
KRSSHMEAC

SEQ ID NO: 2529 - protein, 9 aa, Artificial Sequence
  Description of Artificial Sequence: Synthetic peptide
KRVIEHKAG

SEQ ID NO: 2530 - protein, 9 aa, Artificial Sequence
  Description of Artificial Sequence: Synthetic peptide
KRYFWMSYY

SEQ ID NO: 2531 - protein, 9 aa, Artificial Sequence
  Description of Artificial Sequence: Synthetic peptide
KSMLEDRIC

SEQ ID NO: 2532 - protein, 9 aa, Artificial Sequence
  Description of Artificial Sequence: Synthetic peptide
KSMWEARIC

SEQ ID NO: 2533 - protein, 9 aa, Artificial Sequence
  Description of Artificial Sequence: Synthetic peptide
KSMWEDRIG

SEQ ID NO: 2534 - protein, 9 aa, Artificial Sequence
  Description of Artificial Sequence: Synthetic peptide
KSMWEDRTC

SEQ ID NO: 2535 - protein, 9 aa, Artificial Sequence
  Description of Artificial Sequence: Synthetic peptide
KSMWEERIC

SEQ ID NO: 2536 - protein, 9 aa, Artificial Sequence
  Description of Artificial Sequence: Synthetic peptide
KSMWENRIC

SEQ ID NO: 2537 - protein, 9 aa, Artificial Sequence
  Description of Artificial Sequence: Synthetic peptide
KSMWEYRIC

SEQ ID NO: 2538 - protein, 9 aa, Artificial Sequence
  Description of Artificial Sequence: Synthetic peptide
KSVWEDRIC

SEQ ID NO: 2539 - protein, 9 aa, Artificial Sequence
  Description of Artificial Sequence: Synthetic peptide
KTFFWMSYY

SEQ ID NO: 2540 - protein, 9 aa, Artificial Sequence
  Description of Artificial Sequence: Synthetic peptide
KTFSESTCR

SEQ ID NO: 2541 - protein, 9 aa, Artificial Sequence
  Description of Artificial Sequence: Synthetic peptide
KTMEVHFQK

SEQ ID NO: 2542 - protein, 9 aa, Artificial Sequence
  Description of Artificial Sequence: Synthetic peptide
KTQWDEAIV

SEQ ID NO: 2543 - protein, 9 aa, Artificial Sequence
  Description of Artificial Sequence: Synthetic peptide
KTYFADTIC

SEQ ID NO: 2544 - protein, 9 aa, Artificial Sequence
  Description of Artificial Sequence: Synthetic peptide
KTYFADTIS

SEQ ID NO: 2545 - protein, 9 aa, Artificial Sequence
  Description of Artificial Sequence: Synthetic peptide
KTYFADTMG

SEQ ID NO: 2546 - protein, 9 aa, Artificial Sequence
  Description of Artificial Sequence: Synthetic peptide
KTYFADTVG

SEQ ID NO: 2547 - protein, 9 aa, Artificial Sequence
  Description of Artificial Sequence: Synthetic peptide
KTYFAETIG

SEQ ID NO: 2548 - protein, 9 aa, Artificial Sequence
  Description of Artificial Sequence: Synthetic peptide
KTYFANTIG

SEQ ID NO: 2549 - protein, 9 aa, Artificial Sequence
  Description of Artificial Sequence: Synthetic peptide
KTYFSDTIG

SEQ ID NO: 2550 - protein, 9 aa, Artificial Sequence
  Description of Artificial Sequence: Synthetic peptide
KTYFWMSYC

SEQ ID NO: 2551 - protein, 9 aa, Artificial Sequence
  Description of Artificial Sequence: Synthetic peptide
KTYFWMSYS

SEQ ID NO: 2552 - protein, 9 aa, Artificial Sequence
  Description of Artificial Sequence: Synthetic peptide
KTYFWTSYY

SEQ ID NO: 2553 - protein, 9 aa, Artificial Sequence
  Description of Artificial Sequence: Synthetic peptide
KTYFWVSYY

SEQ ID NO: 2554 - protein, 9 aa, Artificial Sequence
  Description of Artificial Sequence: Synthetic peptide
KVDVFTVKD

SEQ ID NO: 2555 - protein, 9 aa, Artificial Sequence
  Description of Artificial Sequence: Synthetic peptide
KVDVITFKD

SEQ ID NO: 2556 - protein, 9 aa, Artificial Sequence
  Description of Artificial Sequence: Synthetic peptide
KVDVITVQD

SEQ ID NO: 2557 - protein, 9 aa, Artificial Sequence
  Description of Artificial Sequence: Synthetic peptide
KVDVVTVKD

SEQ ID NO: 2558 - protein, 9 aa, Artificial Sequence
  Description of Artificial Sequence: Synthetic peptide
KVILDSFRR

SEQ ID NO: 2559 - protein, 9 aa, Artificial Sequence
  Description of Artificial Sequence: Synthetic peptide
KVMPEPVPE

SEQ ID NO: 2560 - protein, 9 aa, Artificial Sequence
  Description of Artificial Sequence: Synthetic peptide
KVMPEPVTA

SEQ ID NO: 2561 - protein, 9 aa, Artificial Sequence
  Description of Artificial Sequence: Synthetic peptide
KVMPEPVTV

SEQ ID NO: 2562 - protein, 9 aa, Artificial Sequence
  Description of Artificial Sequence: Synthetic peptide
KVMPVPVTE

SEQ ID NO: 2563 - protein, 9 aa, Artificial Sequence
  Description of Artificial Sequence: Synthetic peptide
KVMSEPVTE

SEQ ID NO: 2564 - protein, 9 aa, Artificial Sequence
  Description of Artificial Sequence: Synthetic peptide
KVTWMDLED

SEQ ID NO: 2565 - protein, 9 aa, Artificial Sequence
  Description of Artificial Sequence: Synthetic peptide
KVVLDSFRQ

SEQ ID NO: 2566 - protein, 9 aa, Artificial Sequence
  Description of Artificial Sequence: Synthetic peptide
KVYMEPANW

SEQ ID NO: 2567 - protein, 9 aa, Artificial Sequence
  Description of Artificial Sequence: Synthetic peptide
KYEFLIKYI

SEQ ID NO: 2568 - protein, 9 aa, Artificial Sequence
  Description of Artificial Sequence: Synthetic peptide
KYEFLLKHI

SEQ ID NO: 2569 - protein, 9 aa, Artificial Sequence
  Description of Artificial Sequence: Synthetic peptide
KYEFLLKYL

SEQ ID NO: 2570 - protein, 9 aa, Artificial Sequence
  Description of Artificial Sequence: Synthetic peptide
KYEFLLRYI

SEQ ID NO: 2571 - protein, 9 aa, Artificial Sequence
  Description of Artificial Sequence: Synthetic peptide
KYEILNCNP

SEQ ID NO: 2572 - protein, 9 aa, Artificial Sequence
  Description of Artificial Sequence: Synthetic peptide
KYEVLLKYI

SEQ ID NO: 2573 - protein, 9 aa, Artificial Sequence
  Description of Artificial Sequence: Synthetic peptide
KYEYLLKYI

SEQ ID NO: 2574 - protein, 9 aa, Artificial Sequence
  Description of Artificial Sequence: Synthetic peptide
KYIAVWDAR

SEQ ID NO: 2575 - protein, 9 aa, Artificial Sequence
  Description of Artificial Sequence: Synthetic peptide
KYIDFWDAR

SEQ ID NO: 2576 - protein, 9 aa, Artificial Sequence
  Description of Artificial Sequence: Synthetic peptide
KYIDIWDAR

SEQ ID NO: 2577 - protein, 9 aa, Artificial Sequence
  Description of Artificial Sequence: Synthetic peptide
KYIDVWEAR

SEQ ID NO: 2578 - protein, 9 aa, Artificial Sequence
  Description of Artificial Sequence: Synthetic peptide
KYKAPTINP

SEQ ID NO: 2579 - protein, 9 aa, Artificial Sequence
  Description of Artificial Sequence: Synthetic peptide
KYKHPTINP

SEQ ID NO: 2580 - protein, 9 aa, Artificial Sequence
  Description of Artificial Sequence: Synthetic peptide
KYKPLTINP

SEQ ID NO: 2581 - protein, 9 aa, Artificial Sequence
  Description of Artificial Sequence: Synthetic peptide
KYKPPTMNP

SEQ ID NO: 2582 - protein, 9 aa, Artificial Sequence
  Description of Artificial Sequence: Synthetic peptide
KYKRPTINP

SEQ ID NO: 2583 - protein, 9 aa, Artificial Sequence
  Description of Artificial Sequence: Synthetic peptide
KYQPPTINP

SEQ ID NO: 2584 - protein, 9 aa, Artificial Sequence
  Description of Artificial Sequence: Synthetic peptide
LAVDKSRLL

SEQ ID NO: 2585 - protein, 9 aa, Artificial Sequence
  Description of Artificial Sequence: Synthetic peptide
LCGLMPRPA

SEQ ID NO: 2586 - protein, 9 aa, Artificial Sequence
  Description of Artificial Sequence: Synthetic peptide
LCGVMPRPG

SEQ ID NO: 2587 - protein, 9 aa, Artificial Sequence
  Description of Artificial Sequence: Synthetic peptide
LFKPEDEDR

SEQ ID NO: 2588 - protein, 9 aa, Artificial Sequence
  Description of Artificial Sequence: Synthetic peptide
LFKPEDPDR

SEQ ID NO: 2589 - protein, 9 aa, Artificial Sequence
  Description of Artificial Sequence: Synthetic peptide
LFKPEEQDR

SEQ ID NO: 2590 - protein, 9 aa, Artificial Sequence
  Description of Artificial Sequence: Synthetic peptide
LHRDPMPIM

SEQ ID NO: 2591 - protein, 9 aa, Artificial Sequence
  Description of Artificial Sequence: Synthetic peptide
LHRDQMPFM

SEQ ID NO: 2592 - protein, 9 aa, Artificial Sequence
  Description of Artificial Sequence: Synthetic peptide
LHRDQMPLM

SEQ ID NO: 2593 - protein, 9 aa, Artificial Sequence
  Description of Artificial Sequence: Synthetic peptide
LIMAHWLHM

SEQ ID NO: 2594 - protein, 9 aa, Artificial Sequence
  Description of Artificial Sequence: Synthetic peptide
LIMAYWLDM

SEQ ID NO: 2595 - protein, 9 aa, Artificial Sequence
  Description of Artificial Sequence: Synthetic peptide
LIMSHWLDM

SEQ ID NO: 2596 - protein, 9 aa, Artificial Sequence
  Description of Artificial Sequence: Synthetic peptide
LKRPQGEAE

SEQ ID NO: 2597 - protein, 9 aa, Artificial Sequence
  Description of Artificial Sequence: Synthetic peptide
LLMAHWLDM

SEQ ID NO: 2598 - protein, 9 aa, Artificial Sequence
  Description of Artificial Sequence: Synthetic peptide
LQKYYMNQP

SEQ ID NO: 2599 - protein, 9 aa, Artificial Sequence
  Description of Artificial Sequence: Synthetic peptide
LQNYRDEDG

SEQ ID NO: 2600 - protein, 9 aa, Artificial Sequence
  Description of Artificial Sequence: Synthetic peptide
LQPWWLGMI

SEQ ID NO: 2601 - protein, 9 aa, Artificial Sequence
  Description of Artificial Sequence: Synthetic peptide
LQTYHHVDG

SEQ ID NO: 2602 - protein, 9 aa, Artificial Sequence
  Description of Artificial Sequence: Synthetic peptide
LQTYQPVDG

SEQ ID NO: 2603 - protein, 9 aa, Artificial Sequence
  Description of Artificial Sequence: Synthetic peptide
LRFLSDADP

SEQ ID NO: 2604 - protein, 9 aa, Artificial Sequence
  Description of Artificial Sequence: Synthetic peptide
LRKEGHGEK

SEQ ID NO: 2605 - protein, 9 aa, Artificial Sequence
  Description of Artificial Sequence: Synthetic peptide
LRYLSDTDP

SEQ ID NO: 2606 - protein, 9 aa, Artificial Sequence
  Description of Artificial Sequence: Synthetic peptide
LSTNRLVNA

SEQ ID NO: 2607 - protein, 9 aa, Artificial Sequence
  Description of Artificial Sequence: Synthetic peptide
LSTNRMVSA

SEQ ID NO: 2608 - protein, 9 aa, Artificial Sequence
  Description of Artificial Sequence: Synthetic peptide
LSTNRMVTA

SEQ ID NO: 2609 - protein, 9 aa, Artificial Sequence
  Description of Artificial Sequence: Synthetic peptide
LYRDQMPIM

SEQ ID NO: 2610 - protein, 9 aa, Artificial Sequence
  Description of Artificial Sequence: Synthetic peptide
MCGHASKAV

SEQ ID NO: 2611 - protein, 9 aa, Artificial Sequence
  Description of Artificial Sequence: Synthetic peptide
MCGHASRAE

SEQ ID NO: 2612 - protein, 9 aa, Artificial Sequence
  Description of Artificial Sequence: Synthetic peptide
MCGPASKAE

SEQ ID NO: 2613 - protein, 9 aa, Artificial Sequence
  Description of Artificial Sequence: Synthetic peptide
MCHLRHIAG

SEQ ID NO: 2614 - protein, 9 aa, Artificial Sequence
  Description of Artificial Sequence: Synthetic peptide
MCRANGNMP

SEQ ID NO: 2615 - protein, 9 aa, Artificial Sequence
  Description of Artificial Sequence: Synthetic peptide
MCSLRHWQP

SEQ ID NO: 2616 - protein, 9 aa, Artificial Sequence
  Description of Artificial Sequence: Synthetic peptide
MIGMWNRSN

SEQ ID NO: 2617 - protein, 9 aa, Artificial Sequence
  Description of Artificial Sequence: Synthetic peptide
MISMLNRSN

SEQ ID NO: 2618 - protein, 9 aa, Artificial Sequence
  Description of Artificial Sequence: Synthetic peptide
MRSIYMNIS

SEQ ID NO: 2619 - protein, 9 aa, Artificial Sequence
  Description of Artificial Sequence: Synthetic peptide
MRWILTIME

SEQ ID NO: 2620 - protein, 9 aa, Artificial Sequence
  Description of Artificial Sequence: Synthetic peptide
MSAQRHVQT

SEQ ID NO: 2621 - protein, 9 aa, Artificial Sequence
  Description of Artificial Sequence: Synthetic peptide
MSAQRYAQT

SEQ ID NO: 2622 - protein, 9 aa, Artificial Sequence
  Description of Artificial Sequence: Synthetic peptide
MSAQRYVQA

SEQ ID NO: 2623 - protein, 9 aa, Artificial Sequence
  Description of Artificial Sequence: Synthetic peptide
MSMLRMHEA

SEQ ID NO: 2624 - protein, 9 aa, Artificial Sequence
  Description of Artificial Sequence: Synthetic peptide
NAMCFGRAR

SEQ ID NO: 2625 - protein, 9 aa, Artificial Sequence
  Description of Artificial Sequence: Synthetic peptide
NAMCFGREK

SEQ ID NO: 2626 - protein, 9 aa, Artificial Sequence
  Description of Artificial Sequence: Synthetic peptide
NAMCFGRTK

SEQ ID NO: 2627 - protein, 9 aa, Artificial Sequence
  Description of Artificial Sequence: Synthetic peptide
NAMCIGRAK

SEQ ID NO: 2628 - protein, 9 aa, Artificial Sequence
  Description of Artificial Sequence: Synthetic peptide
NAMGFGRAK

SEQ ID NO: 2629 - protein, 9 aa, Artificial Sequence
  Description of Artificial Sequence: Synthetic peptide
NATCFGRAK

SEQ ID NO: 2630 - protein, 9 aa, Artificial Sequence
  Description of Artificial Sequence: Synthetic peptide
NCNKCINRT

SEQ ID NO: 2631 - protein, 9 aa, Artificial Sequence
  Description of Artificial Sequence: Synthetic peptide
NCNKCKHRT

SEQ ID NO: 2632 - protein, 9 aa, Artificial Sequence
  Description of Artificial Sequence: Synthetic peptide
NCNKCKYRT

SEQ ID NO: 2633 - protein, 9 aa, Artificial Sequence
  Description of Artificial Sequence: Synthetic peptide
NCRHTILYV

SEQ ID NO: 2634 - protein, 9 aa, Artificial Sequence
  Description of Artificial Sequence: Synthetic peptide
NCSKCAKYD

SEQ ID NO: 2635 - protein, 9 aa, Artificial Sequence
  Description of Artificial Sequence: Synthetic peptide
NCVKLGCQS

SEQ ID NO: 2636 - protein, 9 aa, Artificial Sequence
  Description of Artificial Sequence: Synthetic peptide
NELQDQCGM

SEQ ID NO: 2637 - protein, 9 aa, Artificial Sequence
  Description of Artificial Sequence: Synthetic peptide
NEVVCKFVF

SEQ ID NO: 2638 - protein, 9 aa, Artificial Sequence
  Description of Artificial Sequence: Synthetic peptide
NFSKCAKYV

SEQ ID NO: 2639 - protein, 9 aa, Artificial Sequence
  Description of Artificial Sequence: Synthetic peptide
NFSKCTKYD

SEQ ID NO: 2640 - protein, 9 aa, Artificial Sequence
  Description of Artificial Sequence: Synthetic peptide
NFSKGAKYD

SEQ ID NO: 2641 - protein, 9 aa, Artificial Sequence
  Description of Artificial Sequence: Synthetic peptide
NGMDKAVDA

SEQ ID NO: 2642 - protein, 9 aa, Artificial Sequence
  Description of Artificial Sequence: Synthetic peptide
NGMDKPFDA

SEQ ID NO: 2643 - protein, 9 aa, Artificial Sequence
  Description of Artificial Sequence: Synthetic peptide
NGMDKPIDA

SEQ ID NO: 2644 - protein, 9 aa, Artificial Sequence
  Description of Artificial Sequence: Synthetic peptide
NGMDKPVDG

SEQ ID NO: 2645 - protein, 9 aa, Artificial Sequence
  Description of Artificial Sequence: Synthetic peptide
NGMDKPVDS

SEQ ID NO: 2646 - protein, 9 aa, Artificial Sequence
  Description of Artificial Sequence: Synthetic peptide
NGMDKPVNA

SEQ ID NO: 2647 - protein, 9 aa, Artificial Sequence
  Description of Artificial Sequence: Synthetic peptide
NGMDQPVDA

SEQ ID NO: 2648 - protein, 9 aa, Artificial Sequence
  Description of Artificial Sequence: Synthetic peptide
NGMDRPVDA

SEQ ID NO: 2649 - protein, 9 aa, Artificial Sequence
  Description of Artificial Sequence: Synthetic peptide
NGMDTPVDA

SEQ ID NO: 2650 - protein, 9 aa, Artificial Sequence
  Description of Artificial Sequence: Synthetic peptide
NGVDKPVDA

SEQ ID NO: 2651 - protein, 9 aa, Artificial Sequence
  Description of Artificial Sequence: Synthetic peptide
NGWESEQHM

SEQ ID NO: 2652 - protein, 9 aa, Artificial Sequence
  Description of Artificial Sequence: Synthetic peptide
NHMKQQESP

SEQ ID NO: 2653 - protein, 9 aa, Artificial Sequence
  Description of Artificial Sequence: Synthetic peptide
NLDMSRRAF

SEQ ID NO: 2654 - protein, 9 aa, Artificial Sequence
  Description of Artificial Sequence: Synthetic peptide
NLDMSRRDC

SEQ ID NO: 2655 - protein, 9 aa, Artificial Sequence
  Description of Artificial Sequence: Synthetic peptide
NMIKRCCQG

SEQ ID NO: 2656 - protein, 9 aa, Artificial Sequence
  Description of Artificial Sequence: Synthetic peptide
NMIKRCSKG

SEQ ID NO: 2657 - protein, 9 aa, Artificial Sequence
  Description of Artificial Sequence: Synthetic peptide
NMIKRCSQA

SEQ ID NO: 2658 - protein, 9 aa, Artificial Sequence
  Description of Artificial Sequence: Synthetic peptide
NMIKRCSQC

SEQ ID NO: 2659 - protein, 9 aa, Artificial Sequence
  Description of Artificial Sequence: Synthetic peptide
NMIKRCSQS

SEQ ID NO: 2660 - protein, 9 aa, Artificial Sequence
  Description of Artificial Sequence: Synthetic peptide
NMIKRCSQV

SEQ ID NO: 2661 - protein, 9 aa, Artificial Sequence
  Description of Artificial Sequence: Synthetic peptide
NMIKWCSQG

SEQ ID NO: 2662 - protein, 9 aa, Artificial Sequence
  Description of Artificial Sequence: Synthetic peptide
NMVKRCSQG

SEQ ID NO: 2663 - protein, 9 aa, Artificial Sequence
  Description of Artificial Sequence: Synthetic peptide
NNQWKNSLE

SEQ ID NO: 2664 - protein, 9 aa, Artificial Sequence
  Description of Artificial Sequence: Synthetic peptide
NNQWTNSLE

SEQ ID NO: 2665 - protein, 9 aa, Artificial Sequence
  Description of Artificial Sequence: Synthetic peptide
NPCKINVGT

SEQ ID NO: 2666 - protein, 9 aa, Artificial Sequence
  Description of Artificial Sequence: Synthetic peptide
NQCKINFGT

SEQ ID NO: 2667 - protein, 9 aa, Artificial Sequence
  Description of Artificial Sequence: Synthetic peptide
NQCKINVGN

SEQ ID NO: 2668 - protein, 9 aa, Artificial Sequence
  Description of Artificial Sequence: Synthetic peptide
NQCKINVGP

SEQ ID NO: 2669 - protein, 9 aa, Artificial Sequence
  Description of Artificial Sequence: Synthetic peptide
NQCKLNVGT

SEQ ID NO: 2670 - protein, 9 aa, Artificial Sequence
  Description of Artificial Sequence: Synthetic peptide
NQLKDVAAS

SEQ ID NO: 2671 - protein, 9 aa, Artificial Sequence
  Description of Artificial Sequence: Synthetic peptide
NQWKINVGT

SEQ ID NO: 2672 - protein, 9 aa, Artificial Sequence
  Description of Artificial Sequence: Synthetic peptide
NRAETECWC

SEQ ID NO: 2673 - protein, 9 aa, Artificial Sequence
  Description of Artificial Sequence: Synthetic peptide
NRCLVEWVA

SEQ ID NO: 2674 - protein, 9 aa, Artificial Sequence
  Description of Artificial Sequence: Synthetic peptide
NRMDFHFFV

SEQ ID NO: 2675 - protein, 9 aa, Artificial Sequence
  Description of Artificial Sequence: Synthetic peptide
NRMDFNFFF

SEQ ID NO: 2676 - protein, 9 aa, Artificial Sequence
  Description of Artificial Sequence: Synthetic peptide
NRNKCKNRT

SEQ ID NO: 2677 - protein, 9 aa, Artificial Sequence
  Description of Artificial Sequence: Synthetic peptide
NRPFNYFQR

SEQ ID NO: 2678 - protein, 9 aa, Artificial Sequence
  Description of Artificial Sequence: Synthetic peptide
NRTLYMINR

SEQ ID NO: 2679 - protein, 9 aa, Artificial Sequence
  Description of Artificial Sequence: Synthetic peptide
NSSYFEFSN

SEQ ID NO: 2680 - protein, 9 aa, Artificial Sequence
  Description of Artificial Sequence: Synthetic peptide
NSVKLGCQN

SEQ ID NO: 2681 - protein, 9 aa, Artificial Sequence
  Description of Artificial Sequence: Synthetic peptide
NTIKRCSQG

SEQ ID NO: 2682 - protein, 9 aa, Artificial Sequence
  Description of Artificial Sequence: Synthetic peptide
NVDMSRRDF

SEQ ID NO: 2683 - protein, 9 aa, Artificial Sequence
  Description of Artificial Sequence: Synthetic peptide
NVMCFGRAK

SEQ ID NO: 2684 - protein, 9 aa, Artificial Sequence
  Description of Artificial Sequence: Synthetic peptide
NVRNFFAHC

SEQ ID NO: 2685 - protein, 9 aa, Artificial Sequence
  Description of Artificial Sequence: Synthetic peptide
NVRNFFEHC

SEQ ID NO: 2686 - protein, 9 aa, Artificial Sequence
  Description of Artificial Sequence: Synthetic peptide
NVSKCAKYD

SEQ ID NO: 2687 - protein, 9 aa, Artificial Sequence
  Description of Artificial Sequence: Synthetic peptide
NVWPNIAEM

SEQ ID NO: 2688 - protein, 9 aa, Artificial Sequence
  Description of Artificial Sequence: Synthetic peptide
NVWTNISEM

SEQ ID NO: 2689 - protein, 9 aa, Artificial Sequence
  Description of Artificial Sequence: Synthetic peptide
NWNGRWNQC

SEQ ID NO: 2690 - protein, 9 aa, Artificial Sequence
  Description of Artificial Sequence: Synthetic peptide
NWNKCKNRT

SEQ ID NO: 2691 - protein, 9 aa, Artificial Sequence
  Description of Artificial Sequence: Synthetic peptide
NWPCHDNRH

SEQ ID NO: 2692 - protein, 9 aa, Artificial Sequence
  Description of Artificial Sequence: Synthetic peptide
NWSYHDNRH

SEQ ID NO: 2693 - protein, 9 aa, Artificial Sequence
  Description of Artificial Sequence: Synthetic peptide
NWTGRWHQC

SEQ ID NO: 2694 - protein, 9 aa, Artificial Sequence
  Description of Artificial Sequence: Synthetic peptide
NYCDRAHNG

SEQ ID NO: 2695 - protein, 9 aa, Artificial Sequence
  Description of Artificial Sequence: Synthetic peptide
PAVQKERYN

SEQ ID NO: 2696 - protein, 9 aa, Artificial Sequence
  Description of Artificial Sequence: Synthetic peptide
PCFSIARYY

SEQ ID NO: 2697 - protein, 9 aa, Artificial Sequence
  Description of Artificial Sequence: Synthetic peptide
PCYFMMRQN

SEQ ID NO: 2698 - protein, 9 aa, Artificial Sequence
  Description of Artificial Sequence: Synthetic peptide
PKVTCRYRM

SEQ ID NO: 2699 - protein, 9 aa, Artificial Sequence
  Description of Artificial Sequence: Synthetic peptide
PPLHSRCGM

SEQ ID NO: 2700 - protein, 9 aa, Artificial Sequence
  Description of Artificial Sequence: Synthetic peptide
PQLHSRCRM

SEQ ID NO: 2701 - protein, 9 aa, Artificial Sequence
  Description of Artificial Sequence: Synthetic peptide
PQLLSRCGM

SEQ ID NO: 2702 - protein, 9 aa, Artificial Sequence
  Description of Artificial Sequence: Synthetic peptide
PQLNSRCGM

SEQ ID NO: 2703 - protein, 9 aa, Artificial Sequence
  Description of Artificial Sequence: Synthetic peptide
PQLRSRCGM

SEQ ID NO: 2704 - protein, 9 aa, Artificial Sequence
  Description of Artificial Sequence: Synthetic peptide
PWVMKDQRY

SEQ ID NO: 2705 - protein, 9 aa, Artificial Sequence
  Description of Artificial Sequence: Synthetic peptide
QAYCCMHQD

SEQ ID NO: 2706 - protein, 9 aa, Artificial Sequence
  Description of Artificial Sequence: Synthetic peptide
QCDEFKMRM

SEQ ID NO: 2707 - protein, 9 aa, Artificial Sequence
  Description of Artificial Sequence: Synthetic peptide
QCHKMRCIE

SEQ ID NO: 2708 - protein, 9 aa, Artificial Sequence
  Description of Artificial Sequence: Synthetic peptide
QESNRCWCD

SEQ ID NO: 2709 - protein, 9 aa, Artificial Sequence
  Description of Artificial Sequence: Synthetic peptide
QHKERMLFD

SEQ ID NO: 2710 - protein, 9 aa, Artificial Sequence
  Description of Artificial Sequence: Synthetic peptide
QHKERMVFD

SEQ ID NO: 2711 - protein, 9 aa, Artificial Sequence
  Description of Artificial Sequence: Synthetic peptide
QHQKNINMH

SEQ ID NO: 2712 - protein, 9 aa, Artificial Sequence
  Description of Artificial Sequence: Synthetic peptide
QLDEFKMRM

SEQ ID NO: 2713 - protein, 9 aa, Artificial Sequence
  Description of Artificial Sequence: Synthetic peptide
QMSWVQNWE

SEQ ID NO: 2714 - protein, 9 aa, Artificial Sequence
  Description of Artificial Sequence: Synthetic peptide
QMYHNHHTA

SEQ ID NO: 2715 - protein, 9 aa, Artificial Sequence
  Description of Artificial Sequence: Synthetic peptide
QMYWAQNWE

SEQ ID NO: 2716 - protein, 9 aa, Artificial Sequence
  Description of Artificial Sequence: Synthetic peptide
QMYWGQNWE

SEQ ID NO: 2717 - protein, 9 aa, Artificial Sequence
  Description of Artificial Sequence: Synthetic peptide
QMYWIQNWE

SEQ ID NO: 2718 - protein, 9 aa, Artificial Sequence
  Description of Artificial Sequence: Synthetic peptide
QMYWVQNLE

SEQ ID NO: 2719 - protein, 9 aa, Artificial Sequence
  Description of Artificial Sequence: Synthetic peptide
QMYWVQSWE

SEQ ID NO: 2720 - protein, 9 aa, Artificial Sequence
  Description of Artificial Sequence: Synthetic peptide
QPVTRMTNE

SEQ ID NO: 2721 - protein, 9 aa, Artificial Sequence
  Description of Artificial Sequence: Synthetic peptide
QQLHSRCGM

SEQ ID NO: 2722 - protein, 9 aa, Artificial Sequence
  Description of Artificial Sequence: Synthetic peptide
QQRHISRAP

SEQ ID NO: 2723 - protein, 9 aa, Artificial Sequence
  Description of Artificial Sequence: Synthetic peptide
QRDLAHGQF

SEQ ID NO: 2724 - protein, 9 aa, Artificial Sequence
  Description of Artificial Sequence: Synthetic peptide
QRDLANGKS

SEQ ID NO: 2725 - protein, 9 aa, Artificial Sequence
  Description of Artificial Sequence: Synthetic peptide
QRDLANGLF

SEQ ID NO: 2726 - protein, 9 aa, Artificial Sequence
  Description of Artificial Sequence: Synthetic peptide
QRDLANGQI

SEQ ID NO: 2727 - protein, 9 aa, Artificial Sequence
  Description of Artificial Sequence: Synthetic peptide
QRDLANGQS

SEQ ID NO: 2728 - protein, 9 aa, Artificial Sequence
  Description of Artificial Sequence: Synthetic peptide
QRDLANGQV

SEQ ID NO: 2729 - protein, 9 aa, Artificial Sequence
  Description of Artificial Sequence: Synthetic peptide
QRDLANGQY

SEQ ID NO: 2730 - protein, 9 aa, Artificial Sequence
  Description of Artificial Sequence: Synthetic peptide
QRDMANGQF

SEQ ID NO: 2731 - protein, 9 aa, Artificial Sequence
  Description of Artificial Sequence: Synthetic peptide
QRDPANGQF

SEQ ID NO: 2732 - protein, 9 aa, Artificial Sequence
  Description of Artificial Sequence: Synthetic peptide
QSAFRQSDS

SEQ ID NO: 2733 - protein, 9 aa, Artificial Sequence
  Description of Artificial Sequence: Synthetic peptide
QSTFRQCDS

SEQ ID NO: 2734 - protein, 9 aa, Artificial Sequence
  Description of Artificial Sequence: Synthetic peptide
QSTMRQYYA

SEQ ID NO: 2735 - protein, 9 aa, Artificial Sequence
  Description of Artificial Sequence: Synthetic peptide
QSYCCMHQY

SEQ ID NO: 2736 - protein, 9 aa, Artificial Sequence
  Description of Artificial Sequence: Synthetic peptide
QTYWVQNWE

SEQ ID NO: 2737 - protein, 9 aa, Artificial Sequence
  Description of Artificial Sequence: Synthetic peptide
QVSGMFHPA

SEQ ID NO: 2738 - protein, 9 aa, Artificial Sequence
  Description of Artificial Sequence: Synthetic peptide
QVYCCMHQY

SEQ ID NO: 2739 - protein, 9 aa, Artificial Sequence
  Description of Artificial Sequence: Synthetic peptide
QVYWVQNWE

SEQ ID NO: 2740 - protein, 9 aa, Artificial Sequence
  Description of Artificial Sequence: Synthetic peptide
QWDEFKKRM

SEQ ID NO: 2741 - protein, 9 aa, Artificial Sequence
  Description of Artificial Sequence: Synthetic peptide
QWDEFKMRR

SEQ ID NO: 2742 - protein, 9 aa, Artificial Sequence
  Description of Artificial Sequence: Synthetic peptide
QWDEFKVRM

SEQ ID NO: 2743 - protein, 9 aa, Artificial Sequence
  Description of Artificial Sequence: Synthetic peptide
QWDVFKMRM

SEQ ID NO: 2744 - protein, 9 aa, Artificial Sequence
  Description of Artificial Sequence: Synthetic peptide
RACSLLQQY

SEQ ID NO: 2745 - protein, 9 aa, Artificial Sequence
  Description of Artificial Sequence: Synthetic peptide
RCDKTRFEN

SEQ ID NO: 2746 - protein, 9 aa, Artificial Sequence
  Description of Artificial Sequence: Synthetic peptide
RCEAFNWRE

SEQ ID NO: 2747 - protein, 9 aa, Artificial Sequence
  Description of Artificial Sequence: Synthetic peptide
RCELFNWRE

SEQ ID NO: 2748 - protein, 9 aa, Artificial Sequence
  Description of Artificial Sequence: Synthetic peptide
RCEPFHWRE

SEQ ID NO: 2749 - protein, 9 aa, Artificial Sequence
  Description of Artificial Sequence: Synthetic peptide
RCEPFNLRE

SEQ ID NO: 2750 - protein, 9 aa, Artificial Sequence
  Description of Artificial Sequence: Synthetic peptide
RCEPFNWHE

SEQ ID NO: 2751 - protein, 9 aa, Artificial Sequence
  Description of Artificial Sequence: Synthetic peptide
RCGHASKAE

SEQ ID NO: 2752 - protein, 9 aa, Artificial Sequence
  Description of Artificial Sequence: Synthetic peptide
RCGPFNWRE

SEQ ID NO: 2753 - protein, 9 aa, Artificial Sequence
  Description of Artificial Sequence: Synthetic peptide
RCGQVRNEM

SEQ ID NO: 2754 - protein, 9 aa, Artificial Sequence
  Description of Artificial Sequence: Synthetic peptide
RCKLFDHDE

SEQ ID NO: 2755 - protein, 9 aa, Artificial Sequence
  Description of Artificial Sequence: Synthetic peptide
RCVEDHFHK

SEQ ID NO: 2756 - protein, 9 aa, Artificial Sequence
  Description of Artificial Sequence: Synthetic peptide
RCVLDHFHK

SEQ ID NO: 2757 - protein, 9 aa, Artificial Sequence
  Description of Artificial Sequence: Synthetic peptide
RCVQDHFHE

SEQ ID NO: 2758 - protein, 9 aa, Artificial Sequence
  Description of Artificial Sequence: Synthetic peptide
RCVQDHFHR

SEQ ID NO: 2759 - protein, 9 aa, Artificial Sequence
  Description of Artificial Sequence: Synthetic peptide
RCVQDHFHT

SEQ ID NO: 2760 - protein, 9 aa, Artificial Sequence
  Description of Artificial Sequence: Synthetic peptide
RCVQDHFNK

SEQ ID NO: 2761 - protein, 9 aa, Artificial Sequence
  Description of Artificial Sequence: Synthetic peptide
RCVQDHIHK

SEQ ID NO: 2762 - protein, 9 aa, Artificial Sequence
  Description of Artificial Sequence: Synthetic peptide
RCVQDHSHK

SEQ ID NO: 2763 - protein, 9 aa, Artificial Sequence
  Description of Artificial Sequence: Synthetic peptide
RCVQDNFHK

SEQ ID NO: 2764 - protein, 9 aa, Artificial Sequence
  Description of Artificial Sequence: Synthetic peptide
RCVQHHFHK

SEQ ID NO: 2765 - protein, 9 aa, Artificial Sequence
  Description of Artificial Sequence: Synthetic peptide
RCVRDHFHK

SEQ ID NO: 2766 - protein, 9 aa, Artificial Sequence
  Description of Artificial Sequence: Synthetic peptide
RCYFMMRQN

SEQ ID NO: 2767 - protein, 9 aa, Artificial Sequence
  Description of Artificial Sequence: Synthetic peptide
RDLSLHLMR

SEQ ID NO: 2768 - protein, 9 aa, Artificial Sequence
  Description of Artificial Sequence: Synthetic peptide
RECLIERCG

SEQ ID NO: 2769 - protein, 9 aa, Artificial Sequence
  Description of Artificial Sequence: Synthetic peptide
RECLIERCI

SEQ ID NO: 2770 - protein, 9 aa, Artificial Sequence
  Description of Artificial Sequence: Synthetic peptide
RECLIKRCS

SEQ ID NO: 2771 - protein, 9 aa, Artificial Sequence
  Description of Artificial Sequence: Synthetic peptide
RECLVERCS

SEQ ID NO: 2772 - protein, 9 aa, Artificial Sequence
  Description of Artificial Sequence: Synthetic peptide
RIERVDVFN

SEQ ID NO: 2773 - protein, 9 aa, Artificial Sequence
  Description of Artificial Sequence: Synthetic peptide
RKDEANGQA

SEQ ID NO: 2774 - protein, 9 aa, Artificial Sequence
  Description of Artificial Sequence: Synthetic peptide
RMDEANGQT

SEQ ID NO: 2775 - protein, 9 aa, Artificial Sequence
  Description of Artificial Sequence: Synthetic peptide
RQCLIERCS

SEQ ID NO: 2776 - protein, 9 aa, Artificial Sequence
  Description of Artificial Sequence: Synthetic peptide
RQMWMAHHA

SEQ ID NO: 2777 - protein, 9 aa, Artificial Sequence
  Description of Artificial Sequence: Synthetic peptide
RRDAKVANG

SEQ ID NO: 2778 - protein, 9 aa, Artificial Sequence
  Description of Artificial Sequence: Synthetic peptide
RRDEANGQT

SEQ ID NO: 2779 - protein, 9 aa, Artificial Sequence
  Description of Artificial Sequence: Synthetic peptide
RREDIMCWN

SEQ ID NO: 2780 - protein, 9 aa, Artificial Sequence
  Description of Artificial Sequence: Synthetic peptide
RRKDIMKER

SEQ ID NO: 2781 - protein, 9 aa, Artificial Sequence
  Description of Artificial Sequence: Synthetic peptide
RRYRELTEE

SEQ ID NO: 2782 - protein, 9 aa, Artificial Sequence
  Description of Artificial Sequence: Synthetic peptide
RSEPFNWRE

SEQ ID NO: 2783 - protein, 9 aa, Artificial Sequence
  Description of Artificial Sequence: Synthetic peptide
RTDAIHHQV

SEQ ID NO: 2784 - protein, 9 aa, Artificial Sequence
  Description of Artificial Sequence: Synthetic peptide
RTDAIHPQI

SEQ ID NO: 2785 - protein, 9 aa, Artificial Sequence
  Description of Artificial Sequence: Synthetic peptide
RWVQDHFHK

SEQ ID NO: 2786 - protein, 9 aa, Artificial Sequence
  Description of Artificial Sequence: Synthetic peptide
RYCQVWGCA

SEQ ID NO: 2787 - protein, 9 aa, Artificial Sequence
  Description of Artificial Sequence: Synthetic peptide
RYDLFSYHQ

SEQ ID NO: 2788 - protein, 9 aa, Artificial Sequence
  Description of Artificial Sequence: Synthetic peptide
RYDLVSHHQ

SEQ ID NO: 2789 - protein, 9 aa, Artificial Sequence
  Description of Artificial Sequence: Synthetic peptide
RYDLVSYHR

SEQ ID NO: 2790 - protein, 9 aa, Artificial Sequence
  Description of Artificial Sequence: Synthetic peptide
RYDLVSYYQ

SEQ ID NO: 2791 - protein, 9 aa, Artificial Sequence
  Description of Artificial Sequence: Synthetic peptide
RYNLVSYHQ

SEQ ID NO: 2792 - protein, 9 aa, Artificial Sequence
  Description of Artificial Sequence: Synthetic peptide
RYRQEWGCA

SEQ ID NO: 2793 - protein, 9 aa, Artificial Sequence
  Description of Artificial Sequence: Synthetic peptide
SAGQKERYN

SEQ ID NO: 2794 - protein, 9 aa, Artificial Sequence
  Description of Artificial Sequence: Synthetic peptide
SAIQKERYN

SEQ ID NO: 2795 - protein, 9 aa, Artificial Sequence
  Description of Artificial Sequence: Synthetic peptide
SALYGSKAI

SEQ ID NO: 2796 - protein, 9 aa, Artificial Sequence
  Description of Artificial Sequence: Synthetic peptide
SAVQQERYN

SEQ ID NO: 2797 - protein, 9 aa, Artificial Sequence
  Description of Artificial Sequence: Synthetic peptide
SAVQRERYN

SEQ ID NO: 2798 - protein, 9 aa, Artificial Sequence
  Description of Artificial Sequence: Synthetic peptide
SAVRNERYN

SEQ ID NO: 2799 - protein, 9 aa, Artificial Sequence
  Description of Artificial Sequence: Synthetic peptide
SAWYGSKSI

SEQ ID NO: 2800 - protein, 9 aa, Artificial Sequence
  Description of Artificial Sequence: Synthetic peptide
SCKGFHLQN

SEQ ID NO: 2801 - protein, 9 aa, Artificial Sequence
  Description of Artificial Sequence: Synthetic peptide
SCKSHQMHE

SEQ ID NO: 2802 - protein, 9 aa, Artificial Sequence
  Description of Artificial Sequence: Synthetic peptide
SCRHIYREA

SEQ ID NO: 2803 - protein, 9 aa, Artificial Sequence
  Description of Artificial Sequence: Synthetic peptide
SCRHLYHEA

SEQ ID NO: 2804 - protein, 9 aa, Artificial Sequence
  Description of Artificial Sequence: Synthetic peptide
SCRHNYHEA

SEQ ID NO: 2805 - protein, 9 aa, Artificial Sequence
  Description of Artificial Sequence: Synthetic peptide
SCRRIYHEA

SEQ ID NO: 2806 - protein, 9 aa, Artificial Sequence
  Description of Artificial Sequence: Synthetic peptide
SFDRQDVHR

SEQ ID NO: 2807 - protein, 9 aa, Artificial Sequence
  Description of Artificial Sequence: Synthetic peptide
SFDRQGAHR

SEQ ID NO: 2808 - protein, 9 aa, Artificial Sequence
  Description of Artificial Sequence: Synthetic peptide
SFGHAMKQC

SEQ ID NO: 2809 - protein, 9 aa, Artificial Sequence
  Description of Artificial Sequence: Synthetic peptide
SFKGFHLEN

SEQ ID NO: 2810 - protein, 9 aa, Artificial Sequence
  Description of Artificial Sequence: Synthetic peptide
SFKGFHVQN

SEQ ID NO: 2811 - protein, 9 aa, Artificial Sequence
  Description of Artificial Sequence: Synthetic peptide
SFMGFHLQN

SEQ ID NO: 2812 - protein, 9 aa, Artificial Sequence
  Description of Artificial Sequence: Synthetic peptide
SFVRQDAHR

SEQ ID NO: 2813 - protein, 9 aa, Artificial Sequence
  Description of Artificial Sequence: Synthetic peptide
SGQKFIFCP

SEQ ID NO: 2814 - protein, 9 aa, Artificial Sequence
  Description of Artificial Sequence: Synthetic peptide
SIGCFQNGG

SEQ ID NO: 2815 - protein, 9 aa, Artificial Sequence
  Description of Artificial Sequence: Synthetic peptide
SIIFSNTCM

SEQ ID NO: 2816 - protein, 9 aa, Artificial Sequence
  Description of Artificial Sequence: Synthetic peptide
SILLPGIQG

SEQ ID NO: 2817 - protein, 9 aa, Artificial Sequence
  Description of Artificial Sequence: Synthetic peptide
SIMHEGVQS

SEQ ID NO: 2818 - protein, 9 aa, Artificial Sequence
  Description of Artificial Sequence: Synthetic peptide
SIMLPGIQA

SEQ ID NO: 2819 - protein, 9 aa, Artificial Sequence
  Description of Artificial Sequence: Synthetic peptide
SLNQAIHLE

SEQ ID NO: 2820 - protein, 9 aa, Artificial Sequence
  Description of Artificial Sequence: Synthetic peptide
SMGPTVHEM

SEQ ID NO: 2821 - protein, 9 aa, Artificial Sequence
  Description of Artificial Sequence: Synthetic peptide
SMNQAVHLE

SEQ ID NO: 2822 - protein, 9 aa, Artificial Sequence
  Description of Artificial Sequence: Synthetic peptide
SMNQPIHLE

SEQ ID NO: 2823 - protein, 9 aa, Artificial Sequence
  Description of Artificial Sequence: Synthetic peptide
SMRSQHADY

SEQ ID NO: 2824 - protein, 9 aa, Artificial Sequence
  Description of Artificial Sequence: Synthetic peptide
SNCALHNAW

SEQ ID NO: 2825 - protein, 9 aa, Artificial Sequence
  Description of Artificial Sequence: Synthetic peptide
SNCAQHNSW

SEQ ID NO: 2826 - protein, 9 aa, Artificial Sequence
  Description of Artificial Sequence: Synthetic peptide
SNCAQYNAW

SEQ ID NO: 2827 - protein, 9 aa, Artificial Sequence
  Description of Artificial Sequence: Synthetic peptide
SNCSQHNAW

SEQ ID NO: 2828 - protein, 9 aa, Artificial Sequence
  Description of Artificial Sequence: Synthetic peptide
SNCVQHNAW

SEQ ID NO: 2829 - protein, 9 aa, Artificial Sequence
  Description of Artificial Sequence: Synthetic peptide
SNGAQHNAW

SEQ ID NO: 2830 - protein, 9 aa, Artificial Sequence
  Description of Artificial Sequence: Synthetic peptide
SNGFEWACE

SEQ ID NO: 2831 - protein, 9 aa, Artificial Sequence
  Description of Artificial Sequence: Synthetic peptide
SNGFEWVCA

SEQ ID NO: 2832 - protein, 9 aa, Artificial Sequence
  Description of Artificial Sequence: Synthetic peptide
SNGFEWVGE

SEQ ID NO: 2833 - protein, 9 aa, Artificial Sequence
  Description of Artificial Sequence: Synthetic peptide
SNGFEWVSE

SEQ ID NO: 2834 - protein, 9 aa, Artificial Sequence
  Description of Artificial Sequence: Synthetic peptide
SNGFEWVYE

SEQ ID NO: 2835 - protein, 9 aa, Artificial Sequence
  Description of Artificial Sequence: Synthetic peptide
SNMFRNGMQ

SEQ ID NO: 2836 - protein, 9 aa, Artificial Sequence
  Description of Artificial Sequence: Synthetic peptide
SNVFEWVCE

SEQ ID NO: 2837 - protein, 9 aa, Artificial Sequence
  Description of Artificial Sequence: Synthetic peptide
SRDEAKSWV

SEQ ID NO: 2838 - protein, 9 aa, Artificial Sequence
  Description of Artificial Sequence: Synthetic peptide
SRICMLGMK

SEQ ID NO: 2839 - protein, 9 aa, Artificial Sequence
  Description of Artificial Sequence: Synthetic peptide
SRIILDYYS

SEQ ID NO: 2840 - protein, 9 aa, Artificial Sequence
  Description of Artificial Sequence: Synthetic peptide
SRPFNYIQR

SEQ ID NO: 2841 - protein, 9 aa, Artificial Sequence
  Description of Artificial Sequence: Synthetic peptide
SRSFNYFQR

SEQ ID NO: 2842 - protein, 9 aa, Artificial Sequence
  Description of Artificial Sequence: Synthetic peptide
SRWCQIGTE

SEQ ID NO: 2843 - protein, 9 aa, Artificial Sequence
  Description of Artificial Sequence: Synthetic peptide
SRWFKIGTE

SEQ ID NO: 2844 - protein, 9 aa, Artificial Sequence
  Description of Artificial Sequence: Synthetic peptide
SRWFQIGTK

SEQ ID NO: 2845 - protein, 9 aa, Artificial Sequence
  Description of Artificial Sequence: Synthetic peptide
SSGDRRSDS

SEQ ID NO: 2846 - protein, 9 aa, Artificial Sequence
  Description of Artificial Sequence: Synthetic peptide
SSKGFHLQN

SEQ ID NO: 2847 - protein, 9 aa, Artificial Sequence
  Description of Artificial Sequence: Synthetic peptide
SSKQDFYGL

SEQ ID NO: 2848 - protein, 9 aa, Artificial Sequence
  Description of Artificial Sequence: Synthetic peptide
SSKSHRMHE

SEQ ID NO: 2849 - protein, 9 aa, Artificial Sequence
  Description of Artificial Sequence: Synthetic peptide
SSMLEGVQS

SEQ ID NO: 2850 - protein, 9 aa, Artificial Sequence
  Description of Artificial Sequence: Synthetic peptide
SSVDRRSDG

SEQ ID NO: 2851 - protein, 9 aa, Artificial Sequence
  Description of Artificial Sequence: Synthetic peptide
SSVHALYFP

SEQ ID NO: 2852 - protein, 9 aa, Artificial Sequence
  Description of Artificial Sequence: Synthetic peptide
SSVHTLYYP

SEQ ID NO: 2853 - protein, 9 aa, Artificial Sequence
  Description of Artificial Sequence: Synthetic peptide
SSVQKERYN

SEQ ID NO: 2854 - protein, 9 aa, Artificial Sequence
  Description of Artificial Sequence: Synthetic peptide
STCYFVASL

SEQ ID NO: 2855 - protein, 9 aa, Artificial Sequence
  Description of Artificial Sequence: Synthetic peptide
STDPYTSHH

SEQ ID NO: 2856 - protein, 9 aa, Artificial Sequence
  Description of Artificial Sequence: Synthetic peptide
STFKHTDHL

SEQ ID NO: 2857 - protein, 9 aa, Artificial Sequence
  Description of Artificial Sequence: Synthetic peptide
STGFEWVCE

SEQ ID NO: 2858 - protein, 9 aa, Artificial Sequence
  Description of Artificial Sequence: Synthetic peptide
STSYFVASQ

SEQ ID NO: 2859 - protein, 9 aa, Artificial Sequence
  Description of Artificial Sequence: Synthetic peptide
SVGPTVHQM

SEQ ID NO: 2860 - protein, 9 aa, Artificial Sequence
  Description of Artificial Sequence: Synthetic peptide
SVSKFQADK

SEQ ID NO: 2861 - protein, 9 aa, Artificial Sequence
  Description of Artificial Sequence: Synthetic peptide
SVVQKERYN

SEQ ID NO: 2862 - protein, 9 aa, Artificial Sequence
  Description of Artificial Sequence: Synthetic peptide
SWEKKINVQ

SEQ ID NO: 2863 - protein, 9 aa, Artificial Sequence
  Description of Artificial Sequence: Synthetic peptide
SWGLIHGWN

SEQ ID NO: 2864 - protein, 9 aa, Artificial Sequence
  Description of Artificial Sequence: Synthetic peptide
SWGLIHWWN

SEQ ID NO: 2865 - protein, 9 aa, Artificial Sequence
  Description of Artificial Sequence: Synthetic peptide
SWGLIHYWN

SEQ ID NO: 2866 - protein, 9 aa, Artificial Sequence
  Description of Artificial Sequence: Synthetic peptide
SWGLVHCWN

SEQ ID NO: 2867 - protein, 9 aa, Artificial Sequence
  Description of Artificial Sequence: Synthetic peptide
SWKWDKYCN

SEQ ID NO: 2868 - protein, 9 aa, Artificial Sequence
  Description of Artificial Sequence: Synthetic peptide
SWMCRNVYC

SEQ ID NO: 2869 - protein, 9 aa, Artificial Sequence
  Description of Artificial Sequence: Synthetic peptide
SWRHIYHEA

SEQ ID NO: 2870 - protein, 9 aa, Artificial Sequence
  Description of Artificial Sequence: Synthetic peptide
SWRTRGNFE

SEQ ID NO: 2871 - protein, 9 aa, Artificial Sequence
  Description of Artificial Sequence: Synthetic peptide
SWSKCNMHV

SEQ ID NO: 2872 - protein, 9 aa, Artificial Sequence
  Description of Artificial Sequence: Synthetic peptide
SWVLIHCWN

SEQ ID NO: 2873 - protein, 9 aa, Artificial Sequence
  Description of Artificial Sequence: Synthetic peptide
SYDRQDAHR

SEQ ID NO: 2874 - protein, 9 aa, Artificial Sequence
  Description of Artificial Sequence: Synthetic peptide
SYVFRHHYC

SEQ ID NO: 2875 - protein, 9 aa, Artificial Sequence
  Description of Artificial Sequence: Synthetic peptide
TACATYRSF

SEQ ID NO: 2876 - protein, 9 aa, Artificial Sequence
  Description of Artificial Sequence: Synthetic peptide
TACMTYRSF

SEQ ID NO: 2877 - protein, 9 aa, Artificial Sequence
  Description of Artificial Sequence: Synthetic peptide
TACVAYRSF

SEQ ID NO: 2878 - protein, 9 aa, Artificial Sequence
  Description of Artificial Sequence: Synthetic peptide
TACVNYRSF

SEQ ID NO: 2879 - protein, 9 aa, Artificial Sequence
  Description of Artificial Sequence: Synthetic peptide
TACVTYRGL

SEQ ID NO: 2880 - protein, 9 aa, Artificial Sequence
  Description of Artificial Sequence: Synthetic peptide
TACVTYRIF

SEQ ID NO: 2881 - protein, 9 aa, Artificial Sequence
  Description of Artificial Sequence: Synthetic peptide
TAFVTYRSF

SEQ ID NO: 2882 - protein, 9 aa, Artificial Sequence
  Description of Artificial Sequence: Synthetic peptide
TAFVTYRSL

SEQ ID NO: 2883 - protein, 9 aa, Artificial Sequence
  Description of Artificial Sequence: Synthetic peptide
TAGHEGHSC

SEQ ID NO: 2884 - protein, 9 aa, Artificial Sequence
  Description of Artificial Sequence: Synthetic peptide
TAGHQGHIC

SEQ ID NO: 2885 - protein, 9 aa, Artificial Sequence
  Description of Artificial Sequence: Synthetic peptide
TAGVTYRSF

SEQ ID NO: 2886 - protein, 9 aa, Artificial Sequence
  Description of Artificial Sequence: Synthetic peptide
TAITMWQYM

SEQ ID NO: 2887 - protein, 9 aa, Artificial Sequence
  Description of Artificial Sequence: Synthetic peptide
TAMCFGRAK

SEQ ID NO: 2888 - protein, 9 aa, Artificial Sequence
  Description of Artificial Sequence: Synthetic peptide
TAMSMCMYG

SEQ ID NO: 2889 - protein, 9 aa, Artificial Sequence
  Description of Artificial Sequence: Synthetic peptide
TAMTICMYG

SEQ ID NO: 2890 - protein, 9 aa, Artificial Sequence
  Description of Artificial Sequence: Synthetic peptide
TANDHRVDA

SEQ ID NO: 2891 - protein, 9 aa, Artificial Sequence
  Description of Artificial Sequence: Synthetic peptide
TATDRRVDA

SEQ ID NO: 2892 - protein, 9 aa, Artificial Sequence
  Description of Artificial Sequence: Synthetic peptide
TAVQKERYN

SEQ ID NO: 2893 - protein, 9 aa, Artificial Sequence
  Description of Artificial Sequence: Synthetic peptide
TAVSICMYG

SEQ ID NO: 2894 - protein, 9 aa, Artificial Sequence
  Description of Artificial Sequence: Synthetic peptide
TAVTMWQSM

SEQ ID NO: 2895 - protein, 9 aa, Artificial Sequence
  Description of Artificial Sequence: Synthetic peptide
TAWVTYRSF

SEQ ID NO: 2896 - protein, 9 aa, Artificial Sequence
  Description of Artificial Sequence: Synthetic peptide
TAYVTYRSF

SEQ ID NO: 2897 - protein, 9 aa, Artificial Sequence
  Description of Artificial Sequence: Synthetic peptide
TCCFMMRQN

SEQ ID NO: 2898 - protein, 9 aa, Artificial Sequence
  Description of Artificial Sequence: Synthetic peptide
TCCSIARYY

SEQ ID NO: 2899 - protein, 9 aa, Artificial Sequence
  Description of Artificial Sequence: Synthetic peptide
TCDFMMRQN

SEQ ID NO: 2900 - protein, 9 aa, Artificial Sequence
  Description of Artificial Sequence: Synthetic peptide
TCFFMMRQN

SEQ ID NO: 2901 - protein, 9 aa, Artificial Sequence
  Description of Artificial Sequence: Synthetic peptide
TCFGIARYY

SEQ ID NO: 2902 - protein, 9 aa, Artificial Sequence
  Description of Artificial Sequence: Synthetic peptide
TCFNIARYY

SEQ ID NO: 2903 - protein, 9 aa, Artificial Sequence
  Description of Artificial Sequence: Synthetic peptide
TCFSIARCY

SEQ ID NO: 2904 - protein, 9 aa, Artificial Sequence
  Description of Artificial Sequence: Synthetic peptide
TCFSIARYD

SEQ ID NO: 2905 - protein, 9 aa, Artificial Sequence
  Description of Artificial Sequence: Synthetic peptide
TCFSIARYF

SEQ ID NO: 2906 - protein, 9 aa, Artificial Sequence
  Description of Artificial Sequence: Synthetic peptide
TCFSIARYS

SEQ ID NO: 2907 - protein, 9 aa, Artificial Sequence
  Description of Artificial Sequence: Synthetic peptide
TCFSIDRYY

SEQ ID NO: 2908 - protein, 9 aa, Artificial Sequence
  Description of Artificial Sequence: Synthetic peptide
TCFSIGRYY

SEQ ID NO: 2909 - protein, 9 aa, Artificial Sequence
  Description of Artificial Sequence: Synthetic peptide
TCFSITRYY

SEQ ID NO: 2910 - protein, 9 aa, Artificial Sequence
  Description of Artificial Sequence: Synthetic peptide
TCFSIVRYY

SEQ ID NO: 2911 - protein, 9 aa, Artificial Sequence
  Description of Artificial Sequence: Synthetic peptide
TCFSNARYY

SEQ ID NO: 2912 - protein, 9 aa, Artificial Sequence
  Description of Artificial Sequence: Synthetic peptide
TCFSTARYY

SEQ ID NO: 2913 - protein, 9 aa, Artificial Sequence
  Description of Artificial Sequence: Synthetic peptide
TCFSVARYY

SEQ ID NO: 2914 - protein, 9 aa, Artificial Sequence
  Description of Artificial Sequence: Synthetic peptide
TCFTIARYY

SEQ ID NO: 2915 - protein, 9 aa, Artificial Sequence
  Description of Artificial Sequence: Synthetic peptide
TCFTVARYY

SEQ ID NO: 2916 - protein, 9 aa, Artificial Sequence
  Description of Artificial Sequence: Synthetic peptide
TCGSLYYQG

SEQ ID NO: 2917 - protein, 9 aa, Artificial Sequence
  Description of Artificial Sequence: Synthetic peptide
TCHFALHGC

SEQ ID NO: 2918 - protein, 9 aa, Artificial Sequence
  Description of Artificial Sequence: Synthetic peptide
TCHFMMRQN

SEQ ID NO: 2919 - protein, 9 aa, Artificial Sequence
  Description of Artificial Sequence: Synthetic peptide
TCHYALHAC

SEQ ID NO: 2920 - protein, 9 aa, Artificial Sequence
  Description of Artificial Sequence: Synthetic peptide
TCNKCKNRT

SEQ ID NO: 2921 - protein, 9 aa, Artificial Sequence
  Description of Artificial Sequence: Synthetic peptide
TCRYALHGC

SEQ ID NO: 2922 - protein, 9 aa, Artificial Sequence
  Description of Artificial Sequence: Synthetic peptide
TCSFMMRQN

SEQ ID NO: 2923 - protein, 9 aa, Artificial Sequence
  Description of Artificial Sequence: Synthetic peptide
TCSRFDNQA

SEQ ID NO: 2924 - protein, 9 aa, Artificial Sequence
  Description of Artificial Sequence: Synthetic peptide
TCVSIARYY

SEQ ID NO: 2925 - protein, 9 aa, Artificial Sequence
  Description of Artificial Sequence: Synthetic peptide
TCWALFRGE

SEQ ID NO: 2926 - protein, 9 aa, Artificial Sequence
  Description of Artificial Sequence: Synthetic peptide
TCWDLFRGG

SEQ ID NO: 2927 - protein, 9 aa, Artificial Sequence
  Description of Artificial Sequence: Synthetic peptide
TCYFMMGQN

SEQ ID NO: 2928 - protein, 9 aa, Artificial Sequence
  Description of Artificial Sequence: Synthetic peptide
TCYFMMREN

SEQ ID NO: 2929 - protein, 9 aa, Artificial Sequence
  Description of Artificial Sequence: Synthetic peptide
TCYFMMRKN

SEQ ID NO: 2930 - protein, 9 aa, Artificial Sequence
  Description of Artificial Sequence: Synthetic peptide
TCYFMMRPN

SEQ ID NO: 2931 - protein, 9 aa, Artificial Sequence
  Description of Artificial Sequence: Synthetic peptide
TCYFMMRQD

SEQ ID NO: 2932 - protein, 9 aa, Artificial Sequence
  Description of Artificial Sequence: Synthetic peptide
TCYFMMRQK

SEQ ID NO: 2933 - protein, 9 aa, Artificial Sequence
  Description of Artificial Sequence: Synthetic peptide
TCYFMMRQT

SEQ ID NO: 2934 - protein, 9 aa, Artificial Sequence
  Description of Artificial Sequence: Synthetic peptide
TCYFMMRRN

SEQ ID NO: 2935 - protein, 9 aa, Artificial Sequence
  Description of Artificial Sequence: Synthetic peptide
TCYFMVRQN

SEQ ID NO: 2936 - protein, 9 aa, Artificial Sequence
  Description of Artificial Sequence: Synthetic peptide
TCYSIARYY

SEQ ID NO: 2937 - protein, 9 aa, Artificial Sequence
  Description of Artificial Sequence: Synthetic peptide
TCYSMMRQN

SEQ ID NO: 2938 - protein, 9 aa, Artificial Sequence
  Description of Artificial Sequence: Synthetic peptide
TCYVMMRQN

SEQ ID NO: 2939 - protein, 9 aa, Artificial Sequence
  Description of Artificial Sequence: Synthetic peptide
TCYYMMRQN

SEQ ID NO: 2940 - protein, 9 aa, Artificial Sequence
  Description of Artificial Sequence: Synthetic peptide
TDCVTYRSF

SEQ ID NO: 2941 - protein, 9 aa, Artificial Sequence
  Description of Artificial Sequence: Synthetic peptide
TFDLSNKVT

SEQ ID NO: 2942 - protein, 9 aa, Artificial Sequence
  Description of Artificial Sequence: Synthetic peptide
TFGWFMRIP

SEQ ID NO: 2943 - protein, 9 aa, Artificial Sequence
  Description of Artificial Sequence: Synthetic peptide
TFKGFHLQN

SEQ ID NO: 2944 - protein, 9 aa, Artificial Sequence
  Description of Artificial Sequence: Synthetic peptide
TFSKCAKYD

SEQ ID NO: 2945 - protein, 9 aa, Artificial Sequence
  Description of Artificial Sequence: Synthetic peptide
TFYFMMRQN

SEQ ID NO: 2946 - protein, 9 aa, Artificial Sequence
  Description of Artificial Sequence: Synthetic peptide
TGCVTYRSF

SEQ ID NO: 2947 - protein, 9 aa, Artificial Sequence
  Description of Artificial Sequence: Synthetic peptide
TGGLNERNG

SEQ ID NO: 2948 - protein, 9 aa, Artificial Sequence
  Description of Artificial Sequence: Synthetic peptide
TGGTFVRTM

SEQ ID NO: 2949 - protein, 9 aa, Artificial Sequence
  Description of Artificial Sequence: Synthetic peptide
TGMDKPVDA

SEQ ID NO: 2950 - protein, 9 aa, Artificial Sequence
  Description of Artificial Sequence: Synthetic peptide
TGQATERAL

SEQ ID NO: 2951 - protein, 9 aa, Artificial Sequence
  Description of Artificial Sequence: Synthetic peptide
TGTDHRVDA

SEQ ID NO: 2952 - protein, 9 aa, Artificial Sequence
  Description of Artificial Sequence: Synthetic peptide
TGWSTCMIP

SEQ ID NO: 2953 - protein, 9 aa, Artificial Sequence
  Description of Artificial Sequence: Synthetic peptide
TITKPINLF

SEQ ID NO: 2954 - protein, 9 aa, Artificial Sequence
  Description of Artificial Sequence: Synthetic peptide
TITKPSHLF

SEQ ID NO: 2955 - protein, 9 aa, Artificial Sequence
  Description of Artificial Sequence: Synthetic peptide
TLNKTLAES

SEQ ID NO: 2956 - protein, 9 aa, Artificial Sequence
  Description of Artificial Sequence: Synthetic peptide
TNTCECVDR

SEQ ID NO: 2957 - protein, 9 aa, Artificial Sequence
  Description of Artificial Sequence: Synthetic peptide
TNYIQYVWD

SEQ ID NO: 2958 - protein, 9 aa, Artificial Sequence
  Description of Artificial Sequence: Synthetic peptide
TPLMMCRAS

SEQ ID NO: 2959 - protein, 9 aa, Artificial Sequence
  Description of Artificial Sequence: Synthetic peptide
TPMMMCQAS

SEQ ID NO: 2960 - protein, 9 aa, Artificial Sequence
  Description of Artificial Sequence: Synthetic peptide
TRCYFVASQ

SEQ ID NO: 2961 - protein, 9 aa, Artificial Sequence
  Description of Artificial Sequence: Synthetic peptide
TRDAKVSNG

SEQ ID NO: 2962 - protein, 9 aa, Artificial Sequence
  Description of Artificial Sequence: Synthetic peptide
TREWMCVHC

SEQ ID NO: 2963 - protein, 9 aa, Artificial Sequence
  Description of Artificial Sequence: Synthetic peptide
TRHMGVSAG

SEQ ID NO: 2964 - protein, 9 aa, Artificial Sequence
  Description of Artificial Sequence: Synthetic peptide
TRKWMCVHC

SEQ ID NO: 2965 - protein, 9 aa, Artificial Sequence
  Description of Artificial Sequence: Synthetic peptide
TRLWMCVHC

SEQ ID NO: 2966 - protein, 9 aa, Artificial Sequence
  Description of Artificial Sequence: Synthetic peptide
TRMDFHFFF

SEQ ID NO: 2967 - protein, 9 aa, Artificial Sequence
  Description of Artificial Sequence: Synthetic peptide
TRPWMCVHC

SEQ ID NO: 2968 - protein, 9 aa, Artificial Sequence
  Description of Artificial Sequence: Synthetic peptide
TRQRMCVHC

SEQ ID NO: 2969 - protein, 9 aa, Artificial Sequence
  Description of Artificial Sequence: Synthetic peptide
TRQWMCAHC

SEQ ID NO: 2970 - protein, 9 aa, Artificial Sequence
  Description of Artificial Sequence: Synthetic peptide
TRQWMCIHC

SEQ ID NO: 2971 - protein, 9 aa, Artificial Sequence
  Description of Artificial Sequence: Synthetic peptide
TRQWMCLHC

SEQ ID NO: 2972 - protein, 9 aa, Artificial Sequence
  Description of Artificial Sequence: Synthetic peptide
TRQWMCVHG

SEQ ID NO: 2973 - protein, 9 aa, Artificial Sequence
  Description of Artificial Sequence: Synthetic peptide
TRQWMCVHW

SEQ ID NO: 2974 - protein, 9 aa, Artificial Sequence
  Description of Artificial Sequence: Synthetic peptide
TRQWMCVYC

SEQ ID NO: 2975 - protein, 9 aa, Artificial Sequence
  Description of Artificial Sequence: Synthetic peptide
TRQWMGVHC

SEQ ID NO: 2976 - protein, 9 aa, Artificial Sequence
  Description of Artificial Sequence: Synthetic peptide
TRQWMWVHC

SEQ ID NO: 2977 - protein, 9 aa, Artificial Sequence
  Description of Artificial Sequence: Synthetic peptide
TRTLYMIDR

SEQ ID NO: 2978 - protein, 9 aa, Artificial Sequence
  Description of Artificial Sequence: Synthetic peptide
TRTLYRINR

SEQ ID NO: 2979 - protein, 9 aa, Artificial Sequence
  Description of Artificial Sequence: Synthetic peptide
TRTPYMINR

SEQ ID NO: 2980 - protein, 9 aa, Artificial Sequence
  Description of Artificial Sequence: Synthetic peptide
TRWFQIGTE

SEQ ID NO: 2981 - protein, 9 aa, Artificial Sequence
  Description of Artificial Sequence: Synthetic peptide
TRYFMMRQN

SEQ ID NO: 2982 - protein, 9 aa, Artificial Sequence
  Description of Artificial Sequence: Synthetic peptide
TSCDRAHNA

SEQ ID NO: 2983 - protein, 9 aa, Artificial Sequence
  Description of Artificial Sequence: Synthetic peptide
TSCVTYRSF

SEQ ID NO: 2984 - protein, 9 aa, Artificial Sequence
  Description of Artificial Sequence: Synthetic peptide
TTCFFVASQ

SEQ ID NO: 2985 - protein, 9 aa, Artificial Sequence
  Description of Artificial Sequence: Synthetic peptide
TTCFIVASQ

SEQ ID NO: 2986 - protein, 9 aa, Artificial Sequence
  Description of Artificial Sequence: Synthetic peptide
TTCYFVASE

SEQ ID NO: 2987 - protein, 9 aa, Artificial Sequence
  Description of Artificial Sequence: Synthetic peptide
TTCYFVASP

SEQ ID NO: 2988 - protein, 9 aa, Artificial Sequence
  Description of Artificial Sequence: Synthetic peptide
TTCYFVASW

SEQ ID NO: 2989 - protein, 9 aa, Artificial Sequence
  Description of Artificial Sequence: Synthetic peptide
TTCYFVGSQ

SEQ ID NO: 2990 - protein, 9 aa, Artificial Sequence
  Description of Artificial Sequence: Synthetic peptide
TTCYFVSSQ

SEQ ID NO: 2991 - protein, 9 aa, Artificial Sequence
  Description of Artificial Sequence: Synthetic peptide
TTCYFVVSQ

SEQ ID NO: 2992 - protein, 9 aa, Artificial Sequence
  Description of Artificial Sequence: Synthetic peptide
TTCYIVASE

SEQ ID NO: 2993 - protein, 9 aa, Artificial Sequence
  Description of Artificial Sequence: Synthetic peptide
TTCYLVASP

SEQ ID NO: 2994 - protein, 9 aa, Artificial Sequence
  Description of Artificial Sequence: Synthetic peptide
TTFKHTDHL

SEQ ID NO: 2995 - protein, 9 aa, Artificial Sequence
  Description of Artificial Sequence: Synthetic peptide
TTGYFVASQ

SEQ ID NO: 2996 - protein, 9 aa, Artificial Sequence
  Description of Artificial Sequence: Synthetic peptide
TTRYFVASQ

SEQ ID NO: 2997 - protein, 9 aa, Artificial Sequence
  Description of Artificial Sequence: Synthetic peptide
TTWYFVASQ

SEQ ID NO: 2998 - protein, 9 aa, Artificial Sequence
  Description of Artificial Sequence: Synthetic peptide
TTYYFVASQ

SEQ ID NO: 2999 - protein, 9 aa, Artificial Sequence
  Description of Artificial Sequence: Synthetic peptide
TVGLNERNA

SEQ ID NO: 3000 - protein, 9 aa, Artificial Sequence
  Description of Artificial Sequence: Synthetic peptide
TVGLNERNS

SEQ ID NO: 3001 - protein, 9 aa, Artificial Sequence
  Description of Artificial Sequence: Synthetic peptide
TVGLNKRNG

SEQ ID NO: 3002 - protein, 9 aa, Artificial Sequence
  Description of Artificial Sequence: Synthetic peptide
TVGVNERNG

SEQ ID NO: 3003 - protein, 9 aa, Artificial Sequence
  Description of Artificial Sequence: Synthetic peptide
TVKMHFAAP

SEQ ID NO: 3004 - protein, 9 aa, Artificial Sequence
  Description of Artificial Sequence: Synthetic peptide
TVKTNFTSK

SEQ ID NO: 3005 - protein, 9 aa, Artificial Sequence
  Description of Artificial Sequence: Synthetic peptide
TVQSNFTSK

SEQ ID NO: 3006 - protein, 9 aa, Artificial Sequence
  Description of Artificial Sequence: Synthetic peptide
TWALAAKYE

SEQ ID NO: 3007 - protein, 9 aa, Artificial Sequence
  Description of Artificial Sequence: Synthetic peptide
TWFSIARYY

SEQ ID NO: 3008 - protein, 9 aa, Artificial Sequence
  Description of Artificial Sequence: Synthetic peptide
TWKWDEYCN

SEQ ID NO: 3009 - protein, 9 aa, Artificial Sequence
  Description of Artificial Sequence: Synthetic peptide
TWKWDKYCH

SEQ ID NO: 3010 - protein, 9 aa, Artificial Sequence
  Description of Artificial Sequence: Synthetic peptide
TWKWDKYYN

SEQ ID NO: 3011 - protein, 9 aa, Artificial Sequence
  Description of Artificial Sequence: Synthetic peptide
TWKWDRYCN

SEQ ID NO: 3012 - protein, 9 aa, Artificial Sequence
  Description of Artificial Sequence: Synthetic peptide
TWNKCNMHV

SEQ ID NO: 3013 - protein, 9 aa, Artificial Sequence
  Description of Artificial Sequence: Synthetic peptide
TWPYHDNRH

SEQ ID NO: 3014 - protein, 9 aa, Artificial Sequence
  Description of Artificial Sequence: Synthetic peptide
TWQTKDFYN

SEQ ID NO: 3015 - protein, 9 aa, Artificial Sequence
  Description of Artificial Sequence: Synthetic peptide
TWSKCNLHV

SEQ ID NO: 3016 - protein, 9 aa, Artificial Sequence
  Description of Artificial Sequence: Synthetic peptide
TWSKCNMRV

SEQ ID NO: 3017 - protein, 9 aa, Artificial Sequence
  Description of Artificial Sequence: Synthetic peptide
TWSKCNVHV

SEQ ID NO: 3018 - protein, 9 aa, Artificial Sequence
  Description of Artificial Sequence: Synthetic peptide
TWSKCSMHV

SEQ ID NO: 3019 - protein, 9 aa, Artificial Sequence
  Description of Artificial Sequence: Synthetic peptide
TWSKCTMHV

SEQ ID NO: 3020 - protein, 9 aa, Artificial Sequence
  Description of Artificial Sequence: Synthetic peptide
TWSKFNMHV

SEQ ID NO: 3021 - protein, 9 aa, Artificial Sequence
  Description of Artificial Sequence: Synthetic peptide
TWSRCNMHV

SEQ ID NO: 3022 - protein, 9 aa, Artificial Sequence
  Description of Artificial Sequence: Synthetic peptide
TWTYCEQRH

SEQ ID NO: 3023 - protein, 9 aa, Artificial Sequence
  Description of Artificial Sequence: Synthetic peptide
TYCDRADNG

SEQ ID NO: 3024 - protein, 9 aa, Artificial Sequence
  Description of Artificial Sequence: Synthetic peptide
TYCDRAHDV

SEQ ID NO: 3025 - protein, 9 aa, Artificial Sequence
  Description of Artificial Sequence: Synthetic peptide
TYCDRAHNA

SEQ ID NO: 3026 - protein, 9 aa, Artificial Sequence
  Description of Artificial Sequence: Synthetic peptide
TYCDRTHNG

SEQ ID NO: 3027 - protein, 9 aa, Artificial Sequence
  Description of Artificial Sequence: Synthetic peptide
TYFDRAHTG

SEQ ID NO: 3028 - protein, 9 aa, Artificial Sequence
  Description of Artificial Sequence: Synthetic peptide
TYWDRAHNG

SEQ ID NO: 3029 - protein, 9 aa, Artificial Sequence
  Description of Artificial Sequence: Synthetic peptide
TYYDRAHNG

SEQ ID NO: 3030 - protein, 9 aa, Artificial Sequence
  Description of Artificial Sequence: Synthetic peptide
VACRMWHQP

SEQ ID NO: 3031 - protein, 9 aa, Artificial Sequence
  Description of Artificial Sequence: Synthetic peptide
VAEKRMDRS

SEQ ID NO: 3032 - protein, 9 aa, Artificial Sequence
  Description of Artificial Sequence: Synthetic peptide
VARHVDHDL

SEQ ID NO: 3033 - protein, 9 aa, Artificial Sequence
  Description of Artificial Sequence: Synthetic peptide
VAWSNEDQK

SEQ ID NO: 3034 - protein, 9 aa, Artificial Sequence
  Description of Artificial Sequence: Synthetic peptide
VCHTFLRLG

SEQ ID NO: 3035 - protein, 9 aa, Artificial Sequence
  Description of Artificial Sequence: Synthetic peptide
VFCRMWHQP

SEQ ID NO: 3036 - protein, 9 aa, Artificial Sequence
  Description of Artificial Sequence: Synthetic peptide
VGEKRMDRS

SEQ ID NO: 3037 - protein, 9 aa, Artificial Sequence
  Description of Artificial Sequence: Synthetic peptide
VHEQLEGCK

SEQ ID NO: 3038 - protein, 9 aa, Artificial Sequence
  Description of Artificial Sequence: Synthetic peptide
VILKMTKVL

SEQ ID NO: 3039 - protein, 9 aa, Artificial Sequence
  Description of Artificial Sequence: Synthetic peptide
VLGNRHHQC

SEQ ID NO: 3040 - protein, 9 aa, Artificial Sequence
  Description of Artificial Sequence: Synthetic peptide
VLKKFGHSF

SEQ ID NO: 3041 - protein, 9 aa, Artificial Sequence
  Description of Artificial Sequence: Synthetic peptide
VLMQYERLF

SEQ ID NO: 3042 - protein, 9 aa, Artificial Sequence
  Description of Artificial Sequence: Synthetic peptide
VLNKTLAES

SEQ ID NO: 3043 - protein, 9 aa, Artificial Sequence
  Description of Artificial Sequence: Synthetic peptide
VLPKFGHSF

SEQ ID NO: 3044 - protein, 9 aa, Artificial Sequence
  Description of Artificial Sequence: Synthetic peptide
VLQKFGHSV

SEQ ID NO: 3045 - protein, 9 aa, Artificial Sequence
  Description of Artificial Sequence: Synthetic peptide
VLRKFGHSF

SEQ ID NO: 3046 - protein, 9 aa, Artificial Sequence
  Description of Artificial Sequence: Synthetic peptide
VMKTRCDYD

SEQ ID NO: 3047 - protein, 9 aa, Artificial Sequence
  Description of Artificial Sequence: Synthetic peptide
VMMHRVMSD

SEQ ID NO: 3048 - protein, 9 aa, Artificial Sequence
  Description of Artificial Sequence: Synthetic peptide
VPIEYMTEK

SEQ ID NO: 3049 - protein, 9 aa, Artificial Sequence
  Description of Artificial Sequence: Synthetic peptide
VPIPYMTEK

SEQ ID NO: 3050 - protein, 9 aa, Artificial Sequence
  Description of Artificial Sequence: Synthetic peptide
VPIQYMAEK

SEQ ID NO: 3051 - protein, 9 aa, Artificial Sequence
  Description of Artificial Sequence: Synthetic peptide
VPMQYMTEK

SEQ ID NO: 3052 - protein, 9 aa, Artificial Sequence
  Description of Artificial Sequence: Synthetic peptide
VQEQLESCK

SEQ ID NO: 3053 - protein, 9 aa, Artificial Sequence
  Description of Artificial Sequence: Synthetic peptide
VQKLRDLCC

SEQ ID NO: 3054 - protein, 9 aa, Artificial Sequence
  Description of Artificial Sequence: Synthetic peptide
VQMQYARLF

SEQ ID NO: 3055 - protein, 9 aa, Artificial Sequence
  Description of Artificial Sequence: Synthetic peptide
VQMQYERLY

SEQ ID NO: 3056 - protein, 9 aa, Artificial Sequence
  Description of Artificial Sequence: Synthetic peptide
VQMQYQRLF

SEQ ID NO: 3057 - protein, 9 aa, Artificial Sequence
  Description of Artificial Sequence: Synthetic peptide
VQMQYVRLF

SEQ ID NO: 3058 - protein, 9 aa, Artificial Sequence
  Description of Artificial Sequence: Synthetic peptide
VQTYQHVDG

SEQ ID NO: 3059 - protein, 9 aa, Artificial Sequence
  Description of Artificial Sequence: Synthetic peptide
VQVQYERLF

SEQ ID NO: 3060 - protein, 9 aa, Artificial Sequence
  Description of Artificial Sequence: Synthetic peptide
VRIQYMTEK

SEQ ID NO: 3061 - protein, 9 aa, Artificial Sequence
  Description of Artificial Sequence: Synthetic peptide
VRMQYERLF

SEQ ID NO: 3062 - protein, 9 aa, Artificial Sequence
  Description of Artificial Sequence: Synthetic peptide
VSAECYFDM

SEQ ID NO: 3063 - protein, 9 aa, Artificial Sequence
  Description of Artificial Sequence: Synthetic peptide
VSDEFYFDM

SEQ ID NO: 3064 - protein, 9 aa, Artificial Sequence
  Description of Artificial Sequence: Synthetic peptide
VSDVCYFDM

SEQ ID NO: 3065 - protein, 9 aa, Artificial Sequence
  Description of Artificial Sequence: Synthetic peptide
VSGECYFDM

SEQ ID NO: 3066 - protein, 9 aa, Artificial Sequence
  Description of Artificial Sequence: Synthetic peptide
VTWMVRTSN

SEQ ID NO: 3067 - protein, 9 aa, Artificial Sequence
  Description of Artificial Sequence: Synthetic peptide
VVCRMWYQP

SEQ ID NO: 3068 - protein, 9 aa, Artificial Sequence
  Description of Artificial Sequence: Synthetic peptide
VVEKRMERS

SEQ ID NO: 3069 - protein, 9 aa, Artificial Sequence
  Description of Artificial Sequence: Synthetic peptide
VVFRMWHQP

SEQ ID NO: 3070 - protein, 9 aa, Artificial Sequence
  Description of Artificial Sequence: Synthetic peptide
VVWMQGFHP

SEQ ID NO: 3071 - protein, 9 aa, Artificial Sequence
  Description of Artificial Sequence: Synthetic peptide
VVYRMWHQP

SEQ ID NO: 3072 - protein, 9 aa, Artificial Sequence
  Description of Artificial Sequence: Synthetic peptide
VWRYFCVSL

SEQ ID NO: 3073 - protein, 9 aa, Artificial Sequence
  Description of Artificial Sequence: Synthetic peptide
VWYKWWVMF

SEQ ID NO: 3074 - protein, 9 aa, Artificial Sequence
  Description of Artificial Sequence: Synthetic peptide
WATKWDVHR

SEQ ID NO: 3075 - protein, 9 aa, Artificial Sequence
  Description of Artificial Sequence: Synthetic peptide
WCNTRLAMA

SEQ ID NO: 3076 - protein, 9 aa, Artificial Sequence
  Description of Artificial Sequence: Synthetic peptide
WCTSRLAMA

SEQ ID NO: 3077 - protein, 9 aa, Artificial Sequence
  Description of Artificial Sequence: Synthetic peptide
WCTTRLTMA

SEQ ID NO: 3078 - protein, 9 aa, Artificial Sequence
  Description of Artificial Sequence: Synthetic peptide
WCTTRLVMA

SEQ ID NO: 3079 - protein, 9 aa, Artificial Sequence
  Description of Artificial Sequence: Synthetic peptide
WWMHGRGGR

SEQ ID NO: 3080 - protein, 9 aa, Artificial Sequence
  Description of Artificial Sequence: Synthetic peptide
YACSLLQQY

SEQ ID NO: 3081 - protein, 9 aa, Artificial Sequence
  Description of Artificial Sequence: Synthetic peptide
YAVQKERYN

SEQ ID NO: 3082 - protein, 9 aa, Artificial Sequence
  Description of Artificial Sequence: Synthetic peptide
YCHKTAVAA

SEQ ID NO: 3083 - protein, 9 aa, Artificial Sequence
  Description of Artificial Sequence: Synthetic peptide
YCHQQDRIT

SEQ ID NO: 3084 - protein, 9 aa, Artificial Sequence
  Description of Artificial Sequence: Synthetic peptide
YCNKTAVAA

SEQ ID NO: 3085 - protein, 9 aa, Artificial Sequence
  Description of Artificial Sequence: Synthetic peptide
YCYKNAVAA

SEQ ID NO: 3086 - protein, 9 aa, Artificial Sequence
  Description of Artificial Sequence: Synthetic peptide
YCYKTAVAV

SEQ ID NO: 3087 - protein, 9 aa, Artificial Sequence
  Description of Artificial Sequence: Synthetic peptide
YCYRTAVAA

SEQ ID NO: 3088 - protein, 9 aa, Artificial Sequence
  Description of Artificial Sequence: Synthetic peptide
YGEAQITSP

SEQ ID NO: 3089 - protein, 9 aa, Artificial Sequence
  Description of Artificial Sequence: Synthetic peptide
YIKQICADA

SEQ ID NO: 3090 - protein, 9 aa, Artificial Sequence
  Description of Artificial Sequence: Synthetic peptide
YIKQICSDS

SEQ ID NO: 3091 - protein, 9 aa, Artificial Sequence
  Description of Artificial Sequence: Synthetic peptide
YINKNPHQM

SEQ ID NO: 3092 - protein, 9 aa, Artificial Sequence
  Description of Artificial Sequence: Synthetic peptide
YLHKNPHQM

SEQ ID NO: 3093 - protein, 9 aa, Artificial Sequence
  Description of Artificial Sequence: Synthetic peptide
YLNKNHHQM

SEQ ID NO: 3094 - protein, 9 aa, Artificial Sequence
  Description of Artificial Sequence: Synthetic peptide
YLNKNLHQM

SEQ ID NO: 3095 - protein, 9 aa, Artificial Sequence
  Description of Artificial Sequence: Synthetic peptide
YLNKNPHQR

SEQ ID NO: 3096 - protein, 9 aa, Artificial Sequence
  Description of Artificial Sequence: Synthetic peptide
YLNKNPHQV

SEQ ID NO: 3097 - protein, 9 aa, Artificial Sequence
  Description of Artificial Sequence: Synthetic peptide
YLNQNPHQM

SEQ ID NO: 3098 - protein, 9 aa, Artificial Sequence
  Description of Artificial Sequence: Synthetic peptide
YLTKNPHQM

SEQ ID NO: 3099 - protein, 9 aa, Artificial Sequence
  Description of Artificial Sequence: Synthetic peptide
YMIKRCSQG

SEQ ID NO: 3100 - protein, 9 aa, Artificial Sequence
  Description of Artificial Sequence: Synthetic peptide
YPTQRLHHL

SEQ ID NO: 3101 - protein, 9 aa, Artificial Sequence
  Description of Artificial Sequence: Synthetic peptide
YRDEAKCWV

SEQ ID NO: 3102 - protein, 9 aa, Artificial Sequence
  Description of Artificial Sequence: Synthetic peptide
YRDEAKSWA

SEQ ID NO: 3103 - protein, 9 aa, Artificial Sequence
  Description of Artificial Sequence: Synthetic peptide
YRDEAQSWV

SEQ ID NO: 3104 - protein, 9 aa, Artificial Sequence
  Description of Artificial Sequence: Synthetic peptide
YRDEDKSWV

SEQ ID NO: 3105 - protein, 9 aa, Artificial Sequence
  Description of Artificial Sequence: Synthetic peptide
YRGEAKSWV

SEQ ID NO: 3106 - protein, 9 aa, Artificial Sequence
  Description of Artificial Sequence: Synthetic peptide
YRHEAKSWV

SEQ ID NO: 3107 - protein, 9 aa, Artificial Sequence
  Description of Artificial Sequence: Synthetic peptide
YRKQGHGEK

SEQ ID NO: 3108 - protein, 9 aa, Artificial Sequence
  Description of Artificial Sequence: Synthetic peptide
YRMEYGTCK

SEQ ID NO: 3109 - protein, 9 aa, Artificial Sequence
  Description of Artificial Sequence: Synthetic peptide
YRMEYGTWE

SEQ ID NO: 3110 - protein, 9 aa, Artificial Sequence
  Description of Artificial Sequence: Synthetic peptide
YSAQLRQQM

SEQ ID NO: 3111 - protein, 9 aa, Artificial Sequence
  Description of Artificial Sequence: Synthetic peptide
YSVDRRSDS

SEQ ID NO: 3112 - protein, 9 aa, Artificial Sequence
  Description of Artificial Sequence: Synthetic peptide
YWCPNQWWR

SEQ ID NO: 3113 - protein, 9 aa, Artificial Sequence
  Description of Artificial Sequence: Synthetic peptide
YWCPSKWWR

SEQ ID NO: 3114 - protein, 9 aa, Artificial Sequence
  Description of Artificial Sequence: Synthetic peptide
YWCPSQLWR

SEQ ID NO: 3115 - protein, 9 aa, Artificial Sequence
  Description of Artificial Sequence: Synthetic peptide
YWCPSQWLR

SEQ ID NO: 3116 - protein, 9 aa, Artificial Sequence
  Description of Artificial Sequence: Synthetic peptide
YWGLIHCWN

SEQ ID NO: 3117 - protein, 9 aa, Artificial Sequence
  Description of Artificial Sequence: Synthetic peptide
YWGPSQWWR

SEQ ID NO: 3118 - protein, 9 aa, Artificial Sequence
  Description of Artificial Sequence: Synthetic peptide
KIEYGHWIH

SEQ ID NO: 3119 - protein, 9 aa, Artificial Sequence
  Description of Artificial Sequence: Synthetic peptide
TIDVKRWGQ

SEQ ID NO: 3120 - protein, 9 aa, Artificial Sequence
  Description of Artificial Sequence: Synthetic peptide
CAIPRHVFP

SEQ ID NO: 3121 - protein, 9 aa, Artificial Sequence
  Description of Artificial Sequence: Synthetic peptide
CSYKNQQHQ

SEQ ID NO: 3122 - protein, 9 aa, Artificial Sequence
  Description of Artificial Sequence: Synthetic peptide
AAQKGQHYS

SEQ ID NO: 3123 - protein, 9 aa, Artificial Sequence
  Description of Artificial Sequence: Synthetic peptide
AEMPTVNNI

SEQ ID NO: 3124 - protein, 9 aa, Artificial Sequence
  Description of Artificial Sequence: Synthetic peptide
AERTKELHS

SEQ ID NO: 3125 - protein, 9 aa, Artificial Sequence
  Description of Artificial Sequence: Synthetic peptide
AGWHNTFWG

SEQ ID NO: 3126 - protein, 9 aa, Artificial Sequence
  Description of Artificial Sequence: Synthetic peptide
AHDAYTKNS

SEQ ID NO: 3127 - protein, 9 aa, Artificial Sequence
  Description of Artificial Sequence: Synthetic peptide
ANVHSGQCQ

SEQ ID NO: 3128 - protein, 9 aa, Artificial Sequence
  Description of Artificial Sequence: Synthetic peptide
AQVFSVGWT

SEQ ID NO: 3129 - protein, 9 aa, Artificial Sequence
  Description of Artificial Sequence: Synthetic peptide
ASHRYILAE

SEQ ID NO: 3130 - protein, 9 aa, Artificial Sequence
  Description of Artificial Sequence: Synthetic peptide
ATMTFHFSP

SEQ ID NO: 3131 - protein, 9 aa, Artificial Sequence
  Description of Artificial Sequence: Synthetic peptide
ATVLEASPD

SEQ ID NO: 3132 - protein, 9 aa, Artificial Sequence
  Description of Artificial Sequence: Synthetic peptide
AVHLKAACP

SEQ ID NO: 3133 - protein, 9 aa, Artificial Sequence
  Description of Artificial Sequence: Synthetic peptide
AVMHKNADY

SEQ ID NO: 3134 - protein, 9 aa, Artificial Sequence
  Description of Artificial Sequence: Synthetic peptide
AVMSIPFQS

SEQ ID NO: 3135 - protein, 9 aa, Artificial Sequence
  Description of Artificial Sequence: Synthetic peptide
AVQSCWTGT

SEQ ID NO: 3136 - protein, 9 aa, Artificial Sequence
  Description of Artificial Sequence: Synthetic peptide
CFHRCLFIL

SEQ ID NO: 3137 - protein, 9 aa, Artificial Sequence
  Description of Artificial Sequence: Synthetic peptide
CHLSTCRWP

SEQ ID NO: 3138 - protein, 9 aa, Artificial Sequence
  Description of Artificial Sequence: Synthetic peptide
CIHMLKLAN

SEQ ID NO: 3139 - protein, 9 aa, Artificial Sequence
  Description of Artificial Sequence: Synthetic peptide
CIHQYGRVH

SEQ ID NO: 3140 - protein, 9 aa, Artificial Sequence
  Description of Artificial Sequence: Synthetic peptide
CILRHIKEN

SEQ ID NO: 3141 - protein, 9 aa, Artificial Sequence
  Description of Artificial Sequence: Synthetic peptide
CKMRQRPFR

SEQ ID NO: 3142 - protein, 9 aa, Artificial Sequence
  Description of Artificial Sequence: Synthetic peptide
CLIRNVAGG

SEQ ID NO: 3143 - protein, 9 aa, Artificial Sequence
  Description of Artificial Sequence: Synthetic peptide
CPHKFLMER

SEQ ID NO: 3144 - protein, 9 aa, Artificial Sequence
  Description of Artificial Sequence: Synthetic peptide
CPRCYHRAQ

SEQ ID NO: 3145 - protein, 9 aa, Artificial Sequence
  Description of Artificial Sequence: Synthetic peptide
CSGSKMRMG

SEQ ID NO: 3146 - protein, 9 aa, Artificial Sequence
  Description of Artificial Sequence: Synthetic peptide
CTANRAMML

SEQ ID NO: 3147 - protein, 9 aa, Artificial Sequence
  Description of Artificial Sequence: Synthetic peptide
CTQRRMTFP

SEQ ID NO: 3148 - protein, 9 aa, Artificial Sequence
  Description of Artificial Sequence: Synthetic peptide
CTSYRLSTP

SEQ ID NO: 3149 - protein, 9 aa, Artificial Sequence
  Description of Artificial Sequence: Synthetic peptide
CVMSYINWH

SEQ ID NO: 3150 - protein, 9 aa, Artificial Sequence
  Description of Artificial Sequence: Synthetic peptide
CVNYNLGND

SEQ ID NO: 3151 - protein, 9 aa, Artificial Sequence
  Description of Artificial Sequence: Synthetic peptide
CYKWIDMCN

SEQ ID NO: 3152 - protein, 9 aa, Artificial Sequence
  Description of Artificial Sequence: Synthetic peptide
DHEWYCSLA

SEQ ID NO: 3153 - protein, 9 aa, Artificial Sequence
  Description of Artificial Sequence: Synthetic peptide
DILRYHTQL

SEQ ID NO: 3154 - protein, 9 aa, Artificial Sequence
  Description of Artificial Sequence: Synthetic peptide
DSFQTENSM

SEQ ID NO: 3155 - protein, 9 aa, Artificial Sequence
  Description of Artificial Sequence: Synthetic peptide
DTWIMSQVH

SEQ ID NO: 3156 - protein, 9 aa, Artificial Sequence
  Description of Artificial Sequence: Synthetic peptide
DVKAPHGCV

SEQ ID NO: 3157 - protein, 9 aa, Artificial Sequence
  Description of Artificial Sequence: Synthetic peptide
EDGRADWHV

SEQ ID NO: 3158 - protein, 9 aa, Artificial Sequence
  Description of Artificial Sequence: Synthetic peptide
EHDCYMAVV

SEQ ID NO: 3159 - protein, 9 aa, Artificial Sequence
  Description of Artificial Sequence: Synthetic peptide
ETALLEFRR

SEQ ID NO: 3160 - protein, 9 aa, Artificial Sequence
  Description of Artificial Sequence: Synthetic peptide
EVCQDYQQL

SEQ ID NO: 3161 - protein, 9 aa, Artificial Sequence
  Description of Artificial Sequence: Synthetic peptide
EWKRRLKRR

SEQ ID NO: 3162 - protein, 9 aa, Artificial Sequence
  Description of Artificial Sequence: Synthetic peptide
FCHLIMRYY

SEQ ID NO: 3163 - protein, 9 aa, Artificial Sequence
  Description of Artificial Sequence: Synthetic peptide
FCNYVATDD

SEQ ID NO: 3164 - protein, 9 aa, Artificial Sequence
  Description of Artificial Sequence: Synthetic peptide
FHLRSHWMP

SEQ ID NO: 3165 - protein, 9 aa, Artificial Sequence
  Description of Artificial Sequence: Synthetic peptide
GECRESCVT

SEQ ID NO: 3166 - protein, 9 aa, Artificial Sequence
  Description of Artificial Sequence: Synthetic peptide
GKSDCEHMY

SEQ ID NO: 3167 - protein, 9 aa, Artificial Sequence
  Description of Artificial Sequence: Synthetic peptide
GMHETSVND

SEQ ID NO: 3168 - protein, 9 aa, Artificial Sequence
  Description of Artificial Sequence: Synthetic peptide
GPPLFTMIG

SEQ ID NO: 3169 - protein, 9 aa, Artificial Sequence
  Description of Artificial Sequence: Synthetic peptide
GTTQARIGS

SEQ ID NO: 3170 - protein, 9 aa, Artificial Sequence
  Description of Artificial Sequence: Synthetic peptide
GTVCNNECR

SEQ ID NO: 3171 - protein, 9 aa, Artificial Sequence
  Description of Artificial Sequence: Synthetic peptide
GYIQVHVFN

SEQ ID NO: 3172 - protein, 9 aa, Artificial Sequence
  Description of Artificial Sequence: Synthetic peptide
GYQRAYVPF

SEQ ID NO: 3173 - protein, 9 aa, Artificial Sequence
  Description of Artificial Sequence: Synthetic peptide
HALTWMRAK

SEQ ID NO: 3174 - protein, 9 aa, Artificial Sequence
  Description of Artificial Sequence: Synthetic peptide
HFPYNFWYY

SEQ ID NO: 3175 - protein, 9 aa, Artificial Sequence
  Description of Artificial Sequence: Synthetic peptide
HKIYGSTPY

SEQ ID NO: 3176 - protein, 9 aa, Artificial Sequence
  Description of Artificial Sequence: Synthetic peptide
HSQPDKTGA

SEQ ID NO: 3177 - protein, 9 aa, Artificial Sequence
  Description of Artificial Sequence: Synthetic peptide
HSYNWDEGG

SEQ ID NO: 3178 - protein, 9 aa, Artificial Sequence
  Description of Artificial Sequence: Synthetic peptide
HVMTRNNVY

SEQ ID NO: 3179 - protein, 9 aa, Artificial Sequence
  Description of Artificial Sequence: Synthetic peptide
IIQKTQHNT

SEQ ID NO: 3180 - protein, 9 aa, Artificial Sequence
  Description of Artificial Sequence: Synthetic peptide
IKVQMECHM

SEQ ID NO: 3181 - protein, 9 aa, Artificial Sequence
  Description of Artificial Sequence: Synthetic peptide
ILYNHWVIG

SEQ ID NO: 3182 - protein, 9 aa, Artificial Sequence
  Description of Artificial Sequence: Synthetic peptide
IMEEARTYC

SEQ ID NO: 3183 - protein, 9 aa, Artificial Sequence
  Description of Artificial Sequence: Synthetic peptide
IMSNYCLTA

SEQ ID NO: 3184 - protein, 9 aa, Artificial Sequence
  Description of Artificial Sequence: Synthetic peptide
INKVQTFGL

SEQ ID NO: 3185 - protein, 9 aa, Artificial Sequence
  Description of Artificial Sequence: Synthetic peptide
IRCCTKPLT

SEQ ID NO: 3186 - protein, 9 aa, Artificial Sequence
  Description of Artificial Sequence: Synthetic peptide
KCATYPSHD

SEQ ID NO: 3187 - protein, 9 aa, Artificial Sequence
  Description of Artificial Sequence: Synthetic peptide
KIGMEEVMS

SEQ ID NO: 3188 - protein, 9 aa, Artificial Sequence
  Description of Artificial Sequence: Synthetic peptide
KILIRDCGV

SEQ ID NO: 3189 - protein, 9 aa, Artificial Sequence
  Description of Artificial Sequence: Synthetic peptide
KKKYWKMED

SEQ ID NO: 3190 - protein, 9 aa, Artificial Sequence
  Description of Artificial Sequence: Synthetic peptide
KMLYSSYTQ

SEQ ID NO: 3191 - protein, 9 aa, Artificial Sequence
  Description of Artificial Sequence: Synthetic peptide
KNEWPCIGF

SEQ ID NO: 3192 - protein, 9 aa, Artificial Sequence
  Description of Artificial Sequence: Synthetic peptide
KNKTSEYAC

SEQ ID NO: 3193 - protein, 9 aa, Artificial Sequence
  Description of Artificial Sequence: Synthetic peptide
KTFFHLSFA

SEQ ID NO: 3194 - protein, 9 aa, Artificial Sequence
  Description of Artificial Sequence: Synthetic peptide
KWADQRNSF

SEQ ID NO: 3195 - protein, 9 aa, Artificial Sequence
  Description of Artificial Sequence: Synthetic peptide
LCMLAQIME

SEQ ID NO: 3196 - protein, 9 aa, Artificial Sequence
  Description of Artificial Sequence: Synthetic peptide
LLQKMWAPT

SEQ ID NO: 3197 - protein, 9 aa, Artificial Sequence
  Description of Artificial Sequence: Synthetic peptide
LMNRRADER

SEQ ID NO: 3198 - protein, 9 aa, Artificial Sequence
  Description of Artificial Sequence: Synthetic peptide
LVHCFLKSA

SEQ ID NO: 3199 - protein, 9 aa, Artificial Sequence
  Description of Artificial Sequence: Synthetic peptide
LYCLCKNWC

SEQ ID NO: 3200 - protein, 9 aa, Artificial Sequence
  Description of Artificial Sequence: Synthetic peptide
LYGLKMMYN

SEQ ID NO: 3201 - protein, 9 aa, Artificial Sequence
  Description of Artificial Sequence: Synthetic peptide
MANMVWQNW

SEQ ID NO: 3202 - protein, 9 aa, Artificial Sequence
  Description of Artificial Sequence: Synthetic peptide
MGAMALELA

SEQ ID NO: 3203 - protein, 9 aa, Artificial Sequence
  Description of Artificial Sequence: Synthetic peptide
MSKIKQRLN

SEQ ID NO: 3204 - protein, 9 aa, Artificial Sequence
  Description of Artificial Sequence: Synthetic peptide
MVNRPATCV

SEQ ID NO: 3205 - protein, 9 aa, Artificial Sequence
  Description of Artificial Sequence: Synthetic peptide
MVTPHDHWH

SEQ ID NO: 3206 - protein, 9 aa, Artificial Sequence
  Description of Artificial Sequence: Synthetic peptide
NCDSKVVGH

SEQ ID NO: 3207 - protein, 9 aa, Artificial Sequence
  Description of Artificial Sequence: Synthetic peptide
NCLKEIVVD

SEQ ID NO: 3208 - protein, 9 aa, Artificial Sequence
  Description of Artificial Sequence: Synthetic peptide
NHHCCTPSP

SEQ ID NO: 3209 - protein, 9 aa, Artificial Sequence
  Description of Artificial Sequence: Synthetic peptide
NHRWNFGKS

SEQ ID NO: 3210 - protein, 9 aa, Artificial Sequence
  Description of Artificial Sequence: Synthetic peptide
NLVDCECRV

SEQ ID NO: 3211 - protein, 9 aa, Artificial Sequence
  Description of Artificial Sequence: Synthetic peptide
NTCEGWSHF

SEQ ID NO: 3212 - protein, 9 aa, Artificial Sequence
  Description of Artificial Sequence: Synthetic peptide
PHMPYSDQQ

SEQ ID NO: 3213 - protein, 9 aa, Artificial Sequence
  Description of Artificial Sequence: Synthetic peptide
PQYSVCGGP

SEQ ID NO: 3214 - protein, 9 aa, Artificial Sequence
  Description of Artificial Sequence: Synthetic peptide
PSARSEQQD

SEQ ID NO: 3215 - protein, 9 aa, Artificial Sequence
  Description of Artificial Sequence: Synthetic peptide
QAGGSGFNE

SEQ ID NO: 3216 - protein, 9 aa, Artificial Sequence
  Description of Artificial Sequence: Synthetic peptide
QISAYGRPL

SEQ ID NO: 3217 - protein, 9 aa, Artificial Sequence
  Description of Artificial Sequence: Synthetic peptide
QQNGSNNFM

SEQ ID NO: 3218 - protein, 9 aa, Artificial Sequence
  Description of Artificial Sequence: Synthetic peptide
QSTPTLGPK

SEQ ID NO: 3219 - protein, 9 aa, Artificial Sequence
  Description of Artificial Sequence: Synthetic peptide
QVGTHNHMI

SEQ ID NO: 3220 - protein, 9 aa, Artificial Sequence
  Description of Artificial Sequence: Synthetic peptide
QWVHKQNLD

SEQ ID NO: 3221 - protein, 9 aa, Artificial Sequence
  Description of Artificial Sequence: Synthetic peptide
QYADFKAQQ

SEQ ID NO: 3222 - protein, 9 aa, Artificial Sequence
  Description of Artificial Sequence: Synthetic peptide
QYYMTIHHF

SEQ ID NO: 3223 - protein, 9 aa, Artificial Sequence
  Description of Artificial Sequence: Synthetic peptide
RAETTKQLM

SEQ ID NO: 3224 - protein, 9 aa, Artificial Sequence
  Description of Artificial Sequence: Synthetic peptide
RCWITEVSY

SEQ ID NO: 3225 - protein, 9 aa, Artificial Sequence
  Description of Artificial Sequence: Synthetic peptide
RELSVQQTI

SEQ ID NO: 3226 - protein, 9 aa, Artificial Sequence
  Description of Artificial Sequence: Synthetic peptide
RGKGHGTDL

SEQ ID NO: 3227 - protein, 9 aa, Artificial Sequence
  Description of Artificial Sequence: Synthetic peptide
RGLKCYMRN

SEQ ID NO: 3228 - protein, 9 aa, Artificial Sequence
  Description of Artificial Sequence: Synthetic peptide
RVHTIDLTH

SEQ ID NO: 3229 - protein, 9 aa, Artificial Sequence
  Description of Artificial Sequence: Synthetic peptide
RYQPVENIE

SEQ ID NO: 3230 - protein, 9 aa, Artificial Sequence
  Description of Artificial Sequence: Synthetic peptide
SCCWRGSME

SEQ ID NO: 3231 - protein, 9 aa, Artificial Sequence
  Description of Artificial Sequence: Synthetic peptide
SHVCQEYMN

SEQ ID NO: 3232 - protein, 9 aa, Artificial Sequence
  Description of Artificial Sequence: Synthetic peptide
SLPQTDQHV

SEQ ID NO: 3233 - protein, 9 aa, Artificial Sequence
  Description of Artificial Sequence: Synthetic peptide
SNAEMSQLF

SEQ ID NO: 3234 - protein, 9 aa, Artificial Sequence
  Description of Artificial Sequence: Synthetic peptide
SNKLMMDVM

SEQ ID NO: 3235 - protein, 9 aa, Artificial Sequence
  Description of Artificial Sequence: Synthetic peptide
SPRCGGPFP

SEQ ID NO: 3236 - protein, 9 aa, Artificial Sequence
  Description of Artificial Sequence: Synthetic peptide
SVCMHIGSQ

SEQ ID NO: 3237 - protein, 9 aa, Artificial Sequence
  Description of Artificial Sequence: Synthetic peptide
SVGWSFEPK

SEQ ID NO: 3238 - protein, 9 aa, Artificial Sequence
  Description of Artificial Sequence: Synthetic peptide
TDLEQGMDQ

SEQ ID NO: 3239 - protein, 9 aa, Artificial Sequence
  Description of Artificial Sequence: Synthetic peptide
TFDLWQWGH

SEQ ID NO: 3240 - protein, 9 aa, Artificial Sequence
  Description of Artificial Sequence: Synthetic peptide
TTEWKPSIL

SEQ ID NO: 3241 - protein, 9 aa, Artificial Sequence
  Description of Artificial Sequence: Synthetic peptide
TYLHQPEDS

SEQ ID NO: 3242 - protein, 9 aa, Artificial Sequence
  Description of Artificial Sequence: Synthetic peptide
TYSNDGLFN

SEQ ID NO: 3243 - protein, 9 aa, Artificial Sequence
  Description of Artificial Sequence: Synthetic peptide
VAKITMNTW

SEQ ID NO: 3244 - protein, 9 aa, Artificial Sequence
  Description of Artificial Sequence: Synthetic peptide
VCQVGFLND

SEQ ID NO: 3245 - protein, 9 aa, Artificial Sequence
  Description of Artificial Sequence: Synthetic peptide
VGQPTEKSF

SEQ ID NO: 3246 - protein, 9 aa, Artificial Sequence
  Description of Artificial Sequence: Synthetic peptide
VHCKVWGQC

SEQ ID NO: 3247 - protein, 9 aa, Artificial Sequence
  Description of Artificial Sequence: Synthetic peptide
VMEGQRGWT

SEQ ID NO: 3248 - protein, 9 aa, Artificial Sequence
  Description of Artificial Sequence: Synthetic peptide
VSAYRCSFE

SEQ ID NO: 3249 - protein, 9 aa, Artificial Sequence
  Description of Artificial Sequence: Synthetic peptide
VVMHCAKEF

SEQ ID NO: 3250 - protein, 9 aa, Artificial Sequence
  Description of Artificial Sequence: Synthetic peptide
VYHRLCRDT

SEQ ID NO: 3251 - protein, 9 aa, Artificial Sequence
  Description of Artificial Sequence: Synthetic peptide
VYHRNATWV

SEQ ID NO: 3252 - protein, 9 aa, Artificial Sequence
  Description of Artificial Sequence: Synthetic peptide
WPEQCNVNL

SEQ ID NO: 3253 - protein, 9 aa, Artificial Sequence
  Description of Artificial Sequence: Synthetic peptide
YAQSVSESN

SEQ ID NO: 3254 - protein, 9 aa, Artificial Sequence
  Description of Artificial Sequence: Synthetic peptide
YCERCQDFH

SEQ ID NO: 3255 - protein, 9 aa, Artificial Sequence
  Description of Artificial Sequence: Synthetic peptide
YDEYPRNAT

SEQ ID NO: 3256 - protein, 9 aa, Artificial Sequence
  Description of Artificial Sequence: Synthetic peptide
YDNYWAYNP

SEQ ID NO: 3257 - protein, 9 aa, Artificial Sequence
  Description of Artificial Sequence: Synthetic peptide
YGVCLWNNG

SEQ ID NO: 3258 - protein, 9 aa, Artificial Sequence
  Description of Artificial Sequence: Synthetic peptide
YITQQYASH

SEQ ID NO: 3259 - protein, 9 aa, Artificial Sequence
  Description of Artificial Sequence: Synthetic peptide
YNPQQGKSK

SEQ ID NO: 3260 - protein, 9 aa, Artificial Sequence
  Description of Artificial Sequence: Synthetic peptide
YPYAILVDI

SEQ ID NO: 3261 - protein, 9 aa, Artificial Sequence
  Description of Artificial Sequence: Synthetic peptide
YWQWNTSGN

SEQ ID NO: 3262 - protein, 9 aa, Artificial Sequence
  Description of Artificial Sequence: Synthetic peptide
YWVPDCYNF

SEQ ID NO: 3263 - protein, 9 aa, Artificial Sequence
  Description of Artificial Sequence: Synthetic peptide
GVHATCMHA

SEQ ID NO: 3264 - protein, 9 aa, Artificial Sequence
  Description of Artificial Sequence: Synthetic peptide
ADRQCLQGP

SEQ ID NO: 3265 - protein, 9 aa, Artificial Sequence
  Description of Artificial Sequence: Synthetic peptide
ASDPNRWAG

SEQ ID NO: 3266 - protein, 9 aa, Artificial Sequence
  Description of Artificial Sequence: Synthetic peptide
ATGTYNLQK

SEQ ID NO: 3267 - protein, 9 aa, Artificial Sequence
  Description of Artificial Sequence: Synthetic peptide
CIHRYSKSS

SEQ ID NO: 3268 - protein, 9 aa, Artificial Sequence
  Description of Artificial Sequence: Synthetic peptide
CIHWYGKSS

SEQ ID NO: 3269 - protein, 9 aa, Artificial Sequence
  Description of Artificial Sequence: Synthetic peptide
CIHWYSKSA

SEQ ID NO: 3270 - protein, 9 aa, Artificial Sequence
  Description of Artificial Sequence: Synthetic peptide
CIHWYSKSS

SEQ ID NO: 3271 - protein, 9 aa, Artificial Sequence
  Description of Artificial Sequence: Synthetic peptide
CIHWYSKSY

SEQ ID NO: 3272 - protein, 9 aa, Artificial Sequence
  Description of Artificial Sequence: Synthetic peptide
CLVSYSQGQ

SEQ ID NO: 3273 - protein, 9 aa, Artificial Sequence
  Description of Artificial Sequence: Synthetic peptide
CLVSYSRGQ

SEQ ID NO: 3274 - protein, 9 aa, Artificial Sequence
  Description of Artificial Sequence: Synthetic peptide
CMHWYSKSS

SEQ ID NO: 3275 - protein, 9 aa, Artificial Sequence
  Description of Artificial Sequence: Synthetic peptide
CMQTDKLMN

SEQ ID NO: 3276 - protein, 9 aa, Artificial Sequence
  Description of Artificial Sequence: Synthetic peptide
CMQTGKLMN

SEQ ID NO: 3277 - protein, 9 aa, Artificial Sequence
  Description of Artificial Sequence: Synthetic peptide
CMQTVELMN

SEQ ID NO: 3278 - protein, 9 aa, Artificial Sequence
  Description of Artificial Sequence: Synthetic peptide
CMQTVKLMK

SEQ ID NO: 3279 - protein, 9 aa, Artificial Sequence
  Description of Artificial Sequence: Synthetic peptide
CMQTVKLMN

SEQ ID NO: 3280 - protein, 9 aa, Artificial Sequence
  Description of Artificial Sequence: Synthetic peptide
CMQTVKLMS

SEQ ID NO: 3281 - protein, 9 aa, Artificial Sequence
  Description of Artificial Sequence: Synthetic peptide
CMQTVKLMT

SEQ ID NO: 3282 - protein, 9 aa, Artificial Sequence
  Description of Artificial Sequence: Synthetic peptide
CMQTVRLMN

SEQ ID NO: 3283 - protein, 9 aa, Artificial Sequence
  Description of Artificial Sequence: Synthetic peptide
CSMARRYWG

SEQ ID NO: 3284 - protein, 9 aa, Artificial Sequence
  Description of Artificial Sequence: Synthetic peptide
CSMTRGYWG

SEQ ID NO: 3285 - protein, 9 aa, Artificial Sequence
  Description of Artificial Sequence: Synthetic peptide
CSMTRRYWG

SEQ ID NO: 3286 - protein, 9 aa, Artificial Sequence
  Description of Artificial Sequence: Synthetic peptide
CSMTRRYWS

SEQ ID NO: 3287 - protein, 9 aa, Artificial Sequence
  Description of Artificial Sequence: Synthetic peptide
CSPGMHLSP

SEQ ID NO: 3288 - protein, 9 aa, Artificial Sequence
  Description of Artificial Sequence: Synthetic peptide
CSPSMHLSP

SEQ ID NO: 3289 - protein, 9 aa, Artificial Sequence
  Description of Artificial Sequence: Synthetic peptide
CSPSMHPSP

SEQ ID NO: 3290 - protein, 9 aa, Artificial Sequence
  Description of Artificial Sequence: Synthetic peptide
CSPSVHLSP

SEQ ID NO: 3291 - protein, 9 aa, Artificial Sequence
  Description of Artificial Sequence: Synthetic peptide
CSVTRRYWG

SEQ ID NO: 3292 - protein, 9 aa, Artificial Sequence
  Description of Artificial Sequence: Synthetic peptide
CTMYRNVSW

SEQ ID NO: 3293 - protein, 9 aa, Artificial Sequence
  Description of Artificial Sequence: Synthetic peptide
CVGWQSTAP

SEQ ID NO: 3294 - protein, 9 aa, Artificial Sequence
  Description of Artificial Sequence: Synthetic peptide
CVGWRSAAP

SEQ ID NO: 3295 - protein, 9 aa, Artificial Sequence
  Description of Artificial Sequence: Synthetic peptide
CVGWRSTAP

SEQ ID NO: 3296 - protein, 9 aa, Artificial Sequence
  Description of Artificial Sequence: Synthetic peptide
CVGWWSTAP

SEQ ID NO: 3297 - protein, 9 aa, Artificial Sequence
  Description of Artificial Sequence: Synthetic peptide
CVHWYSKSS

SEQ ID NO: 3298 - protein, 9 aa, Artificial Sequence
  Description of Artificial Sequence: Synthetic peptide
CVIPPRGCV

SEQ ID NO: 3299 - protein, 9 aa, Artificial Sequence
  Description of Artificial Sequence: Synthetic peptide
CVIPPRGWV

SEQ ID NO: 3300 - protein, 9 aa, Artificial Sequence
  Description of Artificial Sequence: Synthetic peptide
CVQWILNSA

SEQ ID NO: 3301 - protein, 9 aa, Artificial Sequence
  Description of Artificial Sequence: Synthetic peptide
CVQWIRNSA

SEQ ID NO: 3302 - protein, 9 aa, Artificial Sequence
  Description of Artificial Sequence: Synthetic peptide
CVQWIRNSV

SEQ ID NO: 3303 - protein, 9 aa, Artificial Sequence
  Description of Artificial Sequence: Synthetic peptide
CYPSMHLSP

SEQ ID NO: 3304 - protein, 9 aa, Artificial Sequence
  Description of Artificial Sequence: Synthetic peptide
DHDEIFVAR

SEQ ID NO: 3305 - protein, 9 aa, Artificial Sequence
  Description of Artificial Sequence: Synthetic peptide
DHDEMFVAR

SEQ ID NO: 3306 - protein, 9 aa, Artificial Sequence
  Description of Artificial Sequence: Synthetic peptide
DHNEIFVAR

SEQ ID NO: 3307 - protein, 9 aa, Artificial Sequence
  Description of Artificial Sequence: Synthetic peptide
DIQCANEGY

SEQ ID NO: 3308 - protein, 9 aa, Artificial Sequence
  Description of Artificial Sequence: Synthetic peptide
EGIHCWKEM

SEQ ID NO: 3309 - protein, 9 aa, Artificial Sequence
  Description of Artificial Sequence: Synthetic peptide
EGIHCWKGM

SEQ ID NO: 3310 - protein, 9 aa, Artificial Sequence
  Description of Artificial Sequence: Synthetic peptide
EIDPNRWAG

SEQ ID NO: 3311 - protein, 9 aa, Artificial Sequence
  Description of Artificial Sequence: Synthetic peptide
ESAPNRWAG

SEQ ID NO: 3312 - protein, 9 aa, Artificial Sequence
  Description of Artificial Sequence: Synthetic peptide
ESDPNRGAG

SEQ ID NO: 3313 - protein, 9 aa, Artificial Sequence
  Description of Artificial Sequence: Synthetic peptide
ESDPNRLAG

SEQ ID NO: 3314 - protein, 9 aa, Artificial Sequence
  Description of Artificial Sequence: Synthetic peptide
ESDPNRWAC

SEQ ID NO: 3315 - protein, 9 aa, Artificial Sequence
  Description of Artificial Sequence: Synthetic peptide
ESDPNRWAD

SEQ ID NO: 3316 - protein, 9 aa, Artificial Sequence
  Description of Artificial Sequence: Synthetic peptide
ESDPNRWAG

SEQ ID NO: 3317 - protein, 9 aa, Artificial Sequence
  Description of Artificial Sequence: Synthetic peptide
ESDPNRWSG

SEQ ID NO: 3318 - protein, 9 aa, Artificial Sequence
  Description of Artificial Sequence: Synthetic peptide
FSLFCGQYS

SEQ ID NO: 3319 - protein, 9 aa, Artificial Sequence
  Description of Artificial Sequence: Synthetic peptide
FSLFCRQYS

SEQ ID NO: 3320 - protein, 9 aa, Artificial Sequence
  Description of Artificial Sequence: Synthetic peptide
GICFALNAP

SEQ ID NO: 3321 - protein, 9 aa, Artificial Sequence
  Description of Artificial Sequence: Synthetic peptide
GIQCANEGY

SEQ ID NO: 3322 - protein, 9 aa, Artificial Sequence
  Description of Artificial Sequence: Synthetic peptide
GLTIDHQLV

SEQ ID NO: 3323 - protein, 9 aa, Artificial Sequence
  Description of Artificial Sequence: Synthetic peptide
GLTTDHQLV

SEQ ID NO: 3324 - protein, 9 aa, Artificial Sequence
  Description of Artificial Sequence: Synthetic peptide
GLTTDPQLV

SEQ ID NO: 3325 - protein, 9 aa, Artificial Sequence
  Description of Artificial Sequence: Synthetic peptide
GLTTNHQLV

SEQ ID NO: 3326 - protein, 9 aa, Artificial Sequence
  Description of Artificial Sequence: Synthetic peptide
GVQCANEGY

SEQ ID NO: 3327 - protein, 9 aa, Artificial Sequence
  Description of Artificial Sequence: Synthetic peptide
IICFALNAP

SEQ ID NO: 3328 - protein, 9 aa, Artificial Sequence
  Description of Artificial Sequence: Synthetic peptide
IMLSCHNMK

SEQ ID NO: 3329 - protein, 9 aa, Artificial Sequence
  Description of Artificial Sequence: Synthetic peptide
IMLSCHNMR

SEQ ID NO: 3330 - protein, 9 aa, Artificial Sequence
  Description of Artificial Sequence: Synthetic peptide
IMLSCRNMK

SEQ ID NO: 3331 - protein, 9 aa, Artificial Sequence
  Description of Artificial Sequence: Synthetic peptide
IMLSYHNMK

SEQ ID NO: 3332 - protein, 9 aa, Artificial Sequence
  Description of Artificial Sequence: Synthetic peptide
KGEAMCQSL

SEQ ID NO: 3333 - protein, 9 aa, Artificial Sequence
  Description of Artificial Sequence: Synthetic peptide
KGEAMYQSL

SEQ ID NO: 3334 - protein, 9 aa, Artificial Sequence
  Description of Artificial Sequence: Synthetic peptide
KGEAVCQSL

SEQ ID NO: 3335 - protein, 9 aa, Artificial Sequence
  Description of Artificial Sequence: Synthetic peptide
KGESMCQSL

SEQ ID NO: 3336 - protein, 9 aa, Artificial Sequence
  Description of Artificial Sequence: Synthetic peptide
KGGAMCQSL

SEQ ID NO: 3337 - protein, 9 aa, Artificial Sequence
  Description of Artificial Sequence: Synthetic peptide
KSDPNRWAG

SEQ ID NO: 3338 - protein, 9 aa, Artificial Sequence
  Description of Artificial Sequence: Synthetic peptide
KSFAGTTHM

SEQ ID NO: 3339 - protein, 9 aa, Artificial Sequence
  Description of Artificial Sequence: Synthetic peptide
KSVAGTTHM

SEQ ID NO: 3340 - protein, 9 aa, Artificial Sequence
  Description of Artificial Sequence: Synthetic peptide
KVEAMCQSL

SEQ ID NO: 3341 - protein, 9 aa, Artificial Sequence
  Description of Artificial Sequence: Synthetic peptide
LEWYPNHHN

SEQ ID NO: 3342 - protein, 9 aa, Artificial Sequence
  Description of Artificial Sequence: Synthetic peptide
LEWYPNHLN

SEQ ID NO: 3343 - protein, 9 aa, Artificial Sequence
  Description of Artificial Sequence: Synthetic peptide
LEWYPNHRN

SEQ ID NO: 3344 - protein, 9 aa, Artificial Sequence
  Description of Artificial Sequence: Synthetic peptide
LEWYPNHSN

SEQ ID NO: 3345 - protein, 9 aa, Artificial Sequence
  Description of Artificial Sequence: Synthetic peptide
LEWYPYHRN

SEQ ID NO: 3346 - protein, 9 aa, Artificial Sequence
  Description of Artificial Sequence: Synthetic peptide
LICFALNAP

SEQ ID NO: 3347 - protein, 9 aa, Artificial Sequence
  Description of Artificial Sequence: Synthetic peptide
MVYCNRKSN

SEQ ID NO: 3348 - protein, 9 aa, Artificial Sequence
  Description of Artificial Sequence: Synthetic peptide
QFHVPQSDS

SEQ ID NO: 3349 - protein, 9 aa, Artificial Sequence
  Description of Artificial Sequence: Synthetic peptide
QFHVPQSGS

SEQ ID NO: 3350 - protein, 9 aa, Artificial Sequence
  Description of Artificial Sequence: Synthetic peptide
QFRVPQSDS

SEQ ID NO: 3351 - protein, 9 aa, Artificial Sequence
  Description of Artificial Sequence: Synthetic peptide
QNNNLYTQV

SEQ ID NO: 3352 - protein, 9 aa, Artificial Sequence
  Description of Artificial Sequence: Synthetic peptide
SAGMLAQMC

SEQ ID NO: 3353 - protein, 9 aa, Artificial Sequence
  Description of Artificial Sequence: Synthetic peptide
SAGMRAQMC

SEQ ID NO: 3354 - protein, 9 aa, Artificial Sequence
  Description of Artificial Sequence: Synthetic peptide
SAGMRTQMC

SEQ ID NO: 3355 - protein, 9 aa, Artificial Sequence
  Description of Artificial Sequence: Synthetic peptide
SAGMWAQMC

SEQ ID NO: 3356 - protein, 9 aa, Artificial Sequence
  Description of Artificial Sequence: Synthetic peptide
SAGVRAQMC

SEQ ID NO: 3357 - protein, 9 aa, Artificial Sequence
  Description of Artificial Sequence: Synthetic peptide
SAVMRAQMC

SEQ ID NO: 3358 - protein, 9 aa, Artificial Sequence
  Description of Artificial Sequence: Synthetic peptide
SEQYVAYSG

SEQ ID NO: 3359 - protein, 9 aa, Artificial Sequence
  Description of Artificial Sequence: Synthetic peptide
SKQYVAYSE

SEQ ID NO: 3360 - protein, 9 aa, Artificial Sequence
  Description of Artificial Sequence: Synthetic peptide
SKQYVAYSG

SEQ ID NO: 3361 - protein, 9 aa, Artificial Sequence
  Description of Artificial Sequence: Synthetic peptide
SKQYVTYSG

SEQ ID NO: 3362 - protein, 9 aa, Artificial Sequence
  Description of Artificial Sequence: Synthetic peptide
TASKYIGRT

SEQ ID NO: 3363 - protein, 9 aa, Artificial Sequence
  Description of Artificial Sequence: Synthetic peptide
TATEYIGRT

SEQ ID NO: 3364 - protein, 9 aa, Artificial Sequence
  Description of Artificial Sequence: Synthetic peptide
TATKYIGRT

SEQ ID NO: 3365 - protein, 9 aa, Artificial Sequence
  Description of Artificial Sequence: Synthetic peptide
TKPSMEVNC

SEQ ID NO: 3366 - protein, 9 aa, Artificial Sequence
  Description of Artificial Sequence: Synthetic peptide
VEANSACQN

SEQ ID NO: 3367 - protein, 9 aa, Artificial Sequence
  Description of Artificial Sequence: Synthetic peptide
VEANSECQN

SEQ ID NO: 3368 - protein, 9 aa, Artificial Sequence
  Description of Artificial Sequence: Synthetic peptide
VEANSEFQN

SEQ ID NO: 3369 - protein, 9 aa, Artificial Sequence
  Description of Artificial Sequence: Synthetic peptide
VEANSGCQN

SEQ ID NO: 3370 - protein, 9 aa, Artificial Sequence
  Description of Artificial Sequence: Synthetic peptide
VICFALNAP

SEQ ID NO: 3371 - protein, 9 aa, Artificial Sequence
  Description of Artificial Sequence: Synthetic peptide
VICFALNAS

SEQ ID NO: 3372 - protein, 9 aa, Artificial Sequence
  Description of Artificial Sequence: Synthetic peptide
VICFALNTP

SEQ ID NO: 3373 - protein, 9 aa, Artificial Sequence
  Description of Artificial Sequence: Synthetic peptide
VSLFCRQYS

SEQ ID NO: 3374 - protein, 9 aa, Artificial Sequence
  Description of Artificial Sequence: Synthetic peptide
WCVHAYWQV

SEQ ID NO: 3375 - protein, 9 aa, Artificial Sequence
  Description of Artificial Sequence: Synthetic peptide
WRVHAYWQV

SEQ ID NO: 3376 - protein, 9 aa, Artificial Sequence
  Description of Artificial Sequence: Synthetic peptide
WRVHSYWQV

SEQ ID NO: 3377 - protein, 9 aa, Artificial Sequence
  Description of Artificial Sequence: Synthetic peptide
YIHWYSKSS

SEQ ID NO: 3378 - protein, 9 aa, Artificial Sequence
  Description of Artificial Sequence: Synthetic peptide
WGQSYNYWP

SEQ ID NO: 3379 - protein, 9 aa, Artificial Sequence
  Description of Artificial Sequence: Synthetic peptide
SIHSIVKGE

SEQ ID NO: 3380 - protein, 9 aa, Artificial Sequence
  Description of Artificial Sequence: Synthetic peptide
GMLEFMNMT

SEQ ID NO: 3381 - protein, 9 aa, Artificial Sequence
  Description of Artificial Sequence: Synthetic peptide
QMYWVQNWE

SEQ ID NO: 3382 - protein, 9 aa, Artificial Sequence
  Description of Artificial Sequence: Synthetic peptide
STDPHTSHH

SEQ ID NO: 3383 - protein, 9 aa, Artificial Sequence
  Description of Artificial Sequence: Synthetic peptide
TLTEVNRLA

SEQ ID NO: 3384 - protein, 9 aa, Artificial Sequence
  Description of Artificial Sequence: Synthetic peptide
SCASCRFPL

SEQ ID NO: 3385 - protein, 9 aa, Artificial Sequence
  Description of Artificial Sequence: Synthetic peptide
ETHWDIDSN

SEQ ID NO: 3386 - protein, 9 aa, Artificial Sequence
  Description of Artificial Sequence: Synthetic peptide
EAAHQTNIW

SEQ ID NO: 3387 - protein, 9 aa, Artificial Sequence
  Description of Artificial Sequence: Synthetic peptide
MGTEWTQSY

SEQ ID NO: 3388 - protein, 9 aa, Artificial Sequence
  Description of Artificial Sequence: Synthetic peptide
QQSFFFGEQ

SEQ ID NO: 3389 - protein, 9 aa, Artificial Sequence
  Description of Artificial Sequence: Synthetic peptide
CVDTNRMWQ

SEQ ID NO: 3390 - protein, 9 aa, Artificial Sequence
  Description of Artificial Sequence: Synthetic peptide
DVCKATTTE

SEQ ID NO: 3391 - protein, 9 aa, Artificial Sequence
  Description of Artificial Sequence: Synthetic peptide
TTYPHNTHG

SEQ ID NO: 3392 - protein, 9 aa, Artificial Sequence
  Description of Artificial Sequence: Synthetic peptide
KGLITENNY

SEQ ID NO: 3393 - protein, 9 aa, Artificial Sequence
  Description of Artificial Sequence: Synthetic peptide
LHKAYVTDS

SEQ ID NO: 3394 - protein, 9 aa, Artificial Sequence
  Description of Artificial Sequence: Synthetic peptide
KQATNNNGW

SEQ ID NO: 3395 - protein, 9 aa, Artificial Sequence
  Description of Artificial Sequence: Synthetic peptide
CFARTLSYD

SEQ ID NO: 3396 - protein, 9 aa, Artificial Sequence
  Description of Artificial Sequence: Synthetic peptide
MPYPLNVKE

SEQ ID NO: 3397 - protein, 9 aa, Artificial Sequence
  Description of Artificial Sequence: Synthetic peptide
EQTHTWLCR

SEQ ID NO: 3398 - protein, 9 aa, Artificial Sequence
  Description of Artificial Sequence: Synthetic peptide
ELKYVMMTA

SEQ ID NO: 3399 - protein, 9 aa, Artificial Sequence
  Description of Artificial Sequence: Synthetic peptide
LARTTTNSE

SEQ ID NO: 3400 - protein, 9 aa, Artificial Sequence
  Description of Artificial Sequence: Synthetic peptide
TLTTDKTYS

SEQ ID NO: 3401 - protein, 9 aa, Artificial Sequence
  Description of Artificial Sequence: Synthetic peptide
TRSYFDQSC

SEQ ID NO: 3402 - protein, 9 aa, Artificial Sequence
  Description of Artificial Sequence: Synthetic peptide
PYIMEFHPF

SEQ ID NO: 3403 - protein, 9 aa, Artificial Sequence
  Description of Artificial Sequence: Synthetic peptide
KIRDCDGNV

SEQ ID NO: 3404 - protein, 9 aa, Artificial Sequence
  Description of Artificial Sequence: Synthetic peptide
EIRQFVKGA

SEQ ID NO: 3405 - protein, 9 aa, Artificial Sequence
  Description of Artificial Sequence: Synthetic peptide
APFFTFTNH

SEQ ID NO: 3406 - protein, 9 aa, Artificial Sequence
  Description of Artificial Sequence: Synthetic peptide
TQCKQLTVM

SEQ ID NO: 3407 - protein, 9 aa, Artificial Sequence
  Description of Artificial Sequence: Synthetic peptide
CQNTAVRAI

SEQ ID NO: 3408 - protein, 9 aa, Artificial Sequence
  Description of Artificial Sequence: Synthetic peptide
KAVLFLKDC

SEQ ID NO: 3409 - protein, 9 aa, Artificial Sequence
  Description of Artificial Sequence: Synthetic peptide
DVTQHTSCT

SEQ ID NO: 3410 - protein, 9 aa, Artificial Sequence
  Description of Artificial Sequence: Synthetic peptide
VCQYCELGG

SEQ ID NO: 3411 - protein, 9 aa, Artificial Sequence
  Description of Artificial Sequence: Synthetic peptide
AVVCKMNYH

SEQ ID NO: 3412 - protein, 9 aa, Artificial Sequence
  Description of Artificial Sequence: Synthetic peptide
PCQQLMCFM

SEQ ID NO: 3413 - protein, 9 aa, Artificial Sequence
  Description of Artificial Sequence: Synthetic peptide
TVNRAMREE

SEQ ID NO: 3414 - protein, 9 aa, Artificial Sequence
  Description of Artificial Sequence: Synthetic peptide
EVLKFCKEW

SEQ ID NO: 3415 - protein, 9 aa, Artificial Sequence
  Description of Artificial Sequence: Synthetic peptide
SMSHNGQCL

SEQ ID NO: 3416 - protein, 9 aa, Artificial Sequence
  Description of Artificial Sequence: Synthetic peptide
TNMLAMRGD

SEQ ID NO: 3417 - protein, 9 aa, Artificial Sequence
  Description of Artificial Sequence: Synthetic peptide
MLAFDPMGR

SEQ ID NO: 3418 - protein, 9 aa, Artificial Sequence
  Description of Artificial Sequence: Synthetic peptide
ASFFLNPLE

SEQ ID NO: 3419 - protein, 9 aa, Artificial Sequence
  Description of Artificial Sequence: Synthetic peptide
QKAIVAQND

SEQ ID NO: 3420 - protein, 9 aa, Artificial Sequence
  Description of Artificial Sequence: Synthetic peptide
ISMRSECED

SEQ ID NO: 3421 - protein, 9 aa, Artificial Sequence
  Description of Artificial Sequence: Synthetic peptide
ISWISHASP

SEQ ID NO: 3422 - protein, 9 aa, Artificial Sequence
  Description of Artificial Sequence: Synthetic peptide
CVEQYVEQG

SEQ ID NO: 3423 - protein, 9 aa, Artificial Sequence
  Description of Artificial Sequence: Synthetic peptide
STTAYHQDY

SEQ ID NO: 3424 - protein, 9 aa, Artificial Sequence
  Description of Artificial Sequence: Synthetic peptide
GWDMLSVAK

SEQ ID NO: 3425 - protein, 9 aa, Artificial Sequence
  Description of Artificial Sequence: Synthetic peptide
MITNNCNIS

SEQ ID NO: 3426 - protein, 9 aa, Artificial Sequence
  Description of Artificial Sequence: Synthetic peptide
TCHPNMSVP

SEQ ID NO: 3427 - protein, 9 aa, Artificial Sequence
  Description of Artificial Sequence: Synthetic peptide
MEHTMDFGV

SEQ ID NO: 3428 - protein, 9 aa, Artificial Sequence
  Description of Artificial Sequence: Synthetic peptide
KEFQLQMEP

SEQ ID NO: 3429 - protein, 9 aa, Artificial Sequence
  Description of Artificial Sequence: Synthetic peptide
TIVVIPIKS

SEQ ID NO: 3430 - protein, 9 aa, Artificial Sequence
  Description of Artificial Sequence: Synthetic peptide
SSIYKEIQE

SEQ ID NO: 3431 - protein, 9 aa, Artificial Sequence
  Description of Artificial Sequence: Synthetic peptide
GTRIYGKVS

SEQ ID NO: 3432 - protein, 9 aa, Artificial Sequence
  Description of Artificial Sequence: Synthetic peptide
EFVLGCQGI

SEQ ID NO: 3433 - protein, 9 aa, Artificial Sequence
  Description of Artificial Sequence: Synthetic peptide
QSGMLTTFA

SEQ ID NO: 3434 - protein, 9 aa, Artificial Sequence
  Description of Artificial Sequence: Synthetic peptide
YVDHWTLGD

SEQ ID NO: 3435 - protein, 9 aa, Artificial Sequence
  Description of Artificial Sequence: Synthetic peptide
SRYVNNGTV

SEQ ID NO: 3436 - protein, 9 aa, Artificial Sequence
  Description of Artificial Sequence: Synthetic peptide
AAQYMGIMK

SEQ ID NO: 3437 - protein, 9 aa, Artificial Sequence
  Description of Artificial Sequence: Synthetic peptide
AEDTPYTIY

SEQ ID NO: 3438 - protein, 9 aa, Artificial Sequence
  Description of Artificial Sequence: Synthetic peptide
DCVLTMVDK

SEQ ID NO: 3439 - protein, 9 aa, Artificial Sequence
  Description of Artificial Sequence: Synthetic peptide
MTIKMEQQY

SEQ ID NO: 3440 - protein, 9 aa, Artificial Sequence
  Description of Artificial Sequence: Synthetic peptide
NSQLSMTFG

SEQ ID NO: 3441 - protein, 9 aa, Artificial Sequence
  Description of Artificial Sequence: Synthetic peptide
NMPSLRTRI

SEQ ID NO: 3442 - protein, 9 aa, Artificial Sequence
  Description of Artificial Sequence: Synthetic peptide
EIHMFGQSE

SEQ ID NO: 3443 - protein, 9 aa, Artificial Sequence
  Description of Artificial Sequence: Synthetic peptide
MVMMREPSN

SEQ ID NO: 3444 - protein, 9 aa, Artificial Sequence
  Description of Artificial Sequence: Synthetic peptide
MNANETHGA

SEQ ID NO: 3445 - protein, 9 aa, Artificial Sequence
  Description of Artificial Sequence: Synthetic peptide
WTTSIAVDT

SEQ ID NO: 3446 - protein, 9 aa, Artificial Sequence
  Description of Artificial Sequence: Synthetic peptide
NDVWQPHPN

SEQ ID NO: 3447 - protein, 9 aa, Artificial Sequence
  Description of Artificial Sequence: Synthetic peptide
GLSMVLHFV

SEQ ID NO: 3448 - protein, 9 aa, Artificial Sequence
  Description of Artificial Sequence: Synthetic peptide
RCADNPYFR

SEQ ID NO: 3449 - protein, 9 aa, Artificial Sequence
  Description of Artificial Sequence: Synthetic peptide
AFLHGQMWQ

SEQ ID NO: 3450 - protein, 9 aa, Artificial Sequence
  Description of Artificial Sequence: Synthetic peptide
NANYWFYYD

SEQ ID NO: 3451 - protein, 9 aa, Artificial Sequence
  Description of Artificial Sequence: Synthetic peptide
AIYTTASFD

SEQ ID NO: 3452 - protein, 9 aa, Artificial Sequence
  Description of Artificial Sequence: Synthetic peptide
EAGCKMWPT

SEQ ID NO: 3453 - protein, 9 aa, Artificial Sequence
  Description of Artificial Sequence: Synthetic peptide
DARFDQWHH

SEQ ID NO: 3454 - protein, 9 aa, Artificial Sequence
  Description of Artificial Sequence: Synthetic peptide
ATGTYNLQE

SEQ ID NO: 3455 - protein, 9 aa, Artificial Sequence
  Description of Artificial Sequence: Synthetic peptide
TTTNQFMFQ

SEQ ID NO: 3456 - protein, 9 aa, Artificial Sequence
  Description of Artificial Sequence: Synthetic peptide
VCRLDNGPQ

SEQ ID NO: 3457 - protein, 9 aa, Artificial Sequence
  Description of Artificial Sequence: Synthetic peptide
EYACMLMTQ

SEQ ID NO: 3458 - protein, 9 aa, Artificial Sequence
  Description of Artificial Sequence: Synthetic peptide
YDYWMQAPT

SEQ ID NO: 3459 - protein, 9 aa, Artificial Sequence
  Description of Artificial Sequence: Synthetic peptide
SHAQPIASH

SEQ ID NO: 3460 - protein, 9 aa, Artificial Sequence
  Description of Artificial Sequence: Synthetic peptide
DFNGSNWLP

SEQ ID NO: 3461 - protein, 9 aa, Artificial Sequence
  Description of Artificial Sequence: Synthetic peptide
RVNGSTCRH

SEQ ID NO: 3462 - protein, 9 aa, Artificial Sequence
  Description of Artificial Sequence: Synthetic peptide
HIHMSDRGA

SEQ ID NO: 3463 - protein, 9 aa, Artificial Sequence
  Description of Artificial Sequence: Synthetic peptide
NAYYDSHCE

SEQ ID NO: 3464 - protein, 9 aa, Artificial Sequence
  Description of Artificial Sequence: Synthetic peptide
THVKRFDYE

SEQ ID NO: 3465 - protein, 9 aa, Artificial Sequence
  Description of Artificial Sequence: Synthetic peptide
KKHKGWCRA

SEQ ID NO: 3466 - protein, 9 aa, Artificial Sequence
  Description of Artificial Sequence: Synthetic peptide
MPWLDKPPC

SEQ ID NO: 3467 - protein, 9 aa, Artificial Sequence
  Description of Artificial Sequence: Synthetic peptide
RRTDHGEPI

SEQ ID NO: 3468 - protein, 9 aa, Artificial Sequence
  Description of Artificial Sequence: Synthetic peptide
GNECFHNVE

SEQ ID NO: 3469 - protein, 9 aa, Artificial Sequence
  Description of Artificial Sequence: Synthetic peptide
YPTMTFPEE

SEQ ID NO: 3470 - protein, 9 aa, Artificial Sequence
  Description of Artificial Sequence: Synthetic peptide
KVNCRMIIM

SEQ ID NO: 3471 - protein, 9 aa, Artificial Sequence
  Description of Artificial Sequence: Synthetic peptide
WPNIKHQPI

SEQ ID NO: 3472 - protein, 9 aa, Artificial Sequence
  Description of Artificial Sequence: Synthetic peptide
QCTAHNTCM

SEQ ID NO: 3473 - protein, 9 aa, Artificial Sequence
  Description of Artificial Sequence: Synthetic peptide
DMTLQSVSS

SEQ ID NO: 3474 - protein, 9 aa, Artificial Sequence
  Description of Artificial Sequence: Synthetic peptide
YFPSIQCYE

SEQ ID NO: 3475 - protein, 9 aa, Artificial Sequence
  Description of Artificial Sequence: Synthetic peptide
RYPCCQSPF

SEQ ID NO: 3476 - protein, 9 aa, Artificial Sequence
  Description of Artificial Sequence: Synthetic peptide
WKATPGGQC

SEQ ID NO: 3477 - protein, 9 aa, Artificial Sequence
  Description of Artificial Sequence: Synthetic peptide
GHLFNNNEW

SEQ ID NO: 3478 - protein, 9 aa, Artificial Sequence
  Description of Artificial Sequence: Synthetic peptide
MNSFYRAEW

SEQ ID NO: 3479 - protein, 9 aa, Artificial Sequence
  Description of Artificial Sequence: Synthetic peptide
QWFTKGVGE

SEQ ID NO: 3480 - protein, 9 aa, Artificial Sequence
  Description of Artificial Sequence: Synthetic peptide
INYISFVDR

SEQ ID NO: 3481 - protein, 9 aa, Artificial Sequence
  Description of Artificial Sequence: Synthetic peptide
KMAGIGCWY

SEQ ID NO: 3482 - protein, 9 aa, Artificial Sequence
  Description of Artificial Sequence: Synthetic peptide
LEIGGKTRT

SEQ ID NO: 3483 - protein, 9 aa, Artificial Sequence
  Description of Artificial Sequence: Synthetic peptide
NGVGRSGDN

SEQ ID NO: 3484 - protein, 9 aa, Artificial Sequence
  Description of Artificial Sequence: Synthetic peptide
AGMYKCQED

SEQ ID NO: 3485 - protein, 9 aa, Artificial Sequence
  Description of Artificial Sequence: Synthetic peptide
YSDPKNMSI

SEQ ID NO: 3486 - protein, 9 aa, Artificial Sequence
  Description of Artificial Sequence: Synthetic peptide
DVKSWAVCD

SEQ ID NO: 3487 - protein, 9 aa, Artificial Sequence
  Description of Artificial Sequence: Synthetic peptide
TVNWYSGFG

SEQ ID NO: 3488 - protein, 9 aa, Artificial Sequence
  Description of Artificial Sequence: Synthetic peptide
AAAGFSAPS

SEQ ID NO: 3489 - protein, 9 aa, Artificial Sequence
  Description of Artificial Sequence: Synthetic peptide
AAARDRRQT

SEQ ID NO: 3490 - protein, 9 aa, Artificial Sequence
  Description of Artificial Sequence: Synthetic peptide
AACAQVYHS

SEQ ID NO: 3491 - protein, 9 aa, Artificial Sequence
  Description of Artificial Sequence: Synthetic peptide
AACGVLWSE

SEQ ID NO: 3492 - protein, 9 aa, Artificial Sequence
  Description of Artificial Sequence: Synthetic peptide
AAEREKAHG

SEQ ID NO: 3493 - protein, 9 aa, Artificial Sequence
  Description of Artificial Sequence: Synthetic peptide
AAGFVTCLD

SEQ ID NO: 3494 - protein, 9 aa, Artificial Sequence
  Description of Artificial Sequence: Synthetic peptide
AAGHHANLG

SEQ ID NO: 3495 - protein, 9 aa, Artificial Sequence
  Description of Artificial Sequence: Synthetic peptide
AAGYARTYD

SEQ ID NO: 3496 - protein, 9 aa, Artificial Sequence
  Description of Artificial Sequence: Synthetic peptide
AANLNEGAK

SEQ ID NO: 3497 - protein, 9 aa, Artificial Sequence
  Description of Artificial Sequence: Synthetic peptide
AANPHMHMR

SEQ ID NO: 3498 - protein, 9 aa, Artificial Sequence
  Description of Artificial Sequence: Synthetic peptide
AASHLIVHE

SEQ ID NO: 3499 - protein, 9 aa, Artificial Sequence
  Description of Artificial Sequence: Synthetic peptide
AATITYAPS

SEQ ID NO: 3500 - protein, 9 aa, Artificial Sequence
  Description of Artificial Sequence: Synthetic peptide
AATMAPWMA

SEQ ID NO: 3501 - protein, 9 aa, Artificial Sequence
  Description of Artificial Sequence: Synthetic peptide
AAVKKLSDD

SEQ ID NO: 3502 - protein, 9 aa, Artificial Sequence
  Description of Artificial Sequence: Synthetic peptide
AAYLPSLVH

SEQ ID NO: 3503 - protein, 9 aa, Artificial Sequence
  Description of Artificial Sequence: Synthetic peptide
ACCRMTTQQ

SEQ ID NO: 3504 - protein, 9 aa, Artificial Sequence
  Description of Artificial Sequence: Synthetic peptide
ACDFIGQNE

SEQ ID NO: 3505 - protein, 9 aa, Artificial Sequence
  Description of Artificial Sequence: Synthetic peptide
ACELQEMAM

SEQ ID NO: 3506 - protein, 9 aa, Artificial Sequence
  Description of Artificial Sequence: Synthetic peptide
ACGQAIHHS

SEQ ID NO: 3507 - protein, 9 aa, Artificial Sequence
  Description of Artificial Sequence: Synthetic peptide
ACIFRHQFY

SEQ ID NO: 3508 - protein, 9 aa, Artificial Sequence
  Description of Artificial Sequence: Synthetic peptide
ACLEVYCQD

SEQ ID NO: 3509 - protein, 9 aa, Artificial Sequence
  Description of Artificial Sequence: Synthetic peptide
ACLSSPIFE

SEQ ID NO: 3510 - protein, 9 aa, Artificial Sequence
  Description of Artificial Sequence: Synthetic peptide
ACMTVYRSC

SEQ ID NO: 3511 - protein, 9 aa, Artificial Sequence
  Description of Artificial Sequence: Synthetic peptide
ACQPSPSYT

SEQ ID NO: 3512 - protein, 9 aa, Artificial Sequence
  Description of Artificial Sequence: Synthetic peptide
ACTQRQEEM

SEQ ID NO: 3513 - protein, 9 aa, Artificial Sequence
  Description of Artificial Sequence: Synthetic peptide
ACYCYFMFI

SEQ ID NO: 3514 - protein, 9 aa, Artificial Sequence
  Description of Artificial Sequence: Synthetic peptide
ACYRQHATK

SEQ ID NO: 3515 - protein, 9 aa, Artificial Sequence
  Description of Artificial Sequence: Synthetic peptide
ADIWIQFDA

SEQ ID NO: 3516 - protein, 9 aa, Artificial Sequence
  Description of Artificial Sequence: Synthetic peptide
ADRLINSSK

SEQ ID NO: 3517 - protein, 9 aa, Artificial Sequence
  Description of Artificial Sequence: Synthetic peptide
ADYQTQTYN

SEQ ID NO: 3518 - protein, 9 aa, Artificial Sequence
  Description of Artificial Sequence: Synthetic peptide
AECLSTKWV

SEQ ID NO: 3519 - protein, 9 aa, Artificial Sequence
  Description of Artificial Sequence: Synthetic peptide
AEQWKLGSI

SEQ ID NO: 3520 - protein, 9 aa, Artificial Sequence
  Description of Artificial Sequence: Synthetic peptide
AERDCEKGP

SEQ ID NO: 3521 - protein, 9 aa, Artificial Sequence
  Description of Artificial Sequence: Synthetic peptide
AERMFHQHF

SEQ ID NO: 3522 - protein, 9 aa, Artificial Sequence
  Description of Artificial Sequence: Synthetic peptide
AFCSMNATS

SEQ ID NO: 3523 - protein, 9 aa, Artificial Sequence
  Description of Artificial Sequence: Synthetic peptide
AFIEQVMNC

SEQ ID NO: 3524 - protein, 9 aa, Artificial Sequence
  Description of Artificial Sequence: Synthetic peptide
AFMAIMWTL

SEQ ID NO: 3525 - protein, 9 aa, Artificial Sequence
  Description of Artificial Sequence: Synthetic peptide
AFQQPHKAN

SEQ ID NO: 3526 - protein, 9 aa, Artificial Sequence
  Description of Artificial Sequence: Synthetic peptide
AGDRYTSED

SEQ ID NO: 3527 - protein, 9 aa, Artificial Sequence
  Description of Artificial Sequence: Synthetic peptide
AGISLWCHN

SEQ ID NO: 3528 - protein, 9 aa, Artificial Sequence
  Description of Artificial Sequence: Synthetic peptide
AGLTMQKCE

SEQ ID NO: 3529 - protein, 9 aa, Artificial Sequence
  Description of Artificial Sequence: Synthetic peptide
AGSSCNTFH

SEQ ID NO: 3530 - protein, 9 aa, Artificial Sequence
  Description of Artificial Sequence: Synthetic peptide
AHAEFAVDP

SEQ ID NO: 3531 - protein, 9 aa, Artificial Sequence
  Description of Artificial Sequence: Synthetic peptide
AHAQYQSVA

SEQ ID NO: 3532 - protein, 9 aa, Artificial Sequence
  Description of Artificial Sequence: Synthetic peptide
AHMPREWMA

SEQ ID NO: 3533 - protein, 9 aa, Artificial Sequence
  Description of Artificial Sequence: Synthetic peptide
AHTAIGSCP

SEQ ID NO: 3534 - protein, 9 aa, Artificial Sequence
  Description of Artificial Sequence: Synthetic peptide
AHVCLSGQW

SEQ ID NO: 3535 - protein, 9 aa, Artificial Sequence
  Description of Artificial Sequence: Synthetic peptide
AHVDYNTCD

SEQ ID NO: 3536 - protein, 9 aa, Artificial Sequence
  Description of Artificial Sequence: Synthetic peptide
AHVGVELAE

SEQ ID NO: 3537 - protein, 9 aa, Artificial Sequence
  Description of Artificial Sequence: Synthetic peptide
AHYHVHSHG

SEQ ID NO: 3538 - protein, 9 aa, Artificial Sequence
  Description of Artificial Sequence: Synthetic peptide
AIAHGSDYE

SEQ ID NO: 3539 - protein, 9 aa, Artificial Sequence
  Description of Artificial Sequence: Synthetic peptide
AIDHRTMCY

SEQ ID NO: 3540 - protein, 9 aa, Artificial Sequence
  Description of Artificial Sequence: Synthetic peptide
AIEKQPNFE

SEQ ID NO: 3541 - protein, 9 aa, Artificial Sequence
  Description of Artificial Sequence: Synthetic peptide
AIESSMHCC

SEQ ID NO: 3542 - protein, 9 aa, Artificial Sequence
  Description of Artificial Sequence: Synthetic peptide
AIGKSNQGL

SEQ ID NO: 3543 - protein, 9 aa, Artificial Sequence
  Description of Artificial Sequence: Synthetic peptide
AIIHQSTAW

SEQ ID NO: 3544 - protein, 9 aa, Artificial Sequence
  Description of Artificial Sequence: Synthetic peptide
AILDQNSLQ

SEQ ID NO: 3545 - protein, 9 aa, Artificial Sequence
  Description of Artificial Sequence: Synthetic peptide
AINTIPMAQ

SEQ ID NO: 3546 - protein, 9 aa, Artificial Sequence
  Description of Artificial Sequence: Synthetic peptide
AISQIMSNE

SEQ ID NO: 3547 - protein, 9 aa, Artificial Sequence
  Description of Artificial Sequence: Synthetic peptide
AITAHLAHD

SEQ ID NO: 3548 - protein, 9 aa, Artificial Sequence
  Description of Artificial Sequence: Synthetic peptide
AITQMEWIN

SEQ ID NO: 3549 - protein, 9 aa, Artificial Sequence
  Description of Artificial Sequence: Synthetic peptide
AIVPESAAQ

SEQ ID NO: 3550 - protein, 9 aa, Artificial Sequence
  Description of Artificial Sequence: Synthetic peptide
AKANRCEAE

SEQ ID NO: 3551 - protein, 9 aa, Artificial Sequence
  Description of Artificial Sequence: Synthetic peptide
AKMPQCAWA

SEQ ID NO: 3552 - protein, 9 aa, Artificial Sequence
  Description of Artificial Sequence: Synthetic peptide
AKMQNMACA

SEQ ID NO: 3553 - protein, 9 aa, Artificial Sequence
  Description of Artificial Sequence: Synthetic peptide
AKNLTMLCR

SEQ ID NO: 3554 - protein, 9 aa, Artificial Sequence
  Description of Artificial Sequence: Synthetic peptide
AKSYANDWA

SEQ ID NO: 3555 - protein, 9 aa, Artificial Sequence
  Description of Artificial Sequence: Synthetic peptide
ALHHFVKAQ

SEQ ID NO: 3556 - protein, 9 aa, Artificial Sequence
  Description of Artificial Sequence: Synthetic peptide
ALLMQTFAH

SEQ ID NO: 3557 - protein, 9 aa, Artificial Sequence
  Description of Artificial Sequence: Synthetic peptide
ALMVFKSMW

SEQ ID NO: 3558 - protein, 9 aa, Artificial Sequence
  Description of Artificial Sequence: Synthetic peptide
ALMVNQGNA

SEQ ID NO: 3559 - protein, 9 aa, Artificial Sequence
  Description of Artificial Sequence: Synthetic peptide
ALNLSWWPM

SEQ ID NO: 3560 - protein, 9 aa, Artificial Sequence
  Description of Artificial Sequence: Synthetic peptide
ALTAITTSS

SEQ ID NO: 3561 - protein, 9 aa, Artificial Sequence
  Description of Artificial Sequence: Synthetic peptide
ALTNHMICP

SEQ ID NO: 3562 - protein, 9 aa, Artificial Sequence
  Description of Artificial Sequence: Synthetic peptide
ALTYRDSMY

SEQ ID NO: 3563 - protein, 9 aa, Artificial Sequence
  Description of Artificial Sequence: Synthetic peptide
AMLKYAYPG

SEQ ID NO: 3564 - protein, 9 aa, Artificial Sequence
  Description of Artificial Sequence: Synthetic peptide
AMSWTQKGG

SEQ ID NO: 3565 - protein, 9 aa, Artificial Sequence
  Description of Artificial Sequence: Synthetic peptide
AMVGYHCRE

SEQ ID NO: 3566 - protein, 9 aa, Artificial Sequence
  Description of Artificial Sequence: Synthetic peptide
ANFPVNTLE

SEQ ID NO: 3567 - protein, 9 aa, Artificial Sequence
  Description of Artificial Sequence: Synthetic peptide
ANGSVNCEE

SEQ ID NO: 3568 - protein, 9 aa, Artificial Sequence
  Description of Artificial Sequence: Synthetic peptide
ANGTLAECG

SEQ ID NO: 3569 - protein, 9 aa, Artificial Sequence
  Description of Artificial Sequence: Synthetic peptide
ANMYSNVTS

SEQ ID NO: 3570 - protein, 9 aa, Artificial Sequence
  Description of Artificial Sequence: Synthetic peptide
ANTSGWTSG

SEQ ID NO: 3571 - protein, 9 aa, Artificial Sequence
  Description of Artificial Sequence: Synthetic peptide
APDQANVYE

SEQ ID NO: 3572 - protein, 9 aa, Artificial Sequence
  Description of Artificial Sequence: Synthetic peptide
APMSYSDMD

SEQ ID NO: 3573 - protein, 9 aa, Artificial Sequence
  Description of Artificial Sequence: Synthetic peptide
APRVHSGNC

SEQ ID NO: 3574 - protein, 9 aa, Artificial Sequence
  Description of Artificial Sequence: Synthetic peptide
APSPKAVYF

SEQ ID NO: 3575 - protein, 9 aa, Artificial Sequence
  Description of Artificial Sequence: Synthetic peptide
AQEFIPSHP

SEQ ID NO: 3576 - protein, 9 aa, Artificial Sequence
  Description of Artificial Sequence: Synthetic peptide
AQGTQCANL

SEQ ID NO: 3577 - protein, 9 aa, Artificial Sequence
  Description of Artificial Sequence: Synthetic peptide
AQKQADINA

SEQ ID NO: 3578 - protein, 9 aa, Artificial Sequence
  Description of Artificial Sequence: Synthetic peptide
AQRMAKIWA

SEQ ID NO: 3579 - protein, 9 aa, Artificial Sequence
  Description of Artificial Sequence: Synthetic peptide
ARELLHWYG

SEQ ID NO: 3580 - protein, 9 aa, Artificial Sequence
  Description of Artificial Sequence: Synthetic peptide
ARMPVSCLP

SEQ ID NO: 3581 - protein, 9 aa, Artificial Sequence
  Description of Artificial Sequence: Synthetic peptide
ARSRTLSDG

SEQ ID NO: 3582 - protein, 9 aa, Artificial Sequence
  Description of Artificial Sequence: Synthetic peptide
ARTECHHCG

SEQ ID NO: 3583 - protein, 9 aa, Artificial Sequence
  Description of Artificial Sequence: Synthetic peptide
ARYKLMPHH

SEQ ID NO: 3584 - protein, 9 aa, Artificial Sequence
  Description of Artificial Sequence: Synthetic peptide
ASCRLAQCC

SEQ ID NO: 3585 - protein, 9 aa, Artificial Sequence
  Description of Artificial Sequence: Synthetic peptide
ASEGAGSWE

SEQ ID NO: 3586 - protein, 9 aa, Artificial Sequence
  Description of Artificial Sequence: Synthetic peptide
ASEPITFVS

SEQ ID NO: 3587 - protein, 9 aa, Artificial Sequence
  Description of Artificial Sequence: Synthetic peptide
ASFGYMIDD

SEQ ID NO: 3588 - protein, 9 aa, Artificial Sequence
  Description of Artificial Sequence: Synthetic peptide
ASGIIKSNG

SEQ ID NO: 3589 - protein, 9 aa, Artificial Sequence
  Description of Artificial Sequence: Synthetic peptide
ASGPIGTAA

SEQ ID NO: 3590 - protein, 9 aa, Artificial Sequence
  Description of Artificial Sequence: Synthetic peptide
ASHGDGVGT

SEQ ID NO: 3591 - protein, 9 aa, Artificial Sequence
  Description of Artificial Sequence: Synthetic peptide
ASKPVELGH

SEQ ID NO: 3592 - protein, 9 aa, Artificial Sequence
  Description of Artificial Sequence: Synthetic peptide
ASLMKPEAV

SEQ ID NO: 3593 - protein, 9 aa, Artificial Sequence
  Description of Artificial Sequence: Synthetic peptide
ASMAYCAQE

SEQ ID NO: 3594 - protein, 9 aa, Artificial Sequence
  Description of Artificial Sequence: Synthetic peptide
ASMKRQENL

SEQ ID NO: 3595 - protein, 9 aa, Artificial Sequence
  Description of Artificial Sequence: Synthetic peptide
ASMTDFVGV

SEQ ID NO: 3596 - protein, 9 aa, Artificial Sequence
  Description of Artificial Sequence: Synthetic peptide
ASMWQHFVL

SEQ ID NO: 3597 - protein, 9 aa, Artificial Sequence
  Description of Artificial Sequence: Synthetic peptide
ASQGVWQSH

SEQ ID NO: 3598 - protein, 9 aa, Artificial Sequence
  Description of Artificial Sequence: Synthetic peptide
ASSTAWQWP

SEQ ID NO: 3599 - protein, 9 aa, Artificial Sequence
  Description of Artificial Sequence: Synthetic peptide
ASTLCNRGQ

SEQ ID NO: 3600 - protein, 9 aa, Artificial Sequence
  Description of Artificial Sequence: Synthetic peptide
ASTWQGHTD

SEQ ID NO: 3601 - protein, 9 aa, Artificial Sequence
  Description of Artificial Sequence: Synthetic peptide
ASVESRIRI

SEQ ID NO: 3602 - protein, 9 aa, Artificial Sequence
  Description of Artificial Sequence: Synthetic peptide
ATAAENIYE

SEQ ID NO: 3603 - protein, 9 aa, Artificial Sequence
  Description of Artificial Sequence: Synthetic peptide
ATAVTANAN

SEQ ID NO: 3604 - protein, 9 aa, Artificial Sequence
  Description of Artificial Sequence: Synthetic peptide
ATCKPDSCD

SEQ ID NO: 3605 - protein, 9 aa, Artificial Sequence
  Description of Artificial Sequence: Synthetic peptide
ATDQFGHHD

SEQ ID NO: 3606 - protein, 9 aa, Artificial Sequence
  Description of Artificial Sequence: Synthetic peptide
ATGKMMFPS

SEQ ID NO: 3607 - protein, 9 aa, Artificial Sequence
  Description of Artificial Sequence: Synthetic peptide
ATHCINRAH

SEQ ID NO: 3608 - protein, 9 aa, Artificial Sequence
  Description of Artificial Sequence: Synthetic peptide
ATIGRSCWD

SEQ ID NO: 3609 - protein, 9 aa, Artificial Sequence
  Description of Artificial Sequence: Synthetic peptide
ATMPWDGNE

SEQ ID NO: 3610 - protein, 9 aa, Artificial Sequence
  Description of Artificial Sequence: Synthetic peptide
ATMQESDRI

SEQ ID NO: 3611 - protein, 9 aa, Artificial Sequence
  Description of Artificial Sequence: Synthetic peptide
ATSPSEHTN

SEQ ID NO: 3612 - protein, 9 aa, Artificial Sequence
  Description of Artificial Sequence: Synthetic peptide
ATSSQVATI

SEQ ID NO: 3613 - protein, 9 aa, Artificial Sequence
  Description of Artificial Sequence: Synthetic peptide
ATTFTRHNV

SEQ ID NO: 3614 - protein, 9 aa, Artificial Sequence
  Description of Artificial Sequence: Synthetic peptide
ATTIWHNHM

SEQ ID NO: 3615 - protein, 9 aa, Artificial Sequence
  Description of Artificial Sequence: Synthetic peptide
ATVFMQETT

SEQ ID NO: 3616 - protein, 9 aa, Artificial Sequence
  Description of Artificial Sequence: Synthetic peptide
ATVHMERDC

SEQ ID NO: 3617 - protein, 9 aa, Artificial Sequence
  Description of Artificial Sequence: Synthetic peptide
ATVMTVHQG

SEQ ID NO: 3618 - protein, 9 aa, Artificial Sequence
  Description of Artificial Sequence: Synthetic peptide
ATYNPGVNW

SEQ ID NO: 3619 - protein, 9 aa, Artificial Sequence
  Description of Artificial Sequence: Synthetic peptide
AVCSMHGTI

SEQ ID NO: 3620 - protein, 9 aa, Artificial Sequence
  Description of Artificial Sequence: Synthetic peptide
AVDIIAWDT

SEQ ID NO: 3621 - protein, 9 aa, Artificial Sequence
  Description of Artificial Sequence: Synthetic peptide
AVEEMVAKG

SEQ ID NO: 3622 - protein, 9 aa, Artificial Sequence
  Description of Artificial Sequence: Synthetic peptide
AVEKCMTLH

SEQ ID NO: 3623 - protein, 9 aa, Artificial Sequence
  Description of Artificial Sequence: Synthetic peptide
AVEPHCFGH

SEQ ID NO: 3624 - protein, 9 aa, Artificial Sequence
  Description of Artificial Sequence: Synthetic peptide
AVGCYTMSG

SEQ ID NO: 3625 - protein, 9 aa, Artificial Sequence
  Description of Artificial Sequence: Synthetic peptide
AVKMFIDRN

SEQ ID NO: 3626 - protein, 9 aa, Artificial Sequence
  Description of Artificial Sequence: Synthetic peptide
AVMAQKIAD

SEQ ID NO: 3627 - protein, 9 aa, Artificial Sequence
  Description of Artificial Sequence: Synthetic peptide
AVQKEYQYL

SEQ ID NO: 3628 - protein, 9 aa, Artificial Sequence
  Description of Artificial Sequence: Synthetic peptide
AVSQFQCSQ

SEQ ID NO: 3629 - protein, 9 aa, Artificial Sequence
  Description of Artificial Sequence: Synthetic peptide
AVVEHAVNR

SEQ ID NO: 3630 - protein, 9 aa, Artificial Sequence
  Description of Artificial Sequence: Synthetic peptide
AVVRSVTRD

SEQ ID NO: 3631 - protein, 9 aa, Artificial Sequence
  Description of Artificial Sequence: Synthetic peptide
AWDSKSNWD

SEQ ID NO: 3632 - protein, 9 aa, Artificial Sequence
  Description of Artificial Sequence: Synthetic peptide
AWEMYHVID

SEQ ID NO: 3633 - protein, 9 aa, Artificial Sequence
  Description of Artificial Sequence: Synthetic peptide
AWGTMNHWL

SEQ ID NO: 3634 - protein, 9 aa, Artificial Sequence
  Description of Artificial Sequence: Synthetic peptide
AWHMYEMSE

SEQ ID NO: 3635 - protein, 9 aa, Artificial Sequence
  Description of Artificial Sequence: Synthetic peptide
AWTEYSLSC

SEQ ID NO: 3636 - protein, 9 aa, Artificial Sequence
  Description of Artificial Sequence: Synthetic peptide
AWYHHCHYD

SEQ ID NO: 3637 - protein, 9 aa, Artificial Sequence
  Description of Artificial Sequence: Synthetic peptide
AYAFVGRDN

SEQ ID NO: 3638 - protein, 9 aa, Artificial Sequence
  Description of Artificial Sequence: Synthetic peptide
AYDRMGGTY

SEQ ID NO: 3639 - protein, 9 aa, Artificial Sequence
  Description of Artificial Sequence: Synthetic peptide
AYEQMPESC

SEQ ID NO: 3640 - protein, 9 aa, Artificial Sequence
  Description of Artificial Sequence: Synthetic peptide
AYHNVKEWN

SEQ ID NO: 3641 - protein, 9 aa, Artificial Sequence
  Description of Artificial Sequence: Synthetic peptide
AYSSTLHAE

SEQ ID NO: 3642 - protein, 9 aa, Artificial Sequence
  Description of Artificial Sequence: Synthetic peptide
AYYEPRGWN

SEQ ID NO: 3643 - protein, 9 aa, Artificial Sequence
  Description of Artificial Sequence: Synthetic peptide
CAAQEQRSR

SEQ ID NO: 3644 - protein, 9 aa, Artificial Sequence
  Description of Artificial Sequence: Synthetic peptide
CAAWRQTQE

SEQ ID NO: 3645 - protein, 9 aa, Artificial Sequence
  Description of Artificial Sequence: Synthetic peptide
CAAWYYGRT

SEQ ID NO: 3646 - protein, 9 aa, Artificial Sequence
  Description of Artificial Sequence: Synthetic peptide
CAFRTAQMA

SEQ ID NO: 3647 - protein, 9 aa, Artificial Sequence
  Description of Artificial Sequence: Synthetic peptide
CALIKHQQP

SEQ ID NO: 3648 - protein, 9 aa, Artificial Sequence
  Description of Artificial Sequence: Synthetic peptide
CAMFRNVAQ

SEQ ID NO: 3649 - protein, 9 aa, Artificial Sequence
  Description of Artificial Sequence: Synthetic peptide
CAMKGNVAQ

SEQ ID NO: 3650 - protein, 9 aa, Artificial Sequence
  Description of Artificial Sequence: Synthetic peptide
CAMLKMKYD

SEQ ID NO: 3651 - protein, 9 aa, Artificial Sequence
  Description of Artificial Sequence: Synthetic peptide
CAMPFRQSV

SEQ ID NO: 3652 - protein, 9 aa, Artificial Sequence
  Description of Artificial Sequence: Synthetic peptide
CAMSRMVFS

SEQ ID NO: 3653 - protein, 9 aa, Artificial Sequence
  Description of Artificial Sequence: Synthetic peptide
CAMWTSASP

SEQ ID NO: 3654 - protein, 9 aa, Artificial Sequence
  Description of Artificial Sequence: Synthetic peptide
CAMYYHRAC

SEQ ID NO: 3655 - protein, 9 aa, Artificial Sequence
  Description of Artificial Sequence: Synthetic peptide
CAQWIKEQQ

SEQ ID NO: 3656 - protein, 9 aa, Artificial Sequence
  Description of Artificial Sequence: Synthetic peptide
CASAFVSYQ

SEQ ID NO: 3657 - protein, 9 aa, Artificial Sequence
  Description of Artificial Sequence: Synthetic peptide
CAVGRHMAL

SEQ ID NO: 3658 - protein, 9 aa, Artificial Sequence
  Description of Artificial Sequence: Synthetic peptide
CAYAYANLC

SEQ ID NO: 3659 - protein, 9 aa, Artificial Sequence
  Description of Artificial Sequence: Synthetic peptide
CCEFKMWRG

SEQ ID NO: 3660 - protein, 9 aa, Artificial Sequence
  Description of Artificial Sequence: Synthetic peptide
CCMWKNSWE

SEQ ID NO: 3661 - protein, 9 aa, Artificial Sequence
  Description of Artificial Sequence: Synthetic peptide
CCNSRNVFP

SEQ ID NO: 3662 - protein, 9 aa, Artificial Sequence
  Description of Artificial Sequence: Synthetic peptide
CCTKLQVLA

SEQ ID NO: 3663 - protein, 9 aa, Artificial Sequence
  Description of Artificial Sequence: Synthetic peptide
CCTLKRCYD

SEQ ID NO: 3664 - protein, 9 aa, Artificial Sequence
  Description of Artificial Sequence: Synthetic peptide
CDGQLDFHW

SEQ ID NO: 3665 - protein, 9 aa, Artificial Sequence
  Description of Artificial Sequence: Synthetic peptide
CFFRVRLCI

SEQ ID NO: 3666 - protein, 9 aa, Artificial Sequence
  Description of Artificial Sequence: Synthetic peptide
CFHIRNIDR

SEQ ID NO: 3667 - protein, 9 aa, Artificial Sequence
  Description of Artificial Sequence: Synthetic peptide
CFHPTDQGW

SEQ ID NO: 3668 - protein, 9 aa, Artificial Sequence
  Description of Artificial Sequence: Synthetic peptide
CFKYTFMQH

SEQ ID NO: 3669 - protein, 9 aa, Artificial Sequence
  Description of Artificial Sequence: Synthetic peptide
CGAKMSRAA

SEQ ID NO: 3670 - protein, 9 aa, Artificial Sequence
  Description of Artificial Sequence: Synthetic peptide
CGTIVHWST

SEQ ID NO: 3671 - protein, 9 aa, Artificial Sequence
  Description of Artificial Sequence: Synthetic peptide
CGTTIAYCP

SEQ ID NO: 3672 - protein, 9 aa, Artificial Sequence
  Description of Artificial Sequence: Synthetic peptide
CHFTQHKSD

SEQ ID NO: 3673 - protein, 9 aa, Artificial Sequence
  Description of Artificial Sequence: Synthetic peptide
CHHWFNHAT

SEQ ID NO: 3674 - protein, 9 aa, Artificial Sequence
  Description of Artificial Sequence: Synthetic peptide
CHLTTNVNE

SEQ ID NO: 3675 - protein, 9 aa, Artificial Sequence
  Description of Artificial Sequence: Synthetic peptide
CIAIITRGP

SEQ ID NO: 3676 - protein, 9 aa, Artificial Sequence
  Description of Artificial Sequence: Synthetic peptide
CIARKMVDD

SEQ ID NO: 3677 - protein, 9 aa, Artificial Sequence
  Description of Artificial Sequence: Synthetic peptide
CIFPRNMAT

SEQ ID NO: 3678 - protein, 9 aa, Artificial Sequence
  Description of Artificial Sequence: Synthetic peptide
CIGSIPMAA

SEQ ID NO: 3679 - protein, 9 aa, Artificial Sequence
  Description of Artificial Sequence: Synthetic peptide
CIHAIPRER

SEQ ID NO: 3680 - protein, 9 aa, Artificial Sequence
  Description of Artificial Sequence: Synthetic peptide
CIHARMVGM

SEQ ID NO: 3681 - protein, 9 aa, Artificial Sequence
  Description of Artificial Sequence: Synthetic peptide
CIHDHKECV

SEQ ID NO: 3682 - protein, 9 aa, Artificial Sequence
  Description of Artificial Sequence: Synthetic peptide
CINWTRKAP

SEQ ID NO: 3683 - protein, 9 aa, Artificial Sequence
  Description of Artificial Sequence: Synthetic peptide
CIRLLCRDK

SEQ ID NO: 3684 - protein, 9 aa, Artificial Sequence
  Description of Artificial Sequence: Synthetic peptide
CIRYEMGAA

SEQ ID NO: 3685 - protein, 9 aa, Artificial Sequence
  Description of Artificial Sequence: Synthetic peptide
CITQRQAMW

SEQ ID NO: 3686 - protein, 9 aa, Artificial Sequence
  Description of Artificial Sequence: Synthetic peptide
CIVLRSMGQ

SEQ ID NO: 3687 - protein, 9 aa, Artificial Sequence
  Description of Artificial Sequence: Synthetic peptide
CIVVYSRSQ

SEQ ID NO: 3688 - protein, 9 aa, Artificial Sequence
  Description of Artificial Sequence: Synthetic peptide
CIWKHSHFV

SEQ ID NO: 3689 - protein, 9 aa, Artificial Sequence
  Description of Artificial Sequence: Synthetic peptide
CKAHYHDNF

SEQ ID NO: 3690 - protein, 9 aa, Artificial Sequence
  Description of Artificial Sequence: Synthetic peptide
CKDAMNTGG

SEQ ID NO: 3691 - protein, 9 aa, Artificial Sequence
  Description of Artificial Sequence: Synthetic peptide
CKFLLNQAR

SEQ ID NO: 3692 - protein, 9 aa, Artificial Sequence
  Description of Artificial Sequence: Synthetic peptide
CKIASNEAF

SEQ ID NO: 3693 - protein, 9 aa, Artificial Sequence
  Description of Artificial Sequence: Synthetic peptide
CKMEFMRVE

SEQ ID NO: 3694 - protein, 9 aa, Artificial Sequence
  Description of Artificial Sequence: Synthetic peptide
CLCLTWAFG

SEQ ID NO: 3695 - protein, 9 aa, Artificial Sequence
  Description of Artificial Sequence: Synthetic peptide
CLGYEKQCP

SEQ ID NO: 3696 - protein, 9 aa, Artificial Sequence
  Description of Artificial Sequence: Synthetic peptide
CLHYTIVNN

SEQ ID NO: 3697 - protein, 9 aa, Artificial Sequence
  Description of Artificial Sequence: Synthetic peptide
CLMEVQWGT

SEQ ID NO: 3698 - protein, 9 aa, Artificial Sequence
  Description of Artificial Sequence: Synthetic peptide
CMDEVHMCT

SEQ ID NO: 3699 - protein, 9 aa, Artificial Sequence
  Description of Artificial Sequence: Synthetic peptide
CMMPYSRTN

SEQ ID NO: 3700 - protein, 9 aa, Artificial Sequence
  Description of Artificial Sequence: Synthetic peptide
CMYQSRAAY

SEQ ID NO: 3701 - protein, 9 aa, Artificial Sequence
  Description of Artificial Sequence: Synthetic peptide
CNTPYWQQA

SEQ ID NO: 3702 - protein, 9 aa, Artificial Sequence
  Description of Artificial Sequence: Synthetic peptide
CPFLMNRAF

SEQ ID NO: 3703 - protein, 9 aa, Artificial Sequence
  Description of Artificial Sequence: Synthetic peptide
CQQRYNVGF

SEQ ID NO: 3704 - protein, 9 aa, Artificial Sequence
  Description of Artificial Sequence: Synthetic peptide
CSAYYMKCS

SEQ ID NO: 3705 - protein, 9 aa, Artificial Sequence
  Description of Artificial Sequence: Synthetic peptide
CSCWYQVQF

SEQ ID NO: 3706 - protein, 9 aa, Artificial Sequence
  Description of Artificial Sequence: Synthetic peptide
CSDNLYCAM

SEQ ID NO: 3707 - protein, 9 aa, Artificial Sequence
  Description of Artificial Sequence: Synthetic peptide
CSECWCKYW

SEQ ID NO: 3708 - protein, 9 aa, Artificial Sequence
  Description of Artificial Sequence: Synthetic peptide
CSHDFTQYQ

SEQ ID NO: 3709 - protein, 9 aa, Artificial Sequence
  Description of Artificial Sequence: Synthetic peptide
CSIQWWQWG

SEQ ID NO: 3710 - protein, 9 aa, Artificial Sequence
  Description of Artificial Sequence: Synthetic peptide
CSKLHDHIN

SEQ ID NO: 3711 - protein, 9 aa, Artificial Sequence
  Description of Artificial Sequence: Synthetic peptide
CSLQQMSIR

SEQ ID NO: 3712 - protein, 9 aa, Artificial Sequence
  Description of Artificial Sequence: Synthetic peptide
CSNMYVASE

SEQ ID NO: 3713 - protein, 9 aa, Artificial Sequence
  Description of Artificial Sequence: Synthetic peptide
CSQPMSMPN

SEQ ID NO: 3714 - protein, 9 aa, Artificial Sequence
  Description of Artificial Sequence: Synthetic peptide
CSQSFQWSK

SEQ ID NO: 3715 - protein, 9 aa, Artificial Sequence
  Description of Artificial Sequence: Synthetic peptide
CSSMWFLWG

SEQ ID NO: 3716 - protein, 9 aa, Artificial Sequence
  Description of Artificial Sequence: Synthetic peptide
CSSPMSLQD

SEQ ID NO: 3717 - protein, 9 aa, Artificial Sequence
  Description of Artificial Sequence: Synthetic peptide
CSTSRMASY

SEQ ID NO: 3718 - protein, 9 aa, Artificial Sequence
  Description of Artificial Sequence: Synthetic peptide
CSVNRHHYW

SEQ ID NO: 3719 - protein, 9 aa, Artificial Sequence
  Description of Artificial Sequence: Synthetic peptide
CSYELITNG

SEQ ID NO: 3720 - protein, 9 aa, Artificial Sequence
  Description of Artificial Sequence: Synthetic peptide
CTFHTMRGH

SEQ ID NO: 3721 - protein, 9 aa, Artificial Sequence
  Description of Artificial Sequence: Synthetic peptide
CTFIRHAMQ

SEQ ID NO: 3722 - protein, 9 aa, Artificial Sequence
  Description of Artificial Sequence: Synthetic peptide
CTFLRSTFA

SEQ ID NO: 3723 - protein, 9 aa, Artificial Sequence
  Description of Artificial Sequence: Synthetic peptide
CTFNQIRGP

SEQ ID NO: 3724 - protein, 9 aa, Artificial Sequence
  Description of Artificial Sequence: Synthetic peptide
CTFQPNRVC

SEQ ID NO: 3725 - protein, 9 aa, Artificial Sequence
  Description of Artificial Sequence: Synthetic peptide
CTGFMGWCM

SEQ ID NO: 3726 - protein, 9 aa, Artificial Sequence
  Description of Artificial Sequence: Synthetic peptide
CTHPNALSP

SEQ ID NO: 3727 - protein, 9 aa, Artificial Sequence
  Description of Artificial Sequence: Synthetic peptide
CTIAIRDSS

SEQ ID NO: 3728 - protein, 9 aa, Artificial Sequence
  Description of Artificial Sequence: Synthetic peptide
CTIMAMQSH

SEQ ID NO: 3729 - protein, 9 aa, Artificial Sequence
  Description of Artificial Sequence: Synthetic peptide
CTIRKQQMT

SEQ ID NO: 3730 - protein, 9 aa, Artificial Sequence
  Description of Artificial Sequence: Synthetic peptide
CTKFEHRSL

SEQ ID NO: 3731 - protein, 9 aa, Artificial Sequence
  Description of Artificial Sequence: Synthetic peptide
CTKHMLQGE

SEQ ID NO: 3732 - protein, 9 aa, Artificial Sequence
  Description of Artificial Sequence: Synthetic peptide
CTMHMDAKY

SEQ ID NO: 3733 - protein, 9 aa, Artificial Sequence
  Description of Artificial Sequence: Synthetic peptide
CTMWCYGCP

SEQ ID NO: 3734 - protein, 9 aa, Artificial Sequence
  Description of Artificial Sequence: Synthetic peptide
CTNVRMKYE

SEQ ID NO: 3735 - protein, 9 aa, Artificial Sequence
  Description of Artificial Sequence: Synthetic peptide
CTRQTTFHG

SEQ ID NO: 3736 - protein, 9 aa, Artificial Sequence
  Description of Artificial Sequence: Synthetic peptide
CTVSKNYGQ

SEQ ID NO: 3737 - protein, 9 aa, Artificial Sequence
  Description of Artificial Sequence: Synthetic peptide
CTYQYQAGM

SEQ ID NO: 3738 - protein, 9 aa, Artificial Sequence
  Description of Artificial Sequence: Synthetic peptide
CTYTPLRAP

SEQ ID NO: 3739 - protein, 9 aa, Artificial Sequence
  Description of Artificial Sequence: Synthetic peptide
CVCYHNSSQ

SEQ ID NO: 3740 - protein, 9 aa, Artificial Sequence
  Description of Artificial Sequence: Synthetic peptide
CVDQHHLTP

SEQ ID NO: 3741 - protein, 9 aa, Artificial Sequence
  Description of Artificial Sequence: Synthetic peptide
CVFAFGMKH

SEQ ID NO: 3742 - protein, 9 aa, Artificial Sequence
  Description of Artificial Sequence: Synthetic peptide
CVFAHNRGF

SEQ ID NO: 3743 - protein, 9 aa, Artificial Sequence
  Description of Artificial Sequence: Synthetic peptide
CVFMDRMAY

SEQ ID NO: 3744 - protein, 9 aa, Artificial Sequence
  Description of Artificial Sequence: Synthetic peptide
CVFPRHHMF

SEQ ID NO: 3745 - protein, 9 aa, Artificial Sequence
  Description of Artificial Sequence: Synthetic peptide
CVGLVMRPQ

SEQ ID NO: 3746 - protein, 9 aa, Artificial Sequence
  Description of Artificial Sequence: Synthetic peptide
CVGPFGSMM

SEQ ID NO: 3747 - protein, 9 aa, Artificial Sequence
  Description of Artificial Sequence: Synthetic peptide
CVHCYNRGY

SEQ ID NO: 3748 - protein, 9 aa, Artificial Sequence
  Description of Artificial Sequence: Synthetic peptide
CVHIRNIGW

SEQ ID NO: 3749 - protein, 9 aa, Artificial Sequence
  Description of Artificial Sequence: Synthetic peptide
CVHTVIRGW

SEQ ID NO: 3750 - protein, 9 aa, Artificial Sequence
  Description of Artificial Sequence: Synthetic peptide
CVIMIGELS

SEQ ID NO: 3751 - protein, 9 aa, Artificial Sequence
  Description of Artificial Sequence: Synthetic peptide
CVIQRMHVY

SEQ ID NO: 3752 - protein, 9 aa, Artificial Sequence
  Description of Artificial Sequence: Synthetic peptide
CVKWCNRCS

SEQ ID NO: 3753 - protein, 9 aa, Artificial Sequence
  Description of Artificial Sequence: Synthetic peptide
CVLASRADR

SEQ ID NO: 3754 - protein, 9 aa, Artificial Sequence
  Description of Artificial Sequence: Synthetic peptide
CVLMRWAWP

SEQ ID NO: 3755 - protein, 9 aa, Artificial Sequence
  Description of Artificial Sequence: Synthetic peptide
CVMPRHRFP

SEQ ID NO: 3756 - protein, 9 aa, Artificial Sequence
  Description of Artificial Sequence: Synthetic peptide
CVMSHLSGK

SEQ ID NO: 3757 - protein, 9 aa, Artificial Sequence
  Description of Artificial Sequence: Synthetic peptide
CVMTYWEAH

SEQ ID NO: 3758 - protein, 9 aa, Artificial Sequence
  Description of Artificial Sequence: Synthetic peptide
CVMVWAEKG

SEQ ID NO: 3759 - protein, 9 aa, Artificial Sequence
  Description of Artificial Sequence: Synthetic peptide
CVNHARQMS

SEQ ID NO: 3760 - protein, 9 aa, Artificial Sequence
  Description of Artificial Sequence: Synthetic peptide
CVNPTTTFG

SEQ ID NO: 3761 - protein, 9 aa, Artificial Sequence
  Description of Artificial Sequence: Synthetic peptide
CVPSYYNNR

SEQ ID NO: 3762 - protein, 9 aa, Artificial Sequence
  Description of Artificial Sequence: Synthetic peptide
CVSYMFSQC

SEQ ID NO: 3763 - protein, 9 aa, Artificial Sequence
  Description of Artificial Sequence: Synthetic peptide
CVTSLYGQY

SEQ ID NO: 3764 - protein, 9 aa, Artificial Sequence
  Description of Artificial Sequence: Synthetic peptide
CVVEYPWTW

SEQ ID NO: 3765 - protein, 9 aa, Artificial Sequence
  Description of Artificial Sequence: Synthetic peptide
CVVGKAKLA

SEQ ID NO: 3766 - protein, 9 aa, Artificial Sequence
  Description of Artificial Sequence: Synthetic peptide
CWCCWNNPG

SEQ ID NO: 3767 - protein, 9 aa, Artificial Sequence
  Description of Artificial Sequence: Synthetic peptide
CWEWTMINC

SEQ ID NO: 3768 - protein, 9 aa, Artificial Sequence
  Description of Artificial Sequence: Synthetic peptide
CWNDEPEKC

SEQ ID NO: 3769 - protein, 9 aa, Artificial Sequence
  Description of Artificial Sequence: Synthetic peptide
CWNYVHRAQ

SEQ ID NO: 3770 - protein, 9 aa, Artificial Sequence
  Description of Artificial Sequence: Synthetic peptide
CWRVDRNHS

SEQ ID NO: 3771 - protein, 9 aa, Artificial Sequence
  Description of Artificial Sequence: Synthetic peptide
CWSNVHRGS

SEQ ID NO: 3772 - protein, 9 aa, Artificial Sequence
  Description of Artificial Sequence: Synthetic peptide
CWSVRHAWQ

SEQ ID NO: 3773 - protein, 9 aa, Artificial Sequence
  Description of Artificial Sequence: Synthetic peptide
CWWLWNARE

SEQ ID NO: 3774 - protein, 9 aa, Artificial Sequence
  Description of Artificial Sequence: Synthetic peptide
CYCCLRCHW

SEQ ID NO: 3775 - protein, 9 aa, Artificial Sequence
  Description of Artificial Sequence: Synthetic peptide
CYCTNEHPS

SEQ ID NO: 3776 - protein, 9 aa, Artificial Sequence
  Description of Artificial Sequence: Synthetic peptide
CYPACICTQ

SEQ ID NO: 3777 - protein, 9 aa, Artificial Sequence
  Description of Artificial Sequence: Synthetic peptide
CYVYRHVIC

SEQ ID NO: 3778 - protein, 9 aa, Artificial Sequence
  Description of Artificial Sequence: Synthetic peptide
CYYLSIVVC

SEQ ID NO: 3779 - protein, 9 aa, Artificial Sequence
  Description of Artificial Sequence: Synthetic peptide
DAASDMFDP

SEQ ID NO: 3780 - protein, 9 aa, Artificial Sequence
  Description of Artificial Sequence: Synthetic peptide
DAGYFTLHA

SEQ ID NO: 3781 - protein, 9 aa, Artificial Sequence
  Description of Artificial Sequence: Synthetic peptide
DAIRWNKMV

SEQ ID NO: 3782 - protein, 9 aa, Artificial Sequence
  Description of Artificial Sequence: Synthetic peptide
DALMREAGH

SEQ ID NO: 3783 - protein, 9 aa, Artificial Sequence
  Description of Artificial Sequence: Synthetic peptide
DAMYYNFIT

SEQ ID NO: 3784 - protein, 9 aa, Artificial Sequence
  Description of Artificial Sequence: Synthetic peptide
DAQSSPTAF

SEQ ID NO: 3785 - protein, 9 aa, Artificial Sequence
  Description of Artificial Sequence: Synthetic peptide
DARFKPMMC

SEQ ID NO: 3786 - protein, 9 aa, Artificial Sequence
  Description of Artificial Sequence: Synthetic peptide
DASMYYECS

SEQ ID NO: 3787 - protein, 9 aa, Artificial Sequence
  Description of Artificial Sequence: Synthetic peptide
DATHMMCMH

SEQ ID NO: 3788 - protein, 9 aa, Artificial Sequence
  Description of Artificial Sequence: Synthetic peptide
DCEPREGYW

SEQ ID NO: 3789 - protein, 9 aa, Artificial Sequence
  Description of Artificial Sequence: Synthetic peptide
DFGAEKASE

SEQ ID NO: 3790 - protein, 9 aa, Artificial Sequence
  Description of Artificial Sequence: Synthetic peptide
DFHYNSDWW

SEQ ID NO: 3791 - protein, 9 aa, Artificial Sequence
  Description of Artificial Sequence: Synthetic peptide
DFLIHGYSG

SEQ ID NO: 3792 - protein, 9 aa, Artificial Sequence
  Description of Artificial Sequence: Synthetic peptide
DFMKMQQHG

SEQ ID NO: 3793 - protein, 9 aa, Artificial Sequence
  Description of Artificial Sequence: Synthetic peptide
DFYTMAEHF

SEQ ID NO: 3794 - protein, 9 aa, Artificial Sequence
  Description of Artificial Sequence: Synthetic peptide
DGFKMQFDR

SEQ ID NO: 3795 - protein, 9 aa, Artificial Sequence
  Description of Artificial Sequence: Synthetic peptide
DGTDWDQFS

SEQ ID NO: 3796 - protein, 9 aa, Artificial Sequence
  Description of Artificial Sequence: Synthetic peptide
DHSFHWAYD

SEQ ID NO: 3797 - protein, 9 aa, Artificial Sequence
  Description of Artificial Sequence: Synthetic peptide
DHSHNHNFF

SEQ ID NO: 3798 - protein, 9 aa, Artificial Sequence
  Description of Artificial Sequence: Synthetic peptide
DHVPISTYF

SEQ ID NO: 3799 - protein, 9 aa, Artificial Sequence
  Description of Artificial Sequence: Synthetic peptide
DIERSSRSM

SEQ ID NO: 3800 - protein, 9 aa, Artificial Sequence
  Description of Artificial Sequence: Synthetic peptide
DIKCTMTES

SEQ ID NO: 3801 - protein, 9 aa, Artificial Sequence
  Description of Artificial Sequence: Synthetic peptide
DIMCGQEHK

SEQ ID NO: 3802 - protein, 9 aa, Artificial Sequence
  Description of Artificial Sequence: Synthetic peptide
DITINSFGS

SEQ ID NO: 3803 - protein, 9 aa, Artificial Sequence
  Description of Artificial Sequence: Synthetic peptide
DKCRKDWHF

SEQ ID NO: 3804 - protein, 9 aa, Artificial Sequence
  Description of Artificial Sequence: Synthetic peptide
DKKFLECVI

SEQ ID NO: 3805 - protein, 9 aa, Artificial Sequence
  Description of Artificial Sequence: Synthetic peptide
DKLLMPFDR

SEQ ID NO: 3806 - protein, 9 aa, Artificial Sequence
  Description of Artificial Sequence: Synthetic peptide
DKLYVDVMA

SEQ ID NO: 3807 - protein, 9 aa, Artificial Sequence
  Description of Artificial Sequence: Synthetic peptide
DKMIAMVAD

SEQ ID NO: 3808 - protein, 9 aa, Artificial Sequence
  Description of Artificial Sequence: Synthetic peptide
DKNDKWHAM

SEQ ID NO: 3809 - protein, 9 aa, Artificial Sequence
  Description of Artificial Sequence: Synthetic peptide
DKYLCYTTP

SEQ ID NO: 3810 - protein, 9 aa, Artificial Sequence
  Description of Artificial Sequence: Synthetic peptide
DLYVSQKAH

SEQ ID NO: 3811 - protein, 9 aa, Artificial Sequence
  Description of Artificial Sequence: Synthetic peptide
DMAQPQAAE

SEQ ID NO: 3812 - protein, 9 aa, Artificial Sequence
  Description of Artificial Sequence: Synthetic peptide
DMEWEHCHL

SEQ ID NO: 3813 - protein, 9 aa, Artificial Sequence
  Description of Artificial Sequence: Synthetic peptide
DMFMIHAVQ

SEQ ID NO: 3814 - protein, 9 aa, Artificial Sequence
  Description of Artificial Sequence: Synthetic peptide
DMHMWVHGM

SEQ ID NO: 3815 - protein, 9 aa, Artificial Sequence
  Description of Artificial Sequence: Synthetic peptide
DMMYVRKDA

SEQ ID NO: 3816 - protein, 9 aa, Artificial Sequence
  Description of Artificial Sequence: Synthetic peptide
DMYQFPMHG

SEQ ID NO: 3817 - protein, 9 aa, Artificial Sequence
  Description of Artificial Sequence: Synthetic peptide
DNQMKNEMR

SEQ ID NO: 3818 - protein, 9 aa, Artificial Sequence
  Description of Artificial Sequence: Synthetic peptide
DNRCIIGHN

SEQ ID NO: 3819 - protein, 9 aa, Artificial Sequence
  Description of Artificial Sequence: Synthetic peptide
DNSTQIIGE

SEQ ID NO: 3820 - protein, 9 aa, Artificial Sequence
  Description of Artificial Sequence: Synthetic peptide
DPCWIWKTI

SEQ ID NO: 3821 - protein, 9 aa, Artificial Sequence
  Description of Artificial Sequence: Synthetic peptide
DPGRFQIGN

SEQ ID NO: 3822 - protein, 9 aa, Artificial Sequence
  Description of Artificial Sequence: Synthetic peptide
DPPKEPKEG

SEQ ID NO: 3823 - protein, 9 aa, Artificial Sequence
  Description of Artificial Sequence: Synthetic peptide
DPRDYDHHS

SEQ ID NO: 3824 - protein, 9 aa, Artificial Sequence
  Description of Artificial Sequence: Synthetic peptide
DPTGEGDII

SEQ ID NO: 3825 - protein, 9 aa, Artificial Sequence
  Description of Artificial Sequence: Synthetic peptide
DQGVMRQNE

SEQ ID NO: 3826 - protein, 9 aa, Artificial Sequence
  Description of Artificial Sequence: Synthetic peptide
DQMGHTWQG

SEQ ID NO: 3827 - protein, 9 aa, Artificial Sequence
  Description of Artificial Sequence: Synthetic peptide
DQMIQVEFT

SEQ ID NO: 3828 - protein, 9 aa, Artificial Sequence
  Description of Artificial Sequence: Synthetic peptide
DQQPYVSGL

SEQ ID NO: 3829 - protein, 9 aa, Artificial Sequence
  Description of Artificial Sequence: Synthetic peptide
DQRYGTSFS

SEQ ID NO: 3830 - protein, 9 aa, Artificial Sequence
  Description of Artificial Sequence: Synthetic peptide
DRCYFGMGH

SEQ ID NO: 3831 - protein, 9 aa, Artificial Sequence
  Description of Artificial Sequence: Synthetic peptide
DRNWYRHPG

SEQ ID NO: 3832 - protein, 9 aa, Artificial Sequence
  Description of Artificial Sequence: Synthetic peptide
DRRPVDCMN

SEQ ID NO: 3833 - protein, 9 aa, Artificial Sequence
  Description of Artificial Sequence: Synthetic peptide
DSASIPNYE

SEQ ID NO: 3834 - protein, 9 aa, Artificial Sequence
  Description of Artificial Sequence: Synthetic peptide
DSFRKGTFA

SEQ ID NO: 3835 - protein, 9 aa, Artificial Sequence
  Description of Artificial Sequence: Synthetic peptide
DSFTYTHGW

SEQ ID NO: 3836 - protein, 9 aa, Artificial Sequence
  Description of Artificial Sequence: Synthetic peptide
DSIFPPHTI

SEQ ID NO: 3837 - protein, 9 aa, Artificial Sequence
  Description of Artificial Sequence: Synthetic peptide
DSMLNGMGW

SEQ ID NO: 3838 - protein, 9 aa, Artificial Sequence
  Description of Artificial Sequence: Synthetic peptide
DSQAAPTCP

SEQ ID NO: 3839 - protein, 9 aa, Artificial Sequence
  Description of Artificial Sequence: Synthetic peptide
DSRTVFVDN

SEQ ID NO: 3840 - protein, 9 aa, Artificial Sequence
  Description of Artificial Sequence: Synthetic peptide
DSVDWFTSG

SEQ ID NO: 3841 - protein, 9 aa, Artificial Sequence
  Description of Artificial Sequence: Synthetic peptide
DTFGVACYL

SEQ ID NO: 3842 - protein, 9 aa, Artificial Sequence
  Description of Artificial Sequence: Synthetic peptide
DTGMDAKYP

SEQ ID NO: 3843 - protein, 9 aa, Artificial Sequence
  Description of Artificial Sequence: Synthetic peptide
DTKSYQAPA

SEQ ID NO: 3844 - protein, 9 aa, Artificial Sequence
  Description of Artificial Sequence: Synthetic peptide
DTKWLHWMH

SEQ ID NO: 3845 - protein, 9 aa, Artificial Sequence
  Description of Artificial Sequence: Synthetic peptide
DTTNRNMYS

SEQ ID NO: 3846 - protein, 9 aa, Artificial Sequence
  Description of Artificial Sequence: Synthetic peptide
DVAEAWKHA

SEQ ID NO: 3847 - protein, 9 aa, Artificial Sequence
  Description of Artificial Sequence: Synthetic peptide
DVAWHHWTF

SEQ ID NO: 3848 - protein, 9 aa, Artificial Sequence
  Description of Artificial Sequence: Synthetic peptide
DVDRGRSMS

SEQ ID NO: 3849 - protein, 9 aa, Artificial Sequence
  Description of Artificial Sequence: Synthetic peptide
DVDRIMPQP

SEQ ID NO: 3850 - protein, 9 aa, Artificial Sequence
  Description of Artificial Sequence: Synthetic peptide
DVDWTYMTL

SEQ ID NO: 3851 - protein, 9 aa, Artificial Sequence
  Description of Artificial Sequence: Synthetic peptide
DVHFKMTMA

SEQ ID NO: 3852 - protein, 9 aa, Artificial Sequence
  Description of Artificial Sequence: Synthetic peptide
DVLCLHNHF

SEQ ID NO: 3853 - protein, 9 aa, Artificial Sequence
  Description of Artificial Sequence: Synthetic peptide
DVLFTDVGF

SEQ ID NO: 3854 - protein, 9 aa, Artificial Sequence
  Description of Artificial Sequence: Synthetic peptide
DVTFRWGIC

SEQ ID NO: 3855 - protein, 9 aa, Artificial Sequence
  Description of Artificial Sequence: Synthetic peptide
DVTLMENAR

SEQ ID NO: 3856 - protein, 9 aa, Artificial Sequence
  Description of Artificial Sequence: Synthetic peptide
DVWFNHTVS

SEQ ID NO: 3857 - protein, 9 aa, Artificial Sequence
  Description of Artificial Sequence: Synthetic peptide
DVYPPQGLM

SEQ ID NO: 3858 - protein, 9 aa, Artificial Sequence
  Description of Artificial Sequence: Synthetic peptide
DVYQLHAMQ

SEQ ID NO: 3859 - protein, 9 aa, Artificial Sequence
  Description of Artificial Sequence: Synthetic peptide
DWAKSDRIT

SEQ ID NO: 3860 - protein, 9 aa, Artificial Sequence
  Description of Artificial Sequence: Synthetic peptide
DWFIQYHRG

SEQ ID NO: 3861 - protein, 9 aa, Artificial Sequence
  Description of Artificial Sequence: Synthetic peptide
DWSWYFQGS

SEQ ID NO: 3862 - protein, 9 aa, Artificial Sequence
  Description of Artificial Sequence: Synthetic peptide
DYAAISSMA

SEQ ID NO: 3863 - protein, 9 aa, Artificial Sequence
  Description of Artificial Sequence: Synthetic peptide
DYAKQDSSC

SEQ ID NO: 3864 - protein, 9 aa, Artificial Sequence
  Description of Artificial Sequence: Synthetic peptide
DYNLAGLLP

SEQ ID NO: 3865 - protein, 9 aa, Artificial Sequence
  Description of Artificial Sequence: Synthetic peptide
DYRQWDQQY

SEQ ID NO: 3866 - protein, 9 aa, Artificial Sequence
  Description of Artificial Sequence: Synthetic peptide
DYVQVNQQP

SEQ ID NO: 3867 - protein, 9 aa, Artificial Sequence
  Description of Artificial Sequence: Synthetic peptide
EAASADCQD

SEQ ID NO: 3868 - protein, 9 aa, Artificial Sequence
  Description of Artificial Sequence: Synthetic peptide
EAAYGCKIG

SEQ ID NO: 3869 - protein, 9 aa, Artificial Sequence
  Description of Artificial Sequence: Synthetic peptide
EADKYPYCP

SEQ ID NO: 3870 - protein, 9 aa, Artificial Sequence
  Description of Artificial Sequence: Synthetic peptide
EADWNIGDT

SEQ ID NO: 3871 - protein, 9 aa, Artificial Sequence
  Description of Artificial Sequence: Synthetic peptide
EAERIVRGP

SEQ ID NO: 3872 - protein, 9 aa, Artificial Sequence
  Description of Artificial Sequence: Synthetic peptide
EAFCLHGWA

SEQ ID NO: 3873 - protein, 9 aa, Artificial Sequence
  Description of Artificial Sequence: Synthetic peptide
EAGFWTQQA

SEQ ID NO: 3874 - protein, 9 aa, Artificial Sequence
  Description of Artificial Sequence: Synthetic peptide
EAGSFQHCA

SEQ ID NO: 3875 - protein, 9 aa, Artificial Sequence
  Description of Artificial Sequence: Synthetic peptide
EAHNVFDNP

SEQ ID NO: 3876 - protein, 9 aa, Artificial Sequence
  Description of Artificial Sequence: Synthetic peptide
EAHPHWWVT

SEQ ID NO: 3877 - protein, 9 aa, Artificial Sequence
  Description of Artificial Sequence: Synthetic peptide
EANDSLKAN

SEQ ID NO: 3878 - protein, 9 aa, Artificial Sequence
  Description of Artificial Sequence: Synthetic peptide
EANLSNVRA

SEQ ID NO: 3879 - protein, 9 aa, Artificial Sequence
  Description of Artificial Sequence: Synthetic peptide
ECFPSIQNL

SEQ ID NO: 3880 - protein, 9 aa, Artificial Sequence
  Description of Artificial Sequence: Synthetic peptide
ECGLSHDCG

SEQ ID NO: 3881 - protein, 9 aa, Artificial Sequence
  Description of Artificial Sequence: Synthetic peptide
ECHVRDSHL

SEQ ID NO: 3882 - protein, 9 aa, Artificial Sequence
  Description of Artificial Sequence: Synthetic peptide
ECIKQSECA

SEQ ID NO: 3883 - protein, 9 aa, Artificial Sequence
  Description of Artificial Sequence: Synthetic peptide
ECIQVVRGS

SEQ ID NO: 3884 - protein, 9 aa, Artificial Sequence
  Description of Artificial Sequence: Synthetic peptide
ECKDVEDIF

SEQ ID NO: 3885 - protein, 9 aa, Artificial Sequence
  Description of Artificial Sequence: Synthetic peptide
ECMLCPEAS

SEQ ID NO: 3886 - protein, 9 aa, Artificial Sequence
  Description of Artificial Sequence: Synthetic peptide
ECQTSPVAY

SEQ ID NO: 3887 - protein, 9 aa, Artificial Sequence
  Description of Artificial Sequence: Synthetic peptide
ECRAGDPVN

SEQ ID NO: 3888 - protein, 9 aa, Artificial Sequence
  Description of Artificial Sequence: Synthetic peptide
ECSLKDHHS

SEQ ID NO: 3889 - protein, 9 aa, Artificial Sequence
  Description of Artificial Sequence: Synthetic peptide
ECTANTHYY

SEQ ID NO: 3890 - protein, 9 aa, Artificial Sequence
  Description of Artificial Sequence: Synthetic peptide
ECWMQNEHA

SEQ ID NO: 3891 - protein, 9 aa, Artificial Sequence
  Description of Artificial Sequence: Synthetic peptide
EDCALHQSE

SEQ ID NO: 3892 - protein, 9 aa, Artificial Sequence
  Description of Artificial Sequence: Synthetic peptide
EDHWLFWKQ

SEQ ID NO: 3893 - protein, 9 aa, Artificial Sequence
  Description of Artificial Sequence: Synthetic peptide
EETILIDCH

SEQ ID NO: 3894 - protein, 9 aa, Artificial Sequence
  Description of Artificial Sequence: Synthetic peptide
EEVMLGCLQ

SEQ ID NO: 3895 - protein, 9 aa, Artificial Sequence
  Description of Artificial Sequence: Synthetic peptide
EFAADAHGM

SEQ ID NO: 3896 - protein, 9 aa, Artificial Sequence
  Description of Artificial Sequence: Synthetic peptide
EFAGITDMG

SEQ ID NO: 3897 - protein, 9 aa, Artificial Sequence
  Description of Artificial Sequence: Synthetic peptide
EFCEYAQAT

SEQ ID NO: 3898 - protein, 9 aa, Artificial Sequence
  Description of Artificial Sequence: Synthetic peptide
EFHQQVNTW

SEQ ID NO: 3899 - protein, 9 aa, Artificial Sequence
  Description of Artificial Sequence: Synthetic peptide
EFMHAYEAT

SEQ ID NO: 3900 - protein, 9 aa, Artificial Sequence
  Description of Artificial Sequence: Synthetic peptide
EFSECHAFD

SEQ ID NO: 3901 - protein, 9 aa, Artificial Sequence
  Description of Artificial Sequence: Synthetic peptide
EFSNPCSFG

SEQ ID NO: 3902 - protein, 9 aa, Artificial Sequence
  Description of Artificial Sequence: Synthetic peptide
EFVKAFMQI

SEQ ID NO: 3903 - protein, 9 aa, Artificial Sequence
  Description of Artificial Sequence: Synthetic peptide
EGHGAVLNP

SEQ ID NO: 3904 - protein, 9 aa, Artificial Sequence
  Description of Artificial Sequence: Synthetic peptide
EGKWIGLQT

SEQ ID NO: 3905 - protein, 9 aa, Artificial Sequence
  Description of Artificial Sequence: Synthetic peptide
EGMKSWNST

SEQ ID NO: 3906 - protein, 9 aa, Artificial Sequence
  Description of Artificial Sequence: Synthetic peptide
EGRSSENND

SEQ ID NO: 3907 - protein, 9 aa, Artificial Sequence
  Description of Artificial Sequence: Synthetic peptide
EGSPYFMAK

SEQ ID NO: 3908 - protein, 9 aa, Artificial Sequence
  Description of Artificial Sequence: Synthetic peptide
EHALEHTQL

SEQ ID NO: 3909 - protein, 9 aa, Artificial Sequence
  Description of Artificial Sequence: Synthetic peptide
EHELLKQYE

SEQ ID NO: 3910 - protein, 9 aa, Artificial Sequence
  Description of Artificial Sequence: Synthetic peptide
EHGMILRLG

SEQ ID NO: 3911 - protein, 9 aa, Artificial Sequence
  Description of Artificial Sequence: Synthetic peptide
EHLFLIHEA

SEQ ID NO: 3912 - protein, 9 aa, Artificial Sequence
  Description of Artificial Sequence: Synthetic peptide
EHRQKMAST

SEQ ID NO: 3913 - protein, 9 aa, Artificial Sequence
  Description of Artificial Sequence: Synthetic peptide
EHRTAFFYS

SEQ ID NO: 3914 - protein, 9 aa, Artificial Sequence
  Description of Artificial Sequence: Synthetic peptide
EHVFEEVHS

SEQ ID NO: 3915 - protein, 9 aa, Artificial Sequence
  Description of Artificial Sequence: Synthetic peptide
EIDNVCRQA

SEQ ID NO: 3916 - protein, 9 aa, Artificial Sequence
  Description of Artificial Sequence: Synthetic peptide
EIGCAHAEE

SEQ ID NO: 3917 - protein, 9 aa, Artificial Sequence
  Description of Artificial Sequence: Synthetic peptide
EIGRNCALF

SEQ ID NO: 3918 - protein, 9 aa, Artificial Sequence
  Description of Artificial Sequence: Synthetic peptide
EILLSMMEQ

SEQ ID NO: 3919 - protein, 9 aa, Artificial Sequence
  Description of Artificial Sequence: Synthetic peptide
EILQPQVMI

SEQ ID NO: 3920 - protein, 9 aa, Artificial Sequence
  Description of Artificial Sequence: Synthetic peptide
EIMCKGTMG

SEQ ID NO: 3921 - protein, 9 aa, Artificial Sequence
  Description of Artificial Sequence: Synthetic peptide
EIQQVGRDF

SEQ ID NO: 3922 - protein, 9 aa, Artificial Sequence
  Description of Artificial Sequence: Synthetic peptide
EIRHWGWLV

SEQ ID NO: 3923 - protein, 9 aa, Artificial Sequence
  Description of Artificial Sequence: Synthetic peptide
EISNVRCAP

SEQ ID NO: 3924 - protein, 9 aa, Artificial Sequence
  Description of Artificial Sequence: Synthetic peptide
EIVPTMHCK

SEQ ID NO: 3925 - protein, 9 aa, Artificial Sequence
  Description of Artificial Sequence: Synthetic peptide
EIVYQHISQ

SEQ ID NO: 3926 - protein, 9 aa, Artificial Sequence
  Description of Artificial Sequence: Synthetic peptide
EKHNFTQMV

SEQ ID NO: 3927 - protein, 9 aa, Artificial Sequence
  Description of Artificial Sequence: Synthetic peptide
EKKFNHQIN

SEQ ID NO: 3928 - protein, 9 aa, Artificial Sequence
  Description of Artificial Sequence: Synthetic peptide
EKLYSVSVA

SEQ ID NO: 3929 - protein, 9 aa, Artificial Sequence
  Description of Artificial Sequence: Synthetic peptide
EKRLESAGW

SEQ ID NO: 3930 - protein, 9 aa, Artificial Sequence
  Description of Artificial Sequence: Synthetic peptide
EKSNLFTVR

SEQ ID NO: 3931 - protein, 9 aa, Artificial Sequence
  Description of Artificial Sequence: Synthetic peptide
EKYMYHDVQ

SEQ ID NO: 3932 - protein, 9 aa, Artificial Sequence
  Description of Artificial Sequence: Synthetic peptide
ELDFIIMPG

SEQ ID NO: 3933 - protein, 9 aa, Artificial Sequence
  Description of Artificial Sequence: Synthetic peptide
ELNGAWWKA

SEQ ID NO: 3934 - protein, 9 aa, Artificial Sequence
  Description of Artificial Sequence: Synthetic peptide
EMGAVGSFK

SEQ ID NO: 3935 - protein, 9 aa, Artificial Sequence
  Description of Artificial Sequence: Synthetic peptide
EMHRNELAM

SEQ ID NO: 3936 - protein, 9 aa, Artificial Sequence
  Description of Artificial Sequence: Synthetic peptide
EMMVKPSYC

SEQ ID NO: 3937 - protein, 9 aa, Artificial Sequence
  Description of Artificial Sequence: Synthetic peptide
EMRIQTAQQ

SEQ ID NO: 3938 - protein, 9 aa, Artificial Sequence
  Description of Artificial Sequence: Synthetic peptide
EMVLCVTHE

SEQ ID NO: 3939 - protein, 9 aa, Artificial Sequence
  Description of Artificial Sequence: Synthetic peptide
ENDQIAHEQ

SEQ ID NO: 3940 - protein, 9 aa, Artificial Sequence
  Description of Artificial Sequence: Synthetic peptide
ENGYMHQYL

SEQ ID NO: 3941 - protein, 9 aa, Artificial Sequence
  Description of Artificial Sequence: Synthetic peptide
ENIKTPFGT

SEQ ID NO: 3942 - protein, 9 aa, Artificial Sequence
  Description of Artificial Sequence: Synthetic peptide
ENTYQDTIP

SEQ ID NO: 3943 - protein, 9 aa, Artificial Sequence
  Description of Artificial Sequence: Synthetic peptide
EPKDVSHMT

SEQ ID NO: 3944 - protein, 9 aa, Artificial Sequence
  Description of Artificial Sequence: Synthetic peptide
EPQSFNHWS

SEQ ID NO: 3945 - protein, 9 aa, Artificial Sequence
  Description of Artificial Sequence: Synthetic peptide
EQARIDTIG

SEQ ID NO: 3946 - protein, 9 aa, Artificial Sequence
  Description of Artificial Sequence: Synthetic peptide
EQDQTKTMH

SEQ ID NO: 3947 - protein, 9 aa, Artificial Sequence
  Description of Artificial Sequence: Synthetic peptide
EQELPVTLK

SEQ ID NO: 3948 - protein, 9 aa, Artificial Sequence
  Description of Artificial Sequence: Synthetic peptide
EQPQKPSAW

SEQ ID NO: 3949 - protein, 9 aa, Artificial Sequence
  Description of Artificial Sequence: Synthetic peptide
EQTKVMHCC

SEQ ID NO: 3950 - protein, 9 aa, Artificial Sequence
  Description of Artificial Sequence: Synthetic peptide
EQVSKGVYA

SEQ ID NO: 3951 - protein, 9 aa, Artificial Sequence
  Description of Artificial Sequence: Synthetic peptide
ERGPTDNLH

SEQ ID NO: 3952 - protein, 9 aa, Artificial Sequence
  Description of Artificial Sequence: Synthetic peptide
ERHESHQEF

SEQ ID NO: 3953 - protein, 9 aa, Artificial Sequence
  Description of Artificial Sequence: Synthetic peptide
ERINKFNAD

SEQ ID NO: 3954 - protein, 9 aa, Artificial Sequence
  Description of Artificial Sequence: Synthetic peptide
ERRSAESLQ

SEQ ID NO: 3955 - protein, 9 aa, Artificial Sequence
  Description of Artificial Sequence: Synthetic peptide
ESAQSEGEF

SEQ ID NO: 3956 - protein, 9 aa, Artificial Sequence
  Description of Artificial Sequence: Synthetic peptide
ESDIGHPYK

SEQ ID NO: 3957 - protein, 9 aa, Artificial Sequence
  Description of Artificial Sequence: Synthetic peptide
ESDIMRSPM

SEQ ID NO: 3958 - protein, 9 aa, Artificial Sequence
  Description of Artificial Sequence: Synthetic peptide
ESEQSQDNH

SEQ ID NO: 3959 - protein, 9 aa, Artificial Sequence
  Description of Artificial Sequence: Synthetic peptide
ESGPKWRFP

SEQ ID NO: 3960 - protein, 9 aa, Artificial Sequence
  Description of Artificial Sequence: Synthetic peptide
ESNGFVNGV

SEQ ID NO: 3961 - protein, 9 aa, Artificial Sequence
  Description of Artificial Sequence: Synthetic peptide
ESSRTGSHA

SEQ ID NO: 3962 - protein, 9 aa, Artificial Sequence
  Description of Artificial Sequence: Synthetic peptide
ESTESHFCE

SEQ ID NO: 3963 - protein, 9 aa, Artificial Sequence
  Description of Artificial Sequence: Synthetic peptide
ESTQMCTCC

SEQ ID NO: 3964 - protein, 9 aa, Artificial Sequence
  Description of Artificial Sequence: Synthetic peptide
ESVKFGKMP

SEQ ID NO: 3965 - protein, 9 aa, Artificial Sequence
  Description of Artificial Sequence: Synthetic peptide
ESYTLYQHL

SEQ ID NO: 3966 - protein, 9 aa, Artificial Sequence
  Description of Artificial Sequence: Synthetic peptide
ETACNHTAW

SEQ ID NO: 3967 - protein, 9 aa, Artificial Sequence
  Description of Artificial Sequence: Synthetic peptide
ETASQQHDA

SEQ ID NO: 3968 - protein, 9 aa, Artificial Sequence
  Description of Artificial Sequence: Synthetic peptide
ETCNRGRLF

SEQ ID NO: 3969 - protein, 9 aa, Artificial Sequence
  Description of Artificial Sequence: Synthetic peptide
ETFAMNAAW

SEQ ID NO: 3970 - protein, 9 aa, Artificial Sequence
  Description of Artificial Sequence: Synthetic peptide
ETHFYEVKF

SEQ ID NO: 3971 - protein, 9 aa, Artificial Sequence
  Description of Artificial Sequence: Synthetic peptide
ETLAKGYDW

SEQ ID NO: 3972 - protein, 9 aa, Artificial Sequence
  Description of Artificial Sequence: Synthetic peptide
ETLRMFGVY

SEQ ID NO: 3973 - protein, 9 aa, Artificial Sequence
  Description of Artificial Sequence: Synthetic peptide
ETMPNKLQY

SEQ ID NO: 3974 - protein, 9 aa, Artificial Sequence
  Description of Artificial Sequence: Synthetic peptide
ETNIDNRAM

SEQ ID NO: 3975 - protein, 9 aa, Artificial Sequence
  Description of Artificial Sequence: Synthetic peptide
ETRINIEAH

SEQ ID NO: 3976 - protein, 9 aa, Artificial Sequence
  Description of Artificial Sequence: Synthetic peptide
ETTNAAWFR

SEQ ID NO: 3977 - protein, 9 aa, Artificial Sequence
  Description of Artificial Sequence: Synthetic peptide
ETVSGMHER

SEQ ID NO: 3978 - protein, 9 aa, Artificial Sequence
  Description of Artificial Sequence: Synthetic peptide
EVCFDVCGE

SEQ ID NO: 3979 - protein, 9 aa, Artificial Sequence
  Description of Artificial Sequence: Synthetic peptide
EVCMAVVDN

SEQ ID NO: 3980 - protein, 9 aa, Artificial Sequence
  Description of Artificial Sequence: Synthetic peptide
EVDHQFHFC

SEQ ID NO: 3981 - protein, 9 aa, Artificial Sequence
  Description of Artificial Sequence: Synthetic peptide
EVGPGSHCE

SEQ ID NO: 3982 - protein, 9 aa, Artificial Sequence
  Description of Artificial Sequence: Synthetic peptide
EVNHMMCDM

SEQ ID NO: 3983 - protein, 9 aa, Artificial Sequence
  Description of Artificial Sequence: Synthetic peptide
EVQKCMFVE

SEQ ID NO: 3984 - protein, 9 aa, Artificial Sequence
  Description of Artificial Sequence: Synthetic peptide
EVRWIPWHY

SEQ ID NO: 3985 - protein, 9 aa, Artificial Sequence
  Description of Artificial Sequence: Synthetic peptide
EVSLFSCEF

SEQ ID NO: 3986 - protein, 9 aa, Artificial Sequence
  Description of Artificial Sequence: Synthetic peptide
EVYITGHEI

SEQ ID NO: 3987 - protein, 9 aa, Artificial Sequence
  Description of Artificial Sequence: Synthetic peptide
EWKFCWDAI

SEQ ID NO: 3988 - protein, 9 aa, Artificial Sequence
  Description of Artificial Sequence: Synthetic peptide
EWQHVGATC

SEQ ID NO: 3989 - protein, 9 aa, Artificial Sequence
  Description of Artificial Sequence: Synthetic peptide
EYCRSNFQH

SEQ ID NO: 3990 - protein, 9 aa, Artificial Sequence
  Description of Artificial Sequence: Synthetic peptide
EYESCICAS

SEQ ID NO: 3991 - protein, 9 aa, Artificial Sequence
  Description of Artificial Sequence: Synthetic peptide
EYLRFIAHD

SEQ ID NO: 3992 - protein, 9 aa, Artificial Sequence
  Description of Artificial Sequence: Synthetic peptide
FACMRQMAY

SEQ ID NO: 3993 - protein, 9 aa, Artificial Sequence
  Description of Artificial Sequence: Synthetic peptide
FATGKHHYL

SEQ ID NO: 3994 - protein, 9 aa, Artificial Sequence
  Description of Artificial Sequence: Synthetic peptide
FATHTYDYW

SEQ ID NO: 3995 - protein, 9 aa, Artificial Sequence
  Description of Artificial Sequence: Synthetic peptide
FAVPSKVTM

SEQ ID NO: 3996 - protein, 9 aa, Artificial Sequence
  Description of Artificial Sequence: Synthetic peptide
FCYRMTDDR

SEQ ID NO: 3997 - protein, 9 aa, Artificial Sequence
  Description of Artificial Sequence: Synthetic peptide
FDMEGFREL

SEQ ID NO: 3998 - protein, 9 aa, Artificial Sequence
  Description of Artificial Sequence: Synthetic peptide
FERTVHTDK

SEQ ID NO: 3999 - protein, 9 aa, Artificial Sequence
  Description of Artificial Sequence: Synthetic peptide
FGDWKHGDG

SEQ ID NO: 4000 - protein, 9 aa, Artificial Sequence
  Description of Artificial Sequence: Synthetic peptide
FGPGSHGNN

SEQ ID NO: 4001 - protein, 9 aa, Artificial Sequence
  Description of Artificial Sequence: Synthetic peptide
FKGPYHYQS

SEQ ID NO: 4002 - protein, 9 aa, Artificial Sequence
  Description of Artificial Sequence: Synthetic peptide
FLFYLNMHE

SEQ ID NO: 4003 - protein, 9 aa, Artificial Sequence
  Description of Artificial Sequence: Synthetic peptide
FLMRRNGAD

SEQ ID NO: 4004 - protein, 9 aa, Artificial Sequence
  Description of Artificial Sequence: Synthetic peptide
FLTERCQTE

SEQ ID NO: 4005 - protein, 9 aa, Artificial Sequence
  Description of Artificial Sequence: Synthetic peptide
FMNHFMMWT

SEQ ID NO: 4006 - protein, 9 aa, Artificial Sequence
  Description of Artificial Sequence: Synthetic peptide
FMQKECVEE

SEQ ID NO: 4007 - protein, 9 aa, Artificial Sequence
  Description of Artificial Sequence: Synthetic peptide
FNADIAHCD

SEQ ID NO: 4008 - protein, 9 aa, Artificial Sequence
  Description of Artificial Sequence: Synthetic peptide
FNMLVLETW

SEQ ID NO: 4009 - protein, 9 aa, Artificial Sequence
  Description of Artificial Sequence: Synthetic peptide
FNSSFMGQA

SEQ ID NO: 4010 - protein, 9 aa, Artificial Sequence
  Description of Artificial Sequence: Synthetic peptide
FPHKWNAMS

SEQ ID NO: 4011 - protein, 9 aa, Artificial Sequence
  Description of Artificial Sequence: Synthetic peptide
FPVDMQWMY

SEQ ID NO: 4012 - protein, 9 aa, Artificial Sequence
  Description of Artificial Sequence: Synthetic peptide
FQGPIAPME

SEQ ID NO: 4013 - protein, 9 aa, Artificial Sequence
  Description of Artificial Sequence: Synthetic peptide
FSAMFRRHC

SEQ ID NO: 4014 - protein, 9 aa, Artificial Sequence
  Description of Artificial Sequence: Synthetic peptide
FSGNLSTYA

SEQ ID NO: 4015 - protein, 9 aa, Artificial Sequence
  Description of Artificial Sequence: Synthetic peptide
FSKLTGQDF

SEQ ID NO: 4016 - protein, 9 aa, Artificial Sequence
  Description of Artificial Sequence: Synthetic peptide
FSLKTESRI

SEQ ID NO: 4017 - protein, 9 aa, Artificial Sequence
  Description of Artificial Sequence: Synthetic peptide
FTDDDVNRF

SEQ ID NO: 4018 - protein, 9 aa, Artificial Sequence
  Description of Artificial Sequence: Synthetic peptide
FTGLCDIWQ

SEQ ID NO: 4019 - protein, 9 aa, Artificial Sequence
  Description of Artificial Sequence: Synthetic peptide
FTRALLDMG

SEQ ID NO: 4020 - protein, 9 aa, Artificial Sequence
  Description of Artificial Sequence: Synthetic peptide
FVRTKEDLV

SEQ ID NO: 4021 - protein, 9 aa, Artificial Sequence
  Description of Artificial Sequence: Synthetic peptide
GADDKGTHC

SEQ ID NO: 4022 - protein, 9 aa, Artificial Sequence
  Description of Artificial Sequence: Synthetic peptide
GADIYIETS

SEQ ID NO: 4023 - protein, 9 aa, Artificial Sequence
  Description of Artificial Sequence: Synthetic peptide
GADKLFMYG

SEQ ID NO: 4024 - protein, 9 aa, Artificial Sequence
  Description of Artificial Sequence: Synthetic peptide
GADNVQKIC

SEQ ID NO: 4025 - protein, 9 aa, Artificial Sequence
  Description of Artificial Sequence: Synthetic peptide
GADPFEGQN

SEQ ID NO: 4026 - protein, 9 aa, Artificial Sequence
  Description of Artificial Sequence: Synthetic peptide
GAEIEQLAF

SEQ ID NO: 4027 - protein, 9 aa, Artificial Sequence
  Description of Artificial Sequence: Synthetic peptide
GAEYDQRVW

SEQ ID NO: 4028 - protein, 9 aa, Artificial Sequence
  Description of Artificial Sequence: Synthetic peptide
GAHFIMSSL

SEQ ID NO: 4029 - protein, 9 aa, Artificial Sequence
  Description of Artificial Sequence: Synthetic peptide
GAQFCTQAR

SEQ ID NO: 4030 - protein, 9 aa, Artificial Sequence
  Description of Artificial Sequence: Synthetic peptide
GARHNGIFT

SEQ ID NO: 4031 - protein, 9 aa, Artificial Sequence
  Description of Artificial Sequence: Synthetic peptide
GARQFNCLE

SEQ ID NO: 4032 - protein, 9 aa, Artificial Sequence
  Description of Artificial Sequence: Synthetic peptide
GASKLSHER

SEQ ID NO: 4033 - protein, 9 aa, Artificial Sequence
  Description of Artificial Sequence: Synthetic peptide
GASRYQWGN

SEQ ID NO: 4034 - protein, 9 aa, Artificial Sequence
  Description of Artificial Sequence: Synthetic peptide
GATDCGSCP

SEQ ID NO: 4035 - protein, 9 aa, Artificial Sequence
  Description of Artificial Sequence: Synthetic peptide
GAVECSEYK

SEQ ID NO: 4036 - protein, 9 aa, Artificial Sequence
  Description of Artificial Sequence: Synthetic peptide
GAVPHPVCA

SEQ ID NO: 4037 - protein, 9 aa, Artificial Sequence
  Description of Artificial Sequence: Synthetic peptide
GAVQKLIQC

SEQ ID NO: 4038 - protein, 9 aa, Artificial Sequence
  Description of Artificial Sequence: Synthetic peptide
GAVSANWQS

SEQ ID NO: 4039 - protein, 9 aa, Artificial Sequence
  Description of Artificial Sequence: Synthetic peptide
GCASIGIHE

SEQ ID NO: 4040 - protein, 9 aa, Artificial Sequence
  Description of Artificial Sequence: Synthetic peptide
GCDWLMCEL

SEQ ID NO: 4041 - protein, 9 aa, Artificial Sequence
  Description of Artificial Sequence: Synthetic peptide
GCERMERVW

SEQ ID NO: 4042 - protein, 9 aa, Artificial Sequence
  Description of Artificial Sequence: Synthetic peptide
GCFFSQRGY

SEQ ID NO: 4043 - protein, 9 aa, Artificial Sequence
  Description of Artificial Sequence: Synthetic peptide
GCFYTQRAY

SEQ ID NO: 4044 - protein, 9 aa, Artificial Sequence
  Description of Artificial Sequence: Synthetic peptide
GCGKLGVDR

SEQ ID NO: 4045 - protein, 9 aa, Artificial Sequence
  Description of Artificial Sequence: Synthetic peptide
GCHQLMNFG

SEQ ID NO: 4046 - protein, 9 aa, Artificial Sequence
  Description of Artificial Sequence: Synthetic peptide
GCIRSISWP

SEQ ID NO: 4047 - protein, 9 aa, Artificial Sequence
  Description of Artificial Sequence: Synthetic peptide
GCIRVDSGF

SEQ ID NO: 4048 - protein, 9 aa, Artificial Sequence
  Description of Artificial Sequence: Synthetic peptide
GCMHYVLTE

SEQ ID NO: 4049 - protein, 9 aa, Artificial Sequence
  Description of Artificial Sequence: Synthetic peptide
GCMQSIHMQ

SEQ ID NO: 4050 - protein, 9 aa, Artificial Sequence
  Description of Artificial Sequence: Synthetic peptide
GCRFVILDH

SEQ ID NO: 4051 - protein, 9 aa, Artificial Sequence
  Description of Artificial Sequence: Synthetic peptide
GCTKYGRHN

SEQ ID NO: 4052 - protein, 9 aa, Artificial Sequence
  Description of Artificial Sequence: Synthetic peptide
GCVVKNTHS

SEQ ID NO: 4053 - protein, 9 aa, Artificial Sequence
  Description of Artificial Sequence: Synthetic peptide
GDKWISIQD

SEQ ID NO: 4054 - protein, 9 aa, Artificial Sequence
  Description of Artificial Sequence: Synthetic peptide
GEMCNVSGN

SEQ ID NO: 4055 - protein, 9 aa, Artificial Sequence
  Description of Artificial Sequence: Synthetic peptide
GFDQRGMEG

SEQ ID NO: 4056 - protein, 9 aa, Artificial Sequence
  Description of Artificial Sequence: Synthetic peptide
GGTEIAMCF

SEQ ID NO: 4057 - protein, 9 aa, Artificial Sequence
  Description of Artificial Sequence: Synthetic peptide
GHAMFNSRD

SEQ ID NO: 4058 - protein, 9 aa, Artificial Sequence
  Description of Artificial Sequence: Synthetic peptide
GHFQTMMAQ

SEQ ID NO: 4059 - protein, 9 aa, Artificial Sequence
  Description of Artificial Sequence: Synthetic peptide
GHITCATMS

SEQ ID NO: 4060 - protein, 9 aa, Artificial Sequence
  Description of Artificial Sequence: Synthetic peptide
GHKQCFHQT

SEQ ID NO: 4061 - protein, 9 aa, Artificial Sequence
  Description of Artificial Sequence: Synthetic peptide
GHNCCHMIE

SEQ ID NO: 4062 - protein, 9 aa, Artificial Sequence
  Description of Artificial Sequence: Synthetic peptide
GHVQESWMW

SEQ ID NO: 4063 - protein, 9 aa, Artificial Sequence
  Description of Artificial Sequence: Synthetic peptide
GIAQKNRNP

SEQ ID NO: 4064 - protein, 9 aa, Artificial Sequence
  Description of Artificial Sequence: Synthetic peptide
GIEHLQNTS

SEQ ID NO: 4065 - protein, 9 aa, Artificial Sequence
  Description of Artificial Sequence: Synthetic peptide
GIMCSGMCP

SEQ ID NO: 4066 - protein, 9 aa, Artificial Sequence
  Description of Artificial Sequence: Synthetic peptide
GIMSVMGIG

SEQ ID NO: 4067 - protein, 9 aa, Artificial Sequence
  Description of Artificial Sequence: Synthetic peptide
GINHRHVSA

SEQ ID NO: 4068 - protein, 9 aa, Artificial Sequence
  Description of Artificial Sequence: Synthetic peptide
GKKDQVKGG

SEQ ID NO: 4069 - protein, 9 aa, Artificial Sequence
  Description of Artificial Sequence: Synthetic peptide
GKTELHVEV

SEQ ID NO: 4070 - protein, 9 aa, Artificial Sequence
  Description of Artificial Sequence: Synthetic peptide
GLGFKHSMG

SEQ ID NO: 4071 - protein, 9 aa, Artificial Sequence
  Description of Artificial Sequence: Synthetic peptide
GLVEIHYTE

SEQ ID NO: 4072 - protein, 9 aa, Artificial Sequence
  Description of Artificial Sequence: Synthetic peptide
GLYPHQAMF

SEQ ID NO: 4073 - protein, 9 aa, Artificial Sequence
  Description of Artificial Sequence: Synthetic peptide
GMAVINEVE

SEQ ID NO: 4074 - protein, 9 aa, Artificial Sequence
  Description of Artificial Sequence: Synthetic peptide
GMGKYNQWW

SEQ ID NO: 4075 - protein, 9 aa, Artificial Sequence
  Description of Artificial Sequence: Synthetic peptide
GMGMVEIVG

SEQ ID NO: 4076 - protein, 9 aa, Artificial Sequence
  Description of Artificial Sequence: Synthetic peptide
GMWVNPMAL

SEQ ID NO: 4077 - protein, 9 aa, Artificial Sequence
  Description of Artificial Sequence: Synthetic peptide
GNQHWDVCG

SEQ ID NO: 4078 - protein, 9 aa, Artificial Sequence
  Description of Artificial Sequence: Synthetic peptide
GQCYCYVQP

SEQ ID NO: 4079 - protein, 9 aa, Artificial Sequence
  Description of Artificial Sequence: Synthetic peptide
GQSGLHVCY

SEQ ID NO: 4080 - protein, 9 aa, Artificial Sequence
  Description of Artificial Sequence: Synthetic peptide
GRIQRMESD

SEQ ID NO: 4081 - protein, 9 aa, Artificial Sequence
  Description of Artificial Sequence: Synthetic peptide
GSAQEPIWA

SEQ ID NO: 4082 - protein, 9 aa, Artificial Sequence
  Description of Artificial Sequence: Synthetic peptide
GSILSIGFH

SEQ ID NO: 4083 - protein, 9 aa, Artificial Sequence
  Description of Artificial Sequence: Synthetic peptide
GSSWIDQQG

SEQ ID NO: 4084 - protein, 9 aa, Artificial Sequence
  Description of Artificial Sequence: Synthetic peptide
GSTRCVKWV

SEQ ID NO: 4085 - protein, 9 aa, Artificial Sequence
  Description of Artificial Sequence: Synthetic peptide
GTEHHPFFD

SEQ ID NO: 4086 - protein, 9 aa, Artificial Sequence
  Description of Artificial Sequence: Synthetic peptide
GTERLPAHQ

SEQ ID NO: 4087 - protein, 9 aa, Artificial Sequence
  Description of Artificial Sequence: Synthetic peptide
GTEYERHTF

SEQ ID NO: 4088 - protein, 9 aa, Artificial Sequence
  Description of Artificial Sequence: Synthetic peptide
GTFWRDSQL

SEQ ID NO: 4089 - protein, 9 aa, Artificial Sequence
  Description of Artificial Sequence: Synthetic peptide
GTGKHAWCY

SEQ ID NO: 4090 - protein, 9 aa, Artificial Sequence
  Description of Artificial Sequence: Synthetic peptide
GTHYDASAG

SEQ ID NO: 4091 - protein, 9 aa, Artificial Sequence
  Description of Artificial Sequence: Synthetic peptide
GTIRLDTQY

SEQ ID NO: 4092 - protein, 9 aa, Artificial Sequence
  Description of Artificial Sequence: Synthetic peptide
GTLEKRAIF

SEQ ID NO: 4093 - protein, 9 aa, Artificial Sequence
  Description of Artificial Sequence: Synthetic peptide
GTLSYMMWW

SEQ ID NO: 4094 - protein, 9 aa, Artificial Sequence
  Description of Artificial Sequence: Synthetic peptide
GTSTIRAEH

SEQ ID NO: 4095 - protein, 9 aa, Artificial Sequence
  Description of Artificial Sequence: Synthetic peptide
GTYIELACF

SEQ ID NO: 4096 - protein, 9 aa, Artificial Sequence
  Description of Artificial Sequence: Synthetic peptide
GVCFKLTDN

SEQ ID NO: 4097 - protein, 9 aa, Artificial Sequence
  Description of Artificial Sequence: Synthetic peptide
GVFQCPQSV

SEQ ID NO: 4098 - protein, 9 aa, Artificial Sequence
  Description of Artificial Sequence: Synthetic peptide
GVHQKNCPE

SEQ ID NO: 4099 - protein, 9 aa, Artificial Sequence
  Description of Artificial Sequence: Synthetic peptide
GVKAREIEI

SEQ ID NO: 4100 - protein, 9 aa, Artificial Sequence
  Description of Artificial Sequence: Synthetic peptide
GVNDLRHVA

SEQ ID NO: 4101 - protein, 9 aa, Artificial Sequence
  Description of Artificial Sequence: Synthetic peptide
GVNHRMDHF

SEQ ID NO: 4102 - protein, 9 aa, Artificial Sequence
  Description of Artificial Sequence: Synthetic peptide
GVRVFMSDV

SEQ ID NO: 4103 - protein, 9 aa, Artificial Sequence
  Description of Artificial Sequence: Synthetic peptide
GVSMCYNWN

SEQ ID NO: 4104 - protein, 9 aa, Artificial Sequence
  Description of Artificial Sequence: Synthetic peptide
GVSSTHQHR

SEQ ID NO: 4105 - protein, 9 aa, Artificial Sequence
  Description of Artificial Sequence: Synthetic peptide
GVVANLNST

SEQ ID NO: 4106 - protein, 9 aa, Artificial Sequence
  Description of Artificial Sequence: Synthetic peptide
GVVKMENMA

SEQ ID NO: 4107 - protein, 9 aa, Artificial Sequence
  Description of Artificial Sequence: Synthetic peptide
GVYTTEQCV

SEQ ID NO: 4108 - protein, 9 aa, Artificial Sequence
  Description of Artificial Sequence: Synthetic peptide
GWEYHPAFG

SEQ ID NO: 4109 - protein, 9 aa, Artificial Sequence
  Description of Artificial Sequence: Synthetic peptide
GWTNYALMT

SEQ ID NO: 4110 - protein, 9 aa, Artificial Sequence
  Description of Artificial Sequence: Synthetic peptide
GYHWTNTAS

SEQ ID NO: 4111 - protein, 9 aa, Artificial Sequence
  Description of Artificial Sequence: Synthetic peptide
GYLPLEIIA

SEQ ID NO: 4112 - protein, 9 aa, Artificial Sequence
  Description of Artificial Sequence: Synthetic peptide
GYMPCMCQD

SEQ ID NO: 4113 - protein, 9 aa, Artificial Sequence
  Description of Artificial Sequence: Synthetic peptide
GYVQDFHGP

SEQ ID NO: 4114 - protein, 9 aa, Artificial Sequence
  Description of Artificial Sequence: Synthetic peptide
HAEQALSVA

SEQ ID NO: 4115 - protein, 9 aa, Artificial Sequence
  Description of Artificial Sequence: Synthetic peptide
HAGSCTLND

SEQ ID NO: 4116 - protein, 9 aa, Artificial Sequence
  Description of Artificial Sequence: Synthetic peptide
HAGSWQYGP

SEQ ID NO: 4117 - protein, 9 aa, Artificial Sequence
  Description of Artificial Sequence: Synthetic peptide
HAMPFCGRS

SEQ ID NO: 4118 - protein, 9 aa, Artificial Sequence
  Description of Artificial Sequence: Synthetic peptide
EAEDEIQKA

SEQ ID NO: 4119 - protein, 9 aa, Artificial Sequence
  Description of Artificial Sequence: Synthetic peptide
EASWPMDWD

SEQ ID NO: 4120 - protein, 9 aa, Artificial Sequence
  Description of Artificial Sequence: Synthetic peptide
ECIHDQCSS

SEQ ID NO: 4121 - protein, 9 aa, Artificial Sequence
  Description of Artificial Sequence: Synthetic peptide
EDIDLKGAQ

SEQ ID NO: 4122 - protein, 9 aa, Artificial Sequence
  Description of Artificial Sequence: Synthetic peptide
EEGPQRMNH

SEQ ID NO: 4123 - protein, 9 aa, Artificial Sequence
  Description of Artificial Sequence: Synthetic peptide
EGCCYWSHA

SEQ ID NO: 4124 - protein, 9 aa, Artificial Sequence
  Description of Artificial Sequence: Synthetic peptide
EHWPMAMFN

SEQ ID NO: 4125 - protein, 9 aa, Artificial Sequence
  Description of Artificial Sequence: Synthetic peptide
EHWQKDYNH

SEQ ID NO: 4126 - protein, 9 aa, Artificial Sequence
  Description of Artificial Sequence: Synthetic peptide
EIYWMMSNV

SEQ ID NO: 4127 - protein, 9 aa, Artificial Sequence
  Description of Artificial Sequence: Synthetic peptide
EKKSCQCWH

SEQ ID NO: 4128 - protein, 9 aa, Artificial Sequence
  Description of Artificial Sequence: Synthetic peptide
ELDSWWRIA

SEQ ID NO: 4129 - protein, 9 aa, Artificial Sequence
  Description of Artificial Sequence: Synthetic peptide
ELKESMESA

SEQ ID NO: 4130 - protein, 9 aa, Artificial Sequence
  Description of Artificial Sequence: Synthetic peptide
EMAQTSETP

SEQ ID NO: 4131 - protein, 9 aa, Artificial Sequence
  Description of Artificial Sequence: Synthetic peptide
ENGHKFNEE

SEQ ID NO: 4132 - protein, 9 aa, Artificial Sequence
  Description of Artificial Sequence: Synthetic peptide
ENQTRMTSW

SEQ ID NO: 4133 - protein, 9 aa, Artificial Sequence
  Description of Artificial Sequence: Synthetic peptide
EPTSEVHHD

SEQ ID NO: 4134 - protein, 9 aa, Artificial Sequence
  Description of Artificial Sequence: Synthetic peptide
EQFNHTWHG

SEQ ID NO: 4135 - protein, 9 aa, Artificial Sequence
  Description of Artificial Sequence: Synthetic peptide
EQHDWYQKY

SEQ ID NO: 4136 - protein, 9 aa, Artificial Sequence
  Description of Artificial Sequence: Synthetic peptide
EQIALHCAW

SEQ ID NO: 4137 - protein, 9 aa, Artificial Sequence
  Description of Artificial Sequence: Synthetic peptide
ERFAFVADH

SEQ ID NO: 4138 - protein, 9 aa, Artificial Sequence
  Description of Artificial Sequence: Synthetic peptide
ESSRYRMMM

SEQ ID NO: 4139 - protein, 9 aa, Artificial Sequence
  Description of Artificial Sequence: Synthetic peptide
ETHEFEKLC

SEQ ID NO: 4140 - protein, 9 aa, Artificial Sequence
  Description of Artificial Sequence: Synthetic peptide
ETRTTAWSA

SEQ ID NO: 4141 - protein, 9 aa, Artificial Sequence
  Description of Artificial Sequence: Synthetic peptide
EVITWGHMQ

SEQ ID NO: 4142 - protein, 9 aa, Artificial Sequence
  Description of Artificial Sequence: Synthetic peptide
EVKDKPSIF

SEQ ID NO: 4143 - protein, 9 aa, Artificial Sequence
  Description of Artificial Sequence: Synthetic peptide
EVWNAHEEG

SEQ ID NO: 4144 - protein, 9 aa, Artificial Sequence
  Description of Artificial Sequence: Synthetic peptide
EWESSSIIS

SEQ ID NO: 4145 - protein, 9 aa, Artificial Sequence
  Description of Artificial Sequence: Synthetic peptide
EYTHESHWA

SEQ ID NO: 4146 - protein, 9 aa, Artificial Sequence
  Description of Artificial Sequence: Synthetic peptide
EIEGMYWPL

SEQ ID NO: 4147 - protein, 9 aa, Artificial Sequence
  Description of Artificial Sequence: Synthetic peptide
ETAWKWEWS

SEQ ID NO: 4148 - protein, 9 aa, Artificial Sequence
  Description of Artificial Sequence: Synthetic peptide
EQLLSLCPS

SEQ ID NO: 4149 - protein, 9 aa, Artificial Sequence
  Description of Artificial Sequence: Synthetic peptide
EKNQSTCET

SEQ ID NO: 4150 - protein, 9 aa, Artificial Sequence
  Description of Artificial Sequence: Synthetic peptide
EYARGELEN

SEQ ID NO: 4151 - protein, 9 aa, Artificial Sequence
  Description of Artificial Sequence: Synthetic peptide
EHPEWKCMY

SEQ ID NO: 4152 - protein, 9 aa, Artificial Sequence
  Description of Artificial Sequence: Synthetic peptide
EMEHYPCYN

SEQ ID NO: 4153 - protein, 9 aa, Artificial Sequence
  Description of Artificial Sequence: Synthetic peptide
EYSMSEQTN

SEQ ID NO: 4154 - protein, 9 aa, Artificial Sequence
  Description of Artificial Sequence: Synthetic peptide
EKGGQMCAN

SEQ ID NO: 4155 - protein, 9 aa, Artificial Sequence
  Description of Artificial Sequence: Synthetic peptide
ECDRLKNER

SEQ ID NO: 4156 - protein, 9 aa, Artificial Sequence
  Description of Artificial Sequence: Synthetic peptide
EWCPGEPDG

SEQ ID NO: 4157 - protein, 9 aa, Artificial Sequence
  Description of Artificial Sequence: Synthetic peptide
EEPRILYAG

SEQ ID NO: 4158 - protein, 9 aa, Artificial Sequence
  Description of Artificial Sequence: Synthetic peptide
EHKLFMKPE

SEQ ID NO: 4159 - protein, 9 aa, Artificial Sequence
  Description of Artificial Sequence: Synthetic peptide
EKIMVKRAF

SEQ ID NO: 4160 - protein, 9 aa, Artificial Sequence
  Description of Artificial Sequence: Synthetic peptide
EAKEDWGVR

SEQ ID NO: 4161 - protein, 9 aa, Artificial Sequence
  Description of Artificial Sequence: Synthetic peptide
EDKYMTKRH

SEQ ID NO: 4162 - protein, 9 aa, Artificial Sequence
  Description of Artificial Sequence: Synthetic peptide
EGDLSGFQC

SEQ ID NO: 4163 - protein, 9 aa, Artificial Sequence
  Description of Artificial Sequence: Synthetic peptide
EGKPRCFDW

SEQ ID NO: 4164 - protein, 9 aa, Artificial Sequence
  Description of Artificial Sequence: Synthetic peptide
EHFQYQNHI

SEQ ID NO: 4165 - protein, 9 aa, Artificial Sequence
  Description of Artificial Sequence: Synthetic peptide
EHKYFNSGH

SEQ ID NO: 4166 - protein, 9 aa, Artificial Sequence
  Description of Artificial Sequence: Synthetic peptide
EHWYNRKGL

SEQ ID NO: 4167 - protein, 9 aa, Artificial Sequence
  Description of Artificial Sequence: Synthetic peptide
EIWMWTQGC

SEQ ID NO: 4168 - protein, 9 aa, Artificial Sequence
  Description of Artificial Sequence: Synthetic peptide
EKTAGMQTM

SEQ ID NO: 4169 - protein, 9 aa, Artificial Sequence
  Description of Artificial Sequence: Synthetic peptide
ELPWQRWEN

SEQ ID NO: 4170 - protein, 9 aa, Artificial Sequence
  Description of Artificial Sequence: Synthetic peptide
ELVPMKLRS

SEQ ID NO: 4171 - protein, 9 aa, Artificial Sequence
  Description of Artificial Sequence: Synthetic peptide
ENHEEKMAE

SEQ ID NO: 4172 - protein, 9 aa, Artificial Sequence
  Description of Artificial Sequence: Synthetic peptide
ENLSVNNLF

SEQ ID NO: 4173 - protein, 9 aa, Artificial Sequence
  Description of Artificial Sequence: Synthetic peptide
ENMDDHYDT

SEQ ID NO: 4174 - protein, 9 aa, Artificial Sequence
  Description of Artificial Sequence: Synthetic peptide
ENWCIRYAK

SEQ ID NO: 4175 - protein, 9 aa, Artificial Sequence
  Description of Artificial Sequence: Synthetic peptide
EQHLKPFEA

SEQ ID NO: 4176 - protein, 9 aa, Artificial Sequence
  Description of Artificial Sequence: Synthetic peptide
EQKHCWSRD

SEQ ID NO: 4177 - protein, 9 aa, Artificial Sequence
  Description of Artificial Sequence: Synthetic peptide
ERMLVHMRS

SEQ ID NO: 4178 - protein, 9 aa, Artificial Sequence
  Description of Artificial Sequence: Synthetic peptide
EVQWNNPKP

SEQ ID NO: 4179 - protein, 9 aa, Artificial Sequence
  Description of Artificial Sequence: Synthetic peptide
HAAGNEFCY

SEQ ID NO: 4180 - protein, 9 aa, Artificial Sequence
  Description of Artificial Sequence: Synthetic peptide
HACDTQIHP

SEQ ID NO: 4181 - protein, 9 aa, Artificial Sequence
  Description of Artificial Sequence: Synthetic peptide
HAENGAVWR

SEQ ID NO: 4182 - protein, 9 aa, Artificial Sequence
  Description of Artificial Sequence: Synthetic peptide
HAISRQQVE

SEQ ID NO: 4183 - protein, 9 aa, Artificial Sequence
  Description of Artificial Sequence: Synthetic peptide
HALTTDYYN

SEQ ID NO: 4184 - protein, 9 aa, Artificial Sequence
  Description of Artificial Sequence: Synthetic peptide
HANQIGWCL

SEQ ID NO: 4185 - protein, 9 aa, Artificial Sequence
  Description of Artificial Sequence: Synthetic peptide
HATSSTGDD

SEQ ID NO: 4186 - protein, 9 aa, Artificial Sequence
  Description of Artificial Sequence: Synthetic peptide
HAVMHSAVS

SEQ ID NO: 4187 - protein, 9 aa, Artificial Sequence
  Description of Artificial Sequence: Synthetic peptide
HAYNTFQFG

SEQ ID NO: 4188 - protein, 9 aa, Artificial Sequence
  Description of Artificial Sequence: Synthetic peptide
IADHTIADP

SEQ ID NO: 4189 - protein, 9 aa, Artificial Sequence
  Description of Artificial Sequence: Synthetic peptide
IADNIMQAC

SEQ ID NO: 4190 - protein, 9 aa, Artificial Sequence
  Description of Artificial Sequence: Synthetic peptide
IAGMTADDG

SEQ ID NO: 4191 - protein, 9 aa, Artificial Sequence
  Description of Artificial Sequence: Synthetic peptide
IAHDGQADS

SEQ ID NO: 4192 - protein, 9 aa, Artificial Sequence
  Description of Artificial Sequence: Synthetic peptide
IAHIKKVSL

SEQ ID NO: 4193 - protein, 9 aa, Artificial Sequence
  Description of Artificial Sequence: Synthetic peptide
IAILLHNFD

SEQ ID NO: 4194 - protein, 9 aa, Artificial Sequence
  Description of Artificial Sequence: Synthetic peptide
IANSKMWEA

SEQ ID NO: 4195 - protein, 9 aa, Artificial Sequence
  Description of Artificial Sequence: Synthetic peptide
IAYCTDAYE

SEQ ID NO: 4196 - protein, 9 aa, Artificial Sequence
  Description of Artificial Sequence: Synthetic peptide
KACQNSNFW

SEQ ID NO: 4197 - protein, 9 aa, Artificial Sequence
  Description of Artificial Sequence: Synthetic peptide
KACTDESGF

SEQ ID NO: 4198 - protein, 9 aa, Artificial Sequence
  Description of Artificial Sequence: Synthetic peptide
KARDLEYIQ

SEQ ID NO: 4199 - protein, 9 aa, Artificial Sequence
  Description of Artificial Sequence: Synthetic peptide
KAYDTMKCA

SEQ ID NO: 4200 - protein, 9 aa, Artificial Sequence
  Description of Artificial Sequence: Synthetic peptide
KAYSEILGY

SEQ ID NO: 4201 - protein, 9 aa, Artificial Sequence
  Description of Artificial Sequence: Synthetic peptide
LAANSVLYF

SEQ ID NO: 4202 - protein, 9 aa, Artificial Sequence
  Description of Artificial Sequence: Synthetic peptide
LADWYSARI

SEQ ID NO: 4203 - protein, 9 aa, Artificial Sequence
  Description of Artificial Sequence: Synthetic peptide
LAEIMKCPP

SEQ ID NO: 4204 - protein, 9 aa, Artificial Sequence
  Description of Artificial Sequence: Synthetic peptide
LAFHLNGTS

SEQ ID NO: 4205 - protein, 9 aa, Artificial Sequence
  Description of Artificial Sequence: Synthetic peptide
LAGCMGLQE

SEQ ID NO: 4206 - protein, 9 aa, Artificial Sequence
  Description of Artificial Sequence: Synthetic peptide
LAMAAHEEA

SEQ ID NO: 4207 - protein, 9 aa, Artificial Sequence
  Description of Artificial Sequence: Synthetic peptide
LAMNQSKAI

SEQ ID NO: 4208 - protein, 9 aa, Artificial Sequence
  Description of Artificial Sequence: Synthetic peptide
LANLHEWEG

SEQ ID NO: 4209 - protein, 9 aa, Artificial Sequence
  Description of Artificial Sequence: Synthetic peptide
LASITTPPS

SEQ ID NO: 4210 - protein, 9 aa, Artificial Sequence
  Description of Artificial Sequence: Synthetic peptide
MAANNECLV

SEQ ID NO: 4211 - protein, 9 aa, Artificial Sequence
  Description of Artificial Sequence: Synthetic peptide
MAGMMEEGS

SEQ ID NO: 4212 - protein, 9 aa, Artificial Sequence
  Description of Artificial Sequence: Synthetic peptide
MAGPCSSDT

SEQ ID NO: 4213 - protein, 9 aa, Artificial Sequence
  Description of Artificial Sequence: Synthetic peptide
MAIIRAEVN

SEQ ID NO: 4214 - protein, 9 aa, Artificial Sequence
  Description of Artificial Sequence: Synthetic peptide
MAIRWHEVY

SEQ ID NO: 4215 - protein, 9 aa, Artificial Sequence
  Description of Artificial Sequence: Synthetic peptide
MAIYKCAVN

SEQ ID NO: 4216 - protein, 9 aa, Artificial Sequence
  Description of Artificial Sequence: Synthetic peptide
MAKYPVNWG

SEQ ID NO: 4217 - protein, 9 aa, Artificial Sequence
  Description of Artificial Sequence: Synthetic peptide
MANDKHDPQ

SEQ ID NO: 4218 - protein, 9 aa, Artificial Sequence
  Description of Artificial Sequence: Synthetic peptide
MARQEGWCK

SEQ ID NO: 4219 - protein, 9 aa, Artificial Sequence
  Description of Artificial Sequence: Synthetic peptide
MASGSVEKM

SEQ ID NO: 4220 - protein, 9 aa, Artificial Sequence
  Description of Artificial Sequence: Synthetic peptide
MASHIWNQW

SEQ ID NO: 4221 - protein, 9 aa, Artificial Sequence
  Description of Artificial Sequence: Synthetic peptide
MAVGNLSEA

SEQ ID NO: 4222 - protein, 9 aa, Artificial Sequence
  Description of Artificial Sequence: Synthetic peptide
NAALHSADW

SEQ ID NO: 4223 - protein, 9 aa, Artificial Sequence
  Description of Artificial Sequence: Synthetic peptide
NAANQDHTW

SEQ ID NO: 4224 - protein, 9 aa, Artificial Sequence
  Description of Artificial Sequence: Synthetic peptide
NAEAAWMTF

SEQ ID NO: 4225 - protein, 9 aa, Artificial Sequence
  Description of Artificial Sequence: Synthetic peptide
NAELMDAHG

SEQ ID NO: 4226 - protein, 9 aa, Artificial Sequence
  Description of Artificial Sequence: Synthetic peptide
NAFCGNHYL

SEQ ID NO: 4227 - protein, 9 aa, Artificial Sequence
  Description of Artificial Sequence: Synthetic peptide
NAFNYRLVI

SEQ ID NO: 4228 - protein, 9 aa, Artificial Sequence
  Description of Artificial Sequence: Synthetic peptide
NAGHYMEYK

SEQ ID NO: 4229 - protein, 9 aa, Artificial Sequence
  Description of Artificial Sequence: Synthetic peptide
NAGPCWSEE

SEQ ID NO: 4230 - protein, 9 aa, Artificial Sequence
  Description of Artificial Sequence: Synthetic peptide
NAMPRIQFP

SEQ ID NO: 4231 - protein, 9 aa, Artificial Sequence
  Description of Artificial Sequence: Synthetic peptide
NAMSNAAML

SEQ ID NO: 4232 - protein, 9 aa, Artificial Sequence
  Description of Artificial Sequence: Synthetic peptide
NANPHHAVP

SEQ ID NO: 4233 - protein, 9 aa, Artificial Sequence
  Description of Artificial Sequence: Synthetic peptide
NANQSCANN

SEQ ID NO: 4234 - protein, 9 aa, Artificial Sequence
  Description of Artificial Sequence: Synthetic peptide
NASHDMHDL

SEQ ID NO: 4235 - protein, 9 aa, Artificial Sequence
  Description of Artificial Sequence: Synthetic peptide
NAVQTLQLY

SEQ ID NO: 4236 - protein, 9 aa, Artificial Sequence
  Description of Artificial Sequence: Synthetic peptide
NAWFPMTNT

SEQ ID NO: 4237 - protein, 9 aa, Artificial Sequence
  Description of Artificial Sequence: Synthetic peptide
PACFRVMFV

SEQ ID NO: 4238 - protein, 9 aa, Artificial Sequence
  Description of Artificial Sequence: Synthetic peptide
PAMNFITFF

SEQ ID NO: 4239 - protein, 9 aa, Artificial Sequence
  Description of Artificial Sequence: Synthetic peptide
PAPKNQSTD

SEQ ID NO: 4240 - protein, 9 aa, Artificial Sequence
  Description of Artificial Sequence: Synthetic peptide
QAACTHPWS

SEQ ID NO: 4241 - protein, 9 aa, Artificial Sequence
  Description of Artificial Sequence: Synthetic peptide
QADQMPTQE

SEQ ID NO: 4242 - protein, 9 aa, Artificial Sequence
  Description of Artificial Sequence: Synthetic peptide
QAEGGPNMP

SEQ ID NO: 4243 - protein, 9 aa, Artificial Sequence
  Description of Artificial Sequence: Synthetic peptide
QAKTSYGGE

SEQ ID NO: 4244 - protein, 9 aa, Artificial Sequence
  Description of Artificial Sequence: Synthetic peptide
QALVHGAPL

SEQ ID NO: 4245 - protein, 9 aa, Artificial Sequence
  Description of Artificial Sequence: Synthetic peptide
QAMMAQRAG

SEQ ID NO: 4246 - protein, 9 aa, Artificial Sequence
  Description of Artificial Sequence: Synthetic peptide
QASQYTVKY

SEQ ID NO: 4247 - protein, 9 aa, Artificial Sequence
  Description of Artificial Sequence: Synthetic peptide
QATHWPMWR

SEQ ID NO: 4248 - protein, 9 aa, Artificial Sequence
  Description of Artificial Sequence: Synthetic peptide
RACHPPHLK

SEQ ID NO: 4249 - protein, 9 aa, Artificial Sequence
  Description of Artificial Sequence: Synthetic peptide
RAEPMIYNF

SEQ ID NO: 4250 - protein, 9 aa, Artificial Sequence
  Description of Artificial Sequence: Synthetic peptide
RAEQAPVCN

SEQ ID NO: 4251 - protein, 9 aa, Artificial Sequence
  Description of Artificial Sequence: Synthetic peptide
RAQDTEMML

SEQ ID NO: 4252 - protein, 9 aa, Artificial Sequence
  Description of Artificial Sequence: Synthetic peptide
RAQLYGMDS

SEQ ID NO: 4253 - protein, 9 aa, Artificial Sequence
  Description of Artificial Sequence: Synthetic peptide
SAATFKGSP

SEQ ID NO: 4254 - protein, 9 aa, Artificial Sequence
  Description of Artificial Sequence: Synthetic peptide
SAAYCSYLR

SEQ ID NO: 4255 - protein, 9 aa, Artificial Sequence
  Description of Artificial Sequence: Synthetic peptide
SAAYFPARG

SEQ ID NO: 4256 - protein, 9 aa, Artificial Sequence
  Description of Artificial Sequence: Synthetic peptide
SACGAQYPP

SEQ ID NO: 4257 - protein, 9 aa, Artificial Sequence
  Description of Artificial Sequence: Synthetic peptide
SAEAVVRLW

SEQ ID NO: 4258 - protein, 9 aa, Artificial Sequence
  Description of Artificial Sequence: Synthetic peptide
SAEVQATTY

SEQ ID NO: 4259 - protein, 9 aa, Artificial Sequence
  Description of Artificial Sequence: Synthetic peptide
SAGLRVCDR

SEQ ID NO: 4260 - protein, 9 aa, Artificial Sequence
  Description of Artificial Sequence: Synthetic peptide
SAIFCLKKH

SEQ ID NO: 4261 - protein, 9 aa, Artificial Sequence
  Description of Artificial Sequence: Synthetic peptide
SAIIVDCHY

SEQ ID NO: 4262 - protein, 9 aa, Artificial Sequence
  Description of Artificial Sequence: Synthetic peptide
SALDVQRPS

SEQ ID NO: 4263 - protein, 9 aa, Artificial Sequence
  Description of Artificial Sequence: Synthetic peptide
SALQISMLY

SEQ ID NO: 4264 - protein, 9 aa, Artificial Sequence
  Description of Artificial Sequence: Synthetic peptide
SANWVQRDM

SEQ ID NO: 4265 - protein, 9 aa, Artificial Sequence
  Description of Artificial Sequence: Synthetic peptide
SAPSMWWAS

SEQ ID NO: 4266 - protein, 9 aa, Artificial Sequence
  Description of Artificial Sequence: Synthetic peptide
SAQNHDCWL

SEQ ID NO: 4267 - protein, 9 aa, Artificial Sequence
  Description of Artificial Sequence: Synthetic peptide
SARPFEFME

SEQ ID NO: 4268 - protein, 9 aa, Artificial Sequence
  Description of Artificial Sequence: Synthetic peptide
SASNEFDGL

SEQ ID NO: 4269 - protein, 9 aa, Artificial Sequence
  Description of Artificial Sequence: Synthetic peptide
SAVAHMSET

SEQ ID NO: 4270 - protein, 9 aa, Artificial Sequence
  Description of Artificial Sequence: Synthetic peptide
TACIAYVDN

SEQ ID NO: 4271 - protein, 9 aa, Artificial Sequence
  Description of Artificial Sequence: Synthetic peptide
TADFNVRVE

SEQ ID NO: 4272 - protein, 9 aa, Artificial Sequence
  Description of Artificial Sequence: Synthetic peptide
TAFWMKGPQ

SEQ ID NO: 4273 - protein, 9 aa, Artificial Sequence
  Description of Artificial Sequence: Synthetic peptide
TAGLSHFKS

SEQ ID NO: 4274 - protein, 9 aa, Artificial Sequence
  Description of Artificial Sequence: Synthetic peptide
TAGLVTGLG

SEQ ID NO: 4275 - protein, 9 aa, Artificial Sequence
  Description of Artificial Sequence: Synthetic peptide
TAHCHITYL

SEQ ID NO: 4276 - protein, 9 aa, Artificial Sequence
  Description of Artificial Sequence: Synthetic peptide
TAHGCPTQH

SEQ ID NO: 4277 - protein, 9 aa, Artificial Sequence
  Description of Artificial Sequence: Synthetic peptide
TAKTHLFPW

SEQ ID NO: 4278 - protein, 9 aa, Artificial Sequence
  Description of Artificial Sequence: Synthetic peptide
TALHIDWIP

SEQ ID NO: 4279 - protein, 9 aa, Artificial Sequence
  Description of Artificial Sequence: Synthetic peptide
TALMSSLQA

SEQ ID NO: 4280 - protein, 9 aa, Artificial Sequence
  Description of Artificial Sequence: Synthetic peptide
TANLHTIEG

SEQ ID NO: 4281 - protein, 9 aa, Artificial Sequence
  Description of Artificial Sequence: Synthetic peptide
TANQAYSTI

SEQ ID NO: 4282 - protein, 9 aa, Artificial Sequence
  Description of Artificial Sequence: Synthetic peptide
TAPTIDYGG

SEQ ID NO: 4283 - protein, 9 aa, Artificial Sequence
  Description of Artificial Sequence: Synthetic peptide
TATGMKHVY

SEQ ID NO: 4284 - protein, 9 aa, Artificial Sequence
  Description of Artificial Sequence: Synthetic peptide
TAVHLLDPD

SEQ ID NO: 4285 - protein, 9 aa, Artificial Sequence
  Description of Artificial Sequence: Synthetic peptide
TAVRYEVCG

SEQ ID NO: 4286 - protein, 9 aa, Artificial Sequence
  Description of Artificial Sequence: Synthetic peptide
TAWKQNVSD

SEQ ID NO: 4287 - protein, 9 aa, Artificial Sequence
  Description of Artificial Sequence: Synthetic peptide
TAYYEEFWR

SEQ ID NO: 4288 - protein, 9 aa, Artificial Sequence
  Description of Artificial Sequence: Synthetic peptide
VAAHEGRKS

SEQ ID NO: 4289 - protein, 9 aa, Artificial Sequence
  Description of Artificial Sequence: Synthetic peptide
VADRQNEHK

SEQ ID NO: 4290 - protein, 9 aa, Artificial Sequence
  Description of Artificial Sequence: Synthetic peptide
VAFSLMIMD

SEQ ID NO: 4291 - protein, 9 aa, Artificial Sequence
  Description of Artificial Sequence: Synthetic peptide
VAGFVSPTG

SEQ ID NO: 4292 - protein, 9 aa, Artificial Sequence
  Description of Artificial Sequence: Synthetic peptide
VAGNGIPMP

SEQ ID NO: 4293 - protein, 9 aa, Artificial Sequence
  Description of Artificial Sequence: Synthetic peptide
VAGWATPQL

SEQ ID NO: 4294 - protein, 9 aa, Artificial Sequence
  Description of Artificial Sequence: Synthetic peptide
VARDHRAGT

SEQ ID NO: 4295 - protein, 9 aa, Artificial Sequence
  Description of Artificial Sequence: Synthetic peptide
VASLGLYCM

SEQ ID NO: 4296 - protein, 9 aa, Artificial Sequence
  Description of Artificial Sequence: Synthetic peptide
WAPVHWMKD

SEQ ID NO: 4297 - protein, 9 aa, Artificial Sequence
  Description of Artificial Sequence: Synthetic peptide
WAYNSVASE

SEQ ID NO: 4298 - protein, 9 aa, Artificial Sequence
  Description of Artificial Sequence: Synthetic peptide
YAASHMEMP

SEQ ID NO: 4299 - protein, 9 aa, Artificial Sequence
  Description of Artificial Sequence: Synthetic peptide
YAHIVYRHG

SEQ ID NO: 4300 - protein, 9 aa, Artificial Sequence
  Description of Artificial Sequence: Synthetic peptide
YAMDCMGGV

SEQ ID NO: 4301 - protein, 9 aa, Artificial Sequence
  Description of Artificial Sequence: Synthetic peptide
YAQTDGCLE

SEQ ID NO: 4302 - protein, 9 aa, Artificial Sequence
  Description of Artificial Sequence: Synthetic peptide
YATQNTFSY

SEQ ID NO: 4303 - protein, 9 aa, Artificial Sequence
  Description of Artificial Sequence: Synthetic peptide
YAVEYGWNQ

SEQ ID NO: 4304 - protein, 9 aa, Artificial Sequence
  Description of Artificial Sequence: Synthetic peptide
AAHNYEGVA

SEQ ID NO: 4305 - protein, 9 aa, Artificial Sequence
  Description of Artificial Sequence: Synthetic peptide
CATHMIRTR

SEQ ID NO: 4306 - protein, 9 aa, Artificial Sequence
  Description of Artificial Sequence: Synthetic peptide
DADDQAVSG

SEQ ID NO: 4307 - protein, 9 aa, Artificial Sequence
  Description of Artificial Sequence: Synthetic peptide
DADFCPRMP

SEQ ID NO: 4308 - protein, 9 aa, Artificial Sequence
  Description of Artificial Sequence: Synthetic peptide
DAGLDSAGY

SEQ ID NO: 4309 - protein, 9 aa, Artificial Sequence
  Description of Artificial Sequence: Synthetic peptide
DAHALQNVI

SEQ ID NO: 4310 - protein, 9 aa, Artificial Sequence
  Description of Artificial Sequence: Synthetic peptide
DATGKFNFN

SEQ ID NO: 4311 - protein, 9 aa, Artificial Sequence
  Description of Artificial Sequence: Synthetic peptide
FADKWANQF

SEQ ID NO: 4312 - protein, 9 aa, Artificial Sequence
  Description of Artificial Sequence: Synthetic peptide
FANLFANTW

SEQ ID NO: 4313 - protein, 9 aa, Artificial Sequence
  Description of Artificial Sequence: Synthetic peptide
FANLFTNTW

SEQ ID NO: 4314 - protein, 9 aa, Artificial Sequence
  Description of Artificial Sequence: Synthetic peptide
GANNQNSCE

SEQ ID NO: 4315 - protein, 9 aa, Artificial Sequence
  Description of Artificial Sequence: Synthetic peptide
GANQHDVGH

SEQ ID NO: 4316 - protein, 9 aa, Artificial Sequence
  Description of Artificial Sequence: Synthetic peptide
GAQCLFFQN

SEQ ID NO: 4317 - protein, 9 aa, Artificial Sequence
  Description of Artificial Sequence: Synthetic peptide
HAIHDCYPP

SEQ ID NO: 4318 - protein, 9 aa, Artificial Sequence
  Description of Artificial Sequence: Synthetic peptide
HAILYFYFP

SEQ ID NO: 4319 - protein, 9 aa, Artificial Sequence
  Description of Artificial Sequence: Synthetic peptide
LAIQPCDER

SEQ ID NO: 4320 - protein, 9 aa, Artificial Sequence
  Description of Artificial Sequence: Synthetic peptide
MAGDYACAM

SEQ ID NO: 4321 - protein, 9 aa, Artificial Sequence
  Description of Artificial Sequence: Synthetic peptide
MASSVVHSC

SEQ ID NO: 4322 - protein, 9 aa, Artificial Sequence
  Description of Artificial Sequence: Synthetic peptide
MATNREWWG

SEQ ID NO: 4323 - protein, 9 aa, Artificial Sequence
  Description of Artificial Sequence: Synthetic peptide
MAVWAKAAE

SEQ ID NO: 4324 - protein, 9 aa, Artificial Sequence
  Description of Artificial Sequence: Synthetic peptide
NARDPACDN

SEQ ID NO: 4325 - protein, 9 aa, Artificial Sequence
  Description of Artificial Sequence: Synthetic peptide
PADRNNLWQ

SEQ ID NO: 4326 - protein, 9 aa, Artificial Sequence
  Description of Artificial Sequence: Synthetic peptide
PAECISDSQ

SEQ ID NO: 4327 - protein, 9 aa, Artificial Sequence
  Description of Artificial Sequence: Synthetic peptide
PATVKPMYW

SEQ ID NO: 4328 - protein, 9 aa, Artificial Sequence
  Description of Artificial Sequence: Synthetic peptide
QALNRVQFN

SEQ ID NO: 4329 - protein, 9 aa, Artificial Sequence
  Description of Artificial Sequence: Synthetic peptide
QATGMLYEE

SEQ ID NO: 4330 - protein, 9 aa, Artificial Sequence
  Description of Artificial Sequence: Synthetic peptide
QATVTKEYW

SEQ ID NO: 4331 - protein, 9 aa, Artificial Sequence
  Description of Artificial Sequence: Synthetic peptide
RAIHDCYPP

SEQ ID NO: 4332 - protein, 9 aa, Artificial Sequence
  Description of Artificial Sequence: Synthetic peptide
SARDGISMH

SEQ ID NO: 4333 - protein, 9 aa, Artificial Sequence
  Description of Artificial Sequence: Synthetic peptide
SAVYIQPDY

SEQ ID NO: 4334 - protein, 9 aa, Artificial Sequence
  Description of Artificial Sequence: Synthetic peptide
TADVVPCHH

SEQ ID NO: 4335 - protein, 9 aa, Artificial Sequence
  Description of Artificial Sequence: Synthetic peptide
VADYLNEFT

SEQ ID NO: 4336 - protein, 9 aa, Artificial Sequence
  Description of Artificial Sequence: Synthetic peptide
VANNGMAVK

SEQ ID NO: 4337 - protein, 9 aa, Artificial Sequence
  Description of Artificial Sequence: Synthetic peptide
VAWSQEESQ

SEQ ID NO: 4338 - protein, 9 aa, Artificial Sequence
  Description of Artificial Sequence: Synthetic peptide
YAQQFTMPT

SEQ ID NO: 4339 - protein, 9 aa, Artificial Sequence
  Description of Artificial Sequence: Synthetic peptide
QAAGETFYG

SEQ ID NO: 4340 - protein, 9 aa, Artificial Sequence
  Description of Artificial Sequence: Synthetic peptide
AACWTNMQW

SEQ ID NO: 4341 - protein, 9 aa, Artificial Sequence
  Description of Artificial Sequence: Synthetic peptide
HAPMDNAPF

SEQ ID NO: 4342 - protein, 9 aa, Artificial Sequence
  Description of Artificial Sequence: Synthetic peptide
NACDWKNDY

SEQ ID NO: 4343 - protein, 9 aa, Artificial Sequence
  Description of Artificial Sequence: Synthetic peptide
IAMLESWWG

SEQ ID NO: 4344 - protein, 9 aa, Artificial Sequence
  Description of Artificial Sequence: Synthetic peptide
DAGRFTGTS

SEQ ID NO: 4345 - protein, 9 aa, Artificial Sequence
  Description of Artificial Sequence: Synthetic peptide
TAPRIDQQE

SEQ ID NO: 4346 - protein, 9 aa, Artificial Sequence
  Description of Artificial Sequence: Synthetic peptide
VATDSVHES

SEQ ID NO: 4347 - protein, 9 aa, Artificial Sequence
  Description of Artificial Sequence: Synthetic peptide
MAEQMGCQA

SEQ ID NO: 4348 - protein, 9 aa, Artificial Sequence
  Description of Artificial Sequence: Synthetic peptide
DARFDQWHH

SEQ ID NO: 4349 - protein, 9 aa, Artificial Sequence
  Description of Artificial Sequence: Synthetic peptide
PACFDDGEF

SEQ ID NO: 4350 - protein, 9 aa, Artificial Sequence
  Description of Artificial Sequence: Synthetic peptide
LAEPWATSH

SEQ ID NO: 4351 - protein, 9 aa, Artificial Sequence
  Description of Artificial Sequence: Synthetic peptide
PAVGFKDEQ

SEQ ID NO: 4352 - protein, 9 aa, Artificial Sequence
  Description of Artificial Sequence: Synthetic peptide
HANHLMSHE

SEQ ID NO: 4353 - protein, 9 aa, Artificial Sequence
  Description of Artificial Sequence: Synthetic peptide
LAHCDMMMC

SEQ ID NO: 4354 - protein, 9 aa, Artificial Sequence
  Description of Artificial Sequence: Synthetic peptide
GADDHHLMT

SEQ ID NO: 4355 - protein, 9 aa, Artificial Sequence
  Description of Artificial Sequence: Synthetic peptide
YAPKMWAEA

SEQ ID NO: 4356 - protein, 9 aa, Artificial Sequence
  Description of Artificial Sequence: Synthetic peptide
WANTYSENV

SEQ ID NO: 4357 - protein, 9 aa, Artificial Sequence
  Description of Artificial Sequence: Synthetic peptide
RAIYNDMTE

SEQ ID NO: 4358 - protein, 9 aa, Artificial Sequence
  Description of Artificial Sequence: Synthetic peptide
AAMGYAKMS

SEQ ID NO: 4359 - protein, 9 aa, Artificial Sequence
  Description of Artificial Sequence: Synthetic peptide
AAPIRCYFE

SEQ ID NO: 4360 - protein, 9 aa, Artificial Sequence
  Description of Artificial Sequence: Synthetic peptide
CAHPEEYHQ

SEQ ID NO: 4361 - protein, 9 aa, Artificial Sequence
  Description of Artificial Sequence: Synthetic peptide
DAHFPGLAQ

SEQ ID NO: 4362 - protein, 9 aa, Artificial Sequence
  Description of Artificial Sequence: Synthetic peptide
DAQCFSFGH

SEQ ID NO: 4363 - protein, 9 aa, Artificial Sequence
  Description of Artificial Sequence: Synthetic peptide
HAVGPVMLE

SEQ ID NO: 4364 - protein, 9 aa, Artificial Sequence
  Description of Artificial Sequence: Synthetic peptide
GIQDEAWVA

SEQ ID NO: 4365 - protein, 9 aa, Artificial Sequence
  Description of Artificial Sequence: Synthetic peptide
GQQSFQQVD

SEQ ID NO: 4366 - protein, 9 aa, Artificial Sequence
  Description of Artificial Sequence: Synthetic peptide
GSQMMQDQA

SEQ ID NO: 4367 - protein, 9 aa, Artificial Sequence
  Description of Artificial Sequence: Synthetic peptide
GVQLTIQQA

SEQ ID NO: 4368 - protein, 9 aa, Artificial Sequence
  Description of Artificial Sequence: Synthetic peptide
GVQPALYED

SEQ ID NO: 4369 - protein, 9 aa, Artificial Sequence
  Description of Artificial Sequence: Synthetic peptide
GYQPDMGMS

SEQ ID NO: 4370 - protein, 9 aa, Artificial Sequence
  Description of Artificial Sequence: Synthetic peptide
HCQIDVLRV

SEQ ID NO: 4371 - protein, 9 aa, Artificial Sequence
  Description of Artificial Sequence: Synthetic peptide
HTQFEPGYH

SEQ ID NO: 4372 - protein, 9 aa, Artificial Sequence
  Description of Artificial Sequence: Synthetic peptide
HVQVDQSKS

SEQ ID NO: 4373 - protein, 9 aa, Artificial Sequence
  Description of Artificial Sequence: Synthetic peptide
HWQHETMAQ

SEQ ID NO: 4374 - protein, 9 aa, Artificial Sequence
  Description of Artificial Sequence: Synthetic peptide
INQLKHSAY

SEQ ID NO: 4375 - protein, 9 aa, Artificial Sequence
  Description of Artificial Sequence: Synthetic peptide
ISQCDTAII

SEQ ID NO: 4376 - protein, 9 aa, Artificial Sequence
  Description of Artificial Sequence: Synthetic peptide
ISQWCANNK

SEQ ID NO: 4377 - protein, 9 aa, Artificial Sequence
  Description of Artificial Sequence: Synthetic peptide
KDQCIKQAP

SEQ ID NO: 4378 - protein, 9 aa, Artificial Sequence
  Description of Artificial Sequence: Synthetic peptide
KIQPNDRTQ

SEQ ID NO: 4379 - protein, 9 aa, Artificial Sequence
  Description of Artificial Sequence: Synthetic peptide
KVQENEVLG

SEQ ID NO: 4380 - protein, 9 aa, Artificial Sequence
  Description of Artificial Sequence: Synthetic peptide
LKQQFAEGM

SEQ ID NO: 4381 - protein, 9 aa, Artificial Sequence
  Description of Artificial Sequence: Synthetic peptide
LVQLNMAGA

SEQ ID NO: 4382 - protein, 9 aa, Artificial Sequence
  Description of Artificial Sequence: Synthetic peptide
LVQSIWGEE

SEQ ID NO: 4383 - protein, 9 aa, Artificial Sequence
  Description of Artificial Sequence: Synthetic peptide
LWQLFTMQQ

SEQ ID NO: 4384 - protein, 9 aa, Artificial Sequence
  Description of Artificial Sequence: Synthetic peptide
LYQQLESSG

SEQ ID NO: 4385 - protein, 9 aa, Artificial Sequence
  Description of Artificial Sequence: Synthetic peptide
MLQSHTCLG

SEQ ID NO: 4386 - protein, 9 aa, Artificial Sequence
  Description of Artificial Sequence: Synthetic peptide
MNQFGNMKQ

SEQ ID NO: 4387 - protein, 9 aa, Artificial Sequence
  Description of Artificial Sequence: Synthetic peptide
MQQPFYRSM

SEQ ID NO: 4388 - protein, 9 aa, Artificial Sequence
  Description of Artificial Sequence: Synthetic peptide
MYQVWCTDT

SEQ ID NO: 4389 - protein, 9 aa, Artificial Sequence
  Description of Artificial Sequence: Synthetic peptide
NCQHNEESP

SEQ ID NO: 4390 - protein, 9 aa, Artificial Sequence
  Description of Artificial Sequence: Synthetic peptide
NDQFRVVDA

SEQ ID NO: 4391 - protein, 9 aa, Artificial Sequence
  Description of Artificial Sequence: Synthetic peptide
NFQPMHWST

SEQ ID NO: 4392 - protein, 9 aa, Artificial Sequence
  Description of Artificial Sequence: Synthetic peptide
NIQGVLDYR

SEQ ID NO: 4393 - protein, 9 aa, Artificial Sequence
  Description of Artificial Sequence: Synthetic peptide
NPQKWNPCI

SEQ ID NO: 4394 - protein, 9 aa, Artificial Sequence
  Description of Artificial Sequence: Synthetic peptide
NQQCFDYYS

SEQ ID NO: 4395 - protein, 9 aa, Artificial Sequence
  Description of Artificial Sequence: Synthetic peptide
NVQIATTDS

SEQ ID NO: 4396 - protein, 9 aa, Artificial Sequence
  Description of Artificial Sequence: Synthetic peptide
NYQPFYVWA

SEQ ID NO: 4397 - protein, 9 aa, Artificial Sequence
  Description of Artificial Sequence: Synthetic peptide
PHQLHENWG

SEQ ID NO: 4398 - protein, 9 aa, Artificial Sequence
  Description of Artificial Sequence: Synthetic peptide
PLQLDHECT

SEQ ID NO: 4399 - protein, 9 aa, Artificial Sequence
  Description of Artificial Sequence: Synthetic peptide
PSQIDHAEQ

SEQ ID NO: 4400 - protein, 9 aa, Artificial Sequence
  Description of Artificial Sequence: Synthetic peptide
PWQYCELGA

SEQ ID NO: 4401 - protein, 9 aa, Artificial Sequence
  Description of Artificial Sequence: Synthetic peptide
QCQSEHRDI

SEQ ID NO: 4402 - protein, 9 aa, Artificial Sequence
  Description of Artificial Sequence: Synthetic peptide
QCQSFGVTQ

SEQ ID NO: 4403 - protein, 9 aa, Artificial Sequence
  Description of Artificial Sequence: Synthetic peptide
QDQLYGRDE

SEQ ID NO: 4404 - protein, 9 aa, Artificial Sequence
  Description of Artificial Sequence: Synthetic peptide
QDQQKQYDW

SEQ ID NO: 4405 - protein, 9 aa, Artificial Sequence
  Description of Artificial Sequence: Synthetic peptide
QHQHLCRTS

SEQ ID NO: 4406 - protein, 9 aa, Artificial Sequence
  Description of Artificial Sequence: Synthetic peptide
QKQFNAQMG

SEQ ID NO: 4407 - protein, 9 aa, Artificial Sequence
  Description of Artificial Sequence: Synthetic peptide
QLQWFVKDS

SEQ ID NO: 4408 - protein, 9 aa, Artificial Sequence
  Description of Artificial Sequence: Synthetic peptide
QNQIEHWCA

SEQ ID NO: 4409 - protein, 9 aa, Artificial Sequence
  Description of Artificial Sequence: Synthetic peptide
QPQFMVGQI

SEQ ID NO: 4410 - protein, 9 aa, Artificial Sequence
  Description of Artificial Sequence: Synthetic peptide
QVQFDRCYL

SEQ ID NO: 4411 - protein, 9 aa, Artificial Sequence
  Description of Artificial Sequence: Synthetic peptide
RFQCEGHLD

SEQ ID NO: 4412 - protein, 9 aa, Artificial Sequence
  Description of Artificial Sequence: Synthetic peptide
RHQLLEWYD

SEQ ID NO: 4413 - protein, 9 aa, Artificial Sequence
  Description of Artificial Sequence: Synthetic peptide
RTQPDGQTR

SEQ ID NO: 4414 - protein, 9 aa, Artificial Sequence
  Description of Artificial Sequence: Synthetic peptide
SDQQWKPTH

SEQ ID NO: 4415 - protein, 9 aa, Artificial Sequence
  Description of Artificial Sequence: Synthetic peptide
SGQPFSYSK

SEQ ID NO: 4416 - protein, 9 aa, Artificial Sequence
  Description of Artificial Sequence: Synthetic peptide
SHQQCVMDP

SEQ ID NO: 4417 - protein, 9 aa, Artificial Sequence
  Description of Artificial Sequence: Synthetic peptide
SIQMMQDHV

SEQ ID NO: 4418 - protein, 9 aa, Artificial Sequence
  Description of Artificial Sequence: Synthetic peptide
SIQTTFNDD

SEQ ID NO: 4419 - protein, 9 aa, Artificial Sequence
  Description of Artificial Sequence: Synthetic peptide
STQKYWNYE

SEQ ID NO: 4420 - protein, 9 aa, Artificial Sequence
  Description of Artificial Sequence: Synthetic peptide
TGQLNTGCV

SEQ ID NO: 4421 - protein, 9 aa, Artificial Sequence
  Description of Artificial Sequence: Synthetic peptide
THQTARQNV

SEQ ID NO: 4422 - protein, 9 aa, Artificial Sequence
  Description of Artificial Sequence: Synthetic peptide
TLQWEPKGV

SEQ ID NO: 4423 - protein, 9 aa, Artificial Sequence
  Description of Artificial Sequence: Synthetic peptide
TNQCICAAP

SEQ ID NO: 4424 - protein, 9 aa, Artificial Sequence
  Description of Artificial Sequence: Synthetic peptide
TNQNLGNDY

SEQ ID NO: 4425 - protein, 9 aa, Artificial Sequence
  Description of Artificial Sequence: Synthetic peptide
TSQSMVCCE

SEQ ID NO: 4426 - protein, 9 aa, Artificial Sequence
  Description of Artificial Sequence: Synthetic peptide
TTQWSQLQS

SEQ ID NO: 4427 - protein, 9 aa, Artificial Sequence
  Description of Artificial Sequence: Synthetic peptide
TVQSMTSFA

SEQ ID NO: 4428 - protein, 9 aa, Artificial Sequence
  Description of Artificial Sequence: Synthetic peptide
TVQTPPQYV

SEQ ID NO: 4429 - protein, 9 aa, Artificial Sequence
  Description of Artificial Sequence: Synthetic peptide
TWQSLCDFE

SEQ ID NO: 4430 - protein, 9 aa, Artificial Sequence
  Description of Artificial Sequence: Synthetic peptide
VCQLMKYQP

SEQ ID NO: 4431 - protein, 9 aa, Artificial Sequence
  Description of Artificial Sequence: Synthetic peptide
VDQVFVEDR

SEQ ID NO: 4432 - protein, 9 aa, Artificial Sequence
  Description of Artificial Sequence: Synthetic peptide
VPQTDLDLC

SEQ ID NO: 4433 - protein, 9 aa, Artificial Sequence
  Description of Artificial Sequence: Synthetic peptide
VQQIIGTIG

SEQ ID NO: 4434 - protein, 9 aa, Artificial Sequence
  Description of Artificial Sequence: Synthetic peptide
VSQPCLIVD

SEQ ID NO: 4435 - protein, 9 aa, Artificial Sequence
  Description of Artificial Sequence: Synthetic peptide
VVQWFAQQV

SEQ ID NO: 4436 - protein, 9 aa, Artificial Sequence
  Description of Artificial Sequence: Synthetic peptide
VWQQQFVWL

SEQ ID NO: 4437 - protein, 9 aa, Artificial Sequence
  Description of Artificial Sequence: Synthetic peptide
WDQFCRLMM

SEQ ID NO: 4438 - protein, 9 aa, Artificial Sequence
  Description of Artificial Sequence: Synthetic peptide
WNQIMEYDY

SEQ ID NO: 4439 - protein, 9 aa, Artificial Sequence
  Description of Artificial Sequence: Synthetic peptide
WNQPLMWCF

SEQ ID NO: 4440 - protein, 9 aa, Artificial Sequence
  Description of Artificial Sequence: Synthetic peptide
YCQQTYTEY

SEQ ID NO: 4441 - protein, 9 aa, Artificial Sequence
  Description of Artificial Sequence: Synthetic peptide
YEQKENQSY

SEQ ID NO: 4442 - protein, 9 aa, Artificial Sequence
  Description of Artificial Sequence: Synthetic peptide
YGQWFDMSY

SEQ ID NO: 4443 - protein, 9 aa, Artificial Sequence
  Description of Artificial Sequence: Synthetic peptide
YIQHMHIQR

SEQ ID NO: 4444 - protein, 9 aa, Artificial Sequence
  Description of Artificial Sequence: Synthetic peptide
YIQTKQIMQ

SEQ ID NO: 4445 - protein, 9 aa, Artificial Sequence
  Description of Artificial Sequence: Synthetic peptide
YNQAVCQEP

SEQ ID NO: 4446 - protein, 9 aa, Artificial Sequence
  Description of Artificial Sequence: Synthetic peptide
YPQPFMLMF

SEQ ID NO: 4447 - protein, 9 aa, Artificial Sequence
  Description of Artificial Sequence: Synthetic peptide
YTQLCHHGV

SEQ ID NO: 4448 - protein, 9 aa, Artificial Sequence
  Description of Artificial Sequence: Synthetic peptide
AIQSRRSVG

SEQ ID NO: 4449 - protein, 9 aa, Artificial Sequence
  Description of Artificial Sequence: Synthetic peptide
AKQCLQDYP

SEQ ID NO: 4450 - protein, 9 aa, Artificial Sequence
  Description of Artificial Sequence: Synthetic peptide
CFQQKHNLF

SEQ ID NO: 4451 - protein, 9 aa, Artificial Sequence
  Description of Artificial Sequence: Synthetic peptide
CGQSVSHAG

SEQ ID NO: 4452 - protein, 9 aa, Artificial Sequence
  Description of Artificial Sequence: Synthetic peptide
CQQYTLVQA

SEQ ID NO: 4453 - protein, 9 aa, Artificial Sequence
  Description of Artificial Sequence: Synthetic peptide
DDQFQDSTC

SEQ ID NO: 4454 - protein, 9 aa, Artificial Sequence
  Description of Artificial Sequence: Synthetic peptide
FDQPTPDHP

SEQ ID NO: 4455 - protein, 9 aa, Artificial Sequence
  Description of Artificial Sequence: Synthetic peptide
GEQHQMPMV

SEQ ID NO: 4456 - protein, 9 aa, Artificial Sequence
  Description of Artificial Sequence: Synthetic peptide
IGQHDVQTT

SEQ ID NO: 4457 - protein, 9 aa, Artificial Sequence
  Description of Artificial Sequence: Synthetic peptide
IMQQWPAMF

SEQ ID NO: 4458 - protein, 9 aa, Artificial Sequence
  Description of Artificial Sequence: Synthetic peptide
ISQHTCSKD

SEQ ID NO: 4459 - protein, 9 aa, Artificial Sequence
  Description of Artificial Sequence: Synthetic peptide
KEQPSQMHG

SEQ ID NO: 4460 - protein, 9 aa, Artificial Sequence
  Description of Artificial Sequence: Synthetic peptide
MQQANSDYA

SEQ ID NO: 4461 - protein, 9 aa, Artificial Sequence
  Description of Artificial Sequence: Synthetic peptide
MTQCRDCWL

SEQ ID NO: 4462 - protein, 9 aa, Artificial Sequence
  Description of Artificial Sequence: Synthetic peptide
MTQDFNCDY

SEQ ID NO: 4463 - protein, 9 aa, Artificial Sequence
  Description of Artificial Sequence: Synthetic peptide
QRQQMSHDC

SEQ ID NO: 4464 - protein, 9 aa, Artificial Sequence
  Description of Artificial Sequence: Synthetic peptide
QRQRMSHDC

SEQ ID NO: 4465 - protein, 9 aa, Artificial Sequence
  Description of Artificial Sequence: Synthetic peptide
RHQLLEWDS

SEQ ID NO: 4466 - protein, 9 aa, Artificial Sequence
  Description of Artificial Sequence: Synthetic peptide
RVQHCYGDM

SEQ ID NO: 4467 - protein, 9 aa, Artificial Sequence
  Description of Artificial Sequence: Synthetic peptide
SKQPNADSD

SEQ ID NO: 4468 - protein, 9 aa, Artificial Sequence
  Description of Artificial Sequence: Synthetic peptide
VCQKYDEWG

SEQ ID NO: 4469 - protein, 9 aa, Artificial Sequence
  Description of Artificial Sequence: Synthetic peptide
VTQQYWACD

SEQ ID NO: 4470 - protein, 9 aa, Artificial Sequence
  Description of Artificial Sequence: Synthetic peptide
VTQQYWACN

SEQ ID NO: 4471 - protein, 9 aa, Artificial Sequence
  Description of Artificial Sequence: Synthetic peptide
WDQPNMHTF

SEQ ID NO: 4472 - protein, 9 aa, Artificial Sequence
  Description of Artificial Sequence: Synthetic peptide
WGQHKHTVA

SEQ ID NO: 4473 - protein, 9 aa, Artificial Sequence
  Description of Artificial Sequence: Synthetic peptide
YCQEFEQYP

SEQ ID NO: 4474 - protein, 9 aa, Artificial Sequence
  Description of Artificial Sequence: Synthetic peptide
YDQWECDIH

SEQ ID NO: 4475 - protein, 9 aa, Artificial Sequence
  Description of Artificial Sequence: Synthetic peptide
YDQWERDIH

SEQ ID NO: 4476 - protein, 9 aa, Artificial Sequence
  Description of Artificial Sequence: Synthetic peptide
HDQMMGLER

SEQ ID NO: 4477 - protein, 9 aa, Artificial Sequence
  Description of Artificial Sequence: Synthetic peptide
TNQCIFKTM

SEQ ID NO: 4478 - protein, 9 aa, Artificial Sequence
  Description of Artificial Sequence: Synthetic peptide
CHQCIGQDN

SEQ ID NO: 4479 - protein, 9 aa, Artificial Sequence
  Description of Artificial Sequence: Synthetic peptide
GDQFQDSTC

SEQ ID NO: 4480 - protein, 9 aa, Artificial Sequence
  Description of Artificial Sequence: Synthetic peptide
THQYFASLA

SEQ ID NO: 4481 - protein, 9 aa, Artificial Sequence
  Description of Artificial Sequence: Synthetic peptide
IGQHNVQTT

SEQ ID NO: 4482 - protein, 9 aa, Artificial Sequence
  Description of Artificial Sequence: Synthetic peptide
LKQCQSTMF

SEQ ID NO: 4483 - protein, 9 aa, Artificial Sequence
  Description of Artificial Sequence: Synthetic peptide
ALQQNPSMT

SEQ ID NO: 4484 - protein, 9 aa, Artificial Sequence
  Description of Artificial Sequence: Synthetic peptide
MMQCRDCWL

SEQ ID NO: 4485 - protein, 9 aa, Artificial Sequence
  Description of Artificial Sequence: Synthetic peptide
SCQEWGIQW

SEQ ID NO: 4486 - protein, 9 aa, Artificial Sequence
  Description of Artificial Sequence: Synthetic peptide
ANQFWKIHC

SEQ ID NO: 4487 - protein, 9 aa, Artificial Sequence
  Description of Artificial Sequence: Synthetic peptide
GHIQYMRST

SEQ ID NO: 4488 - protein, 9 aa, Artificial Sequence
  Description of Artificial Sequence: Synthetic peptide
GIIQTGCYK

SEQ ID NO: 4489 - protein, 9 aa, Artificial Sequence
  Description of Artificial Sequence: Synthetic peptide
GIVQGYEGS

SEQ ID NO: 4490 - protein, 9 aa, Artificial Sequence
  Description of Artificial Sequence: Synthetic peptide
GKTQFRKCS

SEQ ID NO: 4491 - protein, 9 aa, Artificial Sequence
  Description of Artificial Sequence: Synthetic peptide
GMYQKCYFA

SEQ ID NO: 4492 - protein, 9 aa, Artificial Sequence
  Description of Artificial Sequence: Synthetic peptide
GNCQQVQMG

SEQ ID NO: 4493 - protein, 9 aa, Artificial Sequence
  Description of Artificial Sequence: Synthetic peptide
GQDQCCRIW

SEQ ID NO: 4494 - protein, 9 aa, Artificial Sequence
  Description of Artificial Sequence: Synthetic peptide
GSSQGRARA

SEQ ID NO: 4495 - protein, 9 aa, Artificial Sequence
  Description of Artificial Sequence: Synthetic peptide
GSVQEGYDA

SEQ ID NO: 4496 - protein, 9 aa, Artificial Sequence
  Description of Artificial Sequence: Synthetic peptide
GTRQFEGNC

SEQ ID NO: 4497 - protein, 9 aa, Artificial Sequence
  Description of Artificial Sequence: Synthetic peptide
GTTQDWRVP

SEQ ID NO: 4498 - protein, 9 aa, Artificial Sequence
  Description of Artificial Sequence: Synthetic peptide
GVIQDQGMF

SEQ ID NO: 4499 - protein, 9 aa, Artificial Sequence
  Description of Artificial Sequence: Synthetic peptide
GVVQRATIE

SEQ ID NO: 4500 - protein, 9 aa, Artificial Sequence
  Description of Artificial Sequence: Synthetic peptide
GVYQKQSMQ

SEQ ID NO: 4501 - protein, 9 aa, Artificial Sequence
  Description of Artificial Sequence: Synthetic peptide
HDLQYPMSF

SEQ ID NO: 4502 - protein, 9 aa, Artificial Sequence
  Description of Artificial Sequence: Synthetic peptide
HFHQMIFGG

SEQ ID NO: 4503 - protein, 9 aa, Artificial Sequence
  Description of Artificial Sequence: Synthetic peptide
ICAQANIAR

SEQ ID NO: 4504 - protein, 9 aa, Artificial Sequence
  Description of Artificial Sequence: Synthetic peptide
ICDQPGTTG

SEQ ID NO: 4505 - protein, 9 aa, Artificial Sequence
  Description of Artificial Sequence: Synthetic peptide
IGVQTSFQD

SEQ ID NO: 4506 - protein, 9 aa, Artificial Sequence
  Description of Artificial Sequence: Synthetic peptide
IHLQWQSMM

SEQ ID NO: 4507 - protein, 9 aa, Artificial Sequence
  Description of Artificial Sequence: Synthetic peptide
IIDQKYSWC

SEQ ID NO: 4508 - protein, 9 aa, Artificial Sequence
  Description of Artificial Sequence: Synthetic peptide
INLQGHHWP

SEQ ID NO: 4509 - protein, 9 aa, Artificial Sequence
  Description of Artificial Sequence: Synthetic peptide
ISCQEEISM

SEQ ID NO: 4510 - protein, 9 aa, Artificial Sequence
  Description of Artificial Sequence: Synthetic peptide
ISDQNVAHR

SEQ ID NO: 4511 - protein, 9 aa, Artificial Sequence
  Description of Artificial Sequence: Synthetic peptide
ITLQTANAP

SEQ ID NO: 4512 - protein, 9 aa, Artificial Sequence
  Description of Artificial Sequence: Synthetic peptide
IVLQYKFME

SEQ ID NO: 4513 - protein, 9 aa, Artificial Sequence
  Description of Artificial Sequence: Synthetic peptide
IVMQQWFPF

SEQ ID NO: 4514 - protein, 9 aa, Artificial Sequence
  Description of Artificial Sequence: Synthetic peptide
KCEQIENNP

SEQ ID NO: 4515 - protein, 9 aa, Artificial Sequence
  Description of Artificial Sequence: Synthetic peptide
KEIQFMTMH

SEQ ID NO: 4516 - protein, 9 aa, Artificial Sequence
  Description of Artificial Sequence: Synthetic peptide
KLVQNMKRD

SEQ ID NO: 4517 - protein, 9 aa, Artificial Sequence
  Description of Artificial Sequence: Synthetic peptide
KQDQCMCWY

SEQ ID NO: 4518 - protein, 9 aa, Artificial Sequence
  Description of Artificial Sequence: Synthetic peptide
KYEQLLGCY

SEQ ID NO: 4519 - protein, 9 aa, Artificial Sequence
  Description of Artificial Sequence: Synthetic peptide
KYYQAFSKY

SEQ ID NO: 4520 - protein, 9 aa, Artificial Sequence
  Description of Artificial Sequence: Synthetic peptide
LNWQFVECQ

SEQ ID NO: 4521 - protein, 9 aa, Artificial Sequence
  Description of Artificial Sequence: Synthetic peptide
LNYQIALCR

SEQ ID NO: 4522 - protein, 9 aa, Artificial Sequence
  Description of Artificial Sequence: Synthetic peptide
LPHQYNVVY

SEQ ID NO: 4523 - protein, 9 aa, Artificial Sequence
  Description of Artificial Sequence: Synthetic peptide
LQTQRHWIP

SEQ ID NO: 4524 - protein, 9 aa, Artificial Sequence
  Description of Artificial Sequence: Synthetic peptide
LSVQGLCSY

SEQ ID NO: 4525 - protein, 9 aa, Artificial Sequence
  Description of Artificial Sequence: Synthetic peptide
LTSQSNHWG

SEQ ID NO: 4526 - protein, 9 aa, Artificial Sequence
  Description of Artificial Sequence: Synthetic peptide
LWMQHQHGS

SEQ ID NO: 4527 - protein, 9 aa, Artificial Sequence
  Description of Artificial Sequence: Synthetic peptide
LWSQYGLWV

SEQ ID NO: 4528 - protein, 9 aa, Artificial Sequence
  Description of Artificial Sequence: Synthetic peptide
LYLQNMHCE

SEQ ID NO: 4529 - protein, 9 aa, Artificial Sequence
  Description of Artificial Sequence: Synthetic peptide
MDVQTMNDG

SEQ ID NO: 4530 - protein, 9 aa, Artificial Sequence
  Description of Artificial Sequence: Synthetic peptide
MSFQETTSI

SEQ ID NO: 4531 - protein, 9 aa, Artificial Sequence
  Description of Artificial Sequence: Synthetic peptide
MTVQWFDIN

SEQ ID NO: 4532 - protein, 9 aa, Artificial Sequence
  Description of Artificial Sequence: Synthetic peptide
MWDQTEMFN

SEQ ID NO: 4533 - protein, 9 aa, Artificial Sequence
  Description of Artificial Sequence: Synthetic peptide
MYSQRNCLY

SEQ ID NO: 4534 - protein, 9 aa, Artificial Sequence
  Description of Artificial Sequence: Synthetic peptide
NDRQHHHKC

SEQ ID NO: 4535 - protein, 9 aa, Artificial Sequence
  Description of Artificial Sequence: Synthetic peptide
NNYQKLSFD

SEQ ID NO: 4536 - protein, 9 aa, Artificial Sequence
  Description of Artificial Sequence: Synthetic peptide
NSIQFSSWR

SEQ ID NO: 4537 - protein, 9 aa, Artificial Sequence
  Description of Artificial Sequence: Synthetic peptide
NTAQNEGWM

SEQ ID NO: 4538 - protein, 9 aa, Artificial Sequence
  Description of Artificial Sequence: Synthetic peptide
NTEQMPPLS

SEQ ID NO: 4539 - protein, 9 aa, Artificial Sequence
  Description of Artificial Sequence: Synthetic peptide
NTVQDMGVC

SEQ ID NO: 4540 - protein, 9 aa, Artificial Sequence
  Description of Artificial Sequence: Synthetic peptide
NVLQLDAFL

SEQ ID NO: 4541 - protein, 9 aa, Artificial Sequence
  Description of Artificial Sequence: Synthetic peptide
NWAQAHWYG

SEQ ID NO: 4542 - protein, 9 aa, Artificial Sequence
  Description of Artificial Sequence: Synthetic peptide
NWDQTMSQD

SEQ ID NO: 4543 - protein, 9 aa, Artificial Sequence
  Description of Artificial Sequence: Synthetic peptide
PEYQVERSE

SEQ ID NO: 4544 - protein, 9 aa, Artificial Sequence
  Description of Artificial Sequence: Synthetic peptide
PMIQTDCRW

SEQ ID NO: 4545 - protein, 9 aa, Artificial Sequence
  Description of Artificial Sequence: Synthetic peptide
PPPQIYLMA

SEQ ID NO: 4546 - protein, 9 aa, Artificial Sequence
  Description of Artificial Sequence: Synthetic peptide
PWVQTNIGL

SEQ ID NO: 4547 - protein, 9 aa, Artificial Sequence
  Description of Artificial Sequence: Synthetic peptide
QCFQEGWQD

SEQ ID NO: 4548 - protein, 9 aa, Artificial Sequence
  Description of Artificial Sequence: Synthetic peptide
QDIQLSHHT

SEQ ID NO: 4549 - protein, 9 aa, Artificial Sequence
  Description of Artificial Sequence: Synthetic peptide
QEVQFFATD

SEQ ID NO: 4550 - protein, 9 aa, Artificial Sequence
  Description of Artificial Sequence: Synthetic peptide
QHVQRNYAS

SEQ ID NO: 4551 - protein, 9 aa, Artificial Sequence
  Description of Artificial Sequence: Synthetic peptide
QQCQTGTPG

SEQ ID NO: 4552 - protein, 9 aa, Artificial Sequence
  Description of Artificial Sequence: Synthetic peptide
QSCQAIVED

SEQ ID NO: 4553 - protein, 9 aa, Artificial Sequence
  Description of Artificial Sequence: Synthetic peptide
QTTQQWCMQ

SEQ ID NO: 4554 - protein, 9 aa, Artificial Sequence
  Description of Artificial Sequence: Synthetic peptide
QYSQIHMQK

SEQ ID NO: 4555 - protein, 9 aa, Artificial Sequence
  Description of Artificial Sequence: Synthetic peptide
RGYQHEMMG

SEQ ID NO: 4556 - protein, 9 aa, Artificial Sequence
  Description of Artificial Sequence: Synthetic peptide
RQHQGHYDY

SEQ ID NO: 4557 - protein, 9 aa, Artificial Sequence
  Description of Artificial Sequence: Synthetic peptide
SNEQLDDDR

SEQ ID NO: 4558 - protein, 9 aa, Artificial Sequence
  Description of Artificial Sequence: Synthetic peptide
SNIQDDPKG

SEQ ID NO: 4559 - protein, 9 aa, Artificial Sequence
  Description of Artificial Sequence: Synthetic peptide
SQAQCEMMD

SEQ ID NO: 4560 - protein, 9 aa, Artificial Sequence
  Description of Artificial Sequence: Synthetic peptide
SSDQQGWVT

SEQ ID NO: 4561 - protein, 9 aa, Artificial Sequence
  Description of Artificial Sequence: Synthetic peptide
SSLQCFDME

SEQ ID NO: 4562 - protein, 9 aa, Artificial Sequence
  Description of Artificial Sequence: Synthetic peptide
SSMQMPSGN

SEQ ID NO: 4563 - protein, 9 aa, Artificial Sequence
  Description of Artificial Sequence: Synthetic peptide
SYVQTEWVY

SEQ ID NO: 4564 - protein, 9 aa, Artificial Sequence
  Description of Artificial Sequence: Synthetic peptide
TIAQTHWFW

SEQ ID NO: 4565 - protein, 9 aa, Artificial Sequence
  Description of Artificial Sequence: Synthetic peptide
TIKQCSFCL

SEQ ID NO: 4566 - protein, 9 aa, Artificial Sequence
  Description of Artificial Sequence: Synthetic peptide
TISQTQGYM

SEQ ID NO: 4567 - protein, 9 aa, Artificial Sequence
  Description of Artificial Sequence: Synthetic peptide
TQTQINQGR

SEQ ID NO: 4568 - protein, 9 aa, Artificial Sequence
  Description of Artificial Sequence: Synthetic peptide
TSMQSTQGK

SEQ ID NO: 4569 - protein, 9 aa, Artificial Sequence
  Description of Artificial Sequence: Synthetic peptide
TTMQRLHFE

SEQ ID NO: 4570 - protein, 9 aa, Artificial Sequence
  Description of Artificial Sequence: Synthetic peptide
TYAQRHVMG

SEQ ID NO: 4571 - protein, 9 aa, Artificial Sequence
  Description of Artificial Sequence: Synthetic peptide
VDKQMQIYL

SEQ ID NO: 4572 - protein, 9 aa, Artificial Sequence
  Description of Artificial Sequence: Synthetic peptide
VHCQADTAN

SEQ ID NO: 4573 - protein, 9 aa, Artificial Sequence
  Description of Artificial Sequence: Synthetic peptide
VINQNIQCQ

SEQ ID NO: 4574 - protein, 9 aa, Artificial Sequence
  Description of Artificial Sequence: Synthetic peptide
VMKQGNQEE

SEQ ID NO: 4575 - protein, 9 aa, Artificial Sequence
  Description of Artificial Sequence: Synthetic peptide
VPAQQSTFV

SEQ ID NO: 4576 - protein, 9 aa, Artificial Sequence
  Description of Artificial Sequence: Synthetic peptide
VPHQLCHIG

SEQ ID NO: 4577 - protein, 9 aa, Artificial Sequence
  Description of Artificial Sequence: Synthetic peptide
VQVQGLAIM

SEQ ID NO: 4578 - protein, 9 aa, Artificial Sequence
  Description of Artificial Sequence: Synthetic peptide
VTAQAESWF

SEQ ID NO: 4579 - protein, 9 aa, Artificial Sequence
  Description of Artificial Sequence: Synthetic peptide
VTAQQMNLG

SEQ ID NO: 4580 - protein, 9 aa, Artificial Sequence
  Description of Artificial Sequence: Synthetic peptide
VTVQKQFDH

SEQ ID NO: 4581 - protein, 9 aa, Artificial Sequence
  Description of Artificial Sequence: Synthetic peptide
VVIQDIRKD

SEQ ID NO: 4582 - protein, 9 aa, Artificial Sequence
  Description of Artificial Sequence: Synthetic peptide
VVLQQVDPA

SEQ ID NO: 4583 - protein, 9 aa, Artificial Sequence
  Description of Artificial Sequence: Synthetic peptide
WERQYVPFV

SEQ ID NO: 4584 - protein, 9 aa, Artificial Sequence
  Description of Artificial Sequence: Synthetic peptide
WIHQQFAEI

SEQ ID NO: 4585 - protein, 9 aa, Artificial Sequence
  Description of Artificial Sequence: Synthetic peptide
WPCQQQSTW

SEQ ID NO: 4586 - protein, 9 aa, Artificial Sequence
  Description of Artificial Sequence: Synthetic peptide
WSGQNYNGA

SEQ ID NO: 4587 - protein, 9 aa, Artificial Sequence
  Description of Artificial Sequence: Synthetic peptide
YFKQFMNCY

SEQ ID NO: 4588 - protein, 9 aa, Artificial Sequence
  Description of Artificial Sequence: Synthetic peptide
YMNQQNKDE

SEQ ID NO: 4589 - protein, 9 aa, Artificial Sequence
  Description of Artificial Sequence: Synthetic peptide
YSLQTEVND

SEQ ID NO: 4590 - protein, 9 aa, Artificial Sequence
  Description of Artificial Sequence: Synthetic peptide
YVSQSSYNY

SEQ ID NO: 4591 - protein, 9 aa, Artificial Sequence
  Description of Artificial Sequence: Synthetic peptide
YYGQNYMGC

SEQ ID NO: 4592 - protein, 9 aa, Artificial Sequence
  Description of Artificial Sequence: Synthetic peptide
ARAQIQDEW

SEQ ID NO: 4593 - protein, 9 aa, Artificial Sequence
  Description of Artificial Sequence: Synthetic peptide
CVMQERQAN

SEQ ID NO: 4594 - protein, 9 aa, Artificial Sequence
  Description of Artificial Sequence: Synthetic peptide
DLEQAMFMG

SEQ ID NO: 4595 - protein, 9 aa, Artificial Sequence
  Description of Artificial Sequence: Synthetic peptide
DPCQEWDSE

SEQ ID NO: 4596 - protein, 9 aa, Artificial Sequence
  Description of Artificial Sequence: Synthetic peptide
FEAQIVLPG

SEQ ID NO: 4597 - protein, 9 aa, Artificial Sequence
  Description of Artificial Sequence: Synthetic peptide
IHLQWIWAN

SEQ ID NO: 4598 - protein, 9 aa, Artificial Sequence
  Description of Artificial Sequence: Synthetic peptide
KHDQSGIAN

SEQ ID NO: 4599 - protein, 9 aa, Artificial Sequence
  Description of Artificial Sequence: Synthetic peptide
LSGQIDEMS

SEQ ID NO: 4600 - protein, 9 aa, Artificial Sequence
  Description of Artificial Sequence: Synthetic peptide
LYMQAPSEG

SEQ ID NO: 4601 - protein, 9 aa, Artificial Sequence
  Description of Artificial Sequence: Synthetic peptide
NCLQKMQIW

SEQ ID NO: 4602 - protein, 9 aa, Artificial Sequence
  Description of Artificial Sequence: Synthetic peptide
NDLQDKSHQ

SEQ ID NO: 4603 - protein, 9 aa, Artificial Sequence
  Description of Artificial Sequence: Synthetic peptide
NVSQITQDC

SEQ ID NO: 4604 - protein, 9 aa, Artificial Sequence
  Description of Artificial Sequence: Synthetic peptide
PNNQARGQC

SEQ ID NO: 4605 - protein, 9 aa, Artificial Sequence
  Description of Artificial Sequence: Synthetic peptide
PVIQPCDER

SEQ ID NO: 4606 - protein, 9 aa, Artificial Sequence
  Description of Artificial Sequence: Synthetic peptide
RWKQWCWEF

SEQ ID NO: 4607 - protein, 9 aa, Artificial Sequence
  Description of Artificial Sequence: Synthetic peptide
VSYQTQDML

SEQ ID NO: 4608 - protein, 9 aa, Artificial Sequence
  Description of Artificial Sequence: Synthetic peptide
YDLQTIKQL

SEQ ID NO: 4609 - protein, 9 aa, Artificial Sequence
  Description of Artificial Sequence: Synthetic peptide
NITQLQCYC

SEQ ID NO: 4610 - protein, 9 aa, Artificial Sequence
  Description of Artificial Sequence: Synthetic peptide
FHPQTSDND

SEQ ID NO: 4611 - protein, 9 aa, Artificial Sequence
  Description of Artificial Sequence: Synthetic peptide
MEWQSEYIS

SEQ ID NO: 4612 - protein, 9 aa, Artificial Sequence
  Description of Artificial Sequence: Synthetic peptide
DHPQMHFYW

SEQ ID NO: 4613 - protein, 9 aa, Artificial Sequence
  Description of Artificial Sequence: Synthetic peptide
LVAQQDSCE

SEQ ID NO: 4614 - protein, 9 aa, Artificial Sequence
  Description of Artificial Sequence: Synthetic peptide
LWKQWCWEF

SEQ ID NO: 4615 - protein, 9 aa, Artificial Sequence
  Description of Artificial Sequence: Synthetic peptide
LVIQPCDER

SEQ ID NO: 4616 - protein, 9 aa, Artificial Sequence
  Description of Artificial Sequence: Synthetic peptide
KPVQCACQN

SEQ ID NO: 4617 - protein, 9 aa, Artificial Sequence
  Description of Artificial Sequence: Synthetic peptide
LIIQHPNMA

SEQ ID NO: 4618 - protein, 9 aa, Artificial Sequence
  Description of Artificial Sequence: Synthetic peptide
SFLQYHERT

SEQ ID NO: 4619 - protein, 9 aa, Artificial Sequence
  Description of Artificial Sequence: Synthetic peptide
GLPQSADVI

SEQ ID NO: 4620 - protein, 9 aa, Artificial Sequence
  Description of Artificial Sequence: Synthetic peptide
DQVQGAHLF

SEQ ID NO: 4621 - protein, 9 aa, Artificial Sequence
  Description of Artificial Sequence: Synthetic peptide
SGDQHLSEG

SEQ ID NO: 4622 - protein, 9 aa, Artificial Sequence
  Description of Artificial Sequence: Synthetic peptide
LKSQGCEAY

SEQ ID NO: 4623 - protein, 9 aa, Artificial Sequence
  Description of Artificial Sequence: Synthetic peptide
SCCQHDNNA

SEQ ID NO: 4624 - protein, 9 aa, Artificial Sequence
  Description of Artificial Sequence: Synthetic peptide
YHEQCQWHS

SEQ ID NO: 4625 - protein, 9 aa, Artificial Sequence
  Description of Artificial Sequence: Synthetic peptide
NMMQYQWAI

SEQ ID NO: 4626 - protein, 9 aa, Artificial Sequence
  Description of Artificial Sequence: Synthetic peptide
MIPQHARGP

SEQ ID NO: 4627 - protein, 9 aa, Artificial Sequence
  Description of Artificial Sequence: Synthetic peptide
TGRQYYSCC

SEQ ID NO: 4628 - protein, 9 aa, Artificial Sequence
  Description of Artificial Sequence: Synthetic peptide
GNLYVPSWG

SEQ ID NO: 4629 - protein, 9 aa, Artificial Sequence
  Description of Artificial Sequence: Synthetic peptide
GVDLVMMLK

SEQ ID NO: 4630 - protein, 9 aa, Artificial Sequence
  Description of Artificial Sequence: Synthetic peptide
GVMLVGHKY

SEQ ID NO: 4631 - protein, 9 aa, Artificial Sequence
  Description of Artificial Sequence: Synthetic peptide
HDFHVKRRC

SEQ ID NO: 4632 - protein, 9 aa, Artificial Sequence
  Description of Artificial Sequence: Synthetic peptide
HNDWVIMAP

SEQ ID NO: 4633 - protein, 9 aa, Artificial Sequence
  Description of Artificial Sequence: Synthetic peptide
HNVHVTTKW

SEQ ID NO: 4634 - protein, 9 aa, Artificial Sequence
  Description of Artificial Sequence: Synthetic peptide
ICKLVMKED

SEQ ID NO: 4635 - protein, 9 aa, Artificial Sequence
  Description of Artificial Sequence: Synthetic peptide
IEIYVNFCT

SEQ ID NO: 4636 - protein, 9 aa, Artificial Sequence
  Description of Artificial Sequence: Synthetic peptide
IIDYVAHLL

SEQ ID NO: 4637 - protein, 9 aa, Artificial Sequence
  Description of Artificial Sequence: Synthetic peptide
INELVEWCP

SEQ ID NO: 4638 - protein, 9 aa, Artificial Sequence
  Description of Artificial Sequence: Synthetic peptide
ISCSVESLS

SEQ ID NO: 4639 - protein, 9 aa, Artificial Sequence
  Description of Artificial Sequence: Synthetic peptide
KDKEVIVNC

SEQ ID NO: 4640 - protein, 9 aa, Artificial Sequence
  Description of Artificial Sequence: Synthetic peptide
KDMCVHKYT

SEQ ID NO: 4641 - protein, 9 aa, Artificial Sequence
  Description of Artificial Sequence: Synthetic peptide
KEWLVDESQ

SEQ ID NO: 4642 - protein, 9 aa, Artificial Sequence
  Description of Artificial Sequence: Synthetic peptide
KMKMVKEVC

SEQ ID NO: 4643 - protein, 9 aa, Artificial Sequence
  Description of Artificial Sequence: Synthetic peptide
KVEEVNVQQ

SEQ ID NO: 4644 - protein, 9 aa, Artificial Sequence
  Description of Artificial Sequence: Synthetic peptide
KWTEVDGSW

SEQ ID NO: 4645 - protein, 9 aa, Artificial Sequence
  Description of Artificial Sequence: Synthetic peptide
LCEHVQNCM

SEQ ID NO: 4646 - protein, 9 aa, Artificial Sequence
  Description of Artificial Sequence: Synthetic peptide
LDDKVADHW

SEQ ID NO: 4647 - protein, 9 aa, Artificial Sequence
  Description of Artificial Sequence: Synthetic peptide
LDKIVGMWS

SEQ ID NO: 4648 - protein, 9 aa, Artificial Sequence
  Description of Artificial Sequence: Synthetic peptide
LGDNVDCWQ

SEQ ID NO: 4649 - protein, 9 aa, Artificial Sequence
  Description of Artificial Sequence: Synthetic peptide
LMGDVTHMF

SEQ ID NO: 4650 - protein, 9 aa, Artificial Sequence
  Description of Artificial Sequence: Synthetic peptide
LRVWVMYLS

SEQ ID NO: 4651 - protein, 9 aa, Artificial Sequence
  Description of Artificial Sequence: Synthetic peptide
LSCHVQMNS

SEQ ID NO: 4652 - protein, 9 aa, Artificial Sequence
  Description of Artificial Sequence: Synthetic peptide
LTSDVHIHM

SEQ ID NO: 4653 - protein, 9 aa, Artificial Sequence
  Description of Artificial Sequence: Synthetic peptide
LYEAVAQME

SEQ ID NO: 4654 - protein, 9 aa, Artificial Sequence
  Description of Artificial Sequence: Synthetic peptide
MFPLVGMIV

SEQ ID NO: 4655 - protein, 9 aa, Artificial Sequence
  Description of Artificial Sequence: Synthetic peptide
MMTMVCNAL

SEQ ID NO: 4656 - protein, 9 aa, Artificial Sequence
  Description of Artificial Sequence: Synthetic peptide
MPASVGSYT

SEQ ID NO: 4657 - protein, 9 aa, Artificial Sequence
  Description of Artificial Sequence: Synthetic peptide
MWSPVFNWL

SEQ ID NO: 4658 - protein, 9 aa, Artificial Sequence
  Description of Artificial Sequence: Synthetic peptide
NCEWVTKLA

SEQ ID NO: 4659 - protein, 9 aa, Artificial Sequence
  Description of Artificial Sequence: Synthetic peptide
NETGVFRQA

SEQ ID NO: 4660 - protein, 9 aa, Artificial Sequence
  Description of Artificial Sequence: Synthetic peptide
NFCAVEQGV

SEQ ID NO: 4661 - protein, 9 aa, Artificial Sequence
  Description of Artificial Sequence: Synthetic peptide
NFGYVRAVG

SEQ ID NO: 4662 - protein, 9 aa, Artificial Sequence
  Description of Artificial Sequence: Synthetic peptide
NIWGVDATE

SEQ ID NO: 4663 - protein, 9 aa, Artificial Sequence
  Description of Artificial Sequence: Synthetic peptide
NPAPVDQHY

SEQ ID NO: 4664 - protein, 9 aa, Artificial Sequence
  Description of Artificial Sequence: Synthetic peptide
NQNAVECIQ

SEQ ID NO: 4665 - protein, 9 aa, Artificial Sequence
  Description of Artificial Sequence: Synthetic peptide
NRDVVRAWH

SEQ ID NO: 4666 - protein, 9 aa, Artificial Sequence
  Description of Artificial Sequence: Synthetic peptide
NTEHVLVTP

SEQ ID NO: 4667 - protein, 9 aa, Artificial Sequence
  Description of Artificial Sequence: Synthetic peptide
NVFLVPDMD

SEQ ID NO: 4668 - protein, 9 aa, Artificial Sequence
  Description of Artificial Sequence: Synthetic peptide
NVVSVPVKS

SEQ ID NO: 4669 - protein, 9 aa, Artificial Sequence
  Description of Artificial Sequence: Synthetic peptide
PESHVVSVW

SEQ ID NO: 4670 - protein, 9 aa, Artificial Sequence
  Description of Artificial Sequence: Synthetic peptide
PNYVVQWNF

SEQ ID NO: 4671 - protein, 9 aa, Artificial Sequence
  Description of Artificial Sequence: Synthetic peptide
PTTIVGWRD

SEQ ID NO: 4672 - protein, 9 aa, Artificial Sequence
  Description of Artificial Sequence: Synthetic peptide
QCDDVMISE

SEQ ID NO: 4673 - protein, 9 aa, Artificial Sequence
  Description of Artificial Sequence: Synthetic peptide
QCTFVPFET

SEQ ID NO: 4674 - protein, 9 aa, Artificial Sequence
  Description of Artificial Sequence: Synthetic peptide
QGKYVGMIM

SEQ ID NO: 4675 - protein, 9 aa, Artificial Sequence
  Description of Artificial Sequence: Synthetic peptide
QGYYVNSVD

SEQ ID NO: 4676 - protein, 9 aa, Artificial Sequence
  Description of Artificial Sequence: Synthetic peptide
QMKMVNTSK

SEQ ID NO: 4677 - protein, 9 aa, Artificial Sequence
  Description of Artificial Sequence: Synthetic peptide
QWCPVQMQC

SEQ ID NO: 4678 - protein, 9 aa, Artificial Sequence
  Description of Artificial Sequence: Synthetic peptide
QYNVVKCVA

SEQ ID NO: 4679 - protein, 9 aa, Artificial Sequence
  Description of Artificial Sequence: Synthetic peptide
RCDNVEACF

SEQ ID NO: 4680 - protein, 9 aa, Artificial Sequence
  Description of Artificial Sequence: Synthetic peptide
RDGPVVPPP

SEQ ID NO: 4681 - protein, 9 aa, Artificial Sequence
  Description of Artificial Sequence: Synthetic peptide
RIASVQWEE

SEQ ID NO: 4682 - protein, 9 aa, Artificial Sequence
  Description of Artificial Sequence: Synthetic peptide
RPTLVNAHL

SEQ ID NO: 4683 - protein, 9 aa, Artificial Sequence
  Description of Artificial Sequence: Synthetic peptide
RQIPVEDSN

SEQ ID NO: 4684 - protein, 9 aa, Artificial Sequence
  Description of Artificial Sequence: Synthetic peptide
RTDLVAVCG

SEQ ID NO: 4685 - protein, 9 aa, Artificial Sequence
  Description of Artificial Sequence: Synthetic peptide
RWSHVRVLW

SEQ ID NO: 4686 - protein, 9 aa, Artificial Sequence
  Description of Artificial Sequence: Synthetic peptide
SFAHVGLPI

SEQ ID NO: 4687 - protein, 9 aa, Artificial Sequence
  Description of Artificial Sequence: Synthetic peptide
SGHMVVCCR

SEQ ID NO: 4688 - protein, 9 aa, Artificial Sequence
  Description of Artificial Sequence: Synthetic peptide
SNAPVHTCD

SEQ ID NO: 4689 - protein, 9 aa, Artificial Sequence
  Description of Artificial Sequence: Synthetic peptide
SPATVAAGC

SEQ ID NO: 4690 - protein, 9 aa, Artificial Sequence
  Description of Artificial Sequence: Synthetic peptide
SSIGVMGLY

SEQ ID NO: 4691 - protein, 9 aa, Artificial Sequence
  Description of Artificial Sequence: Synthetic peptide
SSLCVNDQW

SEQ ID NO: 4692 - protein, 9 aa, Artificial Sequence
  Description of Artificial Sequence: Synthetic peptide
STFRVGDCI

SEQ ID NO: 4693 - protein, 9 aa, Artificial Sequence
  Description of Artificial Sequence: Synthetic peptide
STTIVGWRD

SEQ ID NO: 4694 - protein, 9 aa, Artificial Sequence
  Description of Artificial Sequence: Synthetic peptide
TCDYVCAQV

SEQ ID NO: 4695 - protein, 9 aa, Artificial Sequence
  Description of Artificial Sequence: Synthetic peptide
THTSVGGQC

SEQ ID NO: 4696 - protein, 9 aa, Artificial Sequence
  Description of Artificial Sequence: Synthetic peptide
TRCDVEGYA

SEQ ID NO: 4697 - protein, 9 aa, Artificial Sequence
  Description of Artificial Sequence: Synthetic peptide
TTYWVREMS

SEQ ID NO: 4698 - protein, 9 aa, Artificial Sequence
  Description of Artificial Sequence: Synthetic peptide
TVMTVAAMQ

SEQ ID NO: 4699 - protein, 9 aa, Artificial Sequence
  Description of Artificial Sequence: Synthetic peptide
TYRLVQQCM

SEQ ID NO: 4700 - protein, 9 aa, Artificial Sequence
  Description of Artificial Sequence: Synthetic peptide
VFESVVITE

SEQ ID NO: 4701 - protein, 9 aa, Artificial Sequence
  Description of Artificial Sequence: Synthetic peptide
VFTPVEKSG

SEQ ID NO: 4702 - protein, 9 aa, Artificial Sequence
  Description of Artificial Sequence: Synthetic peptide
VGDRVQKNS

SEQ ID NO: 4703 - protein, 9 aa, Artificial Sequence
  Description of Artificial Sequence: Synthetic peptide
VGTTVNVRS

SEQ ID NO: 4704 - protein, 9 aa, Artificial Sequence
  Description of Artificial Sequence: Synthetic peptide
VHNMVIAFD

SEQ ID NO: 4705 - protein, 9 aa, Artificial Sequence
  Description of Artificial Sequence: Synthetic peptide
VIGGVTSYW

SEQ ID NO: 4706 - protein, 9 aa, Artificial Sequence
  Description of Artificial Sequence: Synthetic peptide
VRELVMWGY

SEQ ID NO: 4707 - protein, 9 aa, Artificial Sequence
  Description of Artificial Sequence: Synthetic peptide
VSGFVFVWR

SEQ ID NO: 4708 - protein, 9 aa, Artificial Sequence
  Description of Artificial Sequence: Synthetic peptide
VTDYVPMNQ

SEQ ID NO: 4709 - protein, 9 aa, Artificial Sequence
  Description of Artificial Sequence: Synthetic peptide
VTEIVCESG

SEQ ID NO: 4710 - protein, 9 aa, Artificial Sequence
  Description of Artificial Sequence: Synthetic peptide
VVGVVIYTR

SEQ ID NO: 4711 - protein, 9 aa, Artificial Sequence
  Description of Artificial Sequence: Synthetic peptide
VVVAVNADG

SEQ ID NO: 4712 - protein, 9 aa, Artificial Sequence
  Description of Artificial Sequence: Synthetic peptide
VWELVSHVQ

SEQ ID NO: 4713 - protein, 9 aa, Artificial Sequence
  Description of Artificial Sequence: Synthetic peptide
YDSGVFTIS

SEQ ID NO: 4714 - protein, 9 aa, Artificial Sequence
  Description of Artificial Sequence: Synthetic peptide
YYHGVVDSE

SEQ ID NO: 4715 - protein, 9 aa, Artificial Sequence
  Description of Artificial Sequence: Synthetic peptide
CHAAVTNLY

SEQ ID NO: 4716 - protein, 9 aa, Artificial Sequence
  Description of Artificial Sequence: Synthetic peptide
DLIIVPWSN

SEQ ID NO: 4717 - protein, 9 aa, Artificial Sequence
  Description of Artificial Sequence: Synthetic peptide
LEILVAINE

SEQ ID NO: 4718 - protein, 9 aa, Artificial Sequence
  Description of Artificial Sequence: Synthetic peptide
LMTWVEKGA

SEQ ID NO: 4719 - protein, 9 aa, Artificial Sequence
  Description of Artificial Sequence: Synthetic peptide
LMTWVEKGD

SEQ ID NO: 4720 - protein, 9 aa, Artificial Sequence
  Description of Artificial Sequence: Synthetic peptide
NTYGVAFDT

SEQ ID NO: 4721 - protein, 9 aa, Artificial Sequence
  Description of Artificial Sequence: Synthetic peptide
QYHWVTRII

SEQ ID NO: 4722 - protein, 9 aa, Artificial Sequence
  Description of Artificial Sequence: Synthetic peptide
RPPHVGPAL

SEQ ID NO: 4723 - protein, 9 aa, Artificial Sequence
  Description of Artificial Sequence: Synthetic peptide
RQEFVFDCY

SEQ ID NO: 4724 - protein, 9 aa, Artificial Sequence
  Description of Artificial Sequence: Synthetic peptide
SGKLVMCGY

SEQ ID NO: 4725 - protein, 9 aa, Artificial Sequence
  Description of Artificial Sequence: Synthetic peptide
SSGPVIILR

SEQ ID NO: 4726 - protein, 9 aa, Artificial Sequence
  Description of Artificial Sequence: Synthetic peptide
TCFHVAEMF

SEQ ID NO: 4727 - protein, 9 aa, Artificial Sequence
  Description of Artificial Sequence: Synthetic peptide
PQCHVMADR

SEQ ID NO: 4728 - protein, 9 aa, Artificial Sequence
  Description of Artificial Sequence: Synthetic peptide
CSDLVGTNC

SEQ ID NO: 4729 - protein, 9 aa, Artificial Sequence
  Description of Artificial Sequence: Synthetic peptide
IRMNVVLTP

SEQ ID NO: 4730 - protein, 9 aa, Artificial Sequence
  Description of Artificial Sequence: Synthetic peptide
ISMEVNRGE

SEQ ID NO: 4731 - protein, 9 aa, Artificial Sequence
  Description of Artificial Sequence: Synthetic peptide
ALDRVSMAC

SEQ ID NO: 4732 - protein, 9 aa, Artificial Sequence
  Description of Artificial Sequence: Synthetic peptide
FFEGVNINY

SEQ ID NO: 4733 - protein, 9 aa, Artificial Sequence
  Description of Artificial Sequence: Synthetic peptide
PMYVVPEMC

SEQ ID NO: 4734 - protein, 9 aa, Artificial Sequence
  Description of Artificial Sequence: Synthetic peptide
GKLDISNLC

SEQ ID NO: 4735 - protein, 9 aa, Artificial Sequence
  Description of Artificial Sequence: Synthetic peptide
GLCNPSIVT

SEQ ID NO: 4736 - protein, 9 aa, Artificial Sequence
  Description of Artificial Sequence: Synthetic peptide
GQLYCSRYD

SEQ ID NO: 4737 - protein, 9 aa, Artificial Sequence
  Description of Artificial Sequence: Synthetic peptide
GSNFGSIDK

SEQ ID NO: 4738 - protein, 9 aa, Artificial Sequence
  Description of Artificial Sequence: Synthetic peptide
GSNPFSRHG

SEQ ID NO: 4739 - protein, 9 aa, Artificial Sequence
  Description of Artificial Sequence: Synthetic peptide
GYAKESAKR

SEQ ID NO: 4740 - protein, 9 aa, Artificial Sequence
  Description of Artificial Sequence: Synthetic peptide
HHMRMSTLP

SEQ ID NO: 4741 - protein, 9 aa, Artificial Sequence
  Description of Artificial Sequence: Synthetic peptide
HMDDSSICA

SEQ ID NO: 4742 - protein, 9 aa, Artificial Sequence
  Description of Artificial Sequence: Synthetic peptide
ICREESETP

SEQ ID NO: 4743 - protein, 9 aa, Artificial Sequence
  Description of Artificial Sequence: Synthetic peptide
IGEKISAMP

SEQ ID NO: 4744 - protein, 9 aa, Artificial Sequence
  Description of Artificial Sequence: Synthetic peptide
INEGESTYD

SEQ ID NO: 4745 - protein, 9 aa, Artificial Sequence
  Description of Artificial Sequence: Synthetic peptide
IVNTCSQSW

SEQ ID NO: 4746 - protein, 9 aa, Artificial Sequence
  Description of Artificial Sequence: Synthetic peptide
KRKEASTRW

SEQ ID NO: 4747 - protein, 9 aa, Artificial Sequence
  Description of Artificial Sequence: Synthetic peptide
LFEHSSVAN

SEQ ID NO: 4748 - protein, 9 aa, Artificial Sequence
  Description of Artificial Sequence: Synthetic peptide
LGGLISCPG

SEQ ID NO: 4749 - protein, 9 aa, Artificial Sequence
  Description of Artificial Sequence: Synthetic peptide
LHISLSKSC

SEQ ID NO: 4750 - protein, 9 aa, Artificial Sequence
  Description of Artificial Sequence: Synthetic peptide
LISEFSHDK

SEQ ID NO: 4751 - protein, 9 aa, Artificial Sequence
  Description of Artificial Sequence: Synthetic peptide
LLTHISYME

SEQ ID NO: 4752 - protein, 9 aa, Artificial Sequence
  Description of Artificial Sequence: Synthetic peptide
LPGIQSTMR

SEQ ID NO: 4753 - protein, 9 aa, Artificial Sequence
  Description of Artificial Sequence: Synthetic peptide
LVSAYSEKF

SEQ ID NO: 4754 - protein, 9 aa, Artificial Sequence
  Description of Artificial Sequence: Synthetic peptide
MDIDLSSHA

SEQ ID NO: 4755 - protein, 9 aa, Artificial Sequence
  Description of Artificial Sequence: Synthetic peptide
MGAFTSINI

SEQ ID NO: 4756 - protein, 9 aa, Artificial Sequence
  Description of Artificial Sequence: Synthetic peptide
MNVAFSMED

SEQ ID NO: 4757 - protein, 9 aa, Artificial Sequence
  Description of Artificial Sequence: Synthetic peptide
MTPAMSFSP

SEQ ID NO: 4758 - protein, 9 aa, Artificial Sequence
  Description of Artificial Sequence: Synthetic peptide
MTTRESICE

SEQ ID NO: 4759 - protein, 9 aa, Artificial Sequence
  Description of Artificial Sequence: Synthetic peptide
NFDHISAST

SEQ ID NO: 4760 - protein, 9 aa, Artificial Sequence
  Description of Artificial Sequence: Synthetic peptide
NLRYASNWP

SEQ ID NO: 4761 - protein, 9 aa, Artificial Sequence
  Description of Artificial Sequence: Synthetic peptide
NMMSKSLDS

SEQ ID NO: 4762 - protein, 9 aa, Artificial Sequence
  Description of Artificial Sequence: Synthetic peptide
NMSPFSSHS

SEQ ID NO: 4763 - protein, 9 aa, Artificial Sequence
  Description of Artificial Sequence: Synthetic peptide
NMSPMSESY

SEQ ID NO: 4764 - protein, 9 aa, Artificial Sequence
  Description of Artificial Sequence: Synthetic peptide
NQYTASNIC

SEQ ID NO: 4765 - protein, 9 aa, Artificial Sequence
  Description of Artificial Sequence: Synthetic peptide
NTYSWSREW

SEQ ID NO: 4766 - protein, 9 aa, Artificial Sequence
  Description of Artificial Sequence: Synthetic peptide
QTGAASANR

SEQ ID NO: 4767 - protein, 9 aa, Artificial Sequence
  Description of Artificial Sequence: Synthetic peptide
QVFCPSVDA

SEQ ID NO: 4768 - protein, 9 aa, Artificial Sequence
  Description of Artificial Sequence: Synthetic peptide
RGVGMSTDN

SEQ ID NO: 4769 - protein, 9 aa, Artificial Sequence
  Description of Artificial Sequence: Synthetic peptide
RVAEMSNTP

SEQ ID NO: 4770 - protein, 9 aa, Artificial Sequence
  Description of Artificial Sequence: Synthetic peptide
SKNCLSFSW

SEQ ID NO: 4771 - protein, 9 aa, Artificial Sequence
  Description of Artificial Sequence: Synthetic peptide
SMVTDSRWT

SEQ ID NO: 4772 - protein, 9 aa, Artificial Sequence
  Description of Artificial Sequence: Synthetic peptide
SSGKDSNAA

SEQ ID NO: 4773 - protein, 9 aa, Artificial Sequence
  Description of Artificial Sequence: Synthetic peptide
STDDESMPG

SEQ ID NO: 4774 - protein, 9 aa, Artificial Sequence
  Description of Artificial Sequence: Synthetic peptide
TECPKSLTS

SEQ ID NO: 4775 - protein, 9 aa, Artificial Sequence
  Description of Artificial Sequence: Synthetic peptide
TGKDESHFY

SEQ ID NO: 4776 - protein, 9 aa, Artificial Sequence
  Description of Artificial Sequence: Synthetic peptide
THFHTSREP

SEQ ID NO: 4777 - protein, 9 aa, Artificial Sequence
  Description of Artificial Sequence: Synthetic peptide
TMEFTSPCS

SEQ ID NO: 4778 - protein, 9 aa, Artificial Sequence
  Description of Artificial Sequence: Synthetic peptide
TNHGFSNWV

SEQ ID NO: 4779 - protein, 9 aa, Artificial Sequence
  Description of Artificial Sequence: Synthetic peptide
TQDWNSTAA

SEQ ID NO: 4780 - protein, 9 aa, Artificial Sequence
  Description of Artificial Sequence: Synthetic peptide
TTHWQSWIQ

SEQ ID NO: 4781 - protein, 9 aa, Artificial Sequence
  Description of Artificial Sequence: Synthetic peptide
TYGMCSTFQ

SEQ ID NO: 4782 - protein, 9 aa, Artificial Sequence
  Description of Artificial Sequence: Synthetic peptide
VCLTHSFSN

SEQ ID NO: 4783 - protein, 9 aa, Artificial Sequence
  Description of Artificial Sequence: Synthetic peptide
VIEMESGDF

SEQ ID NO: 4784 - protein, 9 aa, Artificial Sequence
  Description of Artificial Sequence: Synthetic peptide
VNLVDSIRD

SEQ ID NO: 4785 - protein, 9 aa, Artificial Sequence
  Description of Artificial Sequence: Synthetic peptide
VVNLFSFRS

SEQ ID NO: 4786 - protein, 9 aa, Artificial Sequence
  Description of Artificial Sequence: Synthetic peptide
WFMEPSPQR

SEQ ID NO: 4787 - protein, 9 aa, Artificial Sequence
  Description of Artificial Sequence: Synthetic peptide
WMHEDSSQY

SEQ ID NO: 4788 - protein, 9 aa, Artificial Sequence
  Description of Artificial Sequence: Synthetic peptide
WTFMDSTTD

SEQ ID NO: 4789 - protein, 9 aa, Artificial Sequence
  Description of Artificial Sequence: Synthetic peptide
YCSPFSGDA

SEQ ID NO: 4790 - protein, 9 aa, Artificial Sequence
  Description of Artificial Sequence: Synthetic peptide
YLNKRSVNA

SEQ ID NO: 4791 - protein, 9 aa, Artificial Sequence
  Description of Artificial Sequence: Synthetic peptide
CISMYSEGD

SEQ ID NO: 4792 - protein, 9 aa, Artificial Sequence
  Description of Artificial Sequence: Synthetic peptide
ISGLMSDYQ

SEQ ID NO: 4793 - protein, 9 aa, Artificial Sequence
  Description of Artificial Sequence: Synthetic peptide
IWMLPSVTT

SEQ ID NO: 4794 - protein, 9 aa, Artificial Sequence
  Description of Artificial Sequence: Synthetic peptide
KQHNYSGRA

SEQ ID NO: 4795 - protein, 9 aa, Artificial Sequence
  Description of Artificial Sequence: Synthetic peptide
KSGLQSITR

SEQ ID NO: 4796 - protein, 9 aa, Artificial Sequence
  Description of Artificial Sequence: Synthetic peptide
LSEVFSAQR

SEQ ID NO: 4797 - protein, 9 aa, Artificial Sequence
  Description of Artificial Sequence: Synthetic peptide
LSMVFSKGE

SEQ ID NO: 4798 - protein, 9 aa, Artificial Sequence
  Description of Artificial Sequence: Synthetic peptide
MHFPWSGEA

SEQ ID NO: 4799 - protein, 9 aa, Artificial Sequence
  Description of Artificial Sequence: Synthetic peptide
QVPWESKLC

SEQ ID NO: 4800 - protein, 9 aa, Artificial Sequence
  Description of Artificial Sequence: Synthetic peptide
SKEEDSTML

SEQ ID NO: 4801 - protein, 9 aa, Artificial Sequence
  Description of Artificial Sequence: Synthetic peptide
VEMCYSWNY

SEQ ID NO: 4802 - protein, 9 aa, Artificial Sequence
  Description of Artificial Sequence: Synthetic peptide
YYTIASANV

SEQ ID NO: 4803 - protein, 9 aa, Artificial Sequence
  Description of Artificial Sequence: Synthetic peptide
IPSADSWPM

SEQ ID NO: 4804 - protein, 9 aa, Artificial Sequence
  Description of Artificial Sequence: Synthetic peptide
LPRTSSQIG

SEQ ID NO: 4805 - protein, 9 aa, Artificial Sequence
  Description of Artificial Sequence: Synthetic peptide
QWGFGSDET

SEQ ID NO: 4806 - protein, 9 aa, Artificial Sequence
  Description of Artificial Sequence: Synthetic peptide
AVLLASDQR

SEQ ID NO: 4807 - protein, 9 aa, Artificial Sequence
  Description of Artificial Sequence: Synthetic peptide
DWNWKSCEW

SEQ ID NO: 4808 - protein, 9 aa, Artificial Sequence
  Description of Artificial Sequence: Synthetic peptide
TSSNDSTAN

SEQ ID NO: 4809 - protein, 9 aa, Artificial Sequence
  Description of Artificial Sequence: Synthetic peptide
IHGYHSCYF

SEQ ID NO: 4810 - protein, 9 aa, Artificial Sequence
  Description of Artificial Sequence: Synthetic peptide
HVMLLSPNQ

SEQ ID NO: 4811 - protein, 9 aa, Artificial Sequence
  Description of Artificial Sequence: Synthetic peptide
LSELFSAQR

SEQ ID NO: 4812 - protein, 9 aa, Artificial Sequence
  Description of Artificial Sequence: Synthetic peptide
DIKMFSFHT

SEQ ID NO: 4813 - protein, 9 aa, Artificial Sequence
  Description of Artificial Sequence: Synthetic peptide
GHTGSWCDR

SEQ ID NO: 4814 - protein, 9 aa, Artificial Sequence
  Description of Artificial Sequence: Synthetic peptide
GKYRIACDT

SEQ ID NO: 4815 - protein, 9 aa, Artificial Sequence
  Description of Artificial Sequence: Synthetic peptide
GMADLKCPS

SEQ ID NO: 4816 - protein, 9 aa, Artificial Sequence
  Description of Artificial Sequence: Synthetic peptide
GMVEAECMD

SEQ ID NO: 4817 - protein, 9 aa, Artificial Sequence
  Description of Artificial Sequence: Synthetic peptide
GQICILCSE

SEQ ID NO: 4818 - protein, 9 aa, Artificial Sequence
  Description of Artificial Sequence: Synthetic peptide
GQYFKECYD

SEQ ID NO: 4819 - protein, 9 aa, Artificial Sequence
  Description of Artificial Sequence: Synthetic peptide
GVNILTCEC

SEQ ID NO: 4820 - protein, 9 aa, Artificial Sequence
  Description of Artificial Sequence: Synthetic peptide
GWKYEQCTD

SEQ ID NO: 4821 - protein, 9 aa, Artificial Sequence
  Description of Artificial Sequence: Synthetic peptide
GWTPQLCSS

SEQ ID NO: 4822 - protein, 9 aa, Artificial Sequence
  Description of Artificial Sequence: Synthetic peptide
HCSSMLCQS

SEQ ID NO: 4823 - protein, 9 aa, Artificial Sequence
  Description of Artificial Sequence: Synthetic peptide
HNIPFYCMH

SEQ ID NO: 4824 - protein, 9 aa, Artificial Sequence
  Description of Artificial Sequence: Synthetic peptide
HRLMYDCHK

SEQ ID NO: 4825 - protein, 9 aa, Artificial Sequence
  Description of Artificial Sequence: Synthetic peptide
HSCPLACMN

SEQ ID NO: 4826 - protein, 9 aa, Artificial Sequence
  Description of Artificial Sequence: Synthetic peptide
HTIGYQCHD

SEQ ID NO: 4827 - protein, 9 aa, Artificial Sequence
  Description of Artificial Sequence: Synthetic peptide
HVAEYCCKH

SEQ ID NO: 4828 - protein, 9 aa, Artificial Sequence
  Description of Artificial Sequence: Synthetic peptide
HYDTHQCWF

SEQ ID NO: 4829 - protein, 9 aa, Artificial Sequence
  Description of Artificial Sequence: Synthetic peptide
IEWDHLCSH

SEQ ID NO: 4830 - protein, 9 aa, Artificial Sequence
  Description of Artificial Sequence: Synthetic peptide
IHHGSICCT

SEQ ID NO: 4831 - protein, 9 aa, Artificial Sequence
  Description of Artificial Sequence: Synthetic peptide
ITETRACAA

SEQ ID NO: 4832 - protein, 9 aa, Artificial Sequence
  Description of Artificial Sequence: Synthetic peptide
KEEMMQCEE

SEQ ID NO: 4833 - protein, 9 aa, Artificial Sequence
  Description of Artificial Sequence: Synthetic peptide
KGEPENCST

SEQ ID NO: 4834 - protein, 9 aa, Artificial Sequence
  Description of Artificial Sequence: Synthetic peptide
KQDMARCWW

SEQ ID NO: 4835 - protein, 9 aa, Artificial Sequence
  Description of Artificial Sequence: Synthetic peptide
KTDSINCQQ

SEQ ID NO: 4836 - protein, 9 aa, Artificial Sequence
  Description of Artificial Sequence: Synthetic peptide
LFEPINCYH

SEQ ID NO: 4837 - protein, 9 aa, Artificial Sequence
  Description of Artificial Sequence: Synthetic peptide
LSEVCLCSE

SEQ ID NO: 4838 - protein, 9 aa, Artificial Sequence
  Description of Artificial Sequence: Synthetic peptide
MCDANHCNS

SEQ ID NO: 4839 - protein, 9 aa, Artificial Sequence
  Description of Artificial Sequence: Synthetic peptide
MKGHNDCIS

SEQ ID NO: 4840 - protein, 9 aa, Artificial Sequence
  Description of Artificial Sequence: Synthetic peptide
MMGVRNCHM

SEQ ID NO: 4841 - protein, 9 aa, Artificial Sequence
  Description of Artificial Sequence: Synthetic peptide
MSTRCHCRY

SEQ ID NO: 4842 - protein, 9 aa, Artificial Sequence
  Description of Artificial Sequence: Synthetic peptide
MTYKADCPK

SEQ ID NO: 4843 - protein, 9 aa, Artificial Sequence
  Description of Artificial Sequence: Synthetic peptide
NDDTMHCAY

SEQ ID NO: 4844 - protein, 9 aa, Artificial Sequence
  Description of Artificial Sequence: Synthetic peptide
NHTHITCTE

SEQ ID NO: 4845 - protein, 9 aa, Artificial Sequence
  Description of Artificial Sequence: Synthetic peptide
NMMIMHCHT

SEQ ID NO: 4846 - protein, 9 aa, Artificial Sequence
  Description of Artificial Sequence: Synthetic peptide
NNTTTRCLM

SEQ ID NO: 4847 - protein, 9 aa, Artificial Sequence
  Description of Artificial Sequence: Synthetic peptide
NPLMQCCYL

SEQ ID NO: 4848 - protein, 9 aa, Artificial Sequence
  Description of Artificial Sequence: Synthetic peptide
NRADMICAK

SEQ ID NO: 4849 - protein, 9 aa, Artificial Sequence
  Description of Artificial Sequence: Synthetic peptide
NSAPSMCST

SEQ ID NO: 4850 - protein, 9 aa, Artificial Sequence
  Description of Artificial Sequence: Synthetic peptide
NTEPNNCWC

SEQ ID NO: 4851 - protein, 9 aa, Artificial Sequence
  Description of Artificial Sequence: Synthetic peptide
NTVYDNCGE

SEQ ID NO: 4852 - protein, 9 aa, Artificial Sequence
  Description of Artificial Sequence: Synthetic peptide
NVKHCHCEI

SEQ ID NO: 4853 - protein, 9 aa, Artificial Sequence
  Description of Artificial Sequence: Synthetic peptide
NWTYTFCQQ

SEQ ID NO: 4854 - protein, 9 aa, Artificial Sequence
  Description of Artificial Sequence: Synthetic peptide
PFPMEQCWQ

SEQ ID NO: 4855 - protein, 9 aa, Artificial Sequence
  Description of Artificial Sequence: Synthetic peptide
QCKWGDCAC

SEQ ID NO: 4856 - protein, 9 aa, Artificial Sequence
  Description of Artificial Sequence: Synthetic peptide
QVHRPECRH

SEQ ID NO: 4857 - protein, 9 aa, Artificial Sequence
  Description of Artificial Sequence: Synthetic peptide
RFWLQCCTE

SEQ ID NO: 4858 - protein, 9 aa, Artificial Sequence
  Description of Artificial Sequence: Synthetic peptide
SFENSICTK

SEQ ID NO: 4859 - protein, 9 aa, Artificial Sequence
  Description of Artificial Sequence: Synthetic peptide
SFYERACFS

SEQ ID NO: 4860 - protein, 9 aa, Artificial Sequence
  Description of Artificial Sequence: Synthetic peptide
SGFLTVCDR

SEQ ID NO: 4861 - protein, 9 aa, Artificial Sequence
  Description of Artificial Sequence: Synthetic peptide
SHCMLNCWA

SEQ ID NO: 4862 - protein, 9 aa, Artificial Sequence
  Description of Artificial Sequence: Synthetic peptide
SKILFDCTS

SEQ ID NO: 4863 - protein, 9 aa, Artificial Sequence
  Description of Artificial Sequence: Synthetic peptide
SPLITNCEA

SEQ ID NO: 4864 - protein, 9 aa, Artificial Sequence
  Description of Artificial Sequence: Synthetic peptide
SQVRTVCGF

SEQ ID NO: 4865 - protein, 9 aa, Artificial Sequence
  Description of Artificial Sequence: Synthetic peptide
SRNPMMCHP

SEQ ID NO: 4866 - protein, 9 aa, Artificial Sequence
  Description of Artificial Sequence: Synthetic peptide
STKNDICEG

SEQ ID NO: 4867 - protein, 9 aa, Artificial Sequence
  Description of Artificial Sequence: Synthetic peptide
STLPSKCGM

SEQ ID NO: 4868 - protein, 9 aa, Artificial Sequence
  Description of Artificial Sequence: Synthetic peptide
STMGTKCSM

SEQ ID NO: 4869 - protein, 9 aa, Artificial Sequence
  Description of Artificial Sequence: Synthetic peptide
TDREIHCMN

SEQ ID NO: 4870 - protein, 9 aa, Artificial Sequence
  Description of Artificial Sequence: Synthetic peptide
TFFPGHCYQ

SEQ ID NO: 4871 - protein, 9 aa, Artificial Sequence
  Description of Artificial Sequence: Synthetic peptide
TLIEKLCED

SEQ ID NO: 4872 - protein, 9 aa, Artificial Sequence
  Description of Artificial Sequence: Synthetic peptide
TPMRCYCFG

SEQ ID NO: 4873 - protein, 9 aa, Artificial Sequence
  Description of Artificial Sequence: Synthetic peptide
TTDTATCKS

SEQ ID NO: 4874 - protein, 9 aa, Artificial Sequence
  Description of Artificial Sequence: Synthetic peptide
TTHKMTCCP

SEQ ID NO: 4875 - protein, 9 aa, Artificial Sequence
  Description of Artificial Sequence: Synthetic peptide
TTYKQECTT

SEQ ID NO: 4876 - protein, 9 aa, Artificial Sequence
  Description of Artificial Sequence: Synthetic peptide
VDEWYVCMW

SEQ ID NO: 4877 - protein, 9 aa, Artificial Sequence
  Description of Artificial Sequence: Synthetic peptide
VDRHGGCQF

SEQ ID NO: 4878 - protein, 9 aa, Artificial Sequence
  Description of Artificial Sequence: Synthetic peptide
VFSKFVCQL

SEQ ID NO: 4879 - protein, 9 aa, Artificial Sequence
  Description of Artificial Sequence: Synthetic peptide
VGSLYNCSG

SEQ ID NO: 4880 - protein, 9 aa, Artificial Sequence
  Description of Artificial Sequence: Synthetic peptide
VNTLRHCQS

SEQ ID NO: 4881 - protein, 9 aa, Artificial Sequence
  Description of Artificial Sequence: Synthetic peptide
VPTNLNCCQ

SEQ ID NO: 4882 - protein, 9 aa, Artificial Sequence
  Description of Artificial Sequence: Synthetic peptide
VREHYKCGW

SEQ ID NO: 4883 - protein, 9 aa, Artificial Sequence
  Description of Artificial Sequence: Synthetic peptide
YENAMICEM

SEQ ID NO: 4884 - protein, 9 aa, Artificial Sequence
  Description of Artificial Sequence: Synthetic peptide
YTENKECCP

SEQ ID NO: 4885 - protein, 9 aa, Artificial Sequence
  Description of Artificial Sequence: Synthetic peptide
AKNYFWCKP

SEQ ID NO: 4886 - protein, 9 aa, Artificial Sequence
  Description of Artificial Sequence: Synthetic peptide
CISILGCAH

SEQ ID NO: 4887 - protein, 9 aa, Artificial Sequence
  Description of Artificial Sequence: Synthetic peptide
FTEEGACGM

SEQ ID NO: 4888 - protein, 9 aa, Artificial Sequence
  Description of Artificial Sequence: Synthetic peptide
GGMDLICHG

SEQ ID NO: 4889 - protein, 9 aa, Artificial Sequence
  Description of Artificial Sequence: Synthetic peptide
HWVMQMCIG

SEQ ID NO: 4890 - protein, 9 aa, Artificial Sequence
  Description of Artificial Sequence: Synthetic peptide
IMEPLVCDD

SEQ ID NO: 4891 - protein, 9 aa, Artificial Sequence
  Description of Artificial Sequence: Synthetic peptide
KGCMDWCDS

SEQ ID NO: 4892 - protein, 9 aa, Artificial Sequence
  Description of Artificial Sequence: Synthetic peptide
MKYDRPCCT

SEQ ID NO: 4893 - protein, 9 aa, Artificial Sequence
  Description of Artificial Sequence: Synthetic peptide
NNDHFVCYL

SEQ ID NO: 4894 - protein, 9 aa, Artificial Sequence
  Description of Artificial Sequence: Synthetic peptide
NTNMRHCGI

SEQ ID NO: 4895 - protein, 9 aa, Artificial Sequence
  Description of Artificial Sequence: Synthetic peptide
RSIPGGCVA

SEQ ID NO: 4896 - protein, 9 aa, Artificial Sequence
  Description of Artificial Sequence: Synthetic peptide
SFYSHICRI

SEQ ID NO: 4897 - protein, 9 aa, Artificial Sequence
  Description of Artificial Sequence: Synthetic peptide
TCHWIQCFN

SEQ ID NO: 4898 - protein, 9 aa, Artificial Sequence
  Description of Artificial Sequence: Synthetic peptide
TGEAQDCNP

SEQ ID NO: 4899 - protein, 9 aa, Artificial Sequence
  Description of Artificial Sequence: Synthetic peptide
TVPMDHCWA

SEQ ID NO: 4900 - protein, 9 aa, Artificial Sequence
  Description of Artificial Sequence: Synthetic peptide
VMKIKRCEG

SEQ ID NO: 4901 - protein, 9 aa, Artificial Sequence
  Description of Artificial Sequence: Synthetic peptide
VNALFDCCY

SEQ ID NO: 4902 - protein, 9 aa, Artificial Sequence
  Description of Artificial Sequence: Synthetic peptide
VTMNFHCGC

SEQ ID NO: 4903 - protein, 9 aa, Artificial Sequence
  Description of Artificial Sequence: Synthetic peptide
VNDYDQCCM

SEQ ID NO: 4904 - protein, 9 aa, Artificial Sequence
  Description of Artificial Sequence: Synthetic peptide
DYAENWCIE

SEQ ID NO: 4905 - protein, 9 aa, Artificial Sequence
  Description of Artificial Sequence: Synthetic peptide
AWRPPNCEL

SEQ ID NO: 4906 - protein, 9 aa, Artificial Sequence
  Description of Artificial Sequence: Synthetic peptide
NPIKFQCAH

SEQ ID NO: 4907 - protein, 9 aa, Artificial Sequence
  Description of Artificial Sequence: Synthetic peptide
VYANENCAP

SEQ ID NO: 4908 - protein, 9 aa, Artificial Sequence
  Description of Artificial Sequence: Synthetic peptide
PHEDCECLR

SEQ ID NO: 4909 - protein, 9 aa, Artificial Sequence
  Description of Artificial Sequence: Synthetic peptide
TSVMWACPG

SEQ ID NO: 4910 - protein, 9 aa, Artificial Sequence
  Description of Artificial Sequence: Synthetic peptide
GICGTRSMK

SEQ ID NO: 4911 - protein, 9 aa, Artificial Sequence
  Description of Artificial Sequence: Synthetic peptide
GIMLSQDML

SEQ ID NO: 4912 - protein, 9 aa, Artificial Sequence
  Description of Artificial Sequence: Synthetic peptide
GIVADRSME

SEQ ID NO: 4913 - protein, 9 aa, Artificial Sequence
  Description of Artificial Sequence: Synthetic peptide
GLGYGHHMM

SEQ ID NO: 4914 - protein, 9 aa, Artificial Sequence
  Description of Artificial Sequence: Synthetic peptide
GMVFTNYMR

SEQ ID NO: 4915 - protein, 9 aa, Artificial Sequence
  Description of Artificial Sequence: Synthetic peptide
GSELGGVMG

SEQ ID NO: 4916 - protein, 9 aa, Artificial Sequence
  Description of Artificial Sequence: Synthetic peptide
GVLPSYMMM

SEQ ID NO: 4917 - protein, 9 aa, Artificial Sequence
  Description of Artificial Sequence: Synthetic peptide
HSPPCQIMP

SEQ ID NO: 4918 - protein, 9 aa, Artificial Sequence
  Description of Artificial Sequence: Synthetic peptide
HWTTEEQMM

SEQ ID NO: 4919 - protein, 9 aa, Artificial Sequence
  Description of Artificial Sequence: Synthetic peptide
IMCTKARMD

SEQ ID NO: 4920 - protein, 9 aa, Artificial Sequence
  Description of Artificial Sequence: Synthetic peptide
IMIFEQMMH

SEQ ID NO: 4921 - protein, 9 aa, Artificial Sequence
  Description of Artificial Sequence: Synthetic peptide
IQGCQMGME

SEQ ID NO: 4922 - protein, 9 aa, Artificial Sequence
  Description of Artificial Sequence: Synthetic peptide
ISHNNAHMQ

SEQ ID NO: 4923 - protein, 9 aa, Artificial Sequence
  Description of Artificial Sequence: Synthetic peptide
ITTPYGHMY

SEQ ID NO: 4924 - protein, 9 aa, Artificial Sequence
  Description of Artificial Sequence: Synthetic peptide
KDLRSMEMC

SEQ ID NO: 4925 - protein, 9 aa, Artificial Sequence
  Description of Artificial Sequence: Synthetic peptide
KFMGYMVMP

SEQ ID NO: 4926 - protein, 9 aa, Artificial Sequence
  Description of Artificial Sequence: Synthetic peptide
KFMGYTVMP

SEQ ID NO: 4927 - protein, 9 aa, Artificial Sequence
  Description of Artificial Sequence: Synthetic peptide
KHWFDPGMW

SEQ ID NO: 4928 - protein, 9 aa, Artificial Sequence
  Description of Artificial Sequence: Synthetic peptide
KIMEPTFMC

SEQ ID NO: 4929 - protein, 9 aa, Artificial Sequence
  Description of Artificial Sequence: Synthetic peptide
LCGLNTKMY

SEQ ID NO: 4930 - protein, 9 aa, Artificial Sequence
  Description of Artificial Sequence: Synthetic peptide
LFHPDMMMP

SEQ ID NO: 4931 - protein, 9 aa, Artificial Sequence
  Description of Artificial Sequence: Synthetic peptide
LGDDKYIMS

SEQ ID NO: 4932 - protein, 9 aa, Artificial Sequence
  Description of Artificial Sequence: Synthetic peptide
LNANMKEMF

SEQ ID NO: 4933 - protein, 9 aa, Artificial Sequence
  Description of Artificial Sequence: Synthetic peptide
LQTSTINMQ

SEQ ID NO: 4934 - protein, 9 aa, Artificial Sequence
  Description of Artificial Sequence: Synthetic peptide
LSFDFPTMC

SEQ ID NO: 4935 - protein, 9 aa, Artificial Sequence
  Description of Artificial Sequence: Synthetic peptide
MCALNPGMP

SEQ ID NO: 4936 - protein, 9 aa, Artificial Sequence
  Description of Artificial Sequence: Synthetic peptide
MCFMQNDMR

SEQ ID NO: 4937 - protein, 9 aa, Artificial Sequence
  Description of Artificial Sequence: Synthetic peptide
MDWSFGKMG

SEQ ID NO: 4938 - protein, 9 aa, Artificial Sequence
  Description of Artificial Sequence: Synthetic peptide
MHDGGMEMP

SEQ ID NO: 4939 - protein, 9 aa, Artificial Sequence
  Description of Artificial Sequence: Synthetic peptide
MILGEMSMY

SEQ ID NO: 4940 - protein, 9 aa, Artificial Sequence
  Description of Artificial Sequence: Synthetic peptide
MNLNKIMMY

SEQ ID NO: 4941 - protein, 9 aa, Artificial Sequence
  Description of Artificial Sequence: Synthetic peptide
MPYCEHWMI

SEQ ID NO: 4942 - protein, 9 aa, Artificial Sequence
  Description of Artificial Sequence: Synthetic peptide
MSIPFCWMQ

SEQ ID NO: 4943 - protein, 9 aa, Artificial Sequence
  Description of Artificial Sequence: Synthetic peptide
MVKPCGSMF

SEQ ID NO: 4944 - protein, 9 aa, Artificial Sequence
  Description of Artificial Sequence: Synthetic peptide
NFHRWDRMT

SEQ ID NO: 4945 - protein, 9 aa, Artificial Sequence
  Description of Artificial Sequence: Synthetic peptide
NIEWFKTMG

SEQ ID NO: 4946 - protein, 9 aa, Artificial Sequence
  Description of Artificial Sequence: Synthetic peptide
NKEDNHMMM

SEQ ID NO: 4947 - protein, 9 aa, Artificial Sequence
  Description of Artificial Sequence: Synthetic peptide
NKNEMAMMG

SEQ ID NO: 4948 - protein, 9 aa, Artificial Sequence
  Description of Artificial Sequence: Synthetic peptide
NNCHYNIMA

SEQ ID NO: 4949 - protein, 9 aa, Artificial Sequence
  Description of Artificial Sequence: Synthetic peptide
NQFPATEMQ

SEQ ID NO: 4950 - protein, 9 aa, Artificial Sequence
  Description of Artificial Sequence: Synthetic peptide
NTFLCQKMA

SEQ ID NO: 4951 - protein, 9 aa, Artificial Sequence
  Description of Artificial Sequence: Synthetic peptide
NTRFNVDME

SEQ ID NO: 4952 - protein, 9 aa, Artificial Sequence
  Description of Artificial Sequence: Synthetic peptide
PLTLADKMQ

SEQ ID NO: 4953 - protein, 9 aa, Artificial Sequence
  Description of Artificial Sequence: Synthetic peptide
PWYWPFEMY

SEQ ID NO: 4954 - protein, 9 aa, Artificial Sequence
  Description of Artificial Sequence: Synthetic peptide
QGNWTMLMQ

SEQ ID NO: 4955 - protein, 9 aa, Artificial Sequence
  Description of Artificial Sequence: Synthetic peptide
QKECYPNMV

SEQ ID NO: 4956 - protein, 9 aa, Artificial Sequence
  Description of Artificial Sequence: Synthetic peptide
QSGVDFAMA

SEQ ID NO: 4957 - protein, 9 aa, Artificial Sequence
  Description of Artificial Sequence: Synthetic peptide
QSLREENMQ

SEQ ID NO: 4958 - protein, 9 aa, Artificial Sequence
  Description of Artificial Sequence: Synthetic peptide
QVLKGEEMP

SEQ ID NO: 4959 - protein, 9 aa, Artificial Sequence
  Description of Artificial Sequence: Synthetic peptide
RHDHMMNMA

SEQ ID NO: 4960 - protein, 9 aa, Artificial Sequence
  Description of Artificial Sequence: Synthetic peptide
RSVVNEKMF

SEQ ID NO: 4961 - protein, 9 aa, Artificial Sequence
  Description of Artificial Sequence: Synthetic peptide
RVCNNESMF

SEQ ID NO: 4962 - protein, 9 aa, Artificial Sequence
  Description of Artificial Sequence: Synthetic peptide
SCVVTDNMR

SEQ ID NO: 4963 - protein, 9 aa, Artificial Sequence
  Description of Artificial Sequence: Synthetic peptide
SDHVLHEMC

SEQ ID NO: 4964 - protein, 9 aa, Artificial Sequence
  Description of Artificial Sequence: Synthetic peptide
SEREMRHMP

SEQ ID NO: 4965 - protein, 9 aa, Artificial Sequence
  Description of Artificial Sequence: Synthetic peptide
SFASKIAME

SEQ ID NO: 4966 - protein, 9 aa, Artificial Sequence
  Description of Artificial Sequence: Synthetic peptide
SLDHMPMMG

SEQ ID NO: 4967 - protein, 9 aa, Artificial Sequence
  Description of Artificial Sequence: Synthetic peptide
SLTFFQYMD

SEQ ID NO: 4968 - protein, 9 aa, Artificial Sequence
  Description of Artificial Sequence: Synthetic peptide
SPSSHCVMI

SEQ ID NO: 4969 - protein, 9 aa, Artificial Sequence
  Description of Artificial Sequence: Synthetic peptide
STSPYEHME

SEQ ID NO: 4970 - protein, 9 aa, Artificial Sequence
  Description of Artificial Sequence: Synthetic peptide
SVGTRINMA

SEQ ID NO: 4971 - protein, 9 aa, Artificial Sequence
  Description of Artificial Sequence: Synthetic peptide
THSSLASMV

SEQ ID NO: 4972 - protein, 9 aa, Artificial Sequence
  Description of Artificial Sequence: Synthetic peptide
TLCSQNWMM

SEQ ID NO: 4973 - protein, 9 aa, Artificial Sequence
  Description of Artificial Sequence: Synthetic peptide
TNHIQNEMD

SEQ ID NO: 4974 - protein, 9 aa, Artificial Sequence
  Description of Artificial Sequence: Synthetic peptide
TNNEDTQMH

SEQ ID NO: 4975 - protein, 9 aa, Artificial Sequence
  Description of Artificial Sequence: Synthetic peptide
TRHYNCTML

SEQ ID NO: 4976 - protein, 9 aa, Artificial Sequence
  Description of Artificial Sequence: Synthetic peptide
TVVTKGTMP

SEQ ID NO: 4977 - protein, 9 aa, Artificial Sequence
  Description of Artificial Sequence: Synthetic peptide
TWIEMDYME

SEQ ID NO: 4978 - protein, 9 aa, Artificial Sequence
  Description of Artificial Sequence: Synthetic peptide
TYPKRMNMM

SEQ ID NO: 4979 - protein, 9 aa, Artificial Sequence
  Description of Artificial Sequence: Synthetic peptide
VCDPWFAMP

SEQ ID NO: 4980 - protein, 9 aa, Artificial Sequence
  Description of Artificial Sequence: Synthetic peptide
VDAPQPNMP

SEQ ID NO: 4981 - protein, 9 aa, Artificial Sequence
  Description of Artificial Sequence: Synthetic peptide
VMYMRDQMW

SEQ ID NO: 4982 - protein, 9 aa, Artificial Sequence
  Description of Artificial Sequence: Synthetic peptide
VPKWGTGMF

SEQ ID NO: 4983 - protein, 9 aa, Artificial Sequence
  Description of Artificial Sequence: Synthetic peptide
VSAYEQNMK

SEQ ID NO: 4984 - protein, 9 aa, Artificial Sequence
  Description of Artificial Sequence: Synthetic peptide
VTWHPLSMH

SEQ ID NO: 4985 - protein, 9 aa, Artificial Sequence
  Description of Artificial Sequence: Synthetic peptide
VVEPQMRMC

SEQ ID NO: 4986 - protein, 9 aa, Artificial Sequence
  Description of Artificial Sequence: Synthetic peptide
WITLNQKMV

SEQ ID NO: 4987 - protein, 9 aa, Artificial Sequence
  Description of Artificial Sequence: Synthetic peptide
WWCHPMHMM

SEQ ID NO: 4988 - protein, 9 aa, Artificial Sequence
  Description of Artificial Sequence: Synthetic peptide
YDKTYMAMG

SEQ ID NO: 4989 - protein, 9 aa, Artificial Sequence
  Description of Artificial Sequence: Synthetic peptide
YQFNWGNMT

SEQ ID NO: 4990 - protein, 9 aa, Artificial Sequence
  Description of Artificial Sequence: Synthetic peptide
YTKETGGMV

SEQ ID NO: 4991 - protein, 9 aa, Artificial Sequence
  Description of Artificial Sequence: Synthetic peptide
DKIPINGMS

SEQ ID NO: 4992 - protein, 9 aa, Artificial Sequence
  Description of Artificial Sequence: Synthetic peptide
DVEKTMQMN

SEQ ID NO: 4993 - protein, 9 aa, Artificial Sequence
  Description of Artificial Sequence: Synthetic peptide
FHFIRHEMV

SEQ ID NO: 4994 - protein, 9 aa, Artificial Sequence
  Description of Artificial Sequence: Synthetic peptide
FQMAMCSMG

SEQ ID NO: 4995 - protein, 9 aa, Artificial Sequence
  Description of Artificial Sequence: Synthetic peptide
GRFEEGAMY

SEQ ID NO: 4996 - protein, 9 aa, Artificial Sequence
  Description of Artificial Sequence: Synthetic peptide
IGVMLNAMQ

SEQ ID NO: 4997 - protein, 9 aa, Artificial Sequence
  Description of Artificial Sequence: Synthetic peptide
KDRCQYEMA

SEQ ID NO: 4998 - protein, 9 aa, Artificial Sequence
  Description of Artificial Sequence: Synthetic peptide
MCGFETTMP

SEQ ID NO: 4999 - protein, 9 aa, Artificial Sequence
  Description of Artificial Sequence: Synthetic peptide
MHDDYRGMQ

SEQ ID NO: 5000 - protein, 9 aa, Artificial Sequence
  Description of Artificial Sequence: Synthetic peptide
MSRRKEAMP

SEQ ID NO: 5001 - protein, 9 aa, Artificial Sequence
  Description of Artificial Sequence: Synthetic peptide
QRIWTTYMH

SEQ ID NO: 5002 - protein, 9 aa, Artificial Sequence
  Description of Artificial Sequence: Synthetic peptide
RRFEEGAMY

SEQ ID NO: 5003 - protein, 9 aa, Artificial Sequence
  Description of Artificial Sequence: Synthetic peptide
SELFRANMD

SEQ ID NO: 5004 - protein, 9 aa, Artificial Sequence
  Description of Artificial Sequence: Synthetic peptide
VMCNMMQMT

SEQ ID NO: 5005 - protein, 9 aa, Artificial Sequence
  Description of Artificial Sequence: Synthetic peptide
WNAPKVMMA

SEQ ID NO: 5006 - protein, 9 aa, Artificial Sequence
  Description of Artificial Sequence: Synthetic peptide
DKIPINGMP

SEQ ID NO: 5007 - protein, 9 aa, Artificial Sequence
  Description of Artificial Sequence: Synthetic peptide
SFHPSWWMY

SEQ ID NO: 5008 - protein, 9 aa, Artificial Sequence
  Description of Artificial Sequence: Synthetic peptide
NCFDSEDMG

SEQ ID NO: 5009 - protein, 9 aa, Artificial Sequence
  Description of Artificial Sequence: Synthetic peptide
VTTNELGMH

SEQ ID NO: 5010 - protein, 9 aa, Artificial Sequence
  Description of Artificial Sequence: Synthetic peptide
TTFPQVIMN

SEQ ID NO: 5011 - protein, 9 aa, Artificial Sequence
  Description of Artificial Sequence: Synthetic peptide
DENWNHNMF

SEQ ID NO: 5012 - protein, 9 aa, Artificial Sequence
  Description of Artificial Sequence: Synthetic peptide
TSGEMLRML

SEQ ID NO: 5013 - protein, 9 aa, Artificial Sequence
  Description of Artificial Sequence: Synthetic peptide
LIEVLNHMN

SEQ ID NO: 5014 - protein, 9 aa, Artificial Sequence
  Description of Artificial Sequence: Synthetic peptide
LFDRCNNMW

SEQ ID NO: 5015 - protein, 9 aa, Artificial Sequence
  Description of Artificial Sequence: Synthetic peptide
KFHSKERMN

SEQ ID NO: 5016 - protein, 9 aa, Artificial Sequence
  Description of Artificial Sequence: Synthetic peptide
YMNSLWHMR

SEQ ID NO: 5017 - protein, 9 aa, Artificial Sequence
  Description of Artificial Sequence: Synthetic peptide
GIVTCAGMC

SEQ ID NO: 5018 - protein, 9 aa, Artificial Sequence
  Description of Artificial Sequence: Synthetic peptide
GIHICKACP

SEQ ID NO: 5019 - protein, 9 aa, Artificial Sequence
  Description of Artificial Sequence: Synthetic peptide
GNWSKVSKP

SEQ ID NO: 5020 - protein, 9 aa, Artificial Sequence
  Description of Artificial Sequence: Synthetic peptide
GWENLFMTP

SEQ ID NO: 5021 - protein, 9 aa, Artificial Sequence
  Description of Artificial Sequence: Synthetic peptide
HHPTLFHFP

SEQ ID NO: 5022 - protein, 9 aa, Artificial Sequence
  Description of Artificial Sequence: Synthetic peptide
HPDNSQMSP

SEQ ID NO: 5023 - protein, 9 aa, Artificial Sequence
  Description of Artificial Sequence: Synthetic peptide
HQTPSELAP

SEQ ID NO: 5024 - protein, 9 aa, Artificial Sequence
  Description of Artificial Sequence: Synthetic peptide
HSAAPTEGP

SEQ ID NO: 5025 - protein, 9 aa, Artificial Sequence
  Description of Artificial Sequence: Synthetic peptide
HVFSIFHVP

SEQ ID NO: 5026 - protein, 9 aa, Artificial Sequence
  Description of Artificial Sequence: Synthetic peptide
IMRLDARCP

SEQ ID NO: 5027 - protein, 9 aa, Artificial Sequence
  Description of Artificial Sequence: Synthetic peptide
INTGFMNKP

SEQ ID NO: 5028 - protein, 9 aa, Artificial Sequence
  Description of Artificial Sequence: Synthetic peptide
ISHPSVGEP

SEQ ID NO: 5029 - protein, 9 aa, Artificial Sequence
  Description of Artificial Sequence: Synthetic peptide
ITMPRMDNP

SEQ ID NO: 5030 - protein, 9 aa, Artificial Sequence
  Description of Artificial Sequence: Synthetic peptide
KDVEFFHGP

SEQ ID NO: 5031 - protein, 9 aa, Artificial Sequence
  Description of Artificial Sequence: Synthetic peptide
KSEENYNHP

SEQ ID NO: 5032 - protein, 9 aa, Artificial Sequence
  Description of Artificial Sequence: Synthetic peptide
KVDDHAFEP

SEQ ID NO: 5033 - protein, 9 aa, Artificial Sequence
  Description of Artificial Sequence: Synthetic peptide
KVDNEFYVP

SEQ ID NO: 5034 - protein, 9 aa, Artificial Sequence
  Description of Artificial Sequence: Synthetic peptide
KVWPCNPDP

SEQ ID NO: 5035 - protein, 9 aa, Artificial Sequence
  Description of Artificial Sequence: Synthetic peptide
LCAIWTLCP

SEQ ID NO: 5036 - protein, 9 aa, Artificial Sequence
  Description of Artificial Sequence: Synthetic peptide
LFRFDMSPP

SEQ ID NO: 5037 - protein, 9 aa, Artificial Sequence
  Description of Artificial Sequence: Synthetic peptide
LHCSPEIGP

SEQ ID NO: 5038 - protein, 9 aa, Artificial Sequence
  Description of Artificial Sequence: Synthetic peptide
LHESLDDFP

SEQ ID NO: 5039 - protein, 9 aa, Artificial Sequence
  Description of Artificial Sequence: Synthetic peptide
LPCHAIVSP

SEQ ID NO: 5040 - protein, 9 aa, Artificial Sequence
  Description of Artificial Sequence: Synthetic peptide
LVTLNHNKP

SEQ ID NO: 5041 - protein, 9 aa, Artificial Sequence
  Description of Artificial Sequence: Synthetic peptide
LYGDAQGGP

SEQ ID NO: 5042 - protein, 9 aa, Artificial Sequence
  Description of Artificial Sequence: Synthetic peptide
MGGHMHEYP

SEQ ID NO: 5043 - protein, 9 aa, Artificial Sequence
  Description of Artificial Sequence: Synthetic peptide
MMVCGDRSP

SEQ ID NO: 5044 - protein, 9 aa, Artificial Sequence
  Description of Artificial Sequence: Synthetic peptide
MPNMWQEWP

SEQ ID NO: 5045 - protein, 9 aa, Artificial Sequence
  Description of Artificial Sequence: Synthetic peptide
MQEELVHCP

SEQ ID NO: 5046 - protein, 9 aa, Artificial Sequence
  Description of Artificial Sequence: Synthetic peptide
MRGIEVEQP

SEQ ID NO: 5047 - protein, 9 aa, Artificial Sequence
  Description of Artificial Sequence: Synthetic peptide
MYIRREGNP

SEQ ID NO: 5048 - protein, 9 aa, Artificial Sequence
  Description of Artificial Sequence: Synthetic peptide
NCDERPHWP

SEQ ID NO: 5049 - protein, 9 aa, Artificial Sequence
  Description of Artificial Sequence: Synthetic peptide
NEGPIMYSP

SEQ ID NO: 5050 - protein, 9 aa, Artificial Sequence
  Description of Artificial Sequence: Synthetic peptide
NEWNPLPKP

SEQ ID NO: 5051 - protein, 9 aa, Artificial Sequence
  Description of Artificial Sequence: Synthetic peptide
NILCKHKVP

SEQ ID NO: 5052 - protein, 9 aa, Artificial Sequence
  Description of Artificial Sequence: Synthetic peptide
NISGQLHTP

SEQ ID NO: 5053 - protein, 9 aa, Artificial Sequence
  Description of Artificial Sequence: Synthetic peptide
NMSGEYVFP

SEQ ID NO: 5054 - protein, 9 aa, Artificial Sequence
  Description of Artificial Sequence: Synthetic peptide
NQCEIIDFP

SEQ ID NO: 5055 - protein, 9 aa, Artificial Sequence
  Description of Artificial Sequence: Synthetic peptide
NSTNNGWQP

SEQ ID NO: 5056 - protein, 9 aa, Artificial Sequence
  Description of Artificial Sequence: Synthetic peptide
NSVKQNAAP

SEQ ID NO: 5057 - protein, 9 aa, Artificial Sequence
  Description of Artificial Sequence: Synthetic peptide
NTGLSDFPP

SEQ ID NO: 5058 - protein, 9 aa, Artificial Sequence
  Description of Artificial Sequence: Synthetic peptide
NVTTAWNCP

SEQ ID NO: 5059 - protein, 9 aa, Artificial Sequence
  Description of Artificial Sequence: Synthetic peptide
NWHWPPVFP

SEQ ID NO: 5060 - protein, 9 aa, Artificial Sequence
  Description of Artificial Sequence: Synthetic peptide
NYDFYGMIP

SEQ ID NO: 5061 - protein, 9 aa, Artificial Sequence
  Description of Artificial Sequence: Synthetic peptide
NYGIAYNFP

SEQ ID NO: 5062 - protein, 9 aa, Artificial Sequence
  Description of Artificial Sequence: Synthetic peptide
PLIIQQFWP

SEQ ID NO: 5063 - protein, 9 aa, Artificial Sequence
  Description of Artificial Sequence: Synthetic peptide
PSACMAGKP

SEQ ID NO: 5064 - protein, 9 aa, Artificial Sequence
  Description of Artificial Sequence: Synthetic peptide
QFEDMYKSP

SEQ ID NO: 5065 - protein, 9 aa, Artificial Sequence
  Description of Artificial Sequence: Synthetic peptide
QHANFAVQP

SEQ ID NO: 5066 - protein, 9 aa, Artificial Sequence
  Description of Artificial Sequence: Synthetic peptide
QNSPCTAFP

SEQ ID NO: 5067 - protein, 9 aa, Artificial Sequence
  Description of Artificial Sequence: Synthetic peptide
QSCLFMQIP

SEQ ID NO: 5068 - protein, 9 aa, Artificial Sequence
  Description of Artificial Sequence: Synthetic peptide
QSTWAERWP

SEQ ID NO: 5069 - protein, 9 aa, Artificial Sequence
  Description of Artificial Sequence: Synthetic peptide
QTMLYWYLP

SEQ ID NO: 5070 - protein, 9 aa, Artificial Sequence
  Description of Artificial Sequence: Synthetic peptide
QTWKHMLGP

SEQ ID NO: 5071 - protein, 9 aa, Artificial Sequence
  Description of Artificial Sequence: Synthetic peptide
RCIWKCEGP

SEQ ID NO: 5072 - protein, 9 aa, Artificial Sequence
  Description of Artificial Sequence: Synthetic peptide
REDPSALEP

SEQ ID NO: 5073 - protein, 9 aa, Artificial Sequence
  Description of Artificial Sequence: Synthetic peptide
RHDLYVWSP

SEQ ID NO: 5074 - protein, 9 aa, Artificial Sequence
  Description of Artificial Sequence: Synthetic peptide
RYDYAKYHP

SEQ ID NO: 5075 - protein, 9 aa, Artificial Sequence
  Description of Artificial Sequence: Synthetic peptide
SFCTHDHFP

SEQ ID NO: 5076 - protein, 9 aa, Artificial Sequence
  Description of Artificial Sequence: Synthetic peptide
SGVPYWAHP

SEQ ID NO: 5077 - protein, 9 aa, Artificial Sequence
  Description of Artificial Sequence: Synthetic peptide
SSIYEPIYP

SEQ ID NO: 5078 - protein, 9 aa, Artificial Sequence
  Description of Artificial Sequence: Synthetic peptide
STSCSPKWP

SEQ ID NO: 5079 - protein, 9 aa, Artificial Sequence
  Description of Artificial Sequence: Synthetic peptide
STTSQHHPP

SEQ ID NO: 5080 - protein, 9 aa, Artificial Sequence
  Description of Artificial Sequence: Synthetic peptide
SVTSQWMPP

SEQ ID NO: 5081 - protein, 9 aa, Artificial Sequence
  Description of Artificial Sequence: Synthetic peptide
SVVCQQDEP

SEQ ID NO: 5082 - protein, 9 aa, Artificial Sequence
  Description of Artificial Sequence: Synthetic peptide
TESDFAIGP

SEQ ID NO: 5083 - protein, 9 aa, Artificial Sequence
  Description of Artificial Sequence: Synthetic peptide
TMTRIVHEP

SEQ ID NO: 5084 - protein, 9 aa, Artificial Sequence
  Description of Artificial Sequence: Synthetic peptide
TNSSGIFPP

SEQ ID NO: 5085 - protein, 9 aa, Artificial Sequence
  Description of Artificial Sequence: Synthetic peptide
TSALELQKP

SEQ ID NO: 5086 - protein, 9 aa, Artificial Sequence
  Description of Artificial Sequence: Synthetic peptide
TWPRGAMHP

SEQ ID NO: 5087 - protein, 9 aa, Artificial Sequence
  Description of Artificial Sequence: Synthetic peptide
TWSSIDMWP

SEQ ID NO: 5088 - protein, 9 aa, Artificial Sequence
  Description of Artificial Sequence: Synthetic peptide
VFLVSGMLP

SEQ ID NO: 5089 - protein, 9 aa, Artificial Sequence
  Description of Artificial Sequence: Synthetic peptide
VGLTMTGVP

SEQ ID NO: 5090 - protein, 9 aa, Artificial Sequence
  Description of Artificial Sequence: Synthetic peptide
VRNIGGEWP

SEQ ID NO: 5091 - protein, 9 aa, Artificial Sequence
  Description of Artificial Sequence: Synthetic peptide
WDCTMYHFP

SEQ ID NO: 5092 - protein, 9 aa, Artificial Sequence
  Description of Artificial Sequence: Synthetic peptide
YPHTPHNCP

SEQ ID NO: 5093 - protein, 9 aa, Artificial Sequence
  Description of Artificial Sequence: Synthetic peptide
YPHTPYNCP

SEQ ID NO: 5094 - protein, 9 aa, Artificial Sequence
  Description of Artificial Sequence: Synthetic peptide
AQPNGNEHP

SEQ ID NO: 5095 - protein, 9 aa, Artificial Sequence
  Description of Artificial Sequence: Synthetic peptide
CISIIAITP

SEQ ID NO: 5096 - protein, 9 aa, Artificial Sequence
  Description of Artificial Sequence: Synthetic peptide
CISITAITP

SEQ ID NO: 5097 - protein, 9 aa, Artificial Sequence
  Description of Artificial Sequence: Synthetic peptide
CVLSWCVRP

SEQ ID NO: 5098 - protein, 9 aa, Artificial Sequence
  Description of Artificial Sequence: Synthetic peptide
DFNDSNWLP

SEQ ID NO: 5099 - protein, 9 aa, Artificial Sequence
  Description of Artificial Sequence: Synthetic peptide
DMMVSGHVP

SEQ ID NO: 5100 - protein, 9 aa, Artificial Sequence
  Description of Artificial Sequence: Synthetic peptide
DQLTWHTGP

SEQ ID NO: 5101 - protein, 9 aa, Artificial Sequence
  Description of Artificial Sequence: Synthetic peptide
DQMDEFLYP

SEQ ID NO: 5102 - protein, 9 aa, Artificial Sequence
  Description of Artificial Sequence: Synthetic peptide
GIDRPHFVP

SEQ ID NO: 5103 - protein, 9 aa, Artificial Sequence
  Description of Artificial Sequence: Synthetic peptide
HNNNHAIPP

SEQ ID NO: 5104 - protein, 9 aa, Artificial Sequence
  Description of Artificial Sequence: Synthetic peptide
LGNWHHNSP

SEQ ID NO: 5105 - protein, 9 aa, Artificial Sequence
  Description of Artificial Sequence: Synthetic peptide
LHYNNERDP

SEQ ID NO: 5106 - protein, 9 aa, Artificial Sequence
  Description of Artificial Sequence: Synthetic peptide
MSEVMDFLP

SEQ ID NO: 5107 - protein, 9 aa, Artificial Sequence
  Description of Artificial Sequence: Synthetic peptide
STAHRPWTP

SEQ ID NO: 5108 - protein, 9 aa, Artificial Sequence
  Description of Artificial Sequence: Synthetic peptide
TELVRQVAP

SEQ ID NO: 5109 - protein, 9 aa, Artificial Sequence
  Description of Artificial Sequence: Synthetic peptide
TITALMVDP

SEQ ID NO: 5110 - protein, 9 aa, Artificial Sequence
  Description of Artificial Sequence: Synthetic peptide
VKLTHRVRP

SEQ ID NO: 5111 - protein, 9 aa, Artificial Sequence
  Description of Artificial Sequence: Synthetic peptide
VQPVQLFCP

SEQ ID NO: 5112 - protein, 9 aa, Artificial Sequence
  Description of Artificial Sequence: Synthetic peptide
YTCCENHWP

SEQ ID NO: 5113 - protein, 9 aa, Artificial Sequence
  Description of Artificial Sequence: Synthetic peptide
YPNDMTFEP

SEQ ID NO: 5114 - protein, 9 aa, Artificial Sequence
  Description of Artificial Sequence: Synthetic peptide
AQPSMDYVP

SEQ ID NO: 5115 - protein, 9 aa, Artificial Sequence
  Description of Artificial Sequence: Synthetic peptide
FKVRKFWDP

SEQ ID NO: 5116 - protein, 9 aa, Artificial Sequence
  Description of Artificial Sequence: Synthetic peptide
QTEEPDDYP

SEQ ID NO: 5117 - protein, 9 aa, Artificial Sequence
  Description of Artificial Sequence: Synthetic peptide
INEGLLYPP

SEQ ID NO: 5118 - protein, 9 aa, Artificial Sequence
  Description of Artificial Sequence: Synthetic peptide
AADVVPCHH

SEQ ID NO: 5119 - protein, 9 aa, Artificial Sequence
  Description of Artificial Sequence: Synthetic peptide
ACFHVAEMF

SEQ ID NO: 5120 - protein, 9 aa, Artificial Sequence
  Description of Artificial Sequence: Synthetic peptide
AEMHMVADF

SEQ ID NO: 5121 - protein, 9 aa, Artificial Sequence
  Description of Artificial Sequence: Synthetic peptide
AESLCNELC

SEQ ID NO: 5122 - protein, 9 aa, Artificial Sequence
  Description of Artificial Sequence: Synthetic peptide
AKKSCQCWH

SEQ ID NO: 5123 - protein, 9 aa, Artificial Sequence
  Description of Artificial Sequence: Synthetic peptide
ANDYDQCCM

SEQ ID NO: 5124 - protein, 9 aa, Artificial Sequence
  Description of Artificial Sequence: Synthetic peptide
ANGHKFNEE

SEQ ID NO: 5125 - protein, 9 aa, Artificial Sequence
  Description of Artificial Sequence: Synthetic peptide
ANNEFIQPF

SEQ ID NO: 5126 - protein, 9 aa, Artificial Sequence
  Description of Artificial Sequence: Synthetic peptide
ANQCIFKTM

SEQ ID NO: 5127 - protein, 9 aa, Artificial Sequence
  Description of Artificial Sequence: Synthetic peptide
AQCLCNELC

SEQ ID NO: 5128 - protein, 9 aa, Artificial Sequence
  Description of Artificial Sequence: Synthetic peptide
AQGLCNELC

SEQ ID NO: 5129 - protein, 9 aa, Artificial Sequence
  Description of Artificial Sequence: Synthetic peptide
AQHDWYQKY

SEQ ID NO: 5130 - protein, 9 aa, Artificial Sequence
  Description of Artificial Sequence: Synthetic peptide
AQPNMDYVP

SEQ ID NO: 5131 - protein, 9 aa, Artificial Sequence
  Description of Artificial Sequence: Synthetic peptide
AQPSMDCVP

SEQ ID NO: 5132 - protein, 9 aa, Artificial Sequence
  Description of Artificial Sequence: Synthetic peptide
AQPSMDYAP

SEQ ID NO: 5133 - protein, 9 aa, Artificial Sequence
  Description of Artificial Sequence: Synthetic peptide
AQPSMDYVA

SEQ ID NO: 5134 - protein, 9 aa, Artificial Sequence
  Description of Artificial Sequence: Synthetic peptide
AQPSMEYVP

SEQ ID NO: 5135 - protein, 9 aa, Artificial Sequence
  Description of Artificial Sequence: Synthetic peptide
AQSLCNELF

SEQ ID NO: 5136 - protein, 9 aa, Artificial Sequence
  Description of Artificial Sequence: Synthetic peptide
AQSLCNELG

SEQ ID NO: 5137 - protein, 9 aa, Artificial Sequence
  Description of Artificial Sequence: Synthetic peptide
AQSLCNQLC

SEQ ID NO: 5138 - protein, 9 aa, Artificial Sequence
  Description of Artificial Sequence: Synthetic peptide
AQSLFNELC

SEQ ID NO: 5139 - protein, 9 aa, Artificial Sequence
  Description of Artificial Sequence: Synthetic peptide
AQSVCNELC

SEQ ID NO: 5140 - protein, 9 aa, Artificial Sequence
  Description of Artificial Sequence: Synthetic peptide
AQTLCNELC

SEQ ID NO: 5141 - protein, 9 aa, Artificial Sequence
  Description of Artificial Sequence: Synthetic peptide
ARAKIQDEW

SEQ ID NO: 5142 - protein, 9 aa, Artificial Sequence
  Description of Artificial Sequence: Synthetic peptide
ARALIQDEW

SEQ ID NO: 5143 - protein, 9 aa, Artificial Sequence
  Description of Artificial Sequence: Synthetic peptide
ARARIQDEW

SEQ ID NO: 5144 - protein, 9 aa, Artificial Sequence
  Description of Artificial Sequence: Synthetic peptide
ARGQIQDEW

SEQ ID NO: 5145 - protein, 9 aa, Artificial Sequence
  Description of Artificial Sequence: Synthetic peptide
ARPSMDYVP

SEQ ID NO: 5146 - protein, 9 aa, Artificial Sequence
  Description of Artificial Sequence: Synthetic peptide
ARVQIQDEW

SEQ ID NO: 5147 - protein, 9 aa, Artificial Sequence
  Description of Artificial Sequence: Synthetic peptide
AWESSSIIS

SEQ ID NO: 5148 - protein, 9 aa, Artificial Sequence
  Description of Artificial Sequence: Synthetic peptide
AYAENWCIE

SEQ ID NO: 5149 - protein, 9 aa, Artificial Sequence
  Description of Artificial Sequence: Synthetic peptide
CANHMIRTR

SEQ ID NO: 5150 - protein, 9 aa, Artificial Sequence
  Description of Artificial Sequence: Synthetic peptide
CATHMIRTK

SEQ ID NO: 5151 - protein, 9 aa, Artificial Sequence
  Description of Artificial Sequence: Synthetic peptide
CCEHKEYLN

SEQ ID NO: 5152 - protein, 9 aa, Artificial Sequence
  Description of Artificial Sequence: Synthetic peptide
CCEPKGYLN

SEQ ID NO: 5153 - protein, 9 aa, Artificial Sequence
  Description of Artificial Sequence: Synthetic peptide
CCRKDNKKS

SEQ ID NO: 5154 - protein, 9 aa, Artificial Sequence
  Description of Artificial Sequence: Synthetic peptide
CCRMANKKS

SEQ ID NO: 5155 - protein, 9 aa, Artificial Sequence
  Description of Artificial Sequence: Synthetic peptide
CCRMDDKKS

SEQ ID NO: 5156 - protein, 9 aa, Artificial Sequence
  Description of Artificial Sequence: Synthetic peptide
CCRMDHKKS

SEQ ID NO: 5157 - protein, 9 aa, Artificial Sequence
  Description of Artificial Sequence: Synthetic peptide
CCRMDIKKS

SEQ ID NO: 5158 - protein, 9 aa, Artificial Sequence
  Description of Artificial Sequence: Synthetic peptide
CCRMDNKES

SEQ ID NO: 5159 - protein, 9 aa, Artificial Sequence
  Description of Artificial Sequence: Synthetic peptide
CCRMDNKIS

SEQ ID NO: 5160 - protein, 9 aa, Artificial Sequence
  Description of Artificial Sequence: Synthetic peptide
CCRMDNKKA

SEQ ID NO: 5161 - protein, 9 aa, Artificial Sequence
  Description of Artificial Sequence: Synthetic peptide
CCRMDNKRS

SEQ ID NO: 5162 - protein, 9 aa, Artificial Sequence
  Description of Artificial Sequence: Synthetic peptide
CCRMDNQKS

SEQ ID NO: 5163 - protein, 9 aa, Artificial Sequence
  Description of Artificial Sequence: Synthetic peptide
CCRRDNKKS

SEQ ID NO: 5164 - protein, 9 aa, Artificial Sequence
  Description of Artificial Sequence: Synthetic peptide
CDAEAEFQR

SEQ ID NO: 5165 - protein, 9 aa, Artificial Sequence
  Description of Artificial Sequence: Synthetic peptide
CDAEDEFRR

SEQ ID NO: 5166 - protein, 9 aa, Artificial Sequence
  Description of Artificial Sequence: Synthetic peptide
CDAKAEFRR

SEQ ID NO: 5167 - protein, 9 aa, Artificial Sequence
  Description of Artificial Sequence: Synthetic peptide
CDAVAEFRR

SEQ ID NO: 5168 - protein, 9 aa, Artificial Sequence
  Description of Artificial Sequence: Synthetic peptide
CDDEAEFRR

SEQ ID NO: 5169 - protein, 9 aa, Artificial Sequence
  Description of Artificial Sequence: Synthetic peptide
CDGEAEFLR

SEQ ID NO: 5170 - protein, 9 aa, Artificial Sequence
  Description of Artificial Sequence: Synthetic peptide
CDGEAEFRR

SEQ ID NO: 5171 - protein, 9 aa, Artificial Sequence
  Description of Artificial Sequence: Synthetic peptide
CDGVAEFRR

SEQ ID NO: 5172 - protein, 9 aa, Artificial Sequence
  Description of Artificial Sequence: Synthetic peptide
CFKQKHNLF

SEQ ID NO: 5173 - protein, 9 aa, Artificial Sequence
  Description of Artificial Sequence: Synthetic peptide
CFLQKHNLF

SEQ ID NO: 5174 - protein, 9 aa, Artificial Sequence
  Description of Artificial Sequence: Synthetic peptide
CFQEKHNLF

SEQ ID NO: 5175 - protein, 9 aa, Artificial Sequence
  Description of Artificial Sequence: Synthetic peptide
CFQPKHNLF

SEQ ID NO: 5176 - protein, 9 aa, Artificial Sequence
  Description of Artificial Sequence: Synthetic peptide
CFQQKHNIF

SEQ ID NO: 5177 - protein, 9 aa, Artificial Sequence
  Description of Artificial Sequence: Synthetic peptide
CFQQKHNLI

SEQ ID NO: 5178 - protein, 9 aa, Artificial Sequence
  Description of Artificial Sequence: Synthetic peptide
CFQQNHNLF

SEQ ID NO: 5179 - protein, 9 aa, Artificial Sequence
  Description of Artificial Sequence: Synthetic peptide
CFQRKHNLF

SEQ ID NO: 5180 - protein, 9 aa, Artificial Sequence
  Description of Artificial Sequence: Synthetic peptide
CGYHEFMVG

SEQ ID NO: 5181 - protein, 9 aa, Artificial Sequence
  Description of Artificial Sequence: Synthetic peptide
CHCDAVECF

SEQ ID NO: 5182 - protein, 9 aa, Artificial Sequence
  Description of Artificial Sequence: Synthetic peptide
CHFDAMECF

SEQ ID NO: 5183 - protein, 9 aa, Artificial Sequence
  Description of Artificial Sequence: Synthetic peptide
CHKCIGQDN

SEQ ID NO: 5184 - protein, 9 aa, Artificial Sequence
  Description of Artificial Sequence: Synthetic peptide
CHQCIGPDN

SEQ ID NO: 5185 - protein, 9 aa, Artificial Sequence
  Description of Artificial Sequence: Synthetic peptide
CHQCIGQDS

SEQ ID NO: 5186 - protein, 9 aa, Artificial Sequence
  Description of Artificial Sequence: Synthetic peptide
CHQCIGQDT

SEQ ID NO: 5187 - protein, 9 aa, Artificial Sequence
  Description of Artificial Sequence: Synthetic peptide
CHQCVGQDN

SEQ ID NO: 5188 - protein, 9 aa, Artificial Sequence
  Description of Artificial Sequence: Synthetic peptide
CHWDAMECF

SEQ ID NO: 5189 - protein, 9 aa, Artificial Sequence
  Description of Artificial Sequence: Synthetic peptide
CIKIQLIDQ

SEQ ID NO: 5190 - protein, 9 aa, Artificial Sequence
  Description of Artificial Sequence: Synthetic peptide
CIKIQMIDK

SEQ ID NO: 5191 - protein, 9 aa, Artificial Sequence
  Description of Artificial Sequence: Synthetic peptide
CIKIRMIDQ

SEQ ID NO: 5192 - protein, 9 aa, Artificial Sequence
  Description of Artificial Sequence: Synthetic peptide
CIKVQMIDQ

SEQ ID NO: 5193 - protein, 9 aa, Artificial Sequence
  Description of Artificial Sequence: Synthetic peptide
CINITAITP

SEQ ID NO: 5194 - protein, 9 aa, Artificial Sequence
  Description of Artificial Sequence: Synthetic peptide
CISITVITP

SEQ ID NO: 5195 - protein, 9 aa, Artificial Sequence
  Description of Artificial Sequence: Synthetic peptide
CMAHIWEAH

SEQ ID NO: 5196 - protein, 9 aa, Artificial Sequence
  Description of Artificial Sequence: Synthetic peptide
CMAHIWEGD

SEQ ID NO: 5197 - protein, 9 aa, Artificial Sequence
  Description of Artificial Sequence: Synthetic peptide
CMDHIWEGH

SEQ ID NO: 5198 - protein, 9 aa, Artificial Sequence
  Description of Artificial Sequence: Synthetic peptide
CMSHIWEGH

SEQ ID NO: 5199 - protein, 9 aa, Artificial Sequence
  Description of Artificial Sequence: Synthetic peptide
CPQCIGQDN

SEQ ID NO: 5200 - protein, 9 aa, Artificial Sequence
  Description of Artificial Sequence: Synthetic peptide
CRCDAMECF

SEQ ID NO: 5201 - protein, 9 aa, Artificial Sequence
  Description of Artificial Sequence: Synthetic peptide
CWYDEFMVG

SEQ ID NO: 5202 - protein, 9 aa, Artificial Sequence
  Description of Artificial Sequence: Synthetic peptide
CWYHEFMVA

SEQ ID NO: 5203 - protein, 9 aa, Artificial Sequence
  Description of Artificial Sequence: Synthetic peptide
CWYHEFMVD

SEQ ID NO: 5204 - protein, 9 aa, Artificial Sequence
  Description of Artificial Sequence: Synthetic peptide
CWYHEFMVR

SEQ ID NO: 5205 - protein, 9 aa, Artificial Sequence
  Description of Artificial Sequence: Synthetic peptide
CWYHEFMVS

SEQ ID NO: 5206 - protein, 9 aa, Artificial Sequence
  Description of Artificial Sequence: Synthetic peptide
CWYHEFMVV

SEQ ID NO: 5207 - protein, 9 aa, Artificial Sequence
  Description of Artificial Sequence: Synthetic peptide
CWYHEFVVG

SEQ ID NO: 5208 - protein, 9 aa, Artificial Sequence
  Description of Artificial Sequence: Synthetic peptide
CWYHEHMVG

SEQ ID NO: 5209 - protein, 9 aa, Artificial Sequence
  Description of Artificial Sequence: Synthetic peptide
CWYHEVMVG

SEQ ID NO: 5210 - protein, 9 aa, Artificial Sequence
  Description of Artificial Sequence: Synthetic peptide
CWYHKFMVG

SEQ ID NO: 5211 - protein, 9 aa, Artificial Sequence
  Description of Artificial Sequence: Synthetic peptide
CWYLEFMVG

SEQ ID NO: 5212 - protein, 9 aa, Artificial Sequence
  Description of Artificial Sequence: Synthetic peptide
CWYNEFMVG

SEQ ID NO: 5213 - protein, 9 aa, Artificial Sequence
  Description of Artificial Sequence: Synthetic peptide
CWYPEFMVG

SEQ ID NO: 5214 - protein, 9 aa, Artificial Sequence
  Description of Artificial Sequence: Synthetic peptide
CWYREFMVG

SEQ ID NO: 5215 - protein, 9 aa, Artificial Sequence
  Description of Artificial Sequence: Synthetic peptide
CWYYEFMVG

SEQ ID NO: 5216 - protein, 9 aa, Artificial Sequence
  Description of Artificial Sequence: Synthetic peptide
DACDWKNDY

SEQ ID NO: 5217 - protein, 9 aa, Artificial Sequence
  Description of Artificial Sequence: Synthetic peptide
DACQEWDSE

SEQ ID NO: 5218 - protein, 9 aa, Artificial Sequence
  Description of Artificial Sequence: Synthetic peptide
DADFCARMP

SEQ ID NO: 5219 - protein, 9 aa, Artificial Sequence
  Description of Artificial Sequence: Synthetic peptide
DADFCPRMA

SEQ ID NO: 5220 - protein, 9 aa, Artificial Sequence
  Description of Artificial Sequence: Synthetic peptide
DADFCPRMS

SEQ ID NO: 5221 - protein, 9 aa, Artificial Sequence
  Description of Artificial Sequence: Synthetic peptide
DADFCPRMT

SEQ ID NO: 5222 - protein, 9 aa, Artificial Sequence
  Description of Artificial Sequence: Synthetic peptide
DARFDQWHY

SEQ ID NO: 5223 - protein, 9 aa, Artificial Sequence
  Description of Artificial Sequence: Synthetic peptide
DCAENWCIE

SEQ ID NO: 5224 - protein, 9 aa, Artificial Sequence
  Description of Artificial Sequence: Synthetic peptide
DCIHDQCSS

SEQ ID NO: 5225 - protein, 9 aa, Artificial Sequence
  Description of Artificial Sequence: Synthetic peptide
DDDCWVFYH

SEQ ID NO: 5226 - protein, 9 aa, Artificial Sequence
  Description of Artificial Sequence: Synthetic peptide
DDDFWVFYH

SEQ ID NO: 5227 - protein, 9 aa, Artificial Sequence
  Description of Artificial Sequence: Synthetic peptide
DDDHWVFYH

SEQ ID NO: 5228 - protein, 9 aa, Artificial Sequence
  Description of Artificial Sequence: Synthetic peptide
DDDYWAFYH

SEQ ID NO: 5229 - protein, 9 aa, Artificial Sequence
  Description of Artificial Sequence: Synthetic peptide
DDDYWGFYH

SEQ ID NO: 5230 - protein, 9 aa, Artificial Sequence
  Description of Artificial Sequence: Synthetic peptide
DDGSWVFYH

SEQ ID NO: 5231 - protein, 9 aa, Artificial Sequence
  Description of Artificial Sequence: Synthetic peptide
DFAENWCIE

SEQ ID NO: 5232 - protein, 9 aa, Artificial Sequence
  Description of Artificial Sequence: Synthetic peptide
DGDYWVFYH

SEQ ID NO: 5233 - protein, 9 aa, Artificial Sequence
  Description of Artificial Sequence: Synthetic peptide
DGGCWPREC

SEQ ID NO: 5234 - protein, 9 aa, Artificial Sequence
  Description of Artificial Sequence: Synthetic peptide
DHAENWCIE

SEQ ID NO: 5235 - protein, 9 aa, Artificial Sequence
  Description of Artificial Sequence: Synthetic peptide
DHELTGSEA

SEQ ID NO: 5236 - protein, 9 aa, Artificial Sequence
  Description of Artificial Sequence: Synthetic peptide
DITQLQCYC

SEQ ID NO: 5237 - protein, 9 aa, Artificial Sequence
  Description of Artificial Sequence: Synthetic peptide
DKNEMFMKW

SEQ ID NO: 5238 - protein, 9 aa, Artificial Sequence
  Description of Artificial Sequence: Synthetic peptide
DLDCDWLHS

SEQ ID NO: 5239 - protein, 9 aa, Artificial Sequence
  Description of Artificial Sequence: Synthetic peptide
DMDCEWLHS

SEQ ID NO: 5240 - protein, 9 aa, Artificial Sequence
  Description of Artificial Sequence: Synthetic peptide
DPCQDWDSE

SEQ ID NO: 5241 - protein, 9 aa, Artificial Sequence
  Description of Artificial Sequence: Synthetic peptide
DPCQEWNSE

SEQ ID NO: 5242 - protein, 9 aa, Artificial Sequence
  Description of Artificial Sequence: Synthetic peptide
DPCQKWDSE

SEQ ID NO: 5243 - protein, 9 aa, Artificial Sequence
  Description of Artificial Sequence: Synthetic peptide
DPCQVWDSE

SEQ ID NO: 5244 - protein, 9 aa, Artificial Sequence
  Description of Artificial Sequence: Synthetic peptide
DPCREWDSE

SEQ ID NO: 5245 - protein, 9 aa, Artificial Sequence
  Description of Artificial Sequence: Synthetic peptide
DPGQEWDSE

SEQ ID NO: 5246 - protein, 9 aa, Artificial Sequence
  Description of Artificial Sequence: Synthetic peptide
DQCQEWDSE

SEQ ID NO: 5247 - protein, 9 aa, Artificial Sequence
  Description of Artificial Sequence: Synthetic peptide
DRCQEWDSE

SEQ ID NO: 5248 - protein, 9 aa, Artificial Sequence
  Description of Artificial Sequence: Synthetic peptide
DSCQEWDSE

SEQ ID NO: 5249 - protein, 9 aa, Artificial Sequence
  Description of Artificial Sequence: Synthetic peptide
DSRFDQWHH

SEQ ID NO: 5250 - protein, 9 aa, Artificial Sequence
  Description of Artificial Sequence: Synthetic peptide
DTCQEWDSE

SEQ ID NO: 5251 - protein, 9 aa, Artificial Sequence
  Description of Artificial Sequence: Synthetic peptide
DYAEHWCIE

SEQ ID NO: 5252 - protein, 9 aa, Artificial Sequence
  Description of Artificial Sequence: Synthetic peptide
DYAEIWCIE

SEQ ID NO: 5253 - protein, 9 aa, Artificial Sequence
  Description of Artificial Sequence: Synthetic peptide
DYAEKWCIA

SEQ ID NO: 5254 - protein, 9 aa, Artificial Sequence
  Description of Artificial Sequence: Synthetic peptide
DYAENGCIE

SEQ ID NO: 5255 - protein, 9 aa, Artificial Sequence
  Description of Artificial Sequence: Synthetic peptide
DYAENWCIA

SEQ ID NO: 5256 - protein, 9 aa, Artificial Sequence
  Description of Artificial Sequence: Synthetic peptide
DYAENWCIG

SEQ ID NO: 5257 - protein, 9 aa, Artificial Sequence
  Description of Artificial Sequence: Synthetic peptide
DYAENWCME

SEQ ID NO: 5258 - protein, 9 aa, Artificial Sequence
  Description of Artificial Sequence: Synthetic peptide
DYAENWCNE

SEQ ID NO: 5259 - protein, 9 aa, Artificial Sequence
  Description of Artificial Sequence: Synthetic peptide
DYAENWCVE

SEQ ID NO: 5260 - protein, 9 aa, Artificial Sequence
  Description of Artificial Sequence: Synthetic peptide
DYAENWWIE

SEQ ID NO: 5261 - protein, 9 aa, Artificial Sequence
  Description of Artificial Sequence: Synthetic peptide
DYAETWCIE

SEQ ID NO: 5262 - protein, 9 aa, Artificial Sequence
  Description of Artificial Sequence: Synthetic peptide
DYAQNWCIE

SEQ ID NO: 5263 - protein, 9 aa, Artificial Sequence
  Description of Artificial Sequence: Synthetic peptide
DYAVNWCIE

SEQ ID NO: 5264 - protein, 9 aa, Artificial Sequence
  Description of Artificial Sequence: Synthetic peptide
DYDENWCIE

SEQ ID NO: 5265 - protein, 9 aa, Artificial Sequence
  Description of Artificial Sequence: Synthetic peptide
DYGENWCIE

SEQ ID NO: 5266 - protein, 9 aa, Artificial Sequence
  Description of Artificial Sequence: Synthetic peptide
DYPENWCIE

SEQ ID NO: 5267 - protein, 9 aa, Artificial Sequence
  Description of Artificial Sequence: Synthetic peptide
DYTENWCIE

SEQ ID NO: 5268 - protein, 9 aa, Artificial Sequence
  Description of Artificial Sequence: Synthetic peptide
DYVENWCIE

SEQ ID NO: 5269 - protein, 9 aa, Artificial Sequence
  Description of Artificial Sequence: Synthetic peptide
EAEDEIQKS

SEQ ID NO: 5270 - protein, 9 aa, Artificial Sequence
  Description of Artificial Sequence: Synthetic peptide
EAEDEIQRA

SEQ ID NO: 5271 - protein, 9 aa, Artificial Sequence
  Description of Artificial Sequence: Synthetic peptide
EAGDEIQKA

SEQ ID NO: 5272 - protein, 9 aa, Artificial Sequence
  Description of Artificial Sequence: Synthetic peptide
EATGMLYEE

SEQ ID NO: 5273 - protein, 9 aa, Artificial Sequence
  Description of Artificial Sequence: Synthetic peptide
EAWNAHEEG

SEQ ID NO: 5274 - protein, 9 aa, Artificial Sequence
  Description of Artificial Sequence: Synthetic peptide
ECESSSIIS

SEQ ID NO: 5275 - protein, 9 aa, Artificial Sequence
  Description of Artificial Sequence: Synthetic peptide
ECIHAQCSS

SEQ ID NO: 5276 - protein, 9 aa, Artificial Sequence
  Description of Artificial Sequence: Synthetic peptide
ECIHDKCSS

SEQ ID NO: 5277 - protein, 9 aa, Artificial Sequence
  Description of Artificial Sequence: Synthetic peptide
ECIHDQCCS

SEQ ID NO: 5278 - protein, 9 aa, Artificial Sequence
  Description of Artificial Sequence: Synthetic peptide
ECIHDQCSA

SEQ ID NO: 5279 - protein, 9 aa, Artificial Sequence
  Description of Artificial Sequence: Synthetic peptide
ECIHDQCSP

SEQ ID NO: 5280 - protein, 9 aa, Artificial Sequence
  Description of Artificial Sequence: Synthetic peptide
ECIHDQCST

SEQ ID NO: 5281 - protein, 9 aa, Artificial Sequence
  Description of Artificial Sequence: Synthetic peptide
ECIHDQCTS

SEQ ID NO: 5282 - protein, 9 aa, Artificial Sequence
  Description of Artificial Sequence: Synthetic peptide
ECIHHQCSS

SEQ ID NO: 5283 - protein, 9 aa, Artificial Sequence
  Description of Artificial Sequence: Synthetic peptide
ECIHVQCSS

SEQ ID NO: 5284 - protein, 9 aa, Artificial Sequence
  Description of Artificial Sequence: Synthetic peptide
EDFHEFAQT

SEQ ID NO: 5285 - protein, 9 aa, Artificial Sequence
  Description of Artificial Sequence: Synthetic peptide
EDGHKFNEE

SEQ ID NO: 5286 - protein, 9 aa, Artificial Sequence
  Description of Artificial Sequence: Synthetic peptide
EEKSCQCWH

SEQ ID NO: 5287 - protein, 9 aa, Artificial Sequence
  Description of Artificial Sequence: Synthetic peptide
EGIHDQCSS

SEQ ID NO: 5288 - protein, 9 aa, Artificial Sequence
  Description of Artificial Sequence: Synthetic peptide
EHAEWKCMY

SEQ ID NO: 5289 - protein, 9 aa, Artificial Sequence
  Description of Artificial Sequence: Synthetic peptide
EHHEWKCMY

SEQ ID NO: 5290 - protein, 9 aa, Artificial Sequence
  Description of Artificial Sequence: Synthetic peptide
EHPEGKCMY

SEQ ID NO: 5291 - protein, 9 aa, Artificial Sequence
  Description of Artificial Sequence: Synthetic peptide
EHPELKCMY

SEQ ID NO: 5292 - protein, 9 aa, Artificial Sequence
  Description of Artificial Sequence: Synthetic peptide
EHPEWKCLC

SEQ ID NO: 5293 - protein, 9 aa, Artificial Sequence
  Description of Artificial Sequence: Synthetic peptide
EHPEWKGMY

SEQ ID NO: 5294 - protein, 9 aa, Artificial Sequence
  Description of Artificial Sequence: Synthetic peptide
EHPEWTCMY

SEQ ID NO: 5295 - protein, 9 aa, Artificial Sequence
  Description of Artificial Sequence: Synthetic peptide
EHREWKCMY

SEQ ID NO: 5296 - protein, 9 aa, Artificial Sequence
  Description of Artificial Sequence: Synthetic peptide
EHSEWKCMY

SEQ ID NO: 5297 - protein, 9 aa, Artificial Sequence
  Description of Artificial Sequence: Synthetic peptide
EHTEWKCMY

SEQ ID NO: 5298 - protein, 9 aa, Artificial Sequence
  Description of Artificial Sequence: Synthetic peptide
EINQSTCET

SEQ ID NO: 5299 - protein, 9 aa, Artificial Sequence
  Description of Artificial Sequence: Synthetic peptide
EKDQSTCET

SEQ ID NO: 5300 - protein, 9 aa, Artificial Sequence
  Description of Artificial Sequence: Synthetic peptide
EKESCQCWH

SEQ ID NO: 5301 - protein, 9 aa, Artificial Sequence
  Description of Artificial Sequence: Synthetic peptide
EKHQSTCET

SEQ ID NO: 5302 - protein, 9 aa, Artificial Sequence
  Description of Artificial Sequence: Synthetic peptide
EKIMVKRPF

SEQ ID NO: 5303 - protein, 9 aa, Artificial Sequence
  Description of Artificial Sequence: Synthetic peptide
EKIMVKRTF

SEQ ID NO: 5304 - protein, 9 aa, Artificial Sequence
  Description of Artificial Sequence: Synthetic peptide
EKIMVKWAF

SEQ ID NO: 5305 - protein, 9 aa, Artificial Sequence
  Description of Artificial Sequence: Synthetic peptide
EKKACQCWH

SEQ ID NO: 5306 - protein, 9 aa, Artificial Sequence
  Description of Artificial Sequence: Synthetic peptide
EKKPCQCWH

SEQ ID NO: 5307 - protein, 9 aa, Artificial Sequence
  Description of Artificial Sequence: Synthetic peptide
EKKSCKCWH

SEQ ID NO: 5308 - protein, 9 aa, Artificial Sequence
  Description of Artificial Sequence: Synthetic peptide
EKKSCLCWH

SEQ ID NO: 5309 - protein, 9 aa, Artificial Sequence
  Description of Artificial Sequence: Synthetic peptide
EKKSCPCWH

SEQ ID NO: 5310 - protein, 9 aa, Artificial Sequence
  Description of Artificial Sequence: Synthetic peptide
EKKSCQCWD

SEQ ID NO: 5311 - protein, 9 aa, Artificial Sequence
  Description of Artificial Sequence: Synthetic peptide
EKKSCQCWN

SEQ ID NO: 5312 - protein, 9 aa, Artificial Sequence
  Description of Artificial Sequence: Synthetic peptide
EKKSCRCWH

SEQ ID NO: 5313 - protein, 9 aa, Artificial Sequence
  Description of Artificial Sequence: Synthetic peptide
EKKSFQCWH

SEQ ID NO: 5314 - protein, 9 aa, Artificial Sequence
  Description of Artificial Sequence: Synthetic peptide
EKKSWQCWH

SEQ ID NO: 5315 - protein, 9 aa, Artificial Sequence
  Description of Artificial Sequence: Synthetic peptide
EKKSYQCWH

SEQ ID NO: 5316 - protein, 9 aa, Artificial Sequence
  Description of Artificial Sequence: Synthetic peptide
EKKTCQCWH

SEQ ID NO: 5317 - protein, 9 aa, Artificial Sequence
  Description of Artificial Sequence: Synthetic peptide
EKLLSLCPS

SEQ ID NO: 5318 - protein, 9 aa, Artificial Sequence
  Description of Artificial Sequence: Synthetic peptide
EKNESTCET

SEQ ID NO: 5319 - protein, 9 aa, Artificial Sequence
  Description of Artificial Sequence: Synthetic peptide
EKNQCTCET

SEQ ID NO: 5320 - protein, 9 aa, Artificial Sequence
  Description of Artificial Sequence: Synthetic peptide
EKNQGTCET

SEQ ID NO: 5321 - protein, 9 aa, Artificial Sequence
  Description of Artificial Sequence: Synthetic peptide
EKNQSTCEA

SEQ ID NO: 5322 - protein, 9 aa, Artificial Sequence
  Description of Artificial Sequence: Synthetic peptide
EKNQSTCEP

SEQ ID NO: 5323 - protein, 9 aa, Artificial Sequence
  Description of Artificial Sequence: Synthetic peptide
EKNQSTCES

SEQ ID NO: 5324 - protein, 9 aa, Artificial Sequence
  Description of Artificial Sequence: Synthetic peptide
EKNQSTCGT

SEQ ID NO: 5325 - protein, 9 aa, Artificial Sequence
  Description of Artificial Sequence: Synthetic peptide
EKNVWNNKW

SEQ ID NO: 5326 - protein, 9 aa, Artificial Sequence
  Description of Artificial Sequence: Synthetic peptide
EKQSCQCWH

SEQ ID NO: 5327 - protein, 9 aa, Artificial Sequence
  Description of Artificial Sequence: Synthetic peptide
EKRSCQCWH

SEQ ID NO: 5328 - protein, 9 aa, Artificial Sequence
  Description of Artificial Sequence: Synthetic peptide
EKTQSTCET

SEQ ID NO: 5329 - protein, 9 aa, Artificial Sequence
  Description of Artificial Sequence: Synthetic peptide
EKTSCQCWH

SEQ ID NO: 5330 - protein, 9 aa, Artificial Sequence
  Description of Artificial Sequence: Synthetic peptide
ELPEWKCMY

SEQ ID NO: 5331 - protein, 9 aa, Artificial Sequence
  Description of Artificial Sequence: Synthetic peptide
ENAHKFNEE

SEQ ID NO: 5332 - protein, 9 aa, Artificial Sequence
  Description of Artificial Sequence: Synthetic peptide
ENGDKFNEE

SEQ ID NO: 5333 - protein, 9 aa, Artificial Sequence
  Description of Artificial Sequence: Synthetic peptide
ENGHEFNEE

SEQ ID NO: 5334 - protein, 9 aa, Artificial Sequence
  Description of Artificial Sequence: Synthetic peptide
ENGHKFDEE

SEQ ID NO: 5335 - protein, 9 aa, Artificial Sequence
  Description of Artificial Sequence: Synthetic peptide
ENGHKFNAE

SEQ ID NO: 5336 - protein, 9 aa, Artificial Sequence
  Description of Artificial Sequence: Synthetic peptide
ENGHKFNEA

SEQ ID NO: 5337 - protein, 9 aa, Artificial Sequence
  Description of Artificial Sequence: Synthetic peptide
ENGHKFNEK

SEQ ID NO: 5338 - protein, 9 aa, Artificial Sequence
  Description of Artificial Sequence: Synthetic peptide
ENGHKFNKE

SEQ ID NO: 5339 - protein, 9 aa, Artificial Sequence
  Description of Artificial Sequence: Synthetic peptide
ENGHKFNQE

SEQ ID NO: 5340 - protein, 9 aa, Artificial Sequence
  Description of Artificial Sequence: Synthetic peptide
ENGHKFSEE

SEQ ID NO: 5341 - protein, 9 aa, Artificial Sequence
  Description of Artificial Sequence: Synthetic peptide
ENGHKFTEE

SEQ ID NO: 5342 - protein, 9 aa, Artificial Sequence
  Description of Artificial Sequence: Synthetic peptide
ENGHQFNEE

SEQ ID NO: 5343 - protein, 9 aa, Artificial Sequence
  Description of Artificial Sequence: Synthetic peptide
ENGHRFNEE

SEQ ID NO: 5344 - protein, 9 aa, Artificial Sequence
  Description of Artificial Sequence: Synthetic peptide
ENPEWKCMY

SEQ ID NO: 5345 - protein, 9 aa, Artificial Sequence
  Description of Artificial Sequence: Synthetic peptide
ENVHKFNEE

SEQ ID NO: 5346 - protein, 9 aa, Artificial Sequence
  Description of Artificial Sequence: Synthetic peptide
EQHDWCQKY

SEQ ID NO: 5347 - protein, 9 aa, Artificial Sequence
  Description of Artificial Sequence: Synthetic peptide
EQHDWYKKY

SEQ ID NO: 5348 - protein, 9 aa, Artificial Sequence
  Description of Artificial Sequence: Synthetic peptide
EQHDWYLKY

SEQ ID NO: 5349 - protein, 9 aa, Artificial Sequence
  Description of Artificial Sequence: Synthetic peptide
EQHHWYQKY

SEQ ID NO: 5350 - protein, 9 aa, Artificial Sequence
  Description of Artificial Sequence: Synthetic peptide
EQHNWYQKY

SEQ ID NO: 5351 - protein, 9 aa, Artificial Sequence
  Description of Artificial Sequence: Synthetic peptide
EQKSCQCWH

SEQ ID NO: 5352 - protein, 9 aa, Artificial Sequence
  Description of Artificial Sequence: Synthetic peptide
EQLLSLCHS

SEQ ID NO: 5353 - protein, 9 aa, Artificial Sequence
  Description of Artificial Sequence: Synthetic peptide
EQLLSLCLS

SEQ ID NO: 5354 - protein, 9 aa, Artificial Sequence
  Description of Artificial Sequence: Synthetic peptide
EQLLSLCPN

SEQ ID NO: 5355 - protein, 9 aa, Artificial Sequence
  Description of Artificial Sequence: Synthetic peptide
EQLLSLCSS

SEQ ID NO: 5356 - protein, 9 aa, Artificial Sequence
  Description of Artificial Sequence: Synthetic peptide
EQLLTLCPS

SEQ ID NO: 5357 - protein, 9 aa, Artificial Sequence
  Description of Artificial Sequence: Synthetic peptide
EQLSSLCPS

SEQ ID NO: 5358 - protein, 9 aa, Artificial Sequence
  Description of Artificial Sequence: Synthetic peptide
EQNDWYQKY

SEQ ID NO: 5359 - protein, 9 aa, Artificial Sequence
  Description of Artificial Sequence: Synthetic peptide
EQPLSLCPS

SEQ ID NO: 5360 - protein, 9 aa, Artificial Sequence
  Description of Artificial Sequence: Synthetic peptide
EQVLSLCPS

SEQ ID NO: 5361 - protein, 9 aa, Artificial Sequence
  Description of Artificial Sequence: Synthetic peptide
ERIHDQCSS

SEQ ID NO: 5362 - protein, 9 aa, Artificial Sequence
  Description of Artificial Sequence: Synthetic peptide
ERKSCQCWH

SEQ ID NO: 5363 - protein, 9 aa, Artificial Sequence
  Description of Artificial Sequence: Synthetic peptide
ERNQSTCET

SEQ ID NO: 5364 - protein, 9 aa, Artificial Sequence
  Description of Artificial Sequence: Synthetic peptide
ESEDEIQKA

SEQ ID NO: 5365 - protein, 9 aa, Artificial Sequence
  Description of Artificial Sequence: Synthetic peptide
ESGHKFNEE

SEQ ID NO: 5366 - protein, 9 aa, Artificial Sequence
  Description of Artificial Sequence: Synthetic peptide
ESIGMVCSD

SEQ ID NO: 5367 - protein, 9 aa, Artificial Sequence
  Description of Artificial Sequence: Synthetic peptide
ETALKWEWS

SEQ ID NO: 5368 - protein, 9 aa, Artificial Sequence
  Description of Artificial Sequence: Synthetic peptide
ETAWKWDWS

SEQ ID NO: 5369 - protein, 9 aa, Artificial Sequence
  Description of Artificial Sequence: Synthetic peptide
ETGHKFNEE

SEQ ID NO: 5370 - protein, 9 aa, Artificial Sequence
  Description of Artificial Sequence: Synthetic peptide
ETSWKWEWS

SEQ ID NO: 5371 - protein, 9 aa, Artificial Sequence
  Description of Artificial Sequence: Synthetic peptide
EVPWESKLC

SEQ ID NO: 5372 - protein, 9 aa, Artificial Sequence
  Description of Artificial Sequence: Synthetic peptide
EVWDAHEEG

SEQ ID NO: 5373 - protein, 9 aa, Artificial Sequence
  Description of Artificial Sequence: Synthetic peptide
EVWNSHEEG

SEQ ID NO: 5374 - protein, 9 aa, Artificial Sequence
  Description of Artificial Sequence: Synthetic peptide
EWEGSSIIS

SEQ ID NO: 5375 - protein, 9 aa, Artificial Sequence
  Description of Artificial Sequence: Synthetic peptide
EWESNSIIS

SEQ ID NO: 5376 - protein, 9 aa, Artificial Sequence
  Description of Artificial Sequence: Synthetic peptide
EWESSSIIA

SEQ ID NO: 5377 - protein, 9 aa, Artificial Sequence
  Description of Artificial Sequence: Synthetic peptide
EWESSSTIS

SEQ ID NO: 5378 - protein, 9 aa, Artificial Sequence
  Description of Artificial Sequence: Synthetic peptide
EWETSSIIS

SEQ ID NO: 5379 - protein, 9 aa, Artificial Sequence
  Description of Artificial Sequence: Synthetic peptide
EWGFGSDET

SEQ ID NO: 5380 - protein, 9 aa, Artificial Sequence
  Description of Artificial Sequence: Synthetic peptide
EWIHDQCSS

SEQ ID NO: 5381 - protein, 9 aa, Artificial Sequence
  Description of Artificial Sequence: Synthetic peptide
EWLPWINER

SEQ ID NO: 5382 - protein, 9 aa, Artificial Sequence
  Description of Artificial Sequence: Synthetic peptide
FEMAMCSMG

SEQ ID NO: 5383 - protein, 9 aa, Artificial Sequence
  Description of Artificial Sequence: Synthetic peptide
FKIRKFWDP

SEQ ID NO: 5384 - protein, 9 aa, Artificial Sequence
  Description of Artificial Sequence: Synthetic peptide
FKMAMCSMG

SEQ ID NO: 5385 - protein, 9 aa, Artificial Sequence
  Description of Artificial Sequence: Synthetic peptide
FKVGKFWDP

SEQ ID NO: 5386 - protein, 9 aa, Artificial Sequence
  Description of Artificial Sequence: Synthetic peptide
FKVIKFWDP

SEQ ID NO: 5387 - protein, 9 aa, Artificial Sequence
  Description of Artificial Sequence: Synthetic peptide
FKVRKFLDP

SEQ ID NO: 5388 - protein, 9 aa, Artificial Sequence
  Description of Artificial Sequence: Synthetic peptide
FKVRKFWDS

SEQ ID NO: 5389 - protein, 9 aa, Artificial Sequence
  Description of Artificial Sequence: Synthetic peptide
FQMAMGSMG

SEQ ID NO: 5390 - protein, 9 aa, Artificial Sequence
  Description of Artificial Sequence: Synthetic peptide
FQMSMCSMG

SEQ ID NO: 5391 - protein, 9 aa, Artificial Sequence
  Description of Artificial Sequence: Synthetic peptide
FQVRKFWDP

SEQ ID NO: 5392 - protein, 9 aa, Artificial Sequence
  Description of Artificial Sequence: Synthetic peptide
FRIIWGADM

SEQ ID NO: 5393 - protein, 9 aa, Artificial Sequence
  Description of Artificial Sequence: Synthetic peptide
FRILWQCEG

SEQ ID NO: 5394 - protein, 9 aa, Artificial Sequence
  Description of Artificial Sequence: Synthetic peptide
FRMAMCSMG

SEQ ID NO: 5395 - protein, 9 aa, Artificial Sequence
  Description of Artificial Sequence: Synthetic peptide
FRPIWGADM

SEQ ID NO: 5396 - protein, 9 aa, Artificial Sequence
  Description of Artificial Sequence: Synthetic peptide
FRPIWGGDM

SEQ ID NO: 5397 - protein, 9 aa, Artificial Sequence
  Description of Artificial Sequence: Synthetic peptide
FRTIWGADL

SEQ ID NO: 5398 - protein, 9 aa, Artificial Sequence
  Description of Artificial Sequence: Synthetic peptide
FRTIWGADV

SEQ ID NO: 5399 - protein, 9 aa, Artificial Sequence
  Description of Artificial Sequence: Synthetic peptide
FRTIWGPDM

SEQ ID NO: 5400 - protein, 9 aa, Artificial Sequence
  Description of Artificial Sequence: Synthetic peptide
FRTIWGTDM

SEQ ID NO: 5401 - protein, 9 aa, Artificial Sequence
  Description of Artificial Sequence: Synthetic peptide
FRVRKFWDP

SEQ ID NO: 5402 - protein, 9 aa, Artificial Sequence
  Description of Artificial Sequence: Synthetic peptide
FVDSMLHKW

SEQ ID NO: 5403 - protein, 9 aa, Artificial Sequence
  Description of Artificial Sequence: Synthetic peptide
FWDRQWDDF

SEQ ID NO: 5404 - protein, 9 aa, Artificial Sequence
  Description of Artificial Sequence: Synthetic peptide
FWLGLFPTK

SEQ ID NO: 5405 - protein, 9 aa, Artificial Sequence
  Description of Artificial Sequence: Synthetic peptide
FWLGVFPAK

SEQ ID NO: 5406 - protein, 9 aa, Artificial Sequence
  Description of Artificial Sequence: Synthetic peptide
FWMGLFPAK

SEQ ID NO: 5407 - protein, 9 aa, Artificial Sequence
  Description of Artificial Sequence: Synthetic peptide
GATHMIRTR

SEQ ID NO: 5408 - protein, 9 aa, Artificial Sequence
  Description of Artificial Sequence: Synthetic peptide
GCEAKEYLN

SEQ ID NO: 5409 - protein, 9 aa, Artificial Sequence
  Description of Artificial Sequence: Synthetic peptide
GCLTWAFRG

SEQ ID NO: 5410 - protein, 9 aa, Artificial Sequence
  Description of Artificial Sequence: Synthetic peptide
GCVTWAFRC

SEQ ID NO: 5411 - protein, 9 aa, Artificial Sequence
  Description of Artificial Sequence: Synthetic peptide
GCVTWDFRG

SEQ ID NO: 5412 - protein, 9 aa, Artificial Sequence
  Description of Artificial Sequence: Synthetic peptide
GDHDMLNSL

SEQ ID NO: 5413 - protein, 9 aa, Artificial Sequence
  Description of Artificial Sequence: Synthetic peptide
GEQEARNCS

SEQ ID NO: 5414 - protein, 9 aa, Artificial Sequence
  Description of Artificial Sequence: Synthetic peptide
GEREGRNCS

SEQ ID NO: 5415 - protein, 9 aa, Artificial Sequence
  Description of Artificial Sequence: Synthetic peptide
GEYLRHTVT

SEQ ID NO: 5416 - protein, 9 aa, Artificial Sequence
  Description of Artificial Sequence: Synthetic peptide
GEYLRNTIT

SEQ ID NO: 5417 - protein, 9 aa, Artificial Sequence
  Description of Artificial Sequence: Synthetic peptide
GEYLRSTVT

SEQ ID NO: 5418 - protein, 9 aa, Artificial Sequence
  Description of Artificial Sequence: Synthetic peptide
GEYQRNTVT

SEQ ID NO: 5419 - protein, 9 aa, Artificial Sequence
  Description of Artificial Sequence: Synthetic peptide
GGAAMWGRY

SEQ ID NO: 5420 - protein, 9 aa, Artificial Sequence
  Description of Artificial Sequence: Synthetic peptide
GGAAMWRKY

SEQ ID NO: 5421 - protein, 9 aa, Artificial Sequence
  Description of Artificial Sequence: Synthetic peptide
GGAGMWRRY

SEQ ID NO: 5422 - protein, 9 aa, Artificial Sequence
  Description of Artificial Sequence: Synthetic peptide
GGASMWRRY

SEQ ID NO: 5423 - protein, 9 aa, Artificial Sequence
  Description of Artificial Sequence: Synthetic peptide
GGATMWRRY

SEQ ID NO: 5424 - protein, 9 aa, Artificial Sequence
  Description of Artificial Sequence: Synthetic peptide
GGDAMWRRY

SEQ ID NO: 5425 - protein, 9 aa, Artificial Sequence
  Description of Artificial Sequence: Synthetic peptide
GGEERVGEA

SEQ ID NO: 5426 - protein, 9 aa, Artificial Sequence
  Description of Artificial Sequence: Synthetic peptide
GGGAMWRRY

SEQ ID NO: 5427 - protein, 9 aa, Artificial Sequence
  Description of Artificial Sequence: Synthetic peptide
GIEGMYWPL

SEQ ID NO: 5428 - protein, 9 aa, Artificial Sequence
  Description of Artificial Sequence: Synthetic peptide
GILIMAYSW

SEQ ID NO: 5429 - protein, 9 aa, Artificial Sequence
  Description of Artificial Sequence: Synthetic peptide
GLDCEWLHS

SEQ ID NO: 5430 - protein, 9 aa, Artificial Sequence
  Description of Artificial Sequence: Synthetic peptide
GLLYDFNPE

SEQ ID NO: 5431 - protein, 9 aa, Artificial Sequence
  Description of Artificial Sequence: Synthetic peptide
GLLYDFNQG

SEQ ID NO: 5432 - protein, 9 aa, Artificial Sequence
  Description of Artificial Sequence: Synthetic peptide
GLPHSADVI

SEQ ID NO: 5433 - protein, 9 aa, Artificial Sequence
  Description of Artificial Sequence: Synthetic peptide
GLPQSADGI

SEQ ID NO: 5434 - protein, 9 aa, Artificial Sequence
  Description of Artificial Sequence: Synthetic peptide
GLPRSADVI

SEQ ID NO: 5435 - protein, 9 aa, Artificial Sequence
  Description of Artificial Sequence: Synthetic peptide
GLSVMTYTS

SEQ ID NO: 5436 - protein, 9 aa, Artificial Sequence
  Description of Artificial Sequence: Synthetic peptide
GMHHAVWAS

SEQ ID NO: 5437 - protein, 9 aa, Artificial Sequence
  Description of Artificial Sequence: Synthetic peptide
GMNHAVGAS

SEQ ID NO: 5438 - protein, 9 aa, Artificial Sequence
  Description of Artificial Sequence: Synthetic peptide
GMNHAVWAN

SEQ ID NO: 5439 - protein, 9 aa, Artificial Sequence
  Description of Artificial Sequence: Synthetic peptide
GMNHAVWTS

SEQ ID NO: 5440 - protein, 9 aa, Artificial Sequence
  Description of Artificial Sequence: Synthetic peptide
GMNHSVWAS

SEQ ID NO: 5441 - protein, 9 aa, Artificial Sequence
  Description of Artificial Sequence: Synthetic peptide
GMNNAVWAS

SEQ ID NO: 5442 - protein, 9 aa, Artificial Sequence
  Description of Artificial Sequence: Synthetic peptide
GMNQAVWAS

SEQ ID NO: 5443 - protein, 9 aa, Artificial Sequence
  Description of Artificial Sequence: Synthetic peptide
GMNYAVWAS

SEQ ID NO: 5444 - protein, 9 aa, Artificial Sequence
  Description of Artificial Sequence: Synthetic peptide
GMPQSADVI

SEQ ID NO: 5445 - protein, 9 aa, Artificial Sequence
  Description of Artificial Sequence: Synthetic peptide
GMSHAVWAS

SEQ ID NO: 5446 - protein, 9 aa, Artificial Sequence
  Description of Artificial Sequence: Synthetic peptide
GMTHAVWAS

SEQ ID NO: 5447 - protein, 9 aa, Artificial Sequence
  Description of Artificial Sequence: Synthetic peptide
GNGHKFNEE

SEQ ID NO: 5448 - protein, 9 aa, Artificial Sequence
  Description of Artificial Sequence: Synthetic peptide
GQSLCNELC

SEQ ID NO: 5449 - protein, 9 aa, Artificial Sequence
  Description of Artificial Sequence: Synthetic peptide
GVPQSADVI

SEQ ID NO: 5450 - protein, 9 aa, Artificial Sequence
  Description of Artificial Sequence: Synthetic peptide
GWMCEVPWT

SEQ ID NO: 5451 - protein, 9 aa, Artificial Sequence
  Description of Artificial Sequence: Synthetic peptide
GWMWEVHWT

SEQ ID NO: 5452 - protein, 9 aa, Artificial Sequence
  Description of Artificial Sequence: Synthetic peptide
GWMWEVPWR

SEQ ID NO: 5453 - protein, 9 aa, Artificial Sequence
  Description of Artificial Sequence: Synthetic peptide
GWMWEVTWT

SEQ ID NO: 5454 - protein, 9 aa, Artificial Sequence
  Description of Artificial Sequence: Synthetic peptide
HDEMMGLER

SEQ ID NO: 5455 - protein, 9 aa, Artificial Sequence
  Description of Artificial Sequence: Synthetic peptide
HDIMFAHQM

SEQ ID NO: 5456 - protein, 9 aa, Artificial Sequence
  Description of Artificial Sequence: Synthetic peptide
HDIMFSHQM

SEQ ID NO: 5457 - protein, 9 aa, Artificial Sequence
  Description of Artificial Sequence: Synthetic peptide
HDIMFTHKM

SEQ ID NO: 5458 - protein, 9 aa, Artificial Sequence
  Description of Artificial Sequence: Synthetic peptide
HDIMFTHKR

SEQ ID NO: 5459 - protein, 9 aa, Artificial Sequence
  Description of Artificial Sequence: Synthetic peptide
HDIMFTHQR

SEQ ID NO: 5460 - protein, 9 aa, Artificial Sequence
  Description of Artificial Sequence: Synthetic peptide
HDIMFTYQM

SEQ ID NO: 5461 - protein, 9 aa, Artificial Sequence
  Description of Artificial Sequence: Synthetic peptide
HDKMMGLER

SEQ ID NO: 5462 - protein, 9 aa, Artificial Sequence
  Description of Artificial Sequence: Synthetic peptide
HDLMFTHQM

SEQ ID NO: 5463 - protein, 9 aa, Artificial Sequence
  Description of Artificial Sequence: Synthetic peptide
HDQMMDLER

SEQ ID NO: 5464 - protein, 9 aa, Artificial Sequence
  Description of Artificial Sequence: Synthetic peptide
HDQMMGMER

SEQ ID NO: 5465 - protein, 9 aa, Artificial Sequence
  Description of Artificial Sequence: Synthetic peptide
HNIMFTHQM

SEQ ID NO: 5466 - protein, 9 aa, Artificial Sequence
  Description of Artificial Sequence: Synthetic peptide
IADVVPCHH

SEQ ID NO: 5467 - protein, 9 aa, Artificial Sequence
  Description of Artificial Sequence: Synthetic peptide
IAMLESWWS

SEQ ID NO: 5468 - protein, 9 aa, Artificial Sequence
  Description of Artificial Sequence: Synthetic peptide
ICFHVAEMF

SEQ ID NO: 5469 - protein, 9 aa, Artificial Sequence
  Description of Artificial Sequence: Synthetic peptide
IDMLESWWG

SEQ ID NO: 5470 - protein, 9 aa, Artificial Sequence
  Description of Artificial Sequence: Synthetic peptide
IGEAQDCNP

SEQ ID NO: 5471 - protein, 9 aa, Artificial Sequence
  Description of Artificial Sequence: Synthetic peptide
IGMIRATRE

SEQ ID NO: 5472 - protein, 9 aa, Artificial Sequence
  Description of Artificial Sequence: Synthetic peptide
IGMIRDARE

SEQ ID NO: 5473 - protein, 9 aa, Artificial Sequence
  Description of Artificial Sequence: Synthetic peptide
IGMIRDTHE

SEQ ID NO: 5474 - protein, 9 aa, Artificial Sequence
  Description of Artificial Sequence: Synthetic peptide
IGMIWDTRE

SEQ ID NO: 5475 - protein, 9 aa, Artificial Sequence
  Description of Artificial Sequence: Synthetic peptide
IGMLRDTRE

SEQ ID NO: 5476 - protein, 9 aa, Artificial Sequence
  Description of Artificial Sequence: Synthetic peptide
IGVMLNAMK

SEQ ID NO: 5477 - protein, 9 aa, Artificial Sequence
  Description of Artificial Sequence: Synthetic peptide
IGVMLNDMQ

SEQ ID NO: 5478 - protein, 9 aa, Artificial Sequence
  Description of Artificial Sequence: Synthetic peptide
ILHMMHRGA

SEQ ID NO: 5479 - protein, 9 aa, Artificial Sequence
  Description of Artificial Sequence: Synthetic peptide
IMAPLVCDD

SEQ ID NO: 5480 - protein, 9 aa, Artificial Sequence
  Description of Artificial Sequence: Synthetic peptide
IMAPLVCDG

SEQ ID NO: 5481 - protein, 9 aa, Artificial Sequence
  Description of Artificial Sequence: Synthetic peptide
IMEALVCDD

SEQ ID NO: 5482 - protein, 9 aa, Artificial Sequence
  Description of Artificial Sequence: Synthetic peptide
IMEHLVCDD

SEQ ID NO: 5483 - protein, 9 aa, Artificial Sequence
  Description of Artificial Sequence: Synthetic peptide
IMEHMVCDD

SEQ ID NO: 5484 - protein, 9 aa, Artificial Sequence
  Description of Artificial Sequence: Synthetic peptide
IMEPLACDD

SEQ ID NO: 5485 - protein, 9 aa, Artificial Sequence
  Description of Artificial Sequence: Synthetic peptide
IMEPLVCAD

SEQ ID NO: 5486 - protein, 9 aa, Artificial Sequence
  Description of Artificial Sequence: Synthetic peptide
IMEPLVCDA

SEQ ID NO: 5487 - protein, 9 aa, Artificial Sequence
  Description of Artificial Sequence: Synthetic peptide
IMEPLVCDN

SEQ ID NO: 5488 - protein, 9 aa, Artificial Sequence
  Description of Artificial Sequence: Synthetic peptide
IMEPLVCDV

SEQ ID NO: 5489 - protein, 9 aa, Artificial Sequence
  Description of Artificial Sequence: Synthetic peptide
IMEPLVCGD

SEQ ID NO: 5490 - protein, 9 aa, Artificial Sequence
  Description of Artificial Sequence: Synthetic peptide
IMEPLVCND

SEQ ID NO: 5491 - protein, 9 aa, Artificial Sequence
  Description of Artificial Sequence: Synthetic peptide
IMEPPVCDD

SEQ ID NO: 5492 - protein, 9 aa, Artificial Sequence
  Description of Artificial Sequence: Synthetic peptide
IMEPRVCDD

SEQ ID NO: 5493 - protein, 9 aa, Artificial Sequence
  Description of Artificial Sequence: Synthetic peptide
IMEPVVCDD

SEQ ID NO: 5494 - protein, 9 aa, Artificial Sequence
  Description of Artificial Sequence: Synthetic peptide
IMERLVCDD

SEQ ID NO: 5495 - protein, 9 aa, Artificial Sequence
  Description of Artificial Sequence: Synthetic peptide
IMERMVCDD

SEQ ID NO: 5496 - protein, 9 aa, Artificial Sequence
  Description of Artificial Sequence: Synthetic peptide
IMKPLVCDD

SEQ ID NO: 5497 - protein, 9 aa, Artificial Sequence
  Description of Artificial Sequence: Synthetic peptide
IMKQWPAMF

SEQ ID NO: 5498 - protein, 9 aa, Artificial Sequence
  Description of Artificial Sequence: Synthetic peptide
IMPQWPAMF

SEQ ID NO: 5499 - protein, 9 aa, Artificial Sequence
  Description of Artificial Sequence: Synthetic peptide
IMQEWPAMF

SEQ ID NO: 5500 - protein, 9 aa, Artificial Sequence
  Description of Artificial Sequence: Synthetic peptide
IMQPLVCDD

SEQ ID NO: 5501 - protein, 9 aa, Artificial Sequence
  Description of Artificial Sequence: Synthetic peptide
IMQPWPAMF

SEQ ID NO: 5502 - protein, 9 aa, Artificial Sequence
  Description of Artificial Sequence: Synthetic peptide
IMQQWLAMF

SEQ ID NO: 5503 - protein, 9 aa, Artificial Sequence
  Description of Artificial Sequence: Synthetic peptide
IMQQWPAKF

SEQ ID NO: 5504 - protein, 9 aa, Artificial Sequence
  Description of Artificial Sequence: Synthetic peptide
IMQQWPAMY

SEQ ID NO: 5505 - protein, 9 aa, Artificial Sequence
  Description of Artificial Sequence: Synthetic peptide
IMQQWPDMF

SEQ ID NO: 5506 - protein, 9 aa, Artificial Sequence
  Description of Artificial Sequence: Synthetic peptide
IMQQWPSMF

SEQ ID NO: 5507 - protein, 9 aa, Artificial Sequence
  Description of Artificial Sequence: Synthetic peptide
IMQQWPTMF

SEQ ID NO: 5508 - protein, 9 aa, Artificial Sequence
  Description of Artificial Sequence: Synthetic peptide
IMRQWPAMF

SEQ ID NO: 5509 - protein, 9 aa, Artificial Sequence
  Description of Artificial Sequence: Synthetic peptide
IMVPLVCDD

SEQ ID NO: 5510 - protein, 9 aa, Artificial Sequence
  Description of Artificial Sequence: Synthetic peptide
INNEFIQPF

SEQ ID NO: 5511 - protein, 9 aa, Artificial Sequence
  Description of Artificial Sequence: Synthetic peptide
IPDLMHNVH

SEQ ID NO: 5512 - protein, 9 aa, Artificial Sequence
  Description of Artificial Sequence: Synthetic peptide
IPGLMSDYQ

SEQ ID NO: 5513 - protein, 9 aa, Artificial Sequence
  Description of Artificial Sequence: Synthetic peptide
IRQQWPAMF

SEQ ID NO: 5514 - protein, 9 aa, Artificial Sequence
  Description of Artificial Sequence: Synthetic peptide
IRTIWGADM

SEQ ID NO: 5515 - protein, 9 aa, Artificial Sequence
  Description of Artificial Sequence: Synthetic peptide
ISALMSDYQ

SEQ ID NO: 5516 - protein, 9 aa, Artificial Sequence
  Description of Artificial Sequence: Synthetic peptide
ISDLMHDVH

SEQ ID NO: 5517 - protein, 9 aa, Artificial Sequence
  Description of Artificial Sequence: Synthetic peptide
ISDLMHNAH

SEQ ID NO: 5518 - protein, 9 aa, Artificial Sequence
  Description of Artificial Sequence: Synthetic peptide
ISDLMHNGH

SEQ ID NO: 5519 - protein, 9 aa, Artificial Sequence
  Description of Artificial Sequence: Synthetic peptide
ISDLMHNVN

SEQ ID NO: 5520 - protein, 9 aa, Artificial Sequence
  Description of Artificial Sequence: Synthetic peptide
ISDLMHSVH

SEQ ID NO: 5521 - protein, 9 aa, Artificial Sequence
  Description of Artificial Sequence: Synthetic peptide
ISDLMHYVH

SEQ ID NO: 5522 - protein, 9 aa, Artificial Sequence
  Description of Artificial Sequence: Synthetic peptide
ISDLMNNVH

SEQ ID NO: 5523 - protein, 9 aa, Artificial Sequence
  Description of Artificial Sequence: Synthetic peptide
ISDLVHNVH

SEQ ID NO: 5524 - protein, 9 aa, Artificial Sequence
  Description of Artificial Sequence: Synthetic peptide
ISDMMHNVH

SEQ ID NO: 5525 - protein, 9 aa, Artificial Sequence
  Description of Artificial Sequence: Synthetic peptide
ISELMSDYQ

SEQ ID NO: 5526 - protein, 9 aa, Artificial Sequence
  Description of Artificial Sequence: Synthetic peptide
ISGLMSDDQ

SEQ ID NO: 5527 - protein, 9 aa, Artificial Sequence
  Description of Artificial Sequence: Synthetic peptide
ISGLMSDHQ

SEQ ID NO: 5528 - protein, 9 aa, Artificial Sequence
  Description of Artificial Sequence: Synthetic peptide
ISGLMSDYE

SEQ ID NO: 5529 - protein, 9 aa, Artificial Sequence
  Description of Artificial Sequence: Synthetic peptide
ISGLMSDYK

SEQ ID NO: 5530 - protein, 9 aa, Artificial Sequence
  Description of Artificial Sequence: Synthetic peptide
ISGLTSDYQ

SEQ ID NO: 5531 - protein, 9 aa, Artificial Sequence
  Description of Artificial Sequence: Synthetic peptide
ISGLVSDYQ

SEQ ID NO: 5532 - protein, 9 aa, Artificial Sequence
  Description of Artificial Sequence: Synthetic peptide
ISNLMHNVH

SEQ ID NO: 5533 - protein, 9 aa, Artificial Sequence
  Description of Artificial Sequence: Synthetic peptide
ISQHTCNKD

SEQ ID NO: 5534 - protein, 9 aa, Artificial Sequence
  Description of Artificial Sequence: Synthetic peptide
ISQHTCSED

SEQ ID NO: 5535 - protein, 9 aa, Artificial Sequence
  Description of Artificial Sequence: Synthetic peptide
ISQQTCSKD

SEQ ID NO: 5536 - protein, 9 aa, Artificial Sequence
  Description of Artificial Sequence: Synthetic peptide
ISRHTCSKD

SEQ ID NO: 5537 - protein, 9 aa, Artificial Sequence
  Description of Artificial Sequence: Synthetic peptide
ISSADSWPM

SEQ ID NO: 5538 - protein, 9 aa, Artificial Sequence
  Description of Artificial Sequence: Synthetic peptide
ISVLMSDYQ

SEQ ID NO: 5539 - protein, 9 aa, Artificial Sequence
  Description of Artificial Sequence: Synthetic peptide
ITCIEAQEN

SEQ ID NO: 5540 - protein, 9 aa, Artificial Sequence
  Description of Artificial Sequence: Synthetic peptide
ITCIEGLEN

SEQ ID NO: 5541 - protein, 9 aa, Artificial Sequence
  Description of Artificial Sequence: Synthetic peptide
ITCIEGQED

SEQ ID NO: 5542 - protein, 9 aa, Artificial Sequence
  Description of Artificial Sequence: Synthetic peptide
ITCIEGREN

SEQ ID NO: 5543 - protein, 9 aa, Artificial Sequence
  Description of Artificial Sequence: Synthetic peptide
ITCLEGQEN

SEQ ID NO: 5544 - protein, 9 aa, Artificial Sequence
  Description of Artificial Sequence: Synthetic peptide
ITEPLVCDD

SEQ ID NO: 5545 - protein, 9 aa, Artificial Sequence
  Description of Artificial Sequence: Synthetic peptide
ITQHTCSKD

SEQ ID NO: 5546 - protein, 9 aa, Artificial Sequence
  Description of Artificial Sequence: Synthetic peptide
IWARQWDDF

SEQ ID NO: 5547 - protein, 9 aa, Artificial Sequence
  Description of Artificial Sequence: Synthetic peptide
IWDHQWDDF

SEQ ID NO: 5548 - protein, 9 aa, Artificial Sequence
  Description of Artificial Sequence: Synthetic peptide
IWDMMHRGA

SEQ ID NO: 5549 - protein, 9 aa, Artificial Sequence
  Description of Artificial Sequence: Synthetic peptide
IWDRKWDDF

SEQ ID NO: 5550 - protein, 9 aa, Artificial Sequence
  Description of Artificial Sequence: Synthetic peptide
IWDRLWDDF

SEQ ID NO: 5551 - protein, 9 aa, Artificial Sequence
  Description of Artificial Sequence: Synthetic peptide
IWDRPWDDF

SEQ ID NO: 5552 - protein, 9 aa, Artificial Sequence
  Description of Artificial Sequence: Synthetic peptide
IWDRQLDDF

SEQ ID NO: 5553 - protein, 9 aa, Artificial Sequence
  Description of Artificial Sequence: Synthetic peptide
IWDRQWADF

SEQ ID NO: 5554 - protein, 9 aa, Artificial Sequence
  Description of Artificial Sequence: Synthetic peptide
IWDRQWDAF

SEQ ID NO: 5555 - protein, 9 aa, Artificial Sequence
  Description of Artificial Sequence: Synthetic peptide
IWDRQWDDY

SEQ ID NO: 5556 - protein, 9 aa, Artificial Sequence
  Description of Artificial Sequence: Synthetic peptide
IWDRQWGDF

SEQ ID NO: 5557 - protein, 9 aa, Artificial Sequence
  Description of Artificial Sequence: Synthetic peptide
IWDRQWNDF

SEQ ID NO: 5558 - protein, 9 aa, Artificial Sequence
  Description of Artificial Sequence: Synthetic peptide
IWDRQWYDF

SEQ ID NO: 5559 - protein, 9 aa, Artificial Sequence
  Description of Artificial Sequence: Synthetic peptide
IWDSQWDDF

SEQ ID NO: 5560 - protein, 9 aa, Artificial Sequence
  Description of Artificial Sequence: Synthetic peptide
IWHRQWDDF

SEQ ID NO: 5561 - protein, 9 aa, Artificial Sequence
  Description of Artificial Sequence: Synthetic peptide
IWKLPSVTT

SEQ ID NO: 5562 - protein, 9 aa, Artificial Sequence
  Description of Artificial Sequence: Synthetic peptide
IWKMPPIDM

SEQ ID NO: 5563 - protein, 9 aa, Artificial Sequence
  Description of Artificial Sequence: Synthetic peptide
IWMLPSITT

SEQ ID NO: 5564 - protein, 9 aa, Artificial Sequence
  Description of Artificial Sequence: Synthetic peptide
IWMLPSVAT

SEQ ID NO: 5565 - protein, 9 aa, Artificial Sequence
  Description of Artificial Sequence: Synthetic peptide
IWMLPSVIT

SEQ ID NO: 5566 - protein, 9 aa, Artificial Sequence
  Description of Artificial Sequence: Synthetic peptide
IWVRQWDDF

SEQ ID NO: 5567 - protein, 9 aa, Artificial Sequence
  Description of Artificial Sequence: Synthetic peptide
IWYRQWDDF

SEQ ID NO: 5568 - protein, 9 aa, Artificial Sequence
  Description of Artificial Sequence: Synthetic peptide
KCCLGKNSR

SEQ ID NO: 5569 - protein, 9 aa, Artificial Sequence
  Description of Artificial Sequence: Synthetic peptide
KFHSKERMS

SEQ ID NO: 5570 - protein, 9 aa, Artificial Sequence
  Description of Artificial Sequence: Synthetic peptide
KINIFAYTY

SEQ ID NO: 5571 - protein, 9 aa, Artificial Sequence
  Description of Artificial Sequence: Synthetic peptide
KINIFEYTC

SEQ ID NO: 5572 - protein, 9 aa, Artificial Sequence
  Description of Artificial Sequence: Synthetic peptide
KINVFEYTY

SEQ ID NO: 5573 - protein, 9 aa, Artificial Sequence
  Description of Artificial Sequence: Synthetic peptide
KITIFEYTY

SEQ ID NO: 5574 - protein, 9 aa, Artificial Sequence
  Description of Artificial Sequence: Synthetic peptide
KKDVWNNKW

SEQ ID NO: 5575 - protein, 9 aa, Artificial Sequence
  Description of Artificial Sequence: Synthetic peptide
KKHVWNNKW

SEQ ID NO: 5576 - protein, 9 aa, Artificial Sequence
  Description of Artificial Sequence: Synthetic peptide
KKNAWNNKW

SEQ ID NO: 5577 - protein, 9 aa, Artificial Sequence
  Description of Artificial Sequence: Synthetic peptide
KKNEMFMKW

SEQ ID NO: 5578 - protein, 9 aa, Artificial Sequence
  Description of Artificial Sequence: Synthetic peptide
KKNEWNNKW

SEQ ID NO: 5579 - protein, 9 aa, Artificial Sequence
  Description of Artificial Sequence: Synthetic peptide
KKNGWNNKW

SEQ ID NO: 5580 - protein, 9 aa, Artificial Sequence
  Description of Artificial Sequence: Synthetic peptide
KKNVWDNKW

SEQ ID NO: 5581 - protein, 9 aa, Artificial Sequence
  Description of Artificial Sequence: Synthetic peptide
KKNVWHNKW

SEQ ID NO: 5582 - protein, 9 aa, Artificial Sequence
  Description of Artificial Sequence: Synthetic peptide
KKNVWNNEW

SEQ ID NO: 5583 - protein, 9 aa, Artificial Sequence
  Description of Artificial Sequence: Synthetic peptide
KKNVWNSKW

SEQ ID NO: 5584 - protein, 9 aa, Artificial Sequence
  Description of Artificial Sequence: Synthetic peptide
KKNVWNTKW

SEQ ID NO: 5585 - protein, 9 aa, Artificial Sequence
  Description of Artificial Sequence: Synthetic peptide
KKNVWNYKW

SEQ ID NO: 5586 - protein, 9 aa, Artificial Sequence
  Description of Artificial Sequence: Synthetic peptide
KKNVWSNKW

SEQ ID NO: 5587 - protein, 9 aa, Artificial Sequence
  Description of Artificial Sequence: Synthetic peptide
KKNVWYNKW

SEQ ID NO: 5588 - protein, 9 aa, Artificial Sequence
  Description of Artificial Sequence: Synthetic peptide
KKSVWNNKW

SEQ ID NO: 5589 - protein, 9 aa, Artificial Sequence
  Description of Artificial Sequence: Synthetic peptide
KKYVWNNKW

SEQ ID NO: 5590 - protein, 9 aa, Artificial Sequence
  Description of Artificial Sequence: Synthetic peptide
KLLPWINER

SEQ ID NO: 5591 - protein, 9 aa, Artificial Sequence
  Description of Artificial Sequence: Synthetic peptide
KLNIFEYTY

SEQ ID NO: 5592 - protein, 9 aa, Artificial Sequence
  Description of Artificial Sequence: Synthetic peptide
KNDHFVCYL

SEQ ID NO: 5593 - protein, 9 aa, Artificial Sequence
  Description of Artificial Sequence: Synthetic peptide
KNGHKFNEE

SEQ ID NO: 5594 - protein, 9 aa, Artificial Sequence
  Description of Artificial Sequence: Synthetic peptide
KNNEFIQPF

SEQ ID NO: 5595 - protein, 9 aa, Artificial Sequence
  Description of Artificial Sequence: Synthetic peptide
KPVQCACEN

SEQ ID NO: 5596 - protein, 9 aa, Artificial Sequence
  Description of Artificial Sequence: Synthetic peptide
KQHDWYQKY

SEQ ID NO: 5597 - protein, 9 aa, Artificial Sequence
  Description of Artificial Sequence: Synthetic peptide
KRLPWINER

SEQ ID NO: 5598 - protein, 9 aa, Artificial Sequence
  Description of Artificial Sequence: Synthetic peptide
KTNVWNNKW

SEQ ID NO: 5599 - protein, 9 aa, Artificial Sequence
  Description of Artificial Sequence: Synthetic peptide
KWGFGSDET

SEQ ID NO: 5600 - protein, 9 aa, Artificial Sequence
  Description of Artificial Sequence: Synthetic peptide
KWLPCINER

SEQ ID NO: 5601 - protein, 9 aa, Artificial Sequence
  Description of Artificial Sequence: Synthetic peptide
KWLPGINER

SEQ ID NO: 5602 - protein, 9 aa, Artificial Sequence
  Description of Artificial Sequence: Synthetic peptide
KWLPWIHER

SEQ ID NO: 5603 - protein, 9 aa, Artificial Sequence
  Description of Artificial Sequence: Synthetic peptide
KWLPWIKER

SEQ ID NO: 5604 - protein, 9 aa, Artificial Sequence
  Description of Artificial Sequence: Synthetic peptide
KWLPWISER

SEQ ID NO: 5605 - protein, 9 aa, Artificial Sequence
  Description of Artificial Sequence: Synthetic peptide
KWLPWVNER

SEQ ID NO: 5606 - protein, 9 aa, Artificial Sequence
  Description of Artificial Sequence: Synthetic peptide
KWLQWINER

SEQ ID NO: 5607 - protein, 9 aa, Artificial Sequence
  Description of Artificial Sequence: Synthetic peptide
KWLRWINER

SEQ ID NO: 5608 - protein, 9 aa, Artificial Sequence
  Description of Artificial Sequence: Synthetic peptide
KWMPWINER

SEQ ID NO: 5609 - protein, 9 aa, Artificial Sequence
  Description of Artificial Sequence: Synthetic peptide
KWPPWINER

SEQ ID NO: 5610 - protein, 9 aa, Artificial Sequence
  Description of Artificial Sequence: Synthetic peptide
KWQPWINER

SEQ ID NO: 5611 - protein, 9 aa, Artificial Sequence
  Description of Artificial Sequence: Synthetic peptide
KWRPWINER

SEQ ID NO: 5612 - protein, 9 aa, Artificial Sequence
  Description of Artificial Sequence: Synthetic peptide
LADSMLHKW

SEQ ID NO: 5613 - protein, 9 aa, Artificial Sequence
  Description of Artificial Sequence: Synthetic peptide
LAGQMDEMS

SEQ ID NO: 5614 - protein, 9 aa, Artificial Sequence
  Description of Artificial Sequence: Synthetic peptide
LAIQPCDER

SEQ ID NO: 5615 - protein, 9 aa, Artificial Sequence
  Description of Artificial Sequence: Synthetic peptide
LATGMLYEE

SEQ ID NO: 5616 - protein, 9 aa, Artificial Sequence
  Description of Artificial Sequence: Synthetic peptide
LDDSMLHKW

SEQ ID NO: 5617 - protein, 9 aa, Artificial Sequence
  Description of Artificial Sequence: Synthetic peptide
LDQMMGLER

SEQ ID NO: 5618 - protein, 9 aa, Artificial Sequence
  Description of Artificial Sequence: Synthetic peptide
LGIQPCDER

SEQ ID NO: 5619 - protein, 9 aa, Artificial Sequence
  Description of Artificial Sequence: Synthetic peptide
LIDSMLHKW

SEQ ID NO: 5620 - protein, 9 aa, Artificial Sequence
  Description of Artificial Sequence: Synthetic peptide
LILIMAYSW

SEQ ID NO: 5621 - protein, 9 aa, Artificial Sequence
  Description of Artificial Sequence: Synthetic peptide
LPAWQQHGR

SEQ ID NO: 5622 - protein, 9 aa, Artificial Sequence
  Description of Artificial Sequence: Synthetic peptide
LQGGFDHLK

SEQ ID NO: 5623 - protein, 9 aa, Artificial Sequence
  Description of Artificial Sequence: Synthetic peptide
LQGGFDHLP

SEQ ID NO: 5624 - protein, 9 aa, Artificial Sequence
  Description of Artificial Sequence: Synthetic peptide
LQGGFDHLS

SEQ ID NO: 5625 - protein, 9 aa, Artificial Sequence
  Description of Artificial Sequence: Synthetic peptide
LSASMEYEE

SEQ ID NO: 5626 - protein, 9 aa, Artificial Sequence
  Description of Artificial Sequence: Synthetic peptide
LSGLIDEMS

SEQ ID NO: 5627 - protein, 9 aa, Artificial Sequence
  Description of Artificial Sequence: Synthetic peptide
LSGQIAEMS

SEQ ID NO: 5628 - protein, 9 aa, Artificial Sequence
  Description of Artificial Sequence: Synthetic peptide
LSGQIDEMA

SEQ ID NO: 5629 - protein, 9 aa, Artificial Sequence
  Description of Artificial Sequence: Synthetic peptide
LSGQIDEMP

SEQ ID NO: 5630 - protein, 9 aa, Artificial Sequence
  Description of Artificial Sequence: Synthetic peptide
LSGQIDEMT

SEQ ID NO: 5631 - protein, 9 aa, Artificial Sequence
  Description of Artificial Sequence: Synthetic peptide
LSGQIDEMY

SEQ ID NO: 5632 - protein, 9 aa, Artificial Sequence
  Description of Artificial Sequence: Synthetic peptide
LSMVFSRGE

SEQ ID NO: 5633 - protein, 9 aa, Artificial Sequence
  Description of Artificial Sequence: Synthetic peptide
LSVQIDEMS

SEQ ID NO: 5634 - protein, 9 aa, Artificial Sequence
  Description of Artificial Sequence: Synthetic peptide
LSVVFSKGE

SEQ ID NO: 5635 - protein, 9 aa, Artificial Sequence
  Description of Artificial Sequence: Synthetic peptide
LVDIMLHKW

SEQ ID NO: 5636 - protein, 9 aa, Artificial Sequence
  Description of Artificial Sequence: Synthetic peptide
LVDSMLHEW

SEQ ID NO: 5637 - protein, 9 aa, Artificial Sequence
  Description of Artificial Sequence: Synthetic peptide
LVDSMLHRW

SEQ ID NO: 5638 - protein, 9 aa, Artificial Sequence
  Description of Artificial Sequence: Synthetic peptide
LVDSMLRKW

SEQ ID NO: 5639 - protein, 9 aa, Artificial Sequence
  Description of Artificial Sequence: Synthetic peptide
LVDSMPHKW

SEQ ID NO: 5640 - protein, 9 aa, Artificial Sequence
  Description of Artificial Sequence: Synthetic peptide
LVDTMLHKW

SEQ ID NO: 5641 - protein, 9 aa, Artificial Sequence
  Description of Artificial Sequence: Synthetic peptide
LVHSMLHKW

SEQ ID NO: 5642 - protein, 9 aa, Artificial Sequence
  Description of Artificial Sequence: Synthetic peptide
LVIEPCDER

SEQ ID NO: 5643 - protein, 9 aa, Artificial Sequence
  Description of Artificial Sequence: Synthetic peptide
LVIKPCDER

SEQ ID NO: 5644 - protein, 9 aa, Artificial Sequence
  Description of Artificial Sequence: Synthetic peptide
LVIQACDER

SEQ ID NO: 5645 - protein, 9 aa, Artificial Sequence
  Description of Artificial Sequence: Synthetic peptide
LVIQHCDER

SEQ ID NO: 5646 - protein, 9 aa, Artificial Sequence
  Description of Artificial Sequence: Synthetic peptide
LVIQPCAER

SEQ ID NO: 5647 - protein, 9 aa, Artificial Sequence
  Description of Artificial Sequence: Synthetic peptide
LVIQPCDEG

SEQ ID NO: 5648 - protein, 9 aa, Artificial Sequence
  Description of Artificial Sequence: Synthetic peptide
LVIQPCDEH

SEQ ID NO: 5649 - protein, 9 aa, Artificial Sequence
  Description of Artificial Sequence: Synthetic peptide
LVIQPCDEP

SEQ ID NO: 5650 - protein, 9 aa, Artificial Sequence
  Description of Artificial Sequence: Synthetic peptide
LVIQPCDKR

SEQ ID NO: 5651 - protein, 9 aa, Artificial Sequence
  Description of Artificial Sequence: Synthetic peptide
LVIQPCNER

SEQ ID NO: 5652 - protein, 9 aa, Artificial Sequence
  Description of Artificial Sequence: Synthetic peptide
LVIQPYDER

SEQ ID NO: 5653 - protein, 9 aa, Artificial Sequence
  Description of Artificial Sequence: Synthetic peptide
LVIQSCDER

SEQ ID NO: 5654 - protein, 9 aa, Artificial Sequence
  Description of Artificial Sequence: Synthetic peptide
LVIRPCDER

SEQ ID NO: 5655 - protein, 9 aa, Artificial Sequence
  Description of Artificial Sequence: Synthetic peptide
LVLQPCDER

SEQ ID NO: 5656 - protein, 9 aa, Artificial Sequence
  Description of Artificial Sequence: Synthetic peptide
LVMQPCDER

SEQ ID NO: 5657 - protein, 9 aa, Artificial Sequence
  Description of Artificial Sequence: Synthetic peptide
LVNSMLHKW

SEQ ID NO: 5658 - protein, 9 aa, Artificial Sequence
  Description of Artificial Sequence: Synthetic peptide
LVTQPCDER

SEQ ID NO: 5659 - protein, 9 aa, Artificial Sequence
  Description of Artificial Sequence: Synthetic peptide
LVVQPCDER

SEQ ID NO: 5660 - protein, 9 aa, Artificial Sequence
  Description of Artificial Sequence: Synthetic peptide
LWAAMEYEE

SEQ ID NO: 5661 - protein, 9 aa, Artificial Sequence
  Description of Artificial Sequence: Synthetic peptide
LWAFLEYEE

SEQ ID NO: 5662 - protein, 9 aa, Artificial Sequence
  Description of Artificial Sequence: Synthetic peptide
LWAFMEYEE

SEQ ID NO: 5663 - protein, 9 aa, Artificial Sequence
  Description of Artificial Sequence: Synthetic peptide
LWASMAYEE

SEQ ID NO: 5664 - protein, 9 aa, Artificial Sequence
  Description of Artificial Sequence: Synthetic peptide
LWASMEFEE

SEQ ID NO: 5665 - protein, 9 aa, Artificial Sequence
  Description of Artificial Sequence: Synthetic peptide
LWASMEHEE

SEQ ID NO: 5666 - protein, 9 aa, Artificial Sequence
  Description of Artificial Sequence: Synthetic peptide
LWASMESEE

SEQ ID NO: 5667 - protein, 9 aa, Artificial Sequence
  Description of Artificial Sequence: Synthetic peptide
LWASMEYDK

SEQ ID NO: 5668 - protein, 9 aa, Artificial Sequence
  Description of Artificial Sequence: Synthetic peptide
LWASMEYEA

SEQ ID NO: 5669 - protein, 9 aa, Artificial Sequence
  Description of Artificial Sequence: Synthetic peptide
LWASMEYEQ

SEQ ID NO: 5670 - protein, 9 aa, Artificial Sequence
  Description of Artificial Sequence: Synthetic peptide
LWASMEYEV

SEQ ID NO: 5671 - protein, 9 aa, Artificial Sequence
  Description of Artificial Sequence: Synthetic peptide
LWASMGYEE

SEQ ID NO: 5672 - protein, 9 aa, Artificial Sequence
  Description of Artificial Sequence: Synthetic peptide
LWASMKYEE

SEQ ID NO: 5673 - protein, 9 aa, Artificial Sequence
  Description of Artificial Sequence: Synthetic peptide
LWASVEYEE

SEQ ID NO: 5674 - protein, 9 aa, Artificial Sequence
  Description of Artificial Sequence: Synthetic peptide
LWENYHSEF

SEQ ID NO: 5675 - protein, 9 aa, Artificial Sequence
  Description of Artificial Sequence: Synthetic peptide
LWEQWCWEF

SEQ ID NO: 5676 - protein, 9 aa, Artificial Sequence
  Description of Artificial Sequence: Synthetic peptide
LWESKEMCS

SEQ ID NO: 5677 - protein, 9 aa, Artificial Sequence
  Description of Artificial Sequence: Synthetic peptide
LWGSMEYEE

SEQ ID NO: 5678 - protein, 9 aa, Artificial Sequence
  Description of Artificial Sequence: Synthetic peptide
LWKEWCWEF

SEQ ID NO: 5679 - protein, 9 aa, Artificial Sequence
  Description of Artificial Sequence: Synthetic peptide
LWKKWCWEF

SEQ ID NO: 5680 - protein, 9 aa, Artificial Sequence
  Description of Artificial Sequence: Synthetic peptide
LWKMPPIDM

SEQ ID NO: 5681 - protein, 9 aa, Artificial Sequence
  Description of Artificial Sequence: Synthetic peptide
LWKPRHYDF

SEQ ID NO: 5682 - protein, 9 aa, Artificial Sequence
  Description of Artificial Sequence: Synthetic peptide
LWKPWCWEF

SEQ ID NO: 5683 - protein, 9 aa, Artificial Sequence
  Description of Artificial Sequence: Synthetic peptide
LWKQGCWEF

SEQ ID NO: 5684 - protein, 9 aa, Artificial Sequence
  Description of Artificial Sequence: Synthetic peptide
LWKQLCWEF

SEQ ID NO: 5685 - protein, 9 aa, Artificial Sequence
  Description of Artificial Sequence: Synthetic peptide
LWKQSCWEF

SEQ ID NO: 5686 - protein, 9 aa, Artificial Sequence
  Description of Artificial Sequence: Synthetic peptide
LWKQWCGEF

SEQ ID NO: 5687 - protein, 9 aa, Artificial Sequence
  Description of Artificial Sequence: Synthetic peptide
LWKQWCLEF

SEQ ID NO: 5688 - protein, 9 aa, Artificial Sequence
  Description of Artificial Sequence: Synthetic peptide
LWKQWCSEF

SEQ ID NO: 5689 - protein, 9 aa, Artificial Sequence
  Description of Artificial Sequence: Synthetic peptide
LWKQWCWEC

SEQ ID NO: 5690 - protein, 9 aa, Artificial Sequence
  Description of Artificial Sequence: Synthetic peptide
LWKQWCWEI

SEQ ID NO: 5691 - protein, 9 aa, Artificial Sequence
  Description of Artificial Sequence: Synthetic peptide
LWKQWCWES

SEQ ID NO: 5692 - protein, 9 aa, Artificial Sequence
  Description of Artificial Sequence: Synthetic peptide
LWKQWCWEV

SEQ ID NO: 5693 - protein, 9 aa, Artificial Sequence
  Description of Artificial Sequence: Synthetic peptide
LWKQWCWEY

SEQ ID NO: 5694 - protein, 9 aa, Artificial Sequence
  Description of Artificial Sequence: Synthetic peptide
LWKQWCWGF

SEQ ID NO: 5695 - protein, 9 aa, Artificial Sequence
  Description of Artificial Sequence: Synthetic peptide
LWKQWCWKF

SEQ ID NO: 5696 - protein, 9 aa, Artificial Sequence
  Description of Artificial Sequence: Synthetic peptide
LWKQWFWEF

SEQ ID NO: 5697 - protein, 9 aa, Artificial Sequence
  Description of Artificial Sequence: Synthetic peptide
LWKQWGWEC

SEQ ID NO: 5698 - protein, 9 aa, Artificial Sequence
  Description of Artificial Sequence: Synthetic peptide
LWKRWCWEF

SEQ ID NO: 5699 - protein, 9 aa, Artificial Sequence
  Description of Artificial Sequence: Synthetic peptide
LWMQWCWEF

SEQ ID NO: 5700 - protein, 9 aa, Artificial Sequence
  Description of Artificial Sequence: Synthetic peptide
LWPSMEYEE

SEQ ID NO: 5701 - protein, 9 aa, Artificial Sequence
  Description of Artificial Sequence: Synthetic peptide
LWQQWCWEF

SEQ ID NO: 5702 - protein, 9 aa, Artificial Sequence
  Description of Artificial Sequence: Synthetic peptide
LWRQWCWEF

SEQ ID NO: 5703 - protein, 9 aa, Artificial Sequence
  Description of Artificial Sequence: Synthetic peptide
LWTQWCWEF

SEQ ID NO: 5704 - protein, 9 aa, Artificial Sequence
  Description of Artificial Sequence: Synthetic peptide
LWTSMEYEV

SEQ ID NO: 5705 - protein, 9 aa, Artificial Sequence
  Description of Artificial Sequence: Synthetic peptide
LWVRQWDDF

SEQ ID NO: 5706 - protein, 9 aa, Artificial Sequence
  Description of Artificial Sequence: Synthetic peptide
LWVSMEYEE

SEQ ID NO: 5707 - protein, 9 aa, Artificial Sequence
  Description of Artificial Sequence: Synthetic peptide
LYEIRFSDM

SEQ ID NO: 5708 - protein, 9 aa, Artificial Sequence
  Description of Artificial Sequence: Synthetic peptide
LYEIRFVDM

SEQ ID NO: 5709 - protein, 9 aa, Artificial Sequence
  Description of Artificial Sequence: Synthetic peptide
LYKIRFADM

SEQ ID NO: 5710 - protein, 9 aa, Artificial Sequence
  Description of Artificial Sequence: Synthetic peptide
LYKQAPSEG

SEQ ID NO: 5711 - protein, 9 aa, Artificial Sequence
  Description of Artificial Sequence: Synthetic peptide
LYMPAPSEG

SEQ ID NO: 5712 - protein, 9 aa, Artificial Sequence
  Description of Artificial Sequence: Synthetic peptide
LYMQATSEG

SEQ ID NO: 5713 - protein, 9 aa, Artificial Sequence
  Description of Artificial Sequence: Synthetic peptide
LYVIRFADM

SEQ ID NO: 5714 - protein, 9 aa, Artificial Sequence
  Description of Artificial Sequence: Synthetic peptide
LYVQAPSEG

SEQ ID NO: 5715 - protein, 9 aa, Artificial Sequence
  Description of Artificial Sequence: Synthetic peptide
MAEPMGCQA

SEQ ID NO: 5716 - protein, 9 aa, Artificial Sequence
  Description of Artificial Sequence: Synthetic peptide
MAEQMGCRA

SEQ ID NO: 5717 - protein, 9 aa, Artificial Sequence
  Description of Artificial Sequence: Synthetic peptide
MAEQMVCQA

SEQ ID NO: 5718 - protein, 9 aa, Artificial Sequence
  Description of Artificial Sequence: Synthetic peptide
MAGDCACAM

SEQ ID NO: 5719 - protein, 9 aa, Artificial Sequence
  Description of Artificial Sequence: Synthetic peptide
MDHPNDHFF

SEQ ID NO: 5720 - protein, 9 aa, Artificial Sequence
  Description of Artificial Sequence: Synthetic peptide
MDHTNDLFF

SEQ ID NO: 5721 - protein, 9 aa, Artificial Sequence
  Description of Artificial Sequence: Synthetic peptide
MEWQSEYVS

SEQ ID NO: 5722 - protein, 9 aa, Artificial Sequence
  Description of Artificial Sequence: Synthetic peptide
MGEQMGCQA

SEQ ID NO: 5723 - protein, 9 aa, Artificial Sequence
  Description of Artificial Sequence: Synthetic peptide
MGEVMDFLP

SEQ ID NO: 5724 - protein, 9 aa, Artificial Sequence
  Description of Artificial Sequence: Synthetic peptide
MKNVWNNKW

SEQ ID NO: 5725 - protein, 9 aa, Artificial Sequence
  Description of Artificial Sequence: Synthetic peptide
MLGHANDGL

SEQ ID NO: 5726 - protein, 9 aa, Artificial Sequence
  Description of Artificial Sequence: Synthetic peptide
MLGHASDAL

SEQ ID NO: 5727 - protein, 9 aa, Artificial Sequence
  Description of Artificial Sequence: Synthetic peptide
MMEPLVCDD

SEQ ID NO: 5728 - protein, 9 aa, Artificial Sequence
  Description of Artificial Sequence: Synthetic peptide
MSAVMDFLP

SEQ ID NO: 5729 - protein, 9 aa, Artificial Sequence
  Description of Artificial Sequence: Synthetic peptide
MSEIMDFLP

SEQ ID NO: 5730 - protein, 9 aa, Artificial Sequence
  Description of Artificial Sequence: Synthetic peptide
MSEVMDFMP

SEQ ID NO: 5731 - protein, 9 aa, Artificial Sequence
  Description of Artificial Sequence: Synthetic peptide
MSEVMDFPP

SEQ ID NO: 5732 - protein, 9 aa, Artificial Sequence
  Description of Artificial Sequence: Synthetic peptide
MSEVMDFQP

SEQ ID NO: 5733 - protein, 9 aa, Artificial Sequence
  Description of Artificial Sequence: Synthetic peptide
MSEVMDFRP

SEQ ID NO: 5734 - protein, 9 aa, Artificial Sequence
  Description of Artificial Sequence: Synthetic peptide
MSGVMDFLP

SEQ ID NO: 5735 - protein, 9 aa, Artificial Sequence
  Description of Artificial Sequence: Synthetic peptide
MSQVMDFLP

SEQ ID NO: 5736 - protein, 9 aa, Artificial Sequence
  Description of Artificial Sequence: Synthetic peptide
MSWNWWALY

SEQ ID NO: 5737 - protein, 9 aa, Artificial Sequence
  Description of Artificial Sequence: Synthetic peptide
MSWNWWNLY

SEQ ID NO: 5738 - protein, 9 aa, Artificial Sequence
  Description of Artificial Sequence: Synthetic peptide
MSWNWWTVY

SEQ ID NO: 5739 - protein, 9 aa, Artificial Sequence
  Description of Artificial Sequence: Synthetic peptide
MSWTWWTLY

SEQ ID NO: 5740 - protein, 9 aa, Artificial Sequence
  Description of Artificial Sequence: Synthetic peptide
MTEQMGCQA

SEQ ID NO: 5741 - protein, 9 aa, Artificial Sequence
  Description of Artificial Sequence: Synthetic peptide
MWASMEYEE

SEQ ID NO: 5742 - protein, 9 aa, Artificial Sequence
  Description of Artificial Sequence: Synthetic peptide
MWDRQWDDF

SEQ ID NO: 5743 - protein, 9 aa, Artificial Sequence
  Description of Artificial Sequence: Synthetic peptide
MWKQWCWEF

SEQ ID NO: 5744 - protein, 9 aa, Artificial Sequence
  Description of Artificial Sequence: Synthetic peptide
NACDLKNDY

SEQ ID NO: 5745 - protein, 9 aa, Artificial Sequence
  Description of Artificial Sequence: Synthetic peptide
NACDWKSDY

SEQ ID NO: 5746 - protein, 9 aa, Artificial Sequence
  Description of Artificial Sequence: Synthetic peptide
NACDWKTDY

SEQ ID NO: 5747 - protein, 9 aa, Artificial Sequence
  Description of Artificial Sequence: Synthetic peptide
NACDWKYDY

SEQ ID NO: 5748 - protein, 9 aa, Artificial Sequence
  Description of Artificial Sequence: Synthetic peptide
NACDWRNDY

SEQ ID NO: 5749 - protein, 9 aa, Artificial Sequence
  Description of Artificial Sequence: Synthetic peptide
NADVVPCHH

SEQ ID NO: 5750 - protein, 9 aa, Artificial Sequence
  Description of Artificial Sequence: Synthetic peptide
NAYDWKNDY

SEQ ID NO: 5751 - protein, 9 aa, Artificial Sequence
  Description of Artificial Sequence: Synthetic peptide
NCFHVAEMF

SEQ ID NO: 5752 - protein, 9 aa, Artificial Sequence
  Description of Artificial Sequence: Synthetic peptide
NFFDSEDMG

SEQ ID NO: 5753 - protein, 9 aa, Artificial Sequence
  Description of Artificial Sequence: Synthetic peptide
NGGCWAREC

SEQ ID NO: 5754 - protein, 9 aa, Artificial Sequence
  Description of Artificial Sequence: Synthetic peptide
NGGCWLREC

SEQ ID NO: 5755 - protein, 9 aa, Artificial Sequence
  Description of Artificial Sequence: Synthetic peptide
NGGCWPWEC

SEQ ID NO: 5756 - protein, 9 aa, Artificial Sequence
  Description of Artificial Sequence: Synthetic peptide
NGGCWSREC

SEQ ID NO: 5757 - protein, 9 aa, Artificial Sequence
  Description of Artificial Sequence: Synthetic peptide
NGGCWTREC

SEQ ID NO: 5758 - protein, 9 aa, Artificial Sequence
  Description of Artificial Sequence: Synthetic peptide
NGGFWPREC

SEQ ID NO: 5759 - protein, 9 aa, Artificial Sequence
  Description of Artificial Sequence: Synthetic peptide
NGGGWPREC

SEQ ID NO: 5760 - protein, 9 aa, Artificial Sequence
  Description of Artificial Sequence: Synthetic peptide
NINQLQCYC

SEQ ID NO: 5761 - protein, 9 aa, Artificial Sequence
  Description of Artificial Sequence: Synthetic peptide
NITQLQCCC

SEQ ID NO: 5762 - protein, 9 aa, Artificial Sequence
  Description of Artificial Sequence: Synthetic peptide
NKHEMFMKW

SEQ ID NO: 5763 - protein, 9 aa, Artificial Sequence
  Description of Artificial Sequence: Synthetic peptide
NKNAMFMKW

SEQ ID NO: 5764 - protein, 9 aa, Artificial Sequence
  Description of Artificial Sequence: Synthetic peptide
NKNGMFMKW

SEQ ID NO: 5765 - protein, 9 aa, Artificial Sequence
  Description of Artificial Sequence: Synthetic peptide
NKNVWNNKW

SEQ ID NO: 5766 - protein, 9 aa, Artificial Sequence
  Description of Artificial Sequence: Synthetic peptide
NLDCEWLHS

SEQ ID NO: 5767 - protein, 9 aa, Artificial Sequence
  Description of Artificial Sequence: Synthetic peptide
NMEPLVCDD

SEQ ID NO: 5768 - protein, 9 aa, Artificial Sequence
  Description of Artificial Sequence: Synthetic peptide
NMTQLQCYC

SEQ ID NO: 5769 - protein, 9 aa, Artificial Sequence
  Description of Artificial Sequence: Synthetic peptide
NNDDFVCYL

SEQ ID NO: 5770 - protein, 9 aa, Artificial Sequence
  Description of Artificial Sequence: Synthetic peptide
NNDHCVCYL

SEQ ID NO: 5771 - protein, 9 aa, Artificial Sequence
  Description of Artificial Sequence: Synthetic peptide
NNDHFICYL

SEQ ID NO: 5772 - protein, 9 aa, Artificial Sequence
  Description of Artificial Sequence: Synthetic peptide
NNDHFLCYL

SEQ ID NO: 5773 - protein, 9 aa, Artificial Sequence
  Description of Artificial Sequence: Synthetic peptide
NNDHFVCFL

SEQ ID NO: 5774 - protein, 9 aa, Artificial Sequence
  Description of Artificial Sequence: Synthetic peptide
NNDHFVCHL

SEQ ID NO: 5775 - protein, 9 aa, Artificial Sequence
  Description of Artificial Sequence: Synthetic peptide
NNDHFVCNL

SEQ ID NO: 5776 - protein, 9 aa, Artificial Sequence
  Description of Artificial Sequence: Synthetic peptide
NNDHFVCYM

SEQ ID NO: 5777 - protein, 9 aa, Artificial Sequence
  Description of Artificial Sequence: Synthetic peptide
NNDHIVCYL

SEQ ID NO: 5778 - protein, 9 aa, Artificial Sequence
  Description of Artificial Sequence: Synthetic peptide
NNDHSVCYL

SEQ ID NO: 5779 - protein, 9 aa, Artificial Sequence
  Description of Artificial Sequence: Synthetic peptide
NNDHVVCYL

SEQ ID NO: 5780 - protein, 9 aa, Artificial Sequence
  Description of Artificial Sequence: Synthetic peptide
NNDHYVCYL

SEQ ID NO: 5781 - protein, 9 aa, Artificial Sequence
  Description of Artificial Sequence: Synthetic peptide
NNDRFVCYL

SEQ ID NO: 5782 - protein, 9 aa, Artificial Sequence
  Description of Artificial Sequence: Synthetic peptide
NNHHFVCYL

SEQ ID NO: 5783 - protein, 9 aa, Artificial Sequence
  Description of Artificial Sequence: Synthetic peptide
NPCQEWDSE

SEQ ID NO: 5784 - protein, 9 aa, Artificial Sequence
  Description of Artificial Sequence: Synthetic peptide
NRGMNAWTA

SEQ ID NO: 5785 - protein, 9 aa, Artificial Sequence
  Description of Artificial Sequence: Synthetic peptide
NSCDWKNDY

SEQ ID NO: 5786 - protein, 9 aa, Artificial Sequence
  Description of Artificial Sequence: Synthetic peptide
NTCIEGQEN

SEQ ID NO: 5787 - protein, 9 aa, Artificial Sequence
  Description of Artificial Sequence: Synthetic peptide
NVGQITQDC

SEQ ID NO: 5788 - protein, 9 aa, Artificial Sequence
  Description of Artificial Sequence: Synthetic peptide
NWFDSEDMG

SEQ ID NO: 5789 - protein, 9 aa, Artificial Sequence
  Description of Artificial Sequence: Synthetic peptide
NYAENWCIE

SEQ ID NO: 5790 - protein, 9 aa, Artificial Sequence
  Description of Artificial Sequence: Synthetic peptide
NYRVHGGAG

SEQ ID NO: 5791 - protein, 9 aa, Artificial Sequence
  Description of Artificial Sequence: Synthetic peptide
NYRVHGSAA

SEQ ID NO: 5792 - protein, 9 aa, Artificial Sequence
  Description of Artificial Sequence: Synthetic peptide
NYRVRGSAG

SEQ ID NO: 5793 - protein, 9 aa, Artificial Sequence
  Description of Artificial Sequence: Synthetic peptide
PATGMLYEE

SEQ ID NO: 5794 - protein, 9 aa, Artificial Sequence
  Description of Artificial Sequence: Synthetic peptide
PKELFPTCM

SEQ ID NO: 5795 - protein, 9 aa, Artificial Sequence
  Description of Artificial Sequence: Synthetic peptide
PLCHVMADR

SEQ ID NO: 5796 - protein, 9 aa, Artificial Sequence
  Description of Artificial Sequence: Synthetic peptide
PMDWVAECR

SEQ ID NO: 5797 - protein, 9 aa, Artificial Sequence
  Description of Artificial Sequence: Synthetic peptide
PNNEFIQPF

SEQ ID NO: 5798 - protein, 9 aa, Artificial Sequence
  Description of Artificial Sequence: Synthetic peptide
PQCHVMDDR

SEQ ID NO: 5799 - protein, 9 aa, Artificial Sequence
  Description of Artificial Sequence: Synthetic peptide
PQCHVMSDR

SEQ ID NO: 5800 - protein, 9 aa, Artificial Sequence
  Description of Artificial Sequence: Synthetic peptide
PQCHVTADR

SEQ ID NO: 5801 - protein, 9 aa, Artificial Sequence
  Description of Artificial Sequence: Synthetic peptide
PQCLVMADR

SEQ ID NO: 5802 - protein, 9 aa, Artificial Sequence
  Description of Artificial Sequence: Synthetic peptide
PQCRVMADR

SEQ ID NO: 5803 - protein, 9 aa, Artificial Sequence
  Description of Artificial Sequence: Synthetic peptide
PQSLCNELC

SEQ ID NO: 5804 - protein, 9 aa, Artificial Sequence
  Description of Artificial Sequence: Synthetic peptide
PQYHVMADR

SEQ ID NO: 5805 - protein, 9 aa, Artificial Sequence
  Description of Artificial Sequence: Synthetic peptide
PVIQPCDER

SEQ ID NO: 5806 - protein, 9 aa, Artificial Sequence
  Description of Artificial Sequence: Synthetic peptide
PWGFGSDET

SEQ ID NO: 5807 - protein, 9 aa, Artificial Sequence
  Description of Artificial Sequence: Synthetic peptide
PWKIDFWYH

SEQ ID NO: 5808 - protein, 9 aa, Artificial Sequence
  Description of Artificial Sequence: Synthetic peptide
PWKVDFWDH

SEQ ID NO: 5809 - protein, 9 aa, Artificial Sequence
  Description of Artificial Sequence: Synthetic peptide
PWLSEFMHW

SEQ ID NO: 5810 - protein, 9 aa, Artificial Sequence
  Description of Artificial Sequence: Synthetic peptide
QAAGMLYEE

SEQ ID NO: 5811 - protein, 9 aa, Artificial Sequence
  Description of Artificial Sequence: Synthetic peptide
QANGMLYEE

SEQ ID NO: 5812 - protein, 9 aa, Artificial Sequence
  Description of Artificial Sequence: Synthetic peptide
QATRMLYEE

SEQ ID NO: 5813 - protein, 9 aa, Artificial Sequence
  Description of Artificial Sequence: Synthetic peptide
QATVMLYEE

SEQ ID NO: 5814 - protein, 9 aa, Artificial Sequence
  Description of Artificial Sequence: Synthetic peptide
QDFHEFAET

SEQ ID NO: 5815 - protein, 9 aa, Artificial Sequence
  Description of Artificial Sequence: Synthetic peptide
QDFHEFAPT

SEQ ID NO: 5816 - protein, 9 aa, Artificial Sequence
  Description of Artificial Sequence: Synthetic peptide
QDFHEFAQA

SEQ ID NO: 5817 - protein, 9 aa, Artificial Sequence
  Description of Artificial Sequence: Synthetic peptide
QDFHEFDQT

SEQ ID NO: 5818 - protein, 9 aa, Artificial Sequence
  Description of Artificial Sequence: Synthetic peptide
QDFHEFPQT

SEQ ID NO: 5819 - protein, 9 aa, Artificial Sequence
  Description of Artificial Sequence: Synthetic peptide
QDFPEFAQT

SEQ ID NO: 5820 - protein, 9 aa, Artificial Sequence
  Description of Artificial Sequence: Synthetic peptide
QDIHEFAQT

SEQ ID NO: 5821 - protein, 9 aa, Artificial Sequence
  Description of Artificial Sequence: Synthetic peptide
QFMCEIECR

SEQ ID NO: 5822 - protein, 9 aa, Artificial Sequence
  Description of Artificial Sequence: Synthetic peptide
QFMFEIECK

SEQ ID NO: 5823 - protein, 9 aa, Artificial Sequence
  Description of Artificial Sequence: Synthetic peptide
QHPEWKCMY

SEQ ID NO: 5824 - protein, 9 aa, Artificial Sequence
  Description of Artificial Sequence: Synthetic peptide
QKGISEFQR

SEQ ID NO: 5825 - protein, 9 aa, Artificial Sequence
  Description of Artificial Sequence: Synthetic peptide
QKNVWNNKW

SEQ ID NO: 5826 - protein, 9 aa, Artificial Sequence
  Description of Artificial Sequence: Synthetic peptide
QMDWVAGCR

SEQ ID NO: 5827 - protein, 9 aa, Artificial Sequence
  Description of Artificial Sequence: Synthetic peptide
QMDWVGECR

SEQ ID NO: 5828 - protein, 9 aa, Artificial Sequence
  Description of Artificial Sequence: Synthetic peptide
QNCFFMHWW

SEQ ID NO: 5829 - protein, 9 aa, Artificial Sequence
  Description of Artificial Sequence: Synthetic peptide
QNGHKFNEE

SEQ ID NO: 5830 - protein, 9 aa, Artificial Sequence
  Description of Artificial Sequence: Synthetic peptide
QNWFFLHWW

SEQ ID NO: 5831 - protein, 9 aa, Artificial Sequence
  Description of Artificial Sequence: Synthetic peptide
QPTGMLYEE

SEQ ID NO: 5832 - protein, 9 aa, Artificial Sequence
  Description of Artificial Sequence: Synthetic peptide
QQCHVMADR

SEQ ID NO: 5833 - protein, 9 aa, Artificial Sequence
  Description of Artificial Sequence: Synthetic peptide
QQHDWYQKY

SEQ ID NO: 5834 - protein, 9 aa, Artificial Sequence
  Description of Artificial Sequence: Synthetic peptide
QVPWESRLC

SEQ ID NO: 5835 - protein, 9 aa, Artificial Sequence
  Description of Artificial Sequence: Synthetic peptide
QVTGMLYEE

SEQ ID NO: 5836 - protein, 9 aa, Artificial Sequence
  Description of Artificial Sequence: Synthetic peptide
QVWNAHEEG

SEQ ID NO: 5837 - protein, 9 aa, Artificial Sequence
  Description of Artificial Sequence: Synthetic peptide
QWAFGSDET

SEQ ID NO: 5838 - protein, 9 aa, Artificial Sequence
  Description of Artificial Sequence: Synthetic peptide
QWESKEMGS

SEQ ID NO: 5839 - protein, 9 aa, Artificial Sequence
  Description of Artificial Sequence: Synthetic peptide
QWESKEMYS

SEQ ID NO: 5840 - protein, 9 aa, Artificial Sequence
  Description of Artificial Sequence: Synthetic peptide
QWGCGSDET

SEQ ID NO: 5841 - protein, 9 aa, Artificial Sequence
  Description of Artificial Sequence: Synthetic peptide
QWGFASDET

SEQ ID NO: 5842 - protein, 9 aa, Artificial Sequence
  Description of Artificial Sequence: Synthetic peptide
QWGFESDET

SEQ ID NO: 5843 - protein, 9 aa, Artificial Sequence
  Description of Artificial Sequence: Synthetic peptide
QWGFGADET

SEQ ID NO: 5844 - protein, 9 aa, Artificial Sequence
  Description of Artificial Sequence: Synthetic peptide
QWGFGSDEA

SEQ ID NO: 5845 - protein, 9 aa, Artificial Sequence
  Description of Artificial Sequence: Synthetic peptide
QWGFGSDEN

SEQ ID NO: 5846 - protein, 9 aa, Artificial Sequence
  Description of Artificial Sequence: Synthetic peptide
QWGFGSDEP

SEQ ID NO: 5847 - protein, 9 aa, Artificial Sequence
  Description of Artificial Sequence: Synthetic peptide
QWGFGSGET

SEQ ID NO: 5848 - protein, 9 aa, Artificial Sequence
  Description of Artificial Sequence: Synthetic peptide
QWGFGSHET

SEQ ID NO: 5849 - protein, 9 aa, Artificial Sequence
  Description of Artificial Sequence: Synthetic peptide
QWGFGSNET

SEQ ID NO: 5850 - protein, 9 aa, Artificial Sequence
  Description of Artificial Sequence: Synthetic peptide
QWGFGSVET

SEQ ID NO: 5851 - protein, 9 aa, Artificial Sequence
  Description of Artificial Sequence: Synthetic peptide
QWGFVSDET

SEQ ID NO: 5852 - protein, 9 aa, Artificial Sequence
  Description of Artificial Sequence: Synthetic peptide
QWGIGSDET

SEQ ID NO: 5853 - protein, 9 aa, Artificial Sequence
  Description of Artificial Sequence: Synthetic peptide
QWGSGSDET

SEQ ID NO: 5854 - protein, 9 aa, Artificial Sequence
  Description of Artificial Sequence: Synthetic peptide
QWGVGSDET

SEQ ID NO: 5855 - protein, 9 aa, Artificial Sequence
  Description of Artificial Sequence: Synthetic peptide
QWGYGSDET

SEQ ID NO: 5856 - protein, 9 aa, Artificial Sequence
  Description of Artificial Sequence: Synthetic peptide
QWKQWCWEF

SEQ ID NO: 5857 - protein, 9 aa, Artificial Sequence
  Description of Artificial Sequence: Synthetic peptide
QWVFGSDET

SEQ ID NO: 5858 - protein, 9 aa, Artificial Sequence
  Description of Artificial Sequence: Synthetic peptide
RDFHEFAQT

SEQ ID NO: 5859 - protein, 9 aa, Artificial Sequence
  Description of Artificial Sequence: Synthetic peptide
RDIMFTHQM

SEQ ID NO: 5860 - protein, 9 aa, Artificial Sequence
  Description of Artificial Sequence: Synthetic peptide
RHELLEWDS

SEQ ID NO: 5861 - protein, 9 aa, Artificial Sequence
  Description of Artificial Sequence: Synthetic peptide
RHQLLEWAS

SEQ ID NO: 5862 - protein, 9 aa, Artificial Sequence
  Description of Artificial Sequence: Synthetic peptide
RHQLMEWDS

SEQ ID NO: 5863 - protein, 9 aa, Artificial Sequence
  Description of Artificial Sequence: Synthetic peptide
RHQLVEWDS

SEQ ID NO: 5864 - protein, 9 aa, Artificial Sequence
  Description of Artificial Sequence: Synthetic peptide
RHRLLEWDS

SEQ ID NO: 5865 - protein, 9 aa, Artificial Sequence
  Description of Artificial Sequence: Synthetic peptide
RKNVWNNKW

SEQ ID NO: 5866 - protein, 9 aa, Artificial Sequence
  Description of Artificial Sequence: Synthetic peptide
RMDWVAECR

SEQ ID NO: 5867 - protein, 9 aa, Artificial Sequence
  Description of Artificial Sequence: Synthetic peptide
RNNEFIQPF

SEQ ID NO: 5868 - protein, 9 aa, Artificial Sequence
  Description of Artificial Sequence: Synthetic peptide
RRQLLEWDS

SEQ ID NO: 5869 - protein, 9 aa, Artificial Sequence
  Description of Artificial Sequence: Synthetic peptide
RSSTFEHHK

SEQ ID NO: 5870 - protein, 9 aa, Artificial Sequence
  Description of Artificial Sequence: Synthetic peptide
RSTTFERHK

SEQ ID NO: 5871 - protein, 9 aa, Artificial Sequence
  Description of Artificial Sequence: Synthetic peptide
RVIQPCDER

SEQ ID NO: 5872 - protein, 9 aa, Artificial Sequence
  Description of Artificial Sequence: Synthetic peptide
RVTRDERWG

SEQ ID NO: 5873 - protein, 9 aa, Artificial Sequence
  Description of Artificial Sequence: Synthetic peptide
RWGFGSDEA

SEQ ID NO: 5874 - protein, 9 aa, Artificial Sequence
  Description of Artificial Sequence: Synthetic peptide
RWKQWCWEF

SEQ ID NO: 5875 - protein, 9 aa, Artificial Sequence
  Description of Artificial Sequence: Synthetic peptide
SCFHVAEMF

SEQ ID NO: 5876 - protein, 9 aa, Artificial Sequence
  Description of Artificial Sequence: Synthetic peptide
SCILRLISS

SEQ ID NO: 5877 - protein, 9 aa, Artificial Sequence
  Description of Artificial Sequence: Synthetic peptide
SCYSHICRI

SEQ ID NO: 5878 - protein, 9 aa, Artificial Sequence
  Description of Artificial Sequence: Synthetic peptide
SFDPSWWMY

SEQ ID NO: 5879 - protein, 9 aa, Artificial Sequence
  Description of Artificial Sequence: Synthetic peptide
SFFLRLISS

SEQ ID NO: 5880 - protein, 9 aa, Artificial Sequence
  Description of Artificial Sequence: Synthetic peptide
SFHPIWWMY

SEQ ID NO: 5881 - protein, 9 aa, Artificial Sequence
  Description of Artificial Sequence: Synthetic peptide
SFHPSWWMS

SEQ ID NO: 5882 - protein, 9 aa, Artificial Sequence
  Description of Artificial Sequence: Synthetic peptide
SFHPSWWVY

SEQ ID NO: 5883 - protein, 9 aa, Artificial Sequence
  Description of Artificial Sequence: Synthetic peptide
SFHPTWWMY

SEQ ID NO: 5884 - protein, 9 aa, Artificial Sequence
  Description of Artificial Sequence: Synthetic peptide
SFHRSWWMY

SEQ ID NO: 5885 - protein, 9 aa, Artificial Sequence
  Description of Artificial Sequence: Synthetic peptide
SFHSSWWMY

SEQ ID NO: 5886 - protein, 9 aa, Artificial Sequence
  Description of Artificial Sequence: Synthetic peptide
SFHTSWWMY

SEQ ID NO: 5887 - protein, 9 aa, Artificial Sequence
  Description of Artificial Sequence: Synthetic peptide
SFILRLICS

SEQ ID NO: 5888 - protein, 9 aa, Artificial Sequence
  Description of Artificial Sequence: Synthetic peptide
SFILRLISF

SEQ ID NO: 5889 - protein, 9 aa, Artificial Sequence
  Description of Artificial Sequence: Synthetic peptide
SFILRPISS

SEQ ID NO: 5890 - protein, 9 aa, Artificial Sequence
  Description of Artificial Sequence: Synthetic peptide
SFNPSWWMY

SEQ ID NO: 5891 - protein, 9 aa, Artificial Sequence
  Description of Artificial Sequence: Synthetic peptide
SFNSHICRI

SEQ ID NO: 5892 - protein, 9 aa, Artificial Sequence
  Description of Artificial Sequence: Synthetic peptide
SFSSHICRI

SEQ ID NO: 5893 - protein, 9 aa, Artificial Sequence
  Description of Artificial Sequence: Synthetic peptide
SFYNHICRI

SEQ ID NO: 5894 - protein, 9 aa, Artificial Sequence
  Description of Artificial Sequence: Synthetic peptide
SFYPSWWMY

SEQ ID NO: 5895 - protein, 9 aa, Artificial Sequence
  Description of Artificial Sequence: Synthetic peptide
SFYSHICHI

SEQ ID NO: 5896 - protein, 9 aa, Artificial Sequence
  Description of Artificial Sequence: Synthetic peptide
SFYSHICPI

SEQ ID NO: 5897 - protein, 9 aa, Artificial Sequence
  Description of Artificial Sequence: Synthetic peptide
SFYSHICRM

SEQ ID NO: 5898 - protein, 9 aa, Artificial Sequence
  Description of Artificial Sequence: Synthetic peptide
SFYSLICRI

SEQ ID NO: 5899 - protein, 9 aa, Artificial Sequence
  Description of Artificial Sequence: Synthetic peptide
SFYSNICRI

SEQ ID NO: 5900 - protein, 9 aa, Artificial Sequence
  Description of Artificial Sequence: Synthetic peptide
SFYSPICRI

SEQ ID NO: 5901 - protein, 9 aa, Artificial Sequence
  Description of Artificial Sequence: Synthetic peptide
SFYSYICRI

SEQ ID NO: 5902 - protein, 9 aa, Artificial Sequence
  Description of Artificial Sequence: Synthetic peptide
SGFPMWDYW

SEQ ID NO: 5903 - protein, 9 aa, Artificial Sequence
  Description of Artificial Sequence: Synthetic peptide
SGIPMWDHW

SEQ ID NO: 5904 - protein, 9 aa, Artificial Sequence
  Description of Artificial Sequence: Synthetic peptide
SGIPMWDYR

SEQ ID NO: 5905 - protein, 9 aa, Artificial Sequence
  Description of Artificial Sequence: Synthetic peptide
SGIPMWEYW

SEQ ID NO: 5906 - protein, 9 aa, Artificial Sequence
  Description of Artificial Sequence: Synthetic peptide
SGIPMWNYW

SEQ ID NO: 5907 - protein, 9 aa, Artificial Sequence
  Description of Artificial Sequence: Synthetic peptide
SGIPVWDYW

SEQ ID NO: 5908 - protein, 9 aa, Artificial Sequence
  Description of Artificial Sequence: Synthetic peptide
SGIQMWDYW

SEQ ID NO: 5909 - protein, 9 aa, Artificial Sequence
  Description of Artificial Sequence: Synthetic peptide
SGIRMWDYW

SEQ ID NO: 5910 - protein, 9 aa, Artificial Sequence
  Description of Artificial Sequence: Synthetic peptide
SGNPMWDYW

SEQ ID NO: 5911 - protein, 9 aa, Artificial Sequence
  Description of Artificial Sequence: Synthetic peptide
SILIMAYSW

SEQ ID NO: 5912 - protein, 9 aa, Artificial Sequence
  Description of Artificial Sequence: Synthetic peptide
SIYSHICRI

SEQ ID NO: 5913 - protein, 9 aa, Artificial Sequence
  Description of Artificial Sequence: Synthetic peptide
SMNSLWHMR

SEQ ID NO: 5914 - protein, 9 aa, Artificial Sequence
  Description of Artificial Sequence: Synthetic peptide
SQSLCNELC

SEQ ID NO: 5915 - protein, 9 aa, Artificial Sequence
  Description of Artificial Sequence: Synthetic peptide
SRAQIQDEW

SEQ ID NO: 5916 - protein, 9 aa, Artificial Sequence
  Description of Artificial Sequence: Synthetic peptide
SRTIWGADM

SEQ ID NO: 5917 - protein, 9 aa, Artificial Sequence
  Description of Artificial Sequence: Synthetic peptide
SSILRLISS

SEQ ID NO: 5918 - protein, 9 aa, Artificial Sequence
  Description of Artificial Sequence: Synthetic peptide
SSIPMWDYW

SEQ ID NO: 5919 - protein, 9 aa, Artificial Sequence
  Description of Artificial Sequence: Synthetic peptide
SVPMDHCWA

SEQ ID NO: 5920 - protein, 9 aa, Artificial Sequence
  Description of Artificial Sequence: Synthetic peptide
SWDRQWDDF

SEQ ID NO: 5921 - protein, 9 aa, Artificial Sequence
  Description of Artificial Sequence: Synthetic peptide
SWKIDFWDH

SEQ ID NO: 5922 - protein, 9 aa, Artificial Sequence
  Description of Artificial Sequence: Synthetic peptide
SYAVLQRTM

SEQ ID NO: 5923 - protein, 9 aa, Artificial Sequence
  Description of Artificial Sequence: Synthetic peptide
SYILRLISS

SEQ ID NO: 5924 - protein, 9 aa, Artificial Sequence
  Description of Artificial Sequence: Synthetic peptide
SYYSHICRI

SEQ ID NO: 5925 - protein, 9 aa, Artificial Sequence
  Description of Artificial Sequence: Synthetic peptide
TADAVPCHH

SEQ ID NO: 5926 - protein, 9 aa, Artificial Sequence
  Description of Artificial Sequence: Synthetic peptide
TADVVLCHH

SEQ ID NO: 5927 - protein, 9 aa, Artificial Sequence
  Description of Artificial Sequence: Synthetic peptide
TADVVPCDH

SEQ ID NO: 5928 - protein, 9 aa, Artificial Sequence
  Description of Artificial Sequence: Synthetic peptide
TAEAQDCNP

SEQ ID NO: 5929 - protein, 9 aa, Artificial Sequence
  Description of Artificial Sequence: Synthetic peptide
TAEVVPCHH

SEQ ID NO: 5930 - protein, 9 aa, Artificial Sequence
  Description of Artificial Sequence: Synthetic peptide
TANVVPCHH

SEQ ID NO: 5931 - protein, 9 aa, Artificial Sequence
  Description of Artificial Sequence: Synthetic peptide
TCEAQDCNP

SEQ ID NO: 5932 - protein, 9 aa, Artificial Sequence
  Description of Artificial Sequence: Synthetic peptide
TCEGREVDS

SEQ ID NO: 5933 - protein, 9 aa, Artificial Sequence
  Description of Artificial Sequence: Synthetic peptide
TCEGRKLDS

SEQ ID NO: 5934 - protein, 9 aa, Artificial Sequence
  Description of Artificial Sequence: Synthetic peptide
TCFDSEDMG

SEQ ID NO: 5935 - protein, 9 aa, Artificial Sequence
  Description of Artificial Sequence: Synthetic peptide
TCFHAAEMF

SEQ ID NO: 5936 - protein, 9 aa, Artificial Sequence
  Description of Artificial Sequence: Synthetic peptide
TCFHFAEMF

SEQ ID NO: 5937 - protein, 9 aa, Artificial Sequence
  Description of Artificial Sequence: Synthetic peptide
TCFHGAEMF

SEQ ID NO: 5938 - protein, 9 aa, Artificial Sequence
  Description of Artificial Sequence: Synthetic peptide
TCFHIAEMF

SEQ ID NO: 5939 - protein, 9 aa, Artificial Sequence
  Description of Artificial Sequence: Synthetic peptide
TCFHVAAMF

SEQ ID NO: 5940 - protein, 9 aa, Artificial Sequence
  Description of Artificial Sequence: Synthetic peptide
TCFHVDEMF

SEQ ID NO: 5941 - protein, 9 aa, Artificial Sequence
  Description of Artificial Sequence: Synthetic peptide
TCFHVTEMF

SEQ ID NO: 5942 - protein, 9 aa, Artificial Sequence
  Description of Artificial Sequence: Synthetic peptide
TCFNVAEMF

SEQ ID NO: 5943 - protein, 9 aa, Artificial Sequence
  Description of Artificial Sequence: Synthetic peptide
TCFPVAEMF

SEQ ID NO: 5944 - protein, 9 aa, Artificial Sequence
  Description of Artificial Sequence: Synthetic peptide
TCFRVAEMF

SEQ ID NO: 5945 - protein, 9 aa, Artificial Sequence
  Description of Artificial Sequence: Synthetic peptide
TCGRDEFAF

SEQ ID NO: 5946 - protein, 9 aa, Artificial Sequence
  Description of Artificial Sequence: Synthetic peptide
TCGRDLFAF

SEQ ID NO: 5947 - protein, 9 aa, Artificial Sequence
  Description of Artificial Sequence: Synthetic peptide
TCGRDQCAF

SEQ ID NO: 5948 - protein, 9 aa, Artificial Sequence
  Description of Artificial Sequence: Synthetic peptide
TCGRDQFAY

SEQ ID NO: 5949 - protein, 9 aa, Artificial Sequence
  Description of Artificial Sequence: Synthetic peptide
TCGRDQFSF

SEQ ID NO: 5950 - protein, 9 aa, Artificial Sequence
  Description of Artificial Sequence: Synthetic peptide
TCIHVAEMF

SEQ ID NO: 5951 - protein, 9 aa, Artificial Sequence
  Description of Artificial Sequence: Synthetic peptide
TFFHVAEMF

SEQ ID NO: 5952 - protein, 9 aa, Artificial Sequence
  Description of Artificial Sequence: Synthetic peptide
TFHPSWWMY

SEQ ID NO: 5953 - protein, 9 aa, Artificial Sequence
  Description of Artificial Sequence: Synthetic peptide
TGDVVPCHH

SEQ ID NO: 5954 - protein, 9 aa, Artificial Sequence
  Description of Artificial Sequence: Synthetic peptide
TGEAEDCNP

SEQ ID NO: 5955 - protein, 9 aa, Artificial Sequence
  Description of Artificial Sequence: Synthetic peptide
TGEAQDCNA

SEQ ID NO: 5956 - protein, 9 aa, Artificial Sequence
  Description of Artificial Sequence: Synthetic peptide
TGEAQDCSP

SEQ ID NO: 5957 - protein, 9 aa, Artificial Sequence
  Description of Artificial Sequence: Synthetic peptide
TGFHVAEMF

SEQ ID NO: 5958 - protein, 9 aa, Artificial Sequence
  Description of Artificial Sequence: Synthetic peptide
TGGCWPREC

SEQ ID NO: 5959 - protein, 9 aa, Artificial Sequence
  Description of Artificial Sequence: Synthetic peptide
TGIPMWDYW

SEQ ID NO: 5960 - protein, 9 aa, Artificial Sequence
  Description of Artificial Sequence: Synthetic peptide
TGKAQDCNP

SEQ ID NO: 5961 - protein, 9 aa, Artificial Sequence
  Description of Artificial Sequence: Synthetic peptide
TGMSELADE

SEQ ID NO: 5962 - protein, 9 aa, Artificial Sequence
  Description of Artificial Sequence: Synthetic peptide
TGPMDHCWA

SEQ ID NO: 5963 - protein, 9 aa, Artificial Sequence
  Description of Artificial Sequence: Synthetic peptide
THFPWSGEA

SEQ ID NO: 5964 - protein, 9 aa, Artificial Sequence
  Description of Artificial Sequence: Synthetic peptide
THQLLEWDS

SEQ ID NO: 5965 - protein, 9 aa, Artificial Sequence
  Description of Artificial Sequence: Synthetic peptide
TMEPLVCDD

SEQ ID NO: 5966 - protein, 9 aa, Artificial Sequence
  Description of Artificial Sequence: Synthetic peptide
TMSVVQCER

SEQ ID NO: 5967 - protein, 9 aa, Artificial Sequence
  Description of Artificial Sequence: Synthetic peptide
TNDEFIQPF

SEQ ID NO: 5968 - protein, 9 aa, Artificial Sequence
  Description of Artificial Sequence: Synthetic peptide
TNDHFVCYL

SEQ ID NO: 5969 - protein, 9 aa, Artificial Sequence
  Description of Artificial Sequence: Synthetic peptide
TNHCIFKTM

SEQ ID NO: 5970 - protein, 9 aa, Artificial Sequence
  Description of Artificial Sequence: Synthetic peptide
TNHEFIQPF

SEQ ID NO: 5971 - protein, 9 aa, Artificial Sequence
  Description of Artificial Sequence: Synthetic peptide
TNIEFIQPF

SEQ ID NO: 5972 - protein, 9 aa, Artificial Sequence
  Description of Artificial Sequence: Synthetic peptide
TNMSELADE

SEQ ID NO: 5973 - protein, 9 aa, Artificial Sequence
  Description of Artificial Sequence: Synthetic peptide
TNNAVIQPF

SEQ ID NO: 5974 - protein, 9 aa, Artificial Sequence
  Description of Artificial Sequence: Synthetic peptide
TNNECIQPF

SEQ ID NO: 5975 - protein, 9 aa, Artificial Sequence
  Description of Artificial Sequence: Synthetic peptide
TNNEFFQPF

SEQ ID NO: 5976 - protein, 9 aa, Artificial Sequence
  Description of Artificial Sequence: Synthetic peptide
TNNEFIEPF

SEQ ID NO: 5977 - protein, 9 aa, Artificial Sequence
  Description of Artificial Sequence: Synthetic peptide
TNNEFIQLF

SEQ ID NO: 5978 - protein, 9 aa, Artificial Sequence
  Description of Artificial Sequence: Synthetic peptide
TNNEFIQQF

SEQ ID NO: 5979 - protein, 9 aa, Artificial Sequence
  Description of Artificial Sequence: Synthetic peptide
TNNEFIQRF

SEQ ID NO: 5980 - protein, 9 aa, Artificial Sequence
  Description of Artificial Sequence: Synthetic peptide
TNNEFIQSF

SEQ ID NO: 5981 - protein, 9 aa, Artificial Sequence
  Description of Artificial Sequence: Synthetic peptide
TNNEFIRPF

SEQ ID NO: 5982 - protein, 9 aa, Artificial Sequence
  Description of Artificial Sequence: Synthetic peptide
TNNEFLQPF

SEQ ID NO: 5983 - protein, 9 aa, Artificial Sequence
  Description of Artificial Sequence: Synthetic peptide
TNNEFVQPF

SEQ ID NO: 5984 - protein, 9 aa, Artificial Sequence
  Description of Artificial Sequence: Synthetic peptide
TNNEIIQPF

SEQ ID NO: 5985 - protein, 9 aa, Artificial Sequence
  Description of Artificial Sequence: Synthetic peptide
TNNEVIQPF

SEQ ID NO: 5986 - protein, 9 aa, Artificial Sequence
  Description of Artificial Sequence: Synthetic peptide
TNNQFIQPF

SEQ ID NO: 5987 - protein, 9 aa, Artificial Sequence
  Description of Artificial Sequence: Synthetic peptide
TNQCLFKTM

SEQ ID NO: 5988 - protein, 9 aa, Artificial Sequence
  Description of Artificial Sequence: Synthetic peptide
TNSEFIQPF

SEQ ID NO: 5989 - protein, 9 aa, Artificial Sequence
  Description of Artificial Sequence: Synthetic peptide
TNTEFIQPF

SEQ ID NO: 5990 - protein, 9 aa, Artificial Sequence
  Description of Artificial Sequence: Synthetic peptide
TNYEFIQPF

SEQ ID NO: 5991 - protein, 9 aa, Artificial Sequence
  Description of Artificial Sequence: Synthetic peptide
TRAQIQDEW

SEQ ID NO: 5992 - protein, 9 aa, Artificial Sequence
  Description of Artificial Sequence: Synthetic peptide
TSDVVPCHH

SEQ ID NO: 5993 - protein, 9 aa, Artificial Sequence
  Description of Artificial Sequence: Synthetic peptide
TSMNELADE

SEQ ID NO: 5994 - protein, 9 aa, Artificial Sequence
  Description of Artificial Sequence: Synthetic peptide
TSNEFIQPF

SEQ ID NO: 5995 - protein, 9 aa, Artificial Sequence
  Description of Artificial Sequence: Synthetic peptide
TVPMDHCWP

SEQ ID NO: 5996 - protein, 9 aa, Artificial Sequence
  Description of Artificial Sequence: Synthetic peptide
TVPMDHCWS

SEQ ID NO: 5997 - protein, 9 aa, Artificial Sequence
  Description of Artificial Sequence: Synthetic peptide
TWFHVAEMF

SEQ ID NO: 5998 - protein, 9 aa, Artificial Sequence
  Description of Artificial Sequence: Synthetic peptide
TWLPWINER

SEQ ID NO: 5999 - protein, 9 aa, Artificial Sequence
  Description of Artificial Sequence: Synthetic peptide
TYAVLKRTM

SEQ ID NO: 6000 - protein, 9 aa, Artificial Sequence
  Description of Artificial Sequence: Synthetic peptide
VATDSVNES

SEQ ID NO: 6001 - protein, 9 aa, Artificial Sequence
  Description of Artificial Sequence: Synthetic peptide
VGEERVGEP

SEQ ID NO: 6002 - protein, 9 aa, Artificial Sequence
  Description of Artificial Sequence: Synthetic peptide
VGGERVGEA

SEQ ID NO: 6003 - protein, 9 aa, Artificial Sequence
  Description of Artificial Sequence: Synthetic peptide
VGVMLNAMQ

SEQ ID NO: 6004 - protein, 9 aa, Artificial Sequence
  Description of Artificial Sequence: Synthetic peptide
VKKIKRCEG

SEQ ID NO: 6005 - protein, 9 aa, Artificial Sequence
  Description of Artificial Sequence: Synthetic peptide
VMEPLVCDD

SEQ ID NO: 6006 - protein, 9 aa, Artificial Sequence
  Description of Artificial Sequence: Synthetic peptide
VMYPWISCL

SEQ ID NO: 6007 - protein, 9 aa, Artificial Sequence
  Description of Artificial Sequence: Synthetic peptide
VNDDDQCCM

SEQ ID NO: 6008 - protein, 9 aa, Artificial Sequence
  Description of Artificial Sequence: Synthetic peptide
VNDHDQCCM

SEQ ID NO: 6009 - protein, 9 aa, Artificial Sequence
  Description of Artificial Sequence: Synthetic peptide
VNDNDQCCM

SEQ ID NO: 6010 - protein, 9 aa, Artificial Sequence
  Description of Artificial Sequence: Synthetic peptide
VNDYAQCCM

SEQ ID NO: 6011 - protein, 9 aa, Artificial Sequence
  Description of Artificial Sequence: Synthetic peptide
VNDYDKCCM

SEQ ID NO: 6012 - protein, 9 aa, Artificial Sequence
  Description of Artificial Sequence: Synthetic peptide
VNDYDQCCR

SEQ ID NO: 6013 - protein, 9 aa, Artificial Sequence
  Description of Artificial Sequence: Synthetic peptide
VNDYDQCCV

SEQ ID NO: 6014 - protein, 9 aa, Artificial Sequence
  Description of Artificial Sequence: Synthetic peptide
VNDYDQCFM

SEQ ID NO: 6015 - protein, 9 aa, Artificial Sequence
  Description of Artificial Sequence: Synthetic peptide
VNDYDQCWM

SEQ ID NO: 6016 - protein, 9 aa, Artificial Sequence
  Description of Artificial Sequence: Synthetic peptide
VNDYDQCYM

SEQ ID NO: 6017 - protein, 9 aa, Artificial Sequence
  Description of Artificial Sequence: Synthetic peptide
VNDYEQCCM

SEQ ID NO: 6018 - protein, 9 aa, Artificial Sequence
  Description of Artificial Sequence: Synthetic peptide
VNDYVQCCM

SEQ ID NO: 6019 - protein, 9 aa, Artificial Sequence
  Description of Artificial Sequence: Synthetic peptide
VNGHKFNEE

SEQ ID NO: 6020 - protein, 9 aa, Artificial Sequence
  Description of Artificial Sequence: Synthetic peptide
VNGYDQCCM

SEQ ID NO: 6021 - protein, 9 aa, Artificial Sequence
  Description of Artificial Sequence: Synthetic peptide
VNHYDQCCM

SEQ ID NO: 6022 - protein, 9 aa, Artificial Sequence
  Description of Artificial Sequence: Synthetic peptide
VNNYDQCCM

SEQ ID NO: 6023 - protein, 9 aa, Artificial Sequence
  Description of Artificial Sequence: Synthetic peptide
VQKLFNSTV

SEQ ID NO: 6024 - protein, 9 aa, Artificial Sequence
  Description of Artificial Sequence: Synthetic peptide
VQLLSLCPS

SEQ ID NO: 6025 - protein, 9 aa, Artificial Sequence
  Description of Artificial Sequence: Synthetic peptide
VSDLMHNVH

SEQ ID NO: 6026 - protein, 9 aa, Artificial Sequence
  Description of Artificial Sequence: Synthetic peptide
VSGQIDEMS

SEQ ID NO: 6027 - protein, 9 aa, Artificial Sequence
  Description of Artificial Sequence: Synthetic peptide
VVIQPCDER

SEQ ID NO: 6028 - protein, 9 aa, Artificial Sequence
  Description of Artificial Sequence: Synthetic peptide
VWAAMEYEE

SEQ ID NO: 6029 - protein, 9 aa, Artificial Sequence
  Description of Artificial Sequence: Synthetic peptide
VWDCQWDDF

SEQ ID NO: 6030 - protein, 9 aa, Artificial Sequence
  Description of Artificial Sequence: Synthetic peptide
VWEMPPIDM

SEQ ID NO: 6031 - protein, 9 aa, Artificial Sequence
  Description of Artificial Sequence: Synthetic peptide
VWESSSIIS

SEQ ID NO: 6032 - protein, 9 aa, Artificial Sequence
  Description of Artificial Sequence: Synthetic peptide
VWKKPPIDM

SEQ ID NO: 6033 - protein, 9 aa, Artificial Sequence
  Description of Artificial Sequence: Synthetic peptide
VWKMLPIDM

SEQ ID NO: 6034 - protein, 9 aa, Artificial Sequence
  Description of Artificial Sequence: Synthetic peptide
VWKMPPIDT

SEQ ID NO: 6035 - protein, 9 aa, Artificial Sequence
  Description of Artificial Sequence: Synthetic peptide
VWKMPPIDV

SEQ ID NO: 6036 - protein, 9 aa, Artificial Sequence
  Description of Artificial Sequence: Synthetic peptide
VWKMPPLDM

SEQ ID NO: 6037 - protein, 9 aa, Artificial Sequence
  Description of Artificial Sequence: Synthetic peptide
VWKMPPMDM

SEQ ID NO: 6038 - protein, 9 aa, Artificial Sequence
  Description of Artificial Sequence: Synthetic peptide
VWKMPPVDM

SEQ ID NO: 6039 - protein, 9 aa, Artificial Sequence
  Description of Artificial Sequence: Synthetic peptide
VWKMPQIDM

SEQ ID NO: 6040 - protein, 9 aa, Artificial Sequence
  Description of Artificial Sequence: Synthetic peptide
VWKMPSIDM

SEQ ID NO: 6041 - protein, 9 aa, Artificial Sequence
  Description of Artificial Sequence: Synthetic peptide
VWKMSPIDM

SEQ ID NO: 6042 - protein, 9 aa, Artificial Sequence
  Description of Artificial Sequence: Synthetic peptide
VWKQWCWEF

SEQ ID NO: 6043 - protein, 9 aa, Artificial Sequence
  Description of Artificial Sequence: Synthetic peptide
VWKRPPIDM

SEQ ID NO: 6044 - protein, 9 aa, Artificial Sequence
  Description of Artificial Sequence: Synthetic peptide
VWKTPPIDM

SEQ ID NO: 6045 - protein, 9 aa, Artificial Sequence
  Description of Artificial Sequence: Synthetic peptide
VWKVPPIDM

SEQ ID NO: 6046 - protein, 9 aa, Artificial Sequence
  Description of Artificial Sequence: Synthetic peptide
VWQMPPIDM

SEQ ID NO: 6047 - protein, 9 aa, Artificial Sequence
  Description of Artificial Sequence: Synthetic peptide
VWTMPPIDM

SEQ ID NO: 6048 - protein, 9 aa, Artificial Sequence
  Description of Artificial Sequence: Synthetic peptide
WAKCQFGAT

SEQ ID NO: 6049 - protein, 9 aa, Artificial Sequence
  Description of Artificial Sequence: Synthetic peptide
WCRMDNKKS

SEQ ID NO: 6050 - protein, 9 aa, Artificial Sequence
  Description of Artificial Sequence: Synthetic peptide
WCRWPFYSE

SEQ ID NO: 6051 - protein, 9 aa, Artificial Sequence
  Description of Artificial Sequence: Synthetic peptide
WHCDAMECF

SEQ ID NO: 6052 - protein, 9 aa, Artificial Sequence
  Description of Artificial Sequence: Synthetic peptide
WILIMASSW

SEQ ID NO: 6053 - protein, 9 aa, Artificial Sequence
  Description of Artificial Sequence: Synthetic peptide
WILIMAYAW

SEQ ID NO: 6054 - protein, 9 aa, Artificial Sequence
  Description of Artificial Sequence: Synthetic peptide
WILIMAYSL

SEQ ID NO: 6055 - protein, 9 aa, Artificial Sequence
  Description of Artificial Sequence: Synthetic peptide
WILIMAYTW

SEQ ID NO: 6056 - protein, 9 aa, Artificial Sequence
  Description of Artificial Sequence: Synthetic peptide
WILIMEYSW

SEQ ID NO: 6057 - protein, 9 aa, Artificial Sequence
  Description of Artificial Sequence: Synthetic peptide
WILIMSYSW

SEQ ID NO: 6058 - protein, 9 aa, Artificial Sequence
  Description of Artificial Sequence: Synthetic peptide
WILIMTYSW

SEQ ID NO: 6059 - protein, 9 aa, Artificial Sequence
  Description of Artificial Sequence: Synthetic peptide
WILIMVYSW

SEQ ID NO: 6060 - protein, 9 aa, Artificial Sequence
  Description of Artificial Sequence: Synthetic peptide
WILSMAYSW

SEQ ID NO: 6061 - protein, 9 aa, Artificial Sequence
  Description of Artificial Sequence: Synthetic peptide
WIMIMAYSW

SEQ ID NO: 6062 - protein, 9 aa, Artificial Sequence
  Description of Artificial Sequence: Synthetic peptide
WIPIMAYSW

SEQ ID NO: 6063 - protein, 9 aa, Artificial Sequence
  Description of Artificial Sequence: Synthetic peptide
WIQIMAYSW

SEQ ID NO: 6064 - protein, 9 aa, Artificial Sequence
  Description of Artificial Sequence: Synthetic peptide
WIRIMAYSW

SEQ ID NO: 6065 - protein, 9 aa, Artificial Sequence
  Description of Artificial Sequence: Synthetic peptide
WIVIMAYSW

SEQ ID NO: 6066 - protein, 9 aa, Artificial Sequence
  Description of Artificial Sequence: Synthetic peptide
WLIHLWTQF

SEQ ID NO: 6067 - protein, 9 aa, Artificial Sequence
  Description of Artificial Sequence: Synthetic peptide
WLIPLWAQF

SEQ ID NO: 6068 - protein, 9 aa, Artificial Sequence
  Description of Artificial Sequence: Synthetic peptide
WLIPLWPQF

SEQ ID NO: 6069 - protein, 9 aa, Artificial Sequence
  Description of Artificial Sequence: Synthetic peptide
WLIPLWTEF

SEQ ID NO: 6070 - protein, 9 aa, Artificial Sequence
  Description of Artificial Sequence: Synthetic peptide
WLIPMWTQF

SEQ ID NO: 6071 - protein, 9 aa, Artificial Sequence
  Description of Artificial Sequence: Synthetic peptide
WLIPPWTQF

SEQ ID NO: 6072 - protein, 9 aa, Artificial Sequence
  Description of Artificial Sequence: Synthetic peptide
WLIPVWTQF

SEQ ID NO: 6073 - protein, 9 aa, Artificial Sequence
  Description of Artificial Sequence: Synthetic peptide
WLIRLWTQF

SEQ ID NO: 6074 - protein, 9 aa, Artificial Sequence
  Description of Artificial Sequence: Synthetic peptide
WLLIMAYSW

SEQ ID NO: 6075 - protein, 9 aa, Artificial Sequence
  Description of Artificial Sequence: Synthetic peptide
WLLPLWTQF

SEQ ID NO: 6076 - protein, 9 aa, Artificial Sequence
  Description of Artificial Sequence: Synthetic peptide
WPSIWKNEQ

SEQ ID NO: 6077 - protein, 9 aa, Artificial Sequence
  Description of Artificial Sequence: Synthetic peptide
WPSIWNNER

SEQ ID NO: 6078 - protein, 9 aa, Artificial Sequence
  Description of Artificial Sequence: Synthetic peptide
WQMRMQNKF

SEQ ID NO: 6079 - protein, 9 aa, Artificial Sequence
  Description of Artificial Sequence: Synthetic peptide
WSKCQFGAA

SEQ ID NO: 6080 - protein, 9 aa, Artificial Sequence
  Description of Artificial Sequence: Synthetic peptide
WSKCQFGAM

SEQ ID NO: 6081 - protein, 9 aa, Artificial Sequence
  Description of Artificial Sequence: Synthetic peptide
WSKCRFGAT

SEQ ID NO: 6082 - protein, 9 aa, Artificial Sequence
  Description of Artificial Sequence: Synthetic peptide
WSKFQFGAT

SEQ ID NO: 6083 - protein, 9 aa, Artificial Sequence
  Description of Artificial Sequence: Synthetic peptide
WSKWQFGAT

SEQ ID NO: 6084 - protein, 9 aa, Artificial Sequence
  Description of Artificial Sequence: Synthetic peptide
WSLIMAYSW

SEQ ID NO: 6085 - protein, 9 aa, Artificial Sequence
  Description of Artificial Sequence: Synthetic peptide
WSQCQFGAT

SEQ ID NO: 6086 - protein, 9 aa, Artificial Sequence
  Description of Artificial Sequence: Synthetic peptide
WSRCQFGAT

SEQ ID NO: 6087 - protein, 9 aa, Artificial Sequence
  Description of Artificial Sequence: Synthetic peptide
WTIACIQRG

SEQ ID NO: 6088 - protein, 9 aa, Artificial Sequence
  Description of Artificial Sequence: Synthetic peptide
WTNDCIQRG

SEQ ID NO: 6089 - protein, 9 aa, Artificial Sequence
  Description of Artificial Sequence: Synthetic peptide
WVDSMLHKW

SEQ ID NO: 6090 - protein, 9 aa, Artificial Sequence
  Description of Artificial Sequence: Synthetic peptide
WVLIMAYSW

SEQ ID NO: 6091 - protein, 9 aa, Artificial Sequence
  Description of Artificial Sequence: Synthetic peptide
YASYKAMED

SEQ ID NO: 6092 - protein, 9 aa, Artificial Sequence
  Description of Artificial Sequence: Synthetic peptide
YCFDSEDMG

SEQ ID NO: 6093 - protein, 9 aa, Artificial Sequence
  Description of Artificial Sequence: Synthetic peptide
YDIMFTHQM

SEQ ID NO: 6094 - protein, 9 aa, Artificial Sequence
  Description of Artificial Sequence: Synthetic peptide
YDQMMGLER

SEQ ID NO: 6095 - protein, 9 aa, Artificial Sequence
  Description of Artificial Sequence: Synthetic peptide
YFAADERWG

SEQ ID NO: 6096 - protein, 9 aa, Artificial Sequence
  Description of Artificial Sequence: Synthetic peptide
YFQQKHNLF

SEQ ID NO: 6097 - protein, 9 aa, Artificial Sequence
  Description of Artificial Sequence: Synthetic peptide
YFTADEQWG

SEQ ID NO: 6098 - protein, 9 aa, Artificial Sequence
  Description of Artificial Sequence: Synthetic peptide
YGGCWPREC

SEQ ID NO: 6099 - protein, 9 aa, Artificial Sequence
  Description of Artificial Sequence: Synthetic peptide
YISDSVSHG

SEQ ID NO: 6100 - protein, 9 aa, Artificial Sequence
  Description of Artificial Sequence: Synthetic peptide
YKVRKFWDP

SEQ ID NO: 6101 - protein, 9 aa, Artificial Sequence
  Description of Artificial Sequence: Synthetic peptide
YPNGMTFEP

SEQ ID NO: 6102 - protein, 9 aa, Artificial Sequence
  Description of Artificial Sequence: Synthetic peptide
YQEHFHNLI

SEQ ID NO: 6103 - protein, 9 aa, Artificial Sequence
  Description of Artificial Sequence: Synthetic peptide
YQENFHNWI

SEQ ID NO: 6104 - protein, 9 aa, Artificial Sequence
  Description of Artificial Sequence: Synthetic peptide
YQNDMTFEP

SEQ ID NO: 6105 - protein, 9 aa, Artificial Sequence
  Description of Artificial Sequence: Synthetic peptide
YRSHEKFQF

SEQ ID NO: 6106 - protein, 9 aa, Artificial Sequence
  Description of Artificial Sequence: Synthetic peptide
YRSPEKFEF

SEQ ID NO: 6107 - protein, 9 aa, Artificial Sequence
  Description of Artificial Sequence: Synthetic peptide
YRSPEQFQF

SEQ ID NO: 6108 - protein, 9 aa, Artificial Sequence
  Description of Artificial Sequence: Synthetic peptide
YRTPEKFQF

SEQ ID NO: 6109 - protein, 9 aa, Artificial Sequence
  Description of Artificial Sequence: Synthetic peptide
YSDEMDWSK

SEQ ID NO: 6110 - protein, 9 aa, Artificial Sequence
  Description of Artificial Sequence: Synthetic peptide
YSNEMDWNK

SEQ ID NO: 6111 - protein, 9 aa, Artificial Sequence
  Description of Artificial Sequence: Synthetic peptide
YSSSKAMED

SEQ ID NO: 6112 - protein, 9 aa, Artificial Sequence
  Description of Artificial Sequence: Synthetic peptide
YVGDSVSHG

SEQ ID NO: 6113 - protein, 9 aa, Artificial Sequence
  Description of Artificial Sequence: Synthetic peptide
YVSDCVSHG

SEQ ID NO: 6114 - protein, 9 aa, Artificial Sequence
  Description of Artificial Sequence: Synthetic peptide
YVSDGVSHG

SEQ ID NO: 6115 - protein, 9 aa, Artificial Sequence
  Description of Artificial Sequence: Synthetic peptide
YVSDSVNHG

SEQ ID NO: 6116 - protein, 9 aa, Artificial Sequence
  Description of Artificial Sequence: Synthetic peptide
YVSDSVSHS

SEQ ID NO: 6117 - protein, 9 aa, Artificial Sequence
  Description of Artificial Sequence: Synthetic peptide
YVSDSVSRG

SEQ ID NO: 6118 - protein, 9 aa, Artificial Sequence
  Description of Artificial Sequence: Synthetic peptide
DVDVVFRWV

SEQ ID NO: 6119 - protein, 9 aa, Artificial Sequence
  Description of Artificial Sequence: Synthetic peptide
GNMHNFSAW

SEQ ID NO: 6120 - protein, 9 aa, Artificial Sequence
  Description of Artificial Sequence: Synthetic peptide
QVVKFTGYH

SEQ ID NO: 6121 - protein, 9 aa, Artificial Sequence
  Description of Artificial Sequence: Synthetic peptide
VQMNLDAAP

SEQ ID NO: 6122 - protein, 9 aa, Artificial Sequence
  Description of Artificial Sequence: Synthetic peptide
YSFATGNAA

SEQ ID NO: 6123 - protein, 9 aa, Artificial Sequence
  Description of Artificial Sequence: Synthetic peptide
MVDPYGCEG

SEQ ID NO: 6124 - protein, 9 aa, Artificial Sequence
  Description of Artificial Sequence: Synthetic peptide
CEMQVQLCV

SEQ ID NO: 6125 - protein, 9 aa, Artificial Sequence
  Description of Artificial Sequence: Synthetic peptide
AVDHYSNGA

SEQ ID NO: 6126 - protein, 9 aa, Artificial Sequence
  Description of Artificial Sequence: Synthetic peptide
AAQTLECHK

SEQ ID NO: 6127 - protein, 9 aa, Artificial Sequence
  Description of Artificial Sequence: Synthetic peptide
ADHLACALQ

SEQ ID NO: 6128 - protein, 9 aa, Artificial Sequence
  Description of Artificial Sequence: Synthetic peptide
ADSDVHSEP

SEQ ID NO: 6129 - protein, 9 aa, Artificial Sequence
  Description of Artificial Sequence: Synthetic peptide
AHENYRYHQ

SEQ ID NO: 6130 - protein, 9 aa, Artificial Sequence
  Description of Artificial Sequence: Synthetic peptide
AHLNCDKSM

SEQ ID NO: 6131 - protein, 9 aa, Artificial Sequence
  Description of Artificial Sequence: Synthetic peptide
AHRCGCFKC

SEQ ID NO: 6132 - protein, 9 aa, Artificial Sequence
  Description of Artificial Sequence: Synthetic peptide
AILKMTKVL

SEQ ID NO: 6133 - protein, 9 aa, Artificial Sequence
  Description of Artificial Sequence: Synthetic peptide
AKTGGEPDS

SEQ ID NO: 6134 - protein, 9 aa, Artificial Sequence
  Description of Artificial Sequence: Synthetic peptide
AKVNMMKQF

SEQ ID NO: 6135 - protein, 9 aa, Artificial Sequence
  Description of Artificial Sequence: Synthetic peptide
ANNTYPVCA

SEQ ID NO: 6136 - protein, 9 aa, Artificial Sequence
  Description of Artificial Sequence: Synthetic peptide
AQWISPWPT

SEQ ID NO: 6137 - protein, 9 aa, Artificial Sequence
  Description of Artificial Sequence: Synthetic peptide
ASKFEIACF

SEQ ID NO: 6138 - protein, 9 aa, Artificial Sequence
  Description of Artificial Sequence: Synthetic peptide
ATCLIVCEA

SEQ ID NO: 6139 - protein, 9 aa, Artificial Sequence
  Description of Artificial Sequence: Synthetic peptide
ATNNADCGV

SEQ ID NO: 6140 - protein, 9 aa, Artificial Sequence
  Description of Artificial Sequence: Synthetic peptide
CARANCVLS

SEQ ID NO: 6141 - protein, 9 aa, Artificial Sequence
  Description of Artificial Sequence: Synthetic peptide
CFDQPLYID

SEQ ID NO: 6142 - protein, 9 aa, Artificial Sequence
  Description of Artificial Sequence: Synthetic peptide
CMRHGDRCA

SEQ ID NO: 6143 - protein, 9 aa, Artificial Sequence
  Description of Artificial Sequence: Synthetic peptide
CRIDHMETY

SEQ ID NO: 6144 - protein, 9 aa, Artificial Sequence
  Description of Artificial Sequence: Synthetic peptide
CVMEDNEAP

SEQ ID NO: 6145 - protein, 9 aa, Artificial Sequence
  Description of Artificial Sequence: Synthetic peptide
CWEEGMPFY

SEQ ID NO: 6146 - protein, 9 aa, Artificial Sequence
  Description of Artificial Sequence: Synthetic peptide
CWILHHRCG

SEQ ID NO: 6147 - protein, 9 aa, Artificial Sequence
  Description of Artificial Sequence: Synthetic peptide
CYEHDHGQA

SEQ ID NO: 6148 - protein, 9 aa, Artificial Sequence
  Description of Artificial Sequence: Synthetic peptide
CYNDNWVDV

SEQ ID NO: 6149 - protein, 9 aa, Artificial Sequence
  Description of Artificial Sequence: Synthetic peptide
DAHKSMKSQ

SEQ ID NO: 6150 - protein, 9 aa, Artificial Sequence
  Description of Artificial Sequence: Synthetic peptide
DCLHCWDFC

SEQ ID NO: 6151 - protein, 9 aa, Artificial Sequence
  Description of Artificial Sequence: Synthetic peptide
DENWRDTCG

SEQ ID NO: 6152 - protein, 9 aa, Artificial Sequence
  Description of Artificial Sequence: Synthetic peptide
DFLEEHSHM

SEQ ID NO: 6153 - protein, 9 aa, Artificial Sequence
  Description of Artificial Sequence: Synthetic peptide
DFNFLRQQA

SEQ ID NO: 6154 - protein, 9 aa, Artificial Sequence
  Description of Artificial Sequence: Synthetic peptide
DFTQLRMSG

SEQ ID NO: 6155 - protein, 9 aa, Artificial Sequence
  Description of Artificial Sequence: Synthetic peptide
DGSKNQHSY

SEQ ID NO: 6156 - protein, 9 aa, Artificial Sequence
  Description of Artificial Sequence: Synthetic peptide
DIAQLILTT

SEQ ID NO: 6157 - protein, 9 aa, Artificial Sequence
  Description of Artificial Sequence: Synthetic peptide
DIGRNVGEC

SEQ ID NO: 6158 - protein, 9 aa, Artificial Sequence
  Description of Artificial Sequence: Synthetic peptide
DILGKGEPC

SEQ ID NO: 6159 - protein, 9 aa, Artificial Sequence
  Description of Artificial Sequence: Synthetic peptide
DIMSYATGI

SEQ ID NO: 6160 - protein, 9 aa, Artificial Sequence
  Description of Artificial Sequence: Synthetic peptide
DKNYPTHKQ

SEQ ID NO: 6161 - protein, 9 aa, Artificial Sequence
  Description of Artificial Sequence: Synthetic peptide
DLGCVQENF

SEQ ID NO: 6162 - protein, 9 aa, Artificial Sequence
  Description of Artificial Sequence: Synthetic peptide
DQECNEIGF

SEQ ID NO: 6163 - protein, 9 aa, Artificial Sequence
  Description of Artificial Sequence: Synthetic peptide
DTDCHSYMD

SEQ ID NO: 6164 - protein, 9 aa, Artificial Sequence
  Description of Artificial Sequence: Synthetic peptide
DTNDYTSCD

SEQ ID NO: 6165 - protein, 9 aa, Artificial Sequence
  Description of Artificial Sequence: Synthetic peptide
DVIRSESRR

SEQ ID NO: 6166 - protein, 9 aa, Artificial Sequence
  Description of Artificial Sequence: Synthetic peptide
DVSYHKKMH

SEQ ID NO: 6167 - protein, 9 aa, Artificial Sequence
  Description of Artificial Sequence: Synthetic peptide
DVVSMKWGV

SEQ ID NO: 6168 - protein, 9 aa, Artificial Sequence
  Description of Artificial Sequence: Synthetic peptide
ELASSWLVI

SEQ ID NO: 6169 - protein, 9 aa, Artificial Sequence
  Description of Artificial Sequence: Synthetic peptide
ELLEFNAMQ

SEQ ID NO: 6170 - protein, 9 aa, Artificial Sequence
  Description of Artificial Sequence: Synthetic peptide
ENAYKTYPL

SEQ ID NO: 6171 - protein, 9 aa, Artificial Sequence
  Description of Artificial Sequence: Synthetic peptide
ERNRLHHRY

SEQ ID NO: 6172 - protein, 9 aa, Artificial Sequence
  Description of Artificial Sequence: Synthetic peptide
ESHALHMCN

SEQ ID NO: 6173 - protein, 9 aa, Artificial Sequence
  Description of Artificial Sequence: Synthetic peptide
ESSYWDKPK

SEQ ID NO: 6174 - protein, 9 aa, Artificial Sequence
  Description of Artificial Sequence: Synthetic peptide
EVVRQKVIC

SEQ ID NO: 6175 - protein, 9 aa, Artificial Sequence
  Description of Artificial Sequence: Synthetic peptide
EYSWSAQYN

SEQ ID NO: 6176 - protein, 9 aa, Artificial Sequence
  Description of Artificial Sequence: Synthetic peptide
FAAMCNKWD

SEQ ID NO: 6177 - protein, 9 aa, Artificial Sequence
  Description of Artificial Sequence: Synthetic peptide
FCSTYNAGT

SEQ ID NO: 6178 - protein, 9 aa, Artificial Sequence
  Description of Artificial Sequence: Synthetic peptide
FEQSEHKPT

SEQ ID NO: 6179 - protein, 9 aa, Artificial Sequence
  Description of Artificial Sequence: Synthetic peptide
FSHAHNWMT

SEQ ID NO: 6180 - protein, 9 aa, Artificial Sequence
  Description of Artificial Sequence: Synthetic peptide
FSHRFDAIF

SEQ ID NO: 6181 - protein, 9 aa, Artificial Sequence
  Description of Artificial Sequence: Synthetic peptide
FSTPARINN

SEQ ID NO: 6182 - protein, 9 aa, Artificial Sequence
  Description of Artificial Sequence: Synthetic peptide
FTAQLAVWM

SEQ ID NO: 6183 - protein, 9 aa, Artificial Sequence
  Description of Artificial Sequence: Synthetic peptide
GDMCEDMCT

SEQ ID NO: 6184 - protein, 9 aa, Artificial Sequence
  Description of Artificial Sequence: Synthetic peptide
GHDFQKHAE

SEQ ID NO: 6185 - protein, 9 aa, Artificial Sequence
  Description of Artificial Sequence: Synthetic peptide
GLHQFSICM

SEQ ID NO: 6186 - protein, 9 aa, Artificial Sequence
  Description of Artificial Sequence: Synthetic peptide
GPAVPEQYG

SEQ ID NO: 6187 - protein, 9 aa, Artificial Sequence
  Description of Artificial Sequence: Synthetic peptide
GRMLVDRHA

SEQ ID NO: 6188 - protein, 9 aa, Artificial Sequence
  Description of Artificial Sequence: Synthetic peptide
GTGPMHHKW

SEQ ID NO: 6189 - protein, 9 aa, Artificial Sequence
  Description of Artificial Sequence: Synthetic peptide
GYDPPEGMV

SEQ ID NO: 6190 - protein, 9 aa, Artificial Sequence
  Description of Artificial Sequence: Synthetic peptide
GYYSMHHEI

SEQ ID NO: 6191 - protein, 9 aa, Artificial Sequence
  Description of Artificial Sequence: Synthetic peptide
HATTVEFCI

SEQ ID NO: 6192 - protein, 9 aa, Artificial Sequence
  Description of Artificial Sequence: Synthetic peptide
HESKTAHRP

SEQ ID NO: 6193 - protein, 9 aa, Artificial Sequence
  Description of Artificial Sequence: Synthetic peptide
HFHQQRKTY

SEQ ID NO: 6194 - protein, 9 aa, Artificial Sequence
  Description of Artificial Sequence: Synthetic peptide
HGEPFCMAP

SEQ ID NO: 6195 - protein, 9 aa, Artificial Sequence
  Description of Artificial Sequence: Synthetic peptide
HHQQCKLDW

SEQ ID NO: 6196 - protein, 9 aa, Artificial Sequence
  Description of Artificial Sequence: Synthetic peptide
HKMECAQSM

SEQ ID NO: 6197 - protein, 9 aa, Artificial Sequence
  Description of Artificial Sequence: Synthetic peptide
HPHQIPIDI

SEQ ID NO: 6198 - protein, 9 aa, Artificial Sequence
  Description of Artificial Sequence: Synthetic peptide
HRPEQLHEG

SEQ ID NO: 6199 - protein, 9 aa, Artificial Sequence
  Description of Artificial Sequence: Synthetic peptide
HSWMRKSQC

SEQ ID NO: 6200 - protein, 9 aa, Artificial Sequence
  Description of Artificial Sequence: Synthetic peptide
HWCIMKGMR

SEQ ID NO: 6201 - protein, 9 aa, Artificial Sequence
  Description of Artificial Sequence: Synthetic peptide
ICEYFRVQA

SEQ ID NO: 6202 - protein, 9 aa, Artificial Sequence
  Description of Artificial Sequence: Synthetic peptide
ICEYRYCIF

SEQ ID NO: 6203 - protein, 9 aa, Artificial Sequence
  Description of Artificial Sequence: Synthetic peptide
IDAWGHFSE

SEQ ID NO: 6204 - protein, 9 aa, Artificial Sequence
  Description of Artificial Sequence: Synthetic peptide
IGYSTWPRE

SEQ ID NO: 6205 - protein, 9 aa, Artificial Sequence
  Description of Artificial Sequence: Synthetic peptide
ILNTCLVDQ

SEQ ID NO: 6206 - protein, 9 aa, Artificial Sequence
  Description of Artificial Sequence: Synthetic peptide
IMDVRVKRS

SEQ ID NO: 6207 - protein, 9 aa, Artificial Sequence
  Description of Artificial Sequence: Synthetic peptide
IMVMINTPY

SEQ ID NO: 6208 - protein, 9 aa, Artificial Sequence
  Description of Artificial Sequence: Synthetic peptide
INTNYPCLN

SEQ ID NO: 6209 - protein, 9 aa, Artificial Sequence
  Description of Artificial Sequence: Synthetic peptide
IPCILELVV

SEQ ID NO: 6210 - protein, 9 aa, Artificial Sequence
  Description of Artificial Sequence: Synthetic peptide
IPVMPCNCE

SEQ ID NO: 6211 - protein, 9 aa, Artificial Sequence
  Description of Artificial Sequence: Synthetic peptide
IWILRARGD

SEQ ID NO: 6212 - protein, 9 aa, Artificial Sequence
  Description of Artificial Sequence: Synthetic peptide
KDDTQSHMF

SEQ ID NO: 6213 - protein, 9 aa, Artificial Sequence
  Description of Artificial Sequence: Synthetic peptide
KEQRPPNAG

SEQ ID NO: 6214 - protein, 9 aa, Artificial Sequence
  Description of Artificial Sequence: Synthetic peptide
KFVQYQHYV

SEQ ID NO: 6215 - protein, 9 aa, Artificial Sequence
  Description of Artificial Sequence: Synthetic peptide
KGRWIFEYA

SEQ ID NO: 6216 - protein, 9 aa, Artificial Sequence
  Description of Artificial Sequence: Synthetic peptide
KHDGEIRVL

SEQ ID NO: 6217 - protein, 9 aa, Artificial Sequence
  Description of Artificial Sequence: Synthetic peptide
KHIVGQDGG

SEQ ID NO: 6218 - protein, 9 aa, Artificial Sequence
  Description of Artificial Sequence: Synthetic peptide
KIYLNQILR

SEQ ID NO: 6219 - protein, 9 aa, Artificial Sequence
  Description of Artificial Sequence: Synthetic peptide
KLQMGQDNS

SEQ ID NO: 6220 - protein, 9 aa, Artificial Sequence
  Description of Artificial Sequence: Synthetic peptide
KLSDHEMMY

SEQ ID NO: 6221 - protein, 9 aa, Artificial Sequence
  Description of Artificial Sequence: Synthetic peptide
KQNDTVKIP

SEQ ID NO: 6222 - protein, 9 aa, Artificial Sequence
  Description of Artificial Sequence: Synthetic peptide
KTDRMAMMM

SEQ ID NO: 6223 - protein, 9 aa, Artificial Sequence
  Description of Artificial Sequence: Synthetic peptide
LAFTMMWPW

SEQ ID NO: 6224 - protein, 9 aa, Artificial Sequence
  Description of Artificial Sequence: Synthetic peptide
LATFWGHQD

SEQ ID NO: 6225 - protein, 9 aa, Artificial Sequence
  Description of Artificial Sequence: Synthetic peptide
LCAPTQWYM

SEQ ID NO: 6226 - protein, 9 aa, Artificial Sequence
  Description of Artificial Sequence: Synthetic peptide
LCGKAGLYH

SEQ ID NO: 6227 - protein, 9 aa, Artificial Sequence
  Description of Artificial Sequence: Synthetic peptide
LDLCMLFLF

SEQ ID NO: 6228 - protein, 9 aa, Artificial Sequence
  Description of Artificial Sequence: Synthetic peptide
LEMQRGMET

SEQ ID NO: 6229 - protein, 9 aa, Artificial Sequence
  Description of Artificial Sequence: Synthetic peptide
LFDKDIARK

SEQ ID NO: 6230 - protein, 9 aa, Artificial Sequence
  Description of Artificial Sequence: Synthetic peptide
LFKFHSGLQ

SEQ ID NO: 6231 - protein, 9 aa, Artificial Sequence
  Description of Artificial Sequence: Synthetic peptide
LGLTEGQSM

SEQ ID NO: 6232 - protein, 9 aa, Artificial Sequence
  Description of Artificial Sequence: Synthetic peptide
LNGWWDCTR

SEQ ID NO: 6233 - protein, 9 aa, Artificial Sequence
  Description of Artificial Sequence: Synthetic peptide
LPCTSIMWY

SEQ ID NO: 6234 - protein, 9 aa, Artificial Sequence
  Description of Artificial Sequence: Synthetic peptide
LPEHIQQMH

SEQ ID NO: 6235 - protein, 9 aa, Artificial Sequence
  Description of Artificial Sequence: Synthetic peptide
LPENRNKRH

SEQ ID NO: 6236 - protein, 9 aa, Artificial Sequence
  Description of Artificial Sequence: Synthetic peptide
LPKSKYMFQ

SEQ ID NO: 6237 - protein, 9 aa, Artificial Sequence
  Description of Artificial Sequence: Synthetic peptide
LQANEWNMC

SEQ ID NO: 6238 - protein, 9 aa, Artificial Sequence
  Description of Artificial Sequence: Synthetic peptide
LQQPIVHIE

SEQ ID NO: 6239 - protein, 9 aa, Artificial Sequence
  Description of Artificial Sequence: Synthetic peptide
LVMCPPFFG

SEQ ID NO: 6240 - protein, 9 aa, Artificial Sequence
  Description of Artificial Sequence: Synthetic peptide
LYDVVHRIW

SEQ ID NO: 6241 - protein, 9 aa, Artificial Sequence
  Description of Artificial Sequence: Synthetic peptide
MGHYCHARR

SEQ ID NO: 6242 - protein, 9 aa, Artificial Sequence
  Description of Artificial Sequence: Synthetic peptide
MHQFRCHYD

SEQ ID NO: 6243 - protein, 9 aa, Artificial Sequence
  Description of Artificial Sequence: Synthetic peptide
MMAPLKVFD

SEQ ID NO: 6244 - protein, 9 aa, Artificial Sequence
  Description of Artificial Sequence: Synthetic peptide
MNMEDRCTF

SEQ ID NO: 6245 - protein, 9 aa, Artificial Sequence
  Description of Artificial Sequence: Synthetic peptide
MNNRWSDCD

SEQ ID NO: 6246 - protein, 9 aa, Artificial Sequence
  Description of Artificial Sequence: Synthetic peptide
MTEPVLLDT

SEQ ID NO: 6247 - protein, 9 aa, Artificial Sequence
  Description of Artificial Sequence: Synthetic peptide
MVQHIEQWE

SEQ ID NO: 6248 - protein, 9 aa, Artificial Sequence
  Description of Artificial Sequence: Synthetic peptide
NCWLPDNPI

SEQ ID NO: 6249 - protein, 9 aa, Artificial Sequence
  Description of Artificial Sequence: Synthetic peptide
NFKQHDTFC

SEQ ID NO: 6250 - protein, 9 aa, Artificial Sequence
  Description of Artificial Sequence: Synthetic peptide
NGFYWVFVM

SEQ ID NO: 6251 - protein, 9 aa, Artificial Sequence
  Description of Artificial Sequence: Synthetic peptide
NLCPNTVDV

SEQ ID NO: 6252 - protein, 9 aa, Artificial Sequence
  Description of Artificial Sequence: Synthetic peptide
NMGCPMMTE

SEQ ID NO: 6253 - protein, 9 aa, Artificial Sequence
  Description of Artificial Sequence: Synthetic peptide
NNSHLYHDN

SEQ ID NO: 6254 - protein, 9 aa, Artificial Sequence
  Description of Artificial Sequence: Synthetic peptide
NWDSPSNKS

SEQ ID NO: 6255 - protein, 9 aa, Artificial Sequence
  Description of Artificial Sequence: Synthetic peptide
NYFPTHAAW

SEQ ID NO: 6256 - protein, 9 aa, Artificial Sequence
  Description of Artificial Sequence: Synthetic peptide
PDQVDRNTP

SEQ ID NO: 6257 - protein, 9 aa, Artificial Sequence
  Description of Artificial Sequence: Synthetic peptide
PEKAKMVWH

SEQ ID NO: 6258 - protein, 9 aa, Artificial Sequence
  Description of Artificial Sequence: Synthetic peptide
PPADPATES

SEQ ID NO: 6259 - protein, 9 aa, Artificial Sequence
  Description of Artificial Sequence: Synthetic peptide
PQTMMCKRW

SEQ ID NO: 6260 - protein, 9 aa, Artificial Sequence
  Description of Artificial Sequence: Synthetic peptide
PSMLWSVVV

SEQ ID NO: 6261 - protein, 9 aa, Artificial Sequence
  Description of Artificial Sequence: Synthetic peptide
QEGNGFHNT

SEQ ID NO: 6262 - protein, 9 aa, Artificial Sequence
  Description of Artificial Sequence: Synthetic peptide
QEKLWEQGS

SEQ ID NO: 6263 - protein, 9 aa, Artificial Sequence
  Description of Artificial Sequence: Synthetic peptide
QEVRSEHYS

SEQ ID NO: 6264 - protein, 9 aa, Artificial Sequence
  Description of Artificial Sequence: Synthetic peptide
QFGPGCFKP

SEQ ID NO: 6265 - protein, 9 aa, Artificial Sequence
  Description of Artificial Sequence: Synthetic peptide
QQIWLCQEI

SEQ ID NO: 6266 - protein, 9 aa, Artificial Sequence
  Description of Artificial Sequence: Synthetic peptide
QQLCVDESH

SEQ ID NO: 6267 - protein, 9 aa, Artificial Sequence
  Description of Artificial Sequence: Synthetic peptide
QRPTCKNTA

SEQ ID NO: 6268 - protein, 9 aa, Artificial Sequence
  Description of Artificial Sequence: Synthetic peptide
QSMVSCYEG

SEQ ID NO: 6269 - protein, 9 aa, Artificial Sequence
  Description of Artificial Sequence: Synthetic peptide
QTRKNEIGI

SEQ ID NO: 6270 - protein, 9 aa, Artificial Sequence
  Description of Artificial Sequence: Synthetic peptide
QWMLRKEVQ

SEQ ID NO: 6271 - protein, 9 aa, Artificial Sequence
  Description of Artificial Sequence: Synthetic peptide
QWTACQATN

SEQ ID NO: 6272 - protein, 9 aa, Artificial Sequence
  Description of Artificial Sequence: Synthetic peptide
QYMLAEDWR

SEQ ID NO: 6273 - protein, 9 aa, Artificial Sequence
  Description of Artificial Sequence: Synthetic peptide
RADGLATVV

SEQ ID NO: 6274 - protein, 9 aa, Artificial Sequence
  Description of Artificial Sequence: Synthetic peptide
RCNMMGKGA

SEQ ID NO: 6275 - protein, 9 aa, Artificial Sequence
  Description of Artificial Sequence: Synthetic peptide
RDRYCDPHQ

SEQ ID NO: 6276 - protein, 9 aa, Artificial Sequence
  Description of Artificial Sequence: Synthetic peptide
RDRYCDPLQ

SEQ ID NO: 6277 - protein, 9 aa, Artificial Sequence
  Description of Artificial Sequence: Synthetic peptide
RKFWLAGKF

SEQ ID NO: 6278 - protein, 9 aa, Artificial Sequence
  Description of Artificial Sequence: Synthetic peptide
RLQIIMYRV

SEQ ID NO: 6279 - protein, 9 aa, Artificial Sequence
  Description of Artificial Sequence: Synthetic peptide
RMKGAKRWY

SEQ ID NO: 6280 - protein, 9 aa, Artificial Sequence
  Description of Artificial Sequence: Synthetic peptide
RNEYQSACW

SEQ ID NO: 6281 - protein, 9 aa, Artificial Sequence
  Description of Artificial Sequence: Synthetic peptide
RRNMPIPSW

SEQ ID NO: 6282 - protein, 9 aa, Artificial Sequence
  Description of Artificial Sequence: Synthetic peptide
RSMYANNDV

SEQ ID NO: 6283 - protein, 9 aa, Artificial Sequence
  Description of Artificial Sequence: Synthetic peptide
RYNNCPNLW

SEQ ID NO: 6284 - protein, 9 aa, Artificial Sequence
  Description of Artificial Sequence: Synthetic peptide
SAMSRAVYY

SEQ ID NO: 6285 - protein, 9 aa, Artificial Sequence
  Description of Artificial Sequence: Synthetic peptide
SEKTQEVCL

SEQ ID NO: 6286 - protein, 9 aa, Artificial Sequence
  Description of Artificial Sequence: Synthetic peptide
SGEGITKMY

SEQ ID NO: 6287 - protein, 9 aa, Artificial Sequence
  Description of Artificial Sequence: Synthetic peptide
SILITPYAN

SEQ ID NO: 6288 - protein, 9 aa, Artificial Sequence
  Description of Artificial Sequence: Synthetic peptide
SLCWEVDLM

SEQ ID NO: 6289 - protein, 9 aa, Artificial Sequence
  Description of Artificial Sequence: Synthetic peptide
SLYITPYHT

SEQ ID NO: 6290 - protein, 9 aa, Artificial Sequence
  Description of Artificial Sequence: Synthetic peptide
SMYTNCTFF

SEQ ID NO: 6291 - protein, 9 aa, Artificial Sequence
  Description of Artificial Sequence: Synthetic peptide
SQKQICGDT

SEQ ID NO: 6292 - protein, 9 aa, Artificial Sequence
  Description of Artificial Sequence: Synthetic peptide
SWLPENPVH

SEQ ID NO: 6293 - protein, 9 aa, Artificial Sequence
  Description of Artificial Sequence: Synthetic peptide
SYAYSHSAT

SEQ ID NO: 6294 - protein, 9 aa, Artificial Sequence
  Description of Artificial Sequence: Synthetic peptide
TNVYQNVEA

SEQ ID NO: 6295 - protein, 9 aa, Artificial Sequence
  Description of Artificial Sequence: Synthetic peptide
TPPCCVIQF

SEQ ID NO: 6296 - protein, 9 aa, Artificial Sequence
  Description of Artificial Sequence: Synthetic peptide
TQEACHHDP

SEQ ID NO: 6297 - protein, 9 aa, Artificial Sequence
  Description of Artificial Sequence: Synthetic peptide
TRSYFDQSC

SEQ ID NO: 6298 - protein, 9 aa, Artificial Sequence
  Description of Artificial Sequence: Synthetic peptide
TSNTFQRHG

SEQ ID NO: 6299 - protein, 9 aa, Artificial Sequence
  Description of Artificial Sequence: Synthetic peptide
TVKYHQDQD

SEQ ID NO: 6300 - protein, 9 aa, Artificial Sequence
  Description of Artificial Sequence: Synthetic peptide
TVNNDPNGI

SEQ ID NO: 6301 - protein, 9 aa, Artificial Sequence
  Description of Artificial Sequence: Synthetic peptide
VCHAFTCNL

SEQ ID NO: 6302 - protein, 9 aa, Artificial Sequence
  Description of Artificial Sequence: Synthetic peptide
VCTIRAECP

SEQ ID NO: 6303 - protein, 9 aa, Artificial Sequence
  Description of Artificial Sequence: Synthetic peptide
VDTIRFPRM

SEQ ID NO: 6304 - protein, 9 aa, Artificial Sequence
  Description of Artificial Sequence: Synthetic peptide
VEKTHNKWM

SEQ ID NO: 6305 - protein, 9 aa, Artificial Sequence
  Description of Artificial Sequence: Synthetic peptide
VESMNHASM

SEQ ID NO: 6306 - protein, 9 aa, Artificial Sequence
  Description of Artificial Sequence: Synthetic peptide
VGICRLKAV

SEQ ID NO: 6307 - protein, 9 aa, Artificial Sequence
  Description of Artificial Sequence: Synthetic peptide
VHYYACHRF

SEQ ID NO: 6308 - protein, 9 aa, Artificial Sequence
  Description of Artificial Sequence: Synthetic peptide
VKEPATYKY

SEQ ID NO: 6309 - protein, 9 aa, Artificial Sequence
  Description of Artificial Sequence: Synthetic peptide
VNAGEVYRS

SEQ ID NO: 6310 - protein, 9 aa, Artificial Sequence
  Description of Artificial Sequence: Synthetic peptide
VPSHMPHHP

SEQ ID NO: 6311 - protein, 9 aa, Artificial Sequence
  Description of Artificial Sequence: Synthetic peptide
VTDAAMFMG

SEQ ID NO: 6312 - protein, 9 aa, Artificial Sequence
  Description of Artificial Sequence: Synthetic peptide
VTNPLEGRI

SEQ ID NO: 6313 - protein, 9 aa, Artificial Sequence
  Description of Artificial Sequence: Synthetic peptide
VVEMNGDDD

SEQ ID NO: 6314 - protein, 9 aa, Artificial Sequence
  Description of Artificial Sequence: Synthetic peptide
VVGVPARAQ

SEQ ID NO: 6315 - protein, 9 aa, Artificial Sequence
  Description of Artificial Sequence: Synthetic peptide
VVQYRLDPP

SEQ ID NO: 6316 - protein, 9 aa, Artificial Sequence
  Description of Artificial Sequence: Synthetic peptide
VYTSTQPQE

SEQ ID NO: 6317 - protein, 9 aa, Artificial Sequence
  Description of Artificial Sequence: Synthetic peptide
WTHTVTSDW

SEQ ID NO: 6318 - protein, 9 aa, Artificial Sequence
  Description of Artificial Sequence: Synthetic peptide
WWDHLPELM

SEQ ID NO: 6319 - protein, 9 aa, Artificial Sequence
  Description of Artificial Sequence: Synthetic peptide
YAFNTPWMT

SEQ ID NO: 6320 - protein, 9 aa, Artificial Sequence
  Description of Artificial Sequence: Synthetic peptide
YVEFEDQNG

SEQ ID NO: 6321 - protein, 9 aa, Artificial Sequence
  Description of Artificial Sequence: Synthetic peptide
YVYDAQRQD

SEQ ID NO: 6322 - protein, 9 aa, Artificial Sequence
  Description of Artificial Sequence: Synthetic peptide
YWRYHYYYM

SEQ ID NO: 6323 - protein, 9 aa, Artificial Sequence
  Description of Artificial Sequence: Synthetic peptide
QNKAFLDAV

SEQ ID NO: 6324 - protein, 9 aa, Artificial Sequence
  Description of Artificial Sequence: Synthetic peptide
FDHNAKVLD

SEQ ID NO: 6325 - protein, 9 aa, Artificial Sequence
  Description of Artificial Sequence: Synthetic peptide
YNNIMQIMV

SEQ ID NO: 6326 - protein, 9 aa, Artificial Sequence
  Description of Artificial Sequence: Synthetic peptide
FWLGLFPAK

SEQ ID NO: 6327 - protein, 9 aa, Artificial Sequence
  Description of Artificial Sequence: Synthetic peptide
NNDHYDSES

SEQ ID NO: 6328 - protein, 9 aa, Artificial Sequence
  Description of Artificial Sequence: Synthetic peptide
MCQNVEKEY

SEQ ID NO: 6329 - protein, 9 aa, Artificial Sequence
  Description of Artificial Sequence: Synthetic peptide
QMDWVAECR

SEQ ID NO: 6330 - protein, 9 aa, Artificial Sequence
  Description of Artificial Sequence: Synthetic peptide
MSSRKEFLT

SEQ ID NO: 6331 - protein, 9 aa, Artificial Sequence
  Description of Artificial Sequence: Synthetic peptide
SCRMVYGRA

SEQ ID NO: 6332 - protein, 9 aa, Artificial Sequence
  Description of Artificial Sequence: Synthetic peptide
AVHKQTAAW

SEQ ID NO: 6333 - protein, 9 aa, Artificial Sequence
  Description of Artificial Sequence: Synthetic peptide
DCAWMQKEW

SEQ ID NO: 6334 - protein, 9 aa, Artificial Sequence
  Description of Artificial Sequence: Synthetic peptide
QKNVSTKYD

SEQ ID NO: 6335 - protein, 9 aa, Artificial Sequence
  Description of Artificial Sequence: Synthetic peptide
DYVDQCQVS

SEQ ID NO: 6336 - protein, 9 aa, Artificial Sequence
  Description of Artificial Sequence: Synthetic peptide
TAVLYETEF

SEQ ID NO: 6337 - protein, 9 aa, Artificial Sequence
  Description of Artificial Sequence: Synthetic peptide
VPDYVPMNW

SEQ ID NO: 6338 - protein, 9 aa, Artificial Sequence
  Description of Artificial Sequence: Synthetic peptide
TSRDGGWAY

SEQ ID NO: 6339 - protein, 9 aa, Artificial Sequence
  Description of Artificial Sequence: Synthetic peptide
LPLPMQSMC

SEQ ID NO: 6340 - protein, 9 aa, Artificial Sequence
  Description of Artificial Sequence: Synthetic peptide
DGGRANTLH

SEQ ID NO: 6341 - protein, 9 aa, Artificial Sequence
  Description of Artificial Sequence: Synthetic peptide
QADNGTMRV

SEQ ID NO: 6342 - protein, 9 aa, Artificial Sequence
  Description of Artificial Sequence: Synthetic peptide
MFSHGHVMF

SEQ ID NO: 6343 - protein, 9 aa, Artificial Sequence
  Description of Artificial Sequence: Synthetic peptide
PYHNPWECR

SEQ ID NO: 6344 - protein, 9 aa, Artificial Sequence
  Description of Artificial Sequence: Synthetic peptide
TTYPHNTHG

SEQ ID NO: 6345 - protein, 9 aa, Artificial Sequence
  Description of Artificial Sequence: Synthetic peptide
EQTYYKITW

SEQ ID NO: 6346 - protein, 9 aa, Artificial Sequence
  Description of Artificial Sequence: Synthetic peptide
TSLCAKPHF

SEQ ID NO: 6347 - protein, 9 aa, Artificial Sequence
  Description of Artificial Sequence: Synthetic peptide
FCHEVFSHT

SEQ ID NO: 6348 - protein, 9 aa, Artificial Sequence
  Description of Artificial Sequence: Synthetic peptide
CKVDIHDYM

SEQ ID NO: 6349 - protein, 9 aa, Artificial Sequence
  Description of Artificial Sequence: Synthetic peptide
ETSTHCCKV

SEQ ID NO: 6350 - protein, 9 aa, Artificial Sequence
  Description of Artificial Sequence: Synthetic peptide
PAYRMECCE

SEQ ID NO: 6351 - protein, 9 aa, Artificial Sequence
  Description of Artificial Sequence: Synthetic peptide
GMVELGSCW

SEQ ID NO: 6352 - protein, 9 aa, Artificial Sequence
  Description of Artificial Sequence: Synthetic peptide
EAMTCTKNH

SEQ ID NO: 6353 - protein, 9 aa, Artificial Sequence
  Description of Artificial Sequence: Synthetic peptide
DNVFSNSPN

SEQ ID NO: 6354 - protein, 9 aa, Artificial Sequence
  Description of Artificial Sequence: Synthetic peptide
HILIMQGVS

SEQ ID NO: 6355 - protein, 9 aa, Artificial Sequence
  Description of Artificial Sequence: Synthetic peptide
MHGIARMQQ

SEQ ID NO: 6356 - protein, 9 aa, Artificial Sequence
  Description of Artificial Sequence: Synthetic peptide
HMDHCQCHE

SEQ ID NO: 6357 - protein, 9 aa, Artificial Sequence
  Description of Artificial Sequence: Synthetic peptide
EKFWFKTMN

SEQ ID NO: 6358 - protein, 9 aa, Artificial Sequence
  Description of Artificial Sequence: Synthetic peptide
QLDTYMEGR

SEQ ID NO: 6359 - protein, 9 aa, Artificial Sequence
  Description of Artificial Sequence: Synthetic peptide
NMKPKDVFR

SEQ ID NO: 6360 - protein, 9 aa, Artificial Sequence
  Description of Artificial Sequence: Synthetic peptide
QPGVRTDDY

SEQ ID NO: 6361 - protein, 9 aa, Artificial Sequence
  Description of Artificial Sequence: Synthetic peptide
WCNWQFAQH

SEQ ID NO: 6362 - protein, 9 aa, Artificial Sequence
  Description of Artificial Sequence: Synthetic peptide
GILVQGGSM

SEQ ID NO: 6363 - protein, 9 aa, Artificial Sequence
  Description of Artificial Sequence: Synthetic peptide
ILKQASCKG

SEQ ID NO: 6364 - protein, 9 aa, Artificial Sequence
  Description of Artificial Sequence: Synthetic peptide
AIIQWACWA

SEQ ID NO: 6365 - protein, 9 aa, Artificial Sequence
  Description of Artificial Sequence: Synthetic peptide
WPTMLSAHM

SEQ ID NO: 6366 - protein, 9 aa, Artificial Sequence
  Description of Artificial Sequence: Synthetic peptide
DFNGSNWLP

SEQ ID NO: 6367 - protein, 9 aa, Artificial Sequence
  Description of Artificial Sequence: Synthetic peptide
FTEPMCMQG

SEQ ID NO: 6368 - protein, 9 aa, Artificial Sequence
  Description of Artificial Sequence: Synthetic peptide
KTDKAGLME

SEQ ID NO: 6369 - protein, 9 aa, Artificial Sequence
  Description of Artificial Sequence: Synthetic peptide
KWEQRSKMS

SEQ ID NO: 6370 - protein, 9 aa, Artificial Sequence
  Description of Artificial Sequence: Synthetic peptide
TLHYFHGYQ

SEQ ID NO: 6371 - protein, 9 aa, Artificial Sequence
  Description of Artificial Sequence: Synthetic peptide
MNHQCMLWD

SEQ ID NO: 6372 - protein, 9 aa, Artificial Sequence
  Description of Artificial Sequence: Synthetic peptide
IYCLCQDSD

SEQ ID NO: 6373 - protein, 9 aa, Artificial Sequence
  Description of Artificial Sequence: Synthetic peptide
TLNSRHPEC

SEQ ID NO: 6374 - protein, 9 aa, Artificial Sequence
  Description of Artificial Sequence: Synthetic peptide
ACTKQKTVQ

SEQ ID NO: 6375 - protein, 9 aa, Artificial Sequence
  Description of Artificial Sequence: Synthetic peptide
KTCLCIFTK

SEQ ID NO: 6376 - protein, 9 aa, Artificial Sequence
  Description of Artificial Sequence: Synthetic peptide
SSNFNHHID

SEQ ID NO: 6377 - protein, 9 aa, Artificial Sequence
  Description of Artificial Sequence: Synthetic peptide
QFMMGQQTP

SEQ ID NO: 6378 - protein, 9 aa, Artificial Sequence
  Description of Artificial Sequence: Synthetic peptide
IAVASHAHG

SEQ ID NO: 6379 - protein, 9 aa, Artificial Sequence
  Description of Artificial Sequence: Synthetic peptide
KTGMGDLFL

SEQ ID NO: 6380 - protein, 9 aa, Artificial Sequence
  Description of Artificial Sequence: Synthetic peptide
RITQGESGM

SEQ ID NO: 6381 - protein, 9 aa, Artificial Sequence
  Description of Artificial Sequence: Synthetic peptide
STVGQNHCG

SEQ ID NO: 6382 - protein, 9 aa, Artificial Sequence
  Description of Artificial Sequence: Synthetic peptide
KVNCRMIIM

SEQ ID NO: 6383 - protein, 9 aa, Artificial Sequence
  Description of Artificial Sequence: Synthetic peptide
YVDHWTLGD

SEQ ID NO: 6384 - protein, 9 aa, Artificial Sequence
  Description of Artificial Sequence: Synthetic peptide
TMPDRDPTY

SEQ ID NO: 6385 - protein, 9 aa, Artificial Sequence
  Description of Artificial Sequence: Synthetic peptide
QKAIVAQND

SEQ ID NO: 6386 - protein, 9 aa, Artificial Sequence
  Description of Artificial Sequence: Synthetic peptide
CMEVTCFVV

SEQ ID NO: 6387 - protein, 9 aa, Artificial Sequence
  Description of Artificial Sequence: Synthetic peptide
LESVKMDCN

SEQ ID NO: 6388 - protein, 9 aa, Artificial Sequence
  Description of Artificial Sequence: Synthetic peptide
VLKSNLTGM

SEQ ID NO: 6389 - protein, 9 aa, Artificial Sequence
  Description of Artificial Sequence: Synthetic peptide
AWMCCARHD

SEQ ID NO: 6390 - protein, 9 aa, Artificial Sequence
  Description of Artificial Sequence: Synthetic peptide
RNDNTCHAY

SEQ ID NO: 6391 - protein, 9 aa, Artificial Sequence
  Description of Artificial Sequence: Synthetic peptide
MYDTMGAWC

SEQ ID NO: 6392 - protein, 9 aa, Artificial Sequence
  Description of Artificial Sequence: Synthetic peptide
ILEAIVNFW

SEQ ID NO: 6393 - protein, 9 aa, Artificial Sequence
  Description of Artificial Sequence: Synthetic peptide
AHAWLQHWA

SEQ ID NO: 6394 - protein, 9 aa, Artificial Sequence
  Description of Artificial Sequence: Synthetic peptide
ATGLTDHQW

SEQ ID NO: 6395 - protein, 9 aa, Artificial Sequence
  Description of Artificial Sequence: Synthetic peptide
DVKSWAVCD

SEQ ID NO: 6396 - protein, 9 aa, Artificial Sequence
  Description of Artificial Sequence: Synthetic peptide
PDLWYEKSS

SEQ ID NO: 6397 - protein, 9 aa, Artificial Sequence
  Description of Artificial Sequence: Synthetic peptide
SECEVLCSL

SEQ ID NO: 6398 - protein, 9 aa, Artificial Sequence
  Description of Artificial Sequence: Synthetic peptide
RYPCCQSPF

SEQ ID NO: 6399 - protein, 9 aa, Artificial Sequence
  Description of Artificial Sequence: Synthetic peptide
MNSFYRAEW

SEQ ID NO: 6400 - protein, 9 aa, Artificial Sequence
  Description of Artificial Sequence: Synthetic peptide
RTRISQMFG

SEQ ID NO: 6401 - protein, 9 aa, Artificial Sequence
  Description of Artificial Sequence: Synthetic peptide
RDVGEDNSA

SEQ ID NO: 6402 - protein, 9 aa, Artificial Sequence
  Description of Artificial Sequence: Synthetic peptide
ATGTYNLQE

SEQ ID NO: 6403 - protein, 9 aa, Artificial Sequence
  Description of Artificial Sequence: Synthetic peptide
DQEAQVVTG

SEQ ID NO: 6404 - protein, 9 aa, Artificial Sequence
  Description of Artificial Sequence: Synthetic peptide
PMELWRTWY

SEQ ID NO: 6405 - protein, 9 aa, Artificial Sequence
  Description of Artificial Sequence: Synthetic peptide
ASMHEETCL

SEQ ID NO: 6406 - protein, 9 aa, Artificial Sequence
  Description of Artificial Sequence: Synthetic peptide
DMTLQSVSS

SEQ ID NO: 6407 - protein, 9 aa, Artificial Sequence
  Description of Artificial Sequence: Synthetic peptide
EVAFTTSSD

SEQ ID NO: 6408 - protein, 9 aa, Artificial Sequence
  Description of Artificial Sequence: Synthetic peptide
SPQQPSVFH

SEQ ID NO: 6409 - protein, 9 aa, Artificial Sequence
  Description of Artificial Sequence: Synthetic peptide
KSTYYNLKW

SEQ ID NO: 6410 - protein, 9 aa, Artificial Sequence
  Description of Artificial Sequence: Synthetic peptide
SQERMDYDG

SEQ ID NO: 6411 - protein, 9 aa, Artificial Sequence
  Description of Artificial Sequence: Synthetic peptide
MNLQIGSKG

SEQ ID NO: 6412 - protein, 9 aa, Artificial Sequence
  Description of Artificial Sequence: Synthetic peptide
EIHMFGQSE

SEQ ID NO: 6413 - protein, 9 aa, Artificial Sequence
  Description of Artificial Sequence: Synthetic peptide
MPWLDKPPC

SEQ ID NO: 6414 - protein, 9 aa, Artificial Sequence
  Description of Artificial Sequence: Synthetic peptide
QCTAHNTCM

SEQ ID NO: 6415 - protein, 9 aa, Artificial Sequence
  Description of Artificial Sequence: Synthetic peptide
DQRHGNVSP

SEQ ID NO: 6416 - protein, 9 aa, Artificial Sequence
  Description of Artificial Sequence: Synthetic peptide
EAGCKMWPT

SEQ ID NO: 6417 - protein, 9 aa, Artificial Sequence
  Description of Artificial Sequence: Synthetic peptide
ATMNLSWGL

SEQ ID NO: 6418 - protein, 9 aa, Artificial Sequence
  Description of Artificial Sequence: Synthetic peptide
QAKMILDGT

SEQ ID NO: 6419 - protein, 9 aa, Artificial Sequence
  Description of Artificial Sequence: Synthetic peptide
INYISFVDR

SEQ ID NO: 6420 - protein, 9 aa, Artificial Sequence
  Description of Artificial Sequence: Synthetic peptide
WKATPGGQC

SEQ ID NO: 6421 - protein, 9 aa, Artificial Sequence
  Description of Artificial Sequence: Synthetic peptide
YCECGHWPN

SEQ ID NO: 6422 - protein, 9 aa, Artificial Sequence
  Description of Artificial Sequence: Synthetic peptide
SNVACIQAF

SEQ ID NO: 6423 - protein, 9 aa, Artificial Sequence
  Description of Artificial Sequence: Synthetic peptide
QSRCVDNTV

SEQ ID NO: 6424 - protein, 9 aa, Artificial Sequence
  Description of Artificial Sequence: Synthetic peptide
YSDPKNMSI

SEQ ID NO: 6425 - protein, 9 aa, Artificial Sequence
  Description of Artificial Sequence: Synthetic peptide
ASKQGTHDY

SEQ ID NO: 6426 - protein, 9 aa, Artificial Sequence
  Description of Artificial Sequence: Synthetic peptide
NHSLCWDSK

SEQ ID NO: 6427 - protein, 9 aa, Artificial Sequence
  Description of Artificial Sequence: Synthetic peptide
HSMMPGWPS

SEQ ID NO: 6428 - protein, 9 aa, Artificial Sequence
  Description of Artificial Sequence: Synthetic peptide
EWMQNWISM

SEQ ID NO: 6429 - protein, 9 aa, Artificial Sequence
  Description of Artificial Sequence: Synthetic peptide
AAADVEGTT

SEQ ID NO: 6430 - protein, 9 aa, Artificial Sequence
  Description of Artificial Sequence: Synthetic peptide
AAAPWCEFR

SEQ ID NO: 6431 - protein, 9 aa, Artificial Sequence
  Description of Artificial Sequence: Synthetic peptide
AAAWPEWTM

SEQ ID NO: 6432 - protein, 9 aa, Artificial Sequence
  Description of Artificial Sequence: Synthetic peptide
AACNEDHHW

SEQ ID NO: 6433 - protein, 9 aa, Artificial Sequence
  Description of Artificial Sequence: Synthetic peptide
AACSRHYES

SEQ ID NO: 6434 - protein, 9 aa, Artificial Sequence
  Description of Artificial Sequence: Synthetic peptide
AAELYKCEN

SEQ ID NO: 6435 - protein, 9 aa, Artificial Sequence
  Description of Artificial Sequence: Synthetic peptide
AAFEGEACF

SEQ ID NO: 6436 - protein, 9 aa, Artificial Sequence
  Description of Artificial Sequence: Synthetic peptide
AAFEWMRAP

SEQ ID NO: 6437 - protein, 9 aa, Artificial Sequence
  Description of Artificial Sequence: Synthetic peptide
AAGWRDGRR

SEQ ID NO: 6438 - protein, 9 aa, Artificial Sequence
  Description of Artificial Sequence: Synthetic peptide
AAHCEYSTI

SEQ ID NO: 6439 - protein, 9 aa, Artificial Sequence
  Description of Artificial Sequence: Synthetic peptide
AAKTFYWAR

SEQ ID NO: 6440 - protein, 9 aa, Artificial Sequence
  Description of Artificial Sequence: Synthetic peptide
AALASDHDF

SEQ ID NO: 6441 - protein, 9 aa, Artificial Sequence
  Description of Artificial Sequence: Synthetic peptide
AAQFLHIVK

SEQ ID NO: 6442 - protein, 9 aa, Artificial Sequence
  Description of Artificial Sequence: Synthetic peptide
AASCGYHGW

SEQ ID NO: 6443 - protein, 9 aa, Artificial Sequence
  Description of Artificial Sequence: Synthetic peptide
AASQAQSLT

SEQ ID NO: 6444 - protein, 9 aa, Artificial Sequence
  Description of Artificial Sequence: Synthetic peptide
AAVCTQFSL

SEQ ID NO: 6445 - protein, 9 aa, Artificial Sequence
  Description of Artificial Sequence: Synthetic peptide
AAVGSAQIE

SEQ ID NO: 6446 - protein, 9 aa, Artificial Sequence
  Description of Artificial Sequence: Synthetic peptide
AAWDIELNE

SEQ ID NO: 6447 - protein, 9 aa, Artificial Sequence
  Description of Artificial Sequence: Synthetic peptide
AAWVSGKLY

SEQ ID NO: 6448 - protein, 9 aa, Artificial Sequence
  Description of Artificial Sequence: Synthetic peptide
ACALDGASN

SEQ ID NO: 6449 - protein, 9 aa, Artificial Sequence
  Description of Artificial Sequence: Synthetic peptide
ACEFGSLNQ

SEQ ID NO: 6450 - protein, 9 aa, Artificial Sequence
  Description of Artificial Sequence: Synthetic peptide
ACFHANNWH

SEQ ID NO: 6451 - protein, 9 aa, Artificial Sequence
  Description of Artificial Sequence: Synthetic peptide
ACHVQLSDA

SEQ ID NO: 6452 - protein, 9 aa, Artificial Sequence
  Description of Artificial Sequence: Synthetic peptide
ACKHEISHA

SEQ ID NO: 6453 - protein, 9 aa, Artificial Sequence
  Description of Artificial Sequence: Synthetic peptide
ACLNMWEER

SEQ ID NO: 6454 - protein, 9 aa, Artificial Sequence
  Description of Artificial Sequence: Synthetic peptide
ACPSAELCY

SEQ ID NO: 6455 - protein, 9 aa, Artificial Sequence
  Description of Artificial Sequence: Synthetic peptide
ACTSSQVKG

SEQ ID NO: 6456 - protein, 9 aa, Artificial Sequence
  Description of Artificial Sequence: Synthetic peptide
ACVFKCWWP

SEQ ID NO: 6457 - protein, 9 aa, Artificial Sequence
  Description of Artificial Sequence: Synthetic peptide
ADCQPQSFN

SEQ ID NO: 6458 - protein, 9 aa, Artificial Sequence
  Description of Artificial Sequence: Synthetic peptide
ADWLYMQSC

SEQ ID NO: 6459 - protein, 9 aa, Artificial Sequence
  Description of Artificial Sequence: Synthetic peptide
ADYDMLTAY

SEQ ID NO: 6460 - protein, 9 aa, Artificial Sequence
  Description of Artificial Sequence: Synthetic peptide
AEIMCSQDH

SEQ ID NO: 6461 - protein, 9 aa, Artificial Sequence
  Description of Artificial Sequence: Synthetic peptide
AEIQNWFAK

SEQ ID NO: 6462 - protein, 9 aa, Artificial Sequence
  Description of Artificial Sequence: Synthetic peptide
AEQHTLGMG

SEQ ID NO: 6463 - protein, 9 aa, Artificial Sequence
  Description of Artificial Sequence: Synthetic peptide
AFDTMVCGT

SEQ ID NO: 6464 - protein, 9 aa, Artificial Sequence
  Description of Artificial Sequence: Synthetic peptide
AFFTNMSPS

SEQ ID NO: 6465 - protein, 9 aa, Artificial Sequence
  Description of Artificial Sequence: Synthetic peptide
AFGPYWMEK

SEQ ID NO: 6466 - protein, 9 aa, Artificial Sequence
  Description of Artificial Sequence: Synthetic peptide
AFHLWKEDQ

SEQ ID NO: 6467 - protein, 9 aa, Artificial Sequence
  Description of Artificial Sequence: Synthetic peptide
AFKSFDSHI

SEQ ID NO: 6468 - protein, 9 aa, Artificial Sequence
  Description of Artificial Sequence: Synthetic peptide
AFRAICAHG

SEQ ID NO: 6469 - protein, 9 aa, Artificial Sequence
  Description of Artificial Sequence: Synthetic peptide
AFWIEQMDY

SEQ ID NO: 6470 - protein, 9 aa, Artificial Sequence
  Description of Artificial Sequence: Synthetic peptide
AGDLWEIGS

SEQ ID NO: 6471 - protein, 9 aa, Artificial Sequence
  Description of Artificial Sequence: Synthetic peptide
AGEHSRSER

SEQ ID NO: 6472 - protein, 9 aa, Artificial Sequence
  Description of Artificial Sequence: Synthetic peptide
AGFPFEKFA

SEQ ID NO: 6473 - protein, 9 aa, Artificial Sequence
  Description of Artificial Sequence: Synthetic peptide
AGGHIHADH

SEQ ID NO: 6474 - protein, 9 aa, Artificial Sequence
  Description of Artificial Sequence: Synthetic peptide
AGQFRKLPY

SEQ ID NO: 6475 - protein, 9 aa, Artificial Sequence
  Description of Artificial Sequence: Synthetic peptide
AGWPTSREM

SEQ ID NO: 6476 - protein, 9 aa, Artificial Sequence
  Description of Artificial Sequence: Synthetic peptide
AHMGQVWWF

SEQ ID NO: 6477 - protein, 9 aa, Artificial Sequence
  Description of Artificial Sequence: Synthetic peptide
AHSQLVSDR

SEQ ID NO: 6478 - protein, 9 aa, Artificial Sequence
  Description of Artificial Sequence: Synthetic peptide
AHVLNTFGN

SEQ ID NO: 6479 - protein, 9 aa, Artificial Sequence
  Description of Artificial Sequence: Synthetic peptide
AIEFWDDAL

SEQ ID NO: 6480 - protein, 9 aa, Artificial Sequence
  Description of Artificial Sequence: Synthetic peptide
AIFHACNSG

SEQ ID NO: 6481 - protein, 9 aa, Artificial Sequence
  Description of Artificial Sequence: Synthetic peptide
AIFRSEITY

SEQ ID NO: 6482 - protein, 9 aa, Artificial Sequence
  Description of Artificial Sequence: Synthetic peptide
AIGNLTGAQ

SEQ ID NO: 6483 - protein, 9 aa, Artificial Sequence
  Description of Artificial Sequence: Synthetic peptide
AIQASMDAF

SEQ ID NO: 6484 - protein, 9 aa, Artificial Sequence
  Description of Artificial Sequence: Synthetic peptide
AIRCESDAA

SEQ ID NO: 6485 - protein, 9 aa, Artificial Sequence
  Description of Artificial Sequence: Synthetic peptide
AISVGEVTT

SEQ ID NO: 6486 - protein, 9 aa, Artificial Sequence
  Description of Artificial Sequence: Synthetic peptide
AISVRHQHH

SEQ ID NO: 6487 - protein, 9 aa, Artificial Sequence
  Description of Artificial Sequence: Synthetic peptide
AITDALLYR

SEQ ID NO: 6488 - protein, 9 aa, Artificial Sequence
  Description of Artificial Sequence: Synthetic peptide
AITSASAKN

SEQ ID NO: 6489 - protein, 9 aa, Artificial Sequence
  Description of Artificial Sequence: Synthetic peptide
AIVGWKTPP

SEQ ID NO: 6490 - protein, 9 aa, Artificial Sequence
  Description of Artificial Sequence: Synthetic peptide
AIWIEEFFH

SEQ ID NO: 6491 - protein, 9 aa, Artificial Sequence
  Description of Artificial Sequence: Synthetic peptide
AKAHVCTIP

SEQ ID NO: 6492 - protein, 9 aa, Artificial Sequence
  Description of Artificial Sequence: Synthetic peptide
AKDQLNITR

SEQ ID NO: 6493 - protein, 9 aa, Artificial Sequence
  Description of Artificial Sequence: Synthetic peptide
AKEVTTCNW

SEQ ID NO: 6494 - protein, 9 aa, Artificial Sequence
  Description of Artificial Sequence: Synthetic peptide
AKHTGVTFG

SEQ ID NO: 6495 - protein, 9 aa, Artificial Sequence
  Description of Artificial Sequence: Synthetic peptide
AKKMWHCDQ

SEQ ID NO: 6496 - protein, 9 aa, Artificial Sequence
  Description of Artificial Sequence: Synthetic peptide
AKYGPWENN

SEQ ID NO: 6497 - protein, 9 aa, Artificial Sequence
  Description of Artificial Sequence: Synthetic peptide
AKYQWQSYP

SEQ ID NO: 6498 - protein, 9 aa, Artificial Sequence
  Description of Artificial Sequence: Synthetic peptide
ALAWKNYDK

SEQ ID NO: 6499 - protein, 9 aa, Artificial Sequence
  Description of Artificial Sequence: Synthetic peptide
ALCTENAER

SEQ ID NO: 6500 - protein, 9 aa, Artificial Sequence
  Description of Artificial Sequence: Synthetic peptide
ALGPLHQGD

SEQ ID NO: 6501 - protein, 9 aa, Artificial Sequence
  Description of Artificial Sequence: Synthetic peptide
ALMPSMFLS

SEQ ID NO: 6502 - protein, 9 aa, Artificial Sequence
  Description of Artificial Sequence: Synthetic peptide
ALQQNSLGE

SEQ ID NO: 6503 - protein, 9 aa, Artificial Sequence
  Description of Artificial Sequence: Synthetic peptide
ALVYAHWWG

SEQ ID NO: 6504 - protein, 9 aa, Artificial Sequence
  Description of Artificial Sequence: Synthetic peptide
ALYEADQFD

SEQ ID NO: 6505 - protein, 9 aa, Artificial Sequence
  Description of Artificial Sequence: Synthetic peptide
ALYQIKWGF

SEQ ID NO: 6506 - protein, 9 aa, Artificial Sequence
  Description of Artificial Sequence: Synthetic peptide
AMDVIIEGA

SEQ ID NO: 6507 - protein, 9 aa, Artificial Sequence
  Description of Artificial Sequence: Synthetic peptide
AMEYLRLQH

SEQ ID NO: 6508 - protein, 9 aa, Artificial Sequence
  Description of Artificial Sequence: Synthetic peptide
AMGTTEVQV

SEQ ID NO: 6509 - protein, 9 aa, Artificial Sequence
  Description of Artificial Sequence: Synthetic peptide
AMHLQERMP

SEQ ID NO: 6510 - protein, 9 aa, Artificial Sequence
  Description of Artificial Sequence: Synthetic peptide
AMHNREGAI

SEQ ID NO: 6511 - protein, 9 aa, Artificial Sequence
  Description of Artificial Sequence: Synthetic peptide
AMIQCAMPP

SEQ ID NO: 6512 - protein, 9 aa, Artificial Sequence
  Description of Artificial Sequence: Synthetic peptide
AMWWGQAMG

SEQ ID NO: 6513 - protein, 9 aa, Artificial Sequence
  Description of Artificial Sequence: Synthetic peptide
ANAAIREHL

SEQ ID NO: 6514 - protein, 9 aa, Artificial Sequence
  Description of Artificial Sequence: Synthetic peptide
ANAERCNLA

SEQ ID NO: 6515 - protein, 9 aa, Artificial Sequence
  Description of Artificial Sequence: Synthetic peptide
ANCRKDPMP

SEQ ID NO: 6516 - protein, 9 aa, Artificial Sequence
  Description of Artificial Sequence: Synthetic peptide
ANENCSKGS

SEQ ID NO: 6517 - protein, 9 aa, Artificial Sequence
  Description of Artificial Sequence: Synthetic peptide
ANGPHTDCI

SEQ ID NO: 6518 - protein, 9 aa, Artificial Sequence
  Description of Artificial Sequence: Synthetic peptide
ANILWYHAS

SEQ ID NO: 6519 - protein, 9 aa, Artificial Sequence
  Description of Artificial Sequence: Synthetic peptide
ANKCLDMRD

SEQ ID NO: 6520 - protein, 9 aa, Artificial Sequence
  Description of Artificial Sequence: Synthetic peptide
ANLMSAKME

SEQ ID NO: 6521 - protein, 9 aa, Artificial Sequence
  Description of Artificial Sequence: Synthetic peptide
ANPLCELQQ

SEQ ID NO: 6522 - protein, 9 aa, Artificial Sequence
  Description of Artificial Sequence: Synthetic peptide
APRLTEACL

SEQ ID NO: 6523 - protein, 9 aa, Artificial Sequence
  Description of Artificial Sequence: Synthetic peptide
APSWRNHMC

SEQ ID NO: 6524 - protein, 9 aa, Artificial Sequence
  Description of Artificial Sequence: Synthetic peptide
APVLITNQQ

SEQ ID NO: 6525 - protein, 9 aa, Artificial Sequence
  Description of Artificial Sequence: Synthetic peptide
AQDHRHSDW

SEQ ID NO: 6526 - protein, 9 aa, Artificial Sequence
  Description of Artificial Sequence: Synthetic peptide
AQDWSATQG

SEQ ID NO: 6527 - protein, 9 aa, Artificial Sequence
  Description of Artificial Sequence: Synthetic peptide
AQEKRLYGQ

SEQ ID NO: 6528 - protein, 9 aa, Artificial Sequence
  Description of Artificial Sequence: Synthetic peptide
AQFSHLHSY

SEQ ID NO: 6529 - protein, 9 aa, Artificial Sequence
  Description of Artificial Sequence: Synthetic peptide
AQHSHHECY

SEQ ID NO: 6530 - protein, 9 aa, Artificial Sequence
  Description of Artificial Sequence: Synthetic peptide
AQSMPYSRH

SEQ ID NO: 6531 - protein, 9 aa, Artificial Sequence
  Description of Artificial Sequence: Synthetic peptide
AQWNQLYGS

SEQ ID NO: 6532 - protein, 9 aa, Artificial Sequence
  Description of Artificial Sequence: Synthetic peptide
ARATWPRTA

SEQ ID NO: 6533 - protein, 9 aa, Artificial Sequence
  Description of Artificial Sequence: Synthetic peptide
ARAVDGLNN

SEQ ID NO: 6534 - protein, 9 aa, Artificial Sequence
  Description of Artificial Sequence: Synthetic peptide
ARFIREHEW

SEQ ID NO: 6535 - protein, 9 aa, Artificial Sequence
  Description of Artificial Sequence: Synthetic peptide
ARLWIPGEP

SEQ ID NO: 6536 - protein, 9 aa, Artificial Sequence
  Description of Artificial Sequence: Synthetic peptide
ARRMDDDWI

SEQ ID NO: 6537 - protein, 9 aa, Artificial Sequence
  Description of Artificial Sequence: Synthetic peptide
ASCAFAEQY

SEQ ID NO: 6538 - protein, 9 aa, Artificial Sequence
  Description of Artificial Sequence: Synthetic peptide
ASCTYYHKW

SEQ ID NO: 6539 - protein, 9 aa, Artificial Sequence
  Description of Artificial Sequence: Synthetic peptide
ASEHYMEVF

SEQ ID NO: 6540 - protein, 9 aa, Artificial Sequence
  Description of Artificial Sequence: Synthetic peptide
ASGIEGEQG

SEQ ID NO: 6541 - protein, 9 aa, Artificial Sequence
  Description of Artificial Sequence: Synthetic peptide
ASGWIQAKT

SEQ ID NO: 6542 - protein, 9 aa, Artificial Sequence
  Description of Artificial Sequence: Synthetic peptide
ASIEKAEMH

SEQ ID NO: 6543 - protein, 9 aa, Artificial Sequence
  Description of Artificial Sequence: Synthetic peptide
ASMDHNLDD

SEQ ID NO: 6544 - protein, 9 aa, Artificial Sequence
  Description of Artificial Sequence: Synthetic peptide
ASMTKHNNF

SEQ ID NO: 6545 - protein, 9 aa, Artificial Sequence
  Description of Artificial Sequence: Synthetic peptide
ASNHRLEKY

SEQ ID NO: 6546 - protein, 9 aa, Artificial Sequence
  Description of Artificial Sequence: Synthetic peptide
ASQPFNPWV

SEQ ID NO: 6547 - protein, 9 aa, Artificial Sequence
  Description of Artificial Sequence: Synthetic peptide
ASSARSIFE

SEQ ID NO: 6548 - protein, 9 aa, Artificial Sequence
  Description of Artificial Sequence: Synthetic peptide
ASTAPVADQ

SEQ ID NO: 6549 - protein, 9 aa, Artificial Sequence
  Description of Artificial Sequence: Synthetic peptide
ASTNSVWHV

SEQ ID NO: 6550 - protein, 9 aa, Artificial Sequence
  Description of Artificial Sequence: Synthetic peptide
ASVMQLLCP

SEQ ID NO: 6551 - protein, 9 aa, Artificial Sequence
  Description of Artificial Sequence: Synthetic peptide
ASWLYDNNC

SEQ ID NO: 6552 - protein, 9 aa, Artificial Sequence
  Description of Artificial Sequence: Synthetic peptide
ATAMPQVRY

SEQ ID NO: 6553 - protein, 9 aa, Artificial Sequence
  Description of Artificial Sequence: Synthetic peptide
ATCCYTHFD

SEQ ID NO: 6554 - protein, 9 aa, Artificial Sequence
  Description of Artificial Sequence: Synthetic peptide
ATDDQMIKG

SEQ ID NO: 6555 - protein, 9 aa, Artificial Sequence
  Description of Artificial Sequence: Synthetic peptide
ATDHSHPWP

SEQ ID NO: 6556 - protein, 9 aa, Artificial Sequence
  Description of Artificial Sequence: Synthetic peptide
ATDPCACNI

SEQ ID NO: 6557 - protein, 9 aa, Artificial Sequence
  Description of Artificial Sequence: Synthetic peptide
ATDVVDECH

SEQ ID NO: 6558 - protein, 9 aa, Artificial Sequence
  Description of Artificial Sequence: Synthetic peptide
ATELYMNGH

SEQ ID NO: 6559 - protein, 9 aa, Artificial Sequence
  Description of Artificial Sequence: Synthetic peptide
ATERWLEGN

SEQ ID NO: 6560 - protein, 9 aa, Artificial Sequence
  Description of Artificial Sequence: Synthetic peptide
ATHDAMVTN

SEQ ID NO: 6561 - protein, 9 aa, Artificial Sequence
  Description of Artificial Sequence: Synthetic peptide
ATKCYEYTW

SEQ ID NO: 6562 - protein, 9 aa, Artificial Sequence
  Description of Artificial Sequence: Synthetic peptide
ATMPQECGA

SEQ ID NO: 6563 - protein, 9 aa, Artificial Sequence
  Description of Artificial Sequence: Synthetic peptide
ATNHSHPWP

SEQ ID NO: 6564 - protein, 9 aa, Artificial Sequence
  Description of Artificial Sequence: Synthetic peptide
ATQFGMTED

SEQ ID NO: 6565 - protein, 9 aa, Artificial Sequence
  Description of Artificial Sequence: Synthetic peptide
ATQSVWMLN

SEQ ID NO: 6566 - protein, 9 aa, Artificial Sequence
  Description of Artificial Sequence: Synthetic peptide
ATQTDYNIP

SEQ ID NO: 6567 - protein, 9 aa, Artificial Sequence
  Description of Artificial Sequence: Synthetic peptide
ATSLPAHYD

SEQ ID NO: 6568 - protein, 9 aa, Artificial Sequence
  Description of Artificial Sequence: Synthetic peptide
ATTLHERTH

SEQ ID NO: 6569 - protein, 9 aa, Artificial Sequence
  Description of Artificial Sequence: Synthetic peptide
ATTYWHRGG

SEQ ID NO: 6570 - protein, 9 aa, Artificial Sequence
  Description of Artificial Sequence: Synthetic peptide
ATYYWQFVW

SEQ ID NO: 6571 - protein, 9 aa, Artificial Sequence
  Description of Artificial Sequence: Synthetic peptide
AVELAPCTN

SEQ ID NO: 6572 - protein, 9 aa, Artificial Sequence
  Description of Artificial Sequence: Synthetic peptide
AVFWTHQEE

SEQ ID NO: 6573 - protein, 9 aa, Artificial Sequence
  Description of Artificial Sequence: Synthetic peptide
AVMPNHWQW

SEQ ID NO: 6574 - protein, 9 aa, Artificial Sequence
  Description of Artificial Sequence: Synthetic peptide
AVMYPMRLH

SEQ ID NO: 6575 - protein, 9 aa, Artificial Sequence
  Description of Artificial Sequence: Synthetic peptide
AVNLKQFKT

SEQ ID NO: 6576 - protein, 9 aa, Artificial Sequence
  Description of Artificial Sequence: Synthetic peptide
AVNPAWKHD

SEQ ID NO: 6577 - protein, 9 aa, Artificial Sequence
  Description of Artificial Sequence: Synthetic peptide
AVNWKQDGY

SEQ ID NO: 6578 - protein, 9 aa, Artificial Sequence
  Description of Artificial Sequence: Synthetic peptide
AVRDHELNN

SEQ ID NO: 6579 - protein, 9 aa, Artificial Sequence
  Description of Artificial Sequence: Synthetic peptide
AVSMACLNT

SEQ ID NO: 6580 - protein, 9 aa, Artificial Sequence
  Description of Artificial Sequence: Synthetic peptide
AVVDWQALE

SEQ ID NO: 6581 - protein, 9 aa, Artificial Sequence
  Description of Artificial Sequence: Synthetic peptide
AVVPLMESA

SEQ ID NO: 6582 - protein, 9 aa, Artificial Sequence
  Description of Artificial Sequence: Synthetic peptide
AVYEALRCL

SEQ ID NO: 6583 - protein, 9 aa, Artificial Sequence
  Description of Artificial Sequence: Synthetic peptide
AVYFVPCRP

SEQ ID NO: 6584 - protein, 9 aa, Artificial Sequence
  Description of Artificial Sequence: Synthetic peptide
AWEMEMEYE

SEQ ID NO: 6585 - protein, 9 aa, Artificial Sequence
  Description of Artificial Sequence: Synthetic peptide
AWNPSGFMG

SEQ ID NO: 6586 - protein, 9 aa, Artificial Sequence
  Description of Artificial Sequence: Synthetic peptide
AWTRCIVCA

SEQ ID NO: 6587 - protein, 9 aa, Artificial Sequence
  Description of Artificial Sequence: Synthetic peptide
AWVMSVMLA

SEQ ID NO: 6588 - protein, 9 aa, Artificial Sequence
  Description of Artificial Sequence: Synthetic peptide
AWVNCISGS

SEQ ID NO: 6589 - protein, 9 aa, Artificial Sequence
  Description of Artificial Sequence: Synthetic peptide
AYAETSTHP

SEQ ID NO: 6590 - protein, 9 aa, Artificial Sequence
  Description of Artificial Sequence: Synthetic peptide
AYDNHYLAP

SEQ ID NO: 6591 - protein, 9 aa, Artificial Sequence
  Description of Artificial Sequence: Synthetic peptide
AYQHHEGVV

SEQ ID NO: 6592 - protein, 9 aa, Artificial Sequence
  Description of Artificial Sequence: Synthetic peptide
AYTESQHNL

SEQ ID NO: 6593 - protein, 9 aa, Artificial Sequence
  Description of Artificial Sequence: Synthetic peptide
CAADCGKGW

SEQ ID NO: 6594 - protein, 9 aa, Artificial Sequence
  Description of Artificial Sequence: Synthetic peptide
CADPQERCD

SEQ ID NO: 6595 - protein, 9 aa, Artificial Sequence
  Description of Artificial Sequence: Synthetic peptide
CAQNLNLWL

SEQ ID NO: 6596 - protein, 9 aa, Artificial Sequence
  Description of Artificial Sequence: Synthetic peptide
CASAVQEDC

SEQ ID NO: 6597 - protein, 9 aa, Artificial Sequence
  Description of Artificial Sequence: Synthetic peptide
CASEHSCWH

SEQ ID NO: 6598 - protein, 9 aa, Artificial Sequence
  Description of Artificial Sequence: Synthetic peptide
CATFQNDVL

SEQ ID NO: 6599 - protein, 9 aa, Artificial Sequence
  Description of Artificial Sequence: Synthetic peptide
CCELLIENT

SEQ ID NO: 6600 - protein, 9 aa, Artificial Sequence
  Description of Artificial Sequence: Synthetic peptide
CDGRRLSMH

SEQ ID NO: 6601 - protein, 9 aa, Artificial Sequence
  Description of Artificial Sequence: Synthetic peptide
CDVQQPTMM

SEQ ID NO: 6602 - protein, 9 aa, Artificial Sequence
  Description of Artificial Sequence: Synthetic peptide
CDYHFKNWG

SEQ ID NO: 6603 - protein, 9 aa, Artificial Sequence
  Description of Artificial Sequence: Synthetic peptide
CEPLVEIHG

SEQ ID NO: 6604 - protein, 9 aa, Artificial Sequence
  Description of Artificial Sequence: Synthetic peptide
CFDYMELSP

SEQ ID NO: 6605 - protein, 9 aa, Artificial Sequence
  Description of Artificial Sequence: Synthetic peptide
CFEDCFYCH

SEQ ID NO: 6606 - protein, 9 aa, Artificial Sequence
  Description of Artificial Sequence: Synthetic peptide
CFEPQCVIN

SEQ ID NO: 6607 - protein, 9 aa, Artificial Sequence
  Description of Artificial Sequence: Synthetic peptide
CFVPDTEWG

SEQ ID NO: 6608 - protein, 9 aa, Artificial Sequence
  Description of Artificial Sequence: Synthetic peptide
CGQQNFRIP

SEQ ID NO: 6609 - protein, 9 aa, Artificial Sequence
  Description of Artificial Sequence: Synthetic peptide
CHADLFWEQ

SEQ ID NO: 6610 - protein, 9 aa, Artificial Sequence
  Description of Artificial Sequence: Synthetic peptide
CHNTANHIQ

SEQ ID NO: 6611 - protein, 9 aa, Artificial Sequence
  Description of Artificial Sequence: Synthetic peptide
CHSYFWMPD

SEQ ID NO: 6612 - protein, 9 aa, Artificial Sequence
  Description of Artificial Sequence: Synthetic peptide
CIATQAFMY

SEQ ID NO: 6613 - protein, 9 aa, Artificial Sequence
  Description of Artificial Sequence: Synthetic peptide
CIHQDAPPH

SEQ ID NO: 6614 - protein, 9 aa, Artificial Sequence
  Description of Artificial Sequence: Synthetic peptide
CISQAVMPP

SEQ ID NO: 6615 - protein, 9 aa, Artificial Sequence
  Description of Artificial Sequence: Synthetic peptide
CKERCGYAN

SEQ ID NO: 6616 - protein, 9 aa, Artificial Sequence
  Description of Artificial Sequence: Synthetic peptide
CKLQKCYYM

SEQ ID NO: 6617 - protein, 9 aa, Artificial Sequence
  Description of Artificial Sequence: Synthetic peptide
CLCYFCCDA

SEQ ID NO: 6618 - protein, 9 aa, Artificial Sequence
  Description of Artificial Sequence: Synthetic peptide
CLHCPIRRR

SEQ ID NO: 6619 - protein, 9 aa, Artificial Sequence
  Description of Artificial Sequence: Synthetic peptide
CLSACDLLV

SEQ ID NO: 6620 - protein, 9 aa, Artificial Sequence
  Description of Artificial Sequence: Synthetic peptide
CMMMYNTCR

SEQ ID NO: 6621 - protein, 9 aa, Artificial Sequence
  Description of Artificial Sequence: Synthetic peptide
CMMQCMDMM

SEQ ID NO: 6622 - protein, 9 aa, Artificial Sequence
  Description of Artificial Sequence: Synthetic peptide
CMNPRSYYF

SEQ ID NO: 6623 - protein, 9 aa, Artificial Sequence
  Description of Artificial Sequence: Synthetic peptide
CNAKQQAAW

SEQ ID NO: 6624 - protein, 9 aa, Artificial Sequence
  Description of Artificial Sequence: Synthetic peptide
CNCASRTEE

SEQ ID NO: 6625 - protein, 9 aa, Artificial Sequence
  Description of Artificial Sequence: Synthetic peptide
CNDLRNQWE

SEQ ID NO: 6626 - protein, 9 aa, Artificial Sequence
  Description of Artificial Sequence: Synthetic peptide
CNNPTTRRW

SEQ ID NO: 6627 - protein, 9 aa, Artificial Sequence
  Description of Artificial Sequence: Synthetic peptide
CNWSKSSIA

SEQ ID NO: 6628 - protein, 9 aa, Artificial Sequence
  Description of Artificial Sequence: Synthetic peptide
CPGVLQSCD

SEQ ID NO: 6629 - protein, 9 aa, Artificial Sequence
  Description of Artificial Sequence: Synthetic peptide
CPQQCIWYG

SEQ ID NO: 6630 - protein, 9 aa, Artificial Sequence
  Description of Artificial Sequence: Synthetic peptide
CQVEKVENE

SEQ ID NO: 6631 - protein, 9 aa, Artificial Sequence
  Description of Artificial Sequence: Synthetic peptide
CQVPAWYDP

SEQ ID NO: 6632 - protein, 9 aa, Artificial Sequence
  Description of Artificial Sequence: Synthetic peptide
CRVNDVMQN

SEQ ID NO: 6633 - protein, 9 aa, Artificial Sequence
  Description of Artificial Sequence: Synthetic peptide
CSCTTDTDP

SEQ ID NO: 6634 - protein, 9 aa, Artificial Sequence
  Description of Artificial Sequence: Synthetic peptide
CSDWYVECK

SEQ ID NO: 6635 - protein, 9 aa, Artificial Sequence
  Description of Artificial Sequence: Synthetic peptide
CSEVLEDNA

SEQ ID NO: 6636 - protein, 9 aa, Artificial Sequence
  Description of Artificial Sequence: Synthetic peptide
CSLPHVVHY

SEQ ID NO: 6637 - protein, 9 aa, Artificial Sequence
  Description of Artificial Sequence: Synthetic peptide
CSQRIHSHC

SEQ ID NO: 6638 - protein, 9 aa, Artificial Sequence
  Description of Artificial Sequence: Synthetic peptide
CSSDYSTLS

SEQ ID NO: 6639 - protein, 9 aa, Artificial Sequence
  Description of Artificial Sequence: Synthetic peptide
CTCQAKIFS

SEQ ID NO: 6640 - protein, 9 aa, Artificial Sequence
  Description of Artificial Sequence: Synthetic peptide
CTDRFAIGA

SEQ ID NO: 6641 - protein, 9 aa, Artificial Sequence
  Description of Artificial Sequence: Synthetic peptide
CTFPNVHEA

SEQ ID NO: 6642 - protein, 9 aa, Artificial Sequence
  Description of Artificial Sequence: Synthetic peptide
CTHSAFHYV

SEQ ID NO: 6643 - protein, 9 aa, Artificial Sequence
  Description of Artificial Sequence: Synthetic peptide
CTIWKQCGH

SEQ ID NO: 6644 - protein, 9 aa, Artificial Sequence
  Description of Artificial Sequence: Synthetic peptide
CTMCYYQNN

SEQ ID NO: 6645 - protein, 9 aa, Artificial Sequence
  Description of Artificial Sequence: Synthetic peptide
CTQMVIHQE

SEQ ID NO: 6646 - protein, 9 aa, Artificial Sequence
  Description of Artificial Sequence: Synthetic peptide
CTTAIGPSG

SEQ ID NO: 6647 - protein, 9 aa, Artificial Sequence
  Description of Artificial Sequence: Synthetic peptide
CTVILPKVG

SEQ ID NO: 6648 - protein, 9 aa, Artificial Sequence
  Description of Artificial Sequence: Synthetic peptide
CTWFDCSQE

SEQ ID NO: 6649 - protein, 9 aa, Artificial Sequence
  Description of Artificial Sequence: Synthetic peptide
CVDTHHANV

SEQ ID NO: 6650 - protein, 9 aa, Artificial Sequence
  Description of Artificial Sequence: Synthetic peptide
CVHATFDYT

SEQ ID NO: 6651 - protein, 9 aa, Artificial Sequence
  Description of Artificial Sequence: Synthetic peptide
CVTTDHCAW

SEQ ID NO: 6652 - protein, 9 aa, Artificial Sequence
  Description of Artificial Sequence: Synthetic peptide
CWENTNVTC

SEQ ID NO: 6653 - protein, 9 aa, Artificial Sequence
  Description of Artificial Sequence: Synthetic peptide
CWEVVNTFR

SEQ ID NO: 6654 - protein, 9 aa, Artificial Sequence
  Description of Artificial Sequence: Synthetic peptide
CWFIKRACA

SEQ ID NO: 6655 - protein, 9 aa, Artificial Sequence
  Description of Artificial Sequence: Synthetic peptide
CWYVWDLWP

SEQ ID NO: 6656 - protein, 9 aa, Artificial Sequence
  Description of Artificial Sequence: Synthetic peptide
DACFVNQPN

SEQ ID NO: 6657 - protein, 9 aa, Artificial Sequence
  Description of Artificial Sequence: Synthetic peptide
DACSHTWAD

SEQ ID NO: 6658 - protein, 9 aa, Artificial Sequence
  Description of Artificial Sequence: Synthetic peptide
DAEDTPATV

SEQ ID NO: 6659 - protein, 9 aa, Artificial Sequence
  Description of Artificial Sequence: Synthetic peptide
DAGKFRKYV

SEQ ID NO: 6660 - protein, 9 aa, Artificial Sequence
  Description of Artificial Sequence: Synthetic peptide
DAHQENLNW

SEQ ID NO: 6661 - protein, 9 aa, Artificial Sequence
  Description of Artificial Sequence: Synthetic peptide
DAKDMMMTC

SEQ ID NO: 6662 - protein, 9 aa, Artificial Sequence
  Description of Artificial Sequence: Synthetic peptide
DALFNHAAV

SEQ ID NO: 6663 - protein, 9 aa, Artificial Sequence
  Description of Artificial Sequence: Synthetic peptide
DALSYMQME

SEQ ID NO: 6664 - protein, 9 aa, Artificial Sequence
  Description of Artificial Sequence: Synthetic peptide
DANEFILMH

SEQ ID NO: 6665 - protein, 9 aa, Artificial Sequence
  Description of Artificial Sequence: Synthetic peptide
DANNTLQHS

SEQ ID NO: 6666 - protein, 9 aa, Artificial Sequence
  Description of Artificial Sequence: Synthetic peptide
DANYYFVWQ

SEQ ID NO: 6667 - protein, 9 aa, Artificial Sequence
  Description of Artificial Sequence: Synthetic peptide
DAWPNQQMW

SEQ ID NO: 6668 - protein, 9 aa, Artificial Sequence
  Description of Artificial Sequence: Synthetic peptide
DCAQNWSGS

SEQ ID NO: 6669 - protein, 9 aa, Artificial Sequence
  Description of Artificial Sequence: Synthetic peptide
DCEWMSTGA

SEQ ID NO: 6670 - protein, 9 aa, Artificial Sequence
  Description of Artificial Sequence: Synthetic peptide
DCGFQTAHT

SEQ ID NO: 6671 - protein, 9 aa, Artificial Sequence
  Description of Artificial Sequence: Synthetic peptide
DCHKWDTNQ

SEQ ID NO: 6672 - protein, 9 aa, Artificial Sequence
  Description of Artificial Sequence: Synthetic peptide
DCKMHQAAM

SEQ ID NO: 6673 - protein, 9 aa, Artificial Sequence
  Description of Artificial Sequence: Synthetic peptide
DCKWLALYP

SEQ ID NO: 6674 - protein, 9 aa, Artificial Sequence
  Description of Artificial Sequence: Synthetic peptide
DCMQDPAYR

SEQ ID NO: 6675 - protein, 9 aa, Artificial Sequence
  Description of Artificial Sequence: Synthetic peptide
DCMVMSQGH

SEQ ID NO: 6676 - protein, 9 aa, Artificial Sequence
  Description of Artificial Sequence: Synthetic peptide
DCNFRHQDP

SEQ ID NO: 6677 - protein, 9 aa, Artificial Sequence
  Description of Artificial Sequence: Synthetic peptide
DCPEWGVGC

SEQ ID NO: 6678 - protein, 9 aa, Artificial Sequence
  Description of Artificial Sequence: Synthetic peptide
DCQMILGDY

SEQ ID NO: 6679 - protein, 9 aa, Artificial Sequence
  Description of Artificial Sequence: Synthetic peptide
DCQPMEWWE

SEQ ID NO: 6680 - protein, 9 aa, Artificial Sequence
  Description of Artificial Sequence: Synthetic peptide
DCRHFQSQE

SEQ ID NO: 6681 - protein, 9 aa, Artificial Sequence
  Description of Artificial Sequence: Synthetic peptide
DCTEIVSGM

SEQ ID NO: 6682 - protein, 9 aa, Artificial Sequence
  Description of Artificial Sequence: Synthetic peptide
DCTMYCKQS

SEQ ID NO: 6683 - protein, 9 aa, Artificial Sequence
  Description of Artificial Sequence: Synthetic peptide
DCTPYQGGH

SEQ ID NO: 6684 - protein, 9 aa, Artificial Sequence
  Description of Artificial Sequence: Synthetic peptide
DCYSKRFTP

SEQ ID NO: 6685 - protein, 9 aa, Artificial Sequence
  Description of Artificial Sequence: Synthetic peptide
DCYYLKYSA

SEQ ID NO: 6686 - protein, 9 aa, Artificial Sequence
  Description of Artificial Sequence: Synthetic peptide
DDEYNLTGL

SEQ ID NO: 6687 - protein, 9 aa, Artificial Sequence
  Description of Artificial Sequence: Synthetic peptide
DDPNYAWEA

SEQ ID NO: 6688 - protein, 9 aa, Artificial Sequence
  Description of Artificial Sequence: Synthetic peptide
DDQLYAWGM

SEQ ID NO: 6689 - protein, 9 aa, Artificial Sequence
  Description of Artificial Sequence: Synthetic peptide
DDSLLFHMD

SEQ ID NO: 6690 - protein, 9 aa, Artificial Sequence
  Description of Artificial Sequence: Synthetic peptide
DEASDLQYA

SEQ ID NO: 6691 - protein, 9 aa, Artificial Sequence
  Description of Artificial Sequence: Synthetic peptide
DEHPHPEHC

SEQ ID NO: 6692 - protein, 9 aa, Artificial Sequence
  Description of Artificial Sequence: Synthetic peptide
DEIQIGGSF

SEQ ID NO: 6693 - protein, 9 aa, Artificial Sequence
  Description of Artificial Sequence: Synthetic peptide
DEMTFEQLF

SEQ ID NO: 6694 - protein, 9 aa, Artificial Sequence
  Description of Artificial Sequence: Synthetic peptide
DEQHICMQT

SEQ ID NO: 6695 - protein, 9 aa, Artificial Sequence
  Description of Artificial Sequence: Synthetic peptide
DESEMTSGG

SEQ ID NO: 6696 - protein, 9 aa, Artificial Sequence
  Description of Artificial Sequence: Synthetic peptide
DEWWWSREE

SEQ ID NO: 6697 - protein, 9 aa, Artificial Sequence
  Description of Artificial Sequence: Synthetic peptide
DFASRCNYV

SEQ ID NO: 6698 - protein, 9 aa, Artificial Sequence
  Description of Artificial Sequence: Synthetic peptide
DFCFNESYW

SEQ ID NO: 6699 - protein, 9 aa, Artificial Sequence
  Description of Artificial Sequence: Synthetic peptide
DFHCYSTER

SEQ ID NO: 6700 - protein, 9 aa, Artificial Sequence
  Description of Artificial Sequence: Synthetic peptide
DFMTLVTHQ

SEQ ID NO: 6701 - protein, 9 aa, Artificial Sequence
  Description of Artificial Sequence: Synthetic peptide
DFQAYSWNH

SEQ ID NO: 6702 - protein, 9 aa, Artificial Sequence
  Description of Artificial Sequence: Synthetic peptide
DFRHVDKHA

SEQ ID NO: 6703 - protein, 9 aa, Artificial Sequence
  Description of Artificial Sequence: Synthetic peptide
DFTQGMCTP

SEQ ID NO: 6704 - protein, 9 aa, Artificial Sequence
  Description of Artificial Sequence: Synthetic peptide
DGDAQSCAY

SEQ ID NO: 6705 - protein, 9 aa, Artificial Sequence
  Description of Artificial Sequence: Synthetic peptide
DGDCLQRHL

SEQ ID NO: 6706 - protein, 9 aa, Artificial Sequence
  Description of Artificial Sequence: Synthetic peptide
DGFNYELQP

SEQ ID NO: 6707 - protein, 9 aa, Artificial Sequence
  Description of Artificial Sequence: Synthetic peptide
DGGHMMNQD

SEQ ID NO: 6708 - protein, 9 aa, Artificial Sequence
  Description of Artificial Sequence: Synthetic peptide
DGHNFDGHN

SEQ ID NO: 6709 - protein, 9 aa, Artificial Sequence
  Description of Artificial Sequence: Synthetic peptide
DGIWTHKAD

SEQ ID NO: 6710 - protein, 9 aa, Artificial Sequence
  Description of Artificial Sequence: Synthetic peptide
DGQFIFSQN

SEQ ID NO: 6711 - protein, 9 aa, Artificial Sequence
  Description of Artificial Sequence: Synthetic peptide
DGYNMLWDP

SEQ ID NO: 6712 - protein, 9 aa, Artificial Sequence
  Description of Artificial Sequence: Synthetic peptide
DHCEMHDCW

SEQ ID NO: 6713 - protein, 9 aa, Artificial Sequence
  Description of Artificial Sequence: Synthetic peptide
DHFHMELTK

SEQ ID NO: 6714 - protein, 9 aa, Artificial Sequence
  Description of Artificial Sequence: Synthetic peptide
DHQSYYTQK

SEQ ID NO: 6715 - protein, 9 aa, Artificial Sequence
  Description of Artificial Sequence: Synthetic peptide
DIEFYCAYP

SEQ ID NO: 6716 - protein, 9 aa, Artificial Sequence
  Description of Artificial Sequence: Synthetic peptide
DIEMFGSEM

SEQ ID NO: 6717 - protein, 9 aa, Artificial Sequence
  Description of Artificial Sequence: Synthetic peptide
DIEYQSMGS

SEQ ID NO: 6718 - protein, 9 aa, Artificial Sequence
  Description of Artificial Sequence: Synthetic peptide
DIGWLAPTA

SEQ ID NO: 6719 - protein, 9 aa, Artificial Sequence
  Description of Artificial Sequence: Synthetic peptide
DIICDCDMF

SEQ ID NO: 6720 - protein, 9 aa, Artificial Sequence
  Description of Artificial Sequence: Synthetic peptide
DILLDSRHS

SEQ ID NO: 6721 - protein, 9 aa, Artificial Sequence
  Description of Artificial Sequence: Synthetic peptide
DITLIMSVH

SEQ ID NO: 6722 - protein, 9 aa, Artificial Sequence
  Description of Artificial Sequence: Synthetic peptide
DKGQLCSLQ

SEQ ID NO: 6723 - protein, 9 aa, Artificial Sequence
  Description of Artificial Sequence: Synthetic peptide
DKIWIWQAS

SEQ ID NO: 6724 - protein, 9 aa, Artificial Sequence
  Description of Artificial Sequence: Synthetic peptide
DKLARSVSC

SEQ ID NO: 6725 - protein, 9 aa, Artificial Sequence
  Description of Artificial Sequence: Synthetic peptide
DKMELNAHW

SEQ ID NO: 6726 - protein, 9 aa, Artificial Sequence
  Description of Artificial Sequence: Synthetic peptide
DKQQAKDQL

SEQ ID NO: 6727 - protein, 9 aa, Artificial Sequence
  Description of Artificial Sequence: Synthetic peptide
DKQRPMCVC

SEQ ID NO: 6728 - protein, 9 aa, Artificial Sequence
  Description of Artificial Sequence: Synthetic peptide
DKQWFWFGH

SEQ ID NO: 6729 - protein, 9 aa, Artificial Sequence
  Description of Artificial Sequence: Synthetic peptide
DKTSCMSFR

SEQ ID NO: 6730 - protein, 9 aa, Artificial Sequence
  Description of Artificial Sequence: Synthetic peptide
DKTYLTRME

SEQ ID NO: 6731 - protein, 9 aa, Artificial Sequence
  Description of Artificial Sequence: Synthetic peptide
DLAVMGKCT

SEQ ID NO: 6732 - protein, 9 aa, Artificial Sequence
  Description of Artificial Sequence: Synthetic peptide
DLMWYEGAS

SEQ ID NO: 6733 - protein, 9 aa, Artificial Sequence
  Description of Artificial Sequence: Synthetic peptide
DLQTSYHDQ

SEQ ID NO: 6734 - protein, 9 aa, Artificial Sequence
  Description of Artificial Sequence: Synthetic peptide
DMARALKFF

SEQ ID NO: 6735 - protein, 9 aa, Artificial Sequence
  Description of Artificial Sequence: Synthetic peptide
DMCTMAYTG

SEQ ID NO: 6736 - protein, 9 aa, Artificial Sequence
  Description of Artificial Sequence: Synthetic peptide
DMEYSVCHS

SEQ ID NO: 6737 - protein, 9 aa, Artificial Sequence
  Description of Artificial Sequence: Synthetic peptide
DMKMYEFGP

SEQ ID NO: 6738 - protein, 9 aa, Artificial Sequence
  Description of Artificial Sequence: Synthetic peptide
DMLMNLMEP

SEQ ID NO: 6739 - protein, 9 aa, Artificial Sequence
  Description of Artificial Sequence: Synthetic peptide
DMNFTEQYA

SEQ ID NO: 6740 - protein, 9 aa, Artificial Sequence
  Description of Artificial Sequence: Synthetic peptide
DMTWTMGRQ

SEQ ID NO: 6741 - protein, 9 aa, Artificial Sequence
  Description of Artificial Sequence: Synthetic peptide
DNACHTPFW

SEQ ID NO: 6742 - protein, 9 aa, Artificial Sequence
  Description of Artificial Sequence: Synthetic peptide
DNAVLDGVP

SEQ ID NO: 6743 - protein, 9 aa, Artificial Sequence
  Description of Artificial Sequence: Synthetic peptide
DNMPQPVCH

SEQ ID NO: 6744 - protein, 9 aa, Artificial Sequence
  Description of Artificial Sequence: Synthetic peptide
DNRFIQDAR

SEQ ID NO: 6745 - protein, 9 aa, Artificial Sequence
  Description of Artificial Sequence: Synthetic peptide
DNSSEGSWF

SEQ ID NO: 6746 - protein, 9 aa, Artificial Sequence
  Description of Artificial Sequence: Synthetic peptide
DNVYKGPWA

SEQ ID NO: 6747 - protein, 9 aa, Artificial Sequence
  Description of Artificial Sequence: Synthetic peptide
DPCPYIDHQ

SEQ ID NO: 6748 - protein, 9 aa, Artificial Sequence
  Description of Artificial Sequence: Synthetic peptide
DPYPQGRQK

SEQ ID NO: 6749 - protein, 9 aa, Artificial Sequence
  Description of Artificial Sequence: Synthetic peptide
DQADCNWTW

SEQ ID NO: 6750 - protein, 9 aa, Artificial Sequence
  Description of Artificial Sequence: Synthetic peptide
DQASYDIHG

SEQ ID NO: 6751 - protein, 9 aa, Artificial Sequence
  Description of Artificial Sequence: Synthetic peptide
DQCPLRSGT

SEQ ID NO: 6752 - protein, 9 aa, Artificial Sequence
  Description of Artificial Sequence: Synthetic peptide
DQKSQMQTR

SEQ ID NO: 6753 - protein, 9 aa, Artificial Sequence
  Description of Artificial Sequence: Synthetic peptide
DQLEFICWP

SEQ ID NO: 6754 - protein, 9 aa, Artificial Sequence
  Description of Artificial Sequence: Synthetic peptide
DQNSYGCIP

SEQ ID NO: 6755 - protein, 9 aa, Artificial Sequence
  Description of Artificial Sequence: Synthetic peptide
DQYVPATGY

SEQ ID NO: 6756 - protein, 9 aa, Artificial Sequence
  Description of Artificial Sequence: Synthetic peptide
DRAVKFSIL

SEQ ID NO: 6757 - protein, 9 aa, Artificial Sequence
  Description of Artificial Sequence: Synthetic peptide
DRGDQVMQT

SEQ ID NO: 6758 - protein, 9 aa, Artificial Sequence
  Description of Artificial Sequence: Synthetic peptide
DRGFAHLCQ

SEQ ID NO: 6759 - protein, 9 aa, Artificial Sequence
  Description of Artificial Sequence: Synthetic peptide
DRSTQDKFD

SEQ ID NO: 6760 - protein, 9 aa, Artificial Sequence
  Description of Artificial Sequence: Synthetic peptide
DRTVQVRVD

SEQ ID NO: 6761 - protein, 9 aa, Artificial Sequence
  Description of Artificial Sequence: Synthetic peptide
DRTYTYCWS

SEQ ID NO: 6762 - protein, 9 aa, Artificial Sequence
  Description of Artificial Sequence: Synthetic peptide
DRVMMQRND

SEQ ID NO: 6763 - protein, 9 aa, Artificial Sequence
  Description of Artificial Sequence: Synthetic peptide
DRWGMEEHQ

SEQ ID NO: 6764 - protein, 9 aa, Artificial Sequence
  Description of Artificial Sequence: Synthetic peptide
DRWQIPSKL

SEQ ID NO: 6765 - protein, 9 aa, Artificial Sequence
  Description of Artificial Sequence: Synthetic peptide
DSATFKSAD

SEQ ID NO: 6766 - protein, 9 aa, Artificial Sequence
  Description of Artificial Sequence: Synthetic peptide
DSECKNCMC

SEQ ID NO: 6767 - protein, 9 aa, Artificial Sequence
  Description of Artificial Sequence: Synthetic peptide
DSGGNMQVY

SEQ ID NO: 6768 - protein, 9 aa, Artificial Sequence
  Description of Artificial Sequence: Synthetic peptide
DSGKQPADQ

SEQ ID NO: 6769 - protein, 9 aa, Artificial Sequence
  Description of Artificial Sequence: Synthetic peptide
DSHCEVRFE

SEQ ID NO: 6770 - protein, 9 aa, Artificial Sequence
  Description of Artificial Sequence: Synthetic peptide
DSIQRLSAG

SEQ ID NO: 6771 - protein, 9 aa, Artificial Sequence
  Description of Artificial Sequence: Synthetic peptide
DSNTGQKAY

SEQ ID NO: 6772 - protein, 9 aa, Artificial Sequence
  Description of Artificial Sequence: Synthetic peptide
DSVEWTVHE

SEQ ID NO: 6773 - protein, 9 aa, Artificial Sequence
  Description of Artificial Sequence: Synthetic peptide
DSVRMLGKP

SEQ ID NO: 6774 - protein, 9 aa, Artificial Sequence
  Description of Artificial Sequence: Synthetic peptide
DSWTGWNFA

SEQ ID NO: 6775 - protein, 9 aa, Artificial Sequence
  Description of Artificial Sequence: Synthetic peptide
DTCKYLWTP

SEQ ID NO: 6776 - protein, 9 aa, Artificial Sequence
  Description of Artificial Sequence: Synthetic peptide
DTCSRKHWM

SEQ ID NO: 6777 - protein, 9 aa, Artificial Sequence
  Description of Artificial Sequence: Synthetic peptide
DTDEYQKAQ

SEQ ID NO: 6778 - protein, 9 aa, Artificial Sequence
  Description of Artificial Sequence: Synthetic peptide
DTEWKYKHN

SEQ ID NO: 6779 - protein, 9 aa, Artificial Sequence
  Description of Artificial Sequence: Synthetic peptide
DTKMQHTCT

SEQ ID NO: 6780 - protein, 9 aa, Artificial Sequence
  Description of Artificial Sequence: Synthetic peptide
DTKWYPSTG

SEQ ID NO: 6781 - protein, 9 aa, Artificial Sequence
  Description of Artificial Sequence: Synthetic peptide
DTMLGPQMQ

SEQ ID NO: 6782 - protein, 9 aa, Artificial Sequence
  Description of Artificial Sequence: Synthetic peptide
DTMTCNRHQ

SEQ ID NO: 6783 - protein, 9 aa, Artificial Sequence
  Description of Artificial Sequence: Synthetic peptide
DTNHATMAC

SEQ ID NO: 6784 - protein, 9 aa, Artificial Sequence
  Description of Artificial Sequence: Synthetic peptide
DTNITDQWR

SEQ ID NO: 6785 - protein, 9 aa, Artificial Sequence
  Description of Artificial Sequence: Synthetic peptide
DTQYTRDFV

SEQ ID NO: 6786 - protein, 9 aa, Artificial Sequence
  Description of Artificial Sequence: Synthetic peptide
DTSWDRIFV

SEQ ID NO: 6787 - protein, 9 aa, Artificial Sequence
  Description of Artificial Sequence: Synthetic peptide
DTYMEADSI

SEQ ID NO: 6788 - protein, 9 aa, Artificial Sequence
  Description of Artificial Sequence: Synthetic peptide
DVAEFTGVV

SEQ ID NO: 6789 - protein, 9 aa, Artificial Sequence
  Description of Artificial Sequence: Synthetic peptide
DVETTKAIN

SEQ ID NO: 6790 - protein, 9 aa, Artificial Sequence
  Description of Artificial Sequence: Synthetic peptide
DVFKHLQCT

SEQ ID NO: 6791 - protein, 9 aa, Artificial Sequence
  Description of Artificial Sequence: Synthetic peptide
DVGACFIQD

SEQ ID NO: 6792 - protein, 9 aa, Artificial Sequence
  Description of Artificial Sequence: Synthetic peptide
DVGPMNGPR

SEQ ID NO: 6793 - protein, 9 aa, Artificial Sequence
  Description of Artificial Sequence: Synthetic peptide
DVLPAVECP

SEQ ID NO: 6794 - protein, 9 aa, Artificial Sequence
  Description of Artificial Sequence: Synthetic peptide
DVLTSQELY

SEQ ID NO: 6795 - protein, 9 aa, Artificial Sequence
  Description of Artificial Sequence: Synthetic peptide
DVMHDSRCS

SEQ ID NO: 6796 - protein, 9 aa, Artificial Sequence
  Description of Artificial Sequence: Synthetic peptide
DVMPIECQT

SEQ ID NO: 6797 - protein, 9 aa, Artificial Sequence
  Description of Artificial Sequence: Synthetic peptide
DVNIVCMDD

SEQ ID NO: 6798 - protein, 9 aa, Artificial Sequence
  Description of Artificial Sequence: Synthetic peptide
DVRSMYVMG

SEQ ID NO: 6799 - protein, 9 aa, Artificial Sequence
  Description of Artificial Sequence: Synthetic peptide
DVTHGDPAK

SEQ ID NO: 6800 - protein, 9 aa, Artificial Sequence
  Description of Artificial Sequence: Synthetic peptide
DVTKHALAP

SEQ ID NO: 6801 - protein, 9 aa, Artificial Sequence
  Description of Artificial Sequence: Synthetic peptide
DVVDGEASQ

SEQ ID NO: 6802 - protein, 9 aa, Artificial Sequence
  Description of Artificial Sequence: Synthetic peptide
DVVHGGTQL

SEQ ID NO: 6803 - protein, 9 aa, Artificial Sequence
  Description of Artificial Sequence: Synthetic peptide
DVVKNQGIG

SEQ ID NO: 6804 - protein, 9 aa, Artificial Sequence
  Description of Artificial Sequence: Synthetic peptide
DVVQNDCEF

SEQ ID NO: 6805 - protein, 9 aa, Artificial Sequence
  Description of Artificial Sequence: Synthetic peptide
DVYWDECVF

SEQ ID NO: 6806 - protein, 9 aa, Artificial Sequence
  Description of Artificial Sequence: Synthetic peptide
DWACQEDAG

SEQ ID NO: 6807 - protein, 9 aa, Artificial Sequence
  Description of Artificial Sequence: Synthetic peptide
DWCWYTCSW

SEQ ID NO: 6808 - protein, 9 aa, Artificial Sequence
  Description of Artificial Sequence: Synthetic peptide
DWNYRHWFN

SEQ ID NO: 6809 - protein, 9 aa, Artificial Sequence
  Description of Artificial Sequence: Synthetic peptide
DWVETAQES

SEQ ID NO: 6810 - protein, 9 aa, Artificial Sequence
  Description of Artificial Sequence: Synthetic peptide
DWYMHDQPM

SEQ ID NO: 6811 - protein, 9 aa, Artificial Sequence
  Description of Artificial Sequence: Synthetic peptide
DYEQSQKWW

SEQ ID NO: 6812 - protein, 9 aa, Artificial Sequence
  Description of Artificial Sequence: Synthetic peptide
DYGTAGYPR

SEQ ID NO: 6813 - protein, 9 aa, Artificial Sequence
  Description of Artificial Sequence: Synthetic peptide
DYIMHHHCG

SEQ ID NO: 6814 - protein, 9 aa, Artificial Sequence
  Description of Artificial Sequence: Synthetic peptide
DYLCINGFS

SEQ ID NO: 6815 - protein, 9 aa, Artificial Sequence
  Description of Artificial Sequence: Synthetic peptide
DYNSKMDFH

SEQ ID NO: 6816 - protein, 9 aa, Artificial Sequence
  Description of Artificial Sequence: Synthetic peptide
DYRPENTGC

SEQ ID NO: 6817 - protein, 9 aa, Artificial Sequence
  Description of Artificial Sequence: Synthetic peptide
DYTTAIYTD

SEQ ID NO: 6818 - protein, 9 aa, Artificial Sequence
  Description of Artificial Sequence: Synthetic peptide
DYVRRAWMP

SEQ ID NO: 6819 - protein, 9 aa, Artificial Sequence
  Description of Artificial Sequence: Synthetic peptide
EAAWVVRKR

SEQ ID NO: 6820 - protein, 9 aa, Artificial Sequence
  Description of Artificial Sequence: Synthetic peptide
EADNTQRSS

SEQ ID NO: 6821 - protein, 9 aa, Artificial Sequence
  Description of Artificial Sequence: Synthetic peptide
EADSKFVDQ

SEQ ID NO: 6822 - protein, 9 aa, Artificial Sequence
  Description of Artificial Sequence: Synthetic peptide
EAFAYDHKD

SEQ ID NO: 6823 - protein, 9 aa, Artificial Sequence
  Description of Artificial Sequence: Synthetic peptide
EAGFDAPGR

SEQ ID NO: 6824 - protein, 9 aa, Artificial Sequence
  Description of Artificial Sequence: Synthetic peptide
EAGIDKCCH

SEQ ID NO: 6825 - protein, 9 aa, Artificial Sequence
  Description of Artificial Sequence: Synthetic peptide
EAHMIGRHT

SEQ ID NO: 6826 - protein, 9 aa, Artificial Sequence
  Description of Artificial Sequence: Synthetic peptide
EAICVEREY

SEQ ID NO: 6827 - protein, 9 aa, Artificial Sequence
  Description of Artificial Sequence: Synthetic peptide
EAKLQQEIE

SEQ ID NO: 6828 - protein, 9 aa, Artificial Sequence
  Description of Artificial Sequence: Synthetic peptide
EAMGCILRG

SEQ ID NO: 6829 - protein, 9 aa, Artificial Sequence
  Description of Artificial Sequence: Synthetic peptide
EAMHGDAIW

SEQ ID NO: 6830 - protein, 9 aa, Artificial Sequence
  Description of Artificial Sequence: Synthetic peptide
EARAHQNEI

SEQ ID NO: 6831 - protein, 9 aa, Artificial Sequence
  Description of Artificial Sequence: Synthetic peptide
EASANWLKC

SEQ ID NO: 6832 - protein, 9 aa, Artificial Sequence
  Description of Artificial Sequence: Synthetic peptide
EASGLHKIF

SEQ ID NO: 6833 - protein, 9 aa, Artificial Sequence
  Description of Artificial Sequence: Synthetic peptide
EASNRMIDN

SEQ ID NO: 6834 - protein, 9 aa, Artificial Sequence
  Description of Artificial Sequence: Synthetic peptide
EATLGGWCD

SEQ ID NO: 6835 - protein, 9 aa, Artificial Sequence
  Description of Artificial Sequence: Synthetic peptide
EATPFVRFR

SEQ ID NO: 6836 - protein, 9 aa, Artificial Sequence
  Description of Artificial Sequence: Synthetic peptide
EATVWTWNP

SEQ ID NO: 6837 - protein, 9 aa, Artificial Sequence
  Description of Artificial Sequence: Synthetic peptide
EAWHFYEWP

SEQ ID NO: 6838 - protein, 9 aa, Artificial Sequence
  Description of Artificial Sequence: Synthetic peptide
EAYVNKDQW

SEQ ID NO: 6839 - protein, 9 aa, Artificial Sequence
  Description of Artificial Sequence: Synthetic peptide
ECDFPMGTE

SEQ ID NO: 6840 - protein, 9 aa, Artificial Sequence
  Description of Artificial Sequence: Synthetic peptide
ECEVSHFID

SEQ ID NO: 6841 - protein, 9 aa, Artificial Sequence
  Description of Artificial Sequence: Synthetic peptide
ECHHLWCDY

SEQ ID NO: 6842 - protein, 9 aa, Artificial Sequence
  Description of Artificial Sequence: Synthetic peptide
ECHQMNEDQ

SEQ ID NO: 6843 - protein, 9 aa, Artificial Sequence
  Description of Artificial Sequence: Synthetic peptide
ECMQRYIGV

SEQ ID NO: 6844 - protein, 9 aa, Artificial Sequence
  Description of Artificial Sequence: Synthetic peptide
ECNQNWDEF

SEQ ID NO: 6845 - protein, 9 aa, Artificial Sequence
  Description of Artificial Sequence: Synthetic peptide
ECQNQFGWM

SEQ ID NO: 6846 - protein, 9 aa, Artificial Sequence
  Description of Artificial Sequence: Synthetic peptide
ECRCIPTVW

SEQ ID NO: 6847 - protein, 9 aa, Artificial Sequence
  Description of Artificial Sequence: Synthetic peptide
ECRSEMGLP

SEQ ID NO: 6848 - protein, 9 aa, Artificial Sequence
  Description of Artificial Sequence: Synthetic peptide
ECTRGELTH

SEQ ID NO: 6849 - protein, 9 aa, Artificial Sequence
  Description of Artificial Sequence: Synthetic peptide
ECVHKHSGS

SEQ ID NO: 6850 - protein, 9 aa, Artificial Sequence
  Description of Artificial Sequence: Synthetic peptide
ECYHMELMT

SEQ ID NO: 6851 - protein, 9 aa, Artificial Sequence
  Description of Artificial Sequence: Synthetic peptide
EDTRFHQWT

SEQ ID NO: 6852 - protein, 9 aa, Artificial Sequence
  Description of Artificial Sequence: Synthetic peptide
EEAEQEEWN

SEQ ID NO: 6853 - protein, 9 aa, Artificial Sequence
  Description of Artificial Sequence: Synthetic peptide
EEMHDDGDA

SEQ ID NO: 6854 - protein, 9 aa, Artificial Sequence
  Description of Artificial Sequence: Synthetic peptide
EESQRDMIT

SEQ ID NO: 6855 - protein, 9 aa, Artificial Sequence
  Description of Artificial Sequence: Synthetic peptide
EFAAEMTPA

SEQ ID NO: 6856 - protein, 9 aa, Artificial Sequence
  Description of Artificial Sequence: Synthetic peptide
EFCKANGPL

SEQ ID NO: 6857 - protein, 9 aa, Artificial Sequence
  Description of Artificial Sequence: Synthetic peptide
EFDGCQYFA

SEQ ID NO: 6858 - protein, 9 aa, Artificial Sequence
  Description of Artificial Sequence: Synthetic peptide
EFEQFTRYA

SEQ ID NO: 6859 - protein, 9 aa, Artificial Sequence
  Description of Artificial Sequence: Synthetic peptide
EFHQITGSS

SEQ ID NO: 6860 - protein, 9 aa, Artificial Sequence
  Description of Artificial Sequence: Synthetic peptide
EFMMPMIYD

SEQ ID NO: 6861 - protein, 9 aa, Artificial Sequence
  Description of Artificial Sequence: Synthetic peptide
EFMPTVDTK

SEQ ID NO: 6862 - protein, 9 aa, Artificial Sequence
  Description of Artificial Sequence: Synthetic peptide
EFQWWNMSK

SEQ ID NO: 6863 - protein, 9 aa, Artificial Sequence
  Description of Artificial Sequence: Synthetic peptide
EFTHWMQMQ

SEQ ID NO: 6864 - protein, 9 aa, Artificial Sequence
  Description of Artificial Sequence: Synthetic peptide
EFTQLAYTY

SEQ ID NO: 6865 - protein, 9 aa, Artificial Sequence
  Description of Artificial Sequence: Synthetic peptide
EGCWHGHTF

SEQ ID NO: 6866 - protein, 9 aa, Artificial Sequence
  Description of Artificial Sequence: Synthetic peptide
EGHAFNTFN

SEQ ID NO: 6867 - protein, 9 aa, Artificial Sequence
  Description of Artificial Sequence: Synthetic peptide
EGKPRLHDA

SEQ ID NO: 6868 - protein, 9 aa, Artificial Sequence
  Description of Artificial Sequence: Synthetic peptide
EGKTDVMSY

SEQ ID NO: 6869 - protein, 9 aa, Artificial Sequence
  Description of Artificial Sequence: Synthetic peptide
EGWTVMVDQ

SEQ ID NO: 6870 - protein, 9 aa, Artificial Sequence
  Description of Artificial Sequence: Synthetic peptide
EHCNHDMNT

SEQ ID NO: 6871 - protein, 9 aa, Artificial Sequence
  Description of Artificial Sequence: Synthetic peptide
EHCQEMRWH

SEQ ID NO: 6872 - protein, 9 aa, Artificial Sequence
  Description of Artificial Sequence: Synthetic peptide
EHEAMLVND

SEQ ID NO: 6873 - protein, 9 aa, Artificial Sequence
  Description of Artificial Sequence: Synthetic peptide
EHEFLGAKS

SEQ ID NO: 6874 - protein, 9 aa, Artificial Sequence
  Description of Artificial Sequence: Synthetic peptide
EHFRACVVF

SEQ ID NO: 6875 - protein, 9 aa, Artificial Sequence
  Description of Artificial Sequence: Synthetic peptide
EHFSTYMRE

SEQ ID NO: 6876 - protein, 9 aa, Artificial Sequence
  Description of Artificial Sequence: Synthetic peptide
EHGYSHTLA

SEQ ID NO: 6877 - protein, 9 aa, Artificial Sequence
  Description of Artificial Sequence: Synthetic peptide
EHQEQQLVH

SEQ ID NO: 6878 - protein, 9 aa, Artificial Sequence
  Description of Artificial Sequence: Synthetic peptide
EHSYIMANP

SEQ ID NO: 6879 - protein, 9 aa, Artificial Sequence
  Description of Artificial Sequence: Synthetic peptide
EHTNLEKYA

SEQ ID NO: 6880 - protein, 9 aa, Artificial Sequence
  Description of Artificial Sequence: Synthetic peptide
EHTTWHQYT

SEQ ID NO: 6881 - protein, 9 aa, Artificial Sequence
  Description of Artificial Sequence: Synthetic peptide
EIATHWQKG

SEQ ID NO: 6882 - protein, 9 aa, Artificial Sequence
  Description of Artificial Sequence: Synthetic peptide
EICHYNEQY

SEQ ID NO: 6883 - protein, 9 aa, Artificial Sequence
  Description of Artificial Sequence: Synthetic peptide
EIDAMIPMT

SEQ ID NO: 6884 - protein, 9 aa, Artificial Sequence
  Description of Artificial Sequence: Synthetic peptide
EIDLVTRWE

SEQ ID NO: 6885 - protein, 9 aa, Artificial Sequence
  Description of Artificial Sequence: Synthetic peptide
EIEEQGWSG

SEQ ID NO: 6886 - protein, 9 aa, Artificial Sequence
  Description of Artificial Sequence: Synthetic peptide
EIFLNPQYY

SEQ ID NO: 6887 - protein, 9 aa, Artificial Sequence
  Description of Artificial Sequence: Synthetic peptide
EIGYRHRDC

SEQ ID NO: 6888 - protein, 9 aa, Artificial Sequence
  Description of Artificial Sequence: Synthetic peptide
EIGYWCGCA

SEQ ID NO: 6889 - protein, 9 aa, Artificial Sequence
  Description of Artificial Sequence: Synthetic peptide
EIHQVTHYE

SEQ ID NO: 6890 - protein, 9 aa, Artificial Sequence
  Description of Artificial Sequence: Synthetic peptide
EKHLLNCDS

SEQ ID NO: 6891 - protein, 9 aa, Artificial Sequence
  Description of Artificial Sequence: Synthetic peptide
EKKFGMSGD

SEQ ID NO: 6892 - protein, 9 aa, Artificial Sequence
  Description of Artificial Sequence: Synthetic peptide
EKMVAEFQC

SEQ ID NO: 6893 - protein, 9 aa, Artificial Sequence
  Description of Artificial Sequence: Synthetic peptide
EKQFGVKNR

SEQ ID NO: 6894 - protein, 9 aa, Artificial Sequence
  Description of Artificial Sequence: Synthetic peptide
EKTWHQRNM

SEQ ID NO: 6895 - protein, 9 aa, Artificial Sequence
  Description of Artificial Sequence: Synthetic peptide
ELATLVDWN

SEQ ID NO: 6896 - protein, 9 aa, Artificial Sequence
  Description of Artificial Sequence: Synthetic peptide
ELAWFMNTE

SEQ ID NO: 6897 - protein, 9 aa, Artificial Sequence
  Description of Artificial Sequence: Synthetic peptide
ELCKTVFLA

SEQ ID NO: 6898 - protein, 9 aa, Artificial Sequence
  Description of Artificial Sequence: Synthetic peptide
ELGAAVMVC

SEQ ID NO: 6899 - protein, 9 aa, Artificial Sequence
  Description of Artificial Sequence: Synthetic peptide
ELGFWHGKG

SEQ ID NO: 6900 - protein, 9 aa, Artificial Sequence
  Description of Artificial Sequence: Synthetic peptide
ELLNPDNPI

SEQ ID NO: 6901 - protein, 9 aa, Artificial Sequence
  Description of Artificial Sequence: Synthetic peptide
ELMLGNMFW

SEQ ID NO: 6902 - protein, 9 aa, Artificial Sequence
  Description of Artificial Sequence: Synthetic peptide
ELMMNLIGM

SEQ ID NO: 6903 - protein, 9 aa, Artificial Sequence
  Description of Artificial Sequence: Synthetic peptide
ELRCRDSDQ

SEQ ID NO: 6904 - protein, 9 aa, Artificial Sequence
  Description of Artificial Sequence: Synthetic peptide
ELRPITWVD

SEQ ID NO: 6905 - protein, 9 aa, Artificial Sequence
  Description of Artificial Sequence: Synthetic peptide
ELTKKVKAS

SEQ ID NO: 6906 - protein, 9 aa, Artificial Sequence
  Description of Artificial Sequence: Synthetic peptide
EMIHRHQVD

SEQ ID NO: 6907 - protein, 9 aa, Artificial Sequence
  Description of Artificial Sequence: Synthetic peptide
EMKKLCDAC

SEQ ID NO: 6908 - protein, 9 aa, Artificial Sequence
  Description of Artificial Sequence: Synthetic peptide
EMKPWCQAL

SEQ ID NO: 6909 - protein, 9 aa, Artificial Sequence
  Description of Artificial Sequence: Synthetic peptide
EMMLVHQPS

SEQ ID NO: 6910 - protein, 9 aa, Artificial Sequence
  Description of Artificial Sequence: Synthetic peptide
EMNAVFSTD

SEQ ID NO: 6911 - protein, 9 aa, Artificial Sequence
  Description of Artificial Sequence: Synthetic peptide
EMTKNDSFM

SEQ ID NO: 6912 - protein, 9 aa, Artificial Sequence
  Description of Artificial Sequence: Synthetic peptide
EMYFMSEGT

SEQ ID NO: 6913 - protein, 9 aa, Artificial Sequence
  Description of Artificial Sequence: Synthetic peptide
ENIQSIADV

SEQ ID NO: 6914 - protein, 9 aa, Artificial Sequence
  Description of Artificial Sequence: Synthetic peptide
ENKEYPDSN

SEQ ID NO: 6915 - protein, 9 aa, Artificial Sequence
  Description of Artificial Sequence: Synthetic peptide
ENMCNQGIG

SEQ ID NO: 6916 - protein, 9 aa, Artificial Sequence
  Description of Artificial Sequence: Synthetic peptide
ENRLCVGTV

SEQ ID NO: 6917 - protein, 9 aa, Artificial Sequence
  Description of Artificial Sequence: Synthetic peptide
ENVVAIQTL

SEQ ID NO: 6918 - protein, 9 aa, Artificial Sequence
  Description of Artificial Sequence: Synthetic peptide
ENYKEIPYG

SEQ ID NO: 6919 - protein, 9 aa, Artificial Sequence
  Description of Artificial Sequence: Synthetic peptide
EPTASKHDR

SEQ ID NO: 6920 - protein, 9 aa, Artificial Sequence
  Description of Artificial Sequence: Synthetic peptide
EPTNIPDGF

SEQ ID NO: 6921 - protein, 9 aa, Artificial Sequence
  Description of Artificial Sequence: Synthetic peptide
EPVRRTVMG

SEQ ID NO: 6922 - protein, 9 aa, Artificial Sequence
  Description of Artificial Sequence: Synthetic peptide
EPWMPSIAL

SEQ ID NO: 6923 - protein, 9 aa, Artificial Sequence
  Description of Artificial Sequence: Synthetic peptide
EPWSIGKAA

SEQ ID NO: 6924 - protein, 9 aa, Artificial Sequence
  Description of Artificial Sequence: Synthetic peptide
EPYCEGVAW

SEQ ID NO: 6925 - protein, 9 aa, Artificial Sequence
  Description of Artificial Sequence: Synthetic peptide
EQETHEALG

SEQ ID NO: 6926 - protein, 9 aa, Artificial Sequence
  Description of Artificial Sequence: Synthetic peptide
EQHVIAMDH

SEQ ID NO: 6927 - protein, 9 aa, Artificial Sequence
  Description of Artificial Sequence: Synthetic peptide
EQIKQLNWA

SEQ ID NO: 6928 - protein, 9 aa, Artificial Sequence
  Description of Artificial Sequence: Synthetic peptide
EQMKYYWFE

SEQ ID NO: 6929 - protein, 9 aa, Artificial Sequence
  Description of Artificial Sequence: Synthetic peptide
EQNEQKDMW

SEQ ID NO: 6930 - protein, 9 aa, Artificial Sequence
  Description of Artificial Sequence: Synthetic peptide
EQVPFCFTE

SEQ ID NO: 6931 - protein, 9 aa, Artificial Sequence
  Description of Artificial Sequence: Synthetic peptide
ERACSMADR

SEQ ID NO: 6932 - protein, 9 aa, Artificial Sequence
  Description of Artificial Sequence: Synthetic peptide
ERCHYPYIK

SEQ ID NO: 6933 - protein, 9 aa, Artificial Sequence
  Description of Artificial Sequence: Synthetic peptide
ERETLGDQR

SEQ ID NO: 6934 - protein, 9 aa, Artificial Sequence
  Description of Artificial Sequence: Synthetic peptide
ERGMQVWPP

SEQ ID NO: 6935 - protein, 9 aa, Artificial Sequence
  Description of Artificial Sequence: Synthetic peptide
ERKYIMQFD

SEQ ID NO: 6936 - protein, 9 aa, Artificial Sequence
  Description of Artificial Sequence: Synthetic peptide
ERRSHTETA

SEQ ID NO: 6937 - protein, 9 aa, Artificial Sequence
  Description of Artificial Sequence: Synthetic peptide
ERYRGVIAC

SEQ ID NO: 6938 - protein, 9 aa, Artificial Sequence
  Description of Artificial Sequence: Synthetic peptide
ESCILEEHM

SEQ ID NO: 6939 - protein, 9 aa, Artificial Sequence
  Description of Artificial Sequence: Synthetic peptide
ESCIMQCMI

SEQ ID NO: 6940 - protein, 9 aa, Artificial Sequence
  Description of Artificial Sequence: Synthetic peptide
ESCLFHMRQ

SEQ ID NO: 6941 - protein, 9 aa, Artificial Sequence
  Description of Artificial Sequence: Synthetic peptide
ESENNKFGH

SEQ ID NO: 6942 - protein, 9 aa, Artificial Sequence
  Description of Artificial Sequence: Synthetic peptide
ESEPNKHNP

SEQ ID NO: 6943 - protein, 9 aa, Artificial Sequence
  Description of Artificial Sequence: Synthetic peptide
ESFPNKIQG

SEQ ID NO: 6944 - protein, 9 aa, Artificial Sequence
  Description of Artificial Sequence: Synthetic peptide
ESGVEDMQN

SEQ ID NO: 6945 - protein, 9 aa, Artificial Sequence
  Description of Artificial Sequence: Synthetic peptide
ESHHKGDHM

SEQ ID NO: 6946 - protein, 9 aa, Artificial Sequence
  Description of Artificial Sequence: Synthetic peptide
ESKSHWTIG

SEQ ID NO: 6947 - protein, 9 aa, Artificial Sequence
  Description of Artificial Sequence: Synthetic peptide
ESKVGYELG

SEQ ID NO: 6948 - protein, 9 aa, Artificial Sequence
  Description of Artificial Sequence: Synthetic peptide
ESLTHEDGY

SEQ ID NO: 6949 - protein, 9 aa, Artificial Sequence
  Description of Artificial Sequence: Synthetic peptide
ESRAVLSMP

SEQ ID NO: 6950 - protein, 9 aa, Artificial Sequence
  Description of Artificial Sequence: Synthetic peptide
ESRLTMTCP

SEQ ID NO: 6951 - protein, 9 aa, Artificial Sequence
  Description of Artificial Sequence: Synthetic peptide
ESVNRYFKQ

SEQ ID NO: 6952 - protein, 9 aa, Artificial Sequence
  Description of Artificial Sequence: Synthetic peptide
ETAYTTRTE

SEQ ID NO: 6953 - protein, 9 aa, Artificial Sequence
  Description of Artificial Sequence: Synthetic peptide
ETDHRKHYC

SEQ ID NO: 6954 - protein, 9 aa, Artificial Sequence
  Description of Artificial Sequence: Synthetic peptide
ETECWHKSH

SEQ ID NO: 6955 - protein, 9 aa, Artificial Sequence
  Description of Artificial Sequence: Synthetic peptide
ETEMICEFQ

SEQ ID NO: 6956 - protein, 9 aa, Artificial Sequence
  Description of Artificial Sequence: Synthetic peptide
ETFACPSCR

SEQ ID NO: 6957 - protein, 9 aa, Artificial Sequence
  Description of Artificial Sequence: Synthetic peptide
ETGMFKFSG

SEQ ID NO: 6958 - protein, 9 aa, Artificial Sequence
  Description of Artificial Sequence: Synthetic peptide
ETGWKQNIE

SEQ ID NO: 6959 - protein, 9 aa, Artificial Sequence
  Description of Artificial Sequence: Synthetic peptide
ETHFCIRNS

SEQ ID NO: 6960 - protein, 9 aa, Artificial Sequence
  Description of Artificial Sequence: Synthetic peptide
ETHQMGMDR

SEQ ID NO: 6961 - protein, 9 aa, Artificial Sequence
  Description of Artificial Sequence: Synthetic peptide
ETILDQHGG

SEQ ID NO: 6962 - protein, 9 aa, Artificial Sequence
  Description of Artificial Sequence: Synthetic peptide
ETISRVGMQ

SEQ ID NO: 6963 - protein, 9 aa, Artificial Sequence
  Description of Artificial Sequence: Synthetic peptide
ETLFNSYGR

SEQ ID NO: 6964 - protein, 9 aa, Artificial Sequence
  Description of Artificial Sequence: Synthetic peptide
ETLPLYWQC

SEQ ID NO: 6965 - protein, 9 aa, Artificial Sequence
  Description of Artificial Sequence: Synthetic peptide
ETNKQLNLW

SEQ ID NO: 6966 - protein, 9 aa, Artificial Sequence
  Description of Artificial Sequence: Synthetic peptide
ETQQNIWSW

SEQ ID NO: 6967 - protein, 9 aa, Artificial Sequence
  Description of Artificial Sequence: Synthetic peptide
ETQSPMCCL

SEQ ID NO: 6968 - protein, 9 aa, Artificial Sequence
  Description of Artificial Sequence: Synthetic peptide
ETSCTCEVC

SEQ ID NO: 6969 - protein, 9 aa, Artificial Sequence
  Description of Artificial Sequence: Synthetic peptide
ETSGQGVLW

SEQ ID NO: 6970 - protein, 9 aa, Artificial Sequence
  Description of Artificial Sequence: Synthetic peptide
ETTWNVICP

SEQ ID NO: 6971 - protein, 9 aa, Artificial Sequence
  Description of Artificial Sequence: Synthetic peptide
EVADPMTWV

SEQ ID NO: 6972 - protein, 9 aa, Artificial Sequence
  Description of Artificial Sequence: Synthetic peptide
EVCPGSIRS

SEQ ID NO: 6973 - protein, 9 aa, Artificial Sequence
  Description of Artificial Sequence: Synthetic peptide
EVERKVNQE

SEQ ID NO: 6974 - protein, 9 aa, Artificial Sequence
  Description of Artificial Sequence: Synthetic peptide
EVGNPTQYD

SEQ ID NO: 6975 - protein, 9 aa, Artificial Sequence
  Description of Artificial Sequence: Synthetic peptide
EVHYCGNCG

SEQ ID NO: 6976 - protein, 9 aa, Artificial Sequence
  Description of Artificial Sequence: Synthetic peptide
EVIMSHLIT

SEQ ID NO: 6977 - protein, 9 aa, Artificial Sequence
  Description of Artificial Sequence: Synthetic peptide
EVKYFWHCA

SEQ ID NO: 6978 - protein, 9 aa, Artificial Sequence
  Description of Artificial Sequence: Synthetic peptide
EVLMDWSWE

SEQ ID NO: 6979 - protein, 9 aa, Artificial Sequence
  Description of Artificial Sequence: Synthetic peptide
EVLQLLKAD

SEQ ID NO: 6980 - protein, 9 aa, Artificial Sequence
  Description of Artificial Sequence: Synthetic peptide
EVLYGGQQW

SEQ ID NO: 6981 - protein, 9 aa, Artificial Sequence
  Description of Artificial Sequence: Synthetic peptide
EVNSGRDWW

SEQ ID NO: 6982 - protein, 9 aa, Artificial Sequence
  Description of Artificial Sequence: Synthetic peptide
EVQGFIDDR

SEQ ID NO: 6983 - protein, 9 aa, Artificial Sequence
  Description of Artificial Sequence: Synthetic peptide
EVQHIHFPY

SEQ ID NO: 6984 - protein, 9 aa, Artificial Sequence
  Description of Artificial Sequence: Synthetic peptide
EVQKILFLQ

SEQ ID NO: 6985 - protein, 9 aa, Artificial Sequence
  Description of Artificial Sequence: Synthetic peptide
EVQRNGIGM

SEQ ID NO: 6986 - protein, 9 aa, Artificial Sequence
  Description of Artificial Sequence: Synthetic peptide
EVSHFKVDE

SEQ ID NO: 6987 - protein, 9 aa, Artificial Sequence
  Description of Artificial Sequence: Synthetic peptide
EVSIQPQMN

SEQ ID NO: 6988 - protein, 9 aa, Artificial Sequence
  Description of Artificial Sequence: Synthetic peptide
EVSYTIGDI

SEQ ID NO: 6989 - protein, 9 aa, Artificial Sequence
  Description of Artificial Sequence: Synthetic peptide
EVVHLMMRG

SEQ ID NO: 6990 - protein, 9 aa, Artificial Sequence
  Description of Artificial Sequence: Synthetic peptide
EVWSPMHNG

SEQ ID NO: 6991 - protein, 9 aa, Artificial Sequence
  Description of Artificial Sequence: Synthetic peptide
EWGWAWLVG

SEQ ID NO: 6992 - protein, 9 aa, Artificial Sequence
  Description of Artificial Sequence: Synthetic peptide
EWKMANVMQ

SEQ ID NO: 6993 - protein, 9 aa, Artificial Sequence
  Description of Artificial Sequence: Synthetic peptide
EWRHAWNCW

SEQ ID NO: 6994 - protein, 9 aa, Artificial Sequence
  Description of Artificial Sequence: Synthetic peptide
EWRMFINTA

SEQ ID NO: 6995 - protein, 9 aa, Artificial Sequence
  Description of Artificial Sequence: Synthetic peptide
EWTPFMNEG

SEQ ID NO: 6996 - protein, 9 aa, Artificial Sequence
  Description of Artificial Sequence: Synthetic peptide
EWYLRHHMI

SEQ ID NO: 6997 - protein, 9 aa, Artificial Sequence
  Description of Artificial Sequence: Synthetic peptide
EWYQIRHID

SEQ ID NO: 6998 - protein, 9 aa, Artificial Sequence
  Description of Artificial Sequence: Synthetic peptide
EYAIKICNH

SEQ ID NO: 6999 - protein, 9 aa, Artificial Sequence
  Description of Artificial Sequence: Synthetic peptide
EYASTACYD

SEQ ID NO: 7000 - protein, 9 aa, Artificial Sequence
  Description of Artificial Sequence: Synthetic peptide
EYDHIDVWL

SEQ ID NO: 7001 - protein, 9 aa, Artificial Sequence
  Description of Artificial Sequence: Synthetic peptide
EYEGYKSAA

SEQ ID NO: 7002 - protein, 9 aa, Artificial Sequence
  Description of Artificial Sequence: Synthetic peptide
EYEPIASGP

SEQ ID NO: 7003 - protein, 9 aa, Artificial Sequence
  Description of Artificial Sequence: Synthetic peptide
EYEWLMAAA

SEQ ID NO: 7004 - protein, 9 aa, Artificial Sequence
  Description of Artificial Sequence: Synthetic peptide
EYFDNRCAQ

SEQ ID NO: 7005 - protein, 9 aa, Artificial Sequence
  Description of Artificial Sequence: Synthetic peptide
EYFHVVGVD

SEQ ID NO: 7006 - protein, 9 aa, Artificial Sequence
  Description of Artificial Sequence: Synthetic peptide
EYFPTARTF

SEQ ID NO: 7007 - protein, 9 aa, Artificial Sequence
  Description of Artificial Sequence: Synthetic peptide
EYKSRGREV

SEQ ID NO: 7008 - protein, 9 aa, Artificial Sequence
  Description of Artificial Sequence: Synthetic peptide
EYMERWFND

SEQ ID NO: 7009 - protein, 9 aa, Artificial Sequence
  Description of Artificial Sequence: Synthetic peptide
EYSDSMVWP

SEQ ID NO: 7010 - protein, 9 aa, Artificial Sequence
  Description of Artificial Sequence: Synthetic peptide
EYVRWNKQC

SEQ ID NO: 7011 - protein, 9 aa, Artificial Sequence
  Description of Artificial Sequence: Synthetic peptide
EYYLLGCAD

SEQ ID NO: 7012 - protein, 9 aa, Artificial Sequence
  Description of Artificial Sequence: Synthetic peptide
EYYRKQCAI

SEQ ID NO: 7013 - protein, 9 aa, Artificial Sequence
  Description of Artificial Sequence: Synthetic peptide
FAASSEIYG

SEQ ID NO: 7014 - protein, 9 aa, Artificial Sequence
  Description of Artificial Sequence: Synthetic peptide
FAAYDMVSE

SEQ ID NO: 7015 - protein, 9 aa, Artificial Sequence
  Description of Artificial Sequence: Synthetic peptide
FACPEALGT

SEQ ID NO: 7016 - protein, 9 aa, Artificial Sequence
  Description of Artificial Sequence: Synthetic peptide
FADPHTWFS

SEQ ID NO: 7017 - protein, 9 aa, Artificial Sequence
  Description of Artificial Sequence: Synthetic peptide
FAEDIHYGA

SEQ ID NO: 7018 - protein, 9 aa, Artificial Sequence
  Description of Artificial Sequence: Synthetic peptide
FAIEPGLCT

SEQ ID NO: 7019 - protein, 9 aa, Artificial Sequence
  Description of Artificial Sequence: Synthetic peptide
FATIVVHEE

SEQ ID NO: 7020 - protein, 9 aa, Artificial Sequence
  Description of Artificial Sequence: Synthetic peptide
FATVSPGWI

SEQ ID NO: 7021 - protein, 9 aa, Artificial Sequence
  Description of Artificial Sequence: Synthetic peptide
FAYENRLCD

SEQ ID NO: 7022 - protein, 9 aa, Artificial Sequence
  Description of Artificial Sequence: Synthetic peptide
FCFIEDLAM

SEQ ID NO: 7023 - protein, 9 aa, Artificial Sequence
  Description of Artificial Sequence: Synthetic peptide
FCFMYPFHW

SEQ ID NO: 7024 - protein, 9 aa, Artificial Sequence
  Description of Artificial Sequence: Synthetic peptide
FCFYNRCWQ

SEQ ID NO: 7025 - protein, 9 aa, Artificial Sequence
  Description of Artificial Sequence: Synthetic peptide
FCHLEQCMI

SEQ ID NO: 7026 - protein, 9 aa, Artificial Sequence
  Description of Artificial Sequence: Synthetic peptide
FCSCCHCRT

SEQ ID NO: 7027 - protein, 9 aa, Artificial Sequence
  Description of Artificial Sequence: Synthetic peptide
FCVINELGT

SEQ ID NO: 7028 - protein, 9 aa, Artificial Sequence
  Description of Artificial Sequence: Synthetic peptide
FCYQKLNYN

SEQ ID NO: 7029 - protein, 9 aa, Artificial Sequence
  Description of Artificial Sequence: Synthetic peptide
FDMQLTAYA

SEQ ID NO: 7030 - protein, 9 aa, Artificial Sequence
  Description of Artificial Sequence: Synthetic peptide
FDQPIQQCP

SEQ ID NO: 7031 - protein, 9 aa, Artificial Sequence
  Description of Artificial Sequence: Synthetic peptide
FEHVIRTMW

SEQ ID NO: 7032 - protein, 9 aa, Artificial Sequence
  Description of Artificial Sequence: Synthetic peptide
FEKWRHPRH

SEQ ID NO: 7033 - protein, 9 aa, Artificial Sequence
  Description of Artificial Sequence: Synthetic peptide
FGAKYHDGQ

SEQ ID NO: 7034 - protein, 9 aa, Artificial Sequence
  Description of Artificial Sequence: Synthetic peptide
FGEPANVNA

SEQ ID NO: 7035 - protein, 9 aa, Artificial Sequence
  Description of Artificial Sequence: Synthetic peptide
FGGLCWLVV

SEQ ID NO: 7036 - protein, 9 aa, Artificial Sequence
  Description of Artificial Sequence: Synthetic peptide
FGGLVIDAS

SEQ ID NO: 7037 - protein, 9 aa, Artificial Sequence
  Description of Artificial Sequence: Synthetic peptide
FGKQRNEDY

SEQ ID NO: 7038 - protein, 9 aa, Artificial Sequence
  Description of Artificial Sequence: Synthetic peptide
FGLWQQAGY

SEQ ID NO: 7039 - protein, 9 aa, Artificial Sequence
  Description of Artificial Sequence: Synthetic peptide
FHAEWKGPP

SEQ ID NO: 7040 - protein, 9 aa, Artificial Sequence
  Description of Artificial Sequence: Synthetic peptide
FHTRVNACD

SEQ ID NO: 7041 - protein, 9 aa, Artificial Sequence
  Description of Artificial Sequence: Synthetic peptide
FICQQGDSL

SEQ ID NO: 7042 - protein, 9 aa, Artificial Sequence
  Description of Artificial Sequence: Synthetic peptide
FIRGSPMNM

SEQ ID NO: 7043 - protein, 9 aa, Artificial Sequence
  Description of Artificial Sequence: Synthetic peptide
FIRMIIVDD

SEQ ID NO: 7044 - protein, 9 aa, Artificial Sequence
  Description of Artificial Sequence: Synthetic peptide
FKAEYQSGH

SEQ ID NO: 7045 - protein, 9 aa, Artificial Sequence
  Description of Artificial Sequence: Synthetic peptide
FLINPAWQG

SEQ ID NO: 7046 - protein, 9 aa, Artificial Sequence
  Description of Artificial Sequence: Synthetic peptide
FLWGIRVLA

SEQ ID NO: 7047 - protein, 9 aa, Artificial Sequence
  Description of Artificial Sequence: Synthetic peptide
FMGKTDVNM

SEQ ID NO: 7048 - protein, 9 aa, Artificial Sequence
  Description of Artificial Sequence: Synthetic peptide
FMLTMDFWA

SEQ ID NO: 7049 - protein, 9 aa, Artificial Sequence
  Description of Artificial Sequence: Synthetic peptide
FMNVYFEHA

SEQ ID NO: 7050 - protein, 9 aa, Artificial Sequence
  Description of Artificial Sequence: Synthetic peptide
FMQVGGINT

SEQ ID NO: 7051 - protein, 9 aa, Artificial Sequence
  Description of Artificial Sequence: Synthetic peptide
FMTSLRDRF

SEQ ID NO: 7052 - protein, 9 aa, Artificial Sequence
  Description of Artificial Sequence: Synthetic peptide
FNCEGQLYE

SEQ ID NO: 7053 - protein, 9 aa, Artificial Sequence
  Description of Artificial Sequence: Synthetic peptide
FNDEYPCSQ

SEQ ID NO: 7054 - protein, 9 aa, Artificial Sequence
  Description of Artificial Sequence: Synthetic peptide
FNDSEPEVI

SEQ ID NO: 7055 - protein, 9 aa, Artificial Sequence
  Description of Artificial Sequence: Synthetic peptide
FNFQKTMDC

SEQ ID NO: 7056 - protein, 9 aa, Artificial Sequence
  Description of Artificial Sequence: Synthetic peptide
FNLEEWWSP

SEQ ID NO: 7057 - protein, 9 aa, Artificial Sequence
  Description of Artificial Sequence: Synthetic peptide
FNLQYAGLQ

SEQ ID NO: 7058 - protein, 9 aa, Artificial Sequence
  Description of Artificial Sequence: Synthetic peptide
FNVPFAKDD

SEQ ID NO: 7059 - protein, 9 aa, Artificial Sequence
  Description of Artificial Sequence: Synthetic peptide
FPRESSNLL

SEQ ID NO: 7060 - protein, 9 aa, Artificial Sequence
  Description of Artificial Sequence: Synthetic peptide
FQAGLANCA

SEQ ID NO: 7061 - protein, 9 aa, Artificial Sequence
  Description of Artificial Sequence: Synthetic peptide
FQFTAMWYM

SEQ ID NO: 7062 - protein, 9 aa, Artificial Sequence
  Description of Artificial Sequence: Synthetic peptide
FQGHSRDGM

SEQ ID NO: 7063 - protein, 9 aa, Artificial Sequence
  Description of Artificial Sequence: Synthetic peptide
FQLYQNHGA

SEQ ID NO: 7064 - protein, 9 aa, Artificial Sequence
  Description of Artificial Sequence: Synthetic peptide
FQMTKQTQS

SEQ ID NO: 7065 - protein, 9 aa, Artificial Sequence
  Description of Artificial Sequence: Synthetic peptide
FQMVEQQPQ

SEQ ID NO: 7066 - protein, 9 aa, Artificial Sequence
  Description of Artificial Sequence: Synthetic peptide
FQNLLDGCW

SEQ ID NO: 7067 - protein, 9 aa, Artificial Sequence
  Description of Artificial Sequence: Synthetic peptide
FQTRPSCSF

SEQ ID NO: 7068 - protein, 9 aa, Artificial Sequence
  Description of Artificial Sequence: Synthetic peptide
FRVRWWHYR

SEQ ID NO: 7069 - protein, 9 aa, Artificial Sequence
  Description of Artificial Sequence: Synthetic peptide
FRWNIDVTY

SEQ ID NO: 7070 - protein, 9 aa, Artificial Sequence
  Description of Artificial Sequence: Synthetic peptide
FSANMNADI

SEQ ID NO: 7071 - protein, 9 aa, Artificial Sequence
  Description of Artificial Sequence: Synthetic peptide
FSDGLNHSD

SEQ ID NO: 7072 - protein, 9 aa, Artificial Sequence
  Description of Artificial Sequence: Synthetic peptide
FSQHFNRYP

SEQ ID NO: 7073 - protein, 9 aa, Artificial Sequence
  Description of Artificial Sequence: Synthetic peptide
FSQLMNTPP

SEQ ID NO: 7074 - protein, 9 aa, Artificial Sequence
  Description of Artificial Sequence: Synthetic peptide
FTFDQPSGY

SEQ ID NO: 7075 - protein, 9 aa, Artificial Sequence
  Description of Artificial Sequence: Synthetic peptide
FTHPSTDQQ

SEQ ID NO: 7076 - protein, 9 aa, Artificial Sequence
  Description of Artificial Sequence: Synthetic peptide
FTILLFVHN

SEQ ID NO: 7077 - protein, 9 aa, Artificial Sequence
  Description of Artificial Sequence: Synthetic peptide
FTLLNSEGF

SEQ ID NO: 7078 - protein, 9 aa, Artificial Sequence
  Description of Artificial Sequence: Synthetic peptide
FTMRYQKLH

SEQ ID NO: 7079 - protein, 9 aa, Artificial Sequence
  Description of Artificial Sequence: Synthetic peptide
FVETTQVMN

SEQ ID NO: 7080 - protein, 9 aa, Artificial Sequence
  Description of Artificial Sequence: Synthetic peptide
FVKSFNNDV

SEQ ID NO: 7081 - protein, 9 aa, Artificial Sequence
  Description of Artificial Sequence: Synthetic peptide
FVQSSCQQS

SEQ ID NO: 7082 - protein, 9 aa, Artificial Sequence
  Description of Artificial Sequence: Synthetic peptide
FVVDKYIYA

SEQ ID NO: 7083 - protein, 9 aa, Artificial Sequence
  Description of Artificial Sequence: Synthetic peptide
FWNNNLFQS

SEQ ID NO: 7084 - protein, 9 aa, Artificial Sequence
  Description of Artificial Sequence: Synthetic peptide
FWRGITCNF

SEQ ID NO: 7085 - protein, 9 aa, Artificial Sequence
  Description of Artificial Sequence: Synthetic peptide
FYRLDRCEM

SEQ ID NO: 7086 - protein, 9 aa, Artificial Sequence
  Description of Artificial Sequence: Synthetic peptide
GACDVLSGE

SEQ ID NO: 7087 - protein, 9 aa, Artificial Sequence
  Description of Artificial Sequence: Synthetic peptide
GADEPQATL

SEQ ID NO: 7088 - protein, 9 aa, Artificial Sequence
  Description of Artificial Sequence: Synthetic peptide
GADYFTECH

SEQ ID NO: 7089 - protein, 9 aa, Artificial Sequence
  Description of Artificial Sequence: Synthetic peptide
GAGHYITAW

SEQ ID NO: 7090 - protein, 9 aa, Artificial Sequence
  Description of Artificial Sequence: Synthetic peptide
GANAIWTEE

SEQ ID NO: 7091 - protein, 9 aa, Artificial Sequence
  Description of Artificial Sequence: Synthetic peptide
GAYEYASKM

SEQ ID NO: 7092 - protein, 9 aa, Artificial Sequence
  Description of Artificial Sequence: Synthetic peptide
GCASEHGRS

SEQ ID NO: 7093 - protein, 9 aa, Artificial Sequence
  Description of Artificial Sequence: Synthetic peptide
GCCQGSPFA

SEQ ID NO: 7094 - protein, 9 aa, Artificial Sequence
  Description of Artificial Sequence: Synthetic peptide
GCELIPIRP

SEQ ID NO: 7095 - protein, 9 aa, Artificial Sequence
  Description of Artificial Sequence: Synthetic peptide
GCEMKYQSF

SEQ ID NO: 7096 - protein, 9 aa, Artificial Sequence
  Description of Artificial Sequence: Synthetic peptide
GCLELEHYE

SEQ ID NO: 7097 - protein, 9 aa, Artificial Sequence
  Description of Artificial Sequence: Synthetic peptide
GCTIAEGAC

SEQ ID NO: 7098 - protein, 9 aa, Artificial Sequence
  Description of Artificial Sequence: Synthetic peptide
GCTQGEQAT

SEQ ID NO: 7099 - protein, 9 aa, Artificial Sequence
  Description of Artificial Sequence: Synthetic peptide
GCVGAGCDM

SEQ ID NO: 7100 - protein, 9 aa, Artificial Sequence
  Description of Artificial Sequence: Synthetic peptide
GDCFKQTFH

SEQ ID NO: 7101 - protein, 9 aa, Artificial Sequence
  Description of Artificial Sequence: Synthetic peptide
GDGNRPTDI

SEQ ID NO: 7102 - protein, 9 aa, Artificial Sequence
  Description of Artificial Sequence: Synthetic peptide
GDHCSLSEE

SEQ ID NO: 7103 - protein, 9 aa, Artificial Sequence
  Description of Artificial Sequence: Synthetic peptide
GDHKTIVMF

SEQ ID NO: 7104 - protein, 9 aa, Artificial Sequence
  Description of Artificial Sequence: Synthetic peptide
GDKYCGVHT

SEQ ID NO: 7105 - protein, 9 aa, Artificial Sequence
  Description of Artificial Sequence: Synthetic peptide
GDLFWKKIH

SEQ ID NO: 7106 - protein, 9 aa, Artificial Sequence
  Description of Artificial Sequence: Synthetic peptide
GDYTKMVNQ

SEQ ID NO: 7107 - protein, 9 aa, Artificial Sequence
  Description of Artificial Sequence: Synthetic peptide
GECTYVGGD

SEQ ID NO: 7108 - protein, 9 aa, Artificial Sequence
  Description of Artificial Sequence: Synthetic peptide
GFAQYGMAL

SEQ ID NO: 7109 - protein, 9 aa, Artificial Sequence
  Description of Artificial Sequence: Synthetic peptide
GFEQYDCEM

SEQ ID NO: 7110 - protein, 9 aa, Artificial Sequence
  Description of Artificial Sequence: Synthetic peptide
GFFCFVTQW

SEQ ID NO: 7111 - protein, 9 aa, Artificial Sequence
  Description of Artificial Sequence: Synthetic peptide
GFMEHPNSA

SEQ ID NO: 7112 - protein, 9 aa, Artificial Sequence
  Description of Artificial Sequence: Synthetic peptide
GFMEKCYDG

SEQ ID NO: 7113 - protein, 9 aa, Artificial Sequence
  Description of Artificial Sequence: Synthetic peptide
GFNALQQAP

SEQ ID NO: 7114 - protein, 9 aa, Artificial Sequence
  Description of Artificial Sequence: Synthetic peptide
GFNCEKPDA

SEQ ID NO: 7115 - protein, 9 aa, Artificial Sequence
  Description of Artificial Sequence: Synthetic peptide
GGGHCWQNA

SEQ ID NO: 7116 - protein, 9 aa, Artificial Sequence
  Description of Artificial Sequence: Synthetic peptide
GGHMKMQME

SEQ ID NO: 7117 - protein, 9 aa, Artificial Sequence
  Description of Artificial Sequence: Synthetic peptide
GGRAFAGYK

SEQ ID NO: 7118 - protein, 9 aa, Artificial Sequence
  Description of Artificial Sequence: Synthetic peptide
KTTFDVACY

SEQ ID NO: 7119 - protein, 9 aa, Artificial Sequence
  Description of Artificial Sequence: Synthetic peptide
KDGYREAWM

SEQ ID NO: 7120 - protein, 9 aa, Artificial Sequence
  Description of Artificial Sequence: Synthetic peptide
KTSNVMDQM

SEQ ID NO: 7121 - protein, 9 aa, Artificial Sequence
  Description of Artificial Sequence: Synthetic peptide
KTLHMLESK

SEQ ID NO: 7122 - protein, 9 aa, Artificial Sequence
  Description of Artificial Sequence: Synthetic peptide
KSHDYHGRA

SEQ ID NO: 7123 - protein, 9 aa, Artificial Sequence
  Description of Artificial Sequence: Synthetic peptide
KSEWTCCPQ

SEQ ID NO: 7124 - protein, 9 aa, Artificial Sequence
  Description of Artificial Sequence: Synthetic peptide
KMHGNERCF

SEQ ID NO: 7125 - protein, 9 aa, Artificial Sequence
  Description of Artificial Sequence: Synthetic peptide
KQTVFVDQE

SEQ ID NO: 7126 - protein, 9 aa, Artificial Sequence
  Description of Artificial Sequence: Synthetic peptide
KVAHEMMSA

SEQ ID NO: 7127 - protein, 9 aa, Artificial Sequence
  Description of Artificial Sequence: Synthetic peptide
KMNTWDQAR

SEQ ID NO: 7128 - protein, 9 aa, Artificial Sequence
  Description of Artificial Sequence: Synthetic peptide
KFNTKDQLM

SEQ ID NO: 7129 - protein, 9 aa, Artificial Sequence
  Description of Artificial Sequence: Synthetic peptide
KCQSKECGG

SEQ ID NO: 7130 - protein, 9 aa, Artificial Sequence
  Description of Artificial Sequence: Synthetic peptide
KGLITENNY

SEQ ID NO: 7131 - protein, 9 aa, Artificial Sequence
  Description of Artificial Sequence: Synthetic peptide
KVEWRWGSA

SEQ ID NO: 7132 - protein, 9 aa, Artificial Sequence
  Description of Artificial Sequence: Synthetic peptide
KTFQYMGPT

SEQ ID NO: 7133 - protein, 9 aa, Artificial Sequence
  Description of Artificial Sequence: Synthetic peptide
KCGLTPGVE

SEQ ID NO: 7134 - protein, 9 aa, Artificial Sequence
  Description of Artificial Sequence: Synthetic peptide
KQRIAYEWQ

SEQ ID NO: 7135 - protein, 9 aa, Artificial Sequence
  Description of Artificial Sequence: Synthetic peptide
KGQRRDSVS

SEQ ID NO: 7136 - protein, 9 aa, Artificial Sequence
  Description of Artificial Sequence: Synthetic peptide
KQCSLAPTI

SEQ ID NO: 7137 - protein, 9 aa, Artificial Sequence
  Description of Artificial Sequence: Synthetic peptide
KEWCVQQQC

SEQ ID NO: 7138 - protein, 9 aa, Artificial Sequence
  Description of Artificial Sequence: Synthetic peptide
KKDPLHLGD

SEQ ID NO: 7139 - protein, 9 aa, Artificial Sequence
  Description of Artificial Sequence: Synthetic peptide
KQTKSMVYM

SEQ ID NO: 7140 - protein, 9 aa, Artificial Sequence
  Description of Artificial Sequence: Synthetic peptide
KISGLNDAS

SEQ ID NO: 7141 - protein, 9 aa, Artificial Sequence
  Description of Artificial Sequence: Synthetic peptide
KPDILKTKT

SEQ ID NO: 7142 - protein, 9 aa, Artificial Sequence
  Description of Artificial Sequence: Synthetic peptide
KWSAYFLIE

SEQ ID NO: 7143 - protein, 9 aa, Artificial Sequence
  Description of Artificial Sequence: Synthetic peptide
KGESQCTSQ

SEQ ID NO: 7144 - protein, 9 aa, Artificial Sequence
  Description of Artificial Sequence: Synthetic peptide
KQEYIMRQR

SEQ ID NO: 7145 - protein, 9 aa, Artificial Sequence
  Description of Artificial Sequence: Synthetic peptide
KLDPRQADQ

SEQ ID NO: 7146 - protein, 9 aa, Artificial Sequence
  Description of Artificial Sequence: Synthetic peptide
KIYMQCDQE

SEQ ID NO: 7147 - protein, 9 aa, Artificial Sequence
  Description of Artificial Sequence: Synthetic peptide
KWAASHKHD

SEQ ID NO: 7148 - protein, 9 aa, Artificial Sequence
  Description of Artificial Sequence: Synthetic peptide
KENKIMQAS

SEQ ID NO: 7149 - protein, 9 aa, Artificial Sequence
  Description of Artificial Sequence: Synthetic peptide
KVAGGHETT

SEQ ID NO: 7150 - protein, 9 aa, Artificial Sequence
  Description of Artificial Sequence: Synthetic peptide
KTDPIAEYC

SEQ ID NO: 7151 - protein, 9 aa, Artificial Sequence
  Description of Artificial Sequence: Synthetic peptide
KPDHAMAQQ

SEQ ID NO: 7152 - protein, 9 aa, Artificial Sequence
  Description of Artificial Sequence: Synthetic peptide
KSDKVWYVL

SEQ ID NO: 7153 - protein, 9 aa, Artificial Sequence
  Description of Artificial Sequence: Synthetic peptide
KIEAEEMHA

SEQ ID NO: 7154 - protein, 9 aa, Artificial Sequence
  Description of Artificial Sequence: Synthetic peptide
KKTECEMIV

SEQ ID NO: 7155 - protein, 9 aa, Artificial Sequence
  Description of Artificial Sequence: Synthetic peptide
KGTPNWWGP

SEQ ID NO: 7156 - protein, 9 aa, Artificial Sequence
  Description of Artificial Sequence: Synthetic peptide
KPAGKNTCW

SEQ ID NO: 7157 - protein, 9 aa, Artificial Sequence
  Description of Artificial Sequence: Synthetic peptide
KSVHYETCE

SEQ ID NO: 7158 - protein, 9 aa, Artificial Sequence
  Description of Artificial Sequence: Synthetic peptide
KCNVITYHG

SEQ ID NO: 7159 - protein, 9 aa, Artificial Sequence
  Description of Artificial Sequence: Synthetic peptide
KQEQFHTGS

SEQ ID NO: 7160 - protein, 9 aa, Artificial Sequence
  Description of Artificial Sequence: Synthetic peptide
KTMADMYNR

SEQ ID NO: 7161 - protein, 9 aa, Artificial Sequence
  Description of Artificial Sequence: Synthetic peptide
KTVETYAAH

SEQ ID NO: 7162 - protein, 9 aa, Artificial Sequence
  Description of Artificial Sequence: Synthetic peptide
KSWVWVDTE

SEQ ID NO: 7163 - protein, 9 aa, Artificial Sequence
  Description of Artificial Sequence: Synthetic peptide
KAIWQGTEN

SEQ ID NO: 7164 - protein, 9 aa, Artificial Sequence
  Description of Artificial Sequence: Synthetic peptide
KPLTYTVGS

SEQ ID NO: 7165 - protein, 9 aa, Artificial Sequence
  Description of Artificial Sequence: Synthetic peptide
KYASMDIYS

SEQ ID NO: 7166 - protein, 9 aa, Artificial Sequence
  Description of Artificial Sequence: Synthetic peptide
KCTMITPCF

SEQ ID NO: 7167 - protein, 9 aa, Artificial Sequence
  Description of Artificial Sequence: Synthetic peptide
KEAYTDMSC

SEQ ID NO: 7168 - protein, 9 aa, Artificial Sequence
  Description of Artificial Sequence: Synthetic peptide
KHMPTLQWQ

SEQ ID NO: 7169 - protein, 9 aa, Artificial Sequence
  Description of Artificial Sequence: Synthetic peptide
KIEYGHWIH

SEQ ID NO: 7170 - protein, 9 aa, Artificial Sequence
  Description of Artificial Sequence: Synthetic peptide
KYSPFQEHN

SEQ ID NO: 7171 - protein, 9 aa, Artificial Sequence
  Description of Artificial Sequence: Synthetic peptide
KHTLAEMYG

SEQ ID NO: 7172 - protein, 9 aa, Artificial Sequence
  Description of Artificial Sequence: Synthetic peptide
KIWAGVNLG

SEQ ID NO: 7173 - protein, 9 aa, Artificial Sequence
  Description of Artificial Sequence: Synthetic peptide
KCDDRNTQH

SEQ ID NO: 7174 - protein, 9 aa, Artificial Sequence
  Description of Artificial Sequence: Synthetic peptide
KSIMMSQLD

SEQ ID NO: 7175 - protein, 9 aa, Artificial Sequence
  Description of Artificial Sequence: Synthetic peptide
KKIFCSWDY

SEQ ID NO: 7176 - protein, 9 aa, Artificial Sequence
  Description of Artificial Sequence: Synthetic peptide
KQAGYDFFH

SEQ ID NO: 7177 - protein, 9 aa, Artificial Sequence
  Description of Artificial Sequence: Synthetic peptide
KSDAQRNVA

SEQ ID NO: 7178 - protein, 9 aa, Artificial Sequence
  Description of Artificial Sequence: Synthetic peptide
KPPSWPMSL

SEQ ID NO: 7179 - protein, 9 aa, Artificial Sequence
  Description of Artificial Sequence: Synthetic peptide
KAHDITWNL

SEQ ID NO: 7180 - protein, 9 aa, Artificial Sequence
  Description of Artificial Sequence: Synthetic peptide
KQATNNNGW

SEQ ID NO: 7181 - protein, 9 aa, Artificial Sequence
  Description of Artificial Sequence: Synthetic peptide
KDPDCYDWP

SEQ ID NO: 7182 - protein, 9 aa, Artificial Sequence
  Description of Artificial Sequence: Synthetic peptide
KHTEYCSHE

SEQ ID NO: 7183 - protein, 9 aa, Artificial Sequence
  Description of Artificial Sequence: Synthetic peptide
KWYHYNEMT

SEQ ID NO: 7184 - protein, 9 aa, Artificial Sequence
  Description of Artificial Sequence: Synthetic peptide
KGQMISETR

SEQ ID NO: 7185 - protein, 9 aa, Artificial Sequence
  Description of Artificial Sequence: Synthetic peptide
KHEPMCVQL

SEQ ID NO: 7186 - protein, 9 aa, Artificial Sequence
  Description of Artificial Sequence: Synthetic peptide
KVDTVRNPK

SEQ ID NO: 7187 - protein, 9 aa, Artificial Sequence
  Description of Artificial Sequence: Synthetic peptide
KRVQQMETM

SEQ ID NO: 7188 - protein, 9 aa, Artificial Sequence
  Description of Artificial Sequence: Synthetic peptide
KIIFELGMD

SEQ ID NO: 7189 - protein, 9 aa, Artificial Sequence
  Description of Artificial Sequence: Synthetic peptide
KSGWGAPYE

SEQ ID NO: 7190 - protein, 9 aa, Artificial Sequence
  Description of Artificial Sequence: Synthetic peptide
KIQMAVSLD

SEQ ID NO: 7191 - protein, 9 aa, Artificial Sequence
  Description of Artificial Sequence: Synthetic peptide
KVPSQLVFE

SEQ ID NO: 7192 - protein, 9 aa, Artificial Sequence
  Description of Artificial Sequence: Synthetic peptide
KSPDMTLLL

SEQ ID NO: 7193 - protein, 9 aa, Artificial Sequence
  Description of Artificial Sequence: Synthetic peptide
KSMTCVYYP

SEQ ID NO: 7194 - protein, 9 aa, Artificial Sequence
  Description of Artificial Sequence: Synthetic peptide
KPDKPNDYA

SEQ ID NO: 7195 - protein, 9 aa, Artificial Sequence
  Description of Artificial Sequence: Synthetic peptide
KFICTTIAC

SEQ ID NO: 7196 - protein, 9 aa, Artificial Sequence
  Description of Artificial Sequence: Synthetic peptide
KPAYEHRGF

SEQ ID NO: 7197 - protein, 9 aa, Artificial Sequence
  Description of Artificial Sequence: Synthetic peptide
KNNTEDGGR

SEQ ID NO: 7198 - protein, 9 aa, Artificial Sequence
  Description of Artificial Sequence: Synthetic peptide
KATREYDIP

SEQ ID NO: 7199 - protein, 9 aa, Artificial Sequence
  Description of Artificial Sequence: Synthetic peptide
KCETKKRFN

SEQ ID NO: 7200 - protein, 9 aa, Artificial Sequence
  Description of Artificial Sequence: Synthetic peptide
KTEKWASHE

SEQ ID NO: 7201 - protein, 9 aa, Artificial Sequence
  Description of Artificial Sequence: Synthetic peptide
KATVEGSWR

SEQ ID NO: 7202 - protein, 9 aa, Artificial Sequence
  Description of Artificial Sequence: Synthetic peptide
KRRDGTRSY

SEQ ID NO: 7203 - protein, 9 aa, Artificial Sequence
  Description of Artificial Sequence: Synthetic peptide
KALHYAMIK

SEQ ID NO: 7204 - protein, 9 aa, Artificial Sequence
  Description of Artificial Sequence: Synthetic peptide
KWEVMSAAY

SEQ ID NO: 7205 - protein, 9 aa, Artificial Sequence
  Description of Artificial Sequence: Synthetic peptide
KALYLHTIG

SEQ ID NO: 7206 - protein, 9 aa, Artificial Sequence
  Description of Artificial Sequence: Synthetic peptide
KLNPFSTGT

SEQ ID NO: 7207 - protein, 9 aa, Artificial Sequence
  Description of Artificial Sequence: Synthetic peptide
KVEIINWHP

SEQ ID NO: 7208 - protein, 9 aa, Artificial Sequence
  Description of Artificial Sequence: Synthetic peptide
KNDPIDNFG

SEQ ID NO: 7209 - protein, 9 aa, Artificial Sequence
  Description of Artificial Sequence: Synthetic peptide
KTFTKEVTP

SEQ ID NO: 7210 - protein, 9 aa, Artificial Sequence
  Description of Artificial Sequence: Synthetic peptide
KCGNEGRMS

SEQ ID NO: 7211 - protein, 9 aa, Artificial Sequence
  Description of Artificial Sequence: Synthetic peptide
KNETFIAST

SEQ ID NO: 7212 - protein, 9 aa, Artificial Sequence
  Description of Artificial Sequence: Synthetic peptide
KDNQSCEWN

SEQ ID NO: 7213 - protein, 9 aa, Artificial Sequence
  Description of Artificial Sequence: Synthetic peptide
KAQVVPVEC

SEQ ID NO: 7214 - protein, 9 aa, Artificial Sequence
  Description of Artificial Sequence: Synthetic peptide
KMMAFEKQC

SEQ ID NO: 7215 - protein, 9 aa, Artificial Sequence
  Description of Artificial Sequence: Synthetic peptide
KWQEMPTFQ

SEQ ID NO: 7216 - protein, 9 aa, Artificial Sequence
  Description of Artificial Sequence: Synthetic peptide
KYCPPQTPN

SEQ ID NO: 7217 - protein, 9 aa, Artificial Sequence
  Description of Artificial Sequence: Synthetic peptide
KCAMFNAGE

SEQ ID NO: 7218 - protein, 9 aa, Artificial Sequence
  Description of Artificial Sequence: Synthetic peptide
KSTIPQTYP

SEQ ID NO: 7219 - protein, 9 aa, Artificial Sequence
  Description of Artificial Sequence: Synthetic peptide
KFTEALSCG

SEQ ID NO: 7220 - protein, 9 aa, Artificial Sequence
  Description of Artificial Sequence: Synthetic peptide
KGEIEGGAK

SEQ ID NO: 7221 - protein, 9 aa, Artificial Sequence
  Description of Artificial Sequence: Synthetic peptide
KQLTFPMLA

SEQ ID NO: 7222 - protein, 9 aa, Artificial Sequence
  Description of Artificial Sequence: Synthetic peptide
KEFVGFQAM

SEQ ID NO: 7223 - protein, 9 aa, Artificial Sequence
  Description of Artificial Sequence: Synthetic peptide
KHDGFSVVG

SEQ ID NO: 7224 - protein, 9 aa, Artificial Sequence
  Description of Artificial Sequence: Synthetic peptide
KATRDPKFP

SEQ ID NO: 7225 - protein, 9 aa, Artificial Sequence
  Description of Artificial Sequence: Synthetic peptide
KRWLHMYQG

SEQ ID NO: 7226 - protein, 9 aa, Artificial Sequence
  Description of Artificial Sequence: Synthetic peptide
KHLDMTSCH

SEQ ID NO: 7227 - protein, 9 aa, Artificial Sequence
  Description of Artificial Sequence: Synthetic peptide
KDEQFARCK

SEQ ID NO: 7228 - protein, 9 aa, Artificial Sequence
  Description of Artificial Sequence: Synthetic peptide
KTLPCSNSE

SEQ ID NO: 7229 - protein, 9 aa, Artificial Sequence
  Description of Artificial Sequence: Synthetic peptide
KYMQENVLS

SEQ ID NO: 7230 - protein, 9 aa, Artificial Sequence
  Description of Artificial Sequence: Synthetic peptide
KSAPRENFN

SEQ ID NO: 7231 - protein, 9 aa, Artificial Sequence
  Description of Artificial Sequence: Synthetic peptide
KQRMTRQGE

SEQ ID NO: 7232 - protein, 9 aa, Artificial Sequence
  Description of Artificial Sequence: Synthetic peptide
KARQDDVNT

SEQ ID NO: 7233 - protein, 9 aa, Artificial Sequence
  Description of Artificial Sequence: Synthetic peptide
KCGVEHEHR

SEQ ID NO: 7234 - protein, 9 aa, Artificial Sequence
  Description of Artificial Sequence: Synthetic peptide
KSELFMKLH

SEQ ID NO: 7235 - protein, 9 aa, Artificial Sequence
  Description of Artificial Sequence: Synthetic peptide
KNELENVIN

SEQ ID NO: 7236 - protein, 9 aa, Artificial Sequence
  Description of Artificial Sequence: Synthetic peptide
KYWCKNEWD

SEQ ID NO: 7237 - protein, 9 aa, Artificial Sequence
  Description of Artificial Sequence: Synthetic peptide
KASLGACVE

SEQ ID NO: 7238 - protein, 9 aa, Artificial Sequence
  Description of Artificial Sequence: Synthetic peptide
KSCNDGQQN

SEQ ID NO: 7239 - protein, 9 aa, Artificial Sequence
  Description of Artificial Sequence: Synthetic peptide
KVTPILEEV

SEQ ID NO: 7240 - protein, 9 aa, Artificial Sequence
  Description of Artificial Sequence: Synthetic peptide
KQEWHVHTE

SEQ ID NO: 7241 - protein, 9 aa, Artificial Sequence
  Description of Artificial Sequence: Synthetic peptide
KPKCDEQKS

SEQ ID NO: 7242 - protein, 9 aa, Artificial Sequence
  Description of Artificial Sequence: Synthetic peptide
KWHGGPGVV

SEQ ID NO: 7243 - protein, 9 aa, Artificial Sequence
  Description of Artificial Sequence: Synthetic peptide
KGNSVTHVQ

SEQ ID NO: 7244 - protein, 9 aa, Artificial Sequence
  Description of Artificial Sequence: Synthetic peptide
KWDDMHTQM

SEQ ID NO: 7245 - protein, 9 aa, Artificial Sequence
  Description of Artificial Sequence: Synthetic peptide
KQAHLEVAW

SEQ ID NO: 7246 - protein, 9 aa, Artificial Sequence
  Description of Artificial Sequence: Synthetic peptide
KVNACGNLT

SEQ ID NO: 7247 - protein, 9 aa, Artificial Sequence
  Description of Artificial Sequence: Synthetic peptide
KAIPQGSSC

SEQ ID NO: 7248 - protein, 9 aa, Artificial Sequence
  Description of Artificial Sequence: Synthetic peptide
KINCRMDGC

SEQ ID NO: 7249 - protein, 9 aa, Artificial Sequence
  Description of Artificial Sequence: Synthetic peptide
KQRDWENFA

SEQ ID NO: 7250 - protein, 9 aa, Artificial Sequence
  Description of Artificial Sequence: Synthetic peptide
KMCWWPESM

SEQ ID NO: 7251 - protein, 9 aa, Artificial Sequence
  Description of Artificial Sequence: Synthetic peptide
KQNLMCCHN

SEQ ID NO: 7252 - protein, 9 aa, Artificial Sequence
  Description of Artificial Sequence: Synthetic peptide
KISPWDGFY

SEQ ID NO: 7253 - protein, 9 aa, Artificial Sequence
  Description of Artificial Sequence: Synthetic peptide
KGMQMWNCE

SEQ ID NO: 7254 - protein, 9 aa, Artificial Sequence
  Description of Artificial Sequence: Synthetic peptide
KAILNAMME

SEQ ID NO: 7255 - protein, 9 aa, Artificial Sequence
  Description of Artificial Sequence: Synthetic peptide
KIDAHSNME

SEQ ID NO: 7256 - protein, 9 aa, Artificial Sequence
  Description of Artificial Sequence: Synthetic peptide
KAPWAPMDS

SEQ ID NO: 7257 - protein, 9 aa, Artificial Sequence
  Description of Artificial Sequence: Synthetic peptide
KRAIVGYAL

SEQ ID NO: 7258 - protein, 9 aa, Artificial Sequence
  Description of Artificial Sequence: Synthetic peptide
KSGMIQEET

SEQ ID NO: 7259 - protein, 9 aa, Artificial Sequence
  Description of Artificial Sequence: Synthetic peptide
KSYQMIMTW

SEQ ID NO: 7260 - protein, 9 aa, Artificial Sequence
  Description of Artificial Sequence: Synthetic peptide
KFELHGTVG

SEQ ID NO: 7261 - protein, 9 aa, Artificial Sequence
  Description of Artificial Sequence: Synthetic peptide
KSGTCGYGQ

SEQ ID NO: 7262 - protein, 9 aa, Artificial Sequence
  Description of Artificial Sequence: Synthetic peptide
KSLQCASRH

SEQ ID NO: 7263 - protein, 9 aa, Artificial Sequence
  Description of Artificial Sequence: Synthetic peptide
KTGTTMEPM

SEQ ID NO: 7264 - protein, 9 aa, Artificial Sequence
  Description of Artificial Sequence: Synthetic peptide
KTDYSRLSD

SEQ ID NO: 7265 - protein, 9 aa, Artificial Sequence
  Description of Artificial Sequence: Synthetic peptide
KHYKWGHCQ

SEQ ID NO: 7266 - protein, 9 aa, Artificial Sequence
  Description of Artificial Sequence: Synthetic peptide
KLYGLNHSC

SEQ ID NO: 7267 - protein, 9 aa, Artificial Sequence
  Description of Artificial Sequence: Synthetic peptide
KLKESMESA

SEQ ID NO: 7268 - protein, 9 aa, Artificial Sequence
  Description of Artificial Sequence: Synthetic peptide
KAGYQEGSC

SEQ ID NO: 7269 - protein, 9 aa, Artificial Sequence
  Description of Artificial Sequence: Synthetic peptide
KCWDCHEAG

SEQ ID NO: 7270 - protein, 9 aa, Artificial Sequence
  Description of Artificial Sequence: Synthetic peptide
KPVQCACQN

SEQ ID NO: 7271 - protein, 9 aa, Artificial Sequence
  Description of Artificial Sequence: Synthetic peptide
KDYWAGYQM

SEQ ID NO: 7272 - protein, 9 aa, Artificial Sequence
  Description of Artificial Sequence: Synthetic peptide
KSEHHWINA

SEQ ID NO: 7273 - protein, 9 aa, Artificial Sequence
  Description of Artificial Sequence: Synthetic peptide
KGGPWAYNC

SEQ ID NO: 7274 - protein, 9 aa, Artificial Sequence
  Description of Artificial Sequence: Synthetic peptide
KYAYSLDCA

SEQ ID NO: 7275 - protein, 9 aa, Artificial Sequence
  Description of Artificial Sequence: Synthetic peptide
KLWIDQRGH

SEQ ID NO: 7276 - protein, 9 aa, Artificial Sequence
  Description of Artificial Sequence: Synthetic peptide
KLWIDQRGY

SEQ ID NO: 7277 - protein, 9 aa, Artificial Sequence
  Description of Artificial Sequence: Synthetic peptide
QRVTKMHFE

SEQ ID NO: 7278 - protein, 9 aa, Artificial Sequence
  Description of Artificial Sequence: Synthetic peptide
ERTACKMKS

SEQ ID NO: 7279 - protein, 9 aa, Artificial Sequence
  Description of Artificial Sequence: Synthetic peptide
ERGEMKATG

SEQ ID NO: 7280 - protein, 9 aa, Artificial Sequence
  Description of Artificial Sequence: Synthetic peptide
ARGTCNYCY

SEQ ID NO: 7281 - protein, 9 aa, Artificial Sequence
  Description of Artificial Sequence: Synthetic peptide
QRNEMSASR

SEQ ID NO: 7282 - protein, 9 aa, Artificial Sequence
  Description of Artificial Sequence: Synthetic peptide
FRDVCMHDV

SEQ ID NO: 7283 - protein, 9 aa, Artificial Sequence
  Description of Artificial Sequence: Synthetic peptide
ERMMWEEYP

SEQ ID NO: 7284 - protein, 9 aa, Artificial Sequence
  Description of Artificial Sequence: Synthetic peptide
HRMSYKWGW

SEQ ID NO: 7285 - protein, 9 aa, Artificial Sequence
  Description of Artificial Sequence: Synthetic peptide
IRVADDMTC

SEQ ID NO: 7286 - protein, 9 aa, Artificial Sequence
  Description of Artificial Sequence: Synthetic peptide
MRSICEHAM

SEQ ID NO: 7287 - protein, 9 aa, Artificial Sequence
  Description of Artificial Sequence: Synthetic peptide
NRGIWLINF

SEQ ID NO: 7288 - protein, 9 aa, Artificial Sequence
  Description of Artificial Sequence: Synthetic peptide
NRQFWYLNT

SEQ ID NO: 7289 - protein, 9 aa, Artificial Sequence
  Description of Artificial Sequence: Synthetic peptide
PRLLRPNRV

SEQ ID NO: 7290 - protein, 9 aa, Artificial Sequence
  Description of Artificial Sequence: Synthetic peptide
TRRVATHMP

SEQ ID NO: 7291 - protein, 9 aa, Artificial Sequence
  Description of Artificial Sequence: Synthetic peptide
VRHSRNNTV

SEQ ID NO: 7292 - protein, 9 aa, Artificial Sequence
  Description of Artificial Sequence: Synthetic peptide
SRWFQIGTE

SEQ ID NO: 7293 - protein, 9 aa, Artificial Sequence
  Description of Artificial Sequence: Synthetic peptide
TRQWMCVHC

SEQ ID NO: 7294 - protein, 9 aa, Artificial Sequence
  Description of Artificial Sequence: Synthetic peptide
HRVHSEKTD

SEQ ID NO: 7295 - protein, 9 aa, Artificial Sequence
  Description of Artificial Sequence: Synthetic peptide
GRHTAFATG

SEQ ID NO: 7296 - protein, 9 aa, Artificial Sequence
  Description of Artificial Sequence: Synthetic peptide
LRSRVIKDH

SEQ ID NO: 7297 - protein, 9 aa, Artificial Sequence
  Description of Artificial Sequence: Synthetic peptide
IRMIGKACN

SEQ ID NO: 7298 - protein, 9 aa, Artificial Sequence
  Description of Artificial Sequence: Synthetic peptide
NRLDQITRR

SEQ ID NO: 7299 - protein, 9 aa, Artificial Sequence
  Description of Artificial Sequence: Synthetic peptide
SRSWFDSCG

SEQ ID NO: 7300 - protein, 9 aa, Artificial Sequence
  Description of Artificial Sequence: Synthetic peptide
VRCQQHQGN

SEQ ID NO: 7301 - protein, 9 aa, Artificial Sequence
  Description of Artificial Sequence: Synthetic peptide
YRSWMCWDI

SEQ ID NO: 7302 - protein, 9 aa, Artificial Sequence
  Description of Artificial Sequence: Synthetic peptide
CRNTQYEQH

SEQ ID NO: 7303 - protein, 9 aa, Artificial Sequence
  Description of Artificial Sequence: Synthetic peptide
ARKNCDHLN

SEQ ID NO: 7304 - protein, 9 aa, Artificial Sequence
  Description of Artificial Sequence: Synthetic peptide
ARCQNHWSH

SEQ ID NO: 7305 - protein, 9 aa, Artificial Sequence
  Description of Artificial Sequence: Synthetic peptide
MRQRTYICQ

SEQ ID NO: 7306 - protein, 9 aa, Artificial Sequence
  Description of Artificial Sequence: Synthetic peptide
SRCTVMDPG

SEQ ID NO: 7307 - protein, 9 aa, Artificial Sequence
  Description of Artificial Sequence: Synthetic peptide
PRNLVAMYW

SEQ ID NO: 7308 - protein, 9 aa, Artificial Sequence
  Description of Artificial Sequence: Synthetic peptide
TRMQAVDHE

SEQ ID NO: 7309 - protein, 9 aa, Artificial Sequence
  Description of Artificial Sequence: Synthetic peptide
FRAVYYYHS

SEQ ID NO: 7310 - protein, 9 aa, Artificial Sequence
  Description of Artificial Sequence: Synthetic peptide
RREAMDDSP

SEQ ID NO: 7311 - protein, 9 aa, Artificial Sequence
  Description of Artificial Sequence: Synthetic peptide
GRQSINEIA

SEQ ID NO: 7312 - protein, 9 aa, Artificial Sequence
  Description of Artificial Sequence: Synthetic peptide
TRHPTIAMH

SEQ ID NO: 7313 - protein, 9 aa, Artificial Sequence
  Description of Artificial Sequence: Synthetic peptide
YRLHVWMKV

SEQ ID NO: 7314 - protein, 9 aa, Artificial Sequence
  Description of Artificial Sequence: Synthetic peptide
DRREKQLMK

SEQ ID NO: 7315 - protein, 9 aa, Artificial Sequence
  Description of Artificial Sequence: Synthetic peptide
ERKAMRWSL

SEQ ID NO: 7316 - protein, 9 aa, Artificial Sequence
  Description of Artificial Sequence: Synthetic peptide
LRMQKEGQE

SEQ ID NO: 7317 - protein, 9 aa, Artificial Sequence
  Description of Artificial Sequence: Synthetic peptide
IRPQYAKMD

SEQ ID NO: 7318 - protein, 9 aa, Artificial Sequence
  Description of Artificial Sequence: Synthetic peptide
SRTICVHGN

SEQ ID NO: 7319 - protein, 9 aa, Artificial Sequence
  Description of Artificial Sequence: Synthetic peptide
NRCGVSKCC

SEQ ID NO: 7320 - protein, 9 aa, Artificial Sequence
  Description of Artificial Sequence: Synthetic peptide
CRCNDAWNM

SEQ ID NO: 7321 - protein, 9 aa, Artificial Sequence
  Description of Artificial Sequence: Synthetic peptide
FRKQGHGEK

SEQ ID NO: 7322 - protein, 9 aa, Artificial Sequence
  Description of Artificial Sequence: Synthetic peptide
YRMEYGTCE

SEQ ID NO: 7323 - protein, 9 aa, Artificial Sequence
  Description of Artificial Sequence: Synthetic peptide
SRPFNYFQR

SEQ ID NO: 7324 - protein, 9 aa, Artificial Sequence
  Description of Artificial Sequence: Synthetic peptide
QRGPLQHQQ

SEQ ID NO: 7325 - protein, 9 aa, Artificial Sequence
  Description of Artificial Sequence: Synthetic peptide
MRQCNYDFL

SEQ ID NO: 7326 - protein, 9 aa, Artificial Sequence
  Description of Artificial Sequence: Synthetic peptide
MRQCNYDFW

SEQ ID NO: 7327 - protein, 9 aa, Artificial Sequence
  Description of Artificial Sequence: Synthetic peptide
MRQCNYGFW

SEQ ID NO: 7328 - protein, 9 aa, Artificial Sequence
  Description of Artificial Sequence: Synthetic peptide
SRTRMYMDH

SEQ ID NO: 7329 - protein, 9 aa, Artificial Sequence
  Description of Artificial Sequence: Synthetic peptide
ERTLTKAGS

SEQ ID NO: 7330 - protein, 9 aa, Artificial Sequence
  Description of Artificial Sequence: Synthetic peptide
WRLAALYQS

SEQ ID NO: 7331 - protein, 9 aa, Artificial Sequence
  Description of Artificial Sequence: Synthetic peptide
CRCCPVMKD

SEQ ID NO: 7332 - protein, 9 aa, Artificial Sequence
  Description of Artificial Sequence: Synthetic peptide
YRDRCWNRI

SEQ ID NO: 7333 - protein, 9 aa, Artificial Sequence
  Description of Artificial Sequence: Synthetic peptide
LRNMRGDWD

SEQ ID NO: 7334 - protein, 9 aa, Artificial Sequence
  Description of Artificial Sequence: Synthetic peptide
CRKCEISAR

SEQ ID NO: 7335 - protein, 9 aa, Artificial Sequence
  Description of Artificial Sequence: Synthetic peptide
ARTQFHSDE

SEQ ID NO: 7336 - protein, 9 aa, Artificial Sequence
  Description of Artificial Sequence: Synthetic peptide
ERSMKDADE

SEQ ID NO: 7337 - protein, 9 aa, Artificial Sequence
  Description of Artificial Sequence: Synthetic peptide
YRRWQSNTT

SEQ ID NO: 7338 - protein, 9 aa, Artificial Sequence
  Description of Artificial Sequence: Synthetic peptide
HRMNNHAWF

SEQ ID NO: 7339 - protein, 9 aa, Artificial Sequence
  Description of Artificial Sequence: Synthetic peptide
QRTQCNFSI

SEQ ID NO: 7340 - protein, 9 aa, Artificial Sequence
  Description of Artificial Sequence: Synthetic peptide
TRILNEFFC

SEQ ID NO: 7341 - protein, 9 aa, Artificial Sequence
  Description of Artificial Sequence: Synthetic peptide
ARLEIEYMG

SEQ ID NO: 7342 - protein, 9 aa, Artificial Sequence
  Description of Artificial Sequence: Synthetic peptide
WRFCDMRMS

SEQ ID NO: 7343 - protein, 9 aa, Artificial Sequence
  Description of Artificial Sequence: Synthetic peptide
DRLYCKLAH

SEQ ID NO: 7344 - protein, 9 aa, Artificial Sequence
  Description of Artificial Sequence: Synthetic peptide
ERKTTADWK

SEQ ID NO: 7345 - protein, 9 aa, Artificial Sequence
  Description of Artificial Sequence: Synthetic peptide
GRSMVLHFV

SEQ ID NO: 7346 - protein, 9 aa, Artificial Sequence
  Description of Artificial Sequence: Synthetic peptide
TRHDNGPSD

SEQ ID NO: 7347 - protein, 9 aa, Artificial Sequence
  Description of Artificial Sequence: Synthetic peptide
PRAPIRPPQ

SEQ ID NO: 7348 - protein, 9 aa, Artificial Sequence
  Description of Artificial Sequence: Synthetic peptide
MRRKTPEDD

SEQ ID NO: 7349 - protein, 9 aa, Artificial Sequence
  Description of Artificial Sequence: Synthetic peptide
ERFRVQEFQ

SEQ ID NO: 7350 - protein, 9 aa, Artificial Sequence
  Description of Artificial Sequence: Synthetic peptide
ERYYPISSF

SEQ ID NO: 7351 - protein, 9 aa, Artificial Sequence
  Description of Artificial Sequence: Synthetic peptide
GRAHGNVCI

SEQ ID NO: 7352 - protein, 9 aa, Artificial Sequence
  Description of Artificial Sequence: Synthetic peptide
ARSGINGHE

SEQ ID NO: 7353 - protein, 9 aa, Artificial Sequence
  Description of Artificial Sequence: Synthetic peptide
ARVALVKPG

SEQ ID NO: 7354 - protein, 9 aa, Artificial Sequence
  Description of Artificial Sequence: Synthetic peptide
SRYVNNGTV

SEQ ID NO: 7355 - protein, 9 aa, Artificial Sequence
  Description of Artificial Sequence: Synthetic peptide
ARAYNSYQA

SEQ ID NO: 7356 - protein, 9 aa, Artificial Sequence
  Description of Artificial Sequence: Synthetic peptide
PRFKACHDP

SEQ ID NO: 7357 - protein, 9 aa, Artificial Sequence
  Description of Artificial Sequence: Synthetic peptide
QRQGQLHYW

SEQ ID NO: 7358 - protein, 9 aa, Artificial Sequence
  Description of Artificial Sequence: Synthetic peptide
SRCTIDVPI

SEQ ID NO: 7359 - protein, 9 aa, Artificial Sequence
  Description of Artificial Sequence: Synthetic peptide
DRTMCKVQG

SEQ ID NO: 7360 - protein, 9 aa, Artificial Sequence
  Description of Artificial Sequence: Synthetic peptide
LRVSQSFSN

SEQ ID NO: 7361 - protein, 9 aa, Artificial Sequence
  Description of Artificial Sequence: Synthetic peptide
NRTNSPYVH

SEQ ID NO: 7362 - protein, 9 aa, Artificial Sequence
  Description of Artificial Sequence: Synthetic peptide
CRGSLSNAN

SEQ ID NO: 7363 - protein, 9 aa, Artificial Sequence
  Description of Artificial Sequence: Synthetic peptide
VRQSVPHWA

SEQ ID NO: 7364 - protein, 9 aa, Artificial Sequence
  Description of Artificial Sequence: Synthetic peptide
HRQESPNNK

SEQ ID NO: 7365 - protein, 9 aa, Artificial Sequence
  Description of Artificial Sequence: Synthetic peptide
TRNIGGVFQ

SEQ ID NO: 7366 - protein, 9 aa, Artificial Sequence
  Description of Artificial Sequence: Synthetic peptide
RRWMNAKAT

SEQ ID NO: 7367 - protein, 9 aa, Artificial Sequence
  Description of Artificial Sequence: Synthetic peptide
YRAHSAGYC

SEQ ID NO: 7368 - protein, 9 aa, Artificial Sequence
  Description of Artificial Sequence: Synthetic peptide
YRAHSAGYY

SEQ ID NO: 7369 - protein, 9 aa, Artificial Sequence
  Description of Artificial Sequence: Synthetic peptide
PPRTVARFK

SEQ ID NO: 7370 - protein, 9 aa, Artificial Sequence
  Description of Artificial Sequence: Synthetic peptide
MTRSCQTEG

SEQ ID NO: 7371 - protein, 9 aa, Artificial Sequence
  Description of Artificial Sequence: Synthetic peptide
SMRNSKGSG

SEQ ID NO: 7372 - protein, 9 aa, Artificial Sequence
  Description of Artificial Sequence: Synthetic peptide
GGRSLHAYL

SEQ ID NO: 7373 - protein, 9 aa, Artificial Sequence
  Description of Artificial Sequence: Synthetic peptide
GTRIYGKVS

SEQ ID NO: 7374 - protein, 9 aa, Artificial Sequence
  Description of Artificial Sequence: Synthetic peptide
EVRSTRKNH

SEQ ID NO: 7375 - protein, 9 aa, Artificial Sequence
  Description of Artificial Sequence: Synthetic peptide
GLRHGFYAV

SEQ ID NO: 7376 - protein, 9 aa, Artificial Sequence
  Description of Artificial Sequence: Synthetic peptide
LARTTTNSE

SEQ ID NO: 7377 - protein, 9 aa, Artificial Sequence
  Description of Artificial Sequence: Synthetic peptide
VVREQFGIH

SEQ ID NO: 7378 - protein, 9 aa, Artificial Sequence
  Description of Artificial Sequence: Synthetic peptide
ANRADWQHL

SEQ ID NO: 7379 - protein, 9 aa, Artificial Sequence
  Description of Artificial Sequence: Synthetic peptide
WCRTPQREN

SEQ ID NO: 7380 - protein, 9 aa, Artificial Sequence
  Description of Artificial Sequence: Synthetic peptide
WKRTAGVHF

SEQ ID NO: 7381 - protein, 9 aa, Artificial Sequence
  Description of Artificial Sequence: Synthetic peptide
GYRNYFIWP

SEQ ID NO: 7382 - protein, 9 aa, Artificial Sequence
  Description of Artificial Sequence: Synthetic peptide
TARNFGDPP

SEQ ID NO: 7383 - protein, 9 aa, Artificial Sequence
  Description of Artificial Sequence: Synthetic peptide
EARISGMHD

SEQ ID NO: 7384 - protein, 9 aa, Artificial Sequence
  Description of Artificial Sequence: Synthetic peptide
MARLYHPQM

SEQ ID NO: 7385 - protein, 9 aa, Artificial Sequence
  Description of Artificial Sequence: Synthetic peptide
SNRYVSLFI

SEQ ID NO: 7386 - protein, 9 aa, Artificial Sequence
  Description of Artificial Sequence: Synthetic peptide
PWRWHKSAC

SEQ ID NO: 7387 - protein, 9 aa, Artificial Sequence
  Description of Artificial Sequence: Synthetic peptide
TLRAEMSFH

SEQ ID NO: 7388 - protein, 9 aa, Artificial Sequence
  Description of Artificial Sequence: Synthetic peptide
EQRHISRAP

SEQ ID NO: 7389 - protein, 9 aa, Artificial Sequence
  Description of Artificial Sequence: Synthetic peptide
TKRIKCCWE

SEQ ID NO: 7390 - protein, 9 aa, Artificial Sequence
  Description of Artificial Sequence: Synthetic peptide
MKRAPTLDY

SEQ ID NO: 7391 - protein, 9 aa, Artificial Sequence
  Description of Artificial Sequence: Synthetic peptide
ENRIAVWFN

SEQ ID NO: 7392 - protein, 9 aa, Artificial Sequence
  Description of Artificial Sequence: Synthetic peptide
AERDHKTIY

SEQ ID NO: 7393 - protein, 9 aa, Artificial Sequence
  Description of Artificial Sequence: Synthetic peptide
ELRMSFTKV

SEQ ID NO: 7394 - protein, 9 aa, Artificial Sequence
  Description of Artificial Sequence: Synthetic peptide
CVRIGMREP

SEQ ID NO: 7395 - protein, 9 aa, Artificial Sequence
  Description of Artificial Sequence: Synthetic peptide
TARSTSDKC

SEQ ID NO: 7396 - protein, 9 aa, Artificial Sequence
  Description of Artificial Sequence: Synthetic peptide
GKRVEDTSC

SEQ ID NO: 7397 - protein, 9 aa, Artificial Sequence
  Description of Artificial Sequence: Synthetic peptide
NQRGFCKDE

SEQ ID NO: 7398 - protein, 9 aa, Artificial Sequence
  Description of Artificial Sequence: Synthetic peptide
TPRCIRADG

SEQ ID NO: 7399 - protein, 9 aa, Artificial Sequence
  Description of Artificial Sequence: Synthetic peptide
DQRMLLKEL

SEQ ID NO: 7400 - protein, 9 aa, Artificial Sequence
  Description of Artificial Sequence: Synthetic peptide
SNRYYSRIF

SEQ ID NO: 7401 - protein, 9 aa, Artificial Sequence
  Description of Artificial Sequence: Synthetic peptide
EDRMGLPHN

SEQ ID NO: 7402 - protein, 9 aa, Artificial Sequence
  Description of Artificial Sequence: Synthetic peptide
EGRTISYGN

SEQ ID NO: 7403 - protein, 9 aa, Artificial Sequence
  Description of Artificial Sequence: Synthetic peptide
ASRSCMTQE

SEQ ID NO: 7404 - protein, 9 aa, Artificial Sequence
  Description of Artificial Sequence: Synthetic peptide
QSRQMMLLH

SEQ ID NO: 7405 - protein, 9 aa, Artificial Sequence
  Description of Artificial Sequence: Synthetic peptide
MTRVSMTWR

SEQ ID NO: 7406 - protein, 9 aa, Artificial Sequence
  Description of Artificial Sequence: Synthetic peptide
TFRHWEGHH

SEQ ID NO: 7407 - protein, 9 aa, Artificial Sequence
  Description of Artificial Sequence: Synthetic peptide
VARQMQENQ

SEQ ID NO: 7408 - protein, 9 aa, Artificial Sequence
  Description of Artificial Sequence: Synthetic peptide
INRPMGHGM

SEQ ID NO: 7409 - protein, 9 aa, Artificial Sequence
  Description of Artificial Sequence: Synthetic peptide
CIRFMMREG

SEQ ID NO: 7410 - protein, 9 aa, Artificial Sequence
  Description of Artificial Sequence: Synthetic peptide
FFRWRWGLG

SEQ ID NO: 7411 - protein, 9 aa, Artificial Sequence
  Description of Artificial Sequence: Synthetic peptide
QGRWACWYS

SEQ ID NO: 7412 - protein, 9 aa, Artificial Sequence
  Description of Artificial Sequence: Synthetic peptide
HHRVNYEMY

SEQ ID NO: 7413 - protein, 9 aa, Artificial Sequence
  Description of Artificial Sequence: Synthetic peptide
SVRTCHQDE

SEQ ID NO: 7414 - protein, 9 aa, Artificial Sequence
  Description of Artificial Sequence: Synthetic peptide
DDRVKMFHY

SEQ ID NO: 7415 - protein, 9 aa, Artificial Sequence
  Description of Artificial Sequence: Synthetic peptide
GMRYSEWHW

SEQ ID NO: 7416 - protein, 9 aa, Artificial Sequence
  Description of Artificial Sequence: Synthetic peptide
ETREHHLLV

SEQ ID NO: 7417 - protein, 9 aa, Artificial Sequence
  Description of Artificial Sequence: Synthetic peptide
MFRQFYIQG

SEQ ID NO: 7418 - protein, 9 aa, Artificial Sequence
  Description of Artificial Sequence: Synthetic peptide
TTRQISNID

SEQ ID NO: 7419 - protein, 9 aa, Artificial Sequence
  Description of Artificial Sequence: Synthetic peptide
DCRHTILYV

SEQ ID NO: 7420 - protein, 9 aa, Artificial Sequence
  Description of Artificial Sequence: Synthetic peptide
AIRQFMMHL

SEQ ID NO: 7421 - protein, 9 aa, Artificial Sequence
  Description of Artificial Sequence: Synthetic peptide
LMRWSKDSN

SEQ ID NO: 7422 - protein, 9 aa, Artificial Sequence
  Description of Artificial Sequence: Synthetic peptide
LMRGSKDSN

SEQ ID NO: 7423 - protein, 9 aa, Artificial Sequence
  Description of Artificial Sequence: Synthetic peptide
LMRWSKDSS

SEQ ID NO: 7424 - protein, 9 aa, Artificial Sequence
  Description of Artificial Sequence: Synthetic peptide
LMRWSRDSN

SEQ ID NO: 7425 - protein, 9 aa, Artificial Sequence
  Description of Artificial Sequence: Synthetic peptide
ASRQFETCW

SEQ ID NO: 7426 - protein, 9 aa, Artificial Sequence
  Description of Artificial Sequence: Synthetic peptide
SDRMVSISA

SEQ ID NO: 7427 - protein, 9 aa, Artificial Sequence
  Description of Artificial Sequence: Synthetic peptide
NTRIVCDLS

SEQ ID NO: 7428 - protein, 9 aa, Artificial Sequence
  Description of Artificial Sequence: Synthetic peptide
EFRCRLIGS

SEQ ID NO: 7429 - protein, 9 aa, Artificial Sequence
  Description of Artificial Sequence: Synthetic peptide
DCRCYDCHD

SEQ ID NO: 7430 - protein, 9 aa, Artificial Sequence
  Description of Artificial Sequence: Synthetic peptide
TMRDSDYNW

SEQ ID NO: 7431 - protein, 9 aa, Artificial Sequence
  Description of Artificial Sequence: Synthetic peptide
DVRACMEDL

SEQ ID NO: 7432 - protein, 9 aa, Artificial Sequence
  Description of Artificial Sequence: Synthetic peptide
WCRCKRFIE

SEQ ID NO: 7433 - protein, 9 aa, Artificial Sequence
  Description of Artificial Sequence: Synthetic peptide
WIRSAQRPG

SEQ ID NO: 7434 - protein, 9 aa, Artificial Sequence
  Description of Artificial Sequence: Synthetic peptide
MGRPHAWWG

SEQ ID NO: 7435 - protein, 9 aa, Artificial Sequence
  Description of Artificial Sequence: Synthetic peptide
NFRMQTGCH

SEQ ID NO: 7436 - protein, 9 aa, Artificial Sequence
  Description of Artificial Sequence: Synthetic peptide
SMRDLIAEA

SEQ ID NO: 7437 - protein, 9 aa, Artificial Sequence
  Description of Artificial Sequence: Synthetic peptide
TARDREHAM

SEQ ID NO: 7438 - protein, 9 aa, Artificial Sequence
  Description of Artificial Sequence: Synthetic peptide
CSRNRCWSG

SEQ ID NO: 7439 - protein, 9 aa, Artificial Sequence
  Description of Artificial Sequence: Synthetic peptide
DYREKYKCQ

SEQ ID NO: 7440 - protein, 9 aa, Artificial Sequence
  Description of Artificial Sequence: Synthetic peptide
VCRQKTDSW

SEQ ID NO: 7441 - protein, 9 aa, Artificial Sequence
  Description of Artificial Sequence: Synthetic peptide
YSRMEENDR

SEQ ID NO: 7442 - protein, 9 aa, Artificial Sequence
  Description of Artificial Sequence: Synthetic peptide
PIRYVKPAR

SEQ ID NO: 7443 - protein, 9 aa, Artificial Sequence
  Description of Artificial Sequence: Synthetic peptide
QPRVYEGFY

SEQ ID NO: 7444 - protein, 9 aa, Artificial Sequence
  Description of Artificial Sequence: Synthetic peptide
MDRMMYMLG

SEQ ID NO: 7445 - protein, 9 aa, Artificial Sequence
  Description of Artificial Sequence: Synthetic peptide
VNRGDLSLF

SEQ ID NO: 7446 - protein, 9 aa, Artificial Sequence
  Description of Artificial Sequence: Synthetic peptide
HTRKEGFNS

SEQ ID NO: 7447 - protein, 9 aa, Artificial Sequence
  Description of Artificial Sequence: Synthetic peptide
LFRTIPIWQ

SEQ ID NO: 7448 - protein, 9 aa, Artificial Sequence
  Description of Artificial Sequence: Synthetic peptide
APRREEQNC

SEQ ID NO: 7449 - protein, 9 aa, Artificial Sequence
  Description of Artificial Sequence: Synthetic peptide
NTRQINGVD

SEQ ID NO: 7450 - protein, 9 aa, Artificial Sequence
  Description of Artificial Sequence: Synthetic peptide
DARHKWCLE

SEQ ID NO: 7451 - protein, 9 aa, Artificial Sequence
  Description of Artificial Sequence: Synthetic peptide
AERQACTMG

SEQ ID NO: 7452 - protein, 9 aa, Artificial Sequence
  Description of Artificial Sequence: Synthetic peptide
ISRMLRQSS

SEQ ID NO: 7453 - protein, 9 aa, Artificial Sequence
  Description of Artificial Sequence: Synthetic peptide
ETRVREDAV

SEQ ID NO: 7454 - protein, 9 aa, Artificial Sequence
  Description of Artificial Sequence: Synthetic peptide
AMRAGLENS

SEQ ID NO: 7455 - protein, 9 aa, Artificial Sequence
  Description of Artificial Sequence: Synthetic peptide
TCRWFAHYS

SEQ ID NO: 7456 - protein, 9 aa, Artificial Sequence
  Description of Artificial Sequence: Synthetic peptide
QVRFEQNPA

SEQ ID NO: 7457 - protein, 9 aa, Artificial Sequence
  Description of Artificial Sequence: Synthetic peptide
NERVYGWGM

SEQ ID NO: 7458 - protein, 9 aa, Artificial Sequence
  Description of Artificial Sequence: Synthetic peptide
EKRLFDRTY

SEQ ID NO: 7459 - protein, 9 aa, Artificial Sequence
  Description of Artificial Sequence: Synthetic peptide
VSRCGIDRS

SEQ ID NO: 7460 - protein, 9 aa, Artificial Sequence
  Description of Artificial Sequence: Synthetic peptide
DARKTVNEW

SEQ ID NO: 7461 - protein, 9 aa, Artificial Sequence
  Description of Artificial Sequence: Synthetic peptide
TIRYIGMSG

SEQ ID NO: 7462 - protein, 9 aa, Artificial Sequence
  Description of Artificial Sequence: Synthetic peptide
FFRICGSYI

SEQ ID NO: 7463 - protein, 9 aa, Artificial Sequence
  Description of Artificial Sequence: Synthetic peptide
NTRSDLRAG

SEQ ID NO: 7464 - protein, 9 aa, Artificial Sequence
  Description of Artificial Sequence: Synthetic peptide
ANRMIWYPY

SEQ ID NO: 7465 - protein, 9 aa, Artificial Sequence
  Description of Artificial Sequence: Synthetic peptide
AQRCFHRWG

SEQ ID NO: 7466 - protein, 9 aa, Artificial Sequence
  Description of Artificial Sequence: Synthetic peptide
TCRYEELAD

SEQ ID NO: 7467 - protein, 9 aa, Artificial Sequence
  Description of Artificial Sequence: Synthetic peptide
STRTTDWNM

SEQ ID NO: 7468 - protein, 9 aa, Artificial Sequence
  Description of Artificial Sequence: Synthetic peptide
DARKTYICY

SEQ ID NO: 7469 - protein, 9 aa, Artificial Sequence
  Description of Artificial Sequence: Synthetic peptide
SSRGQDGVM

SEQ ID NO: 7470 - protein, 9 aa, Artificial Sequence
  Description of Artificial Sequence: Synthetic peptide
RTREPFWWW

SEQ ID NO: 7471 - protein, 9 aa, Artificial Sequence
  Description of Artificial Sequence: Synthetic peptide
IERWWVIDV

SEQ ID NO: 7472 - protein, 9 aa, Artificial Sequence
  Description of Artificial Sequence: Synthetic peptide
ENRSPNNPA

SEQ ID NO: 7473 - protein, 9 aa, Artificial Sequence
  Description of Artificial Sequence: Synthetic peptide
DWRYFCVSL

SEQ ID NO: 7474 - protein, 9 aa, Artificial Sequence
  Description of Artificial Sequence: Synthetic peptide
NPRQGFVPV

SEQ ID NO: 7475 - protein, 9 aa, Artificial Sequence
  Description of Artificial Sequence: Synthetic peptide
NSRLLIKHL

SEQ ID NO: 7476 - protein, 9 aa, Artificial Sequence
  Description of Artificial Sequence: Synthetic peptide
HTRVVKSTG

SEQ ID NO: 7477 - protein, 9 aa, Artificial Sequence
  Description of Artificial Sequence: Synthetic peptide
EIRQFVKGA

SEQ ID NO: 7478 - protein, 9 aa, Artificial Sequence
  Description of Artificial Sequence: Synthetic peptide
QERSMNAWW

SEQ ID NO: 7479 - protein, 9 aa, Artificial Sequence
  Description of Artificial Sequence: Synthetic peptide
CARLEGRGN

SEQ ID NO: 7480 - protein, 9 aa, Artificial Sequence
  Description of Artificial Sequence: Synthetic peptide
FMRDVFAWD

SEQ ID NO: 7481 - protein, 9 aa, Artificial Sequence
  Description of Artificial Sequence: Synthetic peptide
MLRTQIHCA

SEQ ID NO: 7482 - protein, 9 aa, Artificial Sequence
  Description of Artificial Sequence: Synthetic peptide
QLRCEYQHT

SEQ ID NO: 7483 - protein, 9 aa, Artificial Sequence
  Description of Artificial Sequence: Synthetic peptide
CCRMDNKKS

SEQ ID NO: 7484 - protein, 9 aa, Artificial Sequence
  Description of Artificial Sequence: Synthetic peptide
YIRVGGNNE

SEQ ID NO: 7485 - protein, 9 aa, Artificial Sequence
  Description of Artificial Sequence: Synthetic peptide
NVRNFFDHC

SEQ ID NO: 7486 - protein, 9 aa, Artificial Sequence
  Description of Artificial Sequence: Synthetic peptide
ATRWVQMGQ

SEQ ID NO: 7487 - protein, 9 aa, Artificial Sequence
  Description of Artificial Sequence: Synthetic peptide
MDRDIPHCR

SEQ ID NO: 7488 - protein, 9 aa, Artificial Sequence
  Description of Artificial Sequence: Synthetic peptide
CYRRSDSFC

SEQ ID NO: 7489 - protein, 9 aa, Artificial Sequence
  Description of Artificial Sequence: Synthetic peptide
EYSRCCHQE

SEQ ID NO: 7490 - protein, 9 aa, Artificial Sequence
  Description of Artificial Sequence: Synthetic peptide
VHLRSHTWF

SEQ ID NO: 7491 - protein, 9 aa, Artificial Sequence
  Description of Artificial Sequence: Synthetic peptide
QQLRCHCFS

SEQ ID NO: 7492 - protein, 9 aa, Artificial Sequence
  Description of Artificial Sequence: Synthetic peptide
AAIRYDPGF

SEQ ID NO: 7493 - protein, 9 aa, Artificial Sequence
  Description of Artificial Sequence: Synthetic peptide
MSNRIIDIQ

SEQ ID NO: 7494 - protein, 9 aa, Artificial Sequence
  Description of Artificial Sequence: Synthetic peptide
VTQRPLHHS

SEQ ID NO: 7495 - protein, 9 aa, Artificial Sequence
  Description of Artificial Sequence: Synthetic peptide
NQQRTYNNG

SEQ ID NO: 7496 - protein, 9 aa, Artificial Sequence
  Description of Artificial Sequence: Synthetic peptide
SLGRIECDF

SEQ ID NO: 7497 - protein, 9 aa, Artificial Sequence
  Description of Artificial Sequence: Synthetic peptide
SADRTAMFH

SEQ ID NO: 7498 - protein, 9 aa, Artificial Sequence
  Description of Artificial Sequence: Synthetic peptide
NILRYLICD

SEQ ID NO: 7499 - protein, 9 aa, Artificial Sequence
  Description of Artificial Sequence: Synthetic peptide
TFMRKICGM

SEQ ID NO: 7500 - protein, 9 aa, Artificial Sequence
  Description of Artificial Sequence: Synthetic peptide
CWARSVAQN

SEQ ID NO: 7501 - protein, 9 aa, Artificial Sequence
  Description of Artificial Sequence: Synthetic peptide
ELPRYYGQM

SEQ ID NO: 7502 - protein, 9 aa, Artificial Sequence
  Description of Artificial Sequence: Synthetic peptide
EYSRMNKAS

SEQ ID NO: 7503 - protein, 9 aa, Artificial Sequence
  Description of Artificial Sequence: Synthetic peptide
DKVRQGQKD

SEQ ID NO: 7504 - protein, 9 aa, Artificial Sequence
  Description of Artificial Sequence: Synthetic peptide
EFNRYPHGN

SEQ ID NO: 7505 - protein, 9 aa, Artificial Sequence
  Description of Artificial Sequence: Synthetic peptide
HEMRRDYKS

SEQ ID NO: 7506 - protein, 9 aa, Artificial Sequence
  Description of Artificial Sequence: Synthetic peptide
QVYRMMMQP

SEQ ID NO: 7507 - protein, 9 aa, Artificial Sequence
  Description of Artificial Sequence: Synthetic peptide
TVNRAMREE

SEQ ID NO: 7508 - protein, 9 aa, Artificial Sequence
  Description of Artificial Sequence: Synthetic peptide
YKLRSSFRW

SEQ ID NO: 7509 - protein, 9 aa, Artificial Sequence
  Description of Artificial Sequence: Synthetic peptide
FANRCPPDD

SEQ ID NO: 7510 - protein, 9 aa, Artificial Sequence
  Description of Artificial Sequence: Synthetic peptide
NKIRDVAVI

SEQ ID NO: 7511 - protein, 9 aa, Artificial Sequence
  Description of Artificial Sequence: Synthetic peptide
PVARKMSTC

SEQ ID NO: 7512 - protein, 9 aa, Artificial Sequence
  Description of Artificial Sequence: Synthetic peptide
VIQRKFDSG

SEQ ID NO: 7513 - protein, 9 aa, Artificial Sequence
  Description of Artificial Sequence: Synthetic peptide
ALDRERLIF

SEQ ID NO: 7514 - protein, 9 aa, Artificial Sequence
  Description of Artificial Sequence: Synthetic peptide
AGSRMQWAM

SEQ ID NO: 7515 - protein, 9 aa, Artificial Sequence
  Description of Artificial Sequence: Synthetic peptide
WSSREYWHK

SEQ ID NO: 7516 - protein, 9 aa, Artificial Sequence
  Description of Artificial Sequence: Synthetic peptide
THARFKMKS

SEQ ID NO: 7517 - protein, 9 aa, Artificial Sequence
  Description of Artificial Sequence: Synthetic peptide
NCARGPMEK

SEQ ID NO: 7518 - protein, 9 aa, Artificial Sequence
  Description of Artificial Sequence: Synthetic peptide
LWSRFISMD

SEQ ID NO: 7519 - protein, 9 aa, Artificial Sequence
  Description of Artificial Sequence: Synthetic peptide
IAMRCWGNE

SEQ ID NO: 7520 - protein, 9 aa, Artificial Sequence
  Description of Artificial Sequence: Synthetic peptide
LVDRSGRTA

SEQ ID NO: 7521 - protein, 9 aa, Artificial Sequence
  Description of Artificial Sequence: Synthetic peptide
SQSRTIIQE

SEQ ID NO: 7522 - protein, 9 aa, Artificial Sequence
  Description of Artificial Sequence: Synthetic peptide
HEVRRYGQN

SEQ ID NO: 7523 - protein, 9 aa, Artificial Sequence
  Description of Artificial Sequence: Synthetic peptide
NSTRNTSYY

SEQ ID NO: 7524 - protein, 9 aa, Artificial Sequence
  Description of Artificial Sequence: Synthetic peptide
GPARSFEAC

SEQ ID NO: 7525 - protein, 9 aa, Artificial Sequence
  Description of Artificial Sequence: Synthetic peptide
YCPRLVEAW

SEQ ID NO: 7526 - protein, 9 aa, Artificial Sequence
  Description of Artificial Sequence: Synthetic peptide
VIGRTVDDP

SEQ ID NO: 7527 - protein, 9 aa, Artificial Sequence
  Description of Artificial Sequence: Synthetic peptide
WFDRSWHIL

SEQ ID NO: 7528 - protein, 9 aa, Artificial Sequence
  Description of Artificial Sequence: Synthetic peptide
CYIRNMVNL

SEQ ID NO: 7529 - protein, 9 aa, Artificial Sequence
  Description of Artificial Sequence: Synthetic peptide
LIGRDSKVW

SEQ ID NO: 7530 - protein, 9 aa, Artificial Sequence
  Description of Artificial Sequence: Synthetic peptide
QNIRLGVPT

SEQ ID NO: 7531 - protein, 9 aa, Artificial Sequence
  Description of Artificial Sequence: Synthetic peptide
VICRMKKHS

SEQ ID NO: 7532 - protein, 9 aa, Artificial Sequence
  Description of Artificial Sequence: Synthetic peptide
VEDRVFACC

SEQ ID NO: 7533 - protein, 9 aa, Artificial Sequence
  Description of Artificial Sequence: Synthetic peptide
GHLRDHPLY

SEQ ID NO: 7534 - protein, 9 aa, Artificial Sequence
  Description of Artificial Sequence: Synthetic peptide
FIFRKCDHW

SEQ ID NO: 7535 - protein, 9 aa, Artificial Sequence
  Description of Artificial Sequence: Synthetic peptide
RKTRCFCNY

SEQ ID NO: 7536 - protein, 9 aa, Artificial Sequence
  Description of Artificial Sequence: Synthetic peptide
TSERHSCMV

SEQ ID NO: 7537 - protein, 9 aa, Artificial Sequence
  Description of Artificial Sequence: Synthetic peptide
SMSRHMMHQ

SEQ ID NO: 7538 - protein, 9 aa, Artificial Sequence
  Description of Artificial Sequence: Synthetic peptide
DIGRFTAYY

SEQ ID NO: 7539 - protein, 9 aa, Artificial Sequence
  Description of Artificial Sequence: Synthetic peptide
GVSRLPYHA

SEQ ID NO: 7540 - protein, 9 aa, Artificial Sequence
  Description of Artificial Sequence: Synthetic peptide
QVDRTMWMH

SEQ ID NO: 7541 - protein, 9 aa, Artificial Sequence
  Description of Artificial Sequence: Synthetic peptide
CILRKPSYH

SEQ ID NO: 7542 - protein, 9 aa, Artificial Sequence
  Description of Artificial Sequence: Synthetic peptide
NNDRHQHLK

SEQ ID NO: 7543 - protein, 9 aa, Artificial Sequence
  Description of Artificial Sequence: Synthetic peptide
TVDRKVEIE

SEQ ID NO: 7544 - protein, 9 aa, Artificial Sequence
  Description of Artificial Sequence: Synthetic peptide
NSARYAWVY

SEQ ID NO: 7545 - protein, 9 aa, Artificial Sequence
  Description of Artificial Sequence: Synthetic peptide
AITRHVADT

SEQ ID NO: 7546 - protein, 9 aa, Artificial Sequence
  Description of Artificial Sequence: Synthetic peptide
TDKRAHVGA

SEQ ID NO: 7547 - protein, 9 aa, Artificial Sequence
  Description of Artificial Sequence: Synthetic peptide
LLWRRVKRT

SEQ ID NO: 7548 - protein, 9 aa, Artificial Sequence
  Description of Artificial Sequence: Synthetic peptide
YVIRKTWFN

SEQ ID NO: 7549 - protein, 9 aa, Artificial Sequence
  Description of Artificial Sequence: Synthetic peptide
FAERANYCC

SEQ ID NO: 7550 - protein, 9 aa, Artificial Sequence
  Description of Artificial Sequence: Synthetic peptide
SYMRHPNFD

SEQ ID NO: 7551 - protein, 9 aa, Artificial Sequence
  Description of Artificial Sequence: Synthetic peptide
GGDRMATDR

SEQ ID NO: 7552 - protein, 9 aa, Artificial Sequence
  Description of Artificial Sequence: Synthetic peptide
FQTRPSCSF

SEQ ID NO: 7553 - protein, 9 aa, Artificial Sequence
  Description of Artificial Sequence: Synthetic peptide
MMVRREFAD

SEQ ID NO: 7554 - protein, 9 aa, Artificial Sequence
  Description of Artificial Sequence: Synthetic peptide
AVMRNDQWL

SEQ ID NO: 7555 - protein, 9 aa, Artificial Sequence
  Description of Artificial Sequence: Synthetic peptide
LQERDHHMQ

SEQ ID NO: 7556 - protein, 9 aa, Artificial Sequence
  Description of Artificial Sequence: Synthetic peptide
LTPRSEGLS

SEQ ID NO: 7557 - protein, 9 aa, Artificial Sequence
  Description of Artificial Sequence: Synthetic peptide
LVGRTYQHQ

SEQ ID NO: 7558 - protein, 9 aa, Artificial Sequence
  Description of Artificial Sequence: Synthetic peptide
DATRAQTGE

SEQ ID NO: 7559 - protein, 9 aa, Artificial Sequence
  Description of Artificial Sequence: Synthetic peptide
MMVRELMSS

SEQ ID NO: 7560 - protein, 9 aa, Artificial Sequence
  Description of Artificial Sequence: Synthetic peptide
CGHRHSSMG

SEQ ID NO: 7561 - protein, 9 aa, Artificial Sequence
  Description of Artificial Sequence: Synthetic peptide
HHLRNVHHC

SEQ ID NO: 7562 - protein, 9 aa, Artificial Sequence
  Description of Artificial Sequence: Synthetic peptide
NSTRWYHTG

SEQ ID NO: 7563 - protein, 9 aa, Artificial Sequence
  Description of Artificial Sequence: Synthetic peptide
NHMRKQSSH

SEQ ID NO: 7564 - protein, 9 aa, Artificial Sequence
  Description of Artificial Sequence: Synthetic peptide
DDCRLNVRT

SEQ ID NO: 7565 - protein, 9 aa, Artificial Sequence
  Description of Artificial Sequence: Synthetic peptide
MCARGAMCA

SEQ ID NO: 7566 - protein, 9 aa, Artificial Sequence
  Description of Artificial Sequence: Synthetic peptide
SWGRIPHES

SEQ ID NO: 7567 - protein, 9 aa, Artificial Sequence
  Description of Artificial Sequence: Synthetic peptide
QLKRNEQTS

SEQ ID NO: 7568 - protein, 9 aa, Artificial Sequence
  Description of Artificial Sequence: Synthetic peptide
RNQRTYPAL

SEQ ID NO: 7569 - protein, 9 aa, Artificial Sequence
  Description of Artificial Sequence: Synthetic peptide
SFFREDYSF

SEQ ID NO: 7570 - protein, 9 aa, Artificial Sequence
  Description of Artificial Sequence: Synthetic peptide
DSHRCLKAD

SEQ ID NO: 7571 - protein, 9 aa, Artificial Sequence
  Description of Artificial Sequence: Synthetic peptide
SAPRNEITR

SEQ ID NO: 7572 - protein, 9 aa, Artificial Sequence
  Description of Artificial Sequence: Synthetic peptide
DIQRWEHEG

SEQ ID NO: 7573 - protein, 9 aa, Artificial Sequence
  Description of Artificial Sequence: Synthetic peptide
EQLRDLNIE

SEQ ID NO: 7574 - protein, 9 aa, Artificial Sequence
  Description of Artificial Sequence: Synthetic peptide
NYARHDILA

SEQ ID NO: 7575 - protein, 9 aa, Artificial Sequence
  Description of Artificial Sequence: Synthetic peptide
MGQRSAANY

SEQ ID NO: 7576 - protein, 9 aa, Artificial Sequence
  Description of Artificial Sequence: Synthetic peptide
STARHNMQL

SEQ ID NO: 7577 - protein, 9 aa, Artificial Sequence
  Description of Artificial Sequence: Synthetic peptide
PAYRMECCE

SEQ ID NO: 7578 - protein, 9 aa, Artificial Sequence
  Description of Artificial Sequence: Synthetic peptide
ETHRGTVGL

SEQ ID NO: 7579 - protein, 9 aa, Artificial Sequence
  Description of Artificial Sequence: Synthetic peptide
DVCRKPVSH

SEQ ID NO: 7580 - protein, 9 aa, Artificial Sequence
  Description of Artificial Sequence: Synthetic peptide
DVMRMEHYL

SEQ ID NO: 7581 - protein, 9 aa, Artificial Sequence
  Description of Artificial Sequence: Synthetic peptide
PAWRRYCWT

SEQ ID NO: 7582 - protein, 9 aa, Artificial Sequence
  Description of Artificial Sequence: Synthetic peptide
DMHRGGMWT

SEQ ID NO: 7583 - protein, 9 aa, Artificial Sequence
  Description of Artificial Sequence: Synthetic peptide
CTLRQIKMH

SEQ ID NO: 7584 - protein, 9 aa, Artificial Sequence
  Description of Artificial Sequence: Synthetic peptide
YAQRTCWPE

SEQ ID NO: 7585 - protein, 9 aa, Artificial Sequence
  Description of Artificial Sequence: Synthetic peptide
WCMRDWYQE

SEQ ID NO: 7586 - protein, 9 aa, Artificial Sequence
  Description of Artificial Sequence: Synthetic peptide
ISQRGTLWC

SEQ ID NO: 7587 - protein, 9 aa, Artificial Sequence
  Description of Artificial Sequence: Synthetic peptide
RMVRVSVHG

SEQ ID NO: 7588 - protein, 9 aa, Artificial Sequence
  Description of Artificial Sequence: Synthetic peptide
EAWRNSSSG

SEQ ID NO: 7589 - protein, 9 aa, Artificial Sequence
  Description of Artificial Sequence: Synthetic peptide
LWDRFCCPV

SEQ ID NO: 7590 - protein, 9 aa, Artificial Sequence
  Description of Artificial Sequence: Synthetic peptide
NHTRGKQCV

SEQ ID NO: 7591 - protein, 9 aa, Artificial Sequence
  Description of Artificial Sequence: Synthetic peptide
NCERWFQIE

SEQ ID NO: 7592 - protein, 9 aa, Artificial Sequence
  Description of Artificial Sequence: Synthetic peptide
QAVRTRTFR

SEQ ID NO: 7593 - protein, 9 aa, Artificial Sequence
  Description of Artificial Sequence: Synthetic peptide
AYLRRNVGN

SEQ ID NO: 7594 - protein, 9 aa, Artificial Sequence
  Description of Artificial Sequence: Synthetic peptide
LTNRTQESW

SEQ ID NO: 7595 - protein, 9 aa, Artificial Sequence
  Description of Artificial Sequence: Synthetic peptide
NVDRQHAQS

SEQ ID NO: 7596 - protein, 9 aa, Artificial Sequence
  Description of Artificial Sequence: Synthetic peptide
DYERSIENH

SEQ ID NO: 7597 - protein, 9 aa, Artificial Sequence
  Description of Artificial Sequence: Synthetic peptide
MPTRMQKGA

SEQ ID NO: 7598 - protein, 9 aa, Artificial Sequence
  Description of Artificial Sequence: Synthetic peptide
MSARINTPD

SEQ ID NO: 7599 - protein, 9 aa, Artificial Sequence
  Description of Artificial Sequence: Synthetic peptide
CSIRGFSAF

SEQ ID NO: 7600 - protein, 9 aa, Artificial Sequence
  Description of Artificial Sequence: Synthetic peptide
MTERYYWCQ

SEQ ID NO: 7601 - protein, 9 aa, Artificial Sequence
  Description of Artificial Sequence: Synthetic peptide
CHIRDCSPI

SEQ ID NO: 7602 - protein, 9 aa, Artificial Sequence
  Description of Artificial Sequence: Synthetic peptide
NNVRKVGNT

SEQ ID NO: 7603 - protein, 9 aa, Artificial Sequence
  Description of Artificial Sequence: Synthetic peptide
VEMRANKGL

SEQ ID NO: 7604 - protein, 9 aa, Artificial Sequence
  Description of Artificial Sequence: Synthetic peptide
WDGRPDLST

SEQ ID NO: 7605 - protein, 9 aa, Artificial Sequence
  Description of Artificial Sequence: Synthetic peptide
FSYQIQCQN

SEQ ID NO: 7606 - protein, 9 aa, Artificial Sequence
  Description of Artificial Sequence: Synthetic peptide
TSSEITSPP

SEQ ID NO: 7607 - protein, 9 aa, Artificial Sequence
  Description of Artificial Sequence: Synthetic peptide
CTKPIPCWM

SEQ ID NO: 7608 - protein, 9 aa, Artificial Sequence
  Description of Artificial Sequence: Synthetic peptide
IMHEIPEID

SEQ ID NO: 7609 - protein, 9 aa, Artificial Sequence
  Description of Artificial Sequence: Synthetic peptide
HQSPIHTNT

SEQ ID NO: 7610 - protein, 9 aa, Artificial Sequence
  Description of Artificial Sequence: Synthetic peptide
REMMIVNCD

SEQ ID NO: 7611 - protein, 9 aa, Artificial Sequence
  Description of Artificial Sequence: Synthetic peptide
IWPQIQYRM

SEQ ID NO: 7612 - protein, 9 aa, Artificial Sequence
  Description of Artificial Sequence: Synthetic peptide
PEKWIHMHE

SEQ ID NO: 7613 - protein, 9 aa, Artificial Sequence
  Description of Artificial Sequence: Synthetic peptide
ILIFIQNCP

SEQ ID NO: 7614 - protein, 9 aa, Artificial Sequence
  Description of Artificial Sequence: Synthetic peptide
SACNIIYHT

SEQ ID NO: 7615 - protein, 9 aa, Artificial Sequence
  Description of Artificial Sequence: Synthetic peptide
SGNQIVQAP

SEQ ID NO: 7616 - protein, 9 aa, Artificial Sequence
  Description of Artificial Sequence: Synthetic peptide
HWELIRCHD

SEQ ID NO: 7617 - protein, 9 aa, Artificial Sequence
  Description of Artificial Sequence: Synthetic peptide
NSHTIMNGM

SEQ ID NO: 7618 - protein, 9 aa, Artificial Sequence
  Description of Artificial Sequence: Synthetic peptide
DVDIIGLPA

SEQ ID NO: 7619 - protein, 9 aa, Artificial Sequence
  Description of Artificial Sequence: Synthetic peptide
QKHMILCHF

SEQ ID NO: 7620 - protein, 9 aa, Artificial Sequence
  Description of Artificial Sequence: Synthetic peptide
ACEWINMYN

SEQ ID NO: 7621 - protein, 9 aa, Artificial Sequence
  Description of Artificial Sequence: Synthetic peptide
ATYQIQWPG

SEQ ID NO: 7622 - protein, 9 aa, Artificial Sequence
  Description of Artificial Sequence: Synthetic peptide
FIIWIEHRH

SEQ ID NO: 7623 - protein, 9 aa, Artificial Sequence
  Description of Artificial Sequence: Synthetic peptide
GIEQIMGCP

SEQ ID NO: 7624 - protein, 9 aa, Artificial Sequence
  Description of Artificial Sequence: Synthetic peptide
VIMGIQTDD

SEQ ID NO: 7625 - protein, 9 aa, Artificial Sequence
  Description of Artificial Sequence: Synthetic peptide
VQPTISYSD

SEQ ID NO: 7626 - protein, 9 aa, Artificial Sequence
  Description of Artificial Sequence: Synthetic peptide
YSPLIGRWK

SEQ ID NO: 7627 - protein, 9 aa, Artificial Sequence
  Description of Artificial Sequence: Synthetic peptide
IHSNIPVAE

SEQ ID NO: 7628 - protein, 9 aa, Artificial Sequence
  Description of Artificial Sequence: Synthetic peptide
NHDLIQFVK

SEQ ID NO: 7629 - protein, 9 aa, Artificial Sequence
  Description of Artificial Sequence: Synthetic peptide
WSPSIPGGE

SEQ ID NO: 7630 - protein, 9 aa, Artificial Sequence
  Description of Artificial Sequence: Synthetic peptide
CNYPIIWDK

SEQ ID NO: 7631 - protein, 9 aa, Artificial Sequence
  Description of Artificial Sequence: Synthetic peptide
VSAYIERQW

SEQ ID NO: 7632 - protein, 9 aa, Artificial Sequence
  Description of Artificial Sequence: Synthetic peptide
QVSHISEHW

SEQ ID NO: 7633 - protein, 9 aa, Artificial Sequence
  Description of Artificial Sequence: Synthetic peptide
MMTTIQYHD

SEQ ID NO: 7634 - protein, 9 aa, Artificial Sequence
  Description of Artificial Sequence: Synthetic peptide
WAEAIKHFT

SEQ ID NO: 7635 - protein, 9 aa, Artificial Sequence
  Description of Artificial Sequence: Synthetic peptide
VSKFIAASW

SEQ ID NO: 7636 - protein, 9 aa, Artificial Sequence
  Description of Artificial Sequence: Synthetic peptide
CSNDINGRA

SEQ ID NO: 7637 - protein, 9 aa, Artificial Sequence
  Description of Artificial Sequence: Synthetic peptide
LNSMIMWGN

SEQ ID NO: 7638 - protein, 9 aa, Artificial Sequence
  Description of Artificial Sequence: Synthetic peptide
HACVITLDG

SEQ ID NO: 7639 - protein, 9 aa, Artificial Sequence
  Description of Artificial Sequence: Synthetic peptide
GTEPIMWRD

SEQ ID NO: 7640 - protein, 9 aa, Artificial Sequence
  Description of Artificial Sequence: Synthetic peptide
LSTLITMMD

SEQ ID NO: 7641 - protein, 9 aa, Artificial Sequence
  Description of Artificial Sequence: Synthetic peptide
GWALIVNGL

SEQ ID NO: 7642 - protein, 9 aa, Artificial Sequence
  Description of Artificial Sequence: Synthetic peptide
MVNHILPNN

SEQ ID NO: 7643 - protein, 9 aa, Artificial Sequence
  Description of Artificial Sequence: Synthetic peptide
RSLDIQYDI

SEQ ID NO: 7644 - protein, 9 aa, Artificial Sequence
  Description of Artificial Sequence: Synthetic peptide
RVVPIEDSM

SEQ ID NO: 7645 - protein, 9 aa, Artificial Sequence
  Description of Artificial Sequence: Synthetic peptide
LVNTIWKAA

SEQ ID NO: 7646 - protein, 9 aa, Artificial Sequence
  Description of Artificial Sequence: Synthetic peptide
GYKFIGRSR

SEQ ID NO: 7647 - protein, 9 aa, Artificial Sequence
  Description of Artificial Sequence: Synthetic peptide
QYLLIPHLP

SEQ ID NO: 7648 - protein, 9 aa, Artificial Sequence
  Description of Artificial Sequence: Synthetic peptide
NNGPIWISS

SEQ ID NO: 7649 - protein, 9 aa, Artificial Sequence
  Description of Artificial Sequence: Synthetic peptide
YGENISPSP

SEQ ID NO: 7650 - protein, 9 aa, Artificial Sequence
  Description of Artificial Sequence: Synthetic peptide
QSDWISIPC

SEQ ID NO: 7651 - protein, 9 aa, Artificial Sequence
  Description of Artificial Sequence: Synthetic peptide
CMAHIWEGH

SEQ ID NO: 7652 - protein, 9 aa, Artificial Sequence
  Description of Artificial Sequence: Synthetic peptide
NWFGINSWH

SEQ ID NO: 7653 - protein, 9 aa, Artificial Sequence
  Description of Artificial Sequence: Synthetic peptide
FQTSINYYG

SEQ ID NO: 7654 - protein, 9 aa, Artificial Sequence
  Description of Artificial Sequence: Synthetic peptide
TMEYIGLDQ

SEQ ID NO: 7655 - protein, 9 aa, Artificial Sequence
  Description of Artificial Sequence: Synthetic peptide
GKIPIDTFR

SEQ ID NO: 7656 - protein, 9 aa, Artificial Sequence
  Description of Artificial Sequence: Synthetic peptide
WAYYIRLQP

SEQ ID NO: 7657 - protein, 9 aa, Artificial Sequence
  Description of Artificial Sequence: Synthetic peptide
VAYPIQTDV

SEQ ID NO: 7658 - protein, 9 aa, Artificial Sequence
  Description of Artificial Sequence: Synthetic peptide
LSIQINNQI

SEQ ID NO: 7659 - protein, 9 aa, Artificial Sequence
  Description of Artificial Sequence: Synthetic peptide
EQTYISEWG

SEQ ID NO: 7660 - protein, 9 aa, Artificial Sequence
  Description of Artificial Sequence: Synthetic peptide
TCGDIQLRA

SEQ ID NO: 7661 - protein, 9 aa, Artificial Sequence
  Description of Artificial Sequence: Synthetic peptide
MAGHIGHHS

SEQ ID NO: 7662 - protein, 9 aa, Artificial Sequence
  Description of Artificial Sequence: Synthetic peptide
GFKDILMVQ

SEQ ID NO: 7663 - protein, 9 aa, Artificial Sequence
  Description of Artificial Sequence: Synthetic peptide
VWWMIIHTS

SEQ ID NO: 7664 - protein, 9 aa, Artificial Sequence
  Description of Artificial Sequence: Synthetic peptide
NAAMIATVC

SEQ ID NO: 7665 - protein, 9 aa, Artificial Sequence
  Description of Artificial Sequence: Synthetic peptide
SMHLICGEA

SEQ ID NO: 7666 - protein, 9 aa, Artificial Sequence
  Description of Artificial Sequence: Synthetic peptide
ACSQIGQDD

SEQ ID NO: 7667 - protein, 9 aa, Artificial Sequence
  Description of Artificial Sequence: Synthetic peptide
DSQEIGSES

SEQ ID NO: 7668 - protein, 9 aa, Artificial Sequence
  Description of Artificial Sequence: Synthetic peptide
NWEVIGRWH

SEQ ID NO: 7669 - protein, 9 aa, Artificial Sequence
  Description of Artificial Sequence: Synthetic peptide
HSGFIDRQA

SEQ ID NO: 7670 - protein, 9 aa, Artificial Sequence
  Description of Artificial Sequence: Synthetic peptide
PVKPIIHAS

SEQ ID NO: 7671 - protein, 9 aa, Artificial Sequence
  Description of Artificial Sequence: Synthetic peptide
IQAVIASGW

SEQ ID NO: 7672 - protein, 9 aa, Artificial Sequence
  Description of Artificial Sequence: Synthetic peptide
DHLSICCQN

SEQ ID NO: 7673 - protein, 9 aa, Artificial Sequence
  Description of Artificial Sequence: Synthetic peptide
CTKPIVMDW

SEQ ID NO: 7674 - protein, 9 aa, Artificial Sequence
  Description of Artificial Sequence: Synthetic peptide
LNHPIADYD

SEQ ID NO: 7675 - protein, 9 aa, Artificial Sequence
  Description of Artificial Sequence: Synthetic peptide
TQAKIECCS

SEQ ID NO: 7676 - protein, 9 aa, Artificial Sequence
  Description of Artificial Sequence: Synthetic peptide
GTEHIPMQA

SEQ ID NO: 7677 - protein, 9 aa, Artificial Sequence
  Description of Artificial Sequence: Synthetic peptide
SFPMILVNC

SEQ ID NO: 7678 - protein, 9 aa, Artificial Sequence
  Description of Artificial Sequence: Synthetic peptide
GCQQIQLQT

SEQ ID NO: 7679 - protein, 9 aa, Artificial Sequence
  Description of Artificial Sequence: Synthetic peptide
ATDMIFVSN

SEQ ID NO: 7680 - protein, 9 aa, Artificial Sequence
  Description of Artificial Sequence: Synthetic peptide
RQCVIGDYD

SEQ ID NO: 7681 - protein, 9 aa, Artificial Sequence
  Description of Artificial Sequence: Synthetic peptide
RLAWIEQSP

SEQ ID NO: 7682 - protein, 9 aa, Artificial Sequence
  Description of Artificial Sequence: Synthetic peptide
YEHPIMWPV

SEQ ID NO: 7683 - protein, 9 aa, Artificial Sequence
  Description of Artificial Sequence: Synthetic peptide
HEGLIMRLE

SEQ ID NO: 7684 - protein, 9 aa, Artificial Sequence
  Description of Artificial Sequence: Synthetic peptide
TSYCIQTVD

SEQ ID NO: 7685 - protein, 9 aa, Artificial Sequence
  Description of Artificial Sequence: Synthetic peptide
AMEMIVMHE

SEQ ID NO: 7686 - protein, 9 aa, Artificial Sequence
  Description of Artificial Sequence: Synthetic peptide
MGCLIQFCE

SEQ ID NO: 7687 - protein, 9 aa, Artificial Sequence
  Description of Artificial Sequence: Synthetic peptide
FSWPIHEPD

SEQ ID NO: 7688 - protein, 9 aa, Artificial Sequence
  Description of Artificial Sequence: Synthetic peptide
ESTHIMKTP

SEQ ID NO: 7689 - protein, 9 aa, Artificial Sequence
  Description of Artificial Sequence: Synthetic peptide
HPDKIEYWR

SEQ ID NO: 7690 - protein, 9 aa, Artificial Sequence
  Description of Artificial Sequence: Synthetic peptide
TFGCIESMQ

SEQ ID NO: 7691 - protein, 9 aa, Artificial Sequence
  Description of Artificial Sequence: Synthetic peptide
EDGLIVYGP

SEQ ID NO: 7692 - protein, 9 aa, Artificial Sequence
  Description of Artificial Sequence: Synthetic peptide
DHIHIERAN

SEQ ID NO: 7693 - protein, 9 aa, Artificial Sequence
  Description of Artificial Sequence: Synthetic peptide
GCMCIRHAY

SEQ ID NO: 7694 - protein, 9 aa, Artificial Sequence
  Description of Artificial Sequence: Synthetic peptide
APIPINMEG

SEQ ID NO: 7695 - protein, 9 aa, Artificial Sequence
  Description of Artificial Sequence: Synthetic peptide
QMNAIQLCV

SEQ ID NO: 7696 - protein, 9 aa, Artificial Sequence
  Description of Artificial Sequence: Synthetic peptide
SQSQIRQAD

SEQ ID NO: 7697 - protein, 9 aa, Artificial Sequence
  Description of Artificial Sequence: Synthetic peptide
PIVLIHYDA

SEQ ID NO: 7698 - protein, 9 aa, Artificial Sequence
  Description of Artificial Sequence: Synthetic peptide
VADWIGHTP

SEQ ID NO: 7699 - protein, 9 aa, Artificial Sequence
  Description of Artificial Sequence: Synthetic peptide
GSNSITRDT

SEQ ID NO: 7700 - protein, 9 aa, Artificial Sequence
  Description of Artificial Sequence: Synthetic peptide
QWEDITKCS

SEQ ID NO: 7701 - protein, 9 aa, Artificial Sequence
  Description of Artificial Sequence: Synthetic peptide
EDQWISNPF

SEQ ID NO: 7702 - protein, 9 aa, Artificial Sequence
  Description of Artificial Sequence: Synthetic peptide
QCGFIRLNE

SEQ ID NO: 7703 - protein, 9 aa, Artificial Sequence
  Description of Artificial Sequence: Synthetic peptide
DSDPITVDL

SEQ ID NO: 7704 - protein, 9 aa, Artificial Sequence
  Description of Artificial Sequence: Synthetic peptide
EIGIIRHGH

SEQ ID NO: 7705 - protein, 9 aa, Artificial Sequence
  Description of Artificial Sequence: Synthetic peptide
FQTLILSGL

SEQ ID NO: 7706 - protein, 9 aa, Artificial Sequence
  Description of Artificial Sequence: Synthetic peptide
DNNMIVRCA

SEQ ID NO: 7707 - protein, 9 aa, Artificial Sequence
  Description of Artificial Sequence: Synthetic peptide
MAPDIPHCR

SEQ ID NO: 7708 - protein, 9 aa, Artificial Sequence
  Description of Artificial Sequence: Synthetic peptide
MDADIPHCR

SEQ ID NO: 7709 - protein, 9 aa, Artificial Sequence
  Description of Artificial Sequence: Synthetic peptide
MDPAIPHCR

SEQ ID NO: 7710 - protein, 9 aa, Artificial Sequence
  Description of Artificial Sequence: Synthetic peptide
MDPDIAHCR

SEQ ID NO: 7711 - protein, 9 aa, Artificial Sequence
  Description of Artificial Sequence: Synthetic peptide
MDPDILHCR

SEQ ID NO: 7712 - protein, 9 aa, Artificial Sequence
  Description of Artificial Sequence: Synthetic peptide
MDPDIPHCC

SEQ ID NO: 7713 - protein, 9 aa, Artificial Sequence
  Description of Artificial Sequence: Synthetic peptide
MDPDIPHCG

SEQ ID NO: 7714 - protein, 9 aa, Artificial Sequence
  Description of Artificial Sequence: Synthetic peptide
MDPDIPHCH

SEQ ID NO: 7715 - protein, 9 aa, Artificial Sequence
  Description of Artificial Sequence: Synthetic peptide
MDPDIPHCL

SEQ ID NO: 7716 - protein, 9 aa, Artificial Sequence
  Description of Artificial Sequence: Synthetic peptide
MDPDIPHCR

SEQ ID NO: 7717 - protein, 9 aa, Artificial Sequence
  Description of Artificial Sequence: Synthetic peptide
MDPDIPHCS

SEQ ID NO: 7718 - protein, 9 aa, Artificial Sequence
  Description of Artificial Sequence: Synthetic peptide
MDPDIPHFR

SEQ ID NO: 7719 - protein, 9 aa, Artificial Sequence
  Description of Artificial Sequence: Synthetic peptide
MDPDIPHGR

SEQ ID NO: 7720 - protein, 9 aa, Artificial Sequence
  Description of Artificial Sequence: Synthetic peptide
MDPDIPHWR

SEQ ID NO: 7721 - protein, 9 aa, Artificial Sequence
  Description of Artificial Sequence: Synthetic peptide
MDPDIPNCR

SEQ ID NO: 7722 - protein, 9 aa, Artificial Sequence
  Description of Artificial Sequence: Synthetic peptide
MDPDIPPCR

SEQ ID NO: 7723 - protein, 9 aa, Artificial Sequence
  Description of Artificial Sequence: Synthetic peptide
MDPDIPRCR

SEQ ID NO: 7724 - protein, 9 aa, Artificial Sequence
  Description of Artificial Sequence: Synthetic peptide
MDPDIPYCR

SEQ ID NO: 7725 - protein, 9 aa, Artificial Sequence
  Description of Artificial Sequence: Synthetic peptide
MDPDIRHCR

SEQ ID NO: 7726 - protein, 9 aa, Artificial Sequence
  Description of Artificial Sequence: Synthetic peptide
MDPGIPHCR

SEQ ID NO: 7727 - protein, 9 aa, Artificial Sequence
  Description of Artificial Sequence: Synthetic peptide
MDPNIPHCR

SEQ ID NO: 7728 - protein, 9 aa, Artificial Sequence
  Description of Artificial Sequence: Synthetic peptide
MDPVIPHCR

SEQ ID NO: 7729 - protein, 9 aa, Artificial Sequence
  Description of Artificial Sequence: Synthetic peptide
MDPYIPHCR

SEQ ID NO: 7730 - protein, 9 aa, Artificial Sequence
  Description of Artificial Sequence: Synthetic peptide
MDTDIPHCR

SEQ ID NO: 7731 - protein, 9 aa, Artificial Sequence
  Description of Artificial Sequence: Synthetic peptide
MNPDIPHCR

SEQ ID NO: 7732 - protein, 9 aa, Artificial Sequence
  Description of Artificial Sequence: Synthetic peptide
MYPDIPHCR

SEQ ID NO: 7733 - protein, 9 aa, Artificial Sequence
  Description of Artificial Sequence: Synthetic peptide
VDPDIPHCR

SEQ ID NO: 7734 - protein, 9 aa, Artificial Sequence
  Description of Artificial Sequence: Synthetic peptide
HVDQHRVQA

SEQ ID NO: 7735 - protein, 9 aa, Artificial Sequence
  Description of Artificial Sequence: Synthetic peptide
MYLNYRHFA

SEQ ID NO: 7736 - protein, 9 aa, Artificial Sequence
  Description of Artificial Sequence: Synthetic peptide
AVASERQLR

SEQ ID NO: 7737 - protein, 9 aa, Artificial Sequence
  Description of Artificial Sequence: Synthetic peptide
LEQLDRCMY

SEQ ID NO: 7738 - protein, 9 aa, Artificial Sequence
  Description of Artificial Sequence: Synthetic peptide
LFHQGRFPM

SEQ ID NO: 7739 - protein, 9 aa, Artificial Sequence
  Description of Artificial Sequence: Synthetic peptide
CVCEMRTVD

SEQ ID NO: 7740 - protein, 9 aa, Artificial Sequence
  Description of Artificial Sequence: Synthetic peptide
NDCTCRAIM

SEQ ID NO: 7741 - protein, 9 aa, Artificial Sequence
  Description of Artificial Sequence: Synthetic peptide
TIDVKRWGQ

SEQ ID NO: 7742 - protein, 9 aa, Artificial Sequence
  Description of Artificial Sequence: Synthetic peptide
EATYTRYMT

SEQ ID NO: 7743 - protein, 9 aa, Artificial Sequence
  Description of Artificial Sequence: Synthetic peptide
HSGYKRQMK

SEQ ID NO: 7744 - protein, 9 aa, Artificial Sequence
  Description of Artificial Sequence: Synthetic peptide
TYMEYRQHK

SEQ ID NO: 7745 - protein, 9 aa, Artificial Sequence
  Description of Artificial Sequence: Synthetic peptide
VDCWLRDPI

SEQ ID NO: 7746 - protein, 9 aa, Artificial Sequence
  Description of Artificial Sequence: Synthetic peptide
YKTEFRTKL

SEQ ID NO: 7747 - protein, 9 aa, Artificial Sequence
  Description of Artificial Sequence: Synthetic peptide
DPYNTRFRT

SEQ ID NO: 7748 - protein, 9 aa, Artificial Sequence
  Description of Artificial Sequence: Synthetic peptide
LNYMRRAMW

SEQ ID NO: 7749 - protein, 9 aa, Artificial Sequence
  Description of Artificial Sequence: Synthetic peptide
FAIWKRNES

SEQ ID NO: 7750 - protein, 9 aa, Artificial Sequence
  Description of Artificial Sequence: Synthetic peptide
WKDDLRSTY

SEQ ID NO: 7751 - protein, 9 aa, Artificial Sequence
  Description of Artificial Sequence: Synthetic peptide
ENQQRRNFG

SEQ ID NO: 7752 - protein, 9 aa, Artificial Sequence
  Description of Artificial Sequence: Synthetic peptide
IMPPKRYFV

SEQ ID NO: 7753 - protein, 9 aa, Artificial Sequence
  Description of Artificial Sequence: Synthetic peptide
VAADSRMMI

SEQ ID NO: 7754 - protein, 9 aa, Artificial Sequence
  Description of Artificial Sequence: Synthetic peptide
IMCHARMMA

SEQ ID NO: 7755 - protein, 9 aa, Artificial Sequence
  Description of Artificial Sequence: Synthetic peptide
RDIWERPCV

SEQ ID NO: 7756 - protein, 9 aa, Artificial Sequence
  Description of Artificial Sequence: Synthetic peptide
EHSSPREDN

SEQ ID NO: 7757 - protein, 9 aa, Artificial Sequence
  Description of Artificial Sequence: Synthetic peptide
EVHLFRGEG

SEQ ID NO: 7758 - protein, 9 aa, Artificial Sequence
  Description of Artificial Sequence: Synthetic peptide
MYTDMRCWR

SEQ ID NO: 7759 - protein, 9 aa, Artificial Sequence
  Description of Artificial Sequence: Synthetic peptide
LIHYCRCIN

SEQ ID NO: 7760 - protein, 9 aa, Artificial Sequence
  Description of Artificial Sequence: Synthetic peptide
HQCQSRSYI

SEQ ID NO: 7761 - protein, 9 aa, Artificial Sequence
  Description of Artificial Sequence: Synthetic peptide
GTAVSRQSK

SEQ ID NO: 7762 - protein, 9 aa, Artificial Sequence
  Description of Artificial Sequence: Synthetic peptide
VMFYWRYNS

SEQ ID NO: 7763 - protein, 9 aa, Artificial Sequence
  Description of Artificial Sequence: Synthetic peptide
FGDHLRVMY

SEQ ID NO: 7764 - protein, 9 aa, Artificial Sequence
  Description of Artificial Sequence: Synthetic peptide
NSEWLRYTF

SEQ ID NO: 7765 - protein, 9 aa, Artificial Sequence
  Description of Artificial Sequence: Synthetic peptide
AVHWHRKCE

SEQ ID NO: 7766 - protein, 9 aa, Artificial Sequence
  Description of Artificial Sequence: Synthetic peptide
PMELWRTWY

SEQ ID NO: 7767 - protein, 9 aa, Artificial Sequence
  Description of Artificial Sequence: Synthetic peptide
SQDCGRPES

SEQ ID NO: 7768 - protein, 9 aa, Artificial Sequence
  Description of Artificial Sequence: Synthetic peptide
AAKKGRDLH

SEQ ID NO: 7769 - protein, 9 aa, Artificial Sequence
  Description of Artificial Sequence: Synthetic peptide
QNLWYRPLT

SEQ ID NO: 7770 - protein, 9 aa, Artificial Sequence
  Description of Artificial Sequence: Synthetic peptide
TCYCHRAHE

SEQ ID NO: 7771 - protein, 9 aa, Artificial Sequence
  Description of Artificial Sequence: Synthetic peptide
LACTPRCIF

SEQ ID NO: 7772 - protein, 9 aa, Artificial Sequence
  Description of Artificial Sequence: Synthetic peptide
VAFGMRWLL

SEQ ID NO: 7773 - protein, 9 aa, Artificial Sequence
  Description of Artificial Sequence: Synthetic peptide
WAQCDRAVC

SEQ ID NO: 7774 - protein, 9 aa, Artificial Sequence
  Description of Artificial Sequence: Synthetic peptide
FCDIGRSGG

SEQ ID NO: 7775 - protein, 9 aa, Artificial Sequence
  Description of Artificial Sequence: Synthetic peptide
GHQWDRLLA

SEQ ID NO: 7776 - protein, 9 aa, Artificial Sequence
  Description of Artificial Sequence: Synthetic peptide
WLTEKRHFE

SEQ ID NO: 7777 - protein, 9 aa, Artificial Sequence
  Description of Artificial Sequence: Synthetic peptide
MTGQCRNSQ

SEQ ID NO: 7778 - protein, 9 aa, Artificial Sequence
  Description of Artificial Sequence: Synthetic peptide
IHPMMRENG

SEQ ID NO: 7779 - protein, 9 aa, Artificial Sequence
  Description of Artificial Sequence: Synthetic peptide
IFQLSRPAW

SEQ ID NO: 7780 - protein, 9 aa, Artificial Sequence
  Description of Artificial Sequence: Synthetic peptide
IKETWRVYF

SEQ ID NO: 7781 - protein, 9 aa, Artificial Sequence
  Description of Artificial Sequence: Synthetic peptide
NTNPGRYGC

SEQ ID NO: 7782 - protein, 9 aa, Artificial Sequence
  Description of Artificial Sequence: Synthetic peptide
DLVDLRSWM

SEQ ID NO: 7783 - protein, 9 aa, Artificial Sequence
  Description of Artificial Sequence: Synthetic peptide
CNEVCRNYL

SEQ ID NO: 7784 - protein, 9 aa, Artificial Sequence
  Description of Artificial Sequence: Synthetic peptide
GFTPDRCRN

SEQ ID NO: 7785 - protein, 9 aa, Artificial Sequence
  Description of Artificial Sequence: Synthetic peptide
DVPIHRVQL

SEQ ID NO: 7786 - protein, 9 aa, Artificial Sequence
  Description of Artificial Sequence: Synthetic peptide
TMEAHRFGS

SEQ ID NO: 7787 - protein, 9 aa, Artificial Sequence
  Description of Artificial Sequence: Synthetic peptide
GSATNRCGN

SEQ ID NO: 7788 - protein, 9 aa, Artificial Sequence
  Description of Artificial Sequence: Synthetic peptide
NSAECREFQ

SEQ ID NO: 7789 - protein, 9 aa, Artificial Sequence
  Description of Artificial Sequence: Synthetic peptide
VADTYRMWH

SEQ ID NO: 7790 - protein, 9 aa, Artificial Sequence
  Description of Artificial Sequence: Synthetic peptide
DYYLNRASH

SEQ ID NO: 7791 - protein, 9 aa, Artificial Sequence
  Description of Artificial Sequence: Synthetic peptide
NSKACRGCT

SEQ ID NO: 7792 - protein, 9 aa, Artificial Sequence
  Description of Artificial Sequence: Synthetic peptide
LHNSCRTLE

SEQ ID NO: 7793 - protein, 9 aa, Artificial Sequence
  Description of Artificial Sequence: Synthetic peptide
TVGSKRDLY

SEQ ID NO: 7794 - protein, 9 aa, Artificial Sequence
  Description of Artificial Sequence: Synthetic peptide
FNWFVRAYI

SEQ ID NO: 7795 - protein, 9 aa, Artificial Sequence
  Description of Artificial Sequence: Synthetic peptide
TNIKERTGS

SEQ ID NO: 7796 - protein, 9 aa, Artificial Sequence
  Description of Artificial Sequence: Synthetic peptide
TTYHHRNTL

SEQ ID NO: 7797 - protein, 9 aa, Artificial Sequence
  Description of Artificial Sequence: Synthetic peptide
MWTVARMFP

SEQ ID NO: 7798 - protein, 9 aa, Artificial Sequence
  Description of Artificial Sequence: Synthetic peptide
EQFADRAPR

SEQ ID NO: 7799 - protein, 9 aa, Artificial Sequence
  Description of Artificial Sequence: Synthetic peptide
LNELPRAEY

SEQ ID NO: 7800 - protein, 9 aa, Artificial Sequence
  Description of Artificial Sequence: Synthetic peptide
RAEWFRCQH

SEQ ID NO: 7801 - protein, 9 aa, Artificial Sequence
  Description of Artificial Sequence: Synthetic peptide
PANHARNPK

SEQ ID NO: 7802 - protein, 9 aa, Artificial Sequence
  Description of Artificial Sequence: Synthetic peptide
SWQQHRKMS

SEQ ID NO: 7803 - protein, 9 aa, Artificial Sequence
  Description of Artificial Sequence: Synthetic peptide
LPDHWRKFD

SEQ ID NO: 7804 - protein, 9 aa, Artificial Sequence
  Description of Artificial Sequence: Synthetic peptide
EDWLRRNIW

SEQ ID NO: 7805 - protein, 9 aa, Artificial Sequence
  Description of Artificial Sequence: Synthetic peptide
DAAMTRTVP

SEQ ID NO: 7806 - protein, 9 aa, Artificial Sequence
  Description of Artificial Sequence: Synthetic peptide
LLWMGRRRR

SEQ ID NO: 7807 - protein, 9 aa, Artificial Sequence
  Description of Artificial Sequence: Synthetic peptide
ATCWVRMGQ

SEQ ID NO: 7808 - protein, 9 aa, Artificial Sequence
  Description of Artificial Sequence: Synthetic peptide
WVKQKDVLC

SEQ ID NO: 7809 - protein, 9 aa, Artificial Sequence
  Description of Artificial Sequence: Synthetic peptide
MSLDTSVPF

SEQ ID NO: 7810 - protein, 9 aa, Artificial Sequence
  Description of Artificial Sequence: Synthetic peptide
TSHKMMVFS

SEQ ID NO: 7811 - protein, 9 aa, Artificial Sequence
  Description of Artificial Sequence: Synthetic peptide
NMKPKDVFR

SEQ ID NO: 7812 - protein, 9 aa, Artificial Sequence
  Description of Artificial Sequence: Synthetic peptide
LLAKYMVHT

SEQ ID NO: 7813 - protein, 9 aa, Artificial Sequence
  Description of Artificial Sequence: Synthetic peptide
QDCERQVFA

SEQ ID NO: 7814 - protein, 9 aa, Artificial Sequence
  Description of Artificial Sequence: Synthetic peptide
PTMLPHVKH

SEQ ID NO: 7815 - protein, 9 aa, Artificial Sequence
  Description of Artificial Sequence: Synthetic peptide
QGFSTDVKP

SEQ ID NO: 7816 - protein, 9 aa, Artificial Sequence
  Description of Artificial Sequence: Synthetic peptide
EPLLPAVGN

SEQ ID NO: 7817 - protein, 9 aa, Artificial Sequence
  Description of Artificial Sequence: Synthetic peptide
IAKDDAVRL

SEQ ID NO: 7818 - protein, 9 aa, Artificial Sequence
  Description of Artificial Sequence: Synthetic peptide
MENLKGVYD

SEQ ID NO: 7819 - protein, 9 aa, Artificial Sequence
  Description of Artificial Sequence: Synthetic peptide
QTNQVVVVE

SEQ ID NO: 7820 - protein, 9 aa, Artificial Sequence
  Description of Artificial Sequence: Synthetic peptide
GTTGHAVNE

SEQ ID NO: 7821 - protein, 9 aa, Artificial Sequence
  Description of Artificial Sequence: Synthetic peptide
AFLQTPVFS

SEQ ID NO: 7822 - protein, 9 aa, Artificial Sequence
  Description of Artificial Sequence: Synthetic peptide
ETAFQQVQV

SEQ ID NO: 7823 - protein, 9 aa, Artificial Sequence
  Description of Artificial Sequence: Synthetic peptide
TWHKQLVGV

SEQ ID NO: 7824 - protein, 9 aa, Artificial Sequence
  Description of Artificial Sequence: Synthetic peptide
TKYHYHVKV

SEQ ID NO: 7825 - protein, 9 aa, Artificial Sequence
  Description of Artificial Sequence: Synthetic peptide
RNDWQQVFS

SEQ ID NO: 7826 - protein, 9 aa, Artificial Sequence
  Description of Artificial Sequence: Synthetic peptide
QVGVTVVQR

SEQ ID NO: 7827 - protein, 9 aa, Artificial Sequence
  Description of Artificial Sequence: Synthetic peptide
DSHDMFVYK

SEQ ID NO: 7828 - protein, 9 aa, Artificial Sequence
  Description of Artificial Sequence: Synthetic peptide
MYLSFPVHE

SEQ ID NO: 7829 - protein, 9 aa, Artificial Sequence
  Description of Artificial Sequence: Synthetic peptide
PWEIEWVYW

SEQ ID NO: 7830 - protein, 9 aa, Artificial Sequence
  Description of Artificial Sequence: Synthetic peptide
HFADNQVVQ

SEQ ID NO: 7831 - protein, 9 aa, Artificial Sequence
  Description of Artificial Sequence: Synthetic peptide
MHQFLQVAQ

SEQ ID NO: 7832 - protein, 9 aa, Artificial Sequence
  Description of Artificial Sequence: Synthetic peptide
NAGMKGVDV

SEQ ID NO: 7833 - protein, 9 aa, Artificial Sequence
  Description of Artificial Sequence: Synthetic peptide
STQKVPVLA

SEQ ID NO: 7834 - protein, 9 aa, Artificial Sequence
  Description of Artificial Sequence: Synthetic peptide
GWDMLSVAK

SEQ ID NO: 7835 - protein, 9 aa, Artificial Sequence
  Description of Artificial Sequence: Synthetic peptide
RNLPTSVEA

SEQ ID NO: 7836 - protein, 9 aa, Artificial Sequence
  Description of Artificial Sequence: Synthetic peptide
GMSDCEVSF

SEQ ID NO: 7837 - protein, 9 aa, Artificial Sequence
  Description of Artificial Sequence: Synthetic peptide
GKLTVQVNH

SEQ ID NO: 7838 - protein, 9 aa, Artificial Sequence
  Description of Artificial Sequence: Synthetic peptide
LILQRNVKD

SEQ ID NO: 7839 - protein, 9 aa, Artificial Sequence
  Description of Artificial Sequence: Synthetic peptide
NAKEQVVNN

SEQ ID NO: 7840 - protein, 9 aa, Artificial Sequence
  Description of Artificial Sequence: Synthetic peptide
GDHKCHVEW

SEQ ID NO: 7841 - protein, 9 aa, Artificial Sequence
  Description of Artificial Sequence: Synthetic peptide
GFKYCEVDH

SEQ ID NO: 7842 - protein, 9 aa, Artificial Sequence
  Description of Artificial Sequence: Synthetic peptide
MFDMMSVLK

SEQ ID NO: 7843 - protein, 9 aa, Artificial Sequence
  Description of Artificial Sequence: Synthetic peptide
IVGINHVAW

SEQ ID NO: 7844 - protein, 9 aa, Artificial Sequence
  Description of Artificial Sequence: Synthetic peptide
MMNQCQVWN

SEQ ID NO: 7845 - protein, 9 aa, Artificial Sequence
  Description of Artificial Sequence: Synthetic peptide
QGQHVMVHS

SEQ ID NO: 7846 - protein, 9 aa, Artificial Sequence
  Description of Artificial Sequence: Synthetic peptide
NNCNMNVMK

SEQ ID NO: 7847 - protein, 9 aa, Artificial Sequence
  Description of Artificial Sequence: Synthetic peptide
EKHFMQVDR

SEQ ID NO: 7848 - protein, 9 aa, Artificial Sequence
  Description of Artificial Sequence: Synthetic peptide
PIAQDQVWS

SEQ ID NO: 7849 - protein, 9 aa, Artificial Sequence
  Description of Artificial Sequence: Synthetic peptide
ECHKCEVCV

SEQ ID NO: 7850 - protein, 9 aa, Artificial Sequence
  Description of Artificial Sequence: Synthetic peptide
PHAYMQVWR

SEQ ID NO: 7851 - protein, 9 aa, Artificial Sequence
  Description of Artificial Sequence: Synthetic peptide
MQVNLQVIE

SEQ ID NO: 7852 - protein, 9 aa, Artificial Sequence
  Description of Artificial Sequence: Synthetic peptide
TPQPMNVAT

SEQ ID NO: 7853 - protein, 9 aa, Artificial Sequence
  Description of Artificial Sequence: Synthetic peptide
AWMCRNVYC

SEQ ID NO: 7854 - protein, 9 aa, Artificial Sequence
  Description of Artificial Sequence: Synthetic peptide
CGYWLVVPW

SEQ ID NO: 7855 - protein, 9 aa, Artificial Sequence
  Description of Artificial Sequence: Synthetic peptide
QHTQQLVQN

SEQ ID NO: 7856 - protein, 9 aa, Artificial Sequence
  Description of Artificial Sequence: Synthetic peptide
CPEHNQVGI

SEQ ID NO: 7857 - protein, 9 aa, Artificial Sequence
  Description of Artificial Sequence: Synthetic peptide
HDEKQKVYG

SEQ ID NO: 7858 - protein, 9 aa, Artificial Sequence
  Description of Artificial Sequence: Synthetic peptide
EPFLKEVNV

SEQ ID NO: 7859 - protein, 9 aa, Artificial Sequence
  Description of Artificial Sequence: Synthetic peptide
AVTQLSVER

SEQ ID NO: 7860 - protein, 9 aa, Artificial Sequence
  Description of Artificial Sequence: Synthetic peptide
QHKTKCVDN

SEQ ID NO: 7861 - protein, 9 aa, Artificial Sequence
  Description of Artificial Sequence: Synthetic peptide
IHCNVLVNY

SEQ ID NO: 7862 - protein, 9 aa, Artificial Sequence
  Description of Artificial Sequence: Synthetic peptide
MDGHFSVGC

SEQ ID NO: 7863 - protein, 9 aa, Artificial Sequence
  Description of Artificial Sequence: Synthetic peptide
YHQLVQVNE

SEQ ID NO: 7864 - protein, 9 aa, Artificial Sequence
  Description of Artificial Sequence: Synthetic peptide
GQPVWCVCM

SEQ ID NO: 7865 - protein, 9 aa, Artificial Sequence
  Description of Artificial Sequence: Synthetic peptide
MIKPLLVVG

SEQ ID NO: 7866 - protein, 9 aa, Artificial Sequence
  Description of Artificial Sequence: Synthetic peptide
GLGWWNVHT

SEQ ID NO: 7867 - protein, 9 aa, Artificial Sequence
  Description of Artificial Sequence: Synthetic peptide
TMAQWTVHN

SEQ ID NO: 7868 - protein, 9 aa, Artificial Sequence
  Description of Artificial Sequence: Synthetic peptide
EPMPMPVWN

SEQ ID NO: 7869 - protein, 9 aa, Artificial Sequence
  Description of Artificial Sequence: Synthetic peptide
IPTFDGVEP

SEQ ID NO: 7870 - protein, 9 aa, Artificial Sequence
  Description of Artificial Sequence: Synthetic peptide
ELPDTEVPW

SEQ ID NO: 7871 - protein, 9 aa, Artificial Sequence
  Description of Artificial Sequence: Synthetic peptide
QAMLHHVWV

SEQ ID NO: 7872 - protein, 9 aa, Artificial Sequence
  Description of Artificial Sequence: Synthetic peptide
FTEWKPVFF

SEQ ID NO: 7873 - protein, 9 aa, Artificial Sequence
  Description of Artificial Sequence: Synthetic peptide
QAVTLEVVC

SEQ ID NO: 7874 - protein, 9 aa, Artificial Sequence
  Description of Artificial Sequence: Synthetic peptide
HECDTVVVN

SEQ ID NO: 7875 - protein, 9 aa, Artificial Sequence
  Description of Artificial Sequence: Synthetic peptide
CVNLMAVNN

SEQ ID NO: 7876 - protein, 9 aa, Artificial Sequence
  Description of Artificial Sequence: Synthetic peptide
QHQAFFVFT

SEQ ID NO: 7877 - protein, 9 aa, Artificial Sequence
  Description of Artificial Sequence: Synthetic peptide
ATEKQMVDH

SEQ ID NO: 7878 - protein, 9 aa, Artificial Sequence
  Description of Artificial Sequence: Synthetic peptide
TGMHPFVRG

SEQ ID NO: 7879 - protein, 9 aa, Artificial Sequence
  Description of Artificial Sequence: Synthetic peptide
QVMQEKVRC

SEQ ID NO: 7880 - protein, 9 aa, Artificial Sequence
  Description of Artificial Sequence: Synthetic peptide
DFPHMHVGT

SEQ ID NO: 7881 - protein, 9 aa, Artificial Sequence
  Description of Artificial Sequence: Synthetic peptide
NAGVVKVWP

SEQ ID NO: 7882 - protein, 9 aa, Artificial Sequence
  Description of Artificial Sequence: Synthetic peptide
EITQHFVKH

SEQ ID NO: 7883 - protein, 9 aa, Artificial Sequence
  Description of Artificial Sequence: Synthetic peptide
VADTWQVHC

SEQ ID NO: 7884 - protein, 9 aa, Artificial Sequence
  Description of Artificial Sequence: Synthetic peptide
SIYQKWVTN

SEQ ID NO: 7885 - protein, 9 aa, Artificial Sequence
  Description of Artificial Sequence: Synthetic peptide
PIKGVAVQE

SEQ ID NO: 7886 - protein, 9 aa, Artificial Sequence
  Description of Artificial Sequence: Synthetic peptide
IFSHPSVSG

SEQ ID NO: 7887 - protein, 9 aa, Artificial Sequence
  Description of Artificial Sequence: Synthetic peptide
ECSVHPVNC

SEQ ID NO: 7888 - protein, 9 aa, Artificial Sequence
  Description of Artificial Sequence: Synthetic peptide
DKMSLQVQI

SEQ ID NO: 7889 - protein, 9 aa, Artificial Sequence
  Description of Artificial Sequence: Synthetic peptide
EGEWLIVPV

SEQ ID NO: 7890 - protein, 9 aa, Artificial Sequence
  Description of Artificial Sequence: Synthetic peptide
TQNACKVRT

SEQ ID NO: 7891 - protein, 9 aa, Artificial Sequence
  Description of Artificial Sequence: Synthetic peptide
TGSLTDVIW

SEQ ID NO: 7892 - protein, 9 aa, Artificial Sequence
  Description of Artificial Sequence: Synthetic peptide
GSAMLMVIR

SEQ ID NO: 7893 - protein, 9 aa, Artificial Sequence
  Description of Artificial Sequence: Synthetic peptide
TAGEWIVQH

SEQ ID NO: 7894 - protein, 9 aa, Artificial Sequence
  Description of Artificial Sequence: Synthetic peptide
TGMSRYVQD

SEQ ID NO: 7895 - protein, 9 aa, Artificial Sequence
  Description of Artificial Sequence: Synthetic peptide
FAGFTPVWM

SEQ ID NO: 7896 - protein, 9 aa, Artificial Sequence
  Description of Artificial Sequence: Synthetic peptide
NMWYSFVMI

SEQ ID NO: 7897 - protein, 9 aa, Artificial Sequence
  Description of Artificial Sequence: Synthetic peptide
ETEHGSVYT

SEQ ID NO: 7898 - protein, 9 aa, Artificial Sequence
  Description of Artificial Sequence: Synthetic peptide
PSILPVVMF

SEQ ID NO: 7899 - protein, 9 aa, Artificial Sequence
  Description of Artificial Sequence: Synthetic peptide
PEYVKWVAD

SEQ ID NO: 7900 - protein, 9 aa, Artificial Sequence
  Description of Artificial Sequence: Synthetic peptide
TIHPAWVTL

SEQ ID NO: 7901 - protein, 9 aa, Artificial Sequence
  Description of Artificial Sequence: Synthetic peptide
QWFTKGVDE

SEQ ID NO: 7902 - protein, 9 aa, Artificial Sequence
  Description of Artificial Sequence: Synthetic peptide
CYAEEPVWP

SEQ ID NO: 7903 - protein, 9 aa, Artificial Sequence
  Description of Artificial Sequence: Synthetic peptide
QIMSAKVFE

SEQ ID NO: 7904 - protein, 9 aa, Artificial Sequence
  Description of Artificial Sequence: Synthetic peptide
MTTFCDVEA

SEQ ID NO: 7905 - protein, 9 aa, Artificial Sequence
  Description of Artificial Sequence: Synthetic peptide
FTGTPPVDM

SEQ ID NO: 7906 - protein, 9 aa, Artificial Sequence
  Description of Artificial Sequence: Synthetic peptide
ESWMCPVDY

SEQ ID NO: 7907 - protein, 9 aa, Artificial Sequence
  Description of Artificial Sequence: Synthetic peptide
DCTYCCVKA

SEQ ID NO: 7908 - protein, 9 aa, Artificial Sequence
  Description of Artificial Sequence: Synthetic peptide
AVVEHAVNR

SEQ ID NO: 7909 - protein, 9 aa, Artificial Sequence
  Description of Artificial Sequence: Synthetic peptide
MDYHCQVED

SEQ ID NO: 7910 - protein, 9 aa, Artificial Sequence
  Description of Artificial Sequence: Synthetic peptide
QPGVVPVPC

SEQ ID NO: 7911 - protein, 9 aa, Artificial Sequence
  Description of Artificial Sequence: Synthetic peptide
MPYPLNVKE

SEQ ID NO: 7912 - protein, 9 aa, Artificial Sequence
  Description of Artificial Sequence: Synthetic peptide
NVYATPVVC

SEQ ID NO: 7913 - protein, 9 aa, Artificial Sequence
  Description of Artificial Sequence: Synthetic peptide
NCHIDHVQD

SEQ ID NO: 7914 - protein, 9 aa, Artificial Sequence
  Description of Artificial Sequence: Synthetic peptide
VDMGVHVGS

SEQ ID NO: 7915 - protein, 9 aa, Artificial Sequence
  Description of Artificial Sequence: Synthetic peptide
VIKVNTVNP

SEQ ID NO: 7916 - protein, 9 aa, Artificial Sequence
  Description of Artificial Sequence: Synthetic peptide
DFKALDVQC

SEQ ID NO: 7917 - protein, 9 aa, Artificial Sequence
  Description of Artificial Sequence: Synthetic peptide
MSAQRYVQT

SEQ ID NO: 7918 - protein, 9 aa, Artificial Sequence
  Description of Artificial Sequence: Synthetic peptide
FCKCFMKHC

SEQ ID NO: 7919 - protein, 9 aa, Artificial Sequence
  Description of Artificial Sequence: Synthetic peptide
VIPEFMNHA

SEQ ID NO: 7920 - protein, 9 aa, Artificial Sequence
  Description of Artificial Sequence: Synthetic peptide
AVIHEKPHG

SEQ ID NO: 7921 - protein, 9 aa, Artificial Sequence
  Description of Artificial Sequence: Synthetic peptide
MLFDFEEHN

SEQ ID NO: 7922 - protein, 9 aa, Artificial Sequence
  Description of Artificial Sequence: Synthetic peptide
RCVQAHFHK

SEQ ID NO: 7923 - protein, 9 aa, Artificial Sequence
  Description of Artificial Sequence: Synthetic peptide
NPTDLFQHE

SEQ ID NO: 7924 - protein, 9 aa, Artificial Sequence
  Description of Artificial Sequence: Synthetic peptide
GEMTRCFHN

SEQ ID NO: 7925 - protein, 9 aa, Artificial Sequence
  Description of Artificial Sequence: Synthetic peptide
IAVASHAHG

SEQ ID NO: 7926 - protein, 9 aa, Artificial Sequence
  Description of Artificial Sequence: Synthetic peptide
WKWYGLPHH

SEQ ID NO: 7927 - protein, 9 aa, Artificial Sequence
  Description of Artificial Sequence: Synthetic peptide
SVTYHEWHP

SEQ ID NO: 7928 - protein, 9 aa, Artificial Sequence
  Description of Artificial Sequence: Synthetic peptide
TDHPWVLHG

SEQ ID NO: 7929 - protein, 9 aa, Artificial Sequence
  Description of Artificial Sequence: Synthetic peptide
AKEHMPHHM

SEQ ID NO: 7930 - protein, 9 aa, Artificial Sequence
  Description of Artificial Sequence: Synthetic peptide
GIHQLIHHC

SEQ ID NO: 7931 - protein, 9 aa, Artificial Sequence
  Description of Artificial Sequence: Synthetic peptide
EACMPWAHH

SEQ ID NO: 7932 - protein, 9 aa, Artificial Sequence
  Description of Artificial Sequence: Synthetic peptide
DVMQYQNHM

SEQ ID NO: 7933 - protein, 9 aa, Artificial Sequence
  Description of Artificial Sequence: Synthetic peptide
DVDFLKMHC

SEQ ID NO: 7934 - protein, 9 aa, Artificial Sequence
  Description of Artificial Sequence: Synthetic peptide
MYAGWLNHG

SEQ ID NO: 7935 - protein, 9 aa, Artificial Sequence
  Description of Artificial Sequence: Synthetic peptide
TNGVQIMHV

SEQ ID NO: 7936 - protein, 9 aa, Artificial Sequence
  Description of Artificial Sequence: Synthetic peptide
DGLSYEAHD

SEQ ID NO: 7937 - protein, 9 aa, Artificial Sequence
  Description of Artificial Sequence: Synthetic peptide
EHCYYKEHE

SEQ ID NO: 7938 - protein, 9 aa, Artificial Sequence
  Description of Artificial Sequence: Synthetic peptide
HPSWPTMHK

SEQ ID NO: 7939 - protein, 9 aa, Artificial Sequence
  Description of Artificial Sequence: Synthetic peptide
ISCIMKKHL

SEQ ID NO: 7940 - protein, 9 aa, Artificial Sequence
  Description of Artificial Sequence: Synthetic peptide
IWGTRSAHR

SEQ ID NO: 7941 - protein, 9 aa, Artificial Sequence
  Description of Artificial Sequence: Synthetic peptide
NQCWCPKHY

SEQ ID NO: 7942 - protein, 9 aa, Artificial Sequence
  Description of Artificial Sequence: Synthetic peptide
SFKWCPGHE

SEQ ID NO: 7943 - protein, 9 aa, Artificial Sequence
  Description of Artificial Sequence: Synthetic peptide
ADCFRPFHI

SEQ ID NO: 7944 - protein, 9 aa, Artificial Sequence
  Description of Artificial Sequence: Synthetic peptide
IQDCSTLHW

SEQ ID NO: 7945 - protein, 9 aa, Artificial Sequence
  Description of Artificial Sequence: Synthetic peptide
LQHFDLIHL

SEQ ID NO: 7946 - protein, 9 aa, Artificial Sequence
  Description of Artificial Sequence: Synthetic peptide
PQQCGGFHR

SEQ ID NO: 7947 - protein, 9 aa, Artificial Sequence
  Description of Artificial Sequence: Synthetic peptide
TWGLHHYHT

SEQ ID NO: 7948 - protein, 9 aa, Artificial Sequence
  Description of Artificial Sequence: Synthetic peptide
VNPPDMIHT

SEQ ID NO: 7949 - protein, 9 aa, Artificial Sequence
  Description of Artificial Sequence: Synthetic peptide
DKANKMMHG

SEQ ID NO: 7950 - protein, 9 aa, Artificial Sequence
  Description of Artificial Sequence: Synthetic peptide
ETMSEGIHC

SEQ ID NO: 7951 - protein, 9 aa, Artificial Sequence
  Description of Artificial Sequence: Synthetic peptide
FYPYTNCHH

SEQ ID NO: 7952 - protein, 9 aa, Artificial Sequence
  Description of Artificial Sequence: Synthetic peptide
PAAPLILHY

SEQ ID NO: 7953 - protein, 9 aa, Artificial Sequence
  Description of Artificial Sequence: Synthetic peptide
QCLNMMMHG

SEQ ID NO: 7954 - protein, 9 aa, Artificial Sequence
  Description of Artificial Sequence: Synthetic peptide
QVGTGMYHS

SEQ ID NO: 7955 - protein, 9 aa, Artificial Sequence
  Description of Artificial Sequence: Synthetic peptide
WDHYLPEHV

SEQ ID NO: 7956 - protein, 9 aa, Artificial Sequence
  Description of Artificial Sequence: Synthetic peptide
TVQDNDEHA

SEQ ID NO: 7957 - protein, 9 aa, Artificial Sequence
  Description of Artificial Sequence: Synthetic peptide
TKQFFTAHC

SEQ ID NO: 7958 - protein, 9 aa, Artificial Sequence
  Description of Artificial Sequence: Synthetic peptide
NFSVCPRHL

SEQ ID NO: 7959 - protein, 9 aa, Artificial Sequence
  Description of Artificial Sequence: Synthetic peptide
ITTDATGHF

SEQ ID NO: 7960 - protein, 9 aa, Artificial Sequence
  Description of Artificial Sequence: Synthetic peptide
STFHFQSHD

SEQ ID NO: 7961 - protein, 9 aa, Artificial Sequence
  Description of Artificial Sequence: Synthetic peptide
HMDHCQCHE

SEQ ID NO: 7962 - protein, 9 aa, Artificial Sequence
  Description of Artificial Sequence: Synthetic peptide
QYWWPATHD

SEQ ID NO: 7963 - protein, 9 aa, Artificial Sequence
  Description of Artificial Sequence: Synthetic peptide
LGEPYKAHD

SEQ ID NO: 7964 - protein, 9 aa, Artificial Sequence
  Description of Artificial Sequence: Synthetic peptide
ISNTMVEHG

SEQ ID NO: 7965 - protein, 9 aa, Artificial Sequence
  Description of Artificial Sequence: Synthetic peptide
VTAFTACHY

SEQ ID NO: 7966 - protein, 9 aa, Artificial Sequence
  Description of Artificial Sequence: Synthetic peptide
EWLSLYCHW

SEQ ID NO: 7967 - protein, 9 aa, Artificial Sequence
  Description of Artificial Sequence: Synthetic peptide
PIHTYKRHP

SEQ ID NO: 7968 - protein, 9 aa, Artificial Sequence
  Description of Artificial Sequence: Synthetic peptide
GYNYYWQHA

SEQ ID NO: 7969 - protein, 9 aa, Artificial Sequence
  Description of Artificial Sequence: Synthetic peptide
ATVHMPKHE

SEQ ID NO: 7970 - protein, 9 aa, Artificial Sequence
  Description of Artificial Sequence: Synthetic peptide
MFSAFSMHD

SEQ ID NO: 7971 - protein, 9 aa, Artificial Sequence
  Description of Artificial Sequence: Synthetic peptide
TCTNSEPHP

SEQ ID NO: 7972 - protein, 9 aa, Artificial Sequence
  Description of Artificial Sequence: Synthetic peptide
TIDWCEPHC

SEQ ID NO: 7973 - protein, 9 aa, Artificial Sequence
  Description of Artificial Sequence: Synthetic peptide
LMHGVMDHV

SEQ ID NO: 7974 - protein, 9 aa, Artificial Sequence
  Description of Artificial Sequence: Synthetic peptide
YITCQYSHH

SEQ ID NO: 7975 - protein, 9 aa, Artificial Sequence
  Description of Artificial Sequence: Synthetic peptide
LATTTSYHC

SEQ ID NO: 7976 - protein, 9 aa, Artificial Sequence
  Description of Artificial Sequence: Synthetic peptide
GTCLFKTHK

SEQ ID NO: 7977 - protein, 9 aa, Artificial Sequence
  Description of Artificial Sequence: Synthetic peptide
DSAKQWHHQ

SEQ ID NO: 7978 - protein, 9 aa, Artificial Sequence
  Description of Artificial Sequence: Synthetic peptide
SYAAFLHHG

SEQ ID NO: 7979 - protein, 9 aa, Artificial Sequence
  Description of Artificial Sequence: Synthetic peptide
PNCDPAHHD

SEQ ID NO: 7980 - protein, 9 aa, Artificial Sequence
  Description of Artificial Sequence: Synthetic peptide
FAPEFDNHC

SEQ ID NO: 7981 - protein, 9 aa, Artificial Sequence
  Description of Artificial Sequence: Synthetic peptide
QISMKGEHG

SEQ ID NO: 7982 - protein, 9 aa, Artificial Sequence
  Description of Artificial Sequence: Synthetic peptide
QLTTNDAHG

SEQ ID NO: 7983 - protein, 9 aa, Artificial Sequence
  Description of Artificial Sequence: Synthetic peptide
CMAQMVYHH

SEQ ID NO: 7984 - protein, 9 aa, Artificial Sequence
  Description of Artificial Sequence: Synthetic peptide
CIDVLFKHL

SEQ ID NO: 7985 - protein, 9 aa, Artificial Sequence
  Description of Artificial Sequence: Synthetic peptide
EAGKEGAHF

SEQ ID NO: 7986 - protein, 9 aa, Artificial Sequence
  Description of Artificial Sequence: Synthetic peptide
QYCNTDNHI

SEQ ID NO: 7987 - protein, 9 aa, Artificial Sequence
  Description of Artificial Sequence: Synthetic peptide
YLESKTIHA

SEQ ID NO: 7988 - protein, 9 aa, Artificial Sequence
  Description of Artificial Sequence: Synthetic peptide
PHQYGDEHQ

SEQ ID NO: 7989 - protein, 9 aa, Artificial Sequence
  Description of Artificial Sequence: Synthetic peptide
WPTMLSAHM

SEQ ID NO: 7990 - protein, 9 aa, Artificial Sequence
  Description of Artificial Sequence: Synthetic peptide
DQFCPFDHY

SEQ ID NO: 7991 - protein, 9 aa, Artificial Sequence
  Description of Artificial Sequence: Synthetic peptide
LPTQVYGHN

SEQ ID NO: 7992 - protein, 9 aa, Artificial Sequence
  Description of Artificial Sequence: Synthetic peptide
DTHPMSNHR

SEQ ID NO: 7993 - protein, 9 aa, Artificial Sequence
  Description of Artificial Sequence: Synthetic peptide
MGVITSIHQ

SEQ ID NO: 7994 - protein, 9 aa, Artificial Sequence
  Description of Artificial Sequence: Synthetic peptide
NAMTCSMHN

SEQ ID NO: 7995 - protein, 9 aa, Artificial Sequence
  Description of Artificial Sequence: Synthetic peptide
TIQHAFKHN

SEQ ID NO: 7996 - protein, 9 aa, Artificial Sequence
  Description of Artificial Sequence: Synthetic peptide
NVFPAETHV

SEQ ID NO: 7997 - protein, 9 aa, Artificial Sequence
  Description of Artificial Sequence: Synthetic peptide
TLEPAYRHA

SEQ ID NO: 7998 - protein, 9 aa, Artificial Sequence
  Description of Artificial Sequence: Synthetic peptide
YEICKHGHF

SEQ ID NO: 7999 - protein, 9 aa, Artificial Sequence
  Description of Artificial Sequence: Synthetic peptide
HSLVQQLHP

SEQ ID NO: 8000 - protein, 9 aa, Artificial Sequence
  Description of Artificial Sequence: Synthetic peptide
VPVATMIHH

SEQ ID NO: 8001 - protein, 9 aa, Artificial Sequence
  Description of Artificial Sequence: Synthetic peptide
RVDGADRHY

SEQ ID NO: 8002 - protein, 9 aa, Artificial Sequence
  Description of Artificial Sequence: Synthetic peptide
CHILDGLHD

SEQ ID NO: 8003 - protein, 9 aa, Artificial Sequence
  Description of Artificial Sequence: Synthetic peptide
MLGVAPGHL

SEQ ID NO: 8004 - protein, 9 aa, Artificial Sequence
  Description of Artificial Sequence: Synthetic peptide
ANLISQGHC

SEQ ID NO: 8005 - protein, 9 aa, Artificial Sequence
  Description of Artificial Sequence: Synthetic peptide
GSYIVQNHC

SEQ ID NO: 8006 - protein, 9 aa, Artificial Sequence
  Description of Artificial Sequence: Synthetic peptide
WPEAFHLHQ

SEQ ID NO: 8007 - protein, 9 aa, Artificial Sequence
  Description of Artificial Sequence: Synthetic peptide
CDFMFTRHI

SEQ ID NO: 8008 - protein, 9 aa, Artificial Sequence
  Description of Artificial Sequence: Synthetic peptide
HVWNDVFHM

SEQ ID NO: 8009 - protein, 9 aa, Artificial Sequence
  Description of Artificial Sequence: Synthetic peptide
ADYSMMWHM

SEQ ID NO: 8010 - protein, 9 aa, Artificial Sequence
  Description of Artificial Sequence: Synthetic peptide
WNWLKVMHE

SEQ ID NO: 8011 - protein, 9 aa, Artificial Sequence
  Description of Artificial Sequence: Synthetic peptide
PVTTKNCHE

SEQ ID NO: 8012 - protein, 9 aa, Artificial Sequence
  Description of Artificial Sequence: Synthetic peptide
FCHEVFSHT

SEQ ID NO: 8013 - protein, 9 aa, Artificial Sequence
  Description of Artificial Sequence: Synthetic peptide
IHKMNFDHL

SEQ ID NO: 8014 - protein, 9 aa, Artificial Sequence
  Description of Artificial Sequence: Synthetic peptide
WAIFGDIHH

SEQ ID NO: 8015 - protein, 9 aa, Artificial Sequence
  Description of Artificial Sequence: Synthetic peptide
QSGTCHYHD

SEQ ID NO: 8016 - protein, 9 aa, Artificial Sequence
  Description of Artificial Sequence: Synthetic peptide
WVYSHEKHY

SEQ ID NO: 8017 - protein, 9 aa, Artificial Sequence
  Description of Artificial Sequence: Synthetic peptide
DVKYATLHD

SEQ ID NO: 8018 - protein, 9 aa, Artificial Sequence
  Description of Artificial Sequence: Synthetic peptide
GTEMMGDHA

SEQ ID NO: 8019 - protein, 9 aa, Artificial Sequence
  Description of Artificial Sequence: Synthetic peptide
QTKVHQQHT

SEQ ID NO: 8020 - protein, 9 aa, Artificial Sequence
  Description of Artificial Sequence: Synthetic peptide
ASSSQYPHN

SEQ ID NO: 8021 - protein, 9 aa, Artificial Sequence
  Description of Artificial Sequence: Synthetic peptide
TSLCAKPHF

SEQ ID NO: 8022 - protein, 9 aa, Artificial Sequence
  Description of Artificial Sequence: Synthetic peptide
GYTQQDEHF

SEQ ID NO: 8023 - protein, 9 aa, Artificial Sequence
  Description of Artificial Sequence: Synthetic peptide
DHCHCIAHP

SEQ ID NO: 8024 - protein, 9 aa, Artificial Sequence
  Description of Artificial Sequence: Synthetic peptide
IPACGIMHE

SEQ ID NO: 8025 - protein, 9 aa, Artificial Sequence
  Description of Artificial Sequence: Synthetic peptide
TCNVSWKHE

SEQ ID NO: 8026 - protein, 9 aa, Artificial Sequence
  Description of Artificial Sequence: Synthetic peptide
TKGMWQQHS

SEQ ID NO: 8027 - protein, 9 aa, Artificial Sequence
  Description of Artificial Sequence: Synthetic peptide
SAGPFFDHY

SEQ ID NO: 8028 - protein, 9 aa, Artificial Sequence
  Description of Artificial Sequence: Synthetic peptide
HTVNAESHM

SEQ ID NO: 8029 - protein, 9 aa, Artificial Sequence
  Description of Artificial Sequence: Synthetic peptide
DDGSNTMHG

SEQ ID NO: 8030 - protein, 9 aa, Artificial Sequence
  Description of Artificial Sequence: Synthetic peptide
GVAQYLHHC

SEQ ID NO: 8031 - protein, 9 aa, Artificial Sequence
  Description of Artificial Sequence: Synthetic peptide
EFADYNFHF

SEQ ID NO: 8032 - protein, 9 aa, Artificial Sequence
  Description of Artificial Sequence: Synthetic peptide
NTCEGWSHF

SEQ ID NO: 8033 - protein, 9 aa, Artificial Sequence
  Description of Artificial Sequence: Synthetic peptide
FPKCAIWHY

SEQ ID NO: 8034 - protein, 9 aa, Artificial Sequence
  Description of Artificial Sequence: Synthetic peptide
AFGLTTGHT

SEQ ID NO: 8035 - protein, 9 aa, Artificial Sequence
  Description of Artificial Sequence: Synthetic peptide
STGSFSIHC

SEQ ID NO: 8036 - protein, 9 aa, Artificial Sequence
  Description of Artificial Sequence: Synthetic peptide
HHEFTNSHA

SEQ ID NO: 8037 - protein, 9 aa, Artificial Sequence
  Description of Artificial Sequence: Synthetic peptide
QVVIDPAHY

SEQ ID NO: 8038 - protein, 9 aa, Artificial Sequence
  Description of Artificial Sequence: Synthetic peptide
CAGMAWSHS

SEQ ID NO: 8039 - protein, 9 aa, Artificial Sequence
  Description of Artificial Sequence: Synthetic peptide
TVQWNFAHM

SEQ ID NO: 8040 - protein, 9 aa, Artificial Sequence
  Description of Artificial Sequence: Synthetic peptide
RCVQDHFHK

SEQ ID NO: 8041 - protein, 9 aa, Artificial Sequence
  Description of Artificial Sequence: Synthetic peptide
LLWMGQRHR

SEQ ID NO: 8042 - protein, 9 aa, Artificial Sequence
  Description of Artificial Sequence: Synthetic peptide
QQTWEQMQR

SEQ ID NO: 8043 - protein, 9 aa, Artificial Sequence
  Description of Artificial Sequence: Synthetic peptide
CAMPHYQVR

SEQ ID NO: 8044 - protein, 9 aa, Artificial Sequence
  Description of Artificial Sequence: Synthetic peptide
LGKVQTHIR

SEQ ID NO: 8045 - protein, 9 aa, Artificial Sequence
  Description of Artificial Sequence: Synthetic peptide
CSVWMQRDR

SEQ ID NO: 8046 - protein, 9 aa, Artificial Sequence
  Description of Artificial Sequence: Synthetic peptide
VFPKDEQFR

SEQ ID NO: 8047 - protein, 9 aa, Artificial Sequence
  Description of Artificial Sequence: Synthetic peptide
EHITEQDLR

SEQ ID NO: 8048 - protein, 9 aa, Artificial Sequence
  Description of Artificial Sequence: Synthetic peptide
DKTVQTSAR

SEQ ID NO: 8049 - protein, 9 aa, Artificial Sequence
  Description of Artificial Sequence: Synthetic peptide
GGMWQCEVR

SEQ ID NO: 8050 - protein, 9 aa, Artificial Sequence
  Description of Artificial Sequence: Synthetic peptide
LEKNSSQMR

SEQ ID NO: 8051 - protein, 9 aa, Artificial Sequence
  Description of Artificial Sequence: Synthetic peptide
CDAEAEFRR

SEQ ID NO: 8052 - protein, 9 aa, Artificial Sequence
  Description of Artificial Sequence: Synthetic peptide
MGGSCKQER

SEQ ID NO: 8053 - protein, 9 aa, Artificial Sequence
  Description of Artificial Sequence: Synthetic peptide
TCVIGKGRR

SEQ ID NO: 8054 - protein, 9 aa, Artificial Sequence
  Description of Artificial Sequence: Synthetic peptide
VAFFWQRCR

SEQ ID NO: 8055 - protein, 9 aa, Artificial Sequence
  Description of Artificial Sequence: Synthetic peptide
FAESMWCDR

SEQ ID NO: 8056 - protein, 9 aa, Artificial Sequence
  Description of Artificial Sequence: Synthetic peptide
FAQQDKQDR

SEQ ID NO: 8057 - protein, 9 aa, Artificial Sequence
  Description of Artificial Sequence: Synthetic peptide
DANWTVRRR

SEQ ID NO: 8058 - protein, 9 aa, Artificial Sequence
  Description of Artificial Sequence: Synthetic peptide
MCNGGIPAR

SEQ ID NO: 8059 - protein, 9 aa, Artificial Sequence
  Description of Artificial Sequence: Synthetic peptide
EGATAWQDR

SEQ ID NO: 8060 - protein, 9 aa, Artificial Sequence
  Description of Artificial Sequence: Synthetic peptide
SHIQLNAWR

SEQ ID NO: 8061 - protein, 9 aa, Artificial Sequence
  Description of Artificial Sequence: Synthetic peptide
IPAEWDSWR

SEQ ID NO: 8062 - protein, 9 aa, Artificial Sequence
  Description of Artificial Sequence: Synthetic peptide
DAHNDALAR

SEQ ID NO: 8063 - protein, 9 aa, Artificial Sequence
  Description of Artificial Sequence: Synthetic peptide
QPQSRNGAR

SEQ ID NO: 8064 - protein, 9 aa, Artificial Sequence
  Description of Artificial Sequence: Synthetic peptide
NWNHCHQWR

SEQ ID NO: 8065 - protein, 9 aa, Artificial Sequence
  Description of Artificial Sequence: Synthetic peptide
CWHFFGADR

SEQ ID NO: 8066 - protein, 9 aa, Artificial Sequence
  Description of Artificial Sequence: Synthetic peptide
CAMDNTMCR

SEQ ID NO: 8067 - protein, 9 aa, Artificial Sequence
  Description of Artificial Sequence: Synthetic peptide
TFVYGARDR

SEQ ID NO: 8068 - protein, 9 aa, Artificial Sequence
  Description of Artificial Sequence: Synthetic peptide
QLDTYMEGR

SEQ ID NO: 8069 - protein, 9 aa, Artificial Sequence
  Description of Artificial Sequence: Synthetic peptide
AATTHHSAR

SEQ ID NO: 8070 - protein, 9 aa, Artificial Sequence
  Description of Artificial Sequence: Synthetic peptide
YTNHYYNAR

SEQ ID NO: 8071 - protein, 9 aa, Artificial Sequence
  Description of Artificial Sequence: Synthetic peptide
VGIWFIPCR

SEQ ID NO: 8072 - protein, 9 aa, Artificial Sequence
  Description of Artificial Sequence: Synthetic peptide
WSEDMSQYR

SEQ ID NO: 8073 - protein, 9 aa, Artificial Sequence
  Description of Artificial Sequence: Synthetic peptide
MCSQTISMR

SEQ ID NO: 8074 - protein, 9 aa, Artificial Sequence
  Description of Artificial Sequence: Synthetic peptide
RGLAQDCCR

SEQ ID NO: 8075 - protein, 9 aa, Artificial Sequence
  Description of Artificial Sequence: Synthetic peptide
FCNKLTSVR

SEQ ID NO: 8076 - protein, 9 aa, Artificial Sequence
  Description of Artificial Sequence: Synthetic peptide
PTNYGWMWR

SEQ ID NO: 8077 - protein, 9 aa, Artificial Sequence
  Description of Artificial Sequence: Synthetic peptide
HTLQWEAVR

SEQ ID NO: 8078 - protein, 9 aa, Artificial Sequence
  Description of Artificial Sequence: Synthetic peptide
QCAHFYQTR

SEQ ID NO: 8079 - protein, 9 aa, Artificial Sequence
  Description of Artificial Sequence: Synthetic peptide
EWEGVSQFR

SEQ ID NO: 8080 - protein, 9 aa, Artificial Sequence
  Description of Artificial Sequence: Synthetic peptide
QAVIAVDGR

SEQ ID NO: 8081 - protein, 9 aa, Artificial Sequence
  Description of Artificial Sequence: Synthetic peptide
GITEQPLAR

SEQ ID NO: 8082 - protein, 9 aa, Artificial Sequence
  Description of Artificial Sequence: Synthetic peptide
GIVMLKCGR

SEQ ID NO: 8083 - protein, 9 aa, Artificial Sequence
  Description of Artificial Sequence: Synthetic peptide
TLLLVGKDR

SEQ ID NO: 8084 - protein, 9 aa, Artificial Sequence
  Description of Artificial Sequence: Synthetic peptide
GLWLNVAPR

SEQ ID NO: 8085 - protein, 9 aa, Artificial Sequence
  Description of Artificial Sequence: Synthetic peptide
QTEMKKCAR

SEQ ID NO: 8086 - protein, 9 aa, Artificial Sequence
  Description of Artificial Sequence: Synthetic peptide
GHIDLEIMR

SEQ ID NO: 8087 - protein, 9 aa, Artificial Sequence
  Description of Artificial Sequence: Synthetic peptide
RMTPNNCQR

SEQ ID NO: 8088 - protein, 9 aa, Artificial Sequence
  Description of Artificial Sequence: Synthetic peptide
TCGPKLTQR

SEQ ID NO: 8089 - protein, 9 aa, Artificial Sequence
  Description of Artificial Sequence: Synthetic peptide
HIGWMGWLR

SEQ ID NO: 8090 - protein, 9 aa, Artificial Sequence
  Description of Artificial Sequence: Synthetic peptide
QETHWAMMR

SEQ ID NO: 8091 - protein, 9 aa, Artificial Sequence
  Description of Artificial Sequence: Synthetic peptide
PYHNPWECR

SEQ ID NO: 8092 - protein, 9 aa, Artificial Sequence
  Description of Artificial Sequence: Synthetic peptide
YDLWGWSTR

SEQ ID NO: 8093 - protein, 9 aa, Artificial Sequence
  Description of Artificial Sequence: Synthetic peptide
QHYNSMIDR

SEQ ID NO: 8094 - protein, 9 aa, Artificial Sequence
  Description of Artificial Sequence: Synthetic peptide
TYMTNLGDR

SEQ ID NO: 8095 - protein, 9 aa, Artificial Sequence
  Description of Artificial Sequence: Synthetic peptide
GKLTFGTER

SEQ ID NO: 8096 - protein, 9 aa, Artificial Sequence
  Description of Artificial Sequence: Synthetic peptide
GVHDPLHDR

SEQ ID NO: 8097 - protein, 9 aa, Artificial Sequence
  Description of Artificial Sequence: Synthetic peptide
TTYLSMRDR

SEQ ID NO: 8098 - protein, 9 aa, Artificial Sequence
  Description of Artificial Sequence: Synthetic peptide
AHMNYCLSR

SEQ ID NO: 8099 - protein, 9 aa, Artificial Sequence
  Description of Artificial Sequence: Synthetic peptide
NYCKYNKMR

SEQ ID NO: 8100 - protein, 9 aa, Artificial Sequence
  Description of Artificial Sequence: Synthetic peptide
GVGPSHGER

SEQ ID NO: 8101 - protein, 9 aa, Artificial Sequence
  Description of Artificial Sequence: Synthetic peptide
AKISATWDR

SEQ ID NO: 8102 - protein, 9 aa, Artificial Sequence
  Description of Artificial Sequence: Synthetic peptide
INMEYLTDR

SEQ ID NO: 8103 - protein, 9 aa, Artificial Sequence
  Description of Artificial Sequence: Synthetic peptide
YTGHTNSGR

SEQ ID NO: 8104 - protein, 9 aa, Artificial Sequence
  Description of Artificial Sequence: Synthetic peptide
MHCLHQTMR

SEQ ID NO: 8105 - protein, 9 aa, Artificial Sequence
  Description of Artificial Sequence: Synthetic peptide
YWCPSQWWR

SEQ ID NO: 8106 - protein, 9 aa, Artificial Sequence
  Description of Artificial Sequence: Synthetic peptide
MLAFDPMGR

SEQ ID NO: 8107 - protein, 9 aa, Artificial Sequence
  Description of Artificial Sequence: Synthetic peptide
IIAVSMRGR

SEQ ID NO: 8108 - protein, 9 aa, Artificial Sequence
  Description of Artificial Sequence: Synthetic peptide
VWEDNPPFR

SEQ ID NO: 8109 - protein, 9 aa, Artificial Sequence
  Description of Artificial Sequence: Synthetic peptide
CTLMHSHTR

SEQ ID NO: 8110 - protein, 9 aa, Artificial Sequence
  Description of Artificial Sequence: Synthetic peptide
LLWMEQRRR

SEQ ID NO: 8111 - protein, 9 aa, Artificial Sequence
  Description of Artificial Sequence: Synthetic peptide
LLWMGQQRR

SEQ ID NO: 8112 - protein, 9 aa, Artificial Sequence
  Description of Artificial Sequence: Synthetic peptide
LLWMGQRCR

SEQ ID NO: 8113 - protein, 9 aa, Artificial Sequence
  Description of Artificial Sequence: Synthetic peptide
LLWMGQRRR

SEQ ID NO: 8114 - protein, 9 aa, Artificial Sequence
  Description of Artificial Sequence: Synthetic peptide
LLWMGQWRR

SEQ ID NO: 8115 - protein, 9 aa, Artificial Sequence
  Description of Artificial Sequence: Synthetic peptide
MDPDMPHCR

SEQ ID NO: 8116 - protein, 9 aa, Artificial Sequence
  Description of Artificial Sequence: Synthetic peptide
MDPDSPHCR

SEQ ID NO: 8117 - protein, 9 aa, Artificial Sequence
  Description of Artificial Sequence: Synthetic peptide
MDPDVPHCR

SEQ ID NO: 8118 - protein, 9 aa, Artificial Sequence
  Description of Artificial Sequence: Synthetic peptide
HWELVRCHD

SEQ ID NO: 8119 - protein, 9 aa, Artificial Sequence
  Description of Artificial Sequence: Synthetic peptide
SQSRTIIQA

SEQ ID NO: 8120 - protein, 9 aa, Artificial Sequence
  Description of Artificial Sequence: Synthetic peptide
KMAGIGCWD

SEQ ID NO: 8121 - protein, 9 aa, Artificial Sequence
  Description of Artificial Sequence: Synthetic peptide
KSIMMSKLD

SEQ ID NO: 8122 - protein, 9 aa, Artificial Sequence
  Description of Artificial Sequence: Synthetic peptide
ICIRGARTD

SEQ ID NO: 8123 - protein, 9 aa, Artificial Sequence
  Description of Artificial Sequence: Synthetic peptide
CCKSKEACA

SEQ ID NO: 8124 - protein, 9 aa, Artificial Sequence
  Description of Artificial Sequence: Synthetic peptide
RVAGEGIQS

SEQ ID NO: 8125 - protein, 9 aa, Artificial Sequence
  Description of Artificial Sequence: Synthetic peptide
DNYWIIPFA

SEQ ID NO: 8126 - protein, 9 aa, Artificial Sequence
  Description of Artificial Sequence: Synthetic peptide
TERDHKTIY

SEQ ID NO: 8127 - protein, 9 aa, Artificial Sequence
  Description of Artificial Sequence: Synthetic peptide
VKHTAVDVL

SEQ ID NO: 8128 - protein, 9 aa, Artificial Sequence
  Description of Artificial Sequence: Synthetic peptide
RGLSQDCCR

SEQ ID NO: 8129 - protein, 9 aa, Artificial Sequence
  Description of Artificial Sequence: Synthetic peptide
KMEGNMSEL

SEQ ID NO: 8130 - protein, 9 aa, Artificial Sequence
  Description of Artificial Sequence: Synthetic peptide
KNPPWICVW

SEQ ID NO: 8131 - protein, 9 aa, Artificial Sequence
  Description of Artificial Sequence: Synthetic peptide
GVFRPDSFR

SEQ ID NO: 8132 - protein, 9 aa, Artificial Sequence
  Description of Artificial Sequence: Synthetic peptide
AKCTIQNFQ

SEQ ID NO: 8133 - protein, 9 aa, Artificial Sequence
  Description of Artificial Sequence: Synthetic peptide
KTVTKEVTP

SEQ ID NO: 8134 - protein, 9 aa, Artificial Sequence
  Description of Artificial Sequence: Synthetic peptide
RTFYVMGTG

SEQ ID NO: 8135 - protein, 9 aa, Artificial Sequence
  Description of Artificial Sequence: Synthetic peptide
HWEMIRCHD

SEQ ID NO: 8136 - protein, 9 aa, Artificial Sequence
  Description of Artificial Sequence: Synthetic peptide
GKVQWSAQA

SEQ ID NO: 8137 - protein, 9 aa, Artificial Sequence
  Description of Artificial Sequence: Synthetic peptide
VAANSRMMI

SEQ ID NO: 8138 - protein, 9 aa, Artificial Sequence
  Description of Artificial Sequence: Synthetic peptide
KSPCYMSVQ

SEQ ID NO: 8139 - protein, 9 aa, Artificial Sequence
  Description of Artificial Sequence: Synthetic peptide
KSGKVWYVL

SEQ ID NO: 8140 - protein, 9 aa, Artificial Sequence
  Description of Artificial Sequence: Synthetic peptide
PWRARVGAR

SEQ ID NO: 8141 - protein, 9 aa, Artificial Sequence
  Description of Artificial Sequence: Synthetic peptide
RGLTQDCCR

SEQ ID NO: 8142 - protein, 9 aa, Artificial Sequence
  Description of Artificial Sequence: Synthetic peptide
RQYFEDSAG

SEQ ID NO: 8143 - protein, 9 aa, Artificial Sequence
  Description of Artificial Sequence: Synthetic peptide
KSVQVYWHP

SEQ ID NO: 8144 - protein, 9 aa, Artificial Sequence
  Description of Artificial Sequence: Synthetic peptide
IPINDREWG

SEQ ID NO: 8145 - protein, 9 aa, Artificial Sequence
  Description of Artificial Sequence: Synthetic peptide
QIRSLITHA

SEQ ID NO: 8146 - protein, 9 aa, Artificial Sequence
  Description of Artificial Sequence: Synthetic peptide
RMTPHNCQR

SEQ ID NO: 8147 - protein, 9 aa, Artificial Sequence
  Description of Artificial Sequence: Synthetic peptide
EACYWGHCS

SEQ ID NO: 8148 - protein, 9 aa, Artificial Sequence
  Description of Artificial Sequence: Synthetic peptide
MMAVIRQKS

SEQ ID NO: 8149 - protein, 9 aa, Artificial Sequence
  Description of Artificial Sequence: Synthetic peptide
LSAKQRFFC

SEQ ID NO: 8150 - protein, 9 aa, Artificial Sequence
  Description of Artificial Sequence: Synthetic peptide
KFNTKYQLM

SEQ ID NO: 8151 - protein, 9 aa, Artificial Sequence
  Description of Artificial Sequence: Synthetic peptide
QNKHNWWIT

SEQ ID NO: 8152 - protein, 9 aa, Artificial Sequence
  Description of Artificial Sequence: Synthetic peptide
SRLPVHKCP

SEQ ID NO: 8153 - protein, 9 aa, Artificial Sequence
  Description of Artificial Sequence: Synthetic peptide
IRNRYAQAP

SEQ ID NO: 8154 - protein, 9 aa, Artificial Sequence
  Description of Artificial Sequence: Synthetic peptide
KVNCRMTIM

SEQ ID NO: 8155 - protein, 9 aa, Artificial Sequence
  Description of Artificial Sequence: Synthetic peptide
KSYLIANRH

SEQ ID NO: 8156 - protein, 9 aa, Artificial Sequence
  Description of Artificial Sequence: Synthetic peptide
KTTFDVTCY

SEQ ID NO: 8157 - protein, 9 aa, Artificial Sequence
  Description of Artificial Sequence: Synthetic peptide
MEDRVFACC

SEQ ID NO: 8158 - protein, 9 aa, Artificial Sequence
  Description of Artificial Sequence: Synthetic peptide
NLNNLVSCR

SEQ ID NO: 8159 - protein, 9 aa, Artificial Sequence
  Description of Artificial Sequence: Synthetic peptide
DAIWEHIRL

SEQ ID NO: 8160 - protein, 9 aa, Artificial Sequence
  Description of Artificial Sequence: Synthetic peptide
KWAIVGYAL

SEQ ID NO: 8161 - protein, 9 aa, Artificial Sequence
  Description of Artificial Sequence: Synthetic peptide
KFGFMYSEF

SEQ ID NO: 8162 - protein, 9 aa, Artificial Sequence
  Description of Artificial Sequence: Synthetic peptide
KSTMLEHHA

SEQ ID NO: 8163 - protein, 9 aa, Artificial Sequence
  Description of Artificial Sequence: Synthetic peptide
GRWMCNEAA

SEQ ID NO: 8164 - protein, 9 aa, Artificial Sequence
  Description of Artificial Sequence: Synthetic peptide
KDHQLWGVW

SEQ ID NO: 8165 - protein, 9 aa, Artificial Sequence
  Description of Artificial Sequence: Synthetic peptide
ASSFCKFTS

SEQ ID NO: 8166 - protein, 9 aa, Artificial Sequence
  Description of Artificial Sequence: Synthetic peptide
PKRIRYRTT

SEQ ID NO: 8167 - protein, 9 aa, Artificial Sequence
  Description of Artificial Sequence: Synthetic peptide
TKITMPGYQ

SEQ ID NO: 8168 - protein, 9 aa, Artificial Sequence
  Description of Artificial Sequence: Synthetic peptide
TFHQSDYWA

SEQ ID NO: 8169 - protein, 9 aa, Artificial Sequence
  Description of Artificial Sequence: Synthetic peptide
GKRVGDTSC

SEQ ID NO: 8170 - protein, 9 aa, Artificial Sequence
  Description of Artificial Sequence: Synthetic peptide
FAQRDKQDR

SEQ ID NO: 8171 - protein, 9 aa, Artificial Sequence
  Description of Artificial Sequence: Synthetic peptide
KTYSAMHSP

SEQ ID NO: 8172 - protein, 9 aa, Artificial Sequence
  Description of Artificial Sequence: Synthetic peptide
TRAYYDSYS

SEQ ID NO: 8173 - protein, 9 aa, Artificial Sequence
  Description of Artificial Sequence: Synthetic peptide
RMTPNNFQR

SEQ ID NO: 8174 - protein, 9 aa, Artificial Sequence
  Description of Artificial Sequence: Synthetic peptide
KWGNEGRMS

SEQ ID NO: 8175 - protein, 9 aa, Artificial Sequence
  Description of Artificial Sequence: Synthetic peptide
TVRHRMDAY

SEQ ID NO: 8176 - protein, 9 aa, Artificial Sequence
  Description of Artificial Sequence: Synthetic peptide
RQQRNHASS

SEQ ID NO: 8177 - protein, 9 aa, Artificial Sequence
  Description of Artificial Sequence: Synthetic peptide
TISQIPLVR

SEQ ID NO: 8178 - protein, 9 aa, Artificial Sequence
  Description of Artificial Sequence: Synthetic peptide
FNWLVRAYI

SEQ ID NO: 8179 - protein, 9 aa, Artificial Sequence
  Description of Artificial Sequence: Synthetic peptide
MYTGRRCWR

SEQ ID NO: 8180 - protein, 9 aa, Artificial Sequence
  Description of Artificial Sequence: Synthetic peptide
QCHRGYIYE

SEQ ID NO: 8181 - protein, 9 aa, Artificial Sequence
  Description of Artificial Sequence: Synthetic peptide
NYFAFWVFI

SEQ ID NO: 8182 - protein, 9 aa, Artificial Sequence
  Description of Artificial Sequence: Synthetic peptide
AIDCCYSCG

SEQ ID NO: 8183 - protein, 9 aa, Artificial Sequence
  Description of Artificial Sequence: Synthetic peptide
KIYMQCDRE

SEQ ID NO: 8184 - protein, 9 aa, Artificial Sequence
  Description of Artificial Sequence: Synthetic peptide
DRKQAGQIY

SEQ ID NO: 8185 - protein, 9 aa, Artificial Sequence
  Description of Artificial Sequence: Synthetic peptide
RDVGEENSA

SEQ ID NO: 8186 - protein, 9 aa, Artificial Sequence
  Description of Artificial Sequence: Synthetic peptide
IAKKNFMKT

SEQ ID NO: 8187 - protein, 9 aa, Artificial Sequence
  Description of Artificial Sequence: Synthetic peptide
RKAYLNYVA

SEQ ID NO: 8188 - protein, 9 aa, Artificial Sequence
  Description of Artificial Sequence: Synthetic peptide
EMHAFWQRG

SEQ ID NO: 8189 - protein, 9 aa, Artificial Sequence
  Description of Artificial Sequence: Synthetic peptide
FCKCFVKHC

SEQ ID NO: 8190 - protein, 9 aa, Artificial Sequence
  Description of Artificial Sequence: Synthetic peptide
RKKVEVVVA

SEQ ID NO: 8191 - protein, 9 aa, Artificial Sequence
  Description of Artificial Sequence: Synthetic peptide
NTRTGNDRL

SEQ ID NO: 8192 - protein, 9 aa, Artificial Sequence
  Description of Artificial Sequence: Synthetic peptide
LADCMINHH

SEQ ID NO: 8193 - protein, 9 aa, Artificial Sequence
  Description of Artificial Sequence: Synthetic peptide
LDTKTLASS

SEQ ID NO: 8194 - protein, 9 aa, Artificial Sequence
  Description of Artificial Sequence: Synthetic peptide
IVDSKVICV

SEQ ID NO: 8195 - protein, 9 aa, Artificial Sequence
  Description of Artificial Sequence: Synthetic peptide
RTFMKDMCE

SEQ ID NO: 8196 - protein, 9 aa, Artificial Sequence
  Description of Artificial Sequence: Synthetic peptide
DAHSPWQVI

SEQ ID NO: 8197 - protein, 9 aa, Artificial Sequence
  Description of Artificial Sequence: Synthetic peptide
TRHPTITMH

SEQ ID NO: 8198 - protein, 9 aa, Artificial Sequence
  Description of Artificial Sequence: Synthetic peptide
SSRHRGGCQ

SEQ ID NO: 8199 - protein, 9 aa, Artificial Sequence
  Description of Artificial Sequence: Synthetic peptide
RCTDHGESI

SEQ ID NO: 8200 - protein, 9 aa, Artificial Sequence
  Description of Artificial Sequence: Synthetic peptide
SSMCSGSLL

SEQ ID NO: 8201 - protein, 9 aa, Artificial Sequence
  Description of Artificial Sequence: Synthetic peptide
GKLTFDTER

SEQ ID NO: 8202 - protein, 9 aa, Artificial Sequence
  Description of Artificial Sequence: Synthetic peptide
RKDQSDLWS

SEQ ID NO: 8203 - protein, 9 aa, Artificial Sequence
  Description of Artificial Sequence: Synthetic peptide
RSMWSAFKH

SEQ ID NO: 8204 - protein, 9 aa, Artificial Sequence
  Description of Artificial Sequence: Synthetic peptide
FRLDYNYKN

SEQ ID NO: 8205 - protein, 9 aa, Artificial Sequence
  Description of Artificial Sequence: Synthetic peptide
RKKVEVVGE

SEQ ID NO: 8206 - protein, 9 aa, Artificial Sequence
  Description of Artificial Sequence: Synthetic peptide
GYNYYWQHV

SEQ ID NO: 8207 - protein, 9 aa, Artificial Sequence
  Description of Artificial Sequence: Synthetic peptide
TKLMYNTVD

SEQ ID NO: 8208 - protein, 9 aa, Artificial Sequence
  Description of Artificial Sequence: Synthetic peptide
KTLHMPESK

SEQ ID NO: 8209 - protein, 9 aa, Artificial Sequence
  Description of Artificial Sequence: Synthetic peptide
GRPVWCVCM

SEQ ID NO: 8210 - protein, 9 aa, Artificial Sequence
  Description of Artificial Sequence: Synthetic peptide
MVHRVQGDD

SEQ ID NO: 8211 - protein, 9 aa, Artificial Sequence
  Description of Artificial Sequence: Synthetic peptide
ATRYQICGE

SEQ ID NO: 8212 - protein, 9 aa, Artificial Sequence
  Description of Artificial Sequence: Synthetic peptide
DIRWLPYDL

SEQ ID NO: 8213 - protein, 9 aa, Artificial Sequence
  Description of Artificial Sequence: Synthetic peptide
HMHNLSVKP

SEQ ID NO: 8214 - protein, 9 aa, Artificial Sequence
  Description of Artificial Sequence: Synthetic peptide
THRTMDDYF

SEQ ID NO: 8215 - protein, 9 aa, Artificial Sequence
  Description of Artificial Sequence: Synthetic peptide
NYFTFWVFI

SEQ ID NO: 8216 - protein, 9 aa, Artificial Sequence
  Description of Artificial Sequence: Synthetic peptide
HGCKCQYSF

SEQ ID NO: 8217 - protein, 9 aa, Artificial Sequence
  Description of Artificial Sequence: Synthetic peptide
VSANEDRAG

SEQ ID NO: 8218 - protein, 9 aa, Artificial Sequence
  Description of Artificial Sequence: Synthetic peptide
YPVNMMPPL

SEQ ID NO: 8219 - protein, 9 aa, Artificial Sequence
  Description of Artificial Sequence: Synthetic peptide
GFRRTHVDQ

SEQ ID NO: 8220 - protein, 9 aa, Artificial Sequence
  Description of Artificial Sequence: Synthetic peptide
CWMLHHRCS

SEQ ID NO: 8221 - protein, 9 aa, Artificial Sequence
  Description of Artificial Sequence: Synthetic peptide
CVNLMPVNN

SEQ ID NO: 8222 - protein, 9 aa, Artificial Sequence
  Description of Artificial Sequence: Synthetic peptide
TMRAGLENS

SEQ ID NO: 8223 - protein, 9 aa, Artificial Sequence
  Description of Artificial Sequence: Synthetic peptide
QGFSTDAKP

SEQ ID NO: 8224 - protein, 9 aa, Artificial Sequence
  Description of Artificial Sequence: Synthetic peptide
QIVSCDTET

SEQ ID NO: 8225 - protein, 9 aa, Artificial Sequence
  Description of Artificial Sequence: Synthetic peptide
QKGMMLDYA

SEQ ID NO: 8226 - protein, 9 aa, Artificial Sequence
  Description of Artificial Sequence: Synthetic peptide
DSHRCLKAA

SEQ ID NO: 8227 - protein, 9 aa, Artificial Sequence
  Description of Artificial Sequence: Synthetic peptide
NTSEMLMAQ

SEQ ID NO: 8228 - protein, 9 aa, Artificial Sequence
  Description of Artificial Sequence: Synthetic peptide
GKIARDQLN

SEQ ID NO: 8229 - protein, 9 aa, Artificial Sequence
  Description of Artificial Sequence: Synthetic peptide
QYWWPTTHD

SEQ ID NO: 8230 - protein, 9 aa, Artificial Sequence
  Description of Artificial Sequence: Synthetic peptide
KTNFGDAIE

SEQ ID NO: 8231 - protein, 9 aa, Artificial Sequence
  Description of Artificial Sequence: Synthetic peptide
YIYMMLNLH

SEQ ID NO: 8232 - protein, 9 aa, Artificial Sequence
  Description of Artificial Sequence: Synthetic peptide
QWFAKGVGE

SEQ ID NO: 8233 - protein, 9 aa, Artificial Sequence
  Description of Artificial Sequence: Synthetic peptide
QLMSCANVE

SEQ ID NO: 8234 - protein, 9 aa, Artificial Sequence
  Description of Artificial Sequence: Synthetic peptide
DIEFCMKQY

SEQ ID NO: 8235 - protein, 9 aa, Artificial Sequence
  Description of Artificial Sequence: Synthetic peptide
DYEKFVKWM

SEQ ID NO: 8236 - protein, 9 aa, Artificial Sequence
  Description of Artificial Sequence: Synthetic peptide
FCNYAAMSP

SEQ ID NO: 8237 - protein, 9 aa, Artificial Sequence
  Description of Artificial Sequence: Synthetic peptide
CYWSMTNCT

SEQ ID NO: 8238 - protein, 9 aa, Artificial Sequence
  Description of Artificial Sequence: Synthetic peptide
KWPVTANLH

SEQ ID NO: 8239 - protein, 9 aa, Artificial Sequence
  Description of Artificial Sequence: Synthetic peptide
DTRHKWCLE

SEQ ID NO: 8240 - protein, 9 aa, Artificial Sequence
  Description of Artificial Sequence: Synthetic peptide
FCVKSPRVD

SEQ ID NO: 8241 - protein, 9 aa, Artificial Sequence
  Description of Artificial Sequence: Synthetic peptide
DAIQWGSWQ

SEQ ID NO: 8242 - protein, 9 aa, Artificial Sequence
  Description of Artificial Sequence: Synthetic peptide
SALYRRGHV

SEQ ID NO: 8243 - protein, 9 aa, Artificial Sequence
  Description of Artificial Sequence: Synthetic peptide
FMTVRNWAG

SEQ ID NO: 8244 - protein, 9 aa, Artificial Sequence
  Description of Artificial Sequence: Synthetic peptide
KISTTWADT

SEQ ID NO: 8245 - protein, 9 aa, Artificial Sequence
  Description of Artificial Sequence: Synthetic peptide
MHNAHVIIE

SEQ ID NO: 8246 - protein, 9 aa, Artificial Sequence
  Description of Artificial Sequence: Synthetic peptide
MTGCRETVD

SEQ ID NO: 8247 - protein, 9 aa, Artificial Sequence
  Description of Artificial Sequence: Synthetic peptide
QYKWHDVGV

SEQ ID NO: 8248 - protein, 9 aa, Artificial Sequence
  Description of Artificial Sequence: Synthetic peptide
VACDMCLVQ

SEQ ID NO: 8249 - protein, 9 aa, Artificial Sequence
  Description of Artificial Sequence: Synthetic peptide
KSEWTCCPH

SEQ ID NO: 8250 - protein, 9 aa, Artificial Sequence
  Description of Artificial Sequence: Synthetic peptide
ARKPCNGWD

SEQ ID NO: 8251 - protein, 9 aa, Artificial Sequence
  Description of Artificial Sequence: Synthetic peptide
TRYPTIAMH

SEQ ID NO: 8252 - protein, 9 aa, Artificial Sequence
  Description of Artificial Sequence: Synthetic peptide
TFMFNSKWS

SEQ ID NO: 8253 - protein, 9 aa, Artificial Sequence
  Description of Artificial Sequence: Synthetic peptide
RAMAYHIYW

SEQ ID NO: 8254 - protein, 9 aa, Artificial Sequence
  Description of Artificial Sequence: Synthetic peptide
LYNMRMKDR

SEQ ID NO: 8255 - protein, 9 aa, Artificial Sequence
  Description of Artificial Sequence: Synthetic peptide
DIWWTLTRD

SEQ ID NO: 8256 - protein, 9 aa, Artificial Sequence
  Description of Artificial Sequence: Synthetic peptide
YHVHMMPPL

SEQ ID NO: 8257 - protein, 9 aa, Artificial Sequence
  Description of Artificial Sequence: Synthetic peptide
KSGSCAMRV

SEQ ID NO: 8258 - protein, 9 aa, Artificial Sequence
  Description of Artificial Sequence: Synthetic peptide
TRWTEKRQA

SEQ ID NO: 8259 - protein, 9 aa, Artificial Sequence
  Description of Artificial Sequence: Synthetic peptide
QLMPCTNVE

SEQ ID NO: 8260 - protein, 9 aa, Artificial Sequence
  Description of Artificial Sequence: Synthetic peptide
MGAMKSDDF

SEQ ID NO: 8261 - protein, 9 aa, Artificial Sequence
  Description of Artificial Sequence: Synthetic peptide
AMKSHGCLT

SEQ ID NO: 8262 - protein, 9 aa, Artificial Sequence
  Description of Artificial Sequence: Synthetic peptide
QNGPILTSR

SEQ ID NO: 8263 - protein, 9 aa, Artificial Sequence
  Description of Artificial Sequence: Synthetic peptide
YCCNQEPFT

SEQ ID NO: 8264 - protein, 9 aa, Artificial Sequence
  Description of Artificial Sequence: Synthetic peptide
NWCTMYRYC

SEQ ID NO: 8265 - protein, 9 aa, Artificial Sequence
  Description of Artificial Sequence: Synthetic peptide
KDPDFYDWP

SEQ ID NO: 8266 - protein, 9 aa, Artificial Sequence
  Description of Artificial Sequence: Synthetic peptide
LWIKQHVKC

SEQ ID NO: 8267 - protein, 9 aa, Artificial Sequence
  Description of Artificial Sequence: Synthetic peptide
TRLEIEYMG

SEQ ID NO: 8268 - protein, 9 aa, Artificial Sequence
  Description of Artificial Sequence: Synthetic peptide
DMTHTGIMS

SEQ ID NO: 8269 - protein, 9 aa, Artificial Sequence
  Description of Artificial Sequence: Synthetic peptide
SMHMRVCYT

SEQ ID NO: 8270 - protein, 9 aa, Artificial Sequence
  Description of Artificial Sequence: Synthetic peptide
IANKSNCHK

SEQ ID NO: 8271 - protein, 9 aa, Artificial Sequence
  Description of Artificial Sequence: Synthetic peptide
VGRFNAYGE

SEQ ID NO: 8272 - protein, 9 aa, Artificial Sequence
  Description of Artificial Sequence: Synthetic peptide
GLWLNVTPR

SEQ ID NO: 8273 - protein, 9 aa, Artificial Sequence
  Description of Artificial Sequence: Synthetic peptide
NTHTGNARL

SEQ ID NO: 8274 - protein, 9 aa, Artificial Sequence
  Description of Artificial Sequence: Synthetic peptide
MVKPCLDEW

SEQ ID NO: 8275 - protein, 9 aa, Artificial Sequence
  Description of Artificial Sequence: Synthetic peptide
QIKAHSNVF

SEQ ID NO: 8276 - protein, 9 aa, Artificial Sequence
  Description of Artificial Sequence: Synthetic peptide
LVDRSGRAA

SEQ ID NO: 8277 - protein, 9 aa, Artificial Sequence
  Description of Artificial Sequence: Synthetic peptide
TSKGKPTCC

SEQ ID NO: 8278 - protein, 9 aa, Artificial Sequence
  Description of Artificial Sequence: Synthetic peptide
NCYCAYGWP

SEQ ID NO: 8279 - protein, 9 aa, Artificial Sequence
  Description of Artificial Sequence: Synthetic peptide
IWQSLKKAT

SEQ ID NO: 8280 - protein, 9 aa, Artificial Sequence
  Description of Artificial Sequence: Synthetic peptide
ARSGINGHA

SEQ ID NO: 8281 - protein, 9 aa, Artificial Sequence
  Description of Artificial Sequence: Synthetic peptide
NWTRNMQWA

SEQ ID NO: 8282 - protein, 9 aa, Artificial Sequence
  Description of Artificial Sequence: Synthetic peptide
NCLSRKKFA

SEQ ID NO: 8283 - protein, 9 aa, Artificial Sequence
  Description of Artificial Sequence: Synthetic peptide
CIMLNGCFP

SEQ ID NO: 8284 - protein, 9 aa, Artificial Sequence
  Description of Artificial Sequence: Synthetic peptide
KNGATNLAW

SEQ ID NO: 8285 - protein, 9 aa, Artificial Sequence
  Description of Artificial Sequence: Synthetic peptide
NNCKLAMVH

SEQ ID NO: 8286 - protein, 9 aa, Artificial Sequence
  Description of Artificial Sequence: Synthetic peptide
KATHCDKYA

SEQ ID NO: 8287 - protein, 9 aa, Artificial Sequence
  Description of Artificial Sequence: Synthetic peptide
VFNPMLQDT

SEQ ID NO: 8288 - protein, 9 aa, Artificial Sequence
  Description of Artificial Sequence: Synthetic peptide
ARPEIEYMG

SEQ ID NO: 8289 - protein, 9 aa, Artificial Sequence
  Description of Artificial Sequence: Synthetic peptide
NSVHVHSSN

SEQ ID NO: 8290 - protein, 9 aa, Artificial Sequence
  Description of Artificial Sequence: Synthetic peptide
SCPWKCMIV

SEQ ID NO: 8291 - protein, 9 aa, Artificial Sequence
  Description of Artificial Sequence: Synthetic peptide
CSNDINGRT

SEQ ID NO: 8292 - protein, 9 aa, Artificial Sequence
  Description of Artificial Sequence: Synthetic peptide
KMGMHDMAT

SEQ ID NO: 8293 - protein, 9 aa, Artificial Sequence
  Description of Artificial Sequence: Synthetic peptide
KKLVNEGTW

SEQ ID NO: 8294 - protein, 9 aa, Artificial Sequence
  Description of Artificial Sequence: Synthetic peptide
QLNQWTFAG

SEQ ID NO: 8295 - protein, 9 aa, Artificial Sequence
  Description of Artificial Sequence: Synthetic peptide
FERRIGWDH

SEQ ID NO: 8296 - protein, 9 aa, Artificial Sequence
  Description of Artificial Sequence: Synthetic peptide
VWNVMIKMC

SEQ ID NO: 8297 - protein, 9 aa, Artificial Sequence
  Description of Artificial Sequence: Synthetic peptide
TGGCYRMME

SEQ ID NO: 8298 - protein, 9 aa, Artificial Sequence
  Description of Artificial Sequence: Synthetic peptide
KPDPRQADQ

SEQ ID NO: 8299 - protein, 9 aa, Artificial Sequence
  Description of Artificial Sequence: Synthetic peptide
LSCKFGWDG

SEQ ID NO: 8300 - protein, 9 aa, Artificial Sequence
  Description of Artificial Sequence: Synthetic peptide
KYPFKYYVT

SEQ ID NO: 8301 - protein, 9 aa, Artificial Sequence
  Description of Artificial Sequence: Synthetic peptide
TMLQKKRQD

SEQ ID NO: 8302 - protein, 9 aa, Artificial Sequence
  Description of Artificial Sequence: Synthetic peptide
GYAQRSFFM

SEQ ID NO: 8303 - protein, 9 aa, Artificial Sequence
  Description of Artificial Sequence: Synthetic peptide
ATDGYVAQD

SEQ ID NO: 8304 - protein, 9 aa, Artificial Sequence
  Description of Artificial Sequence: Synthetic peptide
KMSTYHTYD

SEQ ID NO: 8305 - protein, 9 aa, Artificial Sequence
  Description of Artificial Sequence: Synthetic peptide
HVADNQVVQ

SEQ ID NO: 8306 - protein, 9 aa, Artificial Sequence
  Description of Artificial Sequence: Synthetic peptide
AKTFVMSFD

SEQ ID NO: 8307 - protein, 9 aa, Artificial Sequence
  Description of Artificial Sequence: Synthetic peptide
TCNVSWEHE

SEQ ID NO: 8308 - protein, 9 aa, Artificial Sequence
  Description of Artificial Sequence: Synthetic peptide
RRTDHCEPI

SEQ ID NO: 8309 - protein, 9 aa, Artificial Sequence
  Description of Artificial Sequence: Synthetic peptide
RTDYSRLSD

SEQ ID NO: 8310 - protein, 9 aa, Artificial Sequence
  Description of Artificial Sequence: Synthetic peptide
TDLRKRSNL

SEQ ID NO: 8311 - protein, 9 aa, Artificial Sequence
  Description of Artificial Sequence: Synthetic peptide
IKAWWHDHQ

SEQ ID NO: 8312 - protein, 9 aa, Artificial Sequence
  Description of Artificial Sequence: Synthetic peptide
KFKWEACCP

SEQ ID NO: 8313 - protein, 9 aa, Artificial Sequence
  Description of Artificial Sequence: Synthetic peptide
VNVDCDVQQ

SEQ ID NO: 8314 - protein, 9 aa, Artificial Sequence
  Description of Artificial Sequence: Synthetic peptide
QYQSTGVVR

SEQ ID NO: 8315 - protein, 9 aa, Artificial Sequence
  Description of Artificial Sequence: Synthetic peptide
LIHEERKEQ

SEQ ID NO: 8316 - protein, 9 aa, Artificial Sequence
  Description of Artificial Sequence: Synthetic peptide
ETNVVEDWY

SEQ ID NO: 8317 - protein, 9 aa, Artificial Sequence
  Description of Artificial Sequence: Synthetic peptide
LACTPRYIF

SEQ ID NO: 8318 - protein, 9 aa, Artificial Sequence
  Description of Artificial Sequence: Synthetic peptide
HGGCYRMME

SEQ ID NO: 8319 - protein, 9 aa, Artificial Sequence
  Description of Artificial Sequence: Synthetic peptide
QSVNERHFH

SEQ ID NO: 8320 - protein, 9 aa, Artificial Sequence
  Description of Artificial Sequence: Synthetic peptide
LWIKQHIKG

SEQ ID NO: 8321 - protein, 9 aa, Artificial Sequence
  Description of Artificial Sequence: Synthetic peptide
QLMPCANVA

SEQ ID NO: 8322 - protein, 9 aa, Artificial Sequence
  Description of Artificial Sequence: Synthetic peptide
TQREGETSY

SEQ ID NO: 8323 - protein, 9 aa, Artificial Sequence
  Description of Artificial Sequence: Synthetic peptide
HNDWQQVFS

SEQ ID NO: 8324 - protein, 9 aa, Artificial Sequence
  Description of Artificial Sequence: Synthetic peptide
YEDNDVMQI

SEQ ID NO: 8325 - protein, 9 aa, Artificial Sequence
  Description of Artificial Sequence: Synthetic peptide
ARRAGLENS

SEQ ID NO: 8326 - protein, 9 aa, Artificial Sequence
  Description of Artificial Sequence: Synthetic peptide
GATWLFRSP

SEQ ID NO: 8327 - protein, 9 aa, Artificial Sequence
  Description of Artificial Sequence: Synthetic peptide
RTLWALYAI

SEQ ID NO: 8328 - protein, 9 aa, Artificial Sequence
  Description of Artificial Sequence: Synthetic peptide
DCIICSSKG

SEQ ID NO: 8329 - protein, 9 aa, Artificial Sequence
  Description of Artificial Sequence: Synthetic peptide
HMALVMQTV

SEQ ID NO: 8330 - protein, 9 aa, Artificial Sequence
  Description of Artificial Sequence: Synthetic peptide
HSNMLSVHQ

SEQ ID NO: 8331 - protein, 9 aa, Artificial Sequence
  Description of Artificial Sequence: Synthetic peptide
TNGAQIMHV

SEQ ID NO: 8332 - protein, 9 aa, Artificial Sequence
  Description of Artificial Sequence: Synthetic peptide
STRPIACQS

SEQ ID NO: 8333 - protein, 9 aa, Artificial Sequence
  Description of Artificial Sequence: Synthetic peptide
CMYVPADQE

SEQ ID NO: 8334 - protein, 9 aa, Artificial Sequence
  Description of Artificial Sequence: Synthetic peptide
SPHYFADQW

SEQ ID NO: 8335 - protein, 9 aa, Artificial Sequence
  Description of Artificial Sequence: Synthetic peptide
GFDLMRQIN

SEQ ID NO: 8336 - protein, 9 aa, Artificial Sequence
  Description of Artificial Sequence: Synthetic peptide
GHHQCYKAN

SEQ ID NO: 8337 - protein, 9 aa, Artificial Sequence
  Description of Artificial Sequence: Synthetic peptide
EMNSDYSGI

SEQ ID NO: 8338 - protein, 9 aa, Artificial Sequence
  Description of Artificial Sequence: Synthetic peptide
SYWHVLLLV

SEQ ID NO: 8339 - protein, 9 aa, Artificial Sequence
  Description of Artificial Sequence: Synthetic peptide
SADRTVMFH

SEQ ID NO: 8340 - protein, 9 aa, Artificial Sequence
  Description of Artificial Sequence: Synthetic peptide
RFTVKDGDA

SEQ ID NO: 8341 - protein, 9 aa, Artificial Sequence
  Description of Artificial Sequence: Synthetic peptide
QCKPGAEGF

SEQ ID NO: 8342 - protein, 9 aa, Artificial Sequence
  Description of Artificial Sequence: Synthetic peptide
KAIQAFEHD

SEQ ID NO: 8343 - protein, 9 aa, Artificial Sequence
  Description of Artificial Sequence: Synthetic peptide
ATRYQICDE

SEQ ID NO: 8344 - protein, 9 aa, Artificial Sequence
  Description of Artificial Sequence: Synthetic peptide
MWWREGAMR

SEQ ID NO: 8345 - protein, 9 aa, Artificial Sequence
  Description of Artificial Sequence: Synthetic peptide
LFMTYSTRN

SEQ ID NO: 8346 - protein, 9 aa, Artificial Sequence
  Description of Artificial Sequence: Synthetic peptide
QPPNREAWC

SEQ ID NO: 8347 - protein, 9 aa, Artificial Sequence
  Description of Artificial Sequence: Synthetic peptide
TPKSAGICC

SEQ ID NO: 8348 - protein, 9 aa, Artificial Sequence
  Description of Artificial Sequence: Synthetic peptide
KPTYEHRGF

SEQ ID NO: 8349 - protein, 9 aa, Artificial Sequence
  Description of Artificial Sequence: Synthetic peptide
CNYPIIWDR

SEQ ID NO: 8350 - protein, 9 aa, Artificial Sequence
  Description of Artificial Sequence: Synthetic peptide
FTGTPPVGM

SEQ ID NO: 8351 - protein, 9 aa, Artificial Sequence
  Description of Artificial Sequence: Synthetic peptide
QGQTGKYVM

SEQ ID NO: 8352 - protein, 9 aa, Artificial Sequence
  Description of Artificial Sequence: Synthetic peptide
AHLHNQVIF

SEQ ID NO: 8353 - protein, 9 aa, Artificial Sequence
  Description of Artificial Sequence: Synthetic peptide
KATVEMQSL

SEQ ID NO: 8354 - protein, 9 aa, Artificial Sequence
  Description of Artificial Sequence: Synthetic peptide
CVRIGMRGP

SEQ ID NO: 8355 - protein, 9 aa, Artificial Sequence
  Description of Artificial Sequence: Synthetic peptide
HLSFMMSSF

SEQ ID NO: 8356 - protein, 9 aa, Artificial Sequence
  Description of Artificial Sequence: Synthetic peptide
TTMWIWFPF

SEQ ID NO: 8357 - protein, 9 aa, Artificial Sequence
  Description of Artificial Sequence: Synthetic peptide
TTNMKWCAG

SEQ ID NO: 8358 - protein, 9 aa, Artificial Sequence
  Description of Artificial Sequence: Synthetic peptide
FIQPTWDSY

SEQ ID NO: 8359 - protein, 9 aa, Artificial Sequence
  Description of Artificial Sequence: Synthetic peptide
RCIWCHMQG

SEQ ID NO: 8360 - protein, 9 aa, Artificial Sequence
  Description of Artificial Sequence: Synthetic peptide
LVHRVQGGD

SEQ ID NO: 8361 - protein, 9 aa, Artificial Sequence
  Description of Artificial Sequence: Synthetic peptide
NVRSPAVRD

SEQ ID NO: 8362 - protein, 9 aa, Artificial Sequence
  Description of Artificial Sequence: Synthetic peptide
LKENWMEWG

SEQ ID NO: 8363 - protein, 9 aa, Artificial Sequence
  Description of Artificial Sequence: Synthetic peptide
YSASFGCQS

SEQ ID NO: 8364 - protein, 9 aa, Artificial Sequence
  Description of Artificial Sequence: Synthetic peptide
GLKYWMHGI

SEQ ID NO: 8365 - protein, 9 aa, Artificial Sequence
  Description of Artificial Sequence: Synthetic peptide
QTGTGHGFE

SEQ ID NO: 8366 - protein, 9 aa, Artificial Sequence
  Description of Artificial Sequence: Synthetic peptide
QMNYQHEHR

SEQ ID NO: 8367 - protein, 9 aa, Artificial Sequence
  Description of Artificial Sequence: Synthetic peptide
AHLHNKFIF

SEQ ID NO: 8368 - protein, 9 aa, Artificial Sequence
  Description of Artificial Sequence: Synthetic peptide
STKQMTKSF

SEQ ID NO: 8369 - protein, 9 aa, Artificial Sequence
  Description of Artificial Sequence: Synthetic peptide
QEENGKSVT

SEQ ID NO: 8370 - protein, 9 aa, Artificial Sequence
  Description of Artificial Sequence: Synthetic peptide
RVADEGIQP

SEQ ID NO: 8371 - protein, 9 aa, Artificial Sequence
  Description of Artificial Sequence: Synthetic peptide
CGLSTHEYL

SEQ ID NO: 8372 - protein, 9 aa, Artificial Sequence
  Description of Artificial Sequence: Synthetic peptide
RANTESDQP

SEQ ID NO: 8373 - protein, 9 aa, Artificial Sequence
  Description of Artificial Sequence: Synthetic peptide
QSAEWYLNG

SEQ ID NO: 8374 - protein, 9 aa, Artificial Sequence
  Description of Artificial Sequence: Synthetic peptide
CWQLFNEQN

SEQ ID NO: 8375 - protein, 9 aa, Artificial Sequence
  Description of Artificial Sequence: Synthetic peptide
AADGYVTQD

SEQ ID NO: 8376 - protein, 9 aa, Artificial Sequence
  Description of Artificial Sequence: Synthetic peptide
SANQRHHDW

SEQ ID NO: 8377 - protein, 9 aa, Artificial Sequence
  Description of Artificial Sequence: Synthetic peptide
KCVEWNAPA

SEQ ID NO: 8378 - protein, 9 aa, Artificial Sequence
  Description of Artificial Sequence: Synthetic peptide
MHDTMGAWC

SEQ ID NO: 8379 - protein, 9 aa, Artificial Sequence
  Description of Artificial Sequence: Synthetic peptide
GDNMVQWGS

SEQ ID NO: 8380 - protein, 9 aa, Artificial Sequence
  Description of Artificial Sequence: Synthetic peptide
DVWCRKLMP

SEQ ID NO: 8381 - protein, 9 aa, Artificial Sequence
  Description of Artificial Sequence: Synthetic peptide
SYRTLFNGW

SEQ ID NO: 8382 - protein, 9 aa, Artificial Sequence
  Description of Artificial Sequence: Synthetic peptide
MRQHMKYSL

SEQ ID NO: 8383 - protein, 9 aa, Artificial Sequence
  Description of Artificial Sequence: Synthetic peptide
PDQYLVVGD

SEQ ID NO: 8384 - protein, 9 aa, Artificial Sequence
  Description of Artificial Sequence: Synthetic peptide
RELDKENCV

SEQ ID NO: 8385 - protein, 9 aa, Artificial Sequence
  Description of Artificial Sequence: Synthetic peptide
MTGQCRNGQ

SEQ ID NO: 8386 - protein, 9 aa, Artificial Sequence
  Description of Artificial Sequence: Synthetic peptide
TSLWQQMAS

SEQ ID NO: 8387 - protein, 9 aa, Artificial Sequence
  Description of Artificial Sequence: Synthetic peptide
HSMFRHPCP

SEQ ID NO: 8388 - protein, 9 aa, Artificial Sequence
  Description of Artificial Sequence: Synthetic peptide
GNTKCPSWH

SEQ ID NO: 8389 - protein, 9 aa, Artificial Sequence
  Description of Artificial Sequence: Synthetic peptide
HECDTVAVN

SEQ ID NO: 8390 - protein, 9 aa, Artificial Sequence
  Description of Artificial Sequence: Synthetic peptide
ERTGEKGIR

SEQ ID NO: 8391 - protein, 9 aa, Artificial Sequence
  Description of Artificial Sequence: Synthetic peptide
GSGPVQSEE

SEQ ID NO: 8392 - protein, 9 aa, Artificial Sequence
  Description of Artificial Sequence: Synthetic peptide
DGWCQKLMP

SEQ ID NO: 8393 - protein, 9 aa, Artificial Sequence
  Description of Artificial Sequence: Synthetic peptide
QSVNEHHFP

SEQ ID NO: 8394 - protein, 9 aa, Artificial Sequence
  Description of Artificial Sequence: Synthetic peptide
RAAKYQNSH

SEQ ID NO: 8395 - protein, 9 aa, Artificial Sequence
  Description of Artificial Sequence: Synthetic peptide
DYERADCWM

SEQ ID NO: 8396 - protein, 9 aa, Artificial Sequence
  Description of Artificial Sequence: Synthetic peptide
IRNYCRMTA

SEQ ID NO: 8397 - protein, 9 aa, Artificial Sequence
  Description of Artificial Sequence: Synthetic peptide
LAVWQQKME

SEQ ID NO: 8398 - protein, 9 aa, Artificial Sequence
  Description of Artificial Sequence: Synthetic peptide
INMSVSKDQ

SEQ ID NO: 8399 - protein, 9 aa, Artificial Sequence
  Description of Artificial Sequence: Synthetic peptide
ACDKWDCCC

SEQ ID NO: 8400 - protein, 9 aa, Artificial Sequence
  Description of Artificial Sequence: Synthetic peptide
SQPVCCVCM

SEQ ID NO: 8401 - protein, 9 aa, Artificial Sequence
  Description of Artificial Sequence: Synthetic peptide
GRALANCAE

SEQ ID NO: 8402 - protein, 9 aa, Artificial Sequence
  Description of Artificial Sequence: Synthetic peptide
ITTHMNCAD

SEQ ID NO: 8403 - protein, 9 aa, Artificial Sequence
  Description of Artificial Sequence: Synthetic peptide
MKTTMQDYF

SEQ ID NO: 8404 - protein, 9 aa, Artificial Sequence
  Description of Artificial Sequence: Synthetic peptide
HCIKVESVG

SEQ ID NO: 8405 - protein, 9 aa, Artificial Sequence
  Description of Artificial Sequence: Synthetic peptide
HKGTHAFAM

SEQ ID NO: 8406 - protein, 9 aa, Artificial Sequence
  Description of Artificial Sequence: Synthetic peptide
HYTEMSCDD

SEQ ID NO: 8407 - protein, 9 aa, Artificial Sequence
  Description of Artificial Sequence: Synthetic peptide
DFWWTLTRD

SEQ ID NO: 8408 - protein, 9 aa, Artificial Sequence
  Description of Artificial Sequence: Synthetic peptide
SMQYFFKTA

SEQ ID NO: 8409 - protein, 9 aa, Artificial Sequence
  Description of Artificial Sequence: Synthetic peptide
LNCPSKDGT

SEQ ID NO: 8410 - protein, 9 aa, Artificial Sequence
  Description of Artificial Sequence: Synthetic peptide
CTHMKNVRT

SEQ ID NO: 8411 - protein, 9 aa, Artificial Sequence
  Description of Artificial Sequence: Synthetic peptide
ANADNSFCQ

SEQ ID NO: 8412 - protein, 9 aa, Artificial Sequence
  Description of Artificial Sequence: Synthetic peptide
EERPWEWET

SEQ ID NO: 8413 - protein, 9 aa, Artificial Sequence
  Description of Artificial Sequence: Synthetic peptide
CSHGTGAMC

SEQ ID NO: 8414 - protein, 9 aa, Artificial Sequence
  Description of Artificial Sequence: Synthetic peptide
FAIWDYESK

SEQ ID NO: 8415 - protein, 9 aa, Artificial Sequence
  Description of Artificial Sequence: Synthetic peptide
HLRFIMHEP

SEQ ID NO: 8416 - protein, 9 aa, Artificial Sequence
  Description of Artificial Sequence: Synthetic peptide
HLMPRSQCF

SEQ ID NO: 8417 - protein, 9 aa, Artificial Sequence
  Description of Artificial Sequence: Synthetic peptide
QLMVAFLCP

SEQ ID NO: 8418 - protein, 9 aa, Artificial Sequence
  Description of Artificial Sequence: Synthetic peptide
AHSPFLDHM

SEQ ID NO: 8419 - protein, 9 aa, Artificial Sequence
  Description of Artificial Sequence: Synthetic peptide
KQAGYDLFH

SEQ ID NO: 8420 - protein, 9 aa, Artificial Sequence
  Description of Artificial Sequence: Synthetic peptide
DTMQWGSWQ

SEQ ID NO: 8421 - protein, 9 aa, Artificial Sequence
  Description of Artificial Sequence: Synthetic peptide
SGFFVHTSS

SEQ ID NO: 8422 - protein, 9 aa, Artificial Sequence
  Description of Artificial Sequence: Synthetic peptide
AKIIAQLCV

SEQ ID NO: 8423 - protein, 9 aa, Artificial Sequence
  Description of Artificial Sequence: Synthetic peptide
NWTGNMQWE

SEQ ID NO: 8424 - protein, 9 aa, Artificial Sequence
  Description of Artificial Sequence: Synthetic peptide
QREGNNYLT

SEQ ID NO: 8425 - protein, 9 aa, Artificial Sequence
  Description of Artificial Sequence: Synthetic peptide
NAFWTQNME

SEQ ID NO: 8426 - protein, 9 aa, Artificial Sequence
  Description of Artificial Sequence: Synthetic peptide
IKQVFNQIV

SEQ ID NO: 8427 - protein, 9 aa, Artificial Sequence
  Description of Artificial Sequence: Synthetic peptide
HAVSGPTTG

SEQ ID NO: 8428 - protein, 9 aa, Artificial Sequence
  Description of Artificial Sequence: Synthetic peptide
NTSGLLMAQ

SEQ ID NO: 8429 - protein, 9 aa, Artificial Sequence
  Description of Artificial Sequence: Synthetic peptide
MYLSFPVHA

SEQ ID NO: 8430 - protein, 9 aa, Artificial Sequence
  Description of Artificial Sequence: Synthetic peptide
STLSRHGWG

SEQ ID NO: 8431 - protein, 9 aa, Artificial Sequence
  Description of Artificial Sequence: Synthetic peptide
QWMWQRLID

SEQ ID NO: 8432 - protein, 9 aa, Artificial Sequence
  Description of Artificial Sequence: Synthetic peptide
TQGTMDSWY

SEQ ID NO: 8433 - protein, 9 aa, Artificial Sequence
  Description of Artificial Sequence: Synthetic peptide
RPIHTRQNY

SEQ ID NO: 8434 - protein, 9 aa, Artificial Sequence
  Description of Artificial Sequence: Synthetic peptide
EWLRQPRMT

SEQ ID NO: 8435 - protein, 9 aa, Artificial Sequence
  Description of Artificial Sequence: Synthetic peptide
NQQRTNNNG

SEQ ID NO: 8436 - protein, 9 aa, Artificial Sequence
  Description of Artificial Sequence: Synthetic peptide
QPRTVGVAG

SEQ ID NO: 8437 - protein, 9 aa, Artificial Sequence
  Description of Artificial Sequence: Synthetic peptide
ASWPCGRNV

SEQ ID NO: 8438 - protein, 9 aa, Artificial Sequence
  Description of Artificial Sequence: Synthetic peptide
LNSMIMWDN

SEQ ID NO: 8439 - protein, 9 aa, Artificial Sequence
  Description of Artificial Sequence: Synthetic peptide
ESRSPNNPA

SEQ ID NO: 8440 - protein, 9 aa, Artificial Sequence
  Description of Artificial Sequence: Synthetic peptide
PTSWLNDLT

SEQ ID NO: 8441 - protein, 9 aa, Artificial Sequence
  Description of Artificial Sequence: Synthetic peptide
MIRKRFEGQ

SEQ ID NO: 8442 - protein, 9 aa, Artificial Sequence
  Description of Artificial Sequence: Synthetic peptide
AMWAGLENS

SEQ ID NO: 8443 - protein, 9 aa, Artificial Sequence
  Description of Artificial Sequence: Synthetic peptide
KLTDIWAHM

SEQ ID NO: 8444 - protein, 9 aa, Artificial Sequence
  Description of Artificial Sequence: Synthetic peptide
TSYNCGRDP

SEQ ID NO: 8445 - protein, 9 aa, Artificial Sequence
  Description of Artificial Sequence: Synthetic peptide
HCVKVESVG

SEQ ID NO: 8446 - protein, 9 aa, Artificial Sequence
  Description of Artificial Sequence: Synthetic peptide
TACGSFHGC

SEQ ID NO: 8447 - protein, 9 aa, Artificial Sequence
  Description of Artificial Sequence: Synthetic peptide
MSVPKRQGP

SEQ ID NO: 8448 - protein, 9 aa, Artificial Sequence
  Description of Artificial Sequence: Synthetic peptide
LKQAKQMEP

SEQ ID NO: 8449 - protein, 9 aa, Artificial Sequence
  Description of Artificial Sequence: Synthetic peptide
DCDVWHANV

SEQ ID NO: 8450 - protein, 9 aa, Artificial Sequence
  Description of Artificial Sequence: Synthetic peptide
MGDWLGVPT

SEQ ID NO: 8451 - protein, 9 aa, Artificial Sequence
  Description of Artificial Sequence: Synthetic peptide
FCKHNAQTQ

SEQ ID NO: 8452 - protein, 9 aa, Artificial Sequence
  Description of Artificial Sequence: Synthetic peptide
QTKPMIGNE

SEQ ID NO: 8453 - protein, 9 aa, Artificial Sequence
  Description of Artificial Sequence: Synthetic peptide
LSAQFNNQS

SEQ ID NO: 8454 - protein, 9 aa, Artificial Sequence
  Description of Artificial Sequence: Synthetic peptide
PVLLMRRMF

SEQ ID NO: 8455 - protein, 9 aa, Artificial Sequence
  Description of Artificial Sequence: Synthetic peptide
ISTICPKIC

SEQ ID NO: 8456 - protein, 9 aa, Artificial Sequence
  Description of Artificial Sequence: Synthetic peptide
TGSFMGCVD

SEQ ID NO: 8457 - protein, 9 aa, Artificial Sequence
  Description of Artificial Sequence: Synthetic peptide
MTGCREAVA

SEQ ID NO: 8458 - protein, 9 aa, Artificial Sequence
  Description of Artificial Sequence: Synthetic peptide
ERGLDNKPR

SEQ ID NO: 8459 - protein, 9 aa, Artificial Sequence
  Description of Artificial Sequence: Synthetic peptide
NYCINKRAV

SEQ ID NO: 8460 - protein, 9 aa, Artificial Sequence
  Description of Artificial Sequence: Synthetic peptide
SGQPVDRMF

SEQ ID NO: 8461 - protein, 9 aa, Artificial Sequence
  Description of Artificial Sequence: Synthetic peptide
QIMSAKVFG

SEQ ID NO: 8462 - protein, 9 aa, Artificial Sequence
  Description of Artificial Sequence: Synthetic peptide
MFVVNRNWA

SEQ ID NO: 8463 - protein, 9 aa, Artificial Sequence
  Description of Artificial Sequence: Synthetic peptide
WPDPESEEV

SEQ ID NO: 8464 - protein, 9 aa, Artificial Sequence
  Description of Artificial Sequence: Synthetic peptide
MNTMLMSNS

SEQ ID NO: 8465 - protein, 9 aa, Artificial Sequence
  Description of Artificial Sequence: Synthetic peptide
HFVDNQVVQ

SEQ ID NO: 8466 - protein, 9 aa, Artificial Sequence
  Description of Artificial Sequence: Synthetic peptide
NTRQRYHTW

SEQ ID NO: 8467 - protein, 9 aa, Artificial Sequence
  Description of Artificial Sequence: Synthetic peptide
TSLVMPSLP

SEQ ID NO: 8468 - protein, 9 aa, Artificial Sequence
  Description of Artificial Sequence: Synthetic peptide
DYRQCIDWE

SEQ ID NO: 8469 - protein, 9 aa, Artificial Sequence
  Description of Artificial Sequence: Synthetic peptide
VLRYKCYPS

SEQ ID NO: 8470 - protein, 9 aa, Artificial Sequence
  Description of Artificial Sequence: Synthetic peptide
HWEIEWVYW

SEQ ID NO: 8471 - protein, 9 aa, Artificial Sequence
  Description of Artificial Sequence: Synthetic peptide
QVMMGQQTP

SEQ ID NO: 8472 - protein, 9 aa, Artificial Sequence
  Description of Artificial Sequence: Synthetic peptide
RGCQVKCHT

SEQ ID NO: 8473 - protein, 9 aa, Artificial Sequence
  Description of Artificial Sequence: Synthetic peptide
EQWKTHQQN

SEQ ID NO: 8474 - protein, 9 aa, Artificial Sequence
  Description of Artificial Sequence: Synthetic peptide
YSKWARALS

SEQ ID NO: 8475 - protein, 9 aa, Artificial Sequence
  Description of Artificial Sequence: Synthetic peptide
QCMITISCP

SEQ ID NO: 8476 - protein, 9 aa, Artificial Sequence
  Description of Artificial Sequence: Synthetic peptide
DVWWQKLMP

SEQ ID NO: 8477 - protein, 9 aa, Artificial Sequence
  Description of Artificial Sequence: Synthetic peptide
VANTWQVHC

SEQ ID NO: 8478 - protein, 9 aa, Artificial Sequence
  Description of Artificial Sequence: Synthetic peptide
RMMWQSHCG

SEQ ID NO: 8479 - protein, 9 aa, Artificial Sequence
  Description of Artificial Sequence: Synthetic peptide
VANITACAN

SEQ ID NO: 8480 - protein, 9 aa, Artificial Sequence
  Description of Artificial Sequence: Synthetic peptide
PWAVEYSLV

SEQ ID NO: 8481 - protein, 9 aa, Artificial Sequence
  Description of Artificial Sequence: Synthetic peptide
SYMWPHFPH

SEQ ID NO: 8482 - protein, 9 aa, Artificial Sequence
  Description of Artificial Sequence: Synthetic peptide
FFEQEAHNR

SEQ ID NO: 8483 - protein, 9 aa, Artificial Sequence
  Description of Artificial Sequence: Synthetic peptide
LCTGTERQG

SEQ ID NO: 8484 - protein, 9 aa, Artificial Sequence
  Description of Artificial Sequence: Synthetic peptide
MAVGTVSAK

SEQ ID NO: 8485 - protein, 9 aa, Artificial Sequence
  Description of Artificial Sequence: Synthetic peptide
QSSSPVMWV

SEQ ID NO: 8486 - protein, 9 aa, Artificial Sequence
  Description of Artificial Sequence: Synthetic peptide
SSVVMVKQP

SEQ ID NO: 8487 - protein, 9 aa, Artificial Sequence
  Description of Artificial Sequence: Synthetic peptide
EPRLYCAQA

SEQ ID NO: 8488 - protein, 9 aa, Artificial Sequence
  Description of Artificial Sequence: Synthetic peptide
YANIHNRHG

SEQ ID NO: 8489 - protein, 9 aa, Artificial Sequence
  Description of Artificial Sequence: Synthetic peptide
EAYIYLGEA

SEQ ID NO: 8490 - protein, 9 aa, Artificial Sequence
  Description of Artificial Sequence: Synthetic peptide
PVETARCSG

SEQ ID NO: 8491 - protein, 9 aa, Artificial Sequence
  Description of Artificial Sequence: Synthetic peptide
NAIPYFIQA

SEQ ID NO: 8492 - protein, 9 aa, Artificial Sequence
  Description of Artificial Sequence: Synthetic peptide
FCKCFMKHF

SEQ ID NO: 8493 - protein, 9 aa, Artificial Sequence
  Description of Artificial Sequence: Synthetic peptide
EKLVMYHKC

SEQ ID NO: 8494 - protein, 9 aa, Artificial Sequence
  Description of Artificial Sequence: Synthetic peptide
YEDCMDMYF

SEQ ID NO: 8495 - protein, 9 aa, Artificial Sequence
  Description of Artificial Sequence: Synthetic peptide
GIWVWDTYN

SEQ ID NO: 8496 - protein, 9 aa, Artificial Sequence
  Description of Artificial Sequence: Synthetic peptide
AEWDHKTIY

SEQ ID NO: 8497 - protein, 9 aa, Artificial Sequence
  Description of Artificial Sequence: Synthetic peptide
TQIQIRQAD

SEQ ID NO: 8498 - protein, 9 aa, Artificial Sequence
  Description of Artificial Sequence: Synthetic peptide
RCNWQFAQH

SEQ ID NO: 8499 - protein, 9 aa, Artificial Sequence
  Description of Artificial Sequence: Synthetic peptide
ESRHCKYPY

SEQ ID NO: 8500 - protein, 9 aa, Artificial Sequence
  Description of Artificial Sequence: Synthetic peptide
SSNCMRRAS

SEQ ID NO: 8501 - protein, 9 aa, Artificial Sequence
  Description of Artificial Sequence: Synthetic peptide
GVGQFRLLS

SEQ ID NO: 8502 - protein, 9 aa, Artificial Sequence
  Description of Artificial Sequence: Synthetic peptide
KIDQTQWRR

SEQ ID NO: 8503 - protein, 9 aa, Artificial Sequence
  Description of Artificial Sequence: Synthetic peptide
HLSFLVSSF

SEQ ID NO: 8504 - protein, 9 aa, Artificial Sequence
  Description of Artificial Sequence: Synthetic peptide
NAGMSFRNR

SEQ ID NO: 8505 - protein, 9 aa, Artificial Sequence
  Description of Artificial Sequence: Synthetic peptide
VMNRMEWSV

SEQ ID NO: 8506 - protein, 9 aa, Artificial Sequence
  Description of Artificial Sequence: Synthetic peptide
LFMGMSDST

SEQ ID NO: 8507 - protein, 9 aa, Artificial Sequence
  Description of Artificial Sequence: Synthetic peptide
ANVVMRKCQ

SEQ ID NO: 8508 - protein, 9 aa, Artificial Sequence
  Description of Artificial Sequence: Synthetic peptide
GIYYQWRGQ

SEQ ID NO: 8509 - protein, 9 aa, Artificial Sequence
  Description of Artificial Sequence: Synthetic peptide
DVHAEHSPQ

SEQ ID NO: 8510 - protein, 9 aa, Artificial Sequence
  Description of Artificial Sequence: Synthetic peptide
QHPMTFSHE

SEQ ID NO: 8511 - protein, 9 aa, Artificial Sequence
  Description of Artificial Sequence: Synthetic peptide
EPRLYCTQE

SEQ ID NO: 8512 - protein, 9 aa, Artificial Sequence
  Description of Artificial Sequence: Synthetic peptide
NAKEQVVNT

SEQ ID NO: 8513 - protein, 9 aa, Artificial Sequence
  Description of Artificial Sequence: Synthetic peptide
EFCHDDILM

SEQ ID NO: 8514 - protein, 9 aa, Artificial Sequence
  Description of Artificial Sequence: Synthetic peptide
PLFRSEWLA

SEQ ID NO: 8515 - protein, 9 aa, Artificial Sequence
  Description of Artificial Sequence: Synthetic peptide
GNMLRNFGS

SEQ ID NO: 8516 - protein, 9 aa, Artificial Sequence
  Description of Artificial Sequence: Synthetic peptide
HAETDHAGL

SEQ ID NO: 8517 - protein, 9 aa, Artificial Sequence
  Description of Artificial Sequence: Synthetic peptide
MKMHQLNGC

SEQ ID NO: 8518 - protein, 9 aa, Artificial Sequence
  Description of Artificial Sequence: Synthetic peptide
SSERFRAEG

SEQ ID NO: 8519 - protein, 9 aa, Artificial Sequence
  Description of Artificial Sequence: Synthetic peptide
QGGCAPMDS

SEQ ID NO: 8520 - protein, 9 aa, Artificial Sequence
  Description of Artificial Sequence: Synthetic peptide
REVWITGCG

SEQ ID NO: 8521 - protein, 9 aa, Artificial Sequence
  Description of Artificial Sequence: Synthetic peptide
SDNGWCAHS

SEQ ID NO: 8522 - protein, 9 aa, Artificial Sequence
  Description of Artificial Sequence: Synthetic peptide
YCCNQELFA

SEQ ID NO: 8523 - protein, 9 aa, Artificial Sequence
  Description of Artificial Sequence: Synthetic peptide
TFVYGEWDR

SEQ ID NO: 8524 - protein, 9 aa, Artificial Sequence
  Description of Artificial Sequence: Synthetic peptide
IFPSKIPCQ

SEQ ID NO: 8525 - protein, 9 aa, Artificial Sequence
  Description of Artificial Sequence: Synthetic peptide
YVTQMQHLE

SEQ ID NO: 8526 - protein, 9 aa, Artificial Sequence
  Description of Artificial Sequence: Synthetic peptide
NSRLLIKHP

SEQ ID NO: 8527 - protein, 9 aa, Artificial Sequence
  Description of Artificial Sequence: Synthetic peptide
KTFPAADMK

SEQ ID NO: 8528 - protein, 9 aa, Artificial Sequence
  Description of Artificial Sequence: Synthetic peptide
VGHVMIKMC

SEQ ID NO: 8529 - protein, 9 aa, Artificial Sequence
  Description of Artificial Sequence: Synthetic peptide
GTDHVIVGY

SEQ ID NO: 8530 - protein, 9 aa, Artificial Sequence
  Description of Artificial Sequence: Synthetic peptide
GAQSMQSSC

SEQ ID NO: 8531 - protein, 9 aa, Artificial Sequence
  Description of Artificial Sequence: Synthetic peptide
YAVQTNNIM

SEQ ID NO: 8532 - protein, 9 aa, Artificial Sequence
  Description of Artificial Sequence: Synthetic peptide
WGGMSNNQG

SEQ ID NO: 8533 - protein, 9 aa, Artificial Sequence
  Description of Artificial Sequence: Synthetic peptide
QMVTQLNWG

SEQ ID NO: 8534 - protein, 9 aa, Artificial Sequence
  Description of Artificial Sequence: Synthetic peptide
VPKQGAKQE

SEQ ID NO: 8535 - protein, 9 aa, Artificial Sequence
  Description of Artificial Sequence: Synthetic peptide
DEYQQESFR

SEQ ID NO: 8536 - protein, 9 aa, Artificial Sequence
  Description of Artificial Sequence: Synthetic peptide
GGTRSGKVV

SEQ ID NO: 8537 - protein, 9 aa, Artificial Sequence
  Description of Artificial Sequence: Synthetic peptide
CQNTAIRAI

SEQ ID NO: 8538 - protein, 9 aa, Artificial Sequence
  Description of Artificial Sequence: Synthetic peptide
TIHPPWVTL

SEQ ID NO: 8539 - protein, 9 aa, Artificial Sequence
  Description of Artificial Sequence: Synthetic peptide
CMVSTPKLA

SEQ ID NO: 8540 - protein, 9 aa, Artificial Sequence
  Description of Artificial Sequence: Synthetic peptide
RIWWALYAI

SEQ ID NO: 8541 - protein, 9 aa, Artificial Sequence
  Description of Artificial Sequence: Synthetic peptide
SNTTDVFTW

SEQ ID NO: 8542 - protein, 9 aa, Artificial Sequence
  Description of Artificial Sequence: Synthetic peptide
WTSSKAVYD

SEQ ID NO: 8543 - protein, 9 aa, Artificial Sequence
  Description of Artificial Sequence: Synthetic peptide
ESSFQDNVI

SEQ ID NO: 8544 - protein, 9 aa, Artificial Sequence
  Description of Artificial Sequence: Synthetic peptide
YAHAFHCQP

SEQ ID NO: 8545 - protein, 9 aa, Artificial Sequence
  Description of Artificial Sequence: Synthetic peptide
RRPPKRGTT

SEQ ID NO: 8546 - protein, 9 aa, Artificial Sequence
  Description of Artificial Sequence: Synthetic peptide
QMYATMDTY

SEQ ID NO: 8547 - protein, 9 aa, Artificial Sequence
  Description of Artificial Sequence: Synthetic peptide
EGGQCEKCK

SEQ ID NO: 8548 - protein, 9 aa, Artificial Sequence
  Description of Artificial Sequence: Synthetic peptide
MGDWLGTPT

SEQ ID NO: 8549 - protein, 9 aa, Artificial Sequence
  Description of Artificial Sequence: Synthetic peptide
GVKYATLHD

SEQ ID NO: 8550 - protein, 9 aa, Artificial Sequence
  Description of Artificial Sequence: Synthetic peptide
PWEIEWGYW

SEQ ID NO: 8551 - protein, 9 aa, Artificial Sequence
  Description of Artificial Sequence: Synthetic peptide
MYLLFPVHE

SEQ ID NO: 8552 - protein, 9 aa, Artificial Sequence
  Description of Artificial Sequence: Synthetic peptide
HVLNGTGGP

SEQ ID NO: 8553 - protein, 9 aa, Artificial Sequence
  Description of Artificial Sequence: Synthetic peptide
NIGQSPTQL

SEQ ID NO: 8554 - protein, 9 aa, Artificial Sequence
  Description of Artificial Sequence: Synthetic peptide
VSCMWCQEN

SEQ ID NO: 8555 - protein, 9 aa, Artificial Sequence
  Description of Artificial Sequence: Synthetic peptide
TMSVHYGQV

SEQ ID NO: 8556 - protein, 9 aa, Artificial Sequence
  Description of Artificial Sequence: Synthetic peptide
NAAMITTVC

SEQ ID NO: 8557 - protein, 9 aa, Artificial Sequence
  Description of Artificial Sequence: Synthetic peptide
HAVNSDCKK

SEQ ID NO: 8558 - protein, 9 aa, Artificial Sequence
  Description of Artificial Sequence: Synthetic peptide
NIRPCVNQE

SEQ ID NO: 8559 - protein, 9 aa, Artificial Sequence
  Description of Artificial Sequence: Synthetic peptide
QMECRGGAM

SEQ ID NO: 8560 - protein, 9 aa, Artificial Sequence
  Description of Artificial Sequence: Synthetic peptide
VGVQCPNGG

SEQ ID NO: 8561 - protein, 9 aa, Artificial Sequence
  Description of Artificial Sequence: Synthetic peptide
MQGMQTFWT

SEQ ID NO: 8562 - protein, 9 aa, Artificial Sequence
  Description of Artificial Sequence: Synthetic peptide
QTMGIGGGP

SEQ ID NO: 8563 - protein, 9 aa, Artificial Sequence
  Description of Artificial Sequence: Synthetic peptide
RSQQDRVMA

SEQ ID NO: 8564 - protein, 9 aa, Artificial Sequence
  Description of Artificial Sequence: Synthetic peptide
QQGMCVTAI

SEQ ID NO: 8565 - protein, 9 aa, Artificial Sequence
  Description of Artificial Sequence: Synthetic peptide
AIGPRLIDD

SEQ ID NO: 8566 - protein, 9 aa, Artificial Sequence
  Description of Artificial Sequence: Synthetic peptide
HGINVELGS

SEQ ID NO: 8567 - protein, 9 aa, Artificial Sequence
  Description of Artificial Sequence: Synthetic peptide
NVDGRHPMI

SEQ ID NO: 8568 - protein, 9 aa, Artificial Sequence
  Description of Artificial Sequence: Synthetic peptide
DAARERHWE

SEQ ID NO: 8569 - protein, 9 aa, Artificial Sequence
  Description of Artificial Sequence: Synthetic peptide
QTGTGHWVE

SEQ ID NO: 8570 - protein, 9 aa, Artificial Sequence
  Description of Artificial Sequence: Synthetic peptide
TCGQCVNGV

SEQ ID NO: 8571 - protein, 9 aa, Artificial Sequence
  Description of Artificial Sequence: Synthetic peptide
EGSMFAERQ

SEQ ID NO: 8572 - protein, 9 aa, Artificial Sequence
  Description of Artificial Sequence: Synthetic peptide
HSCKYLMRV

SEQ ID NO: 8573 - protein, 9 aa, Artificial Sequence
  Description of Artificial Sequence: Synthetic peptide
MCDWLGAPT

SEQ ID NO: 8574 - protein, 9 aa, Artificial Sequence
  Description of Artificial Sequence: Synthetic peptide
EVSMFAERP

SEQ ID NO: 8575 - protein, 9 aa, Artificial Sequence
  Description of Artificial Sequence: Synthetic peptide
ESAITSCAW

SEQ ID NO: 8576 - protein, 9 aa, Artificial Sequence
  Description of Artificial Sequence: Synthetic peptide
RVCEMRTVD

SEQ ID NO: 8577 - protein, 9 aa, Artificial Sequence
  Description of Artificial Sequence: Synthetic peptide
AHQGCRPGQ

SEQ ID NO: 8578 - protein, 9 aa, Artificial Sequence
  Description of Artificial Sequence: Synthetic peptide
ANMISPYGL

SEQ ID NO: 8579 - protein, 9 aa, Artificial Sequence
  Description of Artificial Sequence: Synthetic peptide
EKHRCAKDR

SEQ ID NO: 8580 - protein, 9 aa, Artificial Sequence
  Description of Artificial Sequence: Synthetic peptide
TQQRSQATA

SEQ ID NO: 8581 - protein, 9 aa, Artificial Sequence
  Description of Artificial Sequence: Synthetic peptide
IPMSREFPE

SEQ ID NO: 8582 - protein, 9 aa, Artificial Sequence
  Description of Artificial Sequence: Synthetic peptide
GNQLITMSG

SEQ ID NO: 8583 - protein, 9 aa, Artificial Sequence
  Description of Artificial Sequence: Synthetic peptide
YEMTSKCAY

SEQ ID NO: 8584 - protein, 9 aa, Artificial Sequence
  Description of Artificial Sequence: Synthetic peptide
TIGQIPWVW

SEQ ID NO: 8585 - protein, 9 aa, Artificial Sequence
  Description of Artificial Sequence: Synthetic peptide
HHGASLGKY

SEQ ID NO: 8586 - protein, 9 aa, Artificial Sequence
  Description of Artificial Sequence: Synthetic peptide
QMMPQMDCS

SEQ ID NO: 8587 - protein, 9 aa, Artificial Sequence
  Description of Artificial Sequence: Synthetic peptide
DSWQYYNGL

SEQ ID NO: 8588 - protein, 9 aa, Artificial Sequence
  Description of Artificial Sequence: Synthetic peptide
VTYYGHYSV

SEQ ID NO: 8589 - protein, 9 aa, Artificial Sequence
  Description of Artificial Sequence: Synthetic peptide
TTVHMPKHE

SEQ ID NO: 8590 - protein, 9 aa, Artificial Sequence
  Description of Artificial Sequence: Synthetic peptide
QSHHFLNSA

SEQ ID NO: 8591 - protein, 9 aa, Artificial Sequence
  Description of Artificial Sequence: Synthetic peptide
TNTMIWNDC

SEQ ID NO: 8592 - protein, 9 aa, Artificial Sequence
  Description of Artificial Sequence: Synthetic peptide
KAIQASERD

SEQ ID NO: 8593 - protein, 9 aa, Artificial Sequence
  Description of Artificial Sequence: Synthetic peptide
CRSTGMMRQ

SEQ ID NO: 8594 - protein, 9 aa, Artificial Sequence
  Description of Artificial Sequence: Synthetic peptide
TSSLTDVIW

SEQ ID NO: 8595 - protein, 9 aa, Artificial Sequence
  Description of Artificial Sequence: Synthetic peptide
TQAKIECWS

SEQ ID NO: 8596 - protein, 9 aa, Artificial Sequence
  Description of Artificial Sequence: Synthetic peptide
KYAHSSCED

SEQ ID NO: 8597 - protein, 9 aa, Artificial Sequence
  Description of Artificial Sequence: Synthetic peptide
NYENNFRAQ

SEQ ID NO: 8598 - protein, 9 aa, Artificial Sequence
  Description of Artificial Sequence: Synthetic peptide
SPSQKGYGP

SEQ ID NO: 8599 - protein, 9 aa, Artificial Sequence
  Description of Artificial Sequence: Synthetic peptide
QSHGGVVVQ

SEQ ID NO: 8600 - protein, 9 aa, Artificial Sequence
  Description of Artificial Sequence: Synthetic peptide
WIQLAILVC

SEQ ID NO: 8601 - protein, 9 aa, Artificial Sequence
  Description of Artificial Sequence: Synthetic peptide
NTHTGNYRL

SEQ ID NO: 8602 - protein, 9 aa, Artificial Sequence
  Description of Artificial Sequence: Synthetic peptide
EACYLGHCH

SEQ ID NO: 8603 - protein, 9 aa, Artificial Sequence
  Description of Artificial Sequence: Synthetic peptide
DEYQQESFP

SEQ ID NO: 8604 - protein, 9 aa, Artificial Sequence
  Description of Artificial Sequence: Synthetic peptide
YRQQMFERQ

SEQ ID NO: 8605 - protein, 9 aa, Artificial Sequence
  Description of Artificial Sequence: Synthetic peptide
AQQSTMISL

SEQ ID NO: 8606 - protein, 9 aa, Artificial Sequence
  Description of Artificial Sequence: Synthetic peptide
AHQTPWAWI

SEQ ID NO: 8607 - protein, 9 aa, Artificial Sequence
  Description of Artificial Sequence: Synthetic peptide
SISRADLQG

SEQ ID NO: 8608 - protein, 9 aa, Artificial Sequence
  Description of Artificial Sequence: Synthetic peptide
LNVMSIHRC

SEQ ID NO: 8609 - protein, 9 aa, Artificial Sequence
  Description of Artificial Sequence: Synthetic peptide
AGRFHKHYA

SEQ ID NO: 8610 - protein, 9 aa, Artificial Sequence
  Description of Artificial Sequence: Synthetic peptide
GEMTRCFRN

SEQ ID NO: 8611 - protein, 9 aa, Artificial Sequence
  Description of Artificial Sequence: Synthetic peptide
QVKWTANPD

SEQ ID NO: 8612 - protein, 9 aa, Artificial Sequence
  Description of Artificial Sequence: Synthetic peptide
KTLSPHVFA

SEQ ID NO: 8613 - protein, 9 aa, Artificial Sequence
  Description of Artificial Sequence: Synthetic peptide
MGRPGACQA

SEQ ID NO: 8614 - protein, 9 aa, Artificial Sequence
  Description of Artificial Sequence: Synthetic peptide
FMQPYGHGE

SEQ ID NO: 8615 - protein, 9 aa, Artificial Sequence
  Description of Artificial Sequence: Synthetic peptide
DCWCYTTKC

SEQ ID NO: 8616 - protein, 9 aa, Artificial Sequence
  Description of Artificial Sequence: Synthetic peptide
LIRRHCHYP

SEQ ID NO: 8617 - protein, 9 aa, Artificial Sequence
  Description of Artificial Sequence: Synthetic peptide
QMGVTVVQR

SEQ ID NO: 8618 - protein, 9 aa, Artificial Sequence
  Description of Artificial Sequence: Synthetic peptide
VCYNQEKAA

SEQ ID NO: 8619 - protein, 9 aa, Artificial Sequence
  Description of Artificial Sequence: Synthetic peptide
EMNSDRSGI

SEQ ID NO: 8620 - protein, 9 aa, Artificial Sequence
  Description of Artificial Sequence: Synthetic peptide
HLWMCPPRY

SEQ ID NO: 8621 - protein, 9 aa, Artificial Sequence
  Description of Artificial Sequence: Synthetic peptide
TASLTDVIW

SEQ ID NO: 8622 - protein, 9 aa, Artificial Sequence
  Description of Artificial Sequence: Synthetic peptide
LETTMRHGE

SEQ ID NO: 8623 - protein, 9 aa, Artificial Sequence
  Description of Artificial Sequence: Synthetic peptide
FIGFNNAEA

SEQ ID NO: 8624 - protein, 9 aa, Artificial Sequence
  Description of Artificial Sequence: Synthetic peptide
QQQRTVFGM

SEQ ID NO: 8625 - protein, 9 aa, Artificial Sequence
  Description of Artificial Sequence: Synthetic peptide
CYNQFHTYN

SEQ ID NO: 8626 - protein, 9 aa, Artificial Sequence
  Description of Artificial Sequence: Synthetic peptide
LTISHPKSQ

SEQ ID NO: 8627 - protein, 9 aa, Artificial Sequence
  Description of Artificial Sequence: Synthetic peptide
AVNRIQQVH

SEQ ID NO: 8628 - protein, 9 aa, Artificial Sequence
  Description of Artificial Sequence: Synthetic peptide
GWFMIQSMK

SEQ ID NO: 8629 - protein, 9 aa, Artificial Sequence
  Description of Artificial Sequence: Synthetic peptide
WCNWKFAQH

SEQ ID NO: 8630 - protein, 9 aa, Artificial Sequence
  Description of Artificial Sequence: Synthetic peptide
MSYLVKGVG

SEQ ID NO: 8631 - protein, 9 aa, Artificial Sequence
  Description of Artificial Sequence: Synthetic peptide
NTSRELIMP

SEQ ID NO: 8632 - protein, 9 aa, Artificial Sequence
  Description of Artificial Sequence: Synthetic peptide
TVNPCVNGE

SEQ ID NO: 8633 - protein, 9 aa, Artificial Sequence
  Description of Artificial Sequence: Synthetic peptide
QMGHQLCVQ

SEQ ID NO: 8634 - protein, 9 aa, Artificial Sequence
  Description of Artificial Sequence: Synthetic peptide
DERHKWCLE

SEQ ID NO: 8635 - protein, 9 aa, Artificial Sequence
  Description of Artificial Sequence: Synthetic peptide
MWHELITDQ

SEQ ID NO: 8636 - protein, 9 aa, Artificial Sequence
  Description of Artificial Sequence: Synthetic peptide
LTRSGPVGQ

SEQ ID NO: 8637 - protein, 9 aa, Artificial Sequence
  Description of Artificial Sequence: Synthetic peptide
AQFHIHRWQ

SEQ ID NO: 8638 - protein, 9 aa, Artificial Sequence
  Description of Artificial Sequence: Synthetic peptide
VCTPPLNMQ

SEQ ID NO: 8639 - protein, 9 aa, Artificial Sequence
  Description of Artificial Sequence: Synthetic peptide
SWSQLQHTA

SEQ ID NO: 8640 - protein, 9 aa, Artificial Sequence
  Description of Artificial Sequence: Synthetic peptide
VATYIHAMH

SEQ ID NO: 8641 - protein, 9 aa, Artificial Sequence
  Description of Artificial Sequence: Synthetic peptide
STPQGKQRQ

SEQ ID NO: 8642 - protein, 9 aa, Artificial Sequence
  Description of Artificial Sequence: Synthetic peptide
TTTITNRLR

SEQ ID NO: 8643 - protein, 9 aa, Artificial Sequence
  Description of Artificial Sequence: Synthetic peptide
SSLCRTYDN

SEQ ID NO: 8644 - protein, 9 aa, Artificial Sequence
  Description of Artificial Sequence: Synthetic peptide
MLEKRNHWG

SEQ ID NO: 8645 - protein, 9 aa, Artificial Sequence
  Description of Artificial Sequence: Synthetic peptide
NSELLRYTF

SEQ ID NO: 8646 - protein, 9 aa, Artificial Sequence
  Description of Artificial Sequence: Synthetic peptide
CGVGLTQCK

SEQ ID NO: 8647 - protein, 9 aa, Artificial Sequence
  Description of Artificial Sequence: Synthetic peptide
TGQQIHYKG

SEQ ID NO: 8648 - protein, 9 aa, Artificial Sequence
  Description of Artificial Sequence: Synthetic peptide
DLEPIMTQA

SEQ ID NO: 8649 - protein, 9 aa, Artificial Sequence
  Description of Artificial Sequence: Synthetic peptide
PIAQDKVWS

SEQ ID NO: 8650 - protein, 9 aa, Artificial Sequence
  Description of Artificial Sequence: Synthetic peptide
YSTIQGSGP

SEQ ID NO: 8651 - protein, 9 aa, Artificial Sequence
  Description of Artificial Sequence: Synthetic peptide
ATTTIQGKA

SEQ ID NO: 8652 - protein, 9 aa, Artificial Sequence
  Description of Artificial Sequence: Synthetic peptide
ISICAQDIG

SEQ ID NO: 8653 - protein, 9 aa, Artificial Sequence
  Description of Artificial Sequence: Synthetic peptide
STNPNLTGD

SEQ ID NO: 8654 - protein, 9 aa, Artificial Sequence
  Description of Artificial Sequence: Synthetic peptide
THELHGHCV

SEQ ID NO: 8655 - protein, 9 aa, Artificial Sequence
  Description of Artificial Sequence: Synthetic peptide
QEMMIVNCD

SEQ ID NO: 8656 - protein, 9 aa, Artificial Sequence
  Description of Artificial Sequence: Synthetic peptide
EADTFTLIV

SEQ ID NO: 8657 - protein, 9 aa, Artificial Sequence
  Description of Artificial Sequence: Synthetic peptide
GMNAYPAHS

SEQ ID NO: 8658 - protein, 9 aa, Artificial Sequence
  Description of Artificial Sequence: Synthetic peptide
NCRQLGDNM

SEQ ID NO: 8659 - protein, 9 aa, Artificial Sequence
  Description of Artificial Sequence: Synthetic peptide
ARCSMLDHG

SEQ ID NO: 8660 - protein, 9 aa, Artificial Sequence
  Description of Artificial Sequence: Synthetic peptide
ASTWMQSYS

SEQ ID NO: 8661 - protein, 9 aa, Artificial Sequence
  Description of Artificial Sequence: Synthetic peptide
HYCSCHNKY

SEQ ID NO: 8662 - protein, 9 aa, Artificial Sequence
  Description of Artificial Sequence: Synthetic peptide
VSNVTIGCC

SEQ ID NO: 8663 - protein, 9 aa, Artificial Sequence
  Description of Artificial Sequence: Synthetic peptide
DNAFMHHHV

SEQ ID NO: 8664 - protein, 9 aa, Artificial Sequence
  Description of Artificial Sequence: Synthetic peptide
SKVHWDLPC

SEQ ID NO: 8665 - protein, 9 aa, Artificial Sequence
  Description of Artificial Sequence: Synthetic peptide
NPQHQIDIG

SEQ ID NO: 8666 - protein, 9 aa, Artificial Sequence
  Description of Artificial Sequence: Synthetic peptide
MWWCESAMR

SEQ ID NO: 8667 - protein, 9 aa, Artificial Sequence
  Description of Artificial Sequence: Synthetic peptide
FIQCCQDTP

SEQ ID NO: 8668 - protein, 9 aa, Artificial Sequence
  Description of Artificial Sequence: Synthetic peptide
RMVCDGRID

SEQ ID NO: 8669 - protein, 9 aa, Artificial Sequence
  Description of Artificial Sequence: Synthetic peptide
ELPRYYGQV

SEQ ID NO: 8670 - protein, 9 aa, Artificial Sequence
  Description of Artificial Sequence: Synthetic peptide
VTAFTTCHY

SEQ ID NO: 8671 - protein, 9 aa, Artificial Sequence
  Description of Artificial Sequence: Synthetic peptide
TCSSTEGSG

SEQ ID NO: 8672 - protein, 9 aa, Artificial Sequence
  Description of Artificial Sequence: Synthetic peptide
EWRTISYGN

SEQ ID NO: 8673 - protein, 9 aa, Artificial Sequence
  Description of Artificial Sequence: Synthetic peptide
QSTPTLGPK

SEQ ID NO: 8674 - protein, 9 aa, Artificial Sequence
  Description of Artificial Sequence: Synthetic peptide
GWALIVNDL

SEQ ID NO: 8675 - protein, 9 aa, Artificial Sequence
  Description of Artificial Sequence: Synthetic peptide
VTILGLNPT

SEQ ID NO: 8676 - protein, 9 aa, Artificial Sequence
  Description of Artificial Sequence: Synthetic peptide
VTCHWHQGG

SEQ ID NO: 8677 - protein, 9 aa, Artificial Sequence
  Description of Artificial Sequence: Synthetic peptide
QGSVVHSPS

SEQ ID NO: 8678 - protein, 9 aa, Artificial Sequence
  Description of Artificial Sequence: Synthetic peptide
NQARENWFH

SEQ ID NO: 8679 - protein, 9 aa, Artificial Sequence
  Description of Artificial Sequence: Synthetic peptide
HIKVCTLGD

SEQ ID NO: 8680 - protein, 9 aa, Artificial Sequence
  Description of Artificial Sequence: Synthetic peptide
QYYWFAQFL

SEQ ID NO: 8681 - protein, 9 aa, Artificial Sequence
  Description of Artificial Sequence: Synthetic peptide
LKVDHKIGD

SEQ ID NO: 8682 - protein, 9 aa, Artificial Sequence
  Description of Artificial Sequence: Synthetic peptide
DSPAFHQSG

SEQ ID NO: 8683 - protein, 9 aa, Artificial Sequence
  Description of Artificial Sequence: Synthetic peptide
WSCRSICPP

SEQ ID NO: 8684 - protein, 9 aa, Artificial Sequence
  Description of Artificial Sequence: Synthetic peptide
QHATTCTHP

SEQ ID NO: 8685 - protein, 9 aa, Artificial Sequence
  Description of Artificial Sequence: Synthetic peptide
QYQHAVWAP

SEQ ID NO: 8686 - protein, 9 aa, Artificial Sequence
  Description of Artificial Sequence: Synthetic peptide
LVCSNVDDR

SEQ ID NO: 8687 - protein, 9 aa, Artificial Sequence
  Description of Artificial Sequence: Synthetic peptide
GKEHMPHHM

SEQ ID NO: 8688 - protein, 9 aa, Artificial Sequence
  Description of Artificial Sequence: Synthetic peptide
SMSDCEVSF

SEQ ID NO: 8689 - protein, 9 aa, Artificial Sequence
  Description of Artificial Sequence: Synthetic peptide
DHIWLHWME

SEQ ID NO: 8690 - protein, 9 aa, Artificial Sequence
  Description of Artificial Sequence: Synthetic peptide
WSTLYLMTS

SEQ ID NO: 8691 - protein, 9 aa, Artificial Sequence
  Description of Artificial Sequence: Synthetic peptide
MANDQRVDY

SEQ ID NO: 8692 - protein, 9 aa, Artificial Sequence
  Description of Artificial Sequence: Synthetic peptide
SYWDVLLLV

SEQ ID NO: 8693 - protein, 9 aa, Artificial Sequence
  Description of Artificial Sequence: Synthetic peptide
KMGTLHNME

SEQ ID NO: 8694 - protein, 9 aa, Artificial Sequence
  Description of Artificial Sequence: Synthetic peptide
DHHRTSAVR

SEQ ID NO: 8695 - protein, 9 aa, Artificial Sequence
  Description of Artificial Sequence: Synthetic peptide
MNTPCQQAP

SEQ ID NO: 8696 - protein, 9 aa, Artificial Sequence
  Description of Artificial Sequence: Synthetic peptide
NSTHNTSYY

SEQ ID NO: 8697 - protein, 9 aa, Artificial Sequence
  Description of Artificial Sequence: Synthetic peptide
AVSMFAERQ

SEQ ID NO: 8698 - protein, 9 aa, Artificial Sequence
  Description of Artificial Sequence: Synthetic peptide
STDLSNHFQ

SEQ ID NO: 8699 - protein, 9 aa, Artificial Sequence
  Description of Artificial Sequence: Synthetic peptide
DSIIKDQSA

SEQ ID NO: 8700 - protein, 9 aa, Artificial Sequence
  Description of Artificial Sequence: Synthetic peptide
FCGKGANQI

SEQ ID NO: 8701 - protein, 9 aa, Artificial Sequence
  Description of Artificial Sequence: Synthetic peptide
TQRSTQWSK

SEQ ID NO: 8702 - protein, 9 aa, Artificial Sequence
  Description of Artificial Sequence: Synthetic peptide
CHYQINKFA

SEQ ID NO: 8703 - protein, 9 aa, Artificial Sequence
  Description of Artificial Sequence: Synthetic peptide
QATPACPAV

SEQ ID NO: 8704 - protein, 9 aa, Artificial Sequence
  Description of Artificial Sequence: Synthetic peptide
DVFWPDSFR

SEQ ID NO: 8705 - protein, 9 aa, Artificial Sequence
  Description of Artificial Sequence: Synthetic peptide
FVIKPNQAT

SEQ ID NO: 8706 - protein, 9 aa, Artificial Sequence
  Description of Artificial Sequence: Synthetic peptide
CRKSKEVCA

SEQ ID NO: 8707 - protein, 9 aa, Artificial Sequence
  Description of Artificial Sequence: Synthetic peptide
ASGFGHWWG

SEQ ID NO: 8708 - protein, 9 aa, Artificial Sequence
  Description of Artificial Sequence: Synthetic peptide
RKRTAGVHF

SEQ ID NO: 8709 - protein, 9 aa, Artificial Sequence
  Description of Artificial Sequence: Synthetic peptide
TYMYRSDCS

SEQ ID NO: 8710 - protein, 9 aa, Artificial Sequence
  Description of Artificial Sequence: Synthetic peptide
MSVKKECGG

SEQ ID NO: 8711 - protein, 9 aa, Artificial Sequence
  Description of Artificial Sequence: Synthetic peptide
WHFLMTFYI

SEQ ID NO: 8712 - protein, 9 aa, Artificial Sequence
  Description of Artificial Sequence: Synthetic peptide
IADDYFMYH

SEQ ID NO: 8713 - protein, 9 aa, Artificial Sequence
  Description of Artificial Sequence: Synthetic peptide
RIHDTMSDY

SEQ ID NO: 8714 - protein, 9 aa, Artificial Sequence
  Description of Artificial Sequence: Synthetic peptide
CNMPQQCME

SEQ ID NO: 8715 - protein, 9 aa, Artificial Sequence
  Description of Artificial Sequence: Synthetic peptide
TVGMRQAMM

SEQ ID NO: 8716 - protein, 9 aa, Artificial Sequence
  Description of Artificial Sequence: Synthetic peptide
KKIFCSRDY

SEQ ID NO: 8717 - protein, 9 aa, Artificial Sequence
  Description of Artificial Sequence: Synthetic peptide
NHDEKMWAP

SEQ ID NO: 8718 - protein, 9 aa, Artificial Sequence
  Description of Artificial Sequence: Synthetic peptide
LCAVCGGCD

SEQ ID NO: 8719 - protein, 9 aa, Artificial Sequence
  Description of Artificial Sequence: Synthetic peptide
VHPQTHVTD

SEQ ID NO: 8720 - protein, 9 aa, Artificial Sequence
  Description of Artificial Sequence: Synthetic peptide
QHEQSNRIW

SEQ ID NO: 8721 - protein, 9 aa, Artificial Sequence
  Description of Artificial Sequence: Synthetic peptide
EAYATVHMC

SEQ ID NO: 8722 - protein, 9 aa, Artificial Sequence
  Description of Artificial Sequence: Synthetic peptide
LMHTYVVQQ

SEQ ID NO: 8723 - protein, 9 aa, Artificial Sequence
  Description of Artificial Sequence: Synthetic peptide
DACAAHDHW

SEQ ID NO: 8724 - protein, 9 aa, Artificial Sequence
  Description of Artificial Sequence: Synthetic peptide
DIMMKHCRR

SEQ ID NO: 8725 - protein, 9 aa, Artificial Sequence
  Description of Artificial Sequence: Synthetic peptide
LTQYKALVQ

SEQ ID NO: 8726 - protein, 9 aa, Artificial Sequence
  Description of Artificial Sequence: Synthetic peptide
MDKHKIGYA

SEQ ID NO: 8727 - protein, 9 aa, Artificial Sequence
  Description of Artificial Sequence: Synthetic peptide
ESDWLLGTI

SEQ ID NO: 8728 - protein, 9 aa, Artificial Sequence
  Description of Artificial Sequence: Synthetic peptide
NVGYYKWQS

SEQ ID NO: 8729 - protein, 9 aa, Artificial Sequence
  Description of Artificial Sequence: Synthetic peptide
IECFPRESI

SEQ ID NO: 8730 - protein, 9 aa, Artificial Sequence
  Description of Artificial Sequence: Synthetic peptide
LSMPYAPTT

SEQ ID NO: 8731 - protein, 9 aa, Artificial Sequence
  Description of Artificial Sequence: Synthetic peptide
AVKILMHDH

SEQ ID NO: 8732 - protein, 9 aa, Artificial Sequence
  Description of Artificial Sequence: Synthetic peptide
THELHGHCS

SEQ ID NO: 8733 - protein, 9 aa, Artificial Sequence
  Description of Artificial Sequence: Synthetic peptide
NSQTIMLHQ

SEQ ID NO: 8734 - protein, 9 aa, Artificial Sequence
  Description of Artificial Sequence: Synthetic peptide
HIHMSDRGT

SEQ ID NO: 8735 - protein, 9 aa, Artificial Sequence
  Description of Artificial Sequence: Synthetic peptide
TGRAWMWHS

SEQ ID NO: 8736 - protein, 9 aa, Artificial Sequence
  Description of Artificial Sequence: Synthetic peptide
NSHAHGHMK

SEQ ID NO: 8737 - protein, 9 aa, Artificial Sequence
  Description of Artificial Sequence: Synthetic peptide
DYTIMPYIA

SEQ ID NO: 8738 - protein, 9 aa, Artificial Sequence
  Description of Artificial Sequence: Synthetic peptide
SVTYHERHP

SEQ ID NO: 8739 - protein, 9 aa, Artificial Sequence
  Description of Artificial Sequence: Synthetic peptide
CTAMGWVHN

SEQ ID NO: 8740 - protein, 9 aa, Artificial Sequence
  Description of Artificial Sequence: Synthetic peptide
SVTYHKWHP

SEQ ID NO: 8741 - protein, 9 aa, Artificial Sequence
  Description of Artificial Sequence: Synthetic peptide
VSCEFGQEY

SEQ ID NO: 8742 - protein, 9 aa, Artificial Sequence
  Description of Artificial Sequence: Synthetic peptide
KDLEYQRSN

SEQ ID NO: 8743 - protein, 9 aa, Artificial Sequence
  Description of Artificial Sequence: Synthetic peptide
AKGPHWGQG

SEQ ID NO: 8744 - protein, 9 aa, Artificial Sequence
  Description of Artificial Sequence: Synthetic peptide
RYHHSCDSH

SEQ ID NO: 8745 - protein, 9 aa, Artificial Sequence
  Description of Artificial Sequence: Synthetic peptide
ACTWLHGTN

SEQ ID NO: 8746 - protein, 9 aa, Artificial Sequence
  Description of Artificial Sequence: Synthetic peptide
SIHNVLVQN

SEQ ID NO: 8747 - protein, 9 aa, Artificial Sequence
  Description of Artificial Sequence: Synthetic peptide
KVDQNTNWC

SEQ ID NO: 8748 - protein, 9 aa, Artificial Sequence
  Description of Artificial Sequence: Synthetic peptide
FGEFTTDEN

SEQ ID NO: 8749 - protein, 9 aa, Artificial Sequence
  Description of Artificial Sequence: Synthetic peptide
VWMRFDYVD

SEQ ID NO: 8750 - protein, 9 aa, Artificial Sequence
  Description of Artificial Sequence: Synthetic peptide
MAKKREVGV

SEQ ID NO: 8751 - protein, 9 aa, Artificial Sequence
  Description of Artificial Sequence: Synthetic peptide
MDEHFSVGC

SEQ ID NO: 8752 - protein, 9 aa, Artificial Sequence
  Description of Artificial Sequence: Synthetic peptide
EFRCRLIDS

SEQ ID NO: 8753 - protein, 9 aa, Artificial Sequence
  Description of Artificial Sequence: Synthetic peptide
NHCHCIAHP

SEQ ID NO: 8754 - protein, 9 aa, Artificial Sequence
  Description of Artificial Sequence: Synthetic peptide
IIMLGCTGR

SEQ ID NO: 8755 - protein, 9 aa, Artificial Sequence
  Description of Artificial Sequence: Synthetic peptide
VTLTSKMCQ

SEQ ID NO: 8756 - protein, 9 aa, Artificial Sequence
  Description of Artificial Sequence: Synthetic peptide
RAECRYQTT

SEQ ID NO: 8757 - protein, 9 aa, Artificial Sequence
  Description of Artificial Sequence: Synthetic peptide
FDVHKMCIY

SEQ ID NO: 8758 - protein, 9 aa, Artificial Sequence
  Description of Artificial Sequence: Synthetic peptide
VSADTPYMN

SEQ ID NO: 8759 - protein, 9 aa, Artificial Sequence
  Description of Artificial Sequence: Synthetic peptide
THRTRHTDC

SEQ ID NO: 8760 - protein, 9 aa, Artificial Sequence
  Description of Artificial Sequence: Synthetic peptide
DYYLNRASP

SEQ ID NO: 8761 - protein, 9 aa, Artificial Sequence
  Description of Artificial Sequence: Synthetic peptide
SVSTKPHAE

SEQ ID NO: 8762 - protein, 9 aa, Artificial Sequence
  Description of Artificial Sequence: Synthetic peptide
VADWIGRTP

SEQ ID NO: 8763 - protein, 9 aa, Artificial Sequence
  Description of Artificial Sequence: Synthetic peptide
DLYIVMNQA

SEQ ID NO: 8764 - protein, 9 aa, Artificial Sequence
  Description of Artificial Sequence: Synthetic peptide
NPIPGYFEQ

SEQ ID NO: 8765 - protein, 9 aa, Artificial Sequence
  Description of Artificial Sequence: Synthetic peptide
SCKWIQSNR

SEQ ID NO: 8766 - protein, 9 aa, Artificial Sequence
  Description of Artificial Sequence: Synthetic peptide
QWGVISGHA

SEQ ID NO: 8767 - protein, 9 aa, Artificial Sequence
  Description of Artificial Sequence: Synthetic peptide
ESEFGHWWG

SEQ ID NO: 8768 - protein, 9 aa, Artificial Sequence
  Description of Artificial Sequence: Synthetic peptide
KKAGAKDAL

SEQ ID NO: 8769 - protein, 9 aa, Artificial Sequence
  Description of Artificial Sequence: Synthetic peptide
CTCEPRSAW

SEQ ID NO: 8770 - protein, 9 aa, Artificial Sequence
  Description of Artificial Sequence: Synthetic peptide
YLYHSMMKQ

SEQ ID NO: 8771 - protein, 9 aa, Artificial Sequence
  Description of Artificial Sequence: Synthetic peptide
ILRTIPNRT

SEQ ID NO: 8772 - protein, 9 aa, Artificial Sequence
  Description of Artificial Sequence: Synthetic peptide
IEESIQNAD

SEQ ID NO: 8773 - protein, 9 aa, Artificial Sequence
  Description of Artificial Sequence: Synthetic peptide
AMMPKTETH

SEQ ID NO: 8774 - protein, 9 aa, Artificial Sequence
  Description of Artificial Sequence: Synthetic peptide
VVTLHSKAR

SEQ ID NO: 8775 - protein, 9 aa, Artificial Sequence
  Description of Artificial Sequence: Synthetic peptide
VCCSHADSA

SEQ ID NO: 8776 - protein, 9 aa, Artificial Sequence
  Description of Artificial Sequence: Synthetic peptide
DGSSHFTMQ

SEQ ID NO: 8777 - protein, 9 aa, Artificial Sequence
  Description of Artificial Sequence: Synthetic peptide
VAYPIQTDA

SEQ ID NO: 8778 - protein, 9 aa, Artificial Sequence
  Description of Artificial Sequence: Synthetic peptide
YAQQSPHCE

SEQ ID NO: 8779 - protein, 9 aa, Artificial Sequence
  Description of Artificial Sequence: Synthetic peptide
YMLHAIMES

SEQ ID NO: 8780 - protein, 9 aa, Artificial Sequence
  Description of Artificial Sequence: Synthetic peptide
AAVITINGL

SEQ ID NO: 8781 - protein, 9 aa, Artificial Sequence
  Description of Artificial Sequence: Synthetic peptide
LNMVWGQKF

SEQ ID NO: 8782 - protein, 9 aa, Artificial Sequence
  Description of Artificial Sequence: Synthetic peptide
NALPAQQHH

SEQ ID NO: 8783 - protein, 9 aa, Artificial Sequence
  Description of Artificial Sequence: Synthetic peptide
QKPTIWDHF

SEQ ID NO: 8784 - protein, 9 aa, Artificial Sequence
  Description of Artificial Sequence: Synthetic peptide
YQDIRQCIF

SEQ ID NO: 8785 - protein, 9 aa, Artificial Sequence
  Description of Artificial Sequence: Synthetic peptide
TCTHFEFVD

SEQ ID NO: 8786 - protein, 9 aa, Artificial Sequence
  Description of Artificial Sequence: Synthetic peptide
TLEPAYWHE

SEQ ID NO: 8787 - protein, 9 aa, Artificial Sequence
  Description of Artificial Sequence: Synthetic peptide
PVHFWTQSK

SEQ ID NO: 8788 - protein, 9 aa, Artificial Sequence
  Description of Artificial Sequence: Synthetic peptide
RCKRAVQVV

SEQ ID NO: 8789 - protein, 9 aa, Artificial Sequence
  Description of Artificial Sequence: Synthetic peptide
WCESWGPQG

SEQ ID NO: 8790 - protein, 9 aa, Artificial Sequence
  Description of Artificial Sequence: Synthetic peptide
AVVYKMNYH

SEQ ID NO: 8791 - protein, 9 aa, Artificial Sequence
  Description of Artificial Sequence: Synthetic peptide
KNHMMLYVN

SEQ ID NO: 8792 - protein, 9 aa, Artificial Sequence
  Description of Artificial Sequence: Synthetic peptide
ANMCGCDSF

SEQ ID NO: 8793 - protein, 9 aa, Artificial Sequence
  Description of Artificial Sequence: Synthetic peptide
LFSDHGVSY

SEQ ID NO: 8794 - protein, 9 aa, Artificial Sequence
  Description of Artificial Sequence: Synthetic peptide
TWSCCLHQY

SEQ ID NO: 8795 - protein, 9 aa, Artificial Sequence
  Description of Artificial Sequence: Synthetic peptide
WTDSDSDCT

SEQ ID NO: 8796 - protein, 9 aa, Artificial Sequence
  Description of Artificial Sequence: Synthetic peptide
VIDCCYSCD

SEQ ID NO: 8797 - protein, 9 aa, Artificial Sequence
  Description of Artificial Sequence: Synthetic peptide
PIAQDQVLS

SEQ ID NO: 8798 - protein, 9 aa, Artificial Sequence
  Description of Artificial Sequence: Synthetic peptide
LCRWYRYAN

SEQ ID NO: 8799 - protein, 9 aa, Artificial Sequence
  Description of Artificial Sequence: Synthetic peptide
QNIRPGVPT

SEQ ID NO: 8800 - protein, 9 aa, Artificial Sequence
  Description of Artificial Sequence: Synthetic peptide
RTTDHRADE

SEQ ID NO: 8801 - protein, 9 aa, Artificial Sequence
  Description of Artificial Sequence: Synthetic peptide
QIHSEHCTT

SEQ ID NO: 8802 - protein, 9 aa, Artificial Sequence
  Description of Artificial Sequence: Synthetic peptide
QSHDGVMVQ

SEQ ID NO: 8803 - protein, 9 aa, Artificial Sequence
  Description of Artificial Sequence: Synthetic peptide
DLLANTICT

SEQ ID NO: 8804 - protein, 9 aa, Artificial Sequence
  Description of Artificial Sequence: Synthetic peptide
SANIVFSVC

SEQ ID NO: 8805 - protein, 9 aa, Artificial Sequence
  Description of Artificial Sequence: Synthetic peptide
LSMTRELWH

SEQ ID NO: 8806 - protein, 9 aa, Artificial Sequence
  Description of Artificial Sequence: Synthetic peptide
MLHKYLHMW

SEQ ID NO: 8807 - protein, 9 aa, Artificial Sequence
  Description of Artificial Sequence: Synthetic peptide
QYAITYQKG

SEQ ID NO: 8808 - protein, 9 aa, Artificial Sequence
  Description of Artificial Sequence: Synthetic peptide
VQMYWSSKD

SEQ ID NO: 8809 - protein, 9 aa, Artificial Sequence
  Description of Artificial Sequence: Synthetic peptide
GFNLMHMAG

SEQ ID NO: 8810 - protein, 9 aa, Artificial Sequence
  Description of Artificial Sequence: Synthetic peptide
LFYSPMHTH

SEQ ID NO: 8811 - protein, 9 aa, Artificial Sequence
  Description of Artificial Sequence: Synthetic peptide
VKAKKMANP

SEQ ID NO: 8812 - protein, 9 aa, Artificial Sequence
  Description of Artificial Sequence: Synthetic peptide
NCMPTIAGS

SEQ ID NO: 8813 - protein, 9 aa, Artificial Sequence
  Description of Artificial Sequence: Synthetic peptide
SHWQMQVMA

SEQ ID NO: 8814 - protein, 9 aa, Artificial Sequence
  Description of Artificial Sequence: Synthetic peptide
HIMQEGRSS

SEQ ID NO: 8815 - protein, 9 aa, Artificial Sequence
  Description of Artificial Sequence: Synthetic peptide
HFAMKCHNN

SEQ ID NO: 8816 - protein, 9 aa, Artificial Sequence
  Description of Artificial Sequence: Synthetic peptide
EIIQAHLVN

SEQ ID NO: 8817 - protein, 9 aa, Artificial Sequence
  Description of Artificial Sequence: Synthetic peptide
VKNALCQHM

SEQ ID NO: 8818 - protein, 9 aa, Artificial Sequence
  Description of Artificial Sequence: Synthetic peptide
KTWDAHRSS

SEQ ID NO: 8819 - protein, 9 aa, Artificial Sequence
  Description of Artificial Sequence: Synthetic peptide
IRGFMQNIY

SEQ ID NO: 8820 - protein, 9 aa, Artificial Sequence
  Description of Artificial Sequence: Synthetic peptide
VSYAPMDAQ

SEQ ID NO: 8821 - protein, 9 aa, Artificial Sequence
  Description of Artificial Sequence: Synthetic peptide
SGSMTQHHT

SEQ ID NO: 8822 - protein, 9 aa, Artificial Sequence
  Description of Artificial Sequence: Synthetic peptide
AICTTASFD

SEQ ID NO: 8823 - protein, 9 aa, Artificial Sequence
  Description of Artificial Sequence: Synthetic peptide
YPTECNHLT

SEQ ID NO: 8824 - protein, 9 aa, Artificial Sequence
  Description of Artificial Sequence: Synthetic peptide
QSQHLAYKG

SEQ ID NO: 8825 - protein, 9 aa, Artificial Sequence
  Description of Artificial Sequence: Synthetic peptide
LKAQAVTVT

SEQ ID NO: 8826 - protein, 9 aa, Artificial Sequence
  Description of Artificial Sequence: Synthetic peptide
CTVQFELGC

SEQ ID NO: 8827 - protein, 9 aa, Artificial Sequence
  Description of Artificial Sequence: Synthetic peptide
GTSQLQHMA

SEQ ID NO: 8828 - protein, 9 aa, Artificial Sequence
  Description of Artificial Sequence: Synthetic peptide
PIYCNALCS

SEQ ID NO: 8829 - protein, 9 aa, Artificial Sequence
  Description of Artificial Sequence: Synthetic peptide
VSKPDMHVS

SEQ ID NO: 8830 - protein, 9 aa, Artificial Sequence
  Description of Artificial Sequence: Synthetic peptide
GPLVCISAG

SEQ ID NO: 8831 - protein, 9 aa, Artificial Sequence
  Description of Artificial Sequence: Synthetic peptide
HKVKFGALH

SEQ ID NO: 8832 - protein, 9 aa, Artificial Sequence
  Description of Artificial Sequence: Synthetic peptide
TQGWLAAGH

SEQ ID NO: 8833 - protein, 9 aa, Artificial Sequence
  Description of Artificial Sequence: Synthetic peptide
GPRLIVHKL

SEQ ID NO: 8834 - protein, 9 aa, Artificial Sequence
  Description of Artificial Sequence: Synthetic peptide
MFGFSYSDG

SEQ ID NO: 8835 - protein, 9 aa, Artificial Sequence
  Description of Artificial Sequence: Synthetic peptide
TMGMANCGM

SEQ ID NO: 8836 - protein, 9 aa, Artificial Sequence
  Description of Artificial Sequence: Synthetic peptide
QSAIMSART

SEQ ID NO: 8837 - protein, 9 aa, Artificial Sequence
  Description of Artificial Sequence: Synthetic peptide
VWGMAYTAC

SEQ ID NO: 8838 - protein, 9 aa, Artificial Sequence
  Description of Artificial Sequence: Synthetic peptide
DATFMKNAF

SEQ ID NO: 8839 - protein, 9 aa, Artificial Sequence
  Description of Artificial Sequence: Synthetic peptide
TEGPMHRVW

SEQ ID NO: 8840 - protein, 9 aa, Artificial Sequence
  Description of Artificial Sequence: Synthetic peptide
FFRICDSYI

SEQ ID NO: 8841 - protein, 9 aa, Artificial Sequence
  Description of Artificial Sequence: Synthetic peptide
CTALVNEDL

SEQ ID NO: 8842 - protein, 9 aa, Artificial Sequence
  Description of Artificial Sequence: Synthetic peptide
SQAHQNRAC

SEQ ID NO: 8843 - protein, 9 aa, Artificial Sequence
  Description of Artificial Sequence: Synthetic peptide
AMIGHGAYA

SEQ ID NO: 8844 - protein, 9 aa, Artificial Sequence
  Description of Artificial Sequence: Synthetic peptide
HAETHHVGL

SEQ ID NO: 8845 - protein, 9 aa, Artificial Sequence
  Description of Artificial Sequence: Synthetic peptide
ATVDVKGSH

SEQ ID NO: 8846 - protein, 9 aa, Artificial Sequence
  Description of Artificial Sequence: Synthetic peptide
SSDGESHYI

SEQ ID NO: 8847 - protein, 9 aa, Artificial Sequence
  Description of Artificial Sequence: Synthetic peptide
RTLLPNANS

SEQ ID NO: 8848 - protein, 9 aa, Artificial Sequence
  Description of Artificial Sequence: Synthetic peptide
ITCNWCVMP

SEQ ID NO: 8849 - protein, 9 aa, Artificial Sequence
  Description of Artificial Sequence: Synthetic peptide
GSLLQGVSD

SEQ ID NO: 8850 - protein, 9 aa, Artificial Sequence
  Description of Artificial Sequence: Synthetic peptide
FCIMASDMA

SEQ ID NO: 8851 - protein, 9 aa, Artificial Sequence
  Description of Artificial Sequence: Synthetic peptide
QGAFQMMLP

SEQ ID NO: 8852 - protein, 9 aa, Artificial Sequence
  Description of Artificial Sequence: Synthetic peptide
FMWTTHRWH

SEQ ID NO: 8853 - protein, 9 aa, Artificial Sequence
  Description of Artificial Sequence: Synthetic peptide
MFAQQMGVD

SEQ ID NO: 8854 - protein, 9 aa, Artificial Sequence
  Description of Artificial Sequence: Synthetic peptide
ALVMIILQG

SEQ ID NO: 8855 - protein, 9 aa, Artificial Sequence
  Description of Artificial Sequence: Synthetic peptide
ATISTESEV

SEQ ID NO: 8856 - protein, 9 aa, Artificial Sequence
  Description of Artificial Sequence: Synthetic peptide
LTCNWTHHG

SEQ ID NO: 8857 - protein, 9 aa, Artificial Sequence
  Description of Artificial Sequence: Synthetic peptide
TFKEYQGYH

SEQ ID NO: 8858 - protein, 9 aa, Artificial Sequence
  Description of Artificial Sequence: Synthetic peptide
IRQPIHMTP

SEQ ID NO: 8859 - protein, 9 aa, Artificial Sequence
  Description of Artificial Sequence: Synthetic peptide
QTAMWCWQE

SEQ ID NO: 8860 - protein, 9 aa, Artificial Sequence
  Description of Artificial Sequence: Synthetic peptide
HIEVCTLGA

SEQ ID NO: 8861 - protein, 9 aa, Artificial Sequence
  Description of Artificial Sequence: Synthetic peptide
QTHLKLECE

SEQ ID NO: 8862 - protein, 9 aa, Artificial Sequence
  Description of Artificial Sequence: Synthetic peptide
GRNEQGYCH

SEQ ID NO: 8863 - protein, 9 aa, Artificial Sequence
  Description of Artificial Sequence: Synthetic peptide
TFMQNTYQG

SEQ ID NO: 8864 - protein, 9 aa, Artificial Sequence
  Description of Artificial Sequence: Synthetic peptide
LTNYHIAQE

SEQ ID NO: 8865 - protein, 9 aa, Artificial Sequence
  Description of Artificial Sequence: Synthetic peptide
ATTEKCRSI

SEQ ID NO: 8866 - protein, 9 aa, Artificial Sequence
  Description of Artificial Sequence: Synthetic peptide
ENAQMKCLM

SEQ ID NO: 8867 - protein, 9 aa, Artificial Sequence
  Description of Artificial Sequence: Synthetic peptide
HKLWYWAFF

SEQ ID NO: 8868 - protein, 9 aa, Artificial Sequence
  Description of Artificial Sequence: Synthetic peptide
AHAFRHKHF

SEQ ID NO: 8869 - protein, 9 aa, Artificial Sequence
  Description of Artificial Sequence: Synthetic peptide
KFICTTITC

SEQ ID NO: 8870 - protein, 9 aa, Artificial Sequence
  Description of Artificial Sequence: Synthetic peptide
QPGIVICKK

SEQ ID NO: 8871 - protein, 9 aa, Artificial Sequence
  Description of Artificial Sequence: Synthetic peptide
IMGYKCKWL

SEQ ID NO: 8872 - protein, 9 aa, Artificial Sequence
  Description of Artificial Sequence: Synthetic peptide
QPGYMNKLW

SEQ ID NO: 8873 - protein, 9 aa, Artificial Sequence
  Description of Artificial Sequence: Synthetic peptide
QCDAALNWS

SEQ ID NO: 8874 - protein, 9 aa, Artificial Sequence
  Description of Artificial Sequence: Synthetic peptide
ISTVCPKIF

SEQ ID NO: 8875 - protein, 9 aa, Artificial Sequence
  Description of Artificial Sequence: Synthetic peptide
NDQHAPCTE

SEQ ID NO: 8876 - protein, 9 aa, Artificial Sequence
  Description of Artificial Sequence: Synthetic peptide
ASSHRHWVY

SEQ ID NO: 8877 - protein, 9 aa, Artificial Sequence
  Description of Artificial Sequence: Synthetic peptide
AMMLFQTSY

SEQ ID NO: 8878 - protein, 9 aa, Artificial Sequence
  Description of Artificial Sequence: Synthetic peptide
SKEDLCHQQ

SEQ ID NO: 8879 - protein, 9 aa, Artificial Sequence
  Description of Artificial Sequence: Synthetic peptide
AKIHGAWNA

SEQ ID NO: 8880 - protein, 9 aa, Artificial Sequence
  Description of Artificial Sequence: Synthetic peptide
ASAPRVNEQ

SEQ ID NO: 8881 - protein, 9 aa, Artificial Sequence
  Description of Artificial Sequence: Synthetic peptide
SCPWKCPIV

SEQ ID NO: 8882 - protein, 9 aa, Artificial Sequence
  Description of Artificial Sequence: Synthetic peptide
PNRYRPFCC

SEQ ID NO: 8883 - protein, 9 aa, Artificial Sequence
  Description of Artificial Sequence: Synthetic peptide
DHLRDHPLY

SEQ ID NO: 8884 - protein, 9 aa, Artificial Sequence
  Description of Artificial Sequence: Synthetic peptide
GNGTVGKAN

SEQ ID NO: 8885 - protein, 9 aa, Artificial Sequence
  Description of Artificial Sequence: Synthetic peptide
EQAGAASMW

SEQ ID NO: 8886 - protein, 9 aa, Artificial Sequence
  Description of Artificial Sequence: Synthetic peptide
VQKLTLNAK

SEQ ID NO: 8887 - protein, 9 aa, Artificial Sequence
  Description of Artificial Sequence: Synthetic peptide
GHNHMYTQP

SEQ ID NO: 8888 - protein, 9 aa, Artificial Sequence
  Description of Artificial Sequence: Synthetic peptide
VSKTPWERD

SEQ ID NO: 8889 - protein, 9 aa, Artificial Sequence
  Description of Artificial Sequence: Synthetic peptide
QSCHVMNMP

SEQ ID NO: 8890 - protein, 9 aa, Artificial Sequence
  Description of Artificial Sequence: Synthetic peptide
IVLWFVNTT

SEQ ID NO: 8891 - protein, 9 aa, Artificial Sequence
  Description of Artificial Sequence: Synthetic peptide
WCQHIPHNG

SEQ ID NO: 8892 - protein, 9 aa, Artificial Sequence
  Description of Artificial Sequence: Synthetic peptide
CIAREYTGY

SEQ ID NO: 8893 - protein, 9 aa, Artificial Sequence
  Description of Artificial Sequence: Synthetic peptide
YFVVNHFWS

SEQ ID NO: 8894 - protein, 9 aa, Artificial Sequence
  Description of Artificial Sequence: Synthetic peptide
STLEDEKPY

SEQ ID NO: 8895 - protein, 9 aa, Artificial Sequence
  Description of Artificial Sequence: Synthetic peptide
ARCHDMWGH

SEQ ID NO: 8896 - protein, 9 aa, Artificial Sequence
  Description of Artificial Sequence: Synthetic peptide
MAAIKWYMS

SEQ ID NO: 8897 - protein, 9 aa, Artificial Sequence
  Description of Artificial Sequence: Synthetic peptide
WMLHGWATL

SEQ ID NO: 8898 - protein, 9 aa, Artificial Sequence
  Description of Artificial Sequence: Synthetic peptide
MVDCMKWHE

SEQ ID NO: 8899 - protein, 9 aa, Artificial Sequence
  Description of Artificial Sequence: Synthetic peptide
AGMYSFSGE

SEQ ID NO: 8900 - protein, 9 aa, Artificial Sequence
  Description of Artificial Sequence: Synthetic peptide
VALQTKIEQ

SEQ ID NO: 8901 - protein, 9 aa, Artificial Sequence
  Description of Artificial Sequence: Synthetic peptide
GTQNLLHGY

SEQ ID NO: 8902 - protein, 9 aa, Artificial Sequence
  Description of Artificial Sequence: Synthetic peptide
MTQYKALAQ

SEQ ID NO: 8903 - protein, 9 aa, Artificial Sequence
  Description of Artificial Sequence: Synthetic peptide
GCATYSCYV

SEQ ID NO: 8904 - protein, 9 aa, Artificial Sequence
  Description of Artificial Sequence: Synthetic peptide
QGDMGTWVG

SEQ ID NO: 8905 - protein, 9 aa, Artificial Sequence
  Description of Artificial Sequence: Synthetic peptide
SAVVSMRND

SEQ ID NO: 8906 - protein, 9 aa, Artificial Sequence
  Description of Artificial Sequence: Synthetic peptide
YPYGKCSNY

SEQ ID NO: 8907 - protein, 9 aa, Artificial Sequence
  Description of Artificial Sequence: Synthetic peptide
RVINTEWGR

SEQ ID NO: 8908 - protein, 9 aa, Artificial Sequence
  Description of Artificial Sequence: Synthetic peptide
TTYHHGNTL

SEQ ID NO: 8909 - protein, 9 aa, Artificial Sequence
  Description of Artificial Sequence: Synthetic peptide
QQTTYDCLD

SEQ ID NO: 8910 - protein, 9 aa, Artificial Sequence
  Description of Artificial Sequence: Synthetic peptide
LTHLQHSAT

SEQ ID NO: 8911 - protein, 9 aa, Artificial Sequence
  Description of Artificial Sequence: Synthetic peptide
YMPLAMQYC

SEQ ID NO: 8912 - protein, 9 aa, Artificial Sequence
  Description of Artificial Sequence: Synthetic peptide
TREPCQQCD

SEQ ID NO: 8913 - protein, 9 aa, Artificial Sequence
  Description of Artificial Sequence: Synthetic peptide
IQDLQIAIK

SEQ ID NO: 8914 - protein, 9 aa, Artificial Sequence
  Description of Artificial Sequence: Synthetic peptide
ATTNHDMQQ

SEQ ID NO: 8915 - protein, 9 aa, Artificial Sequence
  Description of Artificial Sequence: Synthetic peptide
FCNKLTSVW

SEQ ID NO: 8916 - protein, 9 aa, Artificial Sequence
  Description of Artificial Sequence: Synthetic peptide
EAVCMDTFP

SEQ ID NO: 8917 - protein, 9 aa, Artificial Sequence
  Description of Artificial Sequence: Synthetic peptide
SAALVADGP

SEQ ID NO: 8918 - protein, 9 aa, Artificial Sequence
  Description of Artificial Sequence: Synthetic peptide
QPEIFPVMA

SEQ ID NO: 8919 - protein, 9 aa, Artificial Sequence
  Description of Artificial Sequence: Synthetic peptide
HTESGQDET

SEQ ID NO: 8920 - protein, 9 aa, Artificial Sequence
  Description of Artificial Sequence: Synthetic peptide
TRNTWQQDF

SEQ ID NO: 8921 - protein, 9 aa, Artificial Sequence
  Description of Artificial Sequence: Synthetic peptide
GVNTNMNGS

SEQ ID NO: 8922 - protein, 9 aa, Artificial Sequence
  Description of Artificial Sequence: Synthetic peptide
CQAELIDVR

SEQ ID NO: 8923 - protein, 9 aa, Artificial Sequence
  Description of Artificial Sequence: Synthetic peptide
TSTMCSWSM

SEQ ID NO: 8924 - protein, 9 aa, Artificial Sequence
  Description of Artificial Sequence: Synthetic peptide
NAEPQQADI

SEQ ID NO: 8925 - protein, 9 aa, Artificial Sequence
  Description of Artificial Sequence: Synthetic peptide
IRQMAGGHC

SEQ ID NO: 8926 - protein, 9 aa, Artificial Sequence
  Description of Artificial Sequence: Synthetic peptide
LNQCAQAGC

SEQ ID NO: 8927 - protein, 9 aa, Artificial Sequence
  Description of Artificial Sequence: Synthetic peptide
TATCGIEAE

SEQ ID NO: 8928 - protein, 9 aa, Artificial Sequence
  Description of Artificial Sequence: Synthetic peptide
TNLHNNHYW

SEQ ID NO: 8929 - protein, 9 aa, Artificial Sequence
  Description of Artificial Sequence: Synthetic peptide
AYSYYSVLP

SEQ ID NO: 8930 - protein, 9 aa, Artificial Sequence
  Description of Artificial Sequence: Synthetic peptide
STMLLLARD

SEQ ID NO: 8931 - protein, 9 aa, Artificial Sequence
  Description of Artificial Sequence: Synthetic peptide
VAYYSGHMM

SEQ ID NO: 8932 - protein, 9 aa, Artificial Sequence
  Description of Artificial Sequence: Synthetic peptide
IQQLSMVGS

SEQ ID NO: 8933 - protein, 9 aa, Artificial Sequence
  Description of Artificial Sequence: Synthetic peptide
ARVKETCEW

SEQ ID NO: 8934 - protein, 9 aa, Artificial Sequence
  Description of Artificial Sequence: Synthetic peptide
TFMFNSEGS

SEQ ID NO: 8935 - protein, 9 aa, Artificial Sequence
  Description of Artificial Sequence: Synthetic peptide
CVPKTIACC

SEQ ID NO: 8936 - protein, 9 aa, Artificial Sequence
  Description of Artificial Sequence: Synthetic peptide
ACYEFVNAC

SEQ ID NO: 8937 - protein, 9 aa, Artificial Sequence
  Description of Artificial Sequence: Synthetic peptide
TRMQFNKCH

SEQ ID NO: 8938 - protein, 9 aa, Artificial Sequence
  Description of Artificial Sequence: Synthetic peptide
SRDIAKSST

SEQ ID NO: 8939 - protein, 9 aa, Artificial Sequence
  Description of Artificial Sequence: Synthetic peptide
YESCNLTRD

SEQ ID NO: 8940 - protein, 9 aa, Artificial Sequence
  Description of Artificial Sequence: Synthetic peptide
STQPACAWP

SEQ ID NO: 8941 - protein, 9 aa, Artificial Sequence
  Description of Artificial Sequence: Synthetic peptide
MVGRNMWAV

SEQ ID NO: 8942 - protein, 9 aa, Artificial Sequence
  Description of Artificial Sequence: Synthetic peptide
CQMQVLNNI

SEQ ID NO: 8943 - protein, 9 aa, Artificial Sequence
  Description of Artificial Sequence: Synthetic peptide
YLVHEGHSR

SEQ ID NO: 8944 - protein, 9 aa, Artificial Sequence
  Description of Artificial Sequence: Synthetic peptide
TGTQFMRWA

SEQ ID NO: 8945 - protein, 9 aa, Artificial Sequence
  Description of Artificial Sequence: Synthetic peptide
MCMQEDRLA

SEQ ID NO: 8946 - protein, 9 aa, Artificial Sequence
  Description of Artificial Sequence: Synthetic peptide
LATNHRHWL

SEQ ID NO: 8947 - protein, 9 aa, Artificial Sequence
  Description of Artificial Sequence: Synthetic peptide
GRWPYFLAC

SEQ ID NO: 8948 - protein, 9 aa, Artificial Sequence
  Description of Artificial Sequence: Synthetic peptide
IPSFYWGDY

SEQ ID NO: 8949 - protein, 9 aa, Artificial Sequence
  Description of Artificial Sequence: Synthetic peptide
GDDWIIWQA

SEQ ID NO: 8950 - protein, 9 aa, Artificial Sequence
  Description of Artificial Sequence: Synthetic peptide
MECIHMRND

SEQ ID NO: 8951 - protein, 9 aa, Artificial Sequence
  Description of Artificial Sequence: Synthetic peptide
SIWDCNHRS

SEQ ID NO: 8952 - protein, 9 aa, Artificial Sequence
  Description of Artificial Sequence: Synthetic peptide
NTVFQLYHT

SEQ ID NO: 8953 - protein, 9 aa, Artificial Sequence
  Description of Artificial Sequence: Synthetic peptide
GYGHTFWDA

SEQ ID NO: 8954 - protein, 9 aa, Artificial Sequence
  Description of Artificial Sequence: Synthetic peptide
VHEEYSNSH

SEQ ID NO: 8955 - protein, 9 aa, Artificial Sequence
  Description of Artificial Sequence: Synthetic peptide
GTLACDQKE

SEQ ID NO: 8956 - protein, 9 aa, Artificial Sequence
  Description of Artificial Sequence: Synthetic peptide
FCCMYCQHP

SEQ ID NO: 8957 - protein, 9 aa, Artificial Sequence
  Description of Artificial Sequence: Synthetic peptide
ESSMWCTDC

SEQ ID NO: 8958 - protein, 9 aa, Artificial Sequence
  Description of Artificial Sequence: Synthetic peptide
QTADWCHPV

SEQ ID NO: 8959 - protein, 9 aa, Artificial Sequence
  Description of Artificial Sequence: Synthetic peptide
MPHGRCNTI

SEQ ID NO: 8960 - protein, 9 aa, Artificial Sequence
  Description of Artificial Sequence: Synthetic peptide
GITQHFVKH

SEQ ID NO: 8961 - protein, 9 aa, Artificial Sequence
  Description of Artificial Sequence: Synthetic peptide
AMDCGQSFG

SEQ ID NO: 8962 - protein, 9 aa, Artificial Sequence
  Description of Artificial Sequence: Synthetic peptide
LAYSQYVGC

SEQ ID NO: 8963 - protein, 9 aa, Artificial Sequence
  Description of Artificial Sequence: Synthetic peptide
NRNCTDAWH

SEQ ID NO: 8964 - protein, 9 aa, Artificial Sequence
  Description of Artificial Sequence: Synthetic peptide
RSHFQEGVQ

SEQ ID NO: 8965 - protein, 9 aa, Artificial Sequence
  Description of Artificial Sequence: Synthetic peptide
MFMAKQNAM

SEQ ID NO: 8966 - protein, 9 aa, Artificial Sequence
  Description of Artificial Sequence: Synthetic peptide
PIWSVYQDE

SEQ ID NO: 8967 - protein, 9 aa, Artificial Sequence
  Description of Artificial Sequence: Synthetic peptide
DKRIICQDN

SEQ ID NO: 8968 - protein, 9 aa, Artificial Sequence
  Description of Artificial Sequence: Synthetic peptide
MFYAMVGPE

SEQ ID NO: 8969 - protein, 9 aa, Artificial Sequence
  Description of Artificial Sequence: Synthetic peptide
ETCCSEWHV

SEQ ID NO: 8970 - protein, 9 aa, Artificial Sequence
  Description of Artificial Sequence: Synthetic peptide
MCKNGDSHG

SEQ ID NO: 8971 - protein, 9 aa, Artificial Sequence
  Description of Artificial Sequence: Synthetic peptide
AIHAHTAAN

SEQ ID NO: 8972 - protein, 9 aa, Artificial Sequence
  Description of Artificial Sequence: Synthetic peptide
NVSSHQHCW

SEQ ID NO: 8973 - protein, 9 aa, Artificial Sequence
  Description of Artificial Sequence: Synthetic peptide
CRCCWYQDQ

SEQ ID NO: 8974 - protein, 9 aa, Artificial Sequence
  Description of Artificial Sequence: Synthetic peptide
DMSDCEVSF

SEQ ID NO: 8975 - protein, 9 aa, Artificial Sequence
  Description of Artificial Sequence: Synthetic peptide
SMCWFNQVA

SEQ ID NO: 8976 - protein, 9 aa, Artificial Sequence
  Description of Artificial Sequence: Synthetic peptide
AAPMVGEFY

SEQ ID NO: 8977 - protein, 9 aa, Artificial Sequence
  Description of Artificial Sequence: Synthetic peptide
SPMSFLNVL

SEQ ID NO: 8978 - protein, 9 aa, Artificial Sequence
  Description of Artificial Sequence: Synthetic peptide
TKGPKELMA

SEQ ID NO: 8979 - protein, 9 aa, Artificial Sequence
  Description of Artificial Sequence: Synthetic peptide
EGWTQFRPE

SEQ ID NO: 8980 - protein, 9 aa, Artificial Sequence
  Description of Artificial Sequence: Synthetic peptide
QAGDSMWAK

SEQ ID NO: 8981 - protein, 9 aa, Artificial Sequence
  Description of Artificial Sequence: Synthetic peptide
SADTNVVVE

SEQ ID NO: 8982 - protein, 9 aa, Artificial Sequence
  Description of Artificial Sequence: Synthetic peptide
LKSGQVRFT

SEQ ID NO: 8983 - protein, 9 aa, Artificial Sequence
  Description of Artificial Sequence: Synthetic peptide
YIHDYSSPN

SEQ ID NO: 8984 - protein, 9 aa, Artificial Sequence
  Description of Artificial Sequence: Synthetic peptide
QTEIAMGFT

SEQ ID NO: 8985 - protein, 9 aa, Artificial Sequence
  Description of Artificial Sequence: Synthetic peptide
QLCIPLTWE

SEQ ID NO: 8986 - protein, 9 aa, Artificial Sequence
  Description of Artificial Sequence: Synthetic peptide
EANCNHVGV

SEQ ID NO: 8987 - protein, 9 aa, Artificial Sequence
  Description of Artificial Sequence: Synthetic peptide
SGMKGRTQI

SEQ ID NO: 8988 - protein, 9 aa, Artificial Sequence
  Description of Artificial Sequence: Synthetic peptide
AEAIINDIW

SEQ ID NO: 8989 - protein, 9 aa, Artificial Sequence
  Description of Artificial Sequence: Synthetic peptide
LTEFTPYIG

SEQ ID NO: 8990 - protein, 9 aa, Artificial Sequence
  Description of Artificial Sequence: Synthetic peptide
FCAHNFTSD

SEQ ID NO: 8991 - protein, 9 aa, Artificial Sequence
  Description of Artificial Sequence: Synthetic peptide
SFLMMMNCT

SEQ ID NO: 8992 - protein, 9 aa, Artificial Sequence
  Description of Artificial Sequence: Synthetic peptide
LCMPADRQS

SEQ ID NO: 8993 - protein, 9 aa, Artificial Sequence
  Description of Artificial Sequence: Synthetic peptide
MTNSQHQHW

SEQ ID NO: 8994 - protein, 9 aa, Artificial Sequence
  Description of Artificial Sequence: Synthetic peptide
PKHHVTWED

SEQ ID NO: 8995 - protein, 9 aa, Artificial Sequence
  Description of Artificial Sequence: Synthetic peptide
VSQPAWQQK

SEQ ID NO: 8996 - protein, 9 aa, Artificial Sequence
  Description of Artificial Sequence: Synthetic peptide
QAQSHIHYT

SEQ ID NO: 8997 - protein, 9 aa, Artificial Sequence
  Description of Artificial Sequence: Synthetic peptide
EVLMAMSLF

SEQ ID NO: 8998 - protein, 9 aa, Artificial Sequence
  Description of Artificial Sequence: Synthetic peptide
GQALDKQYQ

SEQ ID NO: 8999 - protein, 9 aa, Artificial Sequence
  Description of Artificial Sequence: Synthetic peptide
SNEPLDTCY

SEQ ID NO: 9000 - protein, 9 aa, Artificial Sequence
  Description of Artificial Sequence: Synthetic peptide
SQAVRKCCD

SEQ ID NO: 9001 - protein, 9 aa, Artificial Sequence
  Description of Artificial Sequence: Synthetic peptide
QGSPLDSFQ

SEQ ID NO: 9002 - protein, 9 aa, Artificial Sequence
  Description of Artificial Sequence: Synthetic peptide
LLFPLMGSS

SEQ ID NO: 9003 - protein, 9 aa, Artificial Sequence
  Description of Artificial Sequence: Synthetic peptide
PNSPGVCSC

SEQ ID NO: 9004 - protein, 9 aa, Artificial Sequence
  Description of Artificial Sequence: Synthetic peptide
MSTHVLKWV

SEQ ID NO: 9005 - protein, 9 aa, Artificial Sequence
  Description of Artificial Sequence: Synthetic peptide
FCHAFPDAY

SEQ ID NO: 9006 - protein, 9 aa, Artificial Sequence
  Description of Artificial Sequence: Synthetic peptide
VIGWHGTNA

SEQ ID NO: 9007 - protein, 9 aa, Artificial Sequence
  Description of Artificial Sequence: Synthetic peptide
TQGVSTIGV

SEQ ID NO: 9008 - protein, 9 aa, Artificial Sequence
  Description of Artificial Sequence: Synthetic peptide
NDEQRNTLY

SEQ ID NO: 9009 - protein, 9 aa, Artificial Sequence
  Description of Artificial Sequence: Synthetic peptide
TSQHKYAEE

SEQ ID NO: 9010 - protein, 9 aa, Artificial Sequence
  Description of Artificial Sequence: Synthetic peptide
HDCIWMECR

SEQ ID NO: 9011 - protein, 9 aa, Artificial Sequence
  Description of Artificial Sequence: Synthetic peptide
DFAYRSTGV

SEQ ID NO: 9012 - protein, 9 aa, Artificial Sequence
  Description of Artificial Sequence: Synthetic peptide
DSATSKSAD

SEQ ID NO: 9013 - protein, 9 aa, Artificial Sequence
  Description of Artificial Sequence: Synthetic peptide
IPASCGSTR

SEQ ID NO: 9014 - protein, 9 aa, Artificial Sequence
  Description of Artificial Sequence: Synthetic peptide
SMGWDHMMS

SEQ ID NO: 9015 - protein, 9 aa, Artificial Sequence
  Description of Artificial Sequence: Synthetic peptide
MASTESDMC

SEQ ID NO: 9016 - protein, 9 aa, Artificial Sequence
  Description of Artificial Sequence: Synthetic peptide
QMEVHWHMR

SEQ ID NO: 9017 - protein, 9 aa, Artificial Sequence
  Description of Artificial Sequence: Synthetic peptide
AQWISPWPT

SEQ ID NO: 9018 - protein, 9 aa, Artificial Sequence
  Description of Artificial Sequence: Synthetic peptide
QENDANRPQ

SEQ ID NO: 9019 - protein, 9 aa, Artificial Sequence
  Description of Artificial Sequence: Synthetic peptide
LVNQLFHSW

SEQ ID NO: 9020 - protein, 9 aa, Artificial Sequence
  Description of Artificial Sequence: Synthetic peptide
ACDQVNTFQ

SEQ ID NO: 9021 - protein, 9 aa, Artificial Sequence
  Description of Artificial Sequence: Synthetic peptide
MKSVFMHEW

SEQ ID NO: 9022 - protein, 9 aa, Artificial Sequence
  Description of Artificial Sequence: Synthetic peptide
WGIKCLGTS

SEQ ID NO: 9023 - protein, 9 aa, Artificial Sequence
  Description of Artificial Sequence: Synthetic peptide
VSRSDWTMP

SEQ ID NO: 9024 - protein, 9 aa, Artificial Sequence
  Description of Artificial Sequence: Synthetic peptide
TSTIPGVGT

SEQ ID NO: 9025 - protein, 9 aa, Artificial Sequence
  Description of Artificial Sequence: Synthetic peptide
YHTFVECAQ

SEQ ID NO: 9026 - protein, 9 aa, Artificial Sequence
  Description of Artificial Sequence: Synthetic peptide
ASCYVWGPA

SEQ ID NO: 9027 - protein, 9 aa, Artificial Sequence
  Description of Artificial Sequence: Synthetic peptide
QHQSVMGFA

SEQ ID NO: 9028 - protein, 9 aa, Artificial Sequence
  Description of Artificial Sequence: Synthetic peptide
HMQAQIHYW

SEQ ID NO: 9029 - protein, 9 aa, Artificial Sequence
  Description of Artificial Sequence: Synthetic peptide
KQHELIVRV

SEQ ID NO: 9030 - protein, 9 aa, Artificial Sequence
  Description of Artificial Sequence: Synthetic peptide
AYCCFNRFQ

SEQ ID NO: 9031 - protein, 9 aa, Artificial Sequence
  Description of Artificial Sequence: Synthetic peptide
TYMQCMVSG

SEQ ID NO: 9032 - protein, 9 aa, Artificial Sequence
  Description of Artificial Sequence: Synthetic peptide
CAVNTYQKH

SEQ ID NO: 9033 - protein, 9 aa, Artificial Sequence
  Description of Artificial Sequence: Synthetic peptide
RNINEYEHY

SEQ ID NO: 9034 - protein, 9 aa, Artificial Sequence
  Description of Artificial Sequence: Synthetic peptide
SARVNHGRV

SEQ ID NO: 9035 - protein, 9 aa, Artificial Sequence
  Description of Artificial Sequence: Synthetic peptide
HSHMYDCQQ

SEQ ID NO: 9036 - protein, 9 aa, Artificial Sequence
  Description of Artificial Sequence: Synthetic peptide
NTECWQNSD

SEQ ID NO: 9037 - protein, 9 aa, Artificial Sequence
  Description of Artificial Sequence: Synthetic peptide
LNCQKANQN

SEQ ID NO: 9038 - protein, 9 aa, Artificial Sequence
  Description of Artificial Sequence: Synthetic peptide
TVMMLMDNG

SEQ ID NO: 9039 - protein, 9 aa, Artificial Sequence
  Description of Artificial Sequence: Synthetic peptide
MTTGLMAYE

SEQ ID NO: 9040 - protein, 9 aa, Artificial Sequence
  Description of Artificial Sequence: Synthetic peptide
LLYRNMILS

SEQ ID NO: 9041 - protein, 9 aa, Artificial Sequence
  Description of Artificial Sequence: Synthetic peptide
QSHLSDKMY

SEQ ID NO: 9042 - protein, 9 aa, Artificial Sequence
  Description of Artificial Sequence: Synthetic peptide
TMAMLGWMN

SEQ ID NO: 9043 - protein, 9 aa, Artificial Sequence
  Description of Artificial Sequence: Synthetic peptide
GLWHGFYAV

SEQ ID NO: 9044 - protein, 9 aa, Artificial Sequence
  Description of Artificial Sequence: Synthetic peptide
GGCCGGELN

SEQ ID NO: 9045 - protein, 9 aa, Artificial Sequence
  Description of Artificial Sequence: Synthetic peptide
LQYSPGQQT

SEQ ID NO: 9046 - protein, 9 aa, Artificial Sequence
  Description of Artificial Sequence: Synthetic peptide
TNNCYWCAP

SEQ ID NO: 9047 - protein, 9 aa, Artificial Sequence
  Description of Artificial Sequence: Synthetic peptide
AVLGSNYLK

SEQ ID NO: 9048 - protein, 9 aa, Artificial Sequence
  Description of Artificial Sequence: Synthetic peptide
MDTKVVYGT

SEQ ID NO: 9049 - protein, 9 aa, Artificial Sequence
  Description of Artificial Sequence: Synthetic peptide
WADRQGALA

SEQ ID NO: 9050 - protein, 9 aa, Artificial Sequence
  Description of Artificial Sequence: Synthetic peptide
VITLKNNCH

SEQ ID NO: 9051 - protein, 9 aa, Artificial Sequence
  Description of Artificial Sequence: Synthetic peptide
AIAEIKIQS

SEQ ID NO: 9052 - protein, 9 aa, Artificial Sequence
  Description of Artificial Sequence: Synthetic peptide
VTMPMATWH

SEQ ID NO: 9053 - protein, 9 aa, Artificial Sequence
  Description of Artificial Sequence: Synthetic peptide
VHFIAWRGM

SEQ ID NO: 9054 - protein, 9 aa, Artificial Sequence
  Description of Artificial Sequence: Synthetic peptide
VIGVEMKCM

SEQ ID NO: 9055 - protein, 9 aa, Artificial Sequence
  Description of Artificial Sequence: Synthetic peptide
TDAGMFAHA

SEQ ID NO: 9056 - protein, 9 aa, Artificial Sequence
  Description of Artificial Sequence: Synthetic peptide
ITKFKMQDH

SEQ ID NO: 9057 - protein, 9 aa, Artificial Sequence
  Description of Artificial Sequence: Synthetic peptide
AMCIVCIAP

SEQ ID NO: 9058 - protein, 9 aa, Artificial Sequence
  Description of Artificial Sequence: Synthetic peptide
KSGYQCDSM

SEQ ID NO: 9059 - protein, 9 aa, Artificial Sequence
  Description of Artificial Sequence: Synthetic peptide
LALMIQQAH

SEQ ID NO: 9060 - protein, 9 aa, Artificial Sequence
  Description of Artificial Sequence: Synthetic peptide
LSAQDTMFH

SEQ ID NO: 9061 - protein, 9 aa, Artificial Sequence
  Description of Artificial Sequence: Synthetic peptide
YQAQLNNCW

SEQ ID NO: 9062 - protein, 9 aa, Artificial Sequence
  Description of Artificial Sequence: Synthetic peptide
SCEATMHAI

SEQ ID NO: 9063 - protein, 9 aa, Artificial Sequence
  Description of Artificial Sequence: Synthetic peptide
TILGIPSSK

SEQ ID NO: 9064 - protein, 9 aa, Artificial Sequence
  Description of Artificial Sequence: Synthetic peptide
DMTHTDIMP

SEQ ID NO: 9065 - protein, 9 aa, Artificial Sequence
  Description of Artificial Sequence: Synthetic peptide
LIGPNTKWG

SEQ ID NO: 9066 - protein, 9 aa, Artificial Sequence
  Description of Artificial Sequence: Synthetic peptide
EARMPWAHH

SEQ ID NO: 9067 - protein, 9 aa, Artificial Sequence
  Description of Artificial Sequence: Synthetic peptide
HVHMCTPSV

SEQ ID NO: 9068 - protein, 9 aa, Artificial Sequence
  Description of Artificial Sequence: Synthetic peptide
LNTYYRLED

SEQ ID NO: 9069 - protein, 9 aa, Artificial Sequence
  Description of Artificial Sequence: Synthetic peptide
INCQTKKEM

SEQ ID NO: 9070 - protein, 9 aa, Artificial Sequence
  Description of Artificial Sequence: Synthetic peptide
VPEPKGTLN

SEQ ID NO: 9071 - protein, 9 aa, Artificial Sequence
  Description of Artificial Sequence: Synthetic peptide
STHMAGHYA

SEQ ID NO: 9072 - protein, 9 aa, Artificial Sequence
  Description of Artificial Sequence: Synthetic peptide
APGMAFGGQ

SEQ ID NO: 9073 - protein, 9 aa, Artificial Sequence
  Description of Artificial Sequence: Synthetic peptide
SVSAQQTMQ

SEQ ID NO: 9074 - protein, 9 aa, Artificial Sequence
  Description of Artificial Sequence: Synthetic peptide
RTVYDVQDD

SEQ ID NO: 9075 - protein, 9 aa, Artificial Sequence
  Description of Artificial Sequence: Synthetic peptide
GCYGNQPPT

SEQ ID NO: 9076 - protein, 9 aa, Artificial Sequence
  Description of Artificial Sequence: Synthetic peptide
TATWGIEVE

SEQ ID NO: 9077 - protein, 9 aa, Artificial Sequence
  Description of Artificial Sequence: Synthetic peptide
ECATNVGDR

SEQ ID NO: 9078 - protein, 9 aa, Artificial Sequence
  Description of Artificial Sequence: Synthetic peptide
WDQKNLMDT

SEQ ID NO: 9079 - protein, 9 aa, Artificial Sequence
  Description of Artificial Sequence: Synthetic peptide
ERTLTKTGS

SEQ ID NO: 9080 - protein, 9 aa, Artificial Sequence
  Description of Artificial Sequence: Synthetic peptide
IVNMNHSAM

SEQ ID NO: 9081 - protein, 9 aa, Artificial Sequence
  Description of Artificial Sequence: Synthetic peptide
FWMKWESYG

SEQ ID NO: 9082 - protein, 9 aa, Artificial Sequence
  Description of Artificial Sequence: Synthetic peptide
AMRDNSVAH

SEQ ID NO: 9083 - protein, 9 aa, Artificial Sequence
  Description of Artificial Sequence: Synthetic peptide
CWSYTNKNC

SEQ ID NO: 9084 - protein, 9 aa, Artificial Sequence
  Description of Artificial Sequence: Synthetic peptide
QANPYNHGI

SEQ ID NO: 9085 - protein, 9 aa, Artificial Sequence
  Description of Artificial Sequence: Synthetic peptide
IHVKFPPFD

SEQ ID NO: 9086 - protein, 9 aa, Artificial Sequence
  Description of Artificial Sequence: Synthetic peptide
EYIQHSSAR

SEQ ID NO: 9087 - protein, 9 aa, Artificial Sequence
  Description of Artificial Sequence: Synthetic peptide
TTTTPCNMP

SEQ ID NO: 9088 - protein, 9 aa, Artificial Sequence
  Description of Artificial Sequence: Synthetic peptide
CCTGLGSMG

SEQ ID NO: 9089 - protein, 9 aa, Artificial Sequence
  Description of Artificial Sequence: Synthetic peptide
TVTHMSTWG

SEQ ID NO: 9090 - protein, 9 aa, Artificial Sequence
  Description of Artificial Sequence: Synthetic peptide
NNMLHGAYR

SEQ ID NO: 9091 - protein, 9 aa, Artificial Sequence
  Description of Artificial Sequence: Synthetic peptide
WGQHLPMID

SEQ ID NO: 9092 - protein, 9 aa, Artificial Sequence
  Description of Artificial Sequence: Synthetic peptide
MMKMCEYDG

SEQ ID NO: 9093 - protein, 9 aa, Artificial Sequence
  Description of Artificial Sequence: Synthetic peptide
GANNMTAMN

SEQ ID NO: 9094 - protein, 9 aa, Artificial Sequence
  Description of Artificial Sequence: Synthetic peptide
THAAYGTNL

SEQ ID NO: 9095 - protein, 9 aa, Artificial Sequence
  Description of Artificial Sequence: Synthetic peptide
LSSLPMHYC

SEQ ID NO: 9096 - protein, 9 aa, Artificial Sequence
  Description of Artificial Sequence: Synthetic peptide
ITEQYDAFV

SEQ ID NO: 9097 - protein, 9 aa, Artificial Sequence
  Description of Artificial Sequence: Synthetic peptide
YTGIKVMGR

SEQ ID NO: 9098 - protein, 9 aa, Artificial Sequence
  Description of Artificial Sequence: Synthetic peptide
DVEHVSCPK

SEQ ID NO: 9099 - protein, 9 aa, Artificial Sequence
  Description of Artificial Sequence: Synthetic peptide
WHCEFTQHH

SEQ ID NO: 9100 - protein, 9 aa, Artificial Sequence
  Description of Artificial Sequence: Synthetic peptide
LSTQSAKEY

SEQ ID NO: 9101 - protein, 9 aa, Artificial Sequence
  Description of Artificial Sequence: Synthetic peptide
ISDPNVGEP

SEQ ID NO: 9102 - protein, 9 aa, Artificial Sequence
  Description of Artificial Sequence: Synthetic peptide
SVCSKWDGT

SEQ ID NO: 9103 - protein, 9 aa, Artificial Sequence
  Description of Artificial Sequence: Synthetic peptide
NNMWDTIFM

SEQ ID NO: 9104 - protein, 9 aa, Artificial Sequence
  Description of Artificial Sequence: Synthetic peptide
NHKMVRDAL

SEQ ID NO: 9105 - protein, 9 aa, Artificial Sequence
  Description of Artificial Sequence: Synthetic peptide
HVGIYEHCH

SEQ ID NO: 9106 - protein, 9 aa, Artificial Sequence
  Description of Artificial Sequence: Synthetic peptide
SPKMMVSMT

SEQ ID NO: 9107 - protein, 9 aa, Artificial Sequence
  Description of Artificial Sequence: Synthetic peptide
WMVRQKYMA

SEQ ID NO: 9108 - protein, 9 aa, Artificial Sequence
  Description of Artificial Sequence: Synthetic peptide
LQWWIRMGK

SEQ ID NO: 9109 - protein, 9 aa, Artificial Sequence
  Description of Artificial Sequence: Synthetic peptide
CCGIRIEYG

SEQ ID NO: 9110 - protein, 9 aa, Artificial Sequence
  Description of Artificial Sequence: Synthetic peptide
FAGFTPGWM

SEQ ID NO: 9111 - protein, 9 aa, Artificial Sequence
  Description of Artificial Sequence: Synthetic peptide
PHKDSMQMT

SEQ ID NO: 9112 - protein, 9 aa, Artificial Sequence
  Description of Artificial Sequence: Synthetic peptide
DKTVQSLSL

SEQ ID NO: 9113 - protein, 9 aa, Artificial Sequence
  Description of Artificial Sequence: Synthetic peptide
PWACEHVWH

SEQ ID NO: 9114 - protein, 9 aa, Artificial Sequence
  Description of Artificial Sequence: Synthetic peptide
EYCEFMSEA

SEQ ID NO: 9115 - protein, 9 aa, Artificial Sequence
  Description of Artificial Sequence: Synthetic peptide
YGVMCPSHY

SEQ ID NO: 9116 - protein, 9 aa, Artificial Sequence
  Description of Artificial Sequence: Synthetic peptide
PIIRGRSDS

SEQ ID NO: 9117 - protein, 9 aa, Artificial Sequence
  Description of Artificial Sequence: Synthetic peptide
EPMEANQCR

SEQ ID NO: 9118 - protein, 9 aa, Artificial Sequence
  Description of Artificial Sequence: Synthetic peptide
AAMESCAEI

SEQ ID NO: 9119 - protein, 9 aa, Artificial Sequence
  Description of Artificial Sequence: Synthetic peptide
EKYQIHWDR

SEQ ID NO: 9120 - protein, 9 aa, Artificial Sequence
  Description of Artificial Sequence: Synthetic peptide
VTGTYNLQE

SEQ ID NO: 9121 - protein, 9 aa, Artificial Sequence
  Description of Artificial Sequence: Synthetic peptide
ATGTYSLQE

SEQ ID NO: 9122 - protein, 9 aa, Artificial Sequence
  Description of Artificial Sequence: Synthetic peptide
ATGTYNLRE

SEQ ID NO: 9123 - protein, 9 aa, Artificial Sequence
  Description of Artificial Sequence: Synthetic peptide
ATDTYNLQE

SEQ ID NO: 9124 - protein, 9 aa, Artificial Sequence
  Description of Artificial Sequence: Synthetic peptide
MWTKFNEYG

SEQ ID NO: 9125 - protein, 9 aa, Artificial Sequence
  Description of Artificial Sequence: Synthetic peptide
QTLGGHMWT

SEQ ID NO: 9126 - protein, 9 aa, Artificial Sequence
  Description of Artificial Sequence: Synthetic peptide
TLCHTDNMV

SEQ ID NO: 9127 - protein, 9 aa, Artificial Sequence
  Description of Artificial Sequence: Synthetic peptide
GIAYEVLWD

SEQ ID NO: 9128 - protein, 9 aa, Artificial Sequence
  Description of Artificial Sequence: Synthetic peptide
SRLPVHECP

SEQ ID NO: 9129 - protein, 9 aa, Artificial Sequence
  Description of Artificial Sequence: Synthetic peptide
TTGTYNLQE

SEQ ID NO: 9130 - protein, 9 aa, Artificial Sequence
  Description of Artificial Sequence: Synthetic peptide
MWTEFNEDG

SEQ ID NO: 9131 - protein, 9 aa, Artificial Sequence
  Description of Artificial Sequence: Synthetic peptide
TFVYGERDR

SEQ ID NO: 9132 - protein, 9 aa, Artificial Sequence
  Description of Artificial Sequence: Synthetic peptide
GQQTIEMSY

SEQ ID NO: 9133 - protein, 9 aa, Artificial Sequence
  Description of Artificial Sequence: Synthetic peptide
NYAMRRDSY

SEQ ID NO: 9134 - protein, 9 aa, Artificial Sequence
  Description of Artificial Sequence: Synthetic peptide
KPLASIGQY

SEQ ID NO: 9135 - protein, 9 aa, Artificial Sequence
  Description of Artificial Sequence: Synthetic peptide
AAFVMNGDG

SEQ ID NO: 9136 - protein, 9 aa, Artificial Sequence
  Description of Artificial Sequence: Synthetic peptide
RVAGEGIQP

SEQ ID NO: 9137 - protein, 9 aa, Artificial Sequence
  Description of Artificial Sequence: Synthetic peptide
TCGHTRFFI

SEQ ID NO: 9138 - protein, 9 aa, Artificial Sequence
  Description of Artificial Sequence: Synthetic peptide
ESAEPRMIP

SEQ ID NO: 9139 - protein, 9 aa, Artificial Sequence
  Description of Artificial Sequence: Synthetic peptide
TTSQNSEAM

SEQ ID NO: 9140 - protein, 9 aa, Artificial Sequence
  Description of Artificial Sequence: Synthetic peptide
NTQVISRWT

SEQ ID NO: 9141 - protein, 9 aa, Artificial Sequence
  Description of Artificial Sequence: Synthetic peptide
AGCNTQNGH

SEQ ID NO: 9142 - protein, 9 aa, Artificial Sequence
  Description of Artificial Sequence: Synthetic peptide
VGPLYAYYS

SEQ ID NO: 9143 - protein, 9 aa, Artificial Sequence
  Description of Artificial Sequence: Synthetic peptide
QHSRAYMWY

SEQ ID NO: 9144 - protein, 9 aa, Artificial Sequence
  Description of Artificial Sequence: Synthetic peptide
DIRIVSDGK

SEQ ID NO: 9145 - protein, 9 aa, Artificial Sequence
  Description of Artificial Sequence: Synthetic peptide
TMAQKGLWF

SEQ ID NO: 9146 - protein, 9 aa, Artificial Sequence
  Description of Artificial Sequence: Synthetic peptide
QCEYSNCCY

SEQ ID NO: 9147 - protein, 9 aa, Artificial Sequence
  Description of Artificial Sequence: Synthetic peptide
NGTQCLNMD

SEQ ID NO: 9148 - protein, 9 aa, Artificial Sequence
  Description of Artificial Sequence: Synthetic peptide
MTDNNGPLF

SEQ ID NO: 9149 - protein, 9 aa, Artificial Sequence
  Description of Artificial Sequence: Synthetic peptide
CPEHNQVGV

SEQ ID NO: 9150 - protein, 9 aa, Artificial Sequence
  Description of Artificial Sequence: Synthetic peptide
EMYVQRHSL

SEQ ID NO: 9151 - protein, 9 aa, Artificial Sequence
  Description of Artificial Sequence: Synthetic peptide
LINSIVCGD

SEQ ID NO: 9152 - protein, 9 aa, Artificial Sequence
  Description of Artificial Sequence: Synthetic peptide
ACKPCNGWD

SEQ ID NO: 9153 - protein, 9 aa, Artificial Sequence
  Description of Artificial Sequence: Synthetic peptide
PLTIEVNCT

SEQ ID NO: 9154 - protein, 9 aa, Artificial Sequence
  Description of Artificial Sequence: Synthetic peptide
SKGWADLCP

SEQ ID NO: 9155 - protein, 9 aa, Artificial Sequence
  Description of Artificial Sequence: Synthetic peptide
DMTLQSVSS

SEQ ID NO: 9156 - protein, 9 aa, Artificial Sequence
  Description of Artificial Sequence: Synthetic peptide
RVTIMFTGT

SEQ ID NO: 9157 - protein, 9 aa, Artificial Sequence
  Description of Artificial Sequence: Synthetic peptide
RMFWDTSDR

SEQ ID NO: 9158 - protein, 9 aa, Artificial Sequence
  Description of Artificial Sequence: Synthetic peptide
SMQYFFKTE

SEQ ID NO: 9159 - protein, 9 aa, Artificial Sequence
  Description of Artificial Sequence: Synthetic peptide
SFKGFHLQN

SEQ ID NO: 9160 - protein, 9 aa, Artificial Sequence
  Description of Artificial Sequence: Synthetic peptide
TTYPHNTHG

SEQ ID NO: 9161 - protein, 9 aa, Artificial Sequence
  Description of Artificial Sequence: Synthetic peptide
KSTMLEHHD

SEQ ID NO: 9162 - protein, 9 aa, Artificial Sequence
  Description of Artificial Sequence: Synthetic peptide
TCKWYEESI

SEQ ID NO: 9163 - protein, 9 aa, Artificial Sequence
  Description of Artificial Sequence: Synthetic peptide
DICQKQSPN

SEQ ID NO: 9164 - protein, 9 aa, Artificial Sequence
  Description of Artificial Sequence: Synthetic peptide
ILEAIVNFW

SEQ ID NO: 9165 - protein, 9 aa, Artificial Sequence
  Description of Artificial Sequence: Synthetic peptide
DYEVCGNWS

SEQ ID NO: 9166 - protein, 9 aa, Artificial Sequence
  Description of Artificial Sequence: Synthetic peptide
EWNQVWWHD

SEQ ID NO: 9167 - protein, 9 aa, Artificial Sequence
  Description of Artificial Sequence: Synthetic peptide
SPNGRGLCG

SEQ ID NO: 9168 - protein, 9 aa, Artificial Sequence
  Description of Artificial Sequence: Synthetic peptide
TSMEFTQHQ

SEQ ID NO: 9169 - protein, 9 aa, Artificial Sequence
  Description of Artificial Sequence: Synthetic peptide
ASFFLNPLE

SEQ ID NO: 9170 - protein, 9 aa, Artificial Sequence
  Description of Artificial Sequence: Synthetic peptide
MITNNCNIS

SEQ ID NO: 9171 - protein, 9 aa, Artificial Sequence
  Description of Artificial Sequence: Synthetic peptide
MAEQMERDF

SEQ ID NO: 9172 - protein, 9 aa, Artificial Sequence
  Description of Artificial Sequence: Synthetic peptide
VLTTMWKNN

SEQ ID NO: 9173 - protein, 9 aa, Artificial Sequence
  Description of Artificial Sequence: Synthetic peptide
IATHNHILN

SEQ ID NO: 9174 - protein, 9 aa, Artificial Sequence
  Description of Artificial Sequence: Synthetic peptide
MYDTMGAWC

SEQ ID NO: 9175 - protein, 9 aa, Artificial Sequence
  Description of Artificial Sequence: Synthetic peptide
CKQLFCELG

SEQ ID NO: 9176 - protein, 9 aa, Artificial Sequence
  Description of Artificial Sequence: Synthetic peptide
MWTEFNENG

SEQ ID NO: 9177 - protein, 9 aa, Artificial Sequence
  Description of Artificial Sequence: Synthetic peptide
ECVSDYACC

SEQ ID NO: 9178 - protein, 9 aa, Artificial Sequence
  Description of Artificial Sequence: Synthetic peptide
AGFSQFDCF

SEQ ID NO: 9179 - protein, 9 aa, Artificial Sequence
  Description of Artificial Sequence: Synthetic peptide
RGKPILNQQ

SEQ ID NO: 9180 - protein, 9 aa, Artificial Sequence
  Description of Artificial Sequence: Synthetic peptide
KSAQVYWHP

SEQ ID NO: 9181 - protein, 9 aa, Artificial Sequence
  Description of Artificial Sequence: Synthetic peptide
AIGPALCLT

SEQ ID NO: 9182 - protein, 9 aa, Artificial Sequence
  Description of Artificial Sequence: Synthetic peptide
QNKHNWWIM

SEQ ID NO: 9183 - protein, 9 aa, Artificial Sequence
  Description of Artificial Sequence: Synthetic peptide
MASQGGQVR

SEQ ID NO: 9184 - protein, 9 aa, Artificial Sequence
  Description of Artificial Sequence: Synthetic peptide
CGHLLRRAE

SEQ ID NO: 9185 - protein, 9 aa, Artificial Sequence
  Description of Artificial Sequence: Synthetic peptide
WGDNKNFMG

SEQ ID NO: 9186 - protein, 9 aa, Artificial Sequence
  Description of Artificial Sequence: Synthetic peptide
FVFAMIPGF

SEQ ID NO: 9187 - protein, 9 aa, Artificial Sequence
  Description of Artificial Sequence: Synthetic peptide
TFMFNSEWS

SEQ ID NO: 9188 - protein, 9 aa, Artificial Sequence
  Description of Artificial Sequence: Synthetic peptide
MAQPYGRTA

SEQ ID NO: 9189 - protein, 9 aa, Artificial Sequence
  Description of Artificial Sequence: Synthetic peptide
CKNHYMMAA

SEQ ID NO: 9190 - protein, 9 aa, Artificial Sequence
  Description of Artificial Sequence: Synthetic peptide
NSGVLIGME

SEQ ID NO: 9191 - protein, 9 aa, Artificial Sequence
  Description of Artificial Sequence: Synthetic peptide
LAESKKRNK

SEQ ID NO: 9192 - protein, 9 aa, Artificial Sequence
  Description of Artificial Sequence: Synthetic peptide
AFNGANSWT

SEQ ID NO: 9193 - protein, 9 aa, Artificial Sequence
  Description of Artificial Sequence: Synthetic peptide
YTELMKKAC

SEQ ID NO: 9194 - protein, 9 aa, Artificial Sequence
  Description of Artificial Sequence: Synthetic peptide
ETNDNMILH

SEQ ID NO: 9195 - protein, 9 aa, Artificial Sequence
  Description of Artificial Sequence: Synthetic peptide
QFMMGQQTP

SEQ ID NO: 9196 - protein, 9 aa, Artificial Sequence
  Description of Artificial Sequence: Synthetic peptide
VKAWWHDHQ

SEQ ID NO: 9197 - protein, 9 aa, Artificial Sequence
  Description of Artificial Sequence: Synthetic peptide
GKIAHDQLN

SEQ ID NO: 9198 - protein, 9 aa, Artificial Sequence
  Description of Artificial Sequence: Synthetic peptide
QVHMQRYYG

SEQ ID NO: 9199 - protein, 9 aa, Artificial Sequence
  Description of Artificial Sequence: Synthetic peptide
MFVVNQNWA

SEQ ID NO: 9200 - protein, 9 aa, Artificial Sequence
  Description of Artificial Sequence: Synthetic peptide
ILINDREWG

SEQ ID NO: 9201 - protein, 9 aa, Artificial Sequence
  Description of Artificial Sequence: Synthetic peptide
DVTQTRYCY

SEQ ID NO: 9202 - protein, 9 aa, Artificial Sequence
  Description of Artificial Sequence: Synthetic peptide
QTGVMAAFG

SEQ ID NO: 9203 - protein, 9 aa, Artificial Sequence
  Description of Artificial Sequence: Synthetic peptide
ESRQVQDCY

SEQ ID NO: 9204 - protein, 9 aa, Artificial Sequence
  Description of Artificial Sequence: Synthetic peptide
IMNPTAQNN

SEQ ID NO: 9205 - protein, 9 aa, Artificial Sequence
  Description of Artificial Sequence: Synthetic peptide
CCCVPRSIY

SEQ ID NO: 9206 - protein, 9 aa, Artificial Sequence
  Description of Artificial Sequence: Synthetic peptide
NRIQMTDFQ

SEQ ID NO: 9207 - protein, 9 aa, Artificial Sequence
  Description of Artificial Sequence: Synthetic peptide
QPYWVAVDP

SEQ ID NO: 9208 - protein, 9 aa, Artificial Sequence
  Description of Artificial Sequence: Synthetic peptide
KMLHKVWID

SEQ ID NO: 9209 - protein, 9 aa, Artificial Sequence
  Description of Artificial Sequence: Synthetic peptide
QWMHCQLSR

SEQ ID NO: 9210 - protein, 9 aa, Artificial Sequence
  Description of Artificial Sequence: Synthetic peptide
GHMFETFWG

SEQ ID NO: 9211 - protein, 9 aa, Artificial Sequence
  Description of Artificial Sequence: Synthetic peptide
NCPMYDMIS

SEQ ID NO: 9212 - protein, 9 aa, Artificial Sequence
  Description of Artificial Sequence: Synthetic peptide
CCCQFSFWN

SEQ ID NO: 9213 - protein, 9 aa, Artificial Sequence
  Description of Artificial Sequence: Synthetic peptide
TLEPAYRHE

SEQ ID NO: 9214 - protein, 9 aa, Artificial Sequence
  Description of Artificial Sequence: Synthetic peptide
NLSNLVSCR

SEQ ID NO: 9215 - protein, 9 aa, Artificial Sequence
  Description of Artificial Sequence: Synthetic peptide
DRKQADQIY

SEQ ID NO: 9216 - protein, 9 aa, Artificial Sequence
  Description of Artificial Sequence: Synthetic peptide
QPKMWMMAS

SEQ ID NO: 9217 - protein, 9 aa, Artificial Sequence
  Description of Artificial Sequence: Synthetic peptide
KEFQLQMEP

SEQ ID NO: 9218 - protein, 9 aa, Artificial Sequence
  Description of Artificial Sequence: Synthetic peptide
QMKGATEFC

SEQ ID NO: 9219 - protein, 9 aa, Artificial Sequence
  Description of Artificial Sequence: Synthetic peptide
LETMMRHGE

SEQ ID NO: 9220 - protein, 9 aa, Artificial Sequence
  Description of Artificial Sequence: Synthetic peptide
LCKFANGAA

SEQ ID NO: 9221 - protein, 9 aa, Artificial Sequence
  Description of Artificial Sequence: Synthetic peptide
FAQQIINAS

SEQ ID NO: 9222 - protein, 9 aa, Artificial Sequence
  Description of Artificial Sequence: Synthetic peptide
IMYLKRCCT

SEQ ID NO: 9223 - protein, 9 aa, Artificial Sequence
  Description of Artificial Sequence: Synthetic peptide
EKRLEGWVY

SEQ ID NO: 9224 - protein, 9 aa, Artificial Sequence
  Description of Artificial Sequence: Synthetic peptide
NVWSPAVRD

SEQ ID NO: 9225 - protein, 9 aa, Artificial Sequence
  Description of Artificial Sequence: Synthetic peptide
DEYQQESFQ

SEQ ID NO: 9226 - protein, 9 aa, Artificial Sequence
  Description of Artificial Sequence: Synthetic peptide
EICMRSGFI

SEQ ID NO: 9227 - protein, 9 aa, Artificial Sequence
  Description of Artificial Sequence: Synthetic peptide
AVKAPSQMS

SEQ ID NO: 9228 - protein, 9 aa, Artificial Sequence
  Description of Artificial Sequence: Synthetic peptide
QTDILRDVQ

SEQ ID NO: 9229 - protein, 9 aa, Artificial Sequence
  Description of Artificial Sequence: Synthetic peptide
DNYWIVPFA

SEQ ID NO: 9230 - protein, 9 aa, Artificial Sequence
  Description of Artificial Sequence: Synthetic peptide
INMPVSKDQ

SEQ ID NO: 9231 - protein, 9 aa, Artificial Sequence
  Description of Artificial Sequence: Synthetic peptide
ENQSTMSHT

SEQ ID NO: 9232 - protein, 9 aa, Artificial Sequence
  Description of Artificial Sequence: Synthetic peptide
FNTPYAHIG

SEQ ID NO: 9233 - protein, 9 aa, Artificial Sequence
  Description of Artificial Sequence: Synthetic peptide
LESVKMDCN

SEQ ID NO: 9234 - protein, 9 aa, Artificial Sequence
  Description of Artificial Sequence: Synthetic peptide
WCEAVGDYA

SEQ ID NO: 9235 - protein, 9 aa, Artificial Sequence
  Description of Artificial Sequence: Synthetic peptide
SMSHNGQCL

SEQ ID NO: 9236 - protein, 9 aa, Artificial Sequence
  Description of Artificial Sequence: Synthetic peptide
HAETDHVGL

SEQ ID NO: 9237 - protein, 9 aa, Artificial Sequence
  Description of Artificial Sequence: Synthetic peptide
QCTLEISYV

SEQ ID NO: 9238 - protein, 9 aa, Artificial Sequence
  Description of Artificial Sequence: Synthetic peptide
SGQPVDCMF

SEQ ID NO: 9239 - protein, 9 aa, Artificial Sequence
  Description of Artificial Sequence: Synthetic peptide
AAAWSCMQW

SEQ ID NO: 9240 - protein, 9 aa, Artificial Sequence
  Description of Artificial Sequence: Synthetic peptide
RTVPTQEMS

SEQ ID NO: 9241 - protein, 9 aa, Artificial Sequence
  Description of Artificial Sequence: Synthetic peptide
LTPRSEGLP

SEQ ID NO: 9242 - protein, 9 aa, Artificial Sequence
  Description of Artificial Sequence: Synthetic peptide
GDVSYDAEA

SEQ ID NO: 9243 - protein, 9 aa, Artificial Sequence
  Description of Artificial Sequence: Synthetic peptide
QHKWHDVGV

SEQ ID NO: 9244 - protein, 9 aa, Artificial Sequence
  Description of Artificial Sequence: Synthetic peptide
TAFQSLQQM

SEQ ID NO: 9245 - protein, 9 aa, Artificial Sequence
  Description of Artificial Sequence: Synthetic peptide
REFAISGGN

SEQ ID NO: 9246 - protein, 9 aa, Artificial Sequence
  Description of Artificial Sequence: Synthetic peptide
PHAETHWYT

SEQ ID NO: 9247 - protein, 9 aa, Artificial Sequence
  Description of Artificial Sequence: Synthetic peptide
NLAPMIQVC

SEQ ID NO: 9248 - protein, 9 aa, Artificial Sequence
  Description of Artificial Sequence: Synthetic peptide
STGSSKDQD

SEQ ID NO: 9249 - protein, 9 aa, Artificial Sequence
  Description of Artificial Sequence: Synthetic peptide
HFEVRSVQR

SEQ ID NO: 9250 - protein, 9 aa, Artificial Sequence
  Description of Artificial Sequence: Synthetic peptide
TMRLFWDMG

SEQ ID NO: 9251 - protein, 9 aa, Artificial Sequence
  Description of Artificial Sequence: Synthetic peptide
NFVNHQPLP

SEQ ID NO: 9252 - protein, 9 aa, Artificial Sequence
  Description of Artificial Sequence: Synthetic peptide
GKGQWTAQE

SEQ ID NO: 9253 - protein, 9 aa, Artificial Sequence
  Description of Artificial Sequence: Synthetic peptide
VHGQIDLSL

SEQ ID NO: 9254 - protein, 9 aa, Artificial Sequence
  Description of Artificial Sequence: Synthetic peptide
YISEYVMMV

SEQ ID NO: 9255 - protein, 9 aa, Artificial Sequence
  Description of Artificial Sequence: Synthetic peptide
GVRNALNLS

SEQ ID NO: 9256 - protein, 9 aa, Artificial Sequence
  Description of Artificial Sequence: Synthetic peptide
HMEQCWCNE

SEQ ID NO: 9257 - protein, 9 aa, Artificial Sequence
  Description of Artificial Sequence: Synthetic peptide
MFFPGFVAH

SEQ ID NO: 9258 - protein, 9 aa, Artificial Sequence
  Description of Artificial Sequence: Synthetic peptide
QCFLWNDCQ

SEQ ID NO: 9259 - protein, 9 aa, Artificial Sequence
  Description of Artificial Sequence: Synthetic peptide
LIHWLKHDL

SEQ ID NO: 9260 - protein, 9 aa, Artificial Sequence
  Description of Artificial Sequence: Synthetic peptide
KCAWIEVTP

SEQ ID NO: 9261 - protein, 9 aa, Artificial Sequence
  Description of Artificial Sequence: Synthetic peptide
YPVHMMPPL

SEQ ID NO: 9262 - protein, 9 aa, Artificial Sequence
  Description of Artificial Sequence: Synthetic peptide
PCCWEQSTN

SEQ ID NO: 9263 - protein, 9 aa, Artificial Sequence
  Description of Artificial Sequence: Synthetic peptide
CSMPQQCME

SEQ ID NO: 9264 - protein, 9 aa, Artificial Sequence
  Description of Artificial Sequence: Synthetic peptide
RRTDHGEPI

SEQ ID NO: 9265 - protein, 9 aa, Artificial Sequence
  Description of Artificial Sequence: Synthetic peptide
GSKIIMHTE

SEQ ID NO: 9266 - protein, 9 aa, Artificial Sequence
  Description of Artificial Sequence: Synthetic peptide
SQMKYAHNQ

SEQ ID NO: 9267 - protein, 9 aa, Artificial Sequence
  Description of Artificial Sequence: Synthetic peptide
EFNWLLWSG

SEQ ID NO: 9268 - protein, 9 aa, Artificial Sequence
  Description of Artificial Sequence: Synthetic peptide
AEDTPYTIY

SEQ ID NO: 9269 - protein, 9 aa, Artificial Sequence
  Description of Artificial Sequence: Synthetic peptide
RTAEDCPFQ

SEQ ID NO: 9270 - protein, 9 aa, Artificial Sequence
  Description of Artificial Sequence: Synthetic peptide
AKCTILNFQ

SEQ ID NO: 9271 - protein, 9 aa, Artificial Sequence
  Description of Artificial Sequence: Synthetic peptide
WFSIIMSKL

SEQ ID NO: 9272 - protein, 9 aa, Artificial Sequence
  Description of Artificial Sequence: Synthetic peptide
QTAEWYCGA

SEQ ID NO: 9273 - protein, 9 aa, Artificial Sequence
  Description of Artificial Sequence: Synthetic peptide
MHGIARMQQ

SEQ ID NO: 9274 - protein, 9 aa, Artificial Sequence
  Description of Artificial Sequence: Synthetic peptide
VTKYCDHEQ

SEQ ID NO: 9275 - protein, 9 aa, Artificial Sequence
  Description of Artificial Sequence: Synthetic peptide
DFNGSNWLP

SEQ ID NO: 9276 - protein, 9 aa, Artificial Sequence
  Description of Artificial Sequence: Synthetic peptide
IHFTSQSCL

SEQ ID NO: 9277 - protein, 9 aa, Artificial Sequence
  Description of Artificial Sequence: Synthetic peptide
QVKWTADPD

SEQ ID NO: 9278 - protein, 9 aa, Artificial Sequence
  Description of Artificial Sequence: Synthetic peptide
CIQPTWDSY

SEQ ID NO: 9279 - protein, 9 aa, Artificial Sequence
  Description of Artificial Sequence: Synthetic peptide
DVKAFMGGV

SEQ ID NO: 9280 - protein, 9 aa, Artificial Sequence
  Description of Artificial Sequence: Synthetic peptide
DPGWYGLAP

SEQ ID NO: 9281 - protein, 9 aa, Artificial Sequence
  Description of Artificial Sequence: Synthetic peptide
DHLSNDAEM

SEQ ID NO: 9282 - protein, 9 aa, Artificial Sequence
  Description of Artificial Sequence: Synthetic peptide
NSIGWDSAS

SEQ ID NO: 9283 - protein, 9 aa, Artificial Sequence
  Description of Artificial Sequence: Synthetic peptide
TNFPTSMHG

SEQ ID NO: 9284 - protein, 9 aa, Artificial Sequence
  Description of Artificial Sequence: Synthetic peptide
RQTTYDCLD

SEQ ID NO: 9285 - protein, 9 aa, Artificial Sequence
  Description of Artificial Sequence: Synthetic peptide
SAKCCINAV

SEQ ID NO: 9286 - protein, 9 aa, Artificial Sequence
  Description of Artificial Sequence: Synthetic peptide
VHHKTNRSY

SEQ ID NO: 9287 - protein, 9 aa, Artificial Sequence
  Description of Artificial Sequence: Synthetic peptide
FGSMQANDR

SEQ ID NO: 9288 - protein, 9 aa, Artificial Sequence
  Description of Artificial Sequence: Synthetic peptide
AVETGESAM

SEQ ID NO: 9289 - protein, 9 aa, Artificial Sequence
  Description of Artificial Sequence: Synthetic peptide
MVENGLRLQ

SEQ ID NO: 9290 - protein, 9 aa, Artificial Sequence
  Description of Artificial Sequence: Synthetic peptide
AIEHGAWKC

SEQ ID NO: 9291 - protein, 9 aa, Artificial Sequence
  Description of Artificial Sequence: Synthetic peptide
SMMEQKEQQ

SEQ ID NO: 9292 - protein, 9 aa, Artificial Sequence
  Description of Artificial Sequence: Synthetic peptide
AFLHGQMWQ

SEQ ID NO: 9293 - protein, 9 aa, Artificial Sequence
  Description of Artificial Sequence: Synthetic peptide
IEFTHSRKV

SEQ ID NO: 9294 - protein, 9 aa, Artificial Sequence
  Description of Artificial Sequence: Synthetic peptide
NWKLPTCMT

SEQ ID NO: 9295 - protein, 9 aa, Artificial Sequence
  Description of Artificial Sequence: Synthetic peptide
EHKGCMQAI

SEQ ID NO: 9296 - protein, 9 aa, Artificial Sequence
  Description of Artificial Sequence: Synthetic peptide
ATGTYNLQE

SEQ ID NO: 9297 - protein, 9 aa, Artificial Sequence
  Description of Artificial Sequence: Synthetic peptide
NGNHYNAMR

SEQ ID NO: 9298 - protein, 9 aa, Artificial Sequence
  Description of Artificial Sequence: Synthetic peptide
QHEQSNHIW

SEQ ID NO: 9299 - protein, 9 aa, Artificial Sequence
  Description of Artificial Sequence: Synthetic peptide
IGRLNASTP

SEQ ID NO: 9300 - protein, 9 aa, Artificial Sequence
  Description of Artificial Sequence: Synthetic peptide
MSNLEYYEA

SEQ ID NO: 9301 - protein, 9 aa, Artificial Sequence
  Description of Artificial Sequence: Synthetic peptide
TSCCYESSS

SEQ ID NO: 9302 - protein, 9 aa, Artificial Sequence
  Description of Artificial Sequence: Synthetic peptide
WINEANCLM

SEQ ID NO: 9303 - protein, 9 aa, Artificial Sequence
  Description of Artificial Sequence: Synthetic peptide
VESAMINQA

SEQ ID NO: 9304 - protein, 9 aa, Artificial Sequence
  Description of Artificial Sequence: Synthetic peptide
EPRLYCAQE

SEQ ID NO: 9305 - protein, 9 aa, Artificial Sequence
  Description of Artificial Sequence: Synthetic peptide
WPNIKHQPI

SEQ ID NO: 9306 - protein, 9 aa, Artificial Sequence
  Description of Artificial Sequence: Synthetic peptide
FTHSCCCLS

SEQ ID NO: 9307 - protein, 9 aa, Artificial Sequence
  Description of Artificial Sequence: Synthetic peptide
SFSDTHLGW

SEQ ID NO: 9308 - protein, 9 aa, Artificial Sequence
  Description of Artificial Sequence: Synthetic peptide
SDSKVQWGM

SEQ ID NO: 9309 - protein, 9 aa, Artificial Sequence
  Description of Artificial Sequence: Synthetic peptide
WDGWVTTHF

SEQ ID NO: 9310 - protein, 9 aa, Artificial Sequence
  Description of Artificial Sequence: Synthetic peptide
QTNGHPYFP

SEQ ID NO: 9311 - protein, 9 aa, Artificial Sequence
  Description of Artificial Sequence: Synthetic peptide
QTSHQDQDC

SEQ ID NO: 9312 - protein, 9 aa, Artificial Sequence
  Description of Artificial Sequence: Synthetic peptide
HMGIAYNDH

SEQ ID NO: 9313 - protein, 9 aa, Artificial Sequence
  Description of Artificial Sequence: Synthetic peptide
TFVRKPSLM

SEQ ID NO: 9314 - protein, 9 aa, Artificial Sequence
  Description of Artificial Sequence: Synthetic peptide
QQLCYMSDE

SEQ ID NO: 9315 - protein, 9 aa, Artificial Sequence
  Description of Artificial Sequence: Synthetic peptide
KVAEGQNML

SEQ ID NO: 9316 - protein, 9 aa, Artificial Sequence
  Description of Artificial Sequence: Synthetic peptide
LHYRPTEQC

SEQ ID NO: 9317 - protein, 9 aa, Artificial Sequence
  Description of Artificial Sequence: Synthetic peptide
KTGMGDLFL

SEQ ID NO: 9318 - protein, 9 aa, Artificial Sequence
  Description of Artificial Sequence: Synthetic peptide
AQCHDMWGH

SEQ ID NO: 9319 - protein, 9 aa, Artificial Sequence
  Description of Artificial Sequence: Synthetic peptide
ATGLTDHQW

SEQ ID NO: 9320 - protein, 9 aa, Artificial Sequence
  Description of Artificial Sequence: Synthetic peptide
QWAPLQTWA

SEQ ID NO: 9321 - protein, 9 aa, Artificial Sequence
  Description of Artificial Sequence: Synthetic peptide
SPHNCQHMG

SEQ ID NO: 9322 - protein, 9 aa, Artificial Sequence
  Description of Artificial Sequence: Synthetic peptide
ISMRSECED

SEQ ID NO: 9323 - protein, 9 aa, Artificial Sequence
  Description of Artificial Sequence: Synthetic peptide
KIAAWNDFL

SEQ ID NO: 9324 - protein, 9 aa, Artificial Sequence
  Description of Artificial Sequence: Synthetic peptide
RFDQFWDTY

SEQ ID NO: 9325 - protein, 9 aa, Artificial Sequence
  Description of Artificial Sequence: Synthetic peptide
HQCNCLLSW

SEQ ID NO: 9326 - protein, 9 aa, Artificial Sequence
  Description of Artificial Sequence: Synthetic peptide
MAMWIADTH

SEQ ID NO: 9327 - protein, 9 aa, Artificial Sequence
  Description of Artificial Sequence: Synthetic peptide
AVHTADVCC

SEQ ID NO: 9328 - protein, 9 aa, Artificial Sequence
  Description of Artificial Sequence: Synthetic peptide
SCAPDTQFG

SEQ ID NO: 9329 - protein, 9 aa, Artificial Sequence
  Description of Artificial Sequence: Synthetic peptide
CWILHHRCS

SEQ ID NO: 9330 - protein, 9 aa, Artificial Sequence
  Description of Artificial Sequence: Synthetic peptide
QVGIEFVVC

SEQ ID NO: 9331 - protein, 9 aa, Artificial Sequence
  Description of Artificial Sequence: Synthetic peptide
TIVVIPIKS

SEQ ID NO: 9332 - protein, 9 aa, Artificial Sequence
  Description of Artificial Sequence: Synthetic peptide
MPWLDKPPC

SEQ ID NO: 9333 - protein, 9 aa, Artificial Sequence
  Description of Artificial Sequence: Synthetic peptide
YMSWYQIRN

SEQ ID NO: 9334 - protein, 9 aa, Artificial Sequence
  Description of Artificial Sequence: Synthetic peptide
AVYLDHVFS

SEQ ID NO: 9335 - protein, 9 aa, Artificial Sequence
  Description of Artificial Sequence: Synthetic peptide
KACMSHQGR

SEQ ID NO: 9336 - protein, 9 aa, Artificial Sequence
  Description of Artificial Sequence: Synthetic peptide
TSIEGLKTM

SEQ ID NO: 9337 - protein, 9 aa, Artificial Sequence
  Description of Artificial Sequence: Synthetic peptide
AWSYTGACY

SEQ ID NO: 9338 - protein, 9 aa, Artificial Sequence
  Description of Artificial Sequence: Synthetic peptide
QCVDCPPYC

SEQ ID NO: 9339 - protein, 9 aa, Artificial Sequence
  Description of Artificial Sequence: Synthetic peptide
VTCNWCVMP

SEQ ID NO: 9340 - protein, 9 aa, Artificial Sequence
  Description of Artificial Sequence: Synthetic peptide
KCADLIIRS

SEQ ID NO: 9341 - protein, 9 aa, Artificial Sequence
  Description of Artificial Sequence: Synthetic peptide
NVCDNGHEI

SEQ ID NO: 9342 - protein, 9 aa, Artificial Sequence
  Description of Artificial Sequence: Synthetic peptide
MMKRNRFIC

SEQ ID NO: 9343 - protein, 9 aa, Artificial Sequence
  Description of Artificial Sequence: Synthetic peptide
SRVMIHVYV

SEQ ID NO: 9344 - protein, 9 aa, Artificial Sequence
  Description of Artificial Sequence: Synthetic peptide
WKATPGGQC

SEQ ID NO: 9345 - protein, 9 aa, Artificial Sequence
  Description of Artificial Sequence: Synthetic peptide
WTTSIAVDT

SEQ ID NO: 9346 - protein, 9 aa, Artificial Sequence
  Description of Artificial Sequence: Synthetic peptide
DTHHVHGWQ

SEQ ID NO: 9347 - protein, 9 aa, Artificial Sequence
  Description of Artificial Sequence: Synthetic peptide
MGYAKHDSH

SEQ ID NO: 9348 - protein, 9 aa, Artificial Sequence
  Description of Artificial Sequence: Synthetic peptide
GCEEVGRCQ

SEQ ID NO: 9349 - protein, 9 aa, Artificial Sequence
  Description of Artificial Sequence: Synthetic peptide
KTMGIGGGP

SEQ ID NO: 9350 - protein, 9 aa, Artificial Sequence
  Description of Artificial Sequence: Synthetic peptide
RVWSLEWHL

SEQ ID NO: 9351 - protein, 9 aa, Artificial Sequence
  Description of Artificial Sequence: Synthetic peptide
EQPNMGDYG

SEQ ID NO: 9352 - protein, 9 aa, Artificial Sequence
  Description of Artificial Sequence: Synthetic peptide
FGEFTMDEN

SEQ ID NO: 9353 - protein, 9 aa, Artificial Sequence
  Description of Artificial Sequence: Synthetic peptide
KFGFMYNEF

SEQ ID NO: 9354 - protein, 9 aa, Artificial Sequence
  Description of Artificial Sequence: Synthetic peptide
ERFHSYPLG

SEQ ID NO: 9355 - protein, 9 aa, Artificial Sequence
  Description of Artificial Sequence: Synthetic peptide
FLYTFMFQH

SEQ ID NO: 9356 - protein, 9 aa, Artificial Sequence
  Description of Artificial Sequence: Synthetic peptide
GSVMLMVIR

SEQ ID NO: 9357 - protein, 9 aa, Artificial Sequence
  Description of Artificial Sequence: Synthetic peptide
KMAGIGCWY

SEQ ID NO: 9358 - protein, 9 aa, Artificial Sequence
  Description of Artificial Sequence: Synthetic peptide
RTRISQMFG

SEQ ID NO: 9359 - protein, 9 aa, Artificial Sequence
  Description of Artificial Sequence: Synthetic peptide
AQARTIGLG

SEQ ID NO: 9360 - protein, 9 aa, Artificial Sequence
  Description of Artificial Sequence: Synthetic peptide
MIRPSINGS

SEQ ID NO: 9361 - protein, 9 aa, Artificial Sequence
  Description of Artificial Sequence: Synthetic peptide
TKGRNDHME

SEQ ID NO: 9362 - protein, 9 aa, Artificial Sequence
  Description of Artificial Sequence: Synthetic peptide
ATIAQWCVH

SEQ ID NO: 9363 - protein, 9 aa, Artificial Sequence
  Description of Artificial Sequence: Synthetic peptide
RYNNCPNLW

SEQ ID NO: 9364 - protein, 9 aa, Artificial Sequence
  Description of Artificial Sequence: Synthetic peptide
FKIEWSQDI

SEQ ID NO: 9365 - protein, 9 aa, Artificial Sequence
  Description of Artificial Sequence: Synthetic peptide
KKHKGWCRA

SEQ ID NO: 9366 - protein, 9 aa, Artificial Sequence
  Description of Artificial Sequence: Synthetic peptide
GAANRIQSW

SEQ ID NO: 9367 - protein, 9 aa, Artificial Sequence
  Description of Artificial Sequence: Synthetic peptide
NWTGNMQWA

SEQ ID NO: 9368 - protein, 9 aa, Artificial Sequence
  Description of Artificial Sequence: Synthetic peptide
CMEVTCFVV

SEQ ID NO: 9369 - protein, 9 aa, Artificial Sequence
  Description of Artificial Sequence: Synthetic peptide
RVEMGCEPR

SEQ ID NO: 9370 - protein, 9 aa, Artificial Sequence
  Description of Artificial Sequence: Synthetic peptide
SQIQIRQAD

SEQ ID NO: 9371 - protein, 9 aa, Artificial Sequence
  Description of Artificial Sequence: Synthetic peptide
KIGCMYSSQ

SEQ ID NO: 9372 - protein, 9 aa, Artificial Sequence
  Description of Artificial Sequence: Synthetic peptide
MWHELIADQ

SEQ ID NO: 9373 - protein, 9 aa, Artificial Sequence
  Description of Artificial Sequence: Synthetic peptide
PQEAQIGAP

SEQ ID NO: 9374 - protein, 9 aa, Artificial Sequence
  Description of Artificial Sequence: Synthetic peptide
KTQIHMGDE

SEQ ID NO: 9375 - protein, 9 aa, Artificial Sequence
  Description of Artificial Sequence: Synthetic peptide
LPSHCNLGS

SEQ ID NO: 9376 - protein, 9 aa, Artificial Sequence
  Description of Artificial Sequence: Synthetic peptide
KVESTTQLC

SEQ ID NO: 9377 - protein, 9 aa, Artificial Sequence
  Description of Artificial Sequence: Synthetic peptide
AYAMRNYTS

SEQ ID NO: 9378 - protein, 9 aa, Artificial Sequence
  Description of Artificial Sequence: Synthetic peptide
IIRQSEQYH

SEQ ID NO: 9379 - protein, 9 aa, Artificial Sequence
  Description of Artificial Sequence: Synthetic peptide
AHAWLQHWA

SEQ ID NO: 9380 - protein, 9 aa, Artificial Sequence
  Description of Artificial Sequence: Synthetic peptide
HEVMMCPAP

SEQ ID NO: 9381 - protein, 9 aa, Artificial Sequence
  Description of Artificial Sequence: Synthetic peptide
EVAFTTSSD

SEQ ID NO: 9382 - protein, 9 aa, Artificial Sequence
  Description of Artificial Sequence: Synthetic peptide
PLNQEQIPQ

SEQ ID NO: 9383 - protein, 9 aa, Artificial Sequence
  Description of Artificial Sequence: Synthetic peptide
TSVIRLFWI

SEQ ID NO: 9384 - protein, 9 aa, Artificial Sequence
  Description of Artificial Sequence: Synthetic peptide
QFAQLWCAK

SEQ ID NO: 9385 - protein, 9 aa, Artificial Sequence
  Description of Artificial Sequence: Synthetic peptide
GIWVRDTYN

SEQ ID NO: 9386 - protein, 9 aa, Artificial Sequence
  Description of Artificial Sequence: Synthetic peptide
LCTSTERQG

SEQ ID NO: 9387 - protein, 9 aa, Artificial Sequence
  Description of Artificial Sequence: Synthetic peptide
DRVNLMWKD

SEQ ID NO: 9388 - protein, 9 aa, Artificial Sequence
  Description of Artificial Sequence: Synthetic peptide
CYMNFIVDG

SEQ ID NO: 9389 - protein, 9 aa, Artificial Sequence
  Description of Artificial Sequence: Synthetic peptide
QISKPSVQC

SEQ ID NO: 9390 - protein, 9 aa, Artificial Sequence
  Description of Artificial Sequence: Synthetic peptide
GITMHPMHH

SEQ ID NO: 9391 - protein, 9 aa, Artificial Sequence
  Description of Artificial Sequence: Synthetic peptide
LPPPEEKWL

SEQ ID NO: 9392 - protein, 9 aa, Artificial Sequence
  Description of Artificial Sequence: Synthetic peptide
TTTNQFMFQ

SEQ ID NO: 9393 - protein, 9 aa, Artificial Sequence
  Description of Artificial Sequence: Synthetic peptide
RCGEIMGLD

SEQ ID NO: 9394 - protein, 9 aa, Artificial Sequence
  Description of Artificial Sequence: Synthetic peptide
MQLRIHTNS

SEQ ID NO: 9395 - protein, 9 aa, Artificial Sequence
  Description of Artificial Sequence: Synthetic peptide
ICHIRTRGN

SEQ ID NO: 9396 - protein, 9 aa, Artificial Sequence
  Description of Artificial Sequence: Synthetic peptide
MSGPNDTEF

SEQ ID NO: 9397 - protein, 9 aa, Artificial Sequence
  Description of Artificial Sequence: Synthetic peptide
NTQYSAKND

SEQ ID NO: 9398 - protein, 9 aa, Artificial Sequence
  Description of Artificial Sequence: Synthetic peptide
KQKTQNRNA

SEQ ID NO: 9399 - protein, 9 aa, Artificial Sequence
  Description of Artificial Sequence: Synthetic peptide
TRETMNEWH

SEQ ID NO: 9400 - protein, 9 aa, Artificial Sequence
  Description of Artificial Sequence: Synthetic peptide
ERQAHNHYA

SEQ ID NO: 9401 - protein, 9 aa, Artificial Sequence
  Description of Artificial Sequence: Synthetic peptide
SKGWADPCP

SEQ ID NO: 9402 - protein, 9 aa, Artificial Sequence
  Description of Artificial Sequence: Synthetic peptide
RTEAHLPAP

SEQ ID NO: 9403 - protein, 9 aa, Artificial Sequence
  Description of Artificial Sequence: Synthetic peptide
GNECFHNVE

SEQ ID NO: 9404 - protein, 9 aa, Artificial Sequence
  Description of Artificial Sequence: Synthetic peptide
ECIFAPRMS

SEQ ID NO: 9405 - protein, 9 aa, Artificial Sequence
  Description of Artificial Sequence: Synthetic peptide
YFPSIQCYE

SEQ ID NO: 9406 - protein, 9 aa, Artificial Sequence
  Description of Artificial Sequence: Synthetic peptide
SSIYKEIQE

SEQ ID NO: 9407 - protein, 9 aa, Artificial Sequence
  Description of Artificial Sequence: Synthetic peptide
THVKRFDYE

SEQ ID NO: 9408 - protein, 9 aa, Artificial Sequence
  Description of Artificial Sequence: Synthetic peptide
LYMMALLPT

SEQ ID NO: 9409 - protein, 9 aa, Artificial Sequence
  Description of Artificial Sequence: Synthetic peptide
SGALKNREE

SEQ ID NO: 9410 - protein, 9 aa, Artificial Sequence
  Description of Artificial Sequence: Synthetic peptide
EASIQASWN

SEQ ID NO: 9411 - protein, 9 aa, Artificial Sequence
  Description of Artificial Sequence: Synthetic peptide
ACIPQMHSA

SEQ ID NO: 9412 - protein, 9 aa, Artificial Sequence
  Description of Artificial Sequence: Synthetic peptide
LHSYQWRLG

SEQ ID NO: 9413 - protein, 9 aa, Artificial Sequence
  Description of Artificial Sequence: Synthetic peptide
ACVERLHHK

SEQ ID NO: 9414 - protein, 9 aa, Artificial Sequence
  Description of Artificial Sequence: Synthetic peptide
TVNWYSGFG

SEQ ID NO: 9415 - protein, 9 aa, Artificial Sequence
  Description of Artificial Sequence: Synthetic peptide
IAKQNFMKT

SEQ ID NO: 9416 - protein, 9 aa, Artificial Sequence
  Description of Artificial Sequence: Synthetic peptide
FTQAIHHPD

SEQ ID NO: 9417 - protein, 9 aa, Artificial Sequence
  Description of Artificial Sequence: Synthetic peptide
YHCCFAMQS

SEQ ID NO: 9418 - protein, 9 aa, Artificial Sequence
  Description of Artificial Sequence: Synthetic peptide
NLERCNTMM

SEQ ID NO: 9419 - protein, 9 aa, Artificial Sequence
  Description of Artificial Sequence: Synthetic peptide
HMHNLPVKP

SEQ ID NO: 9420 - protein, 9 aa, Artificial Sequence
  Description of Artificial Sequence: Synthetic peptide
HCWVNEKCE

SEQ ID NO: 9421 - protein, 9 aa, Artificial Sequence
  Description of Artificial Sequence: Synthetic peptide
FADKWTNQF

SEQ ID NO: 9422 - protein, 9 aa, Artificial Sequence
  Description of Artificial Sequence: Synthetic peptide
RQAWPKDGM

SEQ ID NO: 9423 - protein, 9 aa, Artificial Sequence
  Description of Artificial Sequence: Synthetic peptide
CSESYRGPD

SEQ ID NO: 9424 - protein, 9 aa, Artificial Sequence
  Description of Artificial Sequence: Synthetic peptide
VLKSNLTGM

SEQ ID NO: 9425 - protein, 9 aa, Artificial Sequence
  Description of Artificial Sequence: Synthetic peptide
NAYYDSHCE

SEQ ID NO: 9426 - protein, 9 aa, Artificial Sequence
  Description of Artificial Sequence: Synthetic peptide
YPAQYTAFS

SEQ ID NO: 9427 - protein, 9 aa, Artificial Sequence
  Description of Artificial Sequence: Synthetic peptide
GLFEGSPGA

SEQ ID NO: 9428 - protein, 9 aa, Artificial Sequence
  Description of Artificial Sequence: Synthetic peptide
VTMIHNAFH

SEQ ID NO: 9429 - protein, 9 aa, Artificial Sequence
  Description of Artificial Sequence: Synthetic peptide
IYMSTGNTP

SEQ ID NO: 9430 - protein, 9 aa, Artificial Sequence
  Description of Artificial Sequence: Synthetic peptide
YIGMKSCSG

SEQ ID NO: 9431 - protein, 9 aa, Artificial Sequence
  Description of Artificial Sequence: Synthetic peptide
MFMTNVNSF

SEQ ID NO: 9432 - protein, 9 aa, Artificial Sequence
  Description of Artificial Sequence: Synthetic peptide
IAQSEADYW

SEQ ID NO: 9433 - protein, 9 aa, Artificial Sequence
  Description of Artificial Sequence: Synthetic peptide
AVHNVKDVH

SEQ ID NO: 9434 - protein, 9 aa, Artificial Sequence
  Description of Artificial Sequence: Synthetic peptide
HIHMSDRGA

SEQ ID NO: 9435 - protein, 9 aa, Artificial Sequence
  Description of Artificial Sequence: Synthetic peptide
GLFHPQFGQ

SEQ ID NO: 9436 - protein, 9 aa, Artificial Sequence
  Description of Artificial Sequence: Synthetic peptide
GPRHIEEDG

SEQ ID NO: 9437 - protein, 9 aa, Artificial Sequence
  Description of Artificial Sequence: Synthetic peptide
AYHCYMSWM

SEQ ID NO: 9438 - protein, 9 aa, Artificial Sequence
  Description of Artificial Sequence: Synthetic peptide
ITASIKDQW

SEQ ID NO: 9439 - protein, 9 aa, Artificial Sequence
  Description of Artificial Sequence: Synthetic peptide
PAHINDQYM

SEQ ID NO: 9440 - protein, 9 aa, Artificial Sequence
  Description of Artificial Sequence: Synthetic peptide
AAMSSSHSY

SEQ ID NO: 9441 - protein, 9 aa, Artificial Sequence
  Description of Artificial Sequence: Synthetic peptide
MNSFYRAEW

SEQ ID NO: 9442 - protein, 9 aa, Artificial Sequence
  Description of Artificial Sequence: Synthetic peptide
QATGMHRWQ

SEQ ID NO: 9443 - protein, 9 aa, Artificial Sequence
  Description of Artificial Sequence: Synthetic peptide
SSRMQMQGP

SEQ ID NO: 9444 - protein, 9 aa, Artificial Sequence
  Description of Artificial Sequence: Synthetic peptide
MEHTMDFGV

SEQ ID NO: 9445 - protein, 9 aa, Artificial Sequence
  Description of Artificial Sequence: Synthetic peptide
YLEMYSKDW

SEQ ID NO: 9446 - protein, 9 aa, Artificial Sequence
  Description of Artificial Sequence: Synthetic peptide
QWFTKGVGE

SEQ ID NO: 9447 - protein, 9 aa, Artificial Sequence
  Description of Artificial Sequence: Synthetic peptide
KNCIMLASN

SEQ ID NO: 9448 - protein, 9 aa, Artificial Sequence
  Description of Artificial Sequence: Synthetic peptide
AYAPSKNAM

SEQ ID NO: 9449 - protein, 9 aa, Artificial Sequence
  Description of Artificial Sequence: Synthetic peptide
GLSMVLHFV

SEQ ID NO: 9450 - protein, 9 aa, Artificial Sequence
  Description of Artificial Sequence: Synthetic peptide
SPQQPSVFH

SEQ ID NO: 9451 - protein, 9 aa, Artificial Sequence
  Description of Artificial Sequence: Synthetic peptide
PGGCYRMME

SEQ ID NO: 9452 - protein, 9 aa, Artificial Sequence
  Description of Artificial Sequence: Synthetic peptide
KTCLCIFTK

SEQ ID NO: 9453 - protein, 9 aa, Artificial Sequence
  Description of Artificial Sequence: Synthetic peptide
ACHTGQSGM

SEQ ID NO: 9454 - protein, 9 aa, Artificial Sequence
  Description of Artificial Sequence: Synthetic peptide
DIEFLDCEN

SEQ ID NO: 9455 - protein, 9 aa, Artificial Sequence
  Description of Artificial Sequence: Synthetic peptide
WTLQVMKIN

SEQ ID NO: 9456 - protein, 9 aa, Artificial Sequence
  Description of Artificial Sequence: Synthetic peptide
DVKSWAVCD

SEQ ID NO: 9457 - protein, 9 aa, Artificial Sequence
  Description of Artificial Sequence: Synthetic peptide
LCAVCGDCD

SEQ ID NO: 9458 - protein, 9 aa, Artificial Sequence
  Description of Artificial Sequence: Synthetic peptide
DQEAQVVTG

SEQ ID NO: 9459 - protein, 9 aa, Artificial Sequence
  Description of Artificial Sequence: Synthetic peptide
HFQPVFMQP

SEQ ID NO: 9460 - protein, 9 aa, Artificial Sequence
  Description of Artificial Sequence: Synthetic peptide
GHLFNNNEW

SEQ ID NO: 9461 - protein, 9 aa, Artificial Sequence
  Description of Artificial Sequence: Synthetic peptide
YDYWMQAPT

SEQ ID NO: 9462 - protein, 9 aa, Artificial Sequence
  Description of Artificial Sequence: Synthetic peptide
ASMHEETCL

SEQ ID NO: 9463 - protein, 9 aa, Artificial Sequence
  Description of Artificial Sequence: Synthetic peptide
DCVLTMVDK

SEQ ID NO: 9464 - protein, 9 aa, Artificial Sequence
  Description of Artificial Sequence: Synthetic peptide
MLPLEMKNL

SEQ ID NO: 9465 - protein, 9 aa, Artificial Sequence
  Description of Artificial Sequence: Synthetic peptide
IMTIIPYGP

SEQ ID NO: 9466 - protein, 9 aa, Artificial Sequence
  Description of Artificial Sequence: Synthetic peptide
LIEKQRWML

SEQ ID NO: 9467 - protein, 9 aa, Artificial Sequence
  Description of Artificial Sequence: Synthetic peptide
VSVQSRAQL

SEQ ID NO: 9468 - protein, 9 aa, Artificial Sequence
  Description of Artificial Sequence: Synthetic peptide
THSSCWYQD

SEQ ID NO: 9469 - protein, 9 aa, Artificial Sequence
  Description of Artificial Sequence: Synthetic peptide
VFNLMLQDK

SEQ ID NO: 9470 - protein, 9 aa, Artificial Sequence
  Description of Artificial Sequence: Synthetic peptide
HIKVEHEEV

SEQ ID NO: 9471 - protein, 9 aa, Artificial Sequence
  Description of Artificial Sequence: Synthetic peptide
MMLGYMEQD

SEQ ID NO: 9472 - protein, 9 aa, Artificial Sequence
  Description of Artificial Sequence: Synthetic peptide
TQCKQLTVM

SEQ ID NO: 9473 - protein, 9 aa, Artificial Sequence
  Description of Artificial Sequence: Synthetic peptide
QSSHCKQMV

SEQ ID NO: 9474 - protein, 9 aa, Artificial Sequence
  Description of Artificial Sequence: Synthetic peptide
WGGMPNNQG

SEQ ID NO: 9475 - protein, 9 aa, Artificial Sequence
  Description of Artificial Sequence: Synthetic peptide
FLTCDQFEW

SEQ ID NO: 9476 - protein, 9 aa, Artificial Sequence
  Description of Artificial Sequence: Synthetic peptide
RVNGSTCRH

SEQ ID NO: 9477 - protein, 9 aa, Artificial Sequence
  Description of Artificial Sequence: Synthetic peptide
ETHAAMNSM

SEQ ID NO: 9478 - protein, 9 aa, Artificial Sequence
  Description of Artificial Sequence: Synthetic peptide
DAKLTMHSA

SEQ ID NO: 9479 - protein, 9 aa, Artificial Sequence
  Description of Artificial Sequence: Synthetic peptide
RYPCCQSPF

SEQ ID NO: 9480 - protein, 9 aa, Artificial Sequence
  Description of Artificial Sequence: Synthetic peptide
QGENAQHHN

SEQ ID NO: 9481 - protein, 9 aa, Artificial Sequence
  Description of Artificial Sequence: Synthetic peptide
TSNHNMALE

SEQ ID NO: 9482 - protein, 9 aa, Artificial Sequence
  Description of Artificial Sequence: Synthetic peptide
NPGWQTIGQ

SEQ ID NO: 9483 - protein, 9 aa, Artificial Sequence
  Description of Artificial Sequence: Synthetic peptide
CAWHMKQGN

SEQ ID NO: 9484 - protein, 9 aa, Artificial Sequence
  Description of Artificial Sequence: Synthetic peptide
NVMGTQAKE

SEQ ID NO: 9485 - protein, 9 aa, Artificial Sequence
  Description of Artificial Sequence: Synthetic peptide
TYIQYPTNA

SEQ ID NO: 9486 - protein, 9 aa, Artificial Sequence
  Description of Artificial Sequence: Synthetic peptide
DGMHRELYS

SEQ ID NO: 9487 - protein, 9 aa, Artificial Sequence
  Description of Artificial Sequence: Synthetic peptide
QSAHPEPMC

SEQ ID NO: 9488 - protein, 9 aa, Artificial Sequence
  Description of Artificial Sequence: Synthetic peptide
QAKMILDGT

SEQ ID NO: 9489 - protein, 9 aa, Artificial Sequence
  Description of Artificial Sequence: Synthetic peptide
VHVHCMIGS

SEQ ID NO: 9490 - protein, 9 aa, Artificial Sequence
  Description of Artificial Sequence: Synthetic peptide
TAALGHSFC

SEQ ID NO: 9491 - protein, 9 aa, Artificial Sequence
  Description of Artificial Sequence: Synthetic peptide
DTRRNLCCD

SEQ ID NO: 9492 - protein, 9 aa, Artificial Sequence
  Description of Artificial Sequence: Synthetic peptide
ENTMWQSSQ

SEQ ID NO: 9493 - protein, 9 aa, Artificial Sequence
  Description of Artificial Sequence: Synthetic peptide
NQREWHGLA

SEQ ID NO: 9494 - protein, 9 aa, Artificial Sequence
  Description of Artificial Sequence: Synthetic peptide
PDLWYEKSS

SEQ ID NO: 9495 - protein, 9 aa, Artificial Sequence
  Description of Artificial Sequence: Synthetic peptide
ESSQEIKTC

SEQ ID NO: 9496 - protein, 9 aa, Artificial Sequence
  Description of Artificial Sequence: Synthetic peptide
YVDHWTLGD

SEQ ID NO: 9497 - protein, 9 aa, Artificial Sequence
  Description of Artificial Sequence: Synthetic peptide
NHSLCWDSK

SEQ ID NO: 9498 - protein, 9 aa, Artificial Sequence
  Description of Artificial Sequence: Synthetic peptide
SECEVLCSL

SEQ ID NO: 9499 - protein, 9 aa, Artificial Sequence
  Description of Artificial Sequence: Synthetic peptide
DQRHGNVSP

SEQ ID NO: 9500 - protein, 9 aa, Artificial Sequence
  Description of Artificial Sequence: Synthetic peptide
MCFPYSCAA

SEQ ID NO: 9501 - protein, 9 aa, Artificial Sequence
  Description of Artificial Sequence: Synthetic peptide
ASKQGTHDY

SEQ ID NO: 9502 - protein, 9 aa, Artificial Sequence
  Description of Artificial Sequence: Synthetic peptide
GNKHCMLGT

SEQ ID NO: 9503 - protein, 9 aa, Artificial Sequence
  Description of Artificial Sequence: Synthetic peptide
GTKLIWPYQ

SEQ ID NO: 9504 - protein, 9 aa, Artificial Sequence
  Description of Artificial Sequence: Synthetic peptide
QCTAHNTCM

SEQ ID NO: 9505 - protein, 9 aa, Artificial Sequence
  Description of Artificial Sequence: Synthetic peptide
ACDQVNTVQ

SEQ ID NO: 9506 - protein, 9 aa, Artificial Sequence
  Description of Artificial Sequence: Synthetic peptide
IECSPRESI

SEQ ID NO: 9507 - protein, 9 aa, Artificial Sequence
  Description of Artificial Sequence: Synthetic peptide
RCADNPYFR

SEQ ID NO: 9508 - protein, 9 aa, Artificial Sequence
  Description of Artificial Sequence: Synthetic peptide
QESMCNYWQ

SEQ ID NO: 9509 - protein, 9 aa, Artificial Sequence
  Description of Artificial Sequence: Synthetic peptide
AGMYKCQED

SEQ ID NO: 9510 - protein, 9 aa, Artificial Sequence
  Description of Artificial Sequence: Synthetic peptide
SQAHQNRTC

SEQ ID NO: 9511 - protein, 9 aa, Artificial Sequence
  Description of Artificial Sequence: Synthetic peptide
MGRQKDNVY

SEQ ID NO: 9512 - protein, 9 aa, Artificial Sequence
  Description of Artificial Sequence: Synthetic peptide
NANYWFYYD

SEQ ID NO: 9513 - protein, 9 aa, Artificial Sequence
  Description of Artificial Sequence: Synthetic peptide
EFVLGCQGI

SEQ ID NO: 9514 - protein, 9 aa, Artificial Sequence
  Description of Artificial Sequence: Synthetic peptide
QRSVFHQRS

SEQ ID NO: 9515 - protein, 9 aa, Artificial Sequence
  Description of Artificial Sequence: Synthetic peptide
PIWQGYWPW

SEQ ID NO: 9516 - protein, 9 aa, Artificial Sequence
  Description of Artificial Sequence: Synthetic peptide
HSMMPGWPS

SEQ ID NO: 9517 - protein, 9 aa, Artificial Sequence
  Description of Artificial Sequence: Synthetic peptide
GVHHRCRMT

SEQ ID NO: 9518 - protein, 9 aa, Artificial Sequence
  Description of Artificial Sequence: Synthetic peptide
IQAVMASGW

SEQ ID NO: 9519 - protein, 9 aa, Artificial Sequence
  Description of Artificial Sequence: Synthetic peptide
IAKIGNCVW

SEQ ID NO: 9520 - protein, 9 aa, Artificial Sequence
  Description of Artificial Sequence: Synthetic peptide
CVDTNRMWQ

SEQ ID NO: 9521 - protein, 9 aa, Artificial Sequence
  Description of Artificial Sequence: Synthetic peptide
ARWFSTVEQ

SEQ ID NO: 9522 - protein, 9 aa, Artificial Sequence
  Description of Artificial Sequence: Synthetic peptide
VFKPLDKRY

SEQ ID NO: 9523 - protein, 9 aa, Artificial Sequence
  Description of Artificial Sequence: Synthetic peptide
EVRIQCKID

SEQ ID NO: 9524 - protein, 9 aa, Artificial Sequence
  Description of Artificial Sequence: Synthetic peptide
NGVGRSGDN

SEQ ID NO: 9525 - protein, 9 aa, Artificial Sequence
  Description of Artificial Sequence: Synthetic peptide
CVEQYVEQG

SEQ ID NO: 9526 - protein, 9 aa, Artificial Sequence
  Description of Artificial Sequence: Synthetic peptide
LSAQRLVCD

SEQ ID NO: 9527 - protein, 9 aa, Artificial Sequence
  Description of Artificial Sequence: Synthetic peptide
KGNPLDGDT

SEQ ID NO: 9528 - protein, 9 aa, Artificial Sequence
  Description of Artificial Sequence: Synthetic peptide
PVICVWHDN

SEQ ID NO: 9529 - protein, 9 aa, Artificial Sequence
  Description of Artificial Sequence: Synthetic peptide
EIHMFGQSE

SEQ ID NO: 9530 - protein, 9 aa, Artificial Sequence
  Description of Artificial Sequence: Synthetic peptide
YCECGHWPN

SEQ ID NO: 9531 - protein, 9 aa, Artificial Sequence
  Description of Artificial Sequence: Synthetic peptide
TYESLQNSW

SEQ ID NO: 9532 - protein, 9 aa, Artificial Sequence
  Description of Artificial Sequence: Synthetic peptide
INYISFVDR

SEQ ID NO: 9533 - protein, 9 aa, Artificial Sequence
  Description of Artificial Sequence: Synthetic peptide
MWGCKLFVC

SEQ ID NO: 9534 - protein, 9 aa, Artificial Sequence
  Description of Artificial Sequence: Synthetic peptide
CQMLCRPPV

SEQ ID NO: 9535 - protein, 9 aa, Artificial Sequence
  Description of Artificial Sequence: Synthetic peptide
RDQCRMESG

SEQ ID NO: 9536 - protein, 9 aa, Artificial Sequence
  Description of Artificial Sequence: Synthetic peptide
WVHPYSYCA

SEQ ID NO: 9537 - protein, 9 aa, Artificial Sequence
  Description of Artificial Sequence: Synthetic peptide
QSRCVDNTV

SEQ ID NO: 9538 - protein, 9 aa, Artificial Sequence
  Description of Artificial Sequence: Synthetic peptide
GRALGKKQG

SEQ ID NO: 9539 - protein, 9 aa, Artificial Sequence
  Description of Artificial Sequence: Synthetic peptide
SNVACIQAF

SEQ ID NO: 9540 - protein, 9 aa, Artificial Sequence
  Description of Artificial Sequence: Synthetic peptide
HQYVHNWRQ

SEQ ID NO: 9541 - protein, 9 aa, Artificial Sequence
  Description of Artificial Sequence: Synthetic peptide
SVLHVQALA

SEQ ID NO: 9542 - protein, 9 aa, Artificial Sequence
  Description of Artificial Sequence: Synthetic peptide
ATMNLSWGL

SEQ ID NO: 9543 - protein, 9 aa, Artificial Sequence
  Description of Artificial Sequence: Synthetic peptide
WERCLELNQ

SEQ ID NO: 9544 - protein, 9 aa, Artificial Sequence
  Description of Artificial Sequence: Synthetic peptide
TKMIIFDSW

SEQ ID NO: 9545 - protein, 9 aa, Artificial Sequence
  Description of Artificial Sequence: Synthetic peptide
CWECCTDSG

SEQ ID NO: 9546 - protein, 9 aa, Artificial Sequence
  Description of Artificial Sequence: Synthetic peptide
YSDPKNMSI

SEQ ID NO: 9547 - protein, 9 aa, Artificial Sequence
  Description of Artificial Sequence: Synthetic peptide
FPKGSECNW

SEQ ID NO: 9548 - protein, 9 aa, Artificial Sequence
  Description of Artificial Sequence: Synthetic peptide
EAGCKMWPT

SEQ ID NO: 9549 - protein, 9 aa, Artificial Sequence
  Description of Artificial Sequence: Synthetic peptide
KDGRNPHCL

SEQ ID NO: 9550 - protein, 9 aa, Artificial Sequence
  Description of Artificial Sequence: Synthetic peptide
LEIGGKTRT

SEQ ID NO: 9551 - protein, 9 aa, Artificial Sequence
  Description of Artificial Sequence: Synthetic peptide
YKGMEKNPV

SEQ ID NO: 9552 - protein, 9 aa, Artificial Sequence
  Description of Artificial Sequence: Synthetic peptide
DLIVATEWF

SEQ ID NO: 9553 - protein, 9 aa, Artificial Sequence
  Description of Artificial Sequence: Synthetic peptide
WHTIMTYES

SEQ ID NO: 9554 - protein, 9 aa, Artificial Sequence
  Description of Artificial Sequence: Synthetic peptide
DTAFMHHHV

SEQ ID NO: 9555 - protein, 9 aa, Artificial Sequence
  Description of Artificial Sequence: Synthetic peptide
FQWRTEMNN

SEQ ID NO: 9556 - protein, 9 aa, Artificial Sequence
  Description of Artificial Sequence: Synthetic peptide
SGDWDFGEW

SEQ ID NO: 9557 - protein, 9 aa, Artificial Sequence
  Description of Artificial Sequence: Synthetic peptide
MNLQIGSKG

SEQ ID NO: 9558 - protein, 9 aa, Artificial Sequence
  Description of Artificial Sequence: Synthetic peptide
CNGYWMCMS

SEQ ID NO: 9559 - protein, 9 aa, Artificial Sequence
  Description of Artificial Sequence: Synthetic peptide
SQERMDYDG

SEQ ID NO: 9560 - protein, 9 aa, Artificial Sequence
  Description of Artificial Sequence: Synthetic peptide
SVGYIYDQS

SEQ ID NO: 9561 - protein, 9 aa, Artificial Sequence
  Description of Artificial Sequence: Synthetic peptide
GTWSDPWPN

SEQ ID NO: 9562 - protein, 9 aa, Artificial Sequence
  Description of Artificial Sequence: Synthetic peptide
YPTMTFPEE

SEQ ID NO: 9563 - protein, 9 aa, Artificial Sequence
  Description of Artificial Sequence: Synthetic peptide
AAQYMGIMK

SEQ ID NO: 9564 - protein, 9 aa, Artificial Sequence
  Description of Artificial Sequence: Synthetic peptide
HTVMEWSPT

SEQ ID NO: 9565 - protein, 9 aa, Artificial Sequence
  Description of Artificial Sequence: Synthetic peptide
GQHTTSHAG

SEQ ID NO: 9566 - protein, 9 aa, Artificial Sequence
  Description of Artificial Sequence: Synthetic peptide
RYQSHCWLH

SEQ ID NO: 9567 - protein, 9 aa, Artificial Sequence
  Description of Artificial Sequence: Synthetic peptide
LSTMFPEQT

SEQ ID NO: 9568 - protein, 9 aa, Artificial Sequence
  Description of Artificial Sequence: Synthetic peptide
NIGVIPHIQ

SEQ ID NO: 9569 - protein, 9 aa, Artificial Sequence
  Description of Artificial Sequence: Synthetic peptide
PWTTPENYT

SEQ ID NO: 9570 - protein, 9 aa, Artificial Sequence
  Description of Artificial Sequence: Synthetic peptide
YNCPWDQQY

SEQ ID NO: 9571 - protein, 9 aa, Artificial Sequence
  Description of Artificial Sequence: Synthetic peptide
QWHDDQWST

SEQ ID NO: 9572 - protein, 9 aa, Artificial Sequence
  Description of Artificial Sequence: Synthetic peptide
DYAQPTGPD

SEQ ID NO: 9573 - protein, 9 aa, Artificial Sequence
  Description of Artificial Sequence: Synthetic peptide
FKHSLREWT

SEQ ID NO: 9574 - protein, 9 aa, Artificial Sequence
  Description of Artificial Sequence: Synthetic peptide
AARMVGEFY

SEQ ID NO: 9575 - protein, 9 aa, Artificial Sequence
  Description of Artificial Sequence: Synthetic peptide
GSMPSTVPH

SEQ ID NO: 9576 - protein, 9 aa, Artificial Sequence
  Description of Artificial Sequence: Synthetic peptide
ALAKFQCWS

SEQ ID NO: 9577 - protein, 9 aa, Artificial Sequence
  Description of Artificial Sequence: Synthetic peptide
AADIFAIND

SEQ ID NO: 9578 - protein, 9 aa, Artificial Sequence
  Description of Artificial Sequence: Synthetic peptide
QHHWKWSTE

SEQ ID NO: 9579 - protein, 9 aa, Artificial Sequence
  Description of Artificial Sequence: Synthetic peptide
AAGAFLSGC

SEQ ID NO: 9580 - protein, 9 aa, Artificial Sequence
  Description of Artificial Sequence: Synthetic peptide
FDVQFMRVD

SEQ ID NO: 9581 - protein, 9 aa, Artificial Sequence
  Description of Artificial Sequence: Synthetic peptide
ALQYCQGKD

SEQ ID NO: 9582 - protein, 9 aa, Artificial Sequence
  Description of Artificial Sequence: Synthetic peptide
NERDQCQWP

SEQ ID NO: 9583 - protein, 9 aa, Artificial Sequence
  Description of Artificial Sequence: Synthetic peptide
CRMITMMNE

SEQ ID NO: 9584 - protein, 9 aa, Artificial Sequence
  Description of Artificial Sequence: Synthetic peptide
EWHARHHYW

SEQ ID NO: 9585 - protein, 9 aa, Artificial Sequence
  Description of Artificial Sequence: Synthetic peptide
STSWLNDLT

SEQ ID NO: 9586 - protein, 9 aa, Artificial Sequence
  Description of Artificial Sequence: Synthetic peptide
DEGYIMFAP

SEQ ID NO: 9587 - protein, 9 aa, Artificial Sequence
  Description of Artificial Sequence: Synthetic peptide
QMVTQLNWE

SEQ ID NO: 9588 - protein, 9 aa, Artificial Sequence
  Description of Artificial Sequence: Synthetic peptide
VVTQYVDAP

SEQ ID NO: 9589 - protein, 9 aa, Artificial Sequence
  Description of Artificial Sequence: Synthetic peptide
TVIRDSRSY

SEQ ID NO: 9590 - protein, 9 aa, Artificial Sequence
  Description of Artificial Sequence: Synthetic peptide
DEAKKSCWQ

SEQ ID NO: 9591 - protein, 9 aa, Artificial Sequence
  Description of Artificial Sequence: Synthetic peptide
AVNEAQDNR

SEQ ID NO: 9592 - protein, 9 aa, Artificial Sequence
  Description of Artificial Sequence: Synthetic peptide
NERSGSVLE

SEQ ID NO: 9593 - protein, 9 aa, Artificial Sequence
  Description of Artificial Sequence: Synthetic peptide
TYASTRNFH

SEQ ID NO: 9594 - protein, 9 aa, Artificial Sequence
  Description of Artificial Sequence: Synthetic peptide
IRRSMQQQN

SEQ ID NO: 9595 - protein, 9 aa, Artificial Sequence
  Description of Artificial Sequence: Synthetic peptide
GFQRTHVDQ

SEQ ID NO: 9596 - protein, 9 aa, Artificial Sequence
  Description of Artificial Sequence: Synthetic peptide
HKHRMCKAR

SEQ ID NO: 9597 - protein, 9 aa, Artificial Sequence
  Description of Artificial Sequence: Synthetic peptide
TAGQQPTFM

SEQ ID NO: 9598 - protein, 9 aa, Artificial Sequence
  Description of Artificial Sequence: Synthetic peptide
VQMNLDAAP

SEQ ID NO: 9599 - protein, 9 aa, Artificial Sequence
  Description of Artificial Sequence: Synthetic peptide
KDHQLWEVW

SEQ ID NO: 9600 - protein, 9 aa, Artificial Sequence
  Description of Artificial Sequence: Synthetic peptide
GDCIIVISW

SEQ ID NO: 9601 - protein, 9 aa, Artificial Sequence
  Description of Artificial Sequence: Synthetic peptide
RDVGEDNSA

SEQ ID NO: 9602 - protein, 9 aa, Artificial Sequence
  Description of Artificial Sequence: Synthetic peptide
PWMHTMLNP

SEQ ID NO: 9603 - protein, 9 aa, Artificial Sequence
  Description of Artificial Sequence: Synthetic peptide
ETSTHCCKV

SEQ ID NO: 9604 - protein, 9 aa, Artificial Sequence
  Description of Artificial Sequence: Synthetic peptide
QVNMFMMPC

SEQ ID NO: 9605 - protein, 9 aa, Artificial Sequence
  Description of Artificial Sequence: Synthetic peptide
NADMSFRNR

SEQ ID NO: 9606 - protein, 9 aa, Artificial Sequence
  Description of Artificial Sequence: Synthetic peptide
FRLDYDYKN

SEQ ID NO: 9607 - protein, 9 aa, Artificial Sequence
  Description of Artificial Sequence: Synthetic peptide
TNAAYEMWF

SEQ ID NO: 9608 - protein, 9 aa, Artificial Sequence
  Description of Artificial Sequence: Synthetic peptide
TTTITNRLC

SEQ ID NO: 9609 - protein, 9 aa, Artificial Sequence
  Description of Artificial Sequence: Synthetic peptide
KIQPMMVKA

SEQ ID NO: 9610 - protein, 9 aa, Artificial Sequence
  Description of Artificial Sequence: Synthetic peptide
LFRAYAWFQ

SEQ ID NO: 9611 - protein, 9 aa, Artificial Sequence
  Description of Artificial Sequence: Synthetic peptide
DVIRDMIAE

SEQ ID NO: 9612 - protein, 9 aa, Artificial Sequence
  Description of Artificial Sequence: Synthetic peptide
ALTHDDGRT

SEQ ID NO: 9613 - protein, 9 aa, Artificial Sequence
  Description of Artificial Sequence: Synthetic peptide
KTYSAMYSP

SEQ ID NO: 9614 - protein, 9 aa, Artificial Sequence
  Description of Artificial Sequence: Synthetic peptide
NCMWISSTQ

SEQ ID NO: 9615 - protein, 9 aa, Artificial Sequence
  Description of Artificial Sequence: Synthetic peptide
TILPKKTLC

SEQ ID NO: 9616 - protein, 9 aa, Artificial Sequence
  Description of Artificial Sequence: Synthetic peptide
VTTHMNCAD

SEQ ID NO: 9617 - protein, 9 aa, Artificial Sequence
  Description of Artificial Sequence: Synthetic peptide
PPRFLQTTG

SEQ ID NO: 9618 - protein, 9 aa, Artificial Sequence
  Description of Artificial Sequence: Synthetic peptide
VSVPKRQGP

SEQ ID NO: 9619 - protein, 9 aa, Artificial Sequence
  Description of Artificial Sequence: Synthetic peptide
VFGSTRSAA

SEQ ID NO: 9620 - protein, 9 aa, Artificial Sequence
  Description of Artificial Sequence: Synthetic peptide
TSDQCGNED

SEQ ID NO: 9621 - protein, 9 aa, Artificial Sequence
  Description of Artificial Sequence: Synthetic peptide
GAKYIQNTD

SEQ ID NO: 9622 - protein, 9 aa, Artificial Sequence
  Description of Artificial Sequence: Synthetic peptide
MRYHWDEAG

SEQ ID NO: 9623 - protein, 9 aa, Artificial Sequence
  Description of Artificial Sequence: Synthetic peptide
SSEYSQFAI

SEQ ID NO: 9624 - protein, 9 aa, Artificial Sequence
  Description of Artificial Sequence: Synthetic peptide
GVFWPDSFR

SEQ ID NO: 9625 - protein, 9 aa, Artificial Sequence
  Description of Artificial Sequence: Synthetic peptide
GAYSLHDWR

SEQ ID NO: 9626 - protein, 9 aa, Artificial Sequence
  Description of Artificial Sequence: Synthetic peptide
MTALPPSKN

SEQ ID NO: 9627 - protein, 9 aa, Artificial Sequence
  Description of Artificial Sequence: Synthetic peptide
HGFKCQYSF

SEQ ID NO: 9628 - protein, 9 aa, Artificial Sequence
  Description of Artificial Sequence: Synthetic peptide
YGGSEHWGP

SEQ ID NO: 9629 - protein, 9 aa, Artificial Sequence
  Description of Artificial Sequence: Synthetic peptide
TTAYHRSDH

SEQ ID NO: 9630 - protein, 9 aa, Artificial Sequence
  Description of Artificial Sequence: Synthetic peptide
NTHTGNDRL

SEQ ID NO: 9631 - protein, 9 aa, Artificial Sequence
  Description of Artificial Sequence: Synthetic peptide
YPQPCSCHS

SEQ ID NO: 9632 - protein, 9 aa, Artificial Sequence
  Description of Artificial Sequence: Synthetic peptide
VSGFDRVAF

SEQ ID NO: 9633 - protein, 9 aa, Artificial Sequence
  Description of Artificial Sequence: Synthetic peptide
SRLYKKRLF

SEQ ID NO: 9634 - protein, 9 aa, Artificial Sequence
  Description of Artificial Sequence: Synthetic peptide
CCKSKEVCA

SEQ ID NO: 9635 - protein, 9 aa, Artificial Sequence
  Description of Artificial Sequence: Synthetic peptide
TYDTRNHCL

SEQ ID NO: 9636 - protein, 9 aa, Artificial Sequence
  Description of Artificial Sequence: Synthetic peptide
SFKSVSQYN

SEQ ID NO: 9637 - protein, 9 aa, Artificial Sequence
  Description of Artificial Sequence: Synthetic peptide
QAAVTKEYW

SEQ ID NO: 9638 - protein, 9 aa, Artificial Sequence
  Description of Artificial Sequence: Synthetic peptide
EIIQAHLIN

SEQ ID NO: 9639 - protein, 9 aa, Artificial Sequence
  Description of Artificial Sequence: Synthetic peptide
KTGATNLAW

SEQ ID NO: 9640 - protein, 9 aa, Artificial Sequence
  Description of Artificial Sequence: Synthetic peptide
GQFRSGAYR

SEQ ID NO: 9641 - protein, 9 aa, Artificial Sequence
  Description of Artificial Sequence: Synthetic peptide
PMMIIPYVD

SEQ ID NO: 9642 - protein, 9 aa, Artificial Sequence
  Description of Artificial Sequence: Synthetic peptide
EPLVCISAG

SEQ ID NO: 9643 - protein, 9 aa, Artificial Sequence
  Description of Artificial Sequence: Synthetic peptide
KGGLSTTNA

SEQ ID NO: 9644 - protein, 9 aa, Artificial Sequence
  Description of Artificial Sequence: Synthetic peptide
KSTYYNLKW

SEQ ID NO: 9645 - protein, 9 aa, Artificial Sequence
  Description of Artificial Sequence: Synthetic peptide
DVGIGVDQG

SEQ ID NO: 9646 - protein, 9 aa, Artificial Sequence
  Description of Artificial Sequence: Synthetic peptide
MCDNFPSAH

SEQ ID NO: 9647 - protein, 9 aa, Artificial Sequence
  Description of Artificial Sequence: Synthetic peptide
IKHITRNTY

SEQ ID NO: 9648 - protein, 9 aa, Artificial Sequence
  Description of Artificial Sequence: Synthetic peptide
GNMHNFSAW

SEQ ID NO: 9649 - protein, 9 aa, Artificial Sequence
  Description of Artificial Sequence: Synthetic peptide
CSIQINNCR

SEQ ID NO: 9650 - protein, 9 aa, Artificial Sequence
  Description of Artificial Sequence: Synthetic peptide
MREKLVHDC

SEQ ID NO: 9651 - protein, 9 aa, Artificial Sequence
  Description of Artificial Sequence: Synthetic peptide
EQPHISIKG

SEQ ID NO: 9652 - protein, 9 aa, Artificial Sequence
  Description of Artificial Sequence: Synthetic peptide
EMSISHGCH

SEQ ID NO: 9653 - protein, 9 aa, Artificial Sequence
  Description of Artificial Sequence: Synthetic peptide
RSDEMYVTP

SEQ ID NO: 9654 - protein, 9 aa, Artificial Sequence
  Description of Artificial Sequence: Synthetic peptide
SFSYDVVMN

SEQ ID NO: 9655 - protein, 9 aa, Artificial Sequence
  Description of Artificial Sequence: Synthetic peptide
GDMCEDMCT

SEQ ID NO: 9656 - protein, 9 aa, Artificial Sequence
  Description of Artificial Sequence: Synthetic peptide
TVTQGSIGH

SEQ ID NO: 9657 - protein, 9 aa, Artificial Sequence
  Description of Artificial Sequence: Synthetic peptide
RKDQSDLWP

SEQ ID NO: 9658 - protein, 9 aa, Artificial Sequence
  Description of Artificial Sequence: Synthetic peptide
MAAITQNVA

SEQ ID NO: 9659 - protein, 9 aa, Artificial Sequence
  Description of Artificial Sequence: Synthetic peptide
NSTPMACME

SEQ ID NO: 9660 - protein, 9 aa, Artificial Sequence
  Description of Artificial Sequence: Synthetic peptide
PLSSEWRWA

SEQ ID NO: 9661 - protein, 9 aa, Artificial Sequence
  Description of Artificial Sequence: Synthetic peptide
CHLKICMHS

SEQ ID NO: 9662 - protein, 9 aa, Artificial Sequence
  Description of Artificial Sequence: Synthetic peptide
DVWWTLTRD

SEQ ID NO: 9663 - protein, 9 aa, Artificial Sequence
  Description of Artificial Sequence: Synthetic peptide
DATTSTECH

SEQ ID NO: 9664 - protein, 9 aa, Artificial Sequence
  Description of Artificial Sequence: Synthetic peptide
AMLQKKRQD

SEQ ID NO: 9665 - protein, 9 aa, Artificial Sequence
  Description of Artificial Sequence: Synthetic peptide
TIAMPSWTY

SEQ ID NO: 9666 - protein, 9 aa, Artificial Sequence
  Description of Artificial Sequence: Synthetic peptide
NGYVVDNHS

SEQ ID NO: 9667 - protein, 9 aa, Artificial Sequence
  Description of Artificial Sequence: Synthetic peptide
GHHQCYKAD

SEQ ID NO: 9668 - protein, 9 aa, Artificial Sequence
  Description of Artificial Sequence: Synthetic peptide
SANQRYHDW

SEQ ID NO: 9669 - protein, 9 aa, Artificial Sequence
  Description of Artificial Sequence: Synthetic peptide
DCAWMQKEW

SEQ ID NO: 9670 - protein, 9 aa, Artificial Sequence
  Description of Artificial Sequence: Synthetic peptide
KVNCRMIIM

SEQ ID NO: 9671 - protein, 9 aa, Artificial Sequence
  Description of Artificial Sequence: Synthetic peptide
KCRYKDCQC

SEQ ID NO: 9672 - protein, 9 aa, Artificial Sequence
  Description of Artificial Sequence: Synthetic peptide
NTSELLMAQ

SEQ ID NO: 9673 - protein, 9 aa, Artificial Sequence
  Description of Artificial Sequence: Synthetic peptide
QGKQLYHMC

SEQ ID NO: 9674 - protein, 9 aa, Artificial Sequence
  Description of Artificial Sequence: Synthetic peptide
NWYTTWIDE

SEQ ID NO: 9675 - protein, 9 aa, Artificial Sequence
  Description of Artificial Sequence: Synthetic peptide
QAGNSMWAK

SEQ ID NO: 9676 - protein, 9 aa, Artificial Sequence
  Description of Artificial Sequence: Synthetic peptide
RMYATEHCS

SEQ ID NO: 9677 - protein, 9 aa, Artificial Sequence
  Description of Artificial Sequence: Synthetic peptide
NDMQMNWVH

SEQ ID NO: 9678 - protein, 9 aa, Artificial Sequence
  Description of Artificial Sequence: Synthetic peptide
MHDGYRGMQ

SEQ ID NO: 9679 - protein, 9 aa, Artificial Sequence
  Description of Artificial Sequence: Synthetic peptide
WVEPEQCFG

SEQ ID NO: 9680 - protein, 9 aa, Artificial Sequence
  Description of Artificial Sequence: Synthetic peptide
TRCCEPYFQ

SEQ ID NO: 9681 - protein, 9 aa, Artificial Sequence
  Description of Artificial Sequence: Synthetic peptide
LSAKQQFFC

SEQ ID NO: 9682 - protein, 9 aa, Artificial Sequence
  Description of Artificial Sequence: Synthetic peptide
ECTKSMQSG

SEQ ID NO: 9683 - protein, 9 aa, Artificial Sequence
  Description of Artificial Sequence: Synthetic peptide
NCHQLGDNM

SEQ ID NO: 9684 - protein, 9 aa, Artificial Sequence
  Description of Artificial Sequence: Synthetic peptide
PCQQLMCFM

SEQ ID NO: 9685 - protein, 9 aa, Artificial Sequence
  Description of Artificial Sequence: Synthetic peptide
YTKYNWKAA

SEQ ID NO: 9686 - protein, 9 aa, Artificial Sequence
  Description of Artificial Sequence: Synthetic peptide
GTIRMPEHR

SEQ ID NO: 9687 - protein, 9 aa, Artificial Sequence
  Description of Artificial Sequence: Synthetic peptide
VCHNPDPFT

SEQ ID NO: 9688 - protein, 9 aa, Artificial Sequence
  Description of Artificial Sequence: Synthetic peptide
SLTQYQWRG

SEQ ID NO: 9689 - protein, 9 aa, Artificial Sequence
  Description of Artificial Sequence: Synthetic peptide
TLNSRHPEC

SEQ ID NO: 9690 - protein, 9 aa, Artificial Sequence
  Description of Artificial Sequence: Synthetic peptide
IMTMQMDTA

SEQ ID NO: 9691 - protein, 9 aa, Artificial Sequence
  Description of Artificial Sequence: Synthetic peptide
YMHFRQYPI

SEQ ID NO: 9692 - protein, 9 aa, Artificial Sequence
  Description of Artificial Sequence: Synthetic peptide
QTMCITIHP

SEQ ID NO: 9693 - protein, 9 aa, Artificial Sequence
  Description of Artificial Sequence: Synthetic peptide
QEAGYTRHN

SEQ ID NO: 9694 - protein, 9 aa, Artificial Sequence
  Description of Artificial Sequence: Synthetic peptide
MNHQCMLWD

SEQ ID NO: 9695 - protein, 9 aa, Artificial Sequence
  Description of Artificial Sequence: Synthetic peptide
PWYNWDRRC

SEQ ID NO: 9696 - protein, 9 aa, Artificial Sequence
  Description of Artificial Sequence: Synthetic peptide
DASQIPITF

SEQ ID NO: 9697 - protein, 9 aa, Artificial Sequence
  Description of Artificial Sequence: Synthetic peptide
IHRVVCRDH

SEQ ID NO: 9698 - protein, 9 aa, Artificial Sequence
  Description of Artificial Sequence: Synthetic peptide
HHMPIWLGL

SEQ ID NO: 9699 - protein, 9 aa, Artificial Sequence
  Description of Artificial Sequence: Synthetic peptide
AEVPYVMQQ

SEQ ID NO: 9700 - protein, 9 aa, Artificial Sequence
  Description of Artificial Sequence: Synthetic peptide
CVLSRSTMR

SEQ ID NO: 9701 - protein, 9 aa, Artificial Sequence
  Description of Artificial Sequence: Synthetic peptide
AKRECTHIP

SEQ ID NO: 9702 - protein, 9 aa, Artificial Sequence
  Description of Artificial Sequence: Synthetic peptide
TISQIPWVR

SEQ ID NO: 9703 - protein, 9 aa, Artificial Sequence
  Description of Artificial Sequence: Synthetic peptide
STRPIACHS

SEQ ID NO: 9704 - protein, 9 aa, Artificial Sequence
  Description of Artificial Sequence: Synthetic peptide
AWKMAHNSF

SEQ ID NO: 9705 - protein, 9 aa, Artificial Sequence
  Description of Artificial Sequence: Synthetic peptide
RNDNTCHAY

SEQ ID NO: 9706 - protein, 9 aa, Artificial Sequence
  Description of Artificial Sequence: Synthetic peptide
IEHCSNRYA

SEQ ID NO: 9707 - protein, 9 aa, Artificial Sequence
  Description of Artificial Sequence: Synthetic peptide
AVEDYWRYF

SEQ ID NO: 9708 - protein, 9 aa, Artificial Sequence
  Description of Artificial Sequence: Synthetic peptide
KHIVGQDGG

SEQ ID NO: 9709 - protein, 9 aa, Artificial Sequence
  Description of Artificial Sequence: Synthetic peptide
ERFKTFCEE

SEQ ID NO: 9710 - protein, 9 aa, Artificial Sequence
  Description of Artificial Sequence: Synthetic peptide
LVQKWMRTC

SEQ ID NO: 9711 - protein, 9 aa, Artificial Sequence
  Description of Artificial Sequence: Synthetic peptide
DARDQQMGT

SEQ ID NO: 9712 - protein, 9 aa, Artificial Sequence
  Description of Artificial Sequence: Synthetic peptide
NMPSLRTRI

SEQ ID NO: 9713 - protein, 9 aa, Artificial Sequence
  Description of Artificial Sequence: Synthetic peptide
GSQQTTLSC

SEQ ID NO: 9714 - protein, 9 aa, Artificial Sequence
  Description of Artificial Sequence: Synthetic peptide
GYFYALFFM

SEQ ID NO: 9715 - protein, 9 aa, Artificial Sequence
  Description of Artificial Sequence: Synthetic peptide
GFRILDACL

SEQ ID NO: 9716 - protein, 9 aa, Artificial Sequence
  Description of Artificial Sequence: Synthetic peptide
ETDCMEGGH

SEQ ID NO: 9717 - protein, 9 aa, Artificial Sequence
  Description of Artificial Sequence: Synthetic peptide
YPDTADIFW

SEQ ID NO: 9718 - protein, 9 aa, Artificial Sequence
  Description of Artificial Sequence: Synthetic peptide
QFMGVSSHS

SEQ ID NO: 9719 - protein, 9 aa, Artificial Sequence
  Description of Artificial Sequence: Synthetic peptide
VHPGFEKLA

SEQ ID NO: 9720 - protein, 9 aa, Artificial Sequence
  Description of Artificial Sequence: Synthetic peptide
NTFEQCTEH

SEQ ID NO: 9721 - protein, 9 aa, Artificial Sequence
  Description of Artificial Sequence: Synthetic peptide
NNRRQFGYV

SEQ ID NO: 9722 - protein, 9 aa, Artificial Sequence
  Description of Artificial Sequence: Synthetic peptide
QQSFFFGEQ

SEQ ID NO: 9723 - protein, 9 aa, Artificial Sequence
  Description of Artificial Sequence: Synthetic peptide
QSMVACYTI

SEQ ID NO: 9724 - protein, 9 aa, Artificial Sequence
  Description of Artificial Sequence: Synthetic peptide
DSMVYNRPQ

SEQ ID NO: 9725 - protein, 9 aa, Artificial Sequence
  Description of Artificial Sequence: Synthetic peptide
TRDAKVANG

SEQ ID NO: 9726 - protein, 9 aa, Artificial Sequence
  Description of Artificial Sequence: Synthetic peptide
SVKDPMDWG

SEQ ID NO: 9727 - protein, 9 aa, Artificial Sequence
  Description of Artificial Sequence: Synthetic peptide
TMTVRMEQP

SEQ ID NO: 9728 - protein, 9 aa, Artificial Sequence
  Description of Artificial Sequence: Synthetic peptide
ACNTLEHMA

SEQ ID NO: 9729 - protein, 9 aa, Artificial Sequence
  Description of Artificial Sequence: Synthetic peptide
KIRDCDGNV

SEQ ID NO: 9730 - protein, 9 aa, Artificial Sequence
  Description of Artificial Sequence: Synthetic peptide
IAYHYDQQN

SEQ ID NO: 9731 - protein, 9 aa, Artificial Sequence
  Description of Artificial Sequence: Synthetic peptide
QTNEEEDGN

SEQ ID NO: 9732 - protein, 9 aa, Artificial Sequence
  Description of Artificial Sequence: Synthetic peptide
NHILTPVVF

SEQ ID NO: 9733 - protein, 9 aa, Artificial Sequence
  Description of Artificial Sequence: Synthetic peptide
QSYPTMYQC

SEQ ID NO: 9734 - protein, 9 aa, Artificial Sequence
  Description of Artificial Sequence: Synthetic peptide
ECGCMYWGY

SEQ ID NO: 9735 - protein, 9 aa, Artificial Sequence
  Description of Artificial Sequence: Synthetic peptide
EGVNRPNMK

SEQ ID NO: 9736 - protein, 9 aa, Artificial Sequence
  Description of Artificial Sequence: Synthetic peptide
HATGLVNFM

SEQ ID NO: 9737 - protein, 9 aa, Artificial Sequence
  Description of Artificial Sequence: Synthetic peptide
NMFQLKPQN

SEQ ID NO: 9738 - protein, 9 aa, Artificial Sequence
  Description of Artificial Sequence: Synthetic peptide
NDVWQPHPN

SEQ ID NO: 9739 - protein, 9 aa, Artificial Sequence
  Description of Artificial Sequence: Synthetic peptide
TQPEDHWLA

SEQ ID NO: 9740 - protein, 9 aa, Artificial Sequence
  Description of Artificial Sequence: Synthetic peptide
IWITCPYAA

SEQ ID NO: 9741 - protein, 9 aa, Artificial Sequence
  Description of Artificial Sequence: Synthetic peptide
TCHPNMSVP

SEQ ID NO: 9742 - protein, 9 aa, Artificial Sequence
  Description of Artificial Sequence: Synthetic peptide
SNVMATKNW

SEQ ID NO: 9743 - protein, 9 aa, Artificial Sequence
  Description of Artificial Sequence: Synthetic peptide
VDRLFRMEY

SEQ ID NO: 9744 - protein, 9 aa, Artificial Sequence
  Description of Artificial Sequence: Synthetic peptide
FNIQCLFSR

SEQ ID NO: 9745 - protein, 9 aa, Artificial Sequence
  Description of Artificial Sequence: Synthetic peptide
PYGPIEYDE

SEQ ID NO: 9746 - protein, 9 aa, Artificial Sequence
  Description of Artificial Sequence: Synthetic peptide
DYFQYNEAP

SEQ ID NO: 9747 - protein, 9 aa, Artificial Sequence
  Description of Artificial Sequence: Synthetic peptide
TTCYFVASQ

SEQ ID NO: 9748 - protein, 9 aa, Artificial Sequence
  Description of Artificial Sequence: Synthetic peptide
AVVCKMNYH

SEQ ID NO: 9749 - protein, 9 aa, Artificial Sequence
  Description of Artificial Sequence: Synthetic peptide
QVSFVGCNH

SEQ ID NO: 9750 - protein, 9 aa, Artificial Sequence
  Description of Artificial Sequence: Synthetic peptide
ATGTYNLQA

SEQ ID NO: 9751 - protein, 9 aa, Artificial Sequence
  Description of Artificial Sequence: Synthetic peptide
RKWMNAKAT

SEQ ID NO: 9752 - protein, 9 aa, Artificial Sequence
  Description of Artificial Sequence: Synthetic peptide
ENHPTWEKS

SEQ ID NO: 9753 - protein, 9 aa, Artificial Sequence
  Description of Artificial Sequence: Synthetic peptide
KAVLFLKDC

SEQ ID NO: 9754 - protein, 9 aa, Artificial Sequence
  Description of Artificial Sequence: Synthetic peptide
ARYMYEKDA

SEQ ID NO: 9755 - protein, 9 aa, Artificial Sequence
  Description of Artificial Sequence: Synthetic peptide
SHAQPIASH

SEQ ID NO: 9756 - protein, 9 aa, Artificial Sequence
  Description of Artificial Sequence: Synthetic peptide
ATGTHNLQE

SEQ ID NO: 9757 - protein, 9 aa, Artificial Sequence
  Description of Artificial Sequence: Synthetic peptide
IPRPFFTMH

SEQ ID NO: 9758 - protein, 9 aa, Artificial Sequence
  Description of Artificial Sequence: Synthetic peptide
SCQLLNDGG

SEQ ID NO: 9759 - protein, 9 aa, Artificial Sequence
  Description of Artificial Sequence: Synthetic peptide
DGEFLHEVL

SEQ ID NO: 9760 - protein, 9 aa, Artificial Sequence
  Description of Artificial Sequence: Synthetic peptide
LFMTYSARN

SEQ ID NO: 9761 - protein, 9 aa, Artificial Sequence
  Description of Artificial Sequence: Synthetic peptide
QVSFNARYA

SEQ ID NO: 9762 - protein, 9 aa, Artificial Sequence
  Description of Artificial Sequence: Synthetic peptide
DILAFDGSC

SEQ ID NO: 9763 - protein, 9 aa, Artificial Sequence
  Description of Artificial Sequence: Synthetic peptide
NTGVKFCAC

SEQ ID NO: 9764 - protein, 9 aa, Artificial Sequence
  Description of Artificial Sequence: Synthetic peptide
IGQYFNFHF

SEQ ID NO: 9765 - protein, 9 aa, Artificial Sequence
  Description of Artificial Sequence: Synthetic peptide
AEHMVVDHE

SEQ ID NO: 9766 - protein, 9 aa, Artificial Sequence
  Description of Artificial Sequence: Synthetic peptide
MQHLPPAMT

SEQ ID NO: 9767 - protein, 9 aa, Artificial Sequence
  Description of Artificial Sequence: Synthetic peptide
RAEQKFVLL

SEQ ID NO: 9768 - protein, 9 aa, Artificial Sequence
  Description of Artificial Sequence: Synthetic peptide
QGKEFICGP

SEQ ID NO: 9769 - protein, 9 aa, Artificial Sequence
  Description of Artificial Sequence: Synthetic peptide
KCNDIVLYH

SEQ ID NO: 9770 - protein, 9 aa, Artificial Sequence
  Description of Artificial Sequence: Synthetic peptide
FQCKMFRIW

SEQ ID NO: 9771 - protein, 9 aa, Artificial Sequence
  Description of Artificial Sequence: Synthetic peptide
STWSANRMT

SEQ ID NO: 9772 - protein, 9 aa, Artificial Sequence
  Description of Artificial Sequence: Synthetic peptide
QCGCAPMDS

SEQ ID NO: 9773 - protein, 9 aa, Artificial Sequence
  Description of Artificial Sequence: Synthetic peptide
CCLWSYWAF

SEQ ID NO: 9774 - protein, 9 aa, Artificial Sequence
  Description of Artificial Sequence: Synthetic peptide
QFCICCDGM

SEQ ID NO: 9775 - protein, 9 aa, Artificial Sequence
  Description of Artificial Sequence: Synthetic peptide
CVFSRNNYQ

SEQ ID NO: 9776 - protein, 9 aa, Artificial Sequence
  Description of Artificial Sequence: Synthetic peptide
LTCMHASTP

SEQ ID NO: 9777 - protein, 9 aa, Artificial Sequence
  Description of Artificial Sequence: Synthetic peptide
GYAQRGFFM

SEQ ID NO: 9778 - protein, 9 aa, Artificial Sequence
  Description of Artificial Sequence: Synthetic peptide
HLMPRNQCF

SEQ ID NO: 9779 - protein, 9 aa, Artificial Sequence
  Description of Artificial Sequence: Synthetic peptide
DIATMRNTW

SEQ ID NO: 9780 - protein, 9 aa, Artificial Sequence
  Description of Artificial Sequence: Synthetic peptide
GKVQWSAQE

SEQ ID NO: 9781 - protein, 9 aa, Artificial Sequence
  Description of Artificial Sequence: Synthetic peptide
AHQTAWAWI

SEQ ID NO: 9782 - protein, 9 aa, Artificial Sequence
  Description of Artificial Sequence: Synthetic peptide
GCQCTGHPI

SEQ ID NO: 9783 - protein, 9 aa, Artificial Sequence
  Description of Artificial Sequence: Synthetic peptide
EPLYSWVGI

SEQ ID NO: 9784 - protein, 9 aa, Artificial Sequence
  Description of Artificial Sequence: Synthetic peptide
EIYSQLTDL

SEQ ID NO: 9785 - protein, 9 aa, Artificial Sequence
  Description of Artificial Sequence: Synthetic peptide
KMEVNMSEL

SEQ ID NO: 9786 - protein, 9 aa, Artificial Sequence
  Description of Artificial Sequence: Synthetic peptide
NVTTMFGQK

SEQ ID NO: 9787 - protein, 9 aa, Artificial Sequence
  Description of Artificial Sequence: Synthetic peptide
CKVDIHDYM

SEQ ID NO: 9788 - protein, 9 aa, Artificial Sequence
  Description of Artificial Sequence: Synthetic peptide
ENCMSRMKP

SEQ ID NO: 9789 - protein, 9 aa, Artificial Sequence
  Description of Artificial Sequence: Synthetic peptide
HPLPNTEIC

SEQ ID NO: 9790 - protein, 9 aa, Artificial Sequence
  Description of Artificial Sequence: Synthetic peptide
KIGVNSHYD

SEQ ID NO: 9791 - protein, 9 aa, Artificial Sequence
  Description of Artificial Sequence: Synthetic peptide
GGDGRVHNK

SEQ ID NO: 9792 - protein, 9 aa, Artificial Sequence
  Description of Artificial Sequence: Synthetic peptide
SIRYDFYVP

SEQ ID NO: 9793 - protein, 9 aa, Artificial Sequence
  Description of Artificial Sequence: Synthetic peptide
SNTPMPYHG

SEQ ID NO: 9794 - protein, 9 aa, Artificial Sequence
  Description of Artificial Sequence: Synthetic peptide
HVTMNQLYS

SEQ ID NO: 9795 - protein, 9 aa, Artificial Sequence
  Description of Artificial Sequence: Synthetic peptide
QHLMTFSHE

SEQ ID NO: 9796 - protein, 9 aa, Artificial Sequence
  Description of Artificial Sequence: Synthetic peptide
GREITQVMS

SEQ ID NO: 9797 - protein, 9 aa, Artificial Sequence
  Description of Artificial Sequence: Synthetic peptide
GRWMCNEAE

SEQ ID NO: 9798 - protein, 9 aa, Artificial Sequence
  Description of Artificial Sequence: Synthetic peptide
TNMLAMRGD

SEQ ID NO: 9799 - protein, 9 aa, Artificial Sequence
  Description of Artificial Sequence: Synthetic peptide
MYTGMRCWR

SEQ ID NO: 9800 - protein, 9 aa, Artificial Sequence
  Description of Artificial Sequence: Synthetic peptide
LAAIQHCAM

SEQ ID NO: 9801 - protein, 9 aa, Artificial Sequence
  Description of Artificial Sequence: Synthetic peptide
RQIGTGNME

SEQ ID NO: 9802 - protein, 9 aa, Artificial Sequence
  Description of Artificial Sequence: Synthetic peptide
AQQQILNSN

SEQ ID NO: 9803 - protein, 9 aa, Artificial Sequence
  Description of Artificial Sequence: Synthetic peptide
CASSKSHYL

SEQ ID NO: 9804 - protein, 9 aa, Artificial Sequence
  Description of Artificial Sequence: Synthetic peptide
CLYHSMMKQ

SEQ ID NO: 9805 - protein, 9 aa, Artificial Sequence
  Description of Artificial Sequence: Synthetic peptide
FKPFAQQWN

SEQ ID NO: 9806 - protein, 9 aa, Artificial Sequence
  Description of Artificial Sequence: Synthetic peptide
KAVSYHHDG

SEQ ID NO: 9807 - protein, 9 aa, Artificial Sequence
  Description of Artificial Sequence: Synthetic peptide
ICHTEVMFN

SEQ ID NO: 9808 - protein, 9 aa, Artificial Sequence
  Description of Artificial Sequence: Synthetic peptide
QCQSQEWFH

SEQ ID NO: 9809 - protein, 9 aa, Artificial Sequence
  Description of Artificial Sequence: Synthetic peptide
WCTQFDEYT

SEQ ID NO: 9810 - protein, 9 aa, Artificial Sequence
  Description of Artificial Sequence: Synthetic peptide
PACKEWCFC

SEQ ID NO: 9811 - protein, 9 aa, Artificial Sequence
  Description of Artificial Sequence: Synthetic peptide
IHNRYAQAP

SEQ ID NO: 9812 - protein, 9 aa, Artificial Sequence
  Description of Artificial Sequence: Synthetic peptide
ASSRFGSYG

SEQ ID NO: 9813 - protein, 9 aa, Artificial Sequence
  Description of Artificial Sequence: Synthetic peptide
EFGEMLGVD

SEQ ID NO: 9814 - protein, 9 aa, Artificial Sequence
  Description of Artificial Sequence: Synthetic peptide
CEMQVQLCV

SEQ ID NO: 9815 - protein, 9 aa, Artificial Sequence
  Description of Artificial Sequence: Synthetic peptide
DFMWYHICS

SEQ ID NO: 9816 - protein, 9 aa, Artificial Sequence
  Description of Artificial Sequence: Synthetic peptide
EFDWLLGTI

SEQ ID NO: 9817 - protein, 9 aa, Artificial Sequence
  Description of Artificial Sequence: Synthetic peptide
IATKSNCHK

SEQ ID NO: 9818 - protein, 9 aa, Artificial Sequence
  Description of Artificial Sequence: Synthetic peptide
QPFCFSIGA

SEQ ID NO: 9819 - protein, 9 aa, Artificial Sequence
  Description of Artificial Sequence: Synthetic peptide
QFHVWFEQK

SEQ ID NO: 9820 - protein, 9 aa, Artificial Sequence
  Description of Artificial Sequence: Synthetic peptide
EMSPIDWHY

SEQ ID NO: 9821 - protein, 9 aa, Artificial Sequence
  Description of Artificial Sequence: Synthetic peptide
ARAYYDSYS

SEQ ID NO: 9822 - protein, 9 aa, Artificial Sequence
  Description of Artificial Sequence: Synthetic peptide
TVRHQMDAY

SEQ ID NO: 9823 - protein, 9 aa, Artificial Sequence
  Description of Artificial Sequence: Synthetic peptide
VKFRITTEC

SEQ ID NO: 9824 - protein, 9 aa, Artificial Sequence
  Description of Artificial Sequence: Synthetic peptide
SDHQYRGCL

SEQ ID NO: 9825 - protein, 9 aa, Artificial Sequence
  Description of Artificial Sequence: Synthetic peptide
TSSDHYALP

SEQ ID NO: 9826 - protein, 9 aa, Artificial Sequence
  Description of Artificial Sequence: Synthetic peptide
GTDLSNHFQ

SEQ ID NO: 9827 - protein, 9 aa, Artificial Sequence
  Description of Artificial Sequence: Synthetic peptide
RAERYFKDE

SEQ ID NO: 9828 - protein, 9 aa, Artificial Sequence
  Description of Artificial Sequence: Synthetic peptide
SKGDLCHQQ

SEQ ID NO: 9829 - protein, 9 aa, Artificial Sequence
  Description of Artificial Sequence: Synthetic peptide
EAQPSEING

SEQ ID NO: 9830 - protein, 9 aa, Artificial Sequence
  Description of Artificial Sequence: Synthetic peptide
TVCGSFHGC

SEQ ID NO: 9831 - protein, 9 aa, Artificial Sequence
  Description of Artificial Sequence: Synthetic peptide
QTPKYFVHQ

SEQ ID NO: 9832 - protein, 9 aa, Artificial Sequence
  Description of Artificial Sequence: Synthetic peptide
KTDKAGLME

SEQ ID NO: 9833 - protein, 9 aa, Artificial Sequence
  Description of Artificial Sequence: Synthetic peptide
VPTGRRVKL

SEQ ID NO: 9834 - protein, 9 aa, Artificial Sequence
  Description of Artificial Sequence: Synthetic peptide
GAQSMQFSC

SEQ ID NO: 9835 - protein, 9 aa, Artificial Sequence
  Description of Artificial Sequence: Synthetic peptide
TQEACHHDP

SEQ ID NO: 9836 - protein, 9 aa, Artificial Sequence
  Description of Artificial Sequence: Synthetic peptide
MKTIMQDYF

SEQ ID NO: 9837 - protein, 9 aa, Artificial Sequence
  Description of Artificial Sequence: Synthetic peptide
MFSHGHVMF

SEQ ID NO: 9838 - protein, 9 aa, Artificial Sequence
  Description of Artificial Sequence: Synthetic peptide
SVSTKPHVE

SEQ ID NO: 9839 - protein, 9 aa, Artificial Sequence
  Description of Artificial Sequence: Synthetic peptide
RAIYNDMTE

SEQ ID NO: 9840 - protein, 9 aa, Artificial Sequence
  Description of Artificial Sequence: Synthetic peptide
MFTPCQEGL

SEQ ID NO: 9841 - protein, 9 aa, Artificial Sequence
  Description of Artificial Sequence: Synthetic peptide
KNAVLNASD

SEQ ID NO: 9842 - protein, 9 aa, Artificial Sequence
  Description of Artificial Sequence: Synthetic peptide
DVYMAVVGS

SEQ ID NO: 9843 - protein, 9 aa, Artificial Sequence
  Description of Artificial Sequence: Synthetic peptide
CIMLNGCFQ

SEQ ID NO: 9844 - protein, 9 aa, Artificial Sequence
  Description of Artificial Sequence: Synthetic peptide
RHWYIALYA

SEQ ID NO: 9845 - protein, 9 aa, Artificial Sequence
  Description of Artificial Sequence: Synthetic peptide
CWQLFNKQN

SEQ ID NO: 9846 - protein, 9 aa, Artificial Sequence
  Description of Artificial Sequence: Synthetic peptide
KPCNPVGQE

SEQ ID NO: 9847 - protein, 9 aa, Artificial Sequence
  Description of Artificial Sequence: Synthetic peptide
SSVVMAKQP

SEQ ID NO: 9848 - protein, 9 aa, Artificial Sequence
  Description of Artificial Sequence: Synthetic peptide
NAKYSMLYG

SEQ ID NO: 9849 - protein, 9 aa, Artificial Sequence
  Description of Artificial Sequence: Synthetic peptide
GMWAQDSSG

SEQ ID NO: 9850 - protein, 9 aa, Artificial Sequence
  Description of Artificial Sequence: Synthetic peptide
YPKRCAEGD

SEQ ID NO: 9851 - protein, 9 aa, Artificial Sequence
  Description of Artificial Sequence: Synthetic peptide
VKHTAVDVP

SEQ ID NO: 9852 - protein, 9 aa, Artificial Sequence
  Description of Artificial Sequence: Synthetic peptide
GEGVEQMDG

SEQ ID NO: 9853 - protein, 9 aa, Artificial Sequence
  Description of Artificial Sequence: Synthetic peptide
MCRPVMMIE

SEQ ID NO: 9854 - protein, 9 aa, Artificial Sequence
  Description of Artificial Sequence: Synthetic peptide
GTNAYMAHK

SEQ ID NO: 9855 - protein, 9 aa, Artificial Sequence
  Description of Artificial Sequence: Synthetic peptide
NIQLLHSYC

SEQ ID NO: 9856 - protein, 9 aa, Artificial Sequence
  Description of Artificial Sequence: Synthetic peptide
MWAETADPA

SEQ ID NO: 9857 - protein, 9 aa, Artificial Sequence
  Description of Artificial Sequence: Synthetic peptide
QIKTHSNVF

SEQ ID NO: 9858 - protein, 9 aa, Artificial Sequence
  Description of Artificial Sequence: Synthetic peptide
RLEITRYIW

SEQ ID NO: 9859 - protein, 9 aa, Artificial Sequence
  Description of Artificial Sequence: Synthetic peptide
VTMTTKSVW

SEQ ID NO: 9860 - protein, 9 aa, Artificial Sequence
  Description of Artificial Sequence: Synthetic peptide
TMPDRDPTY

SEQ ID NO: 9861 - protein, 9 aa, Artificial Sequence
  Description of Artificial Sequence: Synthetic peptide
TVWIQSYSN

SEQ ID NO: 9862 - protein, 9 aa, Artificial Sequence
  Description of Artificial Sequence: Synthetic peptide
CVKPFLTGW

SEQ ID NO: 9863 - protein, 9 aa, Artificial Sequence
  Description of Artificial Sequence: Synthetic peptide
LIWSVYQDE

SEQ ID NO: 9864 - protein, 9 aa, Artificial Sequence
  Description of Artificial Sequence: Synthetic peptide
MPHHSPDCW

SEQ ID NO: 9865 - protein, 9 aa, Artificial Sequence
  Description of Artificial Sequence: Synthetic peptide
HGYQMAYAQ

SEQ ID NO: 9866 - protein, 9 aa, Artificial Sequence
  Description of Artificial Sequence: Synthetic peptide
QVYMMEDNM

SEQ ID NO: 9867 - protein, 9 aa, Artificial Sequence
  Description of Artificial Sequence: Synthetic peptide
VTNWLSLQS

SEQ ID NO: 9868 - protein, 9 aa, Artificial Sequence
  Description of Artificial Sequence: Synthetic peptide
MVFLEQHGR

SEQ ID NO: 9869 - protein, 9 aa, Artificial Sequence
  Description of Artificial Sequence: Synthetic peptide
KRTDLHAAD

SEQ ID NO: 9870 - protein, 9 aa, Artificial Sequence
  Description of Artificial Sequence: Synthetic peptide
QTGTGHWFE

SEQ ID NO: 9871 - protein, 9 aa, Artificial Sequence
  Description of Artificial Sequence: Synthetic peptide
TMGLGMNAI

SEQ ID NO: 9872 - protein, 9 aa, Artificial Sequence
  Description of Artificial Sequence: Synthetic peptide
VLKSCDRHG

SEQ ID NO: 9873 - protein, 9 aa, Artificial Sequence
  Description of Artificial Sequence: Synthetic peptide
TYWCPLMMN

SEQ ID NO: 9874 - protein, 9 aa, Artificial Sequence
  Description of Artificial Sequence: Synthetic peptide
ANGTRECQS

SEQ ID NO: 9875 - protein, 9 aa, Artificial Sequence
  Description of Artificial Sequence: Synthetic peptide
DSQYHVKCG

SEQ ID NO: 9876 - protein, 9 aa, Artificial Sequence
  Description of Artificial Sequence: Synthetic peptide
MALPLHVLS

SEQ ID NO: 9877 - protein, 9 aa, Artificial Sequence
  Description of Artificial Sequence: Synthetic peptide
TIWVHEYGM

SEQ ID NO: 9878 - protein, 9 aa, Artificial Sequence
  Description of Artificial Sequence: Synthetic peptide
QTQICHSWM

SEQ ID NO: 9879 - protein, 9 aa, Artificial Sequence
  Description of Artificial Sequence: Synthetic peptide
TEEVQFVVH

SEQ ID NO: 9880 - protein, 9 aa, Artificial Sequence
  Description of Artificial Sequence: Synthetic peptide
DSATFKSAD

SEQ ID NO: 9881 - protein, 9 aa, Artificial Sequence
  Description of Artificial Sequence: Synthetic peptide
CGCQVKCHT

SEQ ID NO: 9882 - protein, 9 aa, Artificial Sequence
  Description of Artificial Sequence: Synthetic peptide
EAYITYNKA

SEQ ID NO: 9883 - protein, 9 aa, Artificial Sequence
  Description of Artificial Sequence: Synthetic peptide
CTHHNLKAA

SEQ ID NO: 9884 - protein, 9 aa, Artificial Sequence
  Description of Artificial Sequence: Synthetic peptide
AWSDLMNCW

SEQ ID NO: 9885 - protein, 9 aa, Artificial Sequence
  Description of Artificial Sequence: Synthetic peptide
MTIKMEQQY

SEQ ID NO: 9886 - protein, 9 aa, Artificial Sequence
  Description of Artificial Sequence: Synthetic peptide
KATHCDKYV

SEQ ID NO: 9887 - protein, 9 aa, Artificial Sequence
  Description of Artificial Sequence: Synthetic peptide
AHEDPNTWC

SEQ ID NO: 9888 - protein, 9 aa, Artificial Sequence
  Description of Artificial Sequence: Synthetic peptide
AWMCCARHD

SEQ ID NO: 9889 - protein, 9 aa, Artificial Sequence
  Description of Artificial Sequence: Synthetic peptide
QWEEVWWEA

SEQ ID NO: 9890 - protein, 9 aa, Artificial Sequence
  Description of Artificial Sequence: Synthetic peptide
NAIPYFVQA

SEQ ID NO: 9891 - protein, 9 aa, Artificial Sequence
  Description of Artificial Sequence: Synthetic peptide
ITSHWLSTN

SEQ ID NO: 9892 - protein, 9 aa, Artificial Sequence
  Description of Artificial Sequence: Synthetic peptide
KSPCCMSVQ

SEQ ID NO: 9893 - protein, 9 aa, Artificial Sequence
  Description of Artificial Sequence: Synthetic peptide
AGYQCGYNE

SEQ ID NO: 9894 - protein, 9 aa, Artificial Sequence
  Description of Artificial Sequence: Synthetic peptide
ETNGVEDWY

SEQ ID NO: 9895 - protein, 9 aa, Artificial Sequence
  Description of Artificial Sequence: Synthetic peptide
SMKQMTKSF

SEQ ID NO: 9896 - protein, 9 aa, Artificial Sequence
  Description of Artificial Sequence: Synthetic peptide
YACWLQDAL

SEQ ID NO: 9897 - protein, 9 aa, Artificial Sequence
  Description of Artificial Sequence: Synthetic peptide
KWEQRSKMS

SEQ ID NO: 9898 - protein, 9 aa, Artificial Sequence
  Description of Artificial Sequence: Synthetic peptide
KTQTHTSEP

SEQ ID NO: 9899 - protein, 9 aa, Artificial Sequence
  Description of Artificial Sequence: Synthetic peptide
GNVLLGCQP

SEQ ID NO: 9900 - protein, 9 aa, Artificial Sequence
  Description of Artificial Sequence: Synthetic peptide
HAKQANGMV

SEQ ID NO: 9901 - protein, 9 aa, Artificial Sequence
  Description of Artificial Sequence: Synthetic peptide
KCEGEEVGR

SEQ ID NO: 9902 - protein, 9 aa, Artificial Sequence
  Description of Artificial Sequence: Synthetic peptide
HSTNLFEAK

SEQ ID NO: 9903 - protein, 9 aa, Artificial Sequence
  Description of Artificial Sequence: Synthetic peptide
GWADFRELQ

SEQ ID NO: 9904 - protein, 9 aa, Artificial Sequence
  Description of Artificial Sequence: Synthetic peptide
ETEIRQMDG

SEQ ID NO: 9905 - protein, 9 aa, Artificial Sequence
  Description of Artificial Sequence: Synthetic peptide
KITVHDRIP

SEQ ID NO: 9906 - protein, 9 aa, Artificial Sequence
  Description of Artificial Sequence: Synthetic peptide
VCGWWHQYW

SEQ ID NO: 9907 - protein, 9 aa, Artificial Sequence
  Description of Artificial Sequence: Synthetic peptide
IADDYFMCH

SEQ ID NO: 9908 - protein, 9 aa, Artificial Sequence
  Description of Artificial Sequence: Synthetic peptide
GVWMPHGWR

SEQ ID NO: 9909 - protein, 9 aa, Artificial Sequence
  Description of Artificial Sequence: Synthetic peptide
MSLQHHFCT

SEQ ID NO: 9910 - protein, 9 aa, Artificial Sequence
  Description of Artificial Sequence: Synthetic peptide
YNNDMKQRR

SEQ ID NO: 9911 - protein, 9 aa, Artificial Sequence
  Description of Artificial Sequence: Synthetic peptide
QGVACLDQL

SEQ ID NO: 9912 - protein, 9 aa, Artificial Sequence
  Description of Artificial Sequence: Synthetic peptide
RITQGESGM

SEQ ID NO: 9913 - protein, 9 aa, Artificial Sequence
  Description of Artificial Sequence: Synthetic peptide
ASGHMTMCM

SEQ ID NO: 9914 - protein, 9 aa, Artificial Sequence
  Description of Artificial Sequence: Synthetic peptide
NTNRAHYWH

SEQ ID NO: 9915 - protein, 9 aa, Artificial Sequence
  Description of Artificial Sequence: Synthetic peptide
TIKQQMEMM

SEQ ID NO: 9916 - protein, 9 aa, Artificial Sequence
  Description of Artificial Sequence: Synthetic peptide
CQNTAVRAI

SEQ ID NO: 9917 - protein, 9 aa, Artificial Sequence
  Description of Artificial Sequence: Synthetic peptide
AVAEIRPEP

SEQ ID NO: 9918 - protein, 9 aa, Artificial Sequence
  Description of Artificial Sequence: Synthetic peptide
YSFATGNAA

SEQ ID NO: 9919 - protein, 9 aa, Artificial Sequence
  Description of Artificial Sequence: Synthetic peptide
SYLWRSVYC

SEQ ID NO: 9920 - protein, 9 aa, Artificial Sequence
  Description of Artificial Sequence: Synthetic peptide
AVDHYSNGA

SEQ ID NO: 9921 - protein, 9 aa, Artificial Sequence
  Description of Artificial Sequence: Synthetic peptide
ASIATMDRI

SEQ ID NO: 9922 - protein, 9 aa, Artificial Sequence
  Description of Artificial Sequence: Synthetic peptide
NHKMVQDAL

SEQ ID NO: 9923 - protein, 9 aa, Artificial Sequence
  Description of Artificial Sequence: Synthetic peptide
QRALPHPIK

SEQ ID NO: 9924 - protein, 9 aa, Artificial Sequence
  Description of Artificial Sequence: Synthetic peptide
LTHNTPFPK

SEQ ID NO: 9925 - protein, 9 aa, Artificial Sequence
  Description of Artificial Sequence: Synthetic peptide
SIAQDQVWS

SEQ ID NO: 9926 - protein, 9 aa, Artificial Sequence
  Description of Artificial Sequence: Synthetic peptide
CCRQIWVQY

SEQ ID NO: 9927 - protein, 9 aa, Artificial Sequence
  Description of Artificial Sequence: Synthetic peptide
CWGPIMHPF

SEQ ID NO: 9928 - protein, 9 aa, Artificial Sequence
  Description of Artificial Sequence: Synthetic peptide
GNKSPDECF

SEQ ID NO: 9929 - protein, 9 aa, Artificial Sequence
  Description of Artificial Sequence: Synthetic peptide
GHRPKLCDQ

SEQ ID NO: 9930 - protein, 9 aa, Artificial Sequence
  Description of Artificial Sequence: Synthetic peptide
QVACHMTNP

SEQ ID NO: 9931 - protein, 9 aa, Artificial Sequence
  Description of Artificial Sequence: Synthetic peptide
QYVQCAAKD

SEQ ID NO: 9932 - protein, 9 aa, Artificial Sequence
  Description of Artificial Sequence: Synthetic peptide
QDEPMNLSC

SEQ ID NO: 9933 - protein, 9 aa, Artificial Sequence
  Description of Artificial Sequence: Synthetic peptide
GMRTHSVMN

SEQ ID NO: 9934 - protein, 9 aa, Artificial Sequence
  Description of Artificial Sequence: Synthetic peptide
GTNHRDCLV

SEQ ID NO: 9935 - protein, 9 aa, Artificial Sequence
  Description of Artificial Sequence: Synthetic peptide
LMKYQWIGN

SEQ ID NO: 9936 - protein, 9 aa, Artificial Sequence
  Description of Artificial Sequence: Synthetic peptide
KIDQTQWQR

SEQ ID NO: 9937 - protein, 9 aa, Artificial Sequence
  Description of Artificial Sequence: Synthetic peptide
TLHYFHGYQ

SEQ ID NO: 9938 - protein, 9 aa, Artificial Sequence
  Description of Artificial Sequence: Synthetic peptide
QSQWWDTCN

SEQ ID NO: 9939 - protein, 9 aa, Artificial Sequence
  Description of Artificial Sequence: Synthetic peptide
WKPEQRHTP

SEQ ID NO: 9940 - protein, 9 aa, Artificial Sequence
  Description of Artificial Sequence: Synthetic peptide
IYCLCQDSD

SEQ ID NO: 9941 - protein, 9 aa, Artificial Sequence
  Description of Artificial Sequence: Synthetic peptide
DMKQKAEYT

SEQ ID NO: 9942 - protein, 9 aa, Artificial Sequence
  Description of Artificial Sequence: Synthetic peptide
CIPTYRHFG

SEQ ID NO: 9943 - protein, 9 aa, Artificial Sequence
  Description of Artificial Sequence: Synthetic peptide
VRQFGTWAT

SEQ ID NO: 9944 - protein, 9 aa, Artificial Sequence
  Description of Artificial Sequence: Synthetic peptide
ICIRGARAD

SEQ ID NO: 9945 - protein, 9 aa, Artificial Sequence
  Description of Artificial Sequence: Synthetic peptide
TSSKHLVFD

SEQ ID NO: 9946 - protein, 9 aa, Artificial Sequence
  Description of Artificial Sequence: Synthetic peptide
MIKLINCVN

SEQ ID NO: 9947 - protein, 9 aa, Artificial Sequence
  Description of Artificial Sequence: Synthetic peptide
IESNTNKFP

SEQ ID NO: 9948 - protein, 9 aa, Artificial Sequence
  Description of Artificial Sequence: Synthetic peptide
GIKKPNEDN

SEQ ID NO: 9949 - protein, 9 aa, Artificial Sequence
  Description of Artificial Sequence: Synthetic peptide
AMTRCKAGH

SEQ ID NO: 9950 - protein, 9 aa, Artificial Sequence
  Description of Artificial Sequence: Synthetic peptide
HGNMVLVIG

SEQ ID NO: 9951 - protein, 9 aa, Artificial Sequence
  Description of Artificial Sequence: Synthetic peptide
LIQSYPHQC

SEQ ID NO: 9952 - protein, 9 aa, Artificial Sequence
  Description of Artificial Sequence: Synthetic peptide
GGALARSSI

SEQ ID NO: 9953 - protein, 9 aa, Artificial Sequence
  Description of Artificial Sequence: Synthetic peptide
QKAIVAQND

SEQ ID NO: 9954 - protein, 9 aa, Artificial Sequence
  Description of Artificial Sequence: Synthetic peptide
KTLPFAIYH

SEQ ID NO: 9955 - protein, 9 aa, Artificial Sequence
  Description of Artificial Sequence: Synthetic peptide
KIQPTNHHE

SEQ ID NO: 9956 - protein, 9 aa, Artificial Sequence
  Description of Artificial Sequence: Synthetic peptide
KMGMHDMAM

SEQ ID NO: 9957 - protein, 9 aa, Artificial Sequence
  Description of Artificial Sequence: Synthetic peptide
QENDERIWY

SEQ ID NO: 9958 - protein, 9 aa, Artificial Sequence
  Description of Artificial Sequence: Synthetic peptide
APFFTFTNH

SEQ ID NO: 9959 - protein, 9 aa, Artificial Sequence
  Description of Artificial Sequence: Synthetic peptide
YSDMFHKDH

SEQ ID NO: 9960 - protein, 9 aa, Artificial Sequence
  Description of Artificial Sequence: Synthetic peptide
RMVLAYGNF

SEQ ID NO: 9961 - protein, 9 aa, Artificial Sequence
  Description of Artificial Sequence: Synthetic peptide
GQDCWGLAM

SEQ ID NO: 9962 - protein, 9 aa, Artificial Sequence
  Description of Artificial Sequence: Synthetic peptide
PRWQSEKCQ

SEQ ID NO: 9963 - protein, 9 aa, Artificial Sequence
  Description of Artificial Sequence: Synthetic peptide
NTAKLGWGL

SEQ ID NO: 9964 - protein, 9 aa, Artificial Sequence
  Description of Artificial Sequence: Synthetic peptide
MVMMREPSN

SEQ ID NO: 9965 - protein, 9 aa, Artificial Sequence
  Description of Artificial Sequence: Synthetic peptide
MDGRDEIIH

SEQ ID NO: 9966 - protein, 9 aa, Artificial Sequence
  Description of Artificial Sequence: Synthetic peptide
VCRLDNGPQ

SEQ ID NO: 9967 - protein, 9 aa, Artificial Sequence
  Description of Artificial Sequence: Synthetic peptide
MTGIGKCWN

SEQ ID NO: 9968 - protein, 9 aa, Artificial Sequence
  Description of Artificial Sequence: Synthetic peptide
EIHTGRPGS

SEQ ID NO: 9969 - protein, 9 aa, Artificial Sequence
  Description of Artificial Sequence: Synthetic peptide
QIIYRCRST

SEQ ID NO: 9970 - protein, 9 aa, Artificial Sequence
  Description of Artificial Sequence: Synthetic peptide
KCLPYMEMF

SEQ ID NO: 9971 - protein, 9 aa, Artificial Sequence
  Description of Artificial Sequence: Synthetic peptide
PNGYRPFCC

SEQ ID NO: 9972 - protein, 9 aa, Artificial Sequence
  Description of Artificial Sequence: Synthetic peptide
QGQSGTQYA

SEQ ID NO: 9973 - protein, 9 aa, Artificial Sequence
  Description of Artificial Sequence: Synthetic peptide
LVSQWDYDM

SEQ ID NO: 9974 - protein, 9 aa, Artificial Sequence
  Description of Artificial Sequence: Synthetic peptide
ESCHLQHGE

SEQ ID NO: 9975 - protein, 9 aa, Artificial Sequence
  Description of Artificial Sequence: Synthetic peptide
TSEPHCSYA

SEQ ID NO: 9976 - protein, 9 aa, Artificial Sequence
  Description of Artificial Sequence: Synthetic peptide
LSVQAQWDS

SEQ ID NO: 9977 - protein, 9 aa, Artificial Sequence
  Description of Artificial Sequence: Synthetic peptide
FVPWCHSFG

SEQ ID NO: 9978 - protein, 9 aa, Artificial Sequence
  Description of Artificial Sequence: Synthetic peptide
MKEDNKFAV

SEQ ID NO: 9979 - protein, 9 aa, Artificial Sequence
  Description of Artificial Sequence: Synthetic peptide
KTGWDSHWS

SEQ ID NO: 9980 - protein, 9 aa, Artificial Sequence
  Description of Artificial Sequence: Synthetic peptide
TGMTFNSFR

SEQ ID NO: 9981 - protein, 9 aa, Artificial Sequence
  Description of Artificial Sequence: Synthetic peptide
NGYLVHACQ

SEQ ID NO: 9982 - protein, 9 aa, Artificial Sequence
  Description of Artificial Sequence: Synthetic peptide
QVEWFMAQY

SEQ ID NO: 9983 - protein, 9 aa, Artificial Sequence
  Description of Artificial Sequence: Synthetic peptide
YTWPYPETH

SEQ ID NO: 9984 - protein, 9 aa, Artificial Sequence
  Description of Artificial Sequence: Synthetic peptide
IQCKYIHFT

SEQ ID NO: 9985 - protein, 9 aa, Artificial Sequence
  Description of Artificial Sequence: Synthetic peptide
SNVNLMNSR

SEQ ID NO: 9986 - protein, 9 aa, Artificial Sequence
  Description of Artificial Sequence: Synthetic peptide
ATKFFCSSE

SEQ ID NO: 9987 - protein, 9 aa, Artificial Sequence
  Description of Artificial Sequence: Synthetic peptide
MREMPMVGA

SEQ ID NO: 9988 - protein, 9 aa, Artificial Sequence
  Description of Artificial Sequence: Synthetic peptide
SMQEYQKHI

SEQ ID NO: 9989 - protein, 9 aa, Artificial Sequence
  Description of Artificial Sequence: Synthetic peptide
KSMPPGQGD

SEQ ID NO: 9990 - protein, 9 aa, Artificial Sequence
  Description of Artificial Sequence: Synthetic peptide
ECRMAVQSC

SEQ ID NO: 9991 - protein, 9 aa, Artificial Sequence
  Description of Artificial Sequence: Synthetic peptide
VRWGHTCFY

SEQ ID NO: 9992 - protein, 9 aa, Artificial Sequence
  Description of Artificial Sequence: Synthetic peptide
VKRLENEWH

SEQ ID NO: 9993 - protein, 9 aa, Artificial Sequence
  Description of Artificial Sequence: Synthetic peptide
TNRCHDDRG

SEQ ID NO: 9994 - protein, 9 aa, Artificial Sequence
  Description of Artificial Sequence: Synthetic peptide
TTKNAISFE

SEQ ID NO: 9995 - protein, 9 aa, Artificial Sequence
  Description of Artificial Sequence: Synthetic peptide
EAELENVNM

SEQ ID NO: 9996 - protein, 9 aa, Artificial Sequence
  Description of Artificial Sequence: Synthetic peptide
IQNPAMWGT

SEQ ID NO: 9997 - protein, 9 aa, Artificial Sequence
  Description of Artificial Sequence: Synthetic peptide
CDWMANVSV

SEQ ID NO: 9998 - protein, 9 aa, Artificial Sequence
  Description of Artificial Sequence: Synthetic peptide
EQTHTWLCR

SEQ ID NO: 9999 - protein, 9 aa, Artificial Sequence
  Description of Artificial Sequence: Synthetic peptide
AKYLPELYY

SEQ ID NO: 10000 - protein, 9 aa, Artificial Sequence
  Description of Artificial Sequence: Synthetic peptide
EIHEFRASN

SEQ ID NO: 10001 - protein, 9 aa, Artificial Sequence
  Description of Artificial Sequence: Synthetic peptide
WLIGMWNTG

SEQ ID NO: 10002 - protein, 9 aa, Artificial Sequence
  Description of Artificial Sequence: Synthetic peptide
WHVQSKRWT

SEQ ID NO: 10003 - protein, 9 aa, Artificial Sequence
  Description of Artificial Sequence: Synthetic peptide
TTDQQCTGH

SEQ ID NO: 10004 - protein, 9 aa, Artificial Sequence
  Description of Artificial Sequence: Synthetic peptide
NISPYEMAV

SEQ ID NO: 10005 - protein, 9 aa, Artificial Sequence
  Description of Artificial Sequence: Synthetic peptide
YYNHKIVEP

SEQ ID NO: 10006 - protein, 9 aa, Artificial Sequence
  Description of Artificial Sequence: Synthetic peptide
AKPTHDVGS

SEQ ID NO: 10007 - protein, 9 aa, Artificial Sequence
  Description of Artificial Sequence: Synthetic peptide
HTNQQANAP

SEQ ID NO: 10008 - protein, 9 aa, Artificial Sequence
  Description of Artificial Sequence: Synthetic peptide
VTKLAENVY

SEQ ID NO: 10009 - protein, 9 aa, Artificial Sequence
  Description of Artificial Sequence: Synthetic peptide
DVCDDHKPN

SEQ ID NO: 10010 - protein, 9 aa, Artificial Sequence
  Description of Artificial Sequence: Synthetic peptide
IAHWKCHYP

SEQ ID NO: 10011 - protein, 9 aa, Artificial Sequence
  Description of Artificial Sequence: Synthetic peptide
YWEKVPCMK

SEQ ID NO: 10012 - protein, 9 aa, Artificial Sequence
  Description of Artificial Sequence: Synthetic peptide
NWEFNARHD

SEQ ID NO: 10013 - protein, 9 aa, Artificial Sequence
  Description of Artificial Sequence: Synthetic peptide
VRLQPQHNK

SEQ ID NO: 10014 - protein, 9 aa, Artificial Sequence
  Description of Artificial Sequence: Synthetic peptide
KCTEYVHTC

SEQ ID NO: 10015 - protein, 9 aa, Artificial Sequence
  Description of Artificial Sequence: Synthetic peptide
VPTPWMGIS

SEQ ID NO: 10016 - protein, 9 aa, Artificial Sequence
  Description of Artificial Sequence: Synthetic peptide
HHFHVNLDI

SEQ ID NO: 10017 - protein, 9 aa, Artificial Sequence
  Description of Artificial Sequence: Synthetic peptide
DSRTQGGLC

SEQ ID NO: 10018 - protein, 9 aa, Artificial Sequence
  Description of Artificial Sequence: Synthetic peptide
VRADNMPVM

SEQ ID NO: 10019 - protein, 9 aa, Artificial Sequence
  Description of Artificial Sequence: Synthetic peptide
LLPIMHTHW

SEQ ID NO: 10020 - protein, 9 aa, Artificial Sequence
  Description of Artificial Sequence: Synthetic peptide
ISLVWMHYP

SEQ ID NO: 10021 - protein, 9 aa, Artificial Sequence
  Description of Artificial Sequence: Synthetic peptide
MWTEFNEHG

SEQ ID NO: 10022 - protein, 9 aa, Artificial Sequence
  Description of Artificial Sequence: Synthetic peptide
MWAEFNEYG

SEQ ID NO: 10023 - protein, 9 aa, Artificial Sequence
  Description of Artificial Sequence: Synthetic peptide
QVHIGSWPP

SEQ ID NO: 10024 - protein, 9 aa, Artificial Sequence
  Description of Artificial Sequence: Synthetic peptide
YEMTSKCTY

SEQ ID NO: 10025 - protein, 9 aa, Artificial Sequence
  Description of Artificial Sequence: Synthetic peptide
HMSQAGVVS

SEQ ID NO: 10026 - protein, 9 aa, Artificial Sequence
  Description of Artificial Sequence: Synthetic peptide
DQSMMTIGQ

SEQ ID NO: 10027 - protein, 9 aa, Artificial Sequence
  Description of Artificial Sequence: Synthetic peptide
MPSWYIAQA

SEQ ID NO: 10028 - protein, 9 aa, Artificial Sequence
  Description of Artificial Sequence: Synthetic peptide
GAGPVQSEE

SEQ ID NO: 10029 - protein, 9 aa, Artificial Sequence
  Description of Artificial Sequence: Synthetic peptide
FGGMTPYGV

SEQ ID NO: 10030 - protein, 9 aa, Artificial Sequence
  Description of Artificial Sequence: Synthetic peptide
VCSNVRSYC

SEQ ID NO: 10031 - protein, 9 aa, Artificial Sequence
  Description of Artificial Sequence: Synthetic peptide
HGNSFLVHW

SEQ ID NO: 10032 - protein, 9 aa, Artificial Sequence
  Description of Artificial Sequence: Synthetic peptide
MWTEFNEYW

SEQ ID NO: 10033 - protein, 9 aa, Artificial Sequence
  Description of Artificial Sequence: Synthetic peptide
DITSLGCIM

SEQ ID NO: 10034 - protein, 9 aa, Artificial Sequence
  Description of Artificial Sequence: Synthetic peptide
NRPLMSCCF

SEQ ID NO: 10035 - protein, 9 aa, Artificial Sequence
  Description of Artificial Sequence: Synthetic peptide
EFWWMNYMG

SEQ ID NO: 10036 - protein, 9 aa, Artificial Sequence
  Description of Artificial Sequence: Synthetic peptide
TSQYSSVST

SEQ ID NO: 10037 - protein, 9 aa, Artificial Sequence
  Description of Artificial Sequence: Synthetic peptide
MGTEWTQSY

SEQ ID NO: 10038 - protein, 9 aa, Artificial Sequence
  Description of Artificial Sequence: Synthetic peptide
MWTEFDEYG

SEQ ID NO: 10039 - protein, 9 aa, Artificial Sequence
  Description of Artificial Sequence: Synthetic peptide
KQLFMKFWN

SEQ ID NO: 10040 - protein, 9 aa, Artificial Sequence
  Description of Artificial Sequence: Synthetic peptide
EFKCVSDCL

SEQ ID NO: 10041 - protein, 9 aa, Artificial Sequence
  Description of Artificial Sequence: Synthetic peptide
KTIAQTYYG

SEQ ID NO: 10042 - protein, 9 aa, Artificial Sequence
  Description of Artificial Sequence: Synthetic peptide
VQMQYERLF

SEQ ID NO: 10043 - protein, 9 aa, Artificial Sequence
  Description of Artificial Sequence: Synthetic peptide
MDVQQIISG

SEQ ID NO: 10044 - protein, 9 aa, Artificial Sequence
  Description of Artificial Sequence: Synthetic peptide
NPIKFQCAH

SEQ ID NO: 10045 - protein, 9 aa, Artificial Sequence
  Description of Artificial Sequence: Synthetic peptide
NSVHVHASN

SEQ ID NO: 10046 - protein, 9 aa, Artificial Sequence
  Description of Artificial Sequence: Synthetic peptide
CAEGQRALT

SEQ ID NO: 10047 - protein, 9 aa, Artificial Sequence
  Description of Artificial Sequence: Synthetic peptide
QAIDMEFPL

SEQ ID NO: 10048 - protein, 9 aa, Artificial Sequence
  Description of Artificial Sequence: Synthetic peptide
FNESGWPTW

SEQ ID NO: 10049 - protein, 9 aa, Artificial Sequence
  Description of Artificial Sequence: Synthetic peptide
NARVMAKRE

SEQ ID NO: 10050 - protein, 9 aa, Artificial Sequence
  Description of Artificial Sequence: Synthetic peptide
LNDPHCSQN

SEQ ID NO: 10051 - protein, 9 aa, Artificial Sequence
  Description of Artificial Sequence: Synthetic peptide
YFADAWLKT

SEQ ID NO: 10052 - protein, 9 aa, Artificial Sequence
  Description of Artificial Sequence: Synthetic peptide
NIHYHMRRN

SEQ ID NO: 10053 - protein, 9 aa, Artificial Sequence
  Description of Artificial Sequence: Synthetic peptide
QMEVHWHMW

SEQ ID NO: 10054 - protein, 9 aa, Artificial Sequence
  Description of Artificial Sequence: Synthetic peptide
REEWKNASN

SEQ ID NO: 10055 - protein, 9 aa, Artificial Sequence
  Description of Artificial Sequence: Synthetic peptide
ISTKFGKEI

SEQ ID NO: 10056 - protein, 9 aa, Artificial Sequence
  Description of Artificial Sequence: Synthetic peptide
AIHQESMIQ

SEQ ID NO: 10057 - protein, 9 aa, Artificial Sequence
  Description of Artificial Sequence: Synthetic peptide
QEYHIYFPF

SEQ ID NO: 10058 - protein, 9 aa, Artificial Sequence
  Description of Artificial Sequence: Synthetic peptide
TLTHCYSKD

SEQ ID NO: 10059 - protein, 9 aa, Artificial Sequence
  Description of Artificial Sequence: Synthetic peptide
GCLTSECAY

SEQ ID NO: 10060 - protein, 9 aa, Artificial Sequence
  Description of Artificial Sequence: Synthetic peptide
AWFNTYSVH

SEQ ID NO: 10061 - protein, 9 aa, Artificial Sequence
  Description of Artificial Sequence: Synthetic peptide
GYGHTFRDA

SEQ ID NO: 10062 - protein, 9 aa, Artificial Sequence
  Description of Artificial Sequence: Synthetic peptide
FIDEKQCHE

SEQ ID NO: 10063 - protein, 9 aa, Artificial Sequence
  Description of Artificial Sequence: Synthetic peptide
HMSFCNFKV

SEQ ID NO: 10064 - protein, 9 aa, Artificial Sequence
  Description of Artificial Sequence: Synthetic peptide
SVETARCSG

SEQ ID NO: 10065 - protein, 9 aa, Artificial Sequence
  Description of Artificial Sequence: Synthetic peptide
SSEHYSASF

SEQ ID NO: 10066 - protein, 9 aa, Artificial Sequence
  Description of Artificial Sequence: Synthetic peptide
LMKTSPSYW

SEQ ID NO: 10067 - protein, 9 aa, Artificial Sequence
  Description of Artificial Sequence: Synthetic peptide
YGNSVTCTS

SEQ ID NO: 10068 - protein, 9 aa, Artificial Sequence
  Description of Artificial Sequence: Synthetic peptide
KHITWNHCL

SEQ ID NO: 10069 - protein, 9 aa, Artificial Sequence
  Description of Artificial Sequence: Synthetic peptide
DTSKTGKHV

SEQ ID NO: 10070 - protein, 9 aa, Artificial Sequence
  Description of Artificial Sequence: Synthetic peptide
LTQYKALAQ

SEQ ID NO: 10071 - protein, 9 aa, Artificial Sequence
  Description of Artificial Sequence: Synthetic peptide
TRIVEPDAN

SEQ ID NO: 10072 - protein, 9 aa, Artificial Sequence
  Description of Artificial Sequence: Synthetic peptide
LADCMLNHH

SEQ ID NO: 10073 - protein, 9 aa, Artificial Sequence
  Description of Artificial Sequence: Synthetic peptide
VPMWAHWQN

SEQ ID NO: 10074 - protein, 9 aa, Artificial Sequence
  Description of Artificial Sequence: Synthetic peptide
SVTPDSITT

SEQ ID NO: 10075 - protein, 9 aa, Artificial Sequence
  Description of Artificial Sequence: Synthetic peptide
QRNNLFVHD

SEQ ID NO: 10076 - protein, 9 aa, Artificial Sequence
  Description of Artificial Sequence: Synthetic peptide
IHGIDCYEI

SEQ ID NO: 10077 - protein, 9 aa, Artificial Sequence
  Description of Artificial Sequence: Synthetic peptide
GIDLMRQIN

SEQ ID NO: 10078 - protein, 9 aa, Artificial Sequence
  Description of Artificial Sequence: Synthetic peptide
MKNQPTGAS

SEQ ID NO: 10079 - protein, 9 aa, Artificial Sequence
  Description of Artificial Sequence: Synthetic peptide
QKSMLNSIQ

SEQ ID NO: 10080 - protein, 9 aa, Artificial Sequence
  Description of Artificial Sequence: Synthetic peptide
ICNMDFRCA

SEQ ID NO: 10081 - protein, 9 aa, Artificial Sequence
  Description of Artificial Sequence: Synthetic peptide
KTVLKMQDM

SEQ ID NO: 10082 - protein, 9 aa, Artificial Sequence
  Description of Artificial Sequence: Synthetic peptide
RLGMNWKQI

SEQ ID NO: 10083 - protein, 9 aa, Artificial Sequence
  Description of Artificial Sequence: Synthetic peptide
TPKSEGICC

SEQ ID NO: 10084 - protein, 9 aa, Artificial Sequence
  Description of Artificial Sequence: Synthetic peptide
GVITVDAKG

SEQ ID NO: 10085 - protein, 9 aa, Artificial Sequence
  Description of Artificial Sequence: Synthetic peptide
AIGPDRSNN

SEQ ID NO: 10086 - protein, 9 aa, Artificial Sequence
  Description of Artificial Sequence: Synthetic peptide
EQEISDQCR

SEQ ID NO: 10087 - protein, 9 aa, Artificial Sequence
  Description of Artificial Sequence: Synthetic peptide
MQYRGMSAS

SEQ ID NO: 10088 - protein, 9 aa, Artificial Sequence
  Description of Artificial Sequence: Synthetic peptide
MISQMGLKN

SEQ ID NO: 10089 - protein, 9 aa, Artificial Sequence
  Description of Artificial Sequence: Synthetic peptide
AFARQEYAN

SEQ ID NO: 10090 - protein, 9 aa, Artificial Sequence
  Description of Artificial Sequence: Synthetic peptide
TYLHQPEDS

SEQ ID NO: 10091 - protein, 9 aa, Artificial Sequence
  Description of Artificial Sequence: Synthetic peptide
TKLSMMGCE

SEQ ID NO: 10092 - protein, 9 aa, Artificial Sequence
  Description of Artificial Sequence: Synthetic peptide
EELRYTCHT

SEQ ID NO: 10093 - protein, 9 aa, Artificial Sequence
  Description of Artificial Sequence: Synthetic peptide
GSCCLNNET

SEQ ID NO: 10094 - protein, 9 aa, Artificial Sequence
  Description of Artificial Sequence: Synthetic peptide
KKTLYEMAC

SEQ ID NO: 10095 - protein, 9 aa, Artificial Sequence
  Description of Artificial Sequence: Synthetic peptide
RWGVMDLCN

SEQ ID NO: 10096 - protein, 9 aa, Artificial Sequence
  Description of Artificial Sequence: Synthetic peptide
NVEDVGMIE

SEQ ID NO: 10097 - protein, 9 aa, Artificial Sequence
  Description of Artificial Sequence: Synthetic peptide
QSWWHSDTC

SEQ ID NO: 10098 - protein, 9 aa, Artificial Sequence
  Description of Artificial Sequence: Synthetic peptide
AADGYVAQD

SEQ ID NO: 10099 - protein, 9 aa, Artificial Sequence
  Description of Artificial Sequence: Synthetic peptide
ITTPLHHHN

SEQ ID NO: 10100 - protein, 9 aa, Artificial Sequence
  Description of Artificial Sequence: Synthetic peptide
NAQRLAVGM

SEQ ID NO: 10101 - protein, 9 aa, Artificial Sequence
  Description of Artificial Sequence: Synthetic peptide
HVIGMGAGE

SEQ ID NO: 10102 - protein, 9 aa, Artificial Sequence
  Description of Artificial Sequence: Synthetic peptide
RQYFEDNAG

SEQ ID NO: 10103 - protein, 9 aa, Artificial Sequence
  Description of Artificial Sequence: Synthetic peptide
KSELNRFTY

SEQ ID NO: 10104 - protein, 9 aa, Artificial Sequence
  Description of Artificial Sequence: Synthetic peptide
SALYRWGHV

SEQ ID NO: 10105 - protein, 9 aa, Artificial Sequence
  Description of Artificial Sequence: Synthetic peptide
HRAGMSNIP

SEQ ID NO: 10106 - protein, 9 aa, Artificial Sequence
  Description of Artificial Sequence: Synthetic peptide
MARQCHSFH

SEQ ID NO: 10107 - protein, 9 aa, Artificial Sequence
  Description of Artificial Sequence: Synthetic peptide
ICKHLNVWP

SEQ ID NO: 10108 - protein, 9 aa, Artificial Sequence
  Description of Artificial Sequence: Synthetic peptide
TNGKSSSYS

SEQ ID NO: 10109 - protein, 9 aa, Artificial Sequence
  Description of Artificial Sequence: Synthetic peptide
HAVNFDCKK

SEQ ID NO: 10110 - protein, 9 aa, Artificial Sequence
  Description of Artificial Sequence: Synthetic peptide
QISAWNEFF

SEQ ID NO: 10111 - protein, 9 aa, Artificial Sequence
  Description of Artificial Sequence: Synthetic peptide
MMTPMAVEP

SEQ ID NO: 10112 - protein, 9 aa, Artificial Sequence
  Description of Artificial Sequence: Synthetic peptide
KISTTWADK

SEQ ID NO: 10113 - protein, 9 aa, Artificial Sequence
  Description of Artificial Sequence: Synthetic peptide
EVDQYYSLA

SEQ ID NO: 10114 - protein, 9 aa, Artificial Sequence
  Description of Artificial Sequence: Synthetic peptide
GTMSFPTGC

SEQ ID NO: 10115 - protein, 9 aa, Artificial Sequence
  Description of Artificial Sequence: Synthetic peptide
LMQWYNRCW

SEQ ID NO: 10116 - protein, 9 aa, Artificial Sequence
  Description of Artificial Sequence: Synthetic peptide
GTGHIGNAT

SEQ ID NO: 10117 - protein, 9 aa, Artificial Sequence
  Description of Artificial Sequence: Synthetic peptide
GGSYVSAPD

SEQ ID NO: 10118 - protein, 9 aa, Artificial Sequence
  Description of Artificial Sequence: Synthetic peptide
PENIAEDHE

SEQ ID NO: 10119 - protein, 9 aa, Artificial Sequence
  Description of Artificial Sequence: Synthetic peptide
PYALAEGNP

SEQ ID NO: 10120 - protein, 9 aa, Artificial Sequence
  Description of Artificial Sequence: Synthetic peptide
PLAGRFVAQ

SEQ ID NO: 10121 - protein, 9 aa, Artificial Sequence
  Description of Artificial Sequence: Synthetic peptide
PAEAKQRFD

SEQ ID NO: 10122 - protein, 9 aa, Artificial Sequence
  Description of Artificial Sequence: Synthetic peptide
PAAYDGRLL

SEQ ID NO: 10123 - protein, 9 aa, Artificial Sequence
  Description of Artificial Sequence: Synthetic peptide
PACHCYESL

SEQ ID NO: 10124 - protein, 9 aa, Artificial Sequence
  Description of Artificial Sequence: Synthetic peptide
PACRFEANS

SEQ ID NO: 10125 - protein, 9 aa, Artificial Sequence
  Description of Artificial Sequence: Synthetic peptide
PACSPYGWW

SEQ ID NO: 10126 - protein, 9 aa, Artificial Sequence
  Description of Artificial Sequence: Synthetic peptide
PADFVNSNY

SEQ ID NO: 10127 - protein, 9 aa, Artificial Sequence
  Description of Artificial Sequence: Synthetic peptide
PAECWRMTF

SEQ ID NO: 10128 - protein, 9 aa, Artificial Sequence
  Description of Artificial Sequence: Synthetic peptide
PAEFDYLFT

SEQ ID NO: 10129 - protein, 9 aa, Artificial Sequence
  Description of Artificial Sequence: Synthetic peptide
PAHEIKNLE

SEQ ID NO: 10130 - protein, 9 aa, Artificial Sequence
  Description of Artificial Sequence: Synthetic peptide
PAIDHLLHR

SEQ ID NO: 10131 - protein, 9 aa, Artificial Sequence
  Description of Artificial Sequence: Synthetic peptide
PAMQGHMVD

SEQ ID NO: 10132 - protein, 9 aa, Artificial Sequence
  Description of Artificial Sequence: Synthetic peptide
PAMRTVHMW

SEQ ID NO: 10133 - protein, 9 aa, Artificial Sequence
  Description of Artificial Sequence: Synthetic peptide
PAQWAWADG

SEQ ID NO: 10134 - protein, 9 aa, Artificial Sequence
  Description of Artificial Sequence: Synthetic peptide
PARCAVSEH

SEQ ID NO: 10135 - protein, 9 aa, Artificial Sequence
  Description of Artificial Sequence: Synthetic peptide
PASLKEHCV

SEQ ID NO: 10136 - protein, 9 aa, Artificial Sequence
  Description of Artificial Sequence: Synthetic peptide
PATCSQKKY

SEQ ID NO: 10137 - protein, 9 aa, Artificial Sequence
  Description of Artificial Sequence: Synthetic peptide
PATPPTIVG

SEQ ID NO: 10138 - protein, 9 aa, Artificial Sequence
  Description of Artificial Sequence: Synthetic peptide
PAYHTWQYN

SEQ ID NO: 10139 - protein, 9 aa, Artificial Sequence
  Description of Artificial Sequence: Synthetic peptide
PCAPYHPNQ

SEQ ID NO: 10140 - protein, 9 aa, Artificial Sequence
  Description of Artificial Sequence: Synthetic peptide
PCDCSYYFR

SEQ ID NO: 10141 - protein, 9 aa, Artificial Sequence
  Description of Artificial Sequence: Synthetic peptide
PCGSDIGCM

SEQ ID NO: 10142 - protein, 9 aa, Artificial Sequence
  Description of Artificial Sequence: Synthetic peptide
PCHMWMNFY

SEQ ID NO: 10143 - protein, 9 aa, Artificial Sequence
  Description of Artificial Sequence: Synthetic peptide
PCIWNWETD

SEQ ID NO: 10144 - protein, 9 aa, Artificial Sequence
  Description of Artificial Sequence: Synthetic peptide
PCKPYPKDL

SEQ ID NO: 10145 - protein, 9 aa, Artificial Sequence
  Description of Artificial Sequence: Synthetic peptide
PCNNCGHIR

SEQ ID NO: 10146 - protein, 9 aa, Artificial Sequence
  Description of Artificial Sequence: Synthetic peptide
PCPMSPGEW

SEQ ID NO: 10147 - protein, 9 aa, Artificial Sequence
  Description of Artificial Sequence: Synthetic peptide
PCQLKSDGE

SEQ ID NO: 10148 - protein, 9 aa, Artificial Sequence
  Description of Artificial Sequence: Synthetic peptide
PCRDTLEGI

SEQ ID NO: 10149 - protein, 9 aa, Artificial Sequence
  Description of Artificial Sequence: Synthetic peptide
PCRPLPHLL

SEQ ID NO: 10150 - protein, 9 aa, Artificial Sequence
  Description of Artificial Sequence: Synthetic peptide
PCSMPKAGG

SEQ ID NO: 10151 - protein, 9 aa, Artificial Sequence
  Description of Artificial Sequence: Synthetic peptide
PCTVEGRQY

SEQ ID NO: 10152 - protein, 9 aa, Artificial Sequence
  Description of Artificial Sequence: Synthetic peptide
PCYMKSWVM

SEQ ID NO: 10153 - protein, 9 aa, Artificial Sequence
  Description of Artificial Sequence: Synthetic peptide
PDCQEFWKQ

SEQ ID NO: 10154 - protein, 9 aa, Artificial Sequence
  Description of Artificial Sequence: Synthetic peptide
PDGFSCRFA

SEQ ID NO: 10155 - protein, 9 aa, Artificial Sequence
  Description of Artificial Sequence: Synthetic peptide
PDHCLQSTK

SEQ ID NO: 10156 - protein, 9 aa, Artificial Sequence
  Description of Artificial Sequence: Synthetic peptide
PDHRDEMEW

SEQ ID NO: 10157 - protein, 9 aa, Artificial Sequence
  Description of Artificial Sequence: Synthetic peptide
PDHTNYHIV

SEQ ID NO: 10158 - protein, 9 aa, Artificial Sequence
  Description of Artificial Sequence: Synthetic peptide
PDIIIEGNT

SEQ ID NO: 10159 - protein, 9 aa, Artificial Sequence
  Description of Artificial Sequence: Synthetic peptide
PDINYSCAI

SEQ ID NO: 10160 - protein, 9 aa, Artificial Sequence
  Description of Artificial Sequence: Synthetic peptide
PDLRTQLFS

SEQ ID NO: 10161 - protein, 9 aa, Artificial Sequence
  Description of Artificial Sequence: Synthetic peptide
PDMCGRMDM

SEQ ID NO: 10162 - protein, 9 aa, Artificial Sequence
  Description of Artificial Sequence: Synthetic peptide
PDMQTEAGA

SEQ ID NO: 10163 - protein, 9 aa, Artificial Sequence
  Description of Artificial Sequence: Synthetic peptide
PDPRRTNWQ

SEQ ID NO: 10164 - protein, 9 aa, Artificial Sequence
  Description of Artificial Sequence: Synthetic peptide
PDPVDHRGD

SEQ ID NO: 10165 - protein, 9 aa, Artificial Sequence
  Description of Artificial Sequence: Synthetic peptide
PDPWSTSHK

SEQ ID NO: 10166 - protein, 9 aa, Artificial Sequence
  Description of Artificial Sequence: Synthetic peptide
PDQQYELSC

SEQ ID NO: 10167 - protein, 9 aa, Artificial Sequence
  Description of Artificial Sequence: Synthetic peptide
PDRNLSQGP

SEQ ID NO: 10168 - protein, 9 aa, Artificial Sequence
  Description of Artificial Sequence: Synthetic peptide
PDRWCQLYK

SEQ ID NO: 10169 - protein, 9 aa, Artificial Sequence
  Description of Artificial Sequence: Synthetic peptide
PDSHVPLRD

SEQ ID NO: 10170 - protein, 9 aa, Artificial Sequence
  Description of Artificial Sequence: Synthetic peptide
PDTKYLHRC

SEQ ID NO: 10171 - protein, 9 aa, Artificial Sequence
  Description of Artificial Sequence: Synthetic peptide
PDVQNRWEM

SEQ ID NO: 10172 - protein, 9 aa, Artificial Sequence
  Description of Artificial Sequence: Synthetic peptide
PDVTTNNVI

SEQ ID NO: 10173 - protein, 9 aa, Artificial Sequence
  Description of Artificial Sequence: Synthetic peptide
PDWLMWSHH

SEQ ID NO: 10174 - protein, 9 aa, Artificial Sequence
  Description of Artificial Sequence: Synthetic peptide
PDWYHCGFQ

SEQ ID NO: 10175 - protein, 9 aa, Artificial Sequence
  Description of Artificial Sequence: Synthetic peptide
PEAEFGQKS

SEQ ID NO: 10176 - protein, 9 aa, Artificial Sequence
  Description of Artificial Sequence: Synthetic peptide
PEAEYEQMK

SEQ ID NO: 10177 - protein, 9 aa, Artificial Sequence
  Description of Artificial Sequence: Synthetic peptide
PECHNYNQI

SEQ ID NO: 10178 - protein, 9 aa, Artificial Sequence
  Description of Artificial Sequence: Synthetic peptide
PEDENPLYE

SEQ ID NO: 10179 - protein, 9 aa, Artificial Sequence
  Description of Artificial Sequence: Synthetic peptide
PEDQHNTWC

SEQ ID NO: 10180 - protein, 9 aa, Artificial Sequence
  Description of Artificial Sequence: Synthetic peptide
PEDWKRHAN

SEQ ID NO: 10181 - protein, 9 aa, Artificial Sequence
  Description of Artificial Sequence: Synthetic peptide
PEEQTCEGR

SEQ ID NO: 10182 - protein, 9 aa, Artificial Sequence
  Description of Artificial Sequence: Synthetic peptide
PEFPTWGHY

SEQ ID NO: 10183 - protein, 9 aa, Artificial Sequence
  Description of Artificial Sequence: Synthetic peptide
PEGLWSVAC

SEQ ID NO: 10184 - protein, 9 aa, Artificial Sequence
  Description of Artificial Sequence: Synthetic peptide
PEHKGYAGW

SEQ ID NO: 10185 - protein, 9 aa, Artificial Sequence
  Description of Artificial Sequence: Synthetic peptide
PEISHKNVY

SEQ ID NO: 10186 - protein, 9 aa, Artificial Sequence
  Description of Artificial Sequence: Synthetic peptide
PEKESTVIS

SEQ ID NO: 10187 - protein, 9 aa, Artificial Sequence
  Description of Artificial Sequence: Synthetic peptide
PEKYCHEGY

SEQ ID NO: 10188 - protein, 9 aa, Artificial Sequence
  Description of Artificial Sequence: Synthetic peptide
PELAMPWEM

SEQ ID NO: 10189 - protein, 9 aa, Artificial Sequence
  Description of Artificial Sequence: Synthetic peptide
PELTYAKSI

SEQ ID NO: 10190 - protein, 9 aa, Artificial Sequence
  Description of Artificial Sequence: Synthetic peptide
PEMCKMGSP

SEQ ID NO: 10191 - protein, 9 aa, Artificial Sequence
  Description of Artificial Sequence: Synthetic peptide
PENWFWPHQ

SEQ ID NO: 10192 - protein, 9 aa, Artificial Sequence
  Description of Artificial Sequence: Synthetic peptide
PEPSAMTIP

SEQ ID NO: 10193 - protein, 9 aa, Artificial Sequence
  Description of Artificial Sequence: Synthetic peptide
PEQLLYSMK

SEQ ID NO: 10194 - protein, 9 aa, Artificial Sequence
  Description of Artificial Sequence: Synthetic peptide
PEREDCHNP

SEQ ID NO: 10195 - protein, 9 aa, Artificial Sequence
  Description of Artificial Sequence: Synthetic peptide
PESEGRMTK

SEQ ID NO: 10196 - protein, 9 aa, Artificial Sequence
  Description of Artificial Sequence: Synthetic peptide
PESKLMWGA

SEQ ID NO: 10197 - protein, 9 aa, Artificial Sequence
  Description of Artificial Sequence: Synthetic peptide
PETKTFCQQ

SEQ ID NO: 10198 - protein, 9 aa, Artificial Sequence
  Description of Artificial Sequence: Synthetic peptide
PEWTTTTVF

SEQ ID NO: 10199 - protein, 9 aa, Artificial Sequence
  Description of Artificial Sequence: Synthetic peptide
PFACGMSTW

SEQ ID NO: 10200 - protein, 9 aa, Artificial Sequence
  Description of Artificial Sequence: Synthetic peptide
PFAEFVGRT

SEQ ID NO: 10201 - protein, 9 aa, Artificial Sequence
  Description of Artificial Sequence: Synthetic peptide
PFAGGEYDG

SEQ ID NO: 10202 - protein, 9 aa, Artificial Sequence
  Description of Artificial Sequence: Synthetic peptide
PFCIPWTEG

SEQ ID NO: 10203 - protein, 9 aa, Artificial Sequence
  Description of Artificial Sequence: Synthetic peptide
PFCQPPEFN

SEQ ID NO: 10204 - protein, 9 aa, Artificial Sequence
  Description of Artificial Sequence: Synthetic peptide
PFDRMDHLA

SEQ ID NO: 10205 - protein, 9 aa, Artificial Sequence
  Description of Artificial Sequence: Synthetic peptide
PFGLSQCKG

SEQ ID NO: 10206 - protein, 9 aa, Artificial Sequence
  Description of Artificial Sequence: Synthetic peptide
PFGQLKFNM

SEQ ID NO: 10207 - protein, 9 aa, Artificial Sequence
  Description of Artificial Sequence: Synthetic peptide
PFHVPPPTH

SEQ ID NO: 10208 - protein, 9 aa, Artificial Sequence
  Description of Artificial Sequence: Synthetic peptide
PFKCQDIDC

SEQ ID NO: 10209 - protein, 9 aa, Artificial Sequence
  Description of Artificial Sequence: Synthetic peptide
PFMSTYQVE

SEQ ID NO: 10210 - protein, 9 aa, Artificial Sequence
  Description of Artificial Sequence: Synthetic peptide
PFPVQNVDS

SEQ ID NO: 10211 - protein, 9 aa, Artificial Sequence
  Description of Artificial Sequence: Synthetic peptide
PFSKWVYEW

SEQ ID NO: 10212 - protein, 9 aa, Artificial Sequence
  Description of Artificial Sequence: Synthetic peptide
PFVSQWEHM

SEQ ID NO: 10213 - protein, 9 aa, Artificial Sequence
  Description of Artificial Sequence: Synthetic peptide
PFWWVCKVI

SEQ ID NO: 10214 - protein, 9 aa, Artificial Sequence
  Description of Artificial Sequence: Synthetic peptide
PGGYKEHTW

SEQ ID NO: 10215 - protein, 9 aa, Artificial Sequence
  Description of Artificial Sequence: Synthetic peptide
PGIPIVWMH

SEQ ID NO: 10216 - protein, 9 aa, Artificial Sequence
  Description of Artificial Sequence: Synthetic peptide
PGKQTLTTQ

SEQ ID NO: 10217 - protein, 9 aa, Artificial Sequence
  Description of Artificial Sequence: Synthetic peptide
PGMMPGCTA

SEQ ID NO: 10218 - protein, 9 aa, Artificial Sequence
  Description of Artificial Sequence: Synthetic peptide
PGPFRGPER

SEQ ID NO: 10219 - protein, 9 aa, Artificial Sequence
  Description of Artificial Sequence: Synthetic peptide
PGVTCFSQT

SEQ ID NO: 10220 - protein, 9 aa, Artificial Sequence
  Description of Artificial Sequence: Synthetic peptide
PHCLKAGPL

SEQ ID NO: 10221 - protein, 9 aa, Artificial Sequence
  Description of Artificial Sequence: Synthetic peptide
PHDARVSRM

SEQ ID NO: 10222 - protein, 9 aa, Artificial Sequence
  Description of Artificial Sequence: Synthetic peptide
PHEDNNHQT

SEQ ID NO: 10223 - protein, 9 aa, Artificial Sequence
  Description of Artificial Sequence: Synthetic peptide
PHELCHISH

SEQ ID NO: 10224 - protein, 9 aa, Artificial Sequence
  Description of Artificial Sequence: Synthetic peptide
PHENKFLDC

SEQ ID NO: 10225 - protein, 9 aa, Artificial Sequence
  Description of Artificial Sequence: Synthetic peptide
PHHGANGFC

SEQ ID NO: 10226 - protein, 9 aa, Artificial Sequence
  Description of Artificial Sequence: Synthetic peptide
PHHWCIVES

SEQ ID NO: 10227 - protein, 9 aa, Artificial Sequence
  Description of Artificial Sequence: Synthetic peptide
PHKCMFSWN

SEQ ID NO: 10228 - protein, 9 aa, Artificial Sequence
  Description of Artificial Sequence: Synthetic peptide
PHNYRVFWE

SEQ ID NO: 10229 - protein, 9 aa, Artificial Sequence
  Description of Artificial Sequence: Synthetic peptide
PHPPNPGEN

SEQ ID NO: 10230 - protein, 9 aa, Artificial Sequence
  Description of Artificial Sequence: Synthetic peptide
PHQHPQIPE

SEQ ID NO: 10231 - protein, 9 aa, Artificial Sequence
  Description of Artificial Sequence: Synthetic peptide
PHRDVIWLG

SEQ ID NO: 10232 - protein, 9 aa, Artificial Sequence
  Description of Artificial Sequence: Synthetic peptide
PHRVNVERS

SEQ ID NO: 10233 - protein, 9 aa, Artificial Sequence
  Description of Artificial Sequence: Synthetic peptide
PHSNSVGKC

SEQ ID NO: 10234 - protein, 9 aa, Artificial Sequence
  Description of Artificial Sequence: Synthetic peptide
PHSQKLNSG

SEQ ID NO: 10235 - protein, 9 aa, Artificial Sequence
  Description of Artificial Sequence: Synthetic peptide
PHTDAGYIH

SEQ ID NO: 10236 - protein, 9 aa, Artificial Sequence
  Description of Artificial Sequence: Synthetic peptide
PHTQALICP

SEQ ID NO: 10237 - protein, 9 aa, Artificial Sequence
  Description of Artificial Sequence: Synthetic peptide
PIASEMYED

SEQ ID NO: 10238 - protein, 9 aa, Artificial Sequence
  Description of Artificial Sequence: Synthetic peptide
PICEFCTMN

SEQ ID NO: 10239 - protein, 9 aa, Artificial Sequence
  Description of Artificial Sequence: Synthetic peptide
PIEFYTIKH

SEQ ID NO: 10240 - protein, 9 aa, Artificial Sequence
  Description of Artificial Sequence: Synthetic peptide
PIEGYHIAD

SEQ ID NO: 10241 - protein, 9 aa, Artificial Sequence
  Description of Artificial Sequence: Synthetic peptide
PIESKPRSS

SEQ ID NO: 10242 - protein, 9 aa, Artificial Sequence
  Description of Artificial Sequence: Synthetic peptide
PIFPPGQKP

SEQ ID NO: 10243 - protein, 9 aa, Artificial Sequence
  Description of Artificial Sequence: Synthetic peptide
PIHHQLMCF

SEQ ID NO: 10244 - protein, 9 aa, Artificial Sequence
  Description of Artificial Sequence: Synthetic peptide
PIIPCGGWQ

SEQ ID NO: 10245 - protein, 9 aa, Artificial Sequence
  Description of Artificial Sequence: Synthetic peptide
PIISTFNNQ

SEQ ID NO: 10246 - protein, 9 aa, Artificial Sequence
  Description of Artificial Sequence: Synthetic peptide
PILCTMPFV

SEQ ID NO: 10247 - protein, 9 aa, Artificial Sequence
  Description of Artificial Sequence: Synthetic peptide
PILIPSLQP

SEQ ID NO: 10248 - protein, 9 aa, Artificial Sequence
  Description of Artificial Sequence: Synthetic peptide
PILPNTHTG

SEQ ID NO: 10249 - protein, 9 aa, Artificial Sequence
  Description of Artificial Sequence: Synthetic peptide
PIMCKEPGV

SEQ ID NO: 10250 - protein, 9 aa, Artificial Sequence
  Description of Artificial Sequence: Synthetic peptide
PIMMHQTLG

SEQ ID NO: 10251 - protein, 9 aa, Artificial Sequence
  Description of Artificial Sequence: Synthetic peptide
PIMPKYNAL

SEQ ID NO: 10252 - protein, 9 aa, Artificial Sequence
  Description of Artificial Sequence: Synthetic peptide
PINTSHSYF

SEQ ID NO: 10253 - protein, 9 aa, Artificial Sequence
  Description of Artificial Sequence: Synthetic peptide
PIPHVMNEP

SEQ ID NO: 10254 - protein, 9 aa, Artificial Sequence
  Description of Artificial Sequence: Synthetic peptide
PIRQNAMMW

SEQ ID NO: 10255 - protein, 9 aa, Artificial Sequence
  Description of Artificial Sequence: Synthetic peptide
PITLRQPWH

SEQ ID NO: 10256 - protein, 9 aa, Artificial Sequence
  Description of Artificial Sequence: Synthetic peptide
PIVAWIWYD

SEQ ID NO: 10257 - protein, 9 aa, Artificial Sequence
  Description of Artificial Sequence: Synthetic peptide
PIVHQNPMN

SEQ ID NO: 10258 - protein, 9 aa, Artificial Sequence
  Description of Artificial Sequence: Synthetic peptide
PIVVDGRKF

SEQ ID NO: 10259 - protein, 9 aa, Artificial Sequence
  Description of Artificial Sequence: Synthetic peptide
PIYSIVTKG

SEQ ID NO: 10260 - protein, 9 aa, Artificial Sequence
  Description of Artificial Sequence: Synthetic peptide
PKCEILTGA

SEQ ID NO: 10261 - protein, 9 aa, Artificial Sequence
  Description of Artificial Sequence: Synthetic peptide
PKGADRYNY

SEQ ID NO: 10262 - protein, 9 aa, Artificial Sequence
  Description of Artificial Sequence: Synthetic peptide
PKGVAMGGT

SEQ ID NO: 10263 - protein, 9 aa, Artificial Sequence
  Description of Artificial Sequence: Synthetic peptide
PKIEPNLCK

SEQ ID NO: 10264 - protein, 9 aa, Artificial Sequence
  Description of Artificial Sequence: Synthetic peptide
PKIMPKSCS

SEQ ID NO: 10265 - protein, 9 aa, Artificial Sequence
  Description of Artificial Sequence: Synthetic peptide
PKLEDDEHC

SEQ ID NO: 10266 - protein, 9 aa, Artificial Sequence
  Description of Artificial Sequence: Synthetic peptide
PKLTCETWF

SEQ ID NO: 10267 - protein, 9 aa, Artificial Sequence
  Description of Artificial Sequence: Synthetic peptide
PKSDLCEWV

SEQ ID NO: 10268 - protein, 9 aa, Artificial Sequence
  Description of Artificial Sequence: Synthetic peptide
PKSELQKSF

SEQ ID NO: 10269 - protein, 9 aa, Artificial Sequence
  Description of Artificial Sequence: Synthetic peptide
PKSIDELFE

SEQ ID NO: 10270 - protein, 9 aa, Artificial Sequence
  Description of Artificial Sequence: Synthetic peptide
PKTWMHGVP

SEQ ID NO: 10271 - protein, 9 aa, Artificial Sequence
  Description of Artificial Sequence: Synthetic peptide
PLCLKYEGC

SEQ ID NO: 10272 - protein, 9 aa, Artificial Sequence
  Description of Artificial Sequence: Synthetic peptide
PLECNRGTD

SEQ ID NO: 10273 - protein, 9 aa, Artificial Sequence
  Description of Artificial Sequence: Synthetic peptide
PLEMSNTPW

SEQ ID NO: 10274 - protein, 9 aa, Artificial Sequence
  Description of Artificial Sequence: Synthetic peptide
PLGFAPEIT

SEQ ID NO: 10275 - protein, 9 aa, Artificial Sequence
  Description of Artificial Sequence: Synthetic peptide
PLHQTSEYK

SEQ ID NO: 10276 - protein, 9 aa, Artificial Sequence
  Description of Artificial Sequence: Synthetic peptide
PLLMTKTGS

SEQ ID NO: 10277 - protein, 9 aa, Artificial Sequence
  Description of Artificial Sequence: Synthetic peptide
PLMMGPQRQ

SEQ ID NO: 10278 - protein, 9 aa, Artificial Sequence
  Description of Artificial Sequence: Synthetic peptide
PLNHACYCC

SEQ ID NO: 10279 - protein, 9 aa, Artificial Sequence
  Description of Artificial Sequence: Synthetic peptide
PLNWIIACR

SEQ ID NO: 10280 - protein, 9 aa, Artificial Sequence
  Description of Artificial Sequence: Synthetic peptide
PLQTSKWQA

SEQ ID NO: 10281 - protein, 9 aa, Artificial Sequence
  Description of Artificial Sequence: Synthetic peptide
PLVKLEEIH

SEQ ID NO: 10282 - protein, 9 aa, Artificial Sequence
  Description of Artificial Sequence: Synthetic peptide
PMCICWASE

SEQ ID NO: 10283 - protein, 9 aa, Artificial Sequence
  Description of Artificial Sequence: Synthetic peptide
PMFYDEPKH

SEQ ID NO: 10284 - protein, 9 aa, Artificial Sequence
  Description of Artificial Sequence: Synthetic peptide
PMGCNGYVT

SEQ ID NO: 10285 - protein, 9 aa, Artificial Sequence
  Description of Artificial Sequence: Synthetic peptide
PMGYSNLNC

SEQ ID NO: 10286 - protein, 9 aa, Artificial Sequence
  Description of Artificial Sequence: Synthetic peptide
PMHPTCFVI

SEQ ID NO: 10287 - protein, 9 aa, Artificial Sequence
  Description of Artificial Sequence: Synthetic peptide
PMIVPDVAY

SEQ ID NO: 10288 - protein, 9 aa, Artificial Sequence
  Description of Artificial Sequence: Synthetic peptide
PMLKTEAMS

SEQ ID NO: 10289 - protein, 9 aa, Artificial Sequence
  Description of Artificial Sequence: Synthetic peptide
PMLPEKFPD

SEQ ID NO: 10290 - protein, 9 aa, Artificial Sequence
  Description of Artificial Sequence: Synthetic peptide
PMMISCNSV

SEQ ID NO: 10291 - protein, 9 aa, Artificial Sequence
  Description of Artificial Sequence: Synthetic peptide
PMMWSTNVK

SEQ ID NO: 10292 - protein, 9 aa, Artificial Sequence
  Description of Artificial Sequence: Synthetic peptide
PMNWAHSCA

SEQ ID NO: 10293 - protein, 9 aa, Artificial Sequence
  Description of Artificial Sequence: Synthetic peptide
PMPNYYHPQ

SEQ ID NO: 10294 - protein, 9 aa, Artificial Sequence
  Description of Artificial Sequence: Synthetic peptide
PMRPHRDAE

SEQ ID NO: 10295 - protein, 9 aa, Artificial Sequence
  Description of Artificial Sequence: Synthetic peptide
PMSPFPFEH

SEQ ID NO: 10296 - protein, 9 aa, Artificial Sequence
  Description of Artificial Sequence: Synthetic peptide
PMTSTEPME

SEQ ID NO: 10297 - protein, 9 aa, Artificial Sequence
  Description of Artificial Sequence: Synthetic peptide
PMWYYYHRM

SEQ ID NO: 10298 - protein, 9 aa, Artificial Sequence
  Description of Artificial Sequence: Synthetic peptide
PMYSQVHLG

SEQ ID NO: 10299 - protein, 9 aa, Artificial Sequence
  Description of Artificial Sequence: Synthetic peptide
PMYVLEAHY

SEQ ID NO: 10300 - protein, 9 aa, Artificial Sequence
  Description of Artificial Sequence: Synthetic peptide
PNAKPCCFE

SEQ ID NO: 10301 - protein, 9 aa, Artificial Sequence
  Description of Artificial Sequence: Synthetic peptide
PNCLKSIHG

SEQ ID NO: 10302 - protein, 9 aa, Artificial Sequence
  Description of Artificial Sequence: Synthetic peptide
PNCPFYPHP

SEQ ID NO: 10303 - protein, 9 aa, Artificial Sequence
  Description of Artificial Sequence: Synthetic peptide
PNDLNRRTK

SEQ ID NO: 10304 - protein, 9 aa, Artificial Sequence
  Description of Artificial Sequence: Synthetic peptide
PNEPMTPGQ

SEQ ID NO: 10305 - protein, 9 aa, Artificial Sequence
  Description of Artificial Sequence: Synthetic peptide
PNESGHQSS

SEQ ID NO: 10306 - protein, 9 aa, Artificial Sequence
  Description of Artificial Sequence: Synthetic peptide
PNFYSDISR

SEQ ID NO: 10307 - protein, 9 aa, Artificial Sequence
  Description of Artificial Sequence: Synthetic peptide
PNIKYVYNG

SEQ ID NO: 10308 - protein, 9 aa, Artificial Sequence
  Description of Artificial Sequence: Synthetic peptide
PNIPLIDMC

SEQ ID NO: 10309 - protein, 9 aa, Artificial Sequence
  Description of Artificial Sequence: Synthetic peptide
PNMPTCNAP

SEQ ID NO: 10310 - protein, 9 aa, Artificial Sequence
  Description of Artificial Sequence: Synthetic peptide
PNQYTANEI

SEQ ID NO: 10311 - protein, 9 aa, Artificial Sequence
  Description of Artificial Sequence: Synthetic peptide
PNRHGPDAE

SEQ ID NO: 10312 - protein, 9 aa, Artificial Sequence
  Description of Artificial Sequence: Synthetic peptide
PNSSTPYNW

SEQ ID NO: 10313 - protein, 9 aa, Artificial Sequence
  Description of Artificial Sequence: Synthetic peptide
PNWQNLESD

SEQ ID NO: 10314 - protein, 9 aa, Artificial Sequence
  Description of Artificial Sequence: Synthetic peptide
PPDAFRWCP

SEQ ID NO: 10315 - protein, 9 aa, Artificial Sequence
  Description of Artificial Sequence: Synthetic peptide
PPDIQPNCS

SEQ ID NO: 10316 - protein, 9 aa, Artificial Sequence
  Description of Artificial Sequence: Synthetic peptide
PPELEKCTP

SEQ ID NO: 10317 - protein, 9 aa, Artificial Sequence
  Description of Artificial Sequence: Synthetic peptide
PPFCKWYIV

SEQ ID NO: 10318 - protein, 9 aa, Artificial Sequence
  Description of Artificial Sequence: Synthetic peptide
PPILLIQMR

SEQ ID NO: 10319 - protein, 9 aa, Artificial Sequence
  Description of Artificial Sequence: Synthetic peptide
PPKDKYLRE

SEQ ID NO: 10320 - protein, 9 aa, Artificial Sequence
  Description of Artificial Sequence: Synthetic peptide
PPKPAEEGH

SEQ ID NO: 10321 - protein, 9 aa, Artificial Sequence
  Description of Artificial Sequence: Synthetic peptide
PPKYPQQQI

SEQ ID NO: 10322 - protein, 9 aa, Artificial Sequence
  Description of Artificial Sequence: Synthetic peptide
PPPSVRMMM

SEQ ID NO: 10323 - protein, 9 aa, Artificial Sequence
  Description of Artificial Sequence: Synthetic peptide
PPQQCEWIA

SEQ ID NO: 10324 - protein, 9 aa, Artificial Sequence
  Description of Artificial Sequence: Synthetic peptide
PPRHSNSQG

SEQ ID NO: 10325 - protein, 9 aa, Artificial Sequence
  Description of Artificial Sequence: Synthetic peptide
PPTIGCSCN

SEQ ID NO: 10326 - protein, 9 aa, Artificial Sequence
  Description of Artificial Sequence: Synthetic peptide
PQAEVMLGE

SEQ ID NO: 10327 - protein, 9 aa, Artificial Sequence
  Description of Artificial Sequence: Synthetic peptide
PQCRMLLWE

SEQ ID NO: 10328 - protein, 9 aa, Artificial Sequence
  Description of Artificial Sequence: Synthetic peptide
PQDDKGVIP

SEQ ID NO: 10329 - protein, 9 aa, Artificial Sequence
  Description of Artificial Sequence: Synthetic peptide
PQECSHVHP

SEQ ID NO: 10330 - protein, 9 aa, Artificial Sequence
  Description of Artificial Sequence: Synthetic peptide
PQKLNFTYC

SEQ ID NO: 10331 - protein, 9 aa, Artificial Sequence
  Description of Artificial Sequence: Synthetic peptide
PQKTLAVGN

SEQ ID NO: 10332 - protein, 9 aa, Artificial Sequence
  Description of Artificial Sequence: Synthetic peptide
PQLVSHIGH

SEQ ID NO: 10333 - protein, 9 aa, Artificial Sequence
  Description of Artificial Sequence: Synthetic peptide
PQNPKMIPA

SEQ ID NO: 10334 - protein, 9 aa, Artificial Sequence
  Description of Artificial Sequence: Synthetic peptide
PQNTFVRKQ

SEQ ID NO: 10335 - protein, 9 aa, Artificial Sequence
  Description of Artificial Sequence: Synthetic peptide
PQPCSYDSG

SEQ ID NO: 10336 - protein, 9 aa, Artificial Sequence
  Description of Artificial Sequence: Synthetic peptide
PQRYIFGAW

SEQ ID NO: 10337 - protein, 9 aa, Artificial Sequence
  Description of Artificial Sequence: Synthetic peptide
PQSCENNCR

SEQ ID NO: 10338 - protein, 9 aa, Artificial Sequence
  Description of Artificial Sequence: Synthetic peptide
PQSHCHMET

SEQ ID NO: 10339 - protein, 9 aa, Artificial Sequence
  Description of Artificial Sequence: Synthetic peptide
PQTFWGETC

SEQ ID NO: 10340 - protein, 9 aa, Artificial Sequence
  Description of Artificial Sequence: Synthetic peptide
PQVMQLAEA

SEQ ID NO: 10341 - protein, 9 aa, Artificial Sequence
  Description of Artificial Sequence: Synthetic peptide
PQYIQAIED

SEQ ID NO: 10342 - protein, 9 aa, Artificial Sequence
  Description of Artificial Sequence: Synthetic peptide
PQYRCIDEH

SEQ ID NO: 10343 - protein, 9 aa, Artificial Sequence
  Description of Artificial Sequence: Synthetic peptide
PQYTNRVIG

SEQ ID NO: 10344 - protein, 9 aa, Artificial Sequence
  Description of Artificial Sequence: Synthetic peptide
PQYVPDRGT

SEQ ID NO: 10345 - protein, 9 aa, Artificial Sequence
  Description of Artificial Sequence: Synthetic peptide
PRCLKCRPH

SEQ ID NO: 10346 - protein, 9 aa, Artificial Sequence
  Description of Artificial Sequence: Synthetic peptide
PRGANSMMT

SEQ ID NO: 10347 - protein, 9 aa, Artificial Sequence
  Description of Artificial Sequence: Synthetic peptide
PRLFMREID

SEQ ID NO: 10348 - protein, 9 aa, Artificial Sequence
  Description of Artificial Sequence: Synthetic peptide
PRLNVELDW

SEQ ID NO: 10349 - protein, 9 aa, Artificial Sequence
  Description of Artificial Sequence: Synthetic peptide
PRLQWMEPG

SEQ ID NO: 10350 - protein, 9 aa, Artificial Sequence
  Description of Artificial Sequence: Synthetic peptide
PRMCMSENE

SEQ ID NO: 10351 - protein, 9 aa, Artificial Sequence
  Description of Artificial Sequence: Synthetic peptide
PRMWDKLDQ

SEQ ID NO: 10352 - protein, 9 aa, Artificial Sequence
  Description of Artificial Sequence: Synthetic peptide
PRRDKDVYM

SEQ ID NO: 10353 - protein, 9 aa, Artificial Sequence
  Description of Artificial Sequence: Synthetic peptide
PRVCVTWVT

SEQ ID NO: 10354 - protein, 9 aa, Artificial Sequence
  Description of Artificial Sequence: Synthetic peptide
PRWMQTYQV

SEQ ID NO: 10355 - protein, 9 aa, Artificial Sequence
  Description of Artificial Sequence: Synthetic peptide
PSACMVGPC

SEQ ID NO: 10356 - protein, 9 aa, Artificial Sequence
  Description of Artificial Sequence: Synthetic peptide
PSADCNPWA

SEQ ID NO: 10357 - protein, 9 aa, Artificial Sequence
  Description of Artificial Sequence: Synthetic peptide
PSAGDLSQY

SEQ ID NO: 10358 - protein, 9 aa, Artificial Sequence
  Description of Artificial Sequence: Synthetic peptide
PSAQGNFSM

SEQ ID NO: 10359 - protein, 9 aa, Artificial Sequence
  Description of Artificial Sequence: Synthetic peptide
PSCVIFKPW

SEQ ID NO: 10360 - protein, 9 aa, Artificial Sequence
  Description of Artificial Sequence: Synthetic peptide
PSDHTWKNV

SEQ ID NO: 10361 - protein, 9 aa, Artificial Sequence
  Description of Artificial Sequence: Synthetic peptide
PSEGDSWLC

SEQ ID NO: 10362 - protein, 9 aa, Artificial Sequence
  Description of Artificial Sequence: Synthetic peptide
PSESLELCP

SEQ ID NO: 10363 - protein, 9 aa, Artificial Sequence
  Description of Artificial Sequence: Synthetic peptide
PSFLCGKYI

SEQ ID NO: 10364 - protein, 9 aa, Artificial Sequence
  Description of Artificial Sequence: Synthetic peptide
PSGCYKCMK

SEQ ID NO: 10365 - protein, 9 aa, Artificial Sequence
  Description of Artificial Sequence: Synthetic peptide
PSKHKDLNE

SEQ ID NO: 10366 - protein, 9 aa, Artificial Sequence
  Description of Artificial Sequence: Synthetic peptide
PSLYCCDGV

SEQ ID NO: 10367 - protein, 9 aa, Artificial Sequence
  Description of Artificial Sequence: Synthetic peptide
PSMYEDMTN

SEQ ID NO: 10368 - protein, 9 aa, Artificial Sequence
  Description of Artificial Sequence: Synthetic peptide
PSNPEQHLV

SEQ ID NO: 10369 - protein, 9 aa, Artificial Sequence
  Description of Artificial Sequence: Synthetic peptide
PSPRYPVCM

SEQ ID NO: 10370 - protein, 9 aa, Artificial Sequence
  Description of Artificial Sequence: Synthetic peptide
PSVLQTTFN

SEQ ID NO: 10371 - protein, 9 aa, Artificial Sequence
  Description of Artificial Sequence: Synthetic peptide
PSVTVDVGS

SEQ ID NO: 10372 - protein, 9 aa, Artificial Sequence
  Description of Artificial Sequence: Synthetic peptide
PTCLGKIKW

SEQ ID NO: 10373 - protein, 9 aa, Artificial Sequence
  Description of Artificial Sequence: Synthetic peptide
PTCQTPPLH

SEQ ID NO: 10374 - protein, 9 aa, Artificial Sequence
  Description of Artificial Sequence: Synthetic peptide
PTEFDQEQT

SEQ ID NO: 10375 - protein, 9 aa, Artificial Sequence
  Description of Artificial Sequence: Synthetic peptide
PTEPREDAA

SEQ ID NO: 10376 - protein, 9 aa, Artificial Sequence
  Description of Artificial Sequence: Synthetic peptide
PTETRWHTG

SEQ ID NO: 10377 - protein, 9 aa, Artificial Sequence
  Description of Artificial Sequence: Synthetic peptide
PTFMFRRDL

SEQ ID NO: 10378 - protein, 9 aa, Artificial Sequence
  Description of Artificial Sequence: Synthetic peptide
PTGIYAMQC

SEQ ID NO: 10379 - protein, 9 aa, Artificial Sequence
  Description of Artificial Sequence: Synthetic peptide
PTHLFNFHW

SEQ ID NO: 10380 - protein, 9 aa, Artificial Sequence
  Description of Artificial Sequence: Synthetic peptide
PTINRYFNE

SEQ ID NO: 10381 - protein, 9 aa, Artificial Sequence
  Description of Artificial Sequence: Synthetic peptide
PTKEMMSMF

SEQ ID NO: 10382 - protein, 9 aa, Artificial Sequence
  Description of Artificial Sequence: Synthetic peptide
PTKSSGGAA

SEQ ID NO: 10383 - protein, 9 aa, Artificial Sequence
  Description of Artificial Sequence: Synthetic peptide
PTMLAVKNA

SEQ ID NO: 10384 - protein, 9 aa, Artificial Sequence
  Description of Artificial Sequence: Synthetic peptide
PTMPWKKAE

SEQ ID NO: 10385 - protein, 9 aa, Artificial Sequence
  Description of Artificial Sequence: Synthetic peptide
PTMYRPMHV

SEQ ID NO: 10386 - protein, 9 aa, Artificial Sequence
  Description of Artificial Sequence: Synthetic peptide
PTNGIASAH

SEQ ID NO: 10387 - protein, 9 aa, Artificial Sequence
  Description of Artificial Sequence: Synthetic peptide
PTPSIVLCQ

SEQ ID NO: 10388 - protein, 9 aa, Artificial Sequence
  Description of Artificial Sequence: Synthetic peptide
PTQYIGDHR

SEQ ID NO: 10389 - protein, 9 aa, Artificial Sequence
  Description of Artificial Sequence: Synthetic peptide
PTRIQMTVD

SEQ ID NO: 10390 - protein, 9 aa, Artificial Sequence
  Description of Artificial Sequence: Synthetic peptide
PTVWANVAE

SEQ ID NO: 10391 - protein, 9 aa, Artificial Sequence
  Description of Artificial Sequence: Synthetic peptide
PTVWRTFEF

SEQ ID NO: 10392 - protein, 9 aa, Artificial Sequence
  Description of Artificial Sequence: Synthetic peptide
PTWYVLAHF

SEQ ID NO: 10393 - protein, 9 aa, Artificial Sequence
  Description of Artificial Sequence: Synthetic peptide
PTYPFISYS

SEQ ID NO: 10394 - protein, 9 aa, Artificial Sequence
  Description of Artificial Sequence: Synthetic peptide
PVAGDRYGG

SEQ ID NO: 10395 - protein, 9 aa, Artificial Sequence
  Description of Artificial Sequence: Synthetic peptide
PVAVPTESP

SEQ ID NO: 10396 - protein, 9 aa, Artificial Sequence
  Description of Artificial Sequence: Synthetic peptide
PVDRLVHTN

SEQ ID NO: 10397 - protein, 9 aa, Artificial Sequence
  Description of Artificial Sequence: Synthetic peptide
PVEMPDSCH

SEQ ID NO: 10398 - protein, 9 aa, Artificial Sequence
  Description of Artificial Sequence: Synthetic peptide
PVGSHMTFW

SEQ ID NO: 10399 - protein, 9 aa, Artificial Sequence
  Description of Artificial Sequence: Synthetic peptide
PVIHGMHID

SEQ ID NO: 10400 - protein, 9 aa, Artificial Sequence
  Description of Artificial Sequence: Synthetic peptide
PVIKPNTEV

SEQ ID NO: 10401 - protein, 9 aa, Artificial Sequence
  Description of Artificial Sequence: Synthetic peptide
PVIQQRRDQ

SEQ ID NO: 10402 - protein, 9 aa, Artificial Sequence
  Description of Artificial Sequence: Synthetic peptide
PVIRKIYEL

SEQ ID NO: 10403 - protein, 9 aa, Artificial Sequence
  Description of Artificial Sequence: Synthetic peptide
PVKCEDHPE

SEQ ID NO: 10404 - protein, 9 aa, Artificial Sequence
  Description of Artificial Sequence: Synthetic peptide
PVKSPWFNP

SEQ ID NO: 10405 - protein, 9 aa, Artificial Sequence
  Description of Artificial Sequence: Synthetic peptide
PVLCEMKQY

SEQ ID NO: 10406 - protein, 9 aa, Artificial Sequence
  Description of Artificial Sequence: Synthetic peptide
PVNWPPFFC

SEQ ID NO: 10407 - protein, 9 aa, Artificial Sequence
  Description of Artificial Sequence: Synthetic peptide
PVPRRKCSS

SEQ ID NO: 10408 - protein, 9 aa, Artificial Sequence
  Description of Artificial Sequence: Synthetic peptide
PVPTFCSTC

SEQ ID NO: 10409 - protein, 9 aa, Artificial Sequence
  Description of Artificial Sequence: Synthetic peptide
PVPYETHMY

SEQ ID NO: 10410 - protein, 9 aa, Artificial Sequence
  Description of Artificial Sequence: Synthetic peptide
PVRKAGWQK

SEQ ID NO: 10411 - protein, 9 aa, Artificial Sequence
  Description of Artificial Sequence: Synthetic peptide
PVSPPCDAQ

SEQ ID NO: 10412 - protein, 9 aa, Artificial Sequence
  Description of Artificial Sequence: Synthetic peptide
PVVMIGHMS

SEQ ID NO: 10413 - protein, 9 aa, Artificial Sequence
  Description of Artificial Sequence: Synthetic peptide
PWDLRNQYH

SEQ ID NO: 10414 - protein, 9 aa, Artificial Sequence
  Description of Artificial Sequence: Synthetic peptide
PWEAMYMTA

SEQ ID NO: 10415 - protein, 9 aa, Artificial Sequence
  Description of Artificial Sequence: Synthetic peptide
PWERRHAER

SEQ ID NO: 10416 - protein, 9 aa, Artificial Sequence
  Description of Artificial Sequence: Synthetic peptide
PWETCRWKQ

SEQ ID NO: 10417 - protein, 9 aa, Artificial Sequence
  Description of Artificial Sequence: Synthetic peptide
PWIAMVAQE

SEQ ID NO: 10418 - protein, 9 aa, Artificial Sequence
  Description of Artificial Sequence: Synthetic peptide
PWNQKCNYP

SEQ ID NO: 10419 - protein, 9 aa, Artificial Sequence
  Description of Artificial Sequence: Synthetic peptide
PWNWDGHMR

SEQ ID NO: 10420 - protein, 9 aa, Artificial Sequence
  Description of Artificial Sequence: Synthetic peptide
PWQCLRSPD

SEQ ID NO: 10421 - protein, 9 aa, Artificial Sequence
  Description of Artificial Sequence: Synthetic peptide
PWVRWRTCQ

SEQ ID NO: 10422 - protein, 9 aa, Artificial Sequence
  Description of Artificial Sequence: Synthetic peptide
PYAANHQQG

SEQ ID NO: 10423 - protein, 9 aa, Artificial Sequence
  Description of Artificial Sequence: Synthetic peptide
PYACKIIRG

SEQ ID NO: 10424 - protein, 9 aa, Artificial Sequence
  Description of Artificial Sequence: Synthetic peptide
PYCNIWMES

SEQ ID NO: 10425 - protein, 9 aa, Artificial Sequence
  Description of Artificial Sequence: Synthetic peptide
PYCPMQIDC

SEQ ID NO: 10426 - protein, 9 aa, Artificial Sequence
  Description of Artificial Sequence: Synthetic peptide
PYCWMVDDA

SEQ ID NO: 10427 - protein, 9 aa, Artificial Sequence
  Description of Artificial Sequence: Synthetic peptide
PYEHGKEHH

SEQ ID NO: 10428 - protein, 9 aa, Artificial Sequence
  Description of Artificial Sequence: Synthetic peptide
PYGYNCVID

SEQ ID NO: 10429 - protein, 9 aa, Artificial Sequence
  Description of Artificial Sequence: Synthetic peptide
PYHRIMEYA

SEQ ID NO: 10430 - protein, 9 aa, Artificial Sequence
  Description of Artificial Sequence: Synthetic peptide
PYIRCKKDG

SEQ ID NO: 10431 - protein, 9 aa, Artificial Sequence
  Description of Artificial Sequence: Synthetic peptide
PYMRCEHQH

SEQ ID NO: 10432 - protein, 9 aa, Artificial Sequence
  Description of Artificial Sequence: Synthetic peptide
PYMVTCYDF

SEQ ID NO: 10433 - protein, 9 aa, Artificial Sequence
  Description of Artificial Sequence: Synthetic peptide
PYNPQYCCC

SEQ ID NO: 10434 - protein, 9 aa, Artificial Sequence
  Description of Artificial Sequence: Synthetic peptide
PYPWDRCWI

SEQ ID NO: 10435 - protein, 9 aa, Artificial Sequence
  Description of Artificial Sequence: Synthetic peptide
PYRKPWNAE

SEQ ID NO: 10436 - protein, 9 aa, Artificial Sequence
  Description of Artificial Sequence: Synthetic peptide
PYRVEGEHN

SEQ ID NO: 10437 - protein, 9 aa, Artificial Sequence
  Description of Artificial Sequence: Synthetic peptide
PYSFKDLLE

SEQ ID NO: 10438 - protein, 9 aa, Artificial Sequence
  Description of Artificial Sequence: Synthetic peptide
PYTIQKGEY

SEQ ID NO: 10439 - protein, 9 aa, Artificial Sequence
  Description of Artificial Sequence: Synthetic peptide
PYTNEQQYT

SEQ ID NO: 10440 - protein, 9 aa, Artificial Sequence
  Description of Artificial Sequence: Synthetic peptide
PYVQAQAGR

SEQ ID NO: 10441 - protein, 9 aa, Artificial Sequence
  Description of Artificial Sequence: Synthetic peptide
PYVRRVTEI

SEQ ID NO: 10442 - protein, 9 aa, Artificial Sequence
  Description of Artificial Sequence: Synthetic peptide
MPTRQRHEK

SEQ ID NO: 10443 - protein, 9 aa, Artificial Sequence
  Description of Artificial Sequence: Synthetic peptide
APILLQASC

SEQ ID NO: 10444 - protein, 9 aa, Artificial Sequence
  Description of Artificial Sequence: Synthetic peptide
DPRRSMWYL

SEQ ID NO: 10445 - protein, 9 aa, Artificial Sequence
  Description of Artificial Sequence: Synthetic peptide
IPRIVYMCD

SEQ ID NO: 10446 - protein, 9 aa, Artificial Sequence
  Description of Artificial Sequence: Synthetic peptide
SPCNMDTHH

SEQ ID NO: 10447 - protein, 9 aa, Artificial Sequence
  Description of Artificial Sequence: Synthetic peptide
RPVTYPHTA

SEQ ID NO: 10448 - protein, 9 aa, Artificial Sequence
  Description of Artificial Sequence: Synthetic peptide
NPGWTLSMA

SEQ ID NO: 10449 - protein, 9 aa, Artificial Sequence
  Description of Artificial Sequence: Synthetic peptide
IPSHVHFGE

SEQ ID NO: 10450 - protein, 9 aa, Artificial Sequence
  Description of Artificial Sequence: Synthetic peptide
APDNEAGMY

SEQ ID NO: 10451 - protein, 9 aa, Artificial Sequence
  Description of Artificial Sequence: Synthetic peptide
APDPSTANR

SEQ ID NO: 10452 - protein, 9 aa, Artificial Sequence
  Description of Artificial Sequence: Synthetic peptide
APFNANCCN

SEQ ID NO: 10453 - protein, 9 aa, Artificial Sequence
  Description of Artificial Sequence: Synthetic peptide
APGCYFYRN

SEQ ID NO: 10454 - protein, 9 aa, Artificial Sequence
  Description of Artificial Sequence: Synthetic peptide
APICEGEPK

SEQ ID NO: 10455 - protein, 9 aa, Artificial Sequence
  Description of Artificial Sequence: Synthetic peptide
APITIGAMS

SEQ ID NO: 10456 - protein, 9 aa, Artificial Sequence
  Description of Artificial Sequence: Synthetic peptide
APKWFNSLD

SEQ ID NO: 10457 - protein, 9 aa, Artificial Sequence
  Description of Artificial Sequence: Synthetic peptide
APLHNFPVT

SEQ ID NO: 10458 - protein, 9 aa, Artificial Sequence
  Description of Artificial Sequence: Synthetic peptide
APMDMGRMT

SEQ ID NO: 10459 - protein, 9 aa, Artificial Sequence
  Description of Artificial Sequence: Synthetic peptide
APMHSFDAE

SEQ ID NO: 10460 - protein, 9 aa, Artificial Sequence
  Description of Artificial Sequence: Synthetic peptide
APNDCMMQN

SEQ ID NO: 10461 - protein, 9 aa, Artificial Sequence
  Description of Artificial Sequence: Synthetic peptide
APPHQDHNP

SEQ ID NO: 10462 - protein, 9 aa, Artificial Sequence
  Description of Artificial Sequence: Synthetic peptide
APQCVIVFT

SEQ ID NO: 10463 - protein, 9 aa, Artificial Sequence
  Description of Artificial Sequence: Synthetic peptide
APRQIWMHH

SEQ ID NO: 10464 - protein, 9 aa, Artificial Sequence
  Description of Artificial Sequence: Synthetic peptide
APVYWDHQM

SEQ ID NO: 10465 - protein, 9 aa, Artificial Sequence
  Description of Artificial Sequence: Synthetic peptide
APWWEFPQY

SEQ ID NO: 10466 - protein, 9 aa, Artificial Sequence
  Description of Artificial Sequence: Synthetic peptide
APYDPKYVF

SEQ ID NO: 10467 - protein, 9 aa, Artificial Sequence
  Description of Artificial Sequence: Synthetic peptide
APYQAVMES

SEQ ID NO: 10468 - protein, 9 aa, Artificial Sequence
  Description of Artificial Sequence: Synthetic peptide
CPALNQLGR

SEQ ID NO: 10469 - protein, 9 aa, Artificial Sequence
  Description of Artificial Sequence: Synthetic peptide
CPAMPGYCH

SEQ ID NO: 10470 - protein, 9 aa, Artificial Sequence
  Description of Artificial Sequence: Synthetic peptide
CPDDSRLDQ

SEQ ID NO: 10471 - protein, 9 aa, Artificial Sequence
  Description of Artificial Sequence: Synthetic peptide
CPDLPDWSG

SEQ ID NO: 10472 - protein, 9 aa, Artificial Sequence
  Description of Artificial Sequence: Synthetic peptide
CPFFNYMIQ

SEQ ID NO: 10473 - protein, 9 aa, Artificial Sequence
  Description of Artificial Sequence: Synthetic peptide
CPGYYETEI

SEQ ID NO: 10474 - protein, 9 aa, Artificial Sequence
  Description of Artificial Sequence: Synthetic peptide
CPHAHYVWR

SEQ ID NO: 10475 - protein, 9 aa, Artificial Sequence
  Description of Artificial Sequence: Synthetic peptide
CPIYYGPVS

SEQ ID NO: 10476 - protein, 9 aa, Artificial Sequence
  Description of Artificial Sequence: Synthetic peptide
CPKGHEYEN

SEQ ID NO: 10477 - protein, 9 aa, Artificial Sequence
  Description of Artificial Sequence: Synthetic peptide
CPKQWLPAC

SEQ ID NO: 10478 - protein, 9 aa, Artificial Sequence
  Description of Artificial Sequence: Synthetic peptide
CPLIDWCMY

SEQ ID NO: 10479 - protein, 9 aa, Artificial Sequence
  Description of Artificial Sequence: Synthetic peptide
CPLPARWGD

SEQ ID NO: 10480 - protein, 9 aa, Artificial Sequence
  Description of Artificial Sequence: Synthetic peptide
CPNCWYDEV

SEQ ID NO: 10481 - protein, 9 aa, Artificial Sequence
  Description of Artificial Sequence: Synthetic peptide
CPPQSENKV

SEQ ID NO: 10482 - protein, 9 aa, Artificial Sequence
  Description of Artificial Sequence: Synthetic peptide
CPPRRYVNG

SEQ ID NO: 10483 - protein, 9 aa, Artificial Sequence
  Description of Artificial Sequence: Synthetic peptide
CPQCMQGAS

SEQ ID NO: 10484 - protein, 9 aa, Artificial Sequence
  Description of Artificial Sequence: Synthetic peptide
CPQMPWLHF

SEQ ID NO: 10485 - protein, 9 aa, Artificial Sequence
  Description of Artificial Sequence: Synthetic peptide
CPRQLYHWQ

SEQ ID NO: 10486 - protein, 9 aa, Artificial Sequence
  Description of Artificial Sequence: Synthetic peptide
CPSCEISVP

SEQ ID NO: 10487 - protein, 9 aa, Artificial Sequence
  Description of Artificial Sequence: Synthetic peptide
CPSECDNLK

SEQ ID NO: 10488 - protein, 9 aa, Artificial Sequence
  Description of Artificial Sequence: Synthetic peptide
CPSKQTRNP

SEQ ID NO: 10489 - protein, 9 aa, Artificial Sequence
  Description of Artificial Sequence: Synthetic peptide
CPTQLYLHN

SEQ ID NO: 10490 - protein, 9 aa, Artificial Sequence
  Description of Artificial Sequence: Synthetic peptide
CPVCEDMPL

SEQ ID NO: 10491 - protein, 9 aa, Artificial Sequence
  Description of Artificial Sequence: Synthetic peptide
CPVLFTHME

SEQ ID NO: 10492 - protein, 9 aa, Artificial Sequence
  Description of Artificial Sequence: Synthetic peptide
CPWLELCYH

SEQ ID NO: 10493 - protein, 9 aa, Artificial Sequence
  Description of Artificial Sequence: Synthetic peptide
CPYCDQEGH

SEQ ID NO: 10494 - protein, 9 aa, Artificial Sequence
  Description of Artificial Sequence: Synthetic peptide
DPAGDLMQG

SEQ ID NO: 10495 - protein, 9 aa, Artificial Sequence
  Description of Artificial Sequence: Synthetic peptide
DPCNVDPGF

SEQ ID NO: 10496 - protein, 9 aa, Artificial Sequence
  Description of Artificial Sequence: Synthetic peptide
DPCTCHTAK

SEQ ID NO: 10497 - protein, 9 aa, Artificial Sequence
  Description of Artificial Sequence: Synthetic peptide
DPDPVDMYA

SEQ ID NO: 10498 - protein, 9 aa, Artificial Sequence
  Description of Artificial Sequence: Synthetic peptide
DPGAPGPKA

SEQ ID NO: 10499 - protein, 9 aa, Artificial Sequence
  Description of Artificial Sequence: Synthetic peptide
DPHCIPTWK

SEQ ID NO: 10500 - protein, 9 aa, Artificial Sequence
  Description of Artificial Sequence: Synthetic peptide
DPHCVKNNC

SEQ ID NO: 10501 - protein, 9 aa, Artificial Sequence
  Description of Artificial Sequence: Synthetic peptide
DPICVVWTG

SEQ ID NO: 10502 - protein, 9 aa, Artificial Sequence
  Description of Artificial Sequence: Synthetic peptide
DPIHAHVEC

SEQ ID NO: 10503 - protein, 9 aa, Artificial Sequence
  Description of Artificial Sequence: Synthetic peptide
DPKHYNETM

SEQ ID NO: 10504 - protein, 9 aa, Artificial Sequence
  Description of Artificial Sequence: Synthetic peptide
DPKICWQER

SEQ ID NO: 10505 - protein, 9 aa, Artificial Sequence
  Description of Artificial Sequence: Synthetic peptide
DPKSCPRRE

SEQ ID NO: 10506 - protein, 9 aa, Artificial Sequence
  Description of Artificial Sequence: Synthetic peptide
DPKSGFNGT

SEQ ID NO: 10507 - protein, 9 aa, Artificial Sequence
  Description of Artificial Sequence: Synthetic peptide
DPMCFHAYQ

SEQ ID NO: 10508 - protein, 9 aa, Artificial Sequence
  Description of Artificial Sequence: Synthetic peptide
DPMQMHRSG

SEQ ID NO: 10509 - protein, 9 aa, Artificial Sequence
  Description of Artificial Sequence: Synthetic peptide
DPPKCYRYE

SEQ ID NO: 10510 - protein, 9 aa, Artificial Sequence
  Description of Artificial Sequence: Synthetic peptide
DPPNTSFFH

SEQ ID NO: 10511 - protein, 9 aa, Artificial Sequence
  Description of Artificial Sequence: Synthetic peptide
DPPRCDMQK

SEQ ID NO: 10512 - protein, 9 aa, Artificial Sequence
  Description of Artificial Sequence: Synthetic peptide
DPPSPVMCG

SEQ ID NO: 10513 - protein, 9 aa, Artificial Sequence
  Description of Artificial Sequence: Synthetic peptide
DPQLFCSDL

SEQ ID NO: 10514 - protein, 9 aa, Artificial Sequence
  Description of Artificial Sequence: Synthetic peptide
DPRMGGSVN

SEQ ID NO: 10515 - protein, 9 aa, Artificial Sequence
  Description of Artificial Sequence: Synthetic peptide
DPSYNERHR

SEQ ID NO: 10516 - protein, 9 aa, Artificial Sequence
  Description of Artificial Sequence: Synthetic peptide
EPCHWMHEF

SEQ ID NO: 10517 - protein, 9 aa, Artificial Sequence
  Description of Artificial Sequence: Synthetic peptide
EPDQMQERL

SEQ ID NO: 10518 - protein, 9 aa, Artificial Sequence
  Description of Artificial Sequence: Synthetic peptide
EPDQPRWDS

SEQ ID NO: 10519 - protein, 9 aa, Artificial Sequence
  Description of Artificial Sequence: Synthetic peptide
EPECTEFKV

SEQ ID NO: 10520 - protein, 9 aa, Artificial Sequence
  Description of Artificial Sequence: Synthetic peptide
EPFPHVMWG

SEQ ID NO: 10521 - protein, 9 aa, Artificial Sequence
  Description of Artificial Sequence: Synthetic peptide
EPGIVHWYD

SEQ ID NO: 10522 - protein, 9 aa, Artificial Sequence
  Description of Artificial Sequence: Synthetic peptide
EPGYYDGGN

SEQ ID NO: 10523 - protein, 9 aa, Artificial Sequence
  Description of Artificial Sequence: Synthetic peptide
EPHKYNQPS

SEQ ID NO: 10524 - protein, 9 aa, Artificial Sequence
  Description of Artificial Sequence: Synthetic peptide
EPHLQPHQK

SEQ ID NO: 10525 - protein, 9 aa, Artificial Sequence
  Description of Artificial Sequence: Synthetic peptide
EPHLTAVPT

SEQ ID NO: 10526 - protein, 9 aa, Artificial Sequence
  Description of Artificial Sequence: Synthetic peptide
EPKNYSERH

SEQ ID NO: 10527 - protein, 9 aa, Artificial Sequence
  Description of Artificial Sequence: Synthetic peptide
EPLKYNHES

SEQ ID NO: 10528 - protein, 9 aa, Artificial Sequence
  Description of Artificial Sequence: Synthetic peptide
EPLQFMELM

SEQ ID NO: 10529 - protein, 9 aa, Artificial Sequence
  Description of Artificial Sequence: Synthetic peptide
EPMRLGEWS

SEQ ID NO: 10530 - protein, 9 aa, Artificial Sequence
  Description of Artificial Sequence: Synthetic peptide
EPPVCQGNE

SEQ ID NO: 10531 - protein, 9 aa, Artificial Sequence
  Description of Artificial Sequence: Synthetic peptide
EPRRVDDQQ

SEQ ID NO: 10532 - protein, 9 aa, Artificial Sequence
  Description of Artificial Sequence: Synthetic peptide
EPVMVRMQF

SEQ ID NO: 10533 - protein, 9 aa, Artificial Sequence
  Description of Artificial Sequence: Synthetic peptide
FPALIKPHE

SEQ ID NO: 10534 - protein, 9 aa, Artificial Sequence
  Description of Artificial Sequence: Synthetic peptide
FPASPDILI

SEQ ID NO: 10535 - protein, 9 aa, Artificial Sequence
  Description of Artificial Sequence: Synthetic peptide
FPCGIVWTH

SEQ ID NO: 10536 - protein, 9 aa, Artificial Sequence
  Description of Artificial Sequence: Synthetic peptide
FPCQNGPHN

SEQ ID NO: 10537 - protein, 9 aa, Artificial Sequence
  Description of Artificial Sequence: Synthetic peptide
FPDRMDYVE

SEQ ID NO: 10538 - protein, 9 aa, Artificial Sequence
  Description of Artificial Sequence: Synthetic peptide
FPGGQKPCL

SEQ ID NO: 10539 - protein, 9 aa, Artificial Sequence
  Description of Artificial Sequence: Synthetic peptide
FPHFTCWCD

SEQ ID NO: 10540 - protein, 9 aa, Artificial Sequence
  Description of Artificial Sequence: Synthetic peptide
FPHGYAMIW

SEQ ID NO: 10541 - protein, 9 aa, Artificial Sequence
  Description of Artificial Sequence: Synthetic peptide
FPIQGNHFP

SEQ ID NO: 10542 - protein, 9 aa, Artificial Sequence
  Description of Artificial Sequence: Synthetic peptide
FPKAPKYYL

SEQ ID NO: 10543 - protein, 9 aa, Artificial Sequence
  Description of Artificial Sequence: Synthetic peptide
FPKNNLTKC

SEQ ID NO: 10544 - protein, 9 aa, Artificial Sequence
  Description of Artificial Sequence: Synthetic peptide
FPLCVDPGP

SEQ ID NO: 10545 - protein, 9 aa, Artificial Sequence
  Description of Artificial Sequence: Synthetic peptide
FPNIDNPKA

SEQ ID NO: 10546 - protein, 9 aa, Artificial Sequence
  Description of Artificial Sequence: Synthetic peptide
FPPPIHLAI

SEQ ID NO: 10547 - protein, 9 aa, Artificial Sequence
  Description of Artificial Sequence: Synthetic peptide
FPPQQEFIH

SEQ ID NO: 10548 - protein, 9 aa, Artificial Sequence
  Description of Artificial Sequence: Synthetic peptide
FPQWGKEPI

SEQ ID NO: 10549 - protein, 9 aa, Artificial Sequence
  Description of Artificial Sequence: Synthetic peptide
FPRTTNTRV

SEQ ID NO: 10550 - protein, 9 aa, Artificial Sequence
  Description of Artificial Sequence: Synthetic peptide
FPSHDDFLG

SEQ ID NO: 10551 - protein, 9 aa, Artificial Sequence
  Description of Artificial Sequence: Synthetic peptide
FPVTCGTVF

SEQ ID NO: 10552 - protein, 9 aa, Artificial Sequence
  Description of Artificial Sequence: Synthetic peptide
FPWYSLILT

SEQ ID NO: 10553 - protein, 9 aa, Artificial Sequence
  Description of Artificial Sequence: Synthetic peptide
FPYMAEQYR

SEQ ID NO: 10554 - protein, 9 aa, Artificial Sequence
  Description of Artificial Sequence: Synthetic peptide
FPYWDIDDT

SEQ ID NO: 10555 - protein, 9 aa, Artificial Sequence
  Description of Artificial Sequence: Synthetic peptide
GPCMLYEMC

SEQ ID NO: 10556 - protein, 9 aa, Artificial Sequence
  Description of Artificial Sequence: Synthetic peptide
GPDPWSQWW

SEQ ID NO: 10557 - protein, 9 aa, Artificial Sequence
  Description of Artificial Sequence: Synthetic peptide
GPDTEYRGC

SEQ ID NO: 10558 - protein, 9 aa, Artificial Sequence
  Description of Artificial Sequence: Synthetic peptide
GPFADPPAT

SEQ ID NO: 10559 - protein, 9 aa, Artificial Sequence
  Description of Artificial Sequence: Synthetic peptide
GPFLSVPAH

SEQ ID NO: 10560 - protein, 9 aa, Artificial Sequence
  Description of Artificial Sequence: Synthetic peptide
GPFRFEWEW

SEQ ID NO: 10561 - protein, 9 aa, Artificial Sequence
  Description of Artificial Sequence: Synthetic peptide
GPGTLRHLL

SEQ ID NO: 10562 - protein, 9 aa, Artificial Sequence
  Description of Artificial Sequence: Synthetic peptide
GPHWYWHDM

SEQ ID NO: 10563 - protein, 9 aa, Artificial Sequence
  Description of Artificial Sequence: Synthetic peptide
GPINPYAHG

SEQ ID NO: 10564 - protein, 9 aa, Artificial Sequence
  Description of Artificial Sequence: Synthetic peptide
GPLSKHFDV

SEQ ID NO: 10565 - protein, 9 aa, Artificial Sequence
  Description of Artificial Sequence: Synthetic peptide
GPMHNTGPP

SEQ ID NO: 10566 - protein, 9 aa, Artificial Sequence
  Description of Artificial Sequence: Synthetic peptide
GPPPSDLRS

SEQ ID NO: 10567 - protein, 9 aa, Artificial Sequence
  Description of Artificial Sequence: Synthetic peptide
GPPWKHCDA

SEQ ID NO: 10568 - protein, 9 aa, Artificial Sequence
  Description of Artificial Sequence: Synthetic peptide
GPSCYLDYW

SEQ ID NO: 10569 - protein, 9 aa, Artificial Sequence
  Description of Artificial Sequence: Synthetic peptide
GPTIWIHTY

SEQ ID NO: 10570 - protein, 9 aa, Artificial Sequence
  Description of Artificial Sequence: Synthetic peptide
GPTIYQYMQ

SEQ ID NO: 10571 - protein, 9 aa, Artificial Sequence
  Description of Artificial Sequence: Synthetic peptide
GPTKLNYNN

SEQ ID NO: 10572 - protein, 9 aa, Artificial Sequence
  Description of Artificial Sequence: Synthetic peptide
GPVVPCNSW

SEQ ID NO: 10573 - protein, 9 aa, Artificial Sequence
  Description of Artificial Sequence: Synthetic peptide
GPVWEFEWM

SEQ ID NO: 10574 - protein, 9 aa, Artificial Sequence
  Description of Artificial Sequence: Synthetic peptide
GPWHACKIN

SEQ ID NO: 10575 - protein, 9 aa, Artificial Sequence
  Description of Artificial Sequence: Synthetic peptide
HPCCDRYLA

SEQ ID NO: 10576 - protein, 9 aa, Artificial Sequence
  Description of Artificial Sequence: Synthetic peptide
HPDAPGPIQ

SEQ ID NO: 10577 - protein, 9 aa, Artificial Sequence
  Description of Artificial Sequence: Synthetic peptide
HPDVRNYEN

SEQ ID NO: 10578 - protein, 9 aa, Artificial Sequence
  Description of Artificial Sequence: Synthetic peptide
HPEVDSSGA

SEQ ID NO: 10579 - protein, 9 aa, Artificial Sequence
  Description of Artificial Sequence: Synthetic peptide
HPGCEYSWE

SEQ ID NO: 10580 - protein, 9 aa, Artificial Sequence
  Description of Artificial Sequence: Synthetic peptide
HPGIEVDRG

SEQ ID NO: 10581 - protein, 9 aa, Artificial Sequence
  Description of Artificial Sequence: Synthetic peptide
HPGWTHAVF

SEQ ID NO: 10582 - protein, 9 aa, Artificial Sequence
  Description of Artificial Sequence: Synthetic peptide
HPHDVFHET

SEQ ID NO: 10583 - protein, 9 aa, Artificial Sequence
  Description of Artificial Sequence: Synthetic peptide
HPILPAQYF

SEQ ID NO: 10584 - protein, 9 aa, Artificial Sequence
  Description of Artificial Sequence: Synthetic peptide
HPISPWQWL

SEQ ID NO: 10585 - protein, 9 aa, Artificial Sequence
  Description of Artificial Sequence: Synthetic peptide
HPLSRGSES

SEQ ID NO: 10586 - protein, 9 aa, Artificial Sequence
  Description of Artificial Sequence: Synthetic peptide
HPMFEAYQN

SEQ ID NO: 10587 - protein, 9 aa, Artificial Sequence
  Description of Artificial Sequence: Synthetic peptide
HPNFIWCNH

SEQ ID NO: 10588 - protein, 9 aa, Artificial Sequence
  Description of Artificial Sequence: Synthetic peptide
HPNGNEREH

SEQ ID NO: 10589 - protein, 9 aa, Artificial Sequence
  Description of Artificial Sequence: Synthetic peptide
HPNPWGVFW

SEQ ID NO: 10590 - protein, 9 aa, Artificial Sequence
  Description of Artificial Sequence: Synthetic peptide
HPRFNRLQV

SEQ ID NO: 10591 - protein, 9 aa, Artificial Sequence
  Description of Artificial Sequence: Synthetic peptide
HPSFIKCQV

SEQ ID NO: 10592 - protein, 9 aa, Artificial Sequence
  Description of Artificial Sequence: Synthetic peptide
HPYLCTIRI

SEQ ID NO: 10593 - protein, 9 aa, Artificial Sequence
  Description of Artificial Sequence: Synthetic peptide
IPDAWWANM

SEQ ID NO: 10594 - protein, 9 aa, Artificial Sequence
  Description of Artificial Sequence: Synthetic peptide
IPHRNIHPS

SEQ ID NO: 10595 - protein, 9 aa, Artificial Sequence
  Description of Artificial Sequence: Synthetic peptide
IPLWETMNM

SEQ ID NO: 10596 - protein, 9 aa, Artificial Sequence
  Description of Artificial Sequence: Synthetic peptide
IPNDRDRCA

SEQ ID NO: 10597 - protein, 9 aa, Artificial Sequence
  Description of Artificial Sequence: Synthetic peptide
IPRVHWKAE

SEQ ID NO: 10598 - protein, 9 aa, Artificial Sequence
  Description of Artificial Sequence: Synthetic peptide
IPTFRTMKI

SEQ ID NO: 10599 - protein, 9 aa, Artificial Sequence
  Description of Artificial Sequence: Synthetic peptide
IPWFDFAME

SEQ ID NO: 10600 - protein, 9 aa, Artificial Sequence
  Description of Artificial Sequence: Synthetic peptide
KPAPWMRME

SEQ ID NO: 10601 - protein, 9 aa, Artificial Sequence
  Description of Artificial Sequence: Synthetic peptide
KPCPPHAYV

SEQ ID NO: 10602 - protein, 9 aa, Artificial Sequence
  Description of Artificial Sequence: Synthetic peptide
KPEAWAVCG

SEQ ID NO: 10603 - protein, 9 aa, Artificial Sequence
  Description of Artificial Sequence: Synthetic peptide
KPESKMLSE

SEQ ID NO: 10604 - protein, 9 aa, Artificial Sequence
  Description of Artificial Sequence: Synthetic peptide
KPFVSECTE

SEQ ID NO: 10605 - protein, 9 aa, Artificial Sequence
  Description of Artificial Sequence: Synthetic peptide
KPGFRYFAE

SEQ ID NO: 10606 - protein, 9 aa, Artificial Sequence
  Description of Artificial Sequence: Synthetic peptide
KPGTVKDCD

SEQ ID NO: 10607 - protein, 9 aa, Artificial Sequence
  Description of Artificial Sequence: Synthetic peptide
KPILMSEEA

SEQ ID NO: 10608 - protein, 9 aa, Artificial Sequence
  Description of Artificial Sequence: Synthetic peptide
KPITEGRRD

SEQ ID NO: 10609 - protein, 9 aa, Artificial Sequence
  Description of Artificial Sequence: Synthetic peptide
KPKCCQYNW

SEQ ID NO: 10610 - protein, 9 aa, Artificial Sequence
  Description of Artificial Sequence: Synthetic peptide
KPMCDGVAY

SEQ ID NO: 10611 - protein, 9 aa, Artificial Sequence
  Description of Artificial Sequence: Synthetic peptide
KPMCLYVLT

SEQ ID NO: 10612 - protein, 9 aa, Artificial Sequence
  Description of Artificial Sequence: Synthetic peptide
KPNDCLREG

SEQ ID NO: 10613 - protein, 9 aa, Artificial Sequence
  Description of Artificial Sequence: Synthetic peptide
KPPMPTNTG

SEQ ID NO: 10614 - protein, 9 aa, Artificial Sequence
  Description of Artificial Sequence: Synthetic peptide
KPPYSCREQ

SEQ ID NO: 10615 - protein, 9 aa, Artificial Sequence
  Description of Artificial Sequence: Synthetic peptide
KPQHENKQL

SEQ ID NO: 10616 - protein, 9 aa, Artificial Sequence
  Description of Artificial Sequence: Synthetic peptide
KPSMYPRNS

SEQ ID NO: 10617 - protein, 9 aa, Artificial Sequence
  Description of Artificial Sequence: Synthetic peptide
KPTDMVGAW

SEQ ID NO: 10618 - protein, 9 aa, Artificial Sequence
  Description of Artificial Sequence: Synthetic peptide
KPTQIGGEH

SEQ ID NO: 10619 - protein, 9 aa, Artificial Sequence
  Description of Artificial Sequence: Synthetic peptide
KPVEPTTNP

SEQ ID NO: 10620 - protein, 9 aa, Artificial Sequence
  Description of Artificial Sequence: Synthetic peptide
LPAAYFWGA

SEQ ID NO: 10621 - protein, 9 aa, Artificial Sequence
  Description of Artificial Sequence: Synthetic peptide
LPAWYRARC

SEQ ID NO: 10622 - protein, 9 aa, Artificial Sequence
  Description of Artificial Sequence: Synthetic peptide
LPIEQQKSW

SEQ ID NO: 10623 - protein, 9 aa, Artificial Sequence
  Description of Artificial Sequence: Synthetic peptide
LPIESEGEI

SEQ ID NO: 10624 - protein, 9 aa, Artificial Sequence
  Description of Artificial Sequence: Synthetic peptide
LPLGQADEA

SEQ ID NO: 10625 - protein, 9 aa, Artificial Sequence
  Description of Artificial Sequence: Synthetic peptide
LPLVYAKNW

SEQ ID NO: 10626 - protein, 9 aa, Artificial Sequence
  Description of Artificial Sequence: Synthetic peptide
LPLYFHEHY

SEQ ID NO: 10627 - protein, 9 aa, Artificial Sequence
  Description of Artificial Sequence: Synthetic peptide
LPMDEKEGA

SEQ ID NO: 10628 - protein, 9 aa, Artificial Sequence
  Description of Artificial Sequence: Synthetic peptide
LPMQCDETY

SEQ ID NO: 10629 - protein, 9 aa, Artificial Sequence
  Description of Artificial Sequence: Synthetic peptide
LPMVWGNPK

SEQ ID NO: 10630 - protein, 9 aa, Artificial Sequence
  Description of Artificial Sequence: Synthetic peptide
LPMYIEHMC

SEQ ID NO: 10631 - protein, 9 aa, Artificial Sequence
  Description of Artificial Sequence: Synthetic peptide
LPNPVNATQ

SEQ ID NO: 10632 - protein, 9 aa, Artificial Sequence
  Description of Artificial Sequence: Synthetic peptide
LPNWFCRNY

SEQ ID NO: 10633 - protein, 9 aa, Artificial Sequence
  Description of Artificial Sequence: Synthetic peptide
LPPAHMFYC

SEQ ID NO: 10634 - protein, 9 aa, Artificial Sequence
  Description of Artificial Sequence: Synthetic peptide
LPQHYGIWH

SEQ ID NO: 10635 - protein, 9 aa, Artificial Sequence
  Description of Artificial Sequence: Synthetic peptide
LPQPYPDNY

SEQ ID NO: 10636 - protein, 9 aa, Artificial Sequence
  Description of Artificial Sequence: Synthetic peptide
LPQRGTPIV

SEQ ID NO: 10637 - protein, 9 aa, Artificial Sequence
  Description of Artificial Sequence: Synthetic peptide
LPRHIYKST

SEQ ID NO: 10638 - protein, 9 aa, Artificial Sequence
  Description of Artificial Sequence: Synthetic peptide
LPSHELWTW

SEQ ID NO: 10639 - protein, 9 aa, Artificial Sequence
  Description of Artificial Sequence: Synthetic peptide
LPTSDCRAE

SEQ ID NO: 10640 - protein, 9 aa, Artificial Sequence
  Description of Artificial Sequence: Synthetic peptide
LPTYNKYVQ

SEQ ID NO: 10641 - protein, 9 aa, Artificial Sequence
  Description of Artificial Sequence: Synthetic peptide
MPAHANSTC

SEQ ID NO: 10642 - protein, 9 aa, Artificial Sequence
  Description of Artificial Sequence: Synthetic peptide
MPCTCSYPH

SEQ ID NO: 10643 - protein, 9 aa, Artificial Sequence
  Description of Artificial Sequence: Synthetic peptide
MPDNFGNGP

SEQ ID NO: 10644 - protein, 9 aa, Artificial Sequence
  Description of Artificial Sequence: Synthetic peptide
MPIMMNVSP

SEQ ID NO: 10645 - protein, 9 aa, Artificial Sequence
  Description of Artificial Sequence: Synthetic peptide
MPMDLNYIQ

SEQ ID NO: 10646 - protein, 9 aa, Artificial Sequence
  Description of Artificial Sequence: Synthetic peptide
MPMFCQIEQ

SEQ ID NO: 10647 - protein, 9 aa, Artificial Sequence
  Description of Artificial Sequence: Synthetic peptide
MPPFHENES

SEQ ID NO: 10648 - protein, 9 aa, Artificial Sequence
  Description of Artificial Sequence: Synthetic peptide
MPPPVQDWN

SEQ ID NO: 10649 - protein, 9 aa, Artificial Sequence
  Description of Artificial Sequence: Synthetic peptide
MPPVRLYSY

SEQ ID NO: 10650 - protein, 9 aa, Artificial Sequence
  Description of Artificial Sequence: Synthetic peptide
MPQDCGWNL

SEQ ID NO: 10651 - protein, 9 aa, Artificial Sequence
  Description of Artificial Sequence: Synthetic peptide
MPRDGTWWC

SEQ ID NO: 10652 - protein, 9 aa, Artificial Sequence
  Description of Artificial Sequence: Synthetic peptide
MPSHGYWYQ

SEQ ID NO: 10653 - protein, 9 aa, Artificial Sequence
  Description of Artificial Sequence: Synthetic peptide
MPSPYGEAY

SEQ ID NO: 10654 - protein, 9 aa, Artificial Sequence
  Description of Artificial Sequence: Synthetic peptide
MPSQGVIWH

SEQ ID NO: 10655 - protein, 9 aa, Artificial Sequence
  Description of Artificial Sequence: Synthetic peptide
MPSVWGPDM

SEQ ID NO: 10656 - protein, 9 aa, Artificial Sequence
  Description of Artificial Sequence: Synthetic peptide
MPTEYEAHG

SEQ ID NO: 10657 - protein, 9 aa, Artificial Sequence
  Description of Artificial Sequence: Synthetic peptide
MPTQAYMPQ

SEQ ID NO: 10658 - protein, 9 aa, Artificial Sequence
  Description of Artificial Sequence: Synthetic peptide
MPVDIANQM

SEQ ID NO: 10659 - protein, 9 aa, Artificial Sequence
  Description of Artificial Sequence: Synthetic peptide
MPWWYGCIC

SEQ ID NO: 10660 - protein, 9 aa, Artificial Sequence
  Description of Artificial Sequence: Synthetic peptide
NPCFMIWYT

SEQ ID NO: 10661 - protein, 9 aa, Artificial Sequence
  Description of Artificial Sequence: Synthetic peptide
NPCMLQDHH

SEQ ID NO: 10662 - protein, 9 aa, Artificial Sequence
  Description of Artificial Sequence: Synthetic peptide
NPCTFWNNE

SEQ ID NO: 10663 - protein, 9 aa, Artificial Sequence
  Description of Artificial Sequence: Synthetic peptide
NPGHAWATM

SEQ ID NO: 10664 - protein, 9 aa, Artificial Sequence
  Description of Artificial Sequence: Synthetic peptide
NPGWWCRMW

SEQ ID NO: 10665 - protein, 9 aa, Artificial Sequence
  Description of Artificial Sequence: Synthetic peptide
NPIMYPCLS

SEQ ID NO: 10666 - protein, 9 aa, Artificial Sequence
  Description of Artificial Sequence: Synthetic peptide
NPLIRDMWT

SEQ ID NO: 10667 - protein, 9 aa, Artificial Sequence
  Description of Artificial Sequence: Synthetic peptide
NPLKLDYPE

SEQ ID NO: 10668 - protein, 9 aa, Artificial Sequence
  Description of Artificial Sequence: Synthetic peptide
NPPWLQPFS

SEQ ID NO: 10669 - protein, 9 aa, Artificial Sequence
  Description of Artificial Sequence: Synthetic peptide
NPQFLHFQI

SEQ ID NO: 10670 - protein, 9 aa, Artificial Sequence
  Description of Artificial Sequence: Synthetic peptide
NPRAMDAAH

SEQ ID NO: 10671 - protein, 9 aa, Artificial Sequence
  Description of Artificial Sequence: Synthetic peptide
NPRHDAGHS

SEQ ID NO: 10672 - protein, 9 aa, Artificial Sequence
  Description of Artificial Sequence: Synthetic peptide
NPSWNACNV

SEQ ID NO: 10673 - protein, 9 aa, Artificial Sequence
  Description of Artificial Sequence: Synthetic peptide
NPTMPGIRG

SEQ ID NO: 10674 - protein, 9 aa, Artificial Sequence
  Description of Artificial Sequence: Synthetic peptide
NPTQDFKVM

SEQ ID NO: 10675 - protein, 9 aa, Artificial Sequence
  Description of Artificial Sequence: Synthetic peptide
NPVTGEYSL

SEQ ID NO: 10676 - protein, 9 aa, Artificial Sequence
  Description of Artificial Sequence: Synthetic peptide
NPWHYTYAF

SEQ ID NO: 10677 - protein, 9 aa, Artificial Sequence
  Description of Artificial Sequence: Synthetic peptide
NPYLHMFNQ

SEQ ID NO: 10678 - protein, 9 aa, Artificial Sequence
  Description of Artificial Sequence: Synthetic peptide
NPYNQHCIC

SEQ ID NO: 10679 - protein, 9 aa, Artificial Sequence
  Description of Artificial Sequence: Synthetic peptide
NPYRTFTDG

SEQ ID NO: 10680 - protein, 9 aa, Artificial Sequence
  Description of Artificial Sequence: Synthetic peptide
QPAFEHAQV

SEQ ID NO: 10681 - protein, 9 aa, Artificial Sequence
  Description of Artificial Sequence: Synthetic peptide
QPAHMEVMY

SEQ ID NO: 10682 - protein, 9 aa, Artificial Sequence
  Description of Artificial Sequence: Synthetic peptide
QPAHPGTGL

SEQ ID NO: 10683 - protein, 9 aa, Artificial Sequence
  Description of Artificial Sequence: Synthetic peptide
QPAQYAVMH

SEQ ID NO: 10684 - protein, 9 aa, Artificial Sequence
  Description of Artificial Sequence: Synthetic peptide
QPCDITYQS

SEQ ID NO: 10685 - protein, 9 aa, Artificial Sequence
  Description of Artificial Sequence: Synthetic peptide
QPDCEWPHN

SEQ ID NO: 10686 - protein, 9 aa, Artificial Sequence
  Description of Artificial Sequence: Synthetic peptide
QPDMYDCYA

SEQ ID NO: 10687 - protein, 9 aa, Artificial Sequence
  Description of Artificial Sequence: Synthetic peptide
QPEFTYLQF

SEQ ID NO: 10688 - protein, 9 aa, Artificial Sequence
  Description of Artificial Sequence: Synthetic peptide
QPHSSVTLD

SEQ ID NO: 10689 - protein, 9 aa, Artificial Sequence
  Description of Artificial Sequence: Synthetic peptide
QPPAAAKQD

SEQ ID NO: 10690 - protein, 9 aa, Artificial Sequence
  Description of Artificial Sequence: Synthetic peptide
QPTDDVIQG

SEQ ID NO: 10691 - protein, 9 aa, Artificial Sequence
  Description of Artificial Sequence: Synthetic peptide
QPTQRMYHC

SEQ ID NO: 10692 - protein, 9 aa, Artificial Sequence
  Description of Artificial Sequence: Synthetic peptide
QPVTFYEKH

SEQ ID NO: 10693 - protein, 9 aa, Artificial Sequence
  Description of Artificial Sequence: Synthetic peptide
QPVWFPKCW

SEQ ID NO: 10694 - protein, 9 aa, Artificial Sequence
  Description of Artificial Sequence: Synthetic peptide
QPWMVWNSH

SEQ ID NO: 10695 - protein, 9 aa, Artificial Sequence
  Description of Artificial Sequence: Synthetic peptide
QPWMYVMGS

SEQ ID NO: 10696 - protein, 9 aa, Artificial Sequence
  Description of Artificial Sequence: Synthetic peptide
QPWTFWWNR

SEQ ID NO: 10697 - protein, 9 aa, Artificial Sequence
  Description of Artificial Sequence: Synthetic peptide
QPYCERTGI

SEQ ID NO: 10698 - protein, 9 aa, Artificial Sequence
  Description of Artificial Sequence: Synthetic peptide
RPAVDDEEC

SEQ ID NO: 10699 - protein, 9 aa, Artificial Sequence
  Description of Artificial Sequence: Synthetic peptide
RPCPNMTDG

SEQ ID NO: 10700 - protein, 9 aa, Artificial Sequence
  Description of Artificial Sequence: Synthetic peptide
RPDVRNELC

SEQ ID NO: 10701 - protein, 9 aa, Artificial Sequence
  Description of Artificial Sequence: Synthetic peptide
RPELGGQQT

SEQ ID NO: 10702 - protein, 9 aa, Artificial Sequence
  Description of Artificial Sequence: Synthetic peptide
RPETTAERP

SEQ ID NO: 10703 - protein, 9 aa, Artificial Sequence
  Description of Artificial Sequence: Synthetic peptide
RPHHFWVPF

SEQ ID NO: 10704 - protein, 9 aa, Artificial Sequence
  Description of Artificial Sequence: Synthetic peptide
RPKECEQMW

SEQ ID NO: 10705 - protein, 9 aa, Artificial Sequence
  Description of Artificial Sequence: Synthetic peptide
RPLDTSQED

SEQ ID NO: 10706 - protein, 9 aa, Artificial Sequence
  Description of Artificial Sequence: Synthetic peptide
RPMFGAVAG

SEQ ID NO: 10707 - protein, 9 aa, Artificial Sequence
  Description of Artificial Sequence: Synthetic peptide
RPMHGDYDD

SEQ ID NO: 10708 - protein, 9 aa, Artificial Sequence
  Description of Artificial Sequence: Synthetic peptide
RPNCVMYDK

SEQ ID NO: 10709 - protein, 9 aa, Artificial Sequence
  Description of Artificial Sequence: Synthetic peptide
RPPDEIWGH

SEQ ID NO: 10710 - protein, 9 aa, Artificial Sequence
  Description of Artificial Sequence: Synthetic peptide
RPRDNGVEG

SEQ ID NO: 10711 - protein, 9 aa, Artificial Sequence
  Description of Artificial Sequence: Synthetic peptide
RPWSSEFRV

SEQ ID NO: 10712 - protein, 9 aa, Artificial Sequence
  Description of Artificial Sequence: Synthetic peptide
SPAEIPSIF

SEQ ID NO: 10713 - protein, 9 aa, Artificial Sequence
  Description of Artificial Sequence: Synthetic peptide
SPCPNGVRQ

SEQ ID NO: 10714 - protein, 9 aa, Artificial Sequence
  Description of Artificial Sequence: Synthetic peptide
SPDVGWTES

SEQ ID NO: 10715 - protein, 9 aa, Artificial Sequence
  Description of Artificial Sequence: Synthetic peptide
SPEVTEYGF

SEQ ID NO: 10716 - protein, 9 aa, Artificial Sequence
  Description of Artificial Sequence: Synthetic peptide
SPFMWWRWW

SEQ ID NO: 10717 - protein, 9 aa, Artificial Sequence
  Description of Artificial Sequence: Synthetic peptide
SPGFILGGY

SEQ ID NO: 10718 - protein, 9 aa, Artificial Sequence
  Description of Artificial Sequence: Synthetic peptide
SPGKFWHPC

SEQ ID NO: 10719 - protein, 9 aa, Artificial Sequence
  Description of Artificial Sequence: Synthetic peptide
SPHFQKHPS

SEQ ID NO: 10720 - protein, 9 aa, Artificial Sequence
  Description of Artificial Sequence: Synthetic peptide
SPIRIDWQG

SEQ ID NO: 10721 - protein, 9 aa, Artificial Sequence
  Description of Artificial Sequence: Synthetic peptide
SPISDLRNC

SEQ ID NO: 10722 - protein, 9 aa, Artificial Sequence
  Description of Artificial Sequence: Synthetic peptide
SPIWEGERT

SEQ ID NO: 10723 - protein, 9 aa, Artificial Sequence
  Description of Artificial Sequence: Synthetic peptide
SPKKAEQAI

SEQ ID NO: 10724 - protein, 9 aa, Artificial Sequence
  Description of Artificial Sequence: Synthetic peptide
SPLHVHWQS

SEQ ID NO: 10725 - protein, 9 aa, Artificial Sequence
  Description of Artificial Sequence: Synthetic peptide
SPLISVLEG

SEQ ID NO: 10726 - protein, 9 aa, Artificial Sequence
  Description of Artificial Sequence: Synthetic peptide
SPLQNYEER

SEQ ID NO: 10727 - protein, 9 aa, Artificial Sequence
  Description of Artificial Sequence: Synthetic peptide
SPMDTTEPK

SEQ ID NO: 10728 - protein, 9 aa, Artificial Sequence
  Description of Artificial Sequence: Synthetic peptide
SPMQKQKVS

SEQ ID NO: 10729 - protein, 9 aa, Artificial Sequence
  Description of Artificial Sequence: Synthetic peptide
SPQTCSFPT

SEQ ID NO: 10730 - protein, 9 aa, Artificial Sequence
  Description of Artificial Sequence: Synthetic peptide
SPRCMTNGG

SEQ ID NO: 10731 - protein, 9 aa, Artificial Sequence
  Description of Artificial Sequence: Synthetic peptide
SPSGIMEGN

SEQ ID NO: 10732 - protein, 9 aa, Artificial Sequence
  Description of Artificial Sequence: Synthetic peptide
SPYQCPQAS

SEQ ID NO: 10733 - protein, 9 aa, Artificial Sequence
  Description of Artificial Sequence: Synthetic peptide
TPDHKTRAH

SEQ ID NO: 10734 - protein, 9 aa, Artificial Sequence
  Description of Artificial Sequence: Synthetic peptide
TPDPDLNNR

SEQ ID NO: 10735 - protein, 9 aa, Artificial Sequence
  Description of Artificial Sequence: Synthetic peptide
TPGSDMSMV

SEQ ID NO: 10736 - protein, 9 aa, Artificial Sequence
  Description of Artificial Sequence: Synthetic peptide
TPHSSMKVG

SEQ ID NO: 10737 - protein, 9 aa, Artificial Sequence
  Description of Artificial Sequence: Synthetic peptide
TPKLEFPVD

SEQ ID NO: 10738 - protein, 9 aa, Artificial Sequence
  Description of Artificial Sequence: Synthetic peptide
TPLLTSGHE

SEQ ID NO: 10739 - protein, 9 aa, Artificial Sequence
  Description of Artificial Sequence: Synthetic peptide
TPLMAYWIP

SEQ ID NO: 10740 - protein, 9 aa, Artificial Sequence
  Description of Artificial Sequence: Synthetic peptide
TPMDYEDQE

SEQ ID NO: 10741 - protein, 9 aa, Artificial Sequence
  Description of Artificial Sequence: Synthetic peptide
TPMFDRHSL

SEQ ID NO: 10742 - protein, 9 aa, Artificial Sequence
  Description of Artificial Sequence: Synthetic peptide
TPMLGMLWW

SEQ ID NO: 10743 - protein, 9 aa, Artificial Sequence
  Description of Artificial Sequence: Synthetic peptide
TPMWQASWQ

SEQ ID NO: 10744 - protein, 9 aa, Artificial Sequence
  Description of Artificial Sequence: Synthetic peptide
TPNCMGQRM

SEQ ID NO: 10745 - protein, 9 aa, Artificial Sequence
  Description of Artificial Sequence: Synthetic peptide
TPNVWEQQM

SEQ ID NO: 10746 - protein, 9 aa, Artificial Sequence
  Description of Artificial Sequence: Synthetic peptide
TPPHKCSVG

SEQ ID NO: 10747 - protein, 9 aa, Artificial Sequence
  Description of Artificial Sequence: Synthetic peptide
TPQCAMWNE

SEQ ID NO: 10748 - protein, 9 aa, Artificial Sequence
  Description of Artificial Sequence: Synthetic peptide
TPSQVASDD

SEQ ID NO: 10749 - protein, 9 aa, Artificial Sequence
  Description of Artificial Sequence: Synthetic peptide
TPSRNMVDL

SEQ ID NO: 10750 - protein, 9 aa, Artificial Sequence
  Description of Artificial Sequence: Synthetic peptide
TPYIRHHFE

SEQ ID NO: 10751 - protein, 9 aa, Artificial Sequence
  Description of Artificial Sequence: Synthetic peptide
TPYTWCWPD

SEQ ID NO: 10752 - protein, 9 aa, Artificial Sequence
  Description of Artificial Sequence: Synthetic peptide
VPCPKWSMI

SEQ ID NO: 10753 - protein, 9 aa, Artificial Sequence
  Description of Artificial Sequence: Synthetic peptide
VPEQGRWEA

SEQ ID NO: 10754 - protein, 9 aa, Artificial Sequence
  Description of Artificial Sequence: Synthetic peptide
VPKLLDTDQ

SEQ ID NO: 10755 - protein, 9 aa, Artificial Sequence
  Description of Artificial Sequence: Synthetic peptide
VPLLILNNN

SEQ ID NO: 10756 - protein, 9 aa, Artificial Sequence
  Description of Artificial Sequence: Synthetic peptide
VPLVSYSQQ

SEQ ID NO: 10757 - protein, 9 aa, Artificial Sequence
  Description of Artificial Sequence: Synthetic peptide
VPMMCQWSQ

SEQ ID NO: 10758 - protein, 9 aa, Artificial Sequence
  Description of Artificial Sequence: Synthetic peptide
VPQHKNEFQ

SEQ ID NO: 10759 - protein, 9 aa, Artificial Sequence
  Description of Artificial Sequence: Synthetic peptide
VPQWIDERW

SEQ ID NO: 10760 - protein, 9 aa, Artificial Sequence
  Description of Artificial Sequence: Synthetic peptide
VPRHWAGVR

SEQ ID NO: 10761 - protein, 9 aa, Artificial Sequence
  Description of Artificial Sequence: Synthetic peptide
VPRYNSDEQ

SEQ ID NO: 10762 - protein, 9 aa, Artificial Sequence
  Description of Artificial Sequence: Synthetic peptide
VPSCQCSES

SEQ ID NO: 10763 - protein, 9 aa, Artificial Sequence
  Description of Artificial Sequence: Synthetic peptide
VPTIKVTRA

SEQ ID NO: 10764 - protein, 9 aa, Artificial Sequence
  Description of Artificial Sequence: Synthetic peptide
VPTQSVKGC

SEQ ID NO: 10765 - protein, 9 aa, Artificial Sequence
  Description of Artificial Sequence: Synthetic peptide
VPTSYWCTN

SEQ ID NO: 10766 - protein, 9 aa, Artificial Sequence
  Description of Artificial Sequence: Synthetic peptide
VPWFVMLMM

SEQ ID NO: 10767 - protein, 9 aa, Artificial Sequence
  Description of Artificial Sequence: Synthetic peptide
VPWMVLDNN

SEQ ID NO: 10768 - protein, 9 aa, Artificial Sequence
  Description of Artificial Sequence: Synthetic peptide
WPALFVADA

SEQ ID NO: 10769 - protein, 9 aa, Artificial Sequence
  Description of Artificial Sequence: Synthetic peptide
WPDPFIHAT

SEQ ID NO: 10770 - protein, 9 aa, Artificial Sequence
  Description of Artificial Sequence: Synthetic peptide
WPEATHRFA

SEQ ID NO: 10771 - protein, 9 aa, Artificial Sequence
  Description of Artificial Sequence: Synthetic peptide
WPKYDMPLH

SEQ ID NO: 10772 - protein, 9 aa, Artificial Sequence
  Description of Artificial Sequence: Synthetic peptide
WPMCPVCYF

SEQ ID NO: 10773 - protein, 9 aa, Artificial Sequence
  Description of Artificial Sequence: Synthetic peptide
WPMTRTNGH

SEQ ID NO: 10774 - protein, 9 aa, Artificial Sequence
  Description of Artificial Sequence: Synthetic peptide
WPNYHSWYE

SEQ ID NO: 10775 - protein, 9 aa, Artificial Sequence
  Description of Artificial Sequence: Synthetic peptide
WPPNGKWFM

SEQ ID NO: 10776 - protein, 9 aa, Artificial Sequence
  Description of Artificial Sequence: Synthetic peptide
WPQRGTMDM

SEQ ID NO: 10777 - protein, 9 aa, Artificial Sequence
  Description of Artificial Sequence: Synthetic peptide
WPTGHCAYW

SEQ ID NO: 10778 - protein, 9 aa, Artificial Sequence
  Description of Artificial Sequence: Synthetic peptide
WPYYCCIEH

SEQ ID NO: 10779 - protein, 9 aa, Artificial Sequence
  Description of Artificial Sequence: Synthetic peptide
YPANKCEWE

SEQ ID NO: 10780 - protein, 9 aa, Artificial Sequence
  Description of Artificial Sequence: Synthetic peptide
YPASYDCHP

SEQ ID NO: 10781 - protein, 9 aa, Artificial Sequence
  Description of Artificial Sequence: Synthetic peptide
YPDTVQKSP

SEQ ID NO: 10782 - protein, 9 aa, Artificial Sequence
  Description of Artificial Sequence: Synthetic peptide
YPDWWEWHT

SEQ ID NO: 10783 - protein, 9 aa, Artificial Sequence
  Description of Artificial Sequence: Synthetic peptide
YPEGEMNYE

SEQ ID NO: 10784 - protein, 9 aa, Artificial Sequence
  Description of Artificial Sequence: Synthetic peptide
YPFQPIEEP

SEQ ID NO: 10785 - protein, 9 aa, Artificial Sequence
  Description of Artificial Sequence: Synthetic peptide
YPFWAGWGD

SEQ ID NO: 10786 - protein, 9 aa, Artificial Sequence
  Description of Artificial Sequence: Synthetic peptide
YPGMKICGH

SEQ ID NO: 10787 - protein, 9 aa, Artificial Sequence
  Description of Artificial Sequence: Synthetic peptide
YPIIMLPCR

SEQ ID NO: 10788 - protein, 9 aa, Artificial Sequence
  Description of Artificial Sequence: Synthetic peptide
YPMQGGIRW

SEQ ID NO: 10789 - protein, 9 aa, Artificial Sequence
  Description of Artificial Sequence: Synthetic peptide
YPNDAKHGN

SEQ ID NO: 10790 - protein, 9 aa, Artificial Sequence
  Description of Artificial Sequence: Synthetic peptide
YPNLHHSMM

SEQ ID NO: 10791 - protein, 9 aa, Artificial Sequence
  Description of Artificial Sequence: Synthetic peptide
YPSDGLFEQ

SEQ ID NO: 10792 - protein, 9 aa, Artificial Sequence
  Description of Artificial Sequence: Synthetic peptide
YPSGHKPYW

SEQ ID NO: 10793 - protein, 9 aa, Artificial Sequence
  Description of Artificial Sequence: Synthetic peptide
YPSINCPTN

SEQ ID NO: 10794 - protein, 9 aa, Artificial Sequence
  Description of Artificial Sequence: Synthetic peptide
YPSPPERLE

SEQ ID NO: 10795 - protein, 9 aa, Artificial Sequence
  Description of Artificial Sequence: Synthetic peptide
YPVNCTQKW

SEQ ID NO: 10796 - protein, 9 aa, Artificial Sequence
  Description of Artificial Sequence: Synthetic peptide
YPWENNAHL

SEQ ID NO: 10797 - protein, 9 aa, Artificial Sequence
  Description of Artificial Sequence: Synthetic peptide
YPWMTACHD

SEQ ID NO: 10798 - protein, 9 aa, Artificial Sequence
  Description of Artificial Sequence: Synthetic peptide
YPYICEFVW

SEQ ID NO: 10799 - protein, 9 aa, Artificial Sequence
  Description of Artificial Sequence: Synthetic peptide
YPYPRLWEC

SEQ ID NO: 10800 - protein, 9 aa, Artificial Sequence
  Description of Artificial Sequence: Synthetic peptide
NEPYCIWAY

SEQ ID NO: 10801 - protein, 9 aa, Artificial Sequence
  Description of Artificial Sequence: Synthetic peptide
GRPVMHRHS

SEQ ID NO: 10802 - protein, 9 aa, Artificial Sequence
  Description of Artificial Sequence: Synthetic peptide
DSPSNHPAV

SEQ ID NO: 10803 - protein, 9 aa, Artificial Sequence
  Description of Artificial Sequence: Synthetic peptide
YYPFPGPTD

SEQ ID NO: 10804 - protein, 9 aa, Artificial Sequence
  Description of Artificial Sequence: Synthetic peptide
AAPIPGKAF

SEQ ID NO: 10805 - protein, 9 aa, Artificial Sequence
  Description of Artificial Sequence: Synthetic peptide
AFPNVMYQN

SEQ ID NO: 10806 - protein, 9 aa, Artificial Sequence
  Description of Artificial Sequence: Synthetic peptide
AGPKMIEPW

SEQ ID NO: 10807 - protein, 9 aa, Artificial Sequence
  Description of Artificial Sequence: Synthetic peptide
AHPQQPHVT

SEQ ID NO: 10808 - protein, 9 aa, Artificial Sequence
  Description of Artificial Sequence: Synthetic peptide
AIPMIGSYC

SEQ ID NO: 10809 - protein, 9 aa, Artificial Sequence
  Description of Artificial Sequence: Synthetic peptide
AIPQEGVCC

SEQ ID NO: 10810 - protein, 9 aa, Artificial Sequence
  Description of Artificial Sequence: Synthetic peptide
AKPYKFSGE

SEQ ID NO: 10811 - protein, 9 aa, Artificial Sequence
  Description of Artificial Sequence: Synthetic peptide
AMPIVMWHT

SEQ ID NO: 10812 - protein, 9 aa, Artificial Sequence
  Description of Artificial Sequence: Synthetic peptide
ANPADWHWY

SEQ ID NO: 10813 - protein, 9 aa, Artificial Sequence
  Description of Artificial Sequence: Synthetic peptide
ANPFVLAPW

SEQ ID NO: 10814 - protein, 9 aa, Artificial Sequence
  Description of Artificial Sequence: Synthetic peptide
ARPWWMLEQ

SEQ ID NO: 10815 - protein, 9 aa, Artificial Sequence
  Description of Artificial Sequence: Synthetic peptide
ASPPDYKAQ

SEQ ID NO: 10816 - protein, 9 aa, Artificial Sequence
  Description of Artificial Sequence: Synthetic peptide
AVPQMTGWC

SEQ ID NO: 10817 - protein, 9 aa, Artificial Sequence
  Description of Artificial Sequence: Synthetic peptide
AYPHCEAVM

SEQ ID NO: 10818 - protein, 9 aa, Artificial Sequence
  Description of Artificial Sequence: Synthetic peptide
AYPSGIRAH

SEQ ID NO: 10819 - protein, 9 aa, Artificial Sequence
  Description of Artificial Sequence: Synthetic peptide
CCPVDNEFW

SEQ ID NO: 10820 - protein, 9 aa, Artificial Sequence
  Description of Artificial Sequence: Synthetic peptide
CDPPIDCYI

SEQ ID NO: 10821 - protein, 9 aa, Artificial Sequence
  Description of Artificial Sequence: Synthetic peptide
CDPSYELNI

SEQ ID NO: 10822 - protein, 9 aa, Artificial Sequence
  Description of Artificial Sequence: Synthetic peptide
CDPWHKYNG

SEQ ID NO: 10823 - protein, 9 aa, Artificial Sequence
  Description of Artificial Sequence: Synthetic peptide
CGPFRHQNG

SEQ ID NO: 10824 - protein, 9 aa, Artificial Sequence
  Description of Artificial Sequence: Synthetic peptide
CHPQEWHGQ

SEQ ID NO: 10825 - protein, 9 aa, Artificial Sequence
  Description of Artificial Sequence: Synthetic peptide
CIPDFISEY

SEQ ID NO: 10826 - protein, 9 aa, Artificial Sequence
  Description of Artificial Sequence: Synthetic peptide
CLPWVMSIA

SEQ ID NO: 10827 - protein, 9 aa, Artificial Sequence
  Description of Artificial Sequence: Synthetic peptide
CMPPDCKCP

SEQ ID NO: 10828 - protein, 9 aa, Artificial Sequence
  Description of Artificial Sequence: Synthetic peptide
CNPGWPKPG

SEQ ID NO: 10829 - protein, 9 aa, Artificial Sequence
  Description of Artificial Sequence: Synthetic peptide
CTPYPPRDQ

SEQ ID NO: 10830 - protein, 9 aa, Artificial Sequence
  Description of Artificial Sequence: Synthetic peptide
CVPNSHIWQ

SEQ ID NO: 10831 - protein, 9 aa, Artificial Sequence
  Description of Artificial Sequence: Synthetic peptide
CYPTLEKHA

SEQ ID NO: 10832 - protein, 9 aa, Artificial Sequence
  Description of Artificial Sequence: Synthetic peptide
DFPLNPVQT

SEQ ID NO: 10833 - protein, 9 aa, Artificial Sequence
  Description of Artificial Sequence: Synthetic peptide
DFPLQVTGY

SEQ ID NO: 10834 - protein, 9 aa, Artificial Sequence
  Description of Artificial Sequence: Synthetic peptide
DFPRNNAIM

SEQ ID NO: 10835 - protein, 9 aa, Artificial Sequence
  Description of Artificial Sequence: Synthetic peptide
DGPGTQCIK

SEQ ID NO: 10836 - protein, 9 aa, Artificial Sequence
  Description of Artificial Sequence: Synthetic peptide
DLPAGQRMF

SEQ ID NO: 10837 - protein, 9 aa, Artificial Sequence
  Description of Artificial Sequence: Synthetic peptide
DLPLPKLMQ

SEQ ID NO: 10838 - protein, 9 aa, Artificial Sequence
  Description of Artificial Sequence: Synthetic peptide
DNPGYLKEE

SEQ ID NO: 10839 - protein, 9 aa, Artificial Sequence
  Description of Artificial Sequence: Synthetic peptide
DSPNYVWTH

SEQ ID NO: 10840 - protein, 9 aa, Artificial Sequence
  Description of Artificial Sequence: Synthetic peptide
DTPEYAPSM

SEQ ID NO: 10841 - protein, 9 aa, Artificial Sequence
  Description of Artificial Sequence: Synthetic peptide
DTPLQYKAQ

SEQ ID NO: 10842 - protein, 9 aa, Artificial Sequence
  Description of Artificial Sequence: Synthetic peptide
DYPKGEKCD

SEQ ID NO: 10843 - protein, 9 aa, Artificial Sequence
  Description of Artificial Sequence: Synthetic peptide
EEPELQRLN

SEQ ID NO: 10844 - protein, 9 aa, Artificial Sequence
  Description of Artificial Sequence: Synthetic peptide
EHPPHAFAH

SEQ ID NO: 10845 - protein, 9 aa, Artificial Sequence
  Description of Artificial Sequence: Synthetic peptide
EKPLYYHHA

SEQ ID NO: 10846 - protein, 9 aa, Artificial Sequence
  Description of Artificial Sequence: Synthetic peptide
ELPATLFQF

SEQ ID NO: 10847 - protein, 9 aa, Artificial Sequence
  Description of Artificial Sequence: Synthetic peptide
ENPQFVRSI

SEQ ID NO: 10848 - protein, 9 aa, Artificial Sequence
  Description of Artificial Sequence: Synthetic peptide
ESPCHQNQG

SEQ ID NO: 10849 - protein, 9 aa, Artificial Sequence
  Description of Artificial Sequence: Synthetic peptide
EYPSYWSDG

SEQ ID NO: 10850 - protein, 9 aa, Artificial Sequence
  Description of Artificial Sequence: Synthetic peptide
EYPYDVPNF

SEQ ID NO: 10851 - protein, 9 aa, Artificial Sequence
  Description of Artificial Sequence: Synthetic peptide
FAPEICGCC

SEQ ID NO: 10852 - protein, 9 aa, Artificial Sequence
  Description of Artificial Sequence: Synthetic peptide
FDPVCKCMK

SEQ ID NO: 10853 - protein, 9 aa, Artificial Sequence
  Description of Artificial Sequence: Synthetic peptide
FEPQNPTFQ

SEQ ID NO: 10854 - protein, 9 aa, Artificial Sequence
  Description of Artificial Sequence: Synthetic peptide
FFPTMHARF

SEQ ID NO: 10855 - protein, 9 aa, Artificial Sequence
  Description of Artificial Sequence: Synthetic peptide
FIPCVISNQ

SEQ ID NO: 10856 - protein, 9 aa, Artificial Sequence
  Description of Artificial Sequence: Synthetic peptide
FLPFWKAFH

SEQ ID NO: 10857 - protein, 9 aa, Artificial Sequence
  Description of Artificial Sequence: Synthetic peptide
FLPTSKLHS

SEQ ID NO: 10858 - protein, 9 aa, Artificial Sequence
  Description of Artificial Sequence: Synthetic peptide
FLPTYDGMH

SEQ ID NO: 10859 - protein, 9 aa, Artificial Sequence
  Description of Artificial Sequence: Synthetic peptide
FNPPIRQLW

SEQ ID NO: 10860 - protein, 9 aa, Artificial Sequence
  Description of Artificial Sequence: Synthetic peptide
FQPFTSNLL

SEQ ID NO: 10861 - protein, 9 aa, Artificial Sequence
  Description of Artificial Sequence: Synthetic peptide
FQPYMTSTS

SEQ ID NO: 10862 - protein, 9 aa, Artificial Sequence
  Description of Artificial Sequence: Synthetic peptide
FRPIISMKR

SEQ ID NO: 10863 - protein, 9 aa, Artificial Sequence
  Description of Artificial Sequence: Synthetic peptide
FRPMITCWW

SEQ ID NO: 10864 - protein, 9 aa, Artificial Sequence
  Description of Artificial Sequence: Synthetic peptide
FSPPMVMKY

SEQ ID NO: 10865 - protein, 9 aa, Artificial Sequence
  Description of Artificial Sequence: Synthetic peptide
FSPYFMVPH

SEQ ID NO: 10866 - protein, 9 aa, Artificial Sequence
  Description of Artificial Sequence: Synthetic peptide
FTPDSLIVH

SEQ ID NO: 10867 - protein, 9 aa, Artificial Sequence
  Description of Artificial Sequence: Synthetic peptide
FTPECTRGM

SEQ ID NO: 10868 - protein, 9 aa, Artificial Sequence
  Description of Artificial Sequence: Synthetic peptide
FVPHDCNRD

SEQ ID NO: 10869 - protein, 9 aa, Artificial Sequence
  Description of Artificial Sequence: Synthetic peptide
GAPFDELPH

SEQ ID NO: 10870 - protein, 9 aa, Artificial Sequence
  Description of Artificial Sequence: Synthetic peptide
GCPLIVPDL

SEQ ID NO: 10871 - protein, 9 aa, Artificial Sequence
  Description of Artificial Sequence: Synthetic peptide
GDPLVIWLC

SEQ ID NO: 10872 - protein, 9 aa, Artificial Sequence
  Description of Artificial Sequence: Synthetic peptide
GFPREMYTE

SEQ ID NO: 10873 - protein, 9 aa, Artificial Sequence
  Description of Artificial Sequence: Synthetic peptide
GGPEKEAHR

SEQ ID NO: 10874 - protein, 9 aa, Artificial Sequence
  Description of Artificial Sequence: Synthetic peptide
GGPPIDEGN

SEQ ID NO: 10875 - protein, 9 aa, Artificial Sequence
  Description of Artificial Sequence: Synthetic peptide
GHPFKDYHS

SEQ ID NO: 10876 - protein, 9 aa, Artificial Sequence
  Description of Artificial Sequence: Synthetic peptide
GMPWEDISN

SEQ ID NO: 10877 - protein, 9 aa, Artificial Sequence
  Description of Artificial Sequence: Synthetic peptide
GNPCSPKIN

SEQ ID NO: 10878 - protein, 9 aa, Artificial Sequence
  Description of Artificial Sequence: Synthetic peptide
GNPKLLESF

SEQ ID NO: 10879 - protein, 9 aa, Artificial Sequence
  Description of Artificial Sequence: Synthetic peptide
GNPPTWLCP

SEQ ID NO: 10880 - protein, 9 aa, Artificial Sequence
  Description of Artificial Sequence: Synthetic peptide
GNPYMYPWH

SEQ ID NO: 10881 - protein, 9 aa, Artificial Sequence
  Description of Artificial Sequence: Synthetic peptide
GRPWDPYFE

SEQ ID NO: 10882 - protein, 9 aa, Artificial Sequence
  Description of Artificial Sequence: Synthetic peptide
GTPQWWNKG

SEQ ID NO: 10883 - protein, 9 aa, Artificial Sequence
  Description of Artificial Sequence: Synthetic peptide
GTPSMHMGI

SEQ ID NO: 10884 - protein, 9 aa, Artificial Sequence
  Description of Artificial Sequence: Synthetic peptide
GVPQDRIQE

SEQ ID NO: 10885 - protein, 9 aa, Artificial Sequence
  Description of Artificial Sequence: Synthetic peptide
HCPNQGRRS

SEQ ID NO: 10886 - protein, 9 aa, Artificial Sequence
  Description of Artificial Sequence: Synthetic peptide
HFPRSEAHR

SEQ ID NO: 10887 - protein, 9 aa, Artificial Sequence
  Description of Artificial Sequence: Synthetic peptide
HGPMEVMHE

SEQ ID NO: 10888 - protein, 9 aa, Artificial Sequence
  Description of Artificial Sequence: Synthetic peptide
HHPFAKPII

SEQ ID NO: 10889 - protein, 9 aa, Artificial Sequence
  Description of Artificial Sequence: Synthetic peptide
HIPQHSRMC

SEQ ID NO: 10890 - protein, 9 aa, Artificial Sequence
  Description of Artificial Sequence: Synthetic peptide
HKPEQMEAY

SEQ ID NO: 10891 - protein, 9 aa, Artificial Sequence
  Description of Artificial Sequence: Synthetic peptide
HKPKMWMYG

SEQ ID NO: 10892 - protein, 9 aa, Artificial Sequence
  Description of Artificial Sequence: Synthetic peptide
HNPLIRTMV

SEQ ID NO: 10893 - protein, 9 aa, Artificial Sequence
  Description of Artificial Sequence: Synthetic peptide
HNPLQENDC

SEQ ID NO: 10894 - protein, 9 aa, Artificial Sequence
  Description of Artificial Sequence: Synthetic peptide
HQPELMTDN

SEQ ID NO: 10895 - protein, 9 aa, Artificial Sequence
  Description of Artificial Sequence: Synthetic peptide
HRPDWNDGK

SEQ ID NO: 10896 - protein, 9 aa, Artificial Sequence
  Description of Artificial Sequence: Synthetic peptide
HRPPCEMGD

SEQ ID NO: 10897 - protein, 9 aa, Artificial Sequence
  Description of Artificial Sequence: Synthetic peptide
HYPAYQKAC

SEQ ID NO: 10898 - protein, 9 aa, Artificial Sequence
  Description of Artificial Sequence: Synthetic peptide
HYPWTPWTP

SEQ ID NO: 10899 - protein, 9 aa, Artificial Sequence
  Description of Artificial Sequence: Synthetic peptide
ICPTKGMEA

SEQ ID NO: 10900 - protein, 9 aa, Artificial Sequence
  Description of Artificial Sequence: Synthetic peptide
ICPVCSWDC

SEQ ID NO: 10901 - protein, 9 aa, Artificial Sequence
  Description of Artificial Sequence: Synthetic peptide
IDPEIYAWC

SEQ ID NO: 10902 - protein, 9 aa, Artificial Sequence
  Description of Artificial Sequence: Synthetic peptide
IDPLDGNHF

SEQ ID NO: 10903 - protein, 9 aa, Artificial Sequence
  Description of Artificial Sequence: Synthetic peptide
IHPQQWWDH

SEQ ID NO: 10904 - protein, 9 aa, Artificial Sequence
  Description of Artificial Sequence: Synthetic peptide
IIPHQNIMW

SEQ ID NO: 10905 - protein, 9 aa, Artificial Sequence
  Description of Artificial Sequence: Synthetic peptide
IKPEPMWMT

SEQ ID NO: 10906 - protein, 9 aa, Artificial Sequence
  Description of Artificial Sequence: Synthetic peptide
ILPPEKHQA

SEQ ID NO: 10907 - protein, 9 aa, Artificial Sequence
  Description of Artificial Sequence: Synthetic peptide
IMPNNLEMM

SEQ ID NO: 10908 - protein, 9 aa, Artificial Sequence
  Description of Artificial Sequence: Synthetic peptide
INPRKLSSK

SEQ ID NO: 10909 - protein, 9 aa, Artificial Sequence
  Description of Artificial Sequence: Synthetic peptide
IQPMYVIYQ

SEQ ID NO: 10910 - protein, 9 aa, Artificial Sequence
  Description of Artificial Sequence: Synthetic peptide
IQPWDYVRP

SEQ ID NO: 10911 - protein, 9 aa, Artificial Sequence
  Description of Artificial Sequence: Synthetic peptide
ISPLNICWF

SEQ ID NO: 10912 - protein, 9 aa, Artificial Sequence
  Description of Artificial Sequence: Synthetic peptide
ITPEVLKTT

SEQ ID NO: 10913 - protein, 9 aa, Artificial Sequence
  Description of Artificial Sequence: Synthetic peptide
KCPLGKPAS

SEQ ID NO: 10914 - protein, 9 aa, Artificial Sequence
  Description of Artificial Sequence: Synthetic peptide
KCPRGGMNC

SEQ ID NO: 10915 - protein, 9 aa, Artificial Sequence
  Description of Artificial Sequence: Synthetic peptide
KDPCCGCHN

SEQ ID NO: 10916 - protein, 9 aa, Artificial Sequence
  Description of Artificial Sequence: Synthetic peptide
KGPPHKDDQ

SEQ ID NO: 10917 - protein, 9 aa, Artificial Sequence
  Description of Artificial Sequence: Synthetic peptide
KHPNIWCAN

SEQ ID NO: 10918 - protein, 9 aa, Artificial Sequence
  Description of Artificial Sequence: Synthetic peptide
KLPDTYKNF

SEQ ID NO: 10919 - protein, 9 aa, Artificial Sequence
  Description of Artificial Sequence: Synthetic peptide
KMPPPAKDI

SEQ ID NO: 10920 - protein, 9 aa, Artificial Sequence
  Description of Artificial Sequence: Synthetic peptide
KTPHCIKHY

SEQ ID NO: 10921 - protein, 9 aa, Artificial Sequence
  Description of Artificial Sequence: Synthetic peptide
KVPVLTAGG

SEQ ID NO: 10922 - protein, 9 aa, Artificial Sequence
  Description of Artificial Sequence: Synthetic peptide
KWPTFKWPK

SEQ ID NO: 10923 - protein, 9 aa, Artificial Sequence
  Description of Artificial Sequence: Synthetic peptide
KYPEPGRGT

SEQ ID NO: 10924 - protein, 9 aa, Artificial Sequence
  Description of Artificial Sequence: Synthetic peptide
LAPQLGWRN

SEQ ID NO: 10925 - protein, 9 aa, Artificial Sequence
  Description of Artificial Sequence: Synthetic peptide
LCPGEWLVI

SEQ ID NO: 10926 - protein, 9 aa, Artificial Sequence
  Description of Artificial Sequence: Synthetic peptide
LEPKDLAAP

SEQ ID NO: 10927 - protein, 9 aa, Artificial Sequence
  Description of Artificial Sequence: Synthetic peptide
LEPPSTVNV

SEQ ID NO: 10928 - protein, 9 aa, Artificial Sequence
  Description of Artificial Sequence: Synthetic peptide
LFPNQCNFV

SEQ ID NO: 10929 - protein, 9 aa, Artificial Sequence
  Description of Artificial Sequence: Synthetic peptide
LFPQHIAQP

SEQ ID NO: 10930 - protein, 9 aa, Artificial Sequence
  Description of Artificial Sequence: Synthetic peptide
LGPHRWYGH

SEQ ID NO: 10931 - protein, 9 aa, Artificial Sequence
  Description of Artificial Sequence: Synthetic peptide
LHPWMPAGR

SEQ ID NO: 10932 - protein, 9 aa, Artificial Sequence
  Description of Artificial Sequence: Synthetic peptide
LKPSWQDKA

SEQ ID NO: 10933 - protein, 9 aa, Artificial Sequence
  Description of Artificial Sequence: Synthetic peptide
LLPMDEMKT

SEQ ID NO: 10934 - protein, 9 aa, Artificial Sequence
  Description of Artificial Sequence: Synthetic peptide
LMPCHGDIA

SEQ ID NO: 10935 - protein, 9 aa, Artificial Sequence
  Description of Artificial Sequence: Synthetic peptide
LMPELGCTD

SEQ ID NO: 10936 - protein, 9 aa, Artificial Sequence
  Description of Artificial Sequence: Synthetic peptide
LSPLIAGIY

SEQ ID NO: 10937 - protein, 9 aa, Artificial Sequence
  Description of Artificial Sequence: Synthetic peptide
LTPDVRINA

SEQ ID NO: 10938 - protein, 9 aa, Artificial Sequence
  Description of Artificial Sequence: Synthetic peptide
LTPSCRHKW

SEQ ID NO: 10939 - protein, 9 aa, Artificial Sequence
  Description of Artificial Sequence: Synthetic peptide
LVPTLINCL

SEQ ID NO: 10940 - protein, 9 aa, Artificial Sequence
  Description of Artificial Sequence: Synthetic peptide
LWPSSCQMK

SEQ ID NO: 10941 - protein, 9 aa, Artificial Sequence
  Description of Artificial Sequence: Synthetic peptide
MAPQPMGGG

SEQ ID NO: 10942 - protein, 9 aa, Artificial Sequence
  Description of Artificial Sequence: Synthetic peptide
MCPKTFRFE

SEQ ID NO: 10943 - protein, 9 aa, Artificial Sequence
  Description of Artificial Sequence: Synthetic peptide
MEPKKMKVW

SEQ ID NO: 10944 - protein, 9 aa, Artificial Sequence
  Description of Artificial Sequence: Synthetic peptide
MEPMSRDHL

SEQ ID NO: 10945 - protein, 9 aa, Artificial Sequence
  Description of Artificial Sequence: Synthetic peptide
MEPWEQCHI

SEQ ID NO: 10946 - protein, 9 aa, Artificial Sequence
  Description of Artificial Sequence: Synthetic peptide
MGPRYDKEW

SEQ ID NO: 10947 - protein, 9 aa, Artificial Sequence
  Description of Artificial Sequence: Synthetic peptide
MHPDSYNVT

SEQ ID NO: 10948 - protein, 9 aa, Artificial Sequence
  Description of Artificial Sequence: Synthetic peptide
MKPDQNHHK

SEQ ID NO: 10949 - protein, 9 aa, Artificial Sequence
  Description of Artificial Sequence: Synthetic peptide
MLPLPNEFQ

SEQ ID NO: 10950 - protein, 9 aa, Artificial Sequence
  Description of Artificial Sequence: Synthetic peptide
MLPMAWYQI

SEQ ID NO: 10951 - protein, 9 aa, Artificial Sequence
  Description of Artificial Sequence: Synthetic peptide
MLPMRQLTQ

SEQ ID NO: 10952 - protein, 9 aa, Artificial Sequence
  Description of Artificial Sequence: Synthetic peptide
MLPWSSRSN

SEQ ID NO: 10953 - protein, 9 aa, Artificial Sequence
  Description of Artificial Sequence: Synthetic peptide
MMPDILRSY

SEQ ID NO: 10954 - protein, 9 aa, Artificial Sequence
  Description of Artificial Sequence: Synthetic peptide
MQPCWQPQC

SEQ ID NO: 10955 - protein, 9 aa, Artificial Sequence
  Description of Artificial Sequence: Synthetic peptide
MRPQQVWNG

SEQ ID NO: 10956 - protein, 9 aa, Artificial Sequence
  Description of Artificial Sequence: Synthetic peptide
MSPQPELSG

SEQ ID NO: 10957 - protein, 9 aa, Artificial Sequence
  Description of Artificial Sequence: Synthetic peptide
MVPAAGPGE

SEQ ID NO: 10958 - protein, 9 aa, Artificial Sequence
  Description of Artificial Sequence: Synthetic peptide
MVPKMMRSQ

SEQ ID NO: 10959 - protein, 9 aa, Artificial Sequence
  Description of Artificial Sequence: Synthetic peptide
MWPAMKVCW

SEQ ID NO: 10960 - protein, 9 aa, Artificial Sequence
  Description of Artificial Sequence: Synthetic peptide
NCPQPNCGW

SEQ ID NO: 10961 - protein, 9 aa, Artificial Sequence
  Description of Artificial Sequence: Synthetic peptide
NMPERKLTF

SEQ ID NO: 10962 - protein, 9 aa, Artificial Sequence
  Description of Artificial Sequence: Synthetic peptide
NMPIGGYCC

SEQ ID NO: 10963 - protein, 9 aa, Artificial Sequence
  Description of Artificial Sequence: Synthetic peptide
NNPQKQQSR

SEQ ID NO: 10964 - protein, 9 aa, Artificial Sequence
  Description of Artificial Sequence: Synthetic peptide
NNPSNSLIW

SEQ ID NO: 10965 - protein, 9 aa, Artificial Sequence
  Description of Artificial Sequence: Synthetic peptide
NTPEFHWQQ

SEQ ID NO: 10966 - protein, 9 aa, Artificial Sequence
  Description of Artificial Sequence: Synthetic peptide
NTPLDFTGE

SEQ ID NO: 10967 - protein, 9 aa, Artificial Sequence
  Description of Artificial Sequence: Synthetic peptide
NTPNNMEAR

SEQ ID NO: 10968 - protein, 9 aa, Artificial Sequence
  Description of Artificial Sequence: Synthetic peptide
NTPQQGQKG

SEQ ID NO: 10969 - protein, 9 aa, Artificial Sequence
  Description of Artificial Sequence: Synthetic peptide
NVPTEPMDH

SEQ ID NO: 10970 - protein, 9 aa, Artificial Sequence
  Description of Artificial Sequence: Synthetic peptide
NWPVSDEDM

SEQ ID NO: 10971 - protein, 9 aa, Artificial Sequence
  Description of Artificial Sequence: Synthetic peptide
NYPCTDKNH

SEQ ID NO: 10972 - protein, 9 aa, Artificial Sequence
  Description of Artificial Sequence: Synthetic peptide
NYPVGYHEL

SEQ ID NO: 10973 - protein, 9 aa, Artificial Sequence
  Description of Artificial Sequence: Synthetic peptide
QAPMVQDTQ

SEQ ID NO: 10974 - protein, 9 aa, Artificial Sequence
  Description of Artificial Sequence: Synthetic peptide
QAPWKHEGP

SEQ ID NO: 10975 - protein, 9 aa, Artificial Sequence
  Description of Artificial Sequence: Synthetic peptide
QCPDEKAEF

SEQ ID NO: 10976 - protein, 9 aa, Artificial Sequence
  Description of Artificial Sequence: Synthetic peptide
QCPIQSVVC

SEQ ID NO: 10977 - protein, 9 aa, Artificial Sequence
  Description of Artificial Sequence: Synthetic peptide
QDPFWRGLH

SEQ ID NO: 10978 - protein, 9 aa, Artificial Sequence
  Description of Artificial Sequence: Synthetic peptide
QHPDQGQHC

SEQ ID NO: 10979 - protein, 9 aa, Artificial Sequence
  Description of Artificial Sequence: Synthetic peptide
QIPYEMWWS

SEQ ID NO: 10980 - protein, 9 aa, Artificial Sequence
  Description of Artificial Sequence: Synthetic peptide
QLPCIKKCP

SEQ ID NO: 10981 - protein, 9 aa, Artificial Sequence
  Description of Artificial Sequence: Synthetic peptide
QLPGCRTDQ

SEQ ID NO: 10982 - protein, 9 aa, Artificial Sequence
  Description of Artificial Sequence: Synthetic peptide
QLPKMWLPN

SEQ ID NO: 10983 - protein, 9 aa, Artificial Sequence
  Description of Artificial Sequence: Synthetic peptide
QMPNGEIVT

SEQ ID NO: 10984 - protein, 9 aa, Artificial Sequence
  Description of Artificial Sequence: Synthetic peptide
QNPDDVINL

SEQ ID NO: 10985 - protein, 9 aa, Artificial Sequence
  Description of Artificial Sequence: Synthetic peptide
QNPSPMMHR

SEQ ID NO: 10986 - protein, 9 aa, Artificial Sequence
  Description of Artificial Sequence: Synthetic peptide
QNPSTYCHY

SEQ ID NO: 10987 - protein, 9 aa, Artificial Sequence
  Description of Artificial Sequence: Synthetic peptide
QQPWPHQRG

SEQ ID NO: 10988 - protein, 9 aa, Artificial Sequence
  Description of Artificial Sequence: Synthetic peptide
QRPTMLQGY

SEQ ID NO: 10989 - protein, 9 aa, Artificial Sequence
  Description of Artificial Sequence: Synthetic peptide
QSPPIFPTT

SEQ ID NO: 10990 - protein, 9 aa, Artificial Sequence
  Description of Artificial Sequence: Synthetic peptide
QSPWKLWSH

SEQ ID NO: 10991 - protein, 9 aa, Artificial Sequence
  Description of Artificial Sequence: Synthetic peptide
QWPDFMVTI

SEQ ID NO: 10992 - protein, 9 aa, Artificial Sequence
  Description of Artificial Sequence: Synthetic peptide
QYPQLPHWA

SEQ ID NO: 10993 - protein, 9 aa, Artificial Sequence
  Description of Artificial Sequence: Synthetic peptide
REPFLHVNS

SEQ ID NO: 10994 - protein, 9 aa, Artificial Sequence
  Description of Artificial Sequence: Synthetic peptide
RFPVKLGAM

SEQ ID NO: 10995 - protein, 9 aa, Artificial Sequence
  Description of Artificial Sequence: Synthetic peptide
RHPQLGLPH

SEQ ID NO: 10996 - protein, 9 aa, Artificial Sequence
  Description of Artificial Sequence: Synthetic peptide
RIPWAELMK

SEQ ID NO: 10997 - protein, 9 aa, Artificial Sequence
  Description of Artificial Sequence: Synthetic peptide
RKPWREHNI

SEQ ID NO: 10998 - protein, 9 aa, Artificial Sequence
  Description of Artificial Sequence: Synthetic peptide
RLPYYVQFC

SEQ ID NO: 10999 - protein, 9 aa, Artificial Sequence
  Description of Artificial Sequence: Synthetic peptide
RNPCSKHEV

SEQ ID NO: 11000 - protein, 9 aa, Artificial Sequence
  Description of Artificial Sequence: Synthetic peptide
RNPRDYPMF

SEQ ID NO: 11001 - protein, 9 aa, Artificial Sequence
  Description of Artificial Sequence: Synthetic peptide
RQPANRFKE

SEQ ID NO: 11002 - protein, 9 aa, Artificial Sequence
  Description of Artificial Sequence: Synthetic peptide
RTPFPHDSL

SEQ ID NO: 11003 - protein, 9 aa, Artificial Sequence
  Description of Artificial Sequence: Synthetic peptide
RWPSEKEKF

SEQ ID NO: 11004 - protein, 9 aa, Artificial Sequence
  Description of Artificial Sequence: Synthetic peptide
SAPPSFAQK

SEQ ID NO: 11005 - protein, 9 aa, Artificial Sequence
  Description of Artificial Sequence: Synthetic peptide
SAPVEWMRK

SEQ ID NO: 11006 - protein, 9 aa, Artificial Sequence
  Description of Artificial Sequence: Synthetic peptide
SCPNRESGR

SEQ ID NO: 11007 - protein, 9 aa, Artificial Sequence
  Description of Artificial Sequence: Synthetic peptide
SGPRTDCPL

SEQ ID NO: 11008 - protein, 9 aa, Artificial Sequence
  Description of Artificial Sequence: Synthetic peptide
SGPVVMIQS

SEQ ID NO: 11009 - protein, 9 aa, Artificial Sequence
  Description of Artificial Sequence: Synthetic peptide
SMPHACYNG

SEQ ID NO: 11010 - protein, 9 aa, Artificial Sequence
  Description of Artificial Sequence: Synthetic peptide
SMPTTSSSC

SEQ ID NO: 11011 - protein, 9 aa, Artificial Sequence
  Description of Artificial Sequence: Synthetic peptide
SSPDNWKHM

SEQ ID NO: 11012 - protein, 9 aa, Artificial Sequence
  Description of Artificial Sequence: Synthetic peptide
STPLGNSAP

SEQ ID NO: 11013 - protein, 9 aa, Artificial Sequence
  Description of Artificial Sequence: Synthetic peptide
STPMVCEMG

SEQ ID NO: 11014 - protein, 9 aa, Artificial Sequence
  Description of Artificial Sequence: Synthetic peptide
SVPHEVHCE

SEQ ID NO: 11015 - protein, 9 aa, Artificial Sequence
  Description of Artificial Sequence: Synthetic peptide
SVPLKFWTL

SEQ ID NO: 11016 - protein, 9 aa, Artificial Sequence
  Description of Artificial Sequence: Synthetic peptide
SWPDEPSVA

SEQ ID NO: 11017 - protein, 9 aa, Artificial Sequence
  Description of Artificial Sequence: Synthetic peptide
SWPHCEIEI

SEQ ID NO: 11018 - protein, 9 aa, Artificial Sequence
  Description of Artificial Sequence: Synthetic peptide
SYPLTRWPA

SEQ ID NO: 11019 - protein, 9 aa, Artificial Sequence
  Description of Artificial Sequence: Synthetic peptide
SYPYMHMQD

SEQ ID NO: 11020 - protein, 9 aa, Artificial Sequence
  Description of Artificial Sequence: Synthetic peptide
TAPQCVSDA

SEQ ID NO: 11021 - protein, 9 aa, Artificial Sequence
  Description of Artificial Sequence: Synthetic peptide
TCPNLTAYC

SEQ ID NO: 11022 - protein, 9 aa, Artificial Sequence
  Description of Artificial Sequence: Synthetic peptide
TCPRNLCNY

SEQ ID NO: 11023 - protein, 9 aa, Artificial Sequence
  Description of Artificial Sequence: Synthetic peptide
TDPLCKHQT

SEQ ID NO: 11024 - protein, 9 aa, Artificial Sequence
  Description of Artificial Sequence: Synthetic peptide
TDPLNPLCD

SEQ ID NO: 11025 - protein, 9 aa, Artificial Sequence
  Description of Artificial Sequence: Synthetic peptide
TEPPCPGQT

SEQ ID NO: 11026 - protein, 9 aa, Artificial Sequence
  Description of Artificial Sequence: Synthetic peptide
TEPSIMNEV

SEQ ID NO: 11027 - protein, 9 aa, Artificial Sequence
  Description of Artificial Sequence: Synthetic peptide
TFPCNRFGI

SEQ ID NO: 11028 - protein, 9 aa, Artificial Sequence
  Description of Artificial Sequence: Synthetic peptide
TFPSIQWSR

SEQ ID NO: 11029 - protein, 9 aa, Artificial Sequence
  Description of Artificial Sequence: Synthetic peptide
TGPNFQPAL

SEQ ID NO: 11030 - protein, 9 aa, Artificial Sequence
  Description of Artificial Sequence: Synthetic peptide
TIPFCKKCE

SEQ ID NO: 11031 - protein, 9 aa, Artificial Sequence
  Description of Artificial Sequence: Synthetic peptide
TIPYEANCA

SEQ ID NO: 11032 - protein, 9 aa, Artificial Sequence
  Description of Artificial Sequence: Synthetic peptide
TKPQITEIS

SEQ ID NO: 11033 - protein, 9 aa, Artificial Sequence
  Description of Artificial Sequence: Synthetic peptide
TQPCMPNRT

SEQ ID NO: 11034 - protein, 9 aa, Artificial Sequence
  Description of Artificial Sequence: Synthetic peptide
TRPPSSLDE

SEQ ID NO: 11035 - protein, 9 aa, Artificial Sequence
  Description of Artificial Sequence: Synthetic peptide
TTPTWQNSP

SEQ ID NO: 11036 - protein, 9 aa, Artificial Sequence
  Description of Artificial Sequence: Synthetic peptide
TVPHFYFYG

SEQ ID NO: 11037 - protein, 9 aa, Artificial Sequence
  Description of Artificial Sequence: Synthetic peptide
TWPMSCDCD

SEQ ID NO: 11038 - protein, 9 aa, Artificial Sequence
  Description of Artificial Sequence: Synthetic peptide
TYPFGWDKH

SEQ ID NO: 11039 - protein, 9 aa, Artificial Sequence
  Description of Artificial Sequence: Synthetic peptide
VAPAILYRC

SEQ ID NO: 11040 - protein, 9 aa, Artificial Sequence
  Description of Artificial Sequence: Synthetic peptide
VAPIHDHRI

SEQ ID NO: 11041 - protein, 9 aa, Artificial Sequence
  Description of Artificial Sequence: Synthetic peptide
VDPAMMPDN

SEQ ID NO: 11042 - protein, 9 aa, Artificial Sequence
  Description of Artificial Sequence: Synthetic peptide
VFPTASQLC

SEQ ID NO: 11043 - protein, 9 aa, Artificial Sequence
  Description of Artificial Sequence: Synthetic peptide
VHPEQTLIG

SEQ ID NO: 11044 - protein, 9 aa, Artificial Sequence
  Description of Artificial Sequence: Synthetic peptide
VHPFHKYEQ

SEQ ID NO: 11045 - protein, 9 aa, Artificial Sequence
  Description of Artificial Sequence: Synthetic peptide
VIPVHNMCG

SEQ ID NO: 11046 - protein, 9 aa, Artificial Sequence
  Description of Artificial Sequence: Synthetic peptide
VKPYNGLVQ

SEQ ID NO: 11047 - protein, 9 aa, Artificial Sequence
  Description of Artificial Sequence: Synthetic peptide
VLPHFWNQG

SEQ ID NO: 11048 - protein, 9 aa, Artificial Sequence
  Description of Artificial Sequence: Synthetic peptide
VLPKSHFFP

SEQ ID NO: 11049 - protein, 9 aa, Artificial Sequence
  Description of Artificial Sequence: Synthetic peptide
VMPEESVRN

SEQ ID NO: 11050 - protein, 9 aa, Artificial Sequence
  Description of Artificial Sequence: Synthetic peptide
VMPTNILEE

SEQ ID NO: 11051 - protein, 9 aa, Artificial Sequence
  Description of Artificial Sequence: Synthetic peptide
VMPYAQGIS

SEQ ID NO: 11052 - protein, 9 aa, Artificial Sequence
  Description of Artificial Sequence: Synthetic peptide
VQPCFMMDH

SEQ ID NO: 11053 - protein, 9 aa, Artificial Sequence
  Description of Artificial Sequence: Synthetic peptide
VQPFPYCCE

SEQ ID NO: 11054 - protein, 9 aa, Artificial Sequence
  Description of Artificial Sequence: Synthetic peptide
VQPHPFNPH

SEQ ID NO: 11055 - protein, 9 aa, Artificial Sequence
  Description of Artificial Sequence: Synthetic peptide
VQPPILEQH

SEQ ID NO: 11056 - protein, 9 aa, Artificial Sequence
  Description of Artificial Sequence: Synthetic peptide
VQPWWDAMG

SEQ ID NO: 11057 - protein, 9 aa, Artificial Sequence
  Description of Artificial Sequence: Synthetic peptide
VRPLHNFID

SEQ ID NO: 11058 - protein, 9 aa, Artificial Sequence
  Description of Artificial Sequence: Synthetic peptide
VSPANADND

SEQ ID NO: 11059 - protein, 9 aa, Artificial Sequence
  Description of Artificial Sequence: Synthetic peptide
VTPNLQVQS

SEQ ID NO: 11060 - protein, 9 aa, Artificial Sequence
  Description of Artificial Sequence: Synthetic peptide
VTPYDWKFQ

SEQ ID NO: 11061 - protein, 9 aa, Artificial Sequence
  Description of Artificial Sequence: Synthetic peptide
WAPSPRQDR

SEQ ID NO: 11062 - protein, 9 aa, Artificial Sequence
  Description of Artificial Sequence: Synthetic peptide
WDPVYGERN

SEQ ID NO: 11063 - protein, 9 aa, Artificial Sequence
  Description of Artificial Sequence: Synthetic peptide
WEPDGIVPQ

SEQ ID NO: 11064 - protein, 9 aa, Artificial Sequence
  Description of Artificial Sequence: Synthetic peptide
WHPKCYDVF

SEQ ID NO: 11065 - protein, 9 aa, Artificial Sequence
  Description of Artificial Sequence: Synthetic peptide
WHPMDKNFR

SEQ ID NO: 11066 - protein, 9 aa, Artificial Sequence
  Description of Artificial Sequence: Synthetic peptide
WIPTEIYGH

SEQ ID NO: 11067 - protein, 9 aa, Artificial Sequence
  Description of Artificial Sequence: Synthetic peptide
WKPEGQNFG

SEQ ID NO: 11068 - protein, 9 aa, Artificial Sequence
  Description of Artificial Sequence: Synthetic peptide
WLPRMPSCD

SEQ ID NO: 11069 - protein, 9 aa, Artificial Sequence
  Description of Artificial Sequence: Synthetic peptide
WMPCCPHGC

SEQ ID NO: 11070 - protein, 9 aa, Artificial Sequence
  Description of Artificial Sequence: Synthetic peptide
WMPGMHWRC

SEQ ID NO: 11071 - protein, 9 aa, Artificial Sequence
  Description of Artificial Sequence: Synthetic peptide
WMPSTTRWN

SEQ ID NO: 11072 - protein, 9 aa, Artificial Sequence
  Description of Artificial Sequence: Synthetic peptide
WQPDWMYEH

SEQ ID NO: 11073 - protein, 9 aa, Artificial Sequence
  Description of Artificial Sequence: Synthetic peptide
WRPPVRVQD

SEQ ID NO: 11074 - protein, 9 aa, Artificial Sequence
  Description of Artificial Sequence: Synthetic peptide
WSPERERFE

SEQ ID NO: 11075 - protein, 9 aa, Artificial Sequence
  Description of Artificial Sequence: Synthetic peptide
WWPIWWIPQ

SEQ ID NO: 11076 - protein, 9 aa, Artificial Sequence
  Description of Artificial Sequence: Synthetic peptide
WYPLDVLAS

SEQ ID NO: 11077 - protein, 9 aa, Artificial Sequence
  Description of Artificial Sequence: Synthetic peptide
WYPMLWELE

SEQ ID NO: 11078 - protein, 9 aa, Artificial Sequence
  Description of Artificial Sequence: Synthetic peptide
LSICQPVMP

SEQ ID NO: 11079 - protein, 9 aa, Artificial Sequence
  Description of Artificial Sequence: Synthetic peptide
TTRCFRHAK

SEQ ID NO: 11080 - protein, 9 aa, Artificial Sequence
  Description of Artificial Sequence: Synthetic peptide
WATCDAPPV

SEQ ID NO: 11081 - protein, 9 aa, Artificial Sequence
  Description of Artificial Sequence: Synthetic peptide
NYVCSTSGY

SEQ ID NO: 11082 - protein, 9 aa, Artificial Sequence
  Description of Artificial Sequence: Synthetic peptide
LTKCMNKGW

SEQ ID NO: 11083 - protein, 9 aa, Artificial Sequence
  Description of Artificial Sequence: Synthetic peptide
SCECPCCLA

SEQ ID NO: 11084 - protein, 9 aa, Artificial Sequence
  Description of Artificial Sequence: Synthetic peptide
VCECCRQNI

SEQ ID NO: 11085 - protein, 9 aa, Artificial Sequence
  Description of Artificial Sequence: Synthetic peptide
ALCCFCCQG

SEQ ID NO: 11086 - protein, 9 aa, Artificial Sequence
  Description of Artificial Sequence: Synthetic peptide
TSYCIQTVD

SEQ ID NO: 11087 - protein, 9 aa, Artificial Sequence
  Description of Artificial Sequence: Synthetic peptide
DQECCQTLF

SEQ ID NO: 11088 - protein, 9 aa, Artificial Sequence
  Description of Artificial Sequence: Synthetic peptide
QTQVPIWNT

SEQ ID NO: 11089 - protein, 9 aa, Artificial Sequence
  Description of Artificial Sequence: Synthetic peptide
LATHPPYTY

SEQ ID NO: 11090 - protein, 9 aa, Artificial Sequence
  Description of Artificial Sequence: Synthetic peptide
LTYNPTMIG

SEQ ID NO: 11091 - protein, 9 aa, Artificial Sequence
  Description of Artificial Sequence: Synthetic peptide
TGIIPIRVC

SEQ ID NO: 11092 - protein, 9 aa, Artificial Sequence
  Description of Artificial Sequence: Synthetic peptide
TCQEPHNIT

SEQ ID NO: 11093 - protein, 9 aa, Artificial Sequence
  Description of Artificial Sequence: Synthetic peptide
QVYAPEIEG

SEQ ID NO: 11094 - protein, 9 aa, Artificial Sequence
  Description of Artificial Sequence: Synthetic peptide
DYQSERLWS

SEQ ID NO: 11095 - protein, 9 aa, Artificial Sequence
  Description of Artificial Sequence: Synthetic peptide
KEQEQRPVR

SEQ ID NO: 11096 - protein, 9 aa, Artificial Sequence
  Description of Artificial Sequence: Synthetic peptide
ISMQNRCAD

SEQ ID NO: 11097 - protein, 9 aa, Artificial Sequence
  Description of Artificial Sequence: Synthetic peptide
IFQLSRPAW

SEQ ID NO: 11098 - protein, 9 aa, Artificial Sequence
  Description of Artificial Sequence: Synthetic peptide
ECKTHRDVY

SEQ ID NO: 11099 - protein, 9 aa, Artificial Sequence
  Description of Artificial Sequence: Synthetic peptide
YHNQDRHYL

SEQ ID NO: 11100 - protein, 9 aa, Artificial Sequence
  Description of Artificial Sequence: Synthetic peptide
KVDTVRNPK

SEQ ID NO: 11101 - protein, 9 aa, Artificial Sequence
  Description of Artificial Sequence: Synthetic peptide
TVSRGRPVA

SEQ ID NO: 11102 - protein, 9 aa, Artificial Sequence
  Description of Artificial Sequence: Synthetic peptide
NQAYGRGHV

SEQ ID NO: 11103 - protein, 9 aa, Artificial Sequence
  Description of Artificial Sequence: Synthetic peptide
SVRLNEPHV

SEQ ID NO: 11104 - protein, 9 aa, Artificial Sequence
  Description of Artificial Sequence: Synthetic peptide
CLVNDMPRK

SEQ ID NO: 11105 - protein, 9 aa, Artificial Sequence
  Description of Artificial Sequence: Synthetic peptide
AHTFEAPKW

SEQ ID NO: 11106 - protein, 9 aa, Artificial Sequence
  Description of Artificial Sequence: Synthetic peptide
IWNYCVPKH

SEQ ID NO: 11107 - protein, 9 aa, Artificial Sequence
  Description of Artificial Sequence: Synthetic peptide
HWEQHNPIW

SEQ ID NO: 11108 - protein, 9 aa, Artificial Sequence
  Description of Artificial Sequence: Synthetic peptide
CIDWAEMPQ

SEQ ID NO: 11109 - protein, 9 aa, Artificial Sequence
  Description of Artificial Sequence: Synthetic peptide
ACVMYDCPP

SEQ ID NO: 11110 - protein, 9 aa, Artificial Sequence
  Description of Artificial Sequence: Synthetic peptide
WVGNANRPA

SEQ ID NO: 11111 - protein, 9 aa, Artificial Sequence
  Description of Artificial Sequence: Synthetic peptide
SVEVGCSPG

SEQ ID NO: 11112 - protein, 9 aa, Artificial Sequence
  Description of Artificial Sequence: Synthetic peptide
CVFSTNHPA

SEQ ID NO: 11113 - protein, 9 aa, Artificial Sequence
  Description of Artificial Sequence: Synthetic peptide
AMRQIIAPC

SEQ ID NO: 11114 - protein, 9 aa, Artificial Sequence
  Description of Artificial Sequence: Synthetic peptide
TVVFSENEI

SEQ ID NO: 11115 - protein, 9 aa, Artificial Sequence
  Description of Artificial Sequence: Synthetic peptide
WKGRWTTTI

SEQ ID NO: 11116 - protein, 9 aa, Artificial Sequence
  Description of Artificial Sequence: Synthetic peptide
NSHYTEGVI

SEQ ID NO: 11117 - protein, 9 aa, Artificial Sequence
  Description of Artificial Sequence: Synthetic peptide
AWTPTEKQI

SEQ ID NO: 11118 - protein, 9 aa, Artificial Sequence
  Description of Artificial Sequence: Synthetic peptide
ACCKVRRDC

SEQ ID NO: 11119 - protein, 9 aa, Artificial Sequence
  Description of Artificial Sequence: Synthetic peptide
ACPVEFVPW

SEQ ID NO: 11120 - protein, 9 aa, Artificial Sequence
  Description of Artificial Sequence: Synthetic peptide
ACYIDAAPN

SEQ ID NO: 11121 - protein, 9 aa, Artificial Sequence
  Description of Artificial Sequence: Synthetic peptide
ACYLRNEDR

SEQ ID NO: 11122 - protein, 9 aa, Artificial Sequence
  Description of Artificial Sequence: Synthetic peptide
ADASRTELD

SEQ ID NO: 11123 - protein, 9 aa, Artificial Sequence
  Description of Artificial Sequence: Synthetic peptide
ADASRTEPD

SEQ ID NO: 11124 - protein, 9 aa, Artificial Sequence
  Description of Artificial Sequence: Synthetic peptide
ADASRTKRD

SEQ ID NO: 11125 - protein, 9 aa, Artificial Sequence
  Description of Artificial Sequence: Synthetic peptide
ADERPNATD

SEQ ID NO: 11126 - protein, 9 aa, Artificial Sequence
  Description of Artificial Sequence: Synthetic peptide
ADIMKEIIF

SEQ ID NO: 11127 - protein, 9 aa, Artificial Sequence
  Description of Artificial Sequence: Synthetic peptide
ADIMKESIV

SEQ ID NO: 11128 - protein, 9 aa, Artificial Sequence
  Description of Artificial Sequence: Synthetic peptide
ADIMKVSIF

SEQ ID NO: 11129 - protein, 9 aa, Artificial Sequence
  Description of Artificial Sequence: Synthetic peptide
ADIMMESIF

SEQ ID NO: 11130 - protein, 9 aa, Artificial Sequence
  Description of Artificial Sequence: Synthetic peptide
ADIMQESIF

SEQ ID NO: 11131 - protein, 9 aa, Artificial Sequence
  Description of Artificial Sequence: Synthetic peptide
ADIMRESIF

SEQ ID NO: 11132 - protein, 9 aa, Artificial Sequence
  Description of Artificial Sequence: Synthetic peptide
ADINRWSYV

SEQ ID NO: 11133 - protein, 9 aa, Artificial Sequence
  Description of Artificial Sequence: Synthetic peptide
ADITKESIF

SEQ ID NO: 11134 - protein, 9 aa, Artificial Sequence
  Description of Artificial Sequence: Synthetic peptide
ADLHNNHEV

SEQ ID NO: 11135 - protein, 9 aa, Artificial Sequence
  Description of Artificial Sequence: Synthetic peptide
ADLNNNHED

SEQ ID NO: 11136 - protein, 9 aa, Artificial Sequence
  Description of Artificial Sequence: Synthetic peptide
ADRDGPHWY

SEQ ID NO: 11137 - protein, 9 aa, Artificial Sequence
  Description of Artificial Sequence: Synthetic peptide
ADRGGPHWD

SEQ ID NO: 11138 - protein, 9 aa, Artificial Sequence
  Description of Artificial Sequence: Synthetic peptide
AECCLEPKH

SEQ ID NO: 11139 - protein, 9 aa, Artificial Sequence
  Description of Artificial Sequence: Synthetic peptide
AEDGADMIT

SEQ ID NO: 11140 - protein, 9 aa, Artificial Sequence
  Description of Artificial Sequence: Synthetic peptide
AEGCKFYNG

SEQ ID NO: 11141 - protein, 9 aa, Artificial Sequence
  Description of Artificial Sequence: Synthetic peptide
AELMMGSII

SEQ ID NO: 11142 - protein, 9 aa, Artificial Sequence
  Description of Artificial Sequence: Synthetic peptide
AEQQHRLIE

SEQ ID NO: 11143 - protein, 9 aa, Artificial Sequence
  Description of Artificial Sequence: Synthetic peptide
AFCRGHYKA

SEQ ID NO: 11144 - protein, 9 aa, Artificial Sequence
  Description of Artificial Sequence: Synthetic peptide
AFCRGHYPA

SEQ ID NO: 11145 - protein, 9 aa, Artificial Sequence
  Description of Artificial Sequence: Synthetic peptide
AFCRGHYRA

SEQ ID NO: 11146 - protein, 9 aa, Artificial Sequence
  Description of Artificial Sequence: Synthetic peptide
AFCRGLYQA

SEQ ID NO: 11147 - protein, 9 aa, Artificial Sequence
  Description of Artificial Sequence: Synthetic peptide
AFCRGRYQA

SEQ ID NO: 11148 - protein, 9 aa, Artificial Sequence
  Description of Artificial Sequence: Synthetic peptide
AFDTFYAFS

SEQ ID NO: 11149 - protein, 9 aa, Artificial Sequence
  Description of Artificial Sequence: Synthetic peptide
AFHHDRKYY

SEQ ID NO: 11150 - protein, 9 aa, Artificial Sequence
  Description of Artificial Sequence: Synthetic peptide
AFKEFSLCC

SEQ ID NO: 11151 - protein, 9 aa, Artificial Sequence
  Description of Artificial Sequence: Synthetic peptide
AFLYAAGWC

SEQ ID NO: 11152 - protein, 9 aa, Artificial Sequence
  Description of Artificial Sequence: Synthetic peptide
AFNLDRKYY

SEQ ID NO: 11153 - protein, 9 aa, Artificial Sequence
  Description of Artificial Sequence: Synthetic peptide
AFNQDRKYY

SEQ ID NO: 11154 - protein, 9 aa, Artificial Sequence
  Description of Artificial Sequence: Synthetic peptide
AFPQNEHQR

SEQ ID NO: 11155 - protein, 9 aa, Artificial Sequence
  Description of Artificial Sequence: Synthetic peptide
AFVTFYAFR

SEQ ID NO: 11156 - protein, 9 aa, Artificial Sequence
  Description of Artificial Sequence: Synthetic peptide
AGPVEFFPW

SEQ ID NO: 11157 - protein, 9 aa, Artificial Sequence
  Description of Artificial Sequence: Synthetic peptide
AGRQEKPDG

SEQ ID NO: 11158 - protein, 9 aa, Artificial Sequence
  Description of Artificial Sequence: Synthetic peptide
AGRQEKPYV

SEQ ID NO: 11159 - protein, 9 aa, Artificial Sequence
  Description of Artificial Sequence: Synthetic peptide
AGWQKCYDS

SEQ ID NO: 11160 - protein, 9 aa, Artificial Sequence
  Description of Artificial Sequence: Synthetic peptide
AGWQMCDDS

SEQ ID NO: 11161 - protein, 9 aa, Artificial Sequence
  Description of Artificial Sequence: Synthetic peptide
AGWQTCYDS

SEQ ID NO: 11162 - protein, 9 aa, Artificial Sequence
  Description of Artificial Sequence: Synthetic peptide
AHDLATEWE

SEQ ID NO: 11163 - protein, 9 aa, Artificial Sequence
  Description of Artificial Sequence: Synthetic peptide
AIDYLIDIL

SEQ ID NO: 11164 - protein, 9 aa, Artificial Sequence
  Description of Artificial Sequence: Synthetic peptide
AINHEKTDW

SEQ ID NO: 11165 - protein, 9 aa, Artificial Sequence
  Description of Artificial Sequence: Synthetic peptide
AKDPKPIRK

SEQ ID NO: 11166 - protein, 9 aa, Artificial Sequence
  Description of Artificial Sequence: Synthetic peptide
ALNHDRKYY

SEQ ID NO: 11167 - protein, 9 aa, Artificial Sequence
  Description of Artificial Sequence: Synthetic peptide
ALPDTNHAD

SEQ ID NO: 11168 - protein, 9 aa, Artificial Sequence
  Description of Artificial Sequence: Synthetic peptide
ALSNDNAIL

SEQ ID NO: 11169 - protein, 9 aa, Artificial Sequence
  Description of Artificial Sequence: Synthetic peptide
ALSNHNAVL

SEQ ID NO: 11170 - protein, 9 aa, Artificial Sequence
  Description of Artificial Sequence: Synthetic peptide
AMHMTRGKC

SEQ ID NO: 11171 - protein, 9 aa, Artificial Sequence
  Description of Artificial Sequence: Synthetic peptide
AMIWPQVLD

SEQ ID NO: 11172 - protein, 9 aa, Artificial Sequence
  Description of Artificial Sequence: Synthetic peptide
AMQKTRGKC

SEQ ID NO: 11173 - protein, 9 aa, Artificial Sequence
  Description of Artificial Sequence: Synthetic peptide
ANCDMKDPW

SEQ ID NO: 11174 - protein, 9 aa, Artificial Sequence
  Description of Artificial Sequence: Synthetic peptide
ANCDMTDRW

SEQ ID NO: 11175 - protein, 9 aa, Artificial Sequence
  Description of Artificial Sequence: Synthetic peptide
ANCNKRHNW

SEQ ID NO: 11176 - protein, 9 aa, Artificial Sequence
  Description of Artificial Sequence: Synthetic peptide
ANNHEKTDL

SEQ ID NO: 11177 - protein, 9 aa, Artificial Sequence
  Description of Artificial Sequence: Synthetic peptide
ANNHEKTEW

SEQ ID NO: 11178 - protein, 9 aa, Artificial Sequence
  Description of Artificial Sequence: Synthetic peptide
ANNHVKTDW

SEQ ID NO: 11179 - protein, 9 aa, Artificial Sequence
  Description of Artificial Sequence: Synthetic peptide
APPPHEVKI

SEQ ID NO: 11180 - protein, 9 aa, Artificial Sequence
  Description of Artificial Sequence: Synthetic peptide
APPPHEVKS

SEQ ID NO: 11181 - protein, 9 aa, Artificial Sequence
  Description of Artificial Sequence: Synthetic peptide
APPPREVKF

SEQ ID NO: 11182 - protein, 9 aa, Artificial Sequence
  Description of Artificial Sequence: Synthetic peptide
APPQMCDFI

SEQ ID NO: 11183 - protein, 9 aa, Artificial Sequence
  Description of Artificial Sequence: Synthetic peptide
AQFKDRSSF

SEQ ID NO: 11184 - protein, 9 aa, Artificial Sequence
  Description of Artificial Sequence: Synthetic peptide
ARPKNLPLS

SEQ ID NO: 11185 - protein, 9 aa, Artificial Sequence
  Description of Artificial Sequence: Synthetic peptide
AVTNHCIDR

SEQ ID NO: 11186 - protein, 9 aa, Artificial Sequence
  Description of Artificial Sequence: Synthetic peptide
AVWQMCYDS

SEQ ID NO: 11187 - protein, 9 aa, Artificial Sequence
  Description of Artificial Sequence: Synthetic peptide
AWDGSIEFL

SEQ ID NO: 11188 - protein, 9 aa, Artificial Sequence
  Description of Artificial Sequence: Synthetic peptide
AYDAPRWFM

SEQ ID NO: 11189 - protein, 9 aa, Artificial Sequence
  Description of Artificial Sequence: Synthetic peptide
AYFQARLLL

SEQ ID NO: 11190 - protein, 9 aa, Artificial Sequence
  Description of Artificial Sequence: Synthetic peptide
AYIMKESIF

SEQ ID NO: 11191 - protein, 9 aa, Artificial Sequence
  Description of Artificial Sequence: Synthetic peptide
AYNHDRKYY

SEQ ID NO: 11192 - protein, 9 aa, Artificial Sequence
  Description of Artificial Sequence: Synthetic peptide
CDKMCAPQA

SEQ ID NO: 11193 - protein, 9 aa, Artificial Sequence
  Description of Artificial Sequence: Synthetic peptide
CDPHGMVGC

SEQ ID NO: 11194 - protein, 9 aa, Artificial Sequence
  Description of Artificial Sequence: Synthetic peptide
CDRKGAGNC

SEQ ID NO: 11195 - protein, 9 aa, Artificial Sequence
  Description of Artificial Sequence: Synthetic peptide
CDRMYAPQA

SEQ ID NO: 11196 - protein, 9 aa, Artificial Sequence
  Description of Artificial Sequence: Synthetic peptide
CERKGAGHC

SEQ ID NO: 11197 - protein, 9 aa, Artificial Sequence
  Description of Artificial Sequence: Synthetic peptide
CERKGAGNG

SEQ ID NO: 11198 - protein, 9 aa, Artificial Sequence
  Description of Artificial Sequence: Synthetic peptide
CERKGSGNC

SEQ ID NO: 11199 - protein, 9 aa, Artificial Sequence
  Description of Artificial Sequence: Synthetic peptide
CERRGAGNC

SEQ ID NO: 11200 - protein, 9 aa, Artificial Sequence
  Description of Artificial Sequence: Synthetic peptide
CFCKCGMPS

SEQ ID NO: 11201 - protein, 9 aa, Artificial Sequence
  Description of Artificial Sequence: Synthetic peptide
CFDCSRAHP

SEQ ID NO: 11202 - protein, 9 aa, Artificial Sequence
  Description of Artificial Sequence: Synthetic peptide
CFDRGKAFW

SEQ ID NO: 11203 - protein, 9 aa, Artificial Sequence
  Description of Artificial Sequence: Synthetic peptide
CGFPGFSPV

SEQ ID NO: 11204 - protein, 9 aa, Artificial Sequence
  Description of Artificial Sequence: Synthetic peptide
CGRWNFQYL

SEQ ID NO: 11205 - protein, 9 aa, Artificial Sequence
  Description of Artificial Sequence: Synthetic peptide
CGSSGHLIY

SEQ ID NO: 11206 - protein, 9 aa, Artificial Sequence
  Description of Artificial Sequence: Synthetic peptide
CHPLTAPSV

SEQ ID NO: 11207 - protein, 9 aa, Artificial Sequence
  Description of Artificial Sequence: Synthetic peptide
CIHTCESII

SEQ ID NO: 11208 - protein, 9 aa, Artificial Sequence
  Description of Artificial Sequence: Synthetic peptide
CINPCESII

SEQ ID NO: 11209 - protein, 9 aa, Artificial Sequence
  Description of Artificial Sequence: Synthetic peptide
CLLDGKSDL

SEQ ID NO: 11210 - protein, 9 aa, Artificial Sequence
  Description of Artificial Sequence: Synthetic peptide
CMCPPRLEV

SEQ ID NO: 11211 - protein, 9 aa, Artificial Sequence
  Description of Artificial Sequence: Synthetic peptide
CMKFAFWEC

SEQ ID NO: 11212 - protein, 9 aa, Artificial Sequence
  Description of Artificial Sequence: Synthetic peptide
CMKIAFWGC

SEQ ID NO: 11213 - protein, 9 aa, Artificial Sequence
  Description of Artificial Sequence: Synthetic peptide
CMKMAFWEC

SEQ ID NO: 11214 - protein, 9 aa, Artificial Sequence
  Description of Artificial Sequence: Synthetic peptide
CMPTARICM

SEQ ID NO: 11215 - protein, 9 aa, Artificial Sequence
  Description of Artificial Sequence: Synthetic peptide
CQIWAKNEY

SEQ ID NO: 11216 - protein, 9 aa, Artificial Sequence
  Description of Artificial Sequence: Synthetic peptide
CQIWGKNEF

SEQ ID NO: 11217 - protein, 9 aa, Artificial Sequence
  Description of Artificial Sequence: Synthetic peptide
CQLWAKNEF

SEQ ID NO: 11218 - protein, 9 aa, Artificial Sequence
  Description of Artificial Sequence: Synthetic peptide
CQPHWEKGD

SEQ ID NO: 11219 - protein, 9 aa, Artificial Sequence
  Description of Artificial Sequence: Synthetic peptide
CRKMMQRIS

SEQ ID NO: 11220 - protein, 9 aa, Artificial Sequence
  Description of Artificial Sequence: Synthetic peptide
CSGSGHLIY

SEQ ID NO: 11221 - protein, 9 aa, Artificial Sequence
  Description of Artificial Sequence: Synthetic peptide
CWDERNVFC

SEQ ID NO: 11222 - protein, 9 aa, Artificial Sequence
  Description of Artificial Sequence: Synthetic peptide
CWFMGEGCH

SEQ ID NO: 11223 - protein, 9 aa, Artificial Sequence
  Description of Artificial Sequence: Synthetic peptide
CWLIWKLDR

SEQ ID NO: 11224 - protein, 9 aa, Artificial Sequence
  Description of Artificial Sequence: Synthetic peptide
CWVLWKLDR

SEQ ID NO: 11225 - protein, 9 aa, Artificial Sequence
  Description of Artificial Sequence: Synthetic peptide
DCKCDMFNC

SEQ ID NO: 11226 - protein, 9 aa, Artificial Sequence
  Description of Artificial Sequence: Synthetic peptide
DCPLSNSYE

SEQ ID NO: 11227 - protein, 9 aa, Artificial Sequence
  Description of Artificial Sequence: Synthetic peptide
DDKIAVGWP

SEQ ID NO: 11228 - protein, 9 aa, Artificial Sequence
  Description of Artificial Sequence: Synthetic peptide
DDKIAVRWH

SEQ ID NO: 11229 - protein, 9 aa, Artificial Sequence
  Description of Artificial Sequence: Synthetic peptide
DDVDCCDRK

SEQ ID NO: 11230 - protein, 9 aa, Artificial Sequence
  Description of Artificial Sequence: Synthetic peptide
DFIMKYHAM

SEQ ID NO: 11231 - protein, 9 aa, Artificial Sequence
  Description of Artificial Sequence: Synthetic peptide
DFNHDRKYY

SEQ ID NO: 11232 - protein, 9 aa, Artificial Sequence
  Description of Artificial Sequence: Synthetic peptide
DFPQNEHQR

SEQ ID NO: 11233 - protein, 9 aa, Artificial Sequence
  Description of Artificial Sequence: Synthetic peptide
DFQEFSLCC

SEQ ID NO: 11234 - protein, 9 aa, Artificial Sequence
  Description of Artificial Sequence: Synthetic peptide
DGFMDFKHH

SEQ ID NO: 11235 - protein, 9 aa, Artificial Sequence
  Description of Artificial Sequence: Synthetic peptide
DGMRDFKPG

SEQ ID NO: 11236 - protein, 9 aa, Artificial Sequence
  Description of Artificial Sequence: Synthetic peptide
DGVVPVTNL

SEQ ID NO: 11237 - protein, 9 aa, Artificial Sequence
  Description of Artificial Sequence: Synthetic peptide
DGYMDFKHL

SEQ ID NO: 11238 - protein, 9 aa, Artificial Sequence
  Description of Artificial Sequence: Synthetic peptide
DGYMDFKRH

SEQ ID NO: 11239 - protein, 9 aa, Artificial Sequence
  Description of Artificial Sequence: Synthetic peptide
DHALATEWE

SEQ ID NO: 11240 - protein, 9 aa, Artificial Sequence
  Description of Artificial Sequence: Synthetic peptide
DHDLATGWE

SEQ ID NO: 11241 - protein, 9 aa, Artificial Sequence
  Description of Artificial Sequence: Synthetic peptide
DHDLTTEWE

SEQ ID NO: 11242 - protein, 9 aa, Artificial Sequence
  Description of Artificial Sequence: Synthetic peptide
DHDLVTEWE

SEQ ID NO: 11243 - protein, 9 aa, Artificial Sequence
  Description of Artificial Sequence: Synthetic peptide
DHVLATEWE

SEQ ID NO: 11244 - protein, 9 aa, Artificial Sequence
  Description of Artificial Sequence: Synthetic peptide
DKDCDLTSR

SEQ ID NO: 11245 - protein, 9 aa, Artificial Sequence
  Description of Artificial Sequence: Synthetic peptide
DKDGDRFYI

SEQ ID NO: 11246 - protein, 9 aa, Artificial Sequence
  Description of Artificial Sequence: Synthetic peptide
DKDHSRIDG

SEQ ID NO: 11247 - protein, 9 aa, Artificial Sequence
  Description of Artificial Sequence: Synthetic peptide
DKHDSRIDG

SEQ ID NO: 11248 - protein, 9 aa, Artificial Sequence
  Description of Artificial Sequence: Synthetic peptide
DKHHGRIDG

SEQ ID NO: 11249 - protein, 9 aa, Artificial Sequence
  Description of Artificial Sequence: Synthetic peptide
DKHHSRFDG

SEQ ID NO: 11250 - protein, 9 aa, Artificial Sequence
  Description of Artificial Sequence: Synthetic peptide
DKHHSRIDC

SEQ ID NO: 11251 - protein, 9 aa, Artificial Sequence
  Description of Artificial Sequence: Synthetic peptide
DKHHSRIDD

SEQ ID NO: 11252 - protein, 9 aa, Artificial Sequence
  Description of Artificial Sequence: Synthetic peptide
DKHHSRIDR

SEQ ID NO: 11253 - protein, 9 aa, Artificial Sequence
  Description of Artificial Sequence: Synthetic peptide
DKHHSRIDV

SEQ ID NO: 11254 - protein, 9 aa, Artificial Sequence
  Description of Artificial Sequence: Synthetic peptide
DKHHSRIHG

SEQ ID NO: 11255 - protein, 9 aa, Artificial Sequence
  Description of Artificial Sequence: Synthetic peptide
DKHHSRITG

SEQ ID NO: 11256 - protein, 9 aa, Artificial Sequence
  Description of Artificial Sequence: Synthetic peptide
DKHHSRIYG

SEQ ID NO: 11257 - protein, 9 aa, Artificial Sequence
  Description of Artificial Sequence: Synthetic peptide
DKHHSRMDG

SEQ ID NO: 11258 - protein, 9 aa, Artificial Sequence
  Description of Artificial Sequence: Synthetic peptide
DKHHSRNDG

SEQ ID NO: 11259 - protein, 9 aa, Artificial Sequence
  Description of Artificial Sequence: Synthetic peptide
DKHHSRVDG

SEQ ID NO: 11260 - protein, 9 aa, Artificial Sequence
  Description of Artificial Sequence: Synthetic peptide
DKHLSRIDG

SEQ ID NO: 11261 - protein, 9 aa, Artificial Sequence
  Description of Artificial Sequence: Synthetic peptide
DKHNSRIDG

SEQ ID NO: 11262 - protein, 9 aa, Artificial Sequence
  Description of Artificial Sequence: Synthetic peptide
DKHPSRIDG

SEQ ID NO: 11263 - protein, 9 aa, Artificial Sequence
  Description of Artificial Sequence: Synthetic peptide
DKHRSRIDG

SEQ ID NO: 11264 - protein, 9 aa, Artificial Sequence
  Description of Artificial Sequence: Synthetic peptide
DKLHSRIDG

SEQ ID NO: 11265 - protein, 9 aa, Artificial Sequence
  Description of Artificial Sequence: Synthetic peptide
DKNHSRIDG

SEQ ID NO: 11266 - protein, 9 aa, Artificial Sequence
  Description of Artificial Sequence: Synthetic peptide
DKPHSRIDG

SEQ ID NO: 11267 - protein, 9 aa, Artificial Sequence
  Description of Artificial Sequence: Synthetic peptide
DKYHSRIDG

SEQ ID NO: 11268 - protein, 9 aa, Artificial Sequence
  Description of Artificial Sequence: Synthetic peptide
DMHHSRIDG

SEQ ID NO: 11269 - protein, 9 aa, Artificial Sequence
  Description of Artificial Sequence: Synthetic peptide
DNGFKLQKS

SEQ ID NO: 11270 - protein, 9 aa, Artificial Sequence
  Description of Artificial Sequence: Synthetic peptide
DNQCSDKGL

SEQ ID NO: 11271 - protein, 9 aa, Artificial Sequence
  Description of Artificial Sequence: Synthetic peptide
DPPNDMGAV

SEQ ID NO: 11272 - protein, 9 aa, Artificial Sequence
  Description of Artificial Sequence: Synthetic peptide
DQHHSRIDG

SEQ ID NO: 11273 - protein, 9 aa, Artificial Sequence
  Description of Artificial Sequence: Synthetic peptide
DRDCNLTSR

SEQ ID NO: 11274 - protein, 9 aa, Artificial Sequence
  Description of Artificial Sequence: Synthetic peptide
DRHHSRIDG

SEQ ID NO: 11275 - protein, 9 aa, Artificial Sequence
  Description of Artificial Sequence: Synthetic peptide
DSRCPAAYF

SEQ ID NO: 11276 - protein, 9 aa, Artificial Sequence
  Description of Artificial Sequence: Synthetic peptide
DTFDRIFCS

SEQ ID NO: 11277 - protein, 9 aa, Artificial Sequence
  Description of Artificial Sequence: Synthetic peptide
DWDHMFEME

SEQ ID NO: 11278 - protein, 9 aa, Artificial Sequence
  Description of Artificial Sequence: Synthetic peptide
DWSHIFGRG

SEQ ID NO: 11279 - protein, 9 aa, Artificial Sequence
  Description of Artificial Sequence: Synthetic peptide
DYNWHACSI

SEQ ID NO: 11280 - protein, 9 aa, Artificial Sequence
  Description of Artificial Sequence: Synthetic peptide
EAIHRQACT

SEQ ID NO: 11281 - protein, 9 aa, Artificial Sequence
  Description of Artificial Sequence: Synthetic peptide
EDIMKESIF

SEQ ID NO: 11282 - protein, 9 aa, Artificial Sequence
  Description of Artificial Sequence: Synthetic peptide
EDNKWHGWH

SEQ ID NO: 11283 - protein, 9 aa, Artificial Sequence
  Description of Artificial Sequence: Synthetic peptide
EEAPGFFCF

SEQ ID NO: 11284 - protein, 9 aa, Artificial Sequence
  Description of Artificial Sequence: Synthetic peptide
EEAPGFICY

SEQ ID NO: 11285 - protein, 9 aa, Artificial Sequence
  Description of Artificial Sequence: Synthetic peptide
EEATGFICF

SEQ ID NO: 11286 - protein, 9 aa, Artificial Sequence
  Description of Artificial Sequence: Synthetic peptide
EEDPGFICF

SEQ ID NO: 11287 - protein, 9 aa, Artificial Sequence
  Description of Artificial Sequence: Synthetic peptide
EEGPGFICF

SEQ ID NO: 11288 - protein, 9 aa, Artificial Sequence
  Description of Artificial Sequence: Synthetic peptide
EEGPGFIFF

SEQ ID NO: 11289 - protein, 9 aa, Artificial Sequence
  Description of Artificial Sequence: Synthetic peptide
EETPGFICF

SEQ ID NO: 11290 - protein, 9 aa, Artificial Sequence
  Description of Artificial Sequence: Synthetic peptide
EFKEFSLCC

SEQ ID NO: 11291 - protein, 9 aa, Artificial Sequence
  Description of Artificial Sequence: Synthetic peptide
EFPIDRRFP

SEQ ID NO: 11292 - protein, 9 aa, Artificial Sequence
  Description of Artificial Sequence: Synthetic peptide
EGDEHEFAG

SEQ ID NO: 11293 - protein, 9 aa, Artificial Sequence
  Description of Artificial Sequence: Synthetic peptide
EGDEPEFAG

SEQ ID NO: 11294 - protein, 9 aa, Artificial Sequence
  Description of Artificial Sequence: Synthetic peptide
EGDEQEFVG

SEQ ID NO: 11295 - protein, 9 aa, Artificial Sequence
  Description of Artificial Sequence: Synthetic peptide
EGFPFEGIS

SEQ ID NO: 11296 - protein, 9 aa, Artificial Sequence
  Description of Artificial Sequence: Synthetic peptide
EGFRFEGII

SEQ ID NO: 11297 - protein, 9 aa, Artificial Sequence
  Description of Artificial Sequence: Synthetic peptide
EGHNYEAML

SEQ ID NO: 11298 - protein, 9 aa, Artificial Sequence
  Description of Artificial Sequence: Synthetic peptide
EGIYFVKHD

SEQ ID NO: 11299 - protein, 9 aa, Artificial Sequence
  Description of Artificial Sequence: Synthetic peptide
EGQNYEALL

SEQ ID NO: 11300 - protein, 9 aa, Artificial Sequence
  Description of Artificial Sequence: Synthetic peptide
EGQNYEAVL

SEQ ID NO: 11301 - protein, 9 aa, Artificial Sequence
  Description of Artificial Sequence: Synthetic peptide
EGQNYESML

SEQ ID NO: 11302 - protein, 9 aa, Artificial Sequence
  Description of Artificial Sequence: Synthetic peptide
EGQNYETML

SEQ ID NO: 11303 - protein, 9 aa, Artificial Sequence
  Description of Artificial Sequence: Synthetic peptide
EGRNYEAML

SEQ ID NO: 11304 - protein, 9 aa, Artificial Sequence
  Description of Artificial Sequence: Synthetic peptide
EIAYDYFPM

SEQ ID NO: 11305 - protein, 9 aa, Artificial Sequence
  Description of Artificial Sequence: Synthetic peptide
EIILKDMCH

SEQ ID NO: 11306 - protein, 9 aa, Artificial Sequence
  Description of Artificial Sequence: Synthetic peptide
EIILKDMWN

SEQ ID NO: 11307 - protein, 9 aa, Artificial Sequence
  Description of Artificial Sequence: Synthetic peptide
EIIVKDMWH

SEQ ID NO: 11308 - protein, 9 aa, Artificial Sequence
  Description of Artificial Sequence: Synthetic peptide
EKAPGFICF

SEQ ID NO: 11309 - protein, 9 aa, Artificial Sequence
  Description of Artificial Sequence: Synthetic peptide
EKCGPCARY

SEQ ID NO: 11310 - protein, 9 aa, Artificial Sequence
  Description of Artificial Sequence: Synthetic peptide
EKCMCHDIS

SEQ ID NO: 11311 - protein, 9 aa, Artificial Sequence
  Description of Artificial Sequence: Synthetic peptide
EKHDGLMRR

SEQ ID NO: 11312 - protein, 9 aa, Artificial Sequence
  Description of Artificial Sequence: Synthetic peptide
EKPDGLMRQ

SEQ ID NO: 11313 - protein, 9 aa, Artificial Sequence
  Description of Artificial Sequence: Synthetic peptide
EKPEPRYKE

SEQ ID NO: 11314 - protein, 9 aa, Artificial Sequence
  Description of Artificial Sequence: Synthetic peptide
EKPQPWYKE

SEQ ID NO: 11315 - protein, 9 aa, Artificial Sequence
  Description of Artificial Sequence: Synthetic peptide
EKPSITCRE

SEQ ID NO: 11316 - protein, 9 aa, Artificial Sequence
  Description of Artificial Sequence: Synthetic peptide
EMCMDVPSV

SEQ ID NO: 11317 - protein, 9 aa, Artificial Sequence
  Description of Artificial Sequence: Synthetic peptide
EQCLAAAGE

SEQ ID NO: 11318 - protein, 9 aa, Artificial Sequence
  Description of Artificial Sequence: Synthetic peptide
EQCLAAAVE

SEQ ID NO: 11319 - protein, 9 aa, Artificial Sequence
  Description of Artificial Sequence: Synthetic peptide
EQCLAAGAE

SEQ ID NO: 11320 - protein, 9 aa, Artificial Sequence
  Description of Artificial Sequence: Synthetic peptide
EQCLAAPAE

SEQ ID NO: 11321 - protein, 9 aa, Artificial Sequence
  Description of Artificial Sequence: Synthetic peptide
EQCLAASAE

SEQ ID NO: 11322 - protein, 9 aa, Artificial Sequence
  Description of Artificial Sequence: Synthetic peptide
EQCVAAAAE

SEQ ID NO: 11323 - protein, 9 aa, Artificial Sequence
  Description of Artificial Sequence: Synthetic peptide
EQDIYGAIV

SEQ ID NO: 11324 - protein, 9 aa, Artificial Sequence
  Description of Artificial Sequence: Synthetic peptide
EQPVGQSHR

SEQ ID NO: 11325 - protein, 9 aa, Artificial Sequence
  Description of Artificial Sequence: Synthetic peptide
EQTEGQSHR

SEQ ID NO: 11326 - protein, 9 aa, Artificial Sequence
  Description of Artificial Sequence: Synthetic peptide
ESINRQACT

SEQ ID NO: 11327 - protein, 9 aa, Artificial Sequence
  Description of Artificial Sequence: Synthetic peptide
EVAPGFICF

SEQ ID NO: 11328 - protein, 9 aa, Artificial Sequence
  Description of Artificial Sequence: Synthetic peptide
EVEYDYFPM

SEQ ID NO: 11329 - protein, 9 aa, Artificial Sequence
  Description of Artificial Sequence: Synthetic peptide
EVIYFVQHD

SEQ ID NO: 11330 - protein, 9 aa, Artificial Sequence
  Description of Artificial Sequence: Synthetic peptide
EVLYFVKHD

SEQ ID NO: 11331 - protein, 9 aa, Artificial Sequence
  Description of Artificial Sequence: Synthetic peptide
EVWCQVEPN

SEQ ID NO: 11332 - protein, 9 aa, Artificial Sequence
  Description of Artificial Sequence: Synthetic peptide
EWACAHAMR

SEQ ID NO: 11333 - protein, 9 aa, Artificial Sequence
  Description of Artificial Sequence: Synthetic peptide
EWDQPNYIE

SEQ ID NO: 11334 - protein, 9 aa, Artificial Sequence
  Description of Artificial Sequence: Synthetic peptide
EWVCAHAMR

SEQ ID NO: 11335 - protein, 9 aa, Artificial Sequence
  Description of Artificial Sequence: Synthetic peptide
EYFQARLWL

SEQ ID NO: 11336 - protein, 9 aa, Artificial Sequence
  Description of Artificial Sequence: Synthetic peptide
EYRQPQSIA

SEQ ID NO: 11337 - protein, 9 aa, Artificial Sequence
  Description of Artificial Sequence: Synthetic peptide
FACPVLWGQ

SEQ ID NO: 11338 - protein, 9 aa, Artificial Sequence
  Description of Artificial Sequence: Synthetic peptide
FANPVLWGQ

SEQ ID NO: 11339 - protein, 9 aa, Artificial Sequence
  Description of Artificial Sequence: Synthetic peptide
FASPILWGQ

SEQ ID NO: 11340 - protein, 9 aa, Artificial Sequence
  Description of Artificial Sequence: Synthetic peptide
FASPVLWGR

SEQ ID NO: 11341 - protein, 9 aa, Artificial Sequence
  Description of Artificial Sequence: Synthetic peptide
FCWRDNEPE

SEQ ID NO: 11342 - protein, 9 aa, Artificial Sequence
  Description of Artificial Sequence: Synthetic peptide
FDGPSVRGE

SEQ ID NO: 11343 - protein, 9 aa, Artificial Sequence
  Description of Artificial Sequence: Synthetic peptide
FDKMYAPQA

SEQ ID NO: 11344 - protein, 9 aa, Artificial Sequence
  Description of Artificial Sequence: Synthetic peptide
FDMCIEYSN

SEQ ID NO: 11345 - protein, 9 aa, Artificial Sequence
  Description of Artificial Sequence: Synthetic peptide
FDMWGVGIP

SEQ ID NO: 11346 - protein, 9 aa, Artificial Sequence
  Description of Artificial Sequence: Synthetic peptide
FDNHANTWA

SEQ ID NO: 11347 - protein, 9 aa, Artificial Sequence
  Description of Artificial Sequence: Synthetic peptide
FDSPVLWGQ

SEQ ID NO: 11348 - protein, 9 aa, Artificial Sequence
  Description of Artificial Sequence: Synthetic peptide
FEQTRFPMQ

SEQ ID NO: 11349 - protein, 9 aa, Artificial Sequence
  Description of Artificial Sequence: Synthetic peptide
FEREFHYYD

SEQ ID NO: 11350 - protein, 9 aa, Artificial Sequence
  Description of Artificial Sequence: Synthetic peptide
FEREFKYYD

SEQ ID NO: 11351 - protein, 9 aa, Artificial Sequence
  Description of Artificial Sequence: Synthetic peptide
FERPPKLGI

SEQ ID NO: 11352 - protein, 9 aa, Artificial Sequence
  Description of Artificial Sequence: Synthetic peptide
FEWEFQYYD

SEQ ID NO: 11353 - protein, 9 aa, Artificial Sequence
  Description of Artificial Sequence: Synthetic peptide
FHDNARLFL

SEQ ID NO: 11354 - protein, 9 aa, Artificial Sequence
  Description of Artificial Sequence: Synthetic peptide
FHLREKDDC

SEQ ID NO: 11355 - protein, 9 aa, Artificial Sequence
  Description of Artificial Sequence: Synthetic peptide
FHYDCQDKV

SEQ ID NO: 11356 - protein, 9 aa, Artificial Sequence
  Description of Artificial Sequence: Synthetic peptide
FHYDCRDNV

SEQ ID NO: 11357 - protein, 9 aa, Artificial Sequence
  Description of Artificial Sequence: Synthetic peptide
FIAHKGQQW

SEQ ID NO: 11358 - protein, 9 aa, Artificial Sequence
  Description of Artificial Sequence: Synthetic peptide
FIEFHVILV

SEQ ID NO: 11359 - protein, 9 aa, Artificial Sequence
  Description of Artificial Sequence: Synthetic peptide
FIGKGYAIF

SEQ ID NO: 11360 - protein, 9 aa, Artificial Sequence
  Description of Artificial Sequence: Synthetic peptide
FIGMGYAIC

SEQ ID NO: 11361 - protein, 9 aa, Artificial Sequence
  Description of Artificial Sequence: Synthetic peptide
FIVHKGRQW

SEQ ID NO: 11362 - protein, 9 aa, Artificial Sequence
  Description of Artificial Sequence: Synthetic peptide
FIVLKGQQW

SEQ ID NO: 11363 - protein, 9 aa, Artificial Sequence
  Description of Artificial Sequence: Synthetic peptide
FIVMGYAIF

SEQ ID NO: 11364 - protein, 9 aa, Artificial Sequence
  Description of Artificial Sequence: Synthetic peptide
FIVNKGQQW

SEQ ID NO: 11365 - protein, 9 aa, Artificial Sequence
  Description of Artificial Sequence: Synthetic peptide
FLERYQHMD

SEQ ID NO: 11366 - protein, 9 aa, Artificial Sequence
  Description of Artificial Sequence: Synthetic peptide
FLFMEPRNG

SEQ ID NO: 11367 - protein, 9 aa, Artificial Sequence
  Description of Artificial Sequence: Synthetic peptide
FLGCYCHYA

SEQ ID NO: 11368 - protein, 9 aa, Artificial Sequence
  Description of Artificial Sequence: Synthetic peptide
FLGCYCLYA

SEQ ID NO: 11369 - protein, 9 aa, Artificial Sequence
  Description of Artificial Sequence: Synthetic peptide
FLGCYCPDA

SEQ ID NO: 11370 - protein, 9 aa, Artificial Sequence
  Description of Artificial Sequence: Synthetic peptide
FLGCYCPSA

SEQ ID NO: 11371 - protein, 9 aa, Artificial Sequence
  Description of Artificial Sequence: Synthetic peptide
FLGCYCPYG

SEQ ID NO: 11372 - protein, 9 aa, Artificial Sequence
  Description of Artificial Sequence: Synthetic peptide
FLGCYCPYS

SEQ ID NO: 11373 - protein, 9 aa, Artificial Sequence
  Description of Artificial Sequence: Synthetic peptide
FLGCYCRYA

SEQ ID NO: 11374 - protein, 9 aa, Artificial Sequence
  Description of Artificial Sequence: Synthetic peptide
FLGCYFPYA

SEQ ID NO: 11375 - protein, 9 aa, Artificial Sequence
  Description of Artificial Sequence: Synthetic peptide
FLGCYGPYA

SEQ ID NO: 11376 - protein, 9 aa, Artificial Sequence
  Description of Artificial Sequence: Synthetic peptide
FLGCYRPYA

SEQ ID NO: 11377 - protein, 9 aa, Artificial Sequence
  Description of Artificial Sequence: Synthetic peptide
FLGFYCPYA

SEQ ID NO: 11378 - protein, 9 aa, Artificial Sequence
  Description of Artificial Sequence: Synthetic peptide
FLGMGYAIF

SEQ ID NO: 11379 - protein, 9 aa, Artificial Sequence
  Description of Artificial Sequence: Synthetic peptide
FLGNTWLGP

SEQ ID NO: 11380 - protein, 9 aa, Artificial Sequence
  Description of Artificial Sequence: Synthetic peptide
FLGWYCPYA

SEQ ID NO: 11381 - protein, 9 aa, Artificial Sequence
  Description of Artificial Sequence: Synthetic peptide
FLGYYCPYA

SEQ ID NO: 11382 - protein, 9 aa, Artificial Sequence
  Description of Artificial Sequence: Synthetic peptide
FLRNAWLGP

SEQ ID NO: 11383 - protein, 9 aa, Artificial Sequence
  Description of Artificial Sequence: Synthetic peptide
FLRNTWLDP

SEQ ID NO: 11384 - protein, 9 aa, Artificial Sequence
  Description of Artificial Sequence: Synthetic peptide
FLRNTWLGA

SEQ ID NO: 11385 - protein, 9 aa, Artificial Sequence
  Description of Artificial Sequence: Synthetic peptide
FLRNTWLGS

SEQ ID NO: 11386 - protein, 9 aa, Artificial Sequence
  Description of Artificial Sequence: Synthetic peptide
FLRNTWLSP

SEQ ID NO: 11387 - protein, 9 aa, Artificial Sequence
  Description of Artificial Sequence: Synthetic peptide
FLRNTWLVP

SEQ ID NO: 11388 - protein, 9 aa, Artificial Sequence
  Description of Artificial Sequence: Synthetic peptide
FMCNIGCFT

SEQ ID NO: 11389 - protein, 9 aa, Artificial Sequence
  Description of Artificial Sequence: Synthetic peptide
FMGCYCPYA

SEQ ID NO: 11390 - protein, 9 aa, Artificial Sequence
  Description of Artificial Sequence: Synthetic peptide
FNVCTMWAQ

SEQ ID NO: 11391 - protein, 9 aa, Artificial Sequence
  Description of Artificial Sequence: Synthetic peptide
FPDCKNKAF

SEQ ID NO: 11392 - protein, 9 aa, Artificial Sequence
  Description of Artificial Sequence: Synthetic peptide
FPLRENDDC

SEQ ID NO: 11393 - protein, 9 aa, Artificial Sequence
  Description of Artificial Sequence: Synthetic peptide
FPTCWRYAK

SEQ ID NO: 11394 - protein, 9 aa, Artificial Sequence
  Description of Artificial Sequence: Synthetic peptide
FPTIGLMAC

SEQ ID NO: 11395 - protein, 9 aa, Artificial Sequence
  Description of Artificial Sequence: Synthetic peptide
FPYCKNKPF

SEQ ID NO: 11396 - protein, 9 aa, Artificial Sequence
  Description of Artificial Sequence: Synthetic peptide
FQRNTWLGP

SEQ ID NO: 11397 - protein, 9 aa, Artificial Sequence
  Description of Artificial Sequence: Synthetic peptide
FRIRCRVNK

SEQ ID NO: 11398 - protein, 9 aa, Artificial Sequence
  Description of Artificial Sequence: Synthetic peptide
FRIRRRVNK

SEQ ID NO: 11399 - protein, 9 aa, Artificial Sequence
  Description of Artificial Sequence: Synthetic peptide
FRRNTWLGP

SEQ ID NO: 11400 - protein, 9 aa, Artificial Sequence
  Description of Artificial Sequence: Synthetic peptide
FSEQHAVND

SEQ ID NO: 11401 - protein, 9 aa, Artificial Sequence
  Description of Artificial Sequence: Synthetic peptide
FSEQHAVNT

SEQ ID NO: 11402 - protein, 9 aa, Artificial Sequence
  Description of Artificial Sequence: Synthetic peptide
FSEQHVVNN

SEQ ID NO: 11403 - protein, 9 aa, Artificial Sequence
  Description of Artificial Sequence: Synthetic peptide
FSERHAVNN

SEQ ID NO: 11404 - protein, 9 aa, Artificial Sequence
  Description of Artificial Sequence: Synthetic peptide
FSGWFRVCD

SEQ ID NO: 11405 - protein, 9 aa, Artificial Sequence
  Description of Artificial Sequence: Synthetic peptide
FSPVERHNG

SEQ ID NO: 11406 - protein, 9 aa, Artificial Sequence
  Description of Artificial Sequence: Synthetic peptide
FTSPVLWGQ

SEQ ID NO: 11407 - protein, 9 aa, Artificial Sequence
  Description of Artificial Sequence: Synthetic peptide
FVCMEPRNG

SEQ ID NO: 11408 - protein, 9 aa, Artificial Sequence
  Description of Artificial Sequence: Synthetic peptide
FVFMDPRNG

SEQ ID NO: 11409 - protein, 9 aa, Artificial Sequence
  Description of Artificial Sequence: Synthetic peptide
FVFVEPRNG

SEQ ID NO: 11410 - protein, 9 aa, Artificial Sequence
  Description of Artificial Sequence: Synthetic peptide
FVKGEFHFH

SEQ ID NO: 11411 - protein, 9 aa, Artificial Sequence
  Description of Artificial Sequence: Synthetic peptide
FVQPFLHDG

SEQ ID NO: 11412 - protein, 9 aa, Artificial Sequence
  Description of Artificial Sequence: Synthetic peptide
FWCRPRLHY

SEQ ID NO: 11413 - protein, 9 aa, Artificial Sequence
  Description of Artificial Sequence: Synthetic peptide
FWPGHNPHN

SEQ ID NO: 11414 - protein, 9 aa, Artificial Sequence
  Description of Artificial Sequence: Synthetic peptide
FWSRMIPLV

SEQ ID NO: 11415 - protein, 9 aa, Artificial Sequence
  Description of Artificial Sequence: Synthetic peptide
FWTGHNPHI

SEQ ID NO: 11416 - protein, 9 aa, Artificial Sequence
  Description of Artificial Sequence: Synthetic peptide
FWTGHNPPN

SEQ ID NO: 11417 - protein, 9 aa, Artificial Sequence
  Description of Artificial Sequence: Synthetic peptide
FWTGRNPHN

SEQ ID NO: 11418 - protein, 9 aa, Artificial Sequence
  Description of Artificial Sequence: Synthetic peptide
FYPGERHNG

SEQ ID NO: 11419 - protein, 9 aa, Artificial Sequence
  Description of Artificial Sequence: Synthetic peptide
GCDGYALAI

SEQ ID NO: 11420 - protein, 9 aa, Artificial Sequence
  Description of Artificial Sequence: Synthetic peptide
GCDPYNMVD

SEQ ID NO: 11421 - protein, 9 aa, Artificial Sequence
  Description of Artificial Sequence: Synthetic peptide
GDDDCCDRK

SEQ ID NO: 11422 - protein, 9 aa, Artificial Sequence
  Description of Artificial Sequence: Synthetic peptide
GDHHGMVGC

SEQ ID NO: 11423 - protein, 9 aa, Artificial Sequence
  Description of Artificial Sequence: Synthetic peptide
GDKIKFSDR

SEQ ID NO: 11424 - protein, 9 aa, Artificial Sequence
  Description of Artificial Sequence: Synthetic peptide
GDKMGICHC

SEQ ID NO: 11425 - protein, 9 aa, Artificial Sequence
  Description of Artificial Sequence: Synthetic peptide
GDKMGIHHC

SEQ ID NO: 11426 - protein, 9 aa, Artificial Sequence
  Description of Artificial Sequence: Synthetic peptide
GDKMYAPQA

SEQ ID NO: 11427 - protein, 9 aa, Artificial Sequence
  Description of Artificial Sequence: Synthetic peptide
GDPHGMGGC

SEQ ID NO: 11428 - protein, 9 aa, Artificial Sequence
  Description of Artificial Sequence: Synthetic peptide
GDPHGMLGC

SEQ ID NO: 11429 - protein, 9 aa, Artificial Sequence
  Description of Artificial Sequence: Synthetic peptide
GDPPGMVGC

SEQ ID NO: 11430 - protein, 9 aa, Artificial Sequence
  Description of Artificial Sequence: Synthetic peptide
GDPQGMVGC

SEQ ID NO: 11431 - protein, 9 aa, Artificial Sequence
  Description of Artificial Sequence: Synthetic peptide
GDVDCCDRT

SEQ ID NO: 11432 - protein, 9 aa, Artificial Sequence
  Description of Artificial Sequence: Synthetic peptide
GDYHYRVNW

SEQ ID NO: 11433 - protein, 9 aa, Artificial Sequence
  Description of Artificial Sequence: Synthetic peptide
GEAPGFICF

SEQ ID NO: 11434 - protein, 9 aa, Artificial Sequence
  Description of Artificial Sequence: Synthetic peptide
GENKVNDPA

SEQ ID NO: 11435 - protein, 9 aa, Artificial Sequence
  Description of Artificial Sequence: Synthetic peptide
GEYHCRVNW

SEQ ID NO: 11436 - protein, 9 aa, Artificial Sequence
  Description of Artificial Sequence: Synthetic peptide
GEYKLNDPA

SEQ ID NO: 11437 - protein, 9 aa, Artificial Sequence
  Description of Artificial Sequence: Synthetic peptide
GEYKVNDPP

SEQ ID NO: 11438 - protein, 9 aa, Artificial Sequence
  Description of Artificial Sequence: Synthetic peptide
GEYRVNDPA

SEQ ID NO: 11439 - protein, 9 aa, Artificial Sequence
  Description of Artificial Sequence: Synthetic peptide
GFCRGHYQA

SEQ ID NO: 11440 - protein, 9 aa, Artificial Sequence
  Description of Artificial Sequence: Synthetic peptide
GFMCNLCGP

SEQ ID NO: 11441 - protein, 9 aa, Artificial Sequence
  Description of Artificial Sequence: Synthetic peptide
GFQTKFHLC

SEQ ID NO: 11442 - protein, 9 aa, Artificial Sequence
  Description of Artificial Sequence: Synthetic peptide
GGDGYAIAI

SEQ ID NO: 11443 - protein, 9 aa, Artificial Sequence
  Description of Artificial Sequence: Synthetic peptide
GGRHGYLHD

SEQ ID NO: 11444 - protein, 9 aa, Artificial Sequence
  Description of Artificial Sequence: Synthetic peptide
GGWQMCYDS

SEQ ID NO: 11445 - protein, 9 aa, Artificial Sequence
  Description of Artificial Sequence: Synthetic peptide
GGYKVNDPA

SEQ ID NO: 11446 - protein, 9 aa, Artificial Sequence
  Description of Artificial Sequence: Synthetic peptide
GIIHHCVSE

SEQ ID NO: 11447 - protein, 9 aa, Artificial Sequence
  Description of Artificial Sequence: Synthetic peptide
GIIRHCFSE

SEQ ID NO: 11448 - protein, 9 aa, Artificial Sequence
  Description of Artificial Sequence: Synthetic peptide
GIIRHCLSE

SEQ ID NO: 11449 - protein, 9 aa, Artificial Sequence
  Description of Artificial Sequence: Synthetic peptide
GIIRHCVIE

SEQ ID NO: 11450 - protein, 9 aa, Artificial Sequence
  Description of Artificial Sequence: Synthetic peptide
GIIRNCVSE

SEQ ID NO: 11451 - protein, 9 aa, Artificial Sequence
  Description of Artificial Sequence: Synthetic peptide
GKHHSRIDG

SEQ ID NO: 11452 - protein, 9 aa, Artificial Sequence
  Description of Artificial Sequence: Synthetic peptide
GLRDGNSIF

SEQ ID NO: 11453 - protein, 9 aa, Artificial Sequence
  Description of Artificial Sequence: Synthetic peptide
GMIPYNWSW

SEQ ID NO: 11454 - protein, 9 aa, Artificial Sequence
  Description of Artificial Sequence: Synthetic peptide
GMPATELWL

SEQ ID NO: 11455 - protein, 9 aa, Artificial Sequence
  Description of Artificial Sequence: Synthetic peptide
GMRRDGLDV

SEQ ID NO: 11456 - protein, 9 aa, Artificial Sequence
  Description of Artificial Sequence: Synthetic peptide
GMRWDRDQL

SEQ ID NO: 11457 - protein, 9 aa, Artificial Sequence
  Description of Artificial Sequence: Synthetic peptide
GMSSHTPIY

SEQ ID NO: 11458 - protein, 9 aa, Artificial Sequence
  Description of Artificial Sequence: Synthetic peptide
GNCNKRHNW

SEQ ID NO: 11459 - protein, 9 aa, Artificial Sequence
  Description of Artificial Sequence: Synthetic peptide
GPKKGGQAM

SEQ ID NO: 11460 - protein, 9 aa, Artificial Sequence
  Description of Artificial Sequence: Synthetic peptide
GPKQGGQSM

SEQ ID NO: 11461 - protein, 9 aa, Artificial Sequence
  Description of Artificial Sequence: Synthetic peptide
GPVLPDVGG

SEQ ID NO: 11462 - protein, 9 aa, Artificial Sequence
  Description of Artificial Sequence: Synthetic peptide
GPVMPDVGA

SEQ ID NO: 11463 - protein, 9 aa, Artificial Sequence
  Description of Artificial Sequence: Synthetic peptide
GRSSHPPIY

SEQ ID NO: 11464 - protein, 9 aa, Artificial Sequence
  Description of Artificial Sequence: Synthetic peptide
GSKSGGADD

SEQ ID NO: 11465 - protein, 9 aa, Artificial Sequence
  Description of Artificial Sequence: Synthetic peptide
GSKYGGDDD

SEQ ID NO: 11466 - protein, 9 aa, Artificial Sequence
  Description of Artificial Sequence: Synthetic peptide
GSNSGGDDD

SEQ ID NO: 11467 - protein, 9 aa, Artificial Sequence
  Description of Artificial Sequence: Synthetic peptide
GVRRVKIEW

SEQ ID NO: 11468 - protein, 9 aa, Artificial Sequence
  Description of Artificial Sequence: Synthetic peptide
GWIEDKREV

SEQ ID NO: 11469 - protein, 9 aa, Artificial Sequence
  Description of Artificial Sequence: Synthetic peptide
GWSEEKREV

SEQ ID NO: 11470 - protein, 9 aa, Artificial Sequence
  Description of Artificial Sequence: Synthetic peptide
HDDWKKQPN

SEQ ID NO: 11471 - protein, 9 aa, Artificial Sequence
  Description of Artificial Sequence: Synthetic peptide
HGAERFDRF

SEQ ID NO: 11472 - protein, 9 aa, Artificial Sequence
  Description of Artificial Sequence: Synthetic peptide
HGAERVDRV

SEQ ID NO: 11473 - protein, 9 aa, Artificial Sequence
  Description of Artificial Sequence: Synthetic peptide
HGLVDFDPH

SEQ ID NO: 11474 - protein, 9 aa, Artificial Sequence
  Description of Artificial Sequence: Synthetic peptide
HKHHSRIDG

SEQ ID NO: 11475 - protein, 9 aa, Artificial Sequence
  Description of Artificial Sequence: Synthetic peptide
HNHTRKDPV

SEQ ID NO: 11476 - protein, 9 aa, Artificial Sequence
  Description of Artificial Sequence: Synthetic peptide
HVANEEVGG

SEQ ID NO: 11477 - protein, 9 aa, Artificial Sequence
  Description of Artificial Sequence: Synthetic peptide
HVGNEEVSG

SEQ ID NO: 11478 - protein, 9 aa, Artificial Sequence
  Description of Artificial Sequence: Synthetic peptide
HWRVQLPWN

SEQ ID NO: 11479 - protein, 9 aa, Artificial Sequence
  Description of Artificial Sequence: Synthetic peptide
ICHANNVRV

SEQ ID NO: 11480 - protein, 9 aa, Artificial Sequence
  Description of Artificial Sequence: Synthetic peptide
ICKARIEKY

SEQ ID NO: 11481 - protein, 9 aa, Artificial Sequence
  Description of Artificial Sequence: Synthetic peptide
ICKPRLEKY

SEQ ID NO: 11482 - protein, 9 aa, Artificial Sequence
  Description of Artificial Sequence: Synthetic peptide
ICPANNVRG

SEQ ID NO: 11483 - protein, 9 aa, Artificial Sequence
  Description of Artificial Sequence: Synthetic peptide
ICPANNVRL

SEQ ID NO: 11484 - protein, 9 aa, Artificial Sequence
  Description of Artificial Sequence: Synthetic peptide
ICPVNNVRV

SEQ ID NO: 11485 - protein, 9 aa, Artificial Sequence
  Description of Artificial Sequence: Synthetic peptide
ICRPRIEKY

SEQ ID NO: 11486 - protein, 9 aa, Artificial Sequence
  Description of Artificial Sequence: Synthetic peptide
ICSANNVRV

SEQ ID NO: 11487 - protein, 9 aa, Artificial Sequence
  Description of Artificial Sequence: Synthetic peptide
ICSIDNNNY

SEQ ID NO: 11488 - protein, 9 aa, Artificial Sequence
  Description of Artificial Sequence: Synthetic peptide
ICSMDNKNY

SEQ ID NO: 11489 - protein, 9 aa, Artificial Sequence
  Description of Artificial Sequence: Synthetic peptide
IDHDNWDMR

SEQ ID NO: 11490 - protein, 9 aa, Artificial Sequence
  Description of Artificial Sequence: Synthetic peptide
IEKDEMPVC

SEQ ID NO: 11491 - protein, 9 aa, Artificial Sequence
  Description of Artificial Sequence: Synthetic peptide
IERPPKLGT

SEQ ID NO: 11492 - protein, 9 aa, Artificial Sequence
  Description of Artificial Sequence: Synthetic peptide
IFLNIFELR

SEQ ID NO: 11493 - protein, 9 aa, Artificial Sequence
  Description of Artificial Sequence: Synthetic peptide
IFLNIFEML

SEQ ID NO: 11494 - protein, 9 aa, Artificial Sequence
  Description of Artificial Sequence: Synthetic peptide
IGANGWQCC

SEQ ID NO: 11495 - protein, 9 aa, Artificial Sequence
  Description of Artificial Sequence: Synthetic peptide
IGLVDFDPH

SEQ ID NO: 11496 - protein, 9 aa, Artificial Sequence
  Description of Artificial Sequence: Synthetic peptide
IHAPKLLWL

SEQ ID NO: 11497 - protein, 9 aa, Artificial Sequence
  Description of Artificial Sequence: Synthetic peptide
IHCPDSWSQ

SEQ ID NO: 11498 - protein, 9 aa, Artificial Sequence
  Description of Artificial Sequence: Synthetic peptide
IHCPEAWSQ

SEQ ID NO: 11499 - protein, 9 aa, Artificial Sequence
  Description of Artificial Sequence: Synthetic peptide
IHCPESWSL

SEQ ID NO: 11500 - protein, 9 aa, Artificial Sequence
  Description of Artificial Sequence: Synthetic peptide
IHGPCTPWD

SEQ ID NO: 11501 - protein, 9 aa, Artificial Sequence
  Description of Artificial Sequence: Synthetic peptide
IHHEGRSVC

SEQ ID NO: 11502 - protein, 9 aa, Artificial Sequence
  Description of Artificial Sequence: Synthetic peptide
IHPPKLLWL

SEQ ID NO: 11503 - protein, 9 aa, Artificial Sequence
  Description of Artificial Sequence: Synthetic peptide
IHSPKLLWL

SEQ ID NO: 11504 - protein, 9 aa, Artificial Sequence
  Description of Artificial Sequence: Synthetic peptide
IHTNMRVIS

SEQ ID NO: 11505 - protein, 9 aa, Artificial Sequence
  Description of Artificial Sequence: Synthetic peptide
IHTNMRVIV

SEQ ID NO: 11506 - protein, 9 aa, Artificial Sequence
  Description of Artificial Sequence: Synthetic peptide
IHTPRLLWL

SEQ ID NO: 11507 - protein, 9 aa, Artificial Sequence
  Description of Artificial Sequence: Synthetic peptide
IIKFEWQEV

SEQ ID NO: 11508 - protein, 9 aa, Artificial Sequence
  Description of Artificial Sequence: Synthetic peptide
IIKFEWQKF

SEQ ID NO: 11509 - protein, 9 aa, Artificial Sequence
  Description of Artificial Sequence: Synthetic peptide
IIKFEWQQV

SEQ ID NO: 11510 - protein, 9 aa, Artificial Sequence
  Description of Artificial Sequence: Synthetic peptide
IIKFEWQRV

SEQ ID NO: 11511 - protein, 9 aa, Artificial Sequence
  Description of Artificial Sequence: Synthetic peptide
IKDQNKEWN

SEQ ID NO: 11512 - protein, 9 aa, Artificial Sequence
  Description of Artificial Sequence: Synthetic peptide
ILRNTWLGP

SEQ ID NO: 11513 - protein, 9 aa, Artificial Sequence
  Description of Artificial Sequence: Synthetic peptide
IMNEAHYRF

SEQ ID NO: 11514 - protein, 9 aa, Artificial Sequence
  Description of Artificial Sequence: Synthetic peptide
IMNKDHYRF

SEQ ID NO: 11515 - protein, 9 aa, Artificial Sequence
  Description of Artificial Sequence: Synthetic peptide
IMNRAHYRF

SEQ ID NO: 11516 - protein, 9 aa, Artificial Sequence
  Description of Artificial Sequence: Synthetic peptide
INGSNTLTN

SEQ ID NO: 11517 - protein, 9 aa, Artificial Sequence
  Description of Artificial Sequence: Synthetic peptide
IPECWWRWH

SEQ ID NO: 11518 - protein, 9 aa, Artificial Sequence
  Description of Artificial Sequence: Synthetic peptide
IPEFWLRWH

SEQ ID NO: 11519 - protein, 9 aa, Artificial Sequence
  Description of Artificial Sequence: Synthetic peptide
IPEIWWRWH

SEQ ID NO: 11520 - protein, 9 aa, Artificial Sequence
  Description of Artificial Sequence: Synthetic peptide
IPKDEMPVC

SEQ ID NO: 11521 - protein, 9 aa, Artificial Sequence
  Description of Artificial Sequence: Synthetic peptide
IPPLKTEDN

SEQ ID NO: 11522 - protein, 9 aa, Artificial Sequence
  Description of Artificial Sequence: Synthetic peptide
IPRNVYMCD

SEQ ID NO: 11523 - protein, 9 aa, Artificial Sequence
  Description of Artificial Sequence: Synthetic peptide
IPRTVYMCD

SEQ ID NO: 11524 - protein, 9 aa, Artificial Sequence
  Description of Artificial Sequence: Synthetic peptide
IQKDEMPFC

SEQ ID NO: 11525 - protein, 9 aa, Artificial Sequence
  Description of Artificial Sequence: Synthetic peptide
IQKDEMPVW

SEQ ID NO: 11526 - protein, 9 aa, Artificial Sequence
  Description of Artificial Sequence: Synthetic peptide
IQKYEMPVC

SEQ ID NO: 11527 - protein, 9 aa, Artificial Sequence
  Description of Artificial Sequence: Synthetic peptide
IQRDEMPVC

SEQ ID NO: 11528 - protein, 9 aa, Artificial Sequence
  Description of Artificial Sequence: Synthetic peptide
IRPNDSSFH

SEQ ID NO: 11529 - protein, 9 aa, Artificial Sequence
  Description of Artificial Sequence: Synthetic peptide
IRPNEGSFH

SEQ ID NO: 11530 - protein, 9 aa, Artificial Sequence
  Description of Artificial Sequence: Synthetic peptide
IRPNESSFP

SEQ ID NO: 11531 - protein, 9 aa, Artificial Sequence
  Description of Artificial Sequence: Synthetic peptide
ISGKEMNST

SEQ ID NO: 11532 - protein, 9 aa, Artificial Sequence
  Description of Artificial Sequence: Synthetic peptide
ISNEMSKIL

SEQ ID NO: 11533 - protein, 9 aa, Artificial Sequence
  Description of Artificial Sequence: Synthetic peptide
IVADNTVCA

SEQ ID NO: 11534 - protein, 9 aa, Artificial Sequence
  Description of Artificial Sequence: Synthetic peptide
IVDDHTVCA

SEQ ID NO: 11535 - protein, 9 aa, Artificial Sequence
  Description of Artificial Sequence: Synthetic peptide
IVDTNTATK

SEQ ID NO: 11536 - protein, 9 aa, Artificial Sequence
  Description of Artificial Sequence: Synthetic peptide
IVPRFLVEA

SEQ ID NO: 11537 - protein, 9 aa, Artificial Sequence
  Description of Artificial Sequence: Synthetic peptide
IWPANNVRV

SEQ ID NO: 11538 - protein, 9 aa, Artificial Sequence
  Description of Artificial Sequence: Synthetic peptide
KDDWAGYQM

SEQ ID NO: 11539 - protein, 9 aa, Artificial Sequence
  Description of Artificial Sequence: Synthetic peptide
KDIREIWDI

SEQ ID NO: 11540 - protein, 9 aa, Artificial Sequence
  Description of Artificial Sequence: Synthetic peptide
KDIRGIWDI

SEQ ID NO: 11541 - protein, 9 aa, Artificial Sequence
  Description of Artificial Sequence: Synthetic peptide
KDIRVIWDI

SEQ ID NO: 11542 - protein, 9 aa, Artificial Sequence
  Description of Artificial Sequence: Synthetic peptide
KDMRDIWDI

SEQ ID NO: 11543 - protein, 9 aa, Artificial Sequence
  Description of Artificial Sequence: Synthetic peptide
KDSWAGYQM

SEQ ID NO: 11544 - protein, 9 aa, Artificial Sequence
  Description of Artificial Sequence: Synthetic peptide
KDWMPSYAL

SEQ ID NO: 11545 - protein, 9 aa, Artificial Sequence
  Description of Artificial Sequence: Synthetic peptide
KDYWAEYQM

SEQ ID NO: 11546 - protein, 9 aa, Artificial Sequence
  Description of Artificial Sequence: Synthetic peptide
KDYWAGCQM

SEQ ID NO: 11547 - protein, 9 aa, Artificial Sequence
  Description of Artificial Sequence: Synthetic peptide
KDYWAGYKM

SEQ ID NO: 11548 - protein, 9 aa, Artificial Sequence
  Description of Artificial Sequence: Synthetic peptide
KDYWAGYRM

SEQ ID NO: 11549 - protein, 9 aa, Artificial Sequence
  Description of Artificial Sequence: Synthetic peptide
KDYWAVYQM

SEQ ID NO: 11550 - protein, 9 aa, Artificial Sequence
  Description of Artificial Sequence: Synthetic peptide
KEGCHGRMG

SEQ ID NO: 11551 - protein, 9 aa, Artificial Sequence
  Description of Artificial Sequence: Synthetic peptide
KEGCHVRVG

SEQ ID NO: 11552 - protein, 9 aa, Artificial Sequence
  Description of Artificial Sequence: Synthetic peptide
KELSCDQNW

SEQ ID NO: 11553 - protein, 9 aa, Artificial Sequence
  Description of Artificial Sequence: Synthetic peptide
KFLLAFEVT

SEQ ID NO: 11554 - protein, 9 aa, Artificial Sequence
  Description of Artificial Sequence: Synthetic peptide
KFLYAAGWC

SEQ ID NO: 11555 - protein, 9 aa, Artificial Sequence
  Description of Artificial Sequence: Synthetic peptide
KGIVTDRIL

SEQ ID NO: 11556 - protein, 9 aa, Artificial Sequence
  Description of Artificial Sequence: Synthetic peptide
KHENKKDVL

SEQ ID NO: 11557 - protein, 9 aa, Artificial Sequence
  Description of Artificial Sequence: Synthetic peptide
KIMQFCWDF

SEQ ID NO: 11558 - protein, 9 aa, Artificial Sequence
  Description of Artificial Sequence: Synthetic peptide
KKFLCWEWS

SEQ ID NO: 11559 - protein, 9 aa, Artificial Sequence
  Description of Artificial Sequence: Synthetic peptide
KLCNPVVFV

SEQ ID NO: 11560 - protein, 9 aa, Artificial Sequence
  Description of Artificial Sequence: Synthetic peptide
KMCAYQPDT

SEQ ID NO: 11561 - protein, 9 aa, Artificial Sequence
  Description of Artificial Sequence: Synthetic peptide
KMCHDERQV

SEQ ID NO: 11562 - protein, 9 aa, Artificial Sequence
  Description of Artificial Sequence: Synthetic peptide
KMCPDERKV

SEQ ID NO: 11563 - protein, 9 aa, Artificial Sequence
  Description of Artificial Sequence: Synthetic peptide
KMCPDERQL

SEQ ID NO: 11564 - protein, 9 aa, Artificial Sequence
  Description of Artificial Sequence: Synthetic peptide
KMCTDERQV

SEQ ID NO: 11565 - protein, 9 aa, Artificial Sequence
  Description of Artificial Sequence: Synthetic peptide
KMFPDERQV

SEQ ID NO: 11566 - protein, 9 aa, Artificial Sequence
  Description of Artificial Sequence: Synthetic peptide
KMGPDERQV

SEQ ID NO: 11567 - protein, 9 aa, Artificial Sequence
  Description of Artificial Sequence: Synthetic peptide
KMLIDEPTL

SEQ ID NO: 11568 - protein, 9 aa, Artificial Sequence
  Description of Artificial Sequence: Synthetic peptide
KMLIDQATL

SEQ ID NO: 11569 - protein, 9 aa, Artificial Sequence
  Description of Artificial Sequence: Synthetic peptide
KMLMDEATL

SEQ ID NO: 11570 - protein, 9 aa, Artificial Sequence
  Description of Artificial Sequence: Synthetic peptide
KMLNDEATL

SEQ ID NO: 11571 - protein, 9 aa, Artificial Sequence
  Description of Artificial Sequence: Synthetic peptide
KMRIDEATL

SEQ ID NO: 11572 - protein, 9 aa, Artificial Sequence
  Description of Artificial Sequence: Synthetic peptide
KMWPDERQV

SEQ ID NO: 11573 - protein, 9 aa, Artificial Sequence
  Description of Artificial Sequence: Synthetic peptide
KNFEELDND

SEQ ID NO: 11574 - protein, 9 aa, Artificial Sequence
  Description of Artificial Sequence: Synthetic peptide
KNFEKLDNE

SEQ ID NO: 11575 - protein, 9 aa, Artificial Sequence
  Description of Artificial Sequence: Synthetic peptide
KNFEKLDYD

SEQ ID NO: 11576 - protein, 9 aa, Artificial Sequence
  Description of Artificial Sequence: Synthetic peptide
KNFEKLNND

SEQ ID NO: 11577 - protein, 9 aa, Artificial Sequence
  Description of Artificial Sequence: Synthetic peptide
KNKCIENRW

SEQ ID NO: 11578 - protein, 9 aa, Artificial Sequence
  Description of Artificial Sequence: Synthetic peptide
KPCPVRPPH

SEQ ID NO: 11579 - protein, 9 aa, Artificial Sequence
  Description of Artificial Sequence: Synthetic peptide
KPDDEFDCD

SEQ ID NO: 11580 - protein, 9 aa, Artificial Sequence
  Description of Artificial Sequence: Synthetic peptide
KPVYLYCSD

SEQ ID NO: 11581 - protein, 9 aa, Artificial Sequence
  Description of Artificial Sequence: Synthetic peptide
KQCLAAAAE

SEQ ID NO: 11582 - protein, 9 aa, Artificial Sequence
  Description of Artificial Sequence: Synthetic peptide
KSEWQLMYG

SEQ ID NO: 11583 - protein, 9 aa, Artificial Sequence
  Description of Artificial Sequence: Synthetic peptide
KTADEFDCD

SEQ ID NO: 11584 - protein, 9 aa, Artificial Sequence
  Description of Artificial Sequence: Synthetic peptide
KWERYRDFI

SEQ ID NO: 11585 - protein, 9 aa, Artificial Sequence
  Description of Artificial Sequence: Synthetic peptide
KYKREEYEK

SEQ ID NO: 11586 - protein, 9 aa, Artificial Sequence
  Description of Artificial Sequence: Synthetic peptide
LCKLPEIRK

SEQ ID NO: 11587 - protein, 9 aa, Artificial Sequence
  Description of Artificial Sequence: Synthetic peptide
LDAKMVQPS

SEQ ID NO: 11588 - protein, 9 aa, Artificial Sequence
  Description of Artificial Sequence: Synthetic peptide
LDCDSVWSP

SEQ ID NO: 11589 - protein, 9 aa, Artificial Sequence
  Description of Artificial Sequence: Synthetic peptide
LDLKMVQPS

SEQ ID NO: 11590 - protein, 9 aa, Artificial Sequence
  Description of Artificial Sequence: Synthetic peptide
LEGEGMWAF

SEQ ID NO: 11591 - protein, 9 aa, Artificial Sequence
  Description of Artificial Sequence: Synthetic peptide
LERKPRNDC

SEQ ID NO: 11592 - protein, 9 aa, Artificial Sequence
  Description of Artificial Sequence: Synthetic peptide
LERKPRNYF

SEQ ID NO: 11593 - protein, 9 aa, Artificial Sequence
  Description of Artificial Sequence: Synthetic peptide
LERKPRSYC

SEQ ID NO: 11594 - protein, 9 aa, Artificial Sequence
  Description of Artificial Sequence: Synthetic peptide
LERQPRNYC

SEQ ID NO: 11595 - protein, 9 aa, Artificial Sequence
  Description of Artificial Sequence: Synthetic peptide
LESEGMWSF

SEQ ID NO: 11596 - protein, 9 aa, Artificial Sequence
  Description of Artificial Sequence: Synthetic peptide
LHHEGRSVC

SEQ ID NO: 11597 - protein, 9 aa, Artificial Sequence
  Description of Artificial Sequence: Synthetic peptide
LKHPPQPKV

SEQ ID NO: 11598 - protein, 9 aa, Artificial Sequence
  Description of Artificial Sequence: Synthetic peptide
LKQINRHPC

SEQ ID NO: 11599 - protein, 9 aa, Artificial Sequence
  Description of Artificial Sequence: Synthetic peptide
LMDAIDSIW

SEQ ID NO: 11600 - protein, 9 aa, Artificial Sequence
  Description of Artificial Sequence: Synthetic peptide
LMVAIDSIW

SEQ ID NO: 11601 - protein, 9 aa, Artificial Sequence
  Description of Artificial Sequence: Synthetic peptide
LNYCDQYGD

SEQ ID NO: 11602 - protein, 9 aa, Artificial Sequence
  Description of Artificial Sequence: Synthetic peptide
LNYCDQYVG

SEQ ID NO: 11603 - protein, 9 aa, Artificial Sequence
  Description of Artificial Sequence: Synthetic peptide
LNYERRDNY

SEQ ID NO: 11604 - protein, 9 aa, Artificial Sequence
  Description of Artificial Sequence: Synthetic peptide
LPAYTTPIV

SEQ ID NO: 11605 - protein, 9 aa, Artificial Sequence
  Description of Artificial Sequence: Synthetic peptide
LPFGNKFPD

SEQ ID NO: 11606 - protein, 9 aa, Artificial Sequence
  Description of Artificial Sequence: Synthetic peptide
LPGPVTVSW

SEQ ID NO: 11607 - protein, 9 aa, Artificial Sequence
  Description of Artificial Sequence: Synthetic peptide
LPKPHFDKQ

SEQ ID NO: 11608 - protein, 9 aa, Artificial Sequence
  Description of Artificial Sequence: Synthetic peptide
LPKPYFDKK

SEQ ID NO: 11609 - protein, 9 aa, Artificial Sequence
  Description of Artificial Sequence: Synthetic peptide
LPLLKTEDN

SEQ ID NO: 11610 - protein, 9 aa, Artificial Sequence
  Description of Artificial Sequence: Synthetic peptide
LPLTDAPMV

SEQ ID NO: 11611 - protein, 9 aa, Artificial Sequence
  Description of Artificial Sequence: Synthetic peptide
LPPLETEDN

SEQ ID NO: 11612 - protein, 9 aa, Artificial Sequence
  Description of Artificial Sequence: Synthetic peptide
LPPLKTEAN

SEQ ID NO: 11613 - protein, 9 aa, Artificial Sequence
  Description of Artificial Sequence: Synthetic peptide
LPPLKTEDD

SEQ ID NO: 11614 - protein, 9 aa, Artificial Sequence
  Description of Artificial Sequence: Synthetic peptide
LPPLKTEDT

SEQ ID NO: 11615 - protein, 9 aa, Artificial Sequence
  Description of Artificial Sequence: Synthetic peptide
LPPLKTKDN

SEQ ID NO: 11616 - protein, 9 aa, Artificial Sequence
  Description of Artificial Sequence: Synthetic peptide
LPPLKTVDN

SEQ ID NO: 11617 - protein, 9 aa, Artificial Sequence
  Description of Artificial Sequence: Synthetic peptide
LPPLRTEDN

SEQ ID NO: 11618 - protein, 9 aa, Artificial Sequence
  Description of Artificial Sequence: Synthetic peptide
LQRLGYSPD

SEQ ID NO: 11619 - protein, 9 aa, Artificial Sequence
  Description of Artificial Sequence: Synthetic peptide
LQTYTTPIV

SEQ ID NO: 11620 - protein, 9 aa, Artificial Sequence
  Description of Artificial Sequence: Synthetic peptide
LRIDPKDSF

SEQ ID NO: 11621 - protein, 9 aa, Artificial Sequence
  Description of Artificial Sequence: Synthetic peptide
LSICHPVMP

SEQ ID NO: 11622 - protein, 9 aa, Artificial Sequence
  Description of Artificial Sequence: Synthetic peptide
LSICKPVMP

SEQ ID NO: 11623 - protein, 9 aa, Artificial Sequence
  Description of Artificial Sequence: Synthetic peptide
LWDHGASYK

SEQ ID NO: 11624 - protein, 9 aa, Artificial Sequence
  Description of Artificial Sequence: Synthetic peptide
LWHHGASYM

SEQ ID NO: 11625 - protein, 9 aa, Artificial Sequence
  Description of Artificial Sequence: Synthetic peptide
LYDQSRSQL

SEQ ID NO: 11626 - protein, 9 aa, Artificial Sequence
  Description of Artificial Sequence: Synthetic peptide
LYPCKMPMN

SEQ ID NO: 11627 - protein, 9 aa, Artificial Sequence
  Description of Artificial Sequence: Synthetic peptide
LYYPSRSQL

SEQ ID NO: 11628 - protein, 9 aa, Artificial Sequence
  Description of Artificial Sequence: Synthetic peptide
LYYQSRSKL

SEQ ID NO: 11629 - protein, 9 aa, Artificial Sequence
  Description of Artificial Sequence: Synthetic peptide
MCKPRIEKY

SEQ ID NO: 11630 - protein, 9 aa, Artificial Sequence
  Description of Artificial Sequence: Synthetic peptide
MCLIDGKDW

SEQ ID NO: 11631 - protein, 9 aa, Artificial Sequence
  Description of Artificial Sequence: Synthetic peptide
MCSIDNKNY

SEQ ID NO: 11632 - protein, 9 aa, Artificial Sequence
  Description of Artificial Sequence: Synthetic peptide
MDKHGCCCL

SEQ ID NO: 11633 - protein, 9 aa, Artificial Sequence
  Description of Artificial Sequence: Synthetic peptide
MDKLGCCCW

SEQ ID NO: 11634 - protein, 9 aa, Artificial Sequence
  Description of Artificial Sequence: Synthetic peptide
MDMQGGKVC

SEQ ID NO: 11635 - protein, 9 aa, Artificial Sequence
  Description of Artificial Sequence: Synthetic peptide
MDQHGCCCW

SEQ ID NO: 11636 - protein, 9 aa, Artificial Sequence
  Description of Artificial Sequence: Synthetic peptide
MDWCVQQSS

SEQ ID NO: 11637 - protein, 9 aa, Artificial Sequence
  Description of Artificial Sequence: Synthetic peptide
MDWCVQQST

SEQ ID NO: 11638 - protein, 9 aa, Artificial Sequence
  Description of Artificial Sequence: Synthetic peptide
MEADHKSDP

SEQ ID NO: 11639 - protein, 9 aa, Artificial Sequence
  Description of Artificial Sequence: Synthetic peptide
MKGCFVHHS

SEQ ID NO: 11640 - protein, 9 aa, Artificial Sequence
  Description of Artificial Sequence: Synthetic peptide
MKGYFIHHS

SEQ ID NO: 11641 - protein, 9 aa, Artificial Sequence
  Description of Artificial Sequence: Synthetic peptide
MKGYFVHHY

SEQ ID NO: 11642 - protein, 9 aa, Artificial Sequence
  Description of Artificial Sequence: Synthetic peptide
MMPCMVNFG

SEQ ID NO: 11643 - protein, 9 aa, Artificial Sequence
  Description of Artificial Sequence: Synthetic peptide
MNKCIENRG

SEQ ID NO: 11644 - protein, 9 aa, Artificial Sequence
  Description of Artificial Sequence: Synthetic peptide
MNKWIENRW

SEQ ID NO: 11645 - protein, 9 aa, Artificial Sequence
  Description of Artificial Sequence: Synthetic peptide
MQFVDRLAM

SEQ ID NO: 11646 - protein, 9 aa, Artificial Sequence
  Description of Artificial Sequence: Synthetic peptide
MQFVDRWAL

SEQ ID NO: 11647 - protein, 9 aa, Artificial Sequence
  Description of Artificial Sequence: Synthetic peptide
MRCCNVPWS

SEQ ID NO: 11648 - protein, 9 aa, Artificial Sequence
  Description of Artificial Sequence: Synthetic peptide
MRDRMKDEE

SEQ ID NO: 11649 - protein, 9 aa, Artificial Sequence
  Description of Artificial Sequence: Synthetic peptide
MVIHPAISR

SEQ ID NO: 11650 - protein, 9 aa, Artificial Sequence
  Description of Artificial Sequence: Synthetic peptide
MWDHRNETM

SEQ ID NO: 11651 - protein, 9 aa, Artificial Sequence
  Description of Artificial Sequence: Synthetic peptide
MWDNRNESM

SEQ ID NO: 11652 - protein, 9 aa, Artificial Sequence
  Description of Artificial Sequence: Synthetic peptide
NAMKRSPDV

SEQ ID NO: 11653 - protein, 9 aa, Artificial Sequence
  Description of Artificial Sequence: Synthetic peptide
NAMQRSPDF

SEQ ID NO: 11654 - protein, 9 aa, Artificial Sequence
  Description of Artificial Sequence: Synthetic peptide
NCINATDGD

SEQ ID NO: 11655 - protein, 9 aa, Artificial Sequence
  Description of Artificial Sequence: Synthetic peptide
NCLVDFDPH

SEQ ID NO: 11656 - protein, 9 aa, Artificial Sequence
  Description of Artificial Sequence: Synthetic peptide
NCMNATDWD

SEQ ID NO: 11657 - protein, 9 aa, Artificial Sequence
  Description of Artificial Sequence: Synthetic peptide
NCNNELTDR

SEQ ID NO: 11658 - protein, 9 aa, Artificial Sequence
  Description of Artificial Sequence: Synthetic peptide
NDMAQSYRE

SEQ ID NO: 11659 - protein, 9 aa, Artificial Sequence
  Description of Artificial Sequence: Synthetic peptide
NDMEQSDRE

SEQ ID NO: 11660 - protein, 9 aa, Artificial Sequence
  Description of Artificial Sequence: Synthetic peptide
NDMEQSYHE

SEQ ID NO: 11661 - protein, 9 aa, Artificial Sequence
  Description of Artificial Sequence: Synthetic peptide
NELAYQDWS

SEQ ID NO: 11662 - protein, 9 aa, Artificial Sequence
  Description of Artificial Sequence: Synthetic peptide
NELEYQHWS

SEQ ID NO: 11663 - protein, 9 aa, Artificial Sequence
  Description of Artificial Sequence: Synthetic peptide
NFCPENAWQ

SEQ ID NO: 11664 - protein, 9 aa, Artificial Sequence
  Description of Artificial Sequence: Synthetic peptide
NFEDQESHV

SEQ ID NO: 11665 - protein, 9 aa, Artificial Sequence
  Description of Artificial Sequence: Synthetic peptide
NFGDLESHV

SEQ ID NO: 11666 - protein, 9 aa, Artificial Sequence
  Description of Artificial Sequence: Synthetic peptide
NFITQEMYS

SEQ ID NO: 11667 - protein, 9 aa, Artificial Sequence
  Description of Artificial Sequence: Synthetic peptide
NFNTQEMYS

SEQ ID NO: 11668 - protein, 9 aa, Artificial Sequence
  Description of Artificial Sequence: Synthetic peptide
NFTTKEMYS

SEQ ID NO: 11669 - protein, 9 aa, Artificial Sequence
  Description of Artificial Sequence: Synthetic peptide
NFTTMNMTC

SEQ ID NO: 11670 - protein, 9 aa, Artificial Sequence
  Description of Artificial Sequence: Synthetic peptide
NFTTQEMYY

SEQ ID NO: 11671 - protein, 9 aa, Artificial Sequence
  Description of Artificial Sequence: Synthetic peptide
NFWMDMHRI

SEQ ID NO: 11672 - protein, 9 aa, Artificial Sequence
  Description of Artificial Sequence: Synthetic peptide
NGGTWANVE

SEQ ID NO: 11673 - protein, 9 aa, Artificial Sequence
  Description of Artificial Sequence: Synthetic peptide
NGHNELTDR

SEQ ID NO: 11674 - protein, 9 aa, Artificial Sequence
  Description of Artificial Sequence: Synthetic peptide
NGLDDFDPH

SEQ ID NO: 11675 - protein, 9 aa, Artificial Sequence
  Description of Artificial Sequence: Synthetic peptide
NGLVDCDPH

SEQ ID NO: 11676 - protein, 9 aa, Artificial Sequence
  Description of Artificial Sequence: Synthetic peptide
NGLVDFAPH

SEQ ID NO: 11677 - protein, 9 aa, Artificial Sequence
  Description of Artificial Sequence: Synthetic peptide
NGLVDFDPL

SEQ ID NO: 11678 - protein, 9 aa, Artificial Sequence
  Description of Artificial Sequence: Synthetic peptide
NGLVDFDRH

SEQ ID NO: 11679 - protein, 9 aa, Artificial Sequence
  Description of Artificial Sequence: Synthetic peptide
NGLVDFDTH

SEQ ID NO: 11680 - protein, 9 aa, Artificial Sequence
  Description of Artificial Sequence: Synthetic peptide
NGLVDFVPH

SEQ ID NO: 11681 - protein, 9 aa, Artificial Sequence
  Description of Artificial Sequence: Synthetic peptide
NGLVHFDPH

SEQ ID NO: 11682 - protein, 9 aa, Artificial Sequence
  Description of Artificial Sequence: Synthetic peptide
NGNNELADR

SEQ ID NO: 11683 - protein, 9 aa, Artificial Sequence
  Description of Artificial Sequence: Synthetic peptide
NGNNELTDK

SEQ ID NO: 11684 - protein, 9 aa, Artificial Sequence
  Description of Artificial Sequence: Synthetic peptide
NGNNGLTDR

SEQ ID NO: 11685 - protein, 9 aa, Artificial Sequence
  Description of Artificial Sequence: Synthetic peptide
NGRVDFDPH

SEQ ID NO: 11686 - protein, 9 aa, Artificial Sequence
  Description of Artificial Sequence: Synthetic peptide
NGWEGSEDD

SEQ ID NO: 11687 - protein, 9 aa, Artificial Sequence
  Description of Artificial Sequence: Synthetic peptide
NGWSDVDRQ

SEQ ID NO: 11688 - protein, 9 aa, Artificial Sequence
  Description of Artificial Sequence: Synthetic peptide
NHNVPACII

SEQ ID NO: 11689 - protein, 9 aa, Artificial Sequence
  Description of Artificial Sequence: Synthetic peptide
NIEQMLAIG

SEQ ID NO: 11690 - protein, 9 aa, Artificial Sequence
  Description of Artificial Sequence: Synthetic peptide
NKHHSRIDG

SEQ ID NO: 11691 - protein, 9 aa, Artificial Sequence
  Description of Artificial Sequence: Synthetic peptide
NMHSEQTPL

SEQ ID NO: 11692 - protein, 9 aa, Artificial Sequence
  Description of Artificial Sequence: Synthetic peptide
NMKFSVGMN

SEQ ID NO: 11693 - protein, 9 aa, Artificial Sequence
  Description of Artificial Sequence: Synthetic peptide
NMKISVDMN

SEQ ID NO: 11694 - protein, 9 aa, Artificial Sequence
  Description of Artificial Sequence: Synthetic peptide
NMKTESAHK

SEQ ID NO: 11695 - protein, 9 aa, Artificial Sequence
  Description of Artificial Sequence: Synthetic peptide
NMKTKSADK

SEQ ID NO: 11696 - protein, 9 aa, Artificial Sequence
  Description of Artificial Sequence: Synthetic peptide
NMKTKSAHE

SEQ ID NO: 11697 - protein, 9 aa, Artificial Sequence
  Description of Artificial Sequence: Synthetic peptide
NMKTKSAHT

SEQ ID NO: 11698 - protein, 9 aa, Artificial Sequence
  Description of Artificial Sequence: Synthetic peptide
NMKTKSAPK

SEQ ID NO: 11699 - protein, 9 aa, Artificial Sequence
  Description of Artificial Sequence: Synthetic peptide
NMKTKSARK

SEQ ID NO: 11700 - protein, 9 aa, Artificial Sequence
  Description of Artificial Sequence: Synthetic peptide
NMKTKSDHK

SEQ ID NO: 11701 - protein, 9 aa, Artificial Sequence
  Description of Artificial Sequence: Synthetic peptide
NMKTKTAHK

SEQ ID NO: 11702 - protein, 9 aa, Artificial Sequence
  Description of Artificial Sequence: Synthetic peptide
NMKTRSAHK

SEQ ID NO: 11703 - protein, 9 aa, Artificial Sequence
  Description of Artificial Sequence: Synthetic peptide
NMPWNMEWN

SEQ ID NO: 11704 - protein, 9 aa, Artificial Sequence
  Description of Artificial Sequence: Synthetic peptide
NMPWNMPWN

SEQ ID NO: 11705 - protein, 9 aa, Artificial Sequence
  Description of Artificial Sequence: Synthetic peptide
NMPWNMQLN

SEQ ID NO: 11706 - protein, 9 aa, Artificial Sequence
  Description of Artificial Sequence: Synthetic peptide
NMPWNMQWK

SEQ ID NO: 11707 - protein, 9 aa, Artificial Sequence
  Description of Artificial Sequence: Synthetic peptide
NMPWNMQWS

SEQ ID NO: 11708 - protein, 9 aa, Artificial Sequence
  Description of Artificial Sequence: Synthetic peptide
NMPWNVQWN

SEQ ID NO: 11709 - protein, 9 aa, Artificial Sequence
  Description of Artificial Sequence: Synthetic peptide
NMQTKSAHK

SEQ ID NO: 11710 - protein, 9 aa, Artificial Sequence
  Description of Artificial Sequence: Synthetic peptide
NNHMVAKIA

SEQ ID NO: 11711 - protein, 9 aa, Artificial Sequence
  Description of Artificial Sequence: Synthetic peptide
NPCHGYLKM

SEQ ID NO: 11712 - protein, 9 aa, Artificial Sequence
  Description of Artificial Sequence: Synthetic peptide
NPPCARECR

SEQ ID NO: 11713 - protein, 9 aa, Artificial Sequence
  Description of Artificial Sequence: Synthetic peptide
NPPCARGGR

SEQ ID NO: 11714 - protein, 9 aa, Artificial Sequence
  Description of Artificial Sequence: Synthetic peptide
NPPCARKWR

SEQ ID NO: 11715 - protein, 9 aa, Artificial Sequence
  Description of Artificial Sequence: Synthetic peptide
NPPCARQWR

SEQ ID NO: 11716 - protein, 9 aa, Artificial Sequence
  Description of Artificial Sequence: Synthetic peptide
NPRCGIFTL

SEQ ID NO: 11717 - protein, 9 aa, Artificial Sequence
  Description of Artificial Sequence: Synthetic peptide
NQGLPCCQI

SEQ ID NO: 11718 - protein, 9 aa, Artificial Sequence
  Description of Artificial Sequence: Synthetic peptide
NQGMHCCQI

SEQ ID NO: 11719 - protein, 9 aa, Artificial Sequence
  Description of Artificial Sequence: Synthetic peptide
NQGMPCCRI

SEQ ID NO: 11720 - protein, 9 aa, Artificial Sequence
  Description of Artificial Sequence: Synthetic peptide
NQNNLEYPI

SEQ ID NO: 11721 - protein, 9 aa, Artificial Sequence
  Description of Artificial Sequence: Synthetic peptide
NRHPPAAIS

SEQ ID NO: 11722 - protein, 9 aa, Artificial Sequence
  Description of Artificial Sequence: Synthetic peptide
NRNPPAAII

SEQ ID NO: 11723 - protein, 9 aa, Artificial Sequence
  Description of Artificial Sequence: Synthetic peptide
NRNPPEAIS

SEQ ID NO: 11724 - protein, 9 aa, Artificial Sequence
  Description of Artificial Sequence: Synthetic peptide
NRNSFHQFE

SEQ ID NO: 11725 - protein, 9 aa, Artificial Sequence
  Description of Artificial Sequence: Synthetic peptide
NRPWQMRWA

SEQ ID NO: 11726 - protein, 9 aa, Artificial Sequence
  Description of Artificial Sequence: Synthetic peptide
NRTSFHKFE

SEQ ID NO: 11727 - protein, 9 aa, Artificial Sequence
  Description of Artificial Sequence: Synthetic peptide
NSITANCSK

SEQ ID NO: 11728 - protein, 9 aa, Artificial Sequence
  Description of Artificial Sequence: Synthetic peptide
NSITENCAK

SEQ ID NO: 11729 - protein, 9 aa, Artificial Sequence
  Description of Artificial Sequence: Synthetic peptide
NSITENCSN

SEQ ID NO: 11730 - protein, 9 aa, Artificial Sequence
  Description of Artificial Sequence: Synthetic peptide
NTKVKDEDN

SEQ ID NO: 11731 - protein, 9 aa, Artificial Sequence
  Description of Artificial Sequence: Synthetic peptide
NVLGPPSFN

SEQ ID NO: 11732 - protein, 9 aa, Artificial Sequence
  Description of Artificial Sequence: Synthetic peptide
NVNNELTDR

SEQ ID NO: 11733 - protein, 9 aa, Artificial Sequence
  Description of Artificial Sequence: Synthetic peptide
NVTANYCCF

SEQ ID NO: 11734 - protein, 9 aa, Artificial Sequence
  Description of Artificial Sequence: Synthetic peptide
NYDHFIAAS

SEQ ID NO: 11735 - protein, 9 aa, Artificial Sequence
  Description of Artificial Sequence: Synthetic peptide
NYGKDMHKL

SEQ ID NO: 11736 - protein, 9 aa, Artificial Sequence
  Description of Artificial Sequence: Synthetic peptide
NYNNFIAAS

SEQ ID NO: 11737 - protein, 9 aa, Artificial Sequence
  Description of Artificial Sequence: Synthetic peptide
NYRESRSDL

SEQ ID NO: 11738 - protein, 9 aa, Artificial Sequence
  Description of Artificial Sequence: Synthetic peptide
PAIHNHMCT

SEQ ID NO: 11739 - protein, 9 aa, Artificial Sequence
  Description of Artificial Sequence: Synthetic peptide
PAIRNHMCP

SEQ ID NO: 11740 - protein, 9 aa, Artificial Sequence
  Description of Artificial Sequence: Synthetic peptide
PAYKNSGGD

SEQ ID NO: 11741 - protein, 9 aa, Artificial Sequence
  Description of Artificial Sequence: Synthetic peptide
PDFVAEQQP

SEQ ID NO: 11742 - protein, 9 aa, Artificial Sequence
  Description of Artificial Sequence: Synthetic peptide
PETLWANIW

SEQ ID NO: 11743 - protein, 9 aa, Artificial Sequence
  Description of Artificial Sequence: Synthetic peptide
PETLWTDIW

SEQ ID NO: 11744 - protein, 9 aa, Artificial Sequence
  Description of Artificial Sequence: Synthetic peptide
PETPWTNIW

SEQ ID NO: 11745 - protein, 9 aa, Artificial Sequence
  Description of Artificial Sequence: Synthetic peptide
PFCRGHYQA

SEQ ID NO: 11746 - protein, 9 aa, Artificial Sequence
  Description of Artificial Sequence: Synthetic peptide
PFISPKQVS

SEQ ID NO: 11747 - protein, 9 aa, Artificial Sequence
  Description of Artificial Sequence: Synthetic peptide
PFISPREVS

SEQ ID NO: 11748 - protein, 9 aa, Artificial Sequence
  Description of Artificial Sequence: Synthetic peptide
PFIYTDLGP

SEQ ID NO: 11749 - protein, 9 aa, Artificial Sequence
  Description of Artificial Sequence: Synthetic peptide
PFLYTDWGP

SEQ ID NO: 11750 - protein, 9 aa, Artificial Sequence
  Description of Artificial Sequence: Synthetic peptide
PFNNWFAAG

SEQ ID NO: 11751 - protein, 9 aa, Artificial Sequence
  Description of Artificial Sequence: Synthetic peptide
PGWQMCYDS

SEQ ID NO: 11752 - protein, 9 aa, Artificial Sequence
  Description of Artificial Sequence: Synthetic peptide
PINFPYEWL

SEQ ID NO: 11753 - protein, 9 aa, Artificial Sequence
  Description of Artificial Sequence: Synthetic peptide
PKFAFNQCY

SEQ ID NO: 11754 - protein, 9 aa, Artificial Sequence
  Description of Artificial Sequence: Synthetic peptide
PKGMINWPS

SEQ ID NO: 11755 - protein, 9 aa, Artificial Sequence
  Description of Artificial Sequence: Synthetic peptide
PKVRINWPS

SEQ ID NO: 11756 - protein, 9 aa, Artificial Sequence
  Description of Artificial Sequence: Synthetic peptide
PKVVINWPS

SEQ ID NO: 11757 - protein, 9 aa, Artificial Sequence
  Description of Artificial Sequence: Synthetic peptide
PMCMEPFPM

SEQ ID NO: 11758 - protein, 9 aa, Artificial Sequence
  Description of Artificial Sequence: Synthetic peptide
PMNRDTLIS

SEQ ID NO: 11759 - protein, 9 aa, Artificial Sequence
  Description of Artificial Sequence: Synthetic peptide
PPPLNRKWD

SEQ ID NO: 11760 - protein, 9 aa, Artificial Sequence
  Description of Artificial Sequence: Synthetic peptide
PQAYTTPIV

SEQ ID NO: 11761 - protein, 9 aa, Artificial Sequence
  Description of Artificial Sequence: Synthetic peptide
PQLYFTTDK

SEQ ID NO: 11762 - protein, 9 aa, Artificial Sequence
  Description of Artificial Sequence: Synthetic peptide
PQTKKDCPA

SEQ ID NO: 11763 - protein, 9 aa, Artificial Sequence
  Description of Artificial Sequence: Synthetic peptide
PRKMMQRIS

SEQ ID NO: 11764 - protein, 9 aa, Artificial Sequence
  Description of Artificial Sequence: Synthetic peptide
PSDLKLVNN

SEQ ID NO: 11765 - protein, 9 aa, Artificial Sequence
  Description of Artificial Sequence: Synthetic peptide
PSTIKHVDP

SEQ ID NO: 11766 - protein, 9 aa, Artificial Sequence
  Description of Artificial Sequence: Synthetic peptide
PSTIKRIDP

SEQ ID NO: 11767 - protein, 9 aa, Artificial Sequence
  Description of Artificial Sequence: Synthetic peptide
PWDGSIEFL

SEQ ID NO: 11768 - protein, 9 aa, Artificial Sequence
  Description of Artificial Sequence: Synthetic peptide
QCLLWNDCK

SEQ ID NO: 11769 - protein, 9 aa, Artificial Sequence
  Description of Artificial Sequence: Synthetic peptide
QELFHGKIA

SEQ ID NO: 11770 - protein, 9 aa, Artificial Sequence
  Description of Artificial Sequence: Synthetic peptide
QFPRHEPIQ

SEQ ID NO: 11771 - protein, 9 aa, Artificial Sequence
  Description of Artificial Sequence: Synthetic peptide
QFPRQEPLQ

SEQ ID NO: 11772 - protein, 9 aa, Artificial Sequence
  Description of Artificial Sequence: Synthetic peptide
QFYNRSDDL

SEQ ID NO: 11773 - protein, 9 aa, Artificial Sequence
  Description of Artificial Sequence: Synthetic peptide
QIDQFCPIV

SEQ ID NO: 11774 - protein, 9 aa, Artificial Sequence
  Description of Artificial Sequence: Synthetic peptide
QINPFYMWF

SEQ ID NO: 11775 - protein, 9 aa, Artificial Sequence
  Description of Artificial Sequence: Synthetic peptide
QINQFCQIV

SEQ ID NO: 11776 - protein, 9 aa, Artificial Sequence
  Description of Artificial Sequence: Synthetic peptide
QMCPDERQV

SEQ ID NO: 11777 - protein, 9 aa, Artificial Sequence
  Description of Artificial Sequence: Synthetic peptide
QPCLVRPPH

SEQ ID NO: 11778 - protein, 9 aa, Artificial Sequence
  Description of Artificial Sequence: Synthetic peptide
QPCTVRPPH

SEQ ID NO: 11779 - protein, 9 aa, Artificial Sequence
  Description of Artificial Sequence: Synthetic peptide
QSMWETDRN

SEQ ID NO: 11780 - protein, 9 aa, Artificial Sequence
  Description of Artificial Sequence: Synthetic peptide
QWCWMAVSI

SEQ ID NO: 11781 - protein, 9 aa, Artificial Sequence
  Description of Artificial Sequence: Synthetic peptide
QWNMFQVIF

SEQ ID NO: 11782 - protein, 9 aa, Artificial Sequence
  Description of Artificial Sequence: Synthetic peptide
RAAKVIPPT

SEQ ID NO: 11783 - protein, 9 aa, Artificial Sequence
  Description of Artificial Sequence: Synthetic peptide
RADKFIPPT

SEQ ID NO: 11784 - protein, 9 aa, Artificial Sequence
  Description of Artificial Sequence: Synthetic peptide
RADKVITPT

SEQ ID NO: 11785 - protein, 9 aa, Artificial Sequence
  Description of Artificial Sequence: Synthetic peptide
RAYKVIPPT

SEQ ID NO: 11786 - protein, 9 aa, Artificial Sequence
  Description of Artificial Sequence: Synthetic peptide
RCDLKEMWK

SEQ ID NO: 11787 - protein, 9 aa, Artificial Sequence
  Description of Artificial Sequence: Synthetic peptide
RCYLKEMRK

SEQ ID NO: 11788 - protein, 9 aa, Artificial Sequence
  Description of Artificial Sequence: Synthetic peptide
RDCHMRITD

SEQ ID NO: 11789 - protein, 9 aa, Artificial Sequence
  Description of Artificial Sequence: Synthetic peptide
RDCWMVFII

SEQ ID NO: 11790 - protein, 9 aa, Artificial Sequence
  Description of Artificial Sequence: Synthetic peptide
RDFVAGQQP

SEQ ID NO: 11791 - protein, 9 aa, Artificial Sequence
  Description of Artificial Sequence: Synthetic peptide
RDFVGEQQP

SEQ ID NO: 11792 - protein, 9 aa, Artificial Sequence
  Description of Artificial Sequence: Synthetic peptide
RDGKWALEN

SEQ ID NO: 11793 - protein, 9 aa, Artificial Sequence
  Description of Artificial Sequence: Synthetic peptide
RDGKWVREN

SEQ ID NO: 11794 - protein, 9 aa, Artificial Sequence
  Description of Artificial Sequence: Synthetic peptide
RDYHMLITD

SEQ ID NO: 11795 - protein, 9 aa, Artificial Sequence
  Description of Artificial Sequence: Synthetic peptide
RGFHHADNV

SEQ ID NO: 11796 - protein, 9 aa, Artificial Sequence
  Description of Artificial Sequence: Synthetic peptide
RGFNHADNG

SEQ ID NO: 11797 - protein, 9 aa, Artificial Sequence
  Description of Artificial Sequence: Synthetic peptide
RHIYRKGWG

SEQ ID NO: 11798 - protein, 9 aa, Artificial Sequence
  Description of Artificial Sequence: Synthetic peptide
RLRDGNSIF

SEQ ID NO: 11799 - protein, 9 aa, Artificial Sequence
  Description of Artificial Sequence: Synthetic peptide
RMCPYEAWK

SEQ ID NO: 11800 - protein, 9 aa, Artificial Sequence
  Description of Artificial Sequence: Synthetic peptide
RMCTYEPWK

SEQ ID NO: 11801 - protein, 9 aa, Artificial Sequence
  Description of Artificial Sequence: Synthetic peptide
RPEFNAFQA

SEQ ID NO: 11802 - protein, 9 aa, Artificial Sequence
  Description of Artificial Sequence: Synthetic peptide
RSFIDIVGT

SEQ ID NO: 11803 - protein, 9 aa, Artificial Sequence
  Description of Artificial Sequence: Synthetic peptide
RTQPIGVDP

SEQ ID NO: 11804 - protein, 9 aa, Artificial Sequence
  Description of Artificial Sequence: Synthetic peptide
RYCWMVVII

SEQ ID NO: 11805 - protein, 9 aa, Artificial Sequence
  Description of Artificial Sequence: Synthetic peptide
SADYNFGFS

SEQ ID NO: 11806 - protein, 9 aa, Artificial Sequence
  Description of Artificial Sequence: Synthetic peptide
SCGWDHGNL

SEQ ID NO: 11807 - protein, 9 aa, Artificial Sequence
  Description of Artificial Sequence: Synthetic peptide
SCPANNVRV

SEQ ID NO: 11808 - protein, 9 aa, Artificial Sequence
  Description of Artificial Sequence: Synthetic peptide
SCPVEFFPW

SEQ ID NO: 11809 - protein, 9 aa, Artificial Sequence
  Description of Artificial Sequence: Synthetic peptide
SDASRTERD

SEQ ID NO: 11810 - protein, 9 aa, Artificial Sequence
  Description of Artificial Sequence: Synthetic peptide
SDKMGIYHC

SEQ ID NO: 11811 - protein, 9 aa, Artificial Sequence
  Description of Artificial Sequence: Synthetic peptide
SDLHNNHED

SEQ ID NO: 11812 - protein, 9 aa, Artificial Sequence
  Description of Artificial Sequence: Synthetic peptide
SDNWGAQCC

SEQ ID NO: 11813 - protein, 9 aa, Artificial Sequence
  Description of Artificial Sequence: Synthetic peptide
SDPHGMVGC

SEQ ID NO: 11814 - protein, 9 aa, Artificial Sequence
  Description of Artificial Sequence: Synthetic peptide
SFGPSQVCC

SEQ ID NO: 11815 - protein, 9 aa, Artificial Sequence
  Description of Artificial Sequence: Synthetic peptide
SFIGNAQWC

SEQ ID NO: 11816 - protein, 9 aa, Artificial Sequence
  Description of Artificial Sequence: Synthetic peptide
SFIGNARWC

SEQ ID NO: 11817 - protein, 9 aa, Artificial Sequence
  Description of Artificial Sequence: Synthetic peptide
SFLAHNNFH

SEQ ID NO: 11818 - protein, 9 aa, Artificial Sequence
  Description of Artificial Sequence: Synthetic peptide
SFLANNHFH

SEQ ID NO: 11819 - protein, 9 aa, Artificial Sequence
  Description of Artificial Sequence: Synthetic peptide
SFLANNTFH

SEQ ID NO: 11820 - protein, 9 aa, Artificial Sequence
  Description of Artificial Sequence: Synthetic peptide
SFNHDRKYY

SEQ ID NO: 11821 - protein, 9 aa, Artificial Sequence
  Description of Artificial Sequence: Synthetic peptide
SFYEWPHCE

SEQ ID NO: 11822 - protein, 9 aa, Artificial Sequence
  Description of Artificial Sequence: Synthetic peptide
SGICCCDNA

SEQ ID NO: 11823 - protein, 9 aa, Artificial Sequence
  Description of Artificial Sequence: Synthetic peptide
SGIGCCDNS

SEQ ID NO: 11824 - protein, 9 aa, Artificial Sequence
  Description of Artificial Sequence: Synthetic peptide
SGWKMCYDS

SEQ ID NO: 11825 - protein, 9 aa, Artificial Sequence
  Description of Artificial Sequence: Synthetic peptide
SGWQMCYDS

SEQ ID NO: 11826 - protein, 9 aa, Artificial Sequence
  Description of Artificial Sequence: Synthetic peptide
SHDQALMFE

SEQ ID NO: 11827 - protein, 9 aa, Artificial Sequence
  Description of Artificial Sequence: Synthetic peptide
SHFYEDARS

SEQ ID NO: 11828 - protein, 9 aa, Artificial Sequence
  Description of Artificial Sequence: Synthetic peptide
SIIRHCVSE

SEQ ID NO: 11829 - protein, 9 aa, Artificial Sequence
  Description of Artificial Sequence: Synthetic peptide
SIQPFLHDG

SEQ ID NO: 11830 - protein, 9 aa, Artificial Sequence
  Description of Artificial Sequence: Synthetic peptide
SLNGYTLVC

SEQ ID NO: 11831 - protein, 9 aa, Artificial Sequence
  Description of Artificial Sequence: Synthetic peptide
SLPEYSNVK

SEQ ID NO: 11832 - protein, 9 aa, Artificial Sequence
  Description of Artificial Sequence: Synthetic peptide
SNPWPMGKV

SEQ ID NO: 11833 - protein, 9 aa, Artificial Sequence
  Description of Artificial Sequence: Synthetic peptide
SPHHDKDPF

SEQ ID NO: 11834 - protein, 9 aa, Artificial Sequence
  Description of Artificial Sequence: Synthetic peptide
SPMINLWPS

SEQ ID NO: 11835 - protein, 9 aa, Artificial Sequence
  Description of Artificial Sequence: Synthetic peptide
SRKMMKRIS

SEQ ID NO: 11836 - protein, 9 aa, Artificial Sequence
  Description of Artificial Sequence: Synthetic peptide
SRKMMPRIS

SEQ ID NO: 11837 - protein, 9 aa, Artificial Sequence
  Description of Artificial Sequence: Synthetic peptide
SRQCPLEIG

SEQ ID NO: 11838 - protein, 9 aa, Artificial Sequence
  Description of Artificial Sequence: Synthetic peptide
SSDLKLVNS

SEQ ID NO: 11839 - protein, 9 aa, Artificial Sequence
  Description of Artificial Sequence: Synthetic peptide
SSGGDHGNL

SEQ ID NO: 11840 - protein, 9 aa, Artificial Sequence
  Description of Artificial Sequence: Synthetic peptide
SSIHHQCCT

SEQ ID NO: 11841 - protein, 9 aa, Artificial Sequence
  Description of Artificial Sequence: Synthetic peptide
SSIQHHCCT

SEQ ID NO: 11842 - protein, 9 aa, Artificial Sequence
  Description of Artificial Sequence: Synthetic peptide
SSVWDHGNL

SEQ ID NO: 11843 - protein, 9 aa, Artificial Sequence
  Description of Artificial Sequence: Synthetic peptide
SVQLFLHDG

SEQ ID NO: 11844 - protein, 9 aa, Artificial Sequence
  Description of Artificial Sequence: Synthetic peptide
SVQPFLHDA

SEQ ID NO: 11845 - protein, 9 aa, Artificial Sequence
  Description of Artificial Sequence: Synthetic peptide
SVQPFLYDG

SEQ ID NO: 11846 - protein, 9 aa, Artificial Sequence
  Description of Artificial Sequence: Synthetic peptide
SVQPVLHDG

SEQ ID NO: 11847 - protein, 9 aa, Artificial Sequence
  Description of Artificial Sequence: Synthetic peptide
SYDNWDFCC

SEQ ID NO: 11848 - protein, 9 aa, Artificial Sequence
  Description of Artificial Sequence: Synthetic peptide
TCSIDNKNY

SEQ ID NO: 11849 - protein, 9 aa, Artificial Sequence
  Description of Artificial Sequence: Synthetic peptide
TCTWIGAGS

SEQ ID NO: 11850 - protein, 9 aa, Artificial Sequence
  Description of Artificial Sequence: Synthetic peptide
TDASRTERD

SEQ ID NO: 11851 - protein, 9 aa, Artificial Sequence
  Description of Artificial Sequence: Synthetic peptide
TDIMKESIF

SEQ ID NO: 11852 - protein, 9 aa, Artificial Sequence
  Description of Artificial Sequence: Synthetic peptide
TDYWAGYQM

SEQ ID NO: 11853 - protein, 9 aa, Artificial Sequence
  Description of Artificial Sequence: Synthetic peptide
TFPDGEMYQ

SEQ ID NO: 11854 - protein, 9 aa, Artificial Sequence
  Description of Artificial Sequence: Synthetic peptide
TGLVDFDPH

SEQ ID NO: 11855 - protein, 9 aa, Artificial Sequence
  Description of Artificial Sequence: Synthetic peptide
TGTWIGTGS

SEQ ID NO: 11856 - protein, 9 aa, Artificial Sequence
  Description of Artificial Sequence: Synthetic peptide
TGWQMCYDS

SEQ ID NO: 11857 - protein, 9 aa, Artificial Sequence
  Description of Artificial Sequence: Synthetic peptide
TIDDHSFDQ

SEQ ID NO: 11858 - protein, 9 aa, Artificial Sequence
  Description of Artificial Sequence: Synthetic peptide
TINCKWCFC

SEQ ID NO: 11859 - protein, 9 aa, Artificial Sequence
  Description of Artificial Sequence: Synthetic peptide
TINPHKSDW

SEQ ID NO: 11860 - protein, 9 aa, Artificial Sequence
  Description of Artificial Sequence: Synthetic peptide
TISCKWCVC

SEQ ID NO: 11861 - protein, 9 aa, Artificial Sequence
  Description of Artificial Sequence: Synthetic peptide
TNICYDQIK

SEQ ID NO: 11862 - protein, 9 aa, Artificial Sequence
  Description of Artificial Sequence: Synthetic peptide
TNICYDQIR

SEQ ID NO: 11863 - protein, 9 aa, Artificial Sequence
  Description of Artificial Sequence: Synthetic peptide
TNNHEKTDW

SEQ ID NO: 11864 - protein, 9 aa, Artificial Sequence
  Description of Artificial Sequence: Synthetic peptide
TPCCLHHPA

SEQ ID NO: 11865 - protein, 9 aa, Artificial Sequence
  Description of Artificial Sequence: Synthetic peptide
TPPPHEVKF

SEQ ID NO: 11866 - protein, 9 aa, Artificial Sequence
  Description of Artificial Sequence: Synthetic peptide
TQMFAMPPS

SEQ ID NO: 11867 - protein, 9 aa, Artificial Sequence
  Description of Artificial Sequence: Synthetic peptide
TQPPLMNIL

SEQ ID NO: 11868 - protein, 9 aa, Artificial Sequence
  Description of Artificial Sequence: Synthetic peptide
TRNPPAAIS

SEQ ID NO: 11869 - protein, 9 aa, Artificial Sequence
  Description of Artificial Sequence: Synthetic peptide
TRPSAASIR

SEQ ID NO: 11870 - protein, 9 aa, Artificial Sequence
  Description of Artificial Sequence: Synthetic peptide
TRPSAASVG

SEQ ID NO: 11871 - protein, 9 aa, Artificial Sequence
  Description of Artificial Sequence: Synthetic peptide
TRPSASSIG

SEQ ID NO: 11872 - protein, 9 aa, Artificial Sequence
  Description of Artificial Sequence: Synthetic peptide
TSICYDQIQ

SEQ ID NO: 11873 - protein, 9 aa, Artificial Sequence
  Description of Artificial Sequence: Synthetic peptide
TSPPDQVPV

SEQ ID NO: 11874 - protein, 9 aa, Artificial Sequence
  Description of Artificial Sequence: Synthetic peptide
TWDGSIEFL

SEQ ID NO: 11875 - protein, 9 aa, Artificial Sequence
  Description of Artificial Sequence: Synthetic peptide
VADHRPMYS

SEQ ID NO: 11876 - protein, 9 aa, Artificial Sequence
  Description of Artificial Sequence: Synthetic peptide
VAIVDGWIE

SEQ ID NO: 11877 - protein, 9 aa, Artificial Sequence
  Description of Artificial Sequence: Synthetic peptide
VAPSESSWE

SEQ ID NO: 11878 - protein, 9 aa, Artificial Sequence
  Description of Artificial Sequence: Synthetic peptide
VCLVDGKDW

SEQ ID NO: 11879 - protein, 9 aa, Artificial Sequence
  Description of Artificial Sequence: Synthetic peptide
VCPANNVRV

SEQ ID NO: 11880 - protein, 9 aa, Artificial Sequence
  Description of Artificial Sequence: Synthetic peptide
VCTIYYMCG

SEQ ID NO: 11881 - protein, 9 aa, Artificial Sequence
  Description of Artificial Sequence: Synthetic peptide
VDCNKRHNW

SEQ ID NO: 11882 - protein, 9 aa, Artificial Sequence
  Description of Artificial Sequence: Synthetic peptide
VDHCTAIGA

SEQ ID NO: 11883 - protein, 9 aa, Artificial Sequence
  Description of Artificial Sequence: Synthetic peptide
VDIFDGWIE

SEQ ID NO: 11884 - protein, 9 aa, Artificial Sequence
  Description of Artificial Sequence: Synthetic peptide
VDPFCAVRI

SEQ ID NO: 11885 - protein, 9 aa, Artificial Sequence
  Description of Artificial Sequence: Synthetic peptide
VDPMGEAGT

SEQ ID NO: 11886 - protein, 9 aa, Artificial Sequence
  Description of Artificial Sequence: Synthetic peptide
VDVDCCDRK

SEQ ID NO: 11887 - protein, 9 aa, Artificial Sequence
  Description of Artificial Sequence: Synthetic peptide
VEFADNPWN

SEQ ID NO: 11888 - protein, 9 aa, Artificial Sequence
  Description of Artificial Sequence: Synthetic peptide
VERGNKIAS

SEQ ID NO: 11889 - protein, 9 aa, Artificial Sequence
  Description of Artificial Sequence: Synthetic peptide
VERSNKISS

SEQ ID NO: 11890 - protein, 9 aa, Artificial Sequence
  Description of Artificial Sequence: Synthetic peptide
VFCRGHYQA

SEQ ID NO: 11891 - protein, 9 aa, Artificial Sequence
  Description of Artificial Sequence: Synthetic peptide
VGTKEGPDP

SEQ ID NO: 11892 - protein, 9 aa, Artificial Sequence
  Description of Artificial Sequence: Synthetic peptide
VHHEGRSFC

SEQ ID NO: 11893 - protein, 9 aa, Artificial Sequence
  Description of Artificial Sequence: Synthetic peptide
VHHEGRSVF

SEQ ID NO: 11894 - protein, 9 aa, Artificial Sequence
  Description of Artificial Sequence: Synthetic peptide
VHHKGRSVC

SEQ ID NO: 11895 - protein, 9 aa, Artificial Sequence
  Description of Artificial Sequence: Synthetic peptide
VHLRENDDC

SEQ ID NO: 11896 - protein, 9 aa, Artificial Sequence
  Description of Artificial Sequence: Synthetic peptide
VHPEGRSVC

SEQ ID NO: 11897 - protein, 9 aa, Artificial Sequence
  Description of Artificial Sequence: Synthetic peptide
VHQEGRSVC

SEQ ID NO: 11898 - protein, 9 aa, Artificial Sequence
  Description of Artificial Sequence: Synthetic peptide
VHREGRSVC

SEQ ID NO: 11899 - protein, 9 aa, Artificial Sequence
  Description of Artificial Sequence: Synthetic peptide
VHYEGRSVC

SEQ ID NO: 11900 - protein, 9 aa, Artificial Sequence
  Description of Artificial Sequence: Synthetic peptide
VISRECYEE

SEQ ID NO: 11901 - protein, 9 aa, Artificial Sequence
  Description of Artificial Sequence: Synthetic peptide
VKCKDKYQS

SEQ ID NO: 11902 - protein, 9 aa, Artificial Sequence
  Description of Artificial Sequence: Synthetic peptide
VKCQDKYQY

SEQ ID NO: 11903 - protein, 9 aa, Artificial Sequence
  Description of Artificial Sequence: Synthetic peptide
VKHHSRIDG

SEQ ID NO: 11904 - protein, 9 aa, Artificial Sequence
  Description of Artificial Sequence: Synthetic peptide
VLGLPPYPE

SEQ ID NO: 11905 - protein, 9 aa, Artificial Sequence
  Description of Artificial Sequence: Synthetic peptide
VLLYMRNNQ

SEQ ID NO: 11906 - protein, 9 aa, Artificial Sequence
  Description of Artificial Sequence: Synthetic peptide
VMAAEQLNQ

SEQ ID NO: 11907 - protein, 9 aa, Artificial Sequence
  Description of Artificial Sequence: Synthetic peptide
VMIWPQILD

SEQ ID NO: 11908 - protein, 9 aa, Artificial Sequence
  Description of Artificial Sequence: Synthetic peptide
VMPTDCILV

SEQ ID NO: 11909 - protein, 9 aa, Artificial Sequence
  Description of Artificial Sequence: Synthetic peptide
VNCDKRHNW

SEQ ID NO: 11910 - protein, 9 aa, Artificial Sequence
  Description of Artificial Sequence: Synthetic peptide
VNCNKRHNL

SEQ ID NO: 11911 - protein, 9 aa, Artificial Sequence
  Description of Artificial Sequence: Synthetic peptide
VNCNKRHNM

SEQ ID NO: 11912 - protein, 9 aa, Artificial Sequence
  Description of Artificial Sequence: Synthetic peptide
VNCNKRRNW

SEQ ID NO: 11913 - protein, 9 aa, Artificial Sequence
  Description of Artificial Sequence: Synthetic peptide
VNCNKRYNW

SEQ ID NO: 11914 - protein, 9 aa, Artificial Sequence
  Description of Artificial Sequence: Synthetic peptide
VNCNNRHNC

SEQ ID NO: 11915 - protein, 9 aa, Artificial Sequence
  Description of Artificial Sequence: Synthetic peptide
VNCNRRHNW

SEQ ID NO: 11916 - protein, 9 aa, Artificial Sequence
  Description of Artificial Sequence: Synthetic peptide
VNCSKRHNW

SEQ ID NO: 11917 - protein, 9 aa, Artificial Sequence
  Description of Artificial Sequence: Synthetic peptide
VNCYKRHNW

SEQ ID NO: 11918 - protein, 9 aa, Artificial Sequence
  Description of Artificial Sequence: Synthetic peptide
VNGNKRHNW

SEQ ID NO: 11919 - protein, 9 aa, Artificial Sequence
  Description of Artificial Sequence: Synthetic peptide
VNLQDLSDR

SEQ ID NO: 11920 - protein, 9 aa, Artificial Sequence
  Description of Artificial Sequence: Synthetic peptide
VNPSDQTNH

SEQ ID NO: 11921 - protein, 9 aa, Artificial Sequence
  Description of Artificial Sequence: Synthetic peptide
VNSSDQNNH

SEQ ID NO: 11922 - protein, 9 aa, Artificial Sequence
  Description of Artificial Sequence: Synthetic peptide
VPDFDPFWS

SEQ ID NO: 11923 - protein, 9 aa, Artificial Sequence
  Description of Artificial Sequence: Synthetic peptide
VPIFDGWIE

SEQ ID NO: 11924 - protein, 9 aa, Artificial Sequence
  Description of Artificial Sequence: Synthetic peptide
VPNFAAFCM

SEQ ID NO: 11925 - protein, 9 aa, Artificial Sequence
  Description of Artificial Sequence: Synthetic peptide
VPPACRHKK

SEQ ID NO: 11926 - protein, 9 aa, Artificial Sequence
  Description of Artificial Sequence: Synthetic peptide
VPPGCRHQK

SEQ ID NO: 11927 - protein, 9 aa, Artificial Sequence
  Description of Artificial Sequence: Synthetic peptide
VPTFDPFWS

SEQ ID NO: 11928 - protein, 9 aa, Artificial Sequence
  Description of Artificial Sequence: Synthetic peptide
VQFVDRWAM

SEQ ID NO: 11929 - protein, 9 aa, Artificial Sequence
  Description of Artificial Sequence: Synthetic peptide
VQTKKDCPA

SEQ ID NO: 11930 - protein, 9 aa, Artificial Sequence
  Description of Artificial Sequence: Synthetic peptide
VRFDMCKWT

SEQ ID NO: 11931 - protein, 9 aa, Artificial Sequence
  Description of Artificial Sequence: Synthetic peptide
VRFEMMSWT

SEQ ID NO: 11932 - protein, 9 aa, Artificial Sequence
  Description of Artificial Sequence: Synthetic peptide
VTDFHTDML

SEQ ID NO: 11933 - protein, 9 aa, Artificial Sequence
  Description of Artificial Sequence: Synthetic peptide
VTDFNTDMQ

SEQ ID NO: 11934 - protein, 9 aa, Artificial Sequence
  Description of Artificial Sequence: Synthetic peptide
VVFINYNDQ

SEQ ID NO: 11935 - protein, 9 aa, Artificial Sequence
  Description of Artificial Sequence: Synthetic peptide
VVFTNYNDK

SEQ ID NO: 11936 - protein, 9 aa, Artificial Sequence
  Description of Artificial Sequence: Synthetic peptide
VVPPGNVIL

SEQ ID NO: 11937 - protein, 9 aa, Artificial Sequence
  Description of Artificial Sequence: Synthetic peptide
VVPPGNVLP

SEQ ID NO: 11938 - protein, 9 aa, Artificial Sequence
  Description of Artificial Sequence: Synthetic peptide
VVYRDTCNG

SEQ ID NO: 11939 - protein, 9 aa, Artificial Sequence
  Description of Artificial Sequence: Synthetic peptide
VWDHRNESM

SEQ ID NO: 11940 - protein, 9 aa, Artificial Sequence
  Description of Artificial Sequence: Synthetic peptide
VYNWHACAI

SEQ ID NO: 11941 - protein, 9 aa, Artificial Sequence
  Description of Artificial Sequence: Synthetic peptide
WAEDAYRRF

SEQ ID NO: 11942 - protein, 9 aa, Artificial Sequence
  Description of Artificial Sequence: Synthetic peptide
WCACVFEYW

SEQ ID NO: 11943 - protein, 9 aa, Artificial Sequence
  Description of Artificial Sequence: Synthetic peptide
WCERVFEYW

SEQ ID NO: 11944 - protein, 9 aa, Artificial Sequence
  Description of Artificial Sequence: Synthetic peptide
WCEWVFEYW

SEQ ID NO: 11945 - protein, 9 aa, Artificial Sequence
  Description of Artificial Sequence: Synthetic peptide
WCFKKELCN

SEQ ID NO: 11946 - protein, 9 aa, Artificial Sequence
  Description of Artificial Sequence: Synthetic peptide
WCKLPEIRR

SEQ ID NO: 11947 - protein, 9 aa, Artificial Sequence
  Description of Artificial Sequence: Synthetic peptide
WCQCVFEYW

SEQ ID NO: 11948 - protein, 9 aa, Artificial Sequence
  Description of Artificial Sequence: Synthetic peptide
WCQLPEIRK

SEQ ID NO: 11949 - protein, 9 aa, Artificial Sequence
  Description of Artificial Sequence: Synthetic peptide
WCYLMNLES

SEQ ID NO: 11950 - protein, 9 aa, Artificial Sequence
  Description of Artificial Sequence: Synthetic peptide
WDHNCQATI

SEQ ID NO: 11951 - protein, 9 aa, Artificial Sequence
  Description of Artificial Sequence: Synthetic peptide
WDHNYQDTI

SEQ ID NO: 11952 - protein, 9 aa, Artificial Sequence
  Description of Artificial Sequence: Synthetic peptide
WDNNCQDTI

SEQ ID NO: 11953 - protein, 9 aa, Artificial Sequence
  Description of Artificial Sequence: Synthetic peptide
WDQNCQDTI

SEQ ID NO: 11954 - protein, 9 aa, Artificial Sequence
  Description of Artificial Sequence: Synthetic peptide
WERMGQIEC

SEQ ID NO: 11955 - protein, 9 aa, Artificial Sequence
  Description of Artificial Sequence: Synthetic peptide
WERMGQIED

SEQ ID NO: 11956 - protein, 9 aa, Artificial Sequence
  Description of Artificial Sequence: Synthetic peptide
WERMGQIEH

SEQ ID NO: 11957 - protein, 9 aa, Artificial Sequence
  Description of Artificial Sequence: Synthetic peptide
WERMGQIES

SEQ ID NO: 11958 - protein, 9 aa, Artificial Sequence
  Description of Artificial Sequence: Synthetic peptide
WERMGQIQY

SEQ ID NO: 11959 - protein, 9 aa, Artificial Sequence
  Description of Artificial Sequence: Synthetic peptide
WERMGQMEY

SEQ ID NO: 11960 - protein, 9 aa, Artificial Sequence
  Description of Artificial Sequence: Synthetic peptide
WEWDRPFMK

SEQ ID NO: 11961 - protein, 9 aa, Artificial Sequence
  Description of Artificial Sequence: Synthetic peptide
WFFHYKPWM

SEQ ID NO: 11962 - protein, 9 aa, Artificial Sequence
  Description of Artificial Sequence: Synthetic peptide
WFMKCNWWT

SEQ ID NO: 11963 - protein, 9 aa, Artificial Sequence
  Description of Artificial Sequence: Synthetic peptide
WGCCEEMDS

SEQ ID NO: 11964 - protein, 9 aa, Artificial Sequence
  Description of Artificial Sequence: Synthetic peptide
WINTGPLRH

SEQ ID NO: 11965 - protein, 9 aa, Artificial Sequence
  Description of Artificial Sequence: Synthetic peptide
WKIKPDHRV

SEQ ID NO: 11966 - protein, 9 aa, Artificial Sequence
  Description of Artificial Sequence: Synthetic peptide
WKLKNCKSD

SEQ ID NO: 11967 - protein, 9 aa, Artificial Sequence
  Description of Artificial Sequence: Synthetic peptide
WLFEGKLDT

SEQ ID NO: 11968 - protein, 9 aa, Artificial Sequence
  Description of Artificial Sequence: Synthetic peptide
WLFYGCEPN

SEQ ID NO: 11969 - protein, 9 aa, Artificial Sequence
  Description of Artificial Sequence: Synthetic peptide
WLPHGPRME

SEQ ID NO: 11970 - protein, 9 aa, Artificial Sequence
  Description of Artificial Sequence: Synthetic peptide
WLPNRRIDD

SEQ ID NO: 11971 - protein, 9 aa, Artificial Sequence
  Description of Artificial Sequence: Synthetic peptide
WLQDGNSIF

SEQ ID NO: 11972 - protein, 9 aa, Artificial Sequence
  Description of Artificial Sequence: Synthetic peptide
WLRDGDSIF

SEQ ID NO: 11973 - protein, 9 aa, Artificial Sequence
  Description of Artificial Sequence: Synthetic peptide
WLRDGNSIS

SEQ ID NO: 11974 - protein, 9 aa, Artificial Sequence
  Description of Artificial Sequence: Synthetic peptide
WLRDGNSIY

SEQ ID NO: 11975 - protein, 9 aa, Artificial Sequence
  Description of Artificial Sequence: Synthetic peptide
WLREGNSIF

SEQ ID NO: 11976 - protein, 9 aa, Artificial Sequence
  Description of Artificial Sequence: Synthetic peptide
WLRGGNSIF

SEQ ID NO: 11977 - protein, 9 aa, Artificial Sequence
  Description of Artificial Sequence: Synthetic peptide
WLRVGNSIF

SEQ ID NO: 11978 - protein, 9 aa, Artificial Sequence
  Description of Artificial Sequence: Synthetic peptide
WMGWDRDQL

SEQ ID NO: 11979 - protein, 9 aa, Artificial Sequence
  Description of Artificial Sequence: Synthetic peptide
WMPNRRIDA

SEQ ID NO: 11980 - protein, 9 aa, Artificial Sequence
  Description of Artificial Sequence: Synthetic peptide
WMPNRRIDG

SEQ ID NO: 11981 - protein, 9 aa, Artificial Sequence
  Description of Artificial Sequence: Synthetic peptide
WMRCDRDQL

SEQ ID NO: 11982 - protein, 9 aa, Artificial Sequence
  Description of Artificial Sequence: Synthetic peptide
WMRLDRDQL

SEQ ID NO: 11983 - protein, 9 aa, Artificial Sequence
  Description of Artificial Sequence: Synthetic peptide
WMRWARDQL

SEQ ID NO: 11984 - protein, 9 aa, Artificial Sequence
  Description of Artificial Sequence: Synthetic peptide
WMRWDQDQL

SEQ ID NO: 11985 - protein, 9 aa, Artificial Sequence
  Description of Artificial Sequence: Synthetic peptide
WMRWDRAQL

SEQ ID NO: 11986 - protein, 9 aa, Artificial Sequence
  Description of Artificial Sequence: Synthetic peptide
WMRWDREQL

SEQ ID NO: 11987 - protein, 9 aa, Artificial Sequence
  Description of Artificial Sequence: Synthetic peptide
WMSDMLKAV

SEQ ID NO: 11988 - protein, 9 aa, Artificial Sequence
  Description of Artificial Sequence: Synthetic peptide
WMWWDRDQL

SEQ ID NO: 11989 - protein, 9 aa, Artificial Sequence
  Description of Artificial Sequence: Synthetic peptide
WNIPNRSQA

SEQ ID NO: 11990 - protein, 9 aa, Artificial Sequence
  Description of Artificial Sequence: Synthetic peptide
WNNEHLKVW

SEQ ID NO: 11991 - protein, 9 aa, Artificial Sequence
  Description of Artificial Sequence: Synthetic peptide
WNNFYCGCN

SEQ ID NO: 11992 - protein, 9 aa, Artificial Sequence
  Description of Artificial Sequence: Synthetic peptide
WPFPVQFCD

SEQ ID NO: 11993 - protein, 9 aa, Artificial Sequence
  Description of Artificial Sequence: Synthetic peptide
WPHHAKDPF

SEQ ID NO: 11994 - protein, 9 aa, Artificial Sequence
  Description of Artificial Sequence: Synthetic peptide
WPHHDKDPV

SEQ ID NO: 11995 - protein, 9 aa, Artificial Sequence
  Description of Artificial Sequence: Synthetic peptide
WPHHNKDPF

SEQ ID NO: 11996 - protein, 9 aa, Artificial Sequence
  Description of Artificial Sequence: Synthetic peptide
WPRDGNSIF

SEQ ID NO: 11997 - protein, 9 aa, Artificial Sequence
  Description of Artificial Sequence: Synthetic peptide
WPSEGLIGA

SEQ ID NO: 11998 - protein, 9 aa, Artificial Sequence
  Description of Artificial Sequence: Synthetic peptide
WPVPVQVCD

SEQ ID NO: 11999 - protein, 9 aa, Artificial Sequence
  Description of Artificial Sequence: Synthetic peptide
WQIWAKNEF

SEQ ID NO: 12000 - protein, 9 aa, Artificial Sequence
  Description of Artificial Sequence: Synthetic peptide
WRFDGCEPN

SEQ ID NO: 12001 - protein, 9 aa, Artificial Sequence
  Description of Artificial Sequence: Synthetic peptide
WRFYGCEPT

SEQ ID NO: 12002 - protein, 9 aa, Artificial Sequence
  Description of Artificial Sequence: Synthetic peptide
WRFYGCERN

SEQ ID NO: 12003 - protein, 9 aa, Artificial Sequence
  Description of Artificial Sequence: Synthetic peptide
WRFYGCESN

SEQ ID NO: 12004 - protein, 9 aa, Artificial Sequence
  Description of Artificial Sequence: Synthetic peptide
WRGCMFMSK

SEQ ID NO: 12005 - protein, 9 aa, Artificial Sequence
  Description of Artificial Sequence: Synthetic peptide
WRNCMFMSK

SEQ ID NO: 12006 - protein, 9 aa, Artificial Sequence
  Description of Artificial Sequence: Synthetic peptide
WRSYGCEPN

SEQ ID NO: 12007 - protein, 9 aa, Artificial Sequence
  Description of Artificial Sequence: Synthetic peptide
WSSEGLIGA

SEQ ID NO: 12008 - protein, 9 aa, Artificial Sequence
  Description of Artificial Sequence: Synthetic peptide
WVWNGCRDM

SEQ ID NO: 12009 - protein, 9 aa, Artificial Sequence
  Description of Artificial Sequence: Synthetic peptide
WYAQCWKAF

SEQ ID NO: 12010 - protein, 9 aa, Artificial Sequence
  Description of Artificial Sequence: Synthetic peptide
WYCWMVFII

SEQ ID NO: 12011 - protein, 9 aa, Artificial Sequence
  Description of Artificial Sequence: Synthetic peptide
WYDAGHKCK

SEQ ID NO: 12012 - protein, 9 aa, Artificial Sequence
  Description of Artificial Sequence: Synthetic peptide
WYDAGNNCK

SEQ ID NO: 12013 - protein, 9 aa, Artificial Sequence
  Description of Artificial Sequence: Synthetic peptide
WYDAVNKCK

SEQ ID NO: 12014 - protein, 9 aa, Artificial Sequence
  Description of Artificial Sequence: Synthetic peptide
WYDDGNKCK

SEQ ID NO: 12015 - protein, 9 aa, Artificial Sequence
  Description of Artificial Sequence: Synthetic peptide
WYECVFEYW

SEQ ID NO: 12016 - protein, 9 aa, Artificial Sequence
  Description of Artificial Sequence: Synthetic peptide
WYYAGNKCK

SEQ ID NO: 12017 - protein, 9 aa, Artificial Sequence
  Description of Artificial Sequence: Synthetic peptide
YAHYCWDPI

SEQ ID NO: 12018 - protein, 9 aa, Artificial Sequence
  Description of Artificial Sequence: Synthetic peptide
YAVAVGISS

SEQ ID NO: 12019 - protein, 9 aa, Artificial Sequence
  Description of Artificial Sequence: Synthetic peptide
YDFGGRVQT

SEQ ID NO: 12020 - protein, 9 aa, Artificial Sequence
  Description of Artificial Sequence: Synthetic peptide
YDHHKIIWA

SEQ ID NO: 12021 - protein, 9 aa, Artificial Sequence
  Description of Artificial Sequence: Synthetic peptide
YDHHKIIWV

SEQ ID NO: 12022 - protein, 9 aa, Artificial Sequence
  Description of Artificial Sequence: Synthetic peptide
YDINYYPEE

SEQ ID NO: 12023 - protein, 9 aa, Artificial Sequence
  Description of Artificial Sequence: Synthetic peptide
YDINYYPKD

SEQ ID NO: 12024 - protein, 9 aa, Artificial Sequence
  Description of Artificial Sequence: Synthetic peptide
YDINYYPNE

SEQ ID NO: 12025 - protein, 9 aa, Artificial Sequence
  Description of Artificial Sequence: Synthetic peptide
YDIPKSTCS

SEQ ID NO: 12026 - protein, 9 aa, Artificial Sequence
  Description of Artificial Sequence: Synthetic peptide
YDNSKYCKN

SEQ ID NO: 12027 - protein, 9 aa, Artificial Sequence
  Description of Artificial Sequence: Synthetic peptide
YDTNYYPKE

SEQ ID NO: 12028 - protein, 9 aa, Artificial Sequence
  Description of Artificial Sequence: Synthetic peptide
YDYGGRVQK

SEQ ID NO: 12029 - protein, 9 aa, Artificial Sequence
  Description of Artificial Sequence: Synthetic peptide
YEAKSLQPN

SEQ ID NO: 12030 - protein, 9 aa, Artificial Sequence
  Description of Artificial Sequence: Synthetic peptide
YEENVLFMG

SEQ ID NO: 12031 - protein, 9 aa, Artificial Sequence
  Description of Artificial Sequence: Synthetic peptide
YEINYYPKE

SEQ ID NO: 12032 - protein, 9 aa, Artificial Sequence
  Description of Artificial Sequence: Synthetic peptide
YETGMWLNR

SEQ ID NO: 12033 - protein, 9 aa, Artificial Sequence
  Description of Artificial Sequence: Synthetic peptide
YFDCSRAHS

SEQ ID NO: 12034 - protein, 9 aa, Artificial Sequence
  Description of Artificial Sequence: Synthetic peptide
YFDCSRANP

SEQ ID NO: 12035 - protein, 9 aa, Artificial Sequence
  Description of Artificial Sequence: Synthetic peptide
YFDCSRGHP

SEQ ID NO: 12036 - protein, 9 aa, Artificial Sequence
  Description of Artificial Sequence: Synthetic peptide
YFDCSRTHP

SEQ ID NO: 12037 - protein, 9 aa, Artificial Sequence
  Description of Artificial Sequence: Synthetic peptide
YFDRSRAHP

SEQ ID NO: 12038 - protein, 9 aa, Artificial Sequence
  Description of Artificial Sequence: Synthetic peptide
YFDWSRAHP

SEQ ID NO: 12039 - protein, 9 aa, Artificial Sequence
  Description of Artificial Sequence: Synthetic peptide
YGCNRSYQD

SEQ ID NO: 12040 - protein, 9 aa, Artificial Sequence
  Description of Artificial Sequence: Synthetic peptide
YHANNMEPW

SEQ ID NO: 12041 - protein, 9 aa, Artificial Sequence
  Description of Artificial Sequence: Synthetic peptide
YHDLATEWE

SEQ ID NO: 12042 - protein, 9 aa, Artificial Sequence
  Description of Artificial Sequence: Synthetic peptide
YHDNALLFL

SEQ ID NO: 12043 - protein, 9 aa, Artificial Sequence
  Description of Artificial Sequence: Synthetic peptide
YHENVLFMG

SEQ ID NO: 12044 - protein, 9 aa, Artificial Sequence
  Description of Artificial Sequence: Synthetic peptide
YHINNMEPW

SEQ ID NO: 12045 - protein, 9 aa, Artificial Sequence
  Description of Artificial Sequence: Synthetic peptide
YHPHHMYWR

SEQ ID NO: 12046 - protein, 9 aa, Artificial Sequence
  Description of Artificial Sequence: Synthetic peptide
YHPRTALMN

SEQ ID NO: 12047 - protein, 9 aa, Artificial Sequence
  Description of Artificial Sequence: Synthetic peptide
YHQHNACMR

SEQ ID NO: 12048 - protein, 9 aa, Artificial Sequence
  Description of Artificial Sequence: Synthetic peptide
YHTIDMEPW

SEQ ID NO: 12049 - protein, 9 aa, Artificial Sequence
  Description of Artificial Sequence: Synthetic peptide
YHTINMEPW

SEQ ID NO: 12050 - protein, 9 aa, Artificial Sequence
  Description of Artificial Sequence: Synthetic peptide
YHTNNMEPL

SEQ ID NO: 12051 - protein, 9 aa, Artificial Sequence
  Description of Artificial Sequence: Synthetic peptide
YHTNNMERW

SEQ ID NO: 12052 - protein, 9 aa, Artificial Sequence
  Description of Artificial Sequence: Synthetic peptide
YHTNNMETW

SEQ ID NO: 12053 - protein, 9 aa, Artificial Sequence
  Description of Artificial Sequence: Synthetic peptide
YHTNNMVPW

SEQ ID NO: 12054 - protein, 9 aa, Artificial Sequence
  Description of Artificial Sequence: Synthetic peptide
YHTNNREPW

SEQ ID NO: 12055 - protein, 9 aa, Artificial Sequence
  Description of Artificial Sequence: Synthetic peptide
YHTNNVEPW

SEQ ID NO: 12056 - protein, 9 aa, Artificial Sequence
  Description of Artificial Sequence: Synthetic peptide
YHTSNMEPW

SEQ ID NO: 12057 - protein, 9 aa, Artificial Sequence
  Description of Artificial Sequence: Synthetic peptide
YHTTNMEPW

SEQ ID NO: 12058 - protein, 9 aa, Artificial Sequence
  Description of Artificial Sequence: Synthetic peptide
YHTYNMEPW

SEQ ID NO: 12059 - protein, 9 aa, Artificial Sequence
  Description of Artificial Sequence: Synthetic peptide
YIVHKGQQW

SEQ ID NO: 12060 - protein, 9 aa, Artificial Sequence
  Description of Artificial Sequence: Synthetic peptide
YIWLVMFFS

SEQ ID NO: 12061 - protein, 9 aa, Artificial Sequence
  Description of Artificial Sequence: Synthetic peptide
YKAGDRFYI

SEQ ID NO: 12062 - protein, 9 aa, Artificial Sequence
  Description of Artificial Sequence: Synthetic peptide
YKDCDRFYI

SEQ ID NO: 12063 - protein, 9 aa, Artificial Sequence
  Description of Artificial Sequence: Synthetic peptide
YKDDDRFYI

SEQ ID NO: 12064 - protein, 9 aa, Artificial Sequence
  Description of Artificial Sequence: Synthetic peptide
YKDGDRIYI

SEQ ID NO: 12065 - protein, 9 aa, Artificial Sequence
  Description of Artificial Sequence: Synthetic peptide
YKDSDRFYI

SEQ ID NO: 12066 - protein, 9 aa, Artificial Sequence
  Description of Artificial Sequence: Synthetic peptide
YKHHSRIDG

SEQ ID NO: 12067 - protein, 9 aa, Artificial Sequence
  Description of Artificial Sequence: Synthetic peptide
YKYGDRFYI

SEQ ID NO: 12068 - protein, 9 aa, Artificial Sequence
  Description of Artificial Sequence: Synthetic peptide
YLPSAELIK

SEQ ID NO: 12069 - protein, 9 aa, Artificial Sequence
  Description of Artificial Sequence: Synthetic peptide
YMWICPPDQ

SEQ ID NO: 12070 - protein, 9 aa, Artificial Sequence
  Description of Artificial Sequence: Synthetic peptide
YMWIHPPDQ

SEQ ID NO: 12071 - protein, 9 aa, Artificial Sequence
  Description of Artificial Sequence: Synthetic peptide
YMWISPPDQ

SEQ ID NO: 12072 - protein, 9 aa, Artificial Sequence
  Description of Artificial Sequence: Synthetic peptide
YMWIYAPDQ

SEQ ID NO: 12073 - protein, 9 aa, Artificial Sequence
  Description of Artificial Sequence: Synthetic peptide
YMWIYPPDK

SEQ ID NO: 12074 - protein, 9 aa, Artificial Sequence
  Description of Artificial Sequence: Synthetic peptide
YMWIYPPDL

SEQ ID NO: 12075 - protein, 9 aa, Artificial Sequence
  Description of Artificial Sequence: Synthetic peptide
YMWIYPPDP

SEQ ID NO: 12076 - protein, 9 aa, Artificial Sequence
  Description of Artificial Sequence: Synthetic peptide
YMWIYPPGQ

SEQ ID NO: 12077 - protein, 9 aa, Artificial Sequence
  Description of Artificial Sequence: Synthetic peptide
YMWIYPTDQ

SEQ ID NO: 12078 - protein, 9 aa, Artificial Sequence
  Description of Artificial Sequence: Synthetic peptide
YMWIYQPDQ

SEQ ID NO: 12079 - protein, 9 aa, Artificial Sequence
  Description of Artificial Sequence: Synthetic peptide
YMWNYPPDQ

SEQ ID NO: 12080 - protein, 9 aa, Artificial Sequence
  Description of Artificial Sequence: Synthetic peptide
YMWSYPPDQ

SEQ ID NO: 12081 - protein, 9 aa, Artificial Sequence
  Description of Artificial Sequence: Synthetic peptide
YMWTYPPDQ

SEQ ID NO: 12082 - protein, 9 aa, Artificial Sequence
  Description of Artificial Sequence: Synthetic peptide
YNMAHGDEP

SEQ ID NO: 12083 - protein, 9 aa, Artificial Sequence
  Description of Artificial Sequence: Synthetic peptide
YNMVDGDEP

SEQ ID NO: 12084 - protein, 9 aa, Artificial Sequence
  Description of Artificial Sequence: Synthetic peptide
YNMVHGDEA

SEQ ID NO: 12085 - protein, 9 aa, Artificial Sequence
  Description of Artificial Sequence: Synthetic peptide
YNMVHGDES

SEQ ID NO: 12086 - protein, 9 aa, Artificial Sequence
  Description of Artificial Sequence: Synthetic peptide
YNMVHGDET

SEQ ID NO: 12087 - protein, 9 aa, Artificial Sequence
  Description of Artificial Sequence: Synthetic peptide
YNMVHGDGP

SEQ ID NO: 12088 - protein, 9 aa, Artificial Sequence
  Description of Artificial Sequence: Synthetic peptide
YNMVHSDEP

SEQ ID NO: 12089 - protein, 9 aa, Artificial Sequence
  Description of Artificial Sequence: Synthetic peptide
YNPRIALMN

SEQ ID NO: 12090 - protein, 9 aa, Artificial Sequence
  Description of Artificial Sequence: Synthetic peptide
YNPRSALMN

SEQ ID NO: 12091 - protein, 9 aa, Artificial Sequence
  Description of Artificial Sequence: Synthetic peptide
YNTVHGDEP

SEQ ID NO: 12092 - protein, 9 aa, Artificial Sequence
  Description of Artificial Sequence: Synthetic peptide
YNVCTLWAQ

SEQ ID NO: 12093 - protein, 9 aa, Artificial Sequence
  Description of Artificial Sequence: Synthetic peptide
YNVCTMLAQ

SEQ ID NO: 12094 - protein, 9 aa, Artificial Sequence
  Description of Artificial Sequence: Synthetic peptide
YNVVHGDEP

SEQ ID NO: 12095 - protein, 9 aa, Artificial Sequence
  Description of Artificial Sequence: Synthetic peptide
YPEDRLNMR

SEQ ID NO: 12096 - protein, 9 aa, Artificial Sequence
  Description of Artificial Sequence: Synthetic peptide
YPLGSAGSD

SEQ ID NO: 12097 - protein, 9 aa, Artificial Sequence
  Description of Artificial Sequence: Synthetic peptide
YPQHNACMQ

SEQ ID NO: 12098 - protein, 9 aa, Artificial Sequence
  Description of Artificial Sequence: Synthetic peptide
YPTNNMEPW

SEQ ID NO: 12099 - protein, 9 aa, Artificial Sequence
  Description of Artificial Sequence: Synthetic peptide
YQAAARQNA

SEQ ID NO: 12100 - protein, 9 aa, Artificial Sequence
  Description of Artificial Sequence: Synthetic peptide
YQADPRQNA

SEQ ID NO: 12101 - protein, 9 aa, Artificial Sequence
  Description of Artificial Sequence: Synthetic peptide
YQATPRQNA

SEQ ID NO: 12102 - protein, 9 aa, Artificial Sequence
  Description of Artificial Sequence: Synthetic peptide
YQAYGRGHV

SEQ ID NO: 12103 - protein, 9 aa, Artificial Sequence
  Description of Artificial Sequence: Synthetic peptide
YQDAPRQNA

SEQ ID NO: 12104 - protein, 9 aa, Artificial Sequence
  Description of Artificial Sequence: Synthetic peptide
YQIFQYPLH

SEQ ID NO: 12105 - protein, 9 aa, Artificial Sequence
  Description of Artificial Sequence: Synthetic peptide
YQLFQYPWH

SEQ ID NO: 12106 - protein, 9 aa, Artificial Sequence
  Description of Artificial Sequence: Synthetic peptide
YQLLHTIEN

SEQ ID NO: 12107 - protein, 9 aa, Artificial Sequence
  Description of Artificial Sequence: Synthetic peptide
YQLLHTIEQ

SEQ ID NO: 12108 - protein, 9 aa, Artificial Sequence
  Description of Artificial Sequence: Synthetic peptide
YRTLQCKWE

SEQ ID NO: 12109 - protein, 9 aa, Artificial Sequence
  Description of Artificial Sequence: Synthetic peptide
YRWIYPPDQ

SEQ ID NO: 12110 - protein, 9 aa, Artificial Sequence
  Description of Artificial Sequence: Synthetic peptide
YRYLWPIVR

SEQ ID NO: 12111 - protein, 9 aa, Artificial Sequence
  Description of Artificial Sequence: Synthetic peptide
YTGLNELQN

SEQ ID NO: 12112 - protein, 9 aa, Artificial Sequence
  Description of Artificial Sequence: Synthetic peptide
YTICDVPDP

SEQ ID NO: 12113 - protein, 9 aa, Artificial Sequence
  Description of Artificial Sequence: Synthetic peptide
YTPNFRIGD

SEQ ID NO: 12114 - protein, 9 aa, Artificial Sequence
  Description of Artificial Sequence: Synthetic peptide
YVIPFEMDD

SEQ ID NO: 12115 - protein, 9 aa, Artificial Sequence
  Description of Artificial Sequence: Synthetic peptide
YVIPVEMDN

SEQ ID NO: 12116 - protein, 9 aa, Artificial Sequence
  Description of Artificial Sequence: Synthetic peptide
YYDCSRAHP

SEQ ID NO: 12117 - protein, 9 aa, Artificial Sequence
  Description of Artificial Sequence: Synthetic peptide
YYPCVQYRQ

SEQ ID NO: 12118 - protein, 9 aa, Artificial Sequence
  Description of Artificial Sequence: Synthetic peptide
AQWYMWCWD

SEQ ID NO: 12119 - protein, 9 aa, Artificial Sequence
  Description of Artificial Sequence: Synthetic peptide
ASHYHEKVW

SEQ ID NO: 12120 - protein, 9 aa, Artificial Sequence
  Description of Artificial Sequence: Synthetic peptide
IANWRWGPD

SEQ ID NO: 12121 - protein, 9 aa, Artificial Sequence
  Description of Artificial Sequence: Synthetic peptide
RVNGSTCRH

SEQ ID NO: 12122 - protein, 9 aa, Artificial Sequence
  Description of Artificial Sequence: Synthetic peptide
YNRLMHQLW

SEQ ID NO: 12123 - protein, 9 aa, Artificial Sequence
  Description of Artificial Sequence: Synthetic peptide
ETTMMIVSP

SEQ ID NO: 12124 - protein, 9 aa, Artificial Sequence
  Description of Artificial Sequence: Synthetic peptide
STAKTGTTT

SEQ ID NO: 12125 - protein, 9 aa, Artificial Sequence
  Description of Artificial Sequence: Synthetic peptide
LPPLKTEDN

SEQ ID NO: 12126 - protein, 9 aa, Artificial Sequence
  Description of Artificial Sequence: Synthetic peptide
QTQICHSWM

SEQ ID NO: 12127 - protein, 9 aa, Artificial Sequence
  Description of Artificial Sequence: Synthetic peptide
QSLWYWQQE

SEQ ID NO: 12128 - protein, 9 aa, Artificial Sequence
  Description of Artificial Sequence: Synthetic peptide
KMGMHDMAM

SEQ ID NO: 12129 - protein, 9 aa, Artificial Sequence
  Description of Artificial Sequence: Synthetic peptide
IRPQYAKMD

SEQ ID NO: 12130 - protein, 9 aa, Artificial Sequence
  Description of Artificial Sequence: Synthetic peptide
MNANETHGA

SEQ ID NO: 12131 - protein, 9 aa, Artificial Sequence
  Description of Artificial Sequence: Synthetic peptide
MSVAAGRGM

SEQ ID NO: 12132 - protein, 9 aa, Artificial Sequence
  Description of Artificial Sequence: Synthetic peptide
QTMCITIHP

SEQ ID NO: 12133 - protein, 9 aa, Artificial Sequence
  Description of Artificial Sequence: Synthetic peptide
CMEAQGECY

SEQ ID NO: 12134 - protein, 9 aa, Artificial Sequence
  Description of Artificial Sequence: Synthetic peptide
FPQTMHAQA

SEQ ID NO: 12135 - protein, 9 aa, Artificial Sequence
  Description of Artificial Sequence: Synthetic peptide
KPLASIGQY

SEQ ID NO: 12136 - protein, 9 aa, Artificial Sequence
  Description of Artificial Sequence: Synthetic peptide
CCCQFSFWN

SEQ ID NO: 12137 - protein, 9 aa, Artificial Sequence
  Description of Artificial Sequence: Synthetic peptide
DAELMWQIE

SEQ ID NO: 12138 - protein, 9 aa, Artificial Sequence
  Description of Artificial Sequence: Synthetic peptide
ENTMWQSSQ

SEQ ID NO: 12139 - protein, 9 aa, Artificial Sequence
  Description of Artificial Sequence: Synthetic peptide
KIDQTQWQR

SEQ ID NO: 12140 - protein, 9 aa, Artificial Sequence
  Description of Artificial Sequence: Synthetic peptide
EQEISDQCR

SEQ ID NO: 12141 - protein, 9 aa, Artificial Sequence
  Description of Artificial Sequence: Synthetic peptide
GKIAHDQLN

SEQ ID NO: 12142 - protein, 9 aa, Artificial Sequence
  Description of Artificial Sequence: Synthetic peptide
MCFPYSCAA

SEQ ID NO: 12143 - protein, 9 aa, Artificial Sequence
  Description of Artificial Sequence: Synthetic peptide
LSVQAQWDS

SEQ ID NO: 12144 - protein, 9 aa, Artificial Sequence
  Description of Artificial Sequence: Synthetic peptide
MMNQCQVWN

SEQ ID NO: 12145 - protein, 9 aa, Artificial Sequence
  Description of Artificial Sequence: Synthetic peptide
TQEACHHDP

SEQ ID NO: 12146 - protein, 9 aa, Artificial Sequence
  Description of Artificial Sequence: Synthetic peptide
DFNGSNWLP

SEQ ID NO: 12147 - protein, 9 aa, Artificial Sequence
  Description of Artificial Sequence: Synthetic peptide
HFEVRSVQR

SEQ ID NO: 12148 - protein, 9 aa, Artificial Sequence
  Description of Artificial Sequence: Synthetic peptide
MAEQMERDF

SEQ ID NO: 12149 - protein, 9 aa, Artificial Sequence
  Description of Artificial Sequence: Synthetic peptide
TGMAMSEQS

SEQ ID NO: 12150 - protein, 9 aa, Artificial Sequence
  Description of Artificial Sequence: Synthetic peptide
PCCWEQSTN

SEQ ID NO: 12151 - protein, 9 aa, Artificial Sequence
  Description of Artificial Sequence: Synthetic peptide
NWYTTWIDE

SEQ ID NO: 12152 - protein, 9 aa, Artificial Sequence
  Description of Artificial Sequence: Synthetic peptide
CCKSKEVCA

SEQ ID NO: 12153 - protein, 9 aa, Artificial Sequence
  Description of Artificial Sequence: Synthetic peptide
LESVKMDCN

SEQ ID NO: 12154 - protein, 9 aa, Artificial Sequence
  Description of Artificial Sequence: Synthetic peptide
PHVSGEGKI

SEQ ID NO: 12155 - protein, 9 aa, Artificial Sequence
  Description of Artificial Sequence: Synthetic peptide
TYDTRNHCL

SEQ ID NO: 12156 - protein, 9 aa, Artificial Sequence
  Description of Artificial Sequence: Synthetic peptide
MAAITQNVA

SEQ ID NO: 12157 - protein, 9 aa, Artificial Sequence
  Description of Artificial Sequence: Synthetic peptide
PDLWYEKSS

SEQ ID NO: 12158 - protein, 9 aa, Artificial Sequence
  Description of Artificial Sequence: Synthetic peptide
AHAWLQHWA

SEQ ID NO: 12159 - protein, 9 aa, Artificial Sequence
  Description of Artificial Sequence: Synthetic peptide
MAMWIADTH

SEQ ID NO: 12160 - protein, 9 aa, Artificial Sequence
  Description of Artificial Sequence: Synthetic peptide
LCAVCGDCD

SEQ ID NO: 12161 - protein, 9 aa, Artificial Sequence
  Description of Artificial Sequence: Synthetic peptide
RITQGESGM

SEQ ID NO: 12162 - protein, 9 aa, Artificial Sequence
  Description of Artificial Sequence: Synthetic peptide
GNKSPDECF

SEQ ID NO: 12163 - protein, 9 aa, Artificial Sequence
  Description of Artificial Sequence: Synthetic peptide
KNCIMLASN

SEQ ID NO: 12164 - protein, 9 aa, Artificial Sequence
  Description of Artificial Sequence: Synthetic peptide
EKRLEGWVY

SEQ ID NO: 12165 - protein, 9 aa, Artificial Sequence
  Description of Artificial Sequence: Synthetic peptide
LETMMRHGE

SEQ ID NO: 12166 - protein, 9 aa, Artificial Sequence
  Description of Artificial Sequence: Synthetic peptide
EQPNMGDYG

SEQ ID NO: 12167 - protein, 9 aa, Artificial Sequence
  Description of Artificial Sequence: Synthetic peptide
QSQWWDTCN

SEQ ID NO: 12168 - protein, 9 aa, Artificial Sequence
  Description of Artificial Sequence: Synthetic peptide
LMKYQWIGN

SEQ ID NO: 12169 - protein, 9 aa, Artificial Sequence
  Description of Artificial Sequence: Synthetic peptide
QISKPSVQC

SEQ ID NO: 12170 - protein, 9 aa, Artificial Sequence
  Description of Artificial Sequence: Synthetic peptide
AIEHGAWKC

SEQ ID NO: 12171 - protein, 9 aa, Artificial Sequence
  Description of Artificial Sequence: Synthetic peptide
SLTQYQWRG

SEQ ID NO: 12172 - protein, 9 aa, Artificial Sequence
  Description of Artificial Sequence: Synthetic peptide
TIVVIPIKS

SEQ ID NO: 12173 - protein, 9 aa, Artificial Sequence
  Description of Artificial Sequence: Synthetic peptide
CSMPQQCME

SEQ ID NO: 12174 - protein, 9 aa, Artificial Sequence
  Description of Artificial Sequence: Synthetic peptide
QTAEWYCGA

SEQ ID NO: 12175 - protein, 9 aa, Artificial Sequence
  Description of Artificial Sequence: Synthetic peptide
GNECFHNVE

SEQ ID NO: 12176 - protein, 9 aa, Artificial Sequence
  Description of Artificial Sequence: Synthetic peptide
VGPLYAYYS

SEQ ID NO: 12177 - protein, 9 aa, Artificial Sequence
  Description of Artificial Sequence: Synthetic peptide
WTLQVMKIN

SEQ ID NO: 12178 - protein, 9 aa, Artificial Sequence
  Description of Artificial Sequence: Synthetic peptide
TSEPHCSYA

SEQ ID NO: 12179 - protein, 9 aa, Artificial Sequence
  Description of Artificial Sequence: Synthetic peptide
AVHTADVCC

SEQ ID NO: 12180 - protein, 9 aa, Artificial Sequence
  Description of Artificial Sequence: Synthetic peptide
QHSRAYMWY

SEQ ID NO: 12181 - protein, 9 aa, Artificial Sequence
  Description of Artificial Sequence: Synthetic peptide
HMEQCWCNE

SEQ ID NO: 12182 - protein, 9 aa, Artificial Sequence
  Description of Artificial Sequence: Synthetic peptide
AYAPSKNAM

SEQ ID NO: 12183 - protein, 9 aa, Artificial Sequence
  Description of Artificial Sequence: Synthetic peptide
DNYWIVPFA

SEQ ID NO: 12184 - protein, 9 aa, Artificial Sequence
  Description of Artificial Sequence: Synthetic peptide
QRSVFHQRS

SEQ ID NO: 12185 - protein, 9 aa, Artificial Sequence
  Description of Artificial Sequence: Synthetic peptide
HEVMMCPAP

SEQ ID NO: 12186 - protein, 9 aa, Artificial Sequence
  Description of Artificial Sequence: Synthetic peptide
KTMGIGGGP

SEQ ID NO: 12187 - protein, 9 aa, Artificial Sequence
  Description of Artificial Sequence: Synthetic peptide
TLNSRHPEC

SEQ ID NO: 12188 - protein, 9 aa, Artificial Sequence
  Description of Artificial Sequence: Synthetic peptide
PLNQEQIPQ

SEQ ID NO: 12189 - protein, 9 aa, Artificial Sequence
  Description of Artificial Sequence: Synthetic peptide
AQCHDMWGH

SEQ ID NO: 12190 - protein, 9 aa, Artificial Sequence
  Description of Artificial Sequence: Synthetic peptide
KACMSHQGR

SEQ ID NO: 12191 - protein, 9 aa, Artificial Sequence
  Description of Artificial Sequence: Synthetic peptide
TTTNQFMFQ

SEQ ID NO: 12192 - protein, 9 aa, Artificial Sequence
  Description of Artificial Sequence: Synthetic peptide
VLKSNLTGM

SEQ ID NO: 12193 - protein, 9 aa, Artificial Sequence
  Description of Artificial Sequence: Synthetic peptide
MFMTNVNSF

SEQ ID NO: 12194 - protein, 9 aa, Artificial Sequence
  Description of Artificial Sequence: Synthetic peptide
SSRMQMQGP

SEQ ID NO: 12195 - protein, 9 aa, Artificial Sequence
  Description of Artificial Sequence: Synthetic peptide
RYPCCQSPF

SEQ ID NO: 12196 - protein, 9 aa, Artificial Sequence
  Description of Artificial Sequence: Synthetic peptide
NARVMAKRE

SEQ ID NO: 12197 - protein, 9 aa, Artificial Sequence
  Description of Artificial Sequence: Synthetic peptide
GLSMVLHFV

SEQ ID NO: 12198 - protein, 9 aa, Artificial Sequence
  Description of Artificial Sequence: Synthetic peptide
VSVQSRAQL

SEQ ID NO: 12199 - protein, 9 aa, Artificial Sequence
  Description of Artificial Sequence: Synthetic peptide
DMTLQSVSS

SEQ ID NO: 12200 - protein, 9 aa, Artificial Sequence
  Description of Artificial Sequence: Synthetic peptide
MTDNNGPLF

SEQ ID NO: 12201 - protein, 9 aa, Artificial Sequence
  Description of Artificial Sequence: Synthetic peptide
PLTIEVNCT

SEQ ID NO: 12202 - protein, 9 aa, Artificial Sequence
  Description of Artificial Sequence: Synthetic peptide
YVDHWTLGD

SEQ ID NO: 12203 - protein, 9 aa, Artificial Sequence
  Description of Artificial Sequence: Synthetic peptide
NQREWHGLA

SEQ ID NO: 12204 - protein, 9 aa, Artificial Sequence
  Description of Artificial Sequence: Synthetic peptide
SECEVLCSL

SEQ ID NO: 12205 - protein, 9 aa, Artificial Sequence
  Description of Artificial Sequence: Synthetic peptide
CAWHMKQGN

SEQ ID NO: 12206 - protein, 9 aa, Artificial Sequence
  Description of Artificial Sequence: Synthetic peptide
ATGTYNLQE

SEQ ID NO: 12207 - protein, 9 aa, Artificial Sequence
  Description of Artificial Sequence: Synthetic peptide
KCADLIIRS

SEQ ID NO: 12208 - protein, 9 aa, Artificial Sequence
  Description of Artificial Sequence: Synthetic peptide
QSRCVDNTV

SEQ ID NO: 12209 - protein, 9 aa, Artificial Sequence
  Description of Artificial Sequence: Synthetic peptide
ATMNLSWGL

SEQ ID NO: 12210 - protein, 9 aa, Artificial Sequence
  Description of Artificial Sequence: Synthetic peptide
SVLHVQALA

SEQ ID NO: 12211 - protein, 9 aa, Artificial Sequence
  Description of Artificial Sequence: Synthetic peptide
KMAGIGCWY

SEQ ID NO: 12212 - protein, 9 aa, Artificial Sequence
  Description of Artificial Sequence: Synthetic peptide
YDYWMQAPT

SEQ ID NO: 12213 - protein, 9 aa, Artificial Sequence
  Description of Artificial Sequence: Synthetic peptide
HSMMPGWPS

SEQ ID NO: 12214 - protein, 9 aa, Artificial Sequence
  Description of Artificial Sequence: Synthetic peptide
MFWTTPSHW

SEQ ID NO: 12215 - protein, 9 aa, Artificial Sequence
  Description of Artificial Sequence: Synthetic peptide
TKHCFYGGC

SEQ ID NO: 12216 - protein, 9 aa, Artificial Sequence
  Description of Artificial Sequence: Synthetic peptide
AMNWWAAPQ

SEQ ID NO: 12217 - protein, 9 aa, Artificial Sequence
  Description of Artificial Sequence: Synthetic peptide
AMNWWDAPH

SEQ ID NO: 12218 - protein, 9 aa, Artificial Sequence
  Description of Artificial Sequence: Synthetic peptide
AMNWWDAPP

SEQ ID NO: 12219 - protein, 9 aa, Artificial Sequence
  Description of Artificial Sequence: Synthetic peptide
AMNWWGAPQ

SEQ ID NO: 12220 - protein, 9 aa, Artificial Sequence
  Description of Artificial Sequence: Synthetic peptide
CDRPDVNWF

SEQ ID NO: 12221 - protein, 9 aa, Artificial Sequence
  Description of Artificial Sequence: Synthetic peptide
CDRPDVNWV

SEQ ID NO: 12222 - protein, 9 aa, Artificial Sequence
  Description of Artificial Sequence: Synthetic peptide
CHSLHQVWA

SEQ ID NO: 12223 - protein, 9 aa, Artificial Sequence
  Description of Artificial Sequence: Synthetic peptide
CHSLHQVWD

SEQ ID NO: 12224 - protein, 9 aa, Artificial Sequence
  Description of Artificial Sequence: Synthetic peptide
CHSLHQVWG

SEQ ID NO: 12225 - protein, 9 aa, Artificial Sequence
  Description of Artificial Sequence: Synthetic peptide
CHSLRQVWD

SEQ ID NO: 12226 - protein, 9 aa, Artificial Sequence
  Description of Artificial Sequence: Synthetic peptide
CKTMKDIER

SEQ ID NO: 12227 - protein, 9 aa, Artificial Sequence
  Description of Artificial Sequence: Synthetic peptide
DMQQNDPCC

SEQ ID NO: 12228 - protein, 9 aa, Artificial Sequence
  Description of Artificial Sequence: Synthetic peptide
DVDFRAWAT

SEQ ID NO: 12229 - protein, 9 aa, Artificial Sequence
  Description of Artificial Sequence: Synthetic peptide
DVHLFPTEQ

SEQ ID NO: 12230 - protein, 9 aa, Artificial Sequence
  Description of Artificial Sequence: Synthetic peptide
ECHYRMFQI

(The sequence listing continues in the following parts.)
